United States Patent Application Publication US 2007/0042381 A1 - sequence listing, part 90

SEQ ID NO: 4090996 - RNA, 22 nt, Variola virus
gaugaaagauaaacuagauaua

SEQ ID NO: 4090997 - RNA, 12 nt, Variola virus
gaugaaauaugu

SEQ ID NO: 4090998 - RNA, 13 nt, Variola virus
gaugaauauauca

SEQ ID NO: 4090999 - RNA, 21 nt, Variola virus
gaugacaauauuauuaugaag

SEQ ID NO: 4091000 - RNA, 15 nt, Variola virus
gaugagauguuuaua

SEQ ID NO: 4091001 - RNA, 18 nt, Variola virus
gaugagcauaaacauaau

SEQ ID NO: 4091002 - RNA, 21 nt, Variola virus
gaugaucuaguuacaacuauu

SEQ ID NO: 4091003 - RNA, 18 nt, Variola virus
gaugccaucauagauaua

SEQ ID NO: 4091004 - RNA, 15 nt, Variola virus
gaugcuauuagaauu

SEQ ID NO: 4091005 - RNA, 20 nt, Variola virus
gaugcuguaaauuaugaaaa

SEQ ID NO: 4091006 - RNA, 21 nt, Variola virus
gauggaucugugauguaugca

SEQ ID NO: 4091007 - RNA, 16 nt, Variola virus
gauggcugaaauuaga

SEQ ID NO: 4091008 - RNA, 22 nt, Variola virus
gucauaaaaauguuuaaaucaa

SEQ ID NO: 4091009 - RNA, 20 nt, Variola virus
gucauaaacuguaaaugauu

SEQ ID NO: 4091010 - RNA, 14 nt, Variola virus
gucauagaugaaau

SEQ ID NO: 4091011 - RNA, 16 nt, Variola virus
gucauagaugaaauac

SEQ ID NO: 4091012 - RNA, 14 nt, Variola virus
gucaucauuaacaa

SEQ ID NO: 4091013 - RNA, 22 nt, Variola virus
gucauccuucacucguuucaua

SEQ ID NO: 4091014 - RNA, 21 nt, Variola virus
gucaucgaaaugguagauaua

SEQ ID NO: 4091015 - RNA, 20 nt, Variola virus
gucaucuuguucagaaauau

SEQ ID NO: 4091016 - RNA, 20 nt, Variola virus
gucgaauaacuguaauuuua

SEQ ID NO: 4091017 - RNA, 21 nt, Variola virus
gucuauauaguauuuuucuga

SEQ ID NO: 4091018 - RNA, 23 nt, Variola virus
gucuaucaagauccaugauucua

SEQ ID NO: 4091019 - RNA, 15 nt, Variola virus
gucuccaaucuuuug

SEQ ID NO: 4091020 - RNA, 22 nt, Variola virus
gucucccuuuagauuguuguau

SEQ ID NO: 4091021 - RNA, 13 nt, Variola virus
gucucuaucuuua

SEQ ID NO: 4091022 - RNA, 15 nt, Variola virus
gucugaagaauaucu

SEQ ID NO: 4091023 - RNA, 16 nt, Variola virus
gucugcuuucuuuuaa

SEQ ID NO: 4091024 - RNA, 14 nt, Variola virus
gucuguaaaccaca

SEQ ID NO: 4091025 - RNA, 13 nt, Variola virus
gucuguacaaaag

SEQ ID NO: 4091026 - RNA, 22 nt, Variola virus
gucuuaauuaauugucuuucuc

SEQ ID NO: 4091027 - RNA, 17 nt, Variola virus
gucuuccuuauguagag

SEQ ID NO: 4091028 - RNA, 21 nt, Variola virus
gucuugauauuguuacagcca

SEQ ID NO: 4091029 - RNA, 11 nt, Variola virus
gucuuuucuaa

SEQ ID NO: 4091030 - RNA, 17 nt, Variola virus
gugaauaugaucuucau

SEQ ID NO: 4091031 - RNA, 15 nt, Variola virus
gugacgucuguggau

SEQ ID NO: 4091032 - RNA, 23 nt, Variola virus
gugacuauuucguucucugaaaa

SEQ ID NO: 4091033 - RNA, 17 nt, Variola virus
gugaggaaauaaaucau

SEQ ID NO: 4091034 - RNA, 14 nt, Variola virus
gugauaauuuccag

SEQ ID NO: 4091035 - RNA, 12 nt, Variola virus
gugauagauaug

SEQ ID NO: 4091036 - RNA, 19 nt, Variola virus
gugaucacggguuuguaaa

SEQ ID NO: 4091037 - RNA, 17 nt, Variola virus
gugauggauuuaaacau

SEQ ID NO: 4091038 - RNA, 20 nt, Variola virus
gugauucucugaaaauguaa

SEQ ID NO: 4091039 - RNA, 13 nt, Variola virus
gugauuuuccaac

SEQ ID NO: 4091040 - RNA, 12 nt, Variola virus
gugauuuuggua

SEQ ID NO: 4091041 - RNA, 19 nt, Variola virus
gugcaaaugagguagcaaa

SEQ ID NO: 4091042 - RNA, 18 nt, Variola virus
gugcauaaauuaaaauac

SEQ ID NO: 4091043 - RNA, 13 nt, Variola virus
gugcuaccaaagg

SEQ ID NO: 4091044 - RNA, 22 nt, Variola virus
guggaggaguugcugaugauga

SEQ ID NO: 4091045 - RNA, 21 nt, Variola virus
guggauaaucagaauauacac

SEQ ID NO: 4091046 - RNA, 16 nt, Variola virus
guggaugguuaaaaag

SEQ ID NO: 4091047 - RNA, 20 nt, Variola virus
guggcuuuccauuuuccaaa

SEQ ID NO: 4091048 - RNA, 15 nt, Variola virus
gugguagauauauag

SEQ ID NO: 4091049 - RNA, 17 nt, Variola virus
guguaaaucuagaaauu

SEQ ID NO: 4091050 - RNA, 23 nt, Variola virus
guguacauccaaaauacaaaaug

SEQ ID NO: 4091051 - RNA, 22 nt, Variola virus
guguauuacaugcaucuuauua

SEQ ID NO: 4091052 - RNA, 12 nt, Variola virus
guguauuuccau

SEQ ID NO: 4091053 - RNA, 23 nt, Variola virus
gugucagagcacaggauuuccaa

SEQ ID NO: 4091054 - RNA, 15 nt, Variola virus
gugucuagacgaaau

SEQ ID NO: 4091055 - RNA, 16 nt, Variola virus
guguguaacacuuuua

SEQ ID NO: 4091056 - RNA, 13 nt, Variola virus
guguuauuuuuua

SEQ ID NO: 4091057 - RNA, 14 nt, Variola virus
guguugauaauauc

SEQ ID NO: 4091058 - RNA, 15 nt, Variola virus
guguuuuaguuuauc

SEQ ID NO: 4091059 - RNA, 19 nt, Variola virus
guuaaaaaauuaaguguua

SEQ ID NO: 4091060 - RNA, 16 nt, Variola virus
guuaaaaauaaucauc

SEQ ID NO: 4091061 - RNA, 18 nt, Variola virus
guuaaacaauagauggau

SEQ ID NO: 4091062 - RNA, 14 nt, Variola virus
guuaaagaucuuaa

SEQ ID NO: 4091063 - RNA, 19 nt, Variola virus
guuaaaggauauuaugcau

SEQ ID NO: 4091064 - RNA, 15 nt, Variola virus
guuaacccgaugguu

SEQ ID NO: 4091065 - RNA, 17 nt, Variola virus
guuaagagaauaauaga

SEQ ID NO: 4091066 - RNA, 12 nt, Variola virus
guuaauaacauc

SEQ ID NO: 4091067 - RNA, 17 nt, Variola virus
guuaauaaucucaucau

SEQ ID NO: 4091068 - RNA, 13 nt, Variola virus
guuaauacuuauu

SEQ ID NO: 4091069 - RNA, 23 nt, Variola virus
guuaauaggacacauauaauaau

SEQ ID NO: 4091070 - RNA, 18 nt, Variola virus
guuaauaguuuuuaucau

SEQ ID NO: 4091071 - RNA, 19 nt, Variola virus
guuaauuaugcaaauuuga

SEQ ID NO: 4091072 - RNA, 17 nt, Variola virus
guuaauuuuaaaugaug

SEQ ID NO: 4091073 - RNA, 10 nt, Variola virus
guuacaaaag

SEQ ID NO: 4091074 - RNA, 22 nt, Variola virus
guuacacgcauccuuauaaaga

SEQ ID NO: 4091075 - RNA, 12 nt, Variola virus
guuacuauuauu

SEQ ID NO: 4091076 - RNA, 18 nt, Variola virus
guuagaaagcagauuaga

SEQ ID NO: 4091077 - RNA, 19 nt, Variola virus
guuagaguaucuacaucag

SEQ ID NO: 4091078 - RNA, 14 nt, Variola virus
guuagucauauuac

SEQ ID NO: 4091079 - RNA, 20 nt, Variola virus
guuauaaaggacagaaauau

SEQ ID NO: 4091080 - RNA, 17 nt, Variola virus
guuauaagauuacuuau

SEQ ID NO: 4091081 - RNA, 15 nt, Variola virus
guuauaguagauauc

SEQ ID NO: 4091082 - RNA, 20 nt, Variola virus
guuaucaucguauaaauuaa

SEQ ID NO: 4091083 - RNA, 11 nt, Variola virus
guuaucuuuug

SEQ ID NO: 4091084 - RNA, 19 nt, Variola virus
guuauucucggaugcuaaa

SEQ ID NO: 4091085 - RNA, 19 nt, Variola virus
guuauugaaauuaaucaua

SEQ ID NO: 4091086 - RNA, 12 nt, Variola virus
guuauuuacagc

SEQ ID NO: 4091087 - RNA, 15 nt, Variola virus
guucagaauauguua

SEQ ID NO: 4091088 - RNA, 16 nt, Variola virus
guucagaggaugaaau

SEQ ID NO: 4091089 - RNA, 20 nt, Variola virus
guucauacaugaaaugaucu

SEQ ID NO: 4091090 - RNA, 15 nt, Variola virus
guucaucagauguuc

SEQ ID NO: 4091091 - RNA, 21 nt, Variola virus
guuccauaaauuuauaauguu

SEQ ID NO: 4091092 - RNA, 12 nt, Variola virus
guuccauauuau

SEQ ID NO: 4091093 - RNA, 22 nt, Variola virus
guuccugguauauagauaaaga

SEQ ID NO: 4091094 - RNA, 21 nt, Variola virus
guucuauaaucguaaauaauu

SEQ ID NO: 4091095 - RNA, 17 nt, Variola virus
guucugggaauagaaac

SEQ ID NO: 4091096 - RNA, 22 nt, Variola virus
guucugggaauagaaaccaaau

SEQ ID NO: 4091097 - RNA, 16 nt, Variola virus
guucuugaucuuauua

SEQ ID NO: 4091098 - RNA, 14 nt, Variola virus
guucuuuuuccaau

SEQ ID NO: 4091099 - RNA, 21 nt, Variola virus
guugaucagaaugaauguuua

SEQ ID NO: 4091100 - RNA, 21 nt, Variola virus
guugcguacauugcucguaaa

SEQ ID NO: 4091101 - RNA, 22 nt, Variola virus
guuggaagaugcgcauuaacaa

SEQ ID NO: 4091102 - RNA, 22 nt, Variola virus
guugggacugacagauguguuc

SEQ ID NO: 4091103 - RNA, 22 nt, Variola virus
guuguagauaaucguuaauauu

SEQ ID NO: 4091104 - RNA, 15 nt, Variola virus
guugucuauuuccaa

SEQ ID NO: 4091105 - RNA, 15 nt, Variola virus
guuguuccaauaaau

SEQ ID NO: 4091106 - RNA, 16 nt, Variola virus
guuuaacaaaguuauu

SEQ ID NO: 4091107 - RNA, 19 nt, Variola virus
guuuaacaaaguuauucau

SEQ ID NO: 4091108 - RNA, 20 nt, Variola virus
guuuaauauccuuagucauc

SEQ ID NO: 4091109 - RNA, 17 nt, Variola virus
guuuaaugauaaacaaa

SEQ ID NO: 4091110 - RNA, 17 nt, Variola virus
guuuacaacacuuuucu

SEQ ID NO: 4091111 - RNA, 14 nt, Variola virus
guuuacauaaauga

SEQ ID NO: 4091112 - RNA, 17 nt, Variola virus
guuuagacgcuuauuau

SEQ ID NO: 4091113 - RNA, 16 nt, Variola virus
guuuauuccaauaaau

SEQ ID NO: 4091114 - RNA, 17 nt, Variola virus
guuucaaaaauauucau

SEQ ID NO: 4091115 - RNA, 23 nt, Variola virus
guuucaaccgcguuaacauauga

SEQ ID NO: 4091116 - RNA, 23 nt, Variola virus
guuucccaaugaaaugguacaau

SEQ ID NO: 4091117 - RNA, 14 nt, Variola virus
guuucuacuaacuu

SEQ ID NO: 4091118 - RNA, 14 nt, Variola virus
guuugauaaaugua

SEQ ID NO: 4091119 - RNA, 13 nt, Variola virus
guuuggaauaacu

SEQ ID NO: 4091120 - RNA, 21 nt, Variola virus
guuuggagacuaauucuuuuu

SEQ ID NO: 4091121 - RNA, 14 nt, Variola virus
guuuguuuuggaaa

SEQ ID NO: 4091122 - RNA, 15 nt, Variola virus
guuuguuuuggaaau

SEQ ID NO: 4091123 - RNA, 15 nt, Variola virus
guuuuauaacgaagu

SEQ ID NO: 4091124 - RNA, 11 nt, Variola virus
guuuucaucag

SEQ ID NO: 4091125 - RNA, 15 nt, Variola virus
guuuucauuauuauu

SEQ ID NO: 4091126 - RNA, 15 nt, Variola virus
guuuucgauacuuuu

SEQ ID NO: 4091127 - RNA, 14 nt, Variola virus
guuuucuauuuuua

SEQ ID NO: 4091128 - RNA, 16 nt, Variola virus
uaaaaaaugaaaauaa

SEQ ID NO: 4091129 - RNA, 18 nt, Variola virus
uaaaaacauuuuauuucu

SEQ ID NO: 4091130 - RNA, 16 nt, Variola virus
uaaaaagacuaaaucu

SEQ ID NO: 4091131 - RNA, 16 nt, Variola virus
uaaaaaguuuaauuug

SEQ ID NO: 4091132 - RNA, 14 nt, Variola virus
uaaaaauauguaua

SEQ ID NO: 4091133 - RNA, 19 nt, Variola virus
uaaaaauuaaaaaaucacu

SEQ ID NO: 4091134 - RNA, 13 nt, Variola virus
uaaaacaauaaau

SEQ ID NO: 4091135 - RNA, 21 nt, Variola virus
uaaaacagucacgauaucucu

SEQ ID NO: 4091136 - RNA, 12 nt, Variola virus
uaaaacauaaag

SEQ ID NO: 4091137 - RNA, 19 nt, Variola virus
uaaaacauaaucaaggaua

SEQ ID NO: 4091138 - RNA, 20 nt, Variola virus
uaaaacauucucgacuuauu

SEQ ID NO: 4091139 - RNA, 14 nt, Variola virus
uaaaacauuuccua

SEQ ID NO: 4091140 - RNA, 15 nt, Variola virus
uaaaagaugauuuuc

SEQ ID NO: 4091141 - RNA, 14 nt, Variola virus
uaaaaguuaaacuu

SEQ ID NO: 4091142 - RNA, 21 nt, Variola virus
uaaaauacuaaugcaucuauu

SEQ ID NO: 4091143 - RNA, 12 nt, Variola virus
uaaaauaucuua

SEQ ID NO: 4091144 - RNA, 21 nt, Variola virus
uaaaauccaugagaucuaauu

SEQ ID NO: 4091145 - RNA, 15 nt, Variola virus
uaaaaugauaaaugc

SEQ ID NO: 4091146 - RNA, 12 nt, Variola virus
uaaaauggauua

SEQ ID NO: 4091147 - RNA, 15 nt, Variola virus
uaaaaugguaaacuu

SEQ ID NO: 4091148 - RNA, 17 nt, Variola virus
uaaaaugugguaugucu

SEQ ID NO: 4091149 - RNA, 15 nt, Variola virus
uaaaauuagagguau

SEQ ID NO: 4091150 - RNA, 21 nt, Variola virus
uaaaauuagaugugucauacu

SEQ ID NO: 4091151 - RNA, 19 nt, Variola virus
uaaaauuggaucuacuaau

SEQ ID NO: 4091152 - RNA, 17 nt, Variola virus
uaaacaaaaauauaaag

SEQ ID NO: 4091153 - RNA, 21 nt, Variola virus
uaaacaauacuucugaagaaa

SEQ ID NO: 4091154 - RNA, 18 nt, Variola virus
uaaacaauuucacaaaug

SEQ ID NO: 4091155 - RNA, 18 nt, Variola virus
uaaacagaaucccuuucc

SEQ ID NO: 4091156 - RNA, 23 nt, Variola virus
uaaacauauagggaaucauauau

SEQ ID NO: 4091157 - RNA, 15 nt, Variola virus
uaaacauaucauaau

SEQ ID NO: 4091158 - RNA, 21 nt, Variola virus
uaaacaugucuauuguuaauc

SEQ ID NO: 4091159 - RNA, 21 nt, Variola virus
uaaacccucgaucaugaaugg

SEQ ID NO: 4091160 - RNA, 14 nt, Variola virus
uaaacgaacuauau

SEQ ID NO: 4091161 - RNA, 20 nt, Variola virus
uaaacgauuuuccaaaucag

SEQ ID NO: 4091162 - RNA, 23 nt, Variola virus
uaaacggcaaaccaaaaacauuu

SEQ ID NO: 4091163 - RNA, 15 nt, Variola virus
uaaacuaacuacaaa

SEQ ID NO: 4091164 - RNA, 20 nt, Variola virus
uaaacuacgugaacauaugg

SEQ ID NO: 4091165 - RNA, 19 nt, Variola virus
uaaacucuccaccauuucc

SEQ ID NO: 4091166 - RNA, 16 nt, Variola virus
uaaagaaaagauaucc

SEQ ID NO: 4091167 - RNA, 17 nt, Variola virus
uaaagaagaucauacag

SEQ ID NO: 4091168 - RNA, 23 nt, Variola virus
uaaagaaguagcuaauguuguga

SEQ ID NO: 4091169 - RNA, 14 nt, Variola virus
uaaagauacaaaac

SEQ ID NO: 4091170 - RNA, 13 nt, Variola virus
uaaagccauacau

SEQ ID NO: 4091171 - RNA, 21 nt, Variola virus
uaaagcgaaaaauaauuauuc

SEQ ID NO: 4091172 - RNA, 15 nt, Variola virus
uaaaggaugauacau

SEQ ID NO: 4091173 - RNA, 17 nt, Variola virus
uaaaguacguaaaucua

SEQ ID NO: 4091174 - RNA, 18 nt, Variola virus
uaaaguauccguguauag

SEQ ID NO: 4091175 - RNA, 21 nt, Variola virus
uaaaguaugaacaaagaaaug

SEQ ID NO: 4091176 - RNA, 13 nt, Variola virus
uaaagucauuaau

SEQ ID NO: 4091177 - RNA, 22 nt, Variola virus
uaaaguccgcacuacuguuaag

SEQ ID NO: 4091178 - RNA, 14 nt, Variola virus
uaaauaaauucauu

SEQ ID NO: 4091179 - RNA, 15 nt, Variola virus
uaaauaauuauuuca

SEQ ID NO: 4091180 - RNA, 22 nt, Variola virus
uaaauaauucucugaugucauu

SEQ ID NO: 4091181 - RNA, 17 nt, Variola virus
uaaauacaugucuaaug

SEQ ID NO: 4091182 - RNA, 14 nt, Variola virus
uaaauacauuauca

SEQ ID NO: 4091183 - RNA, 16 nt, Variola virus
uaaauagaacgucauc

SEQ ID NO: 4091184 - RNA, 24 nt, Variola virus
uaaauagaauucucuucauaucau

SEQ ID NO: 4091185 - RNA, 17 nt, Variola virus
uaaauagguuucuauaa

SEQ ID NO: 4091186 - RNA, 21 nt, Variola virus
uaaauauaucuacaauuauug

SEQ ID NO: 4091187 - RNA, 20 nt, Variola virus
uaaauauauuuauaaaguau

SEQ ID NO: 4091188 - RNA, 21 nt, Variola virus
uaaauaucaaccgcaaaucaa

SEQ ID NO: 4091189 - RNA, 13 nt, Variola virus
uaaauaucauaau

SEQ ID NO: 4091190 - RNA, 15 nt, Variola virus
uaaauccuuguuuga

SEQ ID NO: 4091191 - RNA, 15 nt, Variola virus
uaaaucguauauguu

SEQ ID NO: 4091192 - RNA, 20 nt, Variola virus
uaaaucuaacauugauuuua

SEQ ID NO: 4091193 - RNA, 14 nt, Variola virus
uaaaugacaaguau

SEQ ID NO: 4091194 - RNA, 18 nt, Variola virus
uaaaugagaugagaagau

SEQ ID NO: 4091195 - RNA, 14 nt, Variola virus
uaaaugaugauguu

SEQ ID NO: 4091196 - RNA, 16 nt, Variola virus
uaaauggaacagacau

SEQ ID NO: 4091197 - RNA, 18 nt, Variola virus
uaaauguccacuauacau

SEQ ID NO: 4091198 - RNA, 22 nt, Variola virus
uaaauguuucgauuucaauuua

SEQ ID NO: 4091199 - RNA, 17 nt, Variola virus
uaaauuaauucauacac

SEQ ID NO: 4091200 - RNA, 15 nt, Variola virus
uaaauuaauuuacca

SEQ ID NO: 4091201 - RNA, 15 nt, Variola virus
uaaauuauuaucuac

SEQ ID NO: 4091202 - RNA, 18 nt, Variola virus
uaaauuuaauaagacuuu

SEQ ID NO: 4091203 - RNA, 18 nt, Variola virus
uaaauuuuaaacauaaag

SEQ ID NO: 4091204 - RNA, 13 nt, Variola virus
uaaauuuuguauu

SEQ ID NO: 4091205 - RNA, 17 nt, Variola virus
uaacaaaaauuaugaaa

SEQ ID NO: 4091206 - RNA, 19 nt, Variola virus
uaacaaaauccaaacauua

SEQ ID NO: 4091207 - RNA, 12 nt, Variola virus
uaacaaacaucu

SEQ ID NO: 4091208 - RNA, 16 nt, Variola virus
uaacaaauuaaagaua

SEQ ID NO: 4091209 - RNA, 16 nt, Variola virus
uaacaacgacuuauaa

SEQ ID NO: 4091210 - RNA, 21 nt, Variola virus
uaacaagaaaauuagaaggau

SEQ ID NO: 4091211 - RNA, 12 nt, Variola virus
uaacaauaugcu

SEQ ID NO: 4091212 - RNA, 18 nt, Variola virus
uaacaauuuauuuuguau

SEQ ID NO: 4091213 - RNA, 17 nt, Variola virus
uaacacauuucaacaau

SEQ ID NO: 4091214 - RNA, 13 nt, Variola virus
uaacacauuuuca

SEQ ID NO: 4091215 - RNA, 20 nt, Variola virus
uaacaccuauaagauuauca

SEQ ID NO: 4091216 - RNA, 17 nt, Variola virus
uaacacuauacuuauau

SEQ ID NO: 4091217 - RNA, 20 nt, Variola virus
uaacacuuucuuugauuuaa

SEQ ID NO: 4091218 - RNA, 16 nt, Variola virus
uaacaggucauauucu

SEQ ID NO: 4091219 - RNA, 16 nt, Variola virus
uaacaguauuauuaau

SEQ ID NO: 4091220 - RNA, 23 nt, Variola virus
uaacagucuguucaaauuuauau

SEQ ID NO: 4091221 - RNA, 18 nt, Variola virus
uaacauaaaaauaucauu

SEQ ID NO: 4091222 - RNA, 22 nt, Variola virus
uaacauaaaaauaucauugaau

SEQ ID NO: 4091223 - RNA, 14 nt, Variola virus
uaacauaccaugga

SEQ ID NO: 4091224 - RNA, 23 nt, Variola virus
uaacaucuggccuguucauaaau

SEQ ID NO: 4091225 - RNA, 20 nt, Variola virus
uaacaugcauuugaaaagau

SEQ ID NO: 4091226 - RNA, 18 nt, Variola virus
uaacauguuauagaauau

SEQ ID NO: 4091227 - RNA, 15 nt, Variola virus
uaacauuacauauua

SEQ ID NO: 4091228 - RNA, 23 nt, Variola virus
uaacccauuauaaaacuuaugau

SEQ ID NO: 4091229 - RNA, 16 nt, Variola virus
uaaccuccugaaaaug

SEQ ID NO: 4091230 - RNA, 14 nt, Variola virus
uaacgcaacuauau

SEQ ID NO: 4091231 - RNA, 21 nt, Variola virus
uaacgccuauucgaaauuaga

SEQ ID NO: 4091232 - RNA, 17 nt, Variola virus
uaacguauuaaauauua

SEQ ID NO: 4091233 - RNA, 18 nt, Variola virus
uaacguucuaacaucauu

SEQ ID NO: 4091234 - RNA, 17 nt, Variola virus
uaacuaucuuucaagau

SEQ ID NO: 4091235 - RNA, 18 nt, Variola virus
uaacucaaagacaucaua

SEQ ID NO: 4091236 - RNA, 20 nt, Variola virus
uaacucauucuauauaugcu

SEQ ID NO: 4091237 - RNA, 16 nt, Variola virus
uaacucauuuuuugaa

SEQ ID NO: 4091238 - RNA, 18 nt, Variola virus
uaacuccagaacaucuuc

SEQ ID NO: 4091239 - RNA, 10 nt, Variola virus
uaacugaaga

SEQ ID NO: 4091240 - RNA, 18 nt, Variola virus
uaacugacuuaauaguag

SEQ ID NO: 4091241 - RNA, 14 nt, Variola virus
uaacuuaauuuauu

SEQ ID NO: 4091242 - RNA, 23 nt, Variola virus
uaacuuuaaauaauuuacaaaaa

SEQ ID NO: 4091243 - RNA, 16 nt, Variola virus
uaacuuuaauguguga

SEQ ID NO: 4091244 - RNA, 23 nt, Variola virus
uaacuuuaguaaaguugucuaua

SEQ ID NO: 4091245 - RNA, 16 nt, Variola virus
uaagaaaaauagagag

SEQ ID NO: 4091246 - RNA, 15 nt, Variola virus
uaagaaacuauaaag

SEQ ID NO: 4091247 - RNA, 14 nt, Variola virus
uaagaaauacauac

SEQ ID NO: 4091248 - RNA, 19 nt, Variola virus
uaagaacuccuaauauguu

SEQ ID NO: 4091249 - RNA, 20 nt, Variola virus
uaagacguaucuccauaaag

SEQ ID NO: 4091250 - RNA, 19 nt, Variola virus
uaagacguauucucuacau

SEQ ID NO: 4091251 - RNA, 19 nt, Variola virus
uaagaguuaugacgcauua

SEQ ID NO: 4091252 - RNA, 23 nt, Variola virus
uaagaucuggguauuucuuuucu

SEQ ID NO: 4091253 - RNA, 22 nt, Variola virus
uaagaucuucuauuuuaucauu

SEQ ID NO: 4091254 - RNA, 14 nt, Variola virus
uaagaugcaaacau

SEQ ID NO: 4091255 - RNA, 16 nt, Variola virus
uaagauuuuaaaugua

SEQ ID NO: 4091256 - RNA, 22 nt, Variola virus
uaagcaucuuggaaacauaaaa

SEQ ID NO: 4091257 - RNA, 16 nt, Variola virus
uaagccugaauuuauu

SEQ ID NO: 4091258 - RNA, 16 nt, Variola virus
uaagcugucuaucaag

SEQ ID NO: 4091259 - RNA, 14 nt, Variola virus
uaaggaguugaaau

SEQ ID NO: 4091260 - RNA, 21 nt, Variola virus
uaggaaauugguuuauaaugu

SEQ ID NO: 4091261 - RNA, 14 nt, Variola virus
uaggagaauuauuu

SEQ ID NO: 4091262 - RNA, 20 nt, Variola virus
uaggagucagacuuguauuc

SEQ ID NO: 4091263 - RNA, 16 nt, Variola virus
uaggaguuagaauaau

SEQ ID NO: 4091264 - RNA, 13 nt, Variola virus
uaggauaucuauu

SEQ ID NO: 4091265 - RNA, 16 nt, Variola virus
uaggauuuuuccaaag

SEQ ID NO: 4091266 - RNA, 20 nt, Variola virus
uagguaugaucguuaagaau

SEQ ID NO: 4091267 - RNA, 15 nt, Variola virus
uagguauguccucua

SEQ ID NO: 4091268 - RNA, 19 nt, Variola virus
uagguauuuuaucucuauu

SEQ ID NO: 4091269 - RNA, 18 nt, Variola virus
uaguaaaaaauaagucag

SEQ ID NO: 4091270 - RNA, 18 nt, Variola virus
uaguaaaaaauauacauc

SEQ ID NO: 4091271 - RNA, 19 nt, Variola virus
uaguaacggacuuaacaug

SEQ ID NO: 4091272 - RNA, 17 nt, Variola virus
uaguacaagaaauacuu

SEQ ID NO: 4091273 - RNA, 18 nt, Variola virus
uaguacaagaaauacuuc

SEQ ID NO: 4091274 - RNA, 17 nt, Variola virus
uaguacuacugaagaac

SEQ ID NO: 4091275 - RNA, 20 nt, Variola virus
uaguacucgaaauaauauua

SEQ ID NO: 4091276 - RNA, 20 nt, Variola virus
uaguagucuaccgaucucuu

SEQ ID NO: 4091277 - RNA, 17 nt, Variola virus
uaguauagaacacaugu

SEQ ID NO: 4091278 - RNA, 16 nt, Variola virus
uaguauagcagaaguu

SEQ ID NO: 4091279 - RNA, 21 nt, Variola virus
uaguauccaguuccuuuucua

SEQ ID NO: 4091280 - RNA, 18 nt, Variola virus
uaguaugacuuacuugua

SEQ ID NO: 4091281 - RNA, 19 nt, Variola virus
uaguauuauucauuuucua

SEQ ID NO: 4091282 - RNA, 18 nt, Variola virus
uaguauuuauacuacuaa

SEQ ID NO: 4091283 - RNA, 13 nt, Variola virus
uagucaagaugau

SEQ ID NO: 4091284 - RNA, 16 nt, Variola virus
uagucaucucauuaac

SEQ ID NO: 4091285 - RNA, 24 nt, Variola virus
uagucgguuaauguuguauuucau

SEQ ID NO: 4091286 - RNA, 19 nt, Variola virus
uagucuaguaucuaaacau

SEQ ID NO: 4091287 - RNA, 15 nt, Variola virus
uagugacauaaacau

SEQ ID NO: 4091288 - RNA, 18 nt, Variola virus
uagugcucaaacaaaaug

SEQ ID NO: 4091289 - RNA, 17 nt, Variola virus
uaguguuggauaucuuc

SEQ ID NO: 4091290 - RNA, 17 nt, Variola virus
uaguguuuacauaaaug

SEQ ID NO: 4091291 - RNA, 13 nt, Variola virus
uaguuaaauauua

SEQ ID NO: 4091292 - RNA, 14 nt, Variola virus
uaguuaguagacau

SEQ ID NO: 4091293 - RNA, 13 nt, Variola virus
uaguuaguauaac

SEQ ID NO: 4091294 - RNA, 21 nt, Variola virus
uaguugauagaacaaaauaca

SEQ ID NO: 4091295 - RNA, 19 nt, Variola virus
uaguugcaauauacauaaa

SEQ ID NO: 4091296 - RNA, 21 nt, Variola virus
uaguugucuuagccuuaucaa

SEQ ID NO: 4091297 - RNA, 14 nt, Variola virus
uaguuuauaucuuu

SEQ ID NO: 4091298 - RNA, 19 nt, Variola virus
uaguuuccuuaacaaaucu

SEQ ID NO: 4091299 - RNA, 22 nt, Variola virus
uaguuuguaucaauaauaguaa

SEQ ID NO: 4091300 - RNA, 17 nt, Variola virus
uaguuuguuucuagaau

SEQ ID NO: 4091301 - RNA, 14 nt, Variola virus
uaguuuguuuucau

SEQ ID NO: 4091302 - RNA, 15 nt, Variola virus
uaguuuuauauacau

SEQ ID NO: 4091303 - RNA, 13 nt, Variola virus
uaguuuuucugga

SEQ ID NO: 4091304 - RNA, 13 nt, Variola virus
uaguuuuuuucau

SEQ ID NO: 4091305 - RNA, 17 nt, Variola virus
uauaaaaacauuauucu

SEQ ID NO: 4091306 - RNA, 21 nt, Variola virus
uauaaaaauacuaaaacugaa

SEQ ID NO: 4091307 - RNA, 23 nt, Variola virus
uauaaaaaugcuaaaugugaugu

SEQ ID NO: 4091308 - RNA, 19 nt, Variola virus
uauaaaacgauuaaacaau

SEQ ID NO: 4091309 - RNA, 19 nt, Variola virus
uauaaaacuacuacaauga

SEQ ID NO: 4091310 - RNA, 20 nt, Variola virus
uauaaacguauacuguagau

SEQ ID NO: 4091311 - RNA, 17 nt, Variola virus
uauaaacucgcuuaaua

SEQ ID NO: 4091312 - RNA, 16 nt, Variola virus
uauaaacucucaacau

SEQ ID NO: 4091313 - RNA, 21 nt, Variola virus
uauaaaguccgcacuacuguu

SEQ ID NO: 4091314 - RNA, 18 nt, Variola virus
uauaaauauauaaugggu

SEQ ID NO: 4091315 - RNA, 15 nt, Variola virus
uauaaauauccuuaa

SEQ ID NO: 4091316 - RNA, 17 nt, Variola virus
uauaaaucaaauacuug

SEQ ID NO: 4091317 - RNA, 17 nt, Variola virus
uauaaaucauauuuaga

SEQ ID NO: 4091318 - RNA, 13 nt, Variola virus
uauaaauuuuaga

SEQ ID NO: 4091319 - RNA, 22 nt, Variola virus
uauaacacguauguauuaacuu

SEQ ID NO: 4091320 - RNA, 21 nt, Variola virus
uauaacagagccaucuguaaa

SEQ ID NO: 4091321 - RNA, 22 nt, Variola virus
uauaacauuaauaucaaacaau

SEQ ID NO: 4091322 - RNA, 17 nt, Variola virus
uauaacauucauuagua

SEQ ID NO: 4091323 - RNA, 20 nt, Variola virus
uauaacuggauauagaacug

SEQ ID NO: 4091324 - RNA, 20 nt, Variola virus
uauaacuucugguaaauauu

SEQ ID NO: 4091325 - RNA, 15 nt, Variola virus
uauaagauuaucaaa

SEQ ID NO: 4091326 - RNA, 20 nt, Variola virus
uauaagauuaucaaaaucuu

SEQ ID NO: 4091327 - RNA, 19 nt, Variola virus
uauaauaacaaguaugaca

SEQ ID NO: 4091328 - RNA, 12 nt, Variola virus
uauaauaucuug

SEQ ID NO: 4091329 - RNA, 17 nt, Variola virus
uauaaucgcuucaucau

SEQ ID NO: 4091330 - RNA, 16 nt, Variola virus
uauaaucguuaaauuu

SEQ ID NO: 4091331 - RNA, 18 nt, Variola virus
uauaaucuagccaacaau

SEQ ID NO: 4091332 - RNA, 16 nt, Variola virus
uauaaucugaugaaca

SEQ ID NO: 4091333 - RNA, 18 nt, Variola virus
uauaaucugaugaacaau

SEQ ID NO: 4091334 - RNA, 22 nt, Variola virus
uauaaucuuuuucaucuuguga

SEQ ID NO: 4091335 - RNA, 20 nt, Variola virus
uauaauguaacguuuauaua

SEQ ID NO: 4091336 - RNA, 15 nt, Variola virus
uauaauguggauaau

SEQ ID NO: 4091337 - RNA, 16 nt, Variola virus
uauaauucuccugaaa

SEQ ID NO: 4091338 - RNA, 15 nt, Variola virus
uauaauucuuuggua

SEQ ID NO: 4091339 - RNA, 22 nt, Variola virus
uauaauuuaccgcuauagcauu

SEQ ID NO: 4091340 - RNA, 14 nt, Variola virus
uauacaaaaaugca

SEQ ID NO: 4091341 - RNA, 16 nt, Variola virus
uauacaccacccaaug

SEQ ID NO: 4091342 - RNA, 14 nt, Variola virus
uauacauuacugaa

SEQ ID NO: 4091343 - RNA, 14 nt, Variola virus
uauaccauuaaaaa

SEQ ID NO: 4091344 - RNA, 13 nt, Variola virus
uauacccaaagag

SEQ ID NO: 4091345 - RNA, 16 nt, Variola virus
uauacccauuauguaa

SEQ ID NO: 4091346 - RNA, 21 nt, Variola virus
uauaccuuugguucuuuaaaa

SEQ ID NO: 4091347 - RNA, 13 nt, Variola virus
uauacgaauauga

SEQ ID NO: 4091348 - RNA, 15 nt, Variola virus
uauacggauuucuau

SEQ ID NO: 4091349 - RNA, 18 nt, Variola virus
uauacuccggucgaugau

SEQ ID NO: 4091350 - RNA, 17 nt, Variola virus
uauacugaaaaguuauu

SEQ ID NO: 4091351 - RNA, 23 nt, Variola virus
uauacugcauggaaucauagaug

SEQ ID NO: 4091352 - RNA, 15 nt, Variola virus
uauacuuuaaagcaa

SEQ ID NO: 4091353 - RNA, 21 nt, Variola virus
uauacuuuguaauauaaugau

SEQ ID NO: 4091354 - RNA, 21 nt, Variola virus
uauagacgguaaugucaucau

SEQ ID NO: 4091355 - RNA, 13 nt, Variola virus
uauagagaaguau

SEQ ID NO: 4091356 - RNA, 17 nt, Variola virus
uauagaucuuagacauu

SEQ ID NO: 4091357 - RNA, 15 nt, Variola virus
uauagcaauaugugu

SEQ ID NO: 4091358 - RNA, 19 nt, Variola virus
uauagcacuuuuaacuauu

SEQ ID NO: 4091359 - RNA, 20 nt, Variola virus
uauagcauuguuauguauuu

SEQ ID NO: 4091360 - RNA, 16 nt, Variola virus
uauaggaaaaaaacaa

SEQ ID NO: 4091361 - RNA, 18 nt, Variola virus
uauaggaccacuagcaaa

SEQ ID NO: 4091362 - RNA, 20 nt, Variola virus
uauaguaauaaaauuucuau

SEQ ID NO: 4091363 - RNA, 14 nt, Variola virus
uauauaaauacuuu

SEQ ID NO: 4091364 - RNA, 13 nt, Variola virus
uauauaacucauu

SEQ ID NO: 4091365 - RNA, 16 nt, Variola virus
uauauagcacaaaugu

SEQ ID NO: 4091366 - RNA, 20 nt, Variola virus
uauauccaccaauagaaguu

SEQ ID NO: 4091367 - RNA, 18 nt, Variola virus
uauauccguucuuaacuu

SEQ ID NO: 4091368 - RNA, 22 nt, Variola virus
uauauccuacaccggaagagau

SEQ ID NO: 4091369 - RNA, 15 nt, Variola virus
uauauccuuuuguau

SEQ ID NO: 4091370 - RNA, 15 nt, Variola virus
uauaucguuaucauc

SEQ ID NO: 4091371 - RNA, 14 nt, Variola virus
uauaugacuguauu

SEQ ID NO: 4091372 - RNA, 18 nt, Variola virus
uauaugucaaccauuacu

SEQ ID NO: 4091373 - RNA, 13 nt, Variola virus
uauauguuuucau

SEQ ID NO: 4091374 - RNA, 17 nt, Variola virus
uauauuaaaaaauguca

SEQ ID NO: 4091375 - RNA, 15 nt, Variola virus
uauauuaauacacau

SEQ ID NO: 4091376 - RNA, 20 nt, Variola virus
uauauuaucaaaauuuggaa

SEQ ID NO: 4091377 - RNA, 23 nt, Variola virus
uauauucaguaaccaaauacaua

SEQ ID NO: 4091378 - RNA, 21 nt, Variola virus
uauauucgauaguuauggaca

SEQ ID NO: 4091379 - RNA, 18 nt, Variola virus
uauauucuuacaguacau

SEQ ID NO: 4091380 - RNA, 14 nt, Variola virus
uauauuuuggaagc

SEQ ID NO: 4091381 - RNA, 18 nt, Variola virus
uaucaaaaucuugucugc

SEQ ID NO: 4091382 - RNA, 17 nt, Variola virus
uaucaaacaauccaaaa

SEQ ID NO: 4091383 - RNA, 18 nt, Variola virus
uaucaaauagcucaauau

SEQ ID NO: 4091384 - RNA, 18 nt, Variola virus
uaucaacggacacaaagu

SEQ ID NO: 4091385 - RNA, 16 nt, Variola virus
uaucaauaccuuuucu

SEQ ID NO: 4091386 - RNA, 16 nt, Variola virus
uugcauauuuaucuuu

SEQ ID NO: 4091387 - RNA, 19 nt, Variola virus
uugccaucacucucauaau

SEQ ID NO: 4091388 - RNA, 16 nt, Variola virus
uugccauucuuuguaa

SEQ ID NO: 4091389 - RNA, 15 nt, Variola virus
uugcggcauauauaa

SEQ ID NO: 4091390 - RNA, 18 nt, Variola virus
uugcucaaauaauacuau

SEQ ID NO: 4091391 - RNA, 13 nt, Variola virus
uugcuuuucuaau

SEQ ID NO: 4091392 - RNA, 18 nt, Variola virus
uuggaaaggcguuaucua

SEQ ID NO: 4091393 - RNA, 16 nt, Variola virus
uuggaagcaauuacag

SEQ ID NO: 4091394 - RNA, 18 nt, Variola virus
uuggaaucacaaacauua

SEQ ID NO: 4091395 - RNA, 18 nt, Variola virus
uuggacaaaucuggaaaa

SEQ ID NO: 4091396 - RNA, 18 nt, Variola virus
uuggcaguacucauuaau

SEQ ID NO: 4091397 - RNA, 18 nt, Variola virus
uuggcgcuagucaucuca

SEQ ID NO: 4091398 - RNA, 15 nt, Variola virus
uuggcgguucuaaug

SEQ ID NO: 4091399 - RNA, 16 nt, Variola virus
uuggcuaauugucuuu

SEQ ID NO: 4091400 - RNA, 16 nt, Variola virus
uuggcuucuuccaacu

SEQ ID NO: 4091401 - RNA, 21 nt, Variola virus
uugguaauauggauacuaauu

SEQ ID NO: 4091402 - RNA, 20 nt, Variola virus
uugguauaaauguuguaauu

SEQ ID NO: 4091403 - RNA, 16 nt, Variola virus
uugguauuucuuacau

SEQ ID NO: 4091404 - RNA, 17 nt, Variola virus
uuggucaccaauucuag

SEQ ID NO: 4091405 - RNA, 13 nt, Variola virus
uugguguaaaucu

SEQ ID NO: 4091406 - RNA, 18 nt, Variola virus
uuguaaagaaauuauuuu

SEQ ID NO: 4091407 - RNA, 16 nt, Variola virus
uuguaacaacaauguu

SEQ ID NO: 4091408 - RNA, 15 nt, Variola virus
uuguaagguuguaaa

SEQ ID NO: 4091409 - RNA, 19 nt, Variola virus
uuguaagucggucgauucu

SEQ ID NO: 4091410 - RNA, 15 nt, Variola virus
uuguaauuaaauuuu

SEQ ID NO: 4091411 - RNA, 13 nt, Variola virus
uuguacauuauua

SEQ ID NO: 4091412 - RNA, 22 nt, Variola virus
uuguagaacuuaacuuuuucuu

SEQ ID NO: 4091413 - RNA, 16 nt, Variola virus
uuguauuauucugaau

SEQ ID NO: 4091414 - RNA, 11 nt, Variola virus
uuguauuuugu

SEQ ID NO: 4091415 - RNA, 21 nt, Variola virus
uuguuacccaugaucuauaaa

SEQ ID NO: 4091416 - RNA, 15 nt, Variola virus
uuguuccuguagaua

SEQ ID NO: 4091417 - RNA, 20 nt, Variola virus
uuguuuauuguauauacuua

SEQ ID NO: 4091418 - RNA, 13 nt, Variola virus
uuguuuuauucaa

SEQ ID NO: 4091419 - RNA, 14 nt, Variola virus
uuguuuuauucaaa

SEQ ID NO: 4091420 - RNA, 17 nt, Variola virus
uuuaaaaaaaaauacuu

SEQ ID NO: 4091421 - RNA, 17 nt, Variola virus
uuuaaaaacgaaucaga

SEQ ID NO: 4091422 - RNA, 19 nt, Variola virus
uuuaaacaagaaaguuauc

SEQ ID NO: 4091423 - RNA, 19 nt, Variola virus
uuuaaacagagaaaucagu

SEQ ID NO: 4091424 - RNA, 15 nt, Variola virus
uuuaaacaguuuauu

SEQ ID NO: 4091425 - RNA, 22 nt, Variola virus
uuuaaacuguccuauaaccucu

SEQ ID NO: 4091426 - RNA, 11 nt, Variola virus
uuuaacagaug

SEQ ID NO: 4091427 - RNA, 21 nt, Variola virus
uuuaacgaggauuuauucaga

SEQ ID NO: 4091428 - RNA, 23 nt, Variola virus
uuuaaggaggcguccuuuucuaa

SEQ ID NO: 4091429 - RNA, 18 nt, Variola virus
uuuaaguauauacgauaa

SEQ ID NO: 4091430 - RNA, 23 nt, Variola virus
uuuaauagcuaacucgguaucua

SEQ ID NO: 4091431 - RNA, 15 nt, Variola virus
uuuaauaucuaaaua

SEQ ID NO: 4091432 - RNA, 16 nt, Variola virus
uuuaauggauauacac

SEQ ID NO: 4091433 - RNA, 19 nt, Variola virus
uuuaaugugugaaaacagu

SEQ ID NO: 4091434 - RNA, 20 nt, Variola virus
uuuaauuucuuguaaucauu

SEQ ID NO: 4091435 - RNA, 18 nt, Variola virus
uuuaauuuggucauucuu

SEQ ID NO: 4091436 - RNA, 23 nt, Variola virus
uuuacaaaaguccggaugcauaa

SEQ ID NO: 4091437 - RNA, 21 nt, Variola virus
uuuacaaauugggaucaucca

SEQ ID NO: 4091438 - RNA, 20 nt, Variola virus
uuuacagauauauucauagu

SEQ ID NO: 4091439 - RNA, 19 nt, Variola virus
uuuacccacuauaaaauaa

SEQ ID NO: 4091440 - RNA, 14 nt, Variola virus
uuuacucuucuaaa

SEQ ID NO: 4091441 - RNA, 21 nt, Variola virus
uuuacucuucuaaauucauaa

SEQ ID NO: 4091442 - RNA, 19 nt, Variola virus
uuuagaauauauguaugua

SEQ ID NO: 4091443 - RNA, 23 nt, Variola virus
uuuagaucauuaacucuagaaau

SEQ ID NO: 4091444 - RNA, 18 nt, Variola virus
uuuagaugaauuauuauu

SEQ ID NO: 4091445 - RNA, 15 nt, Variola virus
uuuagcuaauacuaa

SEQ ID NO: 4091446 - RNA, 19 nt, Variola virus
uuuaggagugaucaucaaa

SEQ ID NO: 4091447 - RNA, 15 nt, Variola virus
uuuaguaugacauaa

SEQ ID NO: 4091448 - RNA, 16 nt, Variola virus
uuuaguccuauuucaa

SEQ ID NO: 4091449 - RNA, 15 nt, Variola virus
uuuauaacgaaguag

SEQ ID NO: 4091450 - RNA, 21 nt, Variola virus
uuuaucaaaaauaaaauacau

SEQ ID NO: 4091451 - RNA, 19 nt, Variola virus
uuuauccucucguuagccu

SEQ ID NO: 4091452 - RNA, 20 nt, Variola virus
uuuaucuaauucgauacaaa

SEQ ID NO: 4091453 - RNA, 15 nt, Variola virus
uuuaugcuucguaaa

SEQ ID NO: 4091454 - RNA, 14 nt, Variola virus
uuuauuaauacagg

SEQ ID NO: 4091455 - RNA, 23 nt, Variola virus
uuuauuauauucaguaaccaaau

SEQ ID NO: 4091456 - RNA, 13 nt, Variola virus
uuuauuaucuaca

SEQ ID NO: 4091457 - RNA, 20 nt, Variola virus
uuuauuaucuugucuuggug

SEQ ID NO: 4091458 - RNA, 22 nt, Variola virus
uuuauucgguaagacgaucauu

SEQ ID NO: 4091459 - RNA, 13 nt, Variola virus
uuuauucuagaau

SEQ ID NO: 4091460 - RNA, 17 nt, Variola virus
uuuauuucuaaaauuuu

SEQ ID NO: 4091461 - RNA, 15 nt, Variola virus
uuucaagauaaauaa

SEQ ID NO: 4091462 - RNA, 17 nt, Variola virus
uuucaauaauauacuaa

SEQ ID NO: 4091463 - RNA, 21 nt, Variola virus
uuucaauaguaucgaaaacag

SEQ ID NO: 4091464 - RNA, 22 nt, Variola virus
uuucaauauauuacgguaucua

SEQ ID NO: 4091465 - RNA, 20 nt, Variola virus
uuucaucuagauacacuaga

SEQ ID NO: 4091466 - RNA, 12 nt, Variola virus
uuuccaaagaua

SEQ ID NO: 4091467 - RNA, 12 nt, Variola virus
uuuccauaauaa

SEQ ID NO: 4091468 - RNA, 14 nt, Variola virus
uuuccccucucugu

SEQ ID NO: 4091469 - RNA, 19 nt, Variola virus
uuucccguaauaaauuuua

SEQ ID NO: 4091470 - RNA, 23 nt, Variola virus
uuuccuauaaucguuaaauuuua

SEQ ID NO: 4091471 - RNA, 13 nt, Variola virus
uuuccuuaucauu

SEQ ID NO: 4091472 - RNA, 14 nt, Variola virus
uuuccuuuaucauu

SEQ ID NO: 4091473 - RNA, 16 nt, Variola virus
uuucgaagaucuucuu

SEQ ID NO: 4091474 - RNA, 17 nt, Variola virus
uuucguaccaacucauu

SEQ ID NO: 4091475 - RNA, 14 nt, Variola virus
uuucgucaacaagu

SEQ ID NO: 4091476 - RNA, 16 nt, Variola virus
uuucuauauagcuauu

SEQ ID NO: 4091477 - RNA, 15 nt, Variola virus
uuucuggcuaagaag

SEQ ID NO: 4091478 - RNA, 19 nt, Variola virus
uuucuucuacauacauaag

SEQ ID NO: 4091479 - RNA, 21 nt, Variola virus
uuucuugagaucccacaucau

SEQ ID NO: 4091480 - RNA, 14 nt, Variola virus
uuucuuuuaacaug

SEQ ID NO: 4091481 - RNA, 20 nt, Variola virus
uuugaaauaucuuaugauga

SEQ ID NO: 4091482 - RNA, 19 nt, Variola virus
uuugaauauacuuuuaauu

SEQ ID NO: 4091483 - RNA, 23 nt, Variola virus
uuugacaggaucagguucuucua

SEQ ID NO: 4091484 - RNA, 15 nt, Variola virus
uuugagaacaucgau

SEQ ID NO: 4091485 - RNA, 16 nt, Variola virus
uuugauuaguagauau

SEQ ID NO: 4091486 - RNA, 13 nt, Variola virus
uuugcaaacauaa

SEQ ID NO: 4091487 - RNA, 14 nt, Variola virus
uuugcaaauacagc

SEQ ID NO: 4091488 - RNA, 13 nt, Variola virus
uuugcauucuauu

SEQ ID NO: 4091489 - RNA, 14 nt, Variola virus
uuugcuauuucuau

SEQ ID NO: 4091490 - RNA, 17 nt, Variola virus
uuuguaaauaacuaucu

SEQ ID NO: 4091491 - RNA, 22 nt, Variola virus
uuuguaaauaacuaucuauaaa

SEQ ID NO: 4091492 - RNA, 18 nt, Variola virus
uuuguaacugacuuuaga

SEQ ID NO: 4091493 - RNA, 14 nt, Variola virus
uuuguaauugacau

SEQ ID NO: 4091494 - RNA, 16 nt, Variola virus
uuuguaauugugacau

SEQ ID NO: 4091495 - RNA, 12 nt, Variola virus
uuuguacauuuu

SEQ ID NO: 4091496 - RNA, 15 nt, Variola virus
uuuguauauacauag

SEQ ID NO: 4091497 - RNA, 17 nt, Variola virus
uuugucaacuuuguaaa

SEQ ID NO: 4091498 - RNA, 14 nt, Variola virus
uuuguuagaguaua

SEQ ID NO: 4091499 - RNA, 23 nt, Variola virus
uuuguuuaaacguuuguaguuua

SEQ ID NO: 4091500 - RNA, 17 nt, Variola virus
uuuuaaaguuaaucaua

SEQ ID NO: 4091501 - RNA, 14 nt, Variola virus
uuuuaaggggaaaa

SEQ ID NO: 4091502 - RNA, 15 nt, Variola virus
uuuuaauuguaugua

SEQ ID NO: 4091503 - RNA, 22 nt, Variola virus
uuuuaccgcaauauguaugcua

SEQ ID NO: 4091504 - RNA, 15 nt, Variola virus
uuuuagaauuuccaa

SEQ ID NO: 4091505 - RNA, 18 nt, Variola virus
uuuuagauguaguaucua

SEQ ID NO: 4091506 - RNA, 14 nt, Variola virus
uuuuaguuuaucaa

SEQ ID NO: 4091507 - RNA, 12 nt, Variola virus
uuuuauaaacag

SEQ ID NO: 4091508 - RNA, 12 nt, Variola virus
uuuuauaaacau

SEQ ID NO: 4091509 - RNA, 20 nt, Variola virus
uuuuaucgauucaucuaauu

SEQ ID NO: 4091510 - RNA, 19 nt, Variola virus
uuuuaugacaaacuuuacu

SEQ ID NO: 4091511 - RNA, 17 nt, Variola virus
uuuuauuuuaucuaauu

SEQ ID NO: 4091512 - RNA, 15 nt, Variola virus
acucuacuaguucca

SEQ ID NO: 4091513 - RNA, 23 nt, Variola virus
acucuauuggauauggauuucca

SEQ ID NO: 4091514 - RNA, 18 nt, Variola virus
acucuggguaacaaacau

SEQ ID NO: 4091515 - RNA, 20 nt, Variola virus
acucugggucauauuauaga

SEQ ID NO: 4091516 - RNA, 20 nt, Variola virus
acugaagaacuaaaagugac

SEQ ID NO: 4091517 - RNA, 12 nt, Variola virus
acugaauuauua

SEQ ID NO: 4091518 - RNA, 16 nt, Variola virus
acugacagauguguuc

SEQ ID NO: 4091519 - RNA, 14 nt, Variola virus
acugacuuaauagu

SEQ ID NO: 4091520 - RNA, 13 nt, Variola virus
acugacuuuagac

SEQ ID NO: 4091521 - RNA, 18 nt, Variola virus
acugagaugacuggaaau

SEQ ID NO: 4091522 - RNA, 15 nt, Variola virus
acugaguuuaucacu

SEQ ID NO: 4091523 - RNA, 16 nt, Variola virus
acugauaauguagaaa

SEQ ID NO: 4091524 - RNA, 13 nt, Variola virus
acugauauucagg

SEQ ID NO: 4091525 - RNA, 12 nt, Variola virus
acugaucuucuu

SEQ ID NO: 4091526 - RNA, 18 nt, Variola virus
acugauuaauaagaucuu

SEQ ID NO: 4091527 - RNA, 18 nt, Variola virus
acugauucagaaauggau

SEQ ID NO: 4091528 - RNA, 13 nt, Variola virus
acugcauauuaag

SEQ ID NO: 4091529 - RNA, 17 nt, Variola virus
acugcauuaaacugaua

SEQ ID NO: 4091530 - RNA, 20 nt, Variola virus
acugcuaaauguaucuucca

SEQ ID NO: 4091531 - RNA, 18 nt, Variola virus
acugcuuuaggugcugaa

SEQ ID NO: 4091532 - RNA, 17 nt, Variola virus
acuggauauauuuuaca

SEQ ID NO: 4091533 - RNA, 21 nt, Variola virus
acuggauauucgauaacagca

SEQ ID NO: 4091534 - RNA, 19 nt, Variola virus
acuggaucguuuagaauac

SEQ ID NO: 4091535 - RNA, 17 nt, Variola virus
acuguacgauacauaau

SEQ ID NO: 4091536 - RNA, 14 nt, Variola virus
acugucuaaaugua

SEQ ID NO: 4091537 - RNA, 16 nt, Variola virus
acuguggauacucugu

SEQ ID NO: 4091538 - RNA, 20 nt, Variola virus
acuguggaugugacagacug

SEQ ID NO: 4091539 - RNA, 13 nt, Variola virus
acuguucaagaau

SEQ ID NO: 4091540 - RNA, 20 nt, Variola virus
acuguuuuccggaaggaaau

SEQ ID NO: 4091541 - RNA, 23 nt, Variola virus
acuguuuucuagauggaaauauu

SEQ ID NO: 4091542 - RNA, 20 nt, Variola virus
acuuaacuaucuuucaagau

SEQ ID NO: 4091543 - RNA, 19 nt, Variola virus
acuuaauaggcaucauuua

SEQ ID NO: 4091544 - RNA, 18 nt, Variola virus
acuuacuaaagucaauaa

SEQ ID NO: 4091545 - RNA, 14 nt, Variola virus
acuuacuuaauaga

SEQ ID NO: 4091546 - RNA, 23 nt, Variola virus
acuuaggaguuagaauuuauaga

SEQ ID NO: 4091547 - RNA, 14 nt, Variola virus
acuuauaaaaauac

SEQ ID NO: 4091548 - RNA, 22 nt, Variola virus
acuuaugcgaagccauguuaaa

SEQ ID NO: 4091549 - RNA, 15 nt, Variola virus
acuuauguaugugca

SEQ ID NO: 4091550 - RNA, 14 nt, Variola virus
acuuauuaaugaau

SEQ ID NO: 4091551 - RNA, 14 nt, Variola virus
acuuauuuuaagau

SEQ ID NO: 4091552 - RNA, 12 nt, Variola virus
acuucagaaauu

SEQ ID NO: 4091553 - RNA, 23 nt, Variola virus
acuuccauacgacgaaaauggua

SEQ ID NO: 4091554 - RNA, 14 nt, Variola virus
acuucgcaauaauu

SEQ ID NO: 4091555 - RNA, 18 nt, Variola virus
acuucuaacaaacaucuc

SEQ ID NO: 4091556 - RNA, 19 nt, Variola virus
acuucuguacuaguggcag

SEQ ID NO: 4091557 - RNA, 19 nt, Variola virus
acuucuguauguacagcau

SEQ ID NO: 4091558 - RNA, 18 nt, Variola virus
acuucuuggaaugauacu

SEQ ID NO: 4091559 - RNA, 20 nt, Variola virus
acuucuuucaguucuggaua

SEQ ID NO: 4091560 - RNA, 14 nt, Variola virus
acuugauaaaaaug

SEQ ID NO: 4091561 - RNA, 23 nt, Variola virus
acuugauauuggauauaucacaa

SEQ ID NO: 4091562 - RNA, 18 nt, Variola virus
acuuggagguagguauua

SEQ ID NO: 4091563 - RNA, 22 nt, Variola virus
acuugguauuuggaaauuagug

SEQ ID NO: 4091564 - RNA, 19 nt, Variola virus
acuuguguucuaaauggau

SEQ ID NO: 4091565 - RNA, 18 nt, Variola virus
acuuguuuaaugaugaau

SEQ ID NO: 4091566 - RNA, 23 nt, Variola virus
acuuuaaaguuguuaaaaaauua

SEQ ID NO: 4091567 - RNA, 22 nt, Variola virus
acuuuaauccuguguuuauaga

SEQ ID NO: 4091568 - RNA, 21 nt, Variola virus
acuuucaaugagauaaauaug

SEQ ID NO: 4091569 - RNA, 23 nt, Variola virus
acuuugauuucuuaucuguaguu

SEQ ID NO: 4091570 - RNA, 16 nt, Variola virus
acuuugguaaauguua

SEQ ID NO: 4091571 - RNA, 12 nt, Variola virus
acuuuuaaauac

SEQ ID NO: 4091572 - RNA, 23 nt, Variola virus
acuuuuauuauggcgucuaagau

SEQ ID NO: 4091573 - RNA, 16 nt, Variola virus
acuuuucauuaauagg

SEQ ID NO: 4091574 - RNA, 14 nt, Variola virus
acuuuucuauuugu

SEQ ID NO: 4091575 - RNA, 14 nt, Variola virus
acuuuucucuaaau

SEQ ID NO: 4091576 - RNA, 21 nt, Variola virus
acuuuuucaucuuuacauacu

SEQ ID NO: 4091577 - RNA, 18 nt, Variola virus
acuuuuuuauccaacaau

SEQ ID NO: 4091578 - RNA, 14 nt, Variola virus
agaaaaaacaaugu

SEQ ID NO: 4091579 - RNA, 13 nt, Variola virus
agaaaaaacuaau

SEQ ID NO: 4091580 - RNA, 22 nt, Variola virus
agaaaaaauuuauuuaucaauu

SEQ ID NO: 4091581 - RNA, 11 nt, Variola virus
agaaaacauuu

SEQ ID NO: 4091582 - RNA, 23 nt, Variola virus
agaaaacucguuauuaacuaugu

SEQ ID NO: 4091583 - RNA, 15 nt, Variola virus
agaaaagauuaagau

SEQ ID NO: 4091584 - RNA, 15 nt, Variola virus
agaaaauaacagaua

SEQ ID NO: 4091585 - RNA, 21 nt, Variola virus
agaaaauaucauaaauauauu

SEQ ID NO: 4091586 - RNA, 15 nt, Variola virus
agaaaauaucauguu

SEQ ID NO: 4091587 - RNA, 22 nt, Variola virus
agaaaaugucccucauaauaaa

SEQ ID NO: 4091588 - RNA, 19 nt, Variola virus
agaaaauuuauaaacuauu

SEQ ID NO: 4091589 - RNA, 13 nt, Variola virus
agaaacagaacua

SEQ ID NO: 4091590 - RNA, 14 nt, Variola virus
agaaaccugauuau

SEQ ID NO: 4091591 - RNA, 18 nt, Variola virus
agaaagauacagguauag

SEQ ID NO: 4091592 - RNA, 20 nt, Variola virus
agaaagauauauuaagaaua

SEQ ID NO: 4091593 - RNA, 23 nt, Variola virus
agaaaguaaguaugucgaaucua

SEQ ID NO: 4091594 - RNA, 13 nt, Variola virus
agaaauaaaaauu

SEQ ID NO: 4091595 - RNA, 13 nt, Variola virus
agaaauaaauguc

SEQ ID NO: 4091596 - RNA, 13 nt, Variola virus
agaaauaauauaa

SEQ ID NO: 4091597 - RNA, 22 nt, Variola virus
agaaauauauacuucaauugau

SEQ ID NO: 4091598 - RNA, 13 nt, Variola virus
agaaauaugugaa

SEQ ID NO: 4091599 - RNA, 13 nt, Variola virus
agaaaucauauau

SEQ ID NO: 4091600 - RNA, 18 nt, Variola virus
agaaaucauauaugauau

SEQ ID NO: 4091601 - RNA, 19 nt, Variola virus
agaaaucauauaugauauu

SEQ ID NO: 4091602 - RNA, 22 nt, Variola virus
agaaaucccaccuuauuauauu

SEQ ID NO: 4091603 - RNA, 17 nt, Variola virus
agaaaugaaauuacucg

SEQ ID NO: 4091604 - RNA, 14 nt, Variola virus
agaaauuaauagaa

SEQ ID NO: 4091605 - RNA, 21 nt, Variola virus
agaaauuacauaaaaaaaaug

SEQ ID NO: 4091606 - RNA, 23 nt, Variola virus
agaaauuuuugguucuucucuaa

SEQ ID NO: 4091607 - RNA, 19 nt, Variola virus
agaacaaaccaaauauauu

SEQ ID NO: 4091608 - RNA, 13 nt, Variola virus
agaacaaaguaau

SEQ ID NO: 4091609 - RNA, 14 nt, Variola virus
agaacauaauaaua

SEQ ID NO: 4091610 - RNA, 17 nt, Variola virus
agaaccacgaaacuaau

SEQ ID NO: 4091611 - RNA, 16 nt, Variola virus
agaaccaguaacauau

SEQ ID NO: 4091612 - RNA, 17 nt, Variola virus
agaacccuuaauaacaa

SEQ ID NO: 4091613 - RNA, 16 nt, Variola virus
agaacgggucauuuau

SEQ ID NO: 4091614 - RNA, 14 nt, Variola virus
agaacucaacaaua

SEQ ID NO: 4091615 - RNA, 15 nt, Variola virus
agaacucaacucauc

SEQ ID NO: 4091616 - RNA, 21 nt, Variola virus
agaacuguuuuagaagucaag

SEQ ID NO: 4091617 - RNA, 23 nt, Variola virus
agaacuuaggcauggacauacua

SEQ ID NO: 4091618 - RNA, 19 nt, Variola virus
agaacuuaugaccguaaua

SEQ ID NO: 4091619 - RNA, 21 nt, Variola virus
agaacuuaugaccguaauaaa

SEQ ID NO: 4091620 - RNA, 21 nt, Variola virus
agaagagucauuaaaauaugc

SEQ ID NO: 4091621 - RNA, 16 nt, Variola virus
agaagcguguuauugu

SEQ ID NO: 4091622 - RNA, 22 nt, Variola virus
agaagguuucgauuaucuguau

SEQ ID NO: 4091623 - RNA, 13 nt, Variola virus
agaaguucaugau

SEQ ID NO: 4091624 - RNA, 21 nt, Variola virus
agaaguuguaaauaacaauga

SEQ ID NO: 4091625 - RNA, 18 nt, Variola virus
agaaguuuucccaaaaaa

SEQ ID NO: 4091626 - RNA, 16 nt, Variola virus
agaauaagaacuauaa

SEQ ID NO: 4091627 - RNA, 16 nt, Variola virus
agaauacgaugauauu

SEQ ID NO: 4091628 - RNA, 17 nt, Variola virus
agaauacuauuugguaa

SEQ ID NO: 4091629 - RNA, 23 nt, Variola virus
agaauaguauuugagaaauaugu

SEQ ID NO: 4091630 - RNA, 15 nt, Variola virus
agaauauaaaaaauu

SEQ ID NO: 4091631 - RNA, 23 nt, Variola virus
agaauauaaauuauauauggauu

SEQ ID NO: 4091632 - RNA, 23 nt, Variola virus
agaauauauguauguaaaaauau

SEQ ID NO: 4091633 - RNA, 17 nt, Variola virus
agaauauccucuagaga

SEQ ID NO: 4091634 - RNA, 19 nt, Variola virus
agaauaucuauacauaccu

SEQ ID NO: 4091635 - RNA, 21 nt, Variola virus
agaauaugauccguaacauau

SEQ ID NO: 4091636 - RNA, 18 nt, Variola virus
agaauauguauaucaauu

SEQ ID NO: 4091637 - RNA, 17 nt, Variola virus
agaauauucuuuucuaa

SEQ ID NO: 4091638 - RNA, 18 nt, Variola virus
agaaucagaaucauacaa

SEQ ID NO: 4091639 - RNA, 19 nt, Variola virus
agaaucauaaagaacagua

SEQ ID NO: 4091640 - RNA, 15 nt, Variola virus
agaaucguaauggau

SEQ ID NO: 4091641 - RNA, 16 nt, Variola virus
agaaucuaaugaugac

SEQ ID NO: 4091642 - RNA, 14 nt, Variola virus
agaaugaauguuua

SEQ ID NO: 4091643 - RNA, 15 nt, Variola virus
agaaugacauaacua

SEQ ID NO: 4091644 - RNA, 17 nt, Variola virus
agaaugacauaacuaau

SEQ ID NO: 4091645 - RNA, 22 nt, Variola virus
agaaugcagaaaugauuuugga

SEQ ID NO: 4091646 - RNA, 22 nt, Variola virus
agaaugcuucggaauuagaaca

SEQ ID NO: 4091647 - RNA, 15 nt, Variola virus
agaauuaacuaguau

SEQ ID NO: 4091648 - RNA, 13 nt, Variola virus
agaauuaagauua

SEQ ID NO: 4091649 - RNA, 17 nt, Variola virus
agaauuaggagaacuua

SEQ ID NO: 4091650 - RNA, 22 nt, Variola virus
agaauucaagucaggaacuauu

SEQ ID NO: 4091651 - RNA, 20 nt, Variola virus
agaauucacaccuagagaca

SEQ ID NO: 4091652 - RNA, 22 nt, Variola virus
agaauugauaauauaaauauga

SEQ ID NO: 4091653 - RNA, 13 nt, Variola virus
agaauuguaacuu

SEQ ID NO: 4091654 - RNA, 17 nt, Variola virus
agaauuuagaaauauau

SEQ ID NO: 4091655 - RNA, 17 nt, Variola virus
agaauuuagauacaucu

SEQ ID NO: 4091656 - RNA, 21 nt, Variola virus
agaauuucuacauaauuauau

SEQ ID NO: 4091657 - RNA, 21 nt, Variola virus
agaauuuguaccaacaaacug

SEQ ID NO: 4091658 - RNA, 15 nt, Variola virus
agaauuuuagacacu

SEQ ID NO: 4091659 - RNA, 12 nt, Variola virus
agaauuuucuag

SEQ ID NO: 4091660 - RNA, 15 nt, Variola virus
agaauuuucuagauc

SEQ ID NO: 4091661 - RNA, 22 nt, Variola virus
agaauuuuuauaaauuuuucca

SEQ ID NO: 4091662 - RNA, 22 nt, Variola virus
agaauuuuuucggguuccaaac

SEQ ID NO: 4091663 - RNA, 21 nt, Variola virus
agacaaaauauuagaaaaagu

SEQ ID NO: 4091664 - RNA, 17 nt, Variola virus
agacaaacgcugauaga

SEQ ID NO: 4091665 - RNA, 21 nt, Variola virus
agacaauuauauaaaacauuu

SEQ ID NO: 4091666 - RNA, 17 nt, Variola virus
agacaauugacaaaauu

SEQ ID NO: 4091667 - RNA, 16 nt, Variola virus
agacacuaacucuguu

SEQ ID NO: 4091668 - RNA, 20 nt, Variola virus
agacacuaacucuguuuuau

SEQ ID NO: 4091669 - RNA, 18 nt, Variola virus
agacauauuaauaagacu

SEQ ID NO: 4091670 - RNA, 12 nt, Variola virus
agaccaaaaauu

SEQ ID NO: 4091671 - RNA, 13 nt, Variola virus
agaccaucuaaca

SEQ ID NO: 4091672 - RNA, 22 nt, Variola virus
agaccuacagugauaugauguc

SEQ ID NO: 4091673 - RNA, 14 nt, Variola virus
agacgcucaaaaua

SEQ ID NO: 4091674 - RNA, 13 nt, Variola virus
agacgcuuauuau

SEQ ID NO: 4091675 - RNA, 19 nt, Variola virus
agacggagucauaacuauu

SEQ ID NO: 4091676 - RNA, 22 nt, Variola virus
agacguaucuccauaaagaaau

SEQ ID NO: 4091677 - RNA, 15 nt, Variola virus
agacguggagaucua

SEQ ID NO: 4091678 - RNA, 18 nt, Variola virus
agacguggagaucuagaa

SEQ ID NO: 4091679 - RNA, 18 nt, Variola virus
agacguggcaaacaaugu

SEQ ID NO: 4091680 - RNA, 14 nt, Variola virus
agacguguuauuac

SEQ ID NO: 4091681 - RNA, 16 nt, Variola virus
agacguuucauaauaa

SEQ ID NO: 4091682 - RNA, 21 nt, Variola virus
agacguuucauaauaauacau

SEQ ID NO: 4091683 - RNA, 14 nt, Variola virus
agacuacaauauau

SEQ ID NO: 4091684 - RNA, 17 nt, Variola virus
agacuacaauauauucu

SEQ ID NO: 4091685 - RNA, 23 nt, Variola virus
agacuccauccguaaaaaugcau

SEQ ID NO: 4091686 - RNA, 19 nt, Variola virus
agacuuugccacaacagaa

SEQ ID NO: 4091687 - RNA, 16 nt, Variola virus
agagaagcaaaugaug

SEQ ID NO: 4091688 - RNA, 13 nt, Variola virus
agagagaaauacu

SEQ ID NO: 4091689 - RNA, 15 nt, Variola virus
agagagcagaaauaa

SEQ ID NO: 4091690 - RNA, 20 nt, Variola virus
agagauacuaaauauagaca

SEQ ID NO: 4091691 - RNA, 15 nt, Variola virus
agagcagucuuucua

SEQ ID NO: 4091692 - RNA, 16 nt, Variola virus
agagccaucuguaaaa

SEQ ID NO: 4091693 - RNA, 18 nt, Variola virus
agagcuuuauuaacuucu

SEQ ID NO: 4091694 - RNA, 12 nt, Variola virus
agaggaaauauc

SEQ ID NO: 4091695 - RNA, 14 nt, Variola virus
agaggauaacuauu

SEQ ID NO: 4091696 - RNA, 21 nt, Variola virus
agaggaugaaauagauagaau

SEQ ID NO: 4091697 - RNA, 17 nt, Variola virus
agaggcagucggauugg

SEQ ID NO: 4091698 - RNA, 21 nt, Variola virus
agagggagccgauaacuuuau

SEQ ID NO: 4091699 - RNA, 17 nt, Variola virus
agagguagcaagaagau

SEQ ID NO: 4091700 - RNA, 17 nt, Variola virus
agaguaggaaguuuaau

SEQ ID NO: 4091701 - RNA, 16 nt, Variola virus
agaguaguauauuguc

SEQ ID NO: 4091702 - RNA, 20 nt, Variola virus
agaguaguaucauuaaaucu

SEQ ID NO: 4091703 - RNA, 13 nt, Variola virus
agaguuauccauu

SEQ ID NO: 4091704 - RNA, 13 nt, Variola virus
agauaaacuagau

SEQ ID NO: 4091705 - RNA, 23 nt, Variola virus
agauaaauuuaucaauaaaugug

SEQ ID NO: 4091706 - RNA, 15 nt, Variola virus
agauaauauuagaca

SEQ ID NO: 4091707 - RNA, 13 nt, Variola virus
agauaaucuauau

SEQ ID NO: 4091708 - RNA, 14 nt, Variola virus
agauacaacaaauu

SEQ ID NO: 4091709 - RNA, 15 nt, Variola virus
agauacauaaaacuu

SEQ ID NO: 4091710 - RNA, 20 nt, Variola virus
agauacauuacaucuugaua

SEQ ID NO: 4091711 - RNA, 20 nt, Variola virus
agauaccacgaguaucaauu

SEQ ID NO: 4091712 - RNA, 17 nt, Variola virus
agauagagauucaaugg

SEQ ID NO: 4091713 - RNA, 19 nt, Variola virus
agauagcggacagcuauau

SEQ ID NO: 4091714 - RNA, 21 nt, Variola virus
agauagguauuuuaucucuau

SEQ ID NO: 4091715 - RNA, 14 nt, Variola virus
agauauaauacuug

SEQ ID NO: 4091716 - RNA, 18 nt, Variola virus
agauauaccagaacuauu

SEQ ID NO: 4091717 - RNA, 16 nt, Variola virus
agauauaugaacgaua

SEQ ID NO: 4091718 - RNA, 13 nt, Variola virus
agauauaugguuu

SEQ ID NO: 4091719 - RNA, 16 nt, Variola virus
agauaucuauauaauu

SEQ ID NO: 4091720 - RNA, 23 nt, Variola virus
agauaucucuggauauaucacaa

SEQ ID NO: 4091721 - RNA, 19 nt, Variola virus
agauaucuucuuuuuucca

SEQ ID NO: 4091722 - RNA, 14 nt, Variola virus
agauaugauaaaca

SEQ ID NO: 4091723 - RNA, 23 nt, Variola virus
agauaugguaaaauuaaauagua

SEQ ID NO: 4091724 - RNA, 15 nt, Variola virus
agauauguuuauuca

SEQ ID NO: 4091725 - RNA, 19 nt, Variola virus
agauauuccgacaaaggau

SEQ ID NO: 4091726 - RNA, 13 nt, Variola virus
agauauuuauccu

SEQ ID NO: 4091727 - RNA, 12 nt, Variola virus
agauauuucauc

SEQ ID NO: 4091728 - RNA, 17 nt, Variola virus
agaucaacagaaauauu

SEQ ID NO: 4091729 - RNA, 15 nt, Variola virus
agaucaagaaacauu

SEQ ID NO: 4091730 - RNA, 22 nt, Variola virus
agaucaauggugugauguugau

SEQ ID NO: 4091731 - RNA, 20 nt, Variola virus
agaucauagagagauucauu

SEQ ID NO: 4091732 - RNA, 16 nt, Variola virus
agauccucucuucaac

SEQ ID NO: 4091733 - RNA, 20 nt, Variola virus
agaucgcguuaaucauguac

SEQ ID NO: 4091734 - RNA, 24 nt, Variola virus
agaucgcuuucugguaacaugaua

SEQ ID NO: 4091735 - RNA, 16 nt, Variola virus
agaucuaauuuuucau

SEQ ID NO: 4091736 - RNA, 22 nt, Variola virus
agaucuacuggugaaaugugac

SEQ ID NO: 4091737 - RNA, 19 nt, Variola virus
agaucuauuccuauuuccu

SEQ ID NO: 4091738 - RNA, 21 nt, Variola virus
agaucuuuucucaaagauguu

SEQ ID NO: 4091739 - RNA, 22 nt, Variola virus
agaugaaaaauuuuccacaucu

SEQ ID NO: 4091740 - RNA, 15 nt, Variola virus
agaugaaauagcguu

SEQ ID NO: 4091741 - RNA, 21 nt, Variola virus
agaugaagucauuaacaauau

SEQ ID NO: 4091742 - RNA, 15 nt, Variola virus
agaugagaacucuau

SEQ ID NO: 4091743 - RNA, 19 nt, Variola virus
agaugagcauaaacauaau

SEQ ID NO: 4091744 - RNA, 17 nt, Variola virus
agaugauaauuuauaca

SEQ ID NO: 4091745 - RNA, 21 nt, Variola virus
agaugauagcuauuuaacuaa

SEQ ID NO: 4091746 - RNA, 15 nt, Variola virus
agaugcaaacauuau

SEQ ID NO: 4091747 - RNA, 20 nt, Variola virus
agaugccaagauaucuauau

SEQ ID NO: 4091748 - RNA, 16 nt, Variola virus
agaugccgguacuuau

SEQ ID NO: 4091749 - RNA, 20 nt, Variola virus
agaugguggccacaauauau

SEQ ID NO: 4091750 - RNA, 21 nt, Variola virus
aguauccguauaaaaaucgau

SEQ ID NO: 4091751 - RNA, 21 nt, Variola virus
aguaucuagccauaucuaaag

SEQ ID NO: 4091752 - RNA, 18 nt, Variola virus
aguaugaagauaaacacu

SEQ ID NO: 4091753 - RNA, 16 nt, Variola virus
aguaugaauaaucuuc

SEQ ID NO: 4091754 - RNA, 21 nt, Variola virus
aguaugcauuauccaaaauau

SEQ ID NO: 4091755 - RNA, 16 nt, Variola virus
aguauguuugacuuua

SEQ ID NO: 4091756 - RNA, 22 nt, Variola virus
aguauuaucgacguaacuauau

SEQ ID NO: 4091757 - RNA, 16 nt, Variola virus
aguauuccaauaucug

SEQ ID NO: 4091758 - RNA, 15 nt, Variola virus
aguauucuuauguau

SEQ ID NO: 4091759 - RNA, 19 nt, Variola virus
aguauugguaauguacaaa

SEQ ID NO: 4091760 - RNA, 13 nt, Variola virus
aguauuuaacaag

SEQ ID NO: 4091761 - RNA, 14 nt, Variola virus
aguauuuaacaaga

SEQ ID NO: 4091762 - RNA, 20 nt, Variola virus
aguauuuacaauguagaaau

SEQ ID NO: 4091763 - RNA, 18 nt, Variola virus
aguauuuauacuacuaau

SEQ ID NO: 4091764 - RNA, 22 nt, Variola virus
aguauuuauacuuuuaggaaau

SEQ ID NO: 4091765 - RNA, 12 nt, Variola virus
aguauuuucuau

SEQ ID NO: 4091766 - RNA, 21 nt, Variola virus
aguauuuuucaaaaaauguau

SEQ ID NO: 4091767 - RNA, 16 nt, Variola virus
agucaaauauauuaaa

SEQ ID NO: 4091768 - RNA, 15 nt, Variola virus
agucaagauacagaa

SEQ ID NO: 4091769 - RNA, 15 nt, Variola virus
agucaagaugaugaa

SEQ ID NO: 4091770 - RNA, 14 nt, Variola virus
agucaauaaaagag

SEQ ID NO: 4091771 - RNA, 21 nt, Variola virus
gaucauagaacaaaccaaaua

SEQ ID NO: 4091772 - RNA, 18 nt, Variola virus
gauccauuuauaguuaua

SEQ ID NO: 4091773 - RNA, 17 nt, Variola virus
gaucuaaagauaaucuu

SEQ ID NO: 4091774 - RNA, 21 nt, Variola virus
gaucuaacgaggaagaaauuu

SEQ ID NO: 4091775 - RNA, 22 nt, Variola virus
gaucuauucaagaugaaaucgu

SEQ ID NO: 4091776 - RNA, 15 nt, Variola virus
gaucuccaacaaauu

SEQ ID NO: 4091777 - RNA, 14 nt, Variola virus
gaucugaguaauau

SEQ ID NO: 4091778 - RNA, 19 nt, Variola virus
gaugaauuaucguuauuau

SEQ ID NO: 4091779 - RNA, 13 nt, Variola virus
gaugaauuauuau

SEQ ID NO: 4091780 - RNA, 18 nt, Variola virus
gaugaguuaauguauauu

SEQ ID NO: 4091781 - RNA, 16 nt, Variola virus
gaugaugcaacucuau

SEQ ID NO: 4091782 - RNA, 22 nt, Variola virus
gaugauguucuaccuauuucau

SEQ ID NO: 4091783 - RNA, 14 nt, Variola virus
gaugcauaaguaca

SEQ ID NO: 4091784 - RNA, 17 nt, Variola virus
gaugccaucauagauau

SEQ ID NO: 4091785 - RNA, 16 nt, Variola virus
gaugcuauaguauauu

SEQ ID NO: 4091786 - RNA, 18 nt, Variola virus
gaugcugguuauuacaca

SEQ ID NO: 4091787 - RNA, 14 nt, Variola virus
gauggaauuaucau

SEQ ID NO: 4091788 - RNA, 16 nt, Variola virus
gaugguuaaaauuaac

SEQ ID NO: 4091789 - RNA, 22 nt, Variola virus
gaugucauuccuuauacaauca

SEQ ID NO: 4091790 - RNA, 18 nt, Variola virus
gaugucguuauucugaaa

SEQ ID NO: 4091791 - RNA, 22 nt, Variola virus
gaugucugaaacguauucucuu

SEQ ID NO: 4091792 - RNA, 20 nt, Variola virus
gaugugacagacugaccagu

SEQ ID NO: 4091793 - RNA, 15 nt, Variola virus
gauguuauuaugaau

SEQ ID NO: 4091794 - RNA, 13 nt, Variola virus
gauguucauauau

SEQ ID NO: 4091795 - RNA, 21 nt, Variola virus
gauuacggauugguuucuaaa

SEQ ID NO: 4091796 - RNA, 21 nt, Variola virus
gauuagaaaauauaaauuaau

SEQ ID NO: 4091797 - RNA, 14 nt, Variola virus
gauuaguaaauuca

SEQ ID NO: 4091798 - RNA, 14 nt, Variola virus
gauuauacagguua

SEQ ID NO: 4091799 - RNA, 14 nt, Variola virus
gauuauaugauaua

SEQ ID NO: 4091800 - RNA, 11 nt, Variola virus
gauuaucauga

SEQ ID NO: 4091801 - RNA, 15 nt, Variola virus
gauuaucguuuucau

SEQ ID NO: 4091802 - RNA, 17 nt, Variola virus
gauuauuagaucuuuuc

SEQ ID NO: 4091803 - RNA, 14 nt, Variola virus
gauuauucuacuau

SEQ ID NO: 4091804 - RNA, 19 nt, Variola virus
gauucaucaagguauauaa

SEQ ID NO: 4091805 - RNA, 17 nt, Variola virus
gauucauugacauaugu

SEQ ID NO: 4091806 - RNA, 18 nt, Variola virus
gauuccagccacuuggga

SEQ ID NO: 4091807 - RNA, 21 nt, Variola virus
gauucgcaaacuauucuaaua

SEQ ID NO: 4091808 - RNA, 21 nt, Variola virus
gauucucgauagagaugagau

SEQ ID NO: 4091809 - RNA, 20 nt, Variola virus
gauugauccuagaacuagau

SEQ ID NO: 4091810 - RNA, 13 nt, Variola virus
gauugauuagaaa

SEQ ID NO: 4091811 - RNA, 15 nt, Variola virus
gauuguauugguaaa

SEQ ID NO: 4091812 - RNA, 17 nt, Variola virus
gauuuaucauauuucuc

SEQ ID NO: 4091813 - RNA, 21 nt, Variola virus
gauuuccgaaguucagcuucu

SEQ ID NO: 4091814 - RNA, 19 nt, Variola virus
gauuugauacggcuauucu

SEQ ID NO: 4091815 - RNA, 18 nt, Variola virus
gauuuguaucucuuuucu

SEQ ID NO: 4091816 - RNA, 22 nt, Variola virus
gcaaaaauaauaugauuagaag

SEQ ID NO: 4091817 - RNA, 18 nt, Variola virus
gcaaaacauuauaauaau

SEQ ID NO: 4091818 - RNA, 18 nt, Variola virus
gcaaaacuauuauuuuaa

SEQ ID NO: 4091819 - RNA, 14 nt, Variola virus
gcaaaauauaaugu

SEQ ID NO: 4091820 - RNA, 14 nt, Variola virus
gcaaauuaaaucaa

SEQ ID NO: 4091821 - RNA, 15 nt, Variola virus
gcaacaaguauacaa

SEQ ID NO: 4091822 - RNA, 21 nt, Variola virus
gcaaccaccgcaugauaauau

SEQ ID NO: 4091823 - RNA, 19 nt, Variola virus
gcaaccaugaauuuacaga

SEQ ID NO: 4091824 - RNA, 23 nt, Variola virus
gcaacggggaugaugauaaugau

SEQ ID NO: 4091825 - RNA, 17 nt, Variola virus
gcaagagcugauuauuu

SEQ ID NO: 4091826 - RNA, 13 nt, Variola virus
gcaauaauacaac

SEQ ID NO: 4091827 - RNA, 12 nt, Variola virus
gcaaucaugaaa

SEQ ID NO: 4091828 - RNA, 14 nt, Variola virus
gcaaugaauaucua

SEQ ID NO: 4091829 - RNA, 17 nt, Variola virus
gcaaugcgcuggacagu

SEQ ID NO: 4091830 - RNA, 17 nt, Variola virus
gcaauucgcuaaacaau

SEQ ID NO: 4091831 - RNA, 13 nt, Variola virus
gcaauuuucagua

SEQ ID NO: 4091832 - RNA, 22 nt, Variola virus
gcaauuuugugguugauaauca

SEQ ID NO: 4091833 - RNA, 16 nt, Variola virus
gcacauguauaauaua

SEQ ID NO: 4091834 - RNA, 20 nt, Variola virus
gcacuacuguuaagaaugau

SEQ ID NO: 4091835 - RNA, 23 nt, Variola virus
gcacuacuguuaagaaugauuac

SEQ ID NO: 4091836 - RNA, 17 nt, Variola virus
gcacuagguacaucauu

SEQ ID NO: 4091837 - RNA, 22 nt, Variola virus
gcacuguguauuauuuaguuca

SEQ ID NO: 4091838 - RNA, 16 nt, Variola virus
gcagggugcauauuau

SEQ ID NO: 4091839 - RNA, 22 nt, Variola virus
gcaguggaguuauaugaauagu

SEQ ID NO: 4091840 - RNA, 14 nt, Variola virus
gcauaacucuauca

SEQ ID NO: 4091841 - RNA, 12 nt, Variola virus
gcauagaaauac

SEQ ID NO: 4091842 - RNA, 20 nt, Variola virus
gcaucaacaguuacaaauga

SEQ ID NO: 4091843 - RNA, 16 nt, Variola virus
gcaucuaguugauauu

SEQ ID NO: 4091844 - RNA, 16 nt, Variola virus
gcaucuuaauccuucu

SEQ ID NO: 4091845 - RNA, 14 nt, Variola virus
gcaugauagaagau

SEQ ID NO: 4091846 - RNA, 20 nt, Variola virus
gcauuagaugaaaaauggaa

SEQ ID NO: 4091847 - RNA, 18 nt, Variola virus
gcauucgguucuaccaac

SEQ ID NO: 4091848 - RNA, 20 nt, Variola virus
gcauucuaucuuuaagggau

SEQ ID NO: 4091849 - RNA, 15 nt, Variola virus
gcauuggaagcaacu

SEQ ID NO: 4091850 - RNA, 13 nt, Variola virus
gcauuuauacaua

SEQ ID NO: 4091851 - RNA, 16 nt, Variola virus
gccacuauuauugaaa

SEQ ID NO: 4091852 - RNA, 13 nt, Variola virus
gccagaaucaugg

SEQ ID NO: 4091853 - RNA, 19 nt, Variola virus
gccaguccuccuacagauu

SEQ ID NO: 4091854 - RNA, 21 nt, Variola virus
gccauagauuuauaauacuuu

SEQ ID NO: 4091855 - RNA, 17 nt, Variola virus
gccauaucauacaugau

SEQ ID NO: 4091856 - RNA, 23 nt, Variola virus
gccauuuucuaugaacaaaucaa

SEQ ID NO: 4091857 - RNA, 22 nt, Variola virus
gcccaauuuugguguaaaucua

SEQ ID NO: 4091858 - RNA, 14 nt, Variola virus
gcccaucuacaccu

SEQ ID NO: 4091859 - RNA, 13 nt, Variola virus
gccgcaugaugaa

SEQ ID NO: 4091860 - RNA, 17 nt, Variola virus
gccgcuauaaugaugau

SEQ ID NO: 4091861 - RNA, 17 nt, Variola virus
gccgucuuuaucucuua

SEQ ID NO: 4091862 - RNA, 22 nt, Variola virus
gccuaaacccgacuuaguuaua

SEQ ID NO: 4091863 - RNA, 13 nt, Variola virus
gccucaaauguag

SEQ ID NO: 4091864 - RNA, 22 nt, Variola virus
gccuucauaaggaaacuuuugu

SEQ ID NO: 4091865 - RNA, 15 nt, Variola virus
gccuuuuuauacaua

SEQ ID NO: 4091866 - RNA, 12 nt, Variola virus
gcgaacaucuuu

SEQ ID NO: 4091867 - RNA, 12 nt, Variola virus
gcgaauauuaaa

SEQ ID NO: 4091868 - RNA, 19 nt, Variola virus
gcgauaauagauagugcua

SEQ ID NO: 4091869 - RNA, 19 nt, Variola virus
gcgauuguagauaaugaaa

SEQ ID NO: 4091870 - RNA, 21 nt, Variola virus
gcgccuuauauagcacuuuua

SEQ ID NO: 4091871 - RNA, 20 nt, Variola virus
gcggagauaauaucagaaag

SEQ ID NO: 4091872 - RNA, 13 nt, Variola virus
gcggauacaaaac

SEQ ID NO: 4091873 - RNA, 23 nt, Variola virus
gcguauauuuuauacauuuuuua

SEQ ID NO: 4091874 - RNA, 15 nt, Variola virus
gcguaucaaauguaa

SEQ ID NO: 4091875 - RNA, 23 nt, Variola virus
gcguguuuuaaauccuuaauaua

SEQ ID NO: 4091876 - RNA, 22 nt, Variola virus
gcguucauuggaaaauauacca

SEQ ID NO: 4091877 - RNA, 19 nt, Variola virus
gcguuuccuacauaacauc

SEQ ID NO: 4091878 - RNA, 16 nt, Variola virus
gcguuuuaguuauuac

SEQ ID NO: 4091879 - RNA, 14 nt, Variola virus
gcuaaaauauccuc

SEQ ID NO: 4091880 - RNA, 18 nt, Variola virus
gcuaaaucguauauguua

SEQ ID NO: 4091881 - RNA, 13 nt, Variola virus
gcuaaauuuucau

SEQ ID NO: 4091882 - RNA, 12 nt, Variola virus
gcuaacaucaua

SEQ ID NO: 4091883 - RNA, 20 nt, Variola virus
gcuaaguauacgaucuuuua

SEQ ID NO: 4091884 - RNA, 21 nt, Variola virus
gcuaauuccuaguuucaucau

SEQ ID NO: 4091885 - RNA, 15 nt, Variola virus
gcuaauugucuuucu

SEQ ID NO: 4091886 - RNA, 16 nt, Variola virus
gcuaauugucuuucuc

SEQ ID NO: 4091887 - RNA, 21 nt, Variola virus
gcuaauuuuuguaaauaacua

SEQ ID NO: 4091888 - RNA, 22 nt, Variola virus
gcuacacccacuagaaaccacg

SEQ ID NO: 4091889 - RNA, 12 nt, Variola virus
gcuacaguaaaa

SEQ ID NO: 4091890 - RNA, 20 nt, Variola virus
gcuaguuaacuaauaaauaa

SEQ ID NO: 4091891 - RNA, 23 nt, Variola virus
gcuauaauccgauauaugaugaa

SEQ ID NO: 4091892 - RNA, 23 nt, Variola virus
gcuauaugauaaccaacuacaga

SEQ ID NO: 4091893 - RNA, 19 nt, Variola virus
gcuauguuucguccaucau

SEQ ID NO: 4091894 - RNA, 19 nt, Variola virus
gcuauugaaacugacggau

SEQ ID NO: 4091895 - RNA, 12 nt, Variola virus
gcucaaacaaaa

SEQ ID NO: 4091896 - RNA, 15 nt, Variola virus
gcuccaaauauacau

SEQ ID NO: 4091897 - RNA, 21 nt, Variola virus
gcuccuacaggaauaucuuua

SEQ ID NO: 4091898 - RNA, 17 nt, Variola virus
gcucguggauacuuaug

SEQ ID NO: 4091899 - RNA, 23 nt, Variola virus
gcucuacaugcgguaaagauauu

SEQ ID NO: 4091900 - RNA, 15 nt, Variola virus
caucuggauuucaga

SEQ ID NO: 4091901 - RNA, 20 nt, Variola virus
caugagaauggaaaggaaac

SEQ ID NO: 4091902 - RNA, 21 nt, Variola virus
caugaguagcauuaaauuccu

SEQ ID NO: 4091903 - RNA, 14 nt, Variola virus
caugaugagauguu

SEQ ID NO: 4091904 - RNA, 15 nt, Variola virus
caugauuaguauuuu

SEQ ID NO: 4091905 - RNA, 21 nt, Variola virus
caugauucuaucucuaagacg

SEQ ID NO: 4091906 - RNA, 14 nt, Variola virus
caugcucuauuuug

SEQ ID NO: 4091907 - RNA, 15 nt, Variola virus
caugguauauggaua

SEQ ID NO: 4091908 - RNA, 22 nt, Variola virus
caugguaucgauuacaccucua

SEQ ID NO: 4091909 - RNA, 19 nt, Variola virus
cauguaacaauauuacaau

SEQ ID NO: 4091910 - RNA, 18 nt, Variola virus
cauguaugagaaaaacug

SEQ ID NO: 4091911 - RNA, 15 nt, Variola virus
caugucuagaaagaa

SEQ ID NO: 4091912 - RNA, 17 nt, Variola virus
cauguguacuuguacac

SEQ ID NO: 4091913 - RNA, 13 nt, Variola virus
cauguguauuaca

SEQ ID NO: 4091914 - RNA, 13 nt, Variola virus
cauguuaaaaaug

SEQ ID NO: 4091915 - RNA, 13 nt, Variola virus
cauguuggaauag

SEQ ID NO: 4091916 - RNA, 16 nt, Variola virus
cauuaaaaugauuauu

SEQ ID NO: 4091917 - RNA, 21 nt, Variola virus
cauuaacagcuuuaacagaug

SEQ ID NO: 4091918 - RNA, 23 nt, Variola virus
cauuaaguucacuagaauaucca

SEQ ID NO: 4091919 - RNA, 14 nt, Variola virus
cauuaauacaguaa

SEQ ID NO: 4091920 - RNA, 15 nt, Variola virus
cauuaauacaguaag

SEQ ID NO: 4091921 - RNA, 16 nt, Variola virus
cauuaaucuauuagaa

SEQ ID NO: 4091922 - RNA, 16 nt, Variola virus
cauuaauuaauacaau

SEQ ID NO: 4091923 - RNA, 14 nt, Variola virus
cauuaauuauaacg

SEQ ID NO: 4091924 - RNA, 21 nt, Variola virus
cauuaauuucugauauggaau

SEQ ID NO: 4091925 - RNA, 15 nt, Variola virus
cauuacgcucucugg

SEQ ID NO: 4091926 - RNA, 19 nt, Variola virus
cauuaggaaucuauccaau

SEQ ID NO: 4091927 - RNA, 15 nt, Variola virus
cauuagguuaaauga

SEQ ID NO: 4091928 - RNA, 16 nt, Variola virus
cauuaguaaggcuuua

SEQ ID NO: 4091929 - RNA, 14 nt, Variola virus
cauuauaaaaagug

SEQ ID NO: 4091930 - RNA, 20 nt, Variola virus
cauuauagauguguauacau

SEQ ID NO: 4091931 - RNA, 15 nt, Variola virus
cauuaucaaaaagaa

SEQ ID NO: 4091932 - RNA, 15 nt, Variola virus
cauuauuaacaaauu

SEQ ID NO: 4091933 - RNA, 19 nt, Variola virus
cauuauuacauagauguau

SEQ ID NO: 4091934 - RNA, 16 nt, Variola virus
cauuauuuuauuguga

SEQ ID NO: 4091935 - RNA, 17 nt, Variola virus
cauucaaccauucauaa

SEQ ID NO: 4091936 - RNA, 11 nt, Variola virus
cauucaugaaa

SEQ ID NO: 4091937 - RNA, 12 nt, Variola virus
cauuccaaagau

SEQ ID NO: 4091938 - RNA, 15 nt, Variola virus
cauuccauuguacaa

SEQ ID NO: 4091939 - RNA, 19 nt, Variola virus
cauuccuaccaaacaaaau

SEQ ID NO: 4091940 - RNA, 23 nt, Variola virus
cauucgacucaguauacaaaaau

SEQ ID NO: 4091941 - RNA, 17 nt, Variola virus
cauucugcaauauuguu

SEQ ID NO: 4091942 - RNA, 21 nt, Variola virus
cauugacggauaaaacaaaaa

SEQ ID NO: 4091943 - RNA, 22 nt, Variola virus
cauugacggauaaaacaaaaau

SEQ ID NO: 4091944 - RNA, 18 nt, Variola virus
cauugagugauaaacuug

SEQ ID NO: 4091945 - RNA, 20 nt, Variola virus
cauuguaugguuuuaaauau

SEQ ID NO: 4091946 - RNA, 21 nt, Variola virus
cauugucuaauagauauuuga

SEQ ID NO: 4091947 - RNA, 15 nt, Variola virus
cauuguuauguauuu

SEQ ID NO: 4091948 - RNA, 21 nt, Variola virus
cauuuagauagucacauuuca

SEQ ID NO: 4091949 - RNA, 13 nt, Variola virus
cauuuauacauau

SEQ ID NO: 4091950 - RNA, 22 nt, Variola virus
cauuuaucgacuaaucaaaaaa

SEQ ID NO: 4091951 - RNA, 21 nt, Variola virus
cauuuccaaaucuaacuucua

SEQ ID NO: 4091952 - RNA, 14 nt, Variola virus
cauuuccaugucaa

SEQ ID NO: 4091953 - RNA, 17 nt, Variola virus
cauuucucaaaugaaua

SEQ ID NO: 4091954 - RNA, 20 nt, Variola virus
cauuuggagaguauccucua

SEQ ID NO: 4091955 - RNA, 13 nt, Variola virus
cauuuuacauuau

SEQ ID NO: 4091956 - RNA, 20 nt, Variola virus
cauuuucccaaauaucuuua

SEQ ID NO: 4091957 - RNA, 12 nt, Variola virus
cauuuuuaggau

SEQ ID NO: 4091958 - RNA, 16 nt, Variola virus
ccaaacaauguuucua

SEQ ID NO: 4091959 - RNA, 21 nt, Variola virus
ccaaacuuagaaccaaaugau

SEQ ID NO: 4091960 - RNA, 15 nt, Variola virus
ccaaaggauguuuaa

SEQ ID NO: 4091961 - RNA, 21 nt, Variola virus
ccaaaucaguaacuauguuca

SEQ ID NO: 4091962 - RNA, 12 nt, Variola virus
ccaaaugaugau

SEQ ID NO: 4091963 - RNA, 14 nt, Variola virus
ccaaauuaaugaau

SEQ ID NO: 4091964 - RNA, 18 nt, Variola virus
ccaacguaguaucaucuu

SEQ ID NO: 4091965 - RNA, 17 nt, Variola virus
ccaacucauuuaaauau

SEQ ID NO: 4091966 - RNA, 15 nt, Variola virus
ccaacugauuaauaa

SEQ ID NO: 4091967 - RNA, 13 nt, Variola virus
ccaacuguagacg

SEQ ID NO: 4091968 - RNA, 18 nt, Variola virus
ccaagaaacagucagcug

SEQ ID NO: 4091969 - RNA, 13 nt, Variola virus
ccaagacacauau

SEQ ID NO: 4091970 - RNA, 15 nt, Variola virus
caagcgauucuuuca

SEQ ID NO: 4091971 - RNA, 22 nt, Variola virus
caaggcuuuaauaucuaaauau

SEQ ID NO: 4091972 - RNA, 16 nt, Variola virus
caaguaacaacaaaaa

SEQ ID NO: 4091973 - RNA, 23 nt, Variola virus
caaguaauacgugagaauauacu

SEQ ID NO: 4091974 - RNA, 16 nt, Variola virus
caagucccaaauggag

SEQ ID NO: 4091975 - RNA, 23 nt, Variola virus
caagucuucaguucuaucuucua

SEQ ID NO: 4091976 - RNA, 19 nt, Variola virus
caagugaaccuauaaugag

SEQ ID NO: 4091977 - RNA, 12 nt, Variola virus
caaguuaaauag

SEQ ID NO: 4091978 - RNA, 19 nt, Variola virus
caauaaaaaaguuaagaau

SEQ ID NO: 4091979 - RNA, 17 nt, Variola virus
caauaaaacauuuccua

SEQ ID NO: 4091980 - RNA, 13 nt, Variola virus
caauaaacaaaau

SEQ ID NO: 4091981 - RNA, 14 nt, Variola virus
caauaaacauagua

SEQ ID NO: 4091982 - RNA, 21 nt, Variola virus
caauaacuaauggcaaaugua

SEQ ID NO: 4091983 - RNA, 15 nt, Variola virus
caauaauaguaacau

SEQ ID NO: 4091984 - RNA, 15 nt, Variola virus
caauaauauacuaau

SEQ ID NO: 4091985 - RNA, 16 nt, Variola virus
caauaauauacuaauu

SEQ ID NO: 4091986 - RNA, 23 nt, Variola virus
caauagagaccgcgucuguuaua

SEQ ID NO: 4091987 - RNA, 20 nt, Variola virus
caauauaaucgcuucaucau

SEQ ID NO: 4091988 - RNA, 15 nt, Variola virus
caauauauauacagu

SEQ ID NO: 4091989 - RNA, 21 nt, Variola virus
caauaugccacaccaucuuca

SEQ ID NO: 4091990 - RNA, 19 nt, Variola virus
caauauguaucguauucua

SEQ ID NO: 4091991 - RNA, 15 nt, Variola virus
caauauuguagaauu

SEQ ID NO: 4091992 - RNA, 19 nt, Variola virus
caaucaaaagacuauacau

SEQ ID NO: 4091993 - RNA, 16 nt, Variola virus
caaucuagcauuucua

SEQ ID NO: 4091994 - RNA, 20 nt, Variola virus
caaucugggcguauaaugaa

SEQ ID NO: 4091995 - RNA, 14 nt, Variola virus
caaucuuauaucuu

SEQ ID NO: 4091996 - RNA, 20 nt, Variola virus
caaugaacaagauuaaucuc

SEQ ID NO: 4091997 - RNA, 17 nt, Variola virus
caaugaacuaauaugau

SEQ ID NO: 4091998 - RNA, 12 nt, Variola virus
caaugaguaaaa

SEQ ID NO: 4091999 - RNA, 20 nt, Variola virus
caaugauuucaaggauguca

SEQ ID NO: 4092000 - RNA, 16 nt, Variola virus
caauguaaaguaucua

SEQ ID NO: 4092001 - RNA, 19 nt, Variola virus
caauguauuuauaucugau

SEQ ID NO: 4092002 - RNA, 12 nt, Variola virus
caauuaaaucaa

SEQ ID NO: 4092003 - RNA, 12 nt, Variola virus
caauuaaaucau

SEQ ID NO: 4092004 - RNA, 23 nt, Variola virus
caauuaguagaguuuuauaacga

SEQ ID NO: 4092005 - RNA, 18 nt, Variola virus
caauuaguuaauaaugau

SEQ ID NO: 4092006 - RNA, 15 nt, Variola virus
caauucaugcucuau

SEQ ID NO: 4092007 - RNA, 20 nt, Variola virus
caauucauguuuaaaaugau

SEQ ID NO: 4092008 - RNA, 17 nt, Variola virus
caauucuaaucacuuua

SEQ ID NO: 4092009 - RNA, 20 nt, Variola virus
caauugcauucccaucauuu

SEQ ID NO: 4092010 - RNA, 21 nt, Variola virus
caauugcauucccaucauuuc

SEQ ID NO: 4092011 - RNA, 19 nt, Variola virus
caauuguuugauauauaau

SEQ ID NO: 4092012 - RNA, 16 nt, Variola virus
caauuuagcugcauua

SEQ ID NO: 4092013 - RNA, 19 nt, Variola virus
caauuuauacggauuucua

SEQ ID NO: 4092014 - RNA, 15 nt, Variola virus
caauuucauaaugag

SEQ ID NO: 4092015 - RNA, 23 nt, Variola virus
caauuugcucccgccgauccugu

SEQ ID NO: 4092016 - RNA, 13 nt, Variola virus
caauuuguuaaua

SEQ ID NO: 4092017 - RNA, 18 nt, Variola virus
caauuuugauguauaaca

SEQ ID NO: 4092018 - RNA, 18 nt, Variola virus
cacaacaauuuauuucua

SEQ ID NO: 4092019 - RNA, 14 nt, Variola virus
cacaaucaugauuu

SEQ ID NO: 4092020 - RNA, 11 nt, Variola virus
cacaaugaaua

SEQ ID NO: 4092021 - RNA, 17 nt, Variola virus
cacaaugauaacaucca

SEQ ID NO: 4092022 - RNA, 14 nt, Variola virus
cacacuaaacaguu

SEQ ID NO: 4092023 - RNA, 19 nt, Variola virus
cacagcgaagaauucuaga

SEQ ID NO: 4092024 - RNA, 21 nt, Variola virus
cacaggauuuccaaucuuuug

SEQ ID NO: 4092025 - RNA, 12 nt, Variola virus
cacauaaaagaa

SEQ ID NO: 4092026 - RNA, 15 nt, Variola virus
cacauaauuauucua

SEQ ID NO: 4092027 - RNA, 21 nt, Variola virus
cacauccuuuauuuuaucuau

SEQ ID NO: 4092028 - RNA, 11 nt, Variola virus
cacaugaugau

SEQ ID NO: 4092029 - RNA, 15 nt, Variola virus
cacauuuaugauaug

SEQ ID NO: 4092030 - RNA, 23 nt, Variola virus
caccgagggaaaaucuaaaguug

SEQ ID NO: 4092031 - RNA, 18 nt, Variola virus
caccucuaccgaauagag

SEQ ID NO: 4092032 - RNA, 17 nt, Variola virus
cacgaauauuacuaauu

SEQ ID NO: 4092033 - RNA, 15 nt, Variola virus
cacgagaacuauuaa

SEQ ID NO: 4092034 - RNA, 13 nt, Variola virus
cacgauauggaug

SEQ ID NO: 4092035 - RNA, 16 nt, Variola virus
cacuaacuguaucaau

SEQ ID NO: 4092036 - RNA, 19 nt, Variola virus
cacuaaucauaauauucua

SEQ ID NO: 4092037 - RNA, 13 nt, Variola virus
cacuagaugauuu

SEQ ID NO: 4092038 - RNA, 13 nt, Variola virus
gcucuacgaauau

SEQ ID NO: 4092039 - RNA, 22 nt, Variola virus
gcucucguacaguagagauauu

SEQ ID NO: 4092040 - RNA, 18 nt, Variola virus
gcucuguaaagcauauuc

SEQ ID NO: 4092041 - RNA, 13 nt, Variola virus
gcucuuaaacgac

SEQ ID NO: 4092042 - RNA, 16 nt, Variola virus
gcugaaugaucuuuuu

SEQ ID NO: 4092043 - RNA, 21 nt, Variola virus
gcugagaauaucuuuauucau

SEQ ID NO: 4092044 - RNA, 22 nt, Variola virus
gcugcuggaucuaaauauuuua

SEQ ID NO: 4092045 - RNA, 16 nt, Variola virus
gcugucacucauaaau

SEQ ID NO: 4092046 - RNA, 15 nt, Variola virus
gcuguggaaauuaaa

SEQ ID NO: 4092047 - RNA, 14 nt, Variola virus
gcuuaauaaauguu

SEQ ID NO: 4092048 - RNA, 17 nt, Variola virus
gcuuacauguauuaaag

SEQ ID NO: 4092049 - RNA, 20 nt, Variola virus
gcuuagcuaauccugauauu

SEQ ID NO: 4092050 - RNA, 23 nt, Variola virus
gcuuuuauuuuuggaauaaucuc

SEQ ID NO: 4092051 - RNA, 14 nt, Variola virus
gcuuuucucuuuua

SEQ ID NO: 4092052 - RNA, 16 nt, Variola virus
ggaaaaauaacaaauc

SEQ ID NO: 4092053 - RNA, 12 nt, Variola virus
ggaaaaugaaaa

SEQ ID NO: 4092054 - RNA, 11 nt, Variola virus
ggaaacuauaa

SEQ ID NO: 4092055 - RNA, 16 nt, Variola virus
ggaaacuuucuagaac

SEQ ID NO: 4092056 - RNA, 17 nt, Variola virus
ggaaacuuuuguuuugu

SEQ ID NO: 4092057 - RNA, 16 nt, Variola virus
ggaaccucgagaaugu

SEQ ID NO: 4092058 - RNA, 20 nt, Variola virus
ggaaguagaaucauaaagaa

SEQ ID NO: 4092059 - RNA, 17 nt, Variola virus
ggaauauauuuggauuu

SEQ ID NO: 4092060 - RNA, 19 nt, Variola virus
ggaaugccacgaauaaaaa

SEQ ID NO: 4092061 - RNA, 11 nt, Variola virus
ggaauugauuu

SEQ ID NO: 4092062 - RNA, 13 nt, Variola virus
ggaauuuuaucga

SEQ ID NO: 4092063 - RNA, 16 nt, Variola virus
ggacaacauguuacua

SEQ ID NO: 4092064 - RNA, 21 nt, Variola virus
ggacagauacuacuauuuguc

SEQ ID NO: 4092065 - RNA, 22 nt, Variola virus
ggaccacauccuucuucaucaa

SEQ ID NO: 4092066 - RNA, 22 nt, Variola virus
ggagaugaugcuaaaaaauaua

SEQ ID NO: 4092067 - RNA, 23 nt, Variola virus
ggaguacccacugaugagauguu

SEQ ID NO: 4092068 - RNA, 13 nt, Variola virus
ggaguuagaaaac

SEQ ID NO: 4092069 - RNA, 16 nt, Variola virus
ggaucuccuauuucuu

SEQ ID NO: 4092070 - RNA, 17 nt, Variola virus
ggaugaguuaauguaua

SEQ ID NO: 4092071 - RNA, 17 nt, Variola virus
ggauuacaagaaauaug

SEQ ID NO: 4092072 - RNA, 10 nt, Variola virus
ggauuacuua

SEQ ID NO: 4092073 - RNA, 21 nt, Variola virus
ggauugguuucuaaauucaug

SEQ ID NO: 4092074 - RNA, 20 nt, Variola virus
ggauuugguaagacuauuac

SEQ ID NO: 4092075 - RNA, 11 nt, Variola virus
ggcaaauuguc

SEQ ID NO: 4092076 - RNA, 22 nt, Variola virus
ggcauacucguccgauuucaua

SEQ ID NO: 4092077 - RNA, 20 nt, Variola virus
ggccuguucauaaauaaaaa

SEQ ID NO: 4092078 - RNA, 20 nt, Variola virus
ggcggaguaaguguugagcu

SEQ ID NO: 4092079 - RNA, 22 nt, Variola virus
ggcuaauugucuuucucuuuua

SEQ ID NO: 4092080 - RNA, 21 nt, Variola virus
ggguauuuaucaauaaacaau

SEQ ID NO: 4092081 - RNA, 18 nt, Variola virus
ggguuguuacgaugauga

SEQ ID NO: 4092082 - RNA, 21 nt, Variola virus
gguaauacgcucaucaaguac

SEQ ID NO: 4092083 - RNA, 20 nt, Variola virus
gguacauacgucuauuucua

SEQ ID NO: 4092084 - RNA, 16 nt, Variola virus
gguagacauagauauu

SEQ ID NO: 4092085 - RNA, 19 nt, Variola virus
gguagaccguuaaugaaga

SEQ ID NO: 4092086 - RNA, 21 nt, Variola virus
gguagauuuguucuauagagc

SEQ ID NO: 4092087 - RNA, 16 nt, Variola virus
gguaugggauaaaaua

SEQ ID NO: 4092088 - RNA, 20 nt, Variola virus
ggucaguuuaugauugauuu

SEQ ID NO: 4092089 - RNA, 16 nt, Variola virus
ggucauaacaaguuuc

SEQ ID NO: 4092090 - RNA, 20 nt, Variola virus
ggucauauuauagauuuaau

SEQ ID NO: 4092091 - RNA, 23 nt, Variola virus
ggucgucgauaacaaauuaaaga

SEQ ID NO: 4092092 - RNA, 15 nt, Variola virus
ggucuaucaauaacu

SEQ ID NO: 4092093 - RNA, 16 nt, Variola virus
ggucuucggaaaaaga

SEQ ID NO: 4092094 - RNA, 16 nt, Variola virus
ggugagaacaugagac

SEQ ID NO: 4092095 - RNA, 11 nt, Variola virus
gguguauauaa

SEQ ID NO: 4092096 - RNA, 16 nt, Variola virus
gguucgauauaaagga

SEQ ID NO: 4092097 - RNA, 15 nt, Variola virus
gguucuuuaaaagaa

SEQ ID NO: 4092098 - RNA, 17 nt, Variola virus
gguugcagaauauagac

SEQ ID NO: 4092099 - RNA, 18 nt, Variola virus
gguuucggaacauauucu

SEQ ID NO: 4092100 - RNA, 15 nt, Variola virus
guaaaacauaaagga

SEQ ID NO: 4092101 - RNA, 16 nt, Variola virus
guaaaacucauuacuu

SEQ ID NO: 4092102 - RNA, 19 nt, Variola virus
guaaaaugaaauaucuuaa

SEQ ID NO: 4092103 - RNA, 22 nt, Variola virus
guaaacauuauaucguuaucau

SEQ ID NO: 4092104 - RNA, 22 nt, Variola virus
guaaaccgauaguguauaaaga

SEQ ID NO: 4092105 - RNA, 21 nt, Variola virus
guaaacuguugaugauaucua

SEQ ID NO: 4092106 - RNA, 12 nt, Variola virus
guaaagaaggag

SEQ ID NO: 4092107 - RNA, 15 nt, Variola virus
guaaagauauuucuc

SEQ ID NO: 4092108 - RNA, 14 nt, Variola virus
guaaauaauaauau

SEQ ID NO: 4092109 - RNA, 14 nt, Variola virus
guaaaugauaacua

SEQ ID NO: 4092110 - RNA, 22 nt, Variola virus
guaacguuuauauauucaauau

SEQ ID NO: 4092111 - RNA, 13 nt, Variola virus
guaaguacaucau

SEQ ID NO: 4092112 - RNA, 14 nt, Variola virus
guaaguacaucauc

SEQ ID NO: 4092113 - RNA, 11 nt, Variola virus
guaaguuuauu

SEQ ID NO: 4092114 - RNA, 19 nt, Variola virus
guaauaaaauuucuauucc

SEQ ID NO: 4092115 - RNA, 19 nt, Variola virus
guaauacgaucuauaaaaa

SEQ ID NO: 4092116 - RNA, 15 nt, Variola virus
guaauacuuuuaguu

SEQ ID NO: 4092117 - RNA, 22 nt, Variola virus
guaauagaauacgaugauauua

SEQ ID NO: 4092118 - RNA, 19 nt, Variola virus
guaaucauguaaauguuua

SEQ ID NO: 4092119 - RNA, 16 nt, Variola virus
guaauuauagaugaau

SEQ ID NO: 4092120 - RNA, 15 nt, Variola virus
guacaauauguguua

SEQ ID NO: 4092121 - RNA, 19 nt, Variola virus
guacagaaaauaucauguu

SEQ ID NO: 4092122 - RNA, 19 nt, Variola virus
guacauacgucuauuucua

SEQ ID NO: 4092123 - RNA, 12 nt, Variola virus
guacauacuaga

SEQ ID NO: 4092124 - RNA, 17 nt, Variola virus
guacauuauuacauaga

SEQ ID NO: 4092125 - RNA, 16 nt, Variola virus
guacauuucacagaaa

SEQ ID NO: 4092126 - RNA, 22 nt, Variola virus
guacuaaauucaauaucuuuuu

SEQ ID NO: 4092127 - RNA, 21 nt, Variola virus
guacuaacuuuugauuuuaac

SEQ ID NO: 4092128 - RNA, 20 nt, Variola virus
guacuucucccauaauacuu

SEQ ID NO: 4092129 - RNA, 19 nt, Variola virus
guagaucaaacuuaaauaa

SEQ ID NO: 4092130 - RNA, 17 nt, Variola virus
guagcaaagaaauuaau

SEQ ID NO: 4092131 - RNA, 20 nt, Variola virus
guagcugaauguuauaaaaa

SEQ ID NO: 4092132 - RNA, 13 nt, Variola virus
guaguauugauuc

SEQ ID NO: 4092133 - RNA, 20 nt, Variola virus
guagucaaugaaacauuuga

SEQ ID NO: 4092134 - RNA, 14 nt, Variola virus
guaguucuauaauc

SEQ ID NO: 4092135 - RNA, 19 nt, Variola virus
guaguucuguucuaucauc

SEQ ID NO: 4092136 - RNA, 12 nt, Variola virus
guauaauagacc

SEQ ID NO: 4092137 - RNA, 20 nt, Variola virus
guauaaucaauucuaaucac

SEQ ID NO: 4092138 - RNA, 16 nt, Variola virus
guauaaucuuuaacaa

SEQ ID NO: 4092139 - RNA, 20 nt, Variola virus
guauacacaaaaagaaagaa

SEQ ID NO: 4092140 - RNA, 21 nt, Variola virus
guauaccuuuccaguauauga

SEQ ID NO: 4092141 - RNA, 13 nt, Variola virus
guauacuuuuuaa

SEQ ID NO: 4092142 - RNA, 19 nt, Variola virus
guauagaacacaugucuua

SEQ ID NO: 4092143 - RNA, 20 nt, Variola virus
guauagauccuccaguaaau

SEQ ID NO: 4092144 - RNA, 15 nt, Variola virus
guauauaaauacuuu

SEQ ID NO: 4092145 - RNA, 21 nt, Variola virus
guauauacuauuauagaucaa

SEQ ID NO: 4092146 - RNA, 17 nt, Variola virus
guauauacuuagauaua

SEQ ID NO: 4092147 - RNA, 13 nt, Variola virus
guauauagauaug

SEQ ID NO: 4092148 - RNA, 18 nt, Variola virus
guauaucgcagaugaaac

SEQ ID NO: 4092149 - RNA, 14 nt, Variola virus
guauaugaguaaau

SEQ ID NO: 4092150 - RNA, 15 nt, Variola virus
guauauucucuaguu

SEQ ID NO: 4092151 - RNA, 20 nt, Variola virus
guauauuuuagguacuuaug

SEQ ID NO: 4092152 - RNA, 16 nt, Variola virus
guaucaagaauaucca

SEQ ID NO: 4092153 - RNA, 22 nt, Variola virus
guaucaaucaagaggauggaau

SEQ ID NO: 4092154 - RNA, 16 nt, Variola virus
guaucauaauauuaau

SEQ ID NO: 4092155 - RNA, 20 nt, Variola virus
guaucaucgucuaguuuauc

SEQ ID NO: 4092156 - RNA, 22 nt, Variola virus
guaucaucucuacauuguuuac

SEQ ID NO: 4092157 - RNA, 19 nt, Variola virus
guaucgcccuaauauuauu

SEQ ID NO: 4092158 - RNA, 24 nt, Variola virus
guaucgcuggaagggacuauauga

SEQ ID NO: 4092159 - RNA, 22 nt, Variola virus
guaucucuaccuaugauuaaau

SEQ ID NO: 4092160 - RNA, 22 nt, Variola virus
guaugccauuuacuuaauauga

SEQ ID NO: 4092161 - RNA, 15 nt, Variola virus
guaugucuuauguau

SEQ ID NO: 4092162 - RNA, 18 nt, Variola virus
guauuaccguuaacuaca

SEQ ID NO: 4092163 - RNA, 21 nt, Variola virus
guauuacgaagaagacaauga

SEQ ID NO: 4092164 - RNA, 13 nt, Variola virus
guauuagauaaau

SEQ ID NO: 4092165 - RNA, 17 nt, Variola virus
guauuauaauauacaua

SEQ ID NO: 4092166 - RNA, 14 nt, Variola virus
guauuaugaugaau

SEQ ID NO: 4092167 - RNA, 14 nt, Variola virus
guauucaauuacua

SEQ ID NO: 4092168 - RNA, 15 nt, Variola virus
guauuccauauggau

SEQ ID NO: 4092169 - RNA, 21 nt, Variola virus
guauucuauaccaauauuauu

SEQ ID NO: 4092170 - RNA, 21 nt, Variola virus
guauuucucuacaauauuaau

SEQ ID NO: 4092171 - RNA, 15 nt, Variola virus
guauuugauaaaaca

SEQ ID NO: 4092172 - RNA, 20 nt, Variola virus
guauuuuugacguaaaugug

SEQ ID NO: 4092173 - RNA, 15 nt, Variola virus
guauuuuuuaugaca

SEQ ID NO: 4092174 - RNA, 18 nt, Variola virus
gucaaacuuaauaaagga

SEQ ID NO: 4092175 - RNA, 13 nt, Variola virus
gucaaagaaauac

SEQ ID NO: 4092176 - RNA, 18 nt, Variola virus
gucaaugauaugauuuuu

SEQ ID NO: 4092177 - RNA, 19 nt, Variola virus
gucaauuacgaauaaagcg

SEQ ID NO: 4092178 - RNA, 20 nt, Variola virus
gucaauucccuccuguagua

SEQ ID NO: 4092179 - RNA, 20 nt, Variola virus
gucacauacuuuguaaucua

SEQ ID NO: 4092180 - RNA, 14 nt, Variola virus
gucacuauuaaaga

SEQ ID NO: 4092181 - RNA, 18 nt, Variola virus
gucagaucguauaaucua

SEQ ID NO: 4092182 - RNA, 15 nt, Variola virus
gucagcaucagcauu

SEQ ID NO: 4092183 - RNA, 23 nt, Variola virus
gucauaacaaauguauacuaucu

SEQ ID NO: 4092184 - RNA, 22 nt, Variola virus
gucauacuccaucaauuucaaa

SEQ ID NO: 4092185 - RNA, 23 nt, Variola virus
gucaucaaguaguagugauuuug

SEQ ID NO: 4092186 - RNA, 14 nt, Variola virus
gucauccuucacuc

SEQ ID NO: 4092187 - RNA, 18 nt, Variola virus
gucaucuccagaggaaau

SEQ ID NO: 4092188 - RNA, 22 nt, Variola virus
gucaucuuauguuuuuaagaga

SEQ ID NO: 4092189 - RNA, 14 nt, Variola virus
gucauuauauacuc

SEQ ID NO: 4092190 - RNA, 18 nt, Variola virus
gucauuccuuauacaauc

SEQ ID NO: 4092191 - RNA, 17 nt, Variola virus
guccaacgcuuggcuga

SEQ ID NO: 4092192 - RNA, 21 nt, Variola virus
guccauuaaaguuaaauugug

SEQ ID NO: 4092193 - RNA, 13 nt, Variola virus
gucccaauguuuc

SEQ ID NO: 4092194 - RNA, 21 nt, Variola virus
guccgauaacguuagccacca

SEQ ID NO: 4092195 - RNA, 13 nt, Variola virus
guccguacuuauu

SEQ ID NO: 4092196 - RNA, 15 nt, Variola virus
guccuuagcuauaau

SEQ ID NO: 4092197 - RNA, 14 nt, Variola virus
gucgauaacaaauu

SEQ ID NO: 4092198 - RNA, 23 nt, Variola virus
gucgcaacgggguaguucguaga

SEQ ID NO: 4092199 - RNA, 19 nt, Variola virus
gucggcauaggugccacca

SEQ ID NO: 4092200 - RNA, 16 nt, Variola virus
gucguccaauauuuua

SEQ ID NO: 4092201 - RNA, 18 nt, Variola virus
gucgucuuuugaucuuua

SEQ ID NO: 4092202 - RNA, 18 nt, Variola virus
gucguguuuuauuaauca

SEQ ID NO: 4092203 - RNA, 21 nt, Variola virus
gucuaaauuccauagcauauu

SEQ ID NO: 4092204 - RNA, 22 nt, Variola virus
gucuacaaauagagauaaaaca

SEQ ID NO: 4092205 - RNA, 12 nt, Variola virus
gucuagaaauaa

SEQ ID NO: 4092206 - RNA, 20 nt, Variola virus
gucuagcaaugaucuaaauu

SEQ ID NO: 4092207 - RNA, 15 nt, Variola virus
gucuagccacagaaa

SEQ ID NO: 4092208 - RNA, 18 nt, Variola virus
gucuaguaaguagaaauu

SEQ ID NO: 4092209 - RNA, 20 nt, Variola virus
gucuaguaaguagaaauuau

SEQ ID NO: 4092210 - RNA, 23 nt, Variola virus
gucuaugucucuuauuagagauu

SEQ ID NO: 4092211 - RNA, 23 nt, Variola virus
gucuauuguuaaucaugccacca

SEQ ID NO: 4092212 - RNA, 22 nt, Variola virus
gucucaugaccguguaugaaau

SEQ ID NO: 4092213 - RNA, 19 nt, Variola virus
gucucauuucuaucuguuu

SEQ ID NO: 4092214 - RNA, 15 nt, Variola virus
gucuccaucggcuuu

SEQ ID NO: 4092215 - RNA, 16 nt, Variola virus
gucucuauaaaaauga

SEQ ID NO: 4092216 - RNA, 19 nt, Variola virus
gucucuuccgcagauaaau

SEQ ID NO: 4092217 - RNA, 16 nt, Variola virus
gucuggcaauaaauga

SEQ ID NO: 4092218 - RNA, 16 nt, Variola virus
gucugucaaaucaucu

SEQ ID NO: 4092219 - RNA, 23 nt, Variola virus
gucuuauucuuaaaaucuauucc

SEQ ID NO: 4092220 - RNA, 14 nt, Variola virus
gucuuggaagcaau

SEQ ID NO: 4092221 - RNA, 18 nt, Variola virus
gucuuuuauaguauauac

SEQ ID NO: 4092222 - RNA, 23 nt, Variola virus
gugaaauacuuuauuacuccauu

SEQ ID NO: 4092223 - RNA, 14 nt, Variola virus
gugaauaauguuuc

SEQ ID NO: 4092224 - RNA, 22 nt, Variola virus
gugaguuugaauuuucuacauc

SEQ ID NO: 4092225 - RNA, 15 nt, Variola virus
gugaguuuuccuuaa

SEQ ID NO: 4092226 - RNA, 19 nt, Variola virus
gugauaucaaauggauauu

SEQ ID NO: 4092227 - RNA, 14 nt, Variola virus
gugaucaucuucau

SEQ ID NO: 4092228 - RNA, 18 nt, Variola virus
gugauguuacggauaucu

SEQ ID NO: 4092229 - RNA, 19 nt, Variola virus
gugcacuuuuuuauaaaga

SEQ ID NO: 4092230 - RNA, 17 nt, Variola virus
gugcagaagcucuggcu

SEQ ID NO: 4092231 - RNA, 21 nt, Variola virus
gugcauaauaaaguauaugua

SEQ ID NO: 4092232 - RNA, 19 nt, Variola virus
gugccaaaaugauauacag

SEQ ID NO: 4092233 - RNA, 18 nt, Variola virus
gugcucaagcuaaacaag

SEQ ID NO: 4092234 - RNA, 17 nt, Variola virus
gugcugaggucuuucaa

SEQ ID NO: 4092235 - RNA, 20 nt, Variola virus
gugcugucaaacaaaaacuu

SEQ ID NO: 4092236 - RNA, 14 nt, Variola virus
gugguguaaucuua

SEQ ID NO: 4092237 - RNA, 14 nt, Variola virus
guguagaagaucaa

SEQ ID NO: 4092238 - RNA, 19 nt, Variola virus
guguagcguuuuaaauauu

SEQ ID NO: 4092239 - RNA, 20 nt, Variola virus
guguaguucuguucuaucau

SEQ ID NO: 4092240 - RNA, 18 nt, Variola virus
guguauaacaaucuuaua

SEQ ID NO: 4092241 - RNA, 17 nt, Variola virus
guguaucgacaucuuua

SEQ ID NO: 4092242 - RNA, 22 nt, Variola virus
guguauuaccccucauaguauu

SEQ ID NO: 4092243 - RNA, 12 nt, Variola virus
guguauuaucau

SEQ ID NO: 4092244 - RNA, 19 nt, Variola virus
guguauuuuugacguaaau

SEQ ID NO: 4092245 - RNA, 22 nt, Variola virus
gugucuuaucucguccuugguu

SEQ ID NO: 4092246 - RNA, 13 nt, Variola virus
guguuuaaucuuc

SEQ ID NO: 4092247 - RNA, 21 nt, Variola virus
guuaaacuuggggauaaugau

SEQ ID NO: 4092248 - RNA, 21 nt, Variola virus
guuaaauaaauccuucaucac

SEQ ID NO: 4092249 - RNA, 16 nt, Variola virus
guuaagagaaauuaga

SEQ ID NO: 4092250 - RNA, 16 nt, Variola virus
guuaagccugaauuua

SEQ ID NO: 4092251 - RNA, 22 nt, Variola virus
guuaauaguuggaauaaauaga

SEQ ID NO: 4092252 - RNA, 23 nt, Variola virus
guuaauauagacaauucuuuugu

SEQ ID NO: 4092253 - RNA, 15 nt, Variola virus
guuaaugaacaaauc

SEQ ID NO: 4092254 - RNA, 16 nt, Variola virus
guuaaugagguaggaa

SEQ ID NO: 4092255 - RNA, 21 nt, Variola virus
guuaauuauuucuaacauuga

SEQ ID NO: 4092256 - RNA, 21 nt, Variola virus
guuaauugucuauaaauuaga

SEQ ID NO: 4092257 - RNA, 15 nt, Variola virus
guuaauuucuauuca

SEQ ID NO: 4092258 - RNA, 16 nt, Variola virus
guuacaauuuuaucau

SEQ ID NO: 4092259 - RNA, 21 nt, Variola virus
guuacuaacgugauuauuauu

SEQ ID NO: 4092260 - RNA, 10 nt, Variola virus
guuacuaucg

SEQ ID NO: 4092261 - RNA, 17 nt, Variola virus
guuagaagucuuaaaaa

SEQ ID NO: 4092262 - RNA, 15 nt, Variola virus
guuagagacaaaaga

SEQ ID NO: 4092263 - RNA, 19 nt, Variola virus
guuagauaacucugcucca

SEQ ID NO: 4092264 - RNA, 22 nt, Variola virus
guuagauauuuagcaauugcau

SEQ ID NO: 4092265 - RNA, 22 nt, Variola virus
guuauaaccuuaauauaauaga

SEQ ID NO: 4092266 - RNA, 17 nt, Variola virus
guuauacagauguauua

SEQ ID NO: 4092267 - RNA, 19 nt, Variola virus
guuauagaggaauaucauc

SEQ ID NO: 4092268 - RNA, 16 nt, Variola virus
guuauagucaaauuaa

SEQ ID NO: 4092269 - RNA, 18 nt, Variola virus
guuaucaaaauauguaga

SEQ ID NO: 4092270 - RNA, 21 nt, Variola virus
guuaucaucguauaaauuaaa

SEQ ID NO: 4092271 - RNA, 15 nt, Variola virus
guuaucuauuucaaa

SEQ ID NO: 4092272 - RNA, 22 nt, Variola virus
guuauguauuucauuguucauc

SEQ ID NO: 4092273 - RNA, 18 nt, Variola virus
guuauuacacauguguuu

SEQ ID NO: 4092274 - RNA, 15 nt, Variola virus
guucaaaaauuuaga

SEQ ID NO: 4092275 - RNA, 23 nt, Variola virus
guucagaaucgcgauucuaaaac

SEQ ID NO: 4092276 - RNA, 21 nt, Variola virus
guucagugacgucuguggaug

SEQ ID NO: 4092277 - RNA, 15 nt, Variola virus
guucauaaauaaaaa

SEQ ID NO: 4092278 - RNA, 13 nt, Variola virus
guucauaaucauc

SEQ ID NO: 4092279 - RNA, 20 nt, Variola virus
guucauccuuguucaucauu

SEQ ID NO: 4092280 - RNA, 18 nt, Variola virus
guuccagcuauuccaccu

SEQ ID NO: 4092281 - RNA, 15 nt, Variola virus
guuccauuacaaaua

SEQ ID NO: 4092282 - RNA, 23 nt, Variola virus
guuccguuggaugguaauaaacu

SEQ ID NO: 4092283 - RNA, 20 nt, Variola virus
guuccucuguaaauaaaucu

SEQ ID NO: 4092284 - RNA, 13 nt, Variola virus
guucgauagaaac

SEQ ID NO: 4092285 - RNA, 16 nt, Variola virus
guucuauaaacugaau

SEQ ID NO: 4092286 - RNA, 21 nt, Variola virus
guucuauaagauguuagaauu

SEQ ID NO: 4092287 - RNA, 20 nt, Variola virus
guucucaagaacuacaaaag

SEQ ID NO: 4092288 - RNA, 16 nt, Variola virus
guucuuugaacaucuu

SEQ ID NO: 4092289 - RNA, 22 nt, Variola virus
guugacacguuuauuucguaua

SEQ ID NO: 4092290 - RNA, 23 nt, Variola virus
guugaucacauuuagauaagaag

SEQ ID NO: 4092291 - RNA, 17 nt, Variola virus
guugcaauaauaaaagu

SEQ ID NO: 4092292 - RNA, 16 nt, Variola virus
guugcaauauacauaa

SEQ ID NO: 4092293 - RNA, 19 nt, Variola virus
guugcugcucguauaaucu

SEQ ID NO: 4092294 - RNA, 17 nt, Variola virus
guuggauuaucuauagu

SEQ ID NO: 4092295 - RNA, 14 nt, Variola virus
guuguauauuucuu

SEQ ID NO: 4092296 - RNA, 21 nt, Variola virus
guuguuacuccauuauauauu

SEQ ID NO: 4092297 - RNA, 22 nt, Variola virus
guuuaacaaaguuauucaucgu

SEQ ID NO: 4092298 - RNA, 18 nt, Variola virus
guuuaacuagucuucucu

SEQ ID NO: 4092299 - RNA, 13 nt, Variola virus
guuuaauauccuu

SEQ ID NO: 4092300 - RNA, 16 nt, Variola virus
guuuaauuuucacaag

SEQ ID NO: 4092301 - RNA, 12 nt, Variola virus
guuuaucuuuuu

SEQ ID NO: 4092302 - RNA, 17 nt, Variola virus
guuuauggaucuauuca

SEQ ID NO: 4092303 - RNA, 20 nt, Variola virus
guuuauuguauuuaugaccu

SEQ ID NO: 4092304 - RNA, 22 nt, Variola virus
guuucaaagcaauuguauuauu

SEQ ID NO: 4092305 - RNA, 20 nt, Variola virus
guuucauaauaauacauaua

SEQ ID NO: 4092306 - RNA, 13 nt, Variola virus
guuuccuguaaau

SEQ ID NO: 4092307 - RNA, 15 nt, Variola virus
guuucuaaauuuuua

SEQ ID NO: 4092308 - RNA, 21 nt, Variola virus
guuucuuagcuugugauuuuu

SEQ ID NO: 4092309 - RNA, 16 nt, Variola virus
guuucuuauguggauc

SEQ ID NO: 4092310 - RNA, 20 nt, Variola virus
guuuuacguuauuaaucauc

SEQ ID NO: 4092311 - RNA, 20 nt, Variola virus
guuuucagaagauaauuauc

SEQ ID NO: 4092312 - RNA, 14 nt, Variola virus
guuuucaucuuuua

SEQ ID NO: 4092313 - RNA, 17 nt, Variola virus
guuuucuagauggaaau

SEQ ID NO: 4092314 - RNA, 14 nt, Variola virus
guuuucucuauucu

SEQ ID NO: 4092315 - RNA, 22 nt, Variola virus
guuuuuaggauugauaaucaac

SEQ ID NO: 4092316 - RNA, 13 nt, Variola virus
guuuuuuauucau

SEQ ID NO: 4092317 - RNA, 15 nt, Variola virus
guuuuuuuagaaaau

SEQ ID NO: 4092318 - RNA, 16 nt, Variola virus
uaaaaaaaaauacuua

SEQ ID NO: 4092319 - RNA, 17 nt, Variola virus
uaaaaaaguuaaaacuu

SEQ ID NO: 4092320 - RNA, 19 nt, Variola virus
uaaaaaaguuuuugauuac

SEQ ID NO: 4092321 - RNA, 15 nt, Variola virus
uaaaaacauuauucu

SEQ ID NO: 4092322 - RNA, 15 nt, Variola virus
uaaaaagauaaacuu

SEQ ID NO: 4092323 - RNA, 13 nt, Variola virus
uaaaaauaaaagu

SEQ ID NO: 4092324 - RNA, 15 nt, Variola virus
uaaaaauaaacauug

SEQ ID NO: 4092325 - RNA, 16 nt, Variola virus
uaaaaauguuaauuua

SEQ ID NO: 4092326 - RNA, 16 nt, Variola virus
uaaaaccaacuaauau

SEQ ID NO: 4092327 - RNA, 20 nt, Variola virus
uaaaacucugauuauugucu

SEQ ID NO: 4092328 - RNA, 14 nt, Variola virus
uaaaacuuaaaauu

SEQ ID NO: 4092329 - RNA, 23 nt, Variola virus
uaaaaguagaggaugugauacau

SEQ ID NO: 4092330 - RNA, 16 nt, Variola virus
uaaaauaaauaucauu

SEQ ID NO: 4092331 - RNA, 18 nt, Variola virus
uaaaauaguucuguaaua

SEQ ID NO: 4092332 - RNA, 15 nt, Variola virus
uaaaauauauuauca

SEQ ID NO: 4092333 - RNA, 23 nt, Variola virus
uaaaauauuguuaaauaauggau

SEQ ID NO: 4092334 - RNA, 17 nt, Variola virus
uaaaaucacugaacauu

SEQ ID NO: 4092335 - RNA, 17 nt, Variola virus
uaaaaugguauuucauu

SEQ ID NO: 4092336 - RNA, 15 nt, Variola virus
uaaaauuaacaagga

SEQ ID NO: 4092337 - RNA, 15 nt, Variola virus
uaaaauuacuuaaag

SEQ ID NO: 4092338 - RNA, 14 nt, Variola virus
uaaaauuagaucuu

SEQ ID NO: 4092339 - RNA, 11 nt, Variola virus
uaaaauuauuc

SEQ ID NO: 4092340 - RNA, 20 nt, Variola virus
uaaaauuauugauauguaua

SEQ ID NO: 4092341 - RNA, 17 nt, Variola virus
uaaacacauagaaauaa

SEQ ID NO: 4092342 - RNA, 19 nt, Variola virus
uaaacagauccuuaaccuu

SEQ ID NO: 4092343 - RNA, 22 nt, Variola virus
uaaacaguuuccacuuugguaa

SEQ ID NO: 4092344 - RNA, 16 nt, Variola virus
uaaacauaaacaacau

SEQ ID NO: 4092345 - RNA, 16 nt, Variola virus
uaaacauaagacguau

SEQ ID NO: 4092346 - RNA, 17 nt, Variola virus
uaaacaucuugauacuu

SEQ ID NO: 4092347 - RNA, 13 nt, Variola virus
uaaacauuauuga

SEQ ID NO: 4092348 - RNA, 16 nt, Variola virus
uaaaccagacaaccac

SEQ ID NO: 4092349 - RNA, 20 nt, Variola virus
uaaaccaucuuacuuaaaau

SEQ ID NO: 4092350 - RNA, 18 nt, Variola virus
uaaaccgauaguguauaa

SEQ ID NO: 4092351 - RNA, 16 nt, Variola virus
uaaaccguuuaauauu

SEQ ID NO: 4092352 - RNA, 23 nt, Variola virus
uaaacgccuuuagaaaaacuuua

SEQ ID NO: 4092353 - RNA, 14 nt, Variola virus
uaaacuaauucauu

SEQ ID NO: 4092354 - RNA, 17 nt, Variola virus
uaaacuauaaacuaaaa

SEQ ID NO: 4092355 - RNA, 15 nt, Variola virus
uaaacuauuguuaug

SEQ ID NO: 4092356 - RNA, 20 nt, Variola virus
uaaacuauuuuaccagcauu

SEQ ID NO: 4092357 - RNA, 17 nt, Variola virus
uaaacucacauuucaaa

SEQ ID NO: 4092358 - RNA, 19 nt, Variola virus
uaaacucagauaauagcaa

SEQ ID NO: 4092359 - RNA, 20 nt, Variola virus
uaaacugcgccaaauugugg

SEQ ID NO: 4092360 - RNA, 21 nt, Variola virus
uaaacuugacaaaaauuguga

SEQ ID NO: 4092361 - RNA, 20 nt, Variola virus
uaaacuugugcuaaucucuu

SEQ ID NO: 4092362 - RNA, 14 nt, Variola virus
uaaacuuuaacaau

SEQ ID NO: 4092363 - RNA, 14 nt, Variola virus
uaaacuuuaaugau

SEQ ID NO: 4092364 - RNA, 14 nt, Variola virus
uaaagaauaucuuu

SEQ ID NO: 4092365 - RNA, 18 nt, Variola virus
uaaagacccaaaugucug

SEQ ID NO: 4092366 - RNA, 15 nt, Variola virus
uaaagaccgaauaca

SEQ ID NO: 4092367 - RNA, 13 nt, Variola virus
uaaagacuuuuau

SEQ ID NO: 4092368 - RNA, 16 nt, Variola virus
uaaagauagaugauga

SEQ ID NO: 4092369 - RNA, 21 nt, Variola virus
uaaagauauucuaaaauggua

SEQ ID NO: 4092370 - RNA, 16 nt, Variola virus
uaaagauauuguuaca

SEQ ID NO: 4092371 - RNA, 13 nt, Variola virus
uaaagauauuucu

SEQ ID NO: 4092372 - RNA, 16 nt, Variola virus
uaaagaugaugcuauu

SEQ ID NO: 4092373 - RNA, 19 nt, Variola virus
uaaagcauauuccauuaau

SEQ ID NO: 4092374 - RNA, 18 nt, Variola virus
uaaaggaccuaauccauu

SEQ ID NO: 4092375 - RNA, 21 nt, Variola virus
uaaaggauauuauauguugug

SEQ ID NO: 4092376 - RNA, 21 nt, Variola virus
uaaagguauaaaauacuuauu

SEQ ID NO: 4092377 - RNA, 15 nt, Variola virus
uaaaguaauaaucuu

SEQ ID NO: 4092378 - RNA, 21 nt, Variola virus
uaaagucauuauauaggguug

SEQ ID NO: 4092379 - RNA, 18 nt, Variola virus
uaaagucuacauugucau

SEQ ID NO: 4092380 - RNA, 14 nt, Variola virus
uaaaguguaugucu

SEQ ID NO: 4092381 - RNA, 12 nt, Variola virus
uaaauagaauau

SEQ ID NO: 4092382 - RNA, 14 nt, Variola virus
uaaauaucauuaau

SEQ ID NO: 4092383 - RNA, 12 nt, Variola virus
uaaauauccauu

SEQ ID NO: 4092384 - RNA, 16 nt, Variola virus
uaaauauccauugucu

SEQ ID NO: 4092385 - RNA, 20 nt, Variola virus
uaaaucauggaguggaugua

SEQ ID NO: 4092386 - RNA, 14 nt, Variola virus
uaaaucuucacauu

SEQ ID NO: 4092387 - RNA, 17 nt, Variola virus
uaaauguauauuuucca

SEQ ID NO: 4092388 - RNA, 18 nt, Variola virus
uaaauucaaccaugaauu

SEQ ID NO: 4092389 - RNA, 12 nt, Variola virus
uaaauucaagau

SEQ ID NO: 4092390 - RNA, 20 nt, Variola virus
uaaauugguacucuaucaua

SEQ ID NO: 4092391 - RNA, 16 nt, Variola virus
uaaauuuuacaaaucu

SEQ ID NO: 4092392 - RNA, 20 nt, Variola virus
uaaauuuuagaaauaacauu

SEQ ID NO: 4092393 - RNA, 19 nt, Variola virus
uaacaaaaauuaugaaaua

SEQ ID NO: 4092394 - RNA, 13 nt, Variola virus
uaacaaagaaaga

SEQ ID NO: 4092395 - RNA, 17 nt, Variola virus
uaacaaccucuuuaaua

SEQ ID NO: 4092396 - RNA, 19 nt, Variola virus
uaacaacgacgaaccaaaa

SEQ ID NO: 4092397 - RNA, 14 nt, Variola virus
uaacaauuaaugau

SEQ ID NO: 4092398 - RNA, 19 nt, Variola virus
uaacaauuauuauaauugu

SEQ ID NO: 4092399 - RNA, 15 nt, Variola virus
uaacaauuucuauaa

SEQ ID NO: 4092400 - RNA, 20 nt, Variola virus
uaacacaaauuauauuauua

SEQ ID NO: 4092401 - RNA, 17 nt, Variola virus
uaacacaccuaaaugug

SEQ ID NO: 4092402 - RNA, 22 nt, Variola virus
uaacacguuuuuuagaucucau

SEQ ID NO: 4092403 - RNA, 19 nt, Variola virus
uaacacuauacgacacuau

SEQ ID NO: 4092404 - RNA, 17 nt, Variola virus
uaacagaaaaaacaaug

SEQ ID NO: 4092405 - RNA, 15 nt, Variola virus
uaacagccaauauga

SEQ ID NO: 4092406 - RNA, 22 nt, Variola virus
uaacaggucauauucucauaau

SEQ ID NO: 4092407 - RNA, 16 nt, Variola virus
uaacaguaacuuguau

SEQ ID NO: 4092408 - RNA, 20 nt, Variola virus
uaacaguuuugcuaauuaau

SEQ ID NO: 4092409 - RNA, 16 nt, Variola virus
uaacauaaacauauca

SEQ ID NO: 4092410 - RNA, 15 nt, Variola virus
uaacaucacuaauau

SEQ ID NO: 4092411 - RNA, 12 nt, Variola virus
uaacaucauuau

SEQ ID NO: 4092412 - RNA, 16 nt, Variola virus
uaacaucuuucaucau

SEQ ID NO: 4092413 - RNA, 23 nt, Variola virus
uaacauuguuaauugaaaaggga

SEQ ID NO: 4092414 - RNA, 19 nt, Variola virus
uaaccguuucaucaucauu

SEQ ID NO: 4092415 - RNA, 18 nt, Variola virus
uaacgaaacaauguuucu

SEQ ID NO: 4092416 - RNA, 16 nt, Variola virus
uaacgaggaagaaauu

SEQ ID NO: 4092417 - RNA, 19 nt, Variola virus
uaacgauaacgucauuaau

SEQ ID NO: 4092418 - RNA, 21 nt, Variola virus
uaacgauauuuugcaaaauag

SEQ ID NO: 4092419 - RNA, 22 nt, Variola virus
uaacgccuauacuauguuauau

SEQ ID NO: 4092420 - RNA, 17 nt, Variola virus
uaacgccuauucgaaau

SEQ ID NO: 4092421 - RNA, 22 nt, Variola virus
uaacguuccuaauucucucauu

SEQ ID NO: 4092422 - RNA, 17 nt, Variola virus
uaacguugguauuauau

SEQ ID NO: 4092423 - RNA, 19 nt, Variola virus
ucgaucggugaaaagucuu

SEQ ID NO: 4092424 - RNA, 19 nt, Variola virus
ucgauuguuuauuguauau

SEQ ID NO: 4092425 - RNA, 23 nt, Variola virus
ucgcaaacuauucuaauacauaa

SEQ ID NO: 4092426 - RNA, 16 nt, Variola virus
ucgcgcuuuacauucu

SEQ ID NO: 4092427 - RNA, 16 nt, Variola virus
ucgcuaaaaucuucau

SEQ ID NO: 4092428 - RNA, 12 nt, Variola virus
ucggauagaguu

SEQ ID NO: 4092429 - RNA, 17 nt, Variola virus
ucguaaaucuuuucacg

SEQ ID NO: 4092430 - RNA, 19 nt, Variola virus
ucguaauuagguucuaaug

SEQ ID NO: 4092431 - RNA, 17 nt, Variola virus
ucguacuuuauaucgug

SEQ ID NO: 4092432 - RNA, 21 nt, Variola virus
ucguauaucaucaucugaaau

SEQ ID NO: 4092433 - RNA, 20 nt, Variola virus
ucguauuucauaaaaguuau

SEQ ID NO: 4092434 - RNA, 19 nt, Variola virus
ucgucaaaauauuuacuaa

SEQ ID NO: 4092435 - RNA, 13 nt, Variola virus
ucgucuaaaguuu

SEQ ID NO: 4092436 - RNA, 11 nt, Variola virus
ucguuaaccaa

SEQ ID NO: 4092437 - RNA, 11 nt, Variola virus
ucguuaaugaa

SEQ ID NO: 4092438 - RNA, 13 nt, Variola virus
ucguucucuaaau

SEQ ID NO: 4092439 - RNA, 15 nt, Variola virus
ucguucucugaaaau

SEQ ID NO: 4092440 - RNA, 20 nt, Variola virus
ucguucugcuaaauuuucau

SEQ ID NO: 4092441 - RNA, 15 nt, Variola virus
ucguucuuaucccaa

SEQ ID NO: 4092442 - RNA, 13 nt, Variola virus
ucguuuacaaaau

SEQ ID NO: 4092443 - RNA, 20 nt, Variola virus
ucuaaaacaauaaaugcauu

SEQ ID NO: 4092444 - RNA, 23 nt, Variola virus
ucuaaaauuuccaucucuaucua

SEQ ID NO: 4092445 - RNA, 16 nt, Variola virus
ucuaaaccuucuuauu

SEQ ID NO: 4092446 - RNA, 23 nt, Variola virus
ucuaaauauuuuagaacacuguu

SEQ ID NO: 4092447 - RNA, 22 nt, Variola virus
ucuaaaugaugauauaccuguu

SEQ ID NO: 4092448 - RNA, 20 nt, Variola virus
ucuaaauuauauuuauuauu

SEQ ID NO: 4092449 - RNA, 16 nt, Variola virus
ucuaacaaacaucuca

SEQ ID NO: 4092450 - RNA, 14 nt, Variola virus
ucuaacaucaucau

SEQ ID NO: 4092451 - RNA, 21 nt, Variola virus
ucuaacuggugaguuaauauu

SEQ ID NO: 4092452 - RNA, 20 nt, Variola virus
ucuaagacgucucauuucua

SEQ ID NO: 4092453 - RNA, 14 nt, Variola virus
ucuaagauguugua

SEQ ID NO: 4092454 - RNA, 21 nt, Variola virus
ucuaauacuuuaacaugugua

SEQ ID NO: 4092455 - RNA, 17 nt, Variola virus
ucuaauucuacauaugg

SEQ ID NO: 4092456 - RNA, 13 nt, Variola virus
ucuacaucuucaa

SEQ ID NO: 4092457 - RNA, 15 nt, Variola virus
ucuacauuuucaguc

SEQ ID NO: 4092458 - RNA, 13 nt, Variola virus
ucuacauuuugcu

SEQ ID NO: 4092459 - RNA, 18 nt, Variola virus
ucuaccguuguuaaauac

SEQ ID NO: 4092460 - RNA, 14 nt, Variola virus
ucuacuauucuauu

SEQ ID NO: 4092461 - RNA, 17 nt, Variola virus
ucuacuauuuguguauu

SEQ ID NO: 4092462 - RNA, 17 nt, Variola virus
ucuagacgugaugugua

SEQ ID NO: 4092463 - RNA, 14 nt, Variola virus
ucuagacuccgcau

SEQ ID NO: 4092464 - RNA, 14 nt, Variola virus
ucuagauacaaaau

SEQ ID NO: 4092465 - RNA, 17 nt, Variola virus
ucuagauccucucuuca

SEQ ID NO: 4092466 - RNA, 18 nt, Variola virus
ucuagauccucucuucaa

SEQ ID NO: 4092467 - RNA, 17 nt, Variola virus
ucuagauguagaagcau

SEQ ID NO: 4092468 - RNA, 13 nt, Variola virus
ucuagcauuucua

SEQ ID NO: 4092469 - RNA, 15 nt, Variola virus
ucuagccauaucuaa

SEQ ID NO: 4092470 - RNA, 21 nt, Variola virus
ucuagccucgguaaucuguac

SEQ ID NO: 4092471 - RNA, 21 nt, Variola virus
ucuagcguugcuucuacauaa

SEQ ID NO: 4092472 - RNA, 21 nt, Variola virus
ucuagguagaccguuaaugaa

SEQ ID NO: 4092473 - RNA, 14 nt, Variola virus
ucuauaaacugaau

SEQ ID NO: 4092474 - RNA, 14 nt, Variola virus
ucuauaaauguaga

SEQ ID NO: 4092475 - RNA, 19 nt, Variola virus
ucuauaaucacuauucaga

SEQ ID NO: 4092476 - RNA, 18 nt, Variola virus
ucuauacccauuauguaa

SEQ ID NO: 4092477 - RNA, 15 nt, Variola virus
ucuauagauggagua

SEQ ID NO: 4092478 - RNA, 12 nt, Variola virus
ucuauaggaaag

SEQ ID NO: 4092479 - RNA, 19 nt, Variola virus
ucuauaucguccuucuuaa

SEQ ID NO: 4092480 - RNA, 14 nt, Variola virus
ucuauaucuaaaau

SEQ ID NO: 4092481 - RNA, 14 nt, Variola virus
ucuaucaaagcuuu

SEQ ID NO: 4092482 - RNA, 22 nt, Variola virus
ucuauccauuugucuuccuuaa

SEQ ID NO: 4092483 - RNA, 21 nt, Variola virus
ucuaucccccguauuuacauu

SEQ ID NO: 4092484 - RNA, 15 nt, Variola virus
ucuaucgacuucaga

SEQ ID NO: 4092485 - RNA, 17 nt, Variola virus
ucuaucgcauguggaug

SEQ ID NO: 4092486 - RNA, 16 nt, Variola virus
ucuaucuuuuauuuua

SEQ ID NO: 4092487 - RNA, 13 nt, Variola virus
ucuaugucucuua

SEQ ID NO: 4092488 - RNA, 19 nt, Variola virus
ucuauuccaaauauucaga

SEQ ID NO: 4092489 - RNA, 17 nt, Variola virus
ucuauuccuagaagugu

SEQ ID NO: 4092490 - RNA, 12 nt, Variola virus
ucuauuuggauu

SEQ ID NO: 4092491 - RNA, 14 nt, Variola virus
ucucaagauuuuaa

SEQ ID NO: 4092492 - RNA, 16 nt, Variola virus
ucucacugaauacgag

SEQ ID NO: 4092493 - RNA, 22 nt, Variola virus
ucucacugaauacgaggaugau

SEQ ID NO: 4092494 - RNA, 20 nt, Variola virus
ucucauaacugcucuagauu

SEQ ID NO: 4092495 - RNA, 22 nt, Variola virus
ucucaugguaucgauuacaccu

SEQ ID NO: 4092496 - RNA, 15 nt, Variola virus
ucucauuuucuucaa

SEQ ID NO: 4092497 - RNA, 14 nt, Variola virus
ucuccccaaacauu

SEQ ID NO: 4092498 - RNA, 20 nt, Variola virus
ucuccgcaauacauuucuca

SEQ ID NO: 4092499 - RNA, 16 nt, Variola virus
ucucuaagagcuacgu

SEQ ID NO: 4092500 - RNA, 19 nt, Variola virus
ucucuaaguuaacacaugu

SEQ ID NO: 4092501 - RNA, 22 nt, Variola virus
ucucuauaaacgaugguuuaau

SEQ ID NO: 4092502 - RNA, 19 nt, Variola virus
ucucuauucugaaauaauu

SEQ ID NO: 4092503 - RNA, 19 nt, Variola virus
ucucucaaucacuacaucu

SEQ ID NO: 4092504 - RNA, 22 nt, Variola virus
ucucuuuuguagaacuuaacuu

SEQ ID NO: 4092505 - RNA, 13 nt, Variola virus
ucugaaauaauca

SEQ ID NO: 4092506 - RNA, 20 nt, Variola virus
ucugaacccguuaauguaua

SEQ ID NO: 4092507 - RNA, 19 nt, Variola virus
ucugaaguaguuucuaaua

SEQ ID NO: 4092508 - RNA, 20 nt, Variola virus
ucugacuggguuguaauguu

SEQ ID NO: 4092509 - RNA, 15 nt, Variola virus
ucugaguauaguguu

SEQ ID NO: 4092510 - RNA, 17 nt, Variola virus
ucugauacaacaauaua

SEQ ID NO: 4092511 - RNA, 18 nt, Variola virus
ucugauggcgacauaauu

SEQ ID NO: 4092512 - RNA, 23 nt, Variola virus
ucugauuuuaucuuuuagagguu

SEQ ID NO: 4092513 - RNA, 15 nt, Variola virus
ucugcuuucuuuuaa

SEQ ID NO: 4092514 - RNA, 21 nt, Variola virus
ucuggaacauuuaacucauug

SEQ ID NO: 4092515 - RNA, 19 nt, Variola virus
ucugguugaagaaauccaa

SEQ ID NO: 4092516 - RNA, 16 nt, Variola virus
ucuguaacuaugaauu

SEQ ID NO: 4092517 - RNA, 15 nt, Variola virus
ucuguacaaaaguuu

SEQ ID NO: 4092518 - RNA, 23 nt, Variola virus
ucuguaguuguauccguuucaga

SEQ ID NO: 4092519 - RNA, 16 nt, Variola virus
ucugucgaaaaaguag

SEQ ID NO: 4092520 - RNA, 16 nt, Variola virus
ucuguuuuauuaaccg

SEQ ID NO: 4092521 - RNA, 21 nt, Variola virus
ucuuaaagccauacauuuaga

SEQ ID NO: 4092522 - RNA, 20 nt, Variola virus
ucuuaaggagaaugaaacag

SEQ ID NO: 4092523 - RNA, 15 nt, Variola virus
ucuuaauagacauau

SEQ ID NO: 4092524 - RNA, 22 nt, Variola virus
ucuuacauauuuuuuucuuauu

SEQ ID NO: 4092525 - RNA, 19 nt, Variola virus
ucuuaccaucuucuuugau

SEQ ID NO: 4092526 - RNA, 14 nt, Variola virus
ucuuagcgaaugau

SEQ ID NO: 4092527 - RNA, 13 nt, Variola virus
ucuuauagaugug

SEQ ID NO: 4092528 - RNA, 16 nt, Variola virus
ucuuauagcaugaauu

SEQ ID NO: 4092529 - RNA, 13 nt, Variola virus
ucuuauguggauc

SEQ ID NO: 4092530 - RNA, 20 nt, Variola virus
ucuuauuggucagaaguuuu

SEQ ID NO: 4092531 - RNA, 13 nt, Variola virus
ucuucaaauucca

SEQ ID NO: 4092532 - RNA, 21 nt, Variola virus
ucuucacuagugggaaucaau

SEQ ID NO: 4092533 - RNA, 19 nt, Variola virus
ucuucauaugauccaaauu

SEQ ID NO: 4092534 - RNA, 21 nt, Variola virus
ucuuccagcauccguuucuaa

SEQ ID NO: 4092535 - RNA, 15 nt, Variola virus
ucuuccuucgauaga

SEQ ID NO: 4092536 - RNA, 15 nt, Variola virus
ucuucugaaacacca

SEQ ID NO: 4092537 - RNA, 21 nt, Variola virus
ucuucugauaucauuaaugau

SEQ ID NO: 4092538 - RNA, 15 nt, Variola virus
ucuucuggaaccuca

SEQ ID NO: 4092539 - RNA, 22 nt, Variola virus
ucuucuuauaagauuguagaau

SEQ ID NO: 4092540 - RNA, 17 nt, Variola virus
ucuugaaacuuuucaga

SEQ ID NO: 4092541 - RNA, 15 nt, Variola virus
ucuugauuacaaaac

SEQ ID NO: 4092542 - RNA, 19 nt, Variola virus
ucuuggauaaaagcaucca

SEQ ID NO: 4092543 - RNA, 15 nt, Variola virus
ucuuguaucauauau

SEQ ID NO: 4092544 - RNA, 18 nt, Variola virus
ucuuuaaaaauuuaaaau

SEQ ID NO: 4092545 - RNA, 14 nt, Variola virus
ucuuuaaugugaaa

SEQ ID NO: 4092546 - RNA, 15 nt, Variola virus
ucuuuaccuuaagaa

SEQ ID NO: 4092547 - RNA, 16 nt, Variola virus
ucuuuuauuuuaucua

SEQ ID NO: 4092548 - RNA, 19 nt, Variola virus
ugaaauaaccgcaugauua

SEQ ID NO: 4092549 - RNA, 17 nt, Variola virus
ugaaauaauuagaacua

SEQ ID NO: 4092550 - RNA, 15 nt, Variola virus
ugaaauauaguaaua

SEQ ID NO: 4092551 - RNA, 19 nt, Variola virus
ugaaaucaguggaguagua

SEQ ID NO: 4092552 - RNA, 16 nt, Variola virus
ugaaaugauaacuguu

SEQ ID NO: 4092553 - RNA, 13 nt, Variola virus
ugaacaauacuac

SEQ ID NO: 4092554 - RNA, 14 nt, Variola virus
ugaacauuauuaau

SEQ ID NO: 4092555 - RNA, 24 nt, Variola virus
ugaacauuuaagagaucaaagcau

SEQ ID NO: 4092556 - RNA, 22 nt, Variola virus
ugaaccaguaccagaucuuaau

SEQ ID NO: 4092557 - RNA, 17 nt, Variola virus
ugaaccgggaucauuau

SEQ ID NO: 4092558 - RNA, 15 nt, Variola virus
ugaagaaaaauguug

SEQ ID NO: 4092559 - RNA, 15 nt, Variola virus
ugaagaaaguaauua

SEQ ID NO: 4092560 - RNA, 11 nt, Variola virus
ugaagaaauga

SEQ ID NO: 4092561 - RNA, 12 nt, Variola virus
ugaagaacacau

SEQ ID NO: 4092562 - RNA, 15 nt, Variola virus
ugaagaagaaaacaa

SEQ ID NO: 4092563 - RNA, 19 nt, Variola virus
ugaagaagaaaacaaacau

SEQ ID NO: 4092564 - RNA, 22 nt, Variola virus
ugaaguauuuguuguauucauu

SEQ ID NO: 4092565 - RNA, 22 nt, Variola virus
ugaaguuaaugauacacacuau

SEQ ID NO: 4092566 - RNA, 19 nt, Variola virus
ugaauaaucagauuuaccc

SEQ ID NO: 4092567 - RNA, 22 nt, Variola virus
ugaauagcaaaauuuuuacuau

SEQ ID NO: 4092568 - RNA, 18 nt, Variola virus
ugaauauagaacaucauu

SEQ ID NO: 4092569 - RNA, 14 nt, Variola virus
ugaaucaaauguaa

SEQ ID NO: 4092570 - RNA, 16 nt, Variola virus
ugaauucucauuuugc

SEQ ID NO: 4092571 - RNA, 22 nt, Variola virus
ugaauuugauuauuuugaagac

SEQ ID NO: 4092572 - RNA, 16 nt, Variola virus
ugacacuaucuucugu

SEQ ID NO: 4092573 - RNA, 18 nt, Variola virus
ugacaucauacuagauaa

SEQ ID NO: 4092574 - RNA, 22 nt, Variola virus
ugacaugauuaagauugcucuu

SEQ ID NO: 4092575 - RNA, 17 nt, Variola virus
ugacauuuauucaucau

SEQ ID NO: 4092576 - RNA, 14 nt, Variola virus
ugacauuuuggauu

SEQ ID NO: 4092577 - RNA, 13 nt, Variola virus
ugacgcuguaaaa

SEQ ID NO: 4092578 - RNA, 19 nt, Variola virus
ugacgucguucuacauaaa

SEQ ID NO: 4092579 - RNA, 19 nt, Variola virus
ugacuagacugauuucucu

SEQ ID NO: 4092580 - RNA, 16 nt, Variola virus
ugacuccuauauuucc

SEQ ID NO: 4092581 - RNA, 17 nt, Variola virus
ugacuccuauauuuccc

SEQ ID NO: 4092582 - RNA, 19 nt, Variola virus
ugacuccuuucuaauauag

SEQ ID NO: 4092583 - RNA, 12 nt, Variola virus
ugacuguauuug

SEQ ID NO: 4092584 - RNA, 19 nt, Variola virus
ugacuucauugauaucuuu

SEQ ID NO: 4092585 - RNA, 22 nt, Variola virus
ugacuuuccugccgaauuuaga

SEQ ID NO: 4092586 - RNA, 18 nt, Variola virus
ugagagaucuacugguga

SEQ ID NO: 4092587 - RNA, 17 nt, Variola virus
ugagagucaauaucauu

SEQ ID NO: 4092588 - RNA, 20 nt, Variola virus
ugagagucuuauauguagca

SEQ ID NO: 4092589 - RNA, 16 nt, Variola virus
ugagauaucucauuaa

SEQ ID NO: 4092590 - RNA, 22 nt, Variola virus
ugagaucccacaucauuucaac

SEQ ID NO: 4092591 - RNA, 23 nt, Variola virus
ugagauguuauuaaauguugaua

SEQ ID NO: 4092592 - RNA, 20 nt, Variola virus
ugagauugauguaauacuuu

SEQ ID NO: 4092593 - RNA, 14 nt, Variola virus
ugaggauaaugcua

SEQ ID NO: 4092594 - RNA, 14 nt, Variola virus
ugaggauauacaaa

SEQ ID NO: 4092595 - RNA, 15 nt, Variola virus
ugagguuuuuggaga

SEQ ID NO: 4092596 - RNA, 17 nt, Variola virus
ugaguauuuuacucauu

SEQ ID NO: 4092597 - RNA, 14 nt, Variola virus
ugaguuaauaugca

SEQ ID NO: 4092598 - RNA, 21 nt, Variola virus
ugauaaucauccuaagaugau

SEQ ID NO: 4092599 - RNA, 15 nt, Variola virus
ugauacguauauaca

SEQ ID NO: 4092600 - RNA, 11 nt, Variola virus
ugauacugaua

SEQ ID NO: 4092601 - RNA, 12 nt, Variola virus
ugauagcauugu

SEQ ID NO: 4092602 - RNA, 16 nt, Variola virus
ugauagcgguagaugu

SEQ ID NO: 4092603 - RNA, 17 nt, Variola virus
ugauaggcaauaaacau

SEQ ID NO: 4092604 - RNA, 17 nt, Variola virus
ugauauauaauuuaccg

SEQ ID NO: 4092605 - RNA, 18 nt, Variola virus
ugauaucuaguauugaua

SEQ ID NO: 4092606 - RNA, 21 nt, Variola virus
ugauaugauuaucguuuucau

SEQ ID NO: 4092607 - RNA, 21 nt, Variola virus
ugauauuggagcaaaauccua

SEQ ID NO: 4092608 - RNA, 13 nt, Variola virus
ugauauuuggauc

SEQ ID NO: 4092609 - RNA, 12 nt, Variola virus
ugauauuuguau

SEQ ID NO: 4092610 - RNA, 17 nt, Variola virus
ugauauuuugauguaca

SEQ ID NO: 4092611 - RNA, 16 nt, Variola virus
ugaucuaacuaagaua

SEQ ID NO: 4092612 - RNA, 17 nt, Variola virus
ugaucuaugacaucaug

SEQ ID NO: 4092613 - RNA, 20 nt, Variola virus
ugaugaaagauaaacuagau

SEQ ID NO: 4092614 - RNA, 19 nt, Variola virus
ugaugaacgacuggauguu

SEQ ID NO: 4092615 - RNA, 16 nt, Variola virus
ugaugaaucagacaau

SEQ ID NO: 4092616 - RNA, 17 nt, Variola virus
ugaugacacuagaugau

SEQ ID NO: 4092617 - RNA, 22 nt, Variola virus
ugaugagauguuauuaaauguu

SEQ ID NO: 4092618 - RNA, 16 nt, Variola virus
ugaugaugaaaugaua

SEQ ID NO: 4092619 - RNA, 17 nt, Variola virus
ugaugcuuaaaaugcuc

SEQ ID NO: 4092620 - RNA, 18 nt, Variola virus
ugaugucguuaaauuuga

SEQ ID NO: 4092621 - RNA, 19 nt, Variola virus
ugaugucguuauucugaaa

SEQ ID NO: 4092622 - RNA, 21 nt, Variola virus
ugauuaaucaauuaguagaga

SEQ ID NO: 4092623 - RNA, 22 nt, Variola virus
ugauuaaugauuuagaaaugaa

SEQ ID NO: 4092624 - RNA, 12 nt, Variola virus
ugauuacuacau

SEQ ID NO: 4092625 - RNA, 14 nt, Variola virus
ugauuagaaaauau

SEQ ID NO: 4092626 - RNA, 16 nt, Variola virus
ugauuauaguuucuau

SEQ ID NO: 4092627 - RNA, 14 nt, Variola virus
ugauuauuagauuu

SEQ ID NO: 4092628 - RNA, 23 nt, Variola virus
ugauucuguagaugccauaucau

SEQ ID NO: 4092629 - RNA, 13 nt, Variola virus
ugauugaacgauu

SEQ ID NO: 4092630 - RNA, 19 nt, Variola virus
ugauugugucucaaaugcc

SEQ ID NO: 4092631 - RNA, 18 nt, Variola virus
ugauuguuugacaaauca

SEQ ID NO: 4092632 - RNA, 15 nt, Variola virus
ugauuucuugaacau

SEQ ID NO: 4092633 - RNA, 19 nt, Variola virus
ugauuuggccaaauguacc

SEQ ID NO: 4092634 - RNA, 21 nt, Variola virus
ugauuuuaacgacgacauauu

SEQ ID NO: 4092635 - RNA, 17 nt, Variola virus
ugcaaugaauaucuaca

SEQ ID NO: 4092636 - RNA, 18 nt, Variola virus
ugcacagcgaagaauucu

SEQ ID NO: 4092637 - RNA, 23 nt, Variola virus
ugcauacaauacuagucuagaaa

SEQ ID NO: 4092638 - RNA, 23 nt, Variola virus
ugcaucuaaaagcgaugcuacgc

SEQ ID NO: 4092639 - RNA, 15 nt, Variola virus
ugcaucuacaucauc

SEQ ID NO: 4092640 - RNA, 23 nt, Variola virus
ugcaucuauauaaucuuuuucau

SEQ ID NO: 4092641 - RNA, 13 nt, Variola virus
ugcauguuuucau

SEQ ID NO: 4092642 - RNA, 14 nt, Variola virus
ugccagauacauac

SEQ ID NO: 4092643 - RNA, 14 nt, Variola virus
ugccauaauaauua

SEQ ID NO: 4092644 - RNA, 15 nt, Variola virus
ugccaucuuacauga

SEQ ID NO: 4092645 - RNA, 23 nt, Variola virus
ugccgaacuaaaaaaaauaacuu

SEQ ID NO: 4092646 - RNA, 14 nt, Variola virus
ugccuaguacugua

SEQ ID NO: 4092647 - RNA, 15 nt, Variola virus
ugcguuuagcaucua

SEQ ID NO: 4092648 - RNA, 14 nt, Variola virus
ugcuaaauuuucau

SEQ ID NO: 4092649 - RNA, 13 nt, Variola virus
ugcuaauauacaa

SEQ ID NO: 4092650 - RNA, 19 nt, Variola virus
ugcuaauauauucuuacag

SEQ ID NO: 4092651 - RNA, 13 nt, Variola virus
ugcuagaacaacu

SEQ ID NO: 4092652 - RNA, 17 nt, Variola virus
ugcuauaccuaauacua

SEQ ID NO: 4092653 - RNA, 17 nt, Variola virus
ugcuaugaaguugucua

SEQ ID NO: 4092654 - RNA, 22 nt, Variola virus
ugcucggcaguaaucaacaaua

SEQ ID NO: 4092655 - RNA, 22 nt, Variola virus
ugcucuacaugcgguaaagaua

SEQ ID NO: 4092656 - RNA, 22 nt, Variola virus
ugcucuagauacugcaaaacuu

SEQ ID NO: 4092657 - RNA, 15 nt, Variola virus
ugcucugcaauaacu

SEQ ID NO: 4092658 - RNA, 13 nt, Variola virus
ugcugucaaacaa

SEQ ID NO: 4092659 - RNA, 15 nt, Variola virus
ugcuguuguacauac

SEQ ID NO: 4092660 - RNA, 22 nt, Variola virus
ugcuuaauacaccguuaacaau

SEQ ID NO: 4092661 - RNA, 16 nt, Variola virus
ugcuuuagugaaauuu

SEQ ID NO: 4092662 - RNA, 22 nt, Variola virus
ugcuuuuaucaggauaaauaca

SEQ ID NO: 4092663 - RNA, 13 nt, Variola virus
uggaaaaaugaug

SEQ ID NO: 4092664 - RNA, 21 nt, Variola virus
uggaaaaaugaugaauuaaug

SEQ ID NO: 4092665 - RNA, 13 nt, Variola virus
uggaaagauauca

SEQ ID NO: 4092666 - RNA, 13 nt, Variola virus
uggaaauguuaua

SEQ ID NO: 4092667 - RNA, 23 nt, Variola virus
uggaaauguuauagaaaauuaaa

SEQ ID NO: 4092668 - RNA, 21 nt, Variola virus
uggaagaaggauggaaagaua

SEQ ID NO: 4092669 - RNA, 14 nt, Variola virus
uggaaguuccaaac

SEQ ID NO: 4092670 - RNA, 15 nt, Variola virus
uggaauaucaaaucu

SEQ ID NO: 4092671 - RNA, 19 nt, Variola virus
uggaauaucauuaacuguu

SEQ ID NO: 4092672 - RNA, 19 nt, Variola virus
uggaaugacgaauccuguu

SEQ ID NO: 4092673 - RNA, 23 nt, Variola virus
uggaaugacgaauccuguuucua

SEQ ID NO: 4092674 - RNA, 23 nt, Variola virus
uggaaugcuguuuaauguuucca

SEQ ID NO: 4092675 - RNA, 21 nt, Variola virus
uggaauucaguuggaauauug

SEQ ID NO: 4092676 - RNA, 22 nt, Variola virus
uggaauugauuucgucaaugua

SEQ ID NO: 4092677 - RNA, 15 nt, Variola virus
uggacaaaucuggaa

SEQ ID NO: 4092678 - RNA, 20 nt, Variola virus
uggacgaucuauuagaaaau

SEQ ID NO: 4092679 - RNA, 13 nt, Variola virus
uggagaagguuuc

SEQ ID NO: 4092680 - RNA, 14 nt, Variola virus
uggagaucuaaaga

SEQ ID NO: 4092681 - RNA, 21 nt, Variola virus
ucaaauucucauucauguaua

SEQ ID NO: 4092682 - RNA, 16 nt, Variola virus
ucaaauuguccuauau

SEQ ID NO: 4092683 - RNA, 18 nt, Variola virus
ucaacaauaugcaaauag

SEQ ID NO: 4092684 - RNA, 23 nt, Variola virus
ucaacaaugucugucauauguau

SEQ ID NO: 4092685 - RNA, 21 nt, Variola virus
ucaacaauuuuguauuauucu

SEQ ID NO: 4092686 - RNA, 13 nt, Variola virus
ucaacacuuauau

SEQ ID NO: 4092687 - RNA, 20 nt, Variola virus
ucaacauaaauaauucuaga

SEQ ID NO: 4092688 - RNA, 21 nt, Variola virus
ucaacggaugaguuaauguau

SEQ ID NO: 4092689 - RNA, 13 nt, Variola virus
ucaacuuauucuc

SEQ ID NO: 4092690 - RNA, 20 nt, Variola virus
ucaagaucuaauauucuaga

SEQ ID NO: 4092691 - RNA, 21 nt, Variola virus
ucaagcuaggcuggaaacuau

SEQ ID NO: 4092692 - RNA, 18 nt, Variola virus
ucaaggaaaaagaugcua

SEQ ID NO: 4092693 - RNA, 20 nt, Variola virus
ucaaggacaguuaaaacuau

SEQ ID NO: 4092694 - RNA, 11 nt, Variola virus
ucaaggauucu

SEQ ID NO: 4092695 - RNA, 19 nt, Variola virus
ucaagucaauuaucuuauu

SEQ ID NO: 4092696 - RNA, 13 nt, Variola virus
ucaagucauaaau

SEQ ID NO: 4092697 - RNA, 18 nt, Variola virus
ucaaguccaauguuuuua

SEQ ID NO: 4092698 - RNA, 16 nt, Variola virus
ucaauagaauaaacca

SEQ ID NO: 4092699 - RNA, 20 nt, Variola virus
ucaauagaauaugucucuua

SEQ ID NO: 4092700 - RNA, 15 nt, Variola virus
ucaauagauuauaca

SEQ ID NO: 4092701 - RNA, 21 nt, Variola virus
ucaauagcaguuuauuaucca

SEQ ID NO: 4092702 - RNA, 18 nt, Variola virus
ucaauauauuaagaaguu

SEQ ID NO: 4092703 - RNA, 15 nt, Variola virus
ucaaucccuaagucu

SEQ ID NO: 4092704 - RNA, 13 nt, Variola virus
ucaaugaauuaug

SEQ ID NO: 4092705 - RNA, 20 nt, Variola virus
ucaauggaccccaacaucuu

SEQ ID NO: 4092706 - RNA, 13 nt, Variola virus
ucaauuaauguac

SEQ ID NO: 4092707 - RNA, 22 nt, Variola virus
ucaauuacacuauuugucuuaa

SEQ ID NO: 4092708 - RNA, 12 nt, Variola virus
ucaauuauacuc

SEQ ID NO: 4092709 - RNA, 13 nt, Variola virus
ucacaacauuucu

SEQ ID NO: 4092710 - RNA, 21 nt, Variola virus
ucacagcuccaucaguuuuau

SEQ ID NO: 4092711 - RNA, 17 nt, Variola virus
ucacauccuuuauuuua

SEQ ID NO: 4092712 - RNA, 14 nt, Variola virus
ucaccaacuacaua

SEQ ID NO: 4092713 - RNA, 22 nt, Variola virus
ucaccguuacgguaauuuuuga

SEQ ID NO: 4092714 - RNA, 21 nt, Variola virus
ucacgauaccggaaaaugcga

SEQ ID NO: 4092715 - RNA, 16 nt, Variola virus
ucacuaacaauaacua

SEQ ID NO: 4092716 - RNA, 20 nt, Variola virus
ucacuaauaucaauauacaa

SEQ ID NO: 4092717 - RNA, 19 nt, Variola virus
ucacuagguaguaauuuga

SEQ ID NO: 4092718 - RNA, 15 nt, Variola virus
ucacucaauaucuag

SEQ ID NO: 4092719 - RNA, 17 nt, Variola virus
ucacugaguuuacagau

SEQ ID NO: 4092720 - RNA, 17 nt, Variola virus
ucacugucacugucacu

SEQ ID NO: 4092721 - RNA, 19 nt, Variola virus
ucacuucuucaacuaccaa

SEQ ID NO: 4092722 - RNA, 16 nt, Variola virus
ucagaaagcuguggau

SEQ ID NO: 4092723 - RNA, 13 nt, Variola virus
ucagaaauuauuc

SEQ ID NO: 4092724 - RNA, 19 nt, Variola virus
ucagacgauccacaaucaa

SEQ ID NO: 4092725 - RNA, 16 nt, Variola virus
ucagauauaaaaaucu

SEQ ID NO: 4092726 - RNA, 16 nt, Variola virus
ucagauuuauacauau

SEQ ID NO: 4092727 - RNA, 21 nt, Variola virus
ucaggacgaauaauucuaaua

SEQ ID NO: 4092728 - RNA, 21 nt, Variola virus
ucaguucaauaacuacacauc

SEQ ID NO: 4092729 - RNA, 22 nt, Variola virus
ucaguugcauuuucaacacucg

SEQ ID NO: 4092730 - RNA, 18 nt, Variola virus
ucaguugcuguugaagag

SEQ ID NO: 4092731 - RNA, 16 nt, Variola virus
ucauaaccauuucuau

SEQ ID NO: 4092732 - RNA, 13 nt, Variola virus
ucauacagacacu

SEQ ID NO: 4092733 - RNA, 18 nt, Variola virus
ucauacuuguuaguaguu

SEQ ID NO: 4092734 - RNA, 15 nt, Variola virus
ucauauaacaacaaa

SEQ ID NO: 4092735 - RNA, 18 nt, Variola virus
ucauauacaacucucuaa

SEQ ID NO: 4092736 - RNA, 19 nt, Variola virus
ucauauauuuauagaagau

SEQ ID NO: 4092737 - RNA, 18 nt, Variola virus
ucauaugacauuucauga

SEQ ID NO: 4092738 - RNA, 14 nt, Variola virus
ucauauguaguguu

SEQ ID NO: 4092739 - RNA, 19 nt, Variola virus
ucaucaaaagacuuaugau

SEQ ID NO: 4092740 - RNA, 23 nt, Variola virus
ucauccguggauauuugauuuuu

SEQ ID NO: 4092741 - RNA, 16 nt, Variola virus
ucaucggaucuguaaa

SEQ ID NO: 4092742 - RNA, 19 nt, Variola virus
ucaucuaccaacgguauau

SEQ ID NO: 4092743 - RNA, 12 nt, Variola virus
ucaucuagaaug

SEQ ID NO: 4092744 - RNA, 19 nt, Variola virus
ucaucuauagaucauguaa

SEQ ID NO: 4092745 - RNA, 14 nt, Variola virus
ucaucuaucauaga

SEQ ID NO: 4092746 - RNA, 16 nt, Variola virus
ucaucucuagauaugu

SEQ ID NO: 4092747 - RNA, 17 nt, Variola virus
ucaucuugucuagaaug

SEQ ID NO: 4092748 - RNA, 13 nt, Variola virus
ucaugaacauaau

SEQ ID NO: 4092749 - RNA, 17 nt, Variola virus
ucaugaaucaauuagua

SEQ ID NO: 4092750 - RNA, 14 nt, Variola virus
ucaugacaaucaau

SEQ ID NO: 4092751 - RNA, 20 nt, Variola virus
ucaugguaaggucuuagaaa

SEQ ID NO: 4092752 - RNA, 16 nt, Variola virus
ucauguuuauuucuag

SEQ ID NO: 4092753 - RNA, 11 nt, Variola virus
ucauuaaacag

SEQ ID NO: 4092754 - RNA, 23 nt, Variola virus
ucauuaaacagcauuucugucaa

SEQ ID NO: 4092755 - RNA, 20 nt, Variola virus
ucauuaacuagacguuuauu

SEQ ID NO: 4092756 - RNA, 18 nt, Variola virus
ucauuacuaauagaguau

SEQ ID NO: 4092757 - RNA, 20 nt, Variola virus
ucauuauuacgucuguaguc

SEQ ID NO: 4092758 - RNA, 15 nt, Variola virus
ucauucaucuagaau

SEQ ID NO: 4092759 - RNA, 12 nt, Variola virus
ucauugauuuua

SEQ ID NO: 4092760 - RNA, 12 nt, Variola virus
ucauugauuuuu

SEQ ID NO: 4092761 - RNA, 15 nt, Variola virus
ucauuuggagaguau

SEQ ID NO: 4092762 - RNA, 14 nt, Variola virus
ucauuuguauacac

SEQ ID NO: 4092763 - RNA, 18 nt, Variola virus
ucauuuucuucaacaaau

SEQ ID NO: 4092764 - RNA, 16 nt, Variola virus
uccaaaaacaauuuga

SEQ ID NO: 4092765 - RNA, 17 nt, Variola virus
uccaaaaagaaugagua

SEQ ID NO: 4092766 - RNA, 20 nt, Variola virus
uccaaacuguugacuucacu

SEQ ID NO: 4092767 - RNA, 15 nt, Variola virus
uccaacuccuuuucg

SEQ ID NO: 4092768 - RNA, 19 nt, Variola virus
uccaauaaacagucuuuaa

SEQ ID NO: 4092769 - RNA, 12 nt, Variola virus
uccaauguuuaa

SEQ ID NO: 4092770 - RNA, 14 nt, Variola virus
uccaauuacaaaaa

SEQ ID NO: 4092771 - RNA, 21 nt, Variola virus
uccacugagaugacuggaaau

SEQ ID NO: 4092772 - RNA, 18 nt, Variola virus
uccacugucacuggaaag

SEQ ID NO: 4092773 - RNA, 17 nt, Variola virus
uccagaauguuucaaag

SEQ ID NO: 4092774 - RNA, 19 nt, Variola virus
uccagaauuguaacaacaa

SEQ ID NO: 4092775 - RNA, 16 nt, Variola virus
uccagauagaaaauau

SEQ ID NO: 4092776 - RNA, 15 nt, Variola virus
uccagaugaaugggu

SEQ ID NO: 4092777 - RNA, 20 nt, Variola virus
uccagcguuacuauacacaa

SEQ ID NO: 4092778 - RNA, 22 nt, Variola virus
uccaggaucguuucuacaaaau

SEQ ID NO: 4092779 - RNA, 17 nt, Variola virus
uccaguccaguguauaa

SEQ ID NO: 4092780 - RNA, 21 nt, Variola virus
uccauaaacaauauuaaggag

SEQ ID NO: 4092781 - RNA, 14 nt, Variola virus
uccauaauccucua

SEQ ID NO: 4092782 - RNA, 19 nt, Variola virus
uccauacauguuauuauca

SEQ ID NO: 4092783 - RNA, 22 nt, Variola virus
uccauaggcaguccagaaauau

SEQ ID NO: 4092784 - RNA, 21 nt, Variola virus
uccauauaccaaacuuucaga

SEQ ID NO: 4092785 - RNA, 17 nt, Variola virus
uccauauauguuuucau

SEQ ID NO: 4092786 - RNA, 20 nt, Variola virus
uccauaugacuaaaaugcug

SEQ ID NO: 4092787 - RNA, 19 nt, Variola virus
uccauauuucuuaauguaa

SEQ ID NO: 4092788 - RNA, 17 nt, Variola virus
uccaucagaauguuucc

SEQ ID NO: 4092789 - RNA, 20 nt, Variola virus
uccaucaugaucugguuuug

SEQ ID NO: 4092790 - RNA, 21 nt, Variola virus
uccaucgguauaaaaaucauu

SEQ ID NO: 4092791 - RNA, 15 nt, Variola virus
uccaugaucaagaag

SEQ ID NO: 4092792 - RNA, 20 nt, Variola virus
uccauuuaaggcuuuaaaau

SEQ ID NO: 4092793 - RNA, 17 nt, Variola virus
ucccaauuccaaagauc

SEQ ID NO: 4092794 - RNA, 18 nt, Variola virus
ucccaccaaauuaaugaa

SEQ ID NO: 4092795 - RNA, 18 nt, Variola virus
ucccgcauuuauacauau

SEQ ID NO: 4092796 - RNA, 18 nt, Variola virus
uccgauuguuguguacau

SEQ ID NO: 4092797 - RNA, 20 nt, Variola virus
uccguauuguauuagaguau

SEQ ID NO: 4092798 - RNA, 21 nt, Variola virus
uccuaauauugguacaugccu

SEQ ID NO: 4092799 - RNA, 14 nt, Variola virus
uccuauuacauaua

SEQ ID NO: 4092800 - RNA, 13 nt, Variola virus
uccuauuaugaaa

SEQ ID NO: 4092801 - RNA, 21 nt, Variola virus
uccuccaguagcaugugguuc

SEQ ID NO: 4092802 - RNA, 17 nt, Variola virus
uccuccuguagauaugu

SEQ ID NO: 4092803 - RNA, 22 nt, Variola virus
uccugacgucuagaguuuauau

SEQ ID NO: 4092804 - RNA, 14 nt, Variola virus
uccuguaauacuuu

SEQ ID NO: 4092805 - RNA, 18 nt, Variola virus
uccuguauaugugaauau

SEQ ID NO: 4092806 - RNA, 20 nt, Variola virus
uccuuaagauguuugagaau

SEQ ID NO: 4092807 - RNA, 20 nt, Variola virus
uccuuaauucuagcaucuuc

SEQ ID NO: 4092808 - RNA, 14 nt, Variola virus
uccuuacacaaaua

SEQ ID NO: 4092809 - RNA, 17 nt, Variola virus
uccuuggaauugauaga

SEQ ID NO: 4092810 - RNA, 14 nt, Variola virus
uccuuuuacuacaa

SEQ ID NO: 4092811 - RNA, 11 nt, Variola virus
ucgaaaacuag

SEQ ID NO: 4092812 - RNA, 19 nt, Variola virus
ucgaaauaauauuauccuu

SEQ ID NO: 4092813 - RNA, 13 nt, Variola virus
ucgaauaaaguau

SEQ ID NO: 4092814 - RNA, 22 nt, Variola virus
ucgaauaaguuugcagacaaac

SEQ ID NO: 4092815 - RNA, 12 nt, Variola virus
ucgaauacuuau

SEQ ID NO: 4092816 - RNA, 18 nt, Variola virus
ucgaaucagaagucauac

SEQ ID NO: 4092817 - RNA, 18 nt, Variola virus
ucgaaugccauagaauaa

SEQ ID NO: 4092818 - RNA, 16 nt, Variola virus
ucgacucaguauacaa

SEQ ID NO: 4092819 - RNA, 17 nt, Variola virus
ucgauaacacauuuuca

SEQ ID NO: 4092820 - RNA, 13 nt, Variola virus
ucgauaauuauuu

SEQ ID NO: 4092821 - RNA, 15 nt, Variola virus
ucgauacauuuugca

SEQ ID NO: 4092822 - RNA, 16 nt, Variola virus
ucgauagaggaaguau

SEQ ID NO: 4092823 - RNA, 13 nt, Variola virus
ccuagcuuuguua

SEQ ID NO: 4092824 - RNA, 17 nt, Variola virus
ccuagucauauguuuaa

SEQ ID NO: 4092825 - RNA, 16 nt, Variola virus
ccuauaaacaugaauu

SEQ ID NO: 4092826 - RNA, 16 nt, Variola virus
ccuauacuauguuaua

SEQ ID NO: 4092827 - RNA, 14 nt, Variola virus
ccuaucauguauuu

SEQ ID NO: 4092828 - RNA, 15 nt, Variola virus
ccuauucccaacaau

SEQ ID NO: 4092829 - RNA, 16 nt, Variola virus
ccuauucuaaauggau

SEQ ID NO: 4092830 - RNA, 17 nt, Variola virus
ccucaaacucuauuuua

SEQ ID NO: 4092831 - RNA, 23 nt, Variola virus
ccucucaccagaagaggagcuac

SEQ ID NO: 4092832 - RNA, 17 nt, Variola virus
ccugccauuuuagagau

SEQ ID NO: 4092833 - RNA, 21 nt, Variola virus
ccugguagacggaauguuuua

SEQ ID NO: 4092834 - RNA, 13 nt, Variola virus
ccuguaacaaaaa

SEQ ID NO: 4092835 - RNA, 12 nt, Variola virus
ccuguguuuaua

SEQ ID NO: 4092836 - RNA, 21 nt, Variola virus
ccuguuucuacuaacuuuuug

SEQ ID NO: 4092837 - RNA, 14 nt, Variola virus
ccuuaauauaauag

SEQ ID NO: 4092838 - RNA, 22 nt, Variola virus
ccuuauagaggauguuaaacaa

SEQ ID NO: 4092839 - RNA, 12 nt, Variola virus
ccuuaucuucua

SEQ ID NO: 4092840 - RNA, 20 nt, Variola virus
ccuuccacauccaugagauu

SEQ ID NO: 4092841 - RNA, 15 nt, Variola virus
ccuuguauguuuuua

SEQ ID NO: 4092842 - RNA, 15 nt, Variola virus
ccuuuaaauccucua

SEQ ID NO: 4092843 - RNA, 22 nt, Variola virus
ccuuuaucauuaauaauuucua

SEQ ID NO: 4092844 - RNA, 15 nt, Variola virus
cgaaaagaaacagau

SEQ ID NO: 4092845 - RNA, 15 nt, Variola virus
cgaaaauacacaaau

SEQ ID NO: 4092846 - RNA, 17 nt, Variola virus
cgaaaauugcuauuuca

SEQ ID NO: 4092847 - RNA, 16 nt, Variola virus
cgaaacuuagaagagu

SEQ ID NO: 4092848 - RNA, 20 nt, Variola virus
cgaaagauuuuauuucacau

SEQ ID NO: 4092849 - RNA, 22 nt, Variola virus
cgaacacuaacgcgcaugauuu

SEQ ID NO: 4092850 - RNA, 19 nt, Variola virus
cgaacuaccugauuuugca

SEQ ID NO: 4092851 - RNA, 19 nt, Variola virus
cgaagauauacacacuaau

SEQ ID NO: 4092852 - RNA, 13 nt, Variola virus
cgaauaaauagau

SEQ ID NO: 4092853 - RNA, 13 nt, Variola virus
cgaauaacaaaaa

SEQ ID NO: 4092854 - RNA, 15 nt, Variola virus
cgaauccuguuucua

SEQ ID NO: 4092855 - RNA, 15 nt, Variola virus
cgaaucuaugauauu

SEQ ID NO: 4092856 - RNA, 17 nt, Variola virus
cgacucauaagaaagag

SEQ ID NO: 4092857 - RNA, 17 nt, Variola virus
cgacucuacuaguucca

SEQ ID NO: 4092858 - RNA, 14 nt, Variola virus
cgagaccuacagug

SEQ ID NO: 4092859 - RNA, 12 nt, Variola virus
cgaggagacugu

SEQ ID NO: 4092860 - RNA, 22 nt, Variola virus
cgagugaguacggauuaaacau

SEQ ID NO: 4092861 - RNA, 17 nt, Variola virus
cgaguuuaaaacuucua

SEQ ID NO: 4092862 - RNA, 17 nt, Variola virus
cgauaacggaauagacu

SEQ ID NO: 4092863 - RNA, 19 nt, Variola virus
cgauaaugugguuacucuu

SEQ ID NO: 4092864 - RNA, 22 nt, Variola virus
cgauaauuguuucauauguuuu

SEQ ID NO: 4092865 - RNA, 17 nt, Variola virus
cgaucauauuauuuuua

SEQ ID NO: 4092866 - RNA, 16 nt, Variola virus
cgaucucaaucaucuu

SEQ ID NO: 4092867 - RNA, 15 nt, Variola virus
cgauuaaacuuuaau

SEQ ID NO: 4092868 - RNA, 17 nt, Variola virus
cgauuuuaaaucaucuu

SEQ ID NO: 4092869 - RNA, 14 nt, Variola virus
cgcauguggaugga

SEQ ID NO: 4092870 - RNA, 12 nt, Variola virus
cgcauuaaugag

SEQ ID NO: 4092871 - RNA, 19 nt, Variola virus
cgccucaguugucauaaac

SEQ ID NO: 4092872 - RNA, 22 nt, Variola virus
cgcgaagcaauauauauacagu

SEQ ID NO: 4092873 - RNA, 13 nt, Variola virus
cgcgggauacauc

SEQ ID NO: 4092874 - RNA, 17 nt, Variola virus
cgcuacaauaacucuau

SEQ ID NO: 4092875 - RNA, 13 nt, Variola virus
cgcuguaucacaa

SEQ ID NO: 4092876 - RNA, 16 nt, Variola virus
cgcuuaacaucuucua

SEQ ID NO: 4092877 - RNA, 13 nt, Variola virus
cggaaaguauuuc

SEQ ID NO: 4092878 - RNA, 13 nt, Variola virus
cggaaaugauaua

SEQ ID NO: 4092879 - RNA, 17 nt, Variola virus
cggaaauguaauucuaa

SEQ ID NO: 4092880 - RNA, 13 nt, Variola virus
cggaacaauaaac

SEQ ID NO: 4092881 - RNA, 15 nt, Variola virus
cggaauaaguagaca

SEQ ID NO: 4092882 - RNA, 22 nt, Variola virus
cggacuuauauagcuuauucca

SEQ ID NO: 4092883 - RNA, 22 nt, Variola virus
cggauacuaguaguuucacaaa

SEQ ID NO: 4092884 - RNA, 17 nt, Variola virus
cggcauaguuucuguaa

SEQ ID NO: 4092885 - RNA, 23 nt, Variola virus
cggcauuucuuuuuaaugauaua

SEQ ID NO: 4092886 - RNA, 16 nt, Variola virus
cgggaauuaauguccu

SEQ ID NO: 4092887 - RNA, 15 nt, Variola virus
cgggaucauuauuua

SEQ ID NO: 4092888 - RNA, 22 nt, Variola virus
cgggucaaacaauuuuaacaga

SEQ ID NO: 4092889 - RNA, 16 nt, Variola virus
cgguguguagaaagug

SEQ ID NO: 4092890 - RNA, 14 nt, Variola virus
cgguuuuaacuuua

SEQ ID NO: 4092891 - RNA, 13 nt, Variola virus
cgguuuuucuugg

SEQ ID NO: 4092892 - RNA, 19 nt, Variola virus
cguacaugagucugaguuc

SEQ ID NO: 4092893 - RNA, 22 nt, Variola virus
cguaccaacucauuuaaauauc

SEQ ID NO: 4092894 - RNA, 22 nt, Variola virus
cguagcgucuagucuuaaaugg

SEQ ID NO: 4092895 - RNA, 13 nt, Variola virus
cguaguaacucua

SEQ ID NO: 4092896 - RNA, 13 nt, Variola virus
cguauaauagaca

SEQ ID NO: 4092897 - RNA, 18 nt, Variola virus
cguauaauagacauaaug

SEQ ID NO: 4092898 - RNA, 21 nt, Variola virus
uggaguauauauuuaucucuu

SEQ ID NO: 4092899 - RNA, 21 nt, Variola virus
uggauaaugguacucuagaau

SEQ ID NO: 4092900 - RNA, 14 nt, Variola virus
uggauaauuuccau

SEQ ID NO: 4092901 - RNA, 17 nt, Variola virus
uggauacaauaaauguu

SEQ ID NO: 4092902 - RNA, 14 nt, Variola virus
uggauauguuuuua

SEQ ID NO: 4092903 - RNA, 22 nt, Variola virus
uggauauucgauaacagcauuu

SEQ ID NO: 4092904 - RNA, 15 nt, Variola virus
uggaucaaauggaua

SEQ ID NO: 4092905 - RNA, 16 nt, Variola virus
uggaucuaguuuucag

SEQ ID NO: 4092906 - RNA, 17 nt, Variola virus
uggaucuaugguuucca

SEQ ID NO: 4092907 - RNA, 18 nt, Variola virus
uggaucuaugguuuccau

SEQ ID NO: 4092908 - RNA, 15 nt, Variola virus
uggaugaauucuaug

SEQ ID NO: 4092909 - RNA, 15 nt, Variola virus
uggauguacauguau

SEQ ID NO: 4092910 - RNA, 18 nt, Variola virus
uggauuaucccuuugaua

SEQ ID NO: 4092911 - RNA, 12 nt, Variola virus
uggcaauguuuc

SEQ ID NO: 4092912 - RNA, 23 nt, Variola virus
uggcugaaauuagagcucaucua

SEQ ID NO: 4092913 - RNA, 20 nt, Variola virus
ugggaaaaacgaaauuaucg

SEQ ID NO: 4092914 - RNA, 21 nt, Variola virus
ugggacuauuggaauguguua

SEQ ID NO: 4092915 - RNA, 16 nt, Variola virus
ugggaggcuugaagug

SEQ ID NO: 4092916 - RNA, 20 nt, Variola virus
ugggugugguuaaacgaaag

SEQ ID NO: 4092917 - RNA, 16 nt, Variola virus
ugguaaaguaaaucau

SEQ ID NO: 4092918 - RNA, 23 nt, Variola virus
ugguacguaaccgaaucuuccca

SEQ ID NO: 4092919 - RNA, 14 nt, Variola virus
ugguaucaacagau

SEQ ID NO: 4092920 - RNA, 20 nt, Variola virus
ugguauccuggcgaauauua

SEQ ID NO: 4092921 - RNA, 19 nt, Variola virus
ugguauuagaaucaaggau

SEQ ID NO: 4092922 - RNA, 15 nt, Variola virus
ugguauuugaaaucg

SEQ ID NO: 4092923 - RNA, 14 nt, Variola virus
uggucaaccuuugu

SEQ ID NO: 4092924 - RNA, 17 nt, Variola virus
uggucauaauagaaugu

SEQ ID NO: 4092925 - RNA, 16 nt, Variola virus
ugguccuauugcuucc

SEQ ID NO: 4092926 - RNA, 13 nt, Variola virus
ugguguaaaucua

SEQ ID NO: 4092927 - RNA, 22 nt, Variola virus
ugguuccacaauucauuuccau

SEQ ID NO: 4092928 - RNA, 13 nt, Variola virus
ugguuuaggaaag

SEQ ID NO: 4092929 - RNA, 17 nt, Variola virus
ugguuucauguuuucaa

SEQ ID NO: 4092930 - RNA, 13 nt, Variola virus
ugguuuucuaaau

SEQ ID NO: 4092931 - RNA, 22 nt, Variola virus
uguaaaaaacaucacgaaaucu

SEQ ID NO: 4092932 - RNA, 16 nt, Variola virus
uguaaaagcauauguu

SEQ ID NO: 4092933 - RNA, 14 nt, Variola virus
uguaaacacagaua

SEQ ID NO: 4092934 - RNA, 23 nt, Variola virus
uguaaacuugacaaaaauuguga

SEQ ID NO: 4092935 - RNA, 20 nt, Variola virus
uguaaagaacaaauguugua

SEQ ID NO: 4092936 - RNA, 19 nt, Variola virus
uguaaauagaacauacuuu

SEQ ID NO: 4092937 - RNA, 21 nt, Variola virus
uguaaauauaucaauaagcau

SEQ ID NO: 4092938 - RNA, 14 nt, Variola virus
uguaaauauaucua

SEQ ID NO: 4092939 - RNA, 15 nt, Variola virus
uguaacaauauuaca

SEQ ID NO: 4092940 - RNA, 15 nt, Variola virus
uguaaccuuaacaau

SEQ ID NO: 4092941 - RNA, 16 nt, Variola virus
uguaacguuagacauu

SEQ ID NO: 4092942 - RNA, 18 nt, Variola virus
uguaagacuugugggaaa

SEQ ID NO: 4092943 - RNA, 21 nt, Variola virus
uguaauaccagcgugaacaac

SEQ ID NO: 4092944 - RNA, 13 nt, Variola virus
uguaauagaauuu

SEQ ID NO: 4092945 - RNA, 14 nt, Variola virus
uguaauaguuucca

SEQ ID NO: 4092946 - RNA, 16 nt, Variola virus
uguaauuacauacuuu

SEQ ID NO: 4092947 - RNA, 15 nt, Variola virus
uguacauacaucacu

SEQ ID NO: 4092948 - RNA, 16 nt, Variola virus
uguacauauuuguaca

SEQ ID NO: 4092949 - RNA, 13 nt, Variola virus
uguacauguaguu

SEQ ID NO: 4092950 - RNA, 13 nt, Variola virus
uguagaacucaug

SEQ ID NO: 4092951 - RNA, 21 nt, Variola virus
uguagagaaucgcuagaugcu

SEQ ID NO: 4092952 - RNA, 23 nt, Variola virus
uguagauaauaacuaaaaaucaa

SEQ ID NO: 4092953 - RNA, 12 nt, Variola virus
uguaguaguaua

SEQ ID NO: 4092954 - RNA, 18 nt, Variola virus
uguauaacagagccaucu

SEQ ID NO: 4092955 - RNA, 12 nt, Variola virus
uguauacuguau

SEQ ID NO: 4092956 - RNA, 18 nt, Variola virus
uguauauaauaguuucua

SEQ ID NO: 4092957 - RNA, 18 nt, Variola virus
uguauccggcaauauuua

SEQ ID NO: 4092958 - RNA, 14 nt, Variola virus
uguaugaaaugcuu

SEQ ID NO: 4092959 - RNA, 18 nt, Variola virus
uguaugauaaaauucuua

SEQ ID NO: 4092960 - RNA, 17 nt, Variola virus
uguaugucuuauguaua

SEQ ID NO: 4092961 - RNA, 22 nt, Variola virus
uguaugugcauucuuuaugaca

SEQ ID NO: 4092962 - RNA, 18 nt, Variola virus
uguauuauccaauacaga

SEQ ID NO: 4092963 - RNA, 18 nt, Variola virus
uguauucacuuaacaauu

SEQ ID NO: 4092964 - RNA, 23 nt, Variola virus
uguauucagaauuaauagauaua

SEQ ID NO: 4092965 - RNA, 15 nt, Variola virus
uguauucucuuacaa

SEQ ID NO: 4092966 - RNA, 17 nt, Variola virus
uguauucuuuuuaagau

SEQ ID NO: 4092967 - RNA, 14 nt, Variola virus
ugucaaaggaugaa

SEQ ID NO: 4092968 - RNA, 23 nt, Variola virus
ugucaauacuuuuguuacuaaua

SEQ ID NO: 4092969 - RNA, 19 nt, Variola virus
ugucaaugguauguaucua

SEQ ID NO: 4092970 - RNA, 21 nt, Variola virus
ugucacucucccuauaucuuc

SEQ ID NO: 4092971 - RNA, 21 nt, Variola virus
ugucaucgaaaugguagauau

SEQ ID NO: 4092972 - RNA, 15 nt, Variola virus
uguccuaaaauacua

SEQ ID NO: 4092973 - RNA, 17 nt, Variola virus
ugucgccaaucuuacac

SEQ ID NO: 4092974 - RNA, 12 nt, Variola virus
ugucgguaaacg

SEQ ID NO: 4092975 - RNA, 21 nt, Variola virus
ugucuacaaccgcuacauaau

SEQ ID NO: 4092976 - RNA, 19 nt, Variola virus
ugucuacauaaauaugcaa

SEQ ID NO: 4092977 - RNA, 22 nt, Variola virus
ugucuagaggcuaaaacauauu

SEQ ID NO: 4092978 - RNA, 13 nt, Variola virus
ugucuauaucuuc

SEQ ID NO: 4092979 - RNA, 16 nt, Variola virus
ugucuaucucuguaaa

SEQ ID NO: 4092980 - RNA, 12 nt, Variola virus
ugucuccauuac

SEQ ID NO: 4092981 - RNA, 15 nt, Variola virus
ugucuuucucuuuua

SEQ ID NO: 4092982 - RNA, 18 nt, Variola virus
ugugacaguuuucucauc

SEQ ID NO: 4092983 - RNA, 19 nt, Variola virus
ugugauaccaauaaguuuu

SEQ ID NO: 4092984 - RNA, 20 nt, Variola virus
ugugaugcuguagcaucaaa

SEQ ID NO: 4092985 - RNA, 12 nt, Variola virus
ugugauggauuu

SEQ ID NO: 4092986 - RNA, 22 nt, Variola virus
ugugauuaaugugugacacauu

SEQ ID NO: 4092987 - RNA, 13 nt, Variola virus
uguggguauacaa

SEQ ID NO: 4092988 - RNA, 14 nt, Variola virus
uguguacuuguaca

SEQ ID NO: 4092989 - RNA, 16 nt, Variola virus
uguguccggaguuaga

SEQ ID NO: 4092990 - RNA, 19 nt, Variola virus
ugugucuccauguacauac

SEQ ID NO: 4092991 - RNA, 14 nt, Variola virus
uguuaaaaaugauu

SEQ ID NO: 4092992 - RNA, 19 nt, Variola virus
uguuaagaaugauuacuaa

SEQ ID NO: 4092993 - RNA, 12 nt, Variola virus
uguuaauaacug

SEQ ID NO: 4092994 - RNA, 18 nt, Variola virus
uguuaauaaguaaaugaa

SEQ ID NO: 4092995 - RNA, 21 nt, Variola virus
uguuaauacaucaauggaaga

SEQ ID NO: 4092996 - RNA, 13 nt, Variola virus
uguuaauguauua

SEQ ID NO: 4092997 - RNA, 19 nt, Variola virus
aaacuuguaagaaguaaau

SEQ ID NO: 4092998 - RNA, 15 nt, Variola virus
aaacuuuauuaucca

SEQ ID NO: 4092999 - RNA, 21 nt, Variola virus
aaacuuucuagaacauacuga

SEQ ID NO: 4093000 - RNA, 15 nt, Variola virus
aaagaaaauauggaa

SEQ ID NO: 4093001 - RNA, 18 nt, Variola virus
aaagaagaucauacaguc

SEQ ID NO: 4093002 - RNA, 15 nt, Variola virus
aaagaaguccauuua

SEQ ID NO: 4093003 - RNA, 15 nt, Variola virus
aaagaaucaucauau

SEQ ID NO: 4093004 - RNA, 23 nt, Variola virus
aaagaauuuguuguuucuauuua

SEQ ID NO: 4093005 - RNA, 18 nt, Variola virus
aaagaccgaauacauaac

SEQ ID NO: 4093006 - RNA, 14 nt, Variola virus
aaagacucagaaga

SEQ ID NO: 4093007 - RNA, 24 nt, Variola virus
aaagagaacguauuuauuguuacu

SEQ ID NO: 4093008 - RNA, 16 nt, Variola virus
aaagagaauuauauau

SEQ ID NO: 4093009 - RNA, 15 nt, Variola virus
aaagauuuuauuuca

SEQ ID NO: 4093010 - RNA, 12 nt, Variola virus
aaagcauauucc

SEQ ID NO: 4093011 - RNA, 17 nt, Variola virus
aaagcgugugcguguau

SEQ ID NO: 4093012 - RNA, 15 nt, Variola virus
aaaggagagaaugua

SEQ ID NO: 4093013 - RNA, 14 nt, Variola virus
aaagguaagaguua

SEQ ID NO: 4093014 - RNA, 15 nt, Variola virus
aaagguauacgaaug

SEQ ID NO: 4093015 - RNA, 17 nt, Variola virus
aaaggugacacauguac

SEQ ID NO: 4093016 - RNA, 16 nt, Variola virus
aaagguuauaguguac

SEQ ID NO: 4093017 - RNA, 14 nt, Variola virus
aaaguaaaaaagaa

SEQ ID NO: 4093018 - RNA, 19 nt, Variola virus
aaaguagaaaauauauucu

SEQ ID NO: 4093019 - RNA, 22 nt, Variola virus
aaaguaguucaacauaauauua

SEQ ID NO: 4093020 - RNA, 22 nt, Variola virus
aaagucuuuacagauuucaucc

SEQ ID NO: 4093021 - RNA, 12 nt, Variola virus
aaagugaaaauc

SEQ ID NO: 4093022 - RNA, 17 nt, Variola virus
aaaguuaauaaucucau

SEQ ID NO: 4093023 - RNA, 17 nt, Variola virus
aaauaaaacuauaguau

SEQ ID NO: 4093024 - RNA, 23 nt, Variola virus
aaauaaaauauaaaauauuggaa

SEQ ID NO: 4093025 - RNA, 18 nt, Variola virus
aaauaaacaaaauaaugu

SEQ ID NO: 4093026 - RNA, 11 nt, Variola virus
aaauaaauguc

SEQ ID NO: 4093027 - RNA, 17 nt, Variola virus
aaauaacaauuaacaau

SEQ ID NO: 4093028 - RNA, 20 nt, Variola virus
aaauaacaccauuacacgaa

SEQ ID NO: 4093029 - RNA, 18 nt, Variola virus
aaauaacaguaucauuua

SEQ ID NO: 4093030 - RNA, 20 nt, Variola virus
aaauaacauauagauuuuau

SEQ ID NO: 4093031 - RNA, 19 nt, Variola virus
aaauaagaucaguaacagu

SEQ ID NO: 4093032 - RNA, 20 nt, Variola virus
aaauaaguaguaauaaugau

SEQ ID NO: 4093033 - RNA, 12 nt, Variola virus
aaauaauaauau

SEQ ID NO: 4093034 - RNA, 19 nt, Variola virus
aaauacauauuuuuuguaa

SEQ ID NO: 4093035 - RNA, 21 nt, Variola virus
aaauacgcaaucgauguguca

SEQ ID NO: 4093036 - RNA, 15 nt, Variola virus
aaauacguccaucag

SEQ ID NO: 4093037 - RNA, 19 nt, Variola virus
aaauacguucuauugugua

SEQ ID NO: 4093038 - RNA, 13 nt, Variola virus
aaauagaacuuau

SEQ ID NO: 4093039 - RNA, 14 nt, Variola virus
aaauagauccugaa

SEQ ID NO: 4093040 - RNA, 15 nt, Variola virus
aaauagcgcugaaaa

SEQ ID NO: 4093041 - RNA, 20 nt, Variola virus
aaauagcguucgucaacaua

SEQ ID NO: 4093042 - RNA, 21 nt, Variola virus
aaauagcucuuaguaugggaa

SEQ ID NO: 4093043 - RNA, 21 nt, Variola virus
aaauaguaaaugagagaucua

SEQ ID NO: 4093044 - RNA, 14 nt, Variola virus
aaauauaaacaguc

SEQ ID NO: 4093045 - RNA, 15 nt, Variola virus
aaauauaauaaugau

SEQ ID NO: 4093046 - RNA, 16 nt, Variola virus
aaauauaaucguguau

SEQ ID NO: 4093047 - RNA, 12 nt, Variola virus
aaauauaaugau

SEQ ID NO: 4093048 - RNA, 16 nt, Variola virus
aaauauaauguuguau

SEQ ID NO: 4093049 - RNA, 14 nt, Variola virus
aaauauaauuuuau

SEQ ID NO: 4093050 - RNA, 22 nt, Variola virus
aaauauagaucuuauuuaguau

SEQ ID NO: 4093051 - RNA, 21 nt, Variola virus
aaauauaucauucgauaagau

SEQ ID NO: 4093052 - RNA, 18 nt, Variola virus
aaauauaugcucauauau

SEQ ID NO: 4093053 - RNA, 17 nt, Variola virus
aaauauauuuucauuua

SEQ ID NO: 4093054 - RNA, 18 nt, Variola virus
aaauaucauuaacgauau

SEQ ID NO: 4093055 - RNA, 22 nt, Variola virus
aaauaucauuuuuugaauauau

SEQ ID NO: 4093056 - RNA, 20 nt, Variola virus
aaauaucgauguuaauaaca

SEQ ID NO: 4093057 - RNA, 13 nt, Variola virus
aaauaucuauuca

SEQ ID NO: 4093058 - RNA, 14 nt, Variola virus
aaauauguaauaau

SEQ ID NO: 4093059 - RNA, 22 nt, Variola virus
aaauauuaauaacauuacauau

SEQ ID NO: 4093060 - RNA, 12 nt, Variola virus
aaauauucauua

SEQ ID NO: 4093061 - RNA, 15 nt, Variola virus
aaauauucuacauau

SEQ ID NO: 4093062 - RNA, 23 nt, Variola virus
aaauauuguauccauacauacau

SEQ ID NO: 4093063 - RNA, 17 nt, Variola virus
aaauauuguuaaauaau

SEQ ID NO: 4093064 - RNA, 22 nt, Variola virus
aaauauuucuacuacuucauua

SEQ ID NO: 4093065 - RNA, 21 nt, Variola virus
aaauauuuuuggacaguguuu

SEQ ID NO: 4093066 - RNA, 14 nt, Variola virus
aaaucaagacuaca

SEQ ID NO: 4093067 - RNA, 17 nt, Variola virus
aaaucacgagaacuauu

SEQ ID NO: 4093068 - RNA, 19 nt, Variola virus
aaaucacuuuuuauacuaa

SEQ ID NO: 4093069 - RNA, 21 nt, Variola virus
aaaucagauaucgauguuaua

SEQ ID NO: 4093070 - RNA, 13 nt, Variola virus
aaauccuguaaua

SEQ ID NO: 4093071 - RNA, 17 nt, Variola virus
aaauccuguaauacuuu

SEQ ID NO: 4093072 - RNA, 21 nt, Variola virus
aaauccuguaauacuuuuagu

SEQ ID NO: 4093073 - RNA, 14 nt, Variola virus
aaaucgcaucuucu

SEQ ID NO: 4093074 - RNA, 19 nt, Variola virus
aaaucggauggauugguaa

SEQ ID NO: 4093075 - RNA, 17 nt, Variola virus
aaaucuaacagauacaa

SEQ ID NO: 4093076 - RNA, 14 nt, Variola virus
aaaucucguaguau

SEQ ID NO: 4093077 - RNA, 23 nt, Variola virus
aaaucuuucauuucuuccuggua

SEQ ID NO: 4093078 - RNA, 14 nt, Variola virus
aaaugaauuauuua

SEQ ID NO: 4093079 - RNA, 15 nt, Variola virus
aaaugauaacuagau

SEQ ID NO: 4093080 - RNA, 13 nt, Variola virus
aaaugauacugau

SEQ ID NO: 4093081 - RNA, 11 nt, Variola virus
aaauggauaau

SEQ ID NO: 4093082 - RNA, 22 nt, Variola virus
aaauggauaauauccauauuga

SEQ ID NO: 4093083 - RNA, 15 nt, Variola virus
aaaugguacaaucag

SEQ ID NO: 4093084 - RNA, 15 nt, Variola virus
aaauguaaauccaau

SEQ ID NO: 4093085 - RNA, 18 nt, Variola virus
aaauguauauuuuccauu

SEQ ID NO: 4093086 - RNA, 21 nt, Variola virus
aaauguauuuuuuaugauaua

SEQ ID NO: 4093087 - RNA, 14 nt, Variola virus
aaauguguaauaau

SEQ ID NO: 4093088 - RNA, 23 nt, Variola virus
aaauuaaccgauaaaaagacuuu

SEQ ID NO: 4093089 - RNA, 13 nt, Variola virus
aaauuagaaagua

SEQ ID NO: 4093090 - RNA, 15 nt, Variola virus
aaauuauaugaccaa

SEQ ID NO: 4093091 - RNA, 12 nt, Variola virus
aaauuauauucu

SEQ ID NO: 4093092 - RNA, 18 nt, Variola virus
aaauuaucaaauacuuca

SEQ ID NO: 4093093 - RNA, 20 nt, Variola virus
aaauuauuaaacaauacucu

SEQ ID NO: 4093094 - RNA, 22 nt, Variola virus
aaauuauucacuauaucaguau

SEQ ID NO: 4093095 - RNA, 21 nt, Variola virus
aaauuauuccaauuauuugaa

SEQ ID NO: 4093096 - RNA, 16 nt, Variola virus
aaauuauugcaaacga

SEQ ID NO: 4093097 - RNA, 21 nt, Variola virus
aaauuauuuaauuuaauacau

SEQ ID NO: 4093098 - RNA, 14 nt, Variola virus
aaauuccaccauuu

SEQ ID NO: 4093099 - RNA, 14 nt, Variola virus
aaauugauaaugag

SEQ ID NO: 4093100 - RNA, 23 nt, Variola virus
aaauuguuuaguuuucucuuuuu

SEQ ID NO: 4093101 - RNA, 15 nt, Variola virus
aaauuuaaauacuuu

SEQ ID NO: 4093102 - RNA, 18 nt, Variola virus
aaauuucuuuuucaaaga

SEQ ID NO: 4093103 - RNA, 17 nt, Variola virus
aaauuuuacuacauagu

SEQ ID NO: 4093104 - RNA, 14 nt, Variola virus
aaauuuuagaaaua

SEQ ID NO: 4093105 - RNA, 23 nt, Variola virus
aaauuuuguugauuacucuuuuu

SEQ ID NO: 4093106 - RNA, 13 nt, Variola virus
aacaaaaauugau

SEQ ID NO: 4093107 - RNA, 18 nt, Variola virus
aacaaagauauuaccagu

SEQ ID NO: 4093108 - RNA, 17 nt, Variola virus
aacaaauagcuacagua

SEQ ID NO: 4093109 - RNA, 22 nt, Variola virus
aacaaaugcaccaaaguuauau

SEQ ID NO: 4093110 - RNA, 19 nt, Variola virus
aacaaccuuggcauauuga

SEQ ID NO: 4093111 - RNA, 14 nt, Variola virus
aacaacuaaaaugu

SEQ ID NO: 4093112 - RNA, 13 nt, Variola virus
aacaacuguaaaa

SEQ ID NO: 4093113 - RNA, 17 nt, Variola virus
aacaaguuggaugauau

SEQ ID NO: 4093114 - RNA, 13 nt, Variola virus
aacaaguuuuuau

SEQ ID NO: 4093115 - RNA, 15 nt, Variola virus
aacaauaguuauuac

SEQ ID NO: 4093116 - RNA, 15 nt, Variola virus
aacaauaugcaaaua

SEQ ID NO: 4093117 - RNA, 12 nt, Variola virus
aacaauauuaag

SEQ ID NO: 4093118 - RNA, 20 nt, Variola virus
aacaauuaauuaauacagua

SEQ ID NO: 4093119 - RNA, 22 nt, Variola virus
aacaauuuuguauuauucugaa

SEQ ID NO: 4093120 - RNA, 14 nt, Variola virus
aacacaaaauauga

SEQ ID NO: 4093121 - RNA, 15 nt, Variola virus
aacaccaaguagaaa

SEQ ID NO: 4093122 - RNA, 16 nt, Variola virus
aacaccuauaagauua

SEQ ID NO: 4093123 - RNA, 15 nt, Variola virus
aacacgauuuaaaau

SEQ ID NO: 4093124 - RNA, 14 nt, Variola virus
aacacuaaaaauau

SEQ ID NO: 4093125 - RNA, 18 nt, Variola virus
aacacucgacugaauauu

SEQ ID NO: 4093126 - RNA, 23 nt, Variola virus
aacacuuauuaaguucuuuuucc

SEQ ID NO: 4093127 - RNA, 17 nt, Variola virus
aacagcuuuaacagaug

SEQ ID NO: 4093128 - RNA, 19 nt, Variola virus
aacaggugguauauuauau

SEQ ID NO: 4093129 - RNA, 16 nt, Variola virus
aacaguauguaaaagu

SEQ ID NO: 4093130 - RNA, 17 nt, Variola virus
aacaguuauuuucugaa

SEQ ID NO: 4093131 - RNA, 21 nt, Variola virus
aacaguuugguauuagaauca

SEQ ID NO: 4093132 - RNA, 13 nt, Variola virus
aacauaaaaauau

SEQ ID NO: 4093133 - RNA, 16 nt, Variola virus
aacauaaacacagaua

SEQ ID NO: 4093134 - RNA, 15 nt, Variola virus
aacauaauuuucuaa

SEQ ID NO: 4093135 - RNA, 17 nt, Variola virus
aacauaguaaaaaauau

SEQ ID NO: 4093136 - RNA, 15 nt, Variola virus
aacauauuuuucuau

SEQ ID NO: 4093137 - RNA, 23 nt, Variola virus
aacaucauacaucaauuaacauu

SEQ ID NO: 4093138 - RNA, 17 nt, Variola virus
aacauccauuucuagaa

SEQ ID NO: 4093139 - RNA, 20 nt, Variola virus
aacaucgaagaugaaucaaa

SEQ ID NO: 4093140 - RNA, 18 nt, Variola virus
aacaucggaaaaaaaucu

SEQ ID NO: 4093141 - RNA, 20 nt, Variola virus
aacaucuuggggaaauaugg

SEQ ID NO: 4093142 - RNA, 16 nt, Variola virus
aacaugcuuuucuaua

SEQ ID NO: 4093143 - RNA, 13 nt, Variola virus
aacauuaaaaugu

SEQ ID NO: 4093144 - RNA, 20 nt, Variola virus
aacauugcagccauuuucua

SEQ ID NO: 4093145 - RNA, 11 nt, Variola virus
aaccaaaucaa

SEQ ID NO: 4093146 - RNA, 20 nt, Variola virus
aaccaaggacagaaaaaugu

SEQ ID NO: 4093147 - RNA, 16 nt, Variola virus
aaccacggaucguaau

SEQ ID NO: 4093148 - RNA, 16 nt, Variola virus
aaccagaauuguaaaa

SEQ ID NO: 4093149 - RNA, 22 nt, Variola virus
aaccaguaucucuuaacgaugu

SEQ ID NO: 4093150 - RNA, 20 nt, Variola virus
aaccaugcuacaaucauuau

SEQ ID NO: 4093151 - RNA, 15 nt, Variola virus
aacccagauaauaac

SEQ ID NO: 4093152 - RNA, 14 nt, Variola virus
aacccauaaauaca

SEQ ID NO: 4093153 - RNA, 17 nt, Variola virus
aacccguuuauacagug

SEQ ID NO: 4093154 - RNA, 22 nt, Variola virus
aaccgucauucaucuagaaugg

SEQ ID NO: 4093155 - RNA, 12 nt, Variola virus
aaccuaauucca

SEQ ID NO: 4093156 - RNA, 14 nt, Variola virus
aaccuagaaaauau

SEQ ID NO: 4093157 - RNA, 20 nt, Variola virus
aaccucacuguuaaaaauau

SEQ ID NO: 4093158 - RNA, 19 nt, Variola virus
aaccugaucuggaaaauaa

SEQ ID NO: 4093159 - RNA, 12 nt, Variola virus
aaccuucuuauu

SEQ ID NO: 4093160 - RNA, 11 nt, Variola virus
aaccuuuguug

SEQ ID NO: 4093161 - RNA, 17 nt, Variola virus
aacgacuuauaauuaau

SEQ ID NO: 4093162 - RNA, 22 nt, Variola virus
aacgagccaguaaucuuaccau

SEQ ID NO: 4093163 - RNA, 21 nt, Variola virus
aacgaguacuuuaaagaagua

SEQ ID NO: 4093164 - RNA, 21 nt, Variola virus
aacgagugcaaguagaacuua

SEQ ID NO: 4093165 - RNA, 20 nt, Variola virus
aacgaguucaaauaugaaau

SEQ ID NO: 4093166 - RNA, 12 nt, Variola virus
aacgauauuaac

SEQ ID NO: 4093167 - RNA, 19 nt, Variola virus
aacgaucuaauaacaaugu

SEQ ID NO: 4093168 - RNA, 20 nt, Variola virus
aacgauuuuccaaaucagua

SEQ ID NO: 4093169 - RNA, 22 nt, Variola virus
aacgauuuuccaaaucaguaac

SEQ ID NO: 4093170 - RNA, 14 nt, Variola virus
aacgcaucuagacu

SEQ ID NO: 4093171 - RNA, 13 nt, Variola virus
aacgccuuagaaa

SEQ ID NO: 4093172 - RNA, 18 nt, Variola virus
aacgcuacuauauauuau

SEQ ID NO: 4093173 - RNA, 21 nt, Variola virus
aacggaagaugcaauaguaau

SEQ ID NO: 4093174 - RNA, 14 nt, Variola virus
aacggaugaaaaua

SEQ ID NO: 4093175 - RNA, 13 nt, Variola virus
aacggcuaucacu

SEQ ID NO: 4093176 - RNA, 16 nt, Variola virus
aacgggauauaugaau

SEQ ID NO: 4093177 - RNA, 14 nt, Variola virus
aacgguaucuucuu

SEQ ID NO: 4093178 - RNA, 18 nt, Variola virus
aacguacaaauggauaaa

SEQ ID NO: 4093179 - RNA, 13 nt, Variola virus
aacuaauaaacau

SEQ ID NO: 4093180 - RNA, 14 nt, Variola virus
aacuacaauauuuc

SEQ ID NO: 4093181 - RNA, 23 nt, Variola virus
aacuaccaauaugucuguacaaa

SEQ ID NO: 4093182 - RNA, 15 nt, Variola virus
aacuacgucaagacu

SEQ ID NO: 4093183 - RNA, 17 nt, Variola virus
aacuacucgaacagaua

SEQ ID NO: 4093184 - RNA, 15 nt, Variola virus
aacuacuugaaauuc

SEQ ID NO: 4093185 - RNA, 15 nt, Variola virus
aacuagaauuguaua

SEQ ID NO: 4093186 - RNA, 21 nt, Variola virus
aacuagaucauccaacaaucu

SEQ ID NO: 4093187 - RNA, 15 nt, Variola virus
aacuaguauaaaauc

SEQ ID NO: 4093188 - RNA, 17 nt, Variola virus
aacuauauauuuguaua

SEQ ID NO: 4093189 - RNA, 21 nt, Variola virus
aacuauauauuuguauagaua

SEQ ID NO: 4093190 - RNA, 18 nt, Variola virus
aacuauaucuauguugau

SEQ ID NO: 4093191 - RNA, 20 nt, Variola virus
aacuaucuaugcuguagaua

SEQ ID NO: 4093192 - RNA, 15 nt, Variola virus
aacuaugucaaaaau

SEQ ID NO: 4093193 - RNA, 18 nt, Variola virus
aacuaugucaaaaauugu

SEQ ID NO: 4093194 - RNA, 14 nt, Variola virus
aacuauuuagcaaa

SEQ ID NO: 4093195 - RNA, 22 nt, Variola virus
aacuauuuuaguuaacaacuau

SEQ ID NO: 4093196 - RNA, 15 nt, Variola virus
aacuauuuuuaacuu

SEQ ID NO: 4093197 - RNA, 18 nt, Variola virus
aacucauuacuuacgaua

SEQ ID NO: 4093198 - RNA, 15 nt, Variola virus
aacucauucuauaua

SEQ ID NO: 4093199 - RNA, 21 nt, Variola virus
aacucauuuaaauaucauaau

SEQ ID NO: 4093200 - RNA, 16 nt, Variola virus
aacucgguaaaaaauu

SEQ ID NO: 4093201 - RNA, 23 nt, Variola virus
aacucuacauaaucauaaccauu

SEQ ID NO: 4093202 - RNA, 19 nt, Variola virus
aacucuuucgaauacuuau

SEQ ID NO: 4093203 - RNA, 14 nt, Variola virus
aacugcucuagauu

SEQ ID NO: 4093204 - RNA, 16 nt, Variola virus
aacugucaaugaauua

SEQ ID NO: 4093205 - RNA, 14 nt, Variola virus
aacuguuaaauguu

SEQ ID NO: 4093206 - RNA, 15 nt, Variola virus
aacuguucaaaauau

SEQ ID NO: 4093207 - RNA, 13 nt, Variola virus
aacuguuuguaua

SEQ ID NO: 4093208 - RNA, 15 nt, Variola virus
aacuuaaacaaaaua

SEQ ID NO: 4093209 - RNA, 17 nt, Variola virus
aacuuaaacaaaauaca

SEQ ID NO: 4093210 - RNA, 12 nt, Variola virus
aacuuaaugaaa

SEQ ID NO: 4093211 - RNA, 18 nt, Variola virus
aacuuauuagauagagau

SEQ ID NO: 4093212 - RNA, 24 nt, Variola virus
aacuuauucuuagcgucacagaau

SEQ ID NO: 4093213 - RNA, 20 nt, Variola virus
aacuucuggaaguuccaaac

SEQ ID NO: 4093214 - RNA, 22 nt, Variola virus
aacuuuaauucaaauuuccauu

SEQ ID NO: 4093215 - RNA, 21 nt, Variola virus
aacuuuuguuuuguuucugau

SEQ ID NO: 4093216 - RNA, 17 nt, Variola virus
aacuuuuuugacaaauu

SEQ ID NO: 4093217 - RNA, 13 nt, Variola virus
aagaaaaaugauu

SEQ ID NO: 4093218 - RNA, 15 nt, Variola virus
aagaaauuaauaaag

SEQ ID NO: 4093219 - RNA, 18 nt, Variola virus
aagaacauugcagccauu

SEQ ID NO: 4093220 - RNA, 20 nt, Variola virus
aagaacccguuuauacagug

SEQ ID NO: 4093221 - RNA, 14 nt, Variola virus
aagaacuacuaucg

SEQ ID NO: 4093222 - RNA, 15 nt, Variola virus
aagaacucuugaaga

SEQ ID NO: 4093223 - RNA, 19 nt, Variola virus
aagaagugucuauaaaugu

SEQ ID NO: 4093224 - RNA, 22 nt, Variola virus
aagaagugucuauaaauguaga

SEQ ID NO: 4093225 - RNA, 23 nt, Variola virus
aagaaucuucaagagugcauuga

SEQ ID NO: 4093226 - RNA, 12 nt, Variola virus
aagaauggauga

SEQ ID NO: 4093227 - RNA, 14 nt, Variola virus
aagaauucggaaau

SEQ ID NO: 4093228 - RNA, 16 nt, Variola virus
aagaauuuuagacacu

SEQ ID NO: 4093229 - RNA, 12 nt, Variola virus
aagacaauaaug

SEQ ID NO: 4093230 - RNA, 14 nt, Variola virus
aagaccaguucauu

SEQ ID NO: 4093231 - RNA, 19 nt, Variola virus
aagaccgaauacauaacag

SEQ ID NO: 4093232 - RNA, 16 nt, Variola virus
aagacgaucauuuacu

SEQ ID NO: 4093233 - RNA, 13 nt, Variola virus
aagagaauuuucu

SEQ ID NO: 4093234 - RNA, 12 nt, Variola virus
aagauaauccaa

SEQ ID NO: 4093235 - RNA, 18 nt, Variola virus
aagauaccgaagaauuaa

SEQ ID NO: 4093236 - RNA, 21 nt, Variola virus
aagauagaugaacugacauau

SEQ ID NO: 4093237 - RNA, 20 nt, Variola virus
aagauaucuacuagaaagau

SEQ ID NO: 4093238 - RNA, 14 nt, Variola virus
aagauauuccaaga

SEQ ID NO: 4093239 - RNA, 21 nt, Variola virus
aagaucguuggacauuggaua

SEQ ID NO: 4093240 - RNA, 18 nt, Variola virus
aagaucuaauauucuaga

SEQ ID NO: 4093241 - RNA, 16 nt, Variola virus
aagauuacuacacuug

SEQ ID NO: 4093242 - RNA, 17 nt, Variola virus
aagauuccauuaucuaa

SEQ ID NO: 4093243 - RNA, 18 nt, Variola virus
aagauugauggauuagaa

SEQ ID NO: 4093244 - RNA, 12 nt, Variola virus
aagcaaaugaug

SEQ ID NO: 4093245 - RNA, 14 nt, Variola virus
aagcuaacaaaauu

SEQ ID NO: 4093246 - RNA, 16 nt, Variola virus
aagcuaggcuggaaac

SEQ ID NO: 4093247 - RNA, 16 nt, Variola virus
aagcucuaaauccaaa

SEQ ID NO: 4093248 - RNA, 17 nt, Variola virus
aaggacaguuaaaacua

SEQ ID NO: 4093249 - RNA, 11 nt, Variola virus
aaggauaaaga

SEQ ID NO: 4093250 - RNA, 21 nt, Variola virus
aauugaauugcgauuauaaga

SEQ ID NO: 4093251 - RNA, 16 nt, Variola virus
aauugauaauauaaau

SEQ ID NO: 4093252 - RNA, 14 nt, Variola virus
aauugauucuauga

SEQ ID NO: 4093253 - RNA, 17 nt, Variola virus
aauuggcauuuaacaga

SEQ ID NO: 4093254 - RNA, 19 nt, Variola virus
aauugggaggauauacaaa

SEQ ID NO: 4093255 - RNA, 17 nt, Variola virus
aauugggguauuaauaa

SEQ ID NO: 4093256 - RNA, 20 nt, Variola virus
aauugguaacucauucuaua

SEQ ID NO: 4093257 - RNA, 21 nt, Variola virus
aauugguuuauaauguauaau

SEQ ID NO: 4093258 - RNA, 18 nt, Variola virus
aauuguauauuacacauu

SEQ ID NO: 4093259 - RNA, 16 nt, Variola virus
aauuguauuauuuccc

SEQ ID NO: 4093260 - RNA, 18 nt, Variola virus
aauugucuguaaaccaca

SEQ ID NO: 4093261 - RNA, 15 nt, Variola virus
aauuuaaaaugagua

SEQ ID NO: 4093262 - RNA, 14 nt, Variola virus
aauuuaaaauggua

SEQ ID NO: 4093263 - RNA, 21 nt, Variola virus
aauuuaaaauuagaucuuuua

SEQ ID NO: 4093264 - RNA, 18 nt, Variola virus
aauuuacaaauaaaaguc

SEQ ID NO: 4093265 - RNA, 22 nt, Variola virus
aauuuaccagauauaggagaau

SEQ ID NO: 4093266 - RNA, 11 nt, Variola virus
aauuuagaaaa

SEQ ID NO: 4093267 - RNA, 13 nt, Variola virus
aauuuaucaucug

SEQ ID NO: 4093268 - RNA, 12 nt, Variola virus
aauuuauuucua

SEQ ID NO: 4093269 - RNA, 14 nt, Variola virus
aauuuauuucuaaa

SEQ ID NO: 4093270 - RNA, 23 nt, Variola virus
aauuucaaggacaaaaugaccag

SEQ ID NO: 4093271 - RNA, 15 nt, Variola virus
aauuucauccauuua

SEQ ID NO: 4093272 - RNA, 19 nt, Variola virus
aauuucuggacguucacca

SEQ ID NO: 4093273 - RNA, 17 nt, Variola virus
aauuucugguuagauaa

SEQ ID NO: 4093274 - RNA, 13 nt, Variola virus
aauuugacuacau

SEQ ID NO: 4093275 - RNA, 18 nt, Variola virus
aauuugaguaagaauaag

SEQ ID NO: 4093276 - RNA, 13 nt, Variola virus
aauuugauaaaga

SEQ ID NO: 4093277 - RNA, 23 nt, Variola virus
aauuuguaaagacgaaacaaaau

SEQ ID NO: 4093278 - RNA, 16 nt, Variola virus
aauuuguaaucaucuu

SEQ ID NO: 4093279 - RNA, 13 nt, Variola virus
aauuuuaacagau

SEQ ID NO: 4093280 - RNA, 17 nt, Variola virus
aauuuuuuaaauccugu

SEQ ID NO: 4093281 - RNA, 22 nt, Variola virus
acaaaaacuugguuucaaugag

SEQ ID NO: 4093282 - RNA, 20 nt, Variola virus
acaaaacguuuauaugaagu

SEQ ID NO: 4093283 - RNA, 16 nt, Variola virus
acaaaagaguuaaguu

SEQ ID NO: 4093284 - RNA, 16 nt, Variola virus
acaaaagguauuacaa

SEQ ID NO: 4093285 - RNA, 17 nt, Variola virus
acaaaaguuaauaacaa

SEQ ID NO: 4093286 - RNA, 18 nt, Variola virus
acaaaaguuaauaaucuc

SEQ ID NO: 4093287 - RNA, 12 nt, Variola virus
acaaaaugugau

SEQ ID NO: 4093288 - RNA, 16 nt, Variola virus
acaaacaggauaucua

SEQ ID NO: 4093289 - RNA, 14 nt, Variola virus
acaaacauacucua

SEQ ID NO: 4093290 - RNA, 14 nt, Variola virus
acaaacuaucugau

SEQ ID NO: 4093291 - RNA, 23 nt, Variola virus
acaaaggaacuaaucaaugaaug

SEQ ID NO: 4093292 - RNA, 19 nt, Variola virus
acaaaguuuccuuuaacuc

SEQ ID NO: 4093293 - RNA, 23 nt, Variola virus
acaaauaauagguuguaauacau

SEQ ID NO: 4093294 - RNA, 16 nt, Variola virus
acaaauauaaaaugau

SEQ ID NO: 4093295 - RNA, 14 nt, Variola virus
acaaaucaauaauu

SEQ ID NO: 4093296 - RNA, 16 nt, Variola virus
acaaaucacugaaaau

SEQ ID NO: 4093297 - RNA, 15 nt, Variola virus
acaaaucuauuugga

SEQ ID NO: 4093298 - RNA, 21 nt, Variola virus
acaaauucuuggauauaugau

SEQ ID NO: 4093299 - RNA, 18 nt, Variola virus
acaaauuuggauauucua

SEQ ID NO: 4093300 - RNA, 18 nt, Variola virus
acaacaaaugauaaucaa

SEQ ID NO: 4093301 - RNA, 17 nt, Variola virus
acaacaucuaacuauau

SEQ ID NO: 4093302 - RNA, 20 nt, Variola virus
acaacaucuauuccaaauau

SEQ ID NO: 4093303 - RNA, 14 nt, Variola virus
acaacauuaauaca

SEQ ID NO: 4093304 - RNA, 16 nt, Variola virus
acaacauuccaaagau

SEQ ID NO: 4093305 - RNA, 15 nt, Variola virus
acaagcuguuuaucu

SEQ ID NO: 4093306 - RNA, 15 nt, Variola virus
acaaguauaaugaua

SEQ ID NO: 4093307 - RNA, 22 nt, Variola virus
acaaguuauacgucauuucauc

SEQ ID NO: 4093308 - RNA, 16 nt, Variola virus
acaauaaaaaaaauug

SEQ ID NO: 4093309 - RNA, 15 nt, Variola virus
acaauaaacaaaaua

SEQ ID NO: 4093310 - RNA, 13 nt, Variola virus
acaauaaauggau

SEQ ID NO: 4093311 - RNA, 16 nt, Variola virus
acaauaaugagaaugu

SEQ ID NO: 4093312 - RNA, 21 nt, Variola virus
acaauacagaagauagcaaag

SEQ ID NO: 4093313 - RNA, 22 nt, Variola virus
acaauauaauguacuagauaau

SEQ ID NO: 4093314 - RNA, 20 nt, Variola virus
acaauauauucucaugguau

SEQ ID NO: 4093315 - RNA, 22 nt, Variola virus
acaauaucauaaacaaacuaau

SEQ ID NO: 4093316 - RNA, 23 nt, Variola virus
acaauauuuuucguuuacaaaau

SEQ ID NO: 4093317 - RNA, 21 nt, Variola virus
acaaucaaaccuauaacauua

SEQ ID NO: 4093318 - RNA, 14 nt, Variola virus
acaauccaauaaua

SEQ ID NO: 4093319 - RNA, 18 nt, Variola virus
acaaucugucgaaaaagu

SEQ ID NO: 4093320 - RNA, 15 nt, Variola virus
acaaugauaaugaac

SEQ ID NO: 4093321 - RNA, 17 nt, Variola virus
acaaugcuauaccuaau

SEQ ID NO: 4093322 - RNA, 16 nt, Variola virus
acaauuucuauuuccu

SEQ ID NO: 4093323 - RNA, 22 nt, Variola virus
acaauuuuuuuauaauaauucu

SEQ ID NO: 4093324 - RNA, 14 nt, Variola virus
acacaaaaagaaag

SEQ ID NO: 4093325 - RNA, 19 nt, Variola virus
acacaaaaagaaagaauau

SEQ ID NO: 4093326 - RNA, 12 nt, Variola virus
acacacuuuucu

SEQ ID NO: 4093327 - RNA, 20 nt, Variola virus
acacaguaaccaaaaugaaa

SEQ ID NO: 4093328 - RNA, 15 nt, Variola virus
acacaucaaaauaac

SEQ ID NO: 4093329 - RNA, 20 nt, Variola virus
acacaucgacggacaaucua

SEQ ID NO: 4093330 - RNA, 19 nt, Variola virus
acacauucuuuagaacuuc

SEQ ID NO: 4093331 - RNA, 15 nt, Variola virus
acaccaauagaugau

SEQ ID NO: 4093332 - RNA, 22 nt, Variola virus
acaccuguuucauggaacaaua

SEQ ID NO: 4093333 - RNA, 17 nt, Variola virus
acacgagccuuuauuau

SEQ ID NO: 4093334 - RNA, 18 nt, Variola virus
acacuaccaguaucaauu

SEQ ID NO: 4093335 - RNA, 15 nt, Variola virus
acacuauuagaauua

SEQ ID NO: 4093336 - RNA, 16 nt, Variola virus
acacuauuauaugauu

SEQ ID NO: 4093337 - RNA, 17 nt, Variola virus
acacuauucuuaaaugu

SEQ ID NO: 4093338 - RNA, 20 nt, Variola virus
acacuauucuuaaaugucau

SEQ ID NO: 4093339 - RNA, 19 nt, Variola virus
acacugauauuaugaugaa

SEQ ID NO: 4093340 - RNA, 23 nt, Variola virus
acacuuauauucuuuguuauuau

SEQ ID NO: 4093341 - RNA, 15 nt, Variola virus
acacuuuauacuucu

SEQ ID NO: 4093342 - RNA, 19 nt, Variola virus
acagaaaagauauuuguua

SEQ ID NO: 4093343 - RNA, 16 nt, Variola virus
acagaaacuuagauua

SEQ ID NO: 4093344 - RNA, 19 nt, Variola virus
acagaaauauaugagaugu

SEQ ID NO: 4093345 - RNA, 15 nt, Variola virus
acagaaauaugugaa

SEQ ID NO: 4093346 - RNA, 14 nt, Variola virus
acagacauacagua

SEQ ID NO: 4093347 - RNA, 14 nt, Variola virus
acagacugaaagua

SEQ ID NO: 4093348 - RNA, 15 nt, Variola virus
acagacugaaaguau

SEQ ID NO: 4093349 - RNA, 19 nt, Variola virus
acagauagaucauuuugaa

SEQ ID NO: 4093350 - RNA, 15 nt, Variola virus
acagauguauuggau

SEQ ID NO: 4093351 - RNA, 15 nt, Variola virus
acagcauuucuguca

SEQ ID NO: 4093352 - RNA, 18 nt, Variola virus
acagcuuuaacagaugau

SEQ ID NO: 4093353 - RNA, 13 nt, Variola virus
acaggcauauuag

SEQ ID NO: 4093354 - RNA, 22 nt, Variola virus
acaguaaguacaucaucugaaa

SEQ ID NO: 4093355 - RNA, 18 nt, Variola virus
acaguguauguaaaaaug

SEQ ID NO: 4093356 - RNA, 13 nt, Variola virus
acaguuacaaaug

SEQ ID NO: 4093357 - RNA, 13 nt, Variola virus
acaguuucuagug

SEQ ID NO: 4093358 - RNA, 22 nt, Variola virus
acauaaucguagauucauguua

SEQ ID NO: 4093359 - RNA, 20 nt, Variola virus
acauaauuauucuaucaauu

SEQ ID NO: 4093360 - RNA, 14 nt, Variola virus
acauaccauggaaa

SEQ ID NO: 4093361 - RNA, 17 nt, Variola virus
acauacgucuauuucua

SEQ ID NO: 4093362 - RNA, 17 nt, Variola virus
acauacucuaauaggug

SEQ ID NO: 4093363 - RNA, 13 nt, Variola virus
acauacuuuguaa

SEQ ID NO: 4093364 - RNA, 16 nt, Variola virus
acauaguuaucuaucu

SEQ ID NO: 4093365 - RNA, 16 nt, Variola virus
acauauaauaaugaau

SEQ ID NO: 4093366 - RNA, 17 nt, Variola virus
acauaucgguguuucca

SEQ ID NO: 4093367 - RNA, 22 nt, Variola virus
acauauuaguaacuguuuucca

SEQ ID NO: 4093368 - RNA, 14 nt, Variola virus
acauauuuauaauu

SEQ ID NO: 4093369 - RNA, 20 nt, Variola virus
acauauuuguuugauaauua

SEQ ID NO: 4093370 - RNA, 22 nt, Variola virus
acauauuuuagaacagaaauac

SEQ ID NO: 4093371 - RNA, 16 nt, Variola virus
acaucauaaaaugagu

SEQ ID NO: 4093372 - RNA, 15 nt, Variola virus
acaucaucauuuacc

SEQ ID NO: 4093373 - RNA, 16 nt, Variola virus
acauccaaaauacaaa

SEQ ID NO: 4093374 - RNA, 20 nt, Variola virus
acauccaucuucucuagaaa

SEQ ID NO: 4093375 - RNA, 15 nt, Variola virus
acauccauuucuaga

SEQ ID NO: 4093376 - RNA, 16 nt, Variola virus
auucaauuaguuuauu

SEQ ID NO: 4093377 - RNA, 13 nt, Variola virus
auucacaaauaua

SEQ ID NO: 4093378 - RNA, 16 nt, Variola virus
auucacauaaaggaua

SEQ ID NO: 4093379 - RNA, 14 nt, Variola virus
auucacuuaacaau

SEQ ID NO: 4093380 - RNA, 19 nt, Variola virus
auucagaacucaacucauc

SEQ ID NO: 4093381 - RNA, 20 nt, Variola virus
auucagaauuucuacauaau

SEQ ID NO: 4093382 - RNA, 17 nt, Variola virus
auucagcugaaaugaga

SEQ ID NO: 4093383 - RNA, 14 nt, Variola virus
auucaguaaauaga

SEQ ID NO: 4093384 - RNA, 20 nt, Variola virus
auucauaaaacauaaucaag

SEQ ID NO: 4093385 - RNA, 13 nt, Variola virus
auucauaacgaga

SEQ ID NO: 4093386 - RNA, 22 nt, Variola virus
auucauaauaagauaaauccau

SEQ ID NO: 4093387 - RNA, 17 nt, Variola virus
auucaugauaaacuuaa

SEQ ID NO: 4093388 - RNA, 21 nt, Variola virus
auucauuaggauuaucaaauc

SEQ ID NO: 4093389 - RNA, 12 nt, Variola virus
auucauuuccau

SEQ ID NO: 4093390 - RNA, 12 nt, Variola virus
auuccaaaauug

SEQ ID NO: 4093391 - RNA, 12 nt, Variola virus
auuccaaagauc

SEQ ID NO: 4093392 - RNA, 15 nt, Variola virus
auuccaacaaacgaa

SEQ ID NO: 4093393 - RNA, 20 nt, Variola virus
auuccagcuaucagauuaug

SEQ ID NO: 4093394 - RNA, 23 nt, Variola virus
auuccggcguaugaauugacauu

SEQ ID NO: 4093395 - RNA, 19 nt, Variola virus
auuccuaccaaacaaaauu

SEQ ID NO: 4093396 - RNA, 18 nt, Variola virus
auuccugacugauuaaca

SEQ ID NO: 4093397 - RNA, 17 nt, Variola virus
auucgaaauuagaaagu

SEQ ID NO: 4093398 - RNA, 21 nt, Variola virus
auucgaagcaguuacaaugac

SEQ ID NO: 4093399 - RNA, 15 nt, Variola virus
auucguucaaaaaua

SEQ ID NO: 4093400 - RNA, 13 nt, Variola virus
auucuaaaugaug

SEQ ID NO: 4093401 - RNA, 13 nt, Variola virus
auucuaaauggau

SEQ ID NO: 4093402 - RNA, 21 nt, Variola virus
auucuaccuuuuuauuuucua

SEQ ID NO: 4093403 - RNA, 18 nt, Variola virus
auucuagcggcuagaaug

SEQ ID NO: 4093404 - RNA, 21 nt, Variola virus
auucuaggcucaguauguaaa

SEQ ID NO: 4093405 - RNA, 19 nt, Variola virus
auucuaugaauuuauaaaa

SEQ ID NO: 4093406 - RNA, 20 nt, Variola virus
auucuaugaugguauugaag

SEQ ID NO: 4093407 - RNA, 18 nt, Variola virus
auucuauuuuacaaauaa

SEQ ID NO: 4093408 - RNA, 19 nt, Variola virus
auucucuaguuacacuaug

SEQ ID NO: 4093409 - RNA, 19 nt, Variola virus
auucucuuaauuauaacga

SEQ ID NO: 4093410 - RNA, 13 nt, Variola virus
auucugaauagau

SEQ ID NO: 4093411 - RNA, 19 nt, Variola virus
auucugccguguuuaaaaa

SEQ ID NO: 4093412 - RNA, 16 nt, Variola virus
auucuuagucaaugga

SEQ ID NO: 4093413 - RNA, 18 nt, Variola virus
auucuucgcccucaauuu

SEQ ID NO: 4093414 - RNA, 23 nt, Variola virus
auucuucuuuaaacgauuuucca

SEQ ID NO: 4093415 - RNA, 12 nt, Variola virus
auucuuucaaag

SEQ ID NO: 4093416 - RNA, 13 nt, Variola virus
auucuuucaauuc

SEQ ID NO: 4093417 - RNA, 20 nt, Variola virus
auugaagaaggagaagauau

SEQ ID NO: 4093418 - RNA, 12 nt, Variola virus
auugacaaaauu

SEQ ID NO: 4093419 - RNA, 19 nt, Variola virus
auugauaucgcauagaaau

SEQ ID NO: 4093420 - RNA, 23 nt, Variola virus
auugaugugucuguuuauacaau

SEQ ID NO: 4093421 - RNA, 17 nt, Variola virus
auugauuacuauaaaug

SEQ ID NO: 4093422 - RNA, 17 nt, Variola virus
auugauuauuucaaaga

SEQ ID NO: 4093423 - RNA, 20 nt, Variola virus
auugauuauuucaaagacua

SEQ ID NO: 4093424 - RNA, 13 nt, Variola virus
auugcugcauaug

SEQ ID NO: 4093425 - RNA, 15 nt, Variola virus
auuggaaaauuagug

SEQ ID NO: 4093426 - RNA, 19 nt, Variola virus
auuggauaguuuuuuugaa

SEQ ID NO: 4093427 - RNA, 15 nt, Variola virus
auuggcuuuucuuua

SEQ ID NO: 4093428 - RNA, 16 nt, Variola virus
auugguagcugaaugu

SEQ ID NO: 4093429 - RNA, 21 nt, Variola virus
auugguuccgagucacaaaua

SEQ ID NO: 4093430 - RNA, 17 nt, Variola virus
auuguaaaagaaauaua

SEQ ID NO: 4093431 - RNA, 20 nt, Variola virus
auuguacacuucuauaguau

SEQ ID NO: 4093432 - RNA, 20 nt, Variola virus
auuguacuauacauuuugaa

SEQ ID NO: 4093433 - RNA, 18 nt, Variola virus
auuguauccauacauaca

SEQ ID NO: 4093434 - RNA, 22 nt, Variola virus
auugucugacauaagaugucua

SEQ ID NO: 4093435 - RNA, 16 nt, Variola virus
auugucuuaacuauaa

SEQ ID NO: 4093436 - RNA, 19 nt, Variola virus
auuguugccguaaauccug

SEQ ID NO: 4093437 - RNA, 20 nt, Variola virus
auuguuuugaagaaaugaua

SEQ ID NO: 4093438 - RNA, 16 nt, Variola virus
auuuaaaaaguauuua

SEQ ID NO: 4093439 - RNA, 12 nt, Variola virus
auuuaaauccua

SEQ ID NO: 4093440 - RNA, 13 nt, Variola virus
auuuaacacuaua

SEQ ID NO: 4093441 - RNA, 20 nt, Variola virus
auuuaacuagauuauacaau

SEQ ID NO: 4093442 - RNA, 20 nt, Variola virus
auuuaaggcuuuaaaauuga

SEQ ID NO: 4093443 - RNA, 15 nt, Variola virus
auuuaagugaugcau

SEQ ID NO: 4093444 - RNA, 13 nt, Variola virus
auuuaaucuaucu

SEQ ID NO: 4093445 - RNA, 17 nt, Variola virus
auuuaauuguauaccuu

SEQ ID NO: 4093446 - RNA, 21 nt, Variola virus
auuuaauuuuguaguuaauuu

SEQ ID NO: 4093447 - RNA, 14 nt, Variola virus
auuuacacacauaa

SEQ ID NO: 4093448 - RNA, 14 nt, Variola virus
auuuacauuaaaug

SEQ ID NO: 4093449 - RNA, 16 nt, Variola virus
auuuacauuaaaugua

SEQ ID NO: 4093450 - RNA, 22 nt, Variola virus
auuuaccaucccauauauucca

SEQ ID NO: 4093451 - RNA, 11 nt, Variola virus
auuuacuaaca

SEQ ID NO: 4093452 - RNA, 18 nt, Variola virus
auuuagauacaucuauau

SEQ ID NO: 4093453 - RNA, 15 nt, Variola virus
auuuagauacuaaca

SEQ ID NO: 4093454 - RNA, 14 nt, Variola virus
auuuagcaaaauua

SEQ ID NO: 4093455 - RNA, 14 nt, Variola virus
auuuagcaaaauuc

SEQ ID NO: 4093456 - RNA, 23 nt, Variola virus
auuuaguuucuucgauauuggau

SEQ ID NO: 4093457 - RNA, 15 nt, Variola virus
auuuauaaugucuac

SEQ ID NO: 4093458 - RNA, 15 nt, Variola virus
auuuauacuacuaau

SEQ ID NO: 4093459 - RNA, 23 nt, Variola virus
auuuauauccuauauacgaaaaa

SEQ ID NO: 4093460 - RNA, 21 nt, Variola virus
auuuaucuaaccauucaauua

SEQ ID NO: 4093461 - RNA, 19 nt, Variola virus
auuuaucuguuuuggugaa

SEQ ID NO: 4093462 - RNA, 23 nt, Variola virus
auuuaugucauaaacuguaaaug

SEQ ID NO: 4093463 - RNA, 16 nt, Variola virus
auuuauguuuuaaaua

SEQ ID NO: 4093464 - RNA, 19 nt, Variola virus
auuuauucaucaucaaaag

SEQ ID NO: 4093465 - RNA, 23 nt, Variola virus
auuuauuggucguccuaugcaua

SEQ ID NO: 4093466 - RNA, 14 nt, Variola virus
auuuauuugaugaa

SEQ ID NO: 4093467 - RNA, 15 nt, Variola virus
auuucaaaauuauuu

SEQ ID NO: 4093468 - RNA, 16 nt, Variola virus
auuucaaauauauuua

SEQ ID NO: 4093469 - RNA, 22 nt, Variola virus
auuucaacaauaaugagaaugu

SEQ ID NO: 4093470 - RNA, 22 nt, Variola virus
auuucaucuguaguauucuugu

SEQ ID NO: 4093471 - RNA, 19 nt, Variola virus
auuuccaaacuguugacuu

SEQ ID NO: 4093472 - RNA, 21 nt, Variola virus
auuuccaaagauacacacauu

SEQ ID NO: 4093473 - RNA, 23 nt, Variola virus
auuuccaucucuaucuaauacag

SEQ ID NO: 4093474 - RNA, 17 nt, Variola virus
auuucuagaaaaaauua

SEQ ID NO: 4093475 - RNA, 15 nt, Variola virus
auuucuauucaugaa

SEQ ID NO: 4093476 - RNA, 12 nt, Variola virus
auuucuauuuuu

SEQ ID NO: 4093477 - RNA, 23 nt, Variola virus
auuucuggauauguuuuuaauaa

SEQ ID NO: 4093478 - RNA, 19 nt, Variola virus
auuucuuuuucaaagaaaa

SEQ ID NO: 4093479 - RNA, 14 nt, Variola virus
auuugaacuuaacu

SEQ ID NO: 4093480 - RNA, 14 nt, Variola virus
auuugaaguauuug

SEQ ID NO: 4093481 - RNA, 12 nt, Variola virus
auuugacuagau

SEQ ID NO: 4093482 - RNA, 17 nt, Variola virus
auuugauaaagauagau

SEQ ID NO: 4093483 - RNA, 20 nt, Variola virus
auuugauacggacaugguau

SEQ ID NO: 4093484 - RNA, 14 nt, Variola virus
auuugauuaguaga

SEQ ID NO: 4093485 - RNA, 19 nt, Variola virus
auuugauuauuuugaagac

SEQ ID NO: 4093486 - RNA, 20 nt, Variola virus
auuuggaauuuauuaauaca

SEQ ID NO: 4093487 - RNA, 18 nt, Variola virus
auuuggagcuuuaauagu

SEQ ID NO: 4093488 - RNA, 17 nt, Variola virus
auuuggcgcuuuucucu

SEQ ID NO: 4093489 - RNA, 19 nt, Variola virus
auuugggccauuauaccuc

SEQ ID NO: 4093490 - RNA, 22 nt, Variola virus
auuuggucauaauagaauguau

SEQ ID NO: 4093491 - RNA, 21 nt, Variola virus
auuuguaauaauccuaucuaa

SEQ ID NO: 4093492 - RNA, 16 nt, Variola virus
auuuguacacaucuau

SEQ ID NO: 4093493 - RNA, 14 nt, Variola virus
auuuguacauuauu

SEQ ID NO: 4093494 - RNA, 16 nt, Variola virus
auuugucgcauuccuu

SEQ ID NO: 4093495 - RNA, 19 nt, Variola virus
auuuguugacgacauauau

SEQ ID NO: 4093496 - RNA, 14 nt, Variola virus
auuuuaaaaaacug

SEQ ID NO: 4093497 - RNA, 20 nt, Variola virus
auuuuaaaaucaaaaaggag

SEQ ID NO: 4093498 - RNA, 20 nt, Variola virus
auuuuaaaauuauuaaacaa

SEQ ID NO: 4093499 - RNA, 21 nt, Variola virus
auuuuaagaaaugguguaacu

SEQ ID NO: 4093500 - RNA, 17 nt, Variola virus
auuuuaaguuuauugac

SEQ ID NO: 4093501 - RNA, 15 nt, Variola virus
auuuuaauauagcug

SEQ ID NO: 4093502 - RNA, 14 nt, Variola virus
caucaaaaaacaac

SEQ ID NO: 4093503 - RNA, 19 nt, Variola virus
caucaaacgaauaaacaau

SEQ ID NO: 4093504 - RNA, 14 nt, Variola virus
caucaaauggaugc

SEQ ID NO: 4093505 - RNA, 20 nt, Variola virus
caucaacucucucauuuucu

SEQ ID NO: 4093506 - RNA, 13 nt, Variola virus
caucaauuuugaa

SEQ ID NO: 4093507 - RNA, 21 nt, Variola virus
caucagauguuccggaaagag

SEQ ID NO: 4093508 - RNA, 15 nt, Variola virus
caucauuaucauuuu

SEQ ID NO: 4093509 - RNA, 14 nt, Variola virus
cauccauauguuug

SEQ ID NO: 4093510 - RNA, 23 nt, Variola virus
caucgauugugauuguauuuccu

SEQ ID NO: 4093511 - RNA, 16 nt, Variola virus
caucgcauacaaaaac

SEQ ID NO: 4093512 - RNA, 16 nt, Variola virus
caucggcaacauacua

SEQ ID NO: 4093513 - RNA, 16 nt, Variola virus
caucgucucaucuguu

SEQ ID NO: 4093514 - RNA, 19 nt, Variola virus
caucuaacuauaugauauc

SEQ ID NO: 4093515 - RNA, 17 nt, Variola virus
caucuaauaauuuggau

SEQ ID NO: 4093516 - RNA, 14 nt, Variola virus
caucuacaaaaaca

SEQ ID NO: 4093517 - RNA, 18 nt, Variola virus
caucuaguugauauucca

SEQ ID NO: 4093518 - RNA, 18 nt, Variola virus
caucuauaggugaugcug

SEQ ID NO: 4093519 - RNA, 20 nt, Variola virus
caucuauauugcuacauaau

SEQ ID NO: 4093520 - RNA, 12 nt, Variola virus
caucuaucaucu

SEQ ID NO: 4093521 - RNA, 23 nt, Variola virus
caucuaucaucuccacacaguca

SEQ ID NO: 4093522 - RNA, 14 nt, Variola virus
caucugcucaacaa

SEQ ID NO: 4093523 - RNA, 20 nt, Variola virus
caucugggaauaaaauacua

SEQ ID NO: 4093524 - RNA, 15 nt, Variola virus
caucuguuguaucau

SEQ ID NO: 4093525 - RNA, 20 nt, Variola virus
caucuucuuugauuaaugau

SEQ ID NO: 4093526 - RNA, 21 nt, Variola virus
caucuuggggaaauauggaag

SEQ ID NO: 4093527 - RNA, 14 nt, Variola virus
caugaccuucuuca

SEQ ID NO: 4093528 - RNA, 18 nt, Variola virus
caugauacuaaguauaau

SEQ ID NO: 4093529 - RNA, 20 nt, Variola virus
caugcaaagcucuaaaucca

SEQ ID NO: 4093530 - RNA, 19 nt, Variola virus
caugccucagguucaucga

SEQ ID NO: 4093531 - RNA, 13 nt, Variola virus
caugcuaccuaau

SEQ ID NO: 4093532 - RNA, 17 nt, Variola virus
cauggaaauuuaacagc

SEQ ID NO: 4093533 - RNA, 14 nt, Variola virus
cauggaagaacuac

SEQ ID NO: 4093534 - RNA, 21 nt, Variola virus
cauggcucguaccaacaguaa

SEQ ID NO: 4093535 - RNA, 20 nt, Variola virus
cauggucuagauguaaaaaa

SEQ ID NO: 4093536 - RNA, 19 nt, Variola virus
cauguacauauuuguacau

SEQ ID NO: 4093537 - RNA, 22 nt, Variola virus
cauguauugcuguauuuguaau

SEQ ID NO: 4093538 - RNA, 14 nt, Variola virus
caugucaacaaaaa

SEQ ID NO: 4093539 - RNA, 19 nt, Variola virus
caugucuauuguuaaucau

SEQ ID NO: 4093540 - RNA, 12 nt, Variola virus
caugucuucaau

SEQ ID NO: 4093541 - RNA, 20 nt, Variola virus
cauguguauuacaugcaucu

SEQ ID NO: 4093542 - RNA, 18 nt, Variola virus
cauguuccuauuaugaaa

SEQ ID NO: 4093543 - RNA, 16 nt, Variola virus
cauguucgaaaaagug

SEQ ID NO: 4093544 - RNA, 14 nt, Variola virus
cauuaaggagauuc

SEQ ID NO: 4093545 - RNA, 21 nt, Variola virus
cauuaaggcguugaugcaauu

SEQ ID NO: 4093546 - RNA, 15 nt, Variola virus
cauuaauaacauccu

SEQ ID NO: 4093547 - RNA, 20 nt, Variola virus
cauuaauaauuguuuugaau

SEQ ID NO: 4093548 - RNA, 20 nt, Variola virus
cauuaauauaugcucuagau

SEQ ID NO: 4093549 - RNA, 15 nt, Variola virus
cauuaauccugucaa

SEQ ID NO: 4093550 - RNA, 15 nt, Variola virus
cauuaauuauaacgg

SEQ ID NO: 4093551 - RNA, 16 nt, Variola virus
cauuaauuucugauau

SEQ ID NO: 4093552 - RNA, 19 nt, Variola virus
cauuacauauuauaucaau

SEQ ID NO: 4093553 - RNA, 22 nt, Variola virus
cauuaccuccacgauacauuug

SEQ ID NO: 4093554 - RNA, 20 nt, Variola virus
cauuacuaguugauaacaau

SEQ ID NO: 4093555 - RNA, 16 nt, Variola virus
cauuagcaaucuuuua

SEQ ID NO: 4093556 - RNA, 22 nt, Variola virus
cauuagccacguucacuguaaa

SEQ ID NO: 4093557 - RNA, 20 nt, Variola virus
cauuagcgcauguacauauu

SEQ ID NO: 4093558 - RNA, 22 nt, Variola virus
cauuagcgcauguacauauuug

SEQ ID NO: 4093559 - RNA, 19 nt, Variola virus
cauuaguaaggcuuuagaa

SEQ ID NO: 4093560 - RNA, 23 nt, Variola virus
cauuaguuaaugaaaauaacucu

SEQ ID NO: 4093561 - RNA, 17 nt, Variola virus
cauuaucgauacuaauu

SEQ ID NO: 4093562 - RNA, 23 nt, Variola virus
cauuaucuggauuaaacauacua

SEQ ID NO: 4093563 - RNA, 17 nt, Variola virus
cauuauuuuuuuggaau

SEQ ID NO: 4093564 - RNA, 15 nt, Variola virus
cauucauaaaaacca

SEQ ID NO: 4093565 - RNA, 19 nt, Variola virus
cauucuaauauauguauuu

SEQ ID NO: 4093566 - RNA, 19 nt, Variola virus
cauucuaauguucauaauu

SEQ ID NO: 4093567 - RNA, 17 nt, Variola virus
cauugaucuauuauuua

SEQ ID NO: 4093568 - RNA, 18 nt, Variola virus
cauugcgcuauacaguau

SEQ ID NO: 4093569 - RNA, 22 nt, Variola virus
cauuggauuggauaauaauaca

SEQ ID NO: 4093570 - RNA, 19 nt, Variola virus
cauuggcuagguauaugca

SEQ ID NO: 4093571 - RNA, 23 nt, Variola virus
cauuguuuacggugauguuuauc

SEQ ID NO: 4093572 - RNA, 11 nt, Variola virus
cauuuaaacau

SEQ ID NO: 4093573 - RNA, 12 nt, Variola virus
cauuuaaacauu

SEQ ID NO: 4093574 - RNA, 21 nt, Variola virus
cauuuaguuuauuacuauuac

SEQ ID NO: 4093575 - RNA, 19 nt, Variola virus
cauuuauaacggucaauau

SEQ ID NO: 4093576 - RNA, 18 nt, Variola virus
cauuuauaacguacaaau

SEQ ID NO: 4093577 - RNA, 14 nt, Variola virus
cauuuauacacaau

SEQ ID NO: 4093578 - RNA, 21 nt, Variola virus
cauuuaucacaaaaaaaacuu

SEQ ID NO: 4093579 - RNA, 22 nt, Variola virus
cauuuaucgcuaacaugcauuu

SEQ ID NO: 4093580 - RNA, 19 nt, Variola virus
cauuuauggcguauacaac

SEQ ID NO: 4093581 - RNA, 17 nt, Variola virus
cauuuauuauauauaau

SEQ ID NO: 4093582 - RNA, 20 nt, Variola virus
cauuucugcauuacaaagaa

SEQ ID NO: 4093583 - RNA, 17 nt, Variola virus
cauuuuacuuuaacaau

SEQ ID NO: 4093584 - RNA, 21 nt, Variola virus
cauuuuauggaaacuauaauu

SEQ ID NO: 4093585 - RNA, 13 nt, Variola virus
cauuuuauuucua

SEQ ID NO: 4093586 - RNA, 21 nt, Variola virus
cauuuucaauaauauacuaau

SEQ ID NO: 4093587 - RNA, 19 nt, Variola virus
cauuuuccagaugauaugu

SEQ ID NO: 4093588 - RNA, 15 nt, Variola virus
cauuuuuuuaaaacu

SEQ ID NO: 4093589 - RNA, 23 nt, Variola virus
ccaaaaauuuuuaaaguauaucu

SEQ ID NO: 4093590 - RNA, 14 nt, Variola virus
ccaaaaugaugaua

SEQ ID NO: 4093591 - RNA, 14 nt, Variola virus
ccaaacaauaccau

SEQ ID NO: 4093592 - RNA, 13 nt, Variola virus
ccaaauucuggaa

SEQ ID NO: 4093593 - RNA, 14 nt, Variola virus
ccaacaaaacaauu

SEQ ID NO: 4093594 - RNA, 22 nt, Variola virus
ccaaccaaacggaguaaaauaa

SEQ ID NO: 4093595 - RNA, 16 nt, Variola virus
ccaacuuaaacaaaau

SEQ ID NO: 4093596 - RNA, 21 nt, Variola virus
ccaagagaugcaauacaaaag

SEQ ID NO: 4093597 - RNA, 22 nt, Variola virus
ccaagauccucucuuaaaugaa

SEQ ID NO: 4093598 - RNA, 21 nt, Variola virus
ccaagucauaucuagaaugaa

SEQ ID NO: 4093599 - RNA, 15 nt, Variola virus
ccaaguuaaauuuua

SEQ ID NO: 4093600 - RNA, 14 nt, Variola virus
ccaauaaaauuacu

SEQ ID NO: 4093601 - RNA, 14 nt, Variola virus
ccaaugaaauggua

SEQ ID NO: 4093602 - RNA, 17 nt, Variola virus
ccaauucguauaaauau

SEQ ID NO: 4093603 - RNA, 17 nt, Variola virus
ccacggauauacaaaac

SEQ ID NO: 4093604 - RNA, 16 nt, Variola virus
ccacguuuaaacauuc

SEQ ID NO: 4093605 - RNA, 17 nt, Variola virus
ccacugaugagauguua

SEQ ID NO: 4093606 - RNA, 17 nt, Variola virus
ccacugucacuggaaag

SEQ ID NO: 4093607 - RNA, 19 nt, Variola virus
ccacuuuaauaauaucaua

SEQ ID NO: 4093608 - RNA, 15 nt, Variola virus
ccagaaguauuuuua

SEQ ID NO: 4093609 - RNA, 22 nt, Variola virus
ccagauuuaaaaagguucacau

SEQ ID NO: 4093610 - RNA, 15 nt, Variola virus
ccaguacaucuauca

SEQ ID NO: 4093611 - RNA, 12 nt, Variola virus
ccagucaugaau

SEQ ID NO: 4093612 - RNA, 14 nt, Variola virus
ccagugcuauaucu

SEQ ID NO: 4093613 - RNA, 15 nt, Variola virus
ccauaagcaaacuga

SEQ ID NO: 4093614 - RNA, 13 nt, Variola virus
ccauagaggaugu

SEQ ID NO: 4093615 - RNA, 17 nt, Variola virus
ccauaguuuguaucaau

SEQ ID NO: 4093616 - RNA, 21 nt, Variola virus
ccauauauguuuucaucauuu

SEQ ID NO: 4093617 - RNA, 21 nt, Variola virus
ccauaucuaaagcuauguuua

SEQ ID NO: 4093618 - RNA, 21 nt, Variola virus
ccauccaagucaauaucuuua

SEQ ID NO: 4093619 - RNA, 21 nt, Variola virus
ccaucuccuuauuuuuaaaaa

SEQ ID NO: 4093620 - RNA, 14 nt, Variola virus
ccaucuuacaugau

SEQ ID NO: 4093621 - RNA, 18 nt, Variola virus
ccaugauggucauguuua

SEQ ID NO: 4093622 - RNA, 19 nt, Variola virus
ccauggacucauaaucucu

SEQ ID NO: 4093623 - RNA, 15 nt, Variola virus
ccauggauaaaguua

SEQ ID NO: 4093624 - RNA, 17 nt, Variola virus
ccauguuucaucuauca

SEQ ID NO: 4093625 - RNA, 16 nt, Variola virus
ccauuaaaaauuguua

SEQ ID NO: 4093626 - RNA, 13 nt, Variola virus
ccauuaaagaauu

SEQ ID NO: 4093627 - RNA, 15 nt, Variola virus
cuaauaucauuagua

SEQ ID NO: 4093628 - RNA, 22 nt, Variola virus
cuaaucuaaacgcguuagauaa

SEQ ID NO: 4093629 - RNA, 13 nt, Variola virus
cuaaucuauuuua

SEQ ID NO: 4093630 - RNA, 23 nt, Variola virus
cuaaugacaauaauuauguagua

SEQ ID NO: 4093631 - RNA, 23 nt, Variola virus
cuaaugaguuauuaagaaauaca

SEQ ID NO: 4093632 - RNA, 11 nt, Variola virus
cuaaugauaua

SEQ ID NO: 4093633 - RNA, 18 nt, Variola virus
cuaauuaaucuaaaaucu

SEQ ID NO: 4093634 - RNA, 12 nt, Variola virus
cuaauuaauuuu

SEQ ID NO: 4093635 - RNA, 23 nt, Variola virus
cuaauuauacuuugguaaauguu

SEQ ID NO: 4093636 - RNA, 20 nt, Variola virus
cuaauugucuuucucuuuua

SEQ ID NO: 4093637 - RNA, 20 nt, Variola virus
cuaauuuuguagcauuagua

SEQ ID NO: 4093638 - RNA, 19 nt, Variola virus
cuacaaaaaggacauguaa

SEQ ID NO: 4093639 - RNA, 22 nt, Variola virus
cuacaauauauauucauagagg

SEQ ID NO: 4093640 - RNA, 15 nt, Variola virus
cuacauaaaacauca

SEQ ID NO: 4093641 - RNA, 17 nt, Variola virus
cuaccauaucagcucuc

SEQ ID NO: 4093642 - RNA, 23 nt, Variola virus
cuaccgucgucgaaauaucuuuc

SEQ ID NO: 4093643 - RNA, 17 nt, Variola virus
cuaccguuguuaaauac

SEQ ID NO: 4093644 - RNA, 15 nt, Variola virus
cuacguuuggagaca

SEQ ID NO: 4093645 - RNA, 20 nt, Variola virus
cuacuacacuucuagauauc

SEQ ID NO: 4093646 - RNA, 19 nt, Variola virus
cuacuauggaauuaauuuu

SEQ ID NO: 4093647 - RNA, 16 nt, Variola virus
cuacucauagaaaggu

SEQ ID NO: 4093648 - RNA, 19 nt, Variola virus
cuacugcguccgcuuuagu

SEQ ID NO: 4093649 - RNA, 21 nt, Variola virus
cuagauaaaauacugaaucaa

SEQ ID NO: 4093650 - RNA, 11 nt, Variola virus
cuagauacauu

SEQ ID NO: 4093651 - RNA, 22 nt, Variola virus
cuagauauguauuuaauaucaa

SEQ ID NO: 4093652 - RNA, 23 nt, Variola virus
cuagauauguauuuaauaucaaa

SEQ ID NO: 4093653 - RNA, 17 nt, Variola virus
cuagaucaagaaacauu

SEQ ID NO: 4093654 - RNA, 21 nt, Variola virus
cuagauuaucuagucagaacu

SEQ ID NO: 4093655 - RNA, 13 nt, Variola virus
cuagcaaaacuau

SEQ ID NO: 4093656 - RNA, 19 nt, Variola virus
cuagguacaucauuuagau

SEQ ID NO: 4093657 - RNA, 14 nt, Variola virus
cuaggucuacagaa

SEQ ID NO: 4093658 - RNA, 16 nt, Variola virus
cuaguacugaggauuu

SEQ ID NO: 4093659 - RNA, 14 nt, Variola virus
cuaguagaaaagau

SEQ ID NO: 4093660 - RNA, 17 nt, Variola virus
cuaguagcgaaaacuau

SEQ ID NO: 4093661 - RNA, 21 nt, Variola virus
cuaguauagcagaaguuuaua

SEQ ID NO: 4093662 - RNA, 16 nt, Variola virus
cuaguuaaaauuuuaa

SEQ ID NO: 4093663 - RNA, 13 nt, Variola virus
cuaguucucucuc

SEQ ID NO: 4093664 - RNA, 19 nt, Variola virus
cuaguuucagaauuuucua

SEQ ID NO: 4093665 - RNA, 18 nt, Variola virus
cuaguuuucuaaguucua

SEQ ID NO: 4093666 - RNA, 23 nt, Variola virus
cuauaaagucugucaaaucaucu

SEQ ID NO: 4093667 - RNA, 19 nt, Variola virus
cuauaacauuaauaucaaa

SEQ ID NO: 4093668 - RNA, 17 nt, Variola virus
cuauaaugacaauaaaa

SEQ ID NO: 4093669 - RNA, 22 nt, Variola virus
cuauacauugcgccaucguguu

SEQ ID NO: 4093670 - RNA, 18 nt, Variola virus
cuauagaaauuauuuuua

SEQ ID NO: 4093671 - RNA, 17 nt, Variola virus
cuauagaccaaacugua

SEQ ID NO: 4093672 - RNA, 22 nt, Variola virus
cuauaguacacggaauaaugau

SEQ ID NO: 4093673 - RNA, 11 nt, Variola virus
cuauaguucuc

SEQ ID NO: 4093674 - RNA, 18 nt, Variola virus
cuauaguuuccacauuaa

SEQ ID NO: 4093675 - RNA, 13 nt, Variola virus
cuauauagauauu

SEQ ID NO: 4093676 - RNA, 15 nt, Variola virus
cuauaucuaacaucu

SEQ ID NO: 4093677 - RNA, 13 nt, Variola virus
cuauauuaauagg

SEQ ID NO: 4093678 - RNA, 24 nt, Variola virus
cuaucaauagcaguuuauuaucca

SEQ ID NO: 4093679 - RNA, 15 nt, Variola virus
cuaucacuguagaaa

SEQ ID NO: 4093680 - RNA, 14 nt, Variola virus
cuaucauguauuug

SEQ ID NO: 4093681 - RNA, 18 nt, Variola virus
cuaucaugucuauucucc

SEQ ID NO: 4093682 - RNA, 21 nt, Variola virus
cuaucgaaaauugcuauuuca

SEQ ID NO: 4093683 - RNA, 16 nt, Variola virus
cuaucgcauguggaug

SEQ ID NO: 4093684 - RNA, 15 nt, Variola virus
cuaucuaucuguauu

SEQ ID NO: 4093685 - RNA, 20 nt, Variola virus
cuaucuuuagcuucugaaau

SEQ ID NO: 4093686 - RNA, 17 nt, Variola virus
cuaugaauuuauaaaau

SEQ ID NO: 4093687 - RNA, 16 nt, Variola virus
cuaugauuaaaucguu

SEQ ID NO: 4093688 - RNA, 16 nt, Variola virus
cuaugccaacacaaac

SEQ ID NO: 4093689 - RNA, 14 nt, Variola virus
cuauggaacaaaau

SEQ ID NO: 4093690 - RNA, 13 nt, Variola virus
cuauguaaaugau

SEQ ID NO: 4093691 - RNA, 18 nt, Variola virus
cuaugucaaaaauuguag

SEQ ID NO: 4093692 - RNA, 15 nt, Variola virus
cuauguuaauaugua

SEQ ID NO: 4093693 - RNA, 17 nt, Variola virus
cuauguuccucguuucc

SEQ ID NO: 4093694 - RNA, 15 nt, Variola virus
cuauuaaagauggag

SEQ ID NO: 4093695 - RNA, 20 nt, Variola virus
cuauuacaccgccuccuaua

SEQ ID NO: 4093696 - RNA, 15 nt, Variola virus
cuauuauaucuuuuu

SEQ ID NO: 4093697 - RNA, 19 nt, Variola virus
cuauuauuauuaauuuuag

SEQ ID NO: 4093698 - RNA, 17 nt, Variola virus
cuauucaguaguguuua

SEQ ID NO: 4093699 - RNA, 12 nt, Variola virus
cuauucauguaa

SEQ ID NO: 4093700 - RNA, 16 nt, Variola virus
cuauugacugaacaau

SEQ ID NO: 4093701 - RNA, 20 nt, Variola virus
cuauugaucaaguauacaau

SEQ ID NO: 4093702 - RNA, 19 nt, Variola virus
cuauugcuuccaugcuacc

SEQ ID NO: 4093703 - RNA, 20 nt, Variola virus
cuauugugucuguuaauaga

SEQ ID NO: 4093704 - RNA, 21 nt, Variola virus
cuauuuagaucauuaacucua

SEQ ID NO: 4093705 - RNA, 20 nt, Variola virus
cuauuucauacuauuuugug

SEQ ID NO: 4093706 - RNA, 13 nt, Variola virus
cuauuuuaauagg

SEQ ID NO: 4093707 - RNA, 17 nt, Variola virus
cuauuuuaccagcauua

SEQ ID NO: 4093708 - RNA, 18 nt, Variola virus
cuauuuugguaucuucca

SEQ ID NO: 4093709 - RNA, 22 nt, Variola virus
cucaaagagaauuauauauuua

SEQ ID NO: 4093710 - RNA, 17 nt, Variola virus
cucaaauaaauacucua

SEQ ID NO: 4093711 - RNA, 10 nt, Variola virus
cucaaaugua

SEQ ID NO: 4093712 - RNA, 16 nt, Variola virus
cucaacauaaauaauu

SEQ ID NO: 4093713 - RNA, 23 nt, Variola virus
cucaauauuuaucuagagugagu

SEQ ID NO: 4093714 - RNA, 15 nt, Variola virus
cucaccaauaauuuu

SEQ ID NO: 4093715 - RNA, 19 nt, Variola virus
cucacuucucuucauuacu

SEQ ID NO: 4093716 - RNA, 13 nt, Variola virus
cucagaaagauau

SEQ ID NO: 4093717 - RNA, 16 nt, Variola virus
cucagugcaaagauua

SEQ ID NO: 4093718 - RNA, 19 nt, Variola virus
cucaguuugauauuacuaa

SEQ ID NO: 4093719 - RNA, 19 nt, Variola virus
cucauaaguguauauaucu

SEQ ID NO: 4093720 - RNA, 16 nt, Variola virus
cucauuaaacagcauu

SEQ ID NO: 4093721 - RNA, 19 nt, Variola virus
cucauugauuauauucuca

SEQ ID NO: 4093722 - RNA, 19 nt, Variola virus
cuccacaguuuuuaauuuc

SEQ ID NO: 4093723 - RNA, 19 nt, Variola virus
cuccagauacauauggauc

SEQ ID NO: 4093724 - RNA, 18 nt, Variola virus
cuccagauuucauaauau

SEQ ID NO: 4093725 - RNA, 16 nt, Variola virus
cuccaguagcaugugg

SEQ ID NO: 4093726 - RNA, 17 nt, Variola virus
cuccguauuccaaacua

SEQ ID NO: 4093727 - RNA, 21 nt, Variola virus
cuccgucaucaucuccuggag

SEQ ID NO: 4093728 - RNA, 14 nt, Variola virus
cuccuauauuuccc

SEQ ID NO: 4093729 - RNA, 14 nt, Variola virus
cucgaauacaaauu

SEQ ID NO: 4093730 - RNA, 12 nt, Variola virus
cucguccuuggu

SEQ ID NO: 4093731 - RNA, 13 nt, Variola virus
cucguccuugguu

SEQ ID NO: 4093732 - RNA, 22 nt, Variola virus
cucuaagaacuuauuaaugaau

SEQ ID NO: 4093733 - RNA, 18 nt, Variola virus
cucuacucauuucauuau

SEQ ID NO: 4093734 - RNA, 13 nt, Variola virus
cucuacucuagau

SEQ ID NO: 4093735 - RNA, 11 nt, Variola virus
cucuagaaaaa

SEQ ID NO: 4093736 - RNA, 12 nt, Variola virus
cucuauaauauu

SEQ ID NO: 4093737 - RNA, 18 nt, Variola virus
cucuauucgaaaacucua

SEQ ID NO: 4093738 - RNA, 18 nt, Variola virus
cucuauucugaaauaauu

SEQ ID NO: 4093739 - RNA, 23 nt, Variola virus
cucuauuggauauggauuuccag

SEQ ID NO: 4093740 - RNA, 19 nt, Variola virus
cucucauaauccauuucca

SEQ ID NO: 4093741 - RNA, 22 nt, Variola virus
cucucauuuucuucaacaaauu

SEQ ID NO: 4093742 - RNA, 18 nt, Variola virus
cucucuucaacaucuuua

SEQ ID NO: 4093743 - RNA, 16 nt, Variola virus
cucuguaauaguuucc

SEQ ID NO: 4093744 - RNA, 21 nt, Variola virus
cucuguagacgauacuugacu

SEQ ID NO: 4093745 - RNA, 15 nt, Variola virus
cucuucucugcauuu

SEQ ID NO: 4093746 - RNA, 12 nt, Variola virus
cucuuuaauagc

SEQ ID NO: 4093747 - RNA, 16 nt, Variola virus
cucuuucggacuuaua

SEQ ID NO: 4093748 - RNA, 16 nt, Variola virus
cugaaaagaaaguauc

SEQ ID NO: 4093749 - RNA, 13 nt, Variola virus
cugaaaauauauu

SEQ ID NO: 4093750 - RNA, 22 nt, Variola virus
cugaaaauauauugauaauauu

SEQ ID NO: 4093751 - RNA, 16 nt, Variola virus
cugaaaaugaaauugu

SEQ ID NO: 4093752 - RNA, 21 nt, Variola virus
cugaaauggugguaaaacuaa

SEQ ID NO: 4093753 - RNA, 13 nt, Variola virus
uaucaauagcagu

SEQ ID NO: 4093754 - RNA, 21 nt, Variola virus
uaucaccuguuugcaugguga

SEQ ID NO: 4093755 - RNA, 16 nt, Variola virus
uaucacgcuuuccauu

SEQ ID NO: 4093756 - RNA, 21 nt, Variola virus
uaucauaaauaaaaauaguag

SEQ ID NO: 4093757 - RNA, 14 nt, Variola virus
uaucauaauuaaau

SEQ ID NO: 4093758 - RNA, 12 nt, Variola virus
uaucauagaugc

SEQ ID NO: 4093759 - RNA, 14 nt, Variola virus
uaucaucuaucaga

SEQ ID NO: 4093760 - RNA, 17 nt, Variola virus
uaucaugcuuuaacauu

SEQ ID NO: 4093761 - RNA, 15 nt, Variola virus
uaucauuaacuguug

SEQ ID NO: 4093762 - RNA, 22 nt, Variola virus
uauccaaggacaaggaugaaaa

SEQ ID NO: 4093763 - RNA, 13 nt, Variola virus
uauccauacauac

SEQ ID NO: 4093764 - RNA, 15 nt, Variola virus
uauccaugaugguca

SEQ ID NO: 4093765 - RNA, 14 nt, Variola virus
uauccauuggaaaa

SEQ ID NO: 4093766 - RNA, 21 nt, Variola virus
uauccgacaacguuacucaaa

SEQ ID NO: 4093767 - RNA, 22 nt, Variola virus
uauccucaauaacguuaucauu

SEQ ID NO: 4093768 - RNA, 18 nt, Variola virus
uaucgcagaugaaacgga

SEQ ID NO: 4093769 - RNA, 16 nt, Variola virus
uaucgcauauuuauau

SEQ ID NO: 4093770 - RNA, 21 nt, Variola virus
uaucgcauuuucuaacgugau

SEQ ID NO: 4093771 - RNA, 18 nt, Variola virus
uaucguaccuaucuuaaa

SEQ ID NO: 4093772 - RNA, 20 nt, Variola virus
uaucguauuggauucugaaa

SEQ ID NO: 4093773 - RNA, 12 nt, Variola virus
uaucuaaagcuu

SEQ ID NO: 4093774 - RNA, 18 nt, Variola virus
uaucuacgauccaucaaa

SEQ ID NO: 4093775 - RNA, 20 nt, Variola virus
uaucuacgauuuuuacaaaa

SEQ ID NO: 4093776 - RNA, 20 nt, Variola virus
uaucuagauaacaacgacuu

SEQ ID NO: 4093777 - RNA, 12 nt, Variola virus
uaucuauacaua

SEQ ID NO: 4093778 - RNA, 16 nt, Variola virus
uaucuauacuauuaaa

SEQ ID NO: 4093779 - RNA, 16 nt, Variola virus
uaucuauguuaucauc

SEQ ID NO: 4093780 - RNA, 23 nt, Variola virus
uaucucaauaaaaaauuaauauu

SEQ ID NO: 4093781 - RNA, 21 nt, Variola virus
uaucucguuuagaaaaaugcu

SEQ ID NO: 4093782 - RNA, 14 nt, Variola virus
uaucucucuuggua

SEQ ID NO: 4093783 - RNA, 15 nt, Variola virus
uaucucuuaaaugcu

SEQ ID NO: 4093784 - RNA, 10 nt, Variola virus
uaucucuuuc

SEQ ID NO: 4093785 - RNA, 11 nt, Variola virus
uaucuguaaaa

SEQ ID NO: 4093786 - RNA, 14 nt, Variola virus
uaugaaaaacaugu

SEQ ID NO: 4093787 - RNA, 18 nt, Variola virus
uaugaacgauaauaacuu

SEQ ID NO: 4093788 - RNA, 15 nt, Variola virus
uaugaagauaaacac

SEQ ID NO: 4093789 - RNA, 12 nt, Variola virus
uaugacaaaauu

SEQ ID NO: 4093790 - RNA, 17 nt, Variola virus
uaugacaaaguuuacau

SEQ ID NO: 4093791 - RNA, 18 nt, Variola virus
uaugacuguauuuggauc

SEQ ID NO: 4093792 - RNA, 19 nt, Variola virus
uaugauaaaaugaaguuuu

SEQ ID NO: 4093793 - RNA, 15 nt, Variola virus
uaugauaucucuauu

SEQ ID NO: 4093794 - RNA, 18 nt, Variola virus
uaugauccguaacauaua

SEQ ID NO: 4093795 - RNA, 17 nt, Variola virus
uaugcauguuugcccuu

SEQ ID NO: 4093796 - RNA, 19 nt, Variola virus
uaugccugagaguaaacau

SEQ ID NO: 4093797 - RNA, 16 nt, Variola virus
uaugcgggaauuaaug

SEQ ID NO: 4093798 - RNA, 13 nt, Variola virus
uaugcuguuuauc

SEQ ID NO: 4093799 - RNA, 13 nt, Variola virus
uaugcuuucauaa

SEQ ID NO: 4093800 - RNA, 13 nt, Variola virus
uauggaaaacuaa

SEQ ID NO: 4093801 - RNA, 19 nt, Variola virus
uauggaaacuauaauuuug

SEQ ID NO: 4093802 - RNA, 18 nt, Variola virus
uauggaucuauucaagau

SEQ ID NO: 4093803 - RNA, 22 nt, Variola virus
uauggauuuggucauaauagaa

SEQ ID NO: 4093804 - RNA, 21 nt, Variola virus
uauggcgccauuggcaucuug

SEQ ID NO: 4093805 - RNA, 13 nt, Variola virus
uauguaugugcau

SEQ ID NO: 4093806 - RNA, 22 nt, Variola virus
uaugucuagcaaugaucuaaau

SEQ ID NO: 4093807 - RNA, 18 nt, Variola virus
uaugucuguacaaauguu

SEQ ID NO: 4093808 - RNA, 12 nt, Variola virus
uaugugauuuug

SEQ ID NO: 4093809 - RNA, 14 nt, Variola virus
uaugugcauuacca

SEQ ID NO: 4093810 - RNA, 22 nt, Variola virus
uauguuuauuuagauacagaug

SEQ ID NO: 4093811 - RNA, 17 nt, Variola virus
uauguuuuauguuuauu

SEQ ID NO: 4093812 - RNA, 14 nt, Variola virus
uauuaaaauuauuu

SEQ ID NO: 4093813 - RNA, 16 nt, Variola virus
uauuaaaauucuuaaa

SEQ ID NO: 4093814 - RNA, 19 nt, Variola virus
uauuaaaguacguaaaucu

SEQ ID NO: 4093815 - RNA, 15 nt, Variola virus
uauuaaaucaugaag

SEQ ID NO: 4093816 - RNA, 13 nt, Variola virus
uauuaaauuuaga

SEQ ID NO: 4093817 - RNA, 14 nt, Variola virus
uauuaaccacauau

SEQ ID NO: 4093818 - RNA, 17 nt, Variola virus
uauuaacccaagcagca

SEQ ID NO: 4093819 - RNA, 21 nt, Variola virus
uauuaacgugaaacguaguau

SEQ ID NO: 4093820 - RNA, 15 nt, Variola virus
uauuaauccuuugau

SEQ ID NO: 4093821 - RNA, 21 nt, Variola virus
uauuaaugagugcacaacugu

SEQ ID NO: 4093822 - RNA, 15 nt, Variola virus
uauuaauucuguaaa

SEQ ID NO: 4093823 - RNA, 21 nt, Variola virus
uauuacaaacauguucaaugc

SEQ ID NO: 4093824 - RNA, 21 nt, Variola virus
uauuacagauuuuauuaaacu

SEQ ID NO: 4093825 - RNA, 22 nt, Variola virus
uauuacauugugauuaaacauu

SEQ ID NO: 4093826 - RNA, 19 nt, Variola virus
uauuacgcuuaccaucaaa

SEQ ID NO: 4093827 - RNA, 18 nt, Variola virus
uauuacguacauaacauu

SEQ ID NO: 4093828 - RNA, 15 nt, Variola virus
uauuaguguuuagau

SEQ ID NO: 4093829 - RNA, 14 nt, Variola virus
uauuauaaacucuc

SEQ ID NO: 4093830 - RNA, 14 nt, Variola virus
uauuauacuuguau

SEQ ID NO: 4093831 - RNA, 17 nt, Variola virus
uauuauacuuguauaua

SEQ ID NO: 4093832 - RNA, 22 nt, Variola virus
uauuaucaaagucacaaagcaa

SEQ ID NO: 4093833 - RNA, 18 nt, Variola virus
uauuauccaauuauuaua

SEQ ID NO: 4093834 - RNA, 18 nt, Variola virus
uauuauggaaaucaacau

SEQ ID NO: 4093835 - RNA, 23 nt, Variola virus
uauuauggaaaucaacauaaugu

SEQ ID NO: 4093836 - RNA, 16 nt, Variola virus
uauuauugauagcauu

SEQ ID NO: 4093837 - RNA, 20 nt, Variola virus
uauucaguaguguuuacaua

SEQ ID NO: 4093838 - RNA, 20 nt, Variola virus
uauucauuaggauuaucaaa

SEQ ID NO: 4093839 - RNA, 14 nt, Variola virus
uauucauugggaag

SEQ ID NO: 4093840 - RNA, 16 nt, Variola virus
uauucccaaacauaca

SEQ ID NO: 4093841 - RNA, 13 nt, Variola virus
uauuccuagcauc

SEQ ID NO: 4093842 - RNA, 17 nt, Variola virus
uauucgauaacagcauu

SEQ ID NO: 4093843 - RNA, 15 nt, Variola virus
uauucuuaaauguca

SEQ ID NO: 4093844 - RNA, 13 nt, Variola virus
uauucuuaauauu

SEQ ID NO: 4093845 - RNA, 23 nt, Variola virus
uauugagguuucugacaauuacu

SEQ ID NO: 4093846 - RNA, 13 nt, Variola virus
uauugaguggaaa

SEQ ID NO: 4093847 - RNA, 13 nt, Variola virus
uauugaugauguc

SEQ ID NO: 4093848 - RNA, 17 nt, Variola virus
uauugcauguuuucaua

SEQ ID NO: 4093849 - RNA, 16 nt, Variola virus
uauuggauauaucaaa

SEQ ID NO: 4093850 - RNA, 19 nt, Variola virus
uauuggauauggauuucca

SEQ ID NO: 4093851 - RNA, 22 nt, Variola virus
uauuggcuuuucuuuaucacua

SEQ ID NO: 4093852 - RNA, 17 nt, Variola virus
uauuggugcauuaauaa

SEQ ID NO: 4093853 - RNA, 23 nt, Variola virus
uauuguagaaauuguuuuucaua

SEQ ID NO: 4093854 - RNA, 14 nt, Variola virus
uauuuaaaugacuu

SEQ ID NO: 4093855 - RNA, 14 nt, Variola virus
uauuuaauaucaaa

SEQ ID NO: 4093856 - RNA, 22 nt, Variola virus
uauuuaaugauucauuaucaua

SEQ ID NO: 4093857 - RNA, 21 nt, Variola virus
uauuuacgaaacuaucaaaau

SEQ ID NO: 4093858 - RNA, 17 nt, Variola virus
uauuuauaccaugucaa

SEQ ID NO: 4093859 - RNA, 19 nt, Variola virus
uauuuauccguaaaaaugu

SEQ ID NO: 4093860 - RNA, 19 nt, Variola virus
uauuucauugacggaugau

SEQ ID NO: 4093861 - RNA, 21 nt, Variola virus
uauuuccuguuccguuaacau

SEQ ID NO: 4093862 - RNA, 23 nt, Variola virus
uauuucuauggacuuaucuacau

SEQ ID NO: 4093863 - RNA, 12 nt, Variola virus
uauuucuuacau

SEQ ID NO: 4093864 - RNA, 13 nt, Variola virus
uauuucuuacaua

SEQ ID NO: 4093865 - RNA, 23 nt, Variola virus
uauuugagaaauauguauacaua

SEQ ID NO: 4093866 - RNA, 23 nt, Variola virus
uauuugcgugguuguuuaucaca

SEQ ID NO: 4093867 - RNA, 19 nt, Variola virus
uauuuggcauuucuaaaau

SEQ ID NO: 4093868 - RNA, 18 nt, Variola virus
uauuuguguauucuucua

SEQ ID NO: 4093869 - RNA, 20 nt, Variola virus
uauuuuaacgucuaaaugua

SEQ ID NO: 4093870 - RNA, 16 nt, Variola virus
uauuuuacauggauuu

SEQ ID NO: 4093871 - RNA, 12 nt, Variola virus
uauuuuaucauc

SEQ ID NO: 4093872 - RNA, 15 nt, Variola virus
uauuuuauuucaaaa

SEQ ID NO: 4093873 - RNA, 18 nt, Variola virus
uauuuucggguuuaaauu

SEQ ID NO: 4093874 - RNA, 20 nt, Variola virus
uauuuugggcaaaucuaaau

SEQ ID NO: 4093875 - RNA, 21 nt, Variola virus
uauuuuuucuggcauuaucua

SEQ ID NO: 4093876 - RNA, 18 nt, Variola virus
ucaaaagacguuguacaa

SEQ ID NO: 4093877 - RNA, 18 nt, Variola virus
ucaaaauaacaaauacua

SEQ ID NO: 4093878 - RNA, 14 nt, Variola virus
ucaaaauauguaga

SEQ ID NO: 4093879 - RNA, 16 nt, Variola virus
ucuaucguuauaacuc

SEQ ID NO: 4093880 - RNA, 22 nt, Variola virus
ucuaucguuauaacucgagaau

SEQ ID NO: 4093881 - RNA, 13 nt, Variola virus
ucuaucucaaaau

SEQ ID NO: 4093882 - RNA, 21 nt, Variola virus
ucuaugaauauaauagaugua

SEQ ID NO: 4093883 - RNA, 12 nt, Variola virus
ucuauguaucua

SEQ ID NO: 4093884 - RNA, 16 nt, Variola virus
ucuauguuauuuguau

SEQ ID NO: 4093885 - RNA, 18 nt, Variola virus
ucuauguugauagaaguu

SEQ ID NO: 4093886 - RNA, 13 nt, Variola virus
ucuauuacuacaa

SEQ ID NO: 4093887 - RNA, 20 nt, Variola virus
ucuauuagaguauugcauuu

SEQ ID NO: 4093888 - RNA, 21 nt, Variola virus
ucuauucgaaaacucuaagaa

SEQ ID NO: 4093889 - RNA, 23 nt, Variola virus
ucuauuggauauggauuuccaga

SEQ ID NO: 4093890 - RNA, 17 nt, Variola virus
ucuauugugucuguuaa

SEQ ID NO: 4093891 - RNA, 23 nt, Variola virus
ucuauuuguucugacaauauuua

SEQ ID NO: 4093892 - RNA, 17 nt, Variola virus
ucuauuuugucauuaac

SEQ ID NO: 4093893 - RNA, 12 nt, Variola virus
ucucaauacaga

SEQ ID NO: 4093894 - RNA, 16 nt, Variola virus
ucucaauauuuggauu

SEQ ID NO: 4093895 - RNA, 14 nt, Variola virus
ucucauaaaauagu

SEQ ID NO: 4093896 - RNA, 22 nt, Variola virus
ucucaugucuaagaauuacaaa

SEQ ID NO: 4093897 - RNA, 22 nt, Variola virus
ucuccaugauuaaauauuuuaa

SEQ ID NO: 4093898 - RNA, 22 nt, Variola virus
ucuccuuuucagaaauuaguuu

SEQ ID NO: 4093899 - RNA, 16 nt, Variola virus
ucuccuuuuguagaua

SEQ ID NO: 4093900 - RNA, 16 nt, Variola virus
ucucggacauuucagc

SEQ ID NO: 4093901 - RNA, 18 nt, Variola virus
ucucguaggcacacaauc

SEQ ID NO: 4093902 - RNA, 15 nt, Variola virus
ucucgucguccaaua

SEQ ID NO: 4093903 - RNA, 18 nt, Variola virus
ucucuaagacgucucauu

SEQ ID NO: 4093904 - RNA, 18 nt, Variola virus
ucucuaucuguuuccauu

SEQ ID NO: 4093905 - RNA, 22 nt, Variola virus
ucucucaaucacuacaucuuua

SEQ ID NO: 4093906 - RNA, 17 nt, Variola virus
ucucucauuuaucaaaa

SEQ ID NO: 4093907 - RNA, 21 nt, Variola virus
ucucugauguuuguuuucgau

SEQ ID NO: 4093908 - RNA, 12 nt, Variola virus
ucugaagaagag

SEQ ID NO: 4093909 - RNA, 17 nt, Variola virus
ucugaauuuagauaguu

SEQ ID NO: 4093910 - RNA, 16 nt, Variola virus
ucugacauaagaacag

SEQ ID NO: 4093911 - RNA, 15 nt, Variola virus
ucugacgacaaacag

SEQ ID NO: 4093912 - RNA, 15 nt, Variola virus
ucugauaaucucuaa

SEQ ID NO: 4093913 - RNA, 23 nt, Variola virus
ucugaucuuaacuccucuauuaa

SEQ ID NO: 4093914 - RNA, 17 nt, Variola virus
ucugaugaaucugaacc

SEQ ID NO: 4093915 - RNA, 13 nt, Variola virus
ucugcauucaauu

SEQ ID NO: 4093916 - RNA, 14 nt, Variola virus
ucugguugaagaaa

SEQ ID NO: 4093917 - RNA, 16 nt, Variola virus
ucuguaaaagaaucau

SEQ ID NO: 4093918 - RNA, 15 nt, Variola virus
ucuguagucacuuaa

SEQ ID NO: 4093919 - RNA, 14 nt, Variola virus
ucuguuauuucagu

SEQ ID NO: 4093920 - RNA, 18 nt, Variola virus
ucuguucaaaaauuuaga

SEQ ID NO: 4093921 - RNA, 15 nt, Variola virus
ucuuaaaacaguuuu

SEQ ID NO: 4093922 - RNA, 13 nt, Variola virus
ucuuaaauaacuc

SEQ ID NO: 4093923 - RNA, 13 nt, Variola virus
ucuuaauaucaga

SEQ ID NO: 4093924 - RNA, 15 nt, Variola virus
ucuuauauacacagu

SEQ ID NO: 4093925 - RNA, 16 nt, Variola virus
ucuuaucaauuucuga

SEQ ID NO: 4093926 - RNA, 16 nt, Variola virus
ucuuauccauuuauaa

SEQ ID NO: 4093927 - RNA, 16 nt, Variola virus
ucuuauccauuucgaa

SEQ ID NO: 4093928 - RNA, 18 nt, Variola virus
ucuuauuggucagaaguu

SEQ ID NO: 4093929 - RNA, 15 nt, Variola virus
ucuuccuucaaacag

SEQ ID NO: 4093930 - RNA, 20 nt, Variola virus
ucuucgaaaagaaacagaua

SEQ ID NO: 4093931 - RNA, 14 nt, Variola virus
ucuucgcagaugau

SEQ ID NO: 4093932 - RNA, 15 nt, Variola virus
ucuucuacaugaaga

SEQ ID NO: 4093933 - RNA, 12 nt, Variola virus
ucuucuaucaaa

SEQ ID NO: 4093934 - RNA, 22 nt, Variola virus
ucuugacugucuaucucuguaa

SEQ ID NO: 4093935 - RNA, 14 nt, Variola virus
ucuugcucaaauaa

SEQ ID NO: 4093936 - RNA, 22 nt, Variola virus
ucuuggaaacauaaaauaacuc

SEQ ID NO: 4093937 - RNA, 15 nt, Variola virus
ucuugguuaaacuca

SEQ ID NO: 4093938 - RNA, 14 nt, Variola virus
ucuuguucaauaga

SEQ ID NO: 4093939 - RNA, 18 nt, Variola virus
ucuuuaaaguuucugaaa

SEQ ID NO: 4093940 - RNA, 19 nt, Variola virus
ucuuuaaaguuucugaaau

SEQ ID NO: 4093941 - RNA, 20 nt, Variola virus
ucuuuaguaaacauaucaua

SEQ ID NO: 4093942 - RNA, 14 nt, Variola virus
ucuuuauacaauga

SEQ ID NO: 4093943 - RNA, 14 nt, Variola virus
ucuuuaucucuuag

SEQ ID NO: 4093944 - RNA, 15 nt, Variola virus
ucuuucguuaaauau

SEQ ID NO: 4093945 - RNA, 21 nt, Variola virus
ucuuugauuaaugauuuagaa

SEQ ID NO: 4093946 - RNA, 16 nt, Variola virus
ucuuuggauauucuaa

SEQ ID NO: 4093947 - RNA, 18 nt, Variola virus
ucuuuuagcacauguaua

SEQ ID NO: 4093948 - RNA, 21 nt, Variola virus
ucuuuuauacaagaacaauua

SEQ ID NO: 4093949 - RNA, 21 nt, Variola virus
ucuuuuccauuuuuaucagua

SEQ ID NO: 4093950 - RNA, 22 nt, Variola virus
ucuuuuuauccucauuaaacag

SEQ ID NO: 4093951 - RNA, 17 nt, Variola virus
ucuuuuucauuaacuag

SEQ ID NO: 4093952 - RNA, 18 nt, Variola virus
ugaaaaauggauuuugau

SEQ ID NO: 4093953 - RNA, 21 nt, Variola virus
ugaaaacuaaaugguauacac

SEQ ID NO: 4093954 - RNA, 12 nt, Variola virus
ugaaaauuauuu

SEQ ID NO: 4093955 - RNA, 14 nt, Variola virus
ugaaacgaacacua

SEQ ID NO: 4093956 - RNA, 13 nt, Variola virus
ugaaacuaucuuu

SEQ ID NO: 4093957 - RNA, 21 nt, Variola virus
ugaaauagcguucgucaacau

SEQ ID NO: 4093958 - RNA, 15 nt, Variola virus
ugaaauugagaagau

SEQ ID NO: 4093959 - RNA, 19 nt, Variola virus
ugaacacacgaugaaaaug

SEQ ID NO: 4093960 - RNA, 24 nt, Variola virus
ugaacauauaguucgucauuuaau

SEQ ID NO: 4093961 - RNA, 16 nt, Variola virus
ugaacauauucaucgu

SEQ ID NO: 4093962 - RNA, 19 nt, Variola virus
ugaaccguaauauaucuag

SEQ ID NO: 4093963 - RNA, 15 nt, Variola virus
ugaacgauaauaacu

SEQ ID NO: 4093964 - RNA, 14 nt, Variola virus
ugaacuauuucuug

SEQ ID NO: 4093965 - RNA, 20 nt, Variola virus
ugaacuccgccguaguuucc

SEQ ID NO: 4093966 - RNA, 21 nt, Variola virus
ugaacuccgccguaguuucca

SEQ ID NO: 4093967 - RNA, 22 nt, Variola virus
ugaagaaauuguuauaaugcua

SEQ ID NO: 4093968 - RNA, 14 nt, Variola virus
ugaaguagguuucu

SEQ ID NO: 4093969 - RNA, 17 nt, Variola virus
ugaaguuaugacauuca

SEQ ID NO: 4093970 - RNA, 20 nt, Variola virus
ugaaguuggcgcauaucuuu

SEQ ID NO: 4093971 - RNA, 21 nt, Variola virus
ugaauaagcaguguuaucuau

SEQ ID NO: 4093972 - RNA, 20 nt, Variola virus
ugaauaauacauuuaaauuu

SEQ ID NO: 4093973 - RNA, 19 nt, Variola virus
ugaauacaacuaaggagaa

SEQ ID NO: 4093974 - RNA, 15 nt, Variola virus
ugaauauauaugaca

SEQ ID NO: 4093975 - RNA, 23 nt, Variola virus
ugaauauauuaaaguuauuuaug

SEQ ID NO: 4093976 - RNA, 11 nt, Variola virus
ugaauaugaca

SEQ ID NO: 4093977 - RNA, 19 nt, Variola virus
ugaaucauauauguauuca

SEQ ID NO: 4093978 - RNA, 21 nt, Variola virus
ugaauccaucucuauguuuca

SEQ ID NO: 4093979 - RNA, 16 nt, Variola virus
ugaauggauacuaguu

SEQ ID NO: 4093980 - RNA, 17 nt, Variola virus
ugaauguuugaaaacau

SEQ ID NO: 4093981 - RNA, 13 nt, Variola virus
ugaauguuuucaa

SEQ ID NO: 4093982 - RNA, 22 nt, Variola virus
ugaauuacuaaaauauacaaac

SEQ ID NO: 4093983 - RNA, 13 nt, Variola virus
ugaauuagauaua

SEQ ID NO: 4093984 - RNA, 17 nt, Variola virus
ugaauucucauuuugca

SEQ ID NO: 4093985 - RNA, 18 nt, Variola virus
ugaauucucauuuugcau

SEQ ID NO: 4093986 - RNA, 22 nt, Variola virus
ugaauugcauacacuacaugac

SEQ ID NO: 4093987 - RNA, 13 nt, Variola virus
ugaauuguuucuu

SEQ ID NO: 4093988 - RNA, 24 nt, Variola virus
ugaauuguuucuuuuagaagugau

SEQ ID NO: 4093989 - RNA, 16 nt, Variola virus
ugaauuuauaaaaugc

SEQ ID NO: 4093990 - RNA, 21 nt, Variola virus
ugacaauauuauuaugaagac

SEQ ID NO: 4093991 - RNA, 17 nt, Variola virus
ugacauaauuacauaua

SEQ ID NO: 4093992 - RNA, 17 nt, Variola virus
ugacauauguaaauauu

SEQ ID NO: 4093993 - RNA, 15 nt, Variola virus
ugacaucaacuacaa

SEQ ID NO: 4093994 - RNA, 12 nt, Variola virus
ugacauggaaau

SEQ ID NO: 4093995 - RNA, 13 nt, Variola virus
ugaccaauuuauu

SEQ ID NO: 4093996 - RNA, 12 nt, Variola virus
ugacgaagagau

SEQ ID NO: 4093997 - RNA, 21 nt, Variola virus
ugacggagcccaauuuuggug

SEQ ID NO: 4093998 - RNA, 19 nt, Variola virus
ugacuaguccaaagacuua

SEQ ID NO: 4093999 - RNA, 15 nt, Variola virus
ugacuccaucuuuua

SEQ ID NO: 4094000 - RNA, 19 nt, Variola virus
ugacucgcaacaauuguaa

SEQ ID NO: 4094001 - RNA, 17 nt, Variola virus
ugacugacuuaaaacuu

SEQ ID NO: 4094002 - RNA, 18 nt, Variola virus
ugacuguuuguacuuuga

SEQ ID NO: 4094003 - RNA, 14 nt, Variola virus
ugacuuacauaaau

SEQ ID NO: 4094004 - RNA, 14 nt, Variola virus
ugacuuaguucuua

SEQ ID NO: 4094005 - RNA, 20 nt, Variola virus
uguaacauuaaguaaauccu

SEQ ID NO: 4094006 - RNA, 15 nt, Variola virus
uguaaggaaauguuu

SEQ ID NO: 4094007 - RNA, 22 nt, Variola virus
uguaagugaugauguaagucau

SEQ ID NO: 4094008 - RNA, 22 nt, Variola virus
uguaauaucuuaaauaacucau

SEQ ID NO: 4094009 - RNA, 17 nt, Variola virus
uguaauuccaguaauug

SEQ ID NO: 4094010 - RNA, 16 nt, Variola virus
uguacaauacauguac

SEQ ID NO: 4094011 - RNA, 20 nt, Variola virus
uguacuacaaacaggcgaug

SEQ ID NO: 4094012 - RNA, 23 nt, Variola virus
uguacucuuccaaaguugggaua

SEQ ID NO: 4094013 - RNA, 16 nt, Variola virus
uguacuuaacaugauu

SEQ ID NO: 4094014 - RNA, 23 nt, Variola virus
uguacuucuuucaguucuggaua

SEQ ID NO: 4094015 - RNA, 17 nt, Variola virus
uguagaugguucuuuaa

SEQ ID NO: 4094016 - RNA, 16 nt, Variola virus
uguagccgauaaacaa

SEQ ID NO: 4094017 - RNA, 13 nt, Variola virus
uguagucuugguc

SEQ ID NO: 4094018 - RNA, 21 nt, Variola virus
uguaguuguugguaacgucug

SEQ ID NO: 4094019 - RNA, 18 nt, Variola virus
uguauagaaauuuuggua

SEQ ID NO: 4094020 - RNA, 22 nt, Variola virus
uguauauaggucagauacuggu

SEQ ID NO: 4094021 - RNA, 19 nt, Variola virus
uguauaucuaacguauucu

SEQ ID NO: 4094022 - RNA, 19 nt, Variola virus
uguauaugugaauaugaca

SEQ ID NO: 4094023 - RNA, 13 nt, Variola virus
uguauaugugauc

SEQ ID NO: 4094024 - RNA, 20 nt, Variola virus
uguauaugugaucuaugaca

SEQ ID NO: 4094025 - RNA, 17 nt, Variola virus
uguauauuacacauuau

SEQ ID NO: 4094026 - RNA, 14 nt, Variola virus
uguaucaaaugcua

SEQ ID NO: 4094027 - RNA, 20 nt, Variola virus
uguaucauaauauuaaucau

SEQ ID NO: 4094028 - RNA, 22 nt, Variola virus
uguauccgucaaucuaauauua

SEQ ID NO: 4094029 - RNA, 17 nt, Variola virus
uguaucgaaaaacuuua

SEQ ID NO: 4094030 - RNA, 14 nt, Variola virus
uguaucuagugaua

SEQ ID NO: 4094031 - RNA, 15 nt, Variola virus
uguauguuugggaga

SEQ ID NO: 4094032 - RNA, 16 nt, Variola virus
uguauuaagaacagaa

SEQ ID NO: 4094033 - RNA, 17 nt, Variola virus
uguauuaguuaaauauu

SEQ ID NO: 4094034 - RNA, 22 nt, Variola virus
uguauucaacaugcuuuucuau

SEQ ID NO: 4094035 - RNA, 11 nt, Variola virus
uguauuuccau

SEQ ID NO: 4094036 - RNA, 19 nt, Variola virus
ugucaacaaaaaugugaua

SEQ ID NO: 4094037 - RNA, 17 nt, Variola virus
ugucaagaucuuuugua

SEQ ID NO: 4094038 - RNA, 16 nt, Variola virus
ugucaauugauucuua

SEQ ID NO: 4094039 - RNA, 21 nt, Variola virus
ugucaucaucaugauacacaa

SEQ ID NO: 4094040 - RNA, 14 nt, Variola virus
ugucauuaaaucuu

SEQ ID NO: 4094041 - RNA, 14 nt, Variola virus
ugucauuuguauuu

SEQ ID NO: 4094042 - RNA, 14 nt, Variola virus
uguccacuauacau

SEQ ID NO: 4094043 - RNA, 14 nt, Variola virus
uguccuaaaauacu

SEQ ID NO: 4094044 - RNA, 15 nt, Variola virus
uguccuucacaucau

SEQ ID NO: 4094045 - RNA, 23 nt, Variola virus
ugucuaaugaugaacacaaaugg

SEQ ID NO: 4094046 - RNA, 16 nt, Variola virus
ugucuacauaaaucua

SEQ ID NO: 4094047 - RNA, 22 nt, Variola virus
ugucuaucaagauccaugauuc

SEQ ID NO: 4094048 - RNA, 13 nt, Variola virus
ugucuccuuuuca

SEQ ID NO: 4094049 - RNA, 15 nt, Variola virus
ugucucgaaaucauu

SEQ ID NO: 4094050 - RNA, 23 nt, Variola virus
ugucuuaauaagaaguguaagag

SEQ ID NO: 4094051 - RNA, 12 nt, Variola virus
ugucuuggaagc

SEQ ID NO: 4094052 - RNA, 17 nt, Variola virus
ugucuuugaacaacauu

SEQ ID NO: 4094053 - RNA, 23 nt, Variola virus
ugugaaugguaaagaaugcuguu

SEQ ID NO: 4094054 - RNA, 20 nt, Variola virus
ugugaauuuagcauauagua

SEQ ID NO: 4094055 - RNA, 14 nt, Variola virus
ugugacaguuuucu

SEQ ID NO: 4094056 - RNA, 23 nt, Variola virus
uguggaauaaaauaaaacaagga

SEQ ID NO: 4094057 - RNA, 14 nt, Variola virus
uguguaaaaaguuu

SEQ ID NO: 4094058 - RNA, 16 nt, Variola virus
uguguaacaaaguauu

SEQ ID NO: 4094059 - RNA, 16 nt, Variola virus
uguguaugaaaugcuu

SEQ ID NO: 4094060 - RNA, 23 nt, Variola virus
ugugucaaagguuaaaccuuuau

SEQ ID NO: 4094061 - RNA, 23 nt, Variola virus
ugugucuacaaccgcuacauaau

SEQ ID NO: 4094062 - RNA, 22 nt, Variola virus
uguguggaugcuacuucaucua

SEQ ID NO: 4094063 - RNA, 22 nt, Variola virus
uguguuaucagccgcuacagaa

SEQ ID NO: 4094064 - RNA, 16 nt, Variola virus
uguguugaacaucagu

SEQ ID NO: 4094065 - RNA, 20 nt, Variola virus
uguuaaauguacuguauaua

SEQ ID NO: 4094066 - RNA, 19 nt, Variola virus
uguuaccauaauaccuuuu

SEQ ID NO: 4094067 - RNA, 18 nt, Variola virus
uguuagaagucuuaaaaa

SEQ ID NO: 4094068 - RNA, 20 nt, Variola virus
uguuaguacuacugaagaac

SEQ ID NO: 4094069 - RNA, 17 nt, Variola virus
uguuauccaacauauca

SEQ ID NO: 4094070 - RNA, 13 nt, Variola virus
uguucaaaugccu

SEQ ID NO: 4094071 - RNA, 20 nt, Variola virus
uguucaaugcaauagaugcc

SEQ ID NO: 4094072 - RNA, 21 nt, Variola virus
uguucauaauugcuuuucuaa

SEQ ID NO: 4094073 - RNA, 16 nt, Variola virus
uguucuuaaucaaugu

SEQ ID NO: 4094074 - RNA, 16 nt, Variola virus
uguucuuggauuucau

SEQ ID NO: 4094075 - RNA, 15 nt, Variola virus
uguugacgacauaua

SEQ ID NO: 4094076 - RNA, 13 nt, Variola virus
uguugugggaaac

SEQ ID NO: 4094077 - RNA, 16 nt, Variola virus
uguuguguacauguag

SEQ ID NO: 4094078 - RNA, 19 nt, Variola virus
uguuuaaauaauucucuga

SEQ ID NO: 4094079 - RNA, 16 nt, Variola virus
uguuuaaauuuuucua

SEQ ID NO: 4094080 - RNA, 19 nt, Variola virus
uguuuaacaaaguuauuca

SEQ ID NO: 4094081 - RNA, 11 nt, Variola virus
uguuuaagaua

SEQ ID NO: 4094082 - RNA, 17 nt, Variola virus
uguuuaccucuacaaau

SEQ ID NO: 4094083 - RNA, 19 nt, Variola virus
uguuuagaugaaguauuga

SEQ ID NO: 4094084 - RNA, 19 nt, Variola virus
uguuucacauugacauauu

SEQ ID NO: 4094085 - RNA, 15 nt, Variola virus
uguuuccauagauuu

SEQ ID NO: 4094086 - RNA, 19 nt, Variola virus
uguuucgaaacuuuaucaa

SEQ ID NO: 4094087 - RNA, 14 nt, Variola virus
uguuucgauuucaa

SEQ ID NO: 4094088 - RNA, 14 nt, Variola virus
uguuugagaauuaa

SEQ ID NO: 4094089 - RNA, 19 nt, Variola virus
uguuugugaugcuuaaaau

SEQ ID NO: 4094090 - RNA, 13 nt, Variola virus
uguuuucauacau

SEQ ID NO: 4094091 - RNA, 19 nt, Variola virus
uuaaaaaaauaaaaaugaa

SEQ ID NO: 4094092 - RNA, 15 nt, Variola virus
uuaaaaauaugugcu

SEQ ID NO: 4094093 - RNA, 16 nt, Variola virus
uuaaaacacaaauaug

SEQ ID NO: 4094094 - RNA, 17 nt, Variola virus
uuaaaauaaauauucuu

SEQ ID NO: 4094095 - RNA, 19 nt, Variola virus
uuaaaauaaauauucuuca

SEQ ID NO: 4094096 - RNA, 16 nt, Variola virus
uuaaaauacaacaaug

SEQ ID NO: 4094097 - RNA, 23 nt, Variola virus
uuaaaauaguuuauaacauuaau

SEQ ID NO: 4094098 - RNA, 21 nt, Variola virus
uuaaacagauauaguuuuucu

SEQ ID NO: 4094099 - RNA, 15 nt, Variola virus
uuaaacguauaaaaa

SEQ ID NO: 4094100 - RNA, 19 nt, Variola virus
uuaaacuaauucauuuuca

SEQ ID NO: 4094101 - RNA, 23 nt, Variola virus
uuaaagagacuacaauauauucu

SEQ ID NO: 4094102 - RNA, 22 nt, Variola virus
uuaaagauggaguauaaucuuu

SEQ ID NO: 4094103 - RNA, 17 nt, Variola virus
uuaaaggauauuaugca

SEQ ID NO: 4094104 - RNA, 22 nt, Variola virus
uuaaaggauggcgaaauuauug

SEQ ID NO: 4094105 - RNA, 14 nt, Variola virus
uuaaaguguaaaua

SEQ ID NO: 4094106 - RNA, 20 nt, Variola virus
uuaaaguuucugaaauaaga

SEQ ID NO: 4094107 - RNA, 20 nt, Variola virus
uuaaauaguaguacacaaca

SEQ ID NO: 4094108 - RNA, 12 nt, Variola virus
uuaaauauuaau

SEQ ID NO: 4094109 - RNA, 13 nt, Variola virus
uuaaaucauuaaa

SEQ ID NO: 4094110 - RNA, 18 nt, Variola virus
uuaaauuauugauauuca

SEQ ID NO: 4094111 - RNA, 14 nt, Variola virus
uuaaauucuuuaau

SEQ ID NO: 4094112 - RNA, 23 nt, Variola virus
uuaaauuuagagauaauauccug

SEQ ID NO: 4094113 - RNA, 17 nt, Variola virus
uuaacaaaaucuuuaau

SEQ ID NO: 4094114 - RNA, 16 nt, Variola virus
uuaacacguugucuuu

SEQ ID NO: 4094115 - RNA, 15 nt, Variola virus
uuaacagauguagua

SEQ ID NO: 4094116 - RNA, 14 nt, Variola virus
uuaacaucacuaau

SEQ ID NO: 4094117 - RNA, 16 nt, Variola virus
uuaacaucacuaauau

SEQ ID NO: 4094118 - RNA, 19 nt, Variola virus
uuaacaucucuucauuaau

SEQ ID NO: 4094119 - RNA, 14 nt, Variola virus
uuaaccgauaaaaa

SEQ ID NO: 4094120 - RNA, 18 nt, Variola virus
uuaacggcguuuuggaaa

SEQ ID NO: 4094121 - RNA, 23 nt, Variola virus
uuaacgucuaccgaaacaucguu

SEQ ID NO: 4094122 - RNA, 15 nt, Variola virus
uuaacuacauuauca

SEQ ID NO: 4094123 - RNA, 23 nt, Variola virus
uuaacuacgguauucauaaaaua

SEQ ID NO: 4094124 - RNA, 23 nt, Variola virus
uuaacuaucgugucucuguuuuu

SEQ ID NO: 4094125 - RNA, 16 nt, Variola virus
uuaacuaucuuucaag

SEQ ID NO: 4094126 - RNA, 22 nt, Variola virus
uuaacucggucgguuuaucuac

SEQ ID NO: 4094127 - RNA, 14 nt, Variola virus
uuaacuuacuuauu

SEQ ID NO: 4094128 - RNA, 15 nt, Variola virus
uuaacuuuauacuuu

SEQ ID NO: 4094129 - RNA, 16 nt, Variola virus
uuaacuuuucauuaau

SEQ ID NO: 4094130 - RNA, 19 nt, Variola virus
uuauuaaguguauuaguca

SEQ ID NO: 4094131 - RNA, 13 nt, Variola virus
uuauuaauucucu

SEQ ID NO: 4094132 - RNA, 22 nt, Variola virus
uuauuacuaaacuacgugaaca

SEQ ID NO: 4094133 - RNA, 19 nt, Variola virus
uuauuacuuaaguuguaaa

SEQ ID NO: 4094134 - RNA, 23 nt, Variola virus
uuauuagucgccgucucuauaaa

SEQ ID NO: 4094135 - RNA, 19 nt, Variola virus
uuauuagucugucuguaga

SEQ ID NO: 4094136 - RNA, 14 nt, Variola virus
uuauucauaauaag

SEQ ID NO: 4094137 - RNA, 22 nt, Variola virus
uuauugcauguuuucauauuca

SEQ ID NO: 4094138 - RNA, 13 nt, Variola virus
uuauuuaacaauu

SEQ ID NO: 4094139 - RNA, 18 nt, Variola virus
uuauuuaaguuuuugaua

SEQ ID NO: 4094140 - RNA, 19 nt, Variola virus
uuauuucagaaauuauucg

SEQ ID NO: 4094141 - RNA, 12 nt, Variola virus
uuauuucuaaau

SEQ ID NO: 4094142 - RNA, 15 nt, Variola virus
uucaaaaauuuagaa

SEQ ID NO: 4094143 - RNA, 23 nt, Variola virus
uucaaaacaaacagacuauucuu

SEQ ID NO: 4094144 - RNA, 14 nt, Variola virus
uucaacaguuucua

SEQ ID NO: 4094145 - RNA, 17 nt, Variola virus
uucaacaugauuauucu

SEQ ID NO: 4094146 - RNA, 22 nt, Variola virus
uucaaccacucucgauacauca

SEQ ID NO: 4094147 - RNA, 17 nt, Variola virus
uucaacuuugaaauugu

SEQ ID NO: 4094148 - RNA, 23 nt, Variola virus
uucaacuuugaaauuguuuuuua

SEQ ID NO: 4094149 - RNA, 23 nt, Variola virus
uucaagauaaauaaucaaaauug

SEQ ID NO: 4094150 - RNA, 14 nt, Variola virus
uucaagauuaucuu

SEQ ID NO: 4094151 - RNA, 18 nt, Variola virus
uucaauaggguagugaua

SEQ ID NO: 4094152 - RNA, 19 nt, Variola virus
uucaauaucuauacuaguu

SEQ ID NO: 4094153 - RNA, 16 nt, Variola virus
uucaaucauagaacug

SEQ ID NO: 4094154 - RNA, 18 nt, Variola virus
uucaaugugcucuuuaca

SEQ ID NO: 4094155 - RNA, 20 nt, Variola virus
uucaauuucccguuuguauu

SEQ ID NO: 4094156 - RNA, 18 nt, Variola virus
uucaccaaacaacuuuua

SEQ ID NO: 4094157 - RNA, 14 nt, Variola virus
uucaccaauaaaaa

SEQ ID NO: 4094158 - RNA, 13 nt, Variola virus
uucacguuccaga

SEQ ID NO: 4094159 - RNA, 19 nt, Variola virus
uucacuauaucuaagaaac

SEQ ID NO: 4094160 - RNA, 21 nt, Variola virus
uucacucgguggauacaauaa

SEQ ID NO: 4094161 - RNA, 14 nt, Variola virus
uucagaauauucuu

SEQ ID NO: 4094162 - RNA, 15 nt, Variola virus
uucagaauauucuuu

SEQ ID NO: 4094163 - RNA, 20 nt, Variola virus
uucagaauuaauagauauau

SEQ ID NO: 4094164 - RNA, 18 nt, Variola virus
uucagaauuucuacauaa

SEQ ID NO: 4094165 - RNA, 17 nt, Variola virus
uucagaggaauacagac

SEQ ID NO: 4094166 - RNA, 17 nt, Variola virus
uucaggaacauaaacaa

SEQ ID NO: 4094167 - RNA, 20 nt, Variola virus
uucaguaaccaaauacauau

SEQ ID NO: 4094168 - RNA, 22 nt, Variola virus
uucaguauuuuuggaaucauaa

SEQ ID NO: 4094169 - RNA, 19 nt, Variola virus
uucagugaagaagugucua

SEQ ID NO: 4094170 - RNA, 19 nt, Variola virus
uucagugguaaagauaucu

SEQ ID NO: 4094171 - RNA, 19 nt, Variola virus
uucauaaauaaaaacuugg

SEQ ID NO: 4094172 - RNA, 23 nt, Variola virus
uucauccccauacauuuuacauu

SEQ ID NO: 4094173 - RNA, 18 nt, Variola virus
uucaucggcauauuauua

SEQ ID NO: 4094174 - RNA, 23 nt, Variola virus
uucaucguuuagaauaaaaugau

SEQ ID NO: 4094175 - RNA, 14 nt, Variola virus
uucauuaaggagau

SEQ ID NO: 4094176 - RNA, 17 nt, Variola virus
uucauuaauuucugaua

SEQ ID NO: 4094177 - RNA, 11 nt, Variola virus
uucauuagaau

SEQ ID NO: 4094178 - RNA, 15 nt, Variola virus
uucauucguaaaucu

SEQ ID NO: 4094179 - RNA, 14 nt, Variola virus
uuccaagaaacuaa

SEQ ID NO: 4094180 - RNA, 18 nt, Variola virus
uuccacagauaauauuag

SEQ ID NO: 4094181 - RNA, 16 nt, Variola virus
uuccacuauugccauc

SEQ ID NO: 4094182 - RNA, 22 nt, Variola virus
uuccaggaucuagauaauuaau

SEQ ID NO: 4094183 - RNA, 14 nt, Variola virus
uuccauaacagugu

SEQ ID NO: 4094184 - RNA, 13 nt, Variola virus
uuccaucauuaac

SEQ ID NO: 4094185 - RNA, 15 nt, Variola virus
uuccaucuagacuau

SEQ ID NO: 4094186 - RNA, 19 nt, Variola virus
uuccauuggccucauuaac

SEQ ID NO: 4094187 - RNA, 23 nt, Variola virus
uucccaaugguuucaucaauaga

SEQ ID NO: 4094188 - RNA, 21 nt, Variola virus
uucccugauuaguauuuucua

SEQ ID NO: 4094189 - RNA, 16 nt, Variola virus
uucccuugucauuaaa

SEQ ID NO: 4094190 - RNA, 21 nt, Variola virus
uuccgccguauccauaaacaa

SEQ ID NO: 4094191 - RNA, 16 nt, Variola virus
uuccuaauuaagaaaa

SEQ ID NO: 4094192 - RNA, 12 nt, Variola virus
uuccuaccaaac

SEQ ID NO: 4094193 - RNA, 12 nt, Variola virus
uuccucauuaag

SEQ ID NO: 4094194 - RNA, 16 nt, Variola virus
uuccuucuauugaucu

SEQ ID NO: 4094195 - RNA, 16 nt, Variola virus
uuccuuuaucauuaau

SEQ ID NO: 4094196 - RNA, 13 nt, Variola virus
uucgaaaauacua

SEQ ID NO: 4094197 - RNA, 22 nt, Variola virus
uucgaagcaguuacaaugacuc

SEQ ID NO: 4094198 - RNA, 21 nt, Variola virus
uucggguuccaaacauuaaca

SEQ ID NO: 4094199 - RNA, 20 nt, Variola virus
uucgucaacaaguuggauga

SEQ ID NO: 4094200 - RNA, 18 nt, Variola virus
uucuaaaaaaauauuaac

SEQ ID NO: 4094201 - RNA, 19 nt, Variola virus
uucuaaaaugguaaacuuu

SEQ ID NO: 4094202 - RNA, 13 nt, Variola virus
uucuaaauuauuc

SEQ ID NO: 4094203 - RNA, 18 nt, Variola virus
uucuaacaucauuauuuu

SEQ ID NO: 4094204 - RNA, 21 nt, Variola virus
uucuaagaaaucuauaauauc

SEQ ID NO: 4094205 - RNA, 15 nt, Variola virus
uucuaaguucuaaug

SEQ ID NO: 4094206 - RNA, 20 nt, Variola virus
uucuaccgcauacgaaauaa

SEQ ID NO: 4094207 - RNA, 21 nt, Variola virus
uucuaccuuacccauaaacaa

SEQ ID NO: 4094208 - RNA, 22 nt, Variola virus
uucuacuaugcacauuauucua

SEQ ID NO: 4094209 - RNA, 16 nt, Variola virus
uucuagaaaaaauuac

SEQ ID NO: 4094210 - RNA, 13 nt, Variola virus
uucuagaccaaaa

SEQ ID NO: 4094211 - RNA, 16 nt, Variola virus
uucuagaguacugauu

SEQ ID NO: 4094212 - RNA, 21 nt, Variola virus
uucuauaccaauauuauucuu

SEQ ID NO: 4094213 - RNA, 18 nt, Variola virus
uucuauauagcuauucuu

SEQ ID NO: 4094214 - RNA, 21 nt, Variola virus
uucuaucuuuaguaguguuuc

SEQ ID NO: 4094215 - RNA, 17 nt, Variola virus
uucuauggcguacaaag

SEQ ID NO: 4094216 - RNA, 18 nt, Variola virus
uucucaucuaucaucucc

SEQ ID NO: 4094217 - RNA, 18 nt, Variola virus
uucucuaguuacacuaug

SEQ ID NO: 4094218 - RNA, 23 nt, Variola virus
uucucuccgguuaauaauucuag

SEQ ID NO: 4094219 - RNA, 17 nt, Variola virus
uucugaaauaacguauu

SEQ ID NO: 4094220 - RNA, 14 nt, Variola virus
uucugauaauagau

SEQ ID NO: 4094221 - RNA, 20 nt, Variola virus
uucugcaauaucuucguaaa

SEQ ID NO: 4094222 - RNA, 20 nt, Variola virus
uucugcuaguucuugagaca

SEQ ID NO: 4094223 - RNA, 17 nt, Variola virus
uucuguacaaauuauug

SEQ ID NO: 4094224 - RNA, 12 nt, Variola virus
uucuuaagaaau

SEQ ID NO: 4094225 - RNA, 20 nt, Variola virus
uucuuacauaaaugaaaaga

SEQ ID NO: 4094226 - RNA, 23 nt, Variola virus
uucuuagcuugugauuuuuucuu

SEQ ID NO: 4094227 - RNA, 15 nt, Variola virus
uucuuggauuucaua

SEQ ID NO: 4094228 - RNA, 21 nt, Variola virus
uucuuggcaaaagaauaccaa

SEQ ID NO: 4094229 - RNA, 12 nt, Variola virus
uucuuguuaaug

SEQ ID NO: 4094230 - RNA, 21 nt, Variola virus
uucuuuaauuauauggcacug

SEQ ID NO: 4094231 - RNA, 13 nt, Variola virus
uugaaaauuauuu

SEQ ID NO: 4094232 - RNA, 14 nt, Variola virus
uugaaaauuauuuu

SEQ ID NO: 4094233 - RNA, 19 nt, Variola virus
uugaaacuaggauacauaa

SEQ ID NO: 4094234 - RNA, 12 nt, Variola virus
uugaaacuuuuc

SEQ ID NO: 4094235 - RNA, 22 nt, Variola virus
uugaaagcgagaaauaaucaua

SEQ ID NO: 4094236 - RNA, 13 nt, Variola virus
uugaaauguguaa

SEQ ID NO: 4094237 - RNA, 14 nt, Variola virus
uugaaccaaacauu

SEQ ID NO: 4094238 - RNA, 22 nt, Variola virus
uugaaccaguccauggaaaaga

SEQ ID NO: 4094239 - RNA, 18 nt, Variola virus
uugaccacggcuuccauu

SEQ ID NO: 4094240 - RNA, 14 nt, Variola virus
uugacguaaaugug

SEQ ID NO: 4094241 - RNA, 19 nt, Variola virus
uugacguaugcaguuacau

SEQ ID NO: 4094242 - RNA, 23 nt, Variola virus
uugacguaugcaguuacaucguu

SEQ ID NO: 4094243 - RNA, 17 nt, Variola virus
uugacuauuguguguaa

SEQ ID NO: 4094244 - RNA, 14 nt, Variola virus
uugagaaaacauuu

SEQ ID NO: 4094245 - RNA, 18 nt, Variola virus
uugagacgggucaaacaa

SEQ ID NO: 4094246 - RNA, 17 nt, Variola virus
uugauaaaucuaucuuu

SEQ ID NO: 4094247 - RNA, 21 nt, Variola virus
uugauaguuguuccuagauau

SEQ ID NO: 4094248 - RNA, 17 nt, Variola virus
uugauaucuuuagauau

SEQ ID NO: 4094249 - RNA, 12 nt, Variola virus
uugaucuucaaa

SEQ ID NO: 4094250 - RNA, 19 nt, Variola virus
uugaugccggacaauagca

SEQ ID NO: 4094251 - RNA, 13 nt, Variola virus
uugauuacucuuu

SEQ ID NO: 4094252 - RNA, 13 nt, Variola virus
uugauucuaguau

SEQ ID NO: 4094253 - RNA, 19 nt, Variola virus
uugauucuuauucacuaua

SEQ ID NO: 4094254 - RNA, 16 nt, Variola virus
uugcaaguuacuaauu

SEQ ID NO: 4094255 - RNA, 12 nt, Variola virus
acuguuuaagag

SEQ ID NO: 4094256 - RNA, 14 nt, Variola virus
acuuaaaaauggau

SEQ ID NO: 4094257 - RNA, 18 nt, Variola virus
acuuaacuuuuucuuucu

SEQ ID NO: 4094258 - RNA, 16 nt, Variola virus
acuuaaugaaaaaugu

SEQ ID NO: 4094259 - RNA, 18 nt, Variola virus
acuuacauggacacauuc

SEQ ID NO: 4094260 - RNA, 16 nt, Variola virus
acuuacugacaaaguu

SEQ ID NO: 4094261 - RNA, 14 nt, Variola virus
acuuacuuaauagg

SEQ ID NO: 4094262 - RNA, 21 nt, Variola virus
acuuacuuuccagauagaaaa

SEQ ID NO: 4094263 - RNA, 21 nt, Variola virus
acuuauuaaguucuuuuucca

SEQ ID NO: 4094264 - RNA, 18 nt, Variola virus
acuucagaugauggugca

SEQ ID NO: 4094265 - RNA, 19 nt, Variola virus
acuucauaaaagaaaauac

SEQ ID NO: 4094266 - RNA, 15 nt, Variola virus
acuuccguuuaaaaa

SEQ ID NO: 4094267 - RNA, 23 nt, Variola virus
acuuccucauuaagauugucaug

SEQ ID NO: 4094268 - RNA, 22 nt, Variola virus
acuucgacagccaucuuaaaau

SEQ ID NO: 4094269 - RNA, 23 nt, Variola virus
acuucuagcgcugauuuaacuaa

SEQ ID NO: 4094270 - RNA, 13 nt, Variola virus
acuucuaucuugu

SEQ ID NO: 4094271 - RNA, 17 nt, Variola virus
acuucucaguucaauaa

SEQ ID NO: 4094272 - RNA, 23 nt, Variola virus
acuucugcagaauaauuagaaau

SEQ ID NO: 4094273 - RNA, 23 nt, Variola virus
acuucuucaacuaccaaaaauug

SEQ ID NO: 4094274 - RNA, 18 nt, Variola virus
acuucuugcgugucuuuc

SEQ ID NO: 4094275 - RNA, 15 nt, Variola virus
acuugacaaaaauug

SEQ ID NO: 4094276 - RNA, 17 nt, Variola virus
acuugagacuugauaga

SEQ ID NO: 4094277 - RNA, 14 nt, Variola virus
acuugauaauuaau

SEQ ID NO: 4094278 - RNA, 22 nt, Variola virus
acuugaucuuuauuuuuugugu

SEQ ID NO: 4094279 - RNA, 20 nt, Variola virus
acuugccaugauucguuaua

SEQ ID NO: 4094280 - RNA, 16 nt, Variola virus
acuuggcgauucuaua

SEQ ID NO: 4094281 - RNA, 13 nt, Variola virus
acuuguuuaauga

SEQ ID NO: 4094282 - RNA, 16 nt, Variola virus
acuuuaaacagaaaua

SEQ ID NO: 4094283 - RNA, 14 nt, Variola virus
acuuuaacaaucuc

SEQ ID NO: 4094284 - RNA, 21 nt, Variola virus
acuuuaacacguugucuuuca

SEQ ID NO: 4094285 - RNA, 11 nt, Variola virus
acuuuaaugau

SEQ ID NO: 4094286 - RNA, 21 nt, Variola virus
acuuuacgcuauuaaucuuua

SEQ ID NO: 4094287 - RNA, 18 nt, Variola virus
acuuuacuggguauucca

SEQ ID NO: 4094288 - RNA, 15 nt, Variola virus
acuuuagaagaauau

SEQ ID NO: 4094289 - RNA, 19 nt, Variola virus
acuuuagcauugaaaauac

SEQ ID NO: 4094290 - RNA, 20 nt, Variola virus
acuuuaucaucuuauauaga

SEQ ID NO: 4094291 - RNA, 18 nt, Variola virus
acuuuccaacuuaucauu

SEQ ID NO: 4094292 - RNA, 21 nt, Variola virus
acuuucuucuauaaaauggau

SEQ ID NO: 4094293 - RNA, 21 nt, Variola virus
acuuucuugcaaguuacuaau

SEQ ID NO: 4094294 - RNA, 18 nt, Variola virus
acuuugcccuuuaauaca

SEQ ID NO: 4094295 - RNA, 13 nt, Variola virus
acuuuguuaauga

SEQ ID NO: 4094296 - RNA, 19 nt, Variola virus
acuuuuauuuuuagaaagu

SEQ ID NO: 4094297 - RNA, 17 nt, Variola virus
agaaaaaaaauugaauu

SEQ ID NO: 4094298 - RNA, 19 nt, Variola virus
agaaaaaaauaucgauauu

SEQ ID NO: 4094299 - RNA, 13 nt, Variola virus
agaaaaaauaucu

SEQ ID NO: 4094300 - RNA, 12 nt, Variola virus
agaaaaaugauu

SEQ ID NO: 4094301 - RNA, 11 nt, Variola virus
agaaaacauua

SEQ ID NO: 4094302 - RNA, 16 nt, Variola virus
agaaaacuagauacaa

SEQ ID NO: 4094303 - RNA, 21 nt, Variola virus
agaaaauaacagauauuacaa

SEQ ID NO: 4094304 - RNA, 17 nt, Variola virus
agaaaauacuauauauu

SEQ ID NO: 4094305 - RNA, 15 nt, Variola virus
agaaaauauaaauua

SEQ ID NO: 4094306 - RNA, 23 nt, Variola virus
agaaaaucagaucugauaauauu

SEQ ID NO: 4094307 - RNA, 11 nt, Variola virus
agaaaauggau

SEQ ID NO: 4094308 - RNA, 19 nt, Variola virus
agaaacauaacaaugagua

SEQ ID NO: 4094309 - RNA, 22 nt, Variola virus
agaaacgauuauuucuaaauua

SEQ ID NO: 4094310 - RNA, 18 nt, Variola virus
agaaagcguguaauacga

SEQ ID NO: 4094311 - RNA, 23 nt, Variola virus
agaaaguaugauauaauacuuac

SEQ ID NO: 4094312 - RNA, 16 nt, Variola virus
agaaagucagaaucua

SEQ ID NO: 4094313 - RNA, 16 nt, Variola virus
agaaagugcaaaugag

SEQ ID NO: 4094314 - RNA, 17 nt, Variola virus
agaaagugcaaaugagg

SEQ ID NO: 4094315 - RNA, 23 nt, Variola virus
agaaauaaaggcagaaauacaau

SEQ ID NO: 4094316 - RNA, 21 nt, Variola virus
agaaauaacaggcuaaaaugu

SEQ ID NO: 4094317 - RNA, 17 nt, Variola virus
agaaauaagagacuuaa

SEQ ID NO: 4094318 - RNA, 17 nt, Variola virus
agaaauaauauaaauga

SEQ ID NO: 4094319 - RNA, 12 nt, Variola virus
agaaauacuucu

SEQ ID NO: 4094320 - RNA, 13 nt, Variola virus
agaaauauauacu

SEQ ID NO: 4094321 - RNA, 21 nt, Variola virus
agaaaucaacaaucuaauaca

SEQ ID NO: 4094322 - RNA, 21 nt, Variola virus
agaaauccaaauaaaauggau

SEQ ID NO: 4094323 - RNA, 13 nt, Variola virus
agaaaucugaaga

SEQ ID NO: 4094324 - RNA, 22 nt, Variola virus
agaaauggaaaucguaauacca

SEQ ID NO: 4094325 - RNA, 21 nt, Variola virus
agaaauggagagagacuguuu

SEQ ID NO: 4094326 - RNA, 13 nt, Variola virus
agaaauuaauaaa

SEQ ID NO: 4094327 - RNA, 19 nt, Variola virus
agaaauugguauaaauguu

SEQ ID NO: 4094328 - RNA, 17 nt, Variola virus
agaacacacuuuucuca

SEQ ID NO: 4094329 - RNA, 18 nt, Variola virus
agaacaucauuuccaaau

SEQ ID NO: 4094330 - RNA, 13 nt, Variola virus
agaacaugaugau

SEQ ID NO: 4094331 - RNA, 20 nt, Variola virus
agaacaugugugaaaauauu

SEQ ID NO: 4094332 - RNA, 21 nt, Variola virus
agaaccgucauucaucuagaa

SEQ ID NO: 4094333 - RNA, 23 nt, Variola virus
agaacuaagauuccauuaucuaa

SEQ ID NO: 4094334 - RNA, 16 nt, Variola virus
agaacuaccaauaugu

SEQ ID NO: 4094335 - RNA, 20 nt, Variola virus
agaacuaucauagaugagaa

SEQ ID NO: 4094336 - RNA, 18 nt, Variola virus
agaacucuguuucuguau

SEQ ID NO: 4094337 - RNA, 12 nt, Variola virus
agaagaaauuga

SEQ ID NO: 4094338 - RNA, 17 nt, Variola virus
agaagauuuaacuagau

SEQ ID NO: 4094339 - RNA, 21 nt, Variola virus
agaaguaccuggaauguaaag

SEQ ID NO: 4094340 - RNA, 17 nt, Variola virus
agaagugugaauaugau

SEQ ID NO: 4094341 - RNA, 14 nt, Variola virus
agaauaaauuauau

SEQ ID NO: 4094342 - RNA, 12 nt, Variola virus
agaauaauacag

SEQ ID NO: 4094343 - RNA, 15 nt, Variola virus
agaauacaacuacau

SEQ ID NO: 4094344 - RNA, 16 nt, Variola virus
agaauacuauagacca

SEQ ID NO: 4094345 - RNA, 19 nt, Variola virus
agaauagcgguaaguauau

SEQ ID NO: 4094346 - RNA, 21 nt, Variola virus
agaauagugggcuuacaugua

SEQ ID NO: 4094347 - RNA, 14 nt, Variola virus
agaauauacuacaa

SEQ ID NO: 4094348 - RNA, 13 nt, Variola virus
agaauauagacaa

SEQ ID NO: 4094349 - RNA, 19 nt, Variola virus
agaauauagacaaaaauau

SEQ ID NO: 4094350 - RNA, 20 nt, Variola virus
agaauauauagguaauacau

SEQ ID NO: 4094351 - RNA, 14 nt, Variola virus
agaauaucucuaac

SEQ ID NO: 4094352 - RNA, 13 nt, Variola virus
agaauaugugcau

SEQ ID NO: 4094353 - RNA, 19 nt, Variola virus
agaauauuccucuaacaga

SEQ ID NO: 4094354 - RNA, 17 nt, Variola virus
agaaucaucuguuguau

SEQ ID NO: 4094355 - RNA, 19 nt, Variola virus
agaauccaucgguuguuaa

SEQ ID NO: 4094356 - RNA, 14 nt, Variola virus
agaaucucaugaau

SEQ ID NO: 4094357 - RNA, 14 nt, Variola virus
agaaugaaacagua

SEQ ID NO: 4094358 - RNA, 17 nt, Variola virus
agaaugugauaagaucg

SEQ ID NO: 4094359 - RNA, 13 nt, Variola virus
agaauuaaaagag

SEQ ID NO: 4094360 - RNA, 22 nt, Variola virus
agaauuaauaauaucucuaaua

SEQ ID NO: 4094361 - RNA, 14 nt, Variola virus
agaauuagaauuac

SEQ ID NO: 4094362 - RNA, 13 nt, Variola virus
agaauucuagauc

SEQ ID NO: 4094363 - RNA, 16 nt, Variola virus
agaauugucuguaaac

SEQ ID NO: 4094364 - RNA, 21 nt, Variola virus
agaauuuaccagauaucuucu

SEQ ID NO: 4094365 - RNA, 16 nt, Variola virus
agaauuuauauaaauu

SEQ ID NO: 4094366 - RNA, 20 nt, Variola virus
agaauuuauauaaauuauuc

SEQ ID NO: 4094367 - RNA, 20 nt, Variola virus
agaauuuucauggauguaga

SEQ ID NO: 4094368 - RNA, 12 nt, Variola virus
agaauuuucuaa

SEQ ID NO: 4094369 - RNA, 17 nt, Variola virus
agaauuuuuuaaaaagu

SEQ ID NO: 4094370 - RNA, 14 nt, Variola virus
agacaaaaauaugg

SEQ ID NO: 4094371 - RNA, 19 nt, Variola virus
agacaaauggucaaugaua

SEQ ID NO: 4094372 - RNA, 18 nt, Variola virus
agacaaugcuaauauauu

SEQ ID NO: 4094373 - RNA, 15 nt, Variola virus
agacaccgaauacaa

SEQ ID NO: 4094374 - RNA, 15 nt, Variola virus
agacauaagaaauuu

SEQ ID NO: 4094375 - RNA, 21 nt, Variola virus
agacauaucgguaaaaugcau

SEQ ID NO: 4094376 - RNA, 15 nt, Variola virus
agaccaucuaacaga

SEQ ID NO: 4094377 - RNA, 17 nt, Variola virus
agaccgucuacaagaaa

SEQ ID NO: 4094378 - RNA, 22 nt, Variola virus
agacgacggugaauacacucag

SEQ ID NO: 4094379 - RNA, 18 nt, Variola virus
agacgauuaguaauauau

SEQ ID NO: 4094380 - RNA, 15 nt, Variola virus
agacgcucaaaauag

SEQ ID NO: 4094381 - RNA, 20 nt, Variola virus
agucuuaaccaagaaaucgu

SEQ ID NO: 4094382 - RNA, 21 nt, Variola virus
agucuuauauguagcaaacau

SEQ ID NO: 4094383 - RNA, 20 nt, Variola virus
agucuuuaaugaauuaacga

SEQ ID NO: 4094384 - RNA, 15 nt, Variola virus
agugaaauaagcuuu

SEQ ID NO: 4094385 - RNA, 15 nt, Variola virus
agugauuuugaagau

SEQ ID NO: 4094386 - RNA, 14 nt, Variola virus
agugcaaugaauau

SEQ ID NO: 4094387 - RNA, 17 nt, Variola virus
agugcuacaaaacagaa

SEQ ID NO: 4094388 - RNA, 13 nt, Variola virus
agugcuucuucuu

SEQ ID NO: 4094389 - RNA, 20 nt, Variola virus
agugguauauaauccaucaa

SEQ ID NO: 4094390 - RNA, 17 nt, Variola virus
aguggugugaauacaac

SEQ ID NO: 4094391 - RNA, 20 nt, Variola virus
aguguaaagaacaaauguug

SEQ ID NO: 4094392 - RNA, 22 nt, Variola virus
aguguauuagacgacucauguu

SEQ ID NO: 4094393 - RNA, 16 nt, Variola virus
agugucguaugaugaa

SEQ ID NO: 4094394 - RNA, 20 nt, Variola virus
aguguuaauuuuaaaugaug

SEQ ID NO: 4094395 - RNA, 13 nt, Variola virus
aguuaaaaugaua

SEQ ID NO: 4094396 - RNA, 13 nt, Variola virus
aguuaaauauuaa

SEQ ID NO: 4094397 - RNA, 13 nt, Variola virus
aguuaauagcuuc

SEQ ID NO: 4094398 - RNA, 13 nt, Variola virus
aguuaauuuauca

SEQ ID NO: 4094399 - RNA, 17 nt, Variola virus
aguuagaaaaaaugauu

SEQ ID NO: 4094400 - RNA, 20 nt, Variola virus
aguuagcaauuucaaaauag

SEQ ID NO: 4094401 - RNA, 16 nt, Variola virus
aguuaucaaaauaugu

SEQ ID NO: 4094402 - RNA, 20 nt, Variola virus
aguuaugacauucaucaaug

SEQ ID NO: 4094403 - RNA, 18 nt, Variola virus
aguucccgcauuaaauaa

SEQ ID NO: 4094404 - RNA, 17 nt, Variola virus
aguucuuugaucucuuu

SEQ ID NO: 4094405 - RNA, 16 nt, Variola virus
aguugcugaugaugaa

SEQ ID NO: 4094406 - RNA, 20 nt, Variola virus
aguuguaaaguuaaaauugu

SEQ ID NO: 4094407 - RNA, 19 nt, Variola virus
aguuuaagacugcuaaaug

SEQ ID NO: 4094408 - RNA, 15 nt, Variola virus
aguuuauaaaaauuu

SEQ ID NO: 4094409 - RNA, 16 nt, Variola virus
aguuuauuauauaccg

SEQ ID NO: 4094410 - RNA, 20 nt, Variola virus
aguuucaucaauaaaggaua

SEQ ID NO: 4094411 - RNA, 23 nt, Variola virus
aguuuccuuaacaaaucuaacug

SEQ ID NO: 4094412 - RNA, 17 nt, Variola virus
aguuucuagauacuaga

SEQ ID NO: 4094413 - RNA, 23 nt, Variola virus
aguuugacgaccucgacauuauu

SEQ ID NO: 4094414 - RNA, 16 nt, Variola virus
aguuugagauuucaua

SEQ ID NO: 4094415 - RNA, 15 nt, Variola virus
aguuuguuuuggaaa

SEQ ID NO: 4094416 - RNA, 15 nt, Variola virus
aguuuuauaaacucg

SEQ ID NO: 4094417 - RNA, 17 nt, Variola virus
aguuuuccguuagaaaa

SEQ ID NO: 4094418 - RNA, 16 nt, Variola virus
aguuuucuuucaaaau

SEQ ID NO: 4094419 - RNA, 17 nt, Variola virus
aguuuuuaggaaauauu

SEQ ID NO: 4094420 - RNA, 20 nt, Variola virus
auaaaaaauacuuaaaaugu

SEQ ID NO: 4094421 - RNA, 11 nt, Variola virus
auaaaaacaag

SEQ ID NO: 4094422 - RNA, 21 nt, Variola virus
auaaaaacgagaaugacauaa

SEQ ID NO: 4094423 - RNA, 19 nt, Variola virus
auaaaaaguauagguguau

SEQ ID NO: 4094424 - RNA, 12 nt, Variola virus
auaaaacuauau

SEQ ID NO: 4094425 - RNA, 20 nt, Variola virus
auaaaauagcguucacauau

SEQ ID NO: 4094426 - RNA, 12 nt, Variola virus
auaaaauaugaa

SEQ ID NO: 4094427 - RNA, 12 nt, Variola virus
auaaaaucucca

SEQ ID NO: 4094428 - RNA, 13 nt, Variola virus
auaaaaugucaca

SEQ ID NO: 4094429 - RNA, 14 nt, Variola virus
auaaaauuacuuaa

SEQ ID NO: 4094430 - RNA, 19 nt, Variola virus
auaaaauuauucacuauau

SEQ ID NO: 4094431 - RNA, 14 nt, Variola virus
auaaaauuuaagaa

SEQ ID NO: 4094432 - RNA, 17 nt, Variola virus
auaaacaaacuaauaaa

SEQ ID NO: 4094433 - RNA, 18 nt, Variola virus
auaaacaccaagaaagcu

SEQ ID NO: 4094434 - RNA, 23 nt, Variola virus
auaaacaugaauuuauuucuaau

SEQ ID NO: 4094435 - RNA, 20 nt, Variola virus
auaaaccauuagauaaaguu

SEQ ID NO: 4094436 - RNA, 17 nt, Variola virus
auaaacuagaaaaacuu

SEQ ID NO: 4094437 - RNA, 15 nt, Variola virus
auaaacuagauauau

SEQ ID NO: 4094438 - RNA, 16 nt, Variola virus
auaaacuauuguuaug

SEQ ID NO: 4094439 - RNA, 21 nt, Variola virus
auaaacucacauuucaaauau

SEQ ID NO: 4094440 - RNA, 15 nt, Variola virus
auaaacuuaguguaa

SEQ ID NO: 4094441 - RNA, 19 nt, Variola virus
auaaagaccgaauacauaa

SEQ ID NO: 4094442 - RNA, 22 nt, Variola virus
auaaagacguggcaaacaaugu

SEQ ID NO: 4094443 - RNA, 16 nt, Variola virus
auaaagaguccuauau

SEQ ID NO: 4094444 - RNA, 16 nt, Variola virus
auaaagauauaaauga

SEQ ID NO: 4094445 - RNA, 13 nt, Variola virus
auaaagauauaca

SEQ ID NO: 4094446 - RNA, 15 nt, Variola virus
auaaagcgagacuau

SEQ ID NO: 4094447 - RNA, 14 nt, Variola virus
auaaaguauaugua

SEQ ID NO: 4094448 - RNA, 18 nt, Variola virus
auaaaguccaacuauugu

SEQ ID NO: 4094449 - RNA, 23 nt, Variola virus
auaaagucccaaaccagaauugc

SEQ ID NO: 4094450 - RNA, 19 nt, Variola virus
auaaagucugucaaaucau

SEQ ID NO: 4094451 - RNA, 16 nt, Variola virus
auaaaguuuauacaag

SEQ ID NO: 4094452 - RNA, 14 nt, Variola virus
auaaauaaggaagu

SEQ ID NO: 4094453 - RNA, 13 nt, Variola virus
auaaauaaugaau

SEQ ID NO: 4094454 - RNA, 15 nt, Variola virus
auaaauaucauauau

SEQ ID NO: 4094455 - RNA, 15 nt, Variola virus
auaaaucaaauacuu

SEQ ID NO: 4094456 - RNA, 21 nt, Variola virus
auaaaucacuuuuuauacuaa

SEQ ID NO: 4094457 - RNA, 12 nt, Variola virus
auaaaucauauu

SEQ ID NO: 4094458 - RNA, 19 nt, Variola virus
auaaaucuuuaucaagcac

SEQ ID NO: 4094459 - RNA, 15 nt, Variola virus
auaaaugacaaguau

SEQ ID NO: 4094460 - RNA, 16 nt, Variola virus
auaaauguucaaugaa

SEQ ID NO: 4094461 - RNA, 13 nt, Variola virus
auaaauguuguaa

SEQ ID NO: 4094462 - RNA, 16 nt, Variola virus
auaaauuaaauauuaa

SEQ ID NO: 4094463 - RNA, 13 nt, Variola virus
auaaauuauacuc

SEQ ID NO: 4094464 - RNA, 18 nt, Variola virus
auaaauuaucaaauacuu

SEQ ID NO: 4094465 - RNA, 23 nt, Variola virus
auaaauuuauuauuuaugauauu

SEQ ID NO: 4094466 - RNA, 13 nt, Variola virus
auaacaaagaaag

SEQ ID NO: 4094467 - RNA, 13 nt, Variola virus
auaacaaauacua

SEQ ID NO: 4094468 - RNA, 15 nt, Variola virus
auaacaaguaugaca

SEQ ID NO: 4094469 - RNA, 21 nt, Variola virus
auaacaaguuuccuguaaauu

SEQ ID NO: 4094470 - RNA, 13 nt, Variola virus
auaacaaugacuu

SEQ ID NO: 4094471 - RNA, 21 nt, Variola virus
auaacagagccaucuguaaaa

SEQ ID NO: 4094472 - RNA, 20 nt, Variola virus
auaacaugaacgauaaacaa

SEQ ID NO: 4094473 - RNA, 15 nt, Variola virus
auaacauuguuuaug

SEQ ID NO: 4094474 - RNA, 17 nt, Variola virus
auaacgagaauaucaca

SEQ ID NO: 4094475 - RNA, 16 nt, Variola virus
auaacguaauuccaaa

SEQ ID NO: 4094476 - RNA, 15 nt, Variola virus
auaacgucucuguau

SEQ ID NO: 4094477 - RNA, 20 nt, Variola virus
auaacguuagccaccacuuc

SEQ ID NO: 4094478 - RNA, 14 nt, Variola virus
auaacguuaucauu

SEQ ID NO: 4094479 - RNA, 18 nt, Variola virus
auaacguuggcaauacua

SEQ ID NO: 4094480 - RNA, 23 nt, Variola virus
auaacucaauuaguuauugccaa

SEQ ID NO: 4094481 - RNA, 18 nt, Variola virus
auaacuucuagauguaga

SEQ ID NO: 4094482 - RNA, 20 nt, Variola virus
auaagaacauaauaauauau

SEQ ID NO: 4094483 - RNA, 19 nt, Variola virus
auaagaaugacuccuauau

SEQ ID NO: 4094484 - RNA, 22 nt, Variola virus
auaagacuuuacucuucuaaau

SEQ ID NO: 4094485 - RNA, 19 nt, Variola virus
auaagagaucuaguaacua

SEQ ID NO: 4094486 - RNA, 23 nt, Variola virus
auaagaugacuguagaacucaug

SEQ ID NO: 4094487 - RNA, 14 nt, Variola virus
auaagcucuauugu

SEQ ID NO: 4094488 - RNA, 18 nt, Variola virus
auaaggaacuagaauugu

SEQ ID NO: 4094489 - RNA, 17 nt, Variola virus
auaaggcuucucaauau

SEQ ID NO: 4094490 - RNA, 19 nt, Variola virus
auaaguaguaauaaugauu

SEQ ID NO: 4094491 - RNA, 22 nt, Variola virus
auaaguauaguuuuaaacuaau

SEQ ID NO: 4094492 - RNA, 15 nt, Variola virus
auaaguguguuguaa

SEQ ID NO: 4094493 - RNA, 23 nt, Variola virus
auaauaaaucauggggcaaacau

SEQ ID NO: 4094494 - RNA, 21 nt, Variola virus
auaauacauuuaaauuuauca

SEQ ID NO: 4094495 - RNA, 23 nt, Variola virus
auaauaccuucuacuaugcaauu

SEQ ID NO: 4094496 - RNA, 14 nt, Variola virus
auaauacuuaaaaa

SEQ ID NO: 4094497 - RNA, 14 nt, Variola virus
auaauagaaaauga

SEQ ID NO: 4094498 - RNA, 17 nt, Variola virus
auaauaggaggaauuga

SEQ ID NO: 4094499 - RNA, 16 nt, Variola virus
auaauaggauaugauu

SEQ ID NO: 4094500 - RNA, 17 nt, Variola virus
auaauagggagaaauga

SEQ ID NO: 4094501 - RNA, 20 nt, Variola virus
auaauagguggaacguauau

SEQ ID NO: 4094502 - RNA, 22 nt, Variola virus
auaauagguuguaauacauaua

SEQ ID NO: 4094503 - RNA, 22 nt, Variola virus
auaauauacuaauuaguaacga

SEQ ID NO: 4094504 - RNA, 15 nt, Variola virus
auaauaucagaaugc

SEQ ID NO: 4094505 - RNA, 13 nt, Variola virus
auaauaucuauau

SEQ ID NO: 4094506 - RNA, 15 nt, Variola virus
auaauauuagauuua

SEQ ID NO: 4094507 - RNA, 13 nt, Variola virus
cgaggauuuugau

SEQ ID NO: 4094508 - RNA, 18 nt, Variola virus
cgauaauaacuuaguuua

SEQ ID NO: 4094509 - RNA, 22 nt, Variola virus
cgauacauuuugcauuagauuu

SEQ ID NO: 4094510 - RNA, 16 nt, Variola virus
cgauacuaauuacaaa

SEQ ID NO: 4094511 - RNA, 11 nt, Variola virus
cgauagaaaaa

SEQ ID NO: 4094512 - RNA, 16 nt, Variola virus
cgauagugauuuugag

SEQ ID NO: 4094513 - RNA, 19 nt, Variola virus
cgauaugccuccagaaguu

SEQ ID NO: 4094514 - RNA, 10 nt, Variola virus
cgauauuaau

SEQ ID NO: 4094515 - RNA, 14 nt, Variola virus
cgauauuauuguaa

SEQ ID NO: 4094516 - RNA, 16 nt, Variola virus
cgauggucuauacaau

SEQ ID NO: 4094517 - RNA, 21 nt, Variola virus
cgaugugucugcguuaagauc

SEQ ID NO: 4094518 - RNA, 15 nt, Variola virus
cgauuauuauaaaau

SEQ ID NO: 4094519 - RNA, 21 nt, Variola virus
cgauuauuauaaaauaacaau

SEQ ID NO: 4094520 - RNA, 18 nt, Variola virus
cgauucuggcuauuucaa

SEQ ID NO: 4094521 - RNA, 14 nt, Variola virus
cgauugaauucucu

SEQ ID NO: 4094522 - RNA, 14 nt, Variola virus
cgauuuuaaaucau

SEQ ID NO: 4094523 - RNA, 12 nt, Variola virus
cgcauuaaauga

SEQ ID NO: 4094524 - RNA, 12 nt, Variola virus
cgcauuaacaaa

SEQ ID NO: 4094525 - RNA, 12 nt, Variola virus
cgccucaaaugu

SEQ ID NO: 4094526 - RNA, 14 nt, Variola virus
cgcgaacaucuuuc

SEQ ID NO: 4094527 - RNA, 14 nt, Variola virus
cgcgaguauucucu

SEQ ID NO: 4094528 - RNA, 12 nt, Variola virus
cgcuauacagua

SEQ ID NO: 4094529 - RNA, 14 nt, Variola virus
cgcuguauauggaa

SEQ ID NO: 4094530 - RNA, 16 nt, Variola virus
cgcuuaauaucuucug

SEQ ID NO: 4094531 - RNA, 20 nt, Variola virus
cggaauugccaacucucaaa

SEQ ID NO: 4094532 - RNA, 23 nt, Variola virus
cggauaguauucaagucaaagaa

SEQ ID NO: 4094533 - RNA, 14 nt, Variola virus
cggcacauauuaau

SEQ ID NO: 4094534 - RNA, 18 nt, Variola virus
cggcuaucgacuuaauau

SEQ ID NO: 4094535 - RNA, 21 nt, Variola virus
cgguuaauguuguauuucauu

SEQ ID NO: 4094536 - RNA, 14 nt, Variola virus
cguaaaaagauucu

SEQ ID NO: 4094537 - RNA, 13 nt, Variola virus
cguaccagcauuu

SEQ ID NO: 4094538 - RNA, 19 nt, Variola virus
cguauaaaguuauauaauu

SEQ ID NO: 4094539 - RNA, 12 nt, Variola virus
cguauacucuau

SEQ ID NO: 4094540 - RNA, 17 nt, Variola virus
cguauauagaugucaau

SEQ ID NO: 4094541 - RNA, 12 nt, Variola virus
cguauauguuuc

SEQ ID NO: 4094542 - RNA, 14 nt, Variola virus
cguauauguuucua

SEQ ID NO: 4094543 - RNA, 17 nt, Variola virus
cguaucuauaaucaucu

SEQ ID NO: 4094544 - RNA, 12 nt, Variola virus
cgucaaacauua

SEQ ID NO: 4094545 - RNA, 12 nt, Variola virus
cgucaguauuua

SEQ ID NO: 4094546 - RNA, 20 nt, Variola virus
cguccaacgaauaacauccg

SEQ ID NO: 4094547 - RNA, 20 nt, Variola virus
cgucucauuucuaucuguuu

SEQ ID NO: 4094548 - RNA, 15 nt, Variola virus
cgucuggagauaucc

SEQ ID NO: 4094549 - RNA, 18 nt, Variola virus
cgucuucccaaaauguua

SEQ ID NO: 4094550 - RNA, 13 nt, Variola virus
cgugagauaaagu

SEQ ID NO: 4094551 - RNA, 17 nt, Variola virus
cguuaaauauaacuggu

SEQ ID NO: 4094552 - RNA, 21 nt, Variola virus
cguuaaugaagaacacauauu

SEQ ID NO: 4094553 - RNA, 16 nt, Variola virus
cguuagaucuauuuua

SEQ ID NO: 4094554 - RNA, 20 nt, Variola virus
cguuauuugagagaucauuu

SEQ ID NO: 4094555 - RNA, 13 nt, Variola virus
cguucuacauaaa

SEQ ID NO: 4094556 - RNA, 18 nt, Variola virus
cguuuaaaguaaacuucg

SEQ ID NO: 4094557 - RNA, 23 nt, Variola virus
cguuuauacaucgaauauaaaau

SEQ ID NO: 4094558 - RNA, 21 nt, Variola virus
cguuuccguuauauccaggga

SEQ ID NO: 4094559 - RNA, 22 nt, Variola virus
cuaaaacuacguucgaugaauu

SEQ ID NO: 4094560 - RNA, 16 nt, Variola virus
cuaaaagcuguuaaag

SEQ ID NO: 4094561 - RNA, 20 nt, Variola virus
cuaaaauauuuuuauucuca

SEQ ID NO: 4094562 - RNA, 16 nt, Variola virus
cuaaacacgauguuua

SEQ ID NO: 4094563 - RNA, 15 nt, Variola virus
cuaaacauaaacaac

SEQ ID NO: 4094564 - RNA, 15 nt, Variola virus
cuaaacauauaacaa

SEQ ID NO: 4094565 - RNA, 18 nt, Variola virus
cuaaacgaucaaccaaaa

SEQ ID NO: 4094566 - RNA, 22 nt, Variola virus
cuaaacuaacuccuugguuuca

SEQ ID NO: 4094567 - RNA, 15 nt, Variola virus
cuaaacuuauuuaga

SEQ ID NO: 4094568 - RNA, 24 nt, Variola virus
cuaaagcaaauugcgccacagaau

SEQ ID NO: 4094569 - RNA, 20 nt, Variola virus
cuaaagccgguguaacauuc

SEQ ID NO: 4094570 - RNA, 23 nt, Variola virus
cuaaagggauuuuauaugauauc

SEQ ID NO: 4094571 - RNA, 12 nt, Variola virus
cuaaauggauua

SEQ ID NO: 4094572 - RNA, 20 nt, Variola virus
cuaacaauaacuagaucauc

SEQ ID NO: 4094573 - RNA, 16 nt, Variola virus
cuaacgaguacauucu

SEQ ID NO: 4094574 - RNA, 14 nt, Variola virus
cuaacuccuugguu

SEQ ID NO: 4094575 - RNA, 16 nt, Variola virus
cuaacucuuauauacc

SEQ ID NO: 4094576 - RNA, 14 nt, Variola virus
cuaacuuuaaacaa

SEQ ID NO: 4094577 - RNA, 15 nt, Variola virus
cuaaggguaaaauag

SEQ ID NO: 4094578 - RNA, 22 nt, Variola virus
cuaagguagaaucucuauuugu

SEQ ID NO: 4094579 - RNA, 16 nt, Variola virus
cuaaguccuauucucg

SEQ ID NO: 4094580 - RNA, 13 nt, Variola virus
cuaauaaacauuc

SEQ ID NO: 4094581 - RNA, 19 nt, Variola virus
cuaauacuacuacuuguaa

SEQ ID NO: 4094582 - RNA, 12 nt, Variola virus
cuaauauuagua

SEQ ID NO: 4094583 - RNA, 23 nt, Variola virus
cuaauauucccaaacauacaucu

SEQ ID NO: 4094584 - RNA, 14 nt, Variola virus
cuaaucuguucaua

SEQ ID NO: 4094585 - RNA, 18 nt, Variola virus
cuaaugaugcagauaucg

SEQ ID NO: 4094586 - RNA, 22 nt, Variola virus
cuaaugauguaucuacacaaac

SEQ ID NO: 4094587 - RNA, 16 nt, Variola virus
cuaauggaugucaaug

SEQ ID NO: 4094588 - RNA, 12 nt, Variola virus
cuaauucucaga

SEQ ID NO: 4094589 - RNA, 16 nt, Variola virus
cuaauuguuuaaauaa

SEQ ID NO: 4094590 - RNA, 15 nt, Variola virus
cuaauuuuuguaaau

SEQ ID NO: 4094591 - RNA, 14 nt, Variola virus
cuacaaaaaugcgu

SEQ ID NO: 4094592 - RNA, 13 nt, Variola virus
cuacaacuaguga

SEQ ID NO: 4094593 - RNA, 23 nt, Variola virus
cuacacuaaaaugauuaaacaau

SEQ ID NO: 4094594 - RNA, 18 nt, Variola virus
cuacagauguaagauacu

SEQ ID NO: 4094595 - RNA, 15 nt, Variola virus
cuacaguaaugucca

SEQ ID NO: 4094596 - RNA, 17 nt, Variola virus
cuacaguaauguccaaa

SEQ ID NO: 4094597 - RNA, 14 nt, Variola virus
cuacauuuggauuu

SEQ ID NO: 4094598 - RNA, 19 nt, Variola virus
cuaccagucuacauuuugc

SEQ ID NO: 4094599 - RNA, 22 nt, Variola virus
cuaccauggacggagacaaauu

SEQ ID NO: 4094600 - RNA, 20 nt, Variola virus
cuaccuuacccauaaacaau

SEQ ID NO: 4094601 - RNA, 20 nt, Variola virus
cuacgaaaacgaaaucugua

SEQ ID NO: 4094602 - RNA, 23 nt, Variola virus
cuacgaaacugauacaaucucuu

SEQ ID NO: 4094603 - RNA, 23 nt, Variola virus
cuacguagacuagacuguuuaua

SEQ ID NO: 4094604 - RNA, 18 nt, Variola virus
cuacuaccgaugauguaa

SEQ ID NO: 4094605 - RNA, 16 nt, Variola virus
cuacugccucacugac

SEQ ID NO: 4094606 - RNA, 19 nt, Variola virus
cuagaaaacgaaaacaucc

SEQ ID NO: 4094607 - RNA, 17 nt, Variola virus
cuagaauuagaauuaca

SEQ ID NO: 4094608 - RNA, 19 nt, Variola virus
cuagagauacaggaauaca

SEQ ID NO: 4094609 - RNA, 21 nt, Variola virus
cuagauagaaagauguagcua

SEQ ID NO: 4094610 - RNA, 22 nt, Variola virus
cuagauauagcuuuuauuucca

SEQ ID NO: 4094611 - RNA, 19 nt, Variola virus
cuagaucggcaaucuuucu

SEQ ID NO: 4094612 - RNA, 12 nt, Variola virus
cuagauuuugac

SEQ ID NO: 4094613 - RNA, 21 nt, Variola virus
cuaggacggcgauucuuuuuc

SEQ ID NO: 4094614 - RNA, 23 nt, Variola virus
cuaguagaggcgguauuacugag

SEQ ID NO: 4094615 - RNA, 22 nt, Variola virus
cuagugccgaacauuaacauuu

SEQ ID NO: 4094616 - RNA, 19 nt, Variola virus
cuaguggcagacugugcau

SEQ ID NO: 4094617 - RNA, 17 nt, Variola virus
cuaguucucucucauaa

SEQ ID NO: 4094618 - RNA, 13 nt, Variola virus
cuaguucucuuuu

SEQ ID NO: 4094619 - RNA, 17 nt, Variola virus
cuaguuuuacuaucaua

SEQ ID NO: 4094620 - RNA, 19 nt, Variola virus
cuauaaaaagaguuucaaa

SEQ ID NO: 4094621 - RNA, 19 nt, Variola virus
cuauaaaacgauuaaacaa

SEQ ID NO: 4094622 - RNA, 21 nt, Variola virus
cuauaaaauuguauauucaga

SEQ ID NO: 4094623 - RNA, 15 nt, Variola virus
cuauaaacaugaauu

SEQ ID NO: 4094624 - RNA, 17 nt, Variola virus
cuauaagccuuuguuua

SEQ ID NO: 4094625 - RNA, 14 nt, Variola virus
cuauaauaaugaau

SEQ ID NO: 4094626 - RNA, 23 nt, Variola virus
cuauaccauauccuccuguagau

SEQ ID NO: 4094627 - RNA, 13 nt, Variola virus
cuauacuauguua

SEQ ID NO: 4094628 - RNA, 12 nt, Variola virus
cuauagauggag

SEQ ID NO: 4094629 - RNA, 14 nt, Variola virus
cuauagauuuugaa

SEQ ID NO: 4094630 - RNA, 21 nt, Variola virus
cuauauaaagguccuauucca

SEQ ID NO: 4094631 - RNA, 13 nt, Variola virus
cuauauaugaaua

SEQ ID NO: 4094632 - RNA, 16 nt, Variola virus
cuauaucuaacaucuu

SEQ ID NO: 4094633 - RNA, 15 nt, Variola virus
cuauauuaacaucua

SEQ ID NO: 4094634 - RNA, 18 nt, Variola virus
gauaauuucguuaaaaca

SEQ ID NO: 4094635 - RNA, 22 nt, Variola virus
gauacacgaaagaaucaaaaga

SEQ ID NO: 4094636 - RNA, 17 nt, Variola virus
gauacauggaaauguau

SEQ ID NO: 4094637 - RNA, 20 nt, Variola virus
gauaccauuauuaacaaauu

SEQ ID NO: 4094638 - RNA, 17 nt, Variola virus
gauaccguuacauuuga

SEQ ID NO: 4094639 - RNA, 22 nt, Variola virus
gauacguacugucuauaaugac

SEQ ID NO: 4094640 - RNA, 15 nt, Variola virus
gauacguauauuaau

SEQ ID NO: 4094641 - RNA, 16 nt, Variola virus
gauacuaucaaaauau

SEQ ID NO: 4094642 - RNA, 23 nt, Variola virus
gauacuauccaucagaauguuuc

SEQ ID NO: 4094643 - RNA, 17 nt, Variola virus
gauagacgcaaauuaga

SEQ ID NO: 4094644 - RNA, 18 nt, Variola virus
gauaguaaaacaaaauua

SEQ ID NO: 4094645 - RNA, 19 nt, Variola virus
gauaguacagcguaguaca

SEQ ID NO: 4094646 - RNA, 22 nt, Variola virus
gauaguauaccaacuauauuac

SEQ ID NO: 4094647 - RNA, 11 nt, Variola virus
gauauaaugaa

SEQ ID NO: 4094648 - RNA, 21 nt, Variola virus
gauauaauucguggauaauca

SEQ ID NO: 4094649 - RNA, 23 nt, Variola virus
gauauaauucguggauaaucauu

SEQ ID NO: 4094650 - RNA, 19 nt, Variola virus
gauauacgaagaauaaugu

SEQ ID NO: 4094651 - RNA, 23 nt, Variola virus
gauauauauggucuuaugaaaga

SEQ ID NO: 4094652 - RNA, 14 nt, Variola virus
gauauauuaaacaa

SEQ ID NO: 4094653 - RNA, 22 nt, Variola virus
gauaucaaauggauauugccac

SEQ ID NO: 4094654 - RNA, 17 nt, Variola virus
gauaugaacauauucau

SEQ ID NO: 4094655 - RNA, 12 nt, Variola virus
gauauuauuaca

SEQ ID NO: 4094656 - RNA, 23 nt, Variola virus
gauauuuagcaauuucugauucu

SEQ ID NO: 4094657 - RNA, 12 nt, Variola virus
gaucaaguaaag

SEQ ID NO: 4094658 - RNA, 21 nt, Variola virus
gaucagaaauacgguuuuucu

SEQ ID NO: 4094659 - RNA, 15 nt, Variola virus
gaucauguagaaaac

SEQ ID NO: 4094660 - RNA, 12 nt, Variola virus
gauccaaucaaa

SEQ ID NO: 4094661 - RNA, 17 nt, Variola virus
gauccaaucaaaaaaua

SEQ ID NO: 4094662 - RNA, 21 nt, Variola virus
gaucccauacuugauaagaua

SEQ ID NO: 4094663 - RNA, 18 nt, Variola virus
gauccuaggauccuucag

SEQ ID NO: 4094664 - RNA, 18 nt, Variola virus
gauccugcauagaaauau

SEQ ID NO: 4094665 - RNA, 20 nt, Variola virus
gauccugcauagaaauaucu

SEQ ID NO: 4094666 - RNA, 14 nt, Variola virus
gauccuuuaagaga

SEQ ID NO: 4094667 - RNA, 15 nt, Variola virus
gaucuaaaaauuaaa

SEQ ID NO: 4094668 - RNA, 15 nt, Variola virus
gaucuaauuuuucau

SEQ ID NO: 4094669 - RNA, 20 nt, Variola virus
gaucuagcaaaggaaauugu

SEQ ID NO: 4094670 - RNA, 22 nt, Variola virus
gaucugcuauauggauauucau

SEQ ID NO: 4094671 - RNA, 22 nt, Variola virus
gaucugcucccgguacacauau

SEQ ID NO: 4094672 - RNA, 20 nt, Variola virus
gaugaaaaauuuguagauuu

SEQ ID NO: 4094673 - RNA, 13 nt, Variola virus
gaugaacagguua

SEQ ID NO: 4094674 - RNA, 19 nt, Variola virus
gaugacuuuaguaaaucau

SEQ ID NO: 4094675 - RNA, 17 nt, Variola virus
gaugagguaaaaaauaa

SEQ ID NO: 4094676 - RNA, 15 nt, Variola virus
gaugaguuagauauu

SEQ ID NO: 4094677 - RNA, 12 nt, Variola virus
gaugauauuaac

SEQ ID NO: 4094678 - RNA, 18 nt, Variola virus
gaugauauucaaacuaau

SEQ ID NO: 4094679 - RNA, 18 nt, Variola virus
gaugccuuaacaucauca

SEQ ID NO: 4094680 - RNA, 17 nt, Variola virus
gauggauaaagauauau

SEQ ID NO: 4094681 - RNA, 15 nt, Variola virus
gauggauauauuaaa

SEQ ID NO: 4094682 - RNA, 23 nt, Variola virus
gauggugccaccguaguguauau

SEQ ID NO: 4094683 - RNA, 13 nt, Variola virus
gauguacauguau

SEQ ID NO: 4094684 - RNA, 13 nt, Variola virus
gauguagaagaag

SEQ ID NO: 4094685 - RNA, 15 nt, Variola virus
gauguaguaguauau

SEQ ID NO: 4094686 - RNA, 19 nt, Variola virus
gauguauauaggucagaua

SEQ ID NO: 4094687 - RNA, 11 nt, Variola virus
gauguauauau

SEQ ID NO: 4094688 - RNA, 23 nt, Variola virus
gauguaugcaaaucaguauauaa

SEQ ID NO: 4094689 - RNA, 19 nt, Variola virus
gaugucaaaggaugaaaga

SEQ ID NO: 4094690 - RNA, 13 nt, Variola virus
gauguguauacau

SEQ ID NO: 4094691 - RNA, 17 nt, Variola virus
gaugugucuacauaaau

SEQ ID NO: 4094692 - RNA, 16 nt, Variola virus
gauguuaaacaaauaa

SEQ ID NO: 4094693 - RNA, 22 nt, Variola virus
gauuaauuguuauuuuauucau

SEQ ID NO: 4094694 - RNA, 20 nt, Variola virus
gauucauccuuaaauguuuu

SEQ ID NO: 4094695 - RNA, 14 nt, Variola virus
gauucgauuuugau

SEQ ID NO: 4094696 - RNA, 13 nt, Variola virus
gauucuaucuuua

SEQ ID NO: 4094697 - RNA, 22 nt, Variola virus
gauucuguguauaaaaacagaa

SEQ ID NO: 4094698 - RNA, 13 nt, Variola virus
gauuguaaugaac

SEQ ID NO: 4094699 - RNA, 16 nt, Variola virus
gauuuaucuguuuugg

SEQ ID NO: 4094700 - RNA, 18 nt, Variola virus
gauuucuuaucuguaguu

SEQ ID NO: 4094701 - RNA, 13 nt, Variola virus
gcaaaaauaauau

SEQ ID NO: 4094702 - RNA, 16 nt, Variola virus
gcaaaauaguaaugau

SEQ ID NO: 4094703 - RNA, 12 nt, Variola virus
gcaaaauuuaua

SEQ ID NO: 4094704 - RNA, 13 nt, Variola virus
gcaaagagaugau

SEQ ID NO: 4094705 - RNA, 19 nt, Variola virus
gcaaaucacucaauaucua

SEQ ID NO: 4094706 - RNA, 18 nt, Variola virus
gcaaauugucuauaucua

SEQ ID NO: 4094707 - RNA, 17 nt, Variola virus
gcaacuguaaauuucuc

SEQ ID NO: 4094708 - RNA, 16 nt, Variola virus
gcaauaagucuuucuc

SEQ ID NO: 4094709 - RNA, 17 nt, Variola virus
gcaauagguaauaacua

SEQ ID NO: 4094710 - RNA, 15 nt, Variola virus
gcaauauauauacag

SEQ ID NO: 4094711 - RNA, 19 nt, Variola virus
gcaaucacuacaauaauua

SEQ ID NO: 4094712 - RNA, 20 nt, Variola virus
gcaaucuuuuagaugaugau

SEQ ID NO: 4094713 - RNA, 20 nt, Variola virus
gcacaaaugugcuuaaacga

SEQ ID NO: 4094714 - RNA, 16 nt, Variola virus
gcacaaugauaaugaa

SEQ ID NO: 4094715 - RNA, 14 nt, Variola virus
gcacacaauacaga

SEQ ID NO: 4094716 - RNA, 13 nt, Variola virus
gcacauuauucua

SEQ ID NO: 4094717 - RNA, 14 nt, Variola virus
gcaccaaaguuaua

SEQ ID NO: 4094718 - RNA, 21 nt, Variola virus
gcacguaucuaaaguauuucu

SEQ ID NO: 4094719 - RNA, 16 nt, Variola virus
gcacugguuuaguuca

SEQ ID NO: 4094720 - RNA, 19 nt, Variola virus
gcagacuagaaauaacagg

SEQ ID NO: 4094721 - RNA, 13 nt, Variola virus
gcagacugugcau

SEQ ID NO: 4094722 - RNA, 17 nt, Variola virus
gcagauagcuauaugau

SEQ ID NO: 4094723 - RNA, 17 nt, Variola virus
gcagcgaacuugauauu

SEQ ID NO: 4094724 - RNA, 20 nt, Variola virus
gcagguacuauaauauuaaa

SEQ ID NO: 4094725 - RNA, 18 nt, Variola virus
gcaguaacauagauuauu

SEQ ID NO: 4094726 - RNA, 12 nt, Variola virus
gcauaaaaaugc

SEQ ID NO: 4094727 - RNA, 11 nt, Variola virus
gcauaauacaa

SEQ ID NO: 4094728 - RNA, 19 nt, Variola virus
gcauaauccuuguaaugau

SEQ ID NO: 4094729 - RNA, 20 nt, Variola virus
gcauacgaaauaaauaauga

SEQ ID NO: 4094730 - RNA, 11 nt, Variola virus
gcauagauaua

SEQ ID NO: 4094731 - RNA, 14 nt, Variola virus
gcauauauuagaaa

SEQ ID NO: 4094732 - RNA, 16 nt, Variola virus
gcauauuaguauauaa

SEQ ID NO: 4094733 - RNA, 16 nt, Variola virus
gcaucaaaaaauguaa

SEQ ID NO: 4094734 - RNA, 21 nt, Variola virus
gcaucaacaguuacaaaugag

SEQ ID NO: 4094735 - RNA, 16 nt, Variola virus
gcaucaugaauacagu

SEQ ID NO: 4094736 - RNA, 14 nt, Variola virus
gcauccaaauggau

SEQ ID NO: 4094737 - RNA, 15 nt, Variola virus
gcaucgauugcaugg

SEQ ID NO: 4094738 - RNA, 22 nt, Variola virus
gcaucuaaaacaauaaaugcau

SEQ ID NO: 4094739 - RNA, 16 nt, Variola virus
gcaucucuuaauccaa

SEQ ID NO: 4094740 - RNA, 19 nt, Variola virus
gcaucugauacaacaauau

SEQ ID NO: 4094741 - RNA, 21 nt, Variola virus
gcaugugauuuacucauuuau

SEQ ID NO: 4094742 - RNA, 14 nt, Variola virus
gcauuauuaagaca

SEQ ID NO: 4094743 - RNA, 13 nt, Variola virus
gcauuugaugcac

SEQ ID NO: 4094744 - RNA, 17 nt, Variola virus
gcauuuuuauauacauu

SEQ ID NO: 4094745 - RNA, 20 nt, Variola virus
gccaaaacuucacagaugau

SEQ ID NO: 4094746 - RNA, 12 nt, Variola virus
gccaaaaugaua

SEQ ID NO: 4094747 - RNA, 18 nt, Variola virus
gccaaaaugauagauauu

SEQ ID NO: 4094748 - RNA, 12 nt, Variola virus
gccaacaaauau

SEQ ID NO: 4094749 - RNA, 23 nt, Variola virus
gccaauugauaguaaauaaugag

SEQ ID NO: 4094750 - RNA, 23 nt, Variola virus
gccacaauauauucuaugauggu

SEQ ID NO: 4094751 - RNA, 15 nt, Variola virus
gccaccacuucucua

SEQ ID NO: 4094752 - RNA, 21 nt, Variola virus
gccacgaauaaaaaauacuua

SEQ ID NO: 4094753 - RNA, 22 nt, Variola virus
gccaucguguuaaauuuucuaa

SEQ ID NO: 4094754 - RNA, 14 nt, Variola virus
gccauuacaagaua

SEQ ID NO: 4094755 - RNA, 18 nt, Variola virus
gccgcaaccauuagauuu

SEQ ID NO: 4094756 - RNA, 20 nt, Variola virus
gccuaauguaucgauaauua

SEQ ID NO: 4094757 - RNA, 17 nt, Variola virus
gcgaaccgauuaaacau

SEQ ID NO: 4094758 - RNA, 15 nt, Variola virus
gcgaacuuuaaacag

SEQ ID NO: 4094759 - RNA, 17 nt, Variola virus
gcgaauaaauagauaua

SEQ ID NO: 4094760 - RNA, 19 nt, Variola virus
uaacuaaaaauguaaaaua

SEQ ID NO: 4094761 - RNA, 19 nt, Variola virus
uaacuaaaguuaauacuac

SEQ ID NO: 4094762 - RNA, 22 nt, Variola virus
uaacuaugauaucucuauuaau

SEQ ID NO: 4094763 - RNA, 16 nt, Variola virus
uaacuauuuagcaaaa

SEQ ID NO: 4094764 - RNA, 12 nt, Variola virus
uaacuauuugca

SEQ ID NO: 4094765 - RNA, 21 nt, Variola virus
uaacucauugcuuucuagaau

SEQ ID NO: 4094766 - RNA, 13 nt, Variola virus
uacauacuaauau

SEQ ID NO: 4094767 - RNA, 17 nt, Variola virus
uacauauuuguacauua

SEQ ID NO: 4094768 - RNA, 13 nt, Variola virus
uacaucaaucuua

SEQ ID NO: 4094769 - RNA, 18 nt, Variola virus
uacaucuaguucuuugaa

SEQ ID NO: 4094770 - RNA, 19 nt, Variola virus
uacaucuauauugcuacau

SEQ ID NO: 4094771 - RNA, 16 nt, Variola virus
uacaucuguuuccuau

SEQ ID NO: 4094772 - RNA, 16 nt, Variola virus
uacaucuucaauagau

SEQ ID NO: 4094773 - RNA, 14 nt, Variola virus
uacaugaaggacuu

SEQ ID NO: 4094774 - RNA, 17 nt, Variola virus
uacauucuuuuugcugu

SEQ ID NO: 4094775 - RNA, 20 nt, Variola virus
uaccaaaaagugugauuaau

SEQ ID NO: 4094776 - RNA, 23 nt, Variola virus
uaccaaacuuucagaagaaaugg

SEQ ID NO: 4094777 - RNA, 13 nt, Variola virus
uaccaaauauuag

SEQ ID NO: 4094778 - RNA, 22 nt, Variola virus
uaccaacaugucugauauuuug

SEQ ID NO: 4094779 - RNA, 22 nt, Variola virus
uaccaauaugucuguacaaaug

SEQ ID NO: 4094780 - RNA, 21 nt, Variola virus
uaccacaauaaaaaaaauuga

SEQ ID NO: 4094781 - RNA, 23 nt, Variola virus
uaccauggaaaaauauuacagau

SEQ ID NO: 4094782 - RNA, 21 nt, Variola virus
uaccauggacggagacaaauu

SEQ ID NO: 4094783 - RNA, 13 nt, Variola virus
uaccauucaauau

SEQ ID NO: 4094784 - RNA, 17 nt, Variola virus
uaccauuuuaaaaucau

SEQ ID NO: 4094785 - RNA, 16 nt, Variola virus
uacccaaaucugaaaa

SEQ ID NO: 4094786 - RNA, 18 nt, Variola virus
uacccaaucucucucaaa

SEQ ID NO: 4094787 - RNA, 21 nt, Variola virus
uaccccucauaguauuaauau

SEQ ID NO: 4094788 - RNA, 16 nt, Variola virus
uaccgaagaauuaaau

SEQ ID NO: 4094789 - RNA, 23 nt, Variola virus
uaccuaauauaaaucaaauacuu

SEQ ID NO: 4094790 - RNA, 20 nt, Variola virus
uaccugcaguggaguuauau

SEQ ID NO: 4094791 - RNA, 14 nt, Variola virus
uaccuuguauacau

SEQ ID NO: 4094792 - RNA, 21 nt, Variola virus
uacgaaaacgaaaucuguaau

SEQ ID NO: 4094793 - RNA, 17 nt, Variola virus
uacgaagacagacauac

SEQ ID NO: 4094794 - RNA, 18 nt, Variola virus
uacgacuaaguucaaguc

SEQ ID NO: 4094795 - RNA, 14 nt, Variola virus
uacgauaugauuca

SEQ ID NO: 4094796 - RNA, 14 nt, Variola virus
uacgauuaucuauu

SEQ ID NO: 4094797 - RNA, 17 nt, Variola virus
uacgcauuacaguuuuu

SEQ ID NO: 4094798 - RNA, 22 nt, Variola virus
uacgccaaauaucucaaagaug

SEQ ID NO: 4094799 - RNA, 16 nt, Variola virus
uacgccccuguaucuc

SEQ ID NO: 4094800 - RNA, 19 nt, Variola virus
uacgccuuuaaauccucua

SEQ ID NO: 4094801 - RNA, 16 nt, Variola virus
uacgcuuauuaucauc

SEQ ID NO: 4094802 - RNA, 15 nt, Variola virus
uacgucaucaaaaau

SEQ ID NO: 4094803 - RNA, 15 nt, Variola virus
uacuaaaacugaaga

SEQ ID NO: 4094804 - RNA, 17 nt, Variola virus
uacuaauacuaauacua

SEQ ID NO: 4094805 - RNA, 18 nt, Variola virus
uacuaauacuaauacuac

SEQ ID NO: 4094806 - RNA, 18 nt, Variola virus
uacuaauaggucuaaaaa

SEQ ID NO: 4094807 - RNA, 19 nt, Variola virus
uacuaauuacuaaaucugu

SEQ ID NO: 4094808 - RNA, 22 nt, Variola virus
uacuagacugacuucuaacaaa

SEQ ID NO: 4094809 - RNA, 11 nt, Variola virus
uacuaggaaaa

SEQ ID NO: 4094810 - RNA, 20 nt, Variola virus
uacuaguggauguacaugua

SEQ ID NO: 4094811 - RNA, 21 nt, Variola virus
uacuauauaguaauaccaaug

SEQ ID NO: 4094812 - RNA, 18 nt, Variola virus
uacuauuauauuugguau

SEQ ID NO: 4094813 - RNA, 18 nt, Variola virus
uacucauuuaacagaugu

SEQ ID NO: 4094814 - RNA, 24 nt, Variola virus
uacuccaaaaaacaaaauaacuag

SEQ ID NO: 4094815 - RNA, 18 nt, Variola virus
uacucggccgacauaaug

SEQ ID NO: 4094816 - RNA, 20 nt, Variola virus
uacucuaaucuuuaauagau

SEQ ID NO: 4094817 - RNA, 22 nt, Variola virus
uacucuccgaguguaaauauua

SEQ ID NO: 4094818 - RNA, 13 nt, Variola virus
uacucuucuaaau

SEQ ID NO: 4094819 - RNA, 16 nt, Variola virus
uacugaagaacuaaaa

SEQ ID NO: 4094820 - RNA, 13 nt, Variola virus
uacugaauuauua

SEQ ID NO: 4094821 - RNA, 16 nt, Variola virus
uacuggauucauacau

SEQ ID NO: 4094822 - RNA, 16 nt, Variola virus
uacuguaacacaauga

SEQ ID NO: 4094823 - RNA, 21 nt, Variola virus
uacuguauugauuacagugua

SEQ ID NO: 4094824 - RNA, 20 nt, Variola virus
uacuuagucuguacaaaagu

SEQ ID NO: 4094825 - RNA, 13 nt, Variola virus
uacuucuauacaa

SEQ ID NO: 4094826 - RNA, 20 nt, Variola virus
uacuucucccauaauacuuu

SEQ ID NO: 4094827 - RNA, 18 nt, Variola virus
uacuugauaagauaaaau

SEQ ID NO: 4094828 - RNA, 22 nt, Variola virus
uacuugcacguaaagucuacau

SEQ ID NO: 4094829 - RNA, 16 nt, Variola virus
uacuuuaaagaaguag

SEQ ID NO: 4094830 - RNA, 13 nt, Variola virus
uacuuuguaagau

SEQ ID NO: 4094831 - RNA, 23 nt, Variola virus
uacuuuguggaugaugaugaaau

SEQ ID NO: 4094832 - RNA, 15 nt, Variola virus
uacuuuguguuucau

SEQ ID NO: 4094833 - RNA, 14 nt, Variola virus
uacuuuuaggaaau

SEQ ID NO: 4094834 - RNA, 18 nt, Variola virus
uagaaaaaacauguggua

SEQ ID NO: 4094835 - RNA, 20 nt, Variola virus
uagaaaaaauagaacuuauc

SEQ ID NO: 4094836 - RNA, 15 nt, Variola virus
uagaaaaaauuuauu

SEQ ID NO: 4094837 - RNA, 13 nt, Variola virus
uagaaaaacuuua

SEQ ID NO: 4094838 - RNA, 15 nt, Variola virus
uagaaaauauauucu

SEQ ID NO: 4094839 - RNA, 15 nt, Variola virus
uagaaacauauucua

SEQ ID NO: 4094840 - RNA, 23 nt, Variola virus
uagaaagaaacgauuauuucuaa

SEQ ID NO: 4094841 - RNA, 17 nt, Variola virus
uagaaaguaauggauua

SEQ ID NO: 4094842 - RNA, 19 nt, Variola virus
uagaaauuaucaaauguug

SEQ ID NO: 4094843 - RNA, 17 nt, Variola virus
uagaacagauuuaacaa

SEQ ID NO: 4094844 - RNA, 19 nt, Variola virus
uagaaccacuauguuaaua

SEQ ID NO: 4094845 - RNA, 17 nt, Variola virus
uagaacuuuuaauuuug

SEQ ID NO: 4094846 - RNA, 21 nt, Variola virus
uagaagagcaaauaucucauc

SEQ ID NO: 4094847 - RNA, 21 nt, Variola virus
uagaagaucaaccucuggagu

SEQ ID NO: 4094848 - RNA, 16 nt, Variola virus
uagaagccaauaucug

SEQ ID NO: 4094849 - RNA, 14 nt, Variola virus
uagaauauauguca

SEQ ID NO: 4094850 - RNA, 21 nt, Variola virus
uagaauccauaaaacaaaauc

SEQ ID NO: 4094851 - RNA, 18 nt, Variola virus
uagaaugcucuuaaauaa

SEQ ID NO: 4094852 - RNA, 22 nt, Variola virus
uagaauguugagcuaauuuuug

SEQ ID NO: 4094853 - RNA, 21 nt, Variola virus
uagacaaugcuaauauauucu

SEQ ID NO: 4094854 - RNA, 15 nt, Variola virus
uagacacgcguaaua

SEQ ID NO: 4094855 - RNA, 16 nt, Variola virus
uagacagaauaucgug

SEQ ID NO: 4094856 - RNA, 14 nt, Variola virus
uagacauaauacua

SEQ ID NO: 4094857 - RNA, 21 nt, Variola virus
uagacauaauagucaauagau

SEQ ID NO: 4094858 - RNA, 11 nt, Variola virus
uagacauagau

SEQ ID NO: 4094859 - RNA, 21 nt, Variola virus
uagacauuguacaauaugugu

SEQ ID NO: 4094860 - RNA, 19 nt, Variola virus
uagagaaucgcuagaugcu

SEQ ID NO: 4094861 - RNA, 20 nt, Variola virus
uagagcccacguuuaaacau

SEQ ID NO: 4094862 - RNA, 21 nt, Variola virus
uagagcccacguuuaaacauu

SEQ ID NO: 4094863 - RNA, 22 nt, Variola virus
uagagugaguuuaggauucauu

SEQ ID NO: 4094864 - RNA, 13 nt, Variola virus
uagauaaacuauc

SEQ ID NO: 4094865 - RNA, 14 nt, Variola virus
uagauaaauuuauc

SEQ ID NO: 4094866 - RNA, 12 nt, Variola virus
uagauacaaaau

SEQ ID NO: 4094867 - RNA, 14 nt, Variola virus
uagauaucaaaaua

SEQ ID NO: 4094868 - RNA, 15 nt, Variola virus
uagaucaacgucauc

SEQ ID NO: 4094869 - RNA, 22 nt, Variola virus
uagauccuucaauaacuuauag

SEQ ID NO: 4094870 - RNA, 21 nt, Variola virus
uagaucugauacaccuguaau

SEQ ID NO: 4094871 - RNA, 14 nt, Variola virus
uagauuaaugcuua

SEQ ID NO: 4094872 - RNA, 13 nt, Variola virus
uagauuaucuauu

SEQ ID NO: 4094873 - RNA, 19 nt, Variola virus
uagauuggagucuacuaau

SEQ ID NO: 4094874 - RNA, 19 nt, Variola virus
uagauugguacgaaauaua

SEQ ID NO: 4094875 - RNA, 17 nt, Variola virus
uagauuuauaauacuuu

SEQ ID NO: 4094876 - RNA, 16 nt, Variola virus
uagauuuccaaagaua

SEQ ID NO: 4094877 - RNA, 16 nt, Variola virus
uagauuuuaucuaauu

SEQ ID NO: 4094878 - RNA, 18 nt, Variola virus
uagauuuuuaguuacaga

SEQ ID NO: 4094879 - RNA, 16 nt, Variola virus
uagcaauuucaaaaua

SEQ ID NO: 4094880 - RNA, 19 nt, Variola virus
uagcaucuuuuuauaucug

SEQ ID NO: 4094881 - RNA, 17 nt, Variola virus
uagccaucguuaauuau

SEQ ID NO: 4094882 - RNA, 22 nt, Variola virus
uagccaugggaacaguaaugau

SEQ ID NO: 4094883 - RNA, 18 nt, Variola virus
uagcguuauaacaaaauc

SEQ ID NO: 4094884 - RNA, 21 nt, Variola virus
uagcuauuuguagcaaaacua

SEQ ID NO: 4094885 - RNA, 15 nt, Variola virus
uagcuguucaagaau

SEQ ID NO: 4094886 - RNA, 23 nt, Variola virus
uagcuuuguuagacuaaauacua

SEQ ID NO: 4094887 - RNA, 17 nt, Variola virus
uaggagaugauagcuau

SEQ ID NO: 4094888 - RNA, 14 nt, Variola virus
uaggaguaucuauu

SEQ ID NO: 4094889 - RNA, 19 nt, Variola virus
uaggauuuuggacuuauau

SEQ ID NO: 4094890 - RNA, 17 nt, Variola virus
uaggcacagucaaacau

SEQ ID NO: 4094891 - RNA, 13 nt, Variola virus
cucuauuaaauac

SEQ ID NO: 4094892 - RNA, 17 nt, Variola virus
cucuauuuugucauuaa

SEQ ID NO: 4094893 - RNA, 22 nt, Variola virus
cucuauuuugucauuaacuuua

SEQ ID NO: 4094894 - RNA, 21 nt, Variola virus
cucugaauauagaacaucauu

SEQ ID NO: 4094895 - RNA, 16 nt, Variola virus
cucugaccuaaaggug

SEQ ID NO: 4094896 - RNA, 20 nt, Variola virus
cucuggguaacaaacauacu

SEQ ID NO: 4094897 - RNA, 13 nt, Variola virus
cucuuaaaaauug

SEQ ID NO: 4094898 - RNA, 18 nt, Variola virus
cucuucaacaucuuuaau

SEQ ID NO: 4094899 - RNA, 15 nt, Variola virus
cucuuccaguuccaa

SEQ ID NO: 4094900 - RNA, 17 nt, Variola virus
cucuuccaucaccaaaa

SEQ ID NO: 4094901 - RNA, 14 nt, Variola virus
cucuuggaauuaau

SEQ ID NO: 4094902 - RNA, 15 nt, Variola virus
cugaaaaagauauca

SEQ ID NO: 4094903 - RNA, 16 nt, Variola virus
cugaaaagaagugagu

SEQ ID NO: 4094904 - RNA, 14 nt, Variola virus
cugaaaauaaagau

SEQ ID NO: 4094905 - RNA, 12 nt, Variola virus
cugaaaauuaaa

SEQ ID NO: 4094906 - RNA, 22 nt, Variola virus
cugaaaauuggaguuagguauu

SEQ ID NO: 4094907 - RNA, 15 nt, Variola virus
cugaacccguuaaug

SEQ ID NO: 4094908 - RNA, 13 nt, Variola virus
cugaaguuucaua

SEQ ID NO: 4094909 - RNA, 14 nt, Variola virus
cugaauaaaacauc

SEQ ID NO: 4094910 - RNA, 23 nt, Variola virus
cugaauacuaucgauugaugagu

SEQ ID NO: 4094911 - RNA, 16 nt, Variola virus
cugaauauauugauuu

SEQ ID NO: 4094912 - RNA, 14 nt, Variola virus
cugauaagauaucu

SEQ ID NO: 4094913 - RNA, 14 nt, Variola virus
cugaucauuaauau

SEQ ID NO: 4094914 - RNA, 20 nt, Variola virus
cugauuuauguuuuaaauau

SEQ ID NO: 4094915 - RNA, 16 nt, Variola virus
cugauuucucucauaa

SEQ ID NO: 4094916 - RNA, 21 nt, Variola virus
cugauuuuuuaugauuuugug

SEQ ID NO: 4094917 - RNA, 20 nt, Variola virus
cugcagaauaauuagaaauu

SEQ ID NO: 4094918 - RNA, 17 nt, Variola virus
cugcauuaucaauaaau

SEQ ID NO: 4094919 - RNA, 18 nt, Variola virus
cugcgaacuuuaaacaga

SEQ ID NO: 4094920 - RNA, 19 nt, Variola virus
cugcuccagaauuaauaau

SEQ ID NO: 4094921 - RNA, 17 nt, Variola virus
cugguagccguuucaau

SEQ ID NO: 4094922 - RNA, 22 nt, Variola virus
cuggucuaaaauuuccaucucu

SEQ ID NO: 4094923 - RNA, 20 nt, Variola virus
cuguacuaucuagagauugu

SEQ ID NO: 4094924 - RNA, 18 nt, Variola virus
cuguaucauccaguuugc

SEQ ID NO: 4094925 - RNA, 18 nt, Variola virus
cuguauccucaaacaucc

SEQ ID NO: 4094926 - RNA, 18 nt, Variola virus
cuguauuuggaucuuuug

SEQ ID NO: 4094927 - RNA, 18 nt, Variola virus
cugucaugauaaaaauuu

SEQ ID NO: 4094928 - RNA, 21 nt, Variola virus
cugucaugauaaaaauuuaaa

SEQ ID NO: 4094929 - RNA, 23 nt, Variola virus
cugucgaaaaaguaggaauuaau

SEQ ID NO: 4094930 - RNA, 21 nt, Variola virus
cugugcauaaauuaaaauaca

SEQ ID NO: 4094931 - RNA, 13 nt, Variola virus
cuguuauuuugaa

SEQ ID NO: 4094932 - RNA, 15 nt, Variola virus
cuguucuaucaucua

SEQ ID NO: 4094933 - RNA, 16 nt, Variola virus
cuguucuccguguggu

SEQ ID NO: 4094934 - RNA, 17 nt, Variola virus
cuguugugaauauuuua

SEQ ID NO: 4094935 - RNA, 15 nt, Variola virus
cuuaaauauuucuac

SEQ ID NO: 4094936 - RNA, 21 nt, Variola virus
cuuaacuuuuucuuucucagc

SEQ ID NO: 4094937 - RNA, 13 nt, Variola virus
cuuaauaaauguu

SEQ ID NO: 4094938 - RNA, 16 nt, Variola virus
cuuaguaaacagucca

SEQ ID NO: 4094939 - RNA, 13 nt, Variola virus
cuuaguaacucua

SEQ ID NO: 4094940 - RNA, 22 nt, Variola virus
cuuauacgauccgcgucuuuuu

SEQ ID NO: 4094941 - RNA, 22 nt, Variola virus
cuuaugaaacuuggaaacaucu

SEQ ID NO: 4094942 - RNA, 21 nt, Variola virus
cuucagaaaagucaaauauug

SEQ ID NO: 4094943 - RNA, 20 nt, Variola virus
cuucagaauauucuuuucua

SEQ ID NO: 4094944 - RNA, 21 nt, Variola virus
cuucagaauauucuuuucuaa

SEQ ID NO: 4094945 - RNA, 23 nt, Variola virus
cuucagauaaucugaaaaugaaa

SEQ ID NO: 4094946 - RNA, 23 nt, Variola virus
cuucaucaaccgaguuguuaauc

SEQ ID NO: 4094947 - RNA, 23 nt, Variola virus
cuuccagaauuguaacaacaaug

SEQ ID NO: 4094948 - RNA, 14 nt, Variola virus
cuucuaaucuugua

SEQ ID NO: 4094949 - RNA, 12 nt, Variola virus
cuucuacauaaa

SEQ ID NO: 4094950 - RNA, 20 nt, Variola virus
cuucuaucuuguuuagauuu

SEQ ID NO: 4094951 - RNA, 22 nt, Variola virus
cuucuaugagauugaucaugua

SEQ ID NO: 4094952 - RNA, 17 nt, Variola virus
cuucuuuuuauauccaa

SEQ ID NO: 4094953 - RNA, 14 nt, Variola virus
cuugaagaugauuu

SEQ ID NO: 4094954 - RNA, 21 nt, Variola virus
cuugagagcauccaguaugaa

SEQ ID NO: 4094955 - RNA, 18 nt, Variola virus
cuugaucucaucauucca

SEQ ID NO: 4094956 - RNA, 13 nt, Variola virus
cuugcaaguuaaa

SEQ ID NO: 4094957 - RNA, 19 nt, Variola virus
cuugguuuacauggaucag

SEQ ID NO: 4094958 - RNA, 22 nt, Variola virus
cuuguaauugugggaacauaau

SEQ ID NO: 4094959 - RNA, 13 nt, Variola virus
cuugugguaauga

SEQ ID NO: 4094960 - RNA, 19 nt, Variola virus
cuuguuaauaaguaaauga

SEQ ID NO: 4094961 - RNA, 15 nt, Variola virus
cuuguuauaaacaca

SEQ ID NO: 4094962 - RNA, 16 nt, Variola virus
cuuuaacaucacuaau

SEQ ID NO: 4094963 - RNA, 15 nt, Variola virus
cuuuaaccuauacau

SEQ ID NO: 4094964 - RNA, 14 nt, Variola virus
cuuuaagcagaucu

SEQ ID NO: 4094965 - RNA, 22 nt, Variola virus
cuuuaaguuuuucguuguuaag

SEQ ID NO: 4094966 - RNA, 15 nt, Variola virus
cuuuaauccauguuu

SEQ ID NO: 4094967 - RNA, 14 nt, Variola virus
cuuuagaaaaacuu

SEQ ID NO: 4094968 - RNA, 14 nt, Variola virus
cuuuauaaugcauu

SEQ ID NO: 4094969 - RNA, 12 nt, Variola virus
cuuuaucacuau

SEQ ID NO: 4094970 - RNA, 14 nt, Variola virus
cuuuauuaaaucau

SEQ ID NO: 4094971 - RNA, 13 nt, Variola virus
cuuuauuaucuau

SEQ ID NO: 4094972 - RNA, 11 nt, Variola virus
cuuucucucuu

SEQ ID NO: 4094973 - RNA, 18 nt, Variola virus
cuuugaacuguuuaagag

SEQ ID NO: 4094974 - RNA, 12 nt, Variola virus
cuuugacaaaug

SEQ ID NO: 4094975 - RNA, 16 nt, Variola virus
cuuugauuucuuaucu

SEQ ID NO: 4094976 - RNA, 12 nt, Variola virus
cuuugcuauuuc

SEQ ID NO: 4094977 - RNA, 20 nt, Variola virus
cuuugguaauaaaauuauuc

SEQ ID NO: 4094978 - RNA, 15 nt, Variola virus
cuuuguaauauugua

SEQ ID NO: 4094979 - RNA, 18 nt, Variola virus
cuuuguauucaguauuuu

SEQ ID NO: 4094980 - RNA, 21 nt, Variola virus
cuuuuaucguuuaagaauaau

SEQ ID NO: 4094981 - RNA, 20 nt, Variola virus
cuuuuauuuccacauuagau

SEQ ID NO: 4094982 - RNA, 16 nt, Variola virus
cuuuuauuuuaucuaa

SEQ ID NO: 4094983 - RNA, 16 nt, Variola virus
cuuuugcuauuaccaa

SEQ ID NO: 4094984 - RNA, 22 nt, Variola virus
cuuuugucguaaauacaugucu

SEQ ID NO: 4094985 - RNA, 18 nt, Variola virus
cuuuuguggaauuuccca

SEQ ID NO: 4094986 - RNA, 18 nt, Variola virus
cuuuuguggacauuuucu

SEQ ID NO: 4094987 - RNA, 17 nt, Variola virus
cuuuuuauccucauuaa

SEQ ID NO: 4094988 - RNA, 16 nt, Variola virus
cuuuuuuccaaacugc

SEQ ID NO: 4094989 - RNA, 22 nt, Variola virus
gaaaaaaaucuuuuuuuauucu

SEQ ID NO: 4094990 - RNA, 17 nt, Variola virus
gaaaaauaacaaaucua

SEQ ID NO: 4094991 - RNA, 12 nt, Variola virus
gaaaaauaauua

SEQ ID NO: 4094992 - RNA, 19 nt, Variola virus
gaaaaauguuagaauuaga

SEQ ID NO: 4094993 - RNA, 17 nt, Variola virus
gaaaacuauauacuaua

SEQ ID NO: 4094994 - RNA, 17 nt, Variola virus
gaaaacugguuaaaaca

SEQ ID NO: 4094995 - RNA, 13 nt, Variola virus
gaaaagauucuuu

SEQ ID NO: 4094996 - RNA, 22 nt, Variola virus
gaaaaguuauuaucuguagacg

SEQ ID NO: 4094997 - RNA, 17 nt, Variola virus
gaaaauaaucuaguaaa

SEQ ID NO: 4094998 - RNA, 21 nt, Variola virus
gaaaaucagaucugauaauau

SEQ ID NO: 4094999 - RNA, 18 nt, Variola virus
gaaaauccagcuacuaua

SEQ ID NO: 4095000 - RNA, 22 nt, Variola virus
gaaaaugaaaaaguacuagaua

SEQ ID NO: 4095001 - RNA, 24 nt, Variola virus
gaaaaugaacaucggaaauauaga

SEQ ID NO: 4095002 - RNA, 14 nt, Variola virus
gaaaauguaauaaa

SEQ ID NO: 4095003 - RNA, 15 nt, Variola virus
gaaaauuauaaugaa

SEQ ID NO: 4095004 - RNA, 15 nt, Variola virus
gaaaauucaaauaga

SEQ ID NO: 4095005 - RNA, 22 nt, Variola virus
gaaacaauguuucuuacauauu

SEQ ID NO: 4095006 - RNA, 15 nt, Variola virus
gaaacauaacaauga

SEQ ID NO: 4095007 - RNA, 23 nt, Variola virus
gaaacauauucuaugaauuuaua

SEQ ID NO: 4095008 - RNA, 20 nt, Variola virus
gaaaccacugucuaaaugua

SEQ ID NO: 4095009 - RNA, 22 nt, Variola virus
gaaaccagaaugaaaaacucug

SEQ ID NO: 4095010 - RNA, 20 nt, Variola virus
gaaacuuuucagaauaucua

SEQ ID NO: 4095011 - RNA, 17 nt, Variola virus
gaaagauauauuaagaa

SEQ ID NO: 4095012 - RNA, 19 nt, Variola virus
gaaauaaccgcaugauuau

SEQ ID NO: 4095013 - RNA, 14 nt, Variola virus
gaaauaagagacuu

SEQ ID NO: 4095014 - RNA, 20 nt, Variola virus
gaaauaauauaaaugauuau

SEQ ID NO: 4095015 - RNA, 14 nt, Variola virus
gaaauaauauuaaa

SEQ ID NO: 4095016 - RNA, 21 nt, Variola virus
gaaauauaugagauguaguua

SEQ ID NO: 4095017 - RNA, 18 nt, Variola virus
gaaauauauuaagaaauc

SEQ ID NO: 4095018 - RNA, 15 nt, Variola virus
gaaaucaacaaucua

SEQ ID NO: 4095019 - RNA, 14 nt, Variola virus
gaaauccuauuuua

SEQ ID NO: 4095020 - RNA, 18 nt, Variola virus
cguuacuaacgugauuau

SEQ ID NO: 4095021 - RNA, 18 nt, Variola virus
cguuaguaacgccauuau

SEQ ID NO: 4095022 - RNA, 12 nt, Variola virus
cguuagucauau

SEQ ID NO: 4095023 - RNA, 19 nt, Variola virus
cguucaacauuuuauggaa

SEQ ID NO: 4095024 - RNA, 18 nt, Variola virus
cguuggaccauuaauagg

SEQ ID NO: 4095025 - RNA, 12 nt, Variola virus
cguuuuucugau

SEQ ID NO: 4095026 - RNA, 21 nt, Variola virus
cuaaaacugaagagacugauu

SEQ ID NO: 4095027 - RNA, 23 nt, Variola virus
cuaaaauaguucuguaauauguc

SEQ ID NO: 4095028 - RNA, 14 nt, Variola virus
cuaaauaaguagua

SEQ ID NO: 4095029 - RNA, 23 nt, Variola virus
cuaaauaccucauaaaacaaaaa

SEQ ID NO: 4095030 - RNA, 17 nt, Variola virus
cuaaaucgucaguagua

SEQ ID NO: 4095031 - RNA, 12 nt, Variola virus
cuaaaugaugau

SEQ ID NO: 4095032 - RNA, 13 nt, Variola virus
cuaacacauuuca

SEQ ID NO: 4095033 - RNA, 15 nt, Variola virus
cuaacacauuucaac

SEQ ID NO: 4095034 - RNA, 16 nt, Variola virus
cuaacgugauggauau

SEQ ID NO: 4095035 - RNA, 14 nt, Variola virus
cuaacucuguuuua

SEQ ID NO: 4095036 - RNA, 13 nt, Variola virus
cuaacuuaucuag

SEQ ID NO: 4095037 - RNA, 17 nt, Variola virus
cuaagacgucucauuuc

SEQ ID NO: 4095038 - RNA, 22 nt, Variola virus
cuaagacguuguaucucuuuuu

SEQ ID NO: 4095039 - RNA, 20 nt, Variola virus
cuaagcaauagguaauaacu

SEQ ID NO: 4095040 - RNA, 13 nt, Variola virus
cuaagccaacaaa

SEQ ID NO: 4095041 - RNA, 16 nt, Variola virus
cuaagcgguaaauaau

SEQ ID NO: 4095042 - RNA, 14 nt, Variola virus
cuaaguuucuuucc

SEQ ID NO: 4095043 - RNA, 22 nt, Variola virus
cuaauagcgaucauucgcuuaa

SEQ ID NO: 4095044 - RNA, 14 nt, Variola virus
cuaauauauucuua

SEQ ID NO: 4095045 - RNA, 19 nt, Variola virus
cuaauaugaggaaaaugau

SEQ ID NO: 4095046 - RNA, 19 nt, Variola virus
cuaauauuauuaccaucuu

SEQ ID NO: 4095047 - RNA, 22 nt, Variola virus
cuaauauucccaaacauacauc

SEQ ID NO: 4095048 - RNA, 19 nt, Variola virus
cuaaucuauuuuaucauuu

SEQ ID NO: 4095049 - RNA, 16 nt, Variola virus
cuaaucucuucuuuaa

SEQ ID NO: 4095050 - RNA, 12 nt, Variola virus
cuaaugaugcag

SEQ ID NO: 4095051 - RNA, 13 nt, Variola virus
cuaauggauguca

SEQ ID NO: 4095052 - RNA, 23 nt, Variola virus
cuaauguuuccggagauagauuu

SEQ ID NO: 4095053 - RNA, 15 nt, Variola virus
cuaauuaaaaguuuu

SEQ ID NO: 4095054 - RNA, 20 nt, Variola virus
cuaauuccgcauuaaaugau

SEQ ID NO: 4095055 - RNA, 17 nt, Variola virus
cuaauucgacuaucgaa

SEQ ID NO: 4095056 - RNA, 13 nt, Variola virus
cuaauucuuuaau

SEQ ID NO: 4095057 - RNA, 22 nt, Variola virus
cuaauugaucaagaguaacuau

SEQ ID NO: 4095058 - RNA, 17 nt, Variola virus
cuaauuuacuaucugua

SEQ ID NO: 4095059 - RNA, 22 nt, Variola virus
cuacaaaacagaaauaugugaa

SEQ ID NO: 4095060 - RNA, 20 nt, Variola virus
cuacaaauuuggauauucua

SEQ ID NO: 4095061 - RNA, 15 nt, Variola virus
cuacaauacacacaa

SEQ ID NO: 4095062 - RNA, 16 nt, Variola virus
cuacaauauauucuca

SEQ ID NO: 4095063 - RNA, 15 nt, Variola virus
cuacacuaaaaugau

SEQ ID NO: 4095064 - RNA, 24 nt, Variola virus
cuacagucguucaacugucuuuca

SEQ ID NO: 4095065 - RNA, 21 nt, Variola virus
cuacauaguuaucuaucuuaa

SEQ ID NO: 4095066 - RNA, 22 nt, Variola virus
cuacauaguuaucuaucuuaaa

SEQ ID NO: 4095067 - RNA, 15 nt, Variola virus
cuacaucaucaucuu

SEQ ID NO: 4095068 - RNA, 13 nt, Variola virus
cuaccaucauguc

SEQ ID NO: 4095069 - RNA, 12 nt, Variola virus
cuaccuauuuca

SEQ ID NO: 4095070 - RNA, 15 nt, Variola virus
cuacucguuuggaau

SEQ ID NO: 4095071 - RNA, 13 nt, Variola virus
cuacuuaaaugua

SEQ ID NO: 4095072 - RNA, 15 nt, Variola virus
cuacuuuagcauuga

SEQ ID NO: 4095073 - RNA, 14 nt, Variola virus
cuagaauaucccaa

SEQ ID NO: 4095074 - RNA, 18 nt, Variola virus
cuagacuugauuauucua

SEQ ID NO: 4095075 - RNA, 18 nt, Variola virus
cuagagcaucaauguccu

SEQ ID NO: 4095076 - RNA, 20 nt, Variola virus
cuagaugauauagugaaaca

SEQ ID NO: 4095077 - RNA, 16 nt, Variola virus
cuagaugguuauuuac

SEQ ID NO: 4095078 - RNA, 17 nt, Variola virus
cuagauucgaaaaucaa

SEQ ID NO: 4095079 - RNA, 23 nt, Variola virus
cuagcuuuauacacaucucuuca

SEQ ID NO: 4095080 - RNA, 12 nt, Variola virus
cuaggauacaua

SEQ ID NO: 4095081 - RNA, 15 nt, Variola virus
cuaggauuuaaacaa

SEQ ID NO: 4095082 - RNA, 16 nt, Variola virus
cuaggugcuauggaug

SEQ ID NO: 4095083 - RNA, 16 nt, Variola virus
cuagguuucucuauaa

SEQ ID NO: 4095084 - RNA, 10 nt, Variola virus
cuaguauaaa

SEQ ID NO: 4095085 - RNA, 17 nt, Variola virus
cuagucucgauauccaa

SEQ ID NO: 4095086 - RNA, 18 nt, Variola virus
cuagugcucaaacaaaau

SEQ ID NO: 4095087 - RNA, 18 nt, Variola virus
cuaguggaauugaaaauu

SEQ ID NO: 4095088 - RNA, 20 nt, Variola virus
cuaguguuccuaauaucaua

SEQ ID NO: 4095089 - RNA, 20 nt, Variola virus
cuaguuuuagaauaacauua

SEQ ID NO: 4095090 - RNA, 20 nt, Variola virus
cuauaaaaagauuauacaaa

SEQ ID NO: 4095091 - RNA, 14 nt, Variola virus
cuauaaaauggauu

SEQ ID NO: 4095092 - RNA, 12 nt, Variola virus
cuauaacuucua

SEQ ID NO: 4095093 - RNA, 14 nt, Variola virus
cuauaaguauaaau

SEQ ID NO: 4095094 - RNA, 16 nt, Variola virus
cuauaauaucuuugaa

SEQ ID NO: 4095095 - RNA, 20 nt, Variola virus
cuauaauggaguuguaaaug

SEQ ID NO: 4095096 - RNA, 22 nt, Variola virus
cuauacaaaaucguucugcuaa

SEQ ID NO: 4095097 - RNA, 15 nt, Variola virus
cuauacaagucgucu

SEQ ID NO: 4095098 - RNA, 11 nt, Variola virus
cuauagaaaau

SEQ ID NO: 4095099 - RNA, 16 nt, Variola virus
cuauauaauaaaugua

SEQ ID NO: 4095100 - RNA, 17 nt, Variola virus
cuauauaauuauacuau

SEQ ID NO: 4095101 - RNA, 17 nt, Variola virus
cuauauauucugcuaua

SEQ ID NO: 4095102 - RNA, 16 nt, Variola virus
cuauaucaaugccuuu

SEQ ID NO: 4095103 - RNA, 14 nt, Variola virus
cuauauuauguuuu

SEQ ID NO: 4095104 - RNA, 19 nt, Variola virus
cuauauucuugauguagua

SEQ ID NO: 4095105 - RNA, 17 nt, Variola virus
cuauauuguaccaaauu

SEQ ID NO: 4095106 - RNA, 14 nt, Variola virus
cuaucauaaguuua

SEQ ID NO: 4095107 - RNA, 13 nt, Variola virus
cuauccaauaaac

SEQ ID NO: 4095108 - RNA, 18 nt, Variola virus
cuaucccccguauuuaca

SEQ ID NO: 4095109 - RNA, 23 nt, Variola virus
cuaucgaaaauugcuauuucaga

SEQ ID NO: 4095110 - RNA, 15 nt, Variola virus
cuaucgauaauuguu

SEQ ID NO: 4095111 - RNA, 13 nt, Variola virus
cuaucuacaucuu

SEQ ID NO: 4095112 - RNA, 18 nt, Variola virus
cuaucuccucuauucaua

SEQ ID NO: 4095113 - RNA, 12 nt, Variola virus
cuaucuuuagag

SEQ ID NO: 4095114 - RNA, 17 nt, Variola virus
cuauuacugacuuuaau

SEQ ID NO: 4095115 - RNA, 17 nt, Variola virus
cuauuagaauuuacaaa

SEQ ID NO: 4095116 - RNA, 23 nt, Variola virus
cuauuagaguauugcauuuugau

SEQ ID NO: 4095117 - RNA, 19 nt, Variola virus
cuauuagaucauuaacaga

SEQ ID NO: 4095118 - RNA, 19 nt, Variola virus
cuauuaucuccguuauaga

SEQ ID NO: 4095119 - RNA, 14 nt, Variola virus
cuauuauuaccaua

SEQ ID NO: 4095120 - RNA, 22 nt, Variola virus
cuauucuaacucacguuaauaa

SEQ ID NO: 4095121 - RNA, 19 nt, Variola virus
cuauugaugacacuaguua

SEQ ID NO: 4095122 - RNA, 14 nt, Variola virus
cuauugccuuagau

SEQ ID NO: 4095123 - RNA, 15 nt, Variola virus
cuauuggaauguguu

SEQ ID NO: 4095124 - RNA, 15 nt, Variola virus
cuauuguauuuugug

SEQ ID NO: 4095125 - RNA, 22 nt, Variola virus
cuauuguuacaaaaguuaauaa

SEQ ID NO: 4095126 - RNA, 21 nt, Variola virus
cuauuuauugacauuaaucua

SEQ ID NO: 4095127 - RNA, 9 nt, Variola virus
cuauuugga

SEQ ID NO: 4095128 - RNA, 13 nt, Variola virus
cuauuuucaguaa

SEQ ID NO: 4095129 - RNA, 19 nt, Variola virus
cuauuuuuuuauacuucua

SEQ ID NO: 4095130 - RNA, 15 nt, Variola virus
cucaacgcgauaucu

SEQ ID NO: 4095131 - RNA, 15 nt, Variola virus
cucaauuaguuuauu

SEQ ID NO: 4095132 - RNA, 13 nt, Variola virus
cucagaaacagaa

SEQ ID NO: 4095133 - RNA, 20 nt, Variola virus
cucauagucuauuaaguggu

SEQ ID NO: 4095134 - RNA, 19 nt, Variola virus
cucauguaaccuacuagaa

SEQ ID NO: 4095135 - RNA, 15 nt, Variola virus
cucauuaaaacuucu

SEQ ID NO: 4095136 - RNA, 19 nt, Variola virus
cucauuuuuugaauauacu

SEQ ID NO: 4095137 - RNA, 14 nt, Variola virus
cuccaaucaugugu

SEQ ID NO: 4095138 - RNA, 15 nt, Variola virus
cuccauuacacaaau

SEQ ID NO: 4095139 - RNA, 14 nt, Variola virus
cuccgauauucaau

SEQ ID NO: 4095140 - RNA, 16 nt, Variola virus
cuccgucauccuucac

SEQ ID NO: 4095141 - RNA, 11 nt, Variola virus
cuccuccacca

SEQ ID NO: 4095142 - RNA, 21 nt, Variola virus
cuccuccguuguuuuuucccu

SEQ ID NO: 4095143 - RNA, 19 nt, Variola virus
cuccugauugugucucaaa

SEQ ID NO: 4095144 - RNA, 22 nt, Variola virus
cuccuguaucuguuaaaacuac

SEQ ID NO: 4095145 - RNA, 19 nt, Variola virus
cucgagaauauuuaauuug

SEQ ID NO: 4095146 - RNA, 21 nt, Variola virus
cucguaugaaagauuaauuug

SEQ ID NO: 4095147 - RNA, 13 nt, Variola virus
cucuaauagauuu

SEQ ID NO: 4095148 - RNA, 20 nt, Variola virus
cucuagauuaucuuagugaa

SEQ ID NO: 4095149 - RNA, 15 nt, Variola virus
cucuauaaaaaugaa

SEQ ID NO: 4095150 - RNA, 17 nt, Variola virus
ccaaucuauaauaucuu

SEQ ID NO: 4095151 - RNA, 22 nt, Variola virus
ccaaucugggcguauaaugaau

SEQ ID NO: 4095152 - RNA, 18 nt, Variola virus
ccaaucuuguuauaaaca

SEQ ID NO: 4095153 - RNA, 22 nt, Variola virus
ccaaucuuuuguuuagaaugau

SEQ ID NO: 4095154 - RNA, 22 nt, Variola virus
ccaauuguuuuuguacauaaua

SEQ ID NO: 4095155 - RNA, 17 nt, Variola virus
ccaauuuggauauagca

SEQ ID NO: 4095156 - RNA, 13 nt, Variola virus
ccaauuuuucaga

SEQ ID NO: 4095157 - RNA, 11 nt, Variola virus
ccacaauucau

SEQ ID NO: 4095158 - RNA, 16 nt, Variola virus
ccacuaguuuccuuua

SEQ ID NO: 4095159 - RNA, 14 nt, Variola virus
ccacuauaaaauaa

SEQ ID NO: 4095160 - RNA, 16 nt, Variola virus
ccacugucuaaaugua

SEQ ID NO: 4095161 - RNA, 17 nt, Variola virus
ccacuuuaacaucucuu

SEQ ID NO: 4095162 - RNA, 20 nt, Variola virus
ccagauaguuuauauccgua

SEQ ID NO: 4095163 - RNA, 23 nt, Variola virus
ccagaucuauugacuauaacucc

SEQ ID NO: 4095164 - RNA, 13 nt, Variola virus
ccagauugaacau

SEQ ID NO: 4095165 - RNA, 14 nt, Variola virus
ccagcagcuagaga

SEQ ID NO: 4095166 - RNA, 17 nt, Variola virus
ccaguaugaauaaucuu

SEQ ID NO: 4095167 - RNA, 12 nt, Variola virus
ccauaauucuca

SEQ ID NO: 4095168 - RNA, 19 nt, Variola virus
ccauacucgucauccucau

SEQ ID NO: 4095169 - RNA, 20 nt, Variola virus
ccauagaguauuauugucga

SEQ ID NO: 4095170 - RNA, 14 nt, Variola virus
ccauauguuggaaa

SEQ ID NO: 4095171 - RNA, 21 nt, Variola virus
ccauauuaugggaucagguaa

SEQ ID NO: 4095172 - RNA, 14 nt, Variola virus
ccaucaaaagcauu

SEQ ID NO: 4095173 - RNA, 21 nt, Variola virus
ccaucacuucuaucuuguuua

SEQ ID NO: 4095174 - RNA, 15 nt, Variola virus
ccaucauccaagaaa

SEQ ID NO: 4095175 - RNA, 20 nt, Variola virus
ccauccuugggaguaguuua

SEQ ID NO: 4095176 - RNA, 14 nt, Variola virus
ccaucgauuguuua

SEQ ID NO: 4095177 - RNA, 16 nt, Variola virus
ccaucgauuguuuauu

SEQ ID NO: 4095178 - RNA, 14 nt, Variola virus
ccaucguuaauuau

SEQ ID NO: 4095179 - RNA, 15 nt, Variola virus
ccaucucuauguuuc

SEQ ID NO: 4095180 - RNA, 18 nt, Variola virus
ccaucuugaauauuuuua

SEQ ID NO: 4095181 - RNA, 14 nt, Variola virus
ccaugauaaugaau

SEQ ID NO: 4095182 - RNA, 18 nt, Variola virus
ccaugauuaaauauuuua

SEQ ID NO: 4095183 - RNA, 16 nt, Variola virus
ccauggaaaaauauua

SEQ ID NO: 4095184 - RNA, 18 nt, Variola virus
ccauguagaauaaauuau

SEQ ID NO: 4095185 - RNA, 19 nt, Variola virus
ccauuaagaaacuaguuua

SEQ ID NO: 4095186 - RNA, 17 nt, Variola virus
ccauuagguuaaaugau

SEQ ID NO: 4095187 - RNA, 15 nt, Variola virus
ccauucagacuacca

SEQ ID NO: 4095188 - RNA, 17 nt, Variola virus
ccauucuaaucacauua

SEQ ID NO: 4095189 - RNA, 16 nt, Variola virus
ccauugaugaauuccu

SEQ ID NO: 4095190 - RNA, 17 nt, Variola virus
ccauugcguugaaugau

SEQ ID NO: 4095191 - RNA, 22 nt, Variola virus
ccauuuaucauggaaaagaauu

SEQ ID NO: 4095192 - RNA, 16 nt, Variola virus
ccauuuuaaaaucauu

SEQ ID NO: 4095193 - RNA, 17 nt, Variola virus
ccauuuuguggugcaac

SEQ ID NO: 4095194 - RNA, 20 nt, Variola virus
cccaaaauguauguguugaa

SEQ ID NO: 4095195 - RNA, 14 nt, Variola virus
cccaaauaucuuua

SEQ ID NO: 4095196 - RNA, 15 nt, Variola virus
cccacguuuaaacau

SEQ ID NO: 4095197 - RNA, 21 nt, Variola virus
cccagaauaauauacuucugu

SEQ ID NO: 4095198 - RNA, 19 nt, Variola virus
ccccaggaucuccaacaaa

SEQ ID NO: 4095199 - RNA, 21 nt, Variola virus
cccuaccugaugaaucagaca

SEQ ID NO: 4095200 - RNA, 23 nt, Variola virus
cccuaucaagcgauucuuucaau

SEQ ID NO: 4095201 - RNA, 12 nt, Variola virus
ccggaacaaaaa

SEQ ID NO: 4095202 - RNA, 16 nt, Variola virus
ccggaguuagaaagca

SEQ ID NO: 4095203 - RNA, 14 nt, Variola virus
ccgucuaucaucua

SEQ ID NO: 4095204 - RNA, 13 nt, Variola virus
ccgucuguaucau

SEQ ID NO: 4095205 - RNA, 18 nt, Variola virus
ccguguucguucaaaugc

SEQ ID NO: 4095206 - RNA, 16 nt, Variola virus
ccguuaacaucucuuc

SEQ ID NO: 4095207 - RNA, 15 nt, Variola virus
ccguuuaauuuccua

SEQ ID NO: 4095208 - RNA, 19 nt, Variola virus
ccuaauacaucucuggaaa

SEQ ID NO: 4095209 - RNA, 18 nt, Variola virus
ccuacaggaauaucuuua

SEQ ID NO: 4095210 - RNA, 22 nt, Variola virus
ccuacguaucuauaaucaucug

SEQ ID NO: 4095211 - RNA, 21 nt, Variola virus
ccuaguacugaggauuuacua

SEQ ID NO: 4095212 - RNA, 16 nt, Variola virus
ccucuaacaucaucau

SEQ ID NO: 4095213 - RNA, 19 nt, Variola virus
ccugccauaaauaaaugcu

SEQ ID NO: 4095214 - RNA, 17 nt, Variola virus
ccuggaguauggaauac

SEQ ID NO: 4095215 - RNA, 19 nt, Variola virus
ccuugaaaauaaauacagu

SEQ ID NO: 4095216 - RNA, 16 nt, Variola virus
ccuuugcaaauacagc

SEQ ID NO: 4095217 - RNA, 17 nt, Variola virus
ccuuuuccuuaucuuca

SEQ ID NO: 4095218 - RNA, 18 nt, Variola virus
cgaaauaaauaaugaauu

SEQ ID NO: 4095219 - RNA, 21 nt, Variola virus
cgaaauagauuauuuaacagc

SEQ ID NO: 4095220 - RNA, 15 nt, Variola virus
cgaaauaucuuucca

SEQ ID NO: 4095221 - RNA, 14 nt, Variola virus
cgaagaauaauguu

SEQ ID NO: 4095222 - RNA, 18 nt, Variola virus
cgaagagacgauagauuu

SEQ ID NO: 4095223 - RNA, 12 nt, Variola virus
cgaauaaaagaa

SEQ ID NO: 4095224 - RNA, 20 nt, Variola virus
cgaauaauguauagcauugc

SEQ ID NO: 4095225 - RNA, 17 nt, Variola virus
cgaauauaaaucauauu

SEQ ID NO: 4095226 - RNA, 21 nt, Variola virus
cgaaugccauagaauaaauau

SEQ ID NO: 4095227 - RNA, 21 nt, Variola virus
cgaauuaugucuuuauucucu

SEQ ID NO: 4095228 - RNA, 21 nt, Variola virus
cgaauuauuucuuuguuuaua

SEQ ID NO: 4095229 - RNA, 13 nt, Variola virus
cgacaauauucua

SEQ ID NO: 4095230 - RNA, 23 nt, Variola virus
cgacuaguucccgcauuaaauaa

SEQ ID NO: 4095231 - RNA, 22 nt, Variola virus
cgagugaaaaaauaauuucuac

SEQ ID NO: 4095232 - RNA, 14 nt, Variola virus
cgauaauagauagu

SEQ ID NO: 4095233 - RNA, 14 nt, Variola virus
cgauaauauauuua

SEQ ID NO: 4095234 - RNA, 14 nt, Variola virus
cgauacauaauguu

SEQ ID NO: 4095235 - RNA, 20 nt, Variola virus
cgauacauccuucuauguua

SEQ ID NO: 4095236 - RNA, 21 nt, Variola virus
cgaucuuguuguuuauuuuca

SEQ ID NO: 4095237 - RNA, 18 nt, Variola virus
cgaugauuaaugacgaua

SEQ ID NO: 4095238 - RNA, 19 nt, Variola virus
cgaugccuuuuguaaauau

SEQ ID NO: 4095239 - RNA, 17 nt, Variola virus
cgaugucuuggaagcaa

SEQ ID NO: 4095240 - RNA, 12 nt, Variola virus
cgauguuagaac

SEQ ID NO: 4095241 - RNA, 13 nt, Variola virus
cgauuuaugugac

SEQ ID NO: 4095242 - RNA, 15 nt, Variola virus
cgcacaccaacaauu

SEQ ID NO: 4095243 - RNA, 13 nt, Variola virus
cgcauaucaugaa

SEQ ID NO: 4095244 - RNA, 13 nt, Variola virus
cgcgagucaauuc

SEQ ID NO: 4095245 - RNA, 18 nt, Variola virus
cgcuacacccacuagaaa

SEQ ID NO: 4095246 - RNA, 16 nt, Variola virus
cgcuauuguagaaauu

SEQ ID NO: 4095247 - RNA, 15 nt, Variola virus
cgcucaaaauagacg

SEQ ID NO: 4095248 - RNA, 14 nt, Variola virus
cgcugauuuaacua

SEQ ID NO: 4095249 - RNA, 15 nt, Variola virus
cgcuugguuggauuu

SEQ ID NO: 4095250 - RNA, 21 nt, Variola virus
cggaauaaguguuuucucaau

SEQ ID NO: 4095251 - RNA, 17 nt, Variola virus
cggagaagaauugguaa

SEQ ID NO: 4095252 - RNA, 22 nt, Variola virus
cggaguaaguguugagcucccu

SEQ ID NO: 4095253 - RNA, 21 nt, Variola virus
cggauaaugauagacaagaua

SEQ ID NO: 4095254 - RNA, 13 nt, Variola virus
cggauaguuuaag

SEQ ID NO: 4095255 - RNA, 15 nt, Variola virus
cggauggaugauaua

SEQ ID NO: 4095256 - RNA, 19 nt, Variola virus
cggauguugugaucaucuu

SEQ ID NO: 4095257 - RNA, 16 nt, Variola virus
cggcugcguuaaacau

SEQ ID NO: 4095258 - RNA, 15 nt, Variola virus
cggucgauucuuucg

SEQ ID NO: 4095259 - RNA, 15 nt, Variola virus
cgguguauuguauuu

SEQ ID NO: 4095260 - RNA, 13 nt, Variola virus
cguaccaguuuca

SEQ ID NO: 4095261 - RNA, 14 nt, Variola virus
cguacccaacaaua

SEQ ID NO: 4095262 - RNA, 22 nt, Variola virus
cguagaaaguaucuuauauaca

SEQ ID NO: 4095263 - RNA, 20 nt, Variola virus
cguagugacaauacuauuag

SEQ ID NO: 4095264 - RNA, 19 nt, Variola virus
cguauaaaaaauauaacau

SEQ ID NO: 4095265 - RNA, 18 nt, Variola virus
cguauaacaguaaaagaa

SEQ ID NO: 4095266 - RNA, 22 nt, Variola virus
cguauacuuuuuaauucucuau

SEQ ID NO: 4095267 - RNA, 17 nt, Variola virus
cguauucugaugauauu

SEQ ID NO: 4095268 - RNA, 19 nt, Variola virus
cguauuuacauuaaaugua

SEQ ID NO: 4095269 - RNA, 13 nt, Variola virus
cguauuuaucuaa

SEQ ID NO: 4095270 - RNA, 16 nt, Variola virus
cgucauucuaaaagac

SEQ ID NO: 4095271 - RNA, 23 nt, Variola virus
cgucuaagauauucuuccaucaa

SEQ ID NO: 4095272 - RNA, 14 nt, Variola virus
cgugauagcucccg

SEQ ID NO: 4095273 - RNA, 16 nt, Variola virus
cgugauauuaucuuca

SEQ ID NO: 4095274 - RNA, 14 nt, Variola virus
cguguacaaaaaug

SEQ ID NO: 4095275 - RNA, 19 nt, Variola virus
cguuaaagaauuuaacaau

SEQ ID NO: 4095276 - RNA, 16 nt, Variola virus
cguuaaagguaacaau

SEQ ID NO: 4095277 - RNA, 14 nt, Variola virus
cguuaaaucaucua

SEQ ID NO: 4095278 - RNA, 24 nt, Variola virus
cguuaacuaucaaacaaacugcug

SEQ ID NO: 4095279 - RNA, 20 nt, Variola virus
auuuuaucaagacauaugca

SEQ ID NO: 4095280 - RNA, 18 nt, Variola virus
auuuuauucuagaauuga

SEQ ID NO: 4095281 - RNA, 17 nt, Variola virus
auuuuauuucaaaauua

SEQ ID NO: 4095282 - RNA, 20 nt, Variola virus
auuuucaaaagauaguuuuc

SEQ ID NO: 4095283 - RNA, 23 nt, Variola virus
auuuucagcauggauuucucaua

SEQ ID NO: 4095284 - RNA, 13 nt, Variola virus
auuuuccauuuau

SEQ ID NO: 4095285 - RNA, 23 nt, Variola virus
auuuucgaaacucguaaaaagau

SEQ ID NO: 4095286 - RNA, 22 nt, Variola virus
auuuucggguuuaaauucuuua

SEQ ID NO: 4095287 - RNA, 14 nt, Variola virus
auuuucuaacguga

SEQ ID NO: 4095288 - RNA, 16 nt, Variola virus
auuuugaggaaauuga

SEQ ID NO: 4095289 - RNA, 19 nt, Variola virus
auuuugcaauuucuucaua

SEQ ID NO: 4095290 - RNA, 17 nt, Variola virus
auuuuggcguuaucauu

SEQ ID NO: 4095291 - RNA, 18 nt, Variola virus
auuuuggugccuauuuua

SEQ ID NO: 4095292 - RNA, 17 nt, Variola virus
auuuuuaaacuguuugu

SEQ ID NO: 4095293 - RNA, 16 nt, Variola virus
auuuuuagugaaacau

SEQ ID NO: 4095294 - RNA, 16 nt, Variola virus
auuuuuaguuacagaa

SEQ ID NO: 4095295 - RNA, 12 nt, Variola virus
auuuuuaucaug

SEQ ID NO: 4095296 - RNA, 16 nt, Variola virus
auuuuucauuaacuaa

SEQ ID NO: 4095297 - RNA, 19 nt, Variola virus
auuuuucuauguuaggaau

SEQ ID NO: 4095298 - RNA, 18 nt, Variola virus
auuuuugcaucauuuacg

SEQ ID NO: 4095299 - RNA, 23 nt, Variola virus
auuuuuuuauucaucaucuucug

SEQ ID NO: 4095300 - RNA, 15 nt, Variola virus
caaaaaauaaaagau

SEQ ID NO: 4095301 - RNA, 14 nt, Variola virus
caaaaaauaauaau

SEQ ID NO: 4095302 - RNA, 22 nt, Variola virus
caaaaacacaacaaaugauaau

SEQ ID NO: 4095303 - RNA, 16 nt, Variola virus
caaaaaguaagauauu

SEQ ID NO: 4095304 - RNA, 19 nt, Variola virus
caaaaauauuguacaguac

SEQ ID NO: 4095305 - RNA, 16 nt, Variola virus
caaaaauuacgauauu

SEQ ID NO: 4095306 - RNA, 20 nt, Variola virus
caaaaccaacacuuaucaau

SEQ ID NO: 4095307 - RNA, 19 nt, Variola virus
caaaaccaauuccuuuuug

SEQ ID NO: 4095308 - RNA, 22 nt, Variola virus
caaaaccccaugguguaacaac

SEQ ID NO: 4095309 - RNA, 19 nt, Variola virus
caaaaccguuaaaauguau

SEQ ID NO: 4095310 - RNA, 22 nt, Variola virus
caaaacguaauuauagaugaau

SEQ ID NO: 4095311 - RNA, 12 nt, Variola virus
caaaacuauuau

SEQ ID NO: 4095312 - RNA, 15 nt, Variola virus
caaaacuauuucaga

SEQ ID NO: 4095313 - RNA, 21 nt, Variola virus
caaaacuucacagaugauaau

SEQ ID NO: 4095314 - RNA, 22 nt, Variola virus
caaaagacuaugggaauauauu

SEQ ID NO: 4095315 - RNA, 18 nt, Variola virus
caaaaggacguagacaau

SEQ ID NO: 4095316 - RNA, 17 nt, Variola virus
caaaauagguacucugu

SEQ ID NO: 4095317 - RNA, 19 nt, Variola virus
caaaauauguuucaaucau

SEQ ID NO: 4095318 - RNA, 19 nt, Variola virus
caaaaucuaaacaaauauu

SEQ ID NO: 4095319 - RNA, 22 nt, Variola virus
caaaauuaucguuccugguaua

SEQ ID NO: 4095320 - RNA, 18 nt, Variola virus
caaaauugucuaugauau

SEQ ID NO: 4095321 - RNA, 14 nt, Variola virus
caaacaauaaugac

SEQ ID NO: 4095322 - RNA, 21 nt, Variola virus
caaacaauccaaaaaaugaaa

SEQ ID NO: 4095323 - RNA, 23 nt, Variola virus
caaacaauuaauuaauacaguaa

SEQ ID NO: 4095324 - RNA, 15 nt, Variola virus
caaacauguucaaug

SEQ ID NO: 4095325 - RNA, 18 nt, Variola virus
caaacgccauaaucugug

SEQ ID NO: 4095326 - RNA, 20 nt, Variola virus
caaacggaguaaaauaaaua

SEQ ID NO: 4095327 - RNA, 14 nt, Variola virus
caaacuguaaaugu

SEQ ID NO: 4095328 - RNA, 22 nt, Variola virus
caaagagaugaucgauuauauu

SEQ ID NO: 4095329 - RNA, 17 nt, Variola virus
caaagaguuacacuaag

SEQ ID NO: 4095330 - RNA, 16 nt, Variola virus
caaagauggcugaaau

SEQ ID NO: 4095331 - RNA, 21 nt, Variola virus
caaaguaaugccuguaaaaau

SEQ ID NO: 4095332 - RNA, 15 nt, Variola virus
caaaguuaguacaga

SEQ ID NO: 4095333 - RNA, 16 nt, Variola virus
caaauaaaauucugau

SEQ ID NO: 4095334 - RNA, 16 nt, Variola virus
caaauaaauacucuau

SEQ ID NO: 4095335 - RNA, 15 nt, Variola virus
caaauaacaaaaucc

SEQ ID NO: 4095336 - RNA, 15 nt, Variola virus
caaauaauacuauau

SEQ ID NO: 4095337 - RNA, 20 nt, Variola virus
caaauaauacuauauacaau

SEQ ID NO: 4095338 - RNA, 15 nt, Variola virus
caaauaauauucucu

SEQ ID NO: 4095339 - RNA, 17 nt, Variola virus
caaauagagcaauuacu

SEQ ID NO: 4095340 - RNA, 15 nt, Variola virus
caaauaggagauauu

SEQ ID NO: 4095341 - RNA, 18 nt, Variola virus
caaauauauuacuagaca

SEQ ID NO: 4095342 - RNA, 20 nt, Variola virus
caaauauauuacuagacaau

SEQ ID NO: 4095343 - RNA, 12 nt, Variola virus
caaauauauuua

SEQ ID NO: 4095344 - RNA, 14 nt, Variola virus
caaaucaaaaguau

SEQ ID NO: 4095345 - RNA, 15 nt, Variola virus
caaaucaguaacuau

SEQ ID NO: 4095346 - RNA, 15 nt, Variola virus
caaaucuaacuucua

SEQ ID NO: 4095347 - RNA, 21 nt, Variola virus
caaaucugaaaauaaauaaug

SEQ ID NO: 4095348 - RNA, 15 nt, Variola virus
caaauggauaauuua

SEQ ID NO: 4095349 - RNA, 20 nt, Variola virus
caaauggucaaugauaugau

SEQ ID NO: 4095350 - RNA, 12 nt, Variola virus
caaauuaaacau

SEQ ID NO: 4095351 - RNA, 15 nt, Variola virus
caaauuaaauucugg

SEQ ID NO: 4095352 - RNA, 14 nt, Variola virus
caaauuuuacuaca

SEQ ID NO: 4095353 - RNA, 19 nt, Variola virus
caaauuuuuuuuacaaaca

SEQ ID NO: 4095354 - RNA, 15 nt, Variola virus
caacaaauauaaaau

SEQ ID NO: 4095355 - RNA, 17 nt, Variola virus
caacaaauucugcaaua

SEQ ID NO: 4095356 - RNA, 20 nt, Variola virus
caacaaauucugcaauaucu

SEQ ID NO: 4095357 - RNA, 23 nt, Variola virus
caacaagucauuacuaauagagu

SEQ ID NO: 4095358 - RNA, 18 nt, Variola virus
caacaaucuaauacaaaa

SEQ ID NO: 4095359 - RNA, 19 nt, Variola virus
caaccgcauacuacuauua

SEQ ID NO: 4095360 - RNA, 14 nt, Variola virus
caaccggauuuaaa

SEQ ID NO: 4095361 - RNA, 16 nt, Variola virus
caaccuacacuauuau

SEQ ID NO: 4095362 - RNA, 19 nt, Variola virus
caacgaaucccuacauauu

SEQ ID NO: 4095363 - RNA, 19 nt, Variola virus
caacguguuagaucgucua

SEQ ID NO: 4095364 - RNA, 22 nt, Variola virus
caacguguuagaucgucuauau

SEQ ID NO: 4095365 - RNA, 17 nt, Variola virus
caacuuaacaaaucuua

SEQ ID NO: 4095366 - RNA, 16 nt, Variola virus
caacuuuauuagauaa

SEQ ID NO: 4095367 - RNA, 17 nt, Variola virus
caagaacuacaaaaguu

SEQ ID NO: 4095368 - RNA, 22 nt, Variola virus
caagaacucuugaagaugauuu

SEQ ID NO: 4095369 - RNA, 18 nt, Variola virus
uauaacaugcuaaaccuu

SEQ ID NO: 4095370 - RNA, 17 nt, Variola virus
uauaacauuaauaucaa

SEQ ID NO: 4095371 - RNA, 20 nt, Variola virus
uguauuaaauagaauauuua

SEQ ID NO: 4095372 - RNA, 21 nt, Variola virus
uguauucaucgccuaauguau

SEQ ID NO: 4095373 - RNA, 19 nt, Variola virus
uguauugauuacaguguau

SEQ ID NO: 4095374 - RNA, 15 nt, Variola virus
uguauuuugaggaaa

SEQ ID NO: 4095375 - RNA, 14 nt, Variola virus
uguauuuuggcaua

SEQ ID NO: 4095376 - RNA, 14 nt, Variola virus
ugucaaaaauugua

SEQ ID NO: 4095377 - RNA, 21 nt, Variola virus
ugucaaagauuguguagaaau

SEQ ID NO: 4095378 - RNA, 20 nt, Variola virus
ugucaaaugaucggaucuaa

SEQ ID NO: 4095379 - RNA, 17 nt, Variola virus
ugucaucauuucuaaug

SEQ ID NO: 4095380 - RNA, 22 nt, Variola virus
ugucaucuuguucagaaauaua

SEQ ID NO: 4095381 - RNA, 13 nt, Variola virus
ugucauucucaug

SEQ ID NO: 4095382 - RNA, 19 nt, Variola virus
ugucccuauuauaaucauu

SEQ ID NO: 4095383 - RNA, 21 nt, Variola virus
uguccuugcguuuuucugaua

SEQ ID NO: 4095384 - RNA, 20 nt, Variola virus
ugucgaaucuaaacuagugg

SEQ ID NO: 4095385 - RNA, 12 nt, Variola virus
ugucuacauaaa

SEQ ID NO: 4095386 - RNA, 19 nt, Variola virus
ugucuacgauaaaccaaaa

SEQ ID NO: 4095387 - RNA, 20 nt, Variola virus
ugucuagcauuuuagagcau

SEQ ID NO: 4095388 - RNA, 15 nt, Variola virus
ugucuauuauguaua

SEQ ID NO: 4095389 - RNA, 19 nt, Variola virus
ugucucuuaacuauuuccg

SEQ ID NO: 4095390 - RNA, 22 nt, Variola virus
ugugaaacagacuuguaauucu

SEQ ID NO: 4095391 - RNA, 23 nt, Variola virus
ugugaauguauucacuuaacaau

SEQ ID NO: 4095392 - RNA, 15 nt, Variola virus
ugugaguauuuuacu

SEQ ID NO: 4095393 - RNA, 16 nt, Variola virus
ugugauguuacggaua

SEQ ID NO: 4095394 - RNA, 18 nt, Variola virus
uguguacccaauaaaaug

SEQ ID NO: 4095395 - RNA, 21 nt, Variola virus
ugugucuacauaaauaugcaa

SEQ ID NO: 4095396 - RNA, 13 nt, Variola virus
uguguuacauaau

SEQ ID NO: 4095397 - RNA, 16 nt, Variola virus
uguguucuuguguaau

SEQ ID NO: 4095398 - RNA, 18 nt, Variola virus
uguuaaaaacaguuauuu

SEQ ID NO: 4095399 - RNA, 12 nt, Variola virus
uuacuaagaaag

SEQ ID NO: 4095400 - RNA, 14 nt, Variola virus
uuacuacauuauua

SEQ ID NO: 4095401 - RNA, 22 nt, Variola virus
uuacuacguucauauuccaauu

SEQ ID NO: 4095402 - RNA, 14 nt, Variola virus
uuacuauagcauua

SEQ ID NO: 4095403 - RNA, 23 nt, Variola virus
uuacuauuggcaauuguagauau

SEQ ID NO: 4095404 - RNA, 16 nt, Variola virus
uuacucaaaauacuau

SEQ ID NO: 4095405 - RNA, 17 nt, Variola virus
uuacucuauaaaauacu

SEQ ID NO: 4095406 - RNA, 18 nt, Variola virus
uuacugaauuaauaauau

SEQ ID NO: 4095407 - RNA, 21 nt, Variola virus
uuacugggauaagauuucuaa

SEQ ID NO: 4095408 - RNA, 16 nt, Variola virus
uuacuuagucuguaca

SEQ ID NO: 4095409 - RNA, 16 nt, Variola virus
uuacuuguauaauaag

SEQ ID NO: 4095410 - RNA, 20 nt, Variola virus
uuacuuugacaaauguagua

SEQ ID NO: 4095411 - RNA, 16 nt, Variola virus
uuacuuuguggaugau

SEQ ID NO: 4095412 - RNA, 15 nt, Variola virus
uuagaaaaaacauca

SEQ ID NO: 4095413 - RNA, 22 nt, Variola virus
uuagaaaacucucuaucucuua

SEQ ID NO: 4095414 - RNA, 16 nt, Variola virus
uuagaaggaguguuuu

SEQ ID NO: 4095415 - RNA, 20 nt, Variola virus
uuagaaggauuggucuuaaa

SEQ ID NO: 4095416 - RNA, 19 nt, Variola virus
uuagaauaagaguguagua

SEQ ID NO: 4095417 - RNA, 17 nt, Variola virus
uuagacuauaugugucu

SEQ ID NO: 4095418 - RNA, 14 nt, Variola virus
uuagauacauagau

SEQ ID NO: 4095419 - RNA, 13 nt, Variola virus
uuagaucauuaac

SEQ ID NO: 4095420 - RNA, 18 nt, Variola virus
uuagaugagaaauuauuc

SEQ ID NO: 4095421 - RNA, 15 nt, Variola virus
uuagcacuaucauaa

SEQ ID NO: 4095422 - RNA, 16 nt, Variola virus
uuagcacuaucauaau

SEQ ID NO: 4095423 - RNA, 22 nt, Variola virus
uuagcaugaauccauucuaaug

SEQ ID NO: 4095424 - RNA, 16 nt, Variola virus
uuagcguacacauuuu

SEQ ID NO: 4095425 - RNA, 13 nt, Variola virus
uuagcuauuucgg

SEQ ID NO: 4095426 - RNA, 22 nt, Variola virus
uuagcuccguauuccaaacuag

SEQ ID NO: 4095427 - RNA, 16 nt, Variola virus
uuaggauugacauagu

SEQ ID NO: 4095428 - RNA, 20 nt, Variola virus
uuaguaucuagcucuguaaa

SEQ ID NO: 4095429 - RNA, 18 nt, Variola virus
uuagucacacaauacuac

SEQ ID NO: 4095430 - RNA, 19 nt, Variola virus
uuagucauacguaaugaag

SEQ ID NO: 4095431 - RNA, 18 nt, Variola virus
uuagucgugguaagaaag

SEQ ID NO: 4095432 - RNA, 21 nt, Variola virus
uuagucuuaaugauacacuaa

SEQ ID NO: 4095433 - RNA, 15 nt, Variola virus
uuaguuccaacaauu

SEQ ID NO: 4095434 - RNA, 17 nt, Variola virus
uuaguuuauuacuauua

SEQ ID NO: 4095435 - RNA, 22 nt, Variola virus
uuaguuucugguuuucuauaaa

SEQ ID NO: 4095436 - RNA, 16 nt, Variola virus
uuaguuuuuggauaga

SEQ ID NO: 4095437 - RNA, 12 nt, Variola virus
uuauaaaaauua

SEQ ID NO: 4095438 - RNA, 19 nt, Variola virus
uuauaaacggguguaaaca

SEQ ID NO: 4095439 - RNA, 18 nt, Variola virus
uuauaaaguuuagucucu

SEQ ID NO: 4095440 - RNA, 13 nt, Variola virus
uuauaaauagaug

SEQ ID NO: 4095441 - RNA, 13 nt, Variola virus
uuauaacuaaaca

SEQ ID NO: 4095442 - RNA, 16 nt, Variola virus
uuauaacuuauugucu

SEQ ID NO: 4095443 - RNA, 21 nt, Variola virus
uuauaauagguguaaaucuag

SEQ ID NO: 4095444 - RNA, 17 nt, Variola virus
uuauacaagauugaaau

SEQ ID NO: 4095445 - RNA, 18 nt, Variola virus
uuauacaguguauguaaa

SEQ ID NO: 4095446 - RNA, 21 nt, Variola virus
uuauacgaaaaaaaucauuaa

SEQ ID NO: 4095447 - RNA, 23 nt, Variola virus
uuauacgaauaucguucucuaaa

SEQ ID NO: 4095448 - RNA, 16 nt, Variola virus
uuauacuaauaugaca

SEQ ID NO: 4095449 - RNA, 19 nt, Variola virus
uuauagaauugucuaucua

SEQ ID NO: 4095450 - RNA, 21 nt, Variola virus
uuauauacacauaauuauucu

SEQ ID NO: 4095451 - RNA, 14 nt, Variola virus
uuauauacaucuuc

SEQ ID NO: 4095452 - RNA, 12 nt, Variola virus
uuauauauguaa

SEQ ID NO: 4095453 - RNA, 18 nt, Variola virus
uuauaucacaacaucuau

SEQ ID NO: 4095454 - RNA, 14 nt, Variola virus
uuauaucacaugau

SEQ ID NO: 4095455 - RNA, 22 nt, Variola virus
uuauaucauccaauauuauuga

SEQ ID NO: 4095456 - RNA, 19 nt, Variola virus
uuauaucguuaucauuaau

SEQ ID NO: 4095457 - RNA, 19 nt, Variola virus
uuaucagugucguaaauua

SEQ ID NO: 4095458 - RNA, 12 nt, Variola virus
uuaucauuauua

SEQ ID NO: 4095459 - RNA, 23 nt, Variola virus
uuauccacaauaaauauaaacaa

SEQ ID NO: 4095460 - RNA, 20 nt, Variola virus
uuauccguauuuccauaaua

SEQ ID NO: 4095461 - RNA, 22 nt, Variola virus
uuauccuuuagaugaauuauua

SEQ ID NO: 4095462 - RNA, 22 nt, Variola virus
uuaucgguaacaucuuuguaaa

SEQ ID NO: 4095463 - RNA, 15 nt, Variola virus
uuaucguuauuauua

SEQ ID NO: 4095464 - RNA, 14 nt, Variola virus
uuaucuauacuauu

SEQ ID NO: 4095465 - RNA, 16 nt, Variola virus
uuaucucaguacauag

SEQ ID NO: 4095466 - RNA, 13 nt, Variola virus
uuaucuguagacg

SEQ ID NO: 4095467 - RNA, 22 nt, Variola virus
uuaugaauaucacauaucaugu

SEQ ID NO: 4095468 - RNA, 21 nt, Variola virus
uuaugacaaaguuuacauucu

SEQ ID NO: 4095469 - RNA, 17 nt, Variola virus
uuaugaugauacauuuu

SEQ ID NO: 4095470 - RNA, 16 nt, Variola virus
uuaugccgaacuaaaa

SEQ ID NO: 4095471 - RNA, 19 nt, Variola virus
uuauguaguaaagaugcua

SEQ ID NO: 4095472 - RNA, 19 nt, Variola virus
uuaugucauaaacuguaaa

SEQ ID NO: 4095473 - RNA, 20 nt, Variola virus
uuauuaaauauuuuuggaca

SEQ ID NO: 4095474 - RNA, 17 nt, Variola virus
uuauuacuaaacauuuu

SEQ ID NO: 4095475 - RNA, 14 nt, Variola virus
uuauuaucuguaga

SEQ ID NO: 4095476 - RNA, 13 nt, Variola virus
uuauuauuucagg

SEQ ID NO: 4095477 - RNA, 18 nt, Variola virus
uuauuccaauuauuugaa

SEQ ID NO: 4095478 - RNA, 23 nt, Variola virus
uuauuccgguacugguuuagaua

SEQ ID NO: 4095479 - RNA, 21 nt, Variola virus
uuauuggcguuggaaaaauua

SEQ ID NO: 4095480 - RNA, 21 nt, Variola virus
uuauugggccaguauacuguu

SEQ ID NO: 4095481 - RNA, 22 nt, Variola virus
uuauugguauuucuuacauaaa

SEQ ID NO: 4095482 - RNA, 16 nt, Variola virus
uuauugucuucuuaaa

SEQ ID NO: 4095483 - RNA, 19 nt, Variola virus
uuauuuagauacagaugua

SEQ ID NO: 4095484 - RNA, 12 nt, Variola virus
uuauuuagugua

SEQ ID NO: 4095485 - RNA, 18 nt, Variola virus
uuauuucaaaauuauuua

SEQ ID NO: 4095486 - RNA, 20 nt, Variola virus
uuauuuuaggaucauauuua

SEQ ID NO: 4095487 - RNA, 14 nt, Variola virus
uuauuuuuggaaga

SEQ ID NO: 4095488 - RNA, 16 nt, Variola virus
uucaaaagauaguuuu

SEQ ID NO: 4095489 - RNA, 22 nt, Variola virus
uucaacauuuuauggaaacuau

SEQ ID NO: 4095490 - RNA, 23 nt, Variola virus
uucaaccaugagugugaaacuaa

SEQ ID NO: 4095491 - RNA, 14 nt, Variola virus
uucaacuaccaaaa

SEQ ID NO: 4095492 - RNA, 21 nt, Variola virus
uucaacuuugaaauuguuuuu

SEQ ID NO: 4095493 - RNA, 17 nt, Variola virus
uucaaggacaaaaugac

SEQ ID NO: 4095494 - RNA, 14 nt, Variola virus
uucaauucuagaaa

SEQ ID NO: 4095495 - RNA, 20 nt, Variola virus
uucaauucucggauagucuu

SEQ ID NO: 4095496 - RNA, 14 nt, Variola virus
uucacaauucauuc

SEQ ID NO: 4095497 - RNA, 23 nt, Variola virus
uucacagauagaucauuuugaac

SEQ ID NO: 4095498 - RNA, 18 nt, Variola virus
uucacagaugauaauaga

SEQ ID NO: 4095499 - RNA, 21 nt, Variola virus
uucacauucaccggaaacuag

SEQ ID NO: 4095500 - RNA, 18 nt, Variola virus
uucacauuguaacuauuc

SEQ ID NO: 4095501 - RNA, 14 nt, Variola virus
uucacuuaacaauu

SEQ ID NO: 4095502 - RNA, 13 nt, Variola virus
uucaggaacauaa

SEQ ID NO: 4095503 - RNA, 19 nt, Variola virus
uucauaaaagaaaauacua

SEQ ID NO: 4095504 - RNA, 16 nt, Variola virus
uucaucagauuauuua

SEQ ID NO: 4095505 - RNA, 14 nt, Variola virus
uucaucaucugaua

SEQ ID NO: 4095506 - RNA, 19 nt, Variola virus
uucauguuuaaaaugaucu

SEQ ID NO: 4095507 - RNA, 13 nt, Variola virus
uucauuaacuaga

SEQ ID NO: 4095508 - RNA, 13 nt, Variola virus
uucauuaaucuuu

SEQ ID NO: 4095509 - RNA, 12 nt, Variola virus
uucauuaauuuc

SEQ ID NO: 4095510 - RNA, 23 nt, Variola virus
uucauuaggauuaucaaaucuuu

SEQ ID NO: 4095511 - RNA, 13 nt, Variola virus
uucauucguaaau

SEQ ID NO: 4095512 - RNA, 14 nt, Variola virus
uucauugucauuaa

SEQ ID NO: 4095513 - RNA, 11 nt, Variola virus
uuccaaacauu

SEQ ID NO: 4095514 - RNA, 15 nt, Variola virus
uuccaaauuauucuu

SEQ ID NO: 4095515 - RNA, 17 nt, Variola virus
uuccaacuuaucauuau

SEQ ID NO: 4095516 - RNA, 14 nt, Variola virus
uuccaaucauugau

SEQ ID NO: 4095517 - RNA, 18 nt, Variola virus
uuccaaucuauugcuacu

SEQ ID NO: 4095518 - RNA, 12 nt, Variola virus
uuccaauguuua

SEQ ID NO: 4095519 - RNA, 21 nt, Variola virus
uuccaauuccguagguaaacg

SEQ ID NO: 4095520 - RNA, 20 nt, Variola virus
uuccaccuagagauagucaa

SEQ ID NO: 4095521 - RNA, 18 nt, Variola virus
uuccacguagucaaugaa

SEQ ID NO: 4095522 - RNA, 15 nt, Variola virus
uuccaguauuuucca

SEQ ID NO: 4095523 - RNA, 20 nt, Variola virus
uuccauacguuuauauucuu

SEQ ID NO: 4095524 - RNA, 18 nt, Variola virus
uuccauaugaugaacuaa

SEQ ID NO: 4095525 - RNA, 21 nt, Variola virus
uuccaucaacgauucuagaac

SEQ ID NO: 4095526 - RNA, 18 nt, Variola virus
uuccaucuagacuauauu

SEQ ID NO: 4095527 - RNA, 17 nt, Variola virus
uuccaugauauccaaaa

SEQ ID NO: 4095528 - RNA, 21 nt, Variola virus
uguuaaaacuacgauuaucua

SEQ ID NO: 4095529 - RNA, 15 nt, Variola virus
uguuaagaauuuaga

SEQ ID NO: 4095530 - RNA, 15 nt, Variola virus
uguuaauacaucaau

SEQ ID NO: 4095531 - RNA, 22 nt, Variola virus
uguuaccauaucguauaacuug

SEQ ID NO: 4095532 - RNA, 16 nt, Variola virus
uguuagaguaucuaca

SEQ ID NO: 4095533 - RNA, 15 nt, Variola virus
uguuagcauuucuau

SEQ ID NO: 4095534 - RNA, 16 nt, Variola virus
uguuauauauugucua

SEQ ID NO: 4095535 - RNA, 17 nt, Variola virus
uguuauuaugaaucauu

SEQ ID NO: 4095536 - RNA, 17 nt, Variola virus
uguuauuguauacuguc

SEQ ID NO: 4095537 - RNA, 15 nt, Variola virus
uguucaacaaacuaa

SEQ ID NO: 4095538 - RNA, 20 nt, Variola virus
uguucacguccaccaaugau

SEQ ID NO: 4095539 - RNA, 12 nt, Variola virus
uguucagaaaua

SEQ ID NO: 4095540 - RNA, 13 nt, Variola virus
uguucccaucauu

SEQ ID NO: 4095541 - RNA, 15 nt, Variola virus
uguucccuugucauu

SEQ ID NO: 4095542 - RNA, 17 nt, Variola virus
uguuccgaucuuaguaa

SEQ ID NO: 4095543 - RNA, 16 nt, Variola virus
uguucuauaaacugaa

SEQ ID NO: 4095544 - RNA, 14 nt, Variola virus
uguugaacaucagu

SEQ ID NO: 4095545 - RNA, 16 nt, Variola virus
uguugacgacauauau

SEQ ID NO: 4095546 - RNA, 13 nt, Variola virus
uguugaucauaua

SEQ ID NO: 4095547 - RNA, 17 nt, Variola virus
uguugaugauaucuaca

SEQ ID NO: 4095548 - RNA, 22 nt, Variola virus
uguugaugauaucuacaucguu

SEQ ID NO: 4095549 - RNA, 18 nt, Variola virus
uguuguacaaauuccucg

SEQ ID NO: 4095550 - RNA, 18 nt, Variola virus
uguugugcuguuguacau

SEQ ID NO: 4095551 - RNA, 20 nt, Variola virus
uguugugucaguuuauaaua

SEQ ID NO: 4095552 - RNA, 15 nt, Variola virus
uguuuaaaucaaaau

SEQ ID NO: 4095553 - RNA, 21 nt, Variola virus
uguuuaaugaauuacuaaaau

SEQ ID NO: 4095554 - RNA, 16 nt, Variola virus
uguuuaccacaaugua

SEQ ID NO: 4095555 - RNA, 16 nt, Variola virus
uguuuaucuucuucca

SEQ ID NO: 4095556 - RNA, 23 nt, Variola virus
uguuuccuauaaucguuaaauuu

SEQ ID NO: 4095557 - RNA, 22 nt, Variola virus
uguuucuacuaacuuuuuggua

SEQ ID NO: 4095558 - RNA, 17 nt, Variola virus
uguuucuauguuuucua

SEQ ID NO: 4095559 - RNA, 16 nt, Variola virus
uguuucuuacauauuu

SEQ ID NO: 4095560 - RNA, 16 nt, Variola virus
uguuugauaauuacgc

SEQ ID NO: 4095561 - RNA, 20 nt, Variola virus
uguuuuauuaaucaaucauu

SEQ ID NO: 4095562 - RNA, 12 nt, Variola virus
uguuuucucaau

SEQ ID NO: 4095563 - RNA, 22 nt, Variola virus
uguuuugaggcagcaaauacug

SEQ ID NO: 4095564 - RNA, 23 nt, Variola virus
uuaaaaaaauuauccuaucaugu

SEQ ID NO: 4095565 - RNA, 19 nt, Variola virus
uuaaaaacaguuauuuucu

SEQ ID NO: 4095566 - RNA, 14 nt, Variola virus
uuaaaaaguuaucu

SEQ ID NO: 4095567 - RNA, 23 nt, Variola virus
uuaaaaaguugacagaaccuugu

SEQ ID NO: 4095568 - RNA, 14 nt, Variola virus
uuaaaaauacgguu

SEQ ID NO: 4095569 - RNA, 14 nt, Variola virus
uuaaaaauaguuuu

SEQ ID NO: 4095570 - RNA, 11 nt, Variola virus
uuaaaaaugau

SEQ ID NO: 4095571 - RNA, 17 nt, Variola virus
uuaaaaauguuacugaa

SEQ ID NO: 4095572 - RNA, 13 nt, Variola virus
uuaaaaauuauua

SEQ ID NO: 4095573 - RNA, 17 nt, Variola virus
uuaaaacuguuuaagaa

SEQ ID NO: 4095574 - RNA, 19 nt, Variola virus
uuaaaacuugauaauuaau

SEQ ID NO: 4095575 - RNA, 22 nt, Variola virus
uuaaaagaauuacuuagucugu

SEQ ID NO: 4095576 - RNA, 22 nt, Variola virus
uuaaaaguaaucaugaaauuaa

SEQ ID NO: 4095577 - RNA, 16 nt, Variola virus
uuaaaauauauuauca

SEQ ID NO: 4095578 - RNA, 16 nt, Variola virus
uuaaaauaucuauuca

SEQ ID NO: 4095579 - RNA, 12 nt, Variola virus
uuaaaauuauua

SEQ ID NO: 4095580 - RNA, 18 nt, Variola virus
uuaaaauucacacauuuu

SEQ ID NO: 4095581 - RNA, 23 nt, Variola virus
uuaaacaauaucacgaaaguaga

SEQ ID NO: 4095582 - RNA, 23 nt, Variola virus
uuaaacagaaauauaugagaugu

SEQ ID NO: 4095583 - RNA, 17 nt, Variola virus
uuaaacauggcauuaau

SEQ ID NO: 4095584 - RNA, 22 nt, Variola virus
uuaaacgaauuaaaauuauuua

SEQ ID NO: 4095585 - RNA, 19 nt, Variola virus
uuaaacgauggauuuucca

SEQ ID NO: 4095586 - RNA, 17 nt, Variola virus
uuaaacuacuacguucu

SEQ ID NO: 4095587 - RNA, 22 nt, Variola virus
uuaaacuguuuguauaauaucu

SEQ ID NO: 4095588 - RNA, 17 nt, Variola virus
uuaaauaacucauuuau

SEQ ID NO: 4095589 - RNA, 13 nt, Variola virus
uuaaauauguucu

SEQ ID NO: 4095590 - RNA, 12 nt, Variola virus
uuaaauauuucu

SEQ ID NO: 4095591 - RNA, 17 nt, Variola virus
uuaaaucccaauucaga

SEQ ID NO: 4095592 - RNA, 17 nt, Variola virus
uuaaauccuuguuugau

SEQ ID NO: 4095593 - RNA, 16 nt, Variola virus
uuaaaucguuguucua

SEQ ID NO: 4095594 - RNA, 13 nt, Variola virus
uuaaauguaucua

SEQ ID NO: 4095595 - RNA, 18 nt, Variola virus
uuaaauuuuuuuauuaau

SEQ ID NO: 4095596 - RNA, 15 nt, Variola virus
uuaacagcuauucaa

SEQ ID NO: 4095597 - RNA, 12 nt, Variola virus
uuaacagcuuua

SEQ ID NO: 4095598 - RNA, 17 nt, Variola virus
uuaacauaugauauuca

SEQ ID NO: 4095599 - RNA, 12 nt, Variola virus
uuaacauuauua

SEQ ID NO: 4095600 - RNA, 17 nt, Variola virus
uuaaccuaacuaaaaga

SEQ ID NO: 4095601 - RNA, 14 nt, Variola virus
uuaacgauauuuug

SEQ ID NO: 4095602 - RNA, 22 nt, Variola virus
uuaacgauuggaaaucauuaac

SEQ ID NO: 4095603 - RNA, 15 nt, Variola virus
uuaacuaucuguaaa

SEQ ID NO: 4095604 - RNA, 16 nt, Variola virus
uuaacuuauuagcguu

SEQ ID NO: 4095605 - RNA, 13 nt, Variola virus
uuaagaauaaucc

SEQ ID NO: 4095606 - RNA, 19 nt, Variola virus
uuaagauuuuaaauguaua

SEQ ID NO: 4095607 - RNA, 17 nt, Variola virus
uuaagcaacaugucuuu

SEQ ID NO: 4095608 - RNA, 20 nt, Variola virus
uuaagcaacaugucuuuaaa

SEQ ID NO: 4095609 - RNA, 20 nt, Variola virus
uuaaggaauacaauacauac

SEQ ID NO: 4095610 - RNA, 15 nt, Variola virus
uuaaggggaaaaagc

SEQ ID NO: 4095611 - RNA, 20 nt, Variola virus
uuaagugauauaaaacauuc

SEQ ID NO: 4095612 - RNA, 21 nt, Variola virus
uuaaguucuggaauauuauca

SEQ ID NO: 4095613 - RNA, 16 nt, Variola virus
uuaauaaacuaacauu

SEQ ID NO: 4095614 - RNA, 17 nt, Variola virus
uuaauaaauaucauuaa

SEQ ID NO: 4095615 - RNA, 24 nt, Variola virus
uuaauaacauuacauauuauauca

SEQ ID NO: 4095616 - RNA, 16 nt, Variola virus
uuaauaauucauggaa

SEQ ID NO: 4095617 - RNA, 19 nt, Variola virus
uuaauacaccguuaacaau

SEQ ID NO: 4095618 - RNA, 17 nt, Variola virus
uuaauacaguaaguaca

SEQ ID NO: 4095619 - RNA, 13 nt, Variola virus
uuaauacaucauc

SEQ ID NO: 4095620 - RNA, 16 nt, Variola virus
uuaauacggaauauag

SEQ ID NO: 4095621 - RNA, 17 nt, Variola virus
uuaauacguucauuaaa

SEQ ID NO: 4095622 - RNA, 18 nt, Variola virus
uuaauauauuuaaacuag

SEQ ID NO: 4095623 - RNA, 18 nt, Variola virus
uuaauaucgcacaaagaa

SEQ ID NO: 4095624 - RNA, 12 nt, Variola virus
uuaauauguaua

SEQ ID NO: 4095625 - RNA, 16 nt, Variola virus
uuaauauuacauauuu

SEQ ID NO: 4095626 - RNA, 20 nt, Variola virus
uuaauauuacauauuuuuca

SEQ ID NO: 4095627 - RNA, 14 nt, Variola virus
uuaauauuacuguu

SEQ ID NO: 4095628 - RNA, 19 nt, Variola virus
uuaauauugaaaauacuaa

SEQ ID NO: 4095629 - RNA, 21 nt, Variola virus
uuaaucaaaugguaaauacug

SEQ ID NO: 4095630 - RNA, 14 nt, Variola virus
uuaaucauuaacuu

SEQ ID NO: 4095631 - RNA, 15 nt, Variola virus
uuaaucauugauuca

SEQ ID NO: 4095632 - RNA, 17 nt, Variola virus
uuaaugauucauuauca

SEQ ID NO: 4095633 - RNA, 19 nt, Variola virus
uuaaugcccaauuuggaua

SEQ ID NO: 4095634 - RNA, 21 nt, Variola virus
uuaaugcuacagauauuauca

SEQ ID NO: 4095635 - RNA, 18 nt, Variola virus
uuaauuccagauguugua

SEQ ID NO: 4095636 - RNA, 22 nt, Variola virus
uuaauucuagacuauuuggaca

SEQ ID NO: 4095637 - RNA, 17 nt, Variola virus
uuaauuuauuauacugu

SEQ ID NO: 4095638 - RNA, 21 nt, Variola virus
uuaauuuuuccuuacacaauc

SEQ ID NO: 4095639 - RNA, 23 nt, Variola virus
uuacaacggcgccagauuuaaga

SEQ ID NO: 4095640 - RNA, 17 nt, Variola virus
uuacaagaauauaaaaa

SEQ ID NO: 4095641 - RNA, 12 nt, Variola virus
uuacaaugacuc

SEQ ID NO: 4095642 - RNA, 17 nt, Variola virus
uuacaaugcucauuaaa

SEQ ID NO: 4095643 - RNA, 20 nt, Variola virus
uuacaauuaauaaguauaaa

SEQ ID NO: 4095644 - RNA, 20 nt, Variola virus
uuacacaacgcgauauauaa

SEQ ID NO: 4095645 - RNA, 12 nt, Variola virus
uuacagagacuu

SEQ ID NO: 4095646 - RNA, 18 nt, Variola virus
uuacagaucuaguauaau

SEQ ID NO: 4095647 - RNA, 16 nt, Variola virus
uuacauguauuaaaga

SEQ ID NO: 4095648 - RNA, 22 nt, Variola virus
uuacauuaaauguauauuuucc

SEQ ID NO: 4095649 - RNA, 20 nt, Variola virus
uuaccaacgacgauaguucu

SEQ ID NO: 4095650 - RNA, 15 nt, Variola virus
uuaccagauaucuuc

SEQ ID NO: 4095651 - RNA, 20 nt, Variola virus
uuaccccucauaguauuaau

SEQ ID NO: 4095652 - RNA, 21 nt, Variola virus
uuaccuugaaaauaaauacag

SEQ ID NO: 4095653 - RNA, 18 nt, Variola virus
uuacgaauauauaaaaga

SEQ ID NO: 4095654 - RNA, 17 nt, Variola virus
uuacgaauuacauuucu

SEQ ID NO: 4095655 - RNA, 22 nt, Variola virus
uuacgacacgcauuugaugcac

SEQ ID NO: 4095656 - RNA, 18 nt, Variola virus
uuacgacgagcauauuca

SEQ ID NO: 4095657 - RNA, 19 nt, Variola virus
acaaaauaaaaaacauaau

SEQ ID NO: 4095658 - RNA, 15 nt, Variola virus
acaaaaucuaaacaa

SEQ ID NO: 4095659 - RNA, 17 nt, Variola virus
acaaaauucagauucua

SEQ ID NO: 4095660 - RNA, 18 nt, Variola virus
acaaacaauuaauuaaua

SEQ ID NO: 4095661 - RNA, 20 nt, Variola virus
acaaacaauuaauuaauaca

SEQ ID NO: 4095662 - RNA, 22 nt, Variola virus
acaaacauuuuuguugguguaa

SEQ ID NO: 4095663 - RNA, 17 nt, Variola virus
acaaacgccauaaucug

SEQ ID NO: 4095664 - RNA, 15 nt, Variola virus
acaaacuccauauau

SEQ ID NO: 4095665 - RNA, 21 nt, Variola virus
acaaacuguucucuuaugaau

SEQ ID NO: 4095666 - RNA, 21 nt, Variola virus
acaaacuguuguuaaggaaua

SEQ ID NO: 4095667 - RNA, 22 nt, Variola virus
acaaacuguuguuaaggaauau

SEQ ID NO: 4095668 - RNA, 20 nt, Variola virus
acaaagauaccgaagaauua

SEQ ID NO: 4095669 - RNA, 17 nt, Variola virus
acaaaguaauuggauuc

SEQ ID NO: 4095670 - RNA, 14 nt, Variola virus
acaaaguacucaau

SEQ ID NO: 4095671 - RNA, 13 nt, Variola virus
acaaauaauaggu

SEQ ID NO: 4095672 - RNA, 19 nt, Variola virus
acaaauagagauaaaacaa

SEQ ID NO: 4095673 - RNA, 14 nt, Variola virus
acaaaucuggaaaa

SEQ ID NO: 4095674 - RNA, 15 nt, Variola virus
acaaauucuuggaua

SEQ ID NO: 4095675 - RNA, 13 nt, Variola virus
acaacaaucuaua

SEQ ID NO: 4095676 - RNA, 17 nt, Variola virus
acaacauguuauaacua

SEQ ID NO: 4095677 - RNA, 17 nt, Variola virus
acaaccgcuacauaauc

SEQ ID NO: 4095678 - RNA, 18 nt, Variola virus
acaaccgcuuagaaauaa

SEQ ID NO: 4095679 - RNA, 19 nt, Variola virus
acaacgagagauauuuuca

SEQ ID NO: 4095680 - RNA, 15 nt, Variola virus
acaacgugaaauacu

SEQ ID NO: 4095681 - RNA, 14 nt, Variola virus
acaacuaaacagua

SEQ ID NO: 4095682 - RNA, 20 nt, Variola virus
acaacuuaaucugaugaaua

SEQ ID NO: 4095683 - RNA, 13 nt, Variola virus
acaagauauauau

SEQ ID NO: 4095684 - RNA, 15 nt, Variola virus
acaagaucuuuguuu

SEQ ID NO: 4095685 - RNA, 17 nt, Variola virus
acaagauuccuuuucua

SEQ ID NO: 4095686 - RNA, 20 nt, Variola virus
acaagcaagcaucaugaaua

SEQ ID NO: 4095687 - RNA, 14 nt, Variola virus
acaagucauuuaaa

SEQ ID NO: 4095688 - RNA, 13 nt, Variola virus
acaagucuaauaa

SEQ ID NO: 4095689 - RNA, 19 nt, Variola virus
acaauaacuacauauucua

SEQ ID NO: 4095690 - RNA, 12 nt, Variola virus
acaauauaacau

SEQ ID NO: 4095691 - RNA, 13 nt, Variola virus
acaauauauucua

SEQ ID NO: 4095692 - RNA, 12 nt, Variola virus
acaauauuuccg

SEQ ID NO: 4095693 - RNA, 14 nt, Variola virus
acaaucguuaauaa

SEQ ID NO: 4095694 - RNA, 17 nt, Variola virus
acaaucuaauacaaaau

SEQ ID NO: 4095695 - RNA, 13 nt, Variola virus
acaaugaacuaau

SEQ ID NO: 4095696 - RNA, 15 nt, Variola virus
acaaugacuuuauca

SEQ ID NO: 4095697 - RNA, 22 nt, Variola virus
acaaugcuaauauauucuuaca

SEQ ID NO: 4095698 - RNA, 19 nt, Variola virus
acaaugcucaguaaaugua

SEQ ID NO: 4095699 - RNA, 16 nt, Variola virus
acaauggaauacuuca

SEQ ID NO: 4095700 - RNA, 15 nt, Variola virus
acaauguauaauaua

SEQ ID NO: 4095701 - RNA, 19 nt, Variola virus
acaaugucaaaauaugagu

SEQ ID NO: 4095702 - RNA, 21 nt, Variola virus
acaauguuugacugaauauau

SEQ ID NO: 4095703 - RNA, 21 nt, Variola virus
acaauuagaacagggaauuac

SEQ ID NO: 4095704 - RNA, 16 nt, Variola virus
acaauuauuauauaau

SEQ ID NO: 4095705 - RNA, 14 nt, Variola virus
acaauuuauuucua

SEQ ID NO: 4095706 - RNA, 22 nt, Variola virus
acaauuuugcaccauucauaau

SEQ ID NO: 4095707 - RNA, 14 nt, Variola virus
acaauuuuguauua

SEQ ID NO: 4095708 - RNA, 23 nt, Variola virus
acacaaguugauaaaauguugau

SEQ ID NO: 4095709 - RNA, 18 nt, Variola virus
acacaggauaaauuauuu

SEQ ID NO: 4095710 - RNA, 14 nt, Variola virus
acacauaacugaag

SEQ ID NO: 4095711 - RNA, 13 nt, Variola virus
acacauuaacauc

SEQ ID NO: 4095712 - RNA, 17 nt, Variola virus
acacauuaggauacaga

SEQ ID NO: 4095713 - RNA, 21 nt, Variola virus
acaccaucuucauaauaaaua

SEQ ID NO: 4095714 - RNA, 15 nt, Variola virus
acaccauuuacuuua

SEQ ID NO: 4095715 - RNA, 14 nt, Variola virus
acaccgaauacaaa

SEQ ID NO: 4095716 - RNA, 16 nt, Variola virus
acaccuaauacucugg

SEQ ID NO: 4095717 - RNA, 17 nt, Variola virus
acaccucaaugucuuua

SEQ ID NO: 4095718 - RNA, 21 nt, Variola virus
acacgaaagaaucaaaagaau

SEQ ID NO: 4095719 - RNA, 16 nt, Variola virus
acacgagccuuuauua

SEQ ID NO: 4095720 - RNA, 20 nt, Variola virus
acacguuagguuucuuuauu

SEQ ID NO: 4095721 - RNA, 17 nt, Variola virus
acacuaauuaagauaua

SEQ ID NO: 4095722 - RNA, 14 nt, Variola virus
acacucaccaauaa

SEQ ID NO: 4095723 - RNA, 17 nt, Variola virus
acacucgacacaauauu

SEQ ID NO: 4095724 - RNA, 17 nt, Variola virus
acacucuauaucuagaa

SEQ ID NO: 4095725 - RNA, 14 nt, Variola virus
acacugauucagaa

SEQ ID NO: 4095726 - RNA, 18 nt, Variola virus
acacuggaucuaugguuu

SEQ ID NO: 4095727 - RNA, 15 nt, Variola virus
acacuguuaaaguua

SEQ ID NO: 4095728 - RNA, 13 nt, Variola virus
acacuucuagaua

SEQ ID NO: 4095729 - RNA, 19 nt, Variola virus
acacuuugauuucuuaucu

SEQ ID NO: 4095730 - RNA, 19 nt, Variola virus
acacuuuuguaaaauauua

SEQ ID NO: 4095731 - RNA, 14 nt, Variola virus
acagaaaagagaau

SEQ ID NO: 4095732 - RNA, 16 nt, Variola virus
acagaacuaauguaua

SEQ ID NO: 4095733 - RNA, 21 nt, Variola virus
acagacgacagccuguaacug

SEQ ID NO: 4095734 - RNA, 13 nt, Variola virus
acagacucauuau

SEQ ID NO: 4095735 - RNA, 21 nt, Variola virus
acagaguuagaaauagauaau

SEQ ID NO: 4095736 - RNA, 14 nt, Variola virus
acagauuuaacaau

SEQ ID NO: 4095737 - RNA, 15 nt, Variola virus
acaggaaagaaguau

SEQ ID NO: 4095738 - RNA, 20 nt, Variola virus
acaggcgaugguaaaaagac

SEQ ID NO: 4095739 - RNA, 13 nt, Variola virus
acaguaguuuaac

SEQ ID NO: 4095740 - RNA, 18 nt, Variola virus
acaguaucagauaaucua

SEQ ID NO: 4095741 - RNA, 17 nt, Variola virus
acaguaucauuuaaaca

SEQ ID NO: 4095742 - RNA, 21 nt, Variola virus
acagucugcgaacuuuaaaca

SEQ ID NO: 4095743 - RNA, 13 nt, Variola virus
acaguuaaaacua

SEQ ID NO: 4095744 - RNA, 14 nt, Variola virus
acaguuauauaucu

SEQ ID NO: 4095745 - RNA, 13 nt, Variola virus
acaguuugaaaaa

SEQ ID NO: 4095746 - RNA, 20 nt, Variola virus
acauaaaggcgcccauuuca

SEQ ID NO: 4095747 - RNA, 17 nt, Variola virus
acauaacagauaguuua

SEQ ID NO: 4095748 - RNA, 17 nt, Variola virus
acauaacagguagaauu

SEQ ID NO: 4095749 - RNA, 16 nt, Variola virus
acauaacucuuuucca

SEQ ID NO: 4095750 - RNA, 17 nt, Variola virus
acauaagcaucuccaau

SEQ ID NO: 4095751 - RNA, 20 nt, Variola virus
acauaagccauuaacagcuu

SEQ ID NO: 4095752 - RNA, 15 nt, Variola virus
acauaauauauacag

SEQ ID NO: 4095753 - RNA, 19 nt, Variola virus
acauaauuuucuauaacug

SEQ ID NO: 4095754 - RNA, 16 nt, Variola virus
acauaccugauuagaa

SEQ ID NO: 4095755 - RNA, 18 nt, Variola virus
acauacuuuccuguagua

SEQ ID NO: 4095756 - RNA, 18 nt, Variola virus
acauauaacuuuccauca

SEQ ID NO: 4095757 - RNA, 17 nt, Variola virus
acauauaauaaugaaua

SEQ ID NO: 4095758 - RNA, 15 nt, Variola virus
acauauaguggauua

SEQ ID NO: 4095759 - RNA, 22 nt, Variola virus
acauaugcaucuauauaaucuu

SEQ ID NO: 4095760 - RNA, 15 nt, Variola virus
acauaugguauuauu

SEQ ID NO: 4095761 - RNA, 16 nt, Variola virus
acauauuuauaauuua

SEQ ID NO: 4095762 - RNA, 13 nt, Variola virus
acaucaaacggau

SEQ ID NO: 4095763 - RNA, 15 nt, Variola virus
acaucauaaaaugag

SEQ ID NO: 4095764 - RNA, 10 nt, Variola virus
acaucaucua

SEQ ID NO: 4095765 - RNA, 22 nt, Variola virus
acauccaggguccauuuucugu

SEQ ID NO: 4095766 - RNA, 14 nt, Variola virus
acauccgaaaaagu

SEQ ID NO: 4095767 - RNA, 17 nt, Variola virus
acauccggcaaaaauaa

SEQ ID NO: 4095768 - RNA, 14 nt, Variola virus
acaucggaaauaua

SEQ ID NO: 4095769 - RNA, 19 nt, Variola virus
acaucguuuaauauuacau

SEQ ID NO: 4095770 - RNA, 14 nt, Variola virus
acaucuaaaaaugu

SEQ ID NO: 4095771 - RNA, 19 nt, Variola virus
acaucuaaagaaaaaugau

SEQ ID NO: 4095772 - RNA, 23 nt, Variola virus
acaucuggccuguucauaaauaa

SEQ ID NO: 4095773 - RNA, 14 nt, Variola virus
acaugcauuugaaa

SEQ ID NO: 4095774 - RNA, 18 nt, Variola virus
acaugcgguucaaaauag

SEQ ID NO: 4095775 - RNA, 15 nt, Variola virus
acauguauuaccguu

SEQ ID NO: 4095776 - RNA, 18 nt, Variola virus
acaugucaucgaaauggu

SEQ ID NO: 4095777 - RNA, 16 nt, Variola virus
acaugucuaauguguu

SEQ ID NO: 4095778 - RNA, 18 nt, Variola virus
acauguguacuuguacac

SEQ ID NO: 4095779 - RNA, 11 nt, Variola virus
acauuaaacag

SEQ ID NO: 4095780 - RNA, 17 nt, Variola virus
acauuaaugguacaaau

SEQ ID NO: 4095781 - RNA, 20 nt, Variola virus
acauuaucaaaaagaacgau

SEQ ID NO: 4095782 - RNA, 19 nt, Variola virus
acauuauuaaaucaugaag

SEQ ID NO: 4095783 - RNA, 19 nt, Variola virus
acauucauuaauaauacag

SEQ ID NO: 4095784 - RNA, 14 nt, Variola virus
acauuccuaugaug

SEQ ID NO: 4095785 - RNA, 22 nt, Variola virus
acauugaucuauuauuuaauga

SEQ ID NO: 4095786 - RNA, 22 nt, Variola virus
acauugauuaaauuuuaauaua

SEQ ID NO: 4095787 - RNA, 20 nt, Variola virus
aaucuagccauugucuuaua

SEQ ID NO: 4095788 - RNA, 22 nt, Variola virus
aaucuaguuaccuugaaaauaa

SEQ ID NO: 4095789 - RNA, 13 nt, Variola virus
aaucuauaauauc

SEQ ID NO: 4095790 - RNA, 20 nt, Variola virus
aaucuauaucauguagaaaa

SEQ ID NO: 4095791 - RNA, 15 nt, Variola virus
aaucugauaaauaua

SEQ ID NO: 4095792 - RNA, 11 nt, Variola virus
aaucuggaaaa

SEQ ID NO: 4095793 - RNA, 23 nt, Variola virus
aaucuguacuauguguuaaaaga

SEQ ID NO: 4095794 - RNA, 15 nt, Variola virus
aaucuguaucgaaug

SEQ ID NO: 4095795 - RNA, 13 nt, Variola virus
aaugacaaacauu

SEQ ID NO: 4095796 - RNA, 22 nt, Variola virus
aaugacuuauuaaaaaacauau

SEQ ID NO: 4095797 - RNA, 18 nt, Variola virus
aaugagauguuaaaugaa

SEQ ID NO: 4095798 - RNA, 23 nt, Variola virus
aaugagguguacagcacaugaua

SEQ ID NO: 4095799 - RNA, 18 nt, Variola virus
aaugaguuauuaagaaau

SEQ ID NO: 4095800 - RNA, 16 nt, Variola virus
aaugaguucugugcag

SEQ ID NO: 4095801 - RNA, 15 nt, Variola virus
aaugauaaacaaaaa

SEQ ID NO: 4095802 - RNA, 19 nt, Variola virus
aaugauacacuaaguauau

SEQ ID NO: 4095803 - RNA, 18 nt, Variola virus
aaugauacugauaaagua

SEQ ID NO: 4095804 - RNA, 21 nt, Variola virus
aaugauaucuaugauuuuacc

SEQ ID NO: 4095805 - RNA, 17 nt, Variola virus
aaugauaucuuagaaua

SEQ ID NO: 4095806 - RNA, 21 nt, Variola virus
aaugaugacuugauagaauau

SEQ ID NO: 4095807 - RNA, 19 nt, Variola virus
aaugaugguguauacagua

SEQ ID NO: 4095808 - RNA, 22 nt, Variola virus
aaugauuauguuguuaugagug

SEQ ID NO: 4095809 - RNA, 14 nt, Variola virus
aaugauuuagaaau

SEQ ID NO: 4095810 - RNA, 17 nt, Variola virus
aaugauuuagaaaugaa

SEQ ID NO: 4095811 - RNA, 18 nt, Variola virus
aaugauuucauuagaaua

SEQ ID NO: 4095812 - RNA, 15 nt, Variola virus
aaugauuuuggaaaa

SEQ ID NO: 4095813 - RNA, 14 nt, Variola virus
aaugcagaaaugau

SEQ ID NO: 4095814 - RNA, 15 nt, Variola virus
aaugcagaaaugauu

SEQ ID NO: 4095815 - RNA, 16 nt, Variola virus
aaugcagggugcauau

SEQ ID NO: 4095816 - RNA, 13 nt, Variola virus
aaugcauuuuaua

SEQ ID NO: 4095817 - RNA, 23 nt, Variola virus
aaugccacgaauaaaaaauacuu

SEQ ID NO: 4095818 - RNA, 23 nt, Variola virus
aaugccuuacucgguguauauaa

SEQ ID NO: 4095819 - RNA, 15 nt, Variola virus
aaugcuaauauuaaa

SEQ ID NO: 4095820 - RNA, 18 nt, Variola virus
aaugcucaguaaauguau

SEQ ID NO: 4095821 - RNA, 23 nt, Variola virus
aaugcuucucuguuuaaugaauu

SEQ ID NO: 4095822 - RNA, 20 nt, Variola virus
aauggacuccaauacgaaau

SEQ ID NO: 4095823 - RNA, 16 nt, Variola virus
aauggauaauuuccau

SEQ ID NO: 4095824 - RNA, 19 nt, Variola virus
aauggaugaggaagugaua

SEQ ID NO: 4095825 - RNA, 16 nt, Variola virus
aauggcauacauagaa

SEQ ID NO: 4095826 - RNA, 16 nt, Variola virus
aauggugguaaaacua

SEQ ID NO: 4095827 - RNA, 15 nt, Variola virus
aauguaaagucuaua

SEQ ID NO: 4095828 - RNA, 16 nt, Variola virus
aauguacuguauauaa

SEQ ID NO: 4095829 - RNA, 16 nt, Variola virus
aauguagaaaaucaua

SEQ ID NO: 4095830 - RNA, 18 nt, Variola virus
aauguagaaauuagaaag

SEQ ID NO: 4095831 - RNA, 14 nt, Variola virus
aauguaguaaauau

SEQ ID NO: 4095832 - RNA, 21 nt, Variola virus
aauguagugauagauaugaua

SEQ ID NO: 4095833 - RNA, 15 nt, Variola virus
aaugucuuucauguu

SEQ ID NO: 4095834 - RNA, 14 nt, Variola virus
aaugugagaaguuu

SEQ ID NO: 4095835 - RNA, 17 nt, Variola virus
aaugugauaauuuccag

SEQ ID NO: 4095836 - RNA, 22 nt, Variola virus
aaugugauucucugaaaaugua

SEQ ID NO: 4095837 - RNA, 14 nt, Variola virus
aauguuaaaacuac

SEQ ID NO: 4095838 - RNA, 14 nt, Variola virus
aauguuaaacauua

SEQ ID NO: 4095839 - RNA, 21 nt, Variola virus
aauguuaagcauauccugaau

SEQ ID NO: 4095840 - RNA, 12 nt, Variola virus
aauguuagaauu

SEQ ID NO: 4095841 - RNA, 19 nt, Variola virus
aauguuagagacggaaaua

SEQ ID NO: 4095842 - RNA, 23 nt, Variola virus
aauguuauaguuuucuaaaaugu

SEQ ID NO: 4095843 - RNA, 22 nt, Variola virus
aauguuugauaaaaauauguau

SEQ ID NO: 4095844 - RNA, 13 nt, Variola virus
aauuaaacaaaac

SEQ ID NO: 4095845 - RNA, 10 nt, Variola virus
aauuaaauau

SEQ ID NO: 4095846 - RNA, 17 nt, Variola virus
aauuaaucauauacaac

SEQ ID NO: 4095847 - RNA, 14 nt, Variola virus
aauuacaaacacua

SEQ ID NO: 4095848 - RNA, 15 nt, Variola virus
aauuacacuauuugu

SEQ ID NO: 4095849 - RNA, 21 nt, Variola virus
aauuacagaguuuucagaaga

SEQ ID NO: 4095850 - RNA, 20 nt, Variola virus
aauuacauaaaaaaaaugua

SEQ ID NO: 4095851 - RNA, 15 nt, Variola virus
aauuacauuucuugu

SEQ ID NO: 4095852 - RNA, 18 nt, Variola virus
aauuaccaacuaaaaguc

SEQ ID NO: 4095853 - RNA, 19 nt, Variola virus
aauuacuaaaauauacaaa

SEQ ID NO: 4095854 - RNA, 20 nt, Variola virus
aauuacuuaaagauagaaau

SEQ ID NO: 4095855 - RNA, 13 nt, Variola virus
aauuagaaauugg

SEQ ID NO: 4095856 - RNA, 16 nt, Variola virus
aauuagaauuacaaaa

SEQ ID NO: 4095857 - RNA, 15 nt, Variola virus
aauuauauaaaacau

SEQ ID NO: 4095858 - RNA, 22 nt, Variola virus
aauuaucguuccugguauauag

SEQ ID NO: 4095859 - RNA, 21 nt, Variola virus
aauuaugagaaugugauucaa

SEQ ID NO: 4095860 - RNA, 12 nt, Variola virus
aauuaugaugau

SEQ ID NO: 4095861 - RNA, 22 nt, Variola virus
aauuauuauauaauucuucgcc

SEQ ID NO: 4095862 - RNA, 14 nt, Variola virus
aauuauuauccaau

SEQ ID NO: 4095863 - RNA, 14 nt, Variola virus
aauuauuucuaaua

SEQ ID NO: 4095864 - RNA, 19 nt, Variola virus
aauuauuuuuucuuaguaa

SEQ ID NO: 4095865 - RNA, 21 nt, Variola virus
aauucauacaccauuaauaga

SEQ ID NO: 4095866 - RNA, 16 nt, Variola virus
aauucaucucuagaua

SEQ ID NO: 4095867 - RNA, 14 nt, Variola virus
aauucauuagaaua

SEQ ID NO: 4095868 - RNA, 22 nt, Variola virus
aauucauuauuaaacaguuuaa

SEQ ID NO: 4095869 - RNA, 19 nt, Variola virus
aauuccagauguuguaaaa

SEQ ID NO: 4095870 - RNA, 19 nt, Variola virus
aauuccgcauuaaaugaug

SEQ ID NO: 4095871 - RNA, 18 nt, Variola virus
aauuccggcggcgguacc

SEQ ID NO: 4095872 - RNA, 19 nt, Variola virus
aauucggaucguaaaucug

SEQ ID NO: 4095873 - RNA, 14 nt, Variola virus
aauucguuuaaaaa

SEQ ID NO: 4095874 - RNA, 21 nt, Variola virus
aauucuagucuuaaccaagaa

SEQ ID NO: 4095875 - RNA, 15 nt, Variola virus
aauucuuaucaauaa

SEQ ID NO: 4095876 - RNA, 17 nt, Variola virus
aauucuuuuaugaauau

SEQ ID NO: 4095877 - RNA, 14 nt, Variola virus
aauugauucuuauu

SEQ ID NO: 4095878 - RNA, 15 nt, Variola virus
aauugcgguaucuau

SEQ ID NO: 4095879 - RNA, 22 nt, Variola virus
aauugcuguuuauuuuagaaga

SEQ ID NO: 4095880 - RNA, 14 nt, Variola virus
aauugcuuuucuaa

SEQ ID NO: 4095881 - RNA, 22 nt, Variola virus
aauugguauauguauuagaaua

SEQ ID NO: 4095882 - RNA, 14 nt, Variola virus
aauuguauauuaca

SEQ ID NO: 4095883 - RNA, 13 nt, Variola virus
aauugucuaauga

SEQ ID NO: 4095884 - RNA, 16 nt, Variola virus
aauugugauuuaguau

SEQ ID NO: 4095885 - RNA, 15 nt, Variola virus
aauuguucaaaacug

SEQ ID NO: 4095886 - RNA, 14 nt, Variola virus
aauuguuucuuuua

SEQ ID NO: 4095887 - RNA, 24 nt, Variola virus
aauuguuuugaauuucuuagucau

SEQ ID NO: 4095888 - RNA, 22 nt, Variola virus
aauuguuuuuguacauaauaga

SEQ ID NO: 4095889 - RNA, 15 nt, Variola virus
aauuuaauaagaaau

SEQ ID NO: 4095890 - RNA, 19 nt, Variola virus
aauuuaccagauaucuucu

SEQ ID NO: 4095891 - RNA, 21 nt, Variola virus
aauuuacuacugaguauaaau

SEQ ID NO: 4095892 - RNA, 14 nt, Variola virus
aauuuagaaauaua

SEQ ID NO: 4095893 - RNA, 15 nt, Variola virus
aauuuagcauuucua

SEQ ID NO: 4095894 - RNA, 13 nt, Variola virus
aauuuauacucau

SEQ ID NO: 4095895 - RNA, 13 nt, Variola virus
aauuuauauaaau

SEQ ID NO: 4095896 - RNA, 22 nt, Variola virus
aauuuaucaaaugguucauaau

SEQ ID NO: 4095897 - RNA, 17 nt, Variola virus
aauuuauuucagaaauu

SEQ ID NO: 4095898 - RNA, 12 nt, Variola virus
aauuucaaaaua

SEQ ID NO: 4095899 - RNA, 14 nt, Variola virus
aauuuccaucucua

SEQ ID NO: 4095900 - RNA, 23 nt, Variola virus
aauuucuaaaggagcaaauguua

SEQ ID NO: 4095901 - RNA, 20 nt, Variola virus
aauuucuagaauaucaucuc

SEQ ID NO: 4095902 - RNA, 16 nt, Variola virus
aauuucuauuagauaa

SEQ ID NO: 4095903 - RNA, 23 nt, Variola virus
aauuucucucaucuguaggauau

SEQ ID NO: 4095904 - RNA, 19 nt, Variola virus
aauuugauccauguucaua

SEQ ID NO: 4095905 - RNA, 17 nt, Variola virus
aauuuuaauauugaaaa

SEQ ID NO: 4095906 - RNA, 18 nt, Variola virus
aauuuucuauacauagau

SEQ ID NO: 4095907 - RNA, 14 nt, Variola virus
aauuuugaagcauu

SEQ ID NO: 4095908 - RNA, 12 nt, Variola virus
aauuuuuagagg

SEQ ID NO: 4095909 - RNA, 13 nt, Variola virus
aauuuuuuaaaaa

SEQ ID NO: 4095910 - RNA, 17 nt, Variola virus
aauuuuuuuucuagaua

SEQ ID NO: 4095911 - RNA, 16 nt, Variola virus
acaaaaagaaagaaua

SEQ ID NO: 4095912 - RNA, 14 nt, Variola virus
acaaaaauacauaa

SEQ ID NO: 4095913 - RNA, 20 nt, Variola virus
acaaaacagaaauaugugaa

SEQ ID NO: 4095914 - RNA, 12 nt, Variola virus
acaaaagguauu

SEQ ID NO: 4095915 - RNA, 21 nt, Variola virus
acaaaagguauuacaagaaua

SEQ ID NO: 4095916 - RNA, 14 nt, Variola virus
cuugaaugucucaa

SEQ ID NO: 4095917 - RNA, 14 nt, Variola virus
cuugacaucuaaaa

SEQ ID NO: 4095918 - RNA, 21 nt, Variola virus
cuugagagacaugauucagaa

SEQ ID NO: 4095919 - RNA, 24 nt, Variola virus
cuugagauaccaaagucugauauu

SEQ ID NO: 4095920 - RNA, 20 nt, Variola virus
cuugauacagccaaguaucu

SEQ ID NO: 4095921 - RNA, 17 nt, Variola virus
cuugauacgaucauuaa

SEQ ID NO: 4095922 - RNA, 20 nt, Variola virus
cuugauuacauucucauuaa

SEQ ID NO: 4095923 - RNA, 23 nt, Variola virus
cuugcacguaaagucuacauugu

SEQ ID NO: 4095924 - RNA, 21 nt, Variola virus
cuugcuagacaccuuuucaau

SEQ ID NO: 4095925 - RNA, 17 nt, Variola virus
cuuggauaaccuucaua

SEQ ID NO: 4095926 - RNA, 19 nt, Variola virus
cuuggauuugacgaaauca

SEQ ID NO: 4095927 - RNA, 19 nt, Variola virus
cuuguauucaacaugcuuu

SEQ ID NO: 4095928 - RNA, 14 nt, Variola virus
cuugucaucuuguu

SEQ ID NO: 4095929 - RNA, 15 nt, Variola virus
cuuguucguugacau

SEQ ID NO: 4095930 - RNA, 19 nt, Variola virus
cuuuaacauauguaucaau

SEQ ID NO: 4095931 - RNA, 12 nt, Variola virus
cuuuaacuucug

SEQ ID NO: 4095932 - RNA, 15 nt, Variola virus
cuuuacuaagaaagu

SEQ ID NO: 4095933 - RNA, 17 nt, Variola virus
cuuuagaugaauuauua

SEQ ID NO: 4095934 - RNA, 21 nt, Variola virus
cuuuauaauuucaucuacaau

SEQ ID NO: 4095935 - RNA, 15 nt, Variola virus
cuuucaguucuggau

SEQ ID NO: 4095936 - RNA, 18 nt, Variola virus
cuuucaucaucugauacc

SEQ ID NO: 4095937 - RNA, 22 nt, Variola virus
cuuucauuauuacgucuguagu

SEQ ID NO: 4095938 - RNA, 23 nt, Variola virus
cuuucggcgguugccauagaaua

SEQ ID NO: 4095939 - RNA, 16 nt, Variola virus
cuuugaucucuuuugu

SEQ ID NO: 4095940 - RNA, 17 nt, Variola virus
cuuuuaacaugauguaa

SEQ ID NO: 4095941 - RNA, 17 nt, Variola virus
cuuuuauuuccacauua

SEQ ID NO: 4095942 - RNA, 17 nt, Variola virus
cuuuucuaguucugaac

SEQ ID NO: 4095943 - RNA, 15 nt, Variola virus
cuuuucuuauccauu

SEQ ID NO: 4095944 - RNA, 22 nt, Variola virus
cuuuugauuugcuuugaauaau

SEQ ID NO: 4095945 - RNA, 15 nt, Variola virus
cuuuugucguaaaua

SEQ ID NO: 4095946 - RNA, 15 nt, Variola virus
cuuuugugaaaagau

SEQ ID NO: 4095947 - RNA, 14 nt, Variola virus
cuuuuguuuagaau

SEQ ID NO: 4095948 - RNA, 23 nt, Variola virus
cuuuuuauaucuggcucucucug

SEQ ID NO: 4095949 - RNA, 18 nt, Variola virus
cuuuuuauuuauccucuc

SEQ ID NO: 4095950 - RNA, 22 nt, Variola virus
gaaaaagaauuuuuauaaauuu

SEQ ID NO: 4095951 - RNA, 12 nt, Variola virus
gaaaaaguaaau

SEQ ID NO: 4095952 - RNA, 18 nt, Variola virus
gaaaaaguaaaugaugaa

SEQ ID NO: 4095953 - RNA, 17 nt, Variola virus
gaaaacauuauauccuc

SEQ ID NO: 4095954 - RNA, 17 nt, Variola virus
gaaaacauuuuuaucau

SEQ ID NO: 4095955 - RNA, 15 nt, Variola virus
cuauuuuaucauuuu

SEQ ID NO: 4095956 - RNA, 15 nt, Variola virus
cucaaacuaaauguc

SEQ ID NO: 4095957 - RNA, 16 nt, Variola virus
cucaaauaauacuaua

SEQ ID NO: 4095958 - RNA, 18 nt, Variola virus
cucaaaugaauaaguuua

SEQ ID NO: 4095959 - RNA, 13 nt, Variola virus
cucaacaauaaau

SEQ ID NO: 4095960 - RNA, 22 nt, Variola virus
cucaauuucccaaauaacacca

SEQ ID NO: 4095961 - RNA, 11 nt, Variola virus
cucacauuuca

SEQ ID NO: 4095962 - RNA, 14 nt, Variola virus
cucaccucuauauu

SEQ ID NO: 4095963 - RNA, 14 nt, Variola virus
cucagaauaucuca

SEQ ID NO: 4095964 - RNA, 21 nt, Variola virus
cucaguacauagauuauccaa

SEQ ID NO: 4095965 - RNA, 17 nt, Variola virus
cucauaaaauaguucuc

SEQ ID NO: 4095966 - RNA, 20 nt, Variola virus
cucauagacccguaguuuua

SEQ ID NO: 4095967 - RNA, 16 nt, Variola virus
cucaucggaucuguaa

SEQ ID NO: 4095968 - RNA, 23 nt, Variola virus
cucaucguuccauaguuuuucua

SEQ ID NO: 4095969 - RNA, 20 nt, Variola virus
cucaucuacaaaaacauacu

SEQ ID NO: 4095970 - RNA, 15 nt, Variola virus
cucauuuaucauguu

SEQ ID NO: 4095971 - RNA, 22 nt, Variola virus
cuccagacuuuauaauuucauc

SEQ ID NO: 4095972 - RNA, 23 nt, Variola virus
cuccaucaauuucaaaaagagcu

SEQ ID NO: 4095973 - RNA, 16 nt, Variola virus
cucccaccaaauuaau

SEQ ID NO: 4095974 - RNA, 16 nt, Variola virus
cucccauaauacuuua

SEQ ID NO: 4095975 - RNA, 17 nt, Variola virus
cucccuuguguaacguu

SEQ ID NO: 4095976 - RNA, 15 nt, Variola virus
cuccgcucucaaugc

SEQ ID NO: 4095977 - RNA, 21 nt, Variola virus
cuccuagguuucucuauaaac

SEQ ID NO: 4095978 - RNA, 16 nt, Variola virus
cuccuuuaaaauuaau

SEQ ID NO: 4095979 - RNA, 14 nt, Variola virus
cucgauaauuauua

SEQ ID NO: 4095980 - RNA, 20 nt, Variola virus
cucgauacaucaacucucuc

SEQ ID NO: 4095981 - RNA, 19 nt, Variola virus
cucgaucaugaauggauuu

SEQ ID NO: 4095982 - RNA, 17 nt, Variola virus
cucgcuuuguguaucau

SEQ ID NO: 4095983 - RNA, 23 nt, Variola virus
cucgguuguguauuaucaucugc

SEQ ID NO: 4095984 - RNA, 23 nt, Variola virus
cucguaaauugggauaaaaauua

SEQ ID NO: 4095985 - RNA, 18 nt, Variola virus
cucguuuuucuuaagaaa

SEQ ID NO: 4095986 - RNA, 21 nt, Variola virus
cucuaaacaauuggacaaauu

SEQ ID NO: 4095987 - RNA, 14 nt, Variola virus
cucuaaaugaugau

SEQ ID NO: 4095988 - RNA, 22 nt, Variola virus
cucuaacaacgacgaaccaaaa

SEQ ID NO: 4095989 - RNA, 13 nt, Variola virus
cucuaguuucaga

SEQ ID NO: 4095990 - RNA, 17 nt, Variola virus
cucucaucuacaaaaac

SEQ ID NO: 4095991 - RNA, 15 nt, Variola virus
cucucuuuuagagau

SEQ ID NO: 4095992 - RNA, 19 nt, Variola virus
cucugacauucagaaagag

SEQ ID NO: 4095993 - RNA, 11 nt, Variola virus
cucuuaggaag

SEQ ID NO: 4095994 - RNA, 14 nt, Variola virus
cucuuucuuuugau

SEQ ID NO: 4095995 - RNA, 19 nt, Variola virus
cucuuugacauauuuugag

SEQ ID NO: 4095996 - RNA, 22 nt, Variola virus
cucuuugauuuugugucacaug

SEQ ID NO: 4095997 - RNA, 21 nt, Variola virus
cucuuuuauagagaaauguaa

SEQ ID NO: 4095998 - RNA, 14 nt, Variola virus
cucuuuuguagaac

SEQ ID NO: 4095999 - RNA, 15 nt, Variola virus
cguaucuaaaguauu

SEQ ID NO: 4096000 - RNA, 18 nt, Variola virus
cguaucuauaaucaucug

SEQ ID NO: 4096001 - RNA, 22 nt, Variola virus
cguauguauuuguguacaguga

SEQ ID NO: 4096002 - RNA, 16 nt, Variola virus
cguauuuuuuaugaau

SEQ ID NO: 4096003 - RNA, 20 nt, Variola virus
cguccaauguuagaguaucu

SEQ ID NO: 4096004 - RNA, 14 nt, Variola virus
cguccgauuucaua

SEQ ID NO: 4096005 - RNA, 20 nt, Variola virus
cgucgucaaaauauuuacua

SEQ ID NO: 4096006 - RNA, 19 nt, Variola virus
cgucuaaaucaaugcaugu

SEQ ID NO: 4096007 - RNA, 14 nt, Variola virus
cgucucaaucuuua

SEQ ID NO: 4096008 - RNA, 16 nt, Variola virus
cgucuuuugaucuuua

SEQ ID NO: 4096009 - RNA, 21 nt, Variola virus
cgugagaauauacuacaauug

SEQ ID NO: 4096010 - RNA, 17 nt, Variola virus
cgugauauuaucuucau

SEQ ID NO: 4096011 - RNA, 18 nt, Variola virus
cgugauuauucuccacca

SEQ ID NO: 4096012 - RNA, 21 nt, Variola virus
cgugcacuuuuuuauaaagau

SEQ ID NO: 4096013 - RNA, 16 nt, Variola virus
cgugcguaauauuguu

SEQ ID NO: 4096014 - RNA, 21 nt, Variola virus
cgugguguuaugaaacaugua

SEQ ID NO: 4096015 - RNA, 18 nt, Variola virus
cguguuaauaaaaacaug

SEQ ID NO: 4096016 - RNA, 16 nt, Variola virus
cguuaauaacaaaaau

SEQ ID NO: 4096017 - RNA, 20 nt, Variola virus
cguuagauuuucuacagaua

SEQ ID NO: 4096018 - RNA, 19 nt, Variola virus
cguuaucauuuucuacaau

SEQ ID NO: 4096019 - RNA, 19 nt, Variola virus
cguucuacauaaaacauca

SEQ ID NO: 4096020 - RNA, 20 nt, Variola virus
cguugaugaggcacauaaua

SEQ ID NO: 4096021 - RNA, 20 nt, Variola virus
cguuuaaaguaaacuucgua

SEQ ID NO: 4096022 - RNA, 12 nt, Variola virus
cguuuauggauc

SEQ ID NO: 4096023 - RNA, 16 nt, Variola virus
cguuuggauuaaucug

SEQ ID NO: 4096024 - RNA, 15 nt, Variola virus
cuaaaaaaaauaacu

SEQ ID NO: 4096025 - RNA, 12 nt, Variola virus
cuaaaaaacuaa

SEQ ID NO: 4096026 - RNA, 15 nt, Variola virus
cuaaaacauauuucu

SEQ ID NO: 4096027 - RNA, 21 nt, Variola virus
cuaaaauauuaucuaauguug

SEQ ID NO: 4096028 - RNA, 21 nt, Variola virus
cuaaacccgacuuaguuauau

SEQ ID NO: 4096029 - RNA, 17 nt, Variola virus
cuaaagaaaaaugauug

SEQ ID NO: 4096030 - RNA, 20 nt, Variola virus
cuaaagaacggagaauaucu

SEQ ID NO: 4096031 - RNA, 22 nt, Variola virus
cuaaagcacaacgagagauauu

SEQ ID NO: 4096032 - RNA, 16 nt, Variola virus
cuaaauaauuauacuu

SEQ ID NO: 4096033 - RNA, 21 nt, Variola virus
cuaaaucuguauaucuuucca

SEQ ID NO: 4096034 - RNA, 10 nt, Variola virus
cuaaauuaau

SEQ ID NO: 4096035 - RNA, 21 nt, Variola virus
cuaacaaaaauuaugaaauaa

SEQ ID NO: 4096036 - RNA, 15 nt, Variola virus
cuaacacacaaugua

SEQ ID NO: 4096037 - RNA, 21 nt, Variola virus
cuaacagaauuuauuguaaca

SEQ ID NO: 4096038 - RNA, 17 nt, Variola virus
cuaacaugcauuugaaa

SEQ ID NO: 4096039 - RNA, 15 nt, Variola virus
cuaacuuuaaacaag

SEQ ID NO: 4096040 - RNA, 18 nt, Variola virus
cuaagacgucucauuucu

SEQ ID NO: 4096041 - RNA, 21 nt, Variola virus
cuaagacguuguaucucuuuu

SEQ ID NO: 4096042 - RNA, 23 nt, Variola virus
cuaagauauacuaccgauauaca

SEQ ID NO: 4096043 - RNA, 20 nt, Variola virus
cuaauaaacauuccacauuc

SEQ ID NO: 4096044 - RNA, 16 nt, Variola virus
cuaauaaauuaaauau

SEQ ID NO: 4096045 - RNA, 17 nt, Variola virus
cuaauacaaaaucaucu

SEQ ID NO: 4096046 - RNA, 19 nt, Variola virus
cuaauacaucucuggaaau

SEQ ID NO: 4096047 - RNA, 15 nt, Variola virus
cuaauacuaaauaca

SEQ ID NO: 4096048 - RNA, 13 nt, Variola virus
aucucuuaaugag

SEQ ID NO: 4096049 - RNA, 21 nt, Variola virus
aucucuuaaugagcguuuaaa

SEQ ID NO: 4096050 - RNA, 19 nt, Variola virus
aucucuucaucuguaaguu

SEQ ID NO: 4096051 - RNA, 21 nt, Variola virus
aucugauagaaagaauaagaa

SEQ ID NO: 4096052 - RNA, 19 nt, Variola virus
aucugauguaggacaucaa

SEQ ID NO: 4096053 - RNA, 22 nt, Variola virus
aucugauguaggacaucaauau

SEQ ID NO: 4096054 - RNA, 17 nt, Variola virus
aucuggaaaaucuauau

SEQ ID NO: 4096055 - RNA, 17 nt, Variola virus
aucuggauuucagauau

SEQ ID NO: 4096056 - RNA, 21 nt, Variola virus
aucuguaguauucuugucauu

SEQ ID NO: 4096057 - RNA, 21 nt, Variola virus
aucugucccauuuugaauauc

SEQ ID NO: 4096058 - RNA, 21 nt, Variola virus
aucugugacagauaucaucuu

SEQ ID NO: 4096059 - RNA, 22 nt, Variola virus
aucuguggaaaauaauacucug

SEQ ID NO: 4096060 - RNA, 20 nt, Variola virus
aucuuauguuuuuaagagau

SEQ ID NO: 4096061 - RNA, 21 nt, Variola virus
aucuucaagagugcauugacu

SEQ ID NO: 4096062 - RNA, 18 nt, Variola virus
aucuucuuauaagauugu

SEQ ID NO: 4096063 - RNA, 21 nt, Variola virus
aucuucuuauuuagaucuugu

SEQ ID NO: 4096064 - RNA, 19 nt, Variola virus
aucuuguuauaaacacaca

SEQ ID NO: 4096065 - RNA, 18 nt, Variola virus
aucuuguucagaaauaua

SEQ ID NO: 4096066 - RNA, 20 nt, Variola virus
aucuuguucugguuuaaaaa

SEQ ID NO: 4096067 - RNA, 16 nt, Variola virus
aucuuuaaagaacuaa

SEQ ID NO: 4096068 - RNA, 18 nt, Variola virus
aucuuuaauaucuagauu

SEQ ID NO: 4096069 - RNA, 22 nt, Variola virus
augaaacaguaggguuauuaac

SEQ ID NO: 4096070 - RNA, 23 nt, Variola virus
augaaagauacaacaaauuaaau

SEQ ID NO: 4096071 - RNA, 13 nt, Variola virus
augaacaaagaaa

SEQ ID NO: 4096072 - RNA, 19 nt, Variola virus
augaacauaguaagaaauu

SEQ ID NO: 4096073 - RNA, 21 nt, Variola virus
augaaccaauacaauguaaag

SEQ ID NO: 4096074 - RNA, 15 nt, Variola virus
augaacuaagagaaa

SEQ ID NO: 4096075 - RNA, 17 nt, Variola virus
augaacuagacaauaau

SEQ ID NO: 4096076 - RNA, 21 nt, Variola virus
augaauaccggaaucauagau

SEQ ID NO: 4096077 - RNA, 13 nt, Variola virus
augaauaucacau

SEQ ID NO: 4096078 - RNA, 17 nt, Variola virus
augaauaucaggaaaug

SEQ ID NO: 4096079 - RNA, 15 nt, Variola virus
augaaucuaaaagaa

SEQ ID NO: 4096080 - RNA, 20 nt, Variola virus
augaauuacuaaaauauaca

SEQ ID NO: 4096081 - RNA, 14 nt, Variola virus
augacaauauaaca

SEQ ID NO: 4096082 - RNA, 16 nt, Variola virus
augacauggaaauauc

SEQ ID NO: 4096083 - RNA, 17 nt, Variola virus
augacauucucugacau

SEQ ID NO: 4096084 - RNA, 14 nt, Variola virus
augacauuguaaaa

SEQ ID NO: 4096085 - RNA, 18 nt, Variola virus
augacauuguaaaagaaa

SEQ ID NO: 4096086 - RNA, 22 nt, Variola virus
augacauuguaaaagaaauaua

SEQ ID NO: 4096087 - RNA, 16 nt, Variola virus
augacgaauugaaaau

SEQ ID NO: 4096088 - RNA, 18 nt, Variola virus
aauaauugcgaauguuuu

SEQ ID NO: 4096089 - RNA, 19 nt, Variola virus
aauaauuguuauuauuuca

SEQ ID NO: 4096090 - RNA, 14 nt, Variola virus
aauaauuuacaaaa

SEQ ID NO: 4096091 - RNA, 22 nt, Variola virus
aauaauuuaggacuuuguaaua

SEQ ID NO: 4096092 - RNA, 15 nt, Variola virus
aauacaacaaccauu

SEQ ID NO: 4096093 - RNA, 20 nt, Variola virus
aauacaaggcacuaugucca

SEQ ID NO: 4096094 - RNA, 14 nt, Variola virus
aauacaauuaaaaa

SEQ ID NO: 4096095 - RNA, 15 nt, Variola virus
aauacacacaaagua

SEQ ID NO: 4096096 - RNA, 15 nt, Variola virus
aauacaccaaauaua

SEQ ID NO: 4096097 - RNA, 19 nt, Variola virus
aauacaccaauagaugaua

SEQ ID NO: 4096098 - RNA, 18 nt, Variola virus
aauacauuaucaugcuug

SEQ ID NO: 4096099 - RNA, 15 nt, Variola virus
aauaccaaaaugaug

SEQ ID NO: 4096100 - RNA, 23 nt, Variola virus
aauaccaaucauuuauugauaau

SEQ ID NO: 4096101 - RNA, 22 nt, Variola virus
aauaccacugaauguuugaaaa

SEQ ID NO: 4096102 - RNA, 23 nt, Variola virus
aauaccgaugugucuacauaaau

SEQ ID NO: 4096103 - RNA, 22 nt, Variola virus
aauacgauccaagguuagagaa

SEQ ID NO: 4096104 - RNA, 14 nt, Variola virus
aauacggauaugac

SEQ ID NO: 4096105 - RNA, 14 nt, Variola virus
aauacguaaaacuc

SEQ ID NO: 4096106 - RNA, 14 nt, Variola virus
aauacguuagagaa

SEQ ID NO: 4096107 - RNA, 17 nt, Variola virus
aauacuagauucgaaaa

SEQ ID NO: 4096108 - RNA, 18 nt, Variola virus
aauacucuuuaaaguuuc

SEQ ID NO: 4096109 - RNA, 13 nt, Variola virus
aauacuggauaaa

SEQ ID NO: 4096110 - RNA, 12 nt, Variola virus
aauacuuaaaaa

SEQ ID NO: 4096111 - RNA, 19 nt, Variola virus
aauacuuauuaauggcucu

SEQ ID NO: 4096112 - RNA, 21 nt, Variola virus
aauacuuugguaguauacaag

SEQ ID NO: 4096113 - RNA, 14 nt, Variola virus
aauagaaacauaua

SEQ ID NO: 4096114 - RNA, 22 nt, Variola virus
aauagacggcauuaauuuccau

SEQ ID NO: 4096115 - RNA, 17 nt, Variola virus
aauagcaaccaauguuu

SEQ ID NO: 4096116 - RNA, 16 nt, Variola virus
aauagcauaaaugcua

SEQ ID NO: 4096117 - RNA, 16 nt, Variola virus
aauagcgcugaaaaua

SEQ ID NO: 4096118 - RNA, 17 nt, Variola virus
aauagcugaugauagaa

SEQ ID NO: 4096119 - RNA, 20 nt, Variola virus
aauaggguaucuaauuuccu

SEQ ID NO: 4096120 - RNA, 13 nt, Variola virus
aauagguauauaa

SEQ ID NO: 4096121 - RNA, 17 nt, Variola virus
aauaggugaugaugcaa

SEQ ID NO: 4096122 - RNA, 12 nt, Variola virus
aauaguaaauga

SEQ ID NO: 4096123 - RNA, 20 nt, Variola virus
aauaguagaaucaaaggaua

SEQ ID NO: 4096124 - RNA, 23 nt, Variola virus
aauaguaucgaaaacagaauauc

SEQ ID NO: 4096125 - RNA, 22 nt, Variola virus
aauaguucaacaucuacuuuug

SEQ ID NO: 4096126 - RNA, 14 nt, Variola virus
aauaguucuguaau

SEQ ID NO: 4096127 - RNA, 15 nt, Variola virus
aauaguuuauaacau

SEQ ID NO: 4096128 - RNA, 22 nt, Variola virus
aauaguuuccaccaaaagacua

SEQ ID NO: 4096129 - RNA, 23 nt, Variola virus
aauaguuuguacugcaaaaauaa

SEQ ID NO: 4096130 - RNA, 16 nt, Variola virus
aauaguuuuuaucaua

SEQ ID NO: 4096131 - RNA, 21 nt, Variola virus
aauauaaauuaauuuaccauc

SEQ ID NO: 4096132 - RNA, 14 nt, Variola virus
aauauaauauugaa

SEQ ID NO: 4096133 - RNA, 16 nt, Variola virus
aauauacauucgaaaa

SEQ ID NO: 4096134 - RNA, 21 nt, Variola virus
aauauacuuuuaauugaacaa

SEQ ID NO: 4096135 - RNA, 20 nt, Variola virus
aauauagaacaucauuucca

SEQ ID NO: 4096136 - RNA, 20 nt, Variola virus
aauauagcauagauccguga

SEQ ID NO: 4096137 - RNA, 22 nt, Variola virus
aauauaguauauaauaaagaua

SEQ ID NO: 4096138 - RNA, 20 nt, Variola virus
aauauauacuucaauugaua

SEQ ID NO: 4096139 - RNA, 19 nt, Variola virus
aauauaucaauaagcauua

SEQ ID NO: 4096140 - RNA, 20 nt, Variola virus
aauauaucaugcucaguaau

SEQ ID NO: 4096141 - RNA, 23 nt, Variola virus
aauauaucuauaauuugauccau

SEQ ID NO: 4096142 - RNA, 14 nt, Variola virus
aauauaucuuauau

SEQ ID NO: 4096143 - RNA, 14 nt, Variola virus
aauauauuaccaug

SEQ ID NO: 4096144 - RNA, 23 nt, Variola virus
aauaucaaagagaugguuuccuu

SEQ ID NO: 4096145 - RNA, 16 nt, Variola virus
aauaucagaaaggaua

SEQ ID NO: 4096146 - RNA, 15 nt, Variola virus
aauaucauaaauaua

SEQ ID NO: 4096147 - RNA, 22 nt, Variola virus
aauaucauuauguauaaucauu

SEQ ID NO: 4096148 - RNA, 23 nt, Variola virus
aauauccacuauugcaacuauaa

SEQ ID NO: 4096149 - RNA, 15 nt, Variola virus
aauauccagaauguu

SEQ ID NO: 4096150 - RNA, 15 nt, Variola virus
aauaucuaaauaugc

SEQ ID NO: 4096151 - RNA, 21 nt, Variola virus
aauaucuauguuuaacuuuug

SEQ ID NO: 4096152 - RNA, 22 nt, Variola virus
aauaucuccacgauucaggaau

SEQ ID NO: 4096153 - RNA, 23 nt, Variola virus
aauaucuuuaaagagguaauggc

SEQ ID NO: 4096154 - RNA, 17 nt, Variola virus
aauaucuuuaauccaau

SEQ ID NO: 4096155 - RNA, 14 nt, Variola virus
aauaugauagaaau

SEQ ID NO: 4096156 - RNA, 17 nt, Variola virus
aauaugauuagaaguua

SEQ ID NO: 4096157 - RNA, 21 nt, Variola virus
aauaugcggaaccucgagaau

SEQ ID NO: 4096158 - RNA, 22 nt, Variola virus
aauaugcuaguuaauaguaaau

SEQ ID NO: 4096159 - RNA, 13 nt, Variola virus
aauauguagaaaa

SEQ ID NO: 4096160 - RNA, 16 nt, Variola virus
aauaugugcucugcag

SEQ ID NO: 4096161 - RNA, 13 nt, Variola virus
aauauuaaaacua

SEQ ID NO: 4096162 - RNA, 12 nt, Variola virus
aauauuaaacac

SEQ ID NO: 4096163 - RNA, 20 nt, Variola virus
aauauuaauaaaguauauau

SEQ ID NO: 4096164 - RNA, 16 nt, Variola virus
aauauuaauaacauua

SEQ ID NO: 4096165 - RNA, 19 nt, Variola virus
aauauuaauauuagaguua

SEQ ID NO: 4096166 - RNA, 11 nt, Variola virus
aauauucaugu

SEQ ID NO: 4096167 - RNA, 17 nt, Variola virus
aauauuguauuguuaua

SEQ ID NO: 4096168 - RNA, 16 nt, Variola virus
aauauugugaauggua

SEQ ID NO: 4096169 - RNA, 20 nt, Variola virus
aauauuguuaauuauuucua

SEQ ID NO: 4096170 - RNA, 13 nt, Variola virus
aauauuuaauccu

SEQ ID NO: 4096171 - RNA, 16 nt, Variola virus
aauauuucuauuucua

SEQ ID NO: 4096172 - RNA, 12 nt, Variola virus
aauauuuucuau

SEQ ID NO: 4096173 - RNA, 13 nt, Variola virus
aauauuuuucuau

SEQ ID NO: 4096174 - RNA, 16 nt, Variola virus
aauauuuuuuauaaaa

SEQ ID NO: 4096175 - RNA, 12 nt, Variola virus
aaucaaaacaaa

SEQ ID NO: 4096176 - RNA, 15 nt, Variola virus
aaucaaaacaaaauu

SEQ ID NO: 4096177 - RNA, 20 nt, Variola virus
aaucaauagaauaaaccauu

SEQ ID NO: 4096178 - RNA, 12 nt, Variola virus
aaucacaaacau

SEQ ID NO: 4096179 - RNA, 15 nt, Variola virus
aaucacuauagaaaa

SEQ ID NO: 4096180 - RNA, 18 nt, Variola virus
aaucagaagaugauucca

SEQ ID NO: 4096181 - RNA, 23 nt, Variola virus
aaucagacugggaggaucacugu

SEQ ID NO: 4096182 - RNA, 19 nt, Variola virus
aaucaguacuaauuuccaa

SEQ ID NO: 4096183 - RNA, 19 nt, Variola virus
aaucaguggaguaguaaau

SEQ ID NO: 4096184 - RNA, 18 nt, Variola virus
aaucauggggcaaacauu

SEQ ID NO: 4096185 - RNA, 17 nt, Variola virus
aaucauguaaauguuua

SEQ ID NO: 4096186 - RNA, 15 nt, Variola virus
aaucauuaaaugauu

SEQ ID NO: 4096187 - RNA, 23 nt, Variola virus
aaucauuaucgauacuaauuaca

SEQ ID NO: 4096188 - RNA, 15 nt, Variola virus
aauccaaaaaaugaa

SEQ ID NO: 4096189 - RNA, 15 nt, Variola virus
aauccaaacaucacu

SEQ ID NO: 4096190 - RNA, 13 nt, Variola virus
aauccaaauauga

SEQ ID NO: 4096191 - RNA, 15 nt, Variola virus
aauccacauaugaua

SEQ ID NO: 4096192 - RNA, 16 nt, Variola virus
aauccaugaauaaagu

SEQ ID NO: 4096193 - RNA, 17 nt, Variola virus
aaucccgucucagaaag

SEQ ID NO: 4096194 - RNA, 16 nt, Variola virus
aauccgguaaauggaa

SEQ ID NO: 4096195 - RNA, 13 nt, Variola virus
aauccugaauaua

SEQ ID NO: 4096196 - RNA, 23 nt, Variola virus
aauccuucuagaauuagaauuac

SEQ ID NO: 4096197 - RNA, 22 nt, Variola virus
aaucguaucggaguacggagau

SEQ ID NO: 4096198 - RNA, 16 nt, Variola virus
aaucuaaaagaauugg

SEQ ID NO: 4096199 - RNA, 15 nt, Variola virus
aaucuaauacaaaau

SEQ ID NO: 4096200 - RNA, 15 nt, Variola virus
aaucuacucacauau

SEQ ID NO: 4096201 - RNA, 18 nt, Variola virus
aaucuagaaauuacauaa

SEQ ID NO: 4096202 - RNA, 18 nt, Variola virus
aaucuagauuccaaucau

SEQ ID NO: 4096203 - RNA, 19 nt, Variola virus
aaucuagccauuauaaagu

SEQ ID NO: 4096204 - RNA, 20 nt, Variola virus
auauuguaccaaauuaauga

SEQ ID NO: 4096205 - RNA, 14 nt, Variola virus
auauuguagcauua

SEQ ID NO: 4096206 - RNA, 12 nt, Variola virus
auauugugaaug

SEQ ID NO: 4096207 - RNA, 14 nt, Variola virus
auauuguuaaauaa

SEQ ID NO: 4096208 - RNA, 23 nt, Variola virus
auauuuaagugauauaaaacauu

SEQ ID NO: 4096209 - RNA, 15 nt, Variola virus
auauuuacaguuacu

SEQ ID NO: 4096210 - RNA, 19 nt, Variola virus
auauuuagcaauuucugau

SEQ ID NO: 4096211 - RNA, 20 nt, Variola virus
auauuucuaaacccaaaaug

SEQ ID NO: 4096212 - RNA, 13 nt, Variola virus
auauuuguaacuu

SEQ ID NO: 4096213 - RNA, 16 nt, Variola virus
auauuuguuaaugccu

SEQ ID NO: 4096214 - RNA, 13 nt, Variola virus
auauuuuaauagu

SEQ ID NO: 4096215 - RNA, 20 nt, Variola virus
auauuuuccauuauuaauaa

SEQ ID NO: 4096216 - RNA, 22 nt, Variola virus
auauuuuuuaucuaaaaaacua

SEQ ID NO: 4096217 - RNA, 17 nt, Variola virus
auauuuuuuuuuaaaga

SEQ ID NO: 4096218 - RNA, 20 nt, Variola virus
aucaaaaaggagaauacuau

SEQ ID NO: 4096219 - RNA, 14 nt, Variola virus
aucaaaagaaaucu

SEQ ID NO: 4096220 - RNA, 17 nt, Variola virus
aucaaaauaguaaagua

SEQ ID NO: 4096221 - RNA, 12 nt, Variola virus
aucaaacaaacu

SEQ ID NO: 4096222 - RNA, 19 nt, Variola virus
aucaaagucacaaagcaag

SEQ ID NO: 4096223 - RNA, 17 nt, Variola virus
aucaaauagcucaauau

SEQ ID NO: 4096224 - RNA, 12 nt, Variola virus
aucaaauuauug

SEQ ID NO: 4096225 - RNA, 23 nt, Variola virus
aucaacagaggaacgccauauau

SEQ ID NO: 4096226 - RNA, 20 nt, Variola virus
aucaacagauagcuugaaug

SEQ ID NO: 4096227 - RNA, 15 nt, Variola virus
aucaaccacauaaua

SEQ ID NO: 4096228 - RNA, 14 nt, Variola virus
aucaacuacauaau

SEQ ID NO: 4096229 - RNA, 15 nt, Variola virus
aucaauaaaacagga

SEQ ID NO: 4096230 - RNA, 20 nt, Variola virus
aucaauaaaugugagaaguu

SEQ ID NO: 4096231 - RNA, 16 nt, Variola virus
aucaauaacuggcaca

SEQ ID NO: 4096232 - RNA, 20 nt, Variola virus
aucaaucuagcauuucuagc

SEQ ID NO: 4096233 - RNA, 21 nt, Variola virus
aucaauguccugcuauacuuc

SEQ ID NO: 4096234 - RNA, 21 nt, Variola virus
aucaauucuauccaagauacu

SEQ ID NO: 4096235 - RNA, 17 nt, Variola virus
aucaauuuaucauauau

SEQ ID NO: 4096236 - RNA, 14 nt, Variola virus
aucacaagaaguua

SEQ ID NO: 4096237 - RNA, 13 nt, Variola virus
aucacuaaaauaa

SEQ ID NO: 4096238 - RNA, 13 nt, Variola virus
aucacuaacaaua

SEQ ID NO: 4096239 - RNA, 19 nt, Variola virus
aucacuaucuucaucauau

SEQ ID NO: 4096240 - RNA, 17 nt, Variola virus
aacagacuguuuaugaa

SEQ ID NO: 4096241 - RNA, 19 nt, Variola virus
aacagagccaucuguaaaa

SEQ ID NO: 4096242 - RNA, 23 nt, Variola virus
aacagauauuacaaccaguguua

SEQ ID NO: 4096243 - RNA, 17 nt, Variola virus
aacagcauuucugucaa

SEQ ID NO: 4096244 - RNA, 15 nt, Variola virus
aacaggcuaaaaugu

SEQ ID NO: 4096245 - RNA, 19 nt, Variola virus
aacaggguuuguugauucg

SEQ ID NO: 4096246 - RNA, 13 nt, Variola virus
aacaguaaaagaa

SEQ ID NO: 4096247 - RNA, 13 nt, Variola virus
aacagucuguuca

SEQ ID NO: 4096248 - RNA, 12 nt, Variola virus
aacaguguguaa

SEQ ID NO: 4096249 - RNA, 13 nt, Variola virus
aacaguuacuauu

SEQ ID NO: 4096250 - RNA, 11 nt, Variola virus
aacaguuuauu

SEQ ID NO: 4096251 - RNA, 15 nt, Variola virus
aacaguuuuaccguu

SEQ ID NO: 4096252 - RNA, 19 nt, Variola virus
aacauaagcuuuucaaaau

SEQ ID NO: 4096253 - RNA, 20 nt, Variola virus
aacauaccauggaaaaauau

SEQ ID NO: 4096254 - RNA, 21 nt, Variola virus
aacauauagaacauaaccauu

SEQ ID NO: 4096255 - RNA, 13 nt, Variola virus
aacauaugauauu

SEQ ID NO: 4096256 - RNA, 18 nt, Variola virus
aacaucaacugaaaaagu

SEQ ID NO: 4096257 - RNA, 11 nt, Variola virus
aacauccacug

SEQ ID NO: 4096258 - RNA, 13 nt, Variola virus
aacauguuccauu

SEQ ID NO: 4096259 - RNA, 22 nt, Variola virus
aacauuaaaaugucuacagaua

SEQ ID NO: 4096260 - RNA, 14 nt, Variola virus
aacauuaacauuuu

SEQ ID NO: 4096261 - RNA, 13 nt, Variola virus
aacauuagaauua

SEQ ID NO: 4096262 - RNA, 20 nt, Variola virus
aacauuuuauauacuuuucu

SEQ ID NO: 4096263 - RNA, 13 nt, Variola virus
aaccaaauacaua

SEQ ID NO: 4096264 - RNA, 18 nt, Variola virus
aaccaaguacuacaaauu

SEQ ID NO: 4096265 - RNA, 14 nt, Variola virus
aaccaauacaaugu

SEQ ID NO: 4096266 - RNA, 14 nt, Variola virus
aaccagucaugaau

SEQ ID NO: 4096267 - RNA, 15 nt, Variola virus
aaccgaaucuuccca

SEQ ID NO: 4096268 - RNA, 16 nt, Variola virus
aaccgccaaugaugcg

SEQ ID NO: 4096269 - RNA, 23 nt, Variola virus
aaccuaacuaaaagacauaauau

SEQ ID NO: 4096270 - RNA, 19 nt, Variola virus
aaccuuuguuguacaaauu

SEQ ID NO: 4096271 - RNA, 22 nt, Variola virus
aacgaacgcggugugaauguac

SEQ ID NO: 4096272 - RNA, 19 nt, Variola virus
aacgaagaucuuuucucaa

SEQ ID NO: 4096273 - RNA, 15 nt, Variola virus
aacgacuuaauuaca

SEQ ID NO: 4096274 - RNA, 18 nt, Variola virus
aacgauaacgucauuaau

SEQ ID NO: 4096275 - RNA, 15 nt, Variola virus
aacgaugauauguau

SEQ ID NO: 4096276 - RNA, 20 nt, Variola virus
aacgucuccaauauaugaua

SEQ ID NO: 4096277 - RNA, 20 nt, Variola virus
aacgucuuccaauaaauguc

SEQ ID NO: 4096278 - RNA, 16 nt, Variola virus
aacguuacucaaacac

SEQ ID NO: 4096279 - RNA, 17 nt, Variola virus
aacguuaucauuuucua

SEQ ID NO: 4096280 - RNA, 12 nt, Variola virus
aacuaaaaaugu

SEQ ID NO: 4096281 - RNA, 17 nt, Variola virus
aacuaaacagucuauca

SEQ ID NO: 4096282 - RNA, 14 nt, Variola virus
aacuaacuauugaa

SEQ ID NO: 4096283 - RNA, 15 nt, Variola virus
aacuaauauuaggaa

SEQ ID NO: 4096284 - RNA, 14 nt, Variola virus
aacuacaaaaaugc

SEQ ID NO: 4096285 - RNA, 21 nt, Variola virus
aacuacaucgguaucuagauc

SEQ ID NO: 4096286 - RNA, 23 nt, Variola virus
aacuacuccauuuuauuguggaa

SEQ ID NO: 4096287 - RNA, 18 nt, Variola virus
aacuagaaucagaaucua

SEQ ID NO: 4096288 - RNA, 15 nt, Variola virus
aacuauagacaaaau

SEQ ID NO: 4096289 - RNA, 15 nt, Variola virus
aacuaucuuucaaga

SEQ ID NO: 4096290 - RNA, 21 nt, Variola virus
aacuauugaagccauugaaaa

SEQ ID NO: 4096291 - RNA, 22 nt, Variola virus
aacuauuuggauagacacauau

SEQ ID NO: 4096292 - RNA, 18 nt, Variola virus
aacucacauuucaaauau

SEQ ID NO: 4096293 - RNA, 15 nt, Variola virus
aacucaguuaacaua

SEQ ID NO: 4096294 - RNA, 19 nt, Variola virus
aacucauugcuuucuagaa

SEQ ID NO: 4096295 - RNA, 17 nt, Variola virus
aacuccacccauuacau

SEQ ID NO: 4096296 - RNA, 21 nt, Variola virus
aacuccacccauuacauauau

SEQ ID NO: 4096297 - RNA, 14 nt, Variola virus
aacuccuggauaac

SEQ ID NO: 4096298 - RNA, 21 nt, Variola virus
aacucuaucauguaguagaaa

SEQ ID NO: 4096299 - RNA, 20 nt, Variola virus
aacucucguauagucauaga

SEQ ID NO: 4096300 - RNA, 21 nt, Variola virus
aacucugauuauugucuaaua

SEQ ID NO: 4096301 - RNA, 18 nt, Variola virus
aacucuuucgaauacuua

SEQ ID NO: 4096302 - RNA, 15 nt, Variola virus
aacucuuugacauau

SEQ ID NO: 4096303 - RNA, 21 nt, Variola virus
aacucuuuuauagagaaaugu

SEQ ID NO: 4096304 - RNA, 14 nt, Variola virus
aacucuuuuccauu

SEQ ID NO: 4096305 - RNA, 21 nt, Variola virus
aacugcauccuucuaagauua

SEQ ID NO: 4096306 - RNA, 18 nt, Variola virus
aacugccggauaaaagug

SEQ ID NO: 4096307 - RNA, 13 nt, Variola virus
aacuguagaauuc

SEQ ID NO: 4096308 - RNA, 20 nt, Variola virus
aacuguagagggucaacaau

SEQ ID NO: 4096309 - RNA, 18 nt, Variola virus
aacuguggauacucugua

SEQ ID NO: 4096310 - RNA, 13 nt, Variola virus
aacuguucaaaau

SEQ ID NO: 4096311 - RNA, 12 nt, Variola virus
aacuuaaaauau

SEQ ID NO: 4096312 - RNA, 17 nt, Variola virus
aacuuaguguaaaacua

SEQ ID NO: 4096313 - RNA, 22 nt, Variola virus
aacuuauaauccuuuuuauuua

SEQ ID NO: 4096314 - RNA, 20 nt, Variola virus
aaugcuaguuuuagaauaac

SEQ ID NO: 4096315 - RNA, 16 nt, Variola virus
aaugcuuuagugaaau

SEQ ID NO: 4096316 - RNA, 21 nt, Variola virus
aauggauaagaauaaauuaua

SEQ ID NO: 4096317 - RNA, 15 nt, Variola virus
aauguaacguuuaua

SEQ ID NO: 4096318 - RNA, 23 nt, Variola virus
aauguaacguuuauauauucaau

SEQ ID NO: 4096319 - RNA, 19 nt, Variola virus
aauguaauggauagacaau

SEQ ID NO: 4096320 - RNA, 15 nt, Variola virus
aauguaguaaauaua

SEQ ID NO: 4096321 - RNA, 21 nt, Variola virus
aauguauccggccaauugaua

SEQ ID NO: 4096322 - RNA, 15 nt, Variola virus
aauguauuaagauua

SEQ ID NO: 4096323 - RNA, 23 nt, Variola virus
aauguccaaaucuaguuguggaa

SEQ ID NO: 4096324 - RNA, 15 nt, Variola virus
aaugucuaaauucca

SEQ ID NO: 4096325 - RNA, 22 nt, Variola virus
aaugucuauaguucucaucuuu

SEQ ID NO: 4096326 - RNA, 16 nt, Variola virus
aaugugaaugaaaaua

SEQ ID NO: 4096327 - RNA, 20 nt, Variola virus
aaugugauucucugaaaaug

SEQ ID NO: 4096328 - RNA, 15 nt, Variola virus
aaugugcuacuaaga

SEQ ID NO: 4096329 - RNA, 18 nt, Variola virus
aauguuacaacugacaau

SEQ ID NO: 4096330 - RNA, 15 nt, Variola virus
aauguuauuacuugu

SEQ ID NO: 4096331 - RNA, 16 nt, Variola virus
aauguugggauccaga

SEQ ID NO: 4096332 - RNA, 17 nt, Variola virus
aauguuugacugaauau

SEQ ID NO: 4096333 - RNA, 18 nt, Variola virus
aauguuugacugaauaua

SEQ ID NO: 4096334 - RNA, 22 nt, Variola virus
aauuaaaacguccucuauacau

SEQ ID NO: 4096335 - RNA, 12 nt, Variola virus
aauuaaauggau

SEQ ID NO: 4096336 - RNA, 19 nt, Variola virus
aauuaacgaugguuaaaau

SEQ ID NO: 4096337 - RNA, 15 nt, Variola virus
aauuaagaacuauag

SEQ ID NO: 4096338 - RNA, 21 nt, Variola virus
aauuaagcauauucuuaauau

SEQ ID NO: 4096339 - RNA, 18 nt, Variola virus
aauuaaguagaucaucug

SEQ ID NO: 4096340 - RNA, 18 nt, Variola virus
aauuaauaguuuugauau

SEQ ID NO: 4096341 - RNA, 16 nt, Variola virus
aauuaaucaaauggua

SEQ ID NO: 4096342 - RNA, 18 nt, Variola virus
aauuaaucuaguagaaaa

SEQ ID NO: 4096343 - RNA, 11 nt, Variola virus
aauuaaugaaa

SEQ ID NO: 4096344 - RNA, 14 nt, Variola virus
aauuacagaaguac

SEQ ID NO: 4096345 - RNA, 19 nt, Variola virus
aauuagaauuacaaaagaa

SEQ ID NO: 4096346 - RNA, 18 nt, Variola virus
aauuaguagaguuuuaua

SEQ ID NO: 4096347 - RNA, 15 nt, Variola virus
aauuaguuuuaccuu

SEQ ID NO: 4096348 - RNA, 16 nt, Variola virus
aauuauaagaaauaua

SEQ ID NO: 4096349 - RNA, 22 nt, Variola virus
aauuauacuuugguaaauguua

SEQ ID NO: 4096350 - RNA, 12 nt, Variola virus
aauuaucaaaug

SEQ ID NO: 4096351 - RNA, 20 nt, Variola virus
aauuaucaacguuuuacugg

SEQ ID NO: 4096352 - RNA, 23 nt, Variola virus
aauuaucgacauagguauagaau

SEQ ID NO: 4096353 - RNA, 22 nt, Variola virus
aauuaugaaaaaguaaaugaug

SEQ ID NO: 4096354 - RNA, 19 nt, Variola virus
aauuauuagcaaaaauaua

SEQ ID NO: 4096355 - RNA, 16 nt, Variola virus
aauuauuauuaaauau

SEQ ID NO: 4096356 - RNA, 13 nt, Variola virus
aauuauuuaccau

SEQ ID NO: 4096357 - RNA, 13 nt, Variola virus
aauucaaauagau

SEQ ID NO: 4096358 - RNA, 19 nt, Variola virus
aauucacaccuagagacaa

SEQ ID NO: 4096359 - RNA, 14 nt, Variola virus
aauucauuagcaaa

SEQ ID NO: 4096360 - RNA, 14 nt, Variola virus
aauuccauuauucu

SEQ ID NO: 4096361 - RNA, 15 nt, Variola virus
aauucccaaucuugu

SEQ ID NO: 4096362 - RNA, 14 nt, Variola virus
aauucgaaggaagu

SEQ ID NO: 4096363 - RNA, 23 nt, Variola virus
aauucuauaauaaacuuuaauga

SEQ ID NO: 4096364 - RNA, 20 nt, Variola virus
aauucuccagacaauacucu

SEQ ID NO: 4096365 - RNA, 19 nt, Variola virus
aauucuuggauauaugaua

SEQ ID NO: 4096366 - RNA, 18 nt, Variola virus
aauucuuuuaugaauauc

SEQ ID NO: 4096367 - RNA, 22 nt, Variola virus
aauucuuuugauuugcuuugaa

SEQ ID NO: 4096368 - RNA, 16 nt, Variola virus
aauugauuaauguuuu

SEQ ID NO: 4096369 - RNA, 15 nt, Variola virus
aauugcgaauguuuu

SEQ ID NO: 4096370 - RNA, 19 nt, Variola virus
aauugcgauuauaagauua

SEQ ID NO: 4096371 - RNA, 22 nt, Variola virus
aauuggagaaucguauaccauu

SEQ ID NO: 4096372 - RNA, 21 nt, Variola virus
aauugucuagauaaaauacug

SEQ ID NO: 4096373 - RNA, 17 nt, Variola virus
aauuguuaaauuaauaa

SEQ ID NO: 4096374 - RNA, 15 nt, Variola virus
aauuguuugagauau

SEQ ID NO: 4096375 - RNA, 13 nt, Variola virus
aauuuaaauacuu

SEQ ID NO: 4096376 - RNA, 15 nt, Variola virus
aauuuagaaaugauu

SEQ ID NO: 4096377 - RNA, 23 nt, Variola virus
aauuuaguuacugcuauacagau

SEQ ID NO: 4096378 - RNA, 21 nt, Variola virus
aauuuauagacgacucauuua

SEQ ID NO: 4096379 - RNA, 18 nt, Variola virus
aauuuauuaauacaggau

SEQ ID NO: 4096380 - RNA, 16 nt, Variola virus
aauuuauuauuuauga

SEQ ID NO: 4096381 - RNA, 15 nt, Variola virus
aauuuauuuaucaau

SEQ ID NO: 4096382 - RNA, 14 nt, Variola virus
aauuuauuucuaau

SEQ ID NO: 4096383 - RNA, 22 nt, Variola virus
aauuuauuucuucucuucguau

SEQ ID NO: 4096384 - RNA, 20 nt, Variola virus
aauuucuuagucauagacaa

SEQ ID NO: 4096385 - RNA, 19 nt, Variola virus
aauuugaccugauuacauu

SEQ ID NO: 4096386 - RNA, 21 nt, Variola virus
aauuugguaauguuucuuaug

SEQ ID NO: 4096387 - RNA, 17 nt, Variola virus
aauuuggucauucuuaa

SEQ ID NO: 4096388 - RNA, 11 nt, Variola virus
aauuuguacau

SEQ ID NO: 4096389 - RNA, 13 nt, Variola virus
aauuuuaaaugau

SEQ ID NO: 4096390 - RNA, 13 nt, Variola virus
aauuuuaagaaau

SEQ ID NO: 4096391 - RNA, 21 nt, Variola virus
aauuuuaagauuuuaaaugua

SEQ ID NO: 4096392 - RNA, 15 nt, Variola virus
aauuuuaccagaaua

SEQ ID NO: 4096393 - RNA, 14 nt, Variola virus
aauuuuagugaaau

SEQ ID NO: 4096394 - RNA, 20 nt, Variola virus
aauuuuuaacgauuuacugu

SEQ ID NO: 4096395 - RNA, 16 nt, Variola virus
aauuuuuuaaauccug

SEQ ID NO: 4096396 - RNA, 17 nt, Variola virus
acaaaaaagcucaauaa

SEQ ID NO: 4096397 - RNA, 21 nt, Variola virus
acaaaaauugugacuuuguua

SEQ ID NO: 4096398 - RNA, 21 nt, Variola virus
acaaaacaauuagagcagcag

SEQ ID NO: 4096399 - RNA, 22 nt, Variola virus
acaaaagguauuacaagaauau

SEQ ID NO: 4096400 - RNA, 23 nt, Variola virus
acaaaaguaguauagcaauacaa

SEQ ID NO: 4096401 - RNA, 16 nt, Variola virus
acaaaauacuauauau

SEQ ID NO: 4096402 - RNA, 19 nt, Variola virus
acaaaaucaacuacauaau

SEQ ID NO: 4096403 - RNA, 20 nt, Variola virus
acaaaauccaucaaaaaugu

SEQ ID NO: 4096404 - RNA, 19 nt, Variola virus
acaaacaggauaucuauga

SEQ ID NO: 4096405 - RNA, 15 nt, Variola virus
acaaacauacucuaa

SEQ ID NO: 4096406 - RNA, 13 nt, Variola virus
acaaaccaaauau

SEQ ID NO: 4096407 - RNA, 15 nt, Variola virus
acaaaccuaagacaa

SEQ ID NO: 4096408 - RNA, 15 nt, Variola virus
acaaacguaaugaca

SEQ ID NO: 4096409 - RNA, 17 nt, Variola virus
acaaagauggcugaaau

SEQ ID NO: 4096410 - RNA, 14 nt, Variola virus
acaaaggagaugau

SEQ ID NO: 4096411 - RNA, 15 nt, Variola virus
acaaaguacucaaua

SEQ ID NO: 4096412 - RNA, 21 nt, Variola virus
acaaauaauuacaaaaccgau

SEQ ID NO: 4096413 - RNA, 13 nt, Variola virus
acaaauacugaca

SEQ ID NO: 4096414 - RNA, 17 nt, Variola virus
acaaauaguaaaugaga

SEQ ID NO: 4096415 - RNA, 18 nt, Variola virus
acaaaucaaaaguauuaa

SEQ ID NO: 4096416 - RNA, 23 nt, Variola virus
acaaaucuauuuggauuuuuugc

SEQ ID NO: 4096417 - RNA, 16 nt, Variola virus
acaaauggucaaugau

SEQ ID NO: 4096418 - RNA, 15 nt, Variola virus
acaaauuacaauaau

SEQ ID NO: 4096419 - RNA, 18 nt, Variola virus
acaaauuuauuuauuaac

SEQ ID NO: 4096420 - RNA, 22 nt, Variola virus
acaacaaggcuuuaauaucuaa

SEQ ID NO: 4096421 - RNA, 13 nt, Variola virus
acaacauauaauu

SEQ ID NO: 4096422 - RNA, 14 nt, Variola virus
acaaccaucuuuga

SEQ ID NO: 4096423 - RNA, 22 nt, Variola virus
acaacgucaucgcuucaucuau

SEQ ID NO: 4096424 - RNA, 16 nt, Variola virus
acaacgucucauauaa

SEQ ID NO: 4096425 - RNA, 21 nt, Variola virus
acaacuaauuaagcauauucu

SEQ ID NO: 4096426 - RNA, 17 nt, Variola virus
acaacugucaaugaauu

SEQ ID NO: 4096427 - RNA, 19 nt, Variola virus
acaagacuacaaagaaugu

SEQ ID NO: 4096428 - RNA, 16 nt, Variola virus
acaagaugaaaaauuu

SEQ ID NO: 4096429 - RNA, 16 nt, Variola virus
acaagauuccuuuucu

SEQ ID NO: 4096430 - RNA, 14 nt, Variola virus
acaagucuaauaau

SEQ ID NO: 4096431 - RNA, 22 nt, Variola virus
acaagugaaauguugucauuau

SEQ ID NO: 4096432 - RNA, 21 nt, Variola virus
acaaguuuaacaauaaaauua

SEQ ID NO: 4096433 - RNA, 15 nt, Variola virus
acaauaacuacauau

SEQ ID NO: 4096434 - RNA, 15 nt, Variola virus
acaauaauuauaauu

SEQ ID NO: 4096435 - RNA, 18 nt, Variola virus
acaauacgauaaacauug

SEQ ID NO: 4096436 - RNA, 14 nt, Variola virus
acaauacuaccaac

SEQ ID NO: 4096437 - RNA, 18 nt, Variola virus
acaauagucuguuaauaa

SEQ ID NO: 4096438 - RNA, 22 nt, Variola virus
acaauagugucuacuuaaaugu

SEQ ID NO: 4096439 - RNA, 20 nt, Variola virus
acaauaguucagauaaugua

SEQ ID NO: 4096440 - RNA, 20 nt, West Nile virus
aagggaaggacuagagguua

SEQ ID NO: 4096441 - RNA, 13 nt, West Nile virus
acaaccagccaca

SEQ ID NO: 4096442 - RNA, 13 nt, West Nile virus
acauagguggcug

SEQ ID NO: 4096443 - RNA, 13 nt, West Nile virus
accccgugccaaa

SEQ ID NO: 4096444 - RNA, 14 nt, West Nile virus
agacggugcugccu

SEQ ID NO: 4096445 - RNA, 22 nt, West Nile virus
agcuguaagccaagggaaggac

SEQ ID NO: 4096446 - RNA, 14 nt, West Nile virus
agggagaagggacu

SEQ ID NO: 4096447 - RNA, 22 nt, West Nile virus
agucaggccagauuaaugcugc

SEQ ID NO: 4096448 - RNA, 20 nt, West Nile virus
agucugcgauagugccccag

SEQ ID NO: 4096449 - RNA, 15 nt, West Nile virus
agugccccaggugga

SEQ ID NO: 4096450 - RNA, 22 nt, West Nile virus
agugccccagguggacuggguu

SEQ ID NO: 4096451 - RNA, 17 nt, West Nile virus
aguguaaauaggauuua

SEQ ID NO: 4096452 - RNA, 16 nt, West Nile virus
auagugccccaggugg

SEQ ID NO: 4096453 - RNA, 21 nt, West Nile virus
augugccacucugcggagagu

SEQ ID NO: 4096454 - RNA, 15 nt, West Nile virus
auugacaccugggau

SEQ ID NO: 4096455 - RNA, 13 nt, West Nile virus
caaccccaggagg

SEQ ID NO: 4096456 - RNA, 15 nt, West Nile virus
cacacggcacagugc

SEQ ID NO: 4096457 - RNA, 16 nt, West Nile virus
cacuuuaaugugccac

SEQ ID NO: 4096458 - RNA, 16 nt, West Nile virus
cagauuaaugcugcca

SEQ ID NO: 4096459 - RNA, 14 nt, West Nile virus
cauagguggcuggu

SEQ ID NO: 4096460 - RNA, 17 nt, West Nile virus
cauagguggcugguggu

SEQ ID NO: 4096461 - RNA, 20 nt, West Nile virus
ccacacuuuaaugugccacu

SEQ ID NO: 4096462 - RNA, 16 nt, West Nile virus
ccacguaagcccucag

SEQ ID NO: 4096463 - RNA, 19 nt, West Nile virus
ccacgugcuuuagccucaa

SEQ ID NO: 4096464 - RNA, 14 nt, West Nile virus
ccacucugcggaga

SEQ ID NO: 4096465 - RNA, 19 nt, West Nile virus
ccagauuaaugcugccacc

SEQ ID NO: 4096466 - RNA, 16 nt, West Nile virus
cggcucaaccccagga

SEQ ID NO: 4096467 - RNA, 13 nt, West Nile virus
cuagaacacagga

SEQ ID NO: 4096468 - RNA, 22 nt, West Nile virus
cucaaagcccagugucagacca

SEQ ID NO: 4096469 - RNA, 12 nt, West Nile virus
cucaaccccagg

SEQ ID NO: 4096470 - RNA, 22 nt, West Nile virus
cuguaagccaagggaaggacua

SEQ ID NO: 4096471 - RNA, 23 nt, West Nile virus
cuuggcugaagcuguaagccaag

SEQ ID NO: 4096472 - RNA, 14 nt, West Nile virus
gauuaaugcugcca

SEQ ID NO: 4096473 - RNA, 20 nt, West Nile virus
gccagauuaaugcugccacc

SEQ ID NO: 4096474 - RNA, 21 nt, West Nile virus
gccagauuaaugcugccaccg

SEQ ID NO: 4096475 - RNA, 22 nt, West Nile virus
gcggcucaaccccaggaggacu

SEQ ID NO: 4096476 - RNA, 13 nt, West Nile virus
gcugccaccggaa

SEQ ID NO: 4096477 - RNA, 16 nt, West Nile virus
ggcccaacuuggcuga

SEQ ID NO: 4096478 - RNA, 20 nt, West Nile virus
ggcugguggugcuagaacac

SEQ ID NO: 4096479 - RNA, 18 nt, West Nile virus
guaagccaagggaaggac

SEQ ID NO: 4096480 - RNA, 20 nt, West Nile virus
gucugcgauagugccccagg

SEQ ID NO: 4096481 - RNA, 15 nt, West Nile virus
guguuaaccagggag

SEQ ID NO: 4096482 - RNA, 14 nt, West Nile virus
uaagccaagggaag

SEQ ID NO: 4096483 - RNA, 16 nt, West Nile virus
uagagguuagaggaga

SEQ ID NO: 4096484 - RNA, 19 nt, West Nile virus
ugauccacguaagcccuca

SEQ ID NO: 4096485 - RNA, 22 nt, West Nile virus
ugcggcucaaccccaggaggac

SEQ ID NO: 4096486 - RNA, 11 nt, West Nile virus
accaaagcugc

SEQ ID NO: 4096487 - RNA, 23 nt, West Nile virus
acggcccaacuuggcugaagcug

SEQ ID NO: 4096488 - RNA, 18 nt, West Nile virus
acuagagguuagaggaga

SEQ ID NO: 4096489 - RNA, 19 nt, West Nile virus
acuuggcugaagcuguaag

SEQ ID NO: 4096490 - RNA, 21 nt, West Nile virus
agaaccgucucggaaggagga

SEQ ID NO: 4096491 - RNA, 21 nt, West Nile virus
agaccacacuuuaaugugcca

SEQ ID NO: 4096492 - RNA, 16 nt, West Nile virus
agccucaaagcccagu

SEQ ID NO: 4096493 - RNA, 18 nt, West Nile virus
aggagaccccgugccaaa

SEQ ID NO: 4096494 - RNA, 18 nt, West Nile virus
aggccagauuaaugcugc

SEQ ID NO: 4096495 - RNA, 15 nt, West Nile virus
agggacuagagguua

SEQ ID NO: 4096496 - RNA, 18 nt, West Nile virus
agugccccagguggacug

SEQ ID NO: 4096497 - RNA, 17 nt, West Nile virus
augcugccaccggaagu

SEQ ID NO: 4096498 - RNA, 17 nt, West Nile virus
cacaaccagccacacgg

SEQ ID NO: 4096499 - RNA, 19 nt, West Nile virus
cacggcccaacuuggcuga

SEQ ID NO: 4096500 - RNA, 20 nt, West Nile virus
cacucugcggagagugcagu

SEQ ID NO: 4096501 - RNA, 14 nt, West Nile virus
caggaggacugggu

SEQ ID NO: 4096502 - RNA, 18 nt, West Nile virus
ccaagggaaggacuagag

SEQ ID NO: 4096503 - RNA, 21 nt, West Nile virus
ccagauuaaugcugccaccgg

SEQ ID NO: 4096504 - RNA, 15 nt, West Nile virus
ccagugucagaccac

SEQ ID NO: 4096505 - RNA, 13 nt, West Nile virus
cccagguggacug

SEQ ID NO: 4096506 - RNA, 15 nt, West Nile virus
ccuggcuaugguguu

SEQ ID NO: 4096507 - RNA, 19 nt, West Nile virus
cgacauagguggcuggugg

SEQ ID NO: 4096508 - RNA, 18 nt, West Nile virus
cgauagugccccaggugg

SEQ ID NO: 4096509 - RNA, 17 nt, West Nile virus
cggaaggaggaccccac

SEQ ID NO: 4096510 - RNA, 20 nt, West Nile virus
cggcucaaccccaggaggac

SEQ ID NO: 4096511 - RNA, 15 nt, West Nile virus
cgugcuuuagccuca

SEQ ID NO: 4096512 - RNA, 18 nt, West Nile virus
cuagagguuagaggagac

SEQ ID NO: 4096513 - RNA, 21 nt, West Nile virus
cuagagguuagaggagacccc

SEQ ID NO: 4096514 - RNA, 15 nt, West Nile virus
cucaaccccaggagg

SEQ ID NO: 4096515 - RNA, 16 nt, West Nile virus
cugaagcuguaagcca

SEQ ID NO: 4096516 - RNA, 21 nt, West Nile virus
cugcacaaccagccacacggc

SEQ ID NO: 4096517 - RNA, 15 nt, West Nile virus
cugcgauagugcccc

SEQ ID NO: 4096518 - RNA, 13 nt, West Nile virus
gacggugcugccu

SEQ ID NO: 4096519 - RNA, 19 nt, West Nile virus
gagguuagaggagaccccg

SEQ ID NO: 4096520 - RNA, 19 nt, West Nile virus
gcauauugacaccugggau

SEQ ID NO: 4096521 - RNA, 22 nt, West Nile virus
gcccaacuuggcugaagcugua

SEQ ID NO: 4096522 - RNA, 21 nt, West Nile virus
gccugcggcucaaccccagga

SEQ ID NO: 4096523 - RNA, 14 nt, West Nile virus
gcgauagugcccca

SEQ ID NO: 4096524 - RNA, 14 nt, West Nile virus
gcuguaagccaagg

SEQ ID NO: 4096525 - RNA, 22 nt, West Nile virus
ggacuagagguuagaggagacc

SEQ ID NO: 4096526 - RNA, 13 nt, West Nile virus
gucucggaaggag

SEQ ID NO: 4096527 - RNA, 15 nt, West Nile virus
ucaaccccaggagga

SEQ ID NO: 4096528 - RNA, 13 nt, West Nile virus
ucgccccacgcgg

SEQ ID NO: 4096529 - RNA, 15 nt, West Nile virus
ucucggaaggaggac

SEQ ID NO: 4096530 - RNA, 15 nt, West Nile virus
ugaccaaagcugcga

SEQ ID NO: 4096531 - RNA, 16 nt, West Nile virus
ugauccacguaagccc

SEQ ID NO: 4096532 - RNA, 20 nt, West Nile virus
ugcucugcacaaccagccac

SEQ ID NO: 4096533 - RNA, 23 nt, West Nile virus
uggcuaugguguuaaccagggag

SEQ ID NO: 4096534 - RNA, 19 nt, West Nile virus
uuaaccagggagaagggac

SEQ ID NO: 4096535 - RNA, 17 nt, West Nile virus
uuagccucaaagcccag

SEQ ID NO: 4096536 - RNA, 20 nt, West Nile virus
uugaguagacggugcugccu

SEQ ID NO: 4096537 - RNA, 17 nt, West Nile virus
aaccagggagaagggac

SEQ ID NO: 4096538 - RNA, 17 nt, West Nile virus
aaccccaggaggacugg

SEQ ID NO: 4096539 - RNA, 15 nt, West Nile virus
aaggacuagagguua

SEQ ID NO: 4096540 - RNA, 13 nt, West Nile virus
aagggaaggacua

SEQ ID NO: 4096541 - RNA, 16 nt, West Nile virus
aagggacuagagguua

SEQ ID NO: 4096542 - RNA, 16 nt, West Nile virus
acacuuuaaugugcca

SEQ ID NO: 4096543 - RNA, 18 nt, West Nile virus
accccaggaggacugggu

SEQ ID NO: 4096544 - RNA, 22 nt, West Nile virus
accccgcguaaaaaagugcacg

SEQ ID NO: 4096545 - RNA, 17 nt, West Nile virus
acugggugaccaaagcu

SEQ ID NO: 4096546 - RNA, 13 nt, West Nile virus
agaccccgugcca

SEQ ID NO: 4096547 - RNA, 13 nt, West Nile virus
agagguuagagga

SEQ ID NO: 4096548 - RNA, 13 nt, West Nile virus
agguggacugggu

SEQ ID NO: 4096549 - RNA, 21 nt, West Nile virus
auuaaugcugccaccggaagu

SEQ ID NO: 4096550 - RNA, 18 nt, West Nile virus
caagggaaggacuagagg

SEQ ID NO: 4096551 - RNA, 21 nt, West Nile virus
cacggcccaacuuggcugaag

SEQ ID NO: 4096552 - RNA, 22 nt, West Nile virus
cagcauauugacaccugggaua

SEQ ID NO: 4096553 - RNA, 15 nt, West Nile virus
caggaggacugggug

SEQ ID NO: 4096554 - RNA, 15 nt, West Nile virus
cagguggacuggguu

SEQ ID NO: 4096555 - RNA, 22 nt, West Nile virus
cagucugcgauagugccccagg

SEQ ID NO: 4096556 - RNA, 21 nt, West Nile virus
ccagccacacggcacagugcg

SEQ ID NO: 4096557 - RNA, 13 nt, West Nile virus
ccagguggacugg

SEQ ID NO: 4096558 - RNA, 20 nt, West Nile virus
ccccgcguaaaaaagugcac

SEQ ID NO: 4096559 - RNA, 16 nt, West Nile virus
ccucaaagcccagugu

SEQ ID NO: 4096560 - RNA, 17 nt, West Nile virus
cgucucggaaggaggac

SEQ ID NO: 4096561 - RNA, 15 nt, West Nile virus
cucaaagcccagugu

SEQ ID NO: 4096562 - RNA, 19 nt, West Nile virus
cugaagcuguaagccaagg

SEQ ID NO: 4096563 - RNA, 23 nt, West Nile virus
cugccugcggcucaaccccagga

SEQ ID NO: 4096564 - RNA, 18 nt, West Nile virus
cugcgauagugccccagg

SEQ ID NO: 4096565 - RNA, 19 nt, West Nile virus
cugcgauagugccccaggu

SEQ ID NO: 4096566 - RNA, 16 nt, West Nile virus
cuguaagccaagggaa

SEQ ID NO: 4096567 - RNA, 23 nt, West Nile virus
gaccccgcguaaaaaagugcacg

SEQ ID NO: 4096568 - RNA, 22 nt, West Nile virus
gccauaacccuggcuauggugu

SEQ ID NO: 4096569 - RNA, 17 nt, West Nile virus
gccccacgcggccauaa

SEQ ID NO: 4096570 - RNA, 19 nt, West Nile virus
gccgacauagguggcuggu

SEQ ID NO: 4096571 - RNA, 13 nt, West Nile virus
gcggcucaacccc

SEQ ID NO: 4096572 - RNA, 19 nt, West Nile virus
gcuaugguguuaaccaggg

SEQ ID NO: 4096573 - RNA, 22 nt, West Nile virus
gcuguaagccaagggaaggacu

SEQ ID NO: 4096574 - RNA, 23 nt, West Nile virus
ggggaucuucugcucugcacaac

SEQ ID NO: 4096575 - RNA, 21 nt, West Nile virus
gucugcgauagugccccaggu

SEQ ID NO: 4096576 - RNA, 22 nt, West Nile virus
gugcagucugcgauagugcccc

SEQ ID NO: 4096577 - RNA, 17 nt, West Nile virus
uaaccagggagaaggga

SEQ ID NO: 4096578 - RNA, 13 nt, West Nile virus
uagagguuagagg

SEQ ID NO: 4096579 - RNA, 18 nt, West Nile virus
ucugcgauagugccccag

SEQ ID NO: 4096580 - RNA, 12 nt, West Nile virus
ugcagucugcga

SEQ ID NO: 4096581 - RNA, 21 nt, West Nile virus
ugcggcucaaccccaggagga

SEQ ID NO: 4096582 - RNA, 15 nt, West Nile virus
uguaagccaagggaa

SEQ ID NO: 4096583 - RNA, 21 nt, West Nile virus
uugagaauggaagucaggcca

SEQ ID NO: 4096584 - RNA, 13 nt, West Nile virus
aaccccaggagga

SEQ ID NO: 4096585 - RNA, 15 nt, West Nile virus
agaagggacuagagg

SEQ ID NO: 4096586 - RNA, 23 nt, West Nile virus
agaccacacuuuaaugugccacu

SEQ ID NO: 4096587 - RNA, 19 nt, West Nile virus
agaggagaccccgcguaaa

SEQ ID NO: 4096588 - RNA, 16 nt, West Nile virus
agagguuagaggagac

SEQ ID NO: 4096589 - RNA, 22 nt, West Nile virus
aggacuagagguuagaggagac

SEQ ID NO: 4096590 - RNA, 20 nt, West Nile virus
aggccagauuaaugcugcca

SEQ ID NO: 4096591 - RNA, 16 nt, West Nile virus
agggaaggacuagagg

SEQ ID NO: 4096592 - RNA, 23 nt, West Nile virus
agggacuagagguuagaggagac

SEQ ID NO: 4096593 - RNA, 19 nt, West Nile virus
agucugcgauagugcccca

SEQ ID NO: 4096594 - RNA, 20 nt, West Nile virus
aguugaguagacggugcugc

SEQ ID NO: 4096595 - RNA, 15 nt, West Nile virus
auuaaugcugccacc

SEQ ID NO: 4096596 - RNA, 19 nt, West Nile virus
auuuauugagaauggaagu

SEQ ID NO: 4096597 - RNA, 23 nt, West Nile virus
caaagcccagugucagaccacac

SEQ ID NO: 4096598 - RNA, 13 nt, West Nile virus
caaccagccacac

SEQ ID NO: 4096599 - RNA, 17 nt, West Nile virus
cacacggcacagugcgc

SEQ ID NO: 4096600 - RNA, 19 nt, West Nile virus
cacacuuuaaugugccacu

SEQ ID NO: 4096601 - RNA, 15 nt, West Nile virus
cacguaagcccucag

SEQ ID NO: 4096602 - RNA, 18 nt, West Nile virus
cagcauauugacaccugg

SEQ ID NO: 4096603 - RNA, 19 nt, West Nile virus
cagccacacggcacagugc

SEQ ID NO: 4096604 - RNA, 14 nt, West Nile virus
cagguggacugggu

SEQ ID NO: 4096605 - RNA, 23 nt, West Nile virus
cagucugcgauagugccccaggu

SEQ ID NO: 4096606 - RNA, 15 nt, West Nile virus
cauauugacaccugg

SEQ ID NO: 4096607 - RNA, 16 nt, West Nile virus
ccacacggcacagugc

SEQ ID NO: 4096608 - RNA, 20 nt, West Nile virus
ccacgcggccauaacccugg

SEQ ID NO: 4096609 - RNA, 13 nt, West Nile virus
ccaggaggacugg

SEQ ID NO: 4096610 - RNA, 20 nt, West Nile virus
ccagggagaagggacuagag

SEQ ID NO: 4096611 - RNA, 10 nt, West Nile virus
ccgugccaaa

SEQ ID NO: 4096612 - RNA, 20 nt, West Nile virus
ccugcggcucaaccccagga

SEQ ID NO: 4096613 - RNA, 16 nt, West Nile virus
cgauagugccccaggu

SEQ ID NO: 4096614 - RNA, 20 nt, West Nile virus
cgcguaaaaaagugcacggc

SEQ ID NO: 4096615 - RNA, 15 nt, West Nile virus
cggcucaaccccagg

SEQ ID NO: 4096616 - RNA, 11 nt, West Nile virus
cggugcugccu

SEQ ID NO: 4096617 - RNA, 17 nt, West Nile virus
cuagagguuagaggaga

SEQ ID NO: 4096618 - RNA, 16 nt, West Nile virus
cucaaccccaggagga

SEQ ID NO: 4096619 - RNA, 13 nt, West Nile virus
cucggaaggagga

SEQ ID NO: 4096620 - RNA, 18 nt, West Nile virus
cugcggcucaaccccagg

SEQ ID NO: 4096621 - RNA, 15 nt, West Nile virus
cugggauagacuagg

SEQ ID NO: 4096622 - RNA, 22 nt, West Nile virus
gacauagguggcugguggugcu

SEQ ID NO: 4096623 - RNA, 19 nt, West Nile virus
gagaagggacuagagguua

SEQ ID NO: 4096624 - RNA, 16 nt, West Nile virus
gauagugccccaggug

SEQ ID NO: 4096625 - RNA, 19 nt, West Nile virus
gauccacguaagcccucag

SEQ ID NO: 4096626 - RNA, 14 nt, West Nile virus
gcggccauaacccu

SEQ ID NO: 4096627 - RNA, 20 nt, West Nile virus
ggacuagagguuagaggaga

SEQ ID NO: 4096628 - RNA, 14 nt, West Nile virus
ggcucaaccccagg

SEQ ID NO: 4096629 - RNA, 17 nt, West Nile virus
ggugcuagaacacagga

SEQ ID NO: 4096630 - RNA, 21 nt, West Nile virus
gugaccaaagcugcgagguga

SEQ ID NO: 4096631 - RNA, 14 nt, West Nile virus
gugucagaccacac

SEQ ID NO: 4096632 - RNA, 14 nt, West Nile virus
guguuaaccaggga

SEQ ID NO: 4096633 - RNA, 22 nt, West Nile virus
ucaggccagauuaaugcugcca

SEQ ID NO: 4096634 - RNA, 14 nt, West Nile virus
ucucggaaggagga

SEQ ID NO: 4096635 - RNA, 21 nt, West Nile virus
ugccugcggcucaaccccagg

SEQ ID NO: 4096636 - RNA, 14 nt, West Nile virus
ugcggcucaacccc

SEQ ID NO: 4096637 - RNA, 14 nt, West Nile virus
ugcuagaacacagg

SEQ ID NO: 4096638 - RNA, 20 nt, West Nile virus
uggcuaugguguuaaccagg

SEQ ID NO: 4096639 - RNA, 23 nt, Western equine encephalomyelitis virus
aaaacucgauguauuuccgagga

SEQ ID NO: 4096640 - RNA, 17 nt, Western equine encephalomyelitis virus
aaaguucacacagcugc

SEQ ID NO: 4096641 - RNA, 15 nt, Western equine encephalomyelitis virus
aaccuggagaucacg

SEQ ID NO: 4096642 - RNA, 14 nt, Western equine encephalomyelitis virus
aagagacugccuga

SEQ ID NO: 4096643 - RNA, 12 nt, Western equine encephalomyelitis virus
aagcacagugca

SEQ ID NO: 4096644 - RNA, 13 nt, Western equine encephalomyelitis virus
aaguccaccugca

SEQ ID NO: 4096645 - RNA, 22 nt, Western equine encephalomyelitis virus
aaguguggcgacuacagcacag

SEQ ID NO: 4096646 - RNA, 17 nt, Western equine encephalomyelitis virus
acacgcugcuggagaac

SEQ ID NO: 4096647 - RNA, 22 nt, Western equine encephalomyelitis virus
acacugaccagucccuaccugg

SEQ ID NO: 4096648 - RNA, 18 nt, Western equine encephalomyelitis virus
acagucauuccuucacca

SEQ ID NO: 4096649 - RNA, 15 nt, Western equine encephalomyelitis virus
acauuuuagcacauc

SEQ ID NO: 4096650 - RNA, 20 nt, Western equine encephalomyelitis virus
accaaccguuucucugggca

SEQ ID NO: 4096651 - RNA, 14 nt, Western equine encephalomyelitis virus
accacucagugcaa

SEQ ID NO: 4096652 - RNA, 21 nt, Western equine encephalomyelitis virus
accaugaaccagucagagucu

SEQ ID NO: 4096653 - RNA, 24 nt, Western equine encephalomyelitis virus
acgaucacuugaaggagacgucug

SEQ ID NO: 4096654 - RNA, 20 nt, Western equine encephalomyelitis virus
acuaaagcaaaacagugcau

SEQ ID NO: 4096655 - RNA, 16 nt, Western equine encephalomyelitis virus
acuacauauuaacaac

SEQ ID NO: 4096656 - RNA, 11 nt, Western equine encephalomyelitis virus
acucagugcaa

SEQ ID NO: 4096657 - RNA, 20 nt, Western equine encephalomyelitis virus
acugagcgcggacacugaca

SEQ ID NO: 4096658 - RNA, 15 nt, Western equine encephalomyelitis virus
acuuccgaggaagcg

SEQ ID NO: 4096659 - RNA, 16 nt, Western equine encephalomyelitis virus
agacaguauggagaaa

SEQ ID NO: 4096660 - RNA, 21 nt, Western equine encephalomyelitis virus
agccuaaaccagggaaacgac

SEQ ID NO: 4096661 - RNA, 22 nt, Western equine encephalomyelitis virus
agcugcacaguagcagacugca

SEQ ID NO: 4096662 - RNA, 18 nt, Western equine encephalomyelitis virus
agcuguuuugaaggaagc

SEQ ID NO: 4096663 - RNA, 15 nt, Western equine encephalomyelitis virus
agguccaccgccaaa

SEQ ID NO: 4096664 - RNA, 20 nt, Western equine encephalomyelitis virus
agguucugaaccguggucac

SEQ ID NO: 4096665 - RNA, 17 nt, Western equine encephalomyelitis virus
agugcuccuaagccaaa

SEQ ID NO: 4096666 - RNA, 12 nt, Western equine encephalomyelitis virus
aguucacacagc

SEQ ID NO: 4096667 - RNA, 15 nt, Western equine encephalomyelitis virus
auagcgguaaaacuc

SEQ ID NO: 4096668 - RNA, 16 nt, Western equine encephalomyelitis virus
aucagacacgcugcag

SEQ ID NO: 4096669 - RNA, 19 nt, Western equine encephalomyelitis virus
auggagcuaugaaaccagg

SEQ ID NO: 4096670 - RNA, 18 nt, Western equine encephalomyelitis virus
auuacaguacaaagcuga

SEQ ID NO: 4096671 - RNA, 14 nt, Western equine encephalomyelitis virus
auuaggcacacaga

SEQ ID NO: 4096672 - RNA, 16 nt, Western equine encephalomyelitis virus
auuccauuccgcuuga

SEQ ID NO: 4096673 - RNA, 15 nt, Western equine encephalomyelitis virus
caaaggcggauuaca

SEQ ID NO: 4096674 - RNA, 14 nt, Western equine encephalomyelitis virus
cacagucauuccuu

SEQ ID NO: 4096675 - RNA, 15 nt, Western equine encephalomyelitis virus
cacaguugugcauuc

SEQ ID NO: 4096676 - RNA, 16 nt, Western equine encephalomyelitis virus
caccagcgacaaacca

SEQ ID NO: 4096677 - RNA, 17 nt, Western equine encephalomyelitis virus
caccgccaaagaagaag

SEQ ID NO: 4096678 - RNA, 13 nt, Western equine encephalomyelitis virus
cacgccggcccaa

SEQ ID NO: 4096679 - RNA, 18 nt, Western equine encephalomyelitis virus
cagccuaaaaagaagaag

SEQ ID NO: 4096680 - RNA, 18 nt, Western equine encephalomyelitis virus
cagcuguuuugaaggaag

SEQ ID NO: 4096681 - RNA, 18 nt, Western equine encephalomyelitis virus
caggcgucugccugggga

SEQ ID NO: 4096682 - RNA, 19 nt, Western equine encephalomyelitis virus
cagguccaccgccaaagaa

SEQ ID NO: 4096683 - RNA, 19 nt, Western equine encephalomyelitis virus
caguggucacuuggaacca

SEQ ID NO: 4096684 - RNA, 21 nt, Western equine encephalomyelitis virus
cauuaccgaugacuucacacu

SEQ ID NO: 4096685 - RNA, 12 nt, Western equine encephalomyelitis virus
ccaagaauucca

SEQ ID NO: 4096686 - RNA, 20 nt, Western equine encephalomyelitis virus
ccaccaguuuacccuacaaa

SEQ ID NO: 4096687 - RNA, 17 nt, Western equine encephalomyelitis virus
cccuccuaggcgccgcu

SEQ ID NO: 4096688 - RNA, 21 nt, Western equine encephalomyelitis virus
ccgaggaagcguggugcauaa

SEQ ID NO: 4096689 - RNA, 12 nt, Western equine encephalomyelitis virus
ccgaucaugcug

SEQ ID NO: 4096690 - RNA, 14 nt, Western equine encephalomyelitis virus
ccugacugcaaugc

SEQ ID NO: 4096691 - RNA, 13 nt, Western equine encephalomyelitis virus
ccugcaaauucca

SEQ ID NO: 4096692 - RNA, 17 nt, Western equine encephalomyelitis virus
ccugcaagaaacagcac

SEQ ID NO: 4096693 - RNA, 23 nt, Western equine encephalomyelitis virus
ccugcguugucggaggaaggcug

SEQ ID NO: 4096694 - RNA, 21 nt, Western equine encephalomyelitis virus
ccuggauacguuugucaaugg

SEQ ID NO: 4096695 - RNA, 19 nt, Western equine encephalomyelitis virus
ccuguuagcucaauguccu

SEQ ID NO: 4096696 - RNA, 15 nt, Western equine encephalomyelitis virus
cgauguacuuccgag

SEQ ID NO: 4096697 - RNA, 15 nt, Western equine encephalomyelitis virus
cgauguauuuccgag

SEQ ID NO: 4096698 - RNA, 14 nt, Western equine encephalomyelitis virus
cgccaaagaagaag

SEQ ID NO: 4096699 - RNA, 13 nt, Western equine encephalomyelitis virus
cgcgcuugcaccg

SEQ ID NO: 4096700 - RNA, 17 nt, Western equine encephalomyelitis virus
cggcaagaaguccaccu

SEQ ID NO: 4096701 - RNA, 23 nt, Western equine encephalomyelitis virus
cguacggcgcuuucaguggucac

SEQ ID NO: 4096702 - RNA, 21 nt, Western equine encephalomyelitis virus
cguucggcgauauucaagcau

SEQ ID NO: 4096703 - RNA, 17 nt, Western equine encephalomyelitis virus
cuaggaggugcaaauga

SEQ ID NO: 4096704 - RNA, 20 nt, Western equine encephalomyelitis virus
cucuaauauacacuacacau

SEQ ID NO: 4096705 - RNA, 21 nt, Western equine encephalomyelitis virus
cugaaacauuuggagaaacuu

SEQ ID NO: 4096706 - RNA, 14 nt, Western equine encephalomyelitis virus
cugaaccgugguca

SEQ ID NO: 4096707 - RNA, 16 nt, Western equine encephalomyelitis virus
cuggcugcuugcacug

SEQ ID NO: 4096708 - RNA, 18 nt, Western equine encephalomyelitis virus
gaaacagcaccauuugga

SEQ ID NO: 4096709 - RNA, 17 nt, Western equine encephalomyelitis virus
gaaauguggaagaacaa

SEQ ID NO: 4096710 - RNA, 15 nt, Western equine encephalomyelitis virus
gaagagacugccuga

SEQ ID NO: 4096711 - RNA, 19 nt, Western equine encephalomyelitis virus
gacagcuguuuugaaggaa

SEQ ID NO: 4096712 - RNA, 15 nt, Western equine encephalomyelitis virus
gacauacggcugcug

SEQ ID NO: 4096713 - RNA, 17 nt, Western equine encephalomyelitis virus
gacauagcgguaaaacu

SEQ ID NO: 4096714 - RNA, 16 nt, Western equine encephalomyelitis virus
gaccacacaugugacu

SEQ ID NO: 4096715 - RNA, 18 nt, Western equine encephalomyelitis virus
gaggaagcguggugcaua

SEQ ID NO: 4096716 - RNA, 22 nt, Western equine encephalomyelitis virus
gaugcagcuuuugugagaucau

SEQ ID NO: 4096717 - RNA, 15 nt, Western equine encephalomyelitis virus
gcaacgguacccaca

SEQ ID NO: 4096718 - RNA, 20 nt, Western equine encephalomyelitis virus
gcaagaagagacugccugac

SEQ ID NO: 4096719 - RNA, 17 nt, Western equine encephalomyelitis virus
gcaccaggcgacccaca

SEQ ID NO: 4096720 - RNA, 17 nt, Western equine encephalomyelitis virus
gcacugcggaugucacc

SEQ ID NO: 4096721 - RNA, 16 nt, Western equine encephalomyelitis virus
gcagacgcaacagcag

SEQ ID NO: 4096722 - RNA, 20 nt, Western equine encephalomyelitis virus
gcagacgcaacagcagaaug

SEQ ID NO: 4096723 - RNA, 16 nt, Western equine encephalomyelitis virus
gcaggcgucugccugg

SEQ ID NO: 4096724 - RNA, 18 nt, Western equine encephalomyelitis virus
gccgucgucuuggccaca

SEQ ID NO: 4096725 - RNA, 21 nt, Western equine encephalomyelitis virus
gcguauaguauacggcaacac

SEQ ID NO: 4096726 - RNA, 14 nt, Western equine encephalomyelitis virus
gcuccuaagccaaa

SEQ ID NO: 4096727 - RNA, 20 nt, Western equine encephalomyelitis virus
gcucuaugcuuauaaacaca

SEQ ID NO: 4096728 - RNA, 17 nt, Western equine encephalomyelitis virus
gcugaauguaaaccacc

SEQ ID NO: 4096729 - RNA, 13 nt, Western equine encephalomyelitis virus
gcugcaugccuuu

SEQ ID NO: 4096730 - RNA, 15 nt, Western equine encephalomyelitis virus
gcugcugaagccuuc

SEQ ID NO: 4096731 - RNA, 18 nt, Western equine encephalomyelitis virus
gcuucuacaacuggcacc

SEQ ID NO: 4096732 - RNA, 14 nt, Western equine encephalomyelitis virus
ggaacuggcugcuu

SEQ ID NO: 4096733 - RNA, 16 nt, Western equine encephalomyelitis virus
ggaagcguggugcaua

SEQ ID NO: 4096734 - RNA, 18 nt, Western equine encephalomyelitis virus
ggcaccaggcgacccaca

SEQ ID NO: 4096735 - RNA, 17 nt, Western equine encephalomyelitis virus
ggcugcucaaaucgaag

SEQ ID NO: 4096736 - RNA, 17 nt, Western equine encephalomyelitis virus
ggguaaccaugaaccag

SEQ ID NO: 4096737 - RNA, 17 nt, Western equine encephalomyelitis virus
guccaccgccaaagaag

SEQ ID NO: 4096738 - RNA, 22 nt, Western equine encephalomyelitis virus
guccaguucacucccacuccac

SEQ ID NO: 4096739 - RNA, 16 nt, Western equine encephalomyelitis virus
guccauggaaagcugg

SEQ ID NO: 4096740 - RNA, 23 nt, Western equine encephalomyelitis virus
gugaccugcaaauuccacacagu

SEQ ID NO: 4096741 - RNA, 23 nt, Western equine encephalomyelitis virus
uaaaccaccggccgaccacauaa

SEQ ID NO: 4096742 - RNA, 16 nt, Western equine encephalomyelitis virus
uacauauuaacaacac

SEQ ID NO: 4096743 - RNA, 22 nt, Western equine encephalomyelitis virus
uacgugaccugcaaauuccaca

SEQ ID NO: 4096744 - RNA, 15 nt, Western equine encephalomyelitis virus
uauacggcaacacca

SEQ ID NO: 4096745 - RNA, 23 nt, Western equine encephalomyelitis virus
uaugcggcaagaaguccaccugc

SEQ ID NO: 4096746 - RNA, 18 nt, Western equine encephalomyelitis virus
uauggagcuaugaaacca

SEQ ID NO: 4096747 - RNA, 15 nt, Western equine encephalomyelitis virus
ucacccuccaccuga

SEQ ID NO: 4096748 - RNA, 17 nt, Western equine encephalomyelitis virus
ucccaugcgacaaacca

SEQ ID NO: 4096749 - RNA, 22 nt, Western equine encephalomyelitis virus
ucugcccguauugcagacacuc

SEQ ID NO: 4096750 - RNA, 12 nt, Western equine encephalomyelitis virus
ugaagaaggcua

SEQ ID NO: 4096751 - RNA, 17 nt, Western equine encephalomyelitis virus
ugaugaaaccacuccac

SEQ ID NO: 4096752 - RNA, 22 nt, Western equine encephalomyelitis virus
ugcaaugcgaccaacauugcug

SEQ ID NO: 4096753 - RNA, 14 nt, Western equine encephalomyelitis virus
ugcaucaucagcag

SEQ ID NO: 4096754 - RNA, 16 nt, Western equine encephalomyelitis virus
ugcaucgccaaagcaa

SEQ ID NO: 4096755 - RNA, 14 nt, Western equine encephalomyelitis virus
ugccguaggcagca

SEQ ID NO: 4096756 - RNA, 17 nt, Western equine encephalomyelitis virus
ugcucgaagagaacguc

SEQ ID NO: 4096757 - RNA, 21 nt, Western equine encephalomyelitis virus
uggauggccgcaugagaucau

SEQ ID NO: 4096758 - RNA, 14 nt, Western equine encephalomyelitis virus
uuaacaacacuaua

SEQ ID NO: 4096759 - RNA, 23 nt, Western equine encephalomyelitis virus
uuagcgguuuugugcugcauucg

SEQ ID NO: 4096760 - RNA, 16 nt, Western equine encephalomyelitis virus
uucacacagcugcucu

SEQ ID NO: 4096761 - RNA, 17 nt, Western equine encephalomyelitis virus
uuggaacuggcugcuug

SEQ ID NO: 4096762 - RNA, 19 nt, Western equine encephalomyelitis virus
uuuacuuaaaaacacuaua

SEQ ID NO: 4096763 - RNA, 23 nt, Western equine encephalomyelitis virus
aaaacucgauguacuuccgagga

SEQ ID NO: 4096764 - RNA, 21 nt, Western equine encephalomyelitis virus
aaacaucuuggaacuggcugc

SEQ ID NO: 4096765 - RNA, 15 nt, Western equine encephalomyelitis virus
aaacauuuggagaaa

SEQ ID NO: 4096766 - RNA, 16 nt, Western equine encephalomyelitis virus
aaacauuuggagaaac

SEQ ID NO: 4096767 - RNA, 12 nt, Western equine encephalomyelitis virus
aacgaacacucg

SEQ ID NO: 4096768 - RNA, 15 nt, Western equine encephalomyelitis virus
aagaagagacugccu

SEQ ID NO: 4096769 - RNA, 16 nt, Western equine encephalomyelitis virus
aagaugaacggcugca

SEQ ID NO: 4096770 - RNA, 20 nt, Western equine encephalomyelitis virus
aagccuucugucaagaacau

SEQ ID NO: 4096771 - RNA, 17 nt, Western equine encephalomyelitis virus
aaguucacacagcugcu

SEQ ID NO: 4096772 - RNA, 18 nt, Western equine encephalomyelitis virus
acaacagaggcagaguug

SEQ ID NO: 4096773 - RNA, 18 nt, Western equine encephalomyelitis virus
acaacguauguguaugaa

SEQ ID NO: 4096774 - RNA, 12 nt, Western equine encephalomyelitis virus
acacuaaaacuc

SEQ ID NO: 4096775 - RNA, 11 nt, Western equine encephalomyelitis virus
acagcaccauu

SEQ ID NO: 4096776 - RNA, 20 nt, Western equine encephalomyelitis virus
accugcaaauuccacacagu

SEQ ID NO: 4096777 - RNA, 18 nt, Western equine encephalomyelitis virus
acgcaagccuaaaccagg

SEQ ID NO: 4096778 - RNA, 18 nt, Western equine encephalomyelitis virus
acgcugcuggagaacguc

SEQ ID NO: 4096779 - RNA, 21 nt, Western equine encephalomyelitis virus
acucagccuaaaaagaagaag

SEQ ID NO: 4096780 - RNA, 23 nt, Western equine encephalomyelitis virus
acuccacguugaaggaaaaauug

SEQ ID NO: 4096781 - RNA, 22 nt, Western equine encephalomyelitis virus
acucgauguauuuccgaggaag

SEQ ID NO: 4096782 - RNA, 20 nt, Western equine encephalomyelitis virus
agcaagaagagacugccuga

SEQ ID NO: 4096783 - RNA, 16 nt, Western equine encephalomyelitis virus
agcgguaaaacucgau

SEQ ID NO: 4096784 - RNA, 16 nt, Western equine encephalomyelitis virus
agcuaucagcacaucu

SEQ ID NO: 4096785 - RNA, 16 nt, Western equine encephalomyelitis virus
agcuugcaucgccaaa

SEQ ID NO: 4096786 - RNA, 15 nt, Western equine encephalomyelitis virus
aggacgaaacgcaag

SEQ ID NO: 4096787 - RNA, 16 nt, Western equine encephalomyelitis virus
aggcacacagaccacu

SEQ ID NO: 4096788 - RNA, 19 nt, Western equine encephalomyelitis virus
agguccaccgccaaagaag

SEQ ID NO: 4096789 - RNA, 16 nt, Western equine encephalomyelitis virus
aguacgugaccugcaa

SEQ ID NO: 4096790 - RNA, 20 nt, Western equine encephalomyelitis virus
aguccuaucuggaggaagcg

SEQ ID NO: 4096791 - RNA, 17 nt, Western equine encephalomyelitis virus
agucugggcccaggagu

SEQ ID NO: 4096792 - RNA, 15 nt, Western equine encephalomyelitis virus
aucagcagcuugcau

SEQ ID NO: 4096793 - RNA, 17 nt, Western equine encephalomyelitis virus
aucugugguuuaacaac

SEQ ID NO: 4096794 - RNA, 23 nt, Western equine encephalomyelitis virus
auuuccgaggaagcacagugcau

SEQ ID NO: 4096795 - RNA, 17 nt, Western equine encephalomyelitis virus
caaauuccacacaguca

SEQ ID NO: 4096796 - RNA, 14 nt, Western equine encephalomyelitis virus
caagaggacgaaac

SEQ ID NO: 4096797 - RNA, 21 nt, Western equine encephalomyelitis virus
caccagcgacaaaccaccggg

SEQ ID NO: 4096798 - RNA, 19 nt, Western equine encephalomyelitis virus
caccaggcgacccacaugg

SEQ ID NO: 4096799 - RNA, 20 nt, Western equine encephalomyelitis virus
cacgagcggagcaucugaga

SEQ ID NO: 4096800 - RNA, 21 nt, Western equine encephalomyelitis virus
cacgcgccgcuugacacuaaa

SEQ ID NO: 4096801 - RNA, 23 nt, Western equine encephalomyelitis virus
cacguuuacgaucacuugaagga

SEQ ID NO: 4096802 - RNA, 15 nt, Western equine encephalomyelitis virus
caugaaccagucaga

SEQ ID NO: 4096803 - RNA, 18 nt, Western equine encephalomyelitis virus
caugcaccguggagaaaa

SEQ ID NO: 4096804 - RNA, 16 nt, Western equine encephalomyelitis virus
caugcgacaaaccacc

SEQ ID NO: 4096805 - RNA, 24 nt, Western equine encephalomyelitis virus
cauuaaucguauaucacacuacau

SEQ ID NO: 4096806 - RNA, 13 nt, Western equine encephalomyelitis virus
cauuccuucacca

SEQ ID NO: 4096807 - RNA, 14 nt, Western equine encephalomyelitis virus
ccaacauugcugac

SEQ ID NO: 4096808 - RNA, 11 nt, Western equine encephalomyelitis virus
ccagaaagggg

SEQ ID NO: 4096809 - RNA, 21 nt, Western equine encephalomyelitis virus
cccgugugcuauucacugacg

SEQ ID NO: 4096810 - RNA, 15 nt, Western equine encephalomyelitis virus
cccucgagugcaagg

SEQ ID NO: 4096811 - RNA, 11 nt, Western equine encephalomyelitis virus
ccgagaggagu

SEQ ID NO: 4096812 - RNA, 19 nt, Western equine encephalomyelitis virus
ccgaggaagcacagugcau

SEQ ID NO: 4096813 - RNA, 20 nt, Western equine encephalomyelitis virus
ccgaggaagcacagugcaua

SEQ ID NO: 4096814 - RNA, 20 nt, Western equine encephalomyelitis virus
ccgaggaagcguggugcaua

SEQ ID NO: 4096815 - RNA, 20 nt, Western equine encephalomyelitis virus
ccgaugacuucacacugacc

SEQ ID NO: 4096816 - RNA, 22 nt, Western equine encephalomyelitis virus
ccgcuugacacuaaaacucgau

SEQ ID NO: 4096817 - RNA, 15 nt, Western equine encephalomyelitis virus
ccuacucagccuaaa

SEQ ID NO: 4096818 - RNA, 19 nt, Western equine encephalomyelitis virus
cgaccaugacaucaaggaa

SEQ ID NO: 4096819 - RNA, 12 nt, Western equine encephalomyelitis virus
cgaggaagcgug

SEQ ID NO: 4096820 - RNA, 18 nt, Western equine encephalomyelitis virus
cgauguacuuccgaggaa

SEQ ID NO: 4096821 - RNA, 18 nt, Western equine encephalomyelitis virus
cgauguauuuccgaggaa

SEQ ID NO: 4096822 - RNA, 22 nt, Western equine encephalomyelitis virus
cggaggaaggcugaugaaacca

SEQ ID NO: 4096823 - RNA, 12 nt, Western equine encephalomyelitis virus
cggcaacaccac

SEQ ID NO: 4096824 - RNA, 20 nt, Western equine encephalomyelitis virus
cguaggcagcauaacacuac

SEQ ID NO: 4096825 - RNA, 20 nt, Western equine encephalomyelitis virus
cgucugccuggggaagguag

SEQ ID NO: 4096826 - RNA, 12 nt, Western equine encephalomyelitis virus
cguugaaggaaa

SEQ ID NO: 4096827 - RNA, 21 nt, Western equine encephalomyelitis virus
cucgauguauuuccgaggaag

SEQ ID NO: 4096828 - RNA, 20 nt, Western equine encephalomyelitis virus
cugacauagcgguaaaacuc

SEQ ID NO: 4096829 - RNA, 18 nt, Western equine encephalomyelitis virus
cugcguugucggaggaag

SEQ ID NO: 4096830 - RNA, 22 nt, Western equine encephalomyelitis virus
cugcguugucggaggaaggcug

SEQ ID NO: 4096831 - RNA, 18 nt, Western equine encephalomyelitis virus
gaagaugaacggcugcac

SEQ ID NO: 4096832 - RNA, 18 nt, Western equine encephalomyelitis virus
gaaggagacgucugccgg

SEQ ID NO: 4096833 - RNA, 23 nt, Western equine encephalomyelitis virus
gaccacauaauuggagaaccaca

SEQ ID NO: 4096834 - RNA, 15 nt, Western equine encephalomyelitis virus
gagaacgucuugaaa

SEQ ID NO: 4096835 - RNA, 19 nt, Western equine encephalomyelitis virus
gauguacuuccgaggaagc

SEQ ID NO: 4096836 - RNA, 16 nt, Western equine encephalomyelitis virus
gcacaucgagcccaca

SEQ ID NO: 4096837 - RNA, 23 nt, Western equine encephalomyelitis virus
gccaagugaauggauaugccugc

SEQ ID NO: 4096838 - RNA, 16 nt, Western equine encephalomyelitis virus
gccacgcgccgcuuga

SEQ ID NO: 4096839 - RNA, 14 nt, Western equine encephalomyelitis virus
gccguaggcagcau

SEQ ID NO: 4096840 - RNA, 15 nt, Western equine encephalomyelitis virus
gcucugaaagucggc

SEQ ID NO: 4096841 - RNA, 21 nt, Western equine encephalomyelitis virus
gcuucuacaacuggcaccacg

SEQ ID NO: 4096842 - RNA, 20 nt, Western equine encephalomyelitis virus
gcuugacaccgacagucugc

SEQ ID NO: 4096843 - RNA, 16 nt, Western equine encephalomyelitis virus
ggaagcacagugcaua

SEQ ID NO: 4096844 - RNA, 14 nt, Western equine encephalomyelitis virus
ggcagcauaacacu

SEQ ID NO: 4096845 - RNA, 13 nt, Western equine encephalomyelitis virus
ggccaggcccaca

SEQ ID NO: 4096846 - RNA, 22 nt, Western equine encephalomyelitis virus
gggcccaggagucggcaccagg

SEQ ID NO: 4096847 - RNA, 14 nt, Western equine encephalomyelitis virus
uaaaaauugagaac

SEQ ID NO: 4096848 - RNA, 17 nt, Western equine encephalomyelitis virus
uacccaccggcagaaug

SEQ ID NO: 4096849 - RNA, 20 nt, Western equine encephalomyelitis virus
uaugaaauguggaagaacaa

SEQ ID NO: 4096850 - RNA, 16 nt, Western equine encephalomyelitis virus
ucacacagcugcucug

SEQ ID NO: 4096851 - RNA, 14 nt, Western equine encephalomyelitis virus
uccgcuugacaccg

SEQ ID NO: 4096852 - RNA, 21 nt, Western equine encephalomyelitis virus
uccucaaaggcggauuacaca

SEQ ID NO: 4096853 - RNA, 12 nt, Western equine encephalomyelitis virus
ucgaaugucacg

SEQ ID NO: 4096854 - RNA, 22 nt, Western equine encephalomyelitis virus
ucugugacagugagaacacaca

SEQ ID NO: 4096855 - RNA, 16 nt, Western equine encephalomyelitis virus
ugaaauguggaagaac

SEQ ID NO: 4096856 - RNA, 22 nt, Western equine encephalomyelitis virus
ugaagccuucugucaagaacau

SEQ ID NO: 4096857 - RNA, 18 nt, Western equine encephalomyelitis virus
ugaccagucccuaccugg

SEQ ID NO: 4096858 - RNA, 15 nt, Western equine encephalomyelitis virus
ugcaaggcauccuca

SEQ ID NO: 4096859 - RNA, 23 nt, Western equine encephalomyelitis virus
uggagaaaaagaucaggaggaag

SEQ ID NO: 4096860 - RNA, 18 nt, Western equine encephalomyelitis virus
ugguucaaaggcaucacc

SEQ ID NO: 4096861 - RNA, 12 nt, Western equine encephalomyelitis virus
ugugcugcauuc

SEQ ID NO: 4096862 - RNA, 15 nt, Western equine encephalomyelitis virus
uugacacuaaaacuc

SEQ ID NO: 4096863 - RNA, 18 nt, Western equine encephalomyelitis virus
cacuacauuuuagcacau

SEQ ID NO: 4096864 - RNA, 14 nt, Western equine encephalomyelitis virus
cacuauacacacuu

SEQ ID NO: 4096865 - RNA, 12 nt, Western equine encephalomyelitis virus
cacuauaucacu

SEQ ID NO: 4096866 - RNA, 13 nt, Western equine encephalomyelitis virus
cacuugaaggaga

SEQ ID NO: 4096867 - RNA, 15 nt, Western equine encephalomyelitis virus
cagcgacaaaccacc

SEQ ID NO: 4096868 - RNA, 18 nt, Western equine encephalomyelitis virus
caggagucggcaccaggc

SEQ ID NO: 4096869 - RNA, 19 nt, Western equine encephalomyelitis virus
cagucuacacugucauugu

SEQ ID NO: 4096870 - RNA, 23 nt, Western equine encephalomyelitis virus
cauaaugcugugcagugucacau

SEQ ID NO: 4096871 - RNA, 13 nt, Western equine encephalomyelitis virus
caucagaaagggg

SEQ ID NO: 4096872 - RNA, 18 nt, Western equine encephalomyelitis virus
caucccugaugcagcuuu

SEQ ID NO: 4096873 - RNA, 16 nt, Western equine encephalomyelitis virus
caugcacaggccaggc

SEQ ID NO: 4096874 - RNA, 13 nt, Western equine encephalomyelitis virus
ccacguugaagga

SEQ ID NO: 4096875 - RNA, 12 nt, Western equine encephalomyelitis virus
cccgcacugaca

SEQ ID NO: 4096876 - RNA, 13 nt, Western equine encephalomyelitis virus
cccugaguaugga

SEQ ID NO: 4096877 - RNA, 11 nt, Western equine encephalomyelitis virus
ccgaggaagca

SEQ ID NO: 4096878 - RNA, 11 nt, Western equine encephalomyelitis virus
ccgcuggcugc

SEQ ID NO: 4096879 - RNA, 21 nt, Western equine encephalomyelitis virus
ccgugaaauugaagaaggcua

SEQ ID NO: 4096880 - RNA, 19 nt, Western equine encephalomyelitis virus
cgauguacuuccgaggaag

SEQ ID NO: 4096881 - RNA, 11 nt, Western equine encephalomyelitis virus
cgccgccaggu

SEQ ID NO: 4096882 - RNA, 22 nt, Western equine encephalomyelitis virus
cgccuucgaacaugcgaccacu

SEQ ID NO: 4096883 - RNA, 18 nt, Western equine encephalomyelitis virus
cggcccccgcuggcugcu

SEQ ID NO: 4096884 - RNA, 13 nt, Western equine encephalomyelitis virus
cgucacgccaggu

SEQ ID NO: 4096885 - RNA, 15 nt, Western equine encephalomyelitis virus
cguugucggaggaag

SEQ ID NO: 4096886 - RNA, 17 nt, Western equine encephalomyelitis virus
cuccacgacagcuguuu

SEQ ID NO: 4096887 - RNA, 23 nt, Western equine encephalomyelitis virus
cugacagggagggacauugucca

SEQ ID NO: 4096888 - RNA, 23 nt, Western equine encephalomyelitis virus
cugcacaguagcagacugcauuu

SEQ ID NO: 4096889 - RNA, 15 nt, Western equine encephalomyelitis virus
cugcuuuucaugcug

SEQ ID NO: 4096890 - RNA, 13 nt, Western equine encephalomyelitis virus
cuugaaaugucca

SEQ ID NO: 4096891 - RNA, 14 nt, Western equine encephalomyelitis virus
cuugacacuaaaac

SEQ ID NO: 4096892 - RNA, 16 nt, Western equine encephalomyelitis virus
cuuggaacuggcugcu

SEQ ID NO: 4096893 - RNA, 18 nt, Western equine encephalomyelitis virus
cuuggaacuggcugcuug

SEQ ID NO: 4096894 - RNA, 12 nt, Western equine encephalomyelitis virus
gaaacauuugga

SEQ ID NO: 4096895 - RNA, 16 nt, Western equine encephalomyelitis virus
gaagcguggugcauaa

SEQ ID NO: 4096896 - RNA, 14 nt, Western equine encephalomyelitis virus
gaucacgcagucgc

SEQ ID NO: 4096897 - RNA, 19 nt, Western equine encephalomyelitis virus
gaucuuauuaggcacacag

SEQ ID NO: 4096898 - RNA, 21 nt, Western equine encephalomyelitis virus
gauguauuuccgaggaagcac

SEQ ID NO: 4096899 - RNA, 19 nt, Western equine encephalomyelitis virus
gcacaguugugcauuccuc

SEQ ID NO: 4096900 - RNA, 13 nt, Western equine encephalomyelitis virus
gcacugcaucauc

SEQ ID NO: 4096901 - RNA, 23 nt, Western equine encephalomyelitis virus
gcacuguuugggggagcaucauc

SEQ ID NO: 4096902 - RNA, 22 nt, Western equine encephalomyelitis virus
gcaucacccuccaccugacugc

SEQ ID NO: 4096903 - RNA, 11 nt, Western equine encephalomyelitis virus
gccaaagcaag

SEQ ID NO: 4096904 - RNA, 14 nt, Western equine encephalomyelitis virus
gcccaggagucggc

SEQ ID NO: 4096905 - RNA, 21 nt, Western equine encephalomyelitis virus
gccggaucuuauuaggcacac

SEQ ID NO: 4096906 - RNA, 23 nt, Western equine encephalomyelitis virus
gccuggggaagguagacgccuuc

SEQ ID NO: 4096907 - RNA, 13 nt, Western equine encephalomyelitis virus
gcgacaaaccacc

SEQ ID NO: 4096908 - RNA, 23 nt, Western equine encephalomyelitis virus
gcgcagguuacgcgccacuuaac

SEQ ID NO: 4096909 - RNA, 13 nt, Western equine encephalomyelitis virus
gcuccagacugca

SEQ ID NO: 4096910 - RNA, 11 nt, Western equine encephalomyelitis virus
gcuggcugcuc

SEQ ID NO: 4096911 - RNA, 17 nt, Western equine encephalomyelitis virus
ggaggugcaaaugaggg

SEQ ID NO: 4096912 - RNA, 13 nt, Western equine encephalomyelitis virus
ggcccaaacgaag

SEQ ID NO: 4096913 - RNA, 16 nt, Western equine encephalomyelitis virus
ggccgugaaauugaag

SEQ ID NO: 4096914 - RNA, 17 nt, Western equine encephalomyelitis virus
ggcugcacuaaagcaaa

SEQ ID NO: 4096915 - RNA, 13 nt, Western equine encephalomyelitis virus
gguaaaacucgau

SEQ ID NO: 4096916 - RNA, 16 nt, Western equine encephalomyelitis virus
ggucacuuggaaccag

SEQ ID NO: 4096917 - RNA, 23 nt, Western equine encephalomyelitis virus
ggucauagcagggccgauaucag

SEQ ID NO: 4096918 - RNA, 17 nt, Western equine encephalomyelitis virus
guaaaacucgauguacu

SEQ ID NO: 4096919 - RNA, 15 nt, Western equine encephalomyelitis virus
guacauuaaaccacc

SEQ ID NO: 4096920 - RNA, 13 nt, Western equine encephalomyelitis virus
guagaugacugag

SEQ ID NO: 4096921 - RNA, 15 nt, Western equine encephalomyelitis virus
guggucacuuggaac

SEQ ID NO: 4096922 - RNA, 22 nt, Western equine encephalomyelitis virus
guucacucccacuccacgacag

SEQ ID NO: 4096923 - RNA, 21 nt, Western equine encephalomyelitis virus
guucccaugcgacaaaccacc

SEQ ID NO: 4096924 - RNA, 14 nt, Western equine encephalomyelitis virus
uaaaaguucacaca

SEQ ID NO: 4096925 - RNA, 23 nt, Western equine encephalomyelitis virus
uagcggccgugaaauugaagaag

SEQ ID NO: 4096926 - RNA, 22 nt, Western equine encephalomyelitis virus
uagucaacuugacuuucaaaca

SEQ ID NO: 4096927 - RNA, 23 nt, Western equine encephalomyelitis virus
uccaaacccuccuaggcgccgcu

SEQ ID NO: 4096928 - RNA, 21 nt, Western equine encephalomyelitis virus
ucggcuacaaucaggcaggca

SEQ ID NO: 4096929 - RNA, 14 nt, Western equine encephalomyelitis virus
ugaaauugaagaag

SEQ ID NO: 4096930 - RNA, 20 nt, Western equine encephalomyelitis virus
ugaagccuucugucaagaac

SEQ ID NO: 4096931 - RNA, 13 nt, Western equine encephalomyelitis virus
ugagaucaucaga

SEQ ID NO: 4096932 - RNA, 14 nt, Western equine encephalomyelitis virus
ugcaagaaacagca

SEQ ID NO: 4096933 - RNA, 14 nt, Western equine encephalomyelitis virus
ugcaccgaacgcaa

SEQ ID NO: 4096934 - RNA, 14 nt, Western equine encephalomyelitis virus
ugccacgcgccgcu

SEQ ID NO: 4096935 - RNA, 17 nt, Western equine encephalomyelitis virus
ugcccguauugcagaca

SEQ ID NO: 4096936 - RNA, 13 nt, Western equine encephalomyelitis virus
uggaagaacaacu

SEQ ID NO: 4096937 - RNA, 10 nt, Western equine encephalomyelitis virus
uggagaucac

SEQ ID NO: 4096938 - RNA, 13 nt, Western equine encephalomyelitis virus
uguuuugaaggaa

SEQ ID NO: 4096939 - RNA, 19 nt, Western equine encephalomyelitis virus
uucagcccaauaaaaauug

SEQ ID NO: 4096940 - RNA, 16 nt, Western equine encephalomyelitis virus
uucuggcaagaacguc

SEQ ID NO: 4096941 - RNA, 15 nt, Western equine encephalomyelitis virus
uucugucaagaacau

SEQ ID NO: 4096942 - RNA, 19 nt, Western equine encephalomyelitis virus
aaaauagcuaucagcacau

SEQ ID NO: 4096943 - RNA, 14 nt, Western equine encephalomyelitis virus
aaacaucuuggaac

SEQ ID NO: 4096944 - RNA, 17 nt, Western equine encephalomyelitis virus
aaacauuuggagaaacu

SEQ ID NO: 4096945 - RNA, 14 nt, Western equine encephalomyelitis virus
aacgcaagccuaaa

SEQ ID NO: 4096946 - RNA, 19 nt, Western equine encephalomyelitis virus
aacggcugcacuaaagcaa

SEQ ID NO: 4096947 - RNA, 13 nt, Western equine encephalomyelitis virus
aacuggcugcuug

SEQ ID NO: 4096948 - RNA, 14 nt, Western equine encephalomyelitis virus
aacuuugaaccauc

SEQ ID NO: 4096949 - RNA, 15 nt, Western equine encephalomyelitis virus
aagaagaagagugcu

SEQ ID NO: 4096950 - RNA, 18 nt, Western equine encephalomyelitis virus
aagacaguauggagaaaa

SEQ ID NO: 4096951 - RNA, 22 nt, Western equine encephalomyelitis virus
aagaugaacggcugcacuaaag

SEQ ID NO: 4096952 - RNA, 18 nt, Western equine encephalomyelitis virus
aaggcugaugaaaccacu

SEQ ID NO: 4096953 - RNA, 19 nt, Western equine encephalomyelitis virus
aaguguacauuaaaccacc

SEQ ID NO: 4096954 - RNA, 13 nt, Western equine encephalomyelitis virus
aaguucacacagc

SEQ ID NO: 4096955 - RNA, 18 nt, Western equine encephalomyelitis virus
aauuacgacacgcugcug

SEQ ID NO: 4096956 - RNA, 14 nt, Western equine encephalomyelitis virus
acaacagaggcaga

SEQ ID NO: 4096957 - RNA, 20 nt, Western equine encephalomyelitis virus
acagcuguuuugaaggaagc

SEQ ID NO: 4096958 - RNA, 18 nt, Western equine encephalomyelitis virus
acauauuaacaacacuau

SEQ ID NO: 4096959 - RNA, 20 nt, Western equine encephalomyelitis virus
acauggauggccgcaugaga

SEQ ID NO: 4096960 - RNA, 22 nt, Western equine encephalomyelitis virus
accaccuucuggcaagaacguc

SEQ ID NO: 4096961 - RNA, 22 nt, Western equine encephalomyelitis virus
accaugaaccagucagagucug

SEQ ID NO: 4096962 - RNA, 17 nt, Western equine encephalomyelitis virus
accgacagucugcccgg

SEQ ID NO: 4096963 - RNA, 16 nt, Western equine encephalomyelitis virus
accuucaacuaacaag

SEQ ID NO: 4096964 - RNA, 20 nt, Western equine encephalomyelitis virus
acgacacgcugcuggagaac

SEQ ID NO: 4096965 - RNA, 17 nt, Western equine encephalomyelitis virus
acgccagaacgaacacu

SEQ ID NO: 4096966 - RNA, 18 nt, Western equine encephalomyelitis virus
acugacauacggcugcug

SEQ ID NO: 4096967 - RNA, 20 nt, Western equine encephalomyelitis virus
agacugcacuauagaucacg

SEQ ID NO: 4096968 - RNA, 18 nt, Western equine encephalomyelitis virus
agaugaacggcugcacua

SEQ ID NO: 4096969 - RNA, 15 nt, Western equine encephalomyelitis virus
agcaaaacagugcau

SEQ ID NO: 4096970 - RNA, 17 nt, Western equine encephalomyelitis virus
agcaagaagagacugcc

SEQ ID NO: 4096971 - RNA, 20 nt, Western equine encephalomyelitis virus
agcagacgcaacagcagaau

SEQ ID NO: 4096972 - RNA, 17 nt, Western equine encephalomyelitis virus
agccuaaaaagaagaag

SEQ ID NO: 4096973 - RNA, 15 nt, Western equine encephalomyelitis virus
agccuaaaccaggga

SEQ ID NO: 4096974 - RNA, 14 nt, Western equine encephalomyelitis virus
agcgucuaacugug

SEQ ID NO: 4096975 - RNA, 18 nt, Western equine encephalomyelitis virus
agcuaugaaaccaggagc

SEQ ID NO: 4096976 - RNA, 21 nt, Western equine encephalomyelitis virus
agcucaauguccuccagguga

SEQ ID NO: 4096977 - RNA, 14 nt, Western equine encephalomyelitis virus
aggaagcgucaggc

SEQ ID NO: 4096978 - RNA, 16 nt, Western equine encephalomyelitis virus
aguagcagacugcauu

SEQ ID NO: 4096979 - RNA, 16 nt, Western equine encephalomyelitis virus
agucggcaccaggcga

SEQ ID NO: 4096980 - RNA, 16 nt, Western equine encephalomyelitis virus
agugcaagguaaauug

SEQ ID NO: 4096981 - RNA, 21 nt, Western equine encephalomyelitis virus
aguucgcuccagacugcacua

SEQ ID NO: 4096982 - RNA, 22 nt, Western equine encephalomyelitis virus
auaaguccuaucuggaggaagc

SEQ ID NO: 4096983 - RNA, 13 nt, Western equine encephalomyelitis virus
auaauuggagaac

SEQ ID NO: 4096984 - RNA, 23 nt, Western equine encephalomyelitis virus
auacguuugucaauggcgucacg

SEQ ID NO: 4096985 - RNA, 17 nt, Western equine encephalomyelitis virus
auauuaacaacacuaua

SEQ ID NO: 4096986 - RNA, 16 nt, Western equine encephalomyelitis virus
augcaccguggagaaa

SEQ ID NO: 4096987 - RNA, 18 nt, Western equine encephalomyelitis virus
auguauuuccgaggaagc

SEQ ID NO: 4096988 - RNA, 19 nt, Western equine encephalomyelitis virus
auuuuacuuaaaaacacua

SEQ ID NO: 4096989 - RNA, 15 nt, Western equine encephalomyelitis virus
caaauguuccgggga

SEQ ID NO: 4096990 - RNA, 15 nt, Western equine encephalomyelitis virus
cacagaccacucagu

SEQ ID NO: 4096991 - RNA, 21 nt, Western equine encephalomyelitis virus
cacagaccacucagugcaagg

SEQ ID NO: 4096992 - RNA, 19 nt, Western equine encephalomyelitis virus
cacagugcauaaugcugug

SEQ ID NO: 4096993 - RNA, 20 nt, Western equine encephalomyelitis virus
caccagcgacaaaccaccgg

SEQ ID NO: 4096994 - RNA, 12 nt, Western equine encephalomyelitis virus
cacuacacauau

SEQ ID NO: 4096995 - RNA, 16 nt, Western equine encephalomyelitis virus
cagaacgaacacucga

SEQ ID NO: 4096996 - RNA, 16 nt, Western equine encephalomyelitis virus
cagagucugggcccag

SEQ ID NO: 4096997 - RNA, 20 nt, Western equine encephalomyelitis virus
cagcuguuuugaaggaagcg

SEQ ID NO: 4096998 - RNA, 15 nt, Western equine encephalomyelitis virus
caggcgucugccugg

SEQ ID NO: 4096999 - RNA, 16 nt, Western equine encephalomyelitis virus
cauauuaacaacacua

SEQ ID NO: 4097000 - RNA, 20 nt, Western equine encephalomyelitis virus
caugcacaggccaggcccac

SEQ ID NO: 4097001 - RNA, 19 nt, Western equine encephalomyelitis virus
cauuaaucguauaucacac

SEQ ID NO: 4097002 - RNA, 22 nt, Western equine encephalomyelitis virus
cauuaaucguauaucacacuac

SEQ ID NO: 4097003 - RNA, 16 nt, Western equine encephalomyelitis virus
ccacacaugugacugc

SEQ ID NO: 4097004 - RNA, 22 nt, Western equine encephalomyelitis virus
ccacgacagcuguuuugaagga

SEQ ID NO: 4097005 - RNA, 18 nt, Western equine encephalomyelitis virus
ccacugugccaaauguuc

SEQ ID NO: 4097006 - RNA, 21 nt, Western equine encephalomyelitis virus
ccgaggaagcacagugcauaa

SEQ ID NO: 4097007 - RNA, 11 nt, Western equine encephalomyelitis virus
ccgaggaagcg

SEQ ID NO: 4097008 - RNA, 11 nt, Western equine encephalomyelitis virus
ccuaaaccagg

SEQ ID NO: 4097009 - RNA, 14 nt, Western equine encephalomyelitis virus
ccuucugucaagaa

SEQ ID NO: 4097010 - RNA, 19 nt, Western equine encephalomyelitis virus
cgauguauuuccgaggaag

SEQ ID NO: 4097011 - RNA, 19 nt, Western equine encephalomyelitis virus
cgcacuaaaaguucacaca

SEQ ID NO: 4097012 - RNA, 13 nt, Western equine encephalomyelitis virus
cggcauccagucu

SEQ ID NO: 4097013 - RNA, 13 nt, Western equine encephalomyelitis virus
cggccgaccacau

SEQ ID NO: 4097014 - RNA, 14 nt, Western equine encephalomyelitis virus
cgguagagaggagu

SEQ ID NO: 4097015 - RNA, 15 nt, Western equine encephalomyelitis virus
cguaccgagaggagu

SEQ ID NO: 4097016 - RNA, 20 nt, Western equine encephalomyelitis virus
cgugaccugcaaauuccaca

SEQ ID NO: 4097017 - RNA, 14 nt, Western equine encephalomyelitis virus
cuaucuggaggaag

SEQ ID NO: 4097018 - RNA, 21 nt, Western equine encephalomyelitis virus
cucgauguacuuccgaggaag

SEQ ID NO: 4097019 - RNA, 17 nt, Western equine encephalomyelitis virus
cugucaagaacauccac

SEQ ID NO: 4097020 - RNA, 17 nt, Western equine encephalomyelitis virus
cugugacagugagaaca

SEQ ID NO: 4097021 - RNA, 22 nt, Western equine encephalomyelitis virus
cuucaccacaaguuaaaugcug

SEQ ID NO: 4097022 - RNA, 21 nt, Western equine encephalomyelitis virus
gaagccuucugucaagaacau

SEQ ID NO: 4097023 - RNA, 15 nt, Western equine encephalomyelitis virus
gacagugagaacaca

SEQ ID NO: 4097024 - RNA, 13 nt, Western equine encephalomyelitis virus
gacuacagcacag

SEQ ID NO: 4097025 - RNA, 19 nt, Western equine encephalomyelitis virus
gaggaagcacagugcauaa

SEQ ID NO: 4097026 - RNA, 22 nt, Western equine encephalomyelitis virus
gccggaucuuauuaggcacaca

SEQ ID NO: 4097027 - RNA, 15 nt, Western equine encephalomyelitis virus
gcugaugaaaccacu

SEQ ID NO: 4097028 - RNA, 16 nt, Western equine encephalomyelitis virus
gcuguuuugaaggaag

SEQ ID NO: 4097029 - RNA, 16 nt, Western equine encephalomyelitis virus
gcuuucaguggucacu

SEQ ID NO: 4097030 - RNA, 19 nt, Western equine encephalomyelitis virus
ggaucgauuagaauccagg

SEQ ID NO: 4097031 - RNA, 15 nt, Western equine encephalomyelitis virus
ggcacacagaccacu

SEQ ID NO: 4097032 - RNA, 16 nt, Western equine encephalomyelitis virus
guauaucacacuacau

SEQ ID NO: 4097033 - RNA, 16 nt, Western equine encephalomyelitis virus
gucucuaauauacacu

SEQ ID NO: 4097034 - RNA, 22 nt, Western equine encephalomyelitis virus
gucucuaauauacacuacacau

SEQ ID NO: 4097035 - RNA, 15 nt, Western equine encephalomyelitis virus
gugagaacacacaac

SEQ ID NO: 4097036 - RNA, 17 nt, Western equine encephalomyelitis virus
guggagaaaaagaucag

SEQ ID NO: 4097037 - RNA, 14 nt, Western equine encephalomyelitis virus
uaacaacacuauau

SEQ ID NO: 4097038 - RNA, 18 nt, Western equine encephalomyelitis virus
uaacaacacuauaucacu

SEQ ID NO: 4097039 - RNA, 12 nt, Western equine encephalomyelitis virus
uacacacuuuau

SEQ ID NO: 4097040 - RNA, 18 nt, Western equine encephalomyelitis virus
uaccgaugacuucacacu

SEQ ID NO: 4097041 - RNA, 11 nt, Western equine encephalomyelitis virus
uagagaggagu

SEQ ID NO: 4097042 - RNA, 12 nt, Western equine encephalomyelitis virus
uaggcacacaga

SEQ ID NO: 4097043 - RNA, 20 nt, Western equine encephalomyelitis virus
uauggagcuaugaaaccagg

SEQ ID NO: 4097044 - RNA, 15 nt, Western equine encephalomyelitis virus
uauugcagacacuca

SEQ ID NO: 4097045 - RNA, 13 nt, Western equine encephalomyelitis virus
ucacuugaaggag

SEQ ID NO: 4097046 - RNA, 18 nt, Western equine encephalomyelitis virus
ucagcacaucuggacccu

SEQ ID NO: 4097047 - RNA, 15 nt, Western equine encephalomyelitis virus
uccacguugaaggaa

SEQ ID NO: 4097048 - RNA, 22 nt, Western equine encephalomyelitis virus
ugaaauguggaagaacaacuca

SEQ ID NO: 4097049 - RNA, 13 nt, Western equine encephalomyelitis virus
ugacagugagaac

SEQ ID NO: 4097050 - RNA, 17 nt, Western equine encephalomyelitis virus
ugcaaugcgaccaacau

SEQ ID NO: 4097051 - RNA, 15 nt, Western equine encephalomyelitis virus
ugcacauuccauucc

SEQ ID NO: 4097052 - RNA, 13 nt, Western equine encephalomyelitis virus
ugcacuaaagcaa

SEQ ID NO: 4097053 - RNA, 14 nt, Western equine encephalomyelitis virus
ugcagacacucaac

SEQ ID NO: 4097054 - RNA, 14 nt, Western equine encephalomyelitis virus
ugcuggagaacguc

SEQ ID NO: 4097055 - RNA, 18 nt, Western equine encephalomyelitis virus
ugggcgggaaaggcgaca

SEQ ID NO: 4097056 - RNA, 15 nt, Western equine encephalomyelitis virus
uucaugcugcaugcc

SEQ ID NO: 4097057 - RNA, 12 nt, Western equine encephalomyelitis virus
uuccgcugcuuu

SEQ ID NO: 4097058 - RNA, 16 nt, Western equine encephalomyelitis virus
uucugucaagaacauc

SEQ ID NO: 4097059 - RNA, 11 nt, Western equine encephalomyelitis virus
uuggagaacca

SEQ ID NO: 4097060 - RNA, 18 nt, Western equine encephalomyelitis virus
aaaagaagaagcagcaag

SEQ ID NO: 4097061 - RNA, 23 nt, Western equine encephalomyelitis virus
aacgagaaaauuggggcugcgag

SEQ ID NO: 4097062 - RNA, 16 nt, Western equine encephalomyelitis virus
aaucagacacgcugca

SEQ ID NO: 4097063 - RNA, 15 nt, Western equine encephalomyelitis virus
acacuaaaacucgau

SEQ ID NO: 4097064 - RNA, 22 nt, Western equine encephalomyelitis virus
acacuauaucacuuuuaugaga

SEQ ID NO: 4097065 - RNA, 14 nt, Western equine encephalomyelitis virus
accaccuucuggca

SEQ ID NO: 4097066 - RNA, 15 nt, Western equine encephalomyelitis virus
acgacacgcugcugg

SEQ ID NO: 4097067 - RNA, 18 nt, Western equine encephalomyelitis virus
acgaucacuugaaggaga

SEQ ID NO: 4097068 - RNA, 13 nt, Western equine encephalomyelitis virus
acgccagaacgaa

SEQ ID NO: 4097069 - RNA, 21 nt, Western equine encephalomyelitis virus
acggcgcaguccaguaugaga

SEQ ID NO: 4097070 - RNA, 16 nt, Western equine encephalomyelitis virus
acggcugcugaagccu

SEQ ID NO: 4097071 - RNA, 22 nt, Western equine encephalomyelitis virus
acucgauguacuuccgaggaag

SEQ ID NO: 4097072 - RNA, 16 nt, Western equine encephalomyelitis virus
acugccugacgccaua

SEQ ID NO: 4097073 - RNA, 12 nt, Western equine encephalomyelitis virus
agaaccacauaa

SEQ ID NO: 4097074 - RNA, 14 nt, Western equine encephalomyelitis virus
agcagcaagccaag

SEQ ID NO: 4097075 - RNA, 14 nt, Western equine encephalomyelitis virus
agccuaaaaagaag

SEQ ID NO: 4097076 - RNA, 20 nt, Western equine encephalomyelitis virus
aggaggugcaaaugagggca

SEQ ID NO: 4097077 - RNA, 18 nt, Western equine encephalomyelitis virus
agggucuacauccaggaa

SEQ ID NO: 4097078 - RNA, 21 nt, Western equine encephalomyelitis virus
aguaucaggguaugaaaugug

SEQ ID NO: 4097079 - RNA, 13 nt, Western equine encephalomyelitis virus
aguccaccugcaa

SEQ ID NO: 4097080 - RNA, 15 nt, Western equine encephalomyelitis virus
agugagaacacacaa

SEQ ID NO: 4097081 - RNA, 15 nt, Western equine encephalomyelitis virus
aguucacacagcugc

SEQ ID NO: 4097082 - RNA, 23 nt, Western equine encephalomyelitis virus
auaaguccuaucuggaggaagcg

SEQ ID NO: 4097083 - RNA, 14 nt, Western equine encephalomyelitis virus
auacgcgcuugcac

SEQ ID NO: 4097084 - RNA, 23 nt, Western equine encephalomyelitis virus
aucuuggaacuggcugcuugcac

SEQ ID NO: 4097085 - RNA, 17 nt, Western equine encephalomyelitis virus
augaaauguggaagaac

SEQ ID NO: 4097086 - RNA, 16 nt, Western equine encephalomyelitis virus
augacaucaaggaaga

SEQ ID NO: 4097087 - RNA, 15 nt, Western equine encephalomyelitis virus
auuccuucaccacaa

SEQ ID NO: 4097088 - RNA, 20 nt, Western equine encephalomyelitis virus
auuuuacuuaaaaacacuau

SEQ ID NO: 4097089 - RNA, 15 nt, Western equine encephalomyelitis virus
caaagcaagaagaga

SEQ ID NO: 4097090 - RNA, 21 nt, Western equine encephalomyelitis virus
caagaaguccaccugcaaugc

SEQ ID NO: 4097091 - RNA, 21 nt, Western equine encephalomyelitis virus
caaugcugaauguaaaccacc

SEQ ID NO: 4097092 - RNA, 17 nt, Western equine encephalomyelitis virus
caauguccuccagguga

SEQ ID NO: 4097093 - RNA, 17 nt, Western equine encephalomyelitis virus
cacagguaucgugagca

SEQ ID NO: 4097094 - RNA, 12 nt, Western equine encephalomyelitis virus
cacagucauucc

SEQ ID NO: 4097095 - RNA, 20 nt, Western equine encephalomyelitis virus
cacaucgagcccacaagcaa

SEQ ID NO: 4097096 - RNA, 21 nt, Western equine encephalomyelitis virus
cacgaccaugacaucaaggaa

SEQ ID NO: 4097097 - RNA, 14 nt, Western equine encephalomyelitis virus
cagaauggauuaca

SEQ ID NO: 4097098 - RNA, 19 nt, Western equine encephalomyelitis virus
cagcaagccaagaggacga

SEQ ID NO: 4097099 - RNA, 15 nt, Western equine encephalomyelitis virus
cagcagcuugcaucg

SEQ ID NO: 4097100 - RNA, 17 nt, Western equine encephalomyelitis virus
caggacgaccccugcaa

SEQ ID NO: 4097101 - RNA, 15 nt, Western equine encephalomyelitis virus
caggccaggcccaca

SEQ ID NO: 4097102 - RNA, 23 nt, Western equine encephalomyelitis virus
cagguccaccgccaaagaagaag

SEQ ID NO: 4097103 - RNA, 15 nt, Western equine encephalomyelitis virus
cagucgcacuaaaag

SEQ ID NO: 4097104 - RNA, 18 nt, Western equine encephalomyelitis virus
cauaaggucgucaucaga

SEQ ID NO: 4097105 - RNA, 22 nt, Western equine encephalomyelitis virus
cauauuuuacuuaaaaacacua

SEQ ID NO: 4097106 - RNA, 23 nt, Western equine encephalomyelitis virus
cauauuuuacuuaaaaacacuau

SEQ ID NO: 4097107 - RNA, 12 nt, Zaire Ebola virus (ZEBOV)
caacaacacuca

SEQ ID NO: 4097108 - RNA, 18 nt, Zaire Ebola virus (ZEBOV)
caaggaagggaagcugca

SEQ ID NO: 4097109 - RNA, 17 nt, Zaire Ebola virus (ZEBOV)
caauacggugauucaaa

SEQ ID NO: 4097110 - RNA, 17 nt, Zaire Ebola virus (ZEBOV)
cagagaacaccaacacg

SEQ ID NO: 4097111 - RNA, 17 nt, Zaire Ebola virus (ZEBOV)
cauaguauccugauacu

SEQ ID NO: 4097112 - RNA, 14 nt, Zaire Ebola virus (ZEBOV)
caugcuuacaucug

SEQ ID NO: 4097113 - RNA, 17 nt, Zaire Ebola virus (ZEBOV)
ccaaaagcagagaacac

SEQ ID NO: 4097114 - RNA, 14 nt, Zaire Ebola virus (ZEBOV)
ccacgaccgcagcc

SEQ ID NO: 4097115 - RNA, 18 nt, Zaire Ebola virus (ZEBOV)
ccagcagcgggaagcuag

SEQ ID NO: 4097116 - RNA, 21 nt, Zaire Ebola virus (ZEBOV)
cccagggaccaacacaacaac

SEQ ID NO: 4097117 - RNA, 17 nt, Zaire Ebola virus (ZEBOV)
cuuaaaauauaaaugua

SEQ ID NO: 4097118 - RNA, 14 nt, Zaire Ebola virus (ZEBOV)
cuuacaucugagga

SEQ ID NO: 4097119 - RNA, 18 nt, Zaire Ebola virus (ZEBOV)
cuuauuuuugaauuuaaa

SEQ ID NO: 4097120 - RNA, 20 nt, Zaire Ebola virus (ZEBOV)
cuuucucauugcacauacuu

SEQ ID NO: 4097121 - RNA, 13 nt, Zaire Ebola virus (ZEBOV)
gaacuucuuccga

SEQ ID NO: 4097122 - RNA, 18 nt, Zaire Ebola virus (ZEBOV)
gacaauugguggacagga

SEQ ID NO: 4097123 - RNA, 21 nt, Zaire Ebola virus (ZEBOV)
gauugaugaaagaucauaacu

SEQ ID NO: 4097124 - RNA, 12 nt, Zaire Ebola virus (ZEBOV)
ggcaauugauuu

SEQ ID NO: 4097125 - RNA, 16 nt, Zaire Ebola virus (ZEBOV)
uagaaucuucucaggg

SEQ ID NO: 4097126 - RNA, 19 nt, Zaire Ebola virus (ZEBOV)
uauacucguaauuaacauu

SEQ ID NO: 4097127 - RNA, 15 nt, Zaire Ebola virus (ZEBOV)
ucaaggaagggaagc

SEQ ID NO: 4097128 - RNA, 14 nt, Zaire Ebola virus (ZEBOV)
ucaaugaaaccagg

SEQ ID NO: 4097129 - RNA, 12 nt, Zaire Ebola virus (ZEBOV)
ugaauuuaaagc

SEQ ID NO: 4097130 - RNA, 13 nt, Zaire Ebola virus (ZEBOV)
ugagucuuaaugc

SEQ ID NO: 4097131 - RNA, 22 nt, Zaire Ebola virus (ZEBOV)
ugcaaagguugguuauuaacau

SEQ ID NO: 4097132 - RNA, 11 nt, Zaire Ebola virus (ZEBOV)
ugccagcagcg

SEQ ID NO: 4097133 - RNA, 23 nt, Zaire Ebola virus (ZEBOV)
ugcugacucaauaguuaucuuga

SEQ ID NO: 4097134 - RNA, 21 nt, Zaire Ebola virus (ZEBOV)
uucaugacuuacuaaugaucu

SEQ ID NO: 4097135 - RNA, 15 nt, Zaire Ebola virus (ZEBOV)
uucuuguacacaaau

SEQ ID NO: 4097136 - RNA, 19 nt, Zaire Ebola virus (ZEBOV)
uugagaaugauaaacuuga

SEQ ID NO: 4097137 - RNA, 14 nt, Zaire Ebola virus (ZEBOV)
uugucaaugcucaa

SEQ ID NO: 4097138 - RNA, 20 nt, Zaire Ebola virus (ZEBOV)
uuuaaagcuagcuuauuauu

SEQ ID NO: 4097139 - RNA, 21 nt, Zaire Ebola virus (ZEBOV)
aguucaauuugagucuuaaug

SEQ ID NO: 4097140 - RNA, 15 nt, Zaire Ebola virus (ZEBOV)
auaaauacucauauu

SEQ ID NO: 4097141 - RNA, 16 nt, Zaire Ebola virus (ZEBOV)
auaauuuguuuaacca

SEQ ID NO: 4097142 - RNA, 22 nt, Zaire Ebola virus (ZEBOV)
auaguauccugauacuugcaaa

SEQ ID NO: 4097143 - RNA, 20 nt, Zaire Ebola virus (ZEBOV)
auuguaacucaauauucuaa

SEQ ID NO: 4097144 - RNA, 15 nt, Zaire Ebola virus (ZEBOV)
caacaucaccgcaga

SEQ ID NO: 4097145 - RNA, 17 nt, Zaire Ebola virus (ZEBOV)
cacagucaaggaaggga

SEQ ID NO: 4097146 - RNA, 22 nt, Zaire Ebola virus (ZEBOV)
ccaaaccagguccggacaacag

SEQ ID NO: 4097147 - RNA, 16 nt, Zaire Ebola virus (ZEBOV)
cuaauaacauuacaaa

SEQ ID NO: 4097148 - RNA, 14 nt, Zaire Ebola virus (ZEBOV)
cucauauuucuuga

SEQ ID NO: 4097149 - RNA, 19 nt, Zaire Ebola virus (ZEBOV)
cucugccacgaccgcagcc

SEQ ID NO: 4097150 - RNA, 23 nt, Zaire Ebola virus (ZEBOV)
cugacucaauaguuaucuugaca

SEQ ID NO: 4097151 - RNA, 14 nt, Zaire Ebola virus (ZEBOV)
cuucaacugcugaa

SEQ ID NO: 4097152 - RNA, 14 nt, Zaire Ebola virus (ZEBOV)
gaaccacaugauug

SEQ ID NO: 4097153 - RNA, 14 nt, Zaire Ebola virus (ZEBOV)
gagugccagcagcg

SEQ ID NO: 4097154 - RNA, 16 nt, Zaire Ebola virus (ZEBOV)
gauaauauaagucaau

SEQ ID NO: 4097155 - RNA, 23 nt, Zaire Ebola virus (ZEBOV)
gcaaagguugguuauuaacauac

SEQ ID NO: 4097156 - RNA, 23 nt, Zaire Ebola virus (ZEBOV)
gcaauugauuucuugcugcagcg

SEQ ID NO: 4097157 - RNA, 20 nt, Zaire Ebola virus (ZEBOV)
gcacauacuuuuugcccuua

SEQ ID NO: 4097158 - RNA, 22 nt, Zaire Ebola virus (ZEBOV)
gcaccuuuucaauccucaaccg

SEQ ID NO: 4097159 - RNA, 22 nt, Zaire Ebola virus (ZEBOV)
gccggacccccaaaagcagaga

SEQ ID NO: 4097160 - RNA, 19 nt, Zaire Ebola virus (ZEBOV)
ggacccccaaaagcagaga

SEQ ID NO: 4097161 - RNA, 19 nt, Zaire Ebola virus (ZEBOV)
ggagaagaacucgaagaga

SEQ ID NO: 4097162 - RNA, 14 nt, Zaire Ebola virus (ZEBOV)
uaauauaauacacu

SEQ ID NO: 4097163 - RNA, 17 nt, Zaire Ebola virus (ZEBOV)
uacguuacauuaaugau

SEQ ID NO: 4097164 - RNA, 15 nt, Zaire Ebola virus (ZEBOV)
ucaaaaaauaaguau

SEQ ID NO: 4097165 - RNA, 17 nt, Zaire Ebola virus (ZEBOV)
ucaaggaacgaaaacag

SEQ ID NO: 4097166 - RNA, 20 nt, Zaire Ebola virus (ZEBOV)
ucacuguaagccagcuucca

SEQ ID NO: 4097167 - RNA, 15 nt, Zaire Ebola virus (ZEBOV)
uccacgaguccccaa

SEQ ID NO: 4097168 - RNA, 14 nt, Zaire Ebola virus (ZEBOV)
ucgggccagcagcc

SEQ ID NO: 4097169 - RNA, 17 nt, Zaire Ebola virus (ZEBOV)
ugccagcagcgggaagc

SEQ ID NO: 4097170 - RNA, 11 nt, Zaire Ebola virus (ZEBOV)
uuauuaacaua

SEQ ID NO: 4097171 - RNA, 22 nt, Zaire Ebola virus (ZEBOV)
uucaauuugagucuuaaugcaa

SEQ ID NO: 4097172 - RNA, 20 nt, Zaire Ebola virus (ZEBOV)
uucuuguacacaaauaaugu

SEQ ID NO: 4097173 - RNA, 21 nt, Zaire Ebola virus (ZEBOV)
uugacaucaaucuaguuaucu

SEQ ID NO: 4097174 - RNA, 14 nt, Zaire Ebola virus (ZEBOV)
aaaauauaaaugua

SEQ ID NO: 4097175 - RNA, 16 nt, Zaire Ebola virus (ZEBOV)
aaaucaaugaaaccag

SEQ ID NO: 4097176 - RNA, 21 nt, Zaire Ebola virus (ZEBOV)
aacauaacagacaaaauugau

SEQ ID NO: 4097177 - RNA, 22 nt, Zaire Ebola virus (ZEBOV)
aacgacagcacagccuccgaca

SEQ ID NO: 4097178 - RNA, 18 nt, Zaire Ebola virus (ZEBOV)
aaggaagggaagcugcag

SEQ ID NO: 4097179 - RNA, 14 nt, Zaire Ebola virus (ZEBOV)
aagugauucuuauu

SEQ ID NO: 4097180 - RNA, 12 nt, Zaire Ebola virus (ZEBOV)
aaugaaaccagg

SEQ ID NO: 4097181 - RNA, 14 nt, Zaire Ebola virus (ZEBOV)
acaaccaaaccagg

SEQ ID NO: 4097182 - RNA, 22 nt, Zaire Ebola virus (ZEBOV)
acaaucaagaugguuuaaucug

SEQ ID NO: 4097183 - RNA, 20 nt, Zaire Ebola virus (ZEBOV)
acaguuaaucauaaacaagg

SEQ ID NO: 4097184 - RNA, 19 nt, Zaire Ebola virus (ZEBOV)
acuggacuacucaggauga

SEQ ID NO: 4097185 - RNA, 20 nt, Zaire Ebola virus (ZEBOV)
agaacagacaacgacagcac

SEQ ID NO: 4097186 - RNA, 14 nt, Zaire Ebola virus (ZEBOV)
agaacucgaagaga

SEQ ID NO: 4097187 - RNA, 21 nt, Zaire Ebola virus (ZEBOV)
agaauuuuugaugucuaaggu

SEQ ID NO: 4097188 - RNA, 14 nt, Zaire Ebola virus (ZEBOV)
agacagcuggccaa

SEQ ID NO: 4097189 - RNA, 16 nt, Zaire Ebola virus (ZEBOV)
agcacugacuuccugg

SEQ ID NO: 4097190 - RNA, 16 nt, Zaire Ebola virus (ZEBOV)
aggauggagacaaugg

SEQ ID NO: 4097191 - RNA, 10 nt, Zaire Ebola virus (ZEBOV)
auaauacacc

SEQ ID NO: 4097192 - RNA, 18 nt, Zaire Ebola virus (ZEBOV)
aucaaagaaaaucauaau

SEQ ID NO: 4097193 - RNA, 12 nt, Zaire Ebola virus (ZEBOV)
augaauaagcau

SEQ ID NO: 4097194 - RNA, 12 nt, Zaire Ebola virus (ZEBOV)
auugcacauacu

SEQ ID NO: 4097195 - RNA, 13 nt, Zaire Ebola virus (ZEBOV)
auuuaucuaaauu

SEQ ID NO: 4097196 - RNA, 15 nt, Zaire Ebola virus (ZEBOV)
auuuuugaugucuaa

SEQ ID NO: 4097197 - RNA, 18 nt, Zaire Ebola virus (ZEBOV)
caaaccaaaagugaugaa

SEQ ID NO: 4097198 - RNA, 19 nt, Zaire Ebola virus (ZEBOV)
caaagguugguuauuaaca

SEQ ID NO: 4097199 - RNA, 16 nt, Zaire Ebola virus (ZEBOV)
aaauuccucugcaaug

SEQ ID NO: 4097200 - RNA, 18 nt, Zaire Ebola virus (ZEBOV)
aacauuagauaaguagau

SEQ ID NO: 4097201 - RNA, 16 nt, Zaire Ebola virus (ZEBOV)
aagagguaugauacaa

SEQ ID NO: 4097202 - RNA, 20 nt, Zaire Ebola virus (ZEBOV)
aaguccccaaaaccacagcg

SEQ ID NO: 4097203 - RNA, 17 nt, Zaire Ebola virus (ZEBOV)
aagugauucuuguacac

SEQ ID NO: 4097204 - RNA, 21 nt, Zaire Ebola virus (ZEBOV)
acagcgagaccgcuggcaaca

SEQ ID NO: 4097205 - RNA, 20 nt, Zaire Ebola virus (ZEBOV)
acguuacauuaaugauacac

SEQ ID NO: 4097206 - RNA, 15 nt, Zaire Ebola virus (ZEBOV)
agagaacaccaacac

SEQ ID NO: 4097207 - RNA, 18 nt, Zaire Ebola virus (ZEBOV)
agaugguuuaaucugugg

SEQ ID NO: 4097208 - RNA, 18 nt, Zaire Ebola virus (ZEBOV)
agccaaaaacaucagugg

SEQ ID NO: 4097209 - RNA, 21 nt, Zaire Ebola virus (ZEBOV)
agccuccgacacucccucugc

SEQ ID NO: 4097210 - RNA, 22 nt, Zaire Ebola virus (ZEBOV)
agccuccgacacucccucugcc

SEQ ID NO: 4097211 - RNA, 19 nt, Zaire Ebola virus (ZEBOV)
aguauccugauacuugcaa

SEQ ID NO: 4097212 - RNA, 17 nt, Zaire Ebola virus (ZEBOV)
aaagcagagaacaccaa

SEQ ID NO: 4097213 - RNA, 23 nt, Zaire Ebola virus (ZEBOV)
aacagacaacgacagcacagccu

SEQ ID NO: 4097214 - RNA, 12 nt, Zaire Ebola virus (ZEBOV)
aacauacagauu

SEQ ID NO: 4097215 - RNA, 20 nt, Zaire Ebola virus (ZEBOV)
aaccaaaccagguccggaca

SEQ ID NO: 4097216 - RNA, 23 nt, Zaire Ebola virus (ZEBOV)
aagguugguuauuaacauacaga

SEQ ID NO: 4097217 - RNA, 18 nt, Zaire Ebola virus (ZEBOV)
aauugguggacaggaugg

SEQ ID NO: 4097218 - RNA, 16 nt, Zaire Ebola virus (ZEBOV)
accagaaauccuauau

SEQ ID NO: 4097219 - RNA, 17 nt, Zaire Ebola virus (ZEBOV)
agaccacaaaaucaugg

SEQ ID NO: 4097220 - RNA, 14 nt, Zaire Ebola virus (ZEBOV)
agauauauaagcau

SEQ ID NO: 4097221 - RNA, 15 nt, Zaire Ebola virus (ZEBOV)
agcuaacucauauau

SEQ ID NO: 4097222 - RNA, 15 nt, Zaire Ebola virus (ZEBOV)
agcuuccaaguugac

SEQ ID NO: 4097223 - RNA, 12 nt, Zaire Ebola virus (ZEBOV)
aguauccugaua

SEQ ID NO: 4097224 - RNA, 14 nt, Zaire Ebola virus (ZEBOV)
aguuuuauagaauc

SEQ ID NO: 4097225 - RNA, 19 nt, Zaire Ebola virus (ZEBOV)
augaauaagcauuuuauca

SEQ ID NO: 4097226 - RNA, 14 nt, Zaire Ebola virus (ZEBOV)
auuaugcuuuuaua

SEQ ID NO: 4097227 - RNA, 18 nt, Zaire Ebola virus (ZEBOV)
auuuuugaugucuaaggu

SEQ ID NO: 4097228 - RNA, 19 nt, Zaire Ebola virus (ZEBOV)
caagauaccggagaagaga

SEQ ID NO: 4097229 - RNA, 19 nt, Zaire Ebola virus (ZEBOV)
cagcacagccuccgacacu

SEQ ID NO: 4097230 - RNA, 17 nt, Zaire Ebola virus (ZEBOV)
cagcuuccaaguugaca

SEQ ID NO: 4097231 - RNA, 16 nt, Zaire Ebola virus (ZEBOV)
cauaauuguaacucaa

SEQ ID NO: 4097232 - RNA, 16 nt, Zaire Ebola virus (ZEBOV)
cccagggaccaacaca

SEQ ID NO: 4097233 - RNA, 22 nt, Zaire Ebola virus (ZEBOV)
ccucugcaaugguucaagugca

SEQ ID NO: 4097234 - RNA, 18 nt, Zaire Ebola virus (ZEBOV)
cgcagaacagacaacgac

SEQ ID NO: 4097235 - RNA, 11 nt, Zaire Ebola virus (ZEBOV)
gaacagacaac

SEQ ID NO: 4097236 - RNA, 13 nt, Zaire Ebola virus (ZEBOV)
gacaaaugauaau

SEQ ID NO: 4097237 - RNA, 18 nt, Zaire Ebola virus (ZEBOV)
gaccagggggacaaugac

SEQ ID NO: 4097238 - RNA, 12 nt, Zaire Ebola virus (ZEBOV)
gcucuucaacug

SEQ ID NO: 4097239 - RNA, 21 nt, Zaire Ebola virus (ZEBOV)
gcuucagaaaauuccucugca

SEQ ID NO: 4097240 - RNA, 13 nt, Zaire Ebola virus (ZEBOV)
guuguucacaauc

SEQ ID NO: 4097241 - RNA, 20 nt, Zaire Ebola virus (ZEBOV)
uaacauuaaguagucaagga

SEQ ID NO: 4097242 - RNA, 19 nt, Zaire Ebola virus (ZEBOV)
uaccauauuucgggccagc

SEQ ID NO: 4097243 - RNA, 23 nt, Zaire Ebola virus (ZEBOV)
uaccauauuucgggccagcagcc

SEQ ID NO: 4097244 - RNA, 15 nt, Zaire Ebola virus (ZEBOV)
ucaaccgacaaauag

SEQ ID NO: 4097245 - RNA, 17 nt, Zaire Ebola virus (ZEBOV)
ucaaguugaacaacauc

SEQ ID NO: 4097246 - RNA, 16 nt, Zaire Ebola virus (ZEBOV)
ucauggaaaagcucag

SEQ ID NO: 4097247 - RNA, 19 nt, Zaire Ebola virus (ZEBOV)
ucuacuugaucacaauacu

SEQ ID NO: 4097248 - RNA, 20 nt, Zaire Ebola virus (ZEBOV)
ugcaaagguugguuauuaac

SEQ ID NO: 4097249 - RNA, 13 nt, Zaire Ebola virus (ZEBOV)
uguauaaacuuga

SEQ ID NO: 4097250 - RNA, 23 nt, Zaire Ebola virus (ZEBOV)
uuaaacauagccaaugugauucu

SEQ ID NO: 4097251 - RNA, 20 nt, Zaire Ebola virus (ZEBOV)
uucuguauaugcaaauuugu

SEQ ID NO: 4097252 - RNA, 22 nt, Zaire Ebola virus (ZEBOV)
aacacgagcaagagcacugacu

SEQ ID NO: 4097253 - RNA, 13 nt, Zaire Ebola virus (ZEBOV)
aacucaaguugaa

SEQ ID NO: 4097254 - RNA, 13 nt, Zaire Ebola virus (ZEBOV)
acagauucuauau

SEQ ID NO: 4097255 - RNA, 12 nt, Zaire Ebola virus (ZEBOV)
acagcuggccaa

SEQ ID NO: 4097256 - RNA, 11 nt, Zaire Ebola virus (ZEBOV)
acauuaaugau

SEQ ID NO: 4097257 - RNA, 21 nt, Zaire Ebola virus (ZEBOV)
acgacucaagcucuucaacug

SEQ ID NO: 4097258 - RNA, 13 nt, Zaire Ebola virus (ZEBOV)
agauuacuugaca

SEQ ID NO: 4097259 - RNA, 19 nt, Zaire Ebola virus (ZEBOV)
aggaagggaagcugcagug

SEQ ID NO: 4097260 - RNA, 12 nt, Zaire Ebola virus (ZEBOV)
auaaacuugaca

SEQ ID NO: 4097261 - RNA, 13 nt, Zaire Ebola virus (ZEBOV)
auaauauacuugu

SEQ ID NO: 4097262 - RNA, 12 nt, Zaire Ebola virus (ZEBOV)
aucaucauauau

SEQ ID NO: 4097263 - RNA, 17 nt, Zaire Ebola virus (ZEBOV)
augcacaaucaagaugg

SEQ ID NO: 4097264 - RNA, 15 nt, Zaire Ebola virus (ZEBOV)
auugacucagaucca

SEQ ID NO: 4097265 - RNA, 20 nt, Zaire Ebola virus (ZEBOV)
auuuacacgaucguuuuaua

SEQ ID NO: 4097266 - RNA, 13 nt, Zaire Ebola virus (ZEBOV)
caacaacaacacu

SEQ ID NO: 4097267 - RNA, 19 nt, Zaire Ebola virus (ZEBOV)
caaggaagggaagcugcag

SEQ ID NO: 4097268 - RNA, 16 nt, Zaire Ebola virus (ZEBOV)
caaucggacuggccug

SEQ ID NO: 4097269 - RNA, 13 nt, Zaire Ebola virus (ZEBOV)
cacucccucugcc

SEQ ID NO: 4097270 - RNA, 20 nt, Zaire Ebola virus (ZEBOV)
cacuugugaguaucagcccu

SEQ ID NO: 4097271 - RNA, 20 nt, Zaire Ebola virus (ZEBOV)
ccggacccccaaaagcagag

SEQ ID NO: 4097272 - RNA, 18 nt, Zaire Ebola virus (ZEBOV)
cugagagccacaacugag

SEQ ID NO: 4097273 - RNA, 20 nt, Zaire Ebola virus (ZEBOV)
cuucagaaaauuccucugca

SEQ ID NO: 4097274 - RNA, 19 nt, Zaire Ebola virus (ZEBOV)
cuugaugaagauuaagaaa

SEQ ID NO: 4097275 - RNA, 16 nt, Zaire Ebola virus (ZEBOV)
gaacauaacagacaaa

SEQ ID NO: 4097276 - RNA, 23 nt, Zaire Ebola virus (ZEBOV)
gaauuauuaucacaauaaaagug

SEQ ID NO: 4097277 - RNA, 17 nt, Zaire Ebola virus (ZEBOV)
gacaacgacagcacagc

SEQ ID NO: 4097278 - RNA, 13 nt, Zaire Ebola virus (ZEBOV)
gacauugcccuuc

SEQ ID NO: 4097279 - RNA, 18 nt, Zaire Ebola virus (ZEBOV)
gauaaacuugaugaagau

SEQ ID NO: 4097280 - RNA, 13 nt, Zaire Ebola virus (ZEBOV)
gauacuugcaaag

SEQ ID NO: 4097281 - RNA, 23 nt, Zaire Ebola virus (ZEBOV)
gccacaguuauagccauaauugu

SEQ ID NO: 4097282 - RNA, 21 nt, Zaire Ebola virus (ZEBOV)
gccaccacaacaaguccccaa

SEQ ID NO: 4097283 - RNA, 12 nt, Zaire Ebola virus (ZEBOV)
guucacaaucca

SEQ ID NO: 4097284 - RNA, 17 nt, Zaire Ebola virus (ZEBOV)
uaacaacccuugccaca

SEQ ID NO: 4097285 - RNA, 18 nt, Zaire Ebola virus (ZEBOV)
uaauauaugaagagguau

SEQ ID NO: 4097286 - RNA, 21 nt, Zaire Ebola virus (ZEBOV)
uacacgaucguuuuauaauua

SEQ ID NO: 4097287 - RNA, 17 nt, Zaire Ebola virus (ZEBOV)
uagccagugugacuugg

SEQ ID NO: 4097288 - RNA, 22 nt, Zaire Ebola virus (ZEBOV)
ucaaacggagccaaaaacauca

SEQ ID NO: 4097289 - RNA, 14 nt, Zaire Ebola virus (ZEBOV)
ucaacuguuccuga

SEQ ID NO: 4097290 - RNA, 18 nt, Zaire Ebola virus (ZEBOV)
ucaaguugaacaacauca

SEQ ID NO: 4097291 - RNA, 21 nt, Zaire Ebola virus (ZEBOV)
ucacauguguuagguuucaca

SEQ ID NO: 4097292 - RNA, 15 nt, Zaire Ebola virus (ZEBOV)
ucugaggcaacucaa

SEQ ID NO: 4097293 - RNA, 13 nt, Zaire Ebola virus (ZEBOV)
ugauacuugcaaa

SEQ ID NO: 4097294 - RNA, 18 nt, Zaire Ebola virus (ZEBOV)
uuaaauuacauuaugcuu

SEQ ID NO: 4097295 - RNA, 16 nt, Zaire Ebola virus (ZEBOV)
uuacaccauugucuuu

SEQ ID NO: 4097296 - RNA, 19 nt, Zaire Ebola virus (ZEBOV)
uuacuagccguuuuucaaa

SEQ ID NO: 4097297 - RNA, 17 nt, Zaire Ebola virus (ZEBOV)
uucaaauguuaaucuuu

SEQ ID NO: 4097298 - RNA, 13 nt, Zaire Ebola virus (ZEBOV)
uugagacagcugg

SEQ ID NO: 4097299 - RNA, 22 nt, Zaire Ebola virus [ZEBOV]
aaaaaccaggacucagaauccc

SEQ ID NO: 4097300 - RNA, 14 nt, Zaire Ebola virus [ZEBOV]
aaaaucauggcuuc

SEQ ID NO: 4097301 - RNA, 16 nt, Zaire Ebola virus [ZEBOV]
aaaauugaucagauua

SEQ ID NO: 4097302 - RNA, 22 nt, Zaire Ebola virus [ZEBOV]
aaaugcaacccuaauuuacauu

SEQ ID NO: 4097303 - RNA, 14 nt, Zaire Ebola virus [ZEBOV]
aaauguagaacuua

SEQ ID NO: 4097304 - RNA, 22 nt, Zaire Ebola virus [ZEBOV]
aacuuaacaaaagacucauaau

SEQ ID NO: 4097305 - RNA, 16 nt, Zaire Ebola virus [ZEBOV]
aagaacauaacagaca

SEQ ID NO: 4097306 - RNA, 17 nt, Zaire Ebola virus [ZEBOV]
aagagagugccagcagc

SEQ ID NO: 4097307 - RNA, 13 nt, Zaire Ebola virus [ZEBOV]
aaggauugauuga

SEQ ID NO: 4097308 - RNA, 16 nt, Zaire Ebola virus [ZEBOV]
aagugauucuuguaca

SEQ ID NO: 4097309 - RNA, 12 nt, Zaire Ebola virus [ZEBOV]
aauagcagaggc

SEQ ID NO: 4097310 - RNA, 20 nt, Zaire Ebola virus [ZEBOV]
aaucucguaucgcucguaau

SEQ ID NO: 4097311 - RNA, 18 nt, Zaire Ebola virus [ZEBOV]
aaugauaaacuugaugaa

SEQ ID NO: 4097312 - RNA, 15 nt, Zaire Ebola virus [ZEBOV]
aaugguuaauuguaa

SEQ ID NO: 4097313 - RNA, 19 nt, Zaire Ebola virus [ZEBOV]
aauuugagucuuaaugcaa

SEQ ID NO: 4097314 - RNA, 21 nt, Zaire Ebola virus [ZEBOV]
acaacagcacccauaauacac

SEQ ID NO: 4097315 - RNA, 14 nt, Zaire Ebola virus [ZEBOV]
acaaccaaaccagg

SEQ ID NO: 4097316 - RNA, 15 nt, Zaire Ebola virus [ZEBOV]
acaaguccccaaaac

SEQ ID NO: 4097317 - RNA, 19 nt, Zaire Ebola virus [ZEBOV]
acaauacuccguauaccua

SEQ ID NO: 4097318 - RNA, 15 nt, Zaire Ebola virus [ZEBOV]
acacucccucugcca

SEQ ID NO: 4097319 - RNA, 15 nt, Zaire Ebola virus [ZEBOV]
acaucucugcuuuca

SEQ ID NO: 4097320 - RNA, 20 nt, Zaire Ebola virus [ZEBOV]
accccgccaccacaacaagu

SEQ ID NO: 4097321 - RNA, 21 nt, Zaire Ebola virus [ZEBOV]
acucaauaguuaucuugacau

SEQ ID NO: 4097322 - RNA, 18 nt, Zaire Ebola virus [ZEBOV]
guacagacauugcccuuc

SEQ ID NO: 4097323 - RNA, 17 nt, Zaire Ebola virus [ZEBOV]
guccccaaaaccacagc

SEQ ID NO: 4097324 - RNA, 21 nt, Zaire Ebola virus [ZEBOV]
uaagauuacuugacaaaugau

SEQ ID NO: 4097325 - RNA, 24 nt, Zaire Ebola virus [ZEBOV]
uaauacacccguguauaaacuuga

SEQ ID NO: 4097326 - RNA, 19 nt, Zaire Ebola virus [ZEBOV]
uauaacuuaccuacuagcc

SEQ ID NO: 4097327 - RNA, 16 nt, Zaire Ebola virus [ZEBOV]
uauuaacauacagauu

SEQ ID NO: 4097328 - RNA, 20 nt, Zaire Ebola virus [ZEBOV]
ucaaacggagccaaaaacau

SEQ ID NO: 4097329 - RNA, 14 nt, Zaire Ebola virus [ZEBOV]
ucaaaucaaugaaa

SEQ ID NO: 4097330 - RNA, 18 nt, Zaire Ebola virus [ZEBOV]
ucaaaucaaugaaaccag

SEQ ID NO: 4097331 - RNA, 22 nt, Zaire Ebola virus [ZEBOV]
ucaaggaagggaagcugcagug

SEQ ID NO: 4097332 - RNA, 16 nt, Zaire Ebola virus [ZEBOV]
ucacaaccaaaccagg

SEQ ID NO: 4097333 - RNA, 17 nt, Zaire Ebola virus [ZEBOV]
ucacaguuaaucauaaa

SEQ ID NO: 4097334 - RNA, 21 nt, Zaire Ebola virus [ZEBOV]
ucacauguguuagguuucaca

SEQ ID NO: 4097335 - RNA, 14 nt, Zaire Ebola virus [ZEBOV]
ucacuguaagccag

SEQ ID NO: 4097336 - RNA, 21 nt, Zaire Ebola virus [ZEBOV]
ucuuccgacccagggaccaac

SEQ ID NO: 4097337 - RNA, 17 nt, Zaire Ebola virus [ZEBOV]
ugagucuuaaugcaaau

SEQ ID NO: 4097338 - RNA, 13 nt, Zaire Ebola virus [ZEBOV]
ugauuggaccaag

SEQ ID NO: 4097339 - RNA, 16 nt, Zaire Ebola virus [ZEBOV]
ugcccuucuaauuaag

SEQ ID NO: 4097340 - RNA, 18 nt, Zaire Ebola virus [ZEBOV]
ugcugcaaucggacuggc

SEQ ID NO: 4097341 - RNA, 14 nt, Zaire Ebola virus [ZEBOV]
uuacaccauugucu

SEQ ID NO: 4097342 - RNA, 19 nt, Zaire Ebola virus [ZEBOV]
uuauuaacauacagauuau

SEQ ID NO: 4097343 - RNA, 12 nt, Zaire Ebola virus [ZEBOV]
uuauuacuagcc

SEQ ID NO: 4097344 - RNA, 17 nt, Zaire Ebola virus [ZEBOV]
uucauaaucagauauau

SEQ ID NO: 4097345 - RNA, 22 nt, Zaire Ebola virus [ZEBOV]
uuggauuggaaauguggagaaa

SEQ ID NO: 4097346 - RNA, 15 nt, Zaire Ebola virus [ZEBOV]
uuucaaaguucaauu

SEQ ID NO: 4097347 - RNA, 11 nt, Zaire Ebola virus [ZEBOV]
aaaaccaggac

SEQ ID NO: 4097348 - RNA, 16 nt, Zaire Ebola virus [ZEBOV]
aaacaagguuugacau

SEQ ID NO: 4097349 - RNA, 15 nt, Zaire Ebola virus [ZEBOV]
aacaucauagaauug

SEQ ID NO: 4097350 - RNA, 20 nt, Zaire Ebola virus [ZEBOV]
aacauuagauaaguagauua

SEQ ID NO: 4097351 - RNA, 17 nt, Zaire Ebola virus [ZEBOV]
aacucuauacucguaau

SEQ ID NO: 4097352 - RNA, 16 nt, Zaire Ebola virus [ZEBOV]
aacugcugaacuauag

SEQ ID NO: 4097353 - RNA, 15 nt, Zaire Ebola virus [ZEBOV]
aacuuauucaguacu

SEQ ID NO: 4097354 - RNA, 16 nt, Zaire Ebola virus [ZEBOV]
aagagguaugauacaa

SEQ ID NO: 4097355 - RNA, 21 nt, Zaire Ebola virus [ZEBOV]
aagguugguuauuaacauaca

SEQ ID NO: 4097356 - RNA, 22 nt, Zaire Ebola virus [ZEBOV]
aauacucauauuucuugauaau

SEQ ID NO: 4097357 - RNA, 12 nt, Zaire Ebola virus [ZEBOV]
aaucuaagauua

SEQ ID NO: 4097358 - RNA, 14 nt, Zaire Ebola virus [ZEBOV]
aaugauaaacuuga

SEQ ID NO: 4097359 - RNA, 19 nt, Zaire Ebola virus [ZEBOV]
acaaaagacucauaauaua

SEQ ID NO: 4097360 - RNA, 15 nt, Zaire Ebola virus [ZEBOV]
acaaaauugaucaga

SEQ ID NO: 4097361 - RNA, 22 nt, Zaire Ebola virus [ZEBOV]
acaaauaauccuacuauaauca

SEQ ID NO: 4097362 - RNA, 16 nt, Zaire Ebola virus [ZEBOV]
acaacaucaccgcaga

SEQ ID NO: 4097363 - RNA, 23 nt, Zaire Ebola virus [ZEBOV]
acaacccuaacagugaucaaaga

SEQ ID NO: 4097364 - RNA, 23 nt, Zaire Ebola virus [ZEBOV]
acaauugguggacaggauggaga

SEQ ID NO: 4097365 - RNA, 22 nt, Zaire Ebola virus [ZEBOV]
acacaacaacugaagaccacaa

SEQ ID NO: 4097366 - RNA, 16 nt, Zaire Ebola virus [ZEBOV]
acacucaucaccaaga

SEQ ID NO: 4097367 - RNA, 12 nt, Zaire Ebola virus [ZEBOV]
acagacaaaauu

SEQ ID NO: 4097368 - RNA, 14 nt, Zaire Ebola virus [ZEBOV]
acagcacagccucc

SEQ ID NO: 4097369 - RNA, 16 nt, Zaire Ebola virus [ZEBOV]
acaugauuggaccaag

SEQ ID NO: 4097370 - RNA, 21 nt, Zaire Ebola virus [ZEBOV]
accauauuucgggccagcagc

SEQ ID NO: 4097371 - RNA, 22 nt, Zaire Ebola virus [ZEBOV]
accauauuucgggccagcagcc

SEQ ID NO: 4097372 - RNA, 18 nt, Zaire Ebola virus [ZEBOV]
acccaaaccaaaagugau

SEQ ID NO: 4097373 - RNA, 17 nt, Zaire Ebola virus [ZEBOV]
accgcagccggaccccc

SEQ ID NO: 4097374 - RNA, 19 nt, Zaire Ebola virus [ZEBOV]
acguuacauuaaugauaca

SEQ ID NO: 4097375 - RNA, 22 nt, Zaire Ebola virus [ZEBOV]
acuaaaggugcuuuacaccauu

SEQ ID NO: 4097376 - RNA, 15 nt, Zaire Ebola virus [ZEBOV]
acucaagcucuucaa

SEQ ID NO: 4097377 - RNA, 20 nt, Zaire Ebola virus [ZEBOV]
acucaauaguuaucuugaca

SEQ ID NO: 4097378 - RNA, 22 nt, Zaire Ebola virus [ZEBOV]
agaauugcuuuauuauaugaau

SEQ ID NO: 4097379 - RNA, 22 nt, Zaire Ebola virus [ZEBOV]
agacaacgacagcacagccucc

SEQ ID NO: 4097380 - RNA, 13 nt, Zaire Ebola virus [ZEBOV]
agacagcuggcca

SEQ ID NO: 4097381 - RNA, 13 nt, Zaire Ebola virus [ZEBOV]
agaguugucuuuc

SEQ ID NO: 4097382 - RNA, 21 nt, Zaire Ebola virus [ZEBOV]
agcauuuuaucaccagaaauc

SEQ ID NO: 4097383 - RNA, 17 nt, Zaire Ebola virus [ZEBOV]
agccauaauuguaacuc

SEQ ID NO: 4097384 - RNA, 19 nt, Zaire Ebola virus [ZEBOV]
agcuuaaaauauaaaugua

SEQ ID NO: 4097385 - RNA, 21 nt, Zaire Ebola virus [ZEBOV]
aggcugacuaaaacacuauau

SEQ ID NO: 4097386 - RNA, 22 nt, Zaire Ebola virus [ZEBOV]
agugaagaguugucuuucacag

SEQ ID NO: 4097387 - RNA, 14 nt, Zaire Ebola virus [ZEBOV]
aguuaucuugacau

SEQ ID NO: 4097388 - RNA, 19 nt, Zaire Ebola virus [ZEBOV]
aguucaauuugagucuuaa

SEQ ID NO: 4097389 - RNA, 18 nt, Zaire Ebola virus [ZEBOV]
auaaacaagguuugacau

SEQ ID NO: 4097390 - RNA, 13 nt, Zaire Ebola virus [ZEBOV]
auaaacuugacau

SEQ ID NO: 4097391 - RNA, 14 nt, Zaire Ebola virus [ZEBOV]
auaauauaauacac

SEQ ID NO: 4097392 - RNA, 22 nt, Zaire Ebola virus [ZEBOV]
auaguauccugauacuugcaaa

SEQ ID NO: 4097393 - RNA, 16 nt, Zaire Ebola virus [ZEBOV]
auccugauacuugcaa

SEQ ID NO: 4097394 - RNA, 16 nt, Zaire Ebola virus [ZEBOV]
aucgaaccacaugauu

SEQ ID NO: 4097395 - RNA, 12 nt, Zaire Ebola virus [ZEBOV]
aucucugcuuuc

SEQ ID NO: 4097396 - RNA, 17 nt, Zaire Ebola virus [ZEBOV]
auuagaggagacacuuu

SEQ ID NO: 4097397 - RNA, 15 nt, Zaire Ebola virus [ZEBOV]
auucuguauaugcaa

SEQ ID NO: 4097398 - RNA, 16 nt, Zaire Ebola virus [ZEBOV]
auuuuugaugucuaag

SEQ ID NO: 4097399 - RNA, 14 nt, Zaire Ebola virus [ZEBOV]
caaaagugaugaag

SEQ ID NO: 4097400 - RNA, 17 nt, Zaire Ebola virus [ZEBOV]
caaaagugaugaagauu

SEQ ID NO: 4097401 - RNA, 22 nt, Zaire Ebola virus [ZEBOV]
caaagguugguuauuaacauac

SEQ ID NO: 4097402 - RNA, 19 nt, Zaire Ebola virus [ZEBOV]
caauccaaguacagacauu

SEQ ID NO: 4097403 - RNA, 12 nt, Zaire Ebola virus [ZEBOV]
caaugaaaccag

SEQ ID NO: 4097404 - RNA, 19 nt, Zaire Ebola virus [ZEBOV]
gcgaauaauagcagaggcu

SEQ ID NO: 4097405 - RNA, 22 nt, Zaire Ebola virus [ZEBOV]
gcgagaccgcuggcaacaacaa

SEQ ID NO: 4097406 - RNA, 13 nt, Zaire Ebola virus [ZEBOV]
gcuaaugcacaau

SEQ ID NO: 4097407 - RNA, 23 nt, Zaire Ebola virus [ZEBOV]
ggagucgcaggacugaucacagg

SEQ ID NO: 4097408 - RNA, 20 nt, Zaire Ebola virus [ZEBOV]
gguccggacaacagcaccca

SEQ ID NO: 4097409 - RNA, 16 nt, Zaire Ebola virus [ZEBOV]
guauaaacuugacauc

SEQ ID NO: 4097410 - RNA, 21 nt, Zaire Ebola virus [ZEBOV]
guauccugauacuugcaaagg

SEQ ID NO: 4097411 - RNA, 19 nt, Zaire Ebola virus [ZEBOV]
guccccaaucccucacaac

SEQ ID NO: 4097412 - RNA, 20 nt, Zaire Ebola virus [ZEBOV]
uaaccacagauaaauccuca

SEQ ID NO: 4097413 - RNA, 15 nt, Zaire Ebola virus [ZEBOV]
uaguauccugauacu

SEQ ID NO: 4097414 - RNA, 20 nt, Zaire Ebola virus [ZEBOV]
uaguauccugauacuugcaa

SEQ ID NO: 4097415 - RNA, 11 nt, Zaire Ebola virus [ZEBOV]
uauaauacacu

SEQ ID NO: 4097416 - RNA, 22 nt, Zaire Ebola virus [ZEBOV]
uauuaaguaacccaaaccaaaa

SEQ ID NO: 4097417 - RNA, 13 nt, Zaire Ebola virus [ZEBOV]
ucaaugaaaccag

SEQ ID NO: 4097418 - RNA, 14 nt, Zaire Ebola virus [ZEBOV]
ucaaugaaaccagg

SEQ ID NO: 4097419 - RNA, 22 nt, Zaire Ebola virus [ZEBOV]
ucacaguuaaucauaaacaagg

SEQ ID NO: 4097420 - RNA, 21 nt, Zaire Ebola virus [ZEBOV]
ucagaaaauuccucugcaaug

SEQ ID NO: 4097421 - RNA, 14 nt, Zaire Ebola virus [ZEBOV]
uccugagagccaca

SEQ ID NO: 4097422 - RNA, 17 nt, Zaire Ebola virus [ZEBOV]
ucuauuuaguaauccgu

SEQ ID NO: 4097423 - RNA, 18 nt, Zaire Ebola virus [ZEBOV]
ucuucaacuguuccugag

SEQ ID NO: 4097424 - RNA, 13 nt, Zaire Ebola virus [ZEBOV]
ugacuaaaacacu

SEQ ID NO: 4097425 - RNA, 17 nt, Zaire Ebola virus [ZEBOV]
ugcauaguauccugaua

SEQ ID NO: 4097426 - RNA, 17 nt, Zaire Ebola virus [ZEBOV]
ugcuuacaucugaggau

SEQ ID NO: 4097427 - RNA, 17 nt, Zaire Ebola virus [ZEBOV]
uuauccucaaauugccu

SEQ ID NO: 4097428 - RNA, 14 nt, Zaire Ebola virus [ZEBOV]
uucgggccagcagc

SEQ ID NO: 4097429 - RNA, 21 nt, Zaire Ebola virus [ZEBOV]
uuguaacucaauauucuaacu

SEQ ID NO: 4097430 - RNA, 17 nt, Zaire Ebola virus [ZEBOV]
uuguucacaauccaagu

SEQ ID NO: 4097431 - RNA, 20 nt, Zaire Ebola virus [ZEBOV]
uuuaaccacagauaaauccu

SEQ ID NO: 4097432 - RNA, 15 nt, Zaire Ebola virus [ZEBOV]
uuuaucaccagaaau

SEQ ID NO: 4097433 - RNA, 22 nt, Zaire Ebola virus [ZEBOV]
uuuaucuaaauuaaauuacauu

SEQ ID NO: 4097434 - RNA, 16 nt, Zaire Ebola virus [ZEBOV]
uuucauaaucagauau

SEQ ID NO: 4097435 - RNA, 22 nt, Zaire Ebola virus [ZEBOV]
acucuacaggagguagcaacga

SEQ ID NO: 4097436 - RNA, 20 nt, Zaire Ebola virus [ZEBOV]
acugaagaccacaaaaucau

SEQ ID NO: 4097437 - RNA, 18 nt, Zaire Ebola virus [ZEBOV]
agaacaccaacacgagca

SEQ ID NO: 4097438 - RNA, 16 nt, Zaire Ebola virus [ZEBOV]
agacaaaauugaucag

SEQ ID NO: 4097439 - RNA, 13 nt, Zaire Ebola virus [ZEBOV]
agauauauaagca

SEQ ID NO: 4097440 - RNA, 13 nt, Zaire Ebola virus [ZEBOV]
agauuauucauga

SEQ ID NO: 4097441 - RNA, 14 nt, Zaire Ebola virus [ZEBOV]
agauugcuucaugg

SEQ ID NO: 4097442 - RNA, 18 nt, Zaire Ebola virus [ZEBOV]
agcauaauaaauaaauac

SEQ ID NO: 4097443 - RNA, 14 nt, Zaire Ebola virus [ZEBOV]
agcgauuuaucuaa

SEQ ID NO: 4097444 - RNA, 13 nt, Zaire Ebola virus [ZEBOV]
agcucagccucaa

SEQ ID NO: 4097445 - RNA, 12 nt, Zaire Ebola virus [ZEBOV]
auaaaacccuuc

SEQ ID NO: 4097446 - RNA, 19 nt, Zaire Ebola virus [ZEBOV]
auaaacuugaugaagauua

SEQ ID NO: 4097447 - RNA, 15 nt, Zaire Ebola virus [ZEBOV]
auaauuguaacucaa

SEQ ID NO: 4097448 - RNA, 18 nt, Zaire Ebola virus [ZEBOV]
auagugauaacaucuauu

SEQ ID NO: 4097449 - RNA, 22 nt, Zaire Ebola virus [ZEBOV]
aucauaaacaagguuugacauc

SEQ ID NO: 4097450 - RNA, 14 nt, Zaire Ebola virus [ZEBOV]
aucuauuuaguaau

SEQ ID NO: 4097451 - RNA, 23 nt, Zaire Ebola virus [ZEBOV]
augauucaaccgacaaauagcua

SEQ ID NO: 4097452 - RNA, 19 nt, Zaire Ebola virus [ZEBOV]
augcaacccuaauuuacau

SEQ ID NO: 4097453 - RNA, 14 nt, Zaire Ebola virus [ZEBOV]
auuugagucuuaau

SEQ ID NO: 4097454 - RNA, 15 nt, Zaire Ebola virus [ZEBOV]
caaaaccacagcgag

SEQ ID NO: 4097455 - RNA, 15 nt, Zaire Ebola virus [ZEBOV]
caaauaauguuuuac

SEQ ID NO: 4097456 - RNA, 18 nt, Zaire Ebola virus [ZEBOV]
caaucggacuggccugga

SEQ ID NO: 4097457 - RNA, 22 nt, Zaire Ebola virus [ZEBOV]
caaugguucaagugcacaguca

SEQ ID NO: 4097458 - RNA, 20 nt, Zaire Ebola virus [ZEBOV]
cacaacaacugaagaccaca

SEQ ID NO: 4097459 - RNA, 22 nt, Zaire Ebola virus [ZEBOV]
cacaacaaguccccaaaaccac

SEQ ID NO: 4097460 - RNA, 18 nt, Zaire Ebola virus [ZEBOV]
cacaaccaaaccaggucc

SEQ ID NO: 4097461 - RNA, 13 nt, Zaire Ebola virus [ZEBOV]
cacaaucaagaug

SEQ ID NO: 4097462 - RNA, 15 nt, Zaire Ebola virus [ZEBOV]
cacagcgagaccgcu

SEQ ID NO: 4097463 - RNA, 16 nt, Zaire Ebola virus [ZEBOV]
caccacaacaaguccc

SEQ ID NO: 4097464 - RNA, 15 nt, Zaire Ebola virus [ZEBOV]
cacccauaauacacc

SEQ ID NO: 4097465 - RNA, 20 nt, Zaire Ebola virus [ZEBOV]
cacgagcaagagcacugacu

SEQ ID NO: 4097466 - RNA, 16 nt, Zaire Ebola virus [ZEBOV]
cacugacuuccuggac

SEQ ID NO: 4097467 - RNA, 13 nt, Zaire Ebola virus [ZEBOV]
cagacauugcccu

SEQ ID NO: 4097468 - RNA, 21 nt, Zaire Ebola virus [ZEBOV]
caggcguuauaauugcaguua

SEQ ID NO: 4097469 - RNA, 15 nt, Zaire Ebola virus [ZEBOV]
cauacagauuauaaa

SEQ ID NO: 4097470 - RNA, 21 nt, Zaire Ebola virus [ZEBOV]
ccaaaccagguccggacaaca

SEQ ID NO: 4097471 - RNA, 18 nt, Zaire Ebola virus [ZEBOV]
ccaagaacauaacagaca

SEQ ID NO: 4097472 - RNA, 21 nt, Zaire Ebola virus [ZEBOV]
cccaaaagcagagaacaccaa

SEQ ID NO: 4097473 - RNA, 20 nt, Zaire Ebola virus [ZEBOV]
ccucugccacgaccgcagcc

SEQ ID NO: 4097474 - RNA, 16 nt, Zaire Ebola virus [ZEBOV]
cgacagcacagccucc

SEQ ID NO: 4097475 - RNA, 17 nt, Zaire Ebola virus [ZEBOV]
cuaacucauauaugcug

SEQ ID NO: 4097476 - RNA, 16 nt, Zaire Ebola virus [ZEBOV]
cucaaaucaaugaaac

SEQ ID NO: 4097477 - RNA, 13 nt, Zaire Ebola virus [ZEBOV]
cucagccucaaau

SEQ ID NO: 4097478 - RNA, 17 nt, Zaire Ebola virus [ZEBOV]
cucuugcacaaagugau

SEQ ID NO: 4097479 - RNA, 14 nt, Zaire Ebola virus [ZEBOV]
cuguauaugcaaau

SEQ ID NO: 4097480 - RNA, 10 nt, Zaire Ebola virus [ZEBOV]
cuucagauug

SEQ ID NO: 4097481 - RNA, 18 nt, Zaire Ebola virus [ZEBOV]
cuucauggaaaagcucag

SEQ ID NO: 4097482 - RNA, 23 nt, Zaire Ebola virus [ZEBOV]
cuucauggaaaagcucagccuca

SEQ ID NO: 4097483 - RNA, 23 nt, Zaire Ebola virus [ZEBOV]
cuugcaaagguugguuauuaaca

SEQ ID NO: 4097484 - RNA, 15 nt, Zaire Ebola virus [ZEBOV]
gaacagacaacgaca

SEQ ID NO: 4097485 - RNA, 13 nt, Zaire Ebola virus [ZEBOV]
gaagcugcagugu

SEQ ID NO: 4097486 - RNA, 21 nt, Zaire Ebola virus [ZEBOV]
gaauugcuuuauuauaugaau

SEQ ID NO: 4097487 - RNA, 20 nt, Zaire Ebola virus [ZEBOV]
gacaucucugcuuucauaau

SEQ ID NO: 4097488 - RNA, 15 nt, Zaire Ebola virus [ZEBOV]
gagcaagagcacuga

SEQ ID NO: 4097489 - RNA, 21 nt, Zaire Ebola virus [ZEBOV]
gaggcgaauaauagcagaggc

SEQ ID NO: 4097490 - RNA, 15 nt, Zaire Ebola virus [ZEBOV]
gagucgcaggacuga

SEQ ID NO: 4097491 - RNA, 20 nt, Zaire Ebola virus [ZEBOV]
gcaugauugcccuaauauau

SEQ ID NO: 4097492 - RNA, 15 nt, Zaire Ebola virus [ZEBOV]
gccagcagcgggaag

SEQ ID NO: 4097493 - RNA, 20 nt, Zaire Ebola virus [ZEBOV]
gcuuuauucuguauaugcaa

SEQ ID NO: 4097494 - RNA, 14 nt, Zaire Ebola virus [ZEBOV]
gggaagcugcagug

SEQ ID NO: 4097495 - RNA, 16 nt, Zaire Ebola virus [ZEBOV]
gguuauuaacauacag

SEQ ID NO: 4097496 - RNA, 18 nt, Zaire Ebola virus [ZEBOV]
guaagccagcuuccaagu

SEQ ID NO: 4097497 - RNA, 22 nt, Zaire Ebola virus [ZEBOV]
cacauucugggaccggacugcu

SEQ ID NO: 4097498 - RNA, 16 nt, Zaire Ebola virus [ZEBOV]
cacgagcaagagcacu

SEQ ID NO: 4097499 - RNA, 17 nt, Zaire Ebola virus [ZEBOV]
cagacaacgacagcaca

SEQ ID NO: 4097500 - RNA, 18 nt, Zaire Ebola virus [ZEBOV]
cagccggacccccaaaag

SEQ ID NO: 4097501 - RNA, 20 nt, Zaire Ebola virus [ZEBOV]
cauaguauccugauacuugc

SEQ ID NO: 4097502 - RNA, 14 nt, Zaire Ebola virus [ZEBOV]
cauuaaugauacac

SEQ ID NO: 4097503 - RNA, 19 nt, Zaire Ebola virus [ZEBOV]
ccauauuucgggccagcag

SEQ ID NO: 4097504 - RNA, 22 nt, Zaire Ebola virus [ZEBOV]
ccggagaagagagugccagcag

SEQ ID NO: 4097505 - RNA, 23 nt, Zaire Ebola virus [ZEBOV]
ccucugccacgaccgcagccgga

SEQ ID NO: 4097506 - RNA, 22 nt, Zaire Ebola virus [ZEBOV]
cgacccagggaccaacacaaca

SEQ ID NO: 4097507 - RNA, 14 nt, Zaire Ebola virus [ZEBOV]
cgagcaagagcacu

SEQ ID NO: 4097508 - RNA, 15 nt, Zaire Ebola virus [ZEBOV]
cgcagccggaccccc

SEQ ID NO: 4097509 - RNA, 15 nt, Zaire Ebola virus [ZEBOV]
cggacaacagcaccc

SEQ ID NO: 4097510 - RNA, 13 nt, Zaire Ebola virus [ZEBOV]
cggagccaaaaac

SEQ ID NO: 4097511 - RNA, 14 nt, Zaire Ebola virus [ZEBOV]
cucaauaguuaucu

SEQ ID NO: 4097512 - RNA, 19 nt, Zaire Ebola virus [ZEBOV]
cucacaguuaaucauaaac

SEQ ID NO: 4097513 - RNA, 19 nt, Zaire Ebola virus [ZEBOV]
cucuucaacuguuccugag

SEQ ID NO: 4097514 - RNA, 21 nt, Zaire Ebola virus [ZEBOV]
cuguggguugagacagcuggc

SEQ ID NO: 4097515 - RNA, 14 nt, Zaire Ebola virus [ZEBOV]
cuuccggaccaggg

SEQ ID NO: 4097516 - RNA, 23 nt, Zaire Ebola virus [ZEBOV]
cuucuuccgacccagggaccaac

SEQ ID NO: 4097517 - RNA, 13 nt, Zaire Ebola virus [ZEBOV]
gaacaacaucacc

SEQ ID NO: 4097518 - RNA, 15 nt, Zaire Ebola virus [ZEBOV]
gaacucgaagagaag

SEQ ID NO: 4097519 - RNA, 16 nt, Zaire Ebola virus [ZEBOV]
gacaaaugauaauaua

SEQ ID NO: 4097520 - RNA, 18 nt, Zaire Ebola virus [ZEBOV]
gacaggauggagacaaug

SEQ ID NO: 4097521 - RNA, 22 nt, Zaire Ebola virus [ZEBOV]
gacaucucugaggcaacucaag

SEQ ID NO: 4097522 - RNA, 21 nt, Zaire Ebola virus [ZEBOV]
gaccaagauaaaauuguucau

SEQ ID NO: 4097523 - RNA, 18 nt, Zaire Ebola virus [ZEBOV]
gccagcagccgagggaau

SEQ ID NO: 4097524 - RNA, 21 nt, Zaire Ebola virus [ZEBOV]
gcucagccucaaaucaaugaa

SEQ ID NO: 4097525 - RNA, 22 nt, Zaire Ebola virus [ZEBOV]
gcugcagcgauggggcggcaca

SEQ ID NO: 4097526 - RNA, 19 nt, Zaire Ebola virus [ZEBOV]
gcuucauggaaaagcucag

SEQ ID NO: 4097527 - RNA, 19 nt, Zaire Ebola virus [ZEBOV]
ggacuacucaggaugaagg

SEQ ID NO: 4097528 - RNA, 15 nt, Zaire Ebola virus [ZEBOV]
gucaaggaagggaag

SEQ ID NO: 4097529 - RNA, 12 nt, Zaire Ebola virus [ZEBOV]
gucaaugcucaa

SEQ ID NO: 4097530 - RNA, 18 nt, Zaire Ebola virus [ZEBOV]
guuuaaccacagauaaau

SEQ ID NO: 4097531 - RNA, 14 nt, Zaire Ebola virus [ZEBOV]
uaaaacccuuccgg

SEQ ID NO: 4097532 - RNA, 14 nt, Zaire Ebola virus [ZEBOV]
uagccaaugugauu

SEQ ID NO: 4097533 - RNA, 14 nt, Zaire Ebola virus [ZEBOV]
ucauaacuaauaac

SEQ ID NO: 4097534 - RNA, 18 nt, Zaire Ebola virus [ZEBOV]
ucauaacuaauaacauua

SEQ ID NO: 4097535 - RNA, 12 nt, Zaire Ebola virus [ZEBOV]
uccuggaccccg

SEQ ID NO: 4097536 - RNA, 14 nt, Zaire Ebola virus [ZEBOV]
ugaauuuaaagcua

SEQ ID NO: 4097537 - RNA, 20 nt, Zaire Ebola virus [ZEBOV]
ugauacaacccuaacaguga

SEQ ID NO: 4097538 - RNA, 20 nt, Zaire Ebola virus [ZEBOV]
ugauucuuauuuuugaauuu

SEQ ID NO: 4097539 - RNA, 18 nt, Zaire Ebola virus [ZEBOV]
ugcugacucaauaguuau

SEQ ID NO: 4097540 - RNA, 23 nt, Zaire Ebola virus [ZEBOV]
aaaauaaguauuucaugacuuac

SEQ ID NO: 4097541 - RNA, 13 nt, Zaire Ebola virus [ZEBOV]
aaagguugguuau

SEQ ID NO: 4097542 - RNA, 16 nt, Zaire Ebola virus [ZEBOV]
aaagguugguuauuaa

SEQ ID NO: 4097543 - RNA, 20 nt, Zaire Ebola virus [ZEBOV]
aaauguaauaggagcuauau

SEQ ID NO: 4097544 - RNA, 18 nt, Zaire Ebola virus [ZEBOV]
aacaaugggaugauucaa

SEQ ID NO: 4097545 - RNA, 21 nt, Zaire Ebola virus [ZEBOV]
aacuugacaucucugaggcaa

SEQ ID NO: 4097546 - RNA, 14 nt, Zaire Ebola virus [ZEBOV]
aagagauuccaaga

SEQ ID NO: 4097547 - RNA, 23 nt, Zaire Ebola virus [ZEBOV]
aauauaugaagagguaugauaca

SEQ ID NO: 4097548 - RNA, 18 nt, Zaire Ebola virus [ZEBOV]
aaucaauacggugauuca

SEQ ID NO: 4097549 - RNA, 18 nt, Zaire Ebola virus [ZEBOV]
aaucuuucucauugcaca

SEQ ID NO: 4097550 - RNA, 22 nt, Zaire Ebola virus [ZEBOV]
aaugauaauauaauacacugga

SEQ ID NO: 4097551 - RNA, 18 nt, Zaire Ebola virus [ZEBOV]
aauugcaguuaucgcuuu

SEQ ID NO: 4097552 - RNA, 12 nt, Zaire Ebola virus [ZEBOV]
aauuugucuuuu

SEQ ID NO: 4097553 - RNA, 14 nt, Zaire Ebola virus [ZEBOV]
acaacgacagcaca

SEQ ID NO: 4097554 - RNA, 17 nt, Zaire Ebola virus [ZEBOV]
acaacgacagcacagcc

SEQ ID NO: 4097555 - RNA, 18 nt, Zaire Ebola virus [ZEBOV]
acaaguccccaaaaccac

SEQ ID NO: 4097556 - RNA, 14 nt, Zaire Ebola virus [ZEBOV]
acagauaaauccuc

SEQ ID NO: 4097557 - RNA, 19 nt, Zaire Ebola virus [ZEBOV]
acauuaaugauacacuugu

SEQ ID NO: 4097558 - RNA, 20 nt, Zaire Ebola virus [ZEBOV]
acauuaugcuuuuauaacuu

SEQ ID NO: 4097559 - RNA, 14 nt, Zaire Ebola virus [ZEBOV]
acccuaacagugau

SEQ ID NO: 4097560 - RNA, 16 nt, Zaire Ebola virus [ZEBOV]
acccuuccggaccagg

SEQ ID NO: 4097561 - RNA, 18 nt, Zaire Ebola virus [ZEBOV]
agagcacugacuuccugg

SEQ ID NO: 4097562 - RNA, 19 nt, Zaire Ebola virus [ZEBOV]
agauuacuugacaaaugau

SEQ ID NO: 4097563 - RNA, 13 nt, Zaire Ebola virus [ZEBOV]
agcaagagcacug

SEQ ID NO: 4097564 - RNA, 19 nt, Zaire Ebola virus [ZEBOV]
agcacagccuccgacacuc

SEQ ID NO: 4097565 - RNA, 19 nt, Zaire Ebola virus [ZEBOV]
aggauuuaauuauauggau

SEQ ID NO: 4097566 - RNA, 21 nt, Zaire Ebola virus [ZEBOV]
agguuucacagauucuauaua

SEQ ID NO: 4097567 - RNA, 15 nt, Zaire Ebola virus [ZEBOV]
aguacuauaaucacu

SEQ ID NO: 4097568 - RNA, 21 nt, Zaire Ebola virus [ZEBOV]
aguauuucaugacuuacuaau

SEQ ID NO: 4097569 - RNA, 19 nt, Zaire Ebola virus [ZEBOV]
agucaaggaagggaagcug

SEQ ID NO: 4097570 - RNA, 14 nt, Zaire Ebola virus [ZEBOV]
auaaacuugacauc

SEQ ID NO: 4097571 - RNA, 13 nt, Zaire Ebola virus [ZEBOV]
auaauuguaacuc

SEQ ID NO: 4097572 - RNA, 23 nt, Zaire Ebola virus [ZEBOV]
auauaaccugccaagcauaccuc

SEQ ID NO: 4097573 - RNA, 14 nt, Zaire Ebola virus [ZEBOV]
auauauuacuaacu

SEQ ID NO: 4097574 - RNA, 18 nt, Zaire Ebola virus [ZEBOV]
aucauagaauugcuuuau

SEQ ID NO: 4097575 - RNA, 21 nt, Zaire Ebola virus [ZEBOV]
auccaguuuuauagaaucuuc

SEQ ID NO: 4097576 - RNA, 15 nt, Zaire Ebola virus [ZEBOV]
aucuaacaacccuug

SEQ ID NO: 4097577 - RNA, 15 nt, Zaire Ebola virus [ZEBOV]
augcuuuuauaacuu

SEQ ID NO: 4097578 - RNA, 15 nt, Zaire Ebola virus [ZEBOV]
auuaacauacagauu

SEQ ID NO: 4097579 - RNA, 17 nt, Zaire Ebola virus [ZEBOV]
auucuuauuuuugaauu

SEQ ID NO: 4097580 - RNA, 16 nt, Zaire Ebola virus [ZEBOV]
auugucuuuuuucucu

SEQ ID NO: 4097581 - RNA, 15 nt, Zaire Ebola virus [ZEBOV]
auuuuaucaccagaa

SEQ ID NO: 4097582 - RNA, 23 nt, Zaire Ebola virus [ZEBOV]
caaacggagccaaaaacaucagu

SEQ ID NO: 4097583 - RNA, 13 nt, Zaire Ebola virus [ZEBOV]
caacgacagcaca

SEQ ID NO: 4097584 - RNA, 15 nt, Zaire Ebola virus [ZEBOV]
caacugaagaccaca

SEQ ID NO: 4097585 - RNA, 16 nt, Zaire Ebola virus [ZEBOV]
caaucccucacaacca

SEQ ID NO: 4097586 - RNA, 22 nt, Zaire Ebola virus [ZEBOV]
cacaaaaucauggcuucagaaa

SEQ ID NO: 4097587 - RNA, 17 nt, Zaire Ebola virus [ZEBOV]
cacaaccaaaccagguc

SEQ ID NO: 4097588 - RNA, 15 nt, Zaire Ebola virus [ZEBOV]
cagacaacgacagca

SEQ ID NO: 4097589 - RNA, 21 nt, Zaire Ebola virus [ZEBOV]
cagcuggccaacgagacgacu

SEQ ID NO: 4097590 - RNA, 19 nt, Zaire Ebola virus [ZEBOV]
caggacucagaaucccuca

SEQ ID NO: 4097591 - RNA, 23 nt, Zaire Ebola virus [ZEBOV]
cauaaacaagguuugacaucaau

SEQ ID NO: 4097592 - RNA, 16 nt, Zaire Ebola virus [ZEBOV]
cauaacagacaaaauu

SEQ ID NO: 4097593 - RNA, 15 nt, Zaire Ebola virus [ZEBOV]
cauagaauugcuuua

SEQ ID NO: 4097594 - RNA, 22 nt, Zaire Ebola virus [ZEBOV]
cauuacuggacuacucaggaug

SEQ ID NO: 4097595 - RNA, 17 nt, Zaire Ebola virus [ZEBOV]
ccagggaccaacacaac

SEQ ID NO: 4097596 - RNA, 18 nt, Zaire Ebola virus [ZEBOV]
ccauauuucgggccagca

SEQ ID NO: 4097597 - RNA, 16 nt, Zaire Ebola virus [ZEBOV]
ccccaaaaccacagcg

SEQ ID NO: 4097598 - RNA, 19 nt, Zaire Ebola virus [ZEBOV]
ccgacccagggaccaacac

SEQ ID NO: 4097599 - RNA, 21 nt, Zaire Ebola virus [ZEBOV]
cguccauuagaggagacacuu

SEQ ID NO: 4097600 - RNA, 21 nt, Zaire Ebola virus [ZEBOV]
cucagggauagugauaacauc

SEQ ID NO: 4097601 - RNA, 16 nt, Zaire Ebola virus [ZEBOV]
cuuaauuaccaauacu

SEQ ID NO: 4097602 - RNA, 14 nt, Zaire Ebola virus [ZEBOV]
cuuccgacccaggg

SEQ ID NO: 4097603 - RNA, 13 nt, Zaire Ebola virus [ZEBOV]
cuuuuugcccuua

SEQ ID NO: 4097604 - RNA, 20 nt, Zaire Ebola virus [ZEBOV]
gaaaauuccucugcaauggu

SEQ ID NO: 4097605 - RNA, 15 nt, Zaire Ebola virus [ZEBOV]
gaauuauuaucacaa

SEQ ID NO: 4097606 - RNA, 20 nt, Zaire Ebola virus [ZEBOV]
gacacccuuacaaaaaccag

SEQ ID NO: 4097607 - RNA, 19 nt, Zaire Ebola virus [ZEBOV]
gaccagggggacaaugaca

SEQ ID NO: 4097608 - RNA, 19 nt, Zaire Ebola virus [ZEBOV]
gauucuuguacacaaauaa

SEQ ID NO: 4097609 - RNA, 21 nt, Zaire Ebola virus [ZEBOV]
gcgaacuucuuccgacccagg

SEQ ID NO: 4097610 - RNA, 23 nt, Zaire Ebola virus [ZEBOV]
aaaaucgggacccauuucuaggu

SEQ ID NO: 4097611 - RNA, 21 nt, Zaire Ebola virus [ZEBOV]
aaacuuauucaguacuauaau

SEQ ID NO: 4097612 - RNA, 21 nt, Zaire Ebola virus [ZEBOV]
aacaucaccgcagaacagaca

SEQ ID NO: 4097613 - RNA, 20 nt, Zaire Ebola virus [ZEBOV]
aacgaaaacaggaagaauuu

SEQ ID NO: 4097614 - RNA, 18 nt, Zaire Ebola virus [ZEBOV]
aacucauauaugcugacu

SEQ ID NO: 4097615 - RNA, 19 nt, Zaire Ebola virus [ZEBOV]
aacugaagaccacaaaauc

SEQ ID NO: 4097616 - RNA, 18 nt, Zaire Ebola virus [ZEBOV]
aagagagugccagcagcg

SEQ ID NO: 4097617 - RNA, 12 nt, Zaire Ebola virus [ZEBOV]
aagguugguuau

SEQ ID NO: 4097618 - RNA, 14 nt, Zaire Ebola virus [ZEBOV]
aaucaagaugguuu

SEQ ID NO: 4097619 - RNA, 14 nt, Zaire Ebola virus [ZEBOV]
aauccucacuguaa

SEQ ID NO: 4097620 - RNA, 17 nt, Zaire Ebola virus [ZEBOV]
aauuaauaagaugugca

SEQ ID NO: 4097621 - RNA, 20 nt, Zaire Ebola virus [ZEBOV]
acaauccaaguacagacauu

SEQ ID NO: 4097622 - RNA, 16 nt, Zaire Ebola virus [ZEBOV]
acaugccacauucugg

SEQ ID NO: 4097623 - RNA, 19 nt, Zaire Ebola virus [ZEBOV]
accacaugauuggaccaag

SEQ ID NO: 4097624 - RNA, 15 nt, Zaire Ebola virus [ZEBOV]
acgacagcacagccu

SEQ ID NO: 4097625 - RNA, 14 nt, Zaire Ebola virus [ZEBOV]
acgagacgacucaa

SEQ ID NO: 4097626 - RNA, 15 nt, Zaire Ebola virus [ZEBOV]
acgcaccuuuucaau

SEQ ID NO: 4097627 - RNA, 12 nt, Zaire Ebola virus [ZEBOV]
acuugcaaaggu

SEQ ID NO: 4097628 - RNA, 14 nt, Zaire Ebola virus [ZEBOV]
agauauauaagcau

SEQ ID NO: 4097629 - RNA, 21 nt, Zaire Ebola virus [ZEBOV]
agcauaauaaauaaauacuca

SEQ ID NO: 4097630 - RNA, 20 nt, Zaire Ebola virus [ZEBOV]
agcuaggcuuaauuaccaau

SEQ ID NO: 4097631 - RNA, 12 nt, Zaire Ebola virus [ZEBOV]
agcucagccuca

SEQ ID NO: 4097632 - RNA, 19 nt, Zaire Ebola virus [ZEBOV]
agcucuucaacuguuccug

SEQ ID NO: 4097633 - RNA, 17 nt, Zaire Ebola virus [ZEBOV]
aggcguuauaauugcag

SEQ ID NO: 4097634 - RNA, 13 nt, Zaire Ebola virus [ZEBOV]
agugccagcagcg

SEQ ID NO: 4097635 - RNA, 14 nt, Zaire Ebola virus [ZEBOV]
aguuauagccauaa

SEQ ID NO: 4097636 - RNA, 19 nt, Zaire Ebola virus [ZEBOV]
auaaacaagguuugacauc

SEQ ID NO: 4097637 - RNA, 19 nt, Zaire Ebola virus [ZEBOV]
auacucauauuucuugaua

SEQ ID NO: 4097638 - RNA, 18 nt, Zaire Ebola virus [ZEBOV]
auacucguaauuaacauu

SEQ ID NO: 4097639 - RNA, 13 nt, Zaire Ebola virus [ZEBOV]
auacuugcaaagg

SEQ ID NO: 4097640 - RNA, 14 nt, Zaire Ebola virus [ZEBOV]
auagaaucuucuca

SEQ ID NO: 4097641 - RNA, 21 nt, Zaire Ebola virus [ZEBOV]
aucaaacggagccaaaaacau

SEQ ID NO: 4097642 - RNA, 15 nt, Zaire Ebola virus [ZEBOV]
aucaaugaaaccagg

SEQ ID NO: 4097643 - RNA, 22 nt, Zaire Ebola virus [ZEBOV]
auccugauacuugcaaagguug

SEQ ID NO: 4097644 - RNA, 23 nt, Zaire Ebola virus [ZEBOV]
aucgcuuuauucuguauaugcaa

SEQ ID NO: 4097645 - RNA, 17 nt, Zaire Ebola virus [ZEBOV]
aucucugcuuucauaau

SEQ ID NO: 4097646 - RNA, 18 nt, Zaire Ebola virus [ZEBOV]
auggaaaagcucagccuc

SEQ ID NO: 4097647 - RNA, 16 nt, Zaire Ebola virus [ZEBOV]
auuauaugaauaagca

SEQ ID NO: 4097648 - RNA, 17 nt, Zaire Ebola virus [ZEBOV]
auucuaacuagcgauuu

SEQ ID NO: 4097649 - RNA, 21 nt, Zaire Ebola virus [ZEBOV]
auuuuaucaccagaaauccua

SEQ ID NO: 4097650 - RNA, 23 nt, Zaire Ebola virus [ZEBOV]
caaaaacaucaguggucagaguc

SEQ ID NO: 4097651 - RNA, 20 nt, Zaire Ebola virus [ZEBOV]
caaauaauguuuuacucuac

SEQ ID NO: 4097652 - RNA, 21 nt, Zaire Ebola virus [ZEBOV]
caacaaguccccaaaaccaca

SEQ ID NO: 4097653 - RNA, 22 nt, Zaire Ebola virus [ZEBOV]
caacacgagcaagagcacugac

SEQ ID NO: 4097654 - RNA, 18 nt, Zaire Ebola virus [ZEBOV]
caacccuugccacaaucu

SEQ ID NO: 4097655 - RNA, 20 nt, Zaire Ebola virus [ZEBOV]
caagauaccggagaagagag

SEQ ID NO: 4097656 - RNA, 19 nt, Zaire Ebola virus [ZEBOV]
caauacuccguauaccuau

SEQ ID NO: 4097657 - RNA, 21 nt, Zaire Ebola virus [ZEBOV]
cacaaagugauucuuguacac

SEQ ID NO: 4097658 - RNA, 17 nt, Zaire Ebola virus [ZEBOV]
cacaaucuccacgaguc

SEQ ID NO: 4097659 - RNA, 15 nt, Zaire Ebola virus [ZEBOV]
cacaugccacauucu

SEQ ID NO: 4097660 - RNA, 21 nt, Zaire Ebola virus [ZEBOV]
cagacaacgacagcacagccu

SEQ ID NO: 4097661 - RNA, 20 nt, Zaire Ebola virus [ZEBOV]
caggaugaaggugcugcaau

SEQ ID NO: 4097662 - RNA, 19 nt, Zaire Ebola virus [ZEBOV]
cauauuucgggccagcagc

SEQ ID NO: 4097663 - RNA, 16 nt, Zaire Ebola virus [ZEBOV]
ccccgccaccacaaca

SEQ ID NO: 4097664 - RNA, 14 nt, Zaire Ebola virus [ZEBOV]
ccggacaacagcac

SEQ ID NO: 4097665 - RNA, 23 nt, Zaire Ebola virus [ZEBOV]
ccggagaagagagugccagcagc

SEQ ID NO: 4097666 - RNA, 14 nt, Zaire Ebola virus [ZEBOV]
ccucugccacgacc

SEQ ID NO: 4097667 - RNA, 21 nt, Zaire Ebola virus [ZEBOV]
cgcaucuaacaacccuugcca

SEQ ID NO: 4097668 - RNA, 15 nt, Zaire Ebola virus [ZEBOV]
cuaauuuacauuacu

SEQ ID NO: 4097669 - RNA, 15 nt, Zaire Ebola virus [ZEBOV]
cugauacuugcaaag

SEQ ID NO: 4097670 - RNA, 16 nt, Zaire Ebola virus [ZEBOV]
cuggcaacaacaacac

SEQ ID NO: 4097671 - RNA, 22 nt, Zaire Ebola virus [ZEBOV]
cuucagaaaauuccucugcaau

SEQ ID NO: 4097672 - RNA, 15 nt, Zaire Ebola virus [ZEBOV]
gaaagaucauaacua

SEQ ID NO: 4097673 - RNA, 16 nt, Zaire Ebola virus [ZEBOV]
gaagagguaugauaca

SEQ ID NO: 4097674 - RNA, 18 nt, Zaire Ebola virus [ZEBOV]
gaagggaagcugcagugu

SEQ ID NO: 4097675 - RNA, 15 nt, Zaire Ebola virus [ZEBOV]
gaaugauaaacuuga

SEQ ID NO: 4097676 - RNA, 19 nt, Zaire Ebola virus [ZEBOV]
gacaaaauugaucagauua

SEQ ID NO: 4097677 - RNA, 17 nt, Zaire Ebola virus [ZEBOV]
gacaacgacagcacagc

SEQ ID NO: 4097678 - RNA, 18 nt, Zaire Ebola virus [ZEBOV]
gacauugcccuucuaauu

SEQ ID NO: 4097679 - RNA, 16 nt, Zaire Ebola virus [ZEBOV]
gaccagggggacaaug

SEQ ID NO: 4097680 - RNA, 15 nt, Zaire Ebola virus [ZEBOV]
gacuacucaggauga

SEQ ID NO: 4097681 - RNA, 17 nt, Zaire Ebola virus [ZEBOV]
gauaccggagaagagag

SEQ ID NO: 4097682 - RNA, 15 nt, Zaire Ebola virus [ZEBOV]
gaucucuuaaaauau

SEQ ID NO: 4097683 - RNA, 24 nt, Zaire Ebola virus [ZEBOV]
gaugauucaaccgacaaauagcua

SEQ ID NO: 4097684 - RNA, 15 nt, Zaire Ebola virus [ZEBOV]
gcacagucaaggaag

SEQ ID NO: 4097685 - RNA, 17 nt, Zaire Ebola virus [ZEBOV]
gcaggacugaucacagg

SEQ ID NO: 4097686 - RNA, 21 nt, Zaire Ebola virus [ZEBOV]
gcuuuacaccauugucuuuuu

SEQ ID NO: 4097687 - RNA, 19 nt, Zaire Ebola virus [ZEBOV]
ggacccccaaaagcagaga

SEQ ID NO: 4097688 - RNA, 21 nt, Zaire Ebola virus [ZEBOV]
guccccaaucccucacaacca

SEQ ID NO: 4097689 - RNA, 12 nt, Zaire Ebola virus [ZEBOV]
guuaaucuuucu

SEQ ID NO: 4097690 - RNA, 18 nt, Zaire Ebola virus [ZEBOV]
guugguuauuaacauaca

SEQ ID NO: 4097691 - RNA, 16 nt, Zaire Ebola virus [ZEBOV]
uaacagacaaaauuga

SEQ ID NO: 4097692 - RNA, 17 nt, Zaire Ebola virus [ZEBOV]
uaguauccugauacuug

SEQ ID NO: 4097693 - RNA, 21 nt, Zaire Ebola virus [ZEBOV]
uauaugcugacucaauaguua

SEQ ID NO: 4097694 - RNA, 16 nt, Zaire Ebola virus [ZEBOV]
ucaaacaagagauucc

SEQ ID NO: 4097695 - RNA, 14 nt, Zaire Ebola virus [ZEBOV]
ucaaccgacaaaua

SEQ ID NO: 4097696 - RNA, 16 nt, Zaire Ebola virus [ZEBOV]
ucaaguugaacaacau

SEQ ID NO: 4097697 - RNA, 15 nt, Zaire Ebola virus [ZEBOV]
ucacaaccaaaccag

SEQ ID NO: 4097698 - RNA, 15 nt, Zaire Ebola virus [ZEBOV]
ucagccucaaaucaa

SEQ ID NO: 4097699 - RNA, 17 nt, Zaire Ebola virus [ZEBOV]
uccugauacuugcaaag

SEQ ID NO: 4097700 - RNA, 17 nt, Zaire Ebola virus [ZEBOV]
ucuccuaaauguagaac

SEQ ID NO: 4097701 - RNA, 23 nt, Zaire Ebola virus [ZEBOV]
ucucugcuuucauaaucagauau

SEQ ID NO: 4097702 - RNA, 14 nt, Zaire Ebola virus [ZEBOV]
ucuuaaugcaaaua

SEQ ID NO: 4097703 - RNA, 16 nt, Zaire Ebola virus [ZEBOV]
ugcauaguauccugau

SEQ ID NO: 4097704 - RNA, 19 nt, Zaire Ebola virus [ZEBOV]
ugccagcagcgggaagcua

SEQ ID NO: 4097705 - RNA, 20 nt, Zaire Ebola virus [ZEBOV]
uguaucgaaccacaugauug

SEQ ID NO: 4097706 - RNA, 14 nt, Zaire Ebola virus [ZEBOV]
uguuuuuaaaggau

SEQ ID NO: 4097707 - RNA, 21 nt, Zaire Ebola virus [ZEBOV]
uuaacauacagauuauaaaaa

SEQ ID NO: 4097708 - RNA, 18 nt, Zaire Ebola virus [ZEBOV]
uucacagauucuauauau

SEQ ID NO: 4097709 - RNA, 13 nt, Zaire Ebola virus [ZEBOV]
uugcacaaaguga

SEQ ID NO: 4097710 - RNA, 22 nt, Zaire Ebola virus [ZEBOV]
uuuacacgaucguuuuauaauu

SEQ ID NO: 4097711 - RNA, 15 nt, Zaire Ebola virus [ZEBOV]
uggagacaauggaua

SEQ ID NO: 4097712 - RNA, 20 nt, Zaire Ebola virus [ZEBOV]
ugguuauuaacauacagauu

SEQ ID NO: 4097713 - RNA, 13 nt, Zaire Ebola virus [ZEBOV]
uuauucaugauuu

SEQ ID NO: 4097714 - RNA, 17 nt, Zaire Ebola virus [ZEBOV]
uucugggaccggacugc

SEQ ID NO: 4097715 - RNA, 18 nt, Zaire Ebola virus [ZEBOV]
uugagacagcuggccaac

SEQ ID NO: 4097716 - RNA, 16 nt, Zaire Ebola virus [ZEBOV]
uugagucuuaaugcaa

SEQ ID NO: 4097717 - RNA, 23 nt, Zaire Ebola virus [ZEBOV]
uugcuggagucgcaggacugauc

SEQ ID NO: 4097718 - RNA, 18 nt, Zaire Ebola virus [ZEBOV]
uuuaucaccagaaauccu

SEQ ID NO: 4097719 - RNA, 13 nt, Zaire Ebola virus [ZEBOV]
uuucaauccucaa

SEQ ID NO: 4097720 - RNA, 16 nt, Zaire Ebola virus [ZEBOV]
uuuucaaaguucaauu

SEQ ID NO: 4097721 - RNA, 94 nt, B19 virus
cccgccuuaugcaaaugggcagccauuuuaaguguuucacuauaauuuuauuggucaguuuuguaacgguuaaaaugggcggagcguaggcggg

SEQ ID NO: 4097722 - RNA, 66 nt, B19 virus
cuccaguuuugucuguaacauccuuaacagcaauuucugauaugguuacaguuaaagcaucaggag

SEQ ID NO: 4097723 - RNA, 99 nt, Barmah Forest virus
ggaacuaaucacuauuagcaagccuagacucgcuaguacugugaugguccaguaaggguacaggucauaguaaugugagacuaugcuaauaggguuacc

SEQ ID NO: 4097724 - RNA, 79 nt, Barmah Forest virus
uaguaugugcaagacacuagcagaauaguauguaugauaguauauuuauaagauuaguuuguuauguaaguauguagua

SEQ ID NO: 4097725 - RNA, 84 nt, BK polyomavirus
caggggcugaaguaucugagacuugggaagagcauugugauugggauucagugcuugauccauguccagagucuucaguuucug

SEQ ID NO: 4097726 - RNA, 80 nt, Colorado tick fever virus
gaggagauucgcaaggugaggcaguucauggucaaguuuccguuuggccgaacuuguccucauugagauuggauauuuuc

SEQ ID NO: 4097727 - RNA, 130 nt, Colorado tick fever virus
guaaagcuggugagaggcaucaaguuggucggcggccuagagugauacagaugguugguacugagggucaauuguccgcauuuguauugcacaauguacuucguccugccuauaaggcuacuagguuuac

SEQ ID NO: 4097728 - RNA, 85 nt, Dengue virus
agcccugauagcuggaguuugguaucuuauuggaaguccucuaagggcuuccuccauuucagcugccacgacucuagugggggcu

SEQ ID NO: 4097729 - RNA, 64 nt, Dobrava virus
uaguaguagacuccgcaagaaauagcaguuaaauaacagcaugaucaugugggguuuacuauug

SEQ ID NO: 4097730 - RNA, 64 nt, Dobrava virus
uguggcugaagaguacaucuccuaugguggugaaaggaaaauuuuauguauucaaucagcuuua

SEQ ID NO: 4097731 - RNA, 61 nt, Eastern equine encephalitis virus
gucaucgacacugacgucagucgccaguaucccggucaucuggucgcacagugucgcuggc

SEQ ID NO: 4097732 - RNA, 56 nt, Eastern equine encephalitis virus
augcuaauguggucaacgcugugaugauuagugacacguaguucaccucguagcgu

SEQ ID NO: 4097733 - RNA, 55 nt, Eastern equine encephalitis virus
cgccuaggcggauuaggaucccgguaagccaucggguuaaucggcgccauaggcg

SEQ ID NO: 4097734 - RNA, 63 nt, Eastern equine encephalitis virus
guguggauauucgguagcagcacagcguucaaccugcgcacaagcucucgauguauaccacau

SEQ ID NO: 4097735 - RNA, 91 nt, Eastern equine encephalitis virus
cuauccaaaauggagaaaguucauguugacuuagacgcagacagcccauucgucaagucacugcaaagaugcuuuccacauuuugagauag

SEQ ID NO: 4097736 - RNA, 68 nt, Hepatitis A virus
uaaaucuuaugauugguggagaaugagauuuuaugaccaguguuucauuugugaccuuucaugauuug

SEQ ID NO: 4097737 - RNA, 78 nt, Hepatitis A virus
guuaccauugccugauuuauagauccaagguuuuuaaguuucugaugaacucuugcuauacaaucucucaaaggugac

SEQ ID NO: 4097738 - RNA, 110 nt, Hepatitis A virus
gagaauuaugaaaguggaguuuacucaguguucaaugaauguggucuccaaaacgcuuuuuagaaagagucccauuuaucaucacauugauaaaaccaugauuaauuuuc

SEQ ID NO: 4097739 - RNA, 81 nt, Hepatitis A virus
caucacagccauuggaucaauuucagcuuuagaaaagggcauagcugcaggaaaauuaaucaugguuuuaucaaugugaug

SEQ ID NO: 4097740 - RNA, 66 nt, Hepatitis B virus
uggaugaugugguauugggggccaagucuguacaacaucuugagucccuuuuuaccucuauuacca

SEQ ID NO: 4097741 - RNA, 68 nt, Hepatitis B virus
ucauguucauguccuacuguucaagccuccaagcugugccuuggguggcuuuggggcauggacauuga

SEQ ID NO: 4097742 - RNA, 102 nt, Hepatitis C virus
gccggaacgaggaccaucgcaucacccaaggguccugucauccagauguauaccaauguggaccaagaccuugugggcuggcccgcuccucaagguucccgc

SEQ ID NO: 4097743 - RNA, 55 nt, Hepatitis C virus
ggccgggagaagguuggcgagagggucacccccuucuauggccagcuccucggcc

SEQ ID NO: 4097744 - RNA, 100 nt, Hepatitis C virus
acgccuucuacgggauguggccucuccuccugcuccugcuggcguugccucagcgggcauacgcacuggacacggagguggccgcgucguguggcggcgu

SEQ ID NO: 4097745 - RNA, 74 nt, Hepatitis C virus
gacugcaauuguucuaucuaucccggccauauaacgggucaucgcauggcaugggauaugaugaugaacugguc

SEQ ID NO: 4097746 - RNA, 68 nt, Hepatitis C virus
gccauccugcacacuccggggugugucccuugcguucgcgaggguaacgccucgagguguuggguggc

SEQ ID NO: 4097747 - RNA, 56 nt, Hepatitis C virus
gacgacugguuccacagccacggccagaucucgcaggccguugugcgcccagucuc

SEQ ID NO: 4097748 - RNA, 78 nt, Hepatitis C virus
ggccccucuauggcaaugaggguugcgggugggcgggauggcuccugucuccccguggcucucggccuagcuggggcc

SEQ ID NO: 4097749 - RNA, 113 nt, Hepatitis C virus
ggucccccacguagagggccgagcagaggguggcgcucccgacaagcagaucgauaugacgucgaagcugcguuguggggaguuugccgucccugguggccaccguggggguc

SEQ ID NO: 4097750 - RNA, 71 nt, Hepatitis C virus
ggucuuggaggguagugccagcaguaggggcguucgucgaggccgcuuccguuggcauaacugauaggacc

SEQ ID NO: 4097751 - RNA, 100 nt, Hepatitis C virus
cauguacgcucguagccuaacuguagucucggcgggcgugagcucauaccaagcacagcccgcgucauagcacucacagaggacggacgagucgaacaug

SEQ ID NO: 4097752 - RNA, 55 nt, Hepatitis C virus
cugcccaguugaagagguacuugccacauauggcagcccugccuccucuggacag

SEQ ID NO: 4097753 - RNA, 100 nt, Hepatitis C virus
ggagcguccgcgcuaggcuucuguccagaggaggcagggcugccauauguggcaaguaccucuucaacugggcaguaagaacaaagcucaaacucacucc

SEQ ID NO: 4097754 - RNA, 92 nt, Hepatitis C virus
gguggccaccagggacggcaaacuccccacaacgcagcuucgacgucauaucgaucugcuugucgggagcgccacccucugcucggcccucu

SEQ ID NO: 4097755 - RNA, 125 nt, Hepatitis D virus
uccgaaggaggacgcacguccacucggauggcuaagggagagccacuuuucucucgcuucucucugggaagcuagagagauuugugggucccauucgccauuaccgaggggacgguccccucgga

SEQ ID NO: 4097756 - RNA, 56 nt, Hepatitis D virus
ggagagccacuuuucucucgcuucucucugggaagcuagagagauuuguggguccc

SEQ ID NO: 4097757 - RNA, 66 nt, Hepatitis D virus
ggcuccacugguccccaauguucaaagucaccccccucggucacuuugaaaggggguccgggaguc

SEQ ID NO: 4097758 - RNA, 62 nt, Hepatitis E virus
ccaccgccggaaccgccgcugcgccgcccacggcggcggccagacggcugaccgggcggugg

SEQ ID NO: 4097759 - RNA, 70 nt, Hepatitis E virus
ugugaccuugguccagucgagcgaccgggcaacggccugcgcgccggucgcuacauuaaccaaggucaca

SEQ ID NO: 4097760 - RNA, 70 nt, Hepatitis E virus
ugugaccuugguuaauguagcgaccggcgcgcaggccguugcccggucgcucgacuggaccaaggucaca

SEQ ID NO: 4097761 - RNA, 78 nt, Hepatitis E virus
gagacugaaagggccggcggccauagugcucugacuggcaucaaaagagagauuguggcgcucugggccauuagucuc

SEQ ID NO: 4097762 - RNA, 76 nt, Hepatitis E virus
cccgcgccaccgcccggucagccgucuggccgccgccgugggcggcgcagcggcgguuccggcggugguuucuggg

SEQ ID NO: 4097763 - RNA, 85 nt, Human
aaaaaaauccaagucagggauaguuugacuacagaggagaaaucauacaugaggugucaaauuauccccugacauagauuuuuuu

SEQ ID NO: 4097764 - RNA, 80 nt, Human
aaaaaauaccaugccuggacuccacucucagaguuacuaauucaauuaaucugagaugacccuagccgcuggcauuuuuu

SEQ ID NO: 4097765 - RNA, 69 nt, Human
aaaaacaucaaauuaggccaugaagcagaaauccuauguuugagcuaugggcuuggauuuguugucauu

SEQ ID NO: 4097766 - RNA, 88 nt, Human
aaaaacuauuuggugauaaagcagcuuggguugaugauuaauuauaaaauauuaacagcaaccacagugcugguccuagauauuuuuu

SEQ ID NO: 4097767 - RNA, 74 nt, Human
aaaaagagauuauacuuguuuuuaccauuuguguccuagauguaguacacugguaggaagagauggcucuauuu

SEQ ID NO: 4097768 - RNA, 70 nt, Human
aaaaagccagagcaagcugucacagauaggcucauauaucaacagcacugugacuuuuuguuugcuuuuu

SEQ ID NO: 4097769 - RNA, 68 nt, Human
aaaaaguaaucauuuuuauuugcauuggcauuuuugucaauucagacugagaaaugaugagccuuuuu

SEQ ID NO: 4097770 - RNA, 78 nt, Human
aaaaauagagcaaaguggaccaaaagaagagguaagcagauuuuauuacacuuauuuuuguccacuuccucaguuuuu

SEQ ID NO: 4097771 - RNA, 129 nt, Human
aaaaauaugcucucuuuguggcucuuuuacaauaaguugcuucagcuuggugaacgcuuggggcccccauucucccuguagacauggcugggguauacauuaaugaaaacaaaaggguccauuuucauu

SEQ ID NO: 4097772 - RNA, 91 nt, Human
aaaaauguagauaagcuggaagagaagagucacaguuauaauuuucaauaugauuucuucuaauuuccaucauguauucauuugcauuuuu

SEQ ID NO: 4097773 - RNA, 67 nt, Human
aaaaauuauugaaauggcuugguaaggaagguuaucacuauccuacauguagguuuccuuaauuuuu

SEQ ID NO: 4097774 - RNA, 103 nt, Human
aaaaauucuacuauauuuauauuagauauauuuagagagguuaagcuuccaucucugcccucucuccuguguucugauguuuucccuauagguacaaauuuuu

SEQ ID NO: 4097775 - RNA, 101 nt, Human
aaaaauuugagugauuguuauucuaauuaucuugcugauuugauuauucuuaaauaaggaagagaacuguaaaauaauuggcaauaacaucuuagauuuuu

SEQ ID NO: 4097776 - RNA, 94 nt, Human
aaaacaaugaugaaagaacaugcuauaauuaucuuuaugaggcuaucacaucccacuuaagauaggaaaguauguguuuuucguuuacuguuuu

SEQ ID NO: 4097777 - RNA, 129 nt, Human
aaaacagaaugaaaaaaugucuuaugaaguucaccaguguagauaguuuagauuucaaagaaaauuucuuaauugugugucuauacuaucugaaugccuugauuauugacuagauuuuuaccauguuuu

SEQ ID NO: 4097778 - RNA, 70 nt, Human
aaaacagacuuucgucauucuugugcagagauaugcuuugcaggcccaggagauguaagacuucuguuuu

SEQ ID NO: 4097779 - RNA, 62 nt, Human
aaaacagugcaggaaguuaagcaaguugacuaauaacaugccaaacuuaaaugcaaaguuuu

SEQ ID NO: 4097780 - RNA, 62 nt, Human
aaaacaguuuaggcaucacaguagauucuauucugggucacuuugcauacccaaauuguuuu

SEQ ID NO: 4097781 - RNA, 82 nt, Human
aaaacauuagggccucaugcucccaagacacuuggccggguagaccauggcuucugggguggccugcauggcccuauguuuu

SEQ ID NO: 4097782 - RNA, 72 nt, Human
aaaacuaagacugugagcucagagacucuggucaguauuaccuuagucacacuauggccacaguuguguuuu

SEQ ID NO: 4097783 - RNA, 65 nt, Human
aaaacugaggcuagauugcuguucuuugggaugacuuaucuuaggauggauuuuaguuuuguuuu

SEQ ID NO: 4097784 - RNA, 82 nt, Human
aaaagauggagagacugauguggcuauguagcucaaacugacuccuuccuacuacguuuuauauuaucuuaccucuucuuuu

SEQ ID NO: 4097785 - RNA, 60 nt, Human
aaaagauuuccuuuauucaacaugaccacuucauuuguuuccugaugugggagaucuuuu

SEQ ID NO: 4097786 - RNA, 74 nt, Human
aaaagcaggugugagccagugggccccacguccccucuucagccagggcgccugcucucucugcuucugcuuuu

SEQ ID NO: 4097787 - RNA, 71 nt, Human
aaaagcauucuggauucuguuguacuuuuuccaaguugaaugaaguucucaaggaucacagaaacucuuuu

SEQ ID NO: 4097788 - RNA, 72 nt, Human
aaaagcuaaaugucauggaguuguagaaaaaaguuauucuggucuaauucauucugugauguuucuucuuuu

SEQ ID NO: 4097789 - RNA, 66 nt, Human
aaaagcuaacugugaaaucucuggauuuuguuuuagaaggaaaucacuuuuuucauaguugcuuuu

SEQ ID NO: 4097790 - RNA, 62 nt, Human
aaaagcucugguuuggagcauuugaugauuucccugguauaaacacucccaccaaagcuuuu

SEQ ID NO: 4097791 - RNA, 66 nt, Human
aaaaggagcucuuaaaaucagagaaugaugcugccuccugguaucugucucuuucagucuccuuuu

SEQ ID NO: 4097792 - RNA, 64 nt, Human
aaaaggccuaauugaaucaagucuccuuuccaucuggcaggagacauuuuaauaaggacuuuuu

SEQ ID NO: 4097793 - RNA, 58 nt, Human
aaaagggcaaaaccaucauggaggucacauuugacaaaccaguuuguuuuucccuuuu

SEQ ID NO: 4097794 - RNA, 76 nt, Human
aaaagugcauugacacauaugguugcugcagugaagcaaagcucacuaccuguagcccauauccaauaaaucuuuu

SEQ ID NO: 4097795 - RNA, 58 nt, Human
aaaagugugaauuaaucaauucuugguaccagccaauuauuccauaguuggcacuuuu

SEQ ID NO: 4097796 - RNA, 71 nt, Human
aaaaguuagcuggauguggcuguugccaaggaaugucuuuuauuagcaacaagugacuaucuauaacuuuu

SEQ ID NO: 4097797 - RNA, 68 nt, Human
aaaaguuagggagguucucucuuugcagagccccaaaagggggucaggaacuagagccuccuccuuuu

SEQ ID NO: 4097798 - RNA, 64 nt, Human
aaaaguucuguauuucaaugucuuuauuuucaguaugggccgaggagugcagaucacugcuuuu

SEQ ID NO: 4097799 - RNA, 62 nt, Human
aaaauaaggcacacauagauaggguuaagugauuugccugugucauguaguagcuucuuuuu

SEQ ID NO: 4097800 - RNA, 57 nt, Human
aaaauagcuguauuuacccuguagucaagucacuaugaaaguaagugcagcuguuuu

SEQ ID NO: 4097801 - RNA, 75 nt, Human
aaaauagggagaagggaguguuuucuugauagugcgcuguggcauuguucagaguagggcucugugaccuguuuu

SEQ ID NO: 4097802 - RNA, 87 nt, Human
aaaauaucugcucauacgcauaugauaguaauggcuuuuccacaucuuaagccauugaguuuuaugugcuauccauagagauguuuu

SEQ ID NO: 4097803 - RNA, 69 nt, Human
aaaaucacauugaaaauguugcaggcuguauucaucaaagcauagccagagauauuuucaguugauuuu

SEQ ID NO: 4097804 - RNA, 58 nt, Human
aaaaucauagaggcuaaaauuauuuggcuuaauugcacaaagagggcucuaugauuuu

SEQ ID NO: 4097805 - RNA, 77 nt, Human
aaaauccagauuccaguucuccucucuaaagucucuaauucaguaggucugggguggagauuggcaaucuguauuuu

SEQ ID NO: 4097806 - RNA, 105 nt, Human
aaaaucugaaaauuuacaacuggaauuuuacaagaaggccucguauuauaaaguuuguugcuugguuugugagacuuggguuguggacaguuugaauaagguuuu

SEQ ID NO: 4097807 - RNA, 113 nt, Human
aaaaucuuugcaaccaccuaaccccaauuuucacauuugugcaacguauccacagaguuuaaguaauuuucuaggaggcacacaaguaguugggauuagaucccaaggguuuu

SEQ ID NO: 4097808 - RNA, 71 nt, Human
aaagccaaucuaggauguguuuugagcugacuaccaacuauggugguuuuaaaaacaugcugcaugguuuu

SEQ ID NO: 4097809 - RNA, 115 nt, Human
aaagccaaugacauuucacagaaauauaguucuagaaauauuuuauuucccauuaaguuacuagugaaaauauuccugagguauauggguagcuguugaaaugucauuuggcuuu

SEQ ID NO: 4097810 - RNA, 60 nt, Human
aaagccagaagagcagugacuuauggccuccaaggaaauaauccugcuucuucucccuuu

SEQ ID NO: 4097811 - RNA, 61 nt, Human
aaagccuaugaaggagagcauuaugcuauaccuguauguauguaugcaucuuuuauguuuu

SEQ ID NO: 4097812 - RNA, 70 nt, Human
aaagcggugucuuuugugagauaucuuccaacaaguuucauggaacuggcuuacaaagaggcaucgcuuu

SEQ ID NO: 4097813 - RNA, 76 nt, Human
aaagcuaaugagaacagugcugauaaaucauacccguggguugaacuaaauuagacauuguuuacgucaaagcuuu

SEQ ID NO: 4097814 - RNA, 72 nt, Human
aaagcuaggcauuucuguggcaguucuuauauuuggugagaaauguugaauacacaaaaugcuucuggcuuu

SEQ ID NO: 4097815 - RNA, 102 nt, Human
uugagacggagucucgcucugucgcccaggcuggagugcaguggcgcgaucucggcucacugcaagcuccgccucuggguucacgccauucuccugucucag

SEQ ID NO: 4097816 - RNA, 103 nt, Human
uugagacggagucucgcucuguugcccaggcuggagugcaguggcgcuaucuuggcucacugcaagcuccgccucccggguucacgccauucuccugccucag

SEQ ID NO: 4097817 - RNA, 103 nt, Human
uugagacggagucuugcucuguugccuaggcuggagugcagugacaugaucuuggcucacugcaagcuccgccucaaggguucacaccauucuccugucucag

SEQ ID NO: 4097818 - RNA, 55 nt, Human
uugagacggagucuugcucuuuugcccaggcuggagugcaauggcucagucucag

SEQ ID NO: 4097819 - RNA, 66 nt, Human
uugagacggggucucacugugucaccuaagcuaaaguguaguggcacaauuuugacucccccucaa

SEQ ID NO: 4097820 - RNA, 60 nt, Human
uugagacugagucucgcccugucguccaggcugcacugcaguggcgugaucucagcucag

SEQ ID NO: 4097821 - RNA, 130 nt, Human
uugagaggaauauuacaggucacuguuuaacacuaguuucuuuaacuaccccaaacaaauguccaguuauggaagagucagugaaaacuagaauguugcuugccugcuguuuuucucuacauuucauuaa

SEQ ID NO: 4097822 - RNA, 55 nt, Human
uugagauggagucucacucuguugccuaggcuagaguacaguggcgccaucucag

SEQ ID NO: 4097823 - RNA, 103 nt, Human
uugagauggagucucgcucugucacccaggcuggagugcaguggcgcgaucucggcucacugcaagcuccgccucccggguucaugccauucuccugccucag

SEQ ID NO: 4097824 - RNA, 55 nt, Human
uugagauggagucuugcucucucgcccaggcuggagggcaguggcgcuaucucag

SEQ ID NO: 4097825 - RNA, 103 nt, Human
uugagauggagucuugcucuguugcccaggcuggagugcaguggcacaaucuuggcucacugcaagcuccgccucccggguucacgccauucuccugccucag

SEQ ID NO: 4097826 - RNA, 88 nt, Human
uugcauucuucuaaauguagccgccuuguuucagcaugcugugauuuccucauauuguugacuauaagaguaacuauuucaggagcag

SEQ ID NO: 4097827 - RNA, 66 nt, Human
uugcauugauguuccuucuugccuccuucagcaaugcuguucuuggugcugaggauacaguaguaa

SEQ ID NO: 4097828 - RNA, 88 nt, Human
uugccaaagaaauagcuaagcuuucuagaguauggagucuguccagauaaucuugguauagucuccuuuuuuggagggugugugguag

SEQ ID NO: 4097829 - RNA, 67 nt, Human
uugccaacagggaagcuugggcugcagcugcagcagcaggugcuggcugccagguucccuguggcaa

SEQ ID NO: 4097830 - RNA, 75 nt, Human
uugccaacuuccuuuuaaaaguucaugugggaauuuugauuuggaaauugcugaacuuauaaaugaauuuggcaa

SEQ ID NO: 4097831 - RNA, 123 nt, Human
uugccaagugucuguuggagcaggauaauauugucucuuucaauaacuuguuuuuauucucucuuuagaaacaguucuuuggauggaagaauaaaguuaucaauaguuuuagcugcuuggugg

SEQ ID NO: 4097832 - RNA, 66 nt, Human
uugccacugcuucccugugcaccagacauaccagggagcauuuuacagucuggaagcagggggcaa

SEQ ID NO: 4097833 - RNA, 81 nt, Human
uugccaguagauugaagagugcuugccuucucaucauaaaacuuaugauacagagaaagcaucuuuuccaagacuuggcaa

SEQ ID NO: 4097834 - RNA, 83 nt, Human
uugccauauugaccagacugacacacaucuaauaauuugaggccaauauaaaagacugugcagcugagugcuaauuugugcaa

SEQ ID NO: 4097835 - RNA, 56 nt, Human
uugccauucuuuugcauggguacacuccuuccugggaugugggcaagggauggcag

SEQ ID NO: 4097836 - RNA, 62 nt, Human
uugccauugcaaaguacuaugaaacaaagaaaucaugcugucauggaauagagcaguggcaa

SEQ ID NO: 4097837 - RNA, 77 nt, Human
uugccccugggaacaguggguuggcucuuauguauccugcagaggagauguuucccacacuguuucccaaauugcaa

SEQ ID NO: 4097838 - RNA, 99 nt, Human
uugcccggugguuguggggaagggcagccugacucacggucugagucccaggaacggaucugaccuggaggaggucccuucucuggaggugcugggcaa

SEQ ID NO: 4097839 - RNA, 65 nt, Human
uugcccugucaguagaagugcagguccugcucuagacuguucuccuugcucugcugucagggcag

SEQ ID NO: 4097840 - RNA, 87 nt, Human
uugcccuugcuguguucucccucuagccugaguguuuccagagccugagcccuccaaagguugggggaggcagcacagccggggggg

SEQ ID NO: 4097841 - RNA, 69 nt, Human
uugcccuuugcugggaagccuucacucuccagcuuuccugggguagggaaggucucccacauuaugcaa

SEQ ID NO: 4097842 - RNA, 81 nt, Human
uugccguuuuuguaggacauagucuuguuaggacuuucuuuauuaucuucaagagacaauuguucuaaguaaaaauaguaa

SEQ ID NO: 4097843 - RNA, 87 nt, Human
uugccuacuugcgugauguuaugcccaaucaaaaucucagaacaagaagagguaaagaaagguguaacauuaaaaagaguaagguaa

SEQ ID NO: 4097844 - RNA, 61 nt, Human
uugccuagcacugagcacacuucugagcuucuuagacucacagaaugucagaguuggggag

SEQ ID NO: 4097845 - RNA, 77 nt, Human
uugccuccucucaaaagcacaacauugauuuuauccaccuggaaguuacugucugccugcuuuuagauagagagcaa

SEQ ID NO: 4097846 - RNA, 64 nt, Human
uugccugaguuguaauucucacaguaguccugcaggacagcugcuguuacugcuuauuacgcag

SEQ ID NO: 4097847 - RNA, 57 nt, Human
uugccuggccaggagguaaccagauggugcaccugcacccuccccuuggaccagcaa

SEQ ID NO: 4097848 - RNA, 59 nt, Human
uugccuggccagucuaacagagguguuaagauccuaagcacuaguucuacugccagcaa

SEQ ID NO: 4097849 - RNA, 56 nt, Human
uugccugugaggauucugguugcuuaaggugaaccaaucaguguucucaggggcaa

SEQ ID NO: 4097850 - RNA, 65 nt, Human
uugccuguguguguugaugucagugccccggcguuggguacacccucuucacaucacacaagcaa

SEQ ID NO: 4097851 - RNA, 84 nt, Human
uugccuuauucuuaggggagaauuacauggcguggaguugucacacagugcuccauccauuuucuuugcuguuuuaugaggcaa

SEQ ID NO: 4097852 - RNA, 70 nt, Human
uugccuucaaccauugggcuaaagucugucuuucauccuaaaucaaacgcuacccagugguggaugguaa

SEQ ID NO: 4097853 - RNA, 70 nt, Human
uugccuucucugucgggcugggcagcguguggcguucuccuuaccugugucaccggaacggaggagguaa

SEQ ID NO: 4097854 - RNA, 56 nt, Human
uugccuuguuauucucucagaacgguccauucuuucauugagagcauucgaggcaa

SEQ ID NO: 4097855 - RNA, 79 nt, Human
uugccuuuagccagcuggacagucuacauuuguauauacccuuuagaggaguacagaugacuugucugcuguaaggcaa

SEQ ID NO: 4097856 - RNA, 95 nt, Human
uugccuuugccagccacagggaagcucaggggcucuggccagcuagagaacaagaaacccuguagcuuccccacugcuguguuguguagugguag

SEQ ID NO: 4097857 - RNA, 65 nt, Human
uugccuuuuccuuucaucaggacaaagcucagccaggcugaucagaauaagagaggaaaggguaa

SEQ ID NO: 4097858 - RNA, 64 nt, Human
uugcgucaggcaaaccuuucuagagaauaucaguuuuauuuuagaaagaauagccuggcugcaa

SEQ ID NO: 4097859 - RNA, 60 nt, Human
uugcuaaugcccuagaaguauuaauucacuuugauaugcuaauuagagggcauuaugcaa

SEQ ID NO: 4097860 - RNA, 112 nt, Human
uugcuaauuugcuaaugcucuuaaaagcaccacugcacagaagaaacuaucaaaauaaauugguuauggcuuucuugugcguguggguggagaguagcggaguauguagcag

SEQ ID NO: 4097861 - RNA, 95 nt, Human
uugcuacgcccacccagaucacugugucagaguaugaugauuuccagcgagaugucagcuccauguacagaaagaugacgcugggacagcugcag

SEQ ID NO: 4097862 - RNA, 78 nt, Human
uugcucacuauucuguggaucaagaauucaggcaucauccaugaggaugcuucccuuugcuccacaugguacuggcag

SEQ ID NO: 4097863 - RNA, 56 nt, Human
uugcuccuccuccucauugcaggaguuuccagacacaacugcuagggggagaguag

SEQ ID NO: 4097864 - RNA, 70 nt, Human
uugcucgagcccaggaguuugaugcugcagugaguuaugaucacagcacugcacuauauccuggugacaa

SEQ ID NO: 4097865 - RNA, 109 nt, Human
uugcucuaauaggaccuguguuguccagguaucuucauaaaaauguacucagagaagguucauugcaguacaauuuaaugaagauagcagauuuauuuguccagaguaa

SEQ ID NO: 4097866 - RNA, 64 nt, Human
uugcucuggacgcugagugguuucaugcucaauuugaagcaacuggcucauugucucagggugg

SEQ ID NO: 4097867 - RNA, 85 nt, Human
uugcucuguggggauuauuuuuguucuggaaaacauuguuauuugcaauaguugguccaugaaaaaagucuauuuucaaaugcaa

SEQ ID NO: 4097868 - RNA, 76 nt, Human
uugcucuguuucccaggcuggaaugcaguggugugaucuuggcucacugcagccuccaucucugggguucaagcga

SEQ ID NO: 4097869 - RNA, 80 nt, Human
uugcucuugaauauggcucaaaggagaugacuaaguuaauccaacuuuacaauauccugugacuuuuuucauuggagcaa

SEQ ID NO: 4097870 - RNA, 59 nt, Human
uugcucuuggcuaauacaguaugucacuagacauaguacugccuggggccagagagcgg

SEQ ID NO: 4097871 - RNA, 79 nt, Human
uugcucuuguugcccagaggcuggagugcaauggcgugaucucggcucacugcaaccuccaccuccuggguucaagcga

SEQ ID NO: 4097872 - RNA, 61 nt, Human
uuuguaaguucuauggaagucuauauggcaaacuguguaguccagaaacugagcuuauaag

SEQ ID NO: 4097873 - RNA, 71 nt, Human
uuuguaauaagcuuuuaaagcuacuuugauaucuuaaauagaggcaagguuaaagagcuuauaaauacaaa

SEQ ID NO: 4097874 - RNA, 59 nt, Human
uuuguaauuagcacggugcgggcuucucugcccucugaaaccauaauguuaauuacaaa

SEQ ID NO: 4097875 - RNA, 63 nt, Human
uuuguacacaggauguuauaaugggauauugacauuuuacggauccagcauccuguguauaaa

SEQ ID NO: 4097876 - RNA, 55 nt, Human
uuuguagacuaucucuggggugcugcagaaccccaugaaggagagugucugcaaa

SEQ ID NO: 4097877 - RNA, 80 nt, Human
uuuguagguaauggauauguuuaguaccuugaugauggcaaugguaucacagguguaugaauauguccaaauccaucaaa

SEQ ID NO: 4097878 - RNA, 63 nt, Human
uuuguaguaaggguuuugagagagcguuccggacuuaaucucuucagcagccucuugcauaaa

SEQ ID NO: 4097879 - RNA, 55 nt, Human
uuuguaugaacugguauguagguguuaucaaaaccccugcucaacagcauauaag

SEQ ID NO: 4097880 - RNA, 79 nt, Human
uuuguauggugcuuuuaacuuuugaaaggauuuuucuuuauauauccuugaucugaagagguuagaaggauagggcaga

SEQ ID NO: 4097881 - RNA, 80 nt, Human
uuuguaugugcauuguaaauuuugaugucauuaaauaacaaaacuaagauauuucagauagugauaauagcauguauaga

SEQ ID NO: 4097882 - RNA, 68 nt, Human
uuuguauuuuggggguaguuuagacuugcguuauaccaaugcaaguaaccaucacuaucucuugcaga

SEQ ID NO: 4097883 - RNA, 76 nt, Human
uuuguauuuuuauguauuuuauagaugugcauuucagaugcaugaauacauugauggaguaccuagcuuguacaaa

SEQ ID NO: 4097884 - RNA, 55 nt, Human
uuugucaucaguuauuaauaugaggucuuuugccuccugucaguaaagugacaga

SEQ ID NO: 4097885 - RNA, 78 nt, Human
uuugucaugcuaccaccacugacugaaccaccugaauuaagucucaaacucaggcuuauagguagugguuaugacaaa

SEQ ID NO: 4097886 - RNA, 59 nt, Human
uuugucaugguagcugaaggaugucucaaucagcaacaucuggaaaguuacuugagaaa

SEQ ID NO: 4097887 - RNA, 91 nt, Human
uuuguccauuucuuccuccuucccuuuuccgccagaaguagccguccggggcuuuuggccagauggggaaacugaggcaagacugggcaga

SEQ ID NO: 4097888 - RNA, 64 nt, Human
uuugucuagcccaucuaaauaaccugacuacacuuugccaggucuuuucaauggcuuagagaaa

SEQ ID NO: 4097889 - RNA, 59 nt, Human
uuugucugcccugcacuuaggaaccaagguugaguucaaacaggggucagggagauaaa

SEQ ID NO: 4097890 - RNA, 56 nt, Human
uuugucugcuuguucagauggaacgcaccccugucccacacugacaaggcaacaaa

SEQ ID NO: 4097891 - RNA, 65 nt, Human
uuugucuguaauuauuaaagaaaggaauagcagcuuaugaaaucuuuuuuuaauagucagaugag

SEQ ID NO: 4097892 - RNA, 78 nt, Human
uuugucuuacauucgugauuuccuuccacuucugacaugucuuacagcugaaggauucaagaaaugguguagcacaag

SEQ ID NO: 4097893 - RNA, 69 nt, Human
uuugugaaacuccuguucuaugacaagagcuuuaauagcacuggugauauaauggugaguagguauaaa

SEQ ID NO: 4097894 - RNA, 66 nt, Human
uuugugaauagguuggcuuccaguccuuggauugagauugcacaaguuaugugauucacucacaaa

SEQ ID NO: 4097895 - RNA, 84 nt, Human
uuugugagaaaauggcaucagugucuugaccugggugugggucaggcuggccucugcucagggagggucacuacaucucauaaa

SEQ ID NO: 4097896 - RNA, 76 nt, Human
uuugugagagccaaacauguaaguuugcugauacugaaaauuaccaacuggcagcucuuacgugucucuugacaaa

SEQ ID NO: 4097897 - RNA, 109 nt, Human
uuugugagauagaacaagaauaguguaaauuuguacuuguaaauaauguacuuucuauagagauuuauaguuguacaaauuguucacauaugucauuucauuucacgaa

SEQ ID NO: 4097898 - RNA, 60 nt, Human
uuugugcaaugguguuuagguuuuauggcuauauauuugaaguucuacaccauuggcaaa

SEQ ID NO: 4097899 - RNA, 80 nt, Human
uuugugccaacaauguguucagcacuguggaaaacacccaaagagucuguccucaaguaugaucacguugaauguacaaa

SEQ ID NO: 4097900 - RNA, 68 nt, Human
uuugugccaggcaauguucuaagugauuuacagguuuuagcucacuugauaaauauugcuuuuauaaa

SEQ ID NO: 4097901 - RNA, 62 nt, Human
uuugugcuaaguauuuucuuauuuuuaagguaaaucucuagagguggaauuacuggcacaaa

SEQ ID NO: 4097902 - RNA, 95 nt, Human
aaaaaaaagauuauuuuagacaugauauagagaguagauuaaaggguagaauucuuuaggaucucucuuguuacauuuaaaauauaaguuuauuu

SEQ ID NO: 4097903 - RNA, 106 nt, Human
aaaaaaaagguauuaagaaacuaaugcaauaagagaauugagcuuaguucuguaucuauucugaggucucgcuccuguugcacuaguuccugaauaaaauguuuuu

SEQ ID NO: 4097904 - RNA, 129 nt, Human
aaaaaacccgcuacguauacauaucucaagagagaaauacauuuguuuuacccuaguagaugguccauuugcaggaaaaauaaauaguguuuuugcaacuaaggggugggugaagaauucagguuuuuu

SEQ ID NO: 4097905 - RNA, 62 nt, Human
aaaaaaggagauuuuagcuugguuuuugaauauuaagaagucaguggucugucuccauuuuu

SEQ ID NO: 4097906 - RNA, 87 nt, Human
aaaaaaguaaauugccuucucacuucaucuggaugagaauccucugcagcagacugaguaugagaaauaaaaagcuuucccuuuuuu

SEQ ID NO: 4097907 - RNA, 62 nt, Human
aaaaaaucaugcuuauagagcaccuucgcuugaacaguguucaaaauguagguagauuuuuu

SEQ ID NO: 4097908 - RNA, 77 nt, Human
aaaaacuguaggacauguacuuguaacagcaauucaucuuucaauucuagucagcaauguucauguucuggguuuuu

SEQ ID NO: 4097909 - RNA, 120 nt, Human
aaaaaguggagaugaaaauaguacuuuaguguuguugugaggauuaaaugaggaaauacauuuaaaguaccuggaacauaacaggcacuaaauaaauguuagcuauuauuuuuucuuuuu

SEQ ID NO: 4097910 - RNA, 101 nt, Human
aaaaaugaaauaaaaacagauucuucaccauggauaauuuggucuaccuuaccagggcuuaguaaucuuaggucaagauaguuuacuuuuuguucauuuuu

SEQ ID NO: 4097911 - RNA, 65 nt, Human
aaaaaugcauauucuuagccccuccugcagauaagaaucuucaggaaugaggaaucuguauuuuu

SEQ ID NO: 4097912 - RNA, 98 nt, Human
aaaaauuaguaauuuacaaaugugugggaauuuuaagagaaaguuaaagaauaguucuaggaaauuguuacuauauuuguuuaaauuauuauauuuuu

SEQ ID NO: 4097913 - RNA, 65 nt, Human
aaaacaaauaaggcagaaaugauucuagugaucauguggccacuagauuugcugucuuuuguuuu

SEQ ID NO: 4097914 - RNA, 65 nt, Human
aaaacaaaugaguuucuuaauagcugccccacuuagucugagugucuuaggaagcuuaauguuuu

SEQ ID NO: 4097915 - RNA, 122 nt, Human
aaaacaaauguugauauguauacgugagaauggcaaaaucggugagauuaaaccaauaauuaaaugucauuaguuucagccauucuuuuaacauggaauccagauuuuuaauagcuuguuuu

SEQ ID NO: 4097916 - RNA, 90 nt, Human
aaaacagaacaaguuugcuuauuagccuuaggucauuucuacccaauacuguuaccauauggcuucuauaaggaagcuuacuucuguuuu

SEQ ID NO: 4097917 - RNA, 70 nt, Human
aaaacagcaaagcuucuuucugaucugagguuguggcaaaccuaaccugggaucugacgggaugcguuuu

SEQ ID NO: 4097918 - RNA, 67 nt, Human
aaaacaucuucucuugauucuuucuuagcauaacugagauaggcuggagaguucaaggaaguguuuu

SEQ ID NO: 4097919 - RNA, 91 nt, Human
aaaaccaugauccucauuuauguaaugauuaaggcaacuugacuuuuaguaguuucuccuuagucagugcuggguauaaaagggugguuuu

SEQ ID NO: 4097920 - RNA, 62 nt, Human
aaaacccuucugcagacucugagaaaugacaaggggaagcugagaagcugagacuggguuuu

SEQ ID NO: 4097921 - RNA, 130 nt, Human
aaaacuacagucugcggagauaaaaguagaauuauuacagcaggcauagaguagcacucaguaacaucaaaugcaugaaugcaaaucaugauuguaauaauacuuuuuacuuuuguaucacuguaggauu

SEQ ID NO: 4097922 - RNA, 91 nt, Human
aaaacuagaggccagagguugggucugaggugagaaaaaugauagggacaacacugcacgacucucccuagacugcuugguguuugauuuu

SEQ ID NO: 4097923 - RNA, 129 nt, Human
aaaacugguuuaaauucauauuuggcccaaugggaagggacagauguuaucauuuuuaugugcaguuacuucucacagugaaaauaauaucuucaauuuagcuuuggugcaguuuuuggaucccauuuu

SEQ ID NO: 4097924 - RNA, 84 nt, Human
aaaacugucaguuacuugagacguuuaugaaagaagucuagcugggcaccauuuaauucauaaaugcuggaagcuaucaguuuu

SEQ ID NO: 4097925 - RNA, 90 nt, Human
aaaacuuuaaagguuauacuaauuuaaugauuaauguggacccaaauacauaauuuggccaaaaaagucauuagaauggguaaugguuuu

SEQ ID NO: 4097926 - RNA, 75 nt, Human
aaaagaauguaacucuccuuuugaucuucagaaaaagagacccccuucugugguugaaaggagagauauacuuuu

SEQ ID NO: 4097927 - RNA, 114 nt, Human
aaaagacuagauagggggauuaaugaugagacuuuucuguuauuuagcaugauuuacaacuauugcuggcaaccauacuaaguaguuucacauauaauguccccucagccuuuu

SEQ ID NO: 4097928 - RNA, 99 nt, Human
aaaagagauaugugcuuuccucagcuuugguuuacucaucaaaaaucacaccaccccucauugaaagaguaaaauuagugaguuagaacagucuuuuuu

SEQ ID NO: 4097929 - RNA, 84 nt, Human
aaaagagucuuuggcuuacauuuacguauauucaaaguucccuuaguauagcaggggugcugaauaauguguaaugucucuuuu

SEQ ID NO: 4097930 - RNA, 63 nt, Human
aaaagaugugaaauagcuggauaugaagaaucaaaacuucauuuuuucuguuucaucuccuuu

SEQ ID NO: 4097931 - RNA, 80 nt, Human
aaaagcaaacuggagagucuagugcaccuaguuuuugaauacacccauaagucaggugucugauuugaacaguugcuuuu

SEQ ID NO: 4097932 - RNA, 59 nt, Human
aaaagcagaucuccaaagucuaaaagccuuaauguuugcuagguggaggguuuguuuuu

SEQ ID NO: 4097933 - RNA, 127 nt, Human
aaaagccugcagugaaggaaggugauuuagauaauugaacauugguaccuuacaucguuaauauuacuguugauuaugguaacaaugauuaaaaauugggcacuauuuuuucauguaguuaguuuuu

SEQ ID NO: 4097934 - RNA, 76 nt, Human
aaaagcuucuaauauguuagggaaauauuggaaauuacuuguaauggcaguugguguuacucugauaggugcuuuu

SEQ ID NO: 4097935 - RNA, 76 nt, Human
aaaaggauggagcagcucauggcauuuucugcauguugaccuuuccaacacagugucaucaguuucucaaccuuuu

SEQ ID NO: 4097936 - RNA, 66 nt, Human
aaaaggcuagcuaguaacagaaauaggaugaagacgugucucuugcucugaguacagcugucuuuu

SEQ ID NO: 4097937 - RNA, 57 nt, Human
aaaagggguuauauacuuauguacuuaaaauacauaauccugguguagcccucuuuu

SEQ ID NO: 4097938 - RNA, 64 nt, Human
aaaagguucuuuucaaugguuguaaaauauuucaagguauggcuauagguagaaggaaucuuuu

SEQ ID NO: 4097939 - RNA, 68 nt, Human
aaaaguacacuauagacagagcauuuuugaaaugauuguuuggaaauguuccauuauuguguaauuuu

SEQ ID NO: 4097940 - RNA, 76 nt, Human
aaaaguuaauagaagugauacauuagcuuucuugggcaaagugcuuaagaagugagugcaccuucuucauccuuuu

SEQ ID NO: 4097941 - RNA, 83 nt, Human
aaaaguuacccauaccugggccuccuccucagaucaauuaaaucaaaauuucugagauuggagccugggcauuaguaauuuuu

SEQ ID NO: 4097942 - RNA, 104 nt, Human
aaaaguuauuguugagacuaguugcauaaagccuuccucauaaauguuuauauuagauuucacauauggguaagaucuuuuguauuugucucaguguaucuuuu

SEQ ID NO: 4097943 - RNA, 63 nt, Human
aaaauaaucuagucuaagaggagcugggaaauuuuucucuuuauguaagacugggcuuguuuu

SEQ ID NO: 4097944 - RNA, 95 nt, Human
aaaauaaugguccuuagaacaauguuaaauuauuaagaaguucuagauauguuugcuguuuugauaauuaaaaauuguaguugacuaguuguuuu

SEQ ID NO: 4097945 - RNA, 73 nt, Human
aaaauacuagacuguucuguuaucacuuggccaggaauguacuggagugggggacaggaaagcuaguuauuuu

SEQ ID NO: 4097946 - RNA, 86 nt, Human
aaaauagaguacugugccaucauucaauaaauucaaagcagccagcuuuuccuccagcuuugaaacagauugaugguuucuauuuu

SEQ ID NO: 4097947 - RNA, 69 nt, Human
aaaauagaugaaaggaagucuguuuaaaaggaugagaauccaagguauggauuuccuuuucagcauuuu

SEQ ID NO: 4097948 - RNA, 96 nt, Human
aaaauaguacagaagaacuuguaaugaaaggcaauaguccuauuauucucuguauccauugaagccaccacuguaagucacuuuuguuauuauuuu

SEQ ID NO: 4097949 - RNA, 101 nt, Human
aaaauaguuucuuccagagcuuagaauuucagaugauuggaaaauucauacaucuaggucugaaaguuuaagucuuucgcaucuauggagaucucuauuuu

SEQ ID NO: 4097950 - RNA, 67 nt, Human
aaaauccauuuuaguaccucaaguauccauuaguuaauagcuaauggaucugugcugaaugcauuuu

SEQ ID NO: 4097951 - RNA, 101 nt, Human
aaaaucuuauuuuucaauguaccuaagaaugaaggaauauugcuuugcuuuuagagauuaacuaaaacaagguuugguccuauauuuugguacuagauuuu

SEQ ID NO: 4097952 - RNA, 102 nt, Human
aaaaucuuuucauugcuguccuuuuagaaggcuucugcucagucuagccuuucuucagcagggcugaugaugagcagaggugaagguauuccucaagauuuu

SEQ ID NO: 4097953 - RNA, 83 nt, Human
aaaaugcaagauccuuuuaucagucaggguuuauagcugcaagcaaaagcaacugccccuggcuggugaagcagagacauuuu

SEQ ID NO: 4097954 - RNA, 57 nt, Human
aacaagaagagagggacguaaucccacugcuuggaaugcgauccucaauccucuguu

SEQ ID NO: 4097955 - RNA, 72 nt, Human
aacaagccagcucugaguugaaguacucacuggggcgaggggugcuucauauuuuuagaacugagcacuguu

SEQ ID NO: 4097956 - RNA, 65 nt, Human
aacaagccaguauucaauggggcuagggggaaaauuaccugggcuucaggaauuacaggagaguu

SEQ ID NO: 4097957 - RNA, 129 nt, Human
aacaauauaauuggauuaauguggguggacuaauuuguuuuaucaucacuuaaaggacacuuuguuuuuagauguucuagaagugugguguucacauuugcccccuuugcuacuuaaauccaguuuguu

SEQ ID NO: 4097958 - RNA, 77 nt, Human
aacaaugagauuccaauagcuccugcagggcccacuguuaccuaaaugaagccccagcagccuggaauuucacaguu

SEQ ID NO: 4097959 - RNA, 61 nt, Human
aacacaacacagggguuaugccaugguugcagcuagcccauagaguaccucugugugaguu

SEQ ID NO: 4097960 - RNA, 130 nt, Human
aacacaauuguaaucagcuacaaucaauaugcaggagcugguuuucauuuuccacuuugcacugagaggcaguucuuaaagugcugaagaccuagcuguacuugaaaauggcugagauuuaguugugcuu

SEQ ID NO: 4097961 - RNA, 95 nt, Human
aacacaccucuacccagguuggagaucugucuauggcagugcagaaauuuucccagucauuacaagauuuccaauuugaauguauuggugauguu

SEQ ID NO: 4097962 - RNA, 58 nt, Human
aacacagaucaaaauauuuccugucuguauaugaagguaaugccauugaucugcuguu

SEQ ID NO: 4097963 - RNA, 76 nt, Human
aacaccagaguccauaucucuuuccugguuugugcuuguucaaagauugaucauggaagagguauuuuuuguuguu

SEQ ID NO: 4097964 - RNA, 55 nt, Human
aacaccaggaagucucccaggcauucuauucuagccuuuauauuuuucugguguu

SEQ ID NO: 4097965 - RNA, 64 nt, Human
aacacuccaagcuugcuuuagccacagggccuuugcacuugugguuccugcuguuuggaauguu

SEQ ID NO: 4097966 - RNA, 68 nt, Human
aacacucccaguagcccacuguuuggcugacuguaccuaugccacagugaucccugccugcgaguguu

SEQ ID NO: 4097967 - RNA, 77 nt, Human
aacacuggacacuuuagagcccagucuuugugugaagaaaaugaaauuuucacccaggugugguuaagugcaguguu

SEQ ID NO: 4097968 - RNA, 84 nt, Human
aacacugggaucaaaauuaaaccaacguccaguuucuagacugccuuuagauauuauuaggaacucaggauuuuucucaguguu

SEQ ID NO: 4097969 - RNA, 65 nt, Human
aacagaaccuggagaaguuucuuccuagguuugaaaucuuuaaucuagaaacuucuuguucuguu

SEQ ID NO: 4097970 - RNA, 114 nt, Human
aacagacacugccucuuaccuagccucucuaggacaaugucaaaauaggaaacauuaucuuuacauguuuaaucuauuuggcauuuuccugggaaaagugagaaacugauuguu

SEQ ID NO: 4097971 - RNA, 62 nt, Human
aaauauucauugaaaaacguugacugagugccuacgcugggccagacuuucaaugucuguuu

SEQ ID NO: 4097972 - RNA, 60 nt, Human
aaauauuggccagacaaucugaugaguggacacuauuccaguucaaauuggccaauauuu

SEQ ID NO: 4097973 - RNA, 85 nt, Human
aaaucaaauaucauauuuuacaugacagguguuuaguauuguaauacgugcuaacuagcuugguuauguaaaguuaaauagguuu

SEQ ID NO: 4097974 - RNA, 68 nt, Human
aaaucagacucuuucaaacagaaagccagucugaguuggcaggcugguuugacaaugaggacugguuu

SEQ ID NO: 4097975 - RNA, 74 nt, Human
aaaucagauacugguauuggauacuuuaauuuauaacauuuuuuuaaaguuacaguaauucaguguaaagguuu

SEQ ID NO: 4097976 - RNA, 111 nt, Human
aaaucagggugcaucauaugugaagcuuucuauaaaugaauguguauauugagccaaaauguaaaauauauacuguauauuguagucagaaacauugaaagccacugauuu

SEQ ID NO: 4097977 - RNA, 77 nt, Human
aaauccacauucucuuccuaaauauacuccuggcauaagacaacaaaagugauauuuguggggagauguuccgauuu

SEQ ID NO: 4097978 - RNA, 84 nt, Human
aaaucuaaaaaguguacauguuuacagcaucugaguaucuccaauaauaagaugacuuuaauaugugaaaacauuuguggauuu

SEQ ID NO: 4097979 - RNA, 73 nt, Human
aaaucugggacacuggccacauuucaaaauacuacacuuaggaauuucuguaauuggccaagucacaugauuu

SEQ ID NO: 4097980 - RNA, 84 nt, Human
aaaucugucuucucaaaguaaacaaggcaagucugugagcaucuccgacaagauguaugaagcuuuguuugggauaauggauuu

SEQ ID NO: 4097981 - RNA, 73 nt, Human
aaaucuugguucucuuagcuguaaagucaauucuaguguuucucaaacugucuuguguuaaagaaccagauuu

SEQ ID NO: 4097982 - RNA, 67 nt, Human
aaaugacagaguaagcuguuuaaagucaaacucacgucccagcuaugcagcuugcuuugggacauuu

SEQ ID NO: 4097983 - RNA, 80 nt, Human
aaaugaguuagaugagaaaauaagcgaggguuaaauauugccucuuccucuucucuucuuuccucauuccuaauugauuu

SEQ ID NO: 4097984 - RNA, 121 nt, Human
aaaugaugagaaaugaaauaacuguucugacuuugagagugguagagggaagacaauggcaaauguuucuaggcagguauucccauuccacuuaucaaggcuaaacagggcucacacauuu

SEQ ID NO: 4097985 - RNA, 86 nt, Human
aaaugauugcaaaagcccuggcauccacaaaugcuuagauucauuaugguaucuuugguauuuuggauggggcuuaagcuacauuu

SEQ ID NO: 4097986 - RNA, 72 nt, Human
aaaugcacacaccaggaaacuauaaauuugcuccagccuggagugaucuuuuauucugguagauguuuauuu

SEQ ID NO: 4097987 - RNA, 79 nt, Human
aaaugcacuuaaauaacauaacuuauguaggcuaaauauugcaaaaauggauauggaguuaugcuguuaauaugcauuu

SEQ ID NO: 4097988 - RNA, 67 nt, Human
aaaugcagguucuugagccaagcccagcucuacugaaugagaauugcuggcccagggaucugcauuu

SEQ ID NO: 4097989 - RNA, 77 nt, Human
aaaugccuggaaugcaggaccggaaccaugggauaugcagacauagauaaaccauauuuccuuucugcugggcauuu

SEQ ID NO: 4097990 - RNA, 57 nt, Human
aaaugccuuuacuuuugcuggcaagugguacuagugcccacaaaaguaaagacauuu

SEQ ID NO: 4097991 - RNA, 59 nt, Human
aaaugcuauacucaaagaaauucaauuugaauuggaaaugaaugaggaggauggcauuu

SEQ ID NO: 4097992 - RNA, 81 nt, Human
aaaugcuaugaagauuuugaguuagaaaaguugcuuuuaacuggaaguaacagcaucaagucucaaguggucacagcauuu

SEQ ID NO: 4097993 - RNA, 79 nt, Human
aaaugcugggacugagacagugaccuggguuuucucucucaucuaauguaccuaugguugcuguaacacucuuacauuu

SEQ ID NO: 4097994 - RNA, 63 nt, Human
aaaugcugucaguguuauuggaaaaugagcugugguuuauagcaauaauacuaacagguauuu

SEQ ID NO: 4097995 - RNA, 65 nt, Human
aaauggaagaagugcaauacugacugcauucccuguaguucaacaugcauuuuucaaucucauuu

SEQ ID NO: 4097996 - RNA, 57 nt, Human
aaauggaguccucucucaccugggagagccaggugcugccccgagaaggaugcauuu

SEQ ID NO: 4097997 - RNA, 128 nt, Human
aaauggcauuauauauaaaagaaaagauugguucuacuacauacaucaggcuuauuaagucacacuagacaacugagguugccuaagacgucauuguccuggacuugcaagggccuccaacuccaguu

SEQ ID NO: 4097998 - RNA, 71 nt, Human
aaauggcuucgaguauauacauagucuaugaaagggaauaaaagucuguuuguaugugcuuggauuuguuu

SEQ ID NO: 4097999 - RNA, 76 nt, Human
aaauggguaaaagaaugaguuacucaaaagcagaacacccugucuuuuugacauuggcuuauucuguuaaucauuu

SEQ ID NO: 4098000 - RNA, 85 nt, Human
aaauggugacaaaggguccagaauuacuacuguuugaguaagacugcugaaaugguuuuggauuuuguccauaguacaaccauuu

SEQ ID NO: 4098001 - RNA, 97 nt, Human
aaaugguuuuucauucugggcaguggcgcaaucucugggugugaaaucacgucugagguuuacaagcuauugcugacaucaaugaaaugcaacauuu

SEQ ID NO: 4098002 - RNA, 65 nt, Human
aaauguaaggauaguacaagaagcuccugugcucuuuauggggauucaucaacuguuuuacauuu

SEQ ID NO: 4098003 - RNA, 66 nt, Human
aaauguaccagccuaagaaguggcaccauauuuucuauuuaucccacuaauuaagcugucacauuu

SEQ ID NO: 4098004 - RNA, 58 nt, Human
aaaugucuacuucccaucuguauuucagguuagauacacaagugggaaguagauauuu

SEQ ID NO: 4098005 - RNA, 100 nt, Human
aaaugucucucccagacuaucuuugcagacuagcuuacaucauauaaaaauauucucaguccuauaagauguaucaguuaagucuucauggcagacauuu

SEQ ID NO: 4098006 - RNA, 88 nt, Human
aaaugugaaaauuucugaaauagaaagcugaguaauacauuucucaguugggaaaaugggugccagcuucugaaagaggaaaacauuu

SEQ ID NO: 4098007 - RNA, 66 nt, Human
aaaugugaucuuggcccuuaauuacuuucuaugauugguauggucuggggaccgaggguuacauuu

SEQ ID NO: 4098008 - RNA, 57 nt, Human
aaaugugcauguaugugcauguuuuaguaugcaugcauacuuguauguguuacauuu

SEQ ID NO: 4098009 - RNA, 64 nt, Human
aaaugugugcacaaagacagcuucucauuauccuuagugguuuucagucuuggugcucacauuu

SEQ ID NO: 4098010 - RNA, 58 nt, Human
aaauguucccaauaugaagcugucggcuuaguuuuguccguuugauugggcaacauuu

SEQ ID NO: 4098011 - RNA, 63 nt, Human
aaauguucugaaagacccgcucuucacuccaguuuucccuaggguguuucuggcagggcguuu

SEQ ID NO: 4098012 - RNA, 82 nt, Human
aaauguuuauaaauucugcuuuuguuugggggaaaaguccaguugaaagauaaaagaggaaauuuguucaaugaaagcauuu

SEQ ID NO: 4098013 - RNA, 84 nt, Human
aaauguuuauuguuuuagguuucuaaucacagugguuauaaauaagcacagauucugaagaguccuuauaugcgguacacauuu

SEQ ID NO: 4098014 - RNA, 110 nt, Human
aaauguuuauuugcaaauaguguuugguaaaguugauuggugcucuguguuaauacagcuagauuguauuguauuaauuuuacuagcaaacauuuugugauagagccuuu

SEQ ID NO: 4098015 - RNA, 92 nt, Human
aaauguuucagagaugcauacagauuuaaaauuuuccuauccaauuucuguaagagugauaauuuaaauuaguaugugauugugauacauuu

SEQ ID NO: 4098016 - RNA, 56 nt, Human
aaauguuucuacuugugagcaucaugaagaaaaauugcucccugguagaaauguuu

SEQ ID NO: 4098017 - RNA, 72 nt, Human
aaauuaacuaaccuguugaaggaauugcuaugugaaguauauaugagcacuucccuugcagguuaugaauuu

SEQ ID NO: 4098018 - RNA, 83 nt, Human
aaauuauacauuccugggcuccacccuagaacccaugaacuagauucauuaagaauggggugggguccagggaucuguaguuu

SEQ ID NO: 4098019 - RNA, 55 nt, Human
aaauucagcauccugcacuggaucauacaauugguaagcuguggaugugggauuu

SEQ ID NO: 4098020 - RNA, 84 nt, Human
aaauucccugagcuucuauuuuuccagagugcccuagagaugaaucucaaugcagcuuuguaaaguaugaagcacaaggcuuuu

SEQ ID NO: 4098021 - RNA, 79 nt, Human
aaauuccugagcauuuuaggaucacauuagaaagcaagagaaaaaaaguaaagugacccuuagaagcugcagcgaaauu

SEQ ID NO: 4098022 - RNA, 126 nt, Human
aaauugcccaggaucuacacaguuagugaaauggauacuaggauguuacgaugcuuuacagaaaaaaauaucuaagcauggcuguucuagcuauauacacaaacccagaagauccucagacaauuu

SEQ ID NO: 4098023 - RNA, 57 nt, Human
aaauugcuacaggugucuaguagcuacuguguuggauagcacagcuguagacaguuu

SEQ ID NO: 4098024 - RNA, 130 nt, Human
aaauuggcccugaaaaaaagacaaagaaacuauaggacacagauauguuucaguauucaagucaaacaauguugaaauggauugggugcugaagcauagugguccagauaguucugacauggccaaugau

SEQ ID NO: 4098025 - RNA, 63 nt, Human
aaauugucagaauucagaaaguugcuccaugugccccugucacccugaauucuagaccaauuu

SEQ ID NO: 4098026 - RNA, 57 nt, Human
aagacuacuuuuggcaguguguauaagagauguguauacauguagguagguagucuu

SEQ ID NO: 4098027 - RNA, 79 nt, Human
aagacugugucuauggcuacucacuuaaacaagaaaauuuuauggucaguucugccuauauagaaacucacacaguuuu

SEQ ID NO: 4098028 - RNA, 57 nt, Human
aagacuuauagucaguaauucuuacauaauagacauuuacugcauacuauggguuuu

SEQ ID NO: 4098029 - RNA, 66 nt, Human
aagacuugacuccacaauuugacuuauauuuccuuuaaauaauuuuguccugguggaguaagucuu

SEQ ID NO: 4098030 - RNA, 58 nt, Human
aagacuuuucugcaaguuuaacaguguaaccaucaccucuuaaagugcgagaagucuu

SEQ ID NO: 4098031 - RNA, 120 nt, Human
aagagaaauagauuaagcaaagcuagagguauugcacgugcucucuacagacaacaucucacuuuguagagaaaaauuuuacugcaaugcuucccauugcaccugccaacuccuucucuu

SEQ ID NO: 4098032 - RNA, 83 nt, Human
aagagaagccuucuuacucuacuccucaaacuacaggcccagcuucuaaacaggccugagcuagggaaggaagaccuugucuu

SEQ ID NO: 4098033 - RNA, 72 nt, Human
aagagaauugaccuguucuuguggcucuggucagauugagaccagcaguuaugaggccaggacuagucuuuu

SEQ ID NO: 4098034 - RNA, 70 nt, Human
aagagacuuauuggaggaucuaagagucacaacccucuuuguggcucucagauccuccaauaagucucuu

SEQ ID NO: 4098035 - RNA, 73 nt, Human
aagagagaggaugaauuuuuuuuaaguugcauaggugaauugaaauaggcacgaaugaaaguuucucucucuu

SEQ ID NO: 4098036 - RNA, 69 nt, Human
aagagaggagggagcagggacuauaaccagccuagggcuuuucucuggauccugcugccaccucuucuu

SEQ ID NO: 4098037 - RNA, 60 nt, Human
aagagaggaugagcuucaguugggugaccugucacacccagcucauccauuaccucucuu

SEQ ID NO: 4098038 - RNA, 129 nt, Human
aagagaggcagaaaaacaagauguaugcaguuuauuuaggagaaugggcauauuaauucuuaacuuuaauaauuuuaaaauaaugucuaugguuccaaaaugcgcauuuaauuucuucucuguucucuu

SEQ ID NO: 4098039 - RNA, 113 nt, Human
aagagagucgucugucugguuucuucugaccuuuugucauuggcaaauuaaaacccaaaguagcugauggcacaggaauuuagaugcaggagccagugaacauaauaucucuu

SEQ ID NO: 4098040 - RNA, 129 nt, Human
aagagauauggccaggagacacauuccaccugaagacugagagggaggcuguccgguaccauguaacaguugcgucagacugggacacuuccuuuuuacagaggacuauaaaaccccugcccuguccuu

SEQ ID NO: 4098041 - RNA, 86 nt, Human
aagagaucaguuaguugcuuaaacccugaucaugugucaggcacuauucuagaugcuggggguuagagcagaaagguagauuucuu

SEQ ID NO: 4098042 - RNA, 71 nt, Human
aagagaugguaauaguaacauuuccauuguuaguuauuacaaacauguacaaugugugcuauuuaucuuuu

SEQ ID NO: 4098043 - RNA, 72 nt, Human
aagagauuaccuuggacuccagaugcugacuaaagaucagauagaucuggaaaaucacaggugcaagcucuu

SEQ ID NO: 4098044 - RNA, 117 nt, Human
aagagauuuguggagaaggagaaauuuaugguguuagcaaggaaagaaauuacaaaauuauaauaagcucuggcuaagcugauaaauuuacagauuuaccuuuuaaggguugcucuu

SEQ ID NO: 4098045 - RNA, 71 nt, Human
aagagauuuucacagauguuuuggagucuauuuagucagucagauucauccaucauuugagaagguuuguu

SEQ ID NO: 4098046 - RNA, 61 nt, Human
aagagcagagcagggggaaucacagucugacaaagagaguucuccagcccuguucccuuuu

SEQ ID NO: 4098047 - RNA, 58 nt, Human
aagagcaugugcagacucugacaggcuuucagggaagccacgucccccaugugcucuu

SEQ ID NO: 4098048 - RNA, 63 nt, Human
aagagccaccuuccaaaauaaucacaaagaagucucacuuuguauuaugugagguuggcacuu

SEQ ID NO: 4098049 - RNA, 55 nt, Human
aagagccugcaguaccuugcuauguggaccagguuugcaggguggcagagcucuu

SEQ ID NO: 4098050 - RNA, 111 nt, Human
aagagcuaauagaggucuggcucuuacucccucugucuuguccagaaaggcagaccuacccugaggggacaggacaggagggcugagcacagcacacacuucuguucucuu

SEQ ID NO: 4098051 - RNA, 55 nt, Human
aagagcucaggauuucauccauguguccuuggacaaggaacuuuuucugacucuu

SEQ ID NO: 4098052 - RNA, 62 nt, Human
aagagcuguugauuuaaaccuauuccuuagugaugguguaggccaggaaucagcaagcuuuu

SEQ ID NO: 4098053 - RNA, 70 nt, Human
aagagcuuauuaauuuuucugcaugugaaagcuuugacuuccuauuagaaagcuuaauaucguggcucuu

SEQ ID NO: 4098054 - RNA, 81 nt, Human
aagaggaaaagagcacucaugacccuagugugcuggcauccuguuguccuuuauagcuaaggucagacuguuucuccuuuu

SEQ ID NO: 4098055 - RNA, 66 nt, Human
aagaggaggaugcuuuacagcuggauucauucauucauuuaaccauuuaugaagcauccacuuuuu

SEQ ID NO: 4098056 - RNA, 64 nt, Human
aagaggcagaaauaucgcugaauggugaaaaacagcucccccauauucagcagugucugcucuu

SEQ ID NO: 4098057 - RNA, 84 nt, Human
aagaggcaguccuauguguauucuuacaggacauguacauuauauuacugcuuugauuagaagaguacauggaggacuaaucuu

SEQ ID NO: 4098058 - RNA, 84 nt, Human
aagaggcaguuaggacacagcuugaugagggcuuugcuggggaaaguacuggugcuccagaagcucguggucaaggugccucuu

SEQ ID NO: 4098059 - RNA, 86 nt, Human
aagaggggagacgagaugugucagguccugggggugggaagucacuuccugcgcccgcuggcccugcgaucuccgccuucccucuu

SEQ ID NO: 4098060 - RNA, 55 nt, Human
aagaggugagaagcuacacuuagauucucugagugcauggacuacuggcuugcuu

SEQ ID NO: 4098061 - RNA, 124 nt, Human
aagaguagaggaaauaaugucuauagguucacaguucugaggucugcauuacauagugcagcucuaguguguaauucagugcccagcacagucagaacuacaagaaguuauuuacucuccucuu

SEQ ID NO: 4098062 - RNA, 65 nt, Human
aagagucuccauggaaaguagccaguugggcaugacugugcauuugucaugggguuuaugcucuu

SEQ ID NO: 4098063 - RNA, 56 nt, Human
aagaguggaggcuccuguuggaagauuaccuguucccagcccagccuccuucucuu

SEQ ID NO: 4098064 - RNA, 59 nt, Human
aagaguggugcaggugucacugcagauccucgauuuguugacaucccuguacuuuuuuu

SEQ ID NO: 4098065 - RNA, 62 nt, Human
aagaguuuuuaauggguacugggauuuauucaauaaaguuuauuacucaguccaaaacucuu

SEQ ID NO: 4098066 - RNA, 74 nt, Human
aagauaccgaugcuugagucccuccacuagauucggauuuauuggucuggggugugaccugagcauggaauuuu

SEQ ID NO: 4098067 - RNA, 89 nt, Human
aagauauguuuccaacugugaucuuacuuggaaauagggugauugcagaucucaucugcuacagugaggucauacuggagagggaucuu

SEQ ID NO: 4098068 - RNA, 90 nt, Human
aagaucaagguuccagcaggguugguuucuucugaggccucuuuccuuggcuuuagauggcugucuucuugcuuacccucauguggucuu

SEQ ID NO: 4098069 - RNA, 63 nt, Human
aagaucacugagcuucagugcuggccuagaaauaagcugggaaagcucucuccucaggaccuu

SEQ ID NO: 4098070 - RNA, 104 nt, Human
aagaucccugguaaaucuguuuuguaauguugagugaaauucccucaagagauucuguucauauaucugcaaagcaguauuuaccaccaacaaauagggauuuu

SEQ ID NO: 4098071 - RNA, 115 nt, Human
aagaugaaaucuuacaagucuuuuucaugucuucugagggcugagauauaacuuugaaguagagcccaaacaugaagaucaugaagacggcuucuucuccaaaugauguuaucuu

SEQ ID NO: 4098072 - RNA, 100 nt, Human
aagaugaaauuacuagaaugaggcuuuugugggaaauuaaauaugucuggauuuaucaggaagauuaguuuccuaccucuuucaacagcaauuucuuuuu

SEQ ID NO: 4098073 - RNA, 67 nt, Human
aagaugauguguuagcuuaguggauauuuccuguuaacauauucauuacaguuaauuacaacaucuu

SEQ ID NO: 4098074 - RNA, 60 nt, Human
aagauggcccagggcacagcagggagauggccuuauuuccuuaugccuuuuggcuaccuu

SEQ ID NO: 4098075 - RNA, 90 nt, Human
aagauguagcacuaguucugacuaagucguaauuaacuucaucgggaguuacaugauagcaacauagaacagaauuuggcugaacauuuu

SEQ ID NO: 4098076 - RNA, 84 nt, Human
aagaugucuuuggaaggaaucaugauccaaauuacuuagucuguaauuacaagccaccaucagugacuucuuccaaaguuucuu

SEQ ID NO: 4098077 - RNA, 57 nt, Human
aagauguuaaaucuguagaauuccaccauggucuaaaguuacaaggugugacaucuu

SEQ ID NO: 4098078 - RNA, 82 nt, Human
aagauguuguguaugccagggucacagucauauuuugaccuauguuaaaucaugccuauugcuuugugugucacaauaucuu

SEQ ID NO: 4098079 - RNA, 71 nt, Human
aagauuaggaucuucauugugcugcaaauagcuauaauauauaugcagucuaacugggaagguagugucuu

SEQ ID NO: 4098080 - RNA, 78 nt, Human
aagauucugauaauguugccauguugcaguaacacuuuuaggcuuagcacugcuauacagcagcuuacuaguuaucuu

SEQ ID NO: 4098081 - RNA, 109 nt, Human
aagauuuuuguaugucauagaagcuuuaauuaucuuacuuauguugaaggagaucaaauucuguuucagaguuauguaagaaaauaagaguuuauacuaugcuaauuuu

SEQ ID NO: 4098082 - RNA, 69 nt, Human
aagcaaacaucccagagguucaaguuaacugaggccgacuccuggcuaggaccucugcggagcaugcuu

SEQ ID NO: 4098083 - RNA, 59 nt, Human
aagcaaagcuaccaauuauugagugcuaugugccaagcaugaugugaaaugcuuugcuu

SEQ ID NO: 4098084 - RNA, 107 nt, Human
aagcaacagcauagucauauuguaggauuggacuauucauuguaggauuagacgauucauuaaguagugaauaguccaaucccgcaaucugacugugcuugggguuu

SEQ ID NO: 4098085 - RNA, 81 nt, Human
aagcaacuucccaaaaaagaugaacugagccuauucauaaucauuguagaaacaagcuucuucuauuuuggggccauguuu

SEQ ID NO: 4098086 - RNA, 78 nt, Human
aagcaagacugucuuuaccaucaaauaaaugaaaucuggggcuauguguaguuccgcuucauauuuggagucuugcuu

SEQ ID NO: 4098087 - RNA, 72 nt, Human
aagcaagggagacagcagaaacuagagcacuugaguaaaagcuggaugcuuaggucccuguuguucauguuu

SEQ ID NO: 4098088 - RNA, 129 nt, Human
aagcaaguaagucauggacauucuaugcauaggucaaguuaauguuauuuuaugcuaaauugcauagcauucugugauaggcauuuaacucuaaguguaucuaaggauaaaaaaugugauugccuguuu

SEQ ID NO: 4098089 - RNA, 94 nt, Human
aagcaauguaccucuuuauuuagguugaaaauugauucaaaagaauuguaacuggcucagugacaacuaugaauauuuagguaaauuucagcuu

SEQ ID NO: 4098090 - RNA, 89 nt, Human
aagcacaaugugacuagcauuuucuauguauaugaaguauugaaaaugcccaauagcuuuaagacauggugaauguauuacaugugguu

SEQ ID NO: 4098091 - RNA, 93 nt, Human
aaauuccuaauugugucuacuaaauuuauuuuagcauuaaacauucuuuaaauggaagucuggugagaacauaaauagaugugagagugguuu

SEQ ID NO: 4098092 - RNA, 87 nt, Human
aaauuccugaaauucuucucuuugcuuugucuauaugcaaaaagcccaaauguugcauagacacaagagaaggguauaauugaguuu

SEQ ID NO: 4098093 - RNA, 66 nt, Human
aaauucuucuugaaacuuuagguuguuguuugugcaaagcucuucaacauguugcaggaaggauuu

SEQ ID NO: 4098094 - RNA, 70 nt, Human
aaauugaaguuucaaauauaaaauuacaggaaauuaccaacuuucuguuuugugaauggaauuuugauuu

SEQ ID NO: 4098095 - RNA, 60 nt, Human
aaauugagacuuuuuuccuccaaauauguuuugacuuuggagauuuagaaggaucaauuu

SEQ ID NO: 4098096 - RNA, 67 nt, Human
aaauugcauugccaccuaguacuucggcaaacacuuacugaggaccugccaggugcaaagcacauuu

SEQ ID NO: 4098097 - RNA, 63 nt, Human
aaauugcuaaauuguaagagggagaucaugaauaauugaaauacucagauaauucagcaauuu

SEQ ID NO: 4098098 - RNA, 62 nt, Human
aagugaguauucaaggcucauaauaauuaauaucuguugcuagcuuugcuuuguacucauuu

SEQ ID NO: 4098099 - RNA, 65 nt, Human
aagugagucugagcgcuuugggauucccccucccaucuaucuucuuggagcugccauauuuaguu

SEQ ID NO: 4098100 - RNA, 62 nt, Human
aagugaucugacucccaguuagagguucuuuccuugcccucuuuuaggugaucagaucacuu

SEQ ID NO: 4098101 - RNA, 127 nt, Human
aagugauuccaucaaccugccuauguacuuugagucauuugaacaguuucaagaaaacuuugaaucauauugaaagaaauugccauuguauucauaugaaaguacagaacaaaacuuggaaacaguu

SEQ ID NO: 4098102 - RNA, 57 nt, Human
aagugcaaaucuguggcugaaaggaucauauccccucguccaaacauuugccagcuu

SEQ ID NO: 4098103 - RNA, 60 nt, Human
aagugcacagacuugcuucuugccugcuacucagggaauuaaguauauguccguguacuu

SEQ ID NO: 4098104 - RNA, 68 nt, Human
aagugcagaagaaaugcaucuaccauaggggucucuagcccuagcccagaucauucuucugagcacuu

SEQ ID NO: 4098105 - RNA, 98 nt, Human
aagugcagagauguuucuucuuuugguggugggcuuggcagccuggacagcagcaguguuaaguugucagcagcacuggcaaagagacuccugggcuu

SEQ ID NO: 4098106 - RNA, 78 nt, Human
aagugccaguguuuaaucauugugaauuuauaagugugugcguuaauuuguaaggggauuaaaaauacauggguauuu

SEQ ID NO: 4098107 - RNA, 88 nt, Human
aagugcccauaucuguacaaacuuaagauguucagauaauuuggaggcauuguuaacuguuuuucuggauaucagugcaugggcacuu

SEQ ID NO: 4098108 - RNA, 73 nt, Human
aagugccucccaaggggcuguuggagggacauucaauccccucaacaauuuucaagcuucuuuggaaacauuu

SEQ ID NO: 4098109 - RNA, 55 nt, Human
aagugccuuuucuucauaguuacuuugaaaaaaggugaauagggaaagguuacuu

SEQ ID NO: 4098110 - RNA, 77 nt, Human
aagaugguacucacagccucaggcaagcugccaugagauugucauuccuuggcacuggugccuguggcgagcaucuu

SEQ ID NO: 4098111 - RNA, 63 nt, Human
aagaugguugccaacucaaggauuuccgccuucuggaggccgcguagucugagcaucugucuu

SEQ ID NO: 4098112 - RNA, 69 nt, Human
aagauguaucuuuccuuuaauucugauuauagaauuuguaaauuaguagaauaaagagggauacauuuu

SEQ ID NO: 4098113 - RNA, 116 nt, Human
aagauguauuuacuuugaggaagaccuaaugagaucuugguaaauccccuuacacaaagagaugcuuuuuuguguaaauuuaaaggaugacacucccucuaaguguucuacauuuu

SEQ ID NO: 4098114 - RNA, 69 nt, Human
aagaugugaaauugucucuggggacuuggagguguucuaaaccuguugaaccagagacauuggcaucuu

SEQ ID NO: 4098115 - RNA, 73 nt, Human
aagauguuaggguggaagggaugaaugguucagcaacccuggcuccuaacagaccuuacuuccccuuugucuu

SEQ ID NO: 4098116 - RNA, 91 nt, Human
aagauuaaaaaaugcguggaggcagaaaucuucuguugacucacuuuggucaauguguagauguugcauuccucucaaauuuuuagguuuu

SEQ ID NO: 4098117 - RNA, 64 nt, Human
aagauuucucuccuggaaagcaauucaccacucucuaugcuucuuuuucuuucugagaagucuu

SEQ ID NO: 4098118 - RNA, 63 nt, Human
aagcaaauuauugacgccaagcuguggauuuucugaaucaacaaugggucuguaauggagcuu

SEQ ID NO: 4098119 - RNA, 82 nt, Human
aagcaagguaauucuagccagaugauucccaaauaggaggugcugcucuccuuguugcuuucugguuggauuaauuuuguuu

SEQ ID NO: 4098120 - RNA, 69 nt, Human
aagcaauaagccagauuuggaucaugaaccacaguuuaccaaguccuggucuaacuggucuccuugcuu

SEQ ID NO: 4098121 - RNA, 65 nt, Human
aagcaaucaaauaugugauagaagcuaauuugaaacaauauuagcuuuauauauuuggaucgcuu

SEQ ID NO: 4098122 - RNA, 93 nt, Human
aagcaaugaaauuugauguccucagacacccugcuggcuuuacgcuuauguaaaguccgcauuuguguucucuggcagcuguauuucuugcuu

SEQ ID NO: 4098123 - RNA, 56 nt, Human
aagcaauucacaguucacuuaaagcaauagugcugaaagucuauuuagaguugcuu

SEQ ID NO: 4098124 - RNA, 64 nt, Human
aagcacacagcaaaggggagcugggccauaccagcuaaauccuacuuuuguauuugaugagcuu

SEQ ID NO: 4098125 - RNA, 66 nt, Human
aagcacagagaugggcacgccucuuuacagaaccaaagauucagaacugugccuuacccuuugcuu

SEQ ID NO: 4098126 - RNA, 59 nt, Human
aagcacagcuggaacagcaggaaaauauuccccaacccugcuguugacauggcuugcuu

SEQ ID NO: 4098127 - RNA, 60 nt, Human
aagcacagggacucaggaccgggcgcuuucuaaucucuucagucucugggucuccugcuu

SEQ ID NO: 4098128 - RNA, 59 nt, Human
aagcacauacauaauaaaguccuuugugcccuucaaaagggauuuauuuguaugugcuu

SEQ ID NO: 4098129 - RNA, 68 nt, Human
aagcacauguguagguauaacuugugaguaagcacuauuuacucuacaaauaaauuacuauguagcuu

SEQ ID NO: 4098130 - RNA, 92 nt, Human
aagcacccgggggugggugcucccccuggaggguucacccgcagucagccugcucuguucucccgcaggggcagcccucaucccggcuguuu

SEQ ID NO: 4098131 - RNA, 62 nt, Human
aagcaccugcuggguguagaggcuucugcuggcuccaaacagccuccaccccacagggacuu

SEQ ID NO: 4098132 - RNA, 64 nt, Human
aagcaccuucugagaaagauuugccuccguggauacuccucaggaggccauucucaagguguuu

SEQ ID NO: 4098133 - RNA, 75 nt, Human
aagcacguucuacaugguugcucagaggguccucaauaggacugaggccuaggaguccacugagauaaccugcuu

SEQ ID NO: 4098134 - RNA, 83 nt, Human
aagcacuggauacuuaaugugaaaccgcacagaauaacauuaguguuucacugugguuuccauggauuucuguauuuguccuu

SEQ ID NO: 4098135 - RNA, 66 nt, Human
aagcacugggacuguuucucuuucuucccugaccuuuggaauuccugaagcguuucccacuugcuu

SEQ ID NO: 4098136 - RNA, 58 nt, Human
aagcacugucccuguuuccuggaaaauuuuuuaauuuugcugagguugggacauguuu

SEQ ID NO: 4098137 - RNA, 83 nt, Human
aagcagaaguucugaauguuuucugacugcuaacuuggugcucucucuaccacagcaugagagaugaacauuccuuucugcuu

SEQ ID NO: 4098138 - RNA, 130 nt, Human
aagcagaauguaacacacacaaaaaauucuucaacaauccuuuauuaagugccuacaauaaagugccucacauauuguaggcacuuaauaaaggauuguuggagaauuuuuuggguguaacauucuauuu

SEQ ID NO: 4098139 - RNA, 57 nt, Human
aagcagaauuucccacuaguuguuugaaugacacuggcaccaagggaaauacugcuu

SEQ ID NO: 4098140 - RNA, 129 nt, Human
aagcagagaaaggauaaguaacucauucaagacauacagacagugagccacagaaccaacacuugaaaucagguauuuuggacuccagugucuguguucuuggcuguuuguaauacugucuuuuauugu

SEQ ID NO: 4098141 - RNA, 104 nt, Human
aagcagcagcuguuuuauggugugaacuuuugcacagaggauuucaagaggcucauucuccucggaagucuguuugcaaagugguucuuucuuggcuguugcuu

SEQ ID NO: 4098142 - RNA, 55 nt, Human
aagcagcauguggguuaucgggaagagugugaacuuccgagcccaccugcugcuu

SEQ ID NO: 4098143 - RNA, 56 nt, Human
aagcagcugugugacauaaucugguuugcauguugggaaggucacacuggcugcuu

SEQ ID NO: 4098144 - RNA, 74 nt, Human
aagcagggcuuuaagcgguuuuauuccccuuggguuguaaaaguccagccuagaggcugcugagagcccuguuu

SEQ ID NO: 4098145 - RNA, 55 nt, Human
aagcagguaaauauguuucccuuuuucuguuucagaggucaacauuuaucuguuu

SEQ ID NO: 4098146 - RNA, 68 nt, Human
aagcagguccuggcaucaggcaggucuggucuuuaaauauucuggaucugggugaccuugggcaacuu

SEQ ID NO: 4098147 - RNA, 63 nt, Human
aagcagucaacugcauuaggaaaugagggcaagcuuuuguucaguaaugcauuugauaaguuu

SEQ ID NO: 4098148 - RNA, 78 nt, Human
aagcaguccagccuucaaucuuagugacacaucuucuucugcugagcaccacuaucuuguagggcauggcaguugcuu

SEQ ID NO: 4098149 - RNA, 73 nt, Human
aagcagucuuggcuggguucagugaguuuagacagauauagcucucugaguccuuuacagccuggacuggcuu

SEQ ID NO: 4098150 - RNA, 61 nt, Human
aagcauaaaaugguaaacgaagcugaagaucguuuucaguugaaaaggcaauuuuaugcuu

SEQ ID NO: 4098151 - RNA, 71 nt, Human
aagcauaugaacucuggagucugagugcuuggguuuaaauucuaccacuuacuuaagaguuguaugagcuu

SEQ ID NO: 4098152 - RNA, 102 nt, Human
aagcauucuaauaguguaggcaucuacauucauguugaaauuugugaucaauauuuuaaaaauucacaauguguagucaugcuuuucuaauaguaauagcuu

SEQ ID NO: 4098153 - RNA, 75 nt, Human
aagccaagguucugggaguuugggucggcugaugauacuuagaagaucuuugcaauuccguuuauuaaccugcuu

SEQ ID NO: 4098154 - RNA, 57 nt, Human
aagccagcauuuucccauuccuuacaggccccucaugaggugaagggagugcugcuu

SEQ ID NO: 4098155 - RNA, 57 nt, Human
aagccaggagcgaggccucggcagaaaacgccccagccgccccuugaucuuggacuu

SEQ ID NO: 4098156 - RNA, 56 nt, Human
aagccagugggcauagcaguugaauuuaugcagcuguuucugauauuacauggcuu

SEQ ID NO: 4098157 - RNA, 76 nt, Human
aagccagugugacaggaaacuuugugucuucugugugacauaaaaccauccauuguuucuuaaauuccauuuguuu

SEQ ID NO: 4098158 - RNA, 100 nt, Human
aagccauaugguuuaucgggcuuucugguucucaaagcacuuuuccaugugaggaaaaggcuaauauuuaugaaaccaaggugccgagcuauauacguuu

SEQ ID NO: 4098159 - RNA, 69 nt, Human
aagccaucuccuuccaaacccaggguaugggcugggugacugcucugauucuuuugggaggugagguuu

SEQ ID NO: 4098160 - RNA, 93 nt, Human
aagccauuaaggagagguauuucucccagcuuugccuacaaggaggucaaaggcuguccaggagaaaauaguuugaaguguuuuguuuggcuu

SEQ ID NO: 4098161 - RNA, 129 nt, Human
aagcccagaccugcaggcccugaggagacaagggagcuauagauuauuuugugagaccugcauuucaauaggcagcauuucacaggccuuuuguagcccugcuuaucuuagaaacuuugugugcggcuu

SEQ ID NO: 4098162 - RNA, 55 nt, Human
aagcccucauuagccauagcccuagaccauccugggcuagggcuaaugagggcuu

SEQ ID NO: 4098163 - RNA, 56 nt, Human
aagcccugggauguucagcaguuaccuagggaggcuaguacacauguuaggagcuu

SEQ ID NO: 4098164 - RNA, 71 nt, Human
aagcccuuugcccagcacucucucucucucuaccugguguggcagagugauggaaugugggugaagugcuu

SEQ ID NO: 4098165 - RNA, 76 nt, Human
aagccuaauugugacuauuucugaaggcagagaacacagaaucaguucucuuaauuuuggaauaguguuaagguuu

SEQ ID NO: 4098166 - RNA, 57 nt, Human
aagccugaauuuauccauaugcuuaggaugcagugauuggaagaagaacucaggcuu

SEQ ID NO: 4098167 - RNA, 74 nt, Human
aagccugacagcugaagggucccagagcagcaaauaucaccuuguuucuaugggaccauuccagcugucugcuu

SEQ ID NO: 4098168 - RNA, 78 nt, Human
aagccugaugauccgucuauuucucuuggcucuguguacagcauucaagagacaggacguguuucauuuccaaggcuu

SEQ ID NO: 4098169 - RNA, 63 nt, Human
aagccuggacuaucgcgugugccugcccuacgccaacgcagugcugcucgagauccagugcuu

SEQ ID NO: 4098170 - RNA, 94 nt, Human
aagccuuaacgauuuauguacaggauuucauguuacauuuaaaauguuguggcacauuucagauguaaugugaugucuauuuguaugugggcuu

SEQ ID NO: 4098171 - RNA, 63 nt, Human
aagcgaggaaggugugaacugauucauuggugugaacaccaauugaauucacaccucuugcuu

SEQ ID NO: 4098172 - RNA, 62 nt, Human
aagcggcagcaucccauggaccgcauggggccucuccagguggagcagggagcaugccucuu

SEQ ID NO: 4098173 - RNA, 77 nt, Human
aagcugagcacagaacagcuuagaaauguugcuaaagcuccuggucuugguggcucuaaagccuguaccucaagcuu

SEQ ID NO: 4098174 - RNA, 69 nt, Human
aagcugagggugugaccauggucuaugauuauccuaacuucaucuacuugaccagcccacucccaguuu

SEQ ID NO: 4098175 - RNA, 82 nt, Human
aagcugagugaaauaacuuaagaaauuuccccacugucauugcaaacuuaucaguggagaugcaaagauauuuuaugagcuu

SEQ ID NO: 4098176 - RNA, 83 nt, Human
aagcugcacggcauucuuuagacugagagauagcugcuggaguuuuacuauuucaaugucaaagaauguaacuagugcuccuu

SEQ ID NO: 4098177 - RNA, 78 nt, Human
aagcugcagaugaggggcauauaacaauaguauuuuggacuauuaguugugugguucucaauuuacucuuugcugcuu

SEQ ID NO: 4098178 - RNA, 55 nt, Human
aagcugccacacggugaguacucuacaaauauggaaaucacugggugugcagcuu

SEQ ID NO: 4098179 - RNA, 58 nt, Human
aagcugguccaaaauucggcacugcgagcgccgcgggucuggcuucgggaacuaguuu

SEQ ID NO: 4098180 - RNA, 64 nt, Human
aagcugugccuuugccuagaauuucccuccacccuugaaauucuucucccuuagggcccagcuu

SEQ ID NO: 4098181 - RNA, 73 nt, Human
aagcuuagccuggggacagagucaaguuccuaagcaugauauuggaaugggagcugcccccagggcugugcuu

SEQ ID NO: 4098182 - RNA, 72 nt, Human
aagcuuccuguacagugaaugaaugugacaaggguuauugaaguugccucacucauucaucugcugaagguu

SEQ ID NO: 4098183 - RNA, 70 nt, Human
aagcuucuugaccaagccuguaacuugaaaaucgcuucagaauuugccaacuguuugguuaagugaccuu

SEQ ID NO: 4098184 - RNA, 62 nt, Human
aagcuuguacuccaggauguagaaucagagauuauuuuugcuugcuccugagaguuauguuu

SEQ ID NO: 4098185 - RNA, 82 nt, Human
aagcuuuagagaugaguuccuuuaaaagcaaacugauuacacgaaaaacuuuccagucuuuggaauugauuauuugaaguuu

SEQ ID NO: 4098186 - RNA, 55 nt, Human
aagcuuugacuacugccucuuggaugucauccugaaagcuggcaggucauagcuu

SEQ ID NO: 4098187 - RNA, 100 nt, Human
aaggaaaauauacucaauuuauuuaaauuacuguuuuguucuccacgcauucuaaaggagaauaugacauagaauugagaugagggucuuuuaguuccuu

SEQ ID NO: 4098188 - RNA, 70 nt, Human
aaggaaagcauugaaagcuugaauccuguuaacuugaaaaguugaguucuggucuuuuaaaagcuuccuu

SEQ ID NO: 4098189 - RNA, 129 nt, Human
aaggaacagugagacuaaggcgcuucuagaaggucauccugguuagguuuguaacuuuauguagaaguuacaagacacugcugacacagggacugguaugguugugguuuuaauguaaaauaguucuau

SEQ ID NO: 4098190 - RNA, 77 nt, Human
aaggaacccuuuuucugucaaguuucucugcaauuuauuuaagcgaagguacauuugauaaaaauagcaggcuccuu

SEQ ID NO: 4098191 - RNA, 130 nt, Human
aaggaacucauuauuucagauguguggacucagaaugugacacuguaagaugagcuuuuuuaacugggaaaguuaacaaauuuguuuuagguauugcuaucugucacucaauggaauguucuacccccuu

SEQ ID NO: 4098192 - RNA, 55 nt, Human
aaggaacugcugauguggugacauauuagucaucgcgccucuagagcaguuucuu

SEQ ID NO: 4098193 - RNA, 62 nt, Human
aaggaagaaucaucacguugggacacaaauccgaguccugucuguccuuugcauucuuccuu

SEQ ID NO: 4098194 - RNA, 61 nt, Human
aaggaagagucaggaugagaggccagguguuucuagugcuuaaaauccaugauuuuuacuu

SEQ ID NO: 4098195 - RNA, 81 nt, Human
aaggaagcuccaaauaggagggaugcugagcaggggccccucccuugaugcucccugcuuguuucccuucaggggacccuu

SEQ ID NO: 4098196 - RNA, 93 nt, Human
aaggaagcugguccuaagagauuaagucacuuggucagggucucuuggugagguacuuaagugaaauugguuuuccaggugcuggucuuccuu

SEQ ID NO: 4098197 - RNA, 130 nt, Human
aaggaagggauuuuaguguguucuguguuuucgcucuagagcuuuuuccucuuguaaaagguaguacaagacuuauaaagggaagaacuuugguacaggagaucagcagagauugacuagaaaaccccuu

SEQ ID NO: 4098198 - RNA, 79 nt, Human
aaggaagggucagugguauuugagagaauggauaacuugaaguuguccaaauuccacagauuucucuauuuccauucuu

SEQ ID NO: 4098199 - RNA, 60 nt, Human
aaggaaguuuucuugguuccuacuuguacgaccuguggagguuucaugacaaauuuccuu

SEQ ID NO: 4098200 - RNA, 61 nt, Human
aaggaaugaagaaucuaggauucccugaucaauacuauaggcacuuagaacaucauuccuu

SEQ ID NO: 4098201 - RNA, 79 nt, Human
aaggacacaauggauuaacaaaugaaaauuacuauaugcauccagcauauaguaagcagucuguaaauucuuguucuuu

SEQ ID NO: 4098202 - RNA, 59 nt, Human
aaggacacacuguucucacguaaagccaaauugcugacuuugagugagugugugugcuu

SEQ ID NO: 4098203 - RNA, 69 nt, Human
aaggacaggagaaaacgggauccuaguuccggaagagaaaaaggagcaaauucaccuuucuucugccuu

SEQ ID NO: 4098204 - RNA, 130 nt, Human
aaggacaguguaucuuucuggaauuaaaaauugcauugguuaagagcuuuggggugcaagaaacaaaagcuuuccuuagguaacuuaaguaauggaguuuuaauacuccauuuuaaagaucaccagaauu

SEQ ID NO: 4098205 - RNA, 73 nt, Human
aaggaccucacaggucaugugguggcuuuuggacuugauccugaagucagugaagaaugacuuggagaaucuu

SEQ ID NO: 4098206 - RNA, 61 nt, Human
aaggaccugccugagccucaguggccaagugucuucaccccuguagcccaggacaggcuuu

SEQ ID NO: 4098207 - RNA, 88 nt, Human
aaggacgagaauucagucaggacugaggaacuugaggcagggacucauacagcaccagaauguucucuccaguccuggauucugcuuu

SEQ ID NO: 4098208 - RNA, 62 nt, Human
aaggacguuucucuuccaggccuggcugccaggaugugaggcccggguggaggaaugcgcuu

SEQ ID NO: 4098209 - RNA, 64 nt, Human
aaggacugacaaaugucuuccuggugcuaaauucuaagcaaaaugggucaugugugugguccuu

SEQ ID NO: 4098210 - RNA, 65 nt, Human
aaggagacugggcugggucuggcuugaaucccagcuuugacacucgcccagcccuggguggccuu

SEQ ID NO: 4098211 - RNA, 60 nt, Human
aaggagaguacaggaguugguacuggaagccaucuggcaucagagcccugugcucuuuuu

SEQ ID NO: 4098212 - RNA, 76 nt, Human
aaggagauuaggcagucaaggcuaagaucuuuucucucccaaccagaguucuuuacaguccucugucaaucuccuu

SEQ ID NO: 4098213 - RNA, 91 nt, Human
aaggagcauagaguccagcaguuguaugacaaaauuugccauauuuagcaaugggcugagaaucaacaaccugcuccuggauuuugccuuu

SEQ ID NO: 4098214 - RNA, 75 nt, Human
aaggaggaauucugaguucaugccaaucugauguuuuacugguuuauucuagcucagaauaguuaauuccucuuu

SEQ ID NO: 4098215 - RNA, 74 nt, Human
aaggaggcaauucuauaggcaagcuauuuuuauauauaacuuaaaggagaaaaaacuaauggaauagcuuccuu

SEQ ID NO: 4098216 - RNA, 89 nt, Human
aaggaggcggcuuuuuacagguacuugcugcugaaaaauaauuucccugccagauacacugugagugcauuagccuguucuuacuccuu

SEQ ID NO: 4098217 - RNA, 127 nt, Human
aaggagguaccugaaaacaagcagaacucacaaggcaaugacugauuuagaauucgggcaacuggguucuuuuguaccaguuauuucuugcuguuuuuaaugcuuacgugcuucaguuguaugccuu

SEQ ID NO: 4098218 - RNA, 60 nt, Human
aaggagguaucuugauaaauuggagcccagcaagguuacaaaguuugagaaugcuuucuu

SEQ ID NO: 4098219 - RNA, 102 nt, Human
aaggaggucagucaacacgugucaucuuucauauagaaguuaguuucacuucugagaaaagugaaccuuuauaugaaagaugacauguugacugaccuccuu

SEQ ID NO: 4098220 - RNA, 82 nt, Human
aaggagguguugggaaggcauaccugagggagagacugcgagccuagcucuucuucagaacuugccuuuucaauggcucuuu

SEQ ID NO: 4098221 - RNA, 88 nt, Human
aaggaguagguggcaacaaggcaguggauguauuuuccuuuauucuuguaaagauaagacaucaacugagcauugccagacugcccuu

SEQ ID NO: 4098222 - RNA, 80 nt, Human
aaggaguccguguucuucuuggguaaagcugagccaggggcacacagacuggcuggauggcuggggaagagcaggcccuu

SEQ ID NO: 4098223 - RNA, 86 nt, Human
aaggauaaaacuguguuaguauacugguaguaaaauguauaauuaauaaagaugcugcagcuauauuuucccacagugaaauccuu

SEQ ID NO: 4098224 - RNA, 56 nt, Human
aaggauacuaagagaaaggagagguaaaaacuccuacaucagcucucaguagccuu

SEQ ID NO: 4098225 - RNA, 58 nt, Human
aaggaucugacagacuauagaagaaugggcauuacugcugaaucugguucagaucuuu

SEQ ID NO: 4098226 - RNA, 58 nt, Human
aaggauggagugccaggguggaacuaagcacuccuuagucacuuugcuacucugccuu

SEQ ID NO: 4098227 - RNA, 81 nt, Human
aaggauuacaggucaccagucuauccuugaucccuuucugcuucagcuggcagagguuggauuggugacuucacugaccuu

SEQ ID NO: 4098228 - RNA, 72 nt, Human
aaggauuaguauaauuguucuggaaucaagaguuccuguucucuugcuagaauuagguuaaacaaaguuuuu

SEQ ID NO: 4098229 - RNA, 84 nt, Human
aaggauuauagccaggucacagagcuagcuagcucauuuacagcugagauuagcucuagaucugggcuauuuuguuugauucuu

SEQ ID NO: 4098230 - RNA, 77 nt, Human
aaggauugauacaugcacagcaagggugagagaauggacaaggaccaacuccaucccccugugugucaaucagccuu

SEQ ID NO: 4098231 - RNA, 63 nt, Human
aaggauuggaaagaacagaguuguguaaagagcaguagacauagaguucaauuuucaguccuu

SEQ ID NO: 4098232 - RNA, 55 nt, Human
aaggauuuguccaaagucacacagcuaguaaguguagaagugggaacaaaucuuu

SEQ ID NO: 4098233 - RNA, 62 nt, Human
aaggcaaagaaguuggucaggagugcaauucuuuuguuuacuuuuaauuuccuucuggcuuu

SEQ ID NO: 4098234 - RNA, 59 nt, Human
aaggcaaugcuaagagguuuggagcccaagaugcggccauucaucucagucauugcuuu

SEQ ID NO: 4098235 - RNA, 61 nt, Human
aaggcaccauaggcaaauccaggaugcucuccuuaugcccugauuguucuugcugggccuu

SEQ ID NO: 4098236 - RNA, 61 nt, Human
aaggcacgcuuucucaccuucaagcccaguccauguucuuaaaguugcagagaguugucuu

SEQ ID NO: 4098237 - RNA, 63 nt, Human
aaggcagaagacaggcaaaucauggcuuauaagguuggugggaggcugccugucauuuggcuu

SEQ ID NO: 4098238 - RNA, 95 nt, Human
aaggcagagaccugauucguacaguaguaaaagugaaugaacauuggcaacauuuauucaccauuuauuaugugaaguccugaaaauccugccuu

SEQ ID NO: 4098239 - RNA, 56 nt, Human
aaggcagagggcuggaucagagggucucuuaagaccccuucuagcucaucuguuuu

SEQ ID NO: 4098240 - RNA, 69 nt, Human
aagugcuggacauguguauuaccucgauugugaugauaguaucacaaauguuugcaugugucuaaacuu

SEQ ID NO: 4098241 - RNA, 61 nt, Human
aagugcuuggagcauaccuguuacauaguaaaugcuacguuaaugugugcuacuaucauuu

SEQ ID NO: 4098242 - RNA, 65 nt, Human
aaguggagcuauaggcucagauauuaacuaccauggagggcugagugcugggucuguuuucauuu

SEQ ID NO: 4098243 - RNA, 67 nt, Human
aaguggcaggagagcacaguaaauguuggaggcagacagccuggccuugaaucuggcuuugccacuu

SEQ ID NO: 4098244 - RNA, 60 nt, Human
aaguggcauguauaagaaagaaucaucagagaauuaaugguccuuccuuaaagugcccuu

SEQ ID NO: 4098245 - RNA, 67 nt, Human
aaguggccugugguuaucacaacugaaaagagcacauugaagcuuuaguauauaauuacugcuacuu

SEQ ID NO: 4098246 - RNA, 97 nt, Human
aaguggggguccucucucagagucucugggaggcugggucuggcuaagggaaagguugcaagauugagccucgcuaagauugggagagcugccgcuu

SEQ ID NO: 4098247 - RNA, 85 nt, Human
aaugaaaggcucuuuguauuauacugagagugcucagaagaucuuuauaauccuguguuaaucagauaaaggagagcuuagcauu

SEQ ID NO: 4098248 - RNA, 66 nt, Human
aaugaaggcaagacugagguguggaaagcauucaucugccucuucaccccagcuccugucaucauu

SEQ ID NO: 4098249 - RNA, 126 nt, Human
aaugaaugaaaggaggaaagucggccagagcucaaacagucgcaucucugcccuuagcaugccgguggugcugcuuugauuugggcuuugggggacuuccugaccguuuaguuuaguuuuugcauu

SEQ ID NO: 4098250 - RNA, 70 nt, Human
aaugacacugaaaucgaaaaauguaggacauuucuuuuaagguuauauacaagagauuucagcugucauu

SEQ ID NO: 4098251 - RNA, 110 nt, Human
aaugacauguaaguaucugcugugguugaaauagccugucuccagagucccaggggucugcuuugugauucucacucuagugcuugccauuaacuacagucuaugucauu

SEQ ID NO: 4098252 - RNA, 86 nt, Human
aauccuuacagaaccaaaugcugacagcaugacuugucaaacuacggacagaagucaucucagguagcauuuacugugaaaggauu

SEQ ID NO: 4098253 - RNA, 106 nt, Human
aaucgugaauaagaccugugaauuauguuacaucuaguaaacauuuaguuaauacuaguauuuguugauugauaugaagugcagguuaucucguuuuauugcgauu

SEQ ID NO: 4098254 - RNA, 73 nt, Human
aaucuaacacagugaccucuuuaaaaggggccaaagcaagacuccuauuuuguguggucaacugucuuaaguu

SEQ ID NO: 4098255 - RNA, 61 nt, Human
aaucuaugugcuggcccugaagagccaucgaacaucuuucccaaggcugguaccauagguu

SEQ ID NO: 4098256 - RNA, 65 nt, Human
aaucucaccuuaaacuguagcucucguaauucccacguguugugggagggacucggugggagauu

SEQ ID NO: 4098257 - RNA, 130 nt, Human
aaucucccuguugcacaugucugccacccuuggcugcuuagcagugugugcuuuugacaagcauuguaaggucacagcuggacacguuggcaugccucaagccuggcuuccagucauuugggaccauguu

SEQ ID NO: 4098258 - RNA, 68 nt, Human
aaucugaaaaccacuuauaucgugauuugaacaaggaauggucaaguuauaagggagguuugaggguu

SEQ ID NO: 4098259 - RNA, 66 nt, Human
aaucugcaauauaauucauauauucaucgguccccuguaugucuugugaauuguaguuaaaggauu

SEQ ID NO: 4098260 - RNA, 60 nt, Human
aaucugggcucagcccuggcuuugguggcaaaauauccuccccaggucuggggccagauu

SEQ ID NO: 4098261 - RNA, 78 nt, Human
aaucuggguugguuguguguaugggaaugucuuugucaauaggacacccagauuaugcacacaaaucaaguuuagauu

SEQ ID NO: 4098262 - RNA, 118 nt, Human
aaucuguacauggaugcuuauagcagcuugauucacaauuaccaagacuugggagcaaccaagauguccuuugguaggugaaugaguaaacagacugcaguauauccaggugaugauu

SEQ ID NO: 4098263 - RNA, 94 nt, Human
aaucuguggaauguccuucaagguccuuggugugucuaguguagaguuuggagucacaggcuugaggaccauggaggagauucuggcacagauu

SEQ ID NO: 4098264 - RNA, 80 nt, Human
aaucuuaaaauccauaauguugugggguuuguaaaaauugugucaaauuuaguuuaauauuaugugaaaauuuuaagauu

SEQ ID NO: 4098265 - RNA, 98 nt, Human
aaucuucaacuuguauuuccaguacccagaacagaggcuuguacuaagaaggcauucaauugguauguaauggauuagaauaaguugaauugaagauu

SEQ ID NO: 4098266 - RNA, 58 nt, Human
aaucuugagggacucaugaggugaccuauagaggcaaaaaacaggcuccuuccagauu

SEQ ID NO: 4098267 - RNA, 67 nt, Human
aaucuugaguguuacucucauuggacaaguuuagaucaugugguugauggaaagugauacaaagauu

SEQ ID NO: 4098268 - RNA, 77 nt, Human
aaucuuuuaauauauuugugauuaacuggcaacuauaauaaggaguugcagggaaauagaaauaaacagaaaagguu

SEQ ID NO: 4098269 - RNA, 70 nt, Human
aaugaaaauuuaaugaguguuuacucugugcuagguauuauacuaagcagguuacauacauuaucucauu

SEQ ID NO: 4098270 - RNA, 72 nt, Human
aaugaacuaaaauaugcauuaacuguguacauuuuaaaugugcauuaaaugucaauguuggaaagguucauu

SEQ ID NO: 4098271 - RNA, 79 nt, Human
aaugaaguugggcggaaaaguaaacacuaggggucaggaugcccuuccucuuuuaucuuuuucauuuuccccuuucguu

SEQ ID NO: 4098272 - RNA, 122 nt, Human
aaugaauaagcuaagcagaguugauaauugauggcuggcuauaucaggggaccccuucugcuggaaggaguuuguugaauagguuaaacauuacucucuuaauugugcuagcacaauucauu

SEQ ID NO: 4098273 - RNA, 77 nt, Human
aaugacagccacagugauuucauccuucugggcuucucuaacaagccacauuuggagaagauacuuuuuggaucauu

SEQ ID NO: 4098274 - RNA, 82 nt, Human
aaugaccccacugcaaacauaguacuugagcccagaccagccacaagauccugggauuaggcuuuguuuauagcaaguuauu

SEQ ID NO: 4098275 - RNA, 62 nt, Human
aaugaccccuaaaauuuacuguccucagcagcacaagcaugacaggaaauauggggguuguu

SEQ ID NO: 4098276 - RNA, 57 nt, Human
aaugaccuccagguaaaugcacaagaaaguccugaugccuuuaaaaaggaagucauu

SEQ ID NO: 4098277 - RNA, 72 nt, Human
aaugacgguuuuagcacgguaacacauaaagucauuuccuggcuuguguuuuacauguggcuuucuauuauu

SEQ ID NO: 4098278 - RNA, 112 nt, Human
aaugacuucuguauaagcaaagguaaauuaaaggucauguuaaagggguauuauugccuucagugcauguuuauaaucacacauuguuuauacguaggaaaacagaagcauu

SEQ ID NO: 4098279 - RNA, 56 nt, Human
aaugagcauggcuguguuccaauaaaauuuuauuuguggacacagaaagcugcauu

SEQ ID NO: 4098280 - RNA, 56 nt, Human
aaugagcuagaccugcuuccuccucuaccauuaaggagcucacagucuaggucauu

SEQ ID NO: 4098281 - RNA, 93 nt, Human
aaugagugauuucagaugccuuuuaaaagagaagguaaaaggagaauuggauugcacuuuauuauaaauuugagaggcacuuugacauuuauu

SEQ ID NO: 4098282 - RNA, 64 nt, Human
aaugauagcaccuuagaccagcaagauauuuuuuggaagucaucuugagucuaagauuaucauu

SEQ ID NO: 4098283 - RNA, 76 nt, Human
aaugaugaauaccucagcagguaaugauuugguauuuacuuuacucuuuuaaauuauucuugagguguuuauuguu

SEQ ID NO: 4098284 - RNA, 79 nt, Human
aaugaugauguuuaucuugguauucccuuacauaucuauacaugaagaaaggccuuaauacaaaggaaggcaucacauu

SEQ ID NO: 4098285 - RNA, 77 nt, Human
aaugaugucuugaguuuugaguuuugccagguucucuacuucuuugggguguggcagagugcagaagaggcauuauu

SEQ ID NO: 4098286 - RNA, 65 nt, Human
aaugauucaguauucacuguguuguuacaauccuagugacaguauuugcgauacugaugaugguu

SEQ ID NO: 4098287 - RNA, 64 nt, Human
aaugcaaaauuaccauucuguucugcuccugacagcaguguggaaaaugugauuucucuguauu

SEQ ID NO: 4098288 - RNA, 130 nt, Human
aaugcacaggaacgaaaaauuucauuugauauugcccuucuguuuacugcagaauguacgaaacauucuguggaauaugaacuagcaaaauaagggaaauaagggacuaaauuucuuuauucaugugugu

SEQ ID NO: 4098289 - RNA, 74 nt, Human
aaugcagaggaauuuuaauaugcuugucucuugaagaauugagucaguaugacuuauaguucucucuuuguguu

SEQ ID NO: 4098290 - RNA, 74 nt, Human
aaugcagccaagaacauuuguguaccaguuuuugaguuuucaguuguuugaguuucagauguuuucaguucauu

SEQ ID NO: 4098291 - RNA, 56 nt, Human
aaugcagcugcugacagcuuucacuaagugauaguggcuuuucuuccaggugcguu

SEQ ID NO: 4098292 - RNA, 60 nt, Human
aaugcaguuuucucacccccacaacuccagaugguugugaaagccuagaaaacaugcauu

SEQ ID NO: 4098293 - RNA, 63 nt, Human
aaugcauacaugugcacacaugguuaugugggucaccguagcuuugccacacauguagauauu

SEQ ID NO: 4098294 - RNA, 84 nt, Human
aaugcauauauagguagguguauauauaguaaacuguaugcuuauuucucuguauuuauauuugugugugcaucuguauguauu

SEQ ID NO: 4098295 - RNA, 129 nt, Human
aaugccacagacaaaagcagaauucaauugcagugcagacugaaaugaccuucuugcaaaagagagaagugauauucccaagucugacaagcaauuuugagugcacuaucuguuaauacugugaucauu

SEQ ID NO: 4098296 - RNA, 74 nt, Human
aaugccagaauugaguucuuuuagaauucaguguccuuguauugaauucuuuuagaauucaguguccuuguauu

SEQ ID NO: 4098297 - RNA, 90 nt, Human
aaugccugaacuguuauuaaauaauucucucuuuaccuacuuacaauauagaugaaggugcaggauuugaaauauuuaguaaaagguauu

SEQ ID NO: 4098298 - RNA, 59 nt, Human
aaugcuaggccuuucagcccaccaccuuaauaaauaguggcuuggaagccaccuguauu

SEQ ID NO: 4098299 - RNA, 64 nt, Human
aaugcuauucguuucugacuuggcuuuuucaacagcuaaauacagguggcaaaugaguagcauu

SEQ ID NO: 4098300 - RNA, 95 nt, Human
aaugcucauauggggaugucagauagaauuggccuagcacuaggugauagaccuuaugccaggccaauucuauuugacauccccguaugaguauu

SEQ ID NO: 4098301 - RNA, 67 nt, Human
aaugcucucugcuuuucuuccaacagaguuggcaagugauucugcaggagguacuguagcuggcguu

SEQ ID NO: 4098302 - RNA, 129 nt, Human
aaugcugaaugcaccucgguuguaacaggguuggagaugccaguguuauaaauagauauuuuauguaaguguagugugacauagguguccaccaauauucaacuuuagucaaauaugcaaagaaacguu

SEQ ID NO: 4098303 - RNA, 79 nt, Human
aaugcuuucuucagaauuagagcucuucuugagguggcgaauucacucaagguaugcauuaauacucuagaaacacauu

SEQ ID NO: 4098304 - RNA, 61 nt, Human
aauggaucuuuguaagacuucaucgccuugacaggaagugagguccuaauagacaucgauu

SEQ ID NO: 4098305 - RNA, 73 nt, Human
aauggcaaacagcuagaauucuacuggcugaaauacuuuuuagcuuaagguuucaguuuuuguuguuguuguu

SEQ ID NO: 4098306 - RNA, 70 nt, Human
aauggcagaacacaaacuggacuggugagaacaagguaggaacugagaucugagguuauugucugccauu

SEQ ID NO: 4098307 - RNA, 61 nt, Human
aauggcgaagaagguuauaauuguuuuaccaagacaguuacucaauaauucuugcgcuauu

SEQ ID NO: 4098308 - RNA, 68 nt, Human
aauggcuacauaguagaccuuugcuuaaagguaacaugcuuuaaggcauucuccuacuaauaggcauu

SEQ ID NO: 4098309 - RNA, 64 nt, Human
aauggcugggaguguauuuuggguaauuuucauauaaugcaccaaaaccagcuccccaguaauu

SEQ ID NO: 4098310 - RNA, 71 nt, Human
aaugguaagcugaagccacgaguuggaacggaauacaggccgcucuagggugaugauucaggaugacuauu

SEQ ID NO: 4098311 - RNA, 58 nt, Human
aaugguguucucuguuaggaacaauaucagauucuguuucugcuaagaaaacauuauu

SEQ ID NO: 4098312 - RNA, 97 nt, Human
aauguaaaauuggugcaauauuuauggagggcaacuuuucaguagguaccaaaacccuuaaaaauauguccuccuugugaucaaguuauuuuacauu

SEQ ID NO: 4098313 - RNA, 101 nt, Human
aauguaaauuauguccucugaaguugugcaaugccugaguccuaggugugggcaaaagcauuugagcacauuuuaaagagaaauaauuccucaucugcauu

SEQ ID NO: 4098314 - RNA, 99 nt, Human
aauguaagagguaauccuacucauuguucuugguauauagucagcuuauagcugugcugugucuaucaggaauaauaauaaauaauuaucuacuauguu

SEQ ID NO: 4098315 - RNA, 78 nt, Human
aauguaggggucuaucuuauuuuaugccauaaaaccagaaauguuacacaaaaauaagauauggcugcuuuuagcauu

SEQ ID NO: 4098316 - RNA, 111 nt, Human
aauguaguaauugcacaaaaauucaaaaucagagucugauuuuaagguuucugugaaccugagccauuggguuugguuuuucuguuuuugagcccguuaagucacugcauu

SEQ ID NO: 4098317 - RNA, 93 nt, Human
aauguaguauaauuguuaguaaaugcaguacaaauuguucuacuguuuuaaaaaguuuuccgcagaacagugcauuuauggcaaugcuauguu

SEQ ID NO: 4098318 - RNA, 91 nt, Human
aauacauucauuucucugccaacagcuauugguccacagguaugucauaugacccaaacuggcccaaucagccagaaggaaagaacuuauu

SEQ ID NO: 4098319 - RNA, 96 nt, Human
aauaccaagaugguuucacugacgucuagcccagcucaaaugaccgguuuucuuaggccucauuguugcuggcgacugcuggugccucuugguguu

SEQ ID NO: 4098320 - RNA, 77 nt, Human
aauaccaugaauaagaauugccagauuugaaaugcuuuguuaagcuuuuuuuaggcaugcaguucuauuuaaguauu

SEQ ID NO: 4098321 - RNA, 86 nt, Human
aauacgaauuaugaaacugggcuuuuugaaacaguaccaagagcaagaugcuucuuuucagaaagcaucaucaaaguuugcauauu

SEQ ID NO: 4098322 - RNA, 58 nt, Human
aauacgucccaucaucuuuuucacuaacaggugaaggguauucuagaugagauguguu

SEQ ID NO: 4098323 - RNA, 64 nt, Human
aauacuuaugugaccucauuuugugcccugaggccccgggacauucagguuacauaacuguguu

SEQ ID NO: 4098324 - RNA, 129 nt, Human
aauacuuuaccaucuuaaugagaaaguaaggaaugaggagauuguuuucuaaagcuuuacuuagaucauuuuaugaagauaauuuucugauauuuuucucuuccucuuauauuuaaauauuaggguauu

SEQ ID NO: 4098325 - RNA, 96 nt, Human
aauagaggagauuuguaugucuaaauguaaggagauuaucccccagaaaggagggggaguuggcuuuuauuugaguuuuacaaagucucucauguu

SEQ ID NO: 4098326 - RNA, 84 nt, Human
aauagagugauuuuuauuguuaaugcacacucauauaugaauauacauuauagagcuuuggcauugauuauuuugucagcuauu

SEQ ID NO: 4098327 - RNA, 57 nt, Human
aauagaugguauuuagacuagcgcuacucaaaguauagugcugguauauuaacuguu

SEQ ID NO: 4098328 - RNA, 62 nt, Human
aauagcaaacacugguaaaguuuucaagagcucauuccuugggauuuaauaaguuugcuguu

SEQ ID NO: 4098329 - RNA, 72 nt, Human
aauagcugaugggaaagaagccacugcccaaugcucucugaaagugacucccuuucaccaguuagggcuguu

SEQ ID NO: 4098330 - RNA, 129 nt, Human
aauagcuucauaucauucccacauguagacacaugccuagaucuauuagcaaacugccauuuuaguccuccugaaauucauaugguuuugagauagcuuccuggaguguuuuauugaaagaggaguauu

SEQ ID NO: 4098331 - RNA, 79 nt, Human
aauaggcaguuuuggaagggagaaguuaagugaaguaauauaauuacuagcuaacauucucaccaaucacaugccuauu

SEQ ID NO: 4098332 - RNA, 80 nt, Human
aauaggguuugucauggaaacagcaaugcuaaugggacaguaucccaaguagccuuaugguuuuccagacacguccuauu

SEQ ID NO: 4098333 - RNA, 85 nt, Human
aauagguguguggugagaucucacuuauuuugaugugcauuuuucuaaugacauaugauauugaggaucucauccuaugcuuauu

SEQ ID NO: 4098334 - RNA, 89 nt, Human
aauaguaacuaggaaaggaauacuuucuagauggauuauuuaacuauuugggcuaauuccuagaaauuauucucagacaaguuacuuuu

SEQ ID NO: 4098335 - RNA, 126 nt, Human
aauagucugccccauuugugaauuuucugaaucucugucuguccugcuuccuuggacuccucagcaccuccagaagccuagggaagagguggaagugaauucagcccguauuuauaacguacuguu

SEQ ID NO: 4098336 - RNA, 57 nt, Human
aauagugaacaggaacaugcuuacauccauugugucgcagagcaccuuuucauuguu

SEQ ID NO: 4098337 - RNA, 63 nt, Human
aauauaaagggguguauguguguguguuagcuacuaugaaucaacacaagcacuucugguauu

SEQ ID NO: 4098338 - RNA, 75 nt, Human
aauauaagaugucagaagcuucagugacaaauauaauaaaugugcugaaguccaucuguuugacuauccaauauu

SEQ ID NO: 4098339 - RNA, 81 nt, Human
aauauaaucauagaauaagccccuuuuuuuaguguuuagucuucugaagaauuuccuagggacuuguguccuauguauguu

SEQ ID NO: 4098340 - RNA, 71 nt, Human
aauauaguucugguauuguuaaccuuaaauuccuucuggcaguaauuagauagcaaagccagauguauauu

SEQ ID NO: 4098341 - RNA, 85 nt, Human
aauauauacuaugauuaauuuuaugugucaacuugacugggccacacgaugcccagacauuuggccaaacauuguucugguuguu

SEQ ID NO: 4098342 - RNA, 121 nt, Human
aauauauauuuuagcaauuuggauauucaugucagcuggagacugcucaaugagauaacaacuaauauuuauuguguacuuccucugugcugggcaucauacuaagugcuuuauguguauu

SEQ ID NO: 4098343 - RNA, 129 nt, Human
aauauauuaacaaaugucaccggcaggugagaagcaucuuuguuguuuguugcagacaagauauuuaguacgacucuugcuguuacagaauuaacagucuuccucccugcuaauucccccauauauguu

SEQ ID NO: 4098344 - RNA, 118 nt, Human
aauauauuauuggucuugcaucucagauaucaaauaaagguaccuagcuugacacaaaaguugguagcugcaagguuaagcuguauuaguuugaugaugggccaggaaaugauauauu

SEQ ID NO: 4098345 - RNA, 130 nt, Human
aauaucacuguguuuacaucuccaguuaaagucuauuacauccacuuuuauugcaugcaugcuacuggaugcgauggccagagaguggaagucggauuuguaugaaggagaaggaacaauaucugguaau

SEQ ID NO: 4098346 - RNA, 95 nt, Human
aauaucuagaaauuaggccuacaucauaaacuggguauuuagggaacuucccuguuccacacuuugagaugacuaggaaaccccuuucugauauu

SEQ ID NO: 4098347 - RNA, 104 nt, Human
aauaucuauacaccugauauguuuuaggaauuaauuguuaccaauguuaaguuaaauacagugucuuggaauuugguuuuaagagcaucagguuaaaggauguu

SEQ ID NO: 4098348 - RNA, 68 nt, Human
aauauggcaaacaugugcucauuuuguguugcugagcaaucaccggcgaggaauauguuugcuguguu

SEQ ID NO: 4098349 - RNA, 81 nt, Human
aauauguggaucugggcuggagacugagaauuugcaguucuagcaaguuccuaguugaugcuucuucaaagaccacauguu

SEQ ID NO: 4098350 - RNA, 78 nt, Human
aauauguggguuucaguuucauggcacagcuaucuucagcuaaauauagcugugccaugaaacugaaucccauguauu

SEQ ID NO: 4098351 - RNA, 67 nt, Human
aauauguugggugaggaauaguuuauagaagggcacaguuuaaauuucacuuccuccucaccauguu

SEQ ID NO: 4098352 - RNA, 84 nt, Human
aauauguuuuguaucuguuuguuuuuauguguuucuguuguugcaagaaacaucauuggaacacaaguggguaauuguuguauu

SEQ ID NO: 4098353 - RNA, 60 nt, Human
aauauugaggguuuuuaagaauguaaauggggacaacccacacuggaaggcuucaauauu

SEQ ID NO: 4098354 - RNA, 75 nt, Human
aauauugaggugguuuugcuuuaugagugaaguguaagaucacuucucuacuuaggagaacuuuacuacaauauu

SEQ ID NO: 4098355 - RNA, 88 nt, Human
aauauugcaaggaagaaagacauuuauuuugaggcucaugcuuugaaacugcuuauugaauuugucuuuccuuuucucccuagauauu

SEQ ID NO: 4098356 - RNA, 105 nt, Human
aaucaagauuaauuuuaggucauauguggucccaaggcaacuggaagacagaaacuucuguguauguuucagcugcuuuggcaggacuaggauggucccuugauu

SEQ ID NO: 4098357 - RNA, 58 nt, Human
aaucaauaaaugcaaucaauuuuuaugggccauuggugaaggugagcauuugcugauu

SEQ ID NO: 4098358 - RNA, 55 nt, Human
aaucacagccacaaccugggggagaagaaucaaauccuccacagggauugugauu

SEQ ID NO: 4098359 - RNA, 58 nt, Human
aaucagauuuaaacauguacaagagccucguuucacuuugauacauguguaucugauu

SEQ ID NO: 4098360 - RNA, 130 nt, Human
aaucagauuuaucugucaugaucucagauguuugugugucacugaaagaaaucuguguaacuugauugaauccuaaucuauucagggagagguuucuagggacaugcaaaguuuaugauagaaaauacgu

SEQ ID NO: 4098361 - RNA, 75 nt, Human
aaucaggacauguuccuuuucaucuuugccucccauaauuuucuuugguagaggucuuaucaaacaugcuugauu

SEQ ID NO: 4098362 - RNA, 78 nt, Human
aaucagggucuucaaaucaggcuuugaaguauauuucaggaaacucaucuuucaaaugcuugaauuggaaauuugauu

SEQ ID NO: 4098363 - RNA, 107 nt, Human
aauccaaacacaaaggcuuuagugcucauccagauggggguuucagauguuaucaaguuaaucuggucucucuguucccugggugacauuuucucacguguuggguu

SEQ ID NO: 4098364 - RNA, 65 nt, Human
aauccagaaggaaaauauuguuugauucaauugucacaauauagaaucacuuuccuucauggguu

SEQ ID NO: 4098365 - RNA, 85 nt, Human
aauccaugugaaguguguucuugagucacuccugaguuugcagucugaaccagaagucacccucagaauaacuccuucauggauu

SEQ ID NO: 4098366 - RNA, 61 nt, Human
aauccauuaaaaacaagcgcaugcaaaucgucauuuacugcagugacugggagaauggauu

SEQ ID NO: 4098367 - RNA, 100 nt, Human
aaucccuaugcacaugaguuugcauuugguucugccugguaccccaaggaauuuaccaguugguaccaguuuuucaacucauuuuguuggcuuaaggauu

SEQ ID NO: 4098368 - RNA, 77 nt, Human
aauccuaaacaguaaguucuaguauuaucugcauuuuauauaugaugaaaaugagccuuaggaacuuacccaggauu

SEQ ID NO: 4098369 - RNA, 56 nt, Human
aauccuggcugcguuggccagcacccccuucugugcucauccuugcugcuaggguu

SEQ ID NO: 4098370 - RNA, 66 nt, Human
aauccuucagcaaccagaaaggcugggucacuuggccagggcuucaguuaguggugagcugggauu

SEQ ID NO: 4098371 - RNA, 68 nt, Human
aauccuuuuaaaacauaaacugacagcccaugggccaagcccaacugcuguuauguuuuguuuggauu

SEQ ID NO: 4098372 - RNA, 81 nt, Human
aaucuacugaacagcguggcugcagucauuuacacaccaggaagaaauagagucccugagccacugcuuguucaguguguu

SEQ ID NO: 4098373 - RNA, 110 nt, Human
aaugacucuaagaaggcaagagaugagacuguaugauuugaguuuauugugcuauuuaccuguugaccacauuaugcaguaauaccuguuugcuuucuaaagagguuguu

SEQ ID NO: 4098374 - RNA, 97 nt, Human
aaugacuuguucugcaaagacccagaggugucuagcaagcuuaguuaaggacaagccacccuccuuggacauuugugauuauugagaacauuucauu

SEQ ID NO: 4098375 - RNA, 129 nt, Human
aaugagaagccugcgaugacuacacccuuuuucugguccagucuuucccuucuagacauuggugaaaugccuaucuagccaaaggaagacuagccagaauaggggaaaucacaucugguuuuacucauu

SEQ ID NO: 4098376 - RNA, 90 nt, Human
aaugagccugaaugggcaagggguaaggacacuuauuuuccuuuggcugaauugaagguucuuccuccccaugucccagaaugguucauu

SEQ ID NO: 4098377 - RNA, 100 nt, Human
aaugagcuggguuggaauugcagcugggacauuuuugauacugugaucuuagauacauucaucugucagacuccagcugauuccaaacuccuuguucauu

SEQ ID NO: 4098378 - RNA, 56 nt, Human
aaugaggccaguagaaggaaguggauuccccacugcaacuugcugagggccucauu

SEQ ID NO: 4098379 - RNA, 58 nt, Human
aaugagggaguggggcuuguccguauuuacguugaggcgggagccgccgcccuucauu

SEQ ID NO: 4098380 - RNA, 129 nt, Human
aaugagguuagaaacguggucuagaauaagaucaucuagggccuuggaggccaugaugaggauguggauuuuaugcuaaauugaaaggcccuggaugguuuugagaagggacaugaucuaguuugcauu

SEQ ID NO: 4098381 - RNA, 92 nt, Human
aaugauaaucuuuaauuauagaaugaggacauagcuuuuuguuucauuuauuuaaaaggcuguguccucauuuuauaucaugauuugccauu

SEQ ID NO: 4098382 - RNA, 102 nt, Human
aaugauaauucacagaagauguuuggucucuaaaagauuuggauacccagcacugaaguagggaaucuuccuuuuuuguaagcugacguuuuuguuaucauu

SEQ ID NO: 4098383 - RNA, 65 nt, Human
aaugauacagugauuauuaguuggugguguggaaauacuaaaugcugcauaaaugcuugauuauu

SEQ ID NO: 4098384 - RNA, 56 nt, Human
aaugaugaguucuaauagacccugcuuuugccucuggauaguggaacucuaucauu

SEQ ID NO: 4098385 - RNA, 100 nt, Human
aaugauugugucuuagaaccuaaugaaaguuugcauuccucaguaaaaucagagacugcugauugacuuaaauguuuauagcuucaaaguccuccucauu

SEQ ID NO: 4098386 - RNA, 74 nt, Human
acaauucuuccaauguggcccagggaagccaaaagauucgacaccccugcuguaaagcuucauggaaggguugu

SEQ ID NO: 4098387 - RNA, 74 nt, Human
acaauugaggcaccaguaagaguagaacuagcuaucuuuggaguucuccuguuuuggugauuccaucugauugu

SEQ ID NO: 4098388 - RNA, 74 nt, Human
acaauugaggggguuaauuaggagaguagcuggaugggauuugcacuuuaaaaagagccuucuaaccaaauugu

SEQ ID NO: 4098389 - RNA, 60 nt, Human
acaauugcaauagagaaaagaguccagugugaacugaacucauccuugauuugcagaugu

SEQ ID NO: 4098390 - RNA, 76 nt, Human
acaauugcuuuuauuuagggccagguaccacuacauugaccuguguuaauacuggcccuagagagaagucuauugu

SEQ ID NO: 4098391 - RNA, 83 nt, Human
acaauuucacagcucaguuugauguuuuggcagauguuaugggagcauucugcaagaucauuaaagcagagcuguggcagagu

SEQ ID NO: 4098392 - RNA, 98 nt, Human
acaauuugagcaguuguauaugcuaugaaaagaguauagccacuggauaaguguuguacuuacauuuuaaagcuaaccaaaguuaggcucuugauugu

SEQ ID NO: 4098393 - RNA, 129 nt, Human
acaauuuuugaugaaaucaaccgguggguuuagucuagcaccuggucaauucagucaaaaaugucaaaaacccugugaccgaauugacagguguuagacugacugacuggucaauuccaucaaagcagu

SEQ ID NO: 4098394 - RNA, 65 nt, Human
acacaaggcuuccaagagcguccugagcuguuuuacagcaagauugcuaaugaaguucuugaugu

SEQ ID NO: 4098395 - RNA, 77 nt, Human
acacacaaguaucugcaugauuuugagaaacuaaaacucuuuaaguucucuuuuugcaucaggucuuaaaugugugu

SEQ ID NO: 4098396 - RNA, 58 nt, Human
acacacauauauacauauuugugcauguauauuugcauguuuguguauauguguaugu

SEQ ID NO: 4098397 - RNA, 72 nt, Human
acacagaggaugugucuggucugggcaccuaggcuguggagggugccaggaggggacaccuccucuuugugu

SEQ ID NO: 4098398 - RNA, 60 nt, Human
acacagccaggguaguaaggcuagaccuaaccccugcccaacugacaccacugcuugugu

SEQ ID NO: 4098399 - RNA, 64 nt, Human
acacagccagugacugcagacccuggccaugcagcucuagggucuguguucuuggccacugugu

SEQ ID NO: 4098400 - RNA, 87 nt, Human
acacagccuuugcuucuuccuggggacacugucuugacccuugagcuggaaagaagaggcuggucccagggagggaaugggccaugu

SEQ ID NO: 4098401 - RNA, 59 nt, Human
acacaggacagggauguguuuuccaguuugccacagucccugccacucccuguccuugu

SEQ ID NO: 4098402 - RNA, 72 nt, Human
acacaggcagacaccuuuaugucuaauaucucaacuguagagguuagauaaucacagagugcuauacugugu

SEQ ID NO: 4098403 - RNA, 93 nt, Human
acacagggaggcaguagcuguggugacagcugugaucugaaccagggcuugguugaguacucuucucacuacaccagacugcacuuccugugu

SEQ ID NO: 4098404 - RNA, 87 nt, Human
acacaguaaguacugaauaucuacuguuauuauuaauaguaagaguauuuguauuaauagaagcaguaacagcaauauuugcagugu

SEQ ID NO: 4098405 - RNA, 61 nt, Human
acacaguggugagucuggaccuguaaaacaucaugacaugacuucacucuugccauugugu

SEQ ID NO: 4098406 - RNA, 81 nt, Human
acacauaaucacccaaaguccauaguuugcauuacaguucaccccugguguuguacauucuauggguuuggacaaaugugu

SEQ ID NO: 4098407 - RNA, 129 nt, Human
acacauacacagugcuaaugcauaugcccgcccugaauuuucuccucaugacugguuguggcacaacuuuaaacccagcagagcauggggaggaagcuggaguuuguauuuucaguuuuguucaacucu

SEQ ID NO: 4098408 - RNA, 69 nt, Human
acacauaggacaugcuacauaaauaggugugugcauguacacguguguguguguguguguuuaauuggu

SEQ ID NO: 4098409 - RNA, 74 nt, Human
acacauauacguacauguauuugcauauaugugucuaugcauauuuguauguguguacauauauauguaugugu

SEQ ID NO: 4098410 - RNA, 72 nt, Human
acacaugaaagguagcuggccucauagccacuggguagcccauccuugagagccuggccaccuucagugugu

SEQ ID NO: 4098411 - RNA, 76 nt, Human
acacauucuugaguugauguuuuaaaaaugcauguauucagauggaaaauagcaaagaugucaauucccccugugu

SEQ ID NO: 4098412 - RNA, 75 nt, Human
acacauuguaguaaauuaaaauauugacuuuccaccuggauagauuacaggaaguucuuuugguuuauucugugu

SEQ ID NO: 4098413 - RNA, 79 nt, Human
acaccagaaucaguuucuucaauucagacacugucuuuucuguugcgaguguuuaaacugaagugaugaauccuggugu

SEQ ID NO: 4098414 - RNA, 67 nt, Human
acaccaguccugaccucaugcuggcagagagagaucucuacucugaagccuuuguacaggccugggu

SEQ ID NO: 4098415 - RNA, 86 nt, Human
acaccauuuauuaaauaggguauccuuucccauugcuuguuuuugucagguuugucaaagaucagaugcuuuuagauguguggugu

SEQ ID NO: 4098416 - RNA, 103 nt, Human
acacccagccuggguucugcaccucaccuccaaguccgagggcucucaaggugaguguuuugcuucucucagacuuggggggucugaggacaaggcugugugu

SEQ ID NO: 4098417 - RNA, 88 nt, Human
acacccaugagagcagagcagagggugcagcugggccccacggacccugugggugcucagaguacccccaggaagugcacgugggugu

SEQ ID NO: 4098418 - RNA, 73 nt, Human
acaccgagcauccuuuuuuccugcccugcggcugcuccaggcugagagcagacucucaaagcugguuuggugu

SEQ ID NO: 4098419 - RNA, 102 nt, Human
acaccuaagguacugacagcuuguauaauguacuuguauuugguugaauuguguccaccaaaaagauauguugaagcccucacacccaguaccucagaaugu

SEQ ID NO: 4098420 - RNA, 79 nt, Human
acaccugaagaaaauucuguuuuuguuugcuugcuugauguggcucuaucuugugcugacaaaacacauucuuuggugu

SEQ ID NO: 4098421 - RNA, 77 nt, Human
acacuaaaagggguagguaagacaagaugcaucuauuaggccaagccuaagagcucuuugauuugcuucucuugugu

SEQ ID NO: 4098422 - RNA, 61 nt, Human
acacuacacacucugcuuugcuuguucuauaauacuggugaguuuugagaguggguagugu

SEQ ID NO: 4098423 - RNA, 89 nt, Human
acacuaggguuugggcacagucaaacuuauaggcacauuugaaaaauaaguaaaguuuuuguaaguugauucuacucuuccuuuaaugu

SEQ ID NO: 4098424 - RNA, 70 nt, Human
acacucuuucacuaccuuaauuccagagaaaagccucauaggcuuccguauuguagguaugcaggagugu

SEQ ID NO: 4098425 - RNA, 64 nt, Human
acacugacuuuuaggcuguaauuagcaaguuggcucgugucucucuaaggccaaaaguaagugu

SEQ ID NO: 4098426 - RNA, 98 nt, Human
acacugaggaaugucauaggaagcaauucuaugaagcuuauuucuguguuuacugcagggauguugucaaggaugugguugaugacauuccacagugu

SEQ ID NO: 4098427 - RNA, 113 nt, Human
acacugauaguuuuuaucuagagacccuuucagacccuuuaguaugcauuugcauaugaguauacauaaagcacugaauaguuaugucuuuaggagucuguuuauuuaagugu

SEQ ID NO: 4098428 - RNA, 75 nt, Human
acacugauguuggcccuggucauauggaaggugauuggucauaacaugacaugucugaccagaggccuucggugu

SEQ ID NO: 4098429 - RNA, 64 nt, Human
acacuggggaaggagagagugaagacccuccaguugguuccucagucagcuccguucuuggugu

SEQ ID NO: 4098430 - RNA, 83 nt, Human
aauuauacagugcucuuuuuucucccacaaguauuaauaacaaggaaaauacugauacggaagaaaaaaguggcugugcuguu

SEQ ID NO: 4098431 - RNA, 68 nt, Human
aauuauacaugaaggcauuauauguauggacauuauuaagucauacuugcuuugcuuccauuguaauu

SEQ ID NO: 4098432 - RNA, 73 nt, Human
aauuauacuaaacuguucaucagcaucucugcccuaccucagagggaggauaguagucaguuuaguuauaauu

SEQ ID NO: 4098433 - RNA, 66 nt, Human
aauuauagguaagagcacugucuccugcugaugguuuacaucagagguacccgcccuuacagaauu

SEQ ID NO: 4098434 - RNA, 104 nt, Human
aauuauccauguuagcacauuuggaacaaauguauaaauguacuuucugaauaaagucaaaagucuaacuuguuuuuaguuccauaauguuuuaauguuuaauu

SEQ ID NO: 4098435 - RNA, 97 nt, Human
aauuauggagggacaccauuuagucuguaacaguacaguuacauaaguagauccauuugccaauauuguacgguuaagauuuguauuuuccaugauu

SEQ ID NO: 4098436 - RNA, 61 nt, Human
aauuauuggcagaauuaaccacugaagccaucucaguguuggcuuuucuuugcgaguaguu

SEQ ID NO: 4098437 - RNA, 77 nt, Human
aauuauuuguguccacagaauacccuuguuuuugaucuugaagcucuaaguaauguauugcugcuggacauguaauu

SEQ ID NO: 4098438 - RNA, 65 nt, Human
aauuccaagcacuguuaauuaaacuuggcuaauauguuaagcgaaauuauuucagguuugguuuu

SEQ ID NO: 4098439 - RNA, 84 nt, Human
aauucccacuuagaacuacaagcauuaaaagucacaguaucuaagacaagugagcuuuuagcuccugguugcaauaggggaauu

SEQ ID NO: 4098440 - RNA, 118 nt, Human
aauucccuauccaucuuccuacacacuuucauagccuuugucgucugagggaaaaagaaagguuuucaucaugccaguuaaaggcugugaaugugaccuagauaauucuuggggaauu

SEQ ID NO: 4098441 - RNA, 96 nt, Human
aauucccucagcuauggguguccaucucuguaugcugcucauauuauuagaggcugcauuucacaagauguaaucaucguguagcauauuggaauu

SEQ ID NO: 4098442 - RNA, 89 nt, Human
aauucccuuuugagaaauuauuuucuguagaccagaaggaaucaaagaugagcccugggauacaguaaaagcuguuacaaaacggaguu

SEQ ID NO: 4098443 - RNA, 76 nt, Human
aauuccugugacaagucugaacauucugguuguaauuucagaggccucuguuguucagacguguuaagaaugaguu

SEQ ID NO: 4098444 - RNA, 69 nt, Human
aauucuagcccaggcaaaacuaguauauacugugagaaagcaaaucuguguuugccuagggccaggguu

SEQ ID NO: 4098445 - RNA, 86 nt, Human
aauucucauuuuuaaugguguguucaugguguaauugauguguuauugcauugguacuccacacgcuauuauaauguuuuaggauu

SEQ ID NO: 4098446 - RNA, 62 nt, Human
aauucugcaucuucagcugagaacgaacaaaaucuugaucagaacagugaggaugaaggguu

SEQ ID NO: 4098447 - RNA, 75 nt, Human
aauugaaaauauaguuuuccagacugaaggaaacaaagccucaggauuggauaucagauuugaguauuuucaguu

SEQ ID NO: 4098448 - RNA, 65 nt, Human
aauugaguaaauauaccuagaagugugacugcuggaucauaugguaagaguauauuuacuuuuuu

SEQ ID NO: 4098449 - RNA, 56 nt, Human
aauugaucacuguuuuuccagucuacacugaggcaggcaucaucaguugaucaguu

SEQ ID NO: 4098450 - RNA, 95 nt, Human
aauugauuugcaauguugaaccagcuuuguauaccugaaauaaaucccacuugguugugguguauaaugcuguuuguacauuguuggauucaauu

SEQ ID NO: 4098451 - RNA, 72 nt, Human
aauugcaauggccucccaagcagggggaaagaccaacauuugccuccuugacucucuugugaggccucaguu

SEQ ID NO: 4098452 - RNA, 127 nt, Human
aauugcuagauaagugacuacuuagguacucuaauuuggaauggucuggcauuuggaacuguaucacaguauagaaaguuuuaaauugguagcucucagucuuauucaucuuucugucuaguuaauu

SEQ ID NO: 4098453 - RNA, 97 nt, Human
aauugcuucucguaaauauguuccacuuaaagcuggcauucuccuuucaucccugugacuguggguuugauugcaacaugucuugaugaagccaauu

SEQ ID NO: 4098454 - RNA, 108 nt, Human
aauuggauuuagaagucuauggaaauuauuaggaagauggguuuuaagugaccaguuuuuuauacaucuucuuugacagugauuugugcauaagcuucugaaguaguu

SEQ ID NO: 4098455 - RNA, 77 nt, Human
aauugggacguuuaucuuuauuagugaaucaaagugggacucaguuaaugguaagggugaaagagauugucuuaauu

SEQ ID NO: 4098456 - RNA, 128 nt, Human
aauugugcaggaggcauguaucuuaaauaaagaauaaaagggcaaauggaauacaaaauuuggaacaaagaauuugauucccugcaccuguuuuucagaaagguuuuaauauguaaacauaaacaauu

SEQ ID NO: 4098457 - RNA, 56 nt, Human
acacaaacugcuagaaaauuggaaauucccuucgguguucaugugcguguuugugu

SEQ ID NO: 4098458 - RNA, 76 nt, Human
acacaaaucuaguggucuaacuucauuuaaccaggaaagaaucagccuggagauguaaagcaaggcuuaagagugu

SEQ ID NO: 4098459 - RNA, 63 nt, Human
acacaagagagugcgcguugcaaagugcgguggagcauuuguguguguguguuuucugggugu

SEQ ID NO: 4098460 - RNA, 65 nt, Human
acacaaugcagcauguaaaugcaucuacuuaaaguguaugugugugugugugugugugugugugu

SEQ ID NO: 4098461 - RNA, 56 nt, Human
acacacaaaucuauuagugaauaauaaaaacuguuugucacugagguuaugugugu

SEQ ID NO: 4098462 - RNA, 60 nt, Human
acacacagguaaaggagccuggaaguauuucaugaauuuuuaggccccaccuccuguugu

SEQ ID NO: 4098463 - RNA, 89 nt, Human
acacacuauauguaucugcaucugcauguguauuguuuaugcuugucuguauacucauguaugcauagugaguaaaugugugugugugu

SEQ ID NO: 4098464 - RNA, 63 nt, Human
acacacuggcaggagcuauaaaauccagcuaugggguuugucauguuuccuccucaguguugu

SEQ ID NO: 4098465 - RNA, 102 nt, Human
acacagauauuuaugaguugaaagggaacuuuucauuguuuguacaugcauguguacaugucuucgcuacaaugaaaaggauuccuuccaauucaccugugu

SEQ ID NO: 4098466 - RNA, 64 nt, Human
acacagcaagaccccuagcaugguggcacaaaccuguaguaccagcuacucgguuggcuguugu

SEQ ID NO: 4098467 - RNA, 61 nt, Human
acacagcuccugggccaucacaaccaucucuagggaguggccagaguccagugagccuugu

SEQ ID NO: 4098468 - RNA, 76 nt, Human
acacaggaauuagaagaacaugucaaacuauaaacugcuugugauugugaauggcuuuguucuuugcuucuugugu

SEQ ID NO: 4098469 - RNA, 68 nt, Human
acacaggacacagauucugaagucuagcugcuggcucagcucuagccucugacucugauuagcugugu

SEQ ID NO: 4098470 - RNA, 57 nt, Human
acacaggggaaaguggagcugagagaucaaccaguuacccaagccaaccccugaugu

SEQ ID NO: 4098471 - RNA, 62 nt, Human
acacagggucuagaguuaggccaaaguucaaaucucaguccugccucuuaguaucuaugugu

SEQ ID NO: 4098472 - RNA, 71 nt, Human
acacaguggcugagaguggacacuggaguuugacugccuguguuugaucccaacucugcuauuugcugugu

SEQ ID NO: 4098473 - RNA, 60 nt, Human
acacagugguguuuacaaaauucaagugccuuugcaaaggauuuuagaucaucaccgugu

SEQ ID NO: 4098474 - RNA, 98 nt, Human
acacauauauauauaggagauguauuugaaauuugagacaugagauggaugaauaagcagguaaacagacagauacauacuaguuagauauuaagugu

SEQ ID NO: 4098475 - RNA, 67 nt, Human
acacaucagguagaccuacagaggcaccauaauucauuguugauuucaugagauuaucugcaugugu

SEQ ID NO: 4098476 - RNA, 89 nt, Human
acacaucugugcuuucaccaacaaugaagcuccacugagcuuuggccuagaguuuuuacugggguuucauuauauaggcauaauugagu

SEQ ID NO: 4098477 - RNA, 69 nt, Human
acacaugcucauuggcacuguuccugguacagagcugugcccaguuggaggggccauuuugagcagugu

SEQ ID NO: 4098478 - RNA, 66 nt, Human
acacauguauguuuuguauuugcuaugcuguggaggcuaaaaccaaaaucaaaacauuagaugugu

SEQ ID NO: 4098479 - RNA, 65 nt, Human
acaccagcugcagaucauguuuacagcucagcugaaacaaaacaucagaucugccugcugccugu

SEQ ID NO: 4098480 - RNA, 77 nt, Human
acaccaguguuggccuucuguacucuggcugcagacugaccuugcucaggugagacuuuagaagagccagccugggu

SEQ ID NO: 4098481 - RNA, 72 nt, Human
acaccauccugcuccugcuauucuucugguaagagcacugccagaauaaaaugcaugagcaucagacggugu

SEQ ID NO: 4098482 - RNA, 76 nt, Human
acacccagggacagaugggcagcuaacccagguacugugucuucugcgucuggcuuuauaccuuugccuuggaugu

SEQ ID NO: 4098483 - RNA, 59 nt, Human
acaccgucaaggcuacugagugcccuguguagguucagggcuguggcuuugugcugugu

SEQ ID NO: 4098484 - RNA, 78 nt, Human
acaccucucagagccucagcuuccccaugugagaaauggguuuaauguuucauguuggggaguugagugagucaaugu

SEQ ID NO: 4098485 - RNA, 74 nt, Human
acaccuuucccacucuagagcccucucccuaacucagggccaauuugggacaugggcucaguggaaaagagugu

SEQ ID NO: 4098486 - RNA, 83 nt, Human
acacgaugaaacagcacaauuuucaggaguccacaauuccagcgaggcgcguggaugggaaauugucacguugugaauugugu

SEQ ID NO: 4098487 - RNA, 57 nt, Human
acacuccauuucccagcugcucuuauugccagguguagacacaggggaaugugaggu

SEQ ID NO: 4098488 - RNA, 71 nt, Human
acacucccuggcacagcgagagguugaauccuccucaggcgcagccucagggcucugcgcagacucagugu

SEQ ID NO: 4098489 - RNA, 118 nt, Human
acacugaaaauaacaacucaggucucauaaagaaggaaaucauaauuuugugaauguagucauucugauuugauaugcaaaauuauggacccuaagaccuuuaguuguuguuucaugu

SEQ ID NO: 4098490 - RNA, 57 nt, Human
acacugaauauacaaugaauaugggcauucccuagagauucgauguguguugcaugu

SEQ ID NO: 4098491 - RNA, 55 nt, Human
acacugacgcuugacagucaccugcccaaggucgccggcuggcaagugacagugu

SEQ ID NO: 4098492 - RNA, 61 nt, Human
acacugagcaucucuagaggcacauuaaggaacaguguuuauuaaugagaugucuuugugu

SEQ ID NO: 4098493 - RNA, 56 nt, Human
acacugaguauugaguaggguaauuaaaaauacaucucgaucuagacacucagugu

SEQ ID NO: 4098494 - RNA, 130 nt, Human
acacuguacucucuuuuggucuuuguuagguuuuuuuucccccuuuuuuucuaucacucacucuguggcagcugagaaguacuacaagagagggaggacagagauacugaacaaggcuguguauaugugu

SEQ ID NO: 4098495 - RNA, 68 nt, Human
acacuguaggagaaaggaguuugccucaguccuuucagcguguuuuuuccuucuuguuccugcggugu

SEQ ID NO: 4098496 - RNA, 56 nt, Human
acacuguggccuuuaaccccaucaauaacucuuugaaggccuggaggacgcguugu

SEQ ID NO: 4098497 - RNA, 123 nt, Human
acacuuaauugcuucuauaugcuuauugcuuaauuacauaaaaugcgguagucccuuuauaauguuucuguaaaagugcccaccuuuacugugauuuaggcagaccaaaaagcaagagagugu

SEQ ID NO: 4098498 - RNA, 57 nt, Human
acacuuaucaguugucucuaauguggagagacuacauggagaggucauuguaggugu

SEQ ID NO: 4098499 - RNA, 79 nt, Human
acacuuccagcucucugcagaaaggacuaagaggcuccaauagccugaugacagucucgcugcaaagagucauaggugu

SEQ ID NO: 4098500 - RNA, 66 nt, Human
acacuucucuuugaagaacaauaccacacuugaaacuuuauaagguaugggcugguuaggaagugu

SEQ ID NO: 4098501 - RNA, 79 nt, Human
acagaagggauggagacgaaaaggacauaauauuuuaaaauaaaauaauguuuauuuguauucucccuacaaucuuugu

SEQ ID NO: 4098502 - RNA, 63 nt, Human
acagaagguaggauaguaauuuaccacucuuacuaugagguguggguguacuguucuagaugu

SEQ ID NO: 4098503 - RNA, 78 nt, Human
acagaauaaggccuaaagaaggguucuucaauguuaguuuauucagcaucaaggacuccaauucuuucaucuuucugu

SEQ ID NO: 4098504 - RNA, 81 nt, Human
acagaaucuggcuugacuuugcgacuugcuuucaccaaucaaaugcagaagaagugaagucugguccucaggagguuuugu

SEQ ID NO: 4098505 - RNA, 64 nt, Human
acagaaugaguagcaucuucaccugucaaauaauagcaguugugaugacacccucauauucugu

SEQ ID NO: 4098506 - RNA, 79 nt, Human
acagaaugcagcugcagaaagcaagcagguucaauaaauaaaauguaaaugugcagcccucugccagcacaaguucugu

SEQ ID NO: 4098507 - RNA, 85 nt, Human
acagaauuaggagcaccaggaggugauguugucaguugcauugcugagcauucuuuuugacuccugguuggcuuacuaugccugu

SEQ ID NO: 4098508 - RNA, 55 nt, Human
acagaauucucucugcagaggcagcuacggcuguuuuguggaaguagguucuugu

SEQ ID NO: 4098509 - RNA, 58 nt, Human
acagaauuguuagcuuaaugguuguugucuuaagccauuaaauguuggcauauuuugu

SEQ ID NO: 4098510 - RNA, 61 nt, Human
acagacccuugagauuuucugugcaggaccuccugaacugcaggaaucucagugggggugu

SEQ ID NO: 4098511 - RNA, 109 nt, Human
acagacuaagacacaugcugauuccuauuuuuucauaagaaacccggaacacggagcuauuaaggguguaaauggcagaauuaggauuucaagucaugguugggucugu

SEQ ID NO: 4098512 - RNA, 63 nt, Human
acagacuucagaggcuugcauuugcuuugagcaauguggcaacauugcuucuggagcuucugu

SEQ ID NO: 4098513 - RNA, 78 nt, Human
acagagaacugccagaggagguaucugaagucauucacagacacaagugauucugauuuguucuuuuggugucuuugu

SEQ ID NO: 4098514 - RNA, 67 nt, Human
acagagagaaaggauaacagcucaacuggguuacauuaaacaaguacugacuggcugucuucucugu

SEQ ID NO: 4098515 - RNA, 89 nt, Human
acagagaugcaggcagcgcagcagugaaacagcugcauauguuuggaaagacuuggagcucccgcacugauuagcuccugcauuuuugu

SEQ ID NO: 4098516 - RNA, 72 nt, Human
acauacagcuacauaaauauuuaugugucuuuaagaaauugugagugauagguauuuugugugugugugugu

SEQ ID NO: 4098517 - RNA, 56 nt, Human
acauacaguagcauuauguuucccuuaaguagucuugagguaguucuauugugagu

SEQ ID NO: 4098518 - RNA, 56 nt, Human
acauacgugugugcacacauaugcacacaaagacauacacaugcacacaugugugu

SEQ ID NO: 4098519 - RNA, 92 nt, Human
acauagaaauagaaaauuaaugcaagguggauuuuagaaaauacugaauaucaagugugaaauuguauuuggcauugaauuuauguauaugu

SEQ ID NO: 4098520 - RNA, 64 nt, Human
acauagcuggugaacacgcaccugugcuuccuucccuguacagguguugacucacaggcccugu

SEQ ID NO: 4098521 - RNA, 58 nt, Human
acauagugagagaaagaucagcuugcucuaauuaaacaaguugaauucuucuacaugu

SEQ ID NO: 4098522 - RNA, 73 nt, Human
acauauaagggaucagugacagaauuaauuucugaguaaugcagaauaaacaucaauauugaccuuuguaugu

SEQ ID NO: 4098523 - RNA, 83 nt, Human
acauauauaccuuguaccauaggucuaucauucucugucuaagggggaggauaauauacguaugguacaaggauguccuaugu

SEQ ID NO: 4098524 - RNA, 103 nt, Human
acauauauaugaucuuacgugauacucacuauucuaucagauagguuuucugaauggagcccgaucuuguggguaguguauugcuuguacgaaaugaauaugu

SEQ ID NO: 4098525 - RNA, 84 nt, Human
acauaucauugucacccaaagcucauaguuuacauuaggguucacucucgguguuguacauucuaugaguuuugacaaaugugu

SEQ ID NO: 4098526 - RNA, 80 nt, Human
acauauguaugauugauuguauaacagcauguauuuucauuuggaaaaugucugaguuaugcagaucuuacaaauauugu

SEQ ID NO: 4098527 - RNA, 74 nt, Human
acauauuaaaguucucaagguuaggaaaagucacuauauuuguauacuuccuuaauuuggggaaaauaaaaugu

SEQ ID NO: 4098528 - RNA, 61 nt, Human
acauauucacagguuccggagauuaggauguucacaucuuugucugugugugugugugugu

SEQ ID NO: 4098529 - RNA, 130 nt, Human
acauauuucaacugugagauuucaaaugaagccuguuguuggcucuguguuuccaggcagcucacagaucccugucuaaaagcacuggguauagcaaugaucucaugauguuaucucaauaaauuucugu

SEQ ID NO: 4098530 - RNA, 90 nt, Human
acaucacauauaguucaaaguagaguuguggaauuacuuuuccaugacaauguuuaagaauuguacagcuuugcuguuaucuagugaugu

SEQ ID NO: 4098531 - RNA, 70 nt, Human
acaucaccucagcuauuucaaaacagagcuaaaguuccaguccagggaauggcugauucuucaggugugu

SEQ ID NO: 4098532 - RNA, 130 nt, Human
acagcucuuuguauccuuccuucacgucacuacucucaguuucucauuauaaaagugugugaucauuuuacaguugaggaaacugagagcuugagaagcagagguaauuuucccaaagaaaugaagcugu

SEQ ID NO: 4098533 - RNA, 58 nt, Human
acagcugacaagaguccuuggaggauuucccgaagaauuccauggacccugucagugu

SEQ ID NO: 4098534 - RNA, 80 nt, Human
acagcugccugacacugccgccaccccgccagccuccuccuuggccugugcggggggcagcagucgcucagucccacugu

SEQ ID NO: 4098535 - RNA, 55 nt, Human
acagcuggugaauguucucuguguccugugggacacauaugacaaggccaguugu

SEQ ID NO: 4098536 - RNA, 56 nt, Human
acagcugugacuuagagaaguugaacuaacuagcucaaucuaagugccaaagcugu

SEQ ID NO: 4098537 - RNA, 67 nt, Human
acagcugugcuaccuuuucauugaguugacuucugauuuccuuuccaugcaaacaguggcuagcugu

SEQ ID NO: 4098538 - RNA, 77 nt, Human
acagcugugggauaaguuuugaaauacugaagugugagucuuucaacuuuguucuuuuucaaaauuguuuuggcugu

SEQ ID NO: 4098539 - RNA, 109 nt, Human
acagcuguugguucaggauugugaagcuucaaugagauaauuguuuagcauguuuuuauuccaucaugaacaccauuuguauuguguuuuacaguuuacaaagugcugu

SEQ ID NO: 4098540 - RNA, 100 nt, Human
acagcuuccauuugcucccaaguucaaugcauucuuucauggaccuggcucugcugacauccaggaaggagguaucuugcuggggaggggauagcacugu

SEQ ID NO: 4098541 - RNA, 65 nt, Human
acagcuucuccaauuauuuucuaaggauagauuccuagcaguaaaauuaauggaucagaaggugu

SEQ ID NO: 4098542 - RNA, 57 nt, Human
acagcuucuccucgaugucaugcacgauuucccgcuuggccgugguggugaagcugu

SEQ ID NO: 4098543 - RNA, 114 nt, Human
acagcuuuuaaagaaaggaaccguuuguaauaaaguggaaaugcaaggauucuaauaaucauguccaucuuaacuuucuuuaaauaugguuuauucauuuucuccaaaaguugu

SEQ ID NO: 4098544 - RNA, 91 nt, Human
acagcuuuuagcccuaucuggccuccacuguggguggcugauaucuacuaccacaguggaggccauaugguccugguuaagaguaagcugu

SEQ ID NO: 4098545 - RNA, 55 nt, Human
acagcuuuucaauucugcugagugacaaaucuucucuuagcuaguaagaagcugu

SEQ ID NO: 4098546 - RNA, 64 nt, Human
acaggaagaaagugcaguagauucucauuauucacaaguucuaaauuugcaaauucuucccugu

SEQ ID NO: 4098547 - RNA, 58 nt, Human
acaggaagugggaagaaacaggcagccuaaugaugagguccugggguccccuuuaugu

SEQ ID NO: 4098548 - RNA, 85 nt, Human
acaggagccacugugcuuggccuuagcuucuucuuaaauggcagcaguuugaguagugagacuaggcagaagcaccccuccuugu

SEQ ID NO: 4098549 - RNA, 69 nt, Human
acaggauugcaaaucacaagagcagagcccugacuccagcucugaugcuacugugcuuugugaccuugu

SEQ ID NO: 4098550 - RNA, 56 nt, Human
acaggauuuuguaguuuuguugccccuucuaugagcaacaaacuacaaaauuaugu

SEQ ID NO: 4098551 - RNA, 58 nt, Human
acaggcaagaggaaagcaaguaagaaugcuuucugagcugcuguuucucucuuucugu

SEQ ID NO: 4098552 - RNA, 65 nt, Human
acaggcaccugccaccacaucuggcuaauuuuuguauuuuuaguagagaugggguuuugccaugu

SEQ ID NO: 4098553 - RNA, 63 nt, Human
acaggcagcaggccucuguugagggccuucuguuggagggcccaugucgggcgcucugcuugu

SEQ ID NO: 4098554 - RNA, 57 nt, Human
acaggcagggaccuuggcuaagucaccaccuaucugagccucaguuucccugucugu

SEQ ID NO: 4098555 - RNA, 75 nt, Human
acaggcuacucagggacugugacaugaugacacuuguaggaacccagugugucauuuaguccucugugugucugu

SEQ ID NO: 4098556 - RNA, 77 nt, Human
acagggacaaggagugugcccacaucucuggggcagguacagcuguccuaggaaguggaggcaccugcugagcuugu

SEQ ID NO: 4098557 - RNA, 56 nt, Human
acaggggagacuggaaucuaacaucuuuacugauguggaaucacagccuucuaggu

SEQ ID NO: 4098558 - RNA, 55 nt, Human
acaggggugcauggugcauggucucugggacugauagcagcggugacacccuugu

SEQ ID NO: 4098559 - RNA, 55 nt, Human
acaggucuccagagugagaggaugaaugccaucuccucuuuauggaaaaacuugu

SEQ ID NO: 4098560 - RNA, 71 nt, Human
acagguggcacugcuguuacucuccugucacacuccagaaaaaagaagucgaguuauaacugccacacugu

SEQ ID NO: 4098561 - RNA, 63 nt, Human
acagguuccugguccuccuagagcuucuuauucaaugggucugggaugaagccagaaacuugu

SEQ ID NO: 4098562 - RNA, 103 nt, Human
acagguuucuccacuucucuagaagguugggcaggugcuaggaagguaaccugcaaacacuucccaacacuuuugagaugaacagaaaguggaguuaccucgu

SEQ ID NO: 4098563 - RNA, 56 nt, Human
acagguuugcagcuuguuaccucuggcuucccacagccuucaugcugugcaucugu

SEQ ID NO: 4098564 - RNA, 66 nt, Human
acaguaaggcauuuuucauguuuauccuccacaugugccguaaagguguugcgaugucuggacugu

SEQ ID NO: 4098565 - RNA, 91 nt, Human
acaguaaugacuagaaaaacaauucaguuuuaggacuggaaaugucaaagcacucuaucagccuuuggaugguuuuucuauuucuuacugu

SEQ ID NO: 4098566 - RNA, 66 nt, Human
acaguaauuaaggucugaaacgcuucccaaucaaagaacaggaagaguucacuccgaguuaacugu

SEQ ID NO: 4098567 - RNA, 83 nt, Human
acaguaguaggucagugaucauucagucucugggacagucaauggacagacguuuacagcucugagugcuaaacugcuacugu

SEQ ID NO: 4098568 - RNA, 68 nt, Human
acaguaguccuuuauuuugguuuaguggaaagacuuucagaggucagugccgaaugaaggaugacugu

SEQ ID NO: 4098569 - RNA, 64 nt, Human
acaguagucucuuuaaucacagugucugcuugguuccaauuacugucuguaaagggaauucugu

SEQ ID NO: 4098570 - RNA, 83 nt, Human
acaguaucagacucaagcagauaggaauuagacaaucaaccagaguaaguuugguccaguuuagcauugagugcuuuaauugu

SEQ ID NO: 4098571 - RNA, 94 nt, Human
acaguauccuguuuucuacagucugggucucagccccuugggaccgcucuuccaagcucaaagacaccagaaucuguugagcaacugaaccagu

SEQ ID NO: 4098572 - RNA, 96 nt, Human
acagucagagagaacaaaauaccaauauucaaccaaccugaggaaaagugaauucuaugucaggagggauuguugccuauuuuggcucacugcugu

SEQ ID NO: 4098573 - RNA, 127 nt, Human
acagucucucaugcuccucccccaccccucucuguuauaaguuauauguuucccuaacugcagguguuauggaaauguaacuucugauucaagcugagagaggacuugaggaacuugaggaaauugu

SEQ ID NO: 4098574 - RNA, 67 nt, Human
acagugcauuauugcugaaugcgucuguuauagguaguuccuaguuuauaaagcaauauuguauugu

SEQ ID NO: 4098575 - RNA, 59 nt, Human
acagugcuggcuacaacccugggaaggccuaacaggguuaguaacgugacagcaucugu

SEQ ID NO: 4098576 - RNA, 60 nt, Human
acaguggagaaucuucaagaugccaaggcacauacuugccagccagaauuucuccacugu

SEQ ID NO: 4098577 - RNA, 69 nt, Human
acagugggauaucagggcccagucugugcaucucucauuccagggaggccggggcccugaauccacugu

SEQ ID NO: 4098578 - RNA, 73 nt, Human
acagugucaaugaacacagcccucuacuuugcugaauuccagaaggagacgacugugcucaugaagacaaggu

SEQ ID NO: 4098579 - RNA, 85 nt, Human
acagugugguuggcccaggaggccagagggcagcacccugucauuguccuuacccuccugggagaucuuagccaaccuuuucugu

SEQ ID NO: 4098580 - RNA, 64 nt, Human
acaguguuguauuuaguuugauagauacaauuacaucuaucuagccagauaauuacaguacugu

SEQ ID NO: 4098581 - RNA, 72 nt, Human
acaguuaagcaguaugaucacaccgaacccuaugcuuagaagggauccauacuugauuuauugcuccacugu

SEQ ID NO: 4098582 - RNA, 56 nt, Human
acaguucaagucuuagacaacaaggguguauccuguugugcucaggguugagcugu

SEQ ID NO: 4098583 - RNA, 87 nt, Human
acaguucccaaaugcagacaagucgugggaucuuccgggagaacuuggaucuucccacaucugucugcuacugggagaaguugcugu

SEQ ID NO: 4098584 - RNA, 87 nt, Human
acaguucuagaagcuggaucaagucacuggcagggaugcuuucuucugaggccucucuccuuggcuugcagauggcuucuccuaugu

SEQ ID NO: 4098585 - RNA, 83 nt, Human
acaguucuggaggcugggaaguccaauaucaaggcagauucagugucuggugagggcccacuucuuaguuuuuacaggacugu

SEQ ID NO: 4098586 - RNA, 74 nt, Human
acaguuuacauauuuuaauuggugaccauagguuucggaaugccaaaguuacagguacaauaugaauaaacugu

SEQ ID NO: 4098587 - RNA, 56 nt, Human
acaguuuaugccucugagccugcagacucaaagaugcaguuuacaacauaaauugu

SEQ ID NO: 4098588 - RNA, 57 nt, Human
acaguuuccagaacaugagcuaguuguguuucagaaguuuauguguaagacagcugu

SEQ ID NO: 4098589 - RNA, 64 nt, Human
acauaaaggugacuaacaucuugagacauaugccuuugucgccaagauuuaauaaucuucaugu

SEQ ID NO: 4098590 - RNA, 61 nt, Human
acauaacaugucaaucacccgauucugggcggcugagucgggaggugacgggcaugggugu

SEQ ID NO: 4098591 - RNA, 90 nt, Human
acauaacuugagugauagcagagccaacucgauucauccagaauugauuucaucccaggcucuggaagaaaucuaaugcucaggcuaugu

SEQ ID NO: 4098592 - RNA, 85 nt, Human
acauaauuuuugguugaggggaugggggcuguucuguggacugcauagcauuuagcagcauuccuggcuucuauccaauguaugu

SEQ ID NO: 4098593 - RNA, 67 nt, Human
acauacacugugcaugcauauacacacauguaugaacacgugugugcauguauguauagaugugugu

SEQ ID NO: 4098594 - RNA, 96 nt, Human
acauacugaacaguuauuggugaaguucuuuagauguuuagaggaagaaaauauuuuuuaaacuacuuccaucuagagaucccaauguuuaguugu

SEQ ID NO: 4098595 - RNA, 70 nt, Human
acauaggacauguguuuuauauaugugaaaauguauacacauacauauaugaaaugcauguuuucuaugu

SEQ ID NO: 4098596 - RNA, 72 nt, Human
acauaguaagugcucaguaaaugucaguuaacacaauccuaacagcuucuauuuauugagcacuugcuaugu

SEQ ID NO: 4098597 - RNA, 61 nt, Human
acauaucugugaacuggcauggccaggaugccaauccaagcuuucagauuuacagaaaugu

SEQ ID NO: 4098598 - RNA, 61 nt, Human
acauaugaguacuauacagugccugcauaccguguguauuuauugugaauacugcauaugu

SEQ ID NO: 4098599 - RNA, 82 nt, Human
acauaugucacuucguuuuuaaauuuaugacuacggaagucauauggcuaugucuaaacuuagggaucgaacaggacaaugu

SEQ ID NO: 4098600 - RNA, 65 nt, Human
acauauuucagcuuuacuuaggaaaggcaucugcuucgaguauuuucugggaaaagccaauaugu

SEQ ID NO: 4098601 - RNA, 90 nt, Human
acauauuuugccauugaagguuuaaugaacuguguuaacugaauauguuuucauauuagguguguuuauaagaccuucuuuagaaaaugu

SEQ ID NO: 4098602 - RNA, 75 nt, Human
acaucagucucaugaggaaaaugucuuauagauuuggaaaucagaucucagagagguuuuucaucugcccaaugu

SEQ ID NO: 4098603 - RNA, 109 nt, Human
acaucauuuaaucugccagaaauuuaacaagaauaaggauaagagauuggccucaagguacaauucaucuuucuccucauauuccuuguaggugcauaucaaaugaugu

SEQ ID NO: 4098604 - RNA, 71 nt, Human
acauccacuagaaugacagaguuggcaggaauguggagcaacuggaacucucaugcauuccuagugggagu

SEQ ID NO: 4098605 - RNA, 63 nt, Human
acaucuagacucuugcccucuuuucuaauaauauuucagagaggcagcucccaguuugggugu

SEQ ID NO: 4098606 - RNA, 56 nt, Human
acaucucuggguccuccaugcauuccauguguuagaauccaagggaacagaguugu

SEQ ID NO: 4098607 - RNA, 74 nt, Human
acuaagacauggcuucuaggaagcuuuugaaccucaaccagagaauuuagccaagaaaagucagguguuuuagu

SEQ ID NO: 4098608 - RNA, 67 nt, Human
acuaauccuuaaggcuucagcauucaaaacauguggcaaacuguuucaugaagucuggauaucuagu

SEQ ID NO: 4098609 - RNA, 91 nt, Human
acuaauuagcugcuuuaauaugaacuuugguaagaaauuuucuuuccauucuugcagaaauaaguuuaaaugaaggcucuaggcuucuagu

SEQ ID NO: 4098610 - RNA, 76 nt, Human
acuacaaaaggcugaguaaaacagagaacccugaaaaaagaguuauuguccauuuauuuagcacaguuucuguggu

SEQ ID NO: 4098611 - RNA, 78 nt, Human
acuacagagauuuauugcuaaggcucaugcuuuugccuccauuugcccaccguuguuuugucagucaaugucuguagu

SEQ ID NO: 4098612 - RNA, 64 nt, Human
acuacauuugcagagaagcaauauggcuuuaucuuccaaucagggcuucauuugcaagucuagu

SEQ ID NO: 4098613 - RNA, 130 nt, Human
acuaccaaauauuuuacuauaguuacccugaauaaauuacguuuugucuuaauuuggauucuacugaaagcagagccugaggcaaggacuugguggcagggaguacauuuggguggguauauaaggaagu

SEQ ID NO: 4098614 - RNA, 80 nt, Human
acuaccacacagaccuauuagggguuuuaaaugaccaacaucuauaaaacaccuguagugucugccauguaauagguagu

SEQ ID NO: 4098615 - RNA, 89 nt, Human
acuaccccauugcuauaaaaugucauuaaaauugugcugcauuuacaauuuuguauuuguugcauuuugaagacauagaauggggcugu

SEQ ID NO: 4098616 - RNA, 78 nt, Human
acuacuauaugucaagaaaugugcuuggauauauuucagugugguguauuucaguguaugucuugaaggacggguagu

SEQ ID NO: 4098617 - RNA, 83 nt, Human
acuagaaaagacuuuagagauugucuaguauuguggcucccaaccaugaagccauuucuggaagucuuuaagcaauguuuagu

SEQ ID NO: 4098618 - RNA, 66 nt, Human
acuagaacuuauuuggcauuauuucauuucugauuccuaaugagcuuggcuaccuggguuccuggu

SEQ ID NO: 4098619 - RNA, 81 nt, Human
acuagaagauuuccauuuuaauauuagcacagggacaagccuuguuucacaauuaaauuagagccagguaaguuuucuagu

SEQ ID NO: 4098620 - RNA, 79 nt, Human
acuagauauagacagcuguuccuucauguuugaaagauaaaaaucacaggaaauacaaggaaaguuuucuuuauucagu

SEQ ID NO: 4098621 - RNA, 68 nt, Human
acuagauggcgaggaagaaguuugagucaagagaccuauucuuggcacugucuucuucguguaagggu

SEQ ID NO: 4098622 - RNA, 57 nt, Human
acuagcaaugauucuaccaaguuguugcaaaggggcuguggcagagacaaugcuagu

SEQ ID NO: 4098623 - RNA, 86 nt, Human
acuagcagaauguaggccuucaguguuaacauagccuuuuucuguuauugcauuuaucugccuuuguucugaagccccagucuagu

SEQ ID NO: 4098624 - RNA, 108 nt, Human
acuagcuguaaugcuuaacacuguggcugggauucaggccuaaguagggucuuauucuuagcuugucucucagccccagucaaguuacuguuaagucuuagagccagu

SEQ ID NO: 4098625 - RNA, 59 nt, Human
acuaggacacaggcugcugcuucauucacccccggggaaggcuuucugugauccucagu

SEQ ID NO: 4098626 - RNA, 55 nt, Human
acuaggagagacuuugucucuggaugucuggaggaauaacagagugucccgcagu

SEQ ID NO: 4098627 - RNA, 58 nt, Human
acuagggagaagcacuuacacagcaaaaucugcugaguuucugaauugucuccuuagu

SEQ ID NO: 4098628 - RNA, 64 nt, Human
acuaguauucuuggucuuguauuuauuguucucugccaaguuuugcagggcuugaauauuaugu

SEQ ID NO: 4098629 - RNA, 74 nt, Human
acuaguuuucaauugacuuuggaagaaagauuuuugaaucauuucauucauguguuaaaggugaagucucuagu

SEQ ID NO: 4098630 - RNA, 66 nt, Human
acuauaucuucuuggguuguuauaaauauguaaaguaaucaugacagaguccagaaguaguguggu

SEQ ID NO: 4098631 - RNA, 61 nt, Human
acuauaugaaauugccauuuuguagcucaaagauguucaaauaccagcaauuucauguggu

SEQ ID NO: 4098632 - RNA, 104 nt, Human
acuaucagucucuaggaugggcccagcauuccugcaccugccccugcugcccuugaagcuguguggacugguugaggcccugaaacuucuuggggacagauagu

SEQ ID NO: 4098633 - RNA, 67 nt, Human
acuaugaagcagcaaguauaggacaggguaaacuccacuucaugaacuuugacuuguuguuuuuugu

SEQ ID NO: 4098634 - RNA, 63 nt, Human
acuaugaagugcaagcugcuuuguuucuucuugguguacauucagcaucuugcaucuucaagu

SEQ ID NO: 4098635 - RNA, 83 nt, Human
acuaugaaugcaagucacacauuucuuccauuguagcuucucauaaagagcuagagacuguacguggcaaguaucuaaguagu

SEQ ID NO: 4098636 - RNA, 81 nt, Human
acuaugacccuuuagagaugucccaaaaugaaggaagaguuauccauuauugaauuggaacuaucuccagggagauguagu

SEQ ID NO: 4098637 - RNA, 98 nt, Human
acuaugaugauugggguucaggagagauuuguuuaagaugcuuaagacaaaaccagaaaaucucuacccgaugguuugugauaccuguaauccguagu

SEQ ID NO: 4098638 - RNA, 68 nt, Human
acuauguuggccaggcuggucuggaacgccugaccucaagugauccguccgccucggccuuccaaagu

SEQ ID NO: 4098639 - RNA, 67 nt, Human
acuauucagauauaccaguauuuguauuuagauauucccauuuagauggcugguguucugagcuagu

SEQ ID NO: 4098640 - RNA, 92 nt, Human
acuauugugcuaaccauggauugauuucauuaugaauuuaaaaguuauaaauuuagaaccauaaugaaucaaugaauaauuggccgaugugu

SEQ ID NO: 4098641 - RNA, 90 nt, Human
acuauuuucaaagucucugagagcauuuuauuuaccuauaagccagaacacuaaaacuuaaggagcagaaugcuuggaccaugagauggu

SEQ ID NO: 4098642 - RNA, 66 nt, Human
acucaaaagcagggcuagaccaagaagagccucuagagcucuuuuuuugcccuuguuuccuugggu

SEQ ID NO: 4098643 - RNA, 56 nt, Human
acucaagguguggcccuagggacccccgccuugccccugugggccucacuuggggu

SEQ ID NO: 4098644 - RNA, 105 nt, Human
acucacaguccauggugugacugagcuguggcagcagccguggcauuggccuugcaacagugucagggcaugcgguccagccuuucuugugauuuggcucugagu

SEQ ID NO: 4098645 - RNA, 95 nt, Human
acucacggcgugucccucugaccagguggacggcgaguacagguaccgcugcggcacuugugagaagaccuuccgcaucgagagcgcgcuggagu

SEQ ID NO: 4098646 - RNA, 55 nt, Human
acucagaguuugcguuccauacgccguuccacggcucgaagcaacaguucugagu

SEQ ID NO: 4098647 - RNA, 72 nt, Human
acucagauccauggcuuugcuucaguucuucucacccuuggugcuucuggcauccagccaugugauuuuagu

SEQ ID NO: 4098648 - RNA, 78 nt, Human
acucagcaccaguucugucuccucuuuucagccgccuucucucuagcuacugaggggaaaagucaggaugaagcgggu

SEQ ID NO: 4098649 - RNA, 60 nt, Human
acucagcuggcugcaugaugccaaaaugacuccuugcuuuggcuaauucagucagcuggu

SEQ ID NO: 4098650 - RNA, 84 nt, Human
acucaggcacuugauaucaagauuauuagggucaugauuguguuuaagacccuaagaccucuugaugcuuuuacaagaaugggu

SEQ ID NO: 4098651 - RNA, 72 nt, Human
acucaggccucccaggcacagggaggagccacagaggcucucggcuccucccgaagccggcugggccugggu

SEQ ID NO: 4098652 - RNA, 68 nt, Human
acucaggccugugugcaggacugugcaccagucucggagguguggauggcccugcacacagguagggu

SEQ ID NO: 4098653 - RNA, 118 nt, Human
acucauuacuccgucaaggauuuggcauuucaaucgaugggaaaugaugugugaucauucuaauuuauuauacaucauuucccaucaaucgacgaacuaaagccuugacguaauaagu

SEQ ID NO: 4098654 - RNA, 79 nt, Human
acgauuauacuaauagcuauuauauugaaaaguuacuauaugucuggcaauaugcaagcuauuaaguauguuuaauugu

SEQ ID NO: 4098655 - RNA, 78 nt, Human
acgcggagcgcacugugggccugucguggguggggccagcagcacaugcaugccuggcucacagagcagccuuugggu

SEQ ID NO: 4098656 - RNA, 57 nt, Human
acgcggcaucaucuugauuuauggacugcacuuccuugagcucaggaagagcugagu

SEQ ID NO: 4098657 - RNA, 84 nt, Human
acgcgugcacauauacuguguuaaauacagagauggguggucgcuuaccuguguguuugauacauaauaguauuuggucaaagu

SEQ ID NO: 4098658 - RNA, 56 nt, Human
acgcuugcagaggcuguuccagauggguaaaauuagaugucuccucaugcaagugu

SEQ ID NO: 4098659 - RNA, 86 nt, Human
acggaaaaucuuaugggucuaucuagaaagcuguguggaugugauugugaaucuccacacacauuucuaugugcauuacccaccgu

SEQ ID NO: 4098660 - RNA, 127 nt, Human
acggaacaccaccaggcucgucuuuuugcgucaauucacccaauagcuguuugaaguccaagaugggcuuccaggggcugugggcugaggaagaggcucuggggcaaggcuuggugggaugaacagu

SEQ ID NO: 4098661 - RNA, 79 nt, Human
acggagaugaugcaacagucaguacauccgggaaaagcacuuaugguagcucuguguacuauuguugcaauuuuucugu

SEQ ID NO: 4098662 - RNA, 89 nt, Human
acggaguuucugggagcaggcagggccgugucuguuacugcccaacccaggguagccccggacggaguuugccggguucccugcucugu

SEQ ID NO: 4098663 - RNA, 78 nt, Human
acggauggucucugcaggccaggcucaaagggccucccacaccuucccugggcacuggccuggacaggacagguccgu

SEQ ID NO: 4098664 - RNA, 128 nt, Human
acggauuguggcucaccuaagcagggaagccgauuuggaacuuaaacaagcucccaaguugugaucagucgagcuuggcaagcacuguuugagagaguaggcuucccgcaagcaggagccgguuuugu

SEQ ID NO: 4098665 - RNA, 66 nt, Human
acggcacagggugauguugcaguucccacacauugucacugaucugcuggcucgcccuguuggugu

SEQ ID NO: 4098666 - RNA, 93 nt, Human
acggcagguaggaaggcgggagcuggaggcagugcugaggucucggugucagggggcaggacucaccuacuagcagcacuucuuacuagcugu

SEQ ID NO: 4098667 - RNA, 69 nt, Human
acgggaccuuggugacuguuuccucaucugaaaaugagcagagugggacacgggcgcugucuguccugu

SEQ ID NO: 4098668 - RNA, 65 nt, Human
acgggagagucugguagagcagcaagcccuacuuccuggagcuguuguugccacauuguuauagu

SEQ ID NO: 4098669 - RNA, 94 nt, Human
acgggaggucagagggcugccuggcgcaguuucucugcugccuggauugaccaugaggacaaggacuagcugugcccagcccccugcuucccgu

SEQ ID NO: 4098670 - RNA, 82 nt, Human
acggggauccuugcauggcccugggucuagguuaugugcuuuccacacagaagcacccugcacucccagccauagaccuugu

SEQ ID NO: 4098671 - RNA, 63 nt, Human
acguagaaauaguuagcuuaguucuguauuauguuugaaauagaauuaacuagcuacugaugu

SEQ ID NO: 4098672 - RNA, 55 nt, Human
acguagcccauggcucaguauuuucugcucaaaugcuggcuccucgaggcuucgu

SEQ ID NO: 4098673 - RNA, 87 nt, Human
acguauaaaagcaugcaaguauucacaggcuucccuuugagugguuucaaaggagaauuuggcuugugaugcucuaacaugaugcgu

SEQ ID NO: 4098674 - RNA, 58 nt, Human
acgucaccaucuacagcuccaaaccuccucuggggaguucacaugaggaugaugaugu

SEQ ID NO: 4098675 - RNA, 86 nt, Human
acgucauaauauuuuaccacuguguaugcuagugagaugauuuacucacauugcauguguaugguaggaauauuaaauaaugaugu

SEQ ID NO: 4098676 - RNA, 80 nt, Human
acguuacuuccuggaggaauaaguuuuccacagaaacauuuugcauaauuggaaaacuucucuugagugagguauuaugu

SEQ ID NO: 4098677 - RNA, 104 nt, Human
acguuuauuagaagaaaaugcagauuccugaaacuuccugcagaccccaugagugacaaucucagggagauggaguuccagaaucugcuuuuuuucauagaugu

SEQ ID NO: 4098678 - RNA, 78 nt, Human
acguuucaacaucuccugcuuuuagauuuugccuuguacuauggcaagccagauuccuuaagcacagcuuugaaaggu

SEQ ID NO: 4098679 - RNA, 82 nt, Human
acucugucagcugugcaaggucacuguccucuacagaguagaacaucgacacugagaaagugaccugccaaggccacagagu

SEQ ID NO: 4098680 - RNA, 57 nt, Human
acucugugccaggcacuuugggguaugcuauagacaaagaaguguaugccacagcgu

SEQ ID NO: 4098681 - RNA, 56 nt, Human
acucugugccuagcucaguauaccugaagaauguaagcugggagggagcccagagu

SEQ ID NO: 4098682 - RNA, 59 nt, Human
acucugugcuucuuacucuggagcugcuuacuuggagcugccccaugagaggcaggugu

SEQ ID NO: 4098683 - RNA, 58 nt, Human
acucuuaugggaacaaggauuagaggagguauuaauucuuccuugugccuguaagugu

SEQ ID NO: 4098684 - RNA, 60 nt, Human
acucuucauccuccuagagagcauggcaccucugucagcaccauggguagugaugugggu

SEQ ID NO: 4098685 - RNA, 62 nt, Human
acucuugagcaucuaugacugaagacaucaacaagaaaucucacagcaucauugcucauggu

SEQ ID NO: 4098686 - RNA, 75 nt, Human
acucuuggcagcuuuuggaggagccagacuauuaauacuuagcccagggcuugggaagcuguuugcacuuagagu

SEQ ID NO: 4098687 - RNA, 64 nt, Human
acucuuuaaaggcaggauguucaccuguuguacucagugauguauccuuagcacuuagaagagu

SEQ ID NO: 4098688 - RNA, 55 nt, Human
acucuuuacuuaaacucuaaguugcuaaccaacuaaugaaguuuggguugagagu

SEQ ID NO: 4098689 - RNA, 63 nt, Human
acucuuuauuugggcauagaaauuaaugacgcagaccguuuuauuucucccaagugcaagggu

SEQ ID NO: 4098690 - RNA, 75 nt, Human
acugaaauaaacguauuuggaagacagugaaacagcacuucacaagugaacauuuucuugcaaauugauuucagu

SEQ ID NO: 4098691 - RNA, 60 nt, Human
acugaaauauuuagaagugaagagucaugauuuuugcaauuuacucuuaaaugauucagu

SEQ ID NO: 4098692 - RNA, 62 nt, Human
acugaaaucuguuuccaauacuugcuaugaaaaauccauagaguaucugaauagguuugggu

SEQ ID NO: 4098693 - RNA, 55 nt, Human
acugaacagccuuucaaacuuagcuuugacagaaugguuuugaaaggaugucagu

SEQ ID NO: 4098694 - RNA, 86 nt, Human
acugaacuauuagguuggugcaaaaggaauugugauuuuugccauuaagaaaucgcaauuacuuuugcaccaaccuaauauauagu

SEQ ID NO: 4098695 - RNA, 130 nt, Human
acugaauaauuucauacuuaaguguuggguuaagucacuauguaauaucuauacagucaaaucaauaauuggaauguauagauguuauguaaugacuuaacccaacacuuaaauaaugaaauauuucugu

SEQ ID NO: 4098696 - RNA, 107 nt, Human
acugaaugauuuauuugcaacuuguuaucugguauaguggggaagagccacuuaugucucuuuaagccaagauauauuuaagauaacaauaaagauaaaauaucagu

SEQ ID NO: 4098697 - RNA, 55 nt, Human
acugaaugcuccaaggcugcuucuucacgaagucccagggccuuggggccucagu

SEQ ID NO: 4098698 - RNA, 57 nt, Human
acugacaaauauagcuucgucuuaaaagauucuuaagagggagcuuuauuuuucugu

SEQ ID NO: 4098699 - RNA, 56 nt, Human
acugacaguugguuuggugaugucuggacgcucuaaaucaucuuuacaaugucagu

SEQ ID NO: 4098700 - RNA, 80 nt, Human
acugaccuccagauggauccacuuucacuuuuacuuuccauuuauguagaauaugugguaggaucuggaugggcgucugu

SEQ ID NO: 4098701 - RNA, 55 nt, Human
acugacucacaauacugcaauuugagaaugcuauaugcagaauccugugaucagu

SEQ ID NO: 4098702 - RNA, 71 nt, Human
acugacuuagcagguuucuggcucuuggcucuugaggacaaggcccaaggaugagaccuuguugaaaaagu

SEQ ID NO: 4098703 - RNA, 61 nt, Human
acugagaaacugaauauuuaacggggccuauugcucugaaaaaacucagauuucucuuagu

SEQ ID NO: 4098704 - RNA, 60 nt, Human
acugagacuaaccgaggagguuaugguuacucuucugccugcuccuucccugguuucugu

SEQ ID NO: 4098705 - RNA, 57 nt, Human
acugagagaauauuugcaacguuacucugcucugauaacucugcuuguucucugagu

SEQ ID NO: 4098706 - RNA, 77 nt, Human
acugagagugaugauggaggcaccacuggcugcccgcuaucaccagcaggcaacuggggcuuucuucccaccuuagu

SEQ ID NO: 4098707 - RNA, 72 nt, Human
acugagcagauauaguggcuugccuggggcucaauccuccugucuucauugcuauucacuguacugcucagu

SEQ ID NO: 4098708 - RNA, 60 nt, Human
acugagcaguagauuuucuguugugauuuuauuuagcauauguagaaacugaggcucagu

SEQ ID NO: 4098709 - RNA, 84 nt, Human
acugagcugcacagcgagccugggagaugguugugccgugcucccacagcacagccagcaucugagggaugauggcggacgagu

SEQ ID NO: 4098710 - RNA, 94 nt, Human
acugaggaggcacugcaaguuuagcuaacuggcccaaggucacacagcugguagaugguggggcugagacuugaacccagucugccuccacagu

SEQ ID NO: 4098711 - RNA, 77 nt, Human
acugaggcuuaaagaucuuaggaagauuuuccaaggaaacaacuggagagugcuagagcugagauuugaacuucagu

SEQ ID NO: 4098712 - RNA, 63 nt, Human
acugagggccuugacaguuaagagaccuuccaaaggucacacaacugucagaggcaaaucagu

SEQ ID NO: 4098713 - RNA, 73 nt, Human
acucagacucagaagcagccucauucucuuuucuacuuguacuggagauugauaacuuuaauuugaucugagu

SEQ ID NO: 4098714 - RNA, 61 nt, Human
acucagaggaaaguugagauugcccuagacaccuugggaguuggaaggcuauucucugggu

SEQ ID NO: 4098715 - RNA, 60 nt, Human
acucagcuugcacacaucaaugaccuuuggggauauuguucacaccugugcaguuugagu

SEQ ID NO: 4098716 - RNA, 64 nt, Human
acucaggaugcagugggacccaggggagggacacugagccucacccucugggcugcaucuuggu

SEQ ID NO: 4098717 - RNA, 81 nt, Human
acucaggcuccauagguaaugagcugagauuacaugauuuauugcuuucaguuugucggccuuggacuguucugccugugu

SEQ ID NO: 4098718 - RNA, 128 nt, Human
acucaggcuggccccuggaccugcaccugcuccggggagggcaucaaucaggccuggaccacaccaggaguggcuggugaccuucugcggguuggugcuagcauugccuggggcccaauccccugagu

SEQ ID NO: 4098719 - RNA, 85 nt, Human
acucaggugcuggcuaugugguuagacauaagaauuaugugugauagacguaugaauuaugguacuaugaagccaaagcuagggu

SEQ ID NO: 4098720 - RNA, 67 nt, Human
acucaguaaauguuuagcaucaguugucuuaauugauacuugagguuguauaaauauuuugaugagu

SEQ ID NO: 4098721 - RNA, 69 nt, Human
acucauacauauguaaaggcuaauggaguuguaaauguaacuuuugaggacuuuauuguauguaugcgu

SEQ ID NO: 4098722 - RNA, 57 nt, Human
acucaugagaacagagagugagguaguacauucuuacauucuguauuuuuauagagu

SEQ ID NO: 4098723 - RNA, 112 nt, Human
acucauugaacauugaauacucucagcucagagauaaucaagagacaguucauucuugagagugcagguuuucagaauguucugagaaagagugaaugauuuuaaggugagu

SEQ ID NO: 4098724 - RNA, 64 nt, Human
acucauugcuaucuuuagauugcagucucaagguccuuccugagcugugcuaagugaaaugagu

SEQ ID NO: 4098725 - RNA, 66 nt, Human
acuccacugauucaagaauuaacguacagaaaaagauucugucucuuuguucugugagucgggggu

SEQ ID NO: 4098726 - RNA, 67 nt, Human
acuccauacagagucauucauuguccaguacguuaguggaugauguauauuuugcaguuaauggagu

SEQ ID NO: 4098727 - RNA, 69 nt, Human
acuccaugagguucagcugcugccugguacauguggucaccugcagcuucuucagcccuacaugugagu

SEQ ID NO: 4098728 - RNA, 71 nt, Human
acuccccagucccugugagaaaugaagcagguucucugucagcuuucuuuacacuuacaggagcuggaagu

SEQ ID NO: 4098729 - RNA, 93 nt, Human
acuccccugugacccguuucuggcuagcaccucagcucagaaggcucuuauuucuugguuugccuggcaagagauggguucaccaucuggagu

SEQ ID NO: 4098730 - RNA, 71 nt, Human
acucccugcaagauuuuccaugucaaccuccaucuaaaugauaucucucggaauauuuuucagaagggagu

SEQ ID NO: 4098731 - RNA, 57 nt, Human
acucccugggccucggagcacaggagacauuuguacucuugccaucugagccugagu

SEQ ID NO: 4098732 - RNA, 59 nt, Human
acuccuaacccaaccucucaccaaaagacagccuggugagcagaauaaggguugagagu

SEQ ID NO: 4098733 - RNA, 62 nt, Human
acuccuagaggccccaugggauggcggugcagacagcaccuucuccuggggcccuccugggu

SEQ ID NO: 4098734 - RNA, 96 nt, Human
acuccuauaaagcagaguuucucaacaucagcacuauugauacuuuaggcugaauaauucuuuguugugggaacuguccuaugcauuguaggaugu

SEQ ID NO: 4098735 - RNA, 55 nt, Human
acuccugccuuaagagauuuacaagcagagaaguagcuaaaauucaaggcagggu

SEQ ID NO: 4098736 - RNA, 58 nt, Human
acuccuggccauccagccuggggaaguuacugcuucacuuugcaaauggcacgggagu

SEQ ID NO: 4098737 - RNA, 67 nt, Human
acuccuggggcugccaucacaguguaaguaacaaauaaacaagauggcugguuugagcuuuagcagu

SEQ ID NO: 4098738 - RNA, 69 nt, Human
acuccuguguggcugggagguuaccagauagccccgucccgucccuccacccagccuucacacaggagu

SEQ ID NO: 4098739 - RNA, 100 nt, Human
acuccuuuggucaaugaugcucuuucuuuugcugaaggcuugacauacaugaauaugcagcuuccauaagagauggagaugacgaucauaugagaggagu

SEQ ID NO: 4098740 - RNA, 59 nt, Human
acucggcagccugagaguucacggggggccagccugccuuggacacagcccuguugagu

SEQ ID NO: 4098741 - RNA, 73 nt, Human
acucgucuuuuugcuuuuaauuucucuagaaugaguggacucagaaugguggcaaaagaggcaaagugagagu

SEQ ID NO: 4098742 - RNA, 59 nt, Human
acucuaaauagccucuuaaacaccaaaggaauacagggacagagguuaacacuuagagu

SEQ ID NO: 4098743 - RNA, 86 nt, Human
acucuaagagcuaauguuucuauaaagaaguuuggggcuccacacaaaagccuuaucauucuucaaagaggcagaguuuuuugagu

SEQ ID NO: 4098744 - RNA, 85 nt, Human
acucuaagucugugugaguuuagguucaugaacgaguuuccccagaacuuaaucaacugugcacuaaauaacauagacuuuuagu

SEQ ID NO: 4098745 - RNA, 55 nt, Human
acucuauuuucucauuuugcauguccuguagcugugcucuaugaggauauagggu

SEQ ID NO: 4098746 - RNA, 106 nt, Human
acucuauuuuuacuaaaacaagccauacaugugucccugauuuauuugcacacauccuuuugcaauauauaucuacguguguguguuuguguguguguauguaggu

SEQ ID NO: 4098747 - RNA, 63 nt, Human
acucuccaagaggcucacugggcaaagacucagguuaguucuccuggccuugagcuggagggu

SEQ ID NO: 4098748 - RNA, 59 nt, Human
acucucccugcuauccacuucccuccaccaucccugggaaaaggacauguuggaguagu

SEQ ID NO: 4098749 - RNA, 67 nt, Human
acucucccuuuguacucugcacaauucuucuggaauauagucuuuguguucagucaaggaucagagu

SEQ ID NO: 4098750 - RNA, 79 nt, Human
acucucuuugaagagauaaaguggcuuuauuuucucuccaacucaaauaaaguguauucuuugucaucuguuaguaggu

SEQ ID NO: 4098751 - RNA, 59 nt, Human
acucugagaacugagauucccuuuucuuacugaauaaacaugucucaaguuuuuauggu

SEQ ID NO: 4098752 - RNA, 85 nt, Human
acucugcccucuguaugggauuuacugguuccuccguaacaaacaacauuguuucaaucagcaaaugcuuacucagggccuaagu

SEQ ID NO: 4098753 - RNA, 56 nt, Human
acucuggcuuuauuuucaucaucuucauuuuauaggugaagaaauuaaagcuaagu

SEQ ID NO: 4098754 - RNA, 63 nt, Human
acucugggaaguggagacuucaguggcaggacuuuuguggcaugauauuuaucuucccugggu

SEQ ID NO: 4098755 - RNA, 75 nt, Human
acucuguaucccucucaaauuguuccuacuucaaggugaaaucagugaaauguuuugagagcccuggugcagagu

SEQ ID NO: 4098756 - RNA, 65 nt, Human
acucugucaccaggccagagugcaguggcaccaucuuggcccacugcaaccucugccuccagggu

SEQ ID NO: 4098757 - RNA, 111 nt, Human
accuacucauuuuaguauugauuuuauauuccaggaugacauaaacaauuggaaucuucccugugacccagaugcauucuggaaaguagcaauuuguguaaaaugagaggu

SEQ ID NO: 4098758 - RNA, 74 nt, Human
accuaggacaaaggaccagaucuggaaaguuccuguccuugaagagcuuucacaaacaacuguuuguucugggu

SEQ ID NO: 4098759 - RNA, 61 nt, Human
accuaggacgguuagugaugugggaaaugauaaaucugacacauuuuucccguucugaggu

SEQ ID NO: 4098760 - RNA, 76 nt, Human
accuaggauucuugggaugggugucacaauaauacgaaccaguguacuucugaccuuuucaucaagagaacugggu

SEQ ID NO: 4098761 - RNA, 86 nt, Human
accuaggucacacugugggaggaacacagccagaacccaaacauucuggguccuucuucacugcuuuuuccaggguugggcuaggu

SEQ ID NO: 4098762 - RNA, 78 nt, Human
accuauagagagaucucuaagcucuggguuaugcagcccacacugcccagaggugcuucagaggugcuuccuauuugu

SEQ ID NO: 4098763 - RNA, 61 nt, Human
accucacaagucucugucagcucugaaaccccauggaccucugagagagagugugucaggu

SEQ ID NO: 4098764 - RNA, 99 nt, Human
accucaccauuucuuucuugguuuugcuugaauacauuuguuucuugaaaaugaagaaaagauuguuagggagaauguggugaaaguaagugguuaggu

SEQ ID NO: 4098765 - RNA, 69 nt, Human
accucagcaguaagugaagacuaguuugaagcaaaugcuuauaaaaucaguacacuuuauuuugcaggu

SEQ ID NO: 4098766 - RNA, 71 nt, Human
accucaguucucucaugccugcccuaagucaguugacaucagugcaguggcauugaggagaaaugagaggu

SEQ ID NO: 4098767 - RNA, 58 nt, Human
accucauaguuuucgugggucagaacuuugaguucuggcucagggucucuuaugaagu

SEQ ID NO: 4098768 - RNA, 99 nt, Human
accucauauuuugaaaaaaggaggggcaaacucaauuauuacaaauuuauuuaaguuugcaaaaugucuuguguuaguaccuucugagucaaaacaggu

SEQ ID NO: 4098769 - RNA, 76 nt, Human
accuccaaauucuuuuugaaagggugauuuggcuuguguucacaacagcugcuuuuucaaaauauaauuuucaggu

SEQ ID NO: 4098770 - RNA, 95 nt, Human
accuccacccugggccuugauauaagagcuguagcuuccuagagcccuaaggagggggaguagcaggcacagccucaagaacuggggugggaggu

SEQ ID NO: 4098771 - RNA, 77 nt, Human
accucccaaagugcaaggauuacaggcaugagccacuaugcccaagccaugccucguacuuugcuauuuuuaaaagu

SEQ ID NO: 4098772 - RNA, 70 nt, Human
accuccugguaaacaaacucucaggccagucucuuaaagagacaguauguguuuguugccaucuggaugu

SEQ ID NO: 4098773 - RNA, 81 nt, Human
accucgguuuuagcccugcugugaugugaaguauuaugagguuauaccacaucccagccaagggcauuacccguaagaggu

SEQ ID NO: 4098774 - RNA, 75 nt, Human
acugauaagaaauggagaaugauauuccaucauuuggaaaaugauagaauauugggcucucugucuaaccucagu

SEQ ID NO: 4098775 - RNA, 97 nt, Human
acugaugcaauuccuucauugaguuacugccugggccacugccugauuaguuugcuguggcauugccuagaagcaguuaaugaauugcuuguucagu

SEQ ID NO: 4098776 - RNA, 63 nt, Human
acugcaacccacaggugucuauaccugacagguauaaacuaugacauccaugugaguggcagu

SEQ ID NO: 4098777 - RNA, 64 nt, Human
acugcaauuacugggagguuuuauagacaccauaaaauuguaaaacugcagaggugauuucagu

SEQ ID NO: 4098778 - RNA, 94 nt, Human
acugcauccucuucaggcuagaagccuccacgauaggguuuuaguacucacuggagcucagcgggugguuucuggcugucaggauaaaggcagu

SEQ ID NO: 4098779 - RNA, 64 nt, Human
acugcauuaggcuaaugcagugguccagguaaagaaaacugggcuuggaguaggcugaugaagu

SEQ ID NO: 4098780 - RNA, 114 nt, Human
acugcauugccaaagucacugagaaugcaggaguaucuauacauuaaacuaauacuuacugaacauaguaugugcaguuugcucuuaacauucacagacaauaaaaagaugagu

SEQ ID NO: 4098781 - RNA, 57 nt, Human
acugccaaugguaguuugaugggaguaguauugaaucuuucaaauacuuugggcagu

SEQ ID NO: 4098782 - RNA, 69 nt, Human
acugccagacugucuuccaaaguggcuguaccauuuugcaguacugagaggugacagcgugcuggcagu

SEQ ID NO: 4098783 - RNA, 57 nt, Human
acugccauuuugaauaauuacugccaaaaauaugggcuuaaucuucaacuugguagu

SEQ ID NO: 4098784 - RNA, 78 nt, Human
acugccucaacagcuagaaauauagagaacuugcaaacuucuuuguuucugucuuugcauuuuaugccguuauguagu

SEQ ID NO: 4098785 - RNA, 60 nt, Human
acugccucugccaacgccccugcacugggcagcccuggguaccuggcuugggggaggagu

SEQ ID NO: 4098786 - RNA, 75 nt, Human
acugccuugauucaugcugaugugaucgguuucaccccauugccucugcaccaucaguuugaauguuagcacagu

SEQ ID NO: 4098787 - RNA, 61 nt, Human
acugccuuuguaacucuuuuauugucuaguaauuuggaagaagaggagcacaaaggaaugu

SEQ ID NO: 4098788 - RNA, 83 nt, Human
acugcuaggcugugcuucagagucagugcuggacucaaacuaggcaguaugcaguaccuacuuugacagcacugaauaguagu

SEQ ID NO: 4098789 - RNA, 93 nt, Human
acugcucugcuccaggcuuggcacaugagucacucacuaagucuuuggagacaaauuuacuggaaaaacuaugagccaggcccucagggcagu

SEQ ID NO: 4098790 - RNA, 57 nt, Human
acugcucugugguuggaagccugaaugugaaucgcugcaaccagaccacagggcagu

SEQ ID NO: 4098791 - RNA, 105 nt, Human
acugcugcaaaaguggcacucuuugauucucauguuugagguucuaauuacuaccucaugcaggacuuacaagagaucagccaugcugcuuacauuguguguagu

SEQ ID NO: 4098792 - RNA, 62 nt, Human
acugcuucaacugagcucuaucuggccugcaaucgcuagauaugaugagucacuugaguggu

SEQ ID NO: 4098793 - RNA, 115 nt, Human
acugcuucuggcccagucuccuguguacuuuuguuucuaagccucggaagcuuagggaucuuuuguggcuggaugauggcaaggugcauggaauauagaaagaggucaggagagu

SEQ ID NO: 4098794 - RNA, 59 nt, Human
acugcuuuaaaaaagcaagcuuuugaggguguacuuuaaagcagcuuaauaaaguaugu

SEQ ID NO: 4098795 - RNA, 71 nt, Human
acugcuuucagugcuggaggggugcuugcaggagcauuguguaauucuaauccagagcuggugagagcggu

SEQ ID NO: 4098796 - RNA, 75 nt, Human
acugcuuucugcuuucuauccuugucacaguacagaaacagcuauugacaaggauaugaauggcuugauaauagu

SEQ ID NO: 4098797 - RNA, 63 nt, Human
acugcuuuugaucucuucuguacuagcuaagauaugaugucaagaacugauuaaauaagcagu

SEQ ID NO: 4098798 - RNA, 129 nt, Human
acuggaauuuuaauuuucaguguuggugguacagagauguggaugagggauuguuuuagcauaagaaauuaaaugccugucaacauagucugcagaauuaacauagaaaaaaaucauuuccagcauuuu

SEQ ID NO: 4098799 - RNA, 60 nt, Human
acuggacgucaauuaauauucuuccaaaggacuggcaggaagccaugguggacgucuagu

SEQ ID NO: 4098800 - RNA, 68 nt, Human
acuggagauagcggaacaagaaguuguggggugccuggguggucccccugcaucugucccucaccagu

SEQ ID NO: 4098801 - RNA, 57 nt, Human
acuggagguggaucuucaugaccuuaacaguaggaggucauggaaucucacucuagu

SEQ ID NO: 4098802 - RNA, 64 nt, Human
acuggauacugauuaguugagaaagcaguucaauagcaugcuugaaagccaauuugugcacagu

SEQ ID NO: 4098803 - RNA, 65 nt, Human
acuggauguuagggauuuuauuguaucacuuccaaaauguauauguugaaguccuaaccuccagu

SEQ ID NO: 4098804 - RNA, 74 nt, Human
acuggauucuacuucugcuuccauugcacaccugguuacucccaaugucaagggaagcaggaaaugaauguagu

SEQ ID NO: 4098805 - RNA, 56 nt, Human
acuggcagcauuaacagagagcaguagaagcaucaugccccucccagucugccagu

SEQ ID NO: 4098806 - RNA, 71 nt, Human
acuggccacugauuccuccccugcaggucuggaagacuauaaacagaagaaggggugagugguugaccagu

SEQ ID NO: 4098807 - RNA, 58 nt, Human
acuggccagguucaaaauacagggugcaucuuuacauaaaugauauagucuggccagu

SEQ ID NO: 4098808 - RNA, 74 nt, Human
acuggcccagcucacugcagccuuggacacauauauuggcaauggcuguuuauaauaugcagugagcagccggu

SEQ ID NO: 4098809 - RNA, 66 nt, Human
acuggccugccucccggcuucuuucuccaagguaaugaaaaagccaagcugggaaggcaggcuggu

SEQ ID NO: 4098810 - RNA, 80 nt, Human
acuggcgaccaggugaccuuuguccuaaguuucaagauucuggcucuagugucaacuuagccacauggucaucauccagu

SEQ ID NO: 4098811 - RNA, 58 nt, Human
acuggcugguuaugaggaguggcagcgcuugcuggcagcccuuucuggccagcucagu

SEQ ID NO: 4098812 - RNA, 94 nt, Human
acuggcugucuucuguuuacccugaggcaggacauggacaacuguucucuacagaaaaugaaccaucugucucagaaaagcuaggacugcuggu

SEQ ID NO: 4098813 - RNA, 67 nt, Human
acugggagaguuuggaugaaacuauugaaugaaauuauuuuggggguuucuuucuggcucucacagu

SEQ ID NO: 4098814 - RNA, 60 nt, Human
acugggccaggggcuuuggagcaugcaaagauaagcagaacauagggucuuuugucuagu

SEQ ID NO: 4098815 - RNA, 64 nt, Human
acugggcggcuggguuccucucaggccuugggcaugugagagaugaaguuaguuguuccucggu

SEQ ID NO: 4098816 - RNA, 61 nt, Human
acugggcuguaaagagaggcaaugaugaacaauuuuaagaccaucagcuuuggaguccagu

SEQ ID NO: 4098817 - RNA, 66 nt, Human
acuggggccuugguacuguaaaccgagcagucaggguuccaaugcaguccaaggcugcuuuccagu

SEQ ID NO: 4098818 - RNA, 66 nt, Human
acuggguuuaggccaggcaggcccaggccugguuucgggccuggcgccgggcugccugucuuuggu

SEQ ID NO: 4098819 - RNA, 128 nt, Human
acugguagguuuucuuggucuggguggaguuuaucuaaaagcaugguuaaagacaguggguauuuuuuuaagcagucuugagccaucuuuauuuauauuauuuacaagcuaugaagucuuaagccagu

SEQ ID NO: 4098820 - RNA, 79 nt, Human
acuggucuguuuucucuucugugggauggcaguaacauaggcuuucuccucccaggguggccaggagaaauggaugagu

SEQ ID NO: 4098821 - RNA, 57 nt, Human
acugguuucccauuaucugcaggaucaaguccagacuuccugauaugguaaacuagu

SEQ ID NO: 4098822 - RNA, 57 nt, Human
acuguaaaguuacgaucaaguuguaaccacaauuuugcccuugaagaauuuugcagu

SEQ ID NO: 4098823 - RNA, 56 nt, Human
acuguaaccaguguggugagagaaacaauucuggucuaguccacaugguuaccugu

SEQ ID NO: 4098824 - RNA, 129 nt, Human
acuguaagcauuuuuccuuucauaauugagauuuuguugguuguguugaggaccaguccacagauaucucaauuuguacacaauucuuaacauacguaccaagaaucuaaaaagcuuauguguugcagu

SEQ ID NO: 4098825 - RNA, 73 nt, Human
acuguaaggagguugguggguuggauuggggcuuuuguggaacuaaauccaccccaucugcuauucuugcagu

SEQ ID NO: 4098826 - RNA, 63 nt, Human
acuguagcugccacuggaugcaaagcaguaccuguuuacuuuagauccagugaaucagccagu

SEQ ID NO: 4098827 - RNA, 92 nt, Human
acuguaggugggacuuaauaacauaauuagaucuuacucccaugaauagguuauaucuuaugggaaagauguaauuaaggucccuaaucagu

SEQ ID NO: 4098828 - RNA, 106 nt, Human
acuguauuaugggagagcaugugggaugggagauauugcuguggcugucuuugaaaauacaaucugucguguuuccccuuccuuucuguuuuccagcuacacuagu

SEQ ID NO: 4098829 - RNA, 109 nt, Human
acuguauucuuuaaggggaaugauuuuggugggggaauauauauauguaaaggauuuuucaugugucuaaucuacuaauauccuuuucuucuuucuuuuaaaauauagu

SEQ ID NO: 4098830 - RNA, 62 nt, Human
acugucacuacuauguguuugugguuuacuugucugcagccacauccuagagaagucacagu

SEQ ID NO: 4098831 - RNA, 100 nt, Human
agacaugcacacgccagggucucucccuguauuuucaggaauauggagaagccaucgucuuccugaaaauacagggagacccccugucgugugcaugucu

SEQ ID NO: 4098832 - RNA, 74 nt, Human
agacauuaugcugagugaaagaagcuagucacaaaaggcuacauauuauauaauuucauucauaugaaaugucu

SEQ ID NO: 4098833 - RNA, 76 nt, Human
agaccaaacacaagucucaacagcagccagcugccaugggccucacgcuguugggcugucaugagacuaguggucu

SEQ ID NO: 4098834 - RNA, 71 nt, Human
agaccaaagagagggauuugguuuauugcuagugcagaaguuaaaaaccaucuuccuuuccugaguggucu

SEQ ID NO: 4098835 - RNA, 79 nt, Human
agaccaaaugcucuggaguacgugaaauuugucuaucagcaaaucaacagacuaguuaaccuuucuccaggcagugucu

SEQ ID NO: 4098836 - RNA, 78 nt, Human
agaccaaguacaugcuaggaauuccagucaauuaaugguuauaauuuacaugcaacuaggagguucuuagcuuggucu

SEQ ID NO: 4098837 - RNA, 70 nt, Human
agaccaaguuucucuauuaggggcuagcuuuagagaagcaaguaggcugaagagaaagaaaaacuggucu

SEQ ID NO: 4098838 - RNA, 59 nt, Human
agaccacuggccuccugcagacuuucucuugauggggggugagggaggagugguggucu

SEQ ID NO: 4098839 - RNA, 64 nt, Human
agaccagaaggaaguuuauuuuagaagagauacugccucucuuucuuucucuuucucuggugcu

SEQ ID NO: 4098840 - RNA, 64 nt, Human
agaccaguuaguuuuauagcacaaaaucagaaggugagccagugugguaaagcugaguaggucu

SEQ ID NO: 4098841 - RNA, 81 nt, Human
agaccauaaauuguauauuccauuuguaugaaauauccagaauagguacaucuauagagacagaauguaaauuagugguuu

SEQ ID NO: 4098842 - RNA, 82 nt, Human
agaccaucugauaguguaaauuccaggcagguucuaaaucuguuucccaaggagcuuucuggauauaacauucaguccuucu

SEQ ID NO: 4098843 - RNA, 130 nt, Human
agaccaugagaggaagaagggguucucuaacgucugcucagugaaacaucaaauagugacuuuauuaguuaaugggauaauuguucaugggagaucauuagagagcccaaaucaaagaauuucuuaggau

SEQ ID NO: 4098844 - RNA, 72 nt, Human
agacccacagggacucgguugagugccccugguaucugcgaccagggcacccucucugcaguaccccggucu

SEQ ID NO: 4098845 - RNA, 80 nt, Human
agacccaggcugaucccagggagccccaauuccaugccuuuauuaucacaagggaggauggcucucggacauuuggguuu

SEQ ID NO: 4098846 - RNA, 69 nt, Human
agacccguccugccugagccccauucucucccuuucccaggauggcagcugaauggcuggaugggaucu

SEQ ID NO: 4098847 - RNA, 83 nt, Human
agaccuccaaucaauaggugauaugagcugggcuacaucauuagucagggcuaauuagaaucuaguucauucauuugagguuu

SEQ ID NO: 4098848 - RNA, 82 nt, Human
agaccuccuccuuccuggcuaggagagcugggcucugggcagcagaucccagggccgcucccacaguagaaggauggaggcu

SEQ ID NO: 4098849 - RNA, 72 nt, Human
agaccugggacagagugagcuuuggccaugcacagcgugucugaggacucucucucucuguccaggaggucu

SEQ ID NO: 4098850 - RNA, 56 nt, Human
agaccugguuuaucaccagcauuuauaaaaacagacguagggaaagaacuaggucu

SEQ ID NO: 4098851 - RNA, 63 nt, Human
agaccuugucuuuaagcccacacugaagagugaaaguauuucauguggaaaaggaucuggucu

SEQ ID NO: 4098852 - RNA, 57 nt, Human
agaccuuuucccacauuagguaacauucuuaguuucuagggaaugggaugaggaucu

SEQ ID NO: 4098853 - RNA, 81 nt, Human
agacgcuugccauuccuacuuugacuggguggagauguggaaaucuuguuauucagaggugaaguagggagggcaaguucu

SEQ ID NO: 4098854 - RNA, 78 nt, Human
agacuaaggcucagaacuacauggacauguuaagugucaaacgcuuggagccaaacugguccuggccuaggaaagucu

SEQ ID NO: 4098855 - RNA, 76 nt, Human
agacuagguuaugcuguauuugugucagauugcuuuguuuaaugacacaugauuaaugccaagcauagucuaguuu

SEQ ID NO: 4098856 - RNA, 61 nt, Human
agacucagaagguacagaagggaaguaucucccagccacccuguugcucucuccugaguuu

SEQ ID NO: 4098857 - RNA, 55 nt, Human
agacuccauggggaaaugaagguggcugaaaaacucugucaucuccauggaguuu

SEQ ID NO: 4098858 - RNA, 62 nt, Human
agacucuggcuuugguccccugugccugcaaugcaggcaacaaacaaccaagcucagccucu

SEQ ID NO: 4098859 - RNA, 78 nt, Human
agacugagauucuuucaugcaguugacaaggugucuucuccaaguacuuuaucuaccugcagauggagaucauggucu

SEQ ID NO: 4098860 - RNA, 130 nt, Human
agacugcaccaaaguggggagagaucaaaagaccccguuuucagacugaagauuccaaaccuguacuuggaacaacucuucuugagagauggguggcuagucugugugccucucugcaacugcugcuuau

SEQ ID NO: 4098861 - RNA, 66 nt, Human
agacugcauuaagaauuucugaggauguggcauuugaguugcaaucugaugguucauagugggucu

SEQ ID NO: 4098862 - RNA, 57 nt, Human
acucauggugaacaugucuacuucccuaaauaaauaguuuguaaguucauuaugagu

SEQ ID NO: 4098863 - RNA, 81 nt, Human
acuccaagauauuuguagaaucacucaaucuuaaaugaaaaaaucaaaaugaucaggaagaucuagcgaaugucucagagu

SEQ ID NO: 4098864 - RNA, 68 nt, Human
acuccaagggcuuugcuggggccccaagguuaauguugaaggggcuuucaaagacuuucccuuagagu

SEQ ID NO: 4098865 - RNA, 72 nt, Human
acuccaccucucgccaccggccacaccgcgccccaaaccggccuggaggucgcuagcgagcgggcuuggggu

SEQ ID NO: 4098866 - RNA, 65 nt, Human
acuccacucugggccaccgcugguguauccaagaucaggacaccagucccugggcaccagggagu

SEQ ID NO: 4098867 - RNA, 64 nt, Human
acuccagaaaggagacuucagaucuccuucuaaauucuagaagucuuuagucuccuucugaagu

SEQ ID NO: 4098868 - RNA, 62 nt, Human
acuccagguguauuuacugaaguaaaaaaaucacuuguauuuucuucagaugcuuuuggagu

SEQ ID NO: 4098869 - RNA, 73 nt, Human
acucccgcugacgcacugaaggcugguuaccgagugccagcugggggccagcuucgcgugcucuuccgggagu

SEQ ID NO: 4098870 - RNA, 58 nt, Human
acucccucuguguucucuagcucaauaaagucacccagcaaggcagaccagagugagu

SEQ ID NO: 4098871 - RNA, 65 nt, Human
acucccuugaaaguauaugcucaauuuugugggaauuagcuuauguguacuuuucugaggagagu

SEQ ID NO: 4098872 - RNA, 101 nt, Human
acucccuugcacauccaggcuaugugccugagugcugagcgggcacccucagguauccugggcugcacccucagccucugggacaccaagggcaagggggu

SEQ ID NO: 4098873 - RNA, 58 nt, Human
acuccgggguagauggcugggguucaauucuugacucugucacuuucugcuguggagu

SEQ ID NO: 4098874 - RNA, 59 nt, Human
acuccucccagcauuguacagaugaaagaaagaucauuucacaggcucagggagagagu

SEQ ID NO: 4098875 - RNA, 126 nt, Human
acuccugcuugauuuuacugucaacuuuaucuccagcguccagcccugucuaugacugaugaucuauaaauaucuuagaguaaauggcuaaugcaugagaaaguggcagacaaaaagaaaaggagu

SEQ ID NO: 4098876 - RNA, 70 nt, Human
acucggauggauauaauacaaccugcuaaguguccuagcacuuagcagguuguauuaucauuguccgugu

SEQ ID NO: 4098877 - RNA, 59 nt, Human
acucuaacuaauuaauaaagccaaguaguguguguuggcuauaggaaaaguguuagggu

SEQ ID NO: 4098878 - RNA, 124 nt, Human
acucuacaauuuagauuuuaauuagauaauuaacguaguguguuguggaaagagcccuggacugggguucuaguucccacauaguugccuuaaacuuucuacaaaccacuaaaccuucccgagu

SEQ ID NO: 4098879 - RNA, 77 nt, Human
acucuacuucugcagagaaaacuccuggguacuucuaauaagaaagauacacuggagcuuccugacaggaacagagu

SEQ ID NO: 4098880 - RNA, 77 nt, Human
acucuaugauguagcuuuuguuauuagccucauuucagguaaggaaacugaggcuuacaaagguaaagucuguaagu

SEQ ID NO: 4098881 - RNA, 63 nt, Human
acucucaguggauugacaugaaaaaggcugauugcuuuauaauuaucacaguccagugcaggu

SEQ ID NO: 4098882 - RNA, 76 nt, Human
acucucucuguccuaugaguacucacuaguuugucaaugaccuucuuagugugcagugcucaggguuagauacagu

SEQ ID NO: 4098883 - RNA, 61 nt, Human
acucucugggcaugccccaccagagcaauuacaggugauggagcugggcagcugggaaagu

SEQ ID NO: 4098884 - RNA, 61 nt, Human
acucugacuuccuuuucugauccaguugauaauugauccgaaacuugaaggaagugagugu

SEQ ID NO: 4098885 - RNA, 65 nt, Human
acucugcccuaggccucuggggcuccacugagaaacugagauuucacugaggucagggguagggu

SEQ ID NO: 4098886 - RNA, 76 nt, Human
acucugcuuguuacauguguguguguugcaugugugaauguacauauguacaagcacacaugugacauuugccagu

SEQ ID NO: 4098887 - RNA, 77 nt, Human
acucuggacugaggcugaagagggccuacgggaggccauauuauaacuucugugggcccuaggcaccuugucuuugu

SEQ ID NO: 4098888 - RNA, 60 nt, Human
acucugggcaggagaggugguuggaauugggaaaacuaaucuggcagcaguuuguugagu

SEQ ID NO: 4098889 - RNA, 113 nt, Human
acucugggggugggggcgcggggguacccagcagcaggccaggcccuccaagggacuggagggacuaguuggaugcuucugugucaccuugcaccccagaauuccuccagggu

SEQ ID NO: 4098890 - RNA, 59 nt, Human
acucuguaauuuucuuagauuuggagaaaagccggcucuagaacugacgauuucagagu

SEQ ID NO: 4098891 - RNA, 64 nt, Human
acucuguacucuagaggaaguggucaguagagaucaguugagaguuacauuucuaagacagagu

SEQ ID NO: 4098892 - RNA, 75 nt, Human
acucugugauccacucaugaauaucuggucuggcucugcguuccagucagacccuuuucugagaggaccacaagu

SEQ ID NO: 4098893 - RNA, 60 nt, Human
acucuucuagagcuggagcaaaugucacugcucuguguaccuucuccuccucuaggcagu

SEQ ID NO: 4098894 - RNA, 85 nt, Human
acucuucugcaccccaugcagauuguucauagacauggggcagcuccuccgaugccagaagagucugcagggauaccagaaaagu

SEQ ID NO: 4098895 - RNA, 63 nt, Human
acucuugaacugauuaagaauggaucauaaaauaaauuuacauucaugauacaguuuuagagu

SEQ ID NO: 4098896 - RNA, 56 nt, Human
acucuugcagauaccuugaaggauggaggcauaucugggguaaguugagcaagagu

SEQ ID NO: 4098897 - RNA, 94 nt, Human
acucuugugccugaaaauguuagugauacgaauugacacuuuaauguuguaugcuugguggggaucuuuuuaucacaaggcauuuuccaagagu

SEQ ID NO: 4098898 - RNA, 91 nt, Human
acucuuguuuuggauguauaguuuuagaaaauacucacuuuaaaaauguauuggauggauaguggugaaggcuguacaacgaaacaaaugu

SEQ ID NO: 4098899 - RNA, 62 nt, Human
acucuuuccaaugcauuuccaaugugcagugcacauguaucugaucugcaauuggaaaaugu

SEQ ID NO: 4098900 - RNA, 72 nt, Human
acucuuuucauccauaguuugguuggacuauauauucauauauuccuucuauucucuguggguaaggacagu

SEQ ID NO: 4098901 - RNA, 70 nt, Human
acugaaaaaugggagugugcauuugucuuuagagacauucucugaagauuaaauggcucccauauuuagu

SEQ ID NO: 4098902 - RNA, 88 nt, Human
acugaaaaucacuuguaaggaauucaauucaauuucuuuaaucuuugaacucaugaaauuaaugcaggugagguuauuuguuuucagu

SEQ ID NO: 4098903 - RNA, 57 nt, Human
acugaaaaucuugugagaucugugacagcaaggcucucagcagaaagcaaggucagu

SEQ ID NO: 4098904 - RNA, 79 nt, Human
acugaaagcacagggacuuuaggaauauguuaccuaaccuggcaacuuaauccuuucccugcugcuucuaaaagucagu

SEQ ID NO: 4098905 - RNA, 127 nt, Human
acugaaaggcguccaaauacccuuacaguuagauugucgagucguggcuuaggugcuugcuaacagccaggaauuggacaacacaucuaaaaggugcuuagggaugaggaugggccugacuuucagu

SEQ ID NO: 4098906 - RNA, 84 nt, Human
agagaugguaaaccuugcauauuuuugaaagcauuugaagaccucaaaucaacuguuuauguaaguaugcagcuuuuauucucu

SEQ ID NO: 4098907 - RNA, 72 nt, Human
agagauuaugagugucugcaagccaggaagagggcccucaccaagaacagaacuugcuggcauuugaucucu

SEQ ID NO: 4098908 - RNA, 66 nt, Human
agagauugcuagcuggcuuuaauaguugucaaaaguaauagaacuaauuuuuagcuagcauuuucu

SEQ ID NO: 4098909 - RNA, 77 nt, Human
agagauuguucaaugaugagaacuggaguaauuuaagaguaaacuucuaagacuuaguuuuaucuagaacacuuucu

SEQ ID NO: 4098910 - RNA, 67 nt, Human
agagauuuggaaauacgcguaggcagauuaggaugaaaaucugcucacguguauucuccauuuuuuu

SEQ ID NO: 4098911 - RNA, 81 nt, Human
agagcaacauuuugcuauuaggguccugucaucucauuacugcuugaugugauugacaacccugguaugagcagucugccu

SEQ ID NO: 4098912 - RNA, 91 nt, Human
agagcacuggucauaguuccuuggagaauccugguuauucauaaggcaagaauaugaauucucuuuccuggagcauagaccaugugccucu

SEQ ID NO: 4098913 - RNA, 85 nt, Human
agagcagaccaggagugcacagguggcugcccugucagccuuuuccgggaguggugguggcgcuugcaacaacugcucuggcuuu

SEQ ID NO: 4098914 - RNA, 72 nt, Human
agagcagcaggaaagacaucugagcauuuuguaguuaaagucaauauugcuuacgauuucuuccagugcucu

SEQ ID NO: 4098915 - RNA, 71 nt, Human
agagcagccccuccaggcccaagacugaugagucucagccaugaggcccagccuggggugugggggccuuu

SEQ ID NO: 4098916 - RNA, 79 nt, Human
agagcagcugaggcaguuugccaugccaggaggcuuuuccuucuuugauauuucuggagggcaugcugcugccugcucu

SEQ ID NO: 4098917 - RNA, 58 nt, Human
agagcagcuuugaucucacuggcaguuuguuuagaagccugagaucuggaguggcuuu

SEQ ID NO: 4098918 - RNA, 56 nt, Human
agagcaggugguagacuuaacucuuucuuggcugggaguaugauccacucugcucu

SEQ ID NO: 4098919 - RNA, 79 nt, Human
agagcaucccggcugacccugcaggucuggagugaaaagacccugcacuggacucuucagggcagugagcgggaucucu

SEQ ID NO: 4098920 - RNA, 79 nt, Human
agagcauccucgccuccccccacucacccauauuuuauugucaguucuuuugcaagggugaaggcagaggacauguuuu

SEQ ID NO: 4098921 - RNA, 78 nt, Human
agaaagggaaaacaagagaaugauguuugcaauccuaaacaacaaaaauauuuauuuucuuguuuuaaguuauuuucu

SEQ ID NO: 4098922 - RNA, 129 nt, Human
agaaagggcuaagagagaaaggccaggcuuuugaagacauuguauacagacuuagucagcuggacacuucucugcugggcugcugucaaguccuuccuguccuauuccucucacaaccauguccucucu

SEQ ID NO: 4098923 - RNA, 63 nt, Human
agaaagguauuguucccuaguuucuaggcuugcuucuagagagguuaguuugcaguacuuucu

SEQ ID NO: 4098924 - RNA, 65 nt, Human
agaaaguacucucauaacuugggcuggaaugaauauuucaugcucaucauuagagugacauuuuu

SEQ ID NO: 4098925 - RNA, 106 nt, Human
agaaagugggguaagaaagggcacauggcacaguuaaaguuguagaaaucaaauuacuaucauuuuuuguugccaaaacaaagucuuacauuuaaccccccuuucu

SEQ ID NO: 4098926 - RNA, 59 nt, Human
agaaaguuugacucucuagauagcaaccguccagguuucugucuugcugucagcuuucu

SEQ ID NO: 4098927 - RNA, 128 nt, Human
agaaauaaaccacuguagugggccaggagggaacaauaugaacagucauuuagaaugugcugcugcagagagaauaacuaaauggcaguucuuugaagccacuuugcuaaacuauaguuuguauaucu

SEQ ID NO: 4098928 - RNA, 119 nt, Human
agaaauauaggucaaacuaggggaauacaagcccaaaugucucucuaaauaaacuuuucuuugacuucucugagaaaaguugauuuggagggauauucuccucuuugacacuguuuucu

SEQ ID NO: 4098929 - RNA, 57 nt, Human
agaaaucagaacccugaaguucuguucccagcuuuagguaagccccuuuugguuucu

SEQ ID NO: 4098930 - RNA, 81 nt, Human
agaaaucuagguucucaagaaggaugccagacaacuggagacuuuucucuaugucagcaucuuucuacccugacaaguucu

SEQ ID NO: 4098931 - RNA, 130 nt, Human
agaaaucugaaaucaagguguugacagggcuguacucccucagaagacuuuagggaagaaucguuccuugcuucuuccuggcuucugguggcucccagcaguucucgacaguccuugguuuguagcugcu

SEQ ID NO: 4098932 - RNA, 58 nt, Human
agaaaugagugguggagccaaaaugaaaaucuucaguuugacuccagagcccauuuuu

SEQ ID NO: 4098933 - RNA, 111 nt, Human
agaaaugggcugugucuucuaaacauuaugauaguagaguuaacauugaguuguugguucuuuaaagaaauuaucucugauguaggcauuguauuuccuagccuuaauucu

SEQ ID NO: 4098934 - RNA, 70 nt, Human
agaaaugguugcuagcuaugucuacuuucacucuuccuauaucuguggaucauaaaauugcaccauuucu

SEQ ID NO: 4098935 - RNA, 74 nt, Human
agaaauguacacagagcauuucuaugucucgagccaacuggaagggaaggccuagggaugcucugcgugccucu

SEQ ID NO: 4098936 - RNA, 67 nt, Human
agaaauguuuauggcugccuauuauaagucaggcucugugcuagguuaugggcacccaaaaaugacu

SEQ ID NO: 4098937 - RNA, 55 nt, Human
agaaauucacccuggagaaguaguauugagucacuaguucacaggccaaauuucu

SEQ ID NO: 4098938 - RNA, 129 nt, Human
agaaauuuaaaaauacgguauuuacucuuaaggaaggaauagcuuaguagguaaaauuauaauacagcguuauaagaaacuuaacugggaacuauaccaccuggucauuuaacccaguuuuggguuugu

SEQ ID NO: 4098939 - RNA, 70 nt, Human
agaaauuucaugucuucuugaacuuugagagagacguccauuuuggcagaggaagaaggcacauauuucu

SEQ ID NO: 4098940 - RNA, 83 nt, Human
agaacaagcugcugcugaacgagcuggccaaguuccgcucggagcacgagcuggacguggcgcugucggaggacaguuguucu

SEQ ID NO: 4098941 - RNA, 69 nt, Human
agaacaaguagcccugugcucuggagaaugauuuacagugguucucuuccucagccuggggccuuuucu

SEQ ID NO: 4098942 - RNA, 74 nt, Human
agaacaauguuuaaaggagucagagacucaaagacaauagauuuuccaaguugauggcucuauucagcaguucu

SEQ ID NO: 4098943 - RNA, 66 nt, Human
agaacaugaaguuuucuauagugaagauagucuuuacuuauagcucauggaauuguucacuguuuu

SEQ ID NO: 4098944 - RNA, 79 nt, Human
agaaccaaaaggcagaggaaggucuaguuugcucucacuucuugagcuaaggcauccaucuucuugugucccugguucu

SEQ ID NO: 4098945 - RNA, 75 nt, Human
agaaccaucguccagacucugcucacaugccucucuccuugcuucacagaggaucugggcaucuggagugguccu

SEQ ID NO: 4098946 - RNA, 65 nt, Human
agaacccuaaguucaugagaaguuaacugaguuacucaguuucuuuacucauagaaugggggucu

SEQ ID NO: 4098947 - RNA, 59 nt, Human
agaacccuagcauguccuuuaggaugaagugaaucacguucugagguaugauagggucu

SEQ ID NO: 4098948 - RNA, 71 nt, Human
agaacgugagaaggaaaggaucagugucuaucuucagagaccaggcuuaauccuuugcuauccaaacgucu

SEQ ID NO: 4098949 - RNA, 94 nt, Human
agaacuaaaaugagcuguggcaaccuugucagacugcauuuuacagccuccuuuguagucugcuauaugaguugcccuggccaaauauaguuuu

SEQ ID NO: 4098950 - RNA, 58 nt, Human
agaacucuaggauuggcuggauagagcuuuagcuuuucagucaggagccaaggguucu

SEQ ID NO: 4098951 - RNA, 86 nt, Human
agaacugcugcuagaauccaaauuuaccuuacagauaucacaaaaguuaagugguguuacuaaaauuugauucuuaggacguuucu

SEQ ID NO: 4098952 - RNA, 80 nt, Human
agaacuggaaucaggaacucaagugcauugaggaucucucugccccucagagcugcuucccaguuuguggucccgauucu

SEQ ID NO: 4098953 - RNA, 64 nt, Human
agaacugguuacagagggauguugccguaaucaaaacacaacuuccugacuucuaaugaguucu

SEQ ID NO: 4098954 - RNA, 56 nt, Human
agaacugugucacauggccacuccuagcugcaagggaggccaggaaauguaguucu

SEQ ID NO: 4098955 - RNA, 74 nt, Human
agaacuuaggaacaacagcuuaggggacucuuugacuuguccuuauccuucuuugccuguguucucuaacuucu

SEQ ID NO: 4098956 - RNA, 100 nt, Human
agaacuuugagcagaaacuugguguauuagcucucacugcccuaccaaaauaccacagcauggguggcuuaaacaacagaauuuuuuuucucacaguucu

SEQ ID NO: 4098957 - RNA, 60 nt, Human
agaagaaaugaggccguucugcuauaaaaucauguguaguaguuauugcuguuuacuucu

SEQ ID NO: 4098958 - RNA, 71 nt, Human
agaagaccuggagaauggaaaguaaagguaaucucauccaaaacaaauacaccauucccagguggauuucu

SEQ ID NO: 4098959 - RNA, 57 nt, Human
agaagacugaguucaaaucacagccucuuccuagcugugugaccugggcaagucucu

SEQ ID NO: 4098960 - RNA, 65 nt, Human
agaagagccacuguugacggcacggcagagcaagauggcaggguugagugugcagcggcuuuucu

SEQ ID NO: 4098961 - RNA, 55 nt, Human
agaagagugggcuggcacaaggcagcagcuacgcucugcucagaccaacucuucu

SEQ ID NO: 4098962 - RNA, 82 nt, Human
agaagauggguuggggaaaggcagggcaggcucuuccugguaacacgggcgaccaggcuuggcugucucccagcccagugcu

SEQ ID NO: 4098963 - RNA, 72 nt, Human
agaagauuguuguauagagggcaugaaucuaaugucuuagaaauuaguccuuuugcaaaucaaaugucuucu

SEQ ID NO: 4098964 - RNA, 71 nt, Human
agaagcaggggcuccuccacagccaugaugcaacacugaaagcugagcucugaugagggccaccuucuuuu

SEQ ID NO: 4098965 - RNA, 130 nt, Human
agaagcaucccgggcuacauuuucaucuucgccgucuuccaaucuugcauaaucuauaauaaugugauuccaaaugcauuuuagcaaaugcaagauggaaugggacucccccggcugcucccgaacaucu

SEQ ID NO: 4098966 - RNA, 82 nt, Human
agaagcauuuguuccagcuauugcuguguaacagucauccauacuuaguggcguaaaacaacaauaguugauuauuguuucu

SEQ ID NO: 4098967 - RNA, 73 nt, Human
agaagccagaguuucugccuccugggcuaaggcucugggcuccauucccaggaggaggaaaaagcucguuucu

SEQ ID NO: 4098968 - RNA, 92 nt, Human
agaagcccucugccucugaguaggacacccuccucuccuucccuccccugcagcugggucugggcuguccuguucuggcgugagugguuucu

SEQ ID NO: 4098969 - RNA, 67 nt, Human
agaagccucacuguccagcccccagcaucacagguauugaauggugagcagcagcaguggggcuucu

SEQ ID NO: 4098970 - RNA, 75 nt, Human
agaagcuaggaagaagcaaggaaagauucagagggagcauggcccacccugcugaugccuugauuuuggacuucu

SEQ ID NO: 4098971 - RNA, 67 nt, Human
agaagcuauaacaacaauuauagacacauuauuaucaacgugguauguaauauuuguuaagguuucu

SEQ ID NO: 4098972 - RNA, 84 nt, Human
agaagcuccuuaccgaggagugugaaggcuugucgagucuucucaaaguccucagcaucguccacacccucgauggaagugucu

SEQ ID NO: 4098973 - RNA, 118 nt, Human
agaagcugagagaaggaaacugggguuaauguuaugcaaugccuugagugcugugauggagagccugccguggaagcacuuggguuuuguuguuguuguuggguuucuuucuguuucu

SEQ ID NO: 4098974 - RNA, 56 nt, Human
agaagcugccuacaugaccagcccccaauaaaagccuugguuauuucuaagcuucu

SEQ ID NO: 4098975 - RNA, 80 nt, Human
agaaggaaaagaagacagcaagaaugagaaagugaaugaaguuaauuucuuugaacuuggcugaucucucagaaacuucu

SEQ ID NO: 4098976 - RNA, 58 nt, Human
agaaggagacagaaaauucaggauauaauaacuaaucuuauauccuucuguucuuucu

SEQ ID NO: 4098977 - RNA, 130 nt, Human
agaaggagacguucgugugggucuuugggaaaggaggaauguggccuagggaggagagaagcugauuucaagcuccauucaaguguuacaucguuaccucucucuguuuggcauguuuccaucuguuucu

SEQ ID NO: 4098978 - RNA, 80 nt, Human
agagccaagacaucuuugccugggaauucuaguguauccaucauaauuggguuuauuuuacccaguaaagagagggcuuu

SEQ ID NO: 4098979 - RNA, 61 nt, Human
agagccugaggccaggaaaauggcaugugaaagcccuucuucugcagcugccucuggcucu

SEQ ID NO: 4098980 - RNA, 90 nt, Human
agagccuuaaauagcccugaaaguacacugggacgguuugcgauggaauuaaaauuggaagugaauauuuuuaggugcucuugaagcuuu

SEQ ID NO: 4098981 - RNA, 98 nt, Human
agagcgaggugcucccggacaggcuggcugagcugcagccugcauccucugugcugccacaaauucagcugccuauugggggugucggcaccagcucu

SEQ ID NO: 4098982 - RNA, 92 nt, Human
agagcuaaggaaagcugagagcugugucaagauaauuguccuccucugaauuagcagauaucuuucagcuguuuucaguucuccuuaucucu

SEQ ID NO: 4098983 - RNA, 58 nt, Human
agagcuagggguagucaggagaccugcauuguaggcaaggcuuuuacauccuagcucu

SEQ ID NO: 4098984 - RNA, 66 nt, Human
agagcucagaggggagagaggccagccccacagugauggggaguccagcccuccucacugagcucu

SEQ ID NO: 4098985 - RNA, 60 nt, Human
agagcucccugcugauggagcugcccagacugagccugucagugauuuguagggaauucu

SEQ ID NO: 4098986 - RNA, 61 nt, Human
agagcucuuauaguucuagcaguugguucccuagaaguggcuguuauagguaaaguguuuu

SEQ ID NO: 4098987 - RNA, 61 nt, Human
agagcugcuugggaaccaucaauuacugaaucgaagcaauugagggagcccggcgcggccu

SEQ ID NO: 4098988 - RNA, 61 nt, Human
agagcuguguucaugaggagaaauauuuuaauauauaauuuauucucagauacauaggucu

SEQ ID NO: 4098989 - RNA, 69 nt, Human
agagcuuacaugugaguaaauuuaauguuuaaaguguaaauauauagauagggcucacaaaguaguuuu

SEQ ID NO: 4098990 - RNA, 112 nt, Human
agagcuuguucauggcuaaaaaccauucuaauaucauuccugagggaguugacuuacagaaggauggccucccuccagaauggugaggaaguuuagcugugguuucuacuuu

SEQ ID NO: 4098991 - RNA, 57 nt, Human
agagcuuugggacauuugcuaggacaccggauauucuggcauuuaugaaccaagccu

SEQ ID NO: 4098992 - RNA, 58 nt, Human
agaggaaauggauaaagggugacaaucucucugccucuccccuuauccauccuucucu

SEQ ID NO: 4098993 - RNA, 78 nt, Human
agaggaaauguggcuuuaagagauuuaggaacauuauuuuaaaagaagacaauguuucucuuuagucauucuucuuuu

SEQ ID NO: 4098994 - RNA, 62 nt, Human
agaggaagauuuuauuaaccagguggaugggaugaccuguuuuggggauggcagucuccucu

SEQ ID NO: 4098995 - RNA, 117 nt, Human
agaggaagggucacuaugcaguggucaggagcacuagcuugagucagacugcucagcucugccaccagcugugugacucuaagcaaguuacuuaaccgccuugugccccauucuucu

SEQ ID NO: 4098996 - RNA, 60 nt, Human
agaggaauaaauuucuguagugagauaguuacccaaacuacaacaguuauuuauuucuuu

SEQ ID NO: 4098997 - RNA, 55 nt, Human
agaggaaugcagccaacccuuccagggacaagaaggacuuggcucuauugccucu

SEQ ID NO: 4098998 - RNA, 60 nt, Human
agaggaaugucaaggcagagcccagucuggaaccagaccccagguggccuugacuucucu

SEQ ID NO: 4098999 - RNA, 60 nt, Human
agaggacauugcugaaaggaagguaguuaauuaagcugaauucugcuguagcaagucccu

SEQ ID NO: 4099000 - RNA, 61 nt, Human
agaggagagaagcuaacggugcucaucguguggcacgcaggugcguuguuuucucuccacu

SEQ ID NO: 4099001 - RNA, 62 nt, Human
agaggagccaagaaacaauauugguaggugagaucuccuaacuuuuacauuuggcucacuuu

SEQ ID NO: 4099002 - RNA, 108 nt, Human
agaggagggagcuggagugagggagcacacuuguuuucagccuucagccuggcuuccaccuuccuggcuggcuagcagagugcauccuucuauaucagcucagccucu

SEQ ID NO: 4099003 - RNA, 64 nt, Human
agaggaggggcaggggguggccagaccucuugcuuucacucuuccacuuccugcccgcuccuuu

SEQ ID NO: 4099004 - RNA, 55 nt, Human
agaggccagcccugggcugagagaggaagccaccaucucucacggguugguuucu

SEQ ID NO: 4099005 - RNA, 64 nt, Human
agaggcccagcaucuugugaaguuucuagagagaaacuuuguagagaaugcuggcauauccucu

SEQ ID NO: 4099006 - RNA, 70 nt, Human
agaggcccaugggugcaugugcuguucccuuuguuauauugugcaggcaggugauucacccugggccuuu

SEQ ID NO: 4099007 - RNA, 62 nt, Human
agaggccccaggugagcaugccugcuguagaauuaagcuguauuucuccaagggggcccucu

SEQ ID NO: 4099008 - RNA, 59 nt, Human
agaggcccugggcuggugugcuucaggggacaaagaagugggccacaucccagggcucu

SEQ ID NO: 4099009 - RNA, 104 nt, Human
agaggcgcaaggagauuuagagccucgagcagcugaggcaguggcaguuuucccacugcaucgcucgcuuagguccucuacauuaucacccaucacgugccuuu

SEQ ID NO: 4099010 - RNA, 70 nt, Human
agaggcgggcagaucaccugaggucaggaguuggagaccagccuggccaacguggugaaacccugucucu

SEQ ID NO: 4099011 - RNA, 72 nt, Human
agaggcucgcugaggcugcacggcugccugggagaggcucgcugaggcugcacggcugccugggcggccucu

SEQ ID NO: 4099012 - RNA, 78 nt, Human
agaggcucgguuagaaggccugguguucauucauucgggaacugcuuguuaagcuccuggucuuuguccagagcuuuu

SEQ ID NO: 4099013 - RNA, 69 nt, Human
agaggcuuggcaggugucugcggcuccccagggguggggugcugggaggcugacaucuguggaguguuu

SEQ ID NO: 4099014 - RNA, 70 nt, Human
agagggagaagaaagccucuuguguugagauuaauguaugcuauaagagucuuguuuucuuauuuccuuu

SEQ ID NO: 4099015 - RNA, 82 nt, Human
agagggcacauucccuuggccucauggacagcucauccuuagggaagguuguggcuggaugaggcccagagugaagcucucu

SEQ ID NO: 4099016 - RNA, 58 nt, Human
agagggcauacagggaagugggggagcugaucacagcucuuuacucugcaaugauucu

SEQ ID NO: 4099017 - RNA, 71 nt, Human
agagggcccacugggcaggccaggacugguaaaaccuugaauuuccccucugguugacccaggagcuguuu

SEQ ID NO: 4099018 - RNA, 56 nt, Human
agaggggagagaguucagagguauuaggucucugaggcacugggccucugcccuuu

SEQ ID NO: 4099019 - RNA, 66 nt, Human
agaggggcagggucuccggauucuuugccaugacuguggaagacuuuccagggcccuggcuccucu

SEQ ID NO: 4099020 - RNA, 105 nt, Human
agagggucucacaggaggugacauguagcuagaauagagguaagagcaagcuaccagagcugacuggcuuuguucugauugcuucuuucugcuuugagaucuuuu

SEQ ID NO: 4099021 - RNA, 55 nt, Human
agaggguggcacuugcuguagaaucuggaaguucugucuucugcugucguccucu

SEQ ID NO: 4099022 - RNA, 62 nt, Human
agagggugggcuccuaucuggguuacuggcguaaugucccugcccucugggaucccuccucu

SEQ ID NO: 4099023 - RNA, 56 nt, Human
agagguaaagagaggggaaauuggcaggagugauugcuugccuucucucugccucu

SEQ ID NO: 4099024 - RNA, 85 nt, Human
agagguacagaggucaggcagcuccaggaaugguauuccaggaaucugguuuugcuucuuaguagcuguguuggcucugaccucu

SEQ ID NO: 4099025 - RNA, 66 nt, Human
agagguaccaagugcugcacuguggagagggucacauggcacagaacagcaggcuaggcugccucu

SEQ ID NO: 4099026 - RNA, 65 nt, Human
agaggucagaggucgccaggucacccucuuuuggaauaagaguaccagggaacucuugacucucu

SEQ ID NO: 4099027 - RNA, 57 nt, Human
agaggucugugggccggccuuucuccucucuggggacaccgcucugccccagccucu

SEQ ID NO: 4099028 - RNA, 58 nt, Human
agaggucuuaaguuccuugaugguaauuuugccaaccacagggauuuucaagaccuuu

SEQ ID NO: 4099029 - RNA, 79 nt, Human
agaggugaccuugugcucaugcauaggagggggucagcacaugcaaacuucccuucugugcagggcagaggccaucucu

SEQ ID NO: 4099030 - RNA, 79 nt, Human
agagguguugagugaggaaggaauugagguuuuaucuguaguugguagcaucuuuuucugucuucuaaacgaggccucu

SEQ ID NO: 4099031 - RNA, 70 nt, Human
agagguugggcagaggugugucucuggcucuccugggugagucagcacagaguugcucacugccgccucu

SEQ ID NO: 4099032 - RNA, 63 nt, Human
agaguaugggaaggucuuugauauaaggcuuuuaucuauagguuuaaguccuuccuuugcuuu

SEQ ID NO: 4099033 - RNA, 58 nt, Human
agaguccugaggacuaacaggaaggagaaaugcuucucaugaaaguaccuuagguucu

SEQ ID NO: 4099034 - RNA, 71 nt, Human
agagucuauauuccauggugauaugcaaauauuaacagcuuacaaguaguuaagcauaucagauagacucu

SEQ ID NO: 4099035 - RNA, 86 nt, Human
agagucucucuuugucauccaggcugaagugcaguggugugaucucggcucacugcaaccucagcuucccggguucaagugacuuu

SEQ ID NO: 4099036 - RNA, 74 nt, Human
agagucuugaggguucugccccaggcaggugguugcauuugcagccuggcuguggcggugcucucaggcacacu

SEQ ID NO: 4099037 - RNA, 86 nt, Human
agagucuugcucuguugcccaggguggagugcagcggcgugaucacggcucacugcaaccuccgccucccggguucaagcgauucu

SEQ ID NO: 4099038 - RNA, 67 nt, Human
agagugacauuccagaagcuauguacuucuugcuguuaauacaguauauaugguuaucugauacuuu

SEQ ID NO: 4099039 - RNA, 55 nt, Human
agagugacugcuuuucugagagucuuuuaccuacucccagaaaguuauuuacucu

SEQ ID NO: 4099040 - RNA, 93 nt, Human
agagugacugguaacacagaagaucucuuaaugcugcaaaguauuauuaguuguccagcugcaaagaugauuuguuguauuuaccuuuauucu

SEQ ID NO: 4099041 - RNA, 86 nt, Human
agagugagcaggaccagggcgcgccuuuggcaggcgacaguguucacuggcaacuugugcucccuguuuucuuuccggcuuacuuu

SEQ ID NO: 4099042 - RNA, 64 nt, Human
agagugagggugggggcucaggcaugccagcacugggcaucucucugugccucaacccucaucu

SEQ ID NO: 4099043 - RNA, 55 nt, Human
agagugaugguguaacugcugaccuacaagcaucacacagaggcaucaucacuuu

SEQ ID NO: 4099044 - RNA, 55 nt, Human
agagugcauuuuuagagcuuuuagcaaaaaugugaaaaguucauguuugcacuuu

SEQ ID NO: 4099045 - RNA, 130 nt, Human
agagugccagccaggccgacuguugugcaaguucugggcuggccugcgagggcaggcuggcagaggagucaugccugaucagcggccagcauggugucugcccagcccucuuggccuguccuaugagacu

SEQ ID NO: 4099046 - RNA, 63 nt, Human
agagugcuauagggucucaguucugaaauuauucacaaguacucagcagacucagugcacuuu

SEQ ID NO: 4099047 - RNA, 107 nt, Human
agaguggaaugaguggaacuugcgucaguagcccuuggcuuaggcauuccuggcauggugcaggacucugagcugggcacagaaggcguccaccugguucucgcuuu

SEQ ID NO: 4099048 - RNA, 81 nt, Human
agaguggacuggugcgggaacacguggccccggugccaccagcuggucacaguggggucacaguguggucacuagcugucu

SEQ ID NO: 4099049 - RNA, 55 nt, Human
agaguggggaagguguugagaagauguaaauauucuuagauaauugccuuacucu

SEQ ID NO: 4099050 - RNA, 60 nt, Human
acugccaucuggucucuauggguggaacuaaggucacaugccaagagggcagagggcagu

SEQ ID NO: 4099051 - RNA, 69 nt, Human
acugcccagugauuggugguuaucaaaucaugcuucuuagacuagcugcuuagaaaucacugagggggu

SEQ ID NO: 4099052 - RNA, 63 nt, Human
acugccccgcaucaggcuuccuucagcuguccccagucaaguaguacccaaugcguggguagu

SEQ ID NO: 4099053 - RNA, 59 nt, Human
acugcccucccaucuauugcaaauucaaggaggaagaugcaggaacugggagggauagu

SEQ ID NO: 4099054 - RNA, 81 nt, Human
acugccuuucaugucuauuauucagugacuggcauaaauuauauacuguauauacuguauauuggacaaggaaaagaaagu

SEQ ID NO: 4099055 - RNA, 73 nt, Human
agcaggugaggcugaacagaugaaaagccuucaaacaaguccacuguuauuucauuugucuacuucacuuguu

SEQ ID NO: 4099056 - RNA, 73 nt, Human
agcagguuagccuuguucaucaaggggcaauccuccugaguuuugucucuggaaggaaaaagcaaugccugcu

SEQ ID NO: 4099057 - RNA, 73 nt, Human
agcagguugugauacacucagauuugcugcucaauuccccuucaacgauccaugaguguagucagaaacuucu

SEQ ID NO: 4099058 - RNA, 63 nt, Human
agcagguuugggaguagaaaucagaaguuuauuuuugaacacauaagacuuccaaugccuguu

SEQ ID NO: 4099059 - RNA, 68 nt, Human
agcagucagccucuaugcccccgucacccagccagcucucuggguuucggggcgggaggcugagggcu

SEQ ID NO: 4099060 - RNA, 56 nt, Human
agcaguccuucuuuagagagccucucugaugcuggggcccucuuagaaagcuagcu

SEQ ID NO: 4099061 - RNA, 63 nt, Human
agcagucuaggguguauaaggaagccucacacuuuuggggcucuucuggcaugcugcucugcu

SEQ ID NO: 4099062 - RNA, 62 nt, Human
agcagugaggcucugcugagcggucugccgagccgcuggcccucuccaugaaccucacggcu

SEQ ID NO: 4099063 - RNA, 55 nt, Human
agcagugucuuccuccuuuguugggucagucaaaagagcacagguggacaaugcu

SEQ ID NO: 4099064 - RNA, 56 nt, Human
agcaguuauguucuauaaagucauuaugaacauugaguuauugaacgcugauugcu

SEQ ID NO: 4099065 - RNA, 65 nt, Human
agacugcagcaaccccuucagccgcuccacuucagccagaguugaagcauuugcuauagcauucu

SEQ ID NO: 4099066 - RNA, 57 nt, Human
agacugcaguugaggcagcuggggaauuuacucaauuuuucucaaucgcugcagucu

SEQ ID NO: 4099067 - RNA, 56 nt, Human
agacugcugugaaaauguugacccaucucuggccuuaacauuaaaagcagcauuuu

SEQ ID NO: 4099068 - RNA, 58 nt, Human
agacuggaguuuuaaaggaacuuguaucagccugaauauaguugcuggacucuagucu

SEQ ID NO: 4099069 - RNA, 78 nt, Human
agacugguaaguagggacuuguuuuacuaguauucaaauaucacuagcacaugaacagucauuccuagaagccagucu

SEQ ID NO: 4099070 - RNA, 73 nt, Human
agacugguagaucaaaucccaggacguacccucgcacagccaagugggguccugggguccugacugcuucccu

SEQ ID NO: 4099071 - RNA, 73 nt, Human
agacuguuuacagaagagaaagaauucaggguaauuuuuguucugagguucuguuuuccuucuggucuaguuu

SEQ ID NO: 4099072 - RNA, 76 nt, Human
agacuuauauaucuuuauucauccucaaguaucaucagaucuacuuuaaagagguguaaugaggacucagugagcu

SEQ ID NO: 4099073 - RNA, 106 nt, Human
agacuucaaucuuauucaaaucaauucugaagccuuccuguguuuuuuaucaugucuuagacaccuguuacagcugaguaugcauucaagcagaguugugaagucu

SEQ ID NO: 4099074 - RNA, 58 nt, Human
agacuucaccucugaggagggggcugcugcuuuaguucagggccucagaggugaagcu

SEQ ID NO: 4099075 - RNA, 63 nt, Human
agacuucauuggguuuuauacuggcuuucuuuuugguaguccacugaagaauccagggaguuu

SEQ ID NO: 4099076 - RNA, 69 nt, Human
agacuucccagccuuucuuuucugcuggccucuguuuuggcaccaguacuugggaaugcuggggaugcu

SEQ ID NO: 4099077 - RNA, 107 nt, Human
agacuuggaaauauaaauuagauuaaaacacgauguacugauuuacaaugaaaauuauaacucguacggaucagaauucuuguguguuucaugcuguucucaagucu

SEQ ID NO: 4099078 - RNA, 68 nt, Human
agacuugggugucggggcagucugggcaggaggaggacacugaaggaugucucccagcaccaaagucu

SEQ ID NO: 4099079 - RNA, 64 nt, Human
agacuuuuauuuucaccauguaucccuguucuuagaacacaaccgugguggagauauucagccu

SEQ ID NO: 4099080 - RNA, 60 nt, Human
agagaaacugauguccuuugaagccaacccuggccuugaauuaggcaaauuaauuucucu

SEQ ID NO: 4099081 - RNA, 79 nt, Human
agagaaauaaggauuucucauuuguggauugaacagacucuucuaaaacaaaguucaaguuucacaagaaaauuucucu

SEQ ID NO: 4099082 - RNA, 67 nt, Human
agagaaauucucaguggaagauuugauauuaaauuucuucaccgagucaaccuacuuggauuucucu

SEQ ID NO: 4099083 - RNA, 61 nt, Human
agagaaauuucccugccuucugagccucccaauaguuuagcagguagguugaaauuuuccu

SEQ ID NO: 4099084 - RNA, 83 nt, Human
agagaaccacuguuucccgcaguguccugucuguuuguccuauuuaaacaaugacaacacagcugcguaggaacacaggcucu

SEQ ID NO: 4099085 - RNA, 81 nt, Human
agagaagaaccuugaauugacugagauuugaguuuuugugauucagcaaaauaucucagauaguuacugagauucuuaucu

SEQ ID NO: 4099086 - RNA, 71 nt, Human
agagaagcaugucccuugugauucaaaagaccaaauuuccucuuuuggaggauaaggauauugauuucucu

SEQ ID NO: 4099087 - RNA, 65 nt, Human
agagaaguguuccauguuugagguaguuggcaaaugcuaagcuaccuauguggugacaguugucu

SEQ ID NO: 4099088 - RNA, 70 nt, Human
agagaaguucaguggaggcucaagugugcuuuuauaggagaguacagagcaaauuccaccuaucuucucu

SEQ ID NO: 4099089 - RNA, 109 nt, Human
agagaauacaauaucgagucgcugacuggaucuaauugguuauagugccuagauacuguauuuguccuagguccaggaucauguggcuaguuuuauauuuguauauucu

SEQ ID NO: 4099090 - RNA, 57 nt, Human
agagaauuccugccuuaugaaguuuuuaugaugauuaaauaaggcagugacuuuuuu

SEQ ID NO: 4099091 - RNA, 61 nt, Human
agagacacacccaagguuaugagagcagcagagcaggauucuggcuguggguggcgucucu

SEQ ID NO: 4099092 - RNA, 61 nt, Human
agagacaggaguucuguuuccauuuagaauauauaacuuugggcaagucacuucugucuuu

SEQ ID NO: 4099093 - RNA, 57 nt, Human
agagacaguacaaaagucacugaugcaacaucaucauuaagugugacaugcugcucu

SEQ ID NO: 4099094 - RNA, 68 nt, Human
agagacauuaauucaccuuucugaaccaugauuuccucacuggggaauggaacugggaaugcgucucu

SEQ ID NO: 4099095 - RNA, 80 nt, Human
agagacauucaaaauugugguuuagauaugaugaaccagaaaaaaauguuguuuuuuaguccacuuuuugaaaagucucu

SEQ ID NO: 4099096 - RNA, 88 nt, Human
agagacauuuuuauaagguuucuacuguguuaagaaaaguuuuaaaauaauuucucuagagaacaguacaaacuuucuguguguuucu

SEQ ID NO: 4099097 - RNA, 90 nt, Human
agagacguuuguuuucagcauccugcacucaggauaucacugaaacuguuaguguuccugugcuuuggaugcuuagaaagcacauccucu

SEQ ID NO: 4099098 - RNA, 64 nt, Human
agagacugagaagcagaaauauagauucaugguuccugaucaucuuuuccugcuuccagccucu

SEQ ID NO: 4099099 - RNA, 59 nt, Human
agagacugcaaaucauaagaauauguggaugcugcauauucuuccaucuguaaguuucu

SEQ ID NO: 4099100 - RNA, 77 nt, Human
agagacugggaaauauaauuuagcugugugcucagaaagaacaggauauagguuugauaaguauucauccagucucu

SEQ ID NO: 4099101 - RNA, 57 nt, Human
agagacuuuaaaaaacauuaagagcuguuuaaaugcucuugaaaaguuagauucucu

SEQ ID NO: 4099102 - RNA, 93 nt, Human
agagacuuuucugagaguaaacauagccuguggcucacacuuugauaccaacacaguuugcuuaguuuucuuuucccaacauagagaagcuuu

SEQ ID NO: 4099103 - RNA, 109 nt, Human
agagagagaguaaauuuucuuagguggugcaaaaguaauugugguucuugccauugaaauuaauagcaaaaacugcaauuacuuuugcaccaaccuaaugcuuuccucu

SEQ ID NO: 4099104 - RNA, 78 nt, Human
agagagagaugagaacucaauaugauggaugcuuguugcuguaauacagauuucauuacugaauucucacuacaaucu

SEQ ID NO: 4099105 - RNA, 62 nt, Human
agagagaggcagcagugcucacgccgcaggagacagccgagcccgcagugccagccucuccu

SEQ ID NO: 4099106 - RNA, 88 nt, Human
agagagaguagauuuuuacuuacagacaguagacucugccacagccagguaucaguugugugauaugagugacuaauuuaaucucucu

SEQ ID NO: 4099107 - RNA, 96 nt, Human
agagagauuugaucuuuucuguagauggggugagacuaggauuaaauuucaaaauuugagaaaaauauuuucauuccauuuaugggagaacuuucu

SEQ ID NO: 4099108 - RNA, 74 nt, Human
agagagcaaaaguguucaagcccuuuugaggucuacauuugggagaggaaaugccagcacuucaauugcacucu

SEQ ID NO: 4099109 - RNA, 75 nt, Human
agagagcugcagugauauauguugccagagaggacaccaucagucaugaccucugugguaaaauagcaguauucu

SEQ ID NO: 4099110 - RNA, 67 nt, Human
agagaggaagccauugcuuacugaacacagacugugucaggccccacacuaagcacauuuucccucu

SEQ ID NO: 4099111 - RNA, 65 nt, Human
agagaggaucacuugagcucagggguucaagaccagccugaguaacauggugagaacccaucuuu

SEQ ID NO: 4099112 - RNA, 61 nt, Human
agagaggcacagcagaaaguguaggaggagaucagggucuuuugcuguuugcugucucucu

SEQ ID NO: 4099113 - RNA, 81 nt, Human
agagaggcagccaccacuguucaguccaauguuggaaaauccugcugagguuuucuugcugcacugaacuauugccucucu

SEQ ID NO: 4099114 - RNA, 87 nt, Human
agagaggccaccugacgagcagucuauaaaguauguuaaaugagaaaaacagagguugggugugaugcuugucaagauggguucucu

SEQ ID NO: 4099115 - RNA, 83 nt, Human
agagaggggaaauaaagugagcuggaagggaagaaaacaaagauugacuuucugaaagacauuuuaacucauuuucacucucu

SEQ ID NO: 4099116 - RNA, 63 nt, Human
agagaguagucuuuagggaauucagugggcaguggcuaaugaauaaaucaaagacugcccucu

SEQ ID NO: 4099117 - RNA, 69 nt, Human
agagagucaagaucccaggagagugagaagugagugaggagguuuucauugucagcucuugacuucucu

SEQ ID NO: 4099118 - RNA, 126 nt, Human
agagagugaaaaauucagaauuccaagauaauuacccagaagauugucagcaaaggccucucauuuucugucacuuugccauuagacagcuucuggcugauuuccacaccaaugucugaacccucu

SEQ ID NO: 4099119 - RNA, 81 nt, Human
agagauauguguaauacuccucugcacuguacccagaaauauacuaggcacugaaggcacagaaguaaaauacaagucucu

SEQ ID NO: 4099120 - RNA, 56 nt, Human
agagaucaguuaaaaucuuuuuaggacacucucuaguuagguugcuucugauuucu

SEQ ID NO: 4099121 - RNA, 67 nt, Human
agagaucugcucucauguuuuucuuauggcaaugacagaagugcaagaggcaaugaaagcagucucu

SEQ ID NO: 4099122 - RNA, 97 nt, Human
agagaugaugcuuauuucauaucuaugucugcacaaaggagacugugaucugaccagaaagguuguuagcuuucuuuggcagacgugugucaucucu

SEQ ID NO: 4099123 - RNA, 65 nt, Human
agagaugccuuuuuaucauggaugauguugacaaacaucgugugccccggaugaaaggcauuucu

SEQ ID NO: 4099124 - RNA, 57 nt, Human
agagcaagggggcaggaucacacuuggggaucccacaggccacagugcccuugcuuu

SEQ ID NO: 4099125 - RNA, 86 nt, Human
agagcaaggucugugucaucugcuaucgugcucucagcaucuucuaaagugcugggcauagagugcuuaguagugacauggguucu

SEQ ID NO: 4099126 - RNA, 68 nt, Human
agagcacagacuuuagaaucagauagccuggauuuggacucaggcuucgcaagguuagagcuggcuuu

SEQ ID NO: 4099127 - RNA, 73 nt, Human
agagcacaguaucugcacaucaugacaugcucaguaaagccugaucauuauugauguauagacaaugcgcucu

SEQ ID NO: 4099128 - RNA, 57 nt, Human
agagcacaugguuccuguguccaggcaguaaagcccaauggguaagccaagugcuuu

SEQ ID NO: 4099129 - RNA, 56 nt, Human
agagcagacagggcagagccagagagacacuguuugauggccaccucugcuguucu

SEQ ID NO: 4099130 - RNA, 76 nt, Human
agagcagacuagaaagagaaacuaugagauaauucaguguugaauacuuaaagucuauccuuucuagaguuacucu

SEQ ID NO: 4099131 - RNA, 70 nt, Human
agauccagauccuuccugguugccucacuaccugccuuguggcagcuuggaaaccaggggggcuggguuu

SEQ ID NO: 4099132 - RNA, 67 nt, Human
agauccuaggggcuuguaauuuaauagaccguauuuugcuuuuggaacuaaauggccccagggcucu

SEQ ID NO: 4099133 - RNA, 72 nt, Human
agauccuauauugguggccauuuggaaaagaagaccacaacuuugcuuuugguuuggcuccaaauagggacu

SEQ ID NO: 4099134 - RNA, 65 nt, Human
agauccuugguguuuauggagugcuugcuggcccuaagauauuuucucugagcccaccaggaucu

SEQ ID NO: 4099135 - RNA, 110 nt, Human
agaucuaaaauucugaauuggaauauuuggaauuuuugaaugccccaaguauauauuuucuguugcaaauacuuuggcucaugguuuuauccaauuuggaauugaauucu

SEQ ID NO: 4099136 - RNA, 92 nt, Human
agaucuaagagacuaaggcaggaagagacgcagcagcuugucuuugauucugccaagcuucugcaucuuuucuucccuagcccuuagcgucu

SEQ ID NO: 4099137 - RNA, 94 nt, Human
agaucuagugcuuauccuagaaucagcccuugcugccuaugaucuucuugauccaguccagguagcggcagauguugguauagacgccagguuu

SEQ ID NO: 4099138 - RNA, 92 nt, Human
agaucucauucugagucauuccaggguuguacugguacaagaacaacugcauuuuuacuauaacccauggaauauaagaacauugcagaucu

SEQ ID NO: 4099139 - RNA, 63 nt, Human
agaucugcauuuauuccuggucauaaguaaacucuugaggccuguagucauggauguagaccu

SEQ ID NO: 4099140 - RNA, 65 nt, Human
agaucugucuucuucauugccuauaguuccaaguccaacuauggcagaggagaggcacuagggcu

SEQ ID NO: 4099141 - RNA, 90 nt, Human
agaucuuuacagaaauuauuuagaaaucgauugaaacggguuacuuuaagauuuucaauuuuauuucuaaagagugguaggugaaauucu

SEQ ID NO: 4099142 - RNA, 59 nt, Human
agaugaaagaguuugacaugauucucagguaaccugaggaagguaggauuuugucaucu

SEQ ID NO: 4099143 - RNA, 65 nt, Human
agaugaacccagcagggggcuuacugcauaaagaucagagcuuaucucuugcuggaaaguuauuu

SEQ ID NO: 4099144 - RNA, 65 nt, Human
agaugaccaguguugcuggccccgcugaagauucagccuaaagcaaucuacauugcauguuaucu

SEQ ID NO: 4099145 - RNA, 87 nt, Human
agaugagaagaguggggugggcuuccaugaggacauggcaugcuuuuugagucuugucuucaugauacccuaagccacucucugucu

SEQ ID NO: 4099146 - RNA, 74 nt, Human
agaugaguucuuucuauucuauuuuagguuauuuguuugauuagcaaauuugguggggcagagacgggccaucu

SEQ ID NO: 4099147 - RNA, 74 nt, Human
agaugcagcuuuccauuuccagguuuuagaacagugcuguuuaauggaacuucaugagauuauggaaauguucu

SEQ ID NO: 4099148 - RNA, 76 nt, Human
agaugcauucgggauguuuacuuugacagcuuuuuagguucauuaugcuucugagugaauuccccgacauguuucu

SEQ ID NO: 4099149 - RNA, 129 nt, Human
agaugccagguaauuucagagaaacaacaaauguuuuuuaguauaaguaugucccaugcaauauuuaggaggugcucauaccaaaaaaaauuuguuguauaucugaaauuugaauuuaacugggcaucu

SEQ ID NO: 4099150 - RNA, 57 nt, Human
agaugcccucgcagcccuuucgcgcuucccaguggagcugggcuccaagagggaucu

SEQ ID NO: 4099151 - RNA, 92 nt, Human
agaugcguaaaaccacauugucugagaaucuugcauaucaucaauauucauuggugagagaugcuuucuuaacgcugguguuuuaugcauuu

SEQ ID NO: 4099152 - RNA, 76 nt, Human
agaugcuaacucugaaaaacgggauuuggcugguagcaccugacacagccaaucuugaauuuccacuaaaguaucu

SEQ ID NO: 4099153 - RNA, 57 nt, Human
agaugcugcagccuggacuggaagccagagugacucaucagcccagggugagcaucu

SEQ ID NO: 4099154 - RNA, 66 nt, Human
agaugcuuauuuuucucuauccccuguuaggcucuacguuccacaauggcagagaaauguccaucu

SEQ ID NO: 4099155 - RNA, 85 nt, Human
agauggacugagggguacacccggugcaccaguuccuuuugguggauggagcuuccugcccugccugugccacuucuuaucauuu

SEQ ID NO: 4099156 - RNA, 58 nt, Human
agauggaguuaguaccagagucuuaggaagggaaaggaugugguacugugguuuauuu

SEQ ID NO: 4099157 - RNA, 83 nt, Human
agauggccacucucuuuaaaagaagggccagacuccagaaguggagucuauuuccccuucucuugaaucugaguugggccucu

SEQ ID NO: 4099158 - RNA, 101 nt, Human
agauggcuacuauagaucuaagcagagauccaugugauuuggaguucagggggucugggcuggaaauacacauuggaaucaucugcaaauaugugacauuu

SEQ ID NO: 4099159 - RNA, 56 nt, Human
agauggcugauuaacuccauggauaaucucccuauggacugauuguccagccaucu

SEQ ID NO: 4099160 - RNA, 73 nt, Human
agauggcuggagccuguucugagaagccgggccuucugcucuccuggcauugaucaggaggcuccagauauuu

SEQ ID NO: 4099161 - RNA, 78 nt, Human
agaugggcaguuaggaggccaggaugcugacccuagauuugcucuaacaugcucuguggucuuggugaccuuccaucu

SEQ ID NO: 4099162 - RNA, 62 nt, Human
agauggguaggaaucucaagguuucaguuacacacacaaaaucuagaaugaccuacucaucu

SEQ ID NO: 4099163 - RNA, 80 nt, Human
agauggugacaaaauaguucagccacggugacuagugaaaagagcugaaucagcgaagcugacuaugcuaugguccauuu

SEQ ID NO: 4099164 - RNA, 57 nt, Human
agauggugaggucugugcaguauucaucugagauuaauggcuuagugcuucacuucu

SEQ ID NO: 4099165 - RNA, 73 nt, Human
agaugguggaggagcggggcaagcuggugggcacuccuggccuugccucacuguccagcucgagacacuaucu

SEQ ID NO: 4099166 - RNA, 65 nt, Human
agaugguggcugaguggucgagucagaauucaagcugaaacucuuccucacgcucagcugccucu

SEQ ID NO: 4099167 - RNA, 60 nt, Human
agaugguuacagcuguggaaauggagcuugauuucccuauaccagcagcuuugauucucu

SEQ ID NO: 4099168 - RNA, 64 nt, Human
agauguaagguucagaguaugugaagagcuaaggauuucuugacauucugcugcauuuuuaucu

SEQ ID NO: 4099169 - RNA, 69 nt, Human
agaugucuguuagugauaacuguuuuaauggcuacucuucaugaagcgcuuaccaguuggcagucauuu

SEQ ID NO: 4099170 - RNA, 63 nt, Human
agaugugauagcaugccagugaaagaccuggaccugguagcuauaagcaugcugauuacauuu

SEQ ID NO: 4099171 - RNA, 63 nt, Human
agaugugucagcaucauuuguugaagggacuauucuuuccucauugaaugaucuugacucucu

SEQ ID NO: 4099172 - RNA, 76 nt, Human
agauguguuuaacucuguuacuguggacuauucucacuuugagaaauguuucaaauauauagaguuguauagauuu

SEQ ID NO: 4099173 - RNA, 82 nt, Human
agauguugcuucuggauuauauaggacuugcccuuccagucacaggcaugucugggaguucauuguguaaaaagcaacaucu

SEQ ID NO: 4099174 - RNA, 89 nt, Human
agauuaaaugagaugauacaugauacuuaguacguaguaagugcugaagaaacauuugcugcuaucuuuguucacaucauuauuaaucu

SEQ ID NO: 4099175 - RNA, 108 nt, Human
agauuaagccuucuggagaccugaugugagcuuuuuaacuuuagauguuuuuuauaugccuaaggcccgugaguuucauaucucgguuuccacaaagagcuuggaucu

SEQ ID NO: 4099176 - RNA, 59 nt, Human
agauuaucuccugauuuuaaggccaacugugccguguaacacaaucaggggaauaaucu

SEQ ID NO: 4099177 - RNA, 71 nt, Human
agauucagacacacuggguuaccuguacuauuucuuucaagugguagaauaugacucaguugucugccucu

SEQ ID NO: 4099178 - RNA, 101 nt, Human
agauucagaccacagcauuaaugaggcaaggaucagguaagggucaggcaaaugacccuuaaaaugcuacuugacuucuuggggcuuugggaucuuuaucu

SEQ ID NO: 4099179 - RNA, 60 nt, Human
agauucagcugcuguauguaauaauuacggaaguauguuugcaaauaauagccugaaacu

SEQ ID NO: 4099180 - RNA, 66 nt, Human
agauucucaggccccacccagacuaacugaaaaaucagaaucucugcagggagggcccagcaaucu

SEQ ID NO: 4099181 - RNA, 113 nt, Human
agauucuuccaaagcaaugcuaugcaugcaacaauucuucuauaacucucuuuggagacagagcccagcugcugugguaaggguuagcugcaucuuauggcuugggaucaucu

SEQ ID NO: 4099182 - RNA, 58 nt, Human
agauugaacgagcuggcauggaugccucaggccgccaagucauuaucucuucuaaucu

SEQ ID NO: 4099183 - RNA, 72 nt, Human
agauugagaaaucgaaugguugccgugucuguguagaaagaaguagacaugggagacuuuucauuuuguucu

SEQ ID NO: 4099184 - RNA, 72 nt, Human
agauugagaaaucggaugguugccgugucuguguagaaaguaguagacaugggagacuuuucauuuuguucu

SEQ ID NO: 4099185 - RNA, 101 nt, Human
agauugagaagaggcgccgaacauguuacaugguaaacacucuuuuauuaguggucuuuugagggaaaguugcuguguuguucuuugcuguuauuucugcu

SEQ ID NO: 4099186 - RNA, 59 nt, Human
agauugauguauucccugaguuguaagaauagagcugagaguccaggaaaacaucagcu

SEQ ID NO: 4099187 - RNA, 94 nt, Human
agauuguaacugaguuucagagacauucaguaaauuaucccaaagucauauaggauaaaacuuagguaugucuuggcuccaaaguucacaauuu

SEQ ID NO: 4099188 - RNA, 60 nt, Human
agauuuacuguaggagcugugguggaagaaaauuccugcaggugguucgaacagaaguuu

SEQ ID NO: 4099189 - RNA, 82 nt, Human
agauuuagaguguauucaucugcugguuuuuggcauaaauauucauugguuuugagcucucagguguuggaacuuuaaaucu

SEQ ID NO: 4099190 - RNA, 63 nt, Human
agauuucaggggauuugaaaacgggaguguucuucggcuucugccuucaguccucugacuucu

SEQ ID NO: 4099191 - RNA, 56 nt, Human
agauuucuaacacagcacgccauucuauucuaaugggcaugcauuguuggaaauuu

SEQ ID NO: 4099192 - RNA, 60 nt, Human
agauuucuccaggagaaauaugaaggagccaccgugcuuccaucucugccugggaacucu

SEQ ID NO: 4099193 - RNA, 130 nt, Human
agauuuguauuuguaaaaggucauaguaacugcuggaugaggaauggaugacucuuaaugcaaaugcagagcagcuaaaauucucaugcacugcagguaggauuaugaauauaaaguugauacaaaugcu

SEQ ID NO: 4099194 - RNA, 99 nt, Human
agagcaucacugagucuaggaggguuuuccacaauuugagcagcagauucuaucugaaguuaaaauuacggagaaaacuuuuacuuucuguacugcuuu

SEQ ID NO: 4099195 - RNA, 58 nt, Human
agagcauggcuuuuuucucuguuucagaucauucugguauaaaguauaagcuuguuuu

SEQ ID NO: 4099196 - RNA, 75 nt, Human
agagcauuccuaaggaaggcuggcaaggcacacacuaggcgcacucugucuuacggcagaaccuaggaaugaucu

SEQ ID NO: 4099197 - RNA, 68 nt, Human
agagcauugguucaagguugugcagcugggaaauggccuguacucuucuacccugagaauaaugcucu

SEQ ID NO: 4099198 - RNA, 60 nt, Human
agagccaauucaugaugguggugaguucugccucauggcagcaagaaucaggaaggcucu

SEQ ID NO: 4099199 - RNA, 72 nt, Human
agagccaauuuaucuuacucgugcucaggaauacuauuguguaacuaagcaacuaaagacaaaauauggucu

SEQ ID NO: 4099200 - RNA, 65 nt, Human
agagccagacugccugaagcucacuguaacaaguccugccuugaggaagaaggaaguuugccucu

SEQ ID NO: 4099201 - RNA, 129 nt, Human
agagccagaguaaccaugaagauaugaaccccaaggaauucucagaaauguugauaaggguacuagauuucccauagaacaugggauagaguuuuugaauuguggguuuagaggaagcaggcacgagcu

SEQ ID NO: 4099202 - RNA, 71 nt, Human
agagccagcaagugaauagugacaaaaggcaagacauucauaacuaggcccacaguuuacuuaaugccucu

SEQ ID NO: 4099203 - RNA, 61 nt, Human
agagccagcauuugacacuggcuuuucuaccagaaaggagugugguguucaagcugguucu

SEQ ID NO: 4099204 - RNA, 80 nt, Human
agagccaggagcucugcugucugaagaugggaaaagauggguuucccagcucaagcagagagcuaauuugcccuuccucu

SEQ ID NO: 4099205 - RNA, 72 nt, Human
aggaauacuuauacacuguuguugggagucugaauuaguucaacuauuaugaaagacagugugacaauuucu

SEQ ID NO: 4099206 - RNA, 57 nt, Human
aggaauagcugagaguucucugcuaucgaauuccaguagagaaaagaagcuguuccu

SEQ ID NO: 4099207 - RNA, 70 nt, Human
aggaauauuuuuaaagggacuaauugcaaacaauucugccuguugagauuuaucuuuaaaaacgguuccu

SEQ ID NO: 4099208 - RNA, 69 nt, Human
aggaaugccuggauuugggacucaaauaaugucauuaugacucaguuugucuguaucuaaauccuuccu

SEQ ID NO: 4099209 - RNA, 56 nt, Human
aggaaugcucugcaguucccaguugagggagcucucugggcuggcaggcauuaccu

SEQ ID NO: 4099210 - RNA, 64 nt, Human
aggaauguuaagaaggucuaccuuguaguaugaguucaugggaaagaccuuuauaauaccuccu

SEQ ID NO: 4099211 - RNA, 71 nt, Human
aggaauucuucaagagaaugcagggauguugaagcuaaaacaaggaaggucaucauucucuuggggucccu

SEQ ID NO: 4099212 - RNA, 68 nt, Human
aggaauuuguaggcagagguaugguaaggacugcuaagugauuacugguaucccuccuuucuuuuccu

SEQ ID NO: 4099213 - RNA, 99 nt, Human
aggaauuuuuaaaacauuaguuacagaauguacagagguuuaugguuuauuucccagauagcuuguguuuuucuaaguaucugauuuuuauuuauuucu

SEQ ID NO: 4099214 - RNA, 58 nt, Human
agccagagcagggaauuggacacacgaacgugugauuccaauguuccugcuuucagcu

SEQ ID NO: 4099215 - RNA, 87 nt, Human
agccagagcugguuaacaggcacugccuugcagggcccgccuggugcugugcagucuuuggugugccugcaggagccaugcauggcu

SEQ ID NO: 4099216 - RNA, 60 nt, Human
agccagagggaucuuucuaagaugcguacauugcauguuggauaauguuucuuuuuggcu

SEQ ID NO: 4099217 - RNA, 59 nt, Human
agccagcaucuugcuucuugagaaaaguguuuuuuaaaaagguaaugguguuccaggcu

SEQ ID NO: 4099218 - RNA, 97 nt, Human
agccaggaaauugugugggugcccuuuuuaaaacaucaagcugaaugaaaugaugauuugacaccuggggcauauauaugguugaacacaagugguu

SEQ ID NO: 4099219 - RNA, 65 nt, Human
agccaggauggggagcagauagaaucagagagaccuagauuuuaaucaugcuucuauguccuacu

SEQ ID NO: 4099220 - RNA, 84 nt, Human
agccagggcaggcucaggaggcucaagaccuggcacuguucaguggcugggauggggucuggccucugcaggcccugccuggcu

SEQ ID NO: 4099221 - RNA, 60 nt, Human
agccagggcugcagguuccuuggugagcuuugcaaaucguccccgaccucagugcuggcu

SEQ ID NO: 4099222 - RNA, 60 nt, Human
agccagguuaaaccacagucaagccuggcagucaggaaaacuguguguaggccuaaggcu

SEQ ID NO: 4099223 - RNA, 76 nt, Human
agccaguauacagaucacauaaguaaaaauuuuuuggaagaaaauuuucuaaggugaugaucugacaacuuugguu

SEQ ID NO: 4099224 - RNA, 56 nt, Human
agccaguggaauucccagggguuucucaaacauaccuuugggacuuauccauggcu

SEQ ID NO: 4099225 - RNA, 129 nt, Human
agccaguggucaaccaacuugcuaagaugguaggggacauuaagagucagaguuggggaacaaaucugagucuuggggucccuauuuccaacacuuagauuauauacgaguuauauuacacuacugguu

SEQ ID NO: 4099226 - RNA, 75 nt, Human
agccauacuauauuaggggaaggauagggagaaaagcagaaacagucuccuuaugcuacuagaaauaaaauggcu

SEQ ID NO: 4099227 - RNA, 65 nt, Human
agccauaucaagcauucuucacuugaaguaucuugccagcuucugaguaaugcuuugauuugguu

SEQ ID NO: 4099228 - RNA, 56 nt, Human
agccauaugcacacauacuucucaaaccuugacccaaguuugugugucuaugcgcu

SEQ ID NO: 4099229 - RNA, 68 nt, Human
agccaucccaagagggcucugccaaaguggccacuuguagggcgauuggccccaucaagggaugaguu

SEQ ID NO: 4099230 - RNA, 129 nt, Human
agccaucugucagcacuguagccacuuggcguggcaugggguccugggcugcuggggccuccccuccuaauaccugccuuguccccagguccucugccguccacaggucaggcagggcugcugaggccu

SEQ ID NO: 4099231 - RNA, 60 nt, Human
agccauggaaagcuaagccauuuaccuauuaguauaggugcccgcaaugguuuuccugcu

SEQ ID NO: 4099232 - RNA, 59 nt, Human
agccauggagcaagagccgaaagccuuuuauuuggaggcuggccuauuucuuuaucgcu

SEQ ID NO: 4099233 - RNA, 101 nt, Human
agccauuuguucuuaguuucugugucugguugggccaguaaagcccuuuccucaucccucuuucugcuuaucacuagagacagaaacuaaaaacuauggcu

SEQ ID NO: 4099234 - RNA, 85 nt, Human
agcccaauuaagauauauuugcuuuugugccacagauucuaugcuuuuccaaauagaacuguuagaugcuaagcaaauggggacu

SEQ ID NO: 4099235 - RNA, 55 nt, Human
agcccagcaggacagagugguuuggaaugcagcauucaguguguucuguuuggcu

SEQ ID NO: 4099236 - RNA, 60 nt, Human
agcccagcuuuuugaggcaggcaggcggggccccacuugcucgccuucaggacuugggcu

SEQ ID NO: 4099237 - RNA, 56 nt, Human
agcccagguucuaaagccaaaccaaguucaaauucugcuuuggccaugaccuggcu

SEQ ID NO: 4099238 - RNA, 68 nt, Human
agcccaguuacugauuccuuuggccuaagcaagacaggucaauuuuuaaagagggaguagcugagguu

SEQ ID NO: 4099239 - RNA, 62 nt, Human
agccccaagucccuauguuuccaccccuuucuaaggacaggcguggaggagcggcuggggcu

SEQ ID NO: 4099240 - RNA, 58 nt, Human
agccccacguugucuagcaccuauggcuuuacuaucaccucucuaguaguguggggcu

SEQ ID NO: 4099241 - RNA, 64 nt, Human
agcccccacacauaugcagaucccccacaaacucucacugugugcguguguaugugugugugcu

SEQ ID NO: 4099242 - RNA, 110 nt, Human
agcccccuggggagagaaaaacaacucuucucugcagccuuugaaggaaggagagccuucuuuuaguagcccuuggaggaagguuggccucuuucuuugccuguaggguu

SEQ ID NO: 4099243 - RNA, 129 nt, Human
agccccugagaacacagcuccucaccauggacuguaccugggggauccacuucuugguggcagcugccacagguaaggggcucccaaguaccagugaugaggaggggauugaguucagucaagggggcu

SEQ ID NO: 4099244 - RNA, 65 nt, Human
agcccgauguguuauucagcuuucuauuagcaaagcauaguaaagugucuuaacacauaguggcu

SEQ ID NO: 4099245 - RNA, 95 nt, Human
agcccucaacucucagggucagaacgcugugacacugaacuccaaagcaauugcguuucucaucaguuucugauaucuagaaguaagguagggcu

SEQ ID NO: 4099246 - RNA, 77 nt, Human
agcccuccauuaugagcagacagugguuuuacaaauccucuaauccccugaaauguaauacugucucuggagaggcu

SEQ ID NO: 4099247 - RNA, 57 nt, Human
agcccucugcaaacaccugauaaugcugaagaguguguuagucauuguagaggagcu

SEQ ID NO: 4099248 - RNA, 68 nt, Human
agcccugauaggagggugaccucaggguucaaagucacugcugggucccaggucccucccucgaggcu

SEQ ID NO: 4099249 - RNA, 63 nt, Human
agcccugcacaguucgggaggagcguggccucaggggaacgcaggcccagggcugccagggcu

SEQ ID NO: 4099250 - RNA, 64 nt, Human
agcccuggcuggauggagccccugggggagccaguucccagggacuccccauccaugucuggcu

SEQ ID NO: 4099251 - RNA, 56 nt, Human
agcccugguuugcagcauuugcccauuucugugguguaaauacuuccaccauggcu

SEQ ID NO: 4099252 - RNA, 128 nt, Human
agcccugugaggacagacugacauggccuggagagugcggcaauccauugcugcagagaguggagcaggcggcgcucacucucagugcccagguuaguucuguuuuucuccauuacaccacaagggcu

SEQ ID NO: 4099253 - RNA, 70 nt, Human
agcccuuaguacauuucucaaguuuccaggacauucuauaaggauuagguugagaauuacugacuuggcu

SEQ ID NO: 4099254 - RNA, 65 nt, Human
agcccuucaguguuuguagagauaacugucagugucaacuuugaaaguuguagcacugcagggcu

SEQ ID NO: 4099255 - RNA, 58 nt, Human
agcccuugcagacugucagcauuggagugggccccacaugaaggcagugccaagggcu

SEQ ID NO: 4099256 - RNA, 57 nt, Human
agccgcucugucuaacuuaaacagagaaggaauuuguuacaagcaccacagguggcu

SEQ ID NO: 4099257 - RNA, 82 nt, Human
agccggagccaguggaguggggcgaagucggcgaguuggaaacuuccugcaaucguccacuccuagccuuuggcguucggcu

SEQ ID NO: 4099258 - RNA, 129 nt, Human
agccuaacauacaucaccugacugcuuaauuuauacauuuauuauucaacuauguauugagcuacaacuauguaucaggcacuggcugagugauggggauagagcagucaacaaaaugagacaacagcu

SEQ ID NO: 4099259 - RNA, 61 nt, Human
agccuagaagaaguggcuacuucugccugugguuuauagcccuacuuuauucuagacagcu

SEQ ID NO: 4099260 - RNA, 64 nt, Human
agccucaaguguaagacaaugcgagcugugcaaagguuggcaggucuggagggcacugggggcu

SEQ ID NO: 4099261 - RNA, 63 nt, Human
agccuccugggcaagaaacagguuguauacauuaagcaauagaagcugaggcuuagagagguu

SEQ ID NO: 4099262 - RNA, 71 nt, Human
agccucuagcccugggaggccagcuuguagcuccuuaucuggcauugcagaagaccuuccagggcugagcu

SEQ ID NO: 4099263 - RNA, 127 nt, Human
agccucuccacacccccaaaccguuugcucgaaacuugaucuccuuggcccucagagucaccucaguggagaagccugcacagggcuuugauggcugaguuuccccagauguggccuuagagaagcu

SEQ ID NO: 4099264 - RNA, 77 nt, Human
agccucuucucuuggcccucuccacuuguaguccaugccguagacugugcacccuggacagugucacauagagugcu

SEQ ID NO: 4099265 - RNA, 80 nt, Human
agccugaaugaaagagccaguggugagacagugaguugauuacuucucacuguuucaccacuggcucuuugguucaugcu

SEQ ID NO: 4099266 - RNA, 67 nt, Human
agccugacuuguaacauuuugccaaugucugugugauaaauacugguaccaugacaaaugucagguu

SEQ ID NO: 4099267 - RNA, 64 nt, Human
agccugagcacccaucugccuguugggccaccgggcagcuucugcagaugggagucaucaggcu

SEQ ID NO: 4099268 - RNA, 70 nt, Human
agccugccuugggcugcuugagaaccucugcugagucagcacucacuggggcagcggcccagccagagcu

SEQ ID NO: 4099269 - RNA, 91 nt, Human
agccugcguccuaaacgugcaaagcacuucacucccaugcaaaagcagguucuggggaagagcauugcacgguguuuuaagaccacaggcu

SEQ ID NO: 4099270 - RNA, 55 nt, Human
agccugcugggaagggaggcuuccuaucugggggggccuggaagucaaguagguu

SEQ ID NO: 4099271 - RNA, 79 nt, Human
agccugcuguagugagcaaagguuaaacauuuacuauuuuucagucuuguguuuauuuuguauacguaaguauuuggcu

SEQ ID NO: 4099272 - RNA, 60 nt, Human
agccuggagcuugaguuaugaguucagccgugccaugaacuccuugggccauuccuggcu

SEQ ID NO: 4099273 - RNA, 55 nt, Human
agccuggagguaaugaggaaacuacuuuuuccauguauacguuaccuuuuaggcu

SEQ ID NO: 4099274 - RNA, 56 nt, Human
agccuggcugucaccuggaaagagaaggacucagucuccccaggcuauaccaggcu

SEQ ID NO: 4099275 - RNA, 74 nt, Human
agccugggaugcugcuaucauuuuuacagagacuuuuuucuucuucugacagaugcugcuggcaguaccagccu

SEQ ID NO: 4099276 - RNA, 123 nt, Human
agccugggauugugcaacuuuaauuggcauguuuuuuggcaaucuguuugaugcuugugauaccugacugguauagcuagcacgaugcagguggcuguuaauguauagugcacaacccaggcu

SEQ ID NO: 4099277 - RNA, 61 nt, Human
agccugggguuucaguuugcacccaagcaauagccacaaaguaaguugagauugccaggcu

SEQ ID NO: 4099278 - RNA, 61 nt, Human
agccuggguccuugcugauugcugagcgggcagugcagcuuugucaugaggacacuuugcu

SEQ ID NO: 4099279 - RNA, 57 nt, Human
agccuguggagcaauggcaucaccuaauccuuccugguuggcuguggcucccagguu

SEQ ID NO: 4099280 - RNA, 66 nt, Human
agaggccuggaauuccagccugggccaugggggccugagcuguuuaaucccagauaaccugccucu

SEQ ID NO: 4099281 - RNA, 62 nt, Human
agaggccuuggcugucuuauucguugcugaaucuucagugccuaggacagggccuggcuucu

SEQ ID NO: 4099282 - RNA, 61 nt, Human
agaggcugauauuagcucauggauuuucacggauagaaaaaucaugaaauaucaguucuuu

SEQ ID NO: 4099283 - RNA, 56 nt, Human
agaggcugauggaguagugucuuuaaaacuuacaugauaguuuaccuucagccucu

SEQ ID NO: 4099284 - RNA, 77 nt, Human
agaggcugauuucacucuucaggauugaaacgcucugguagaaaaguuguggagcaaucuuuaaggacucagucucu

SEQ ID NO: 4099285 - RNA, 69 nt, Human
agagggaaagagaggaggcugaggacugggggcuccagcucaucugaagccaccucugcuugucccuuu

SEQ ID NO: 4099286 - RNA, 129 nt, Human
agagggaauugaacaggcaaaggccuauuuuaggaggcucugugacuaaagaggauuauacccaucuucuucaaggaucuggagcguauucugauuuaaugguggccugauaagccaaagaucuccucu

SEQ ID NO: 4099287 - RNA, 62 nt, Human
agagggcuaagguuugggagauucacaccuggaagcaucugaccccaaaacccaugcucuuu

SEQ ID NO: 4099288 - RNA, 60 nt, Human
agaggggcaaguaaagagucuuucuauaguuugaauuuuaagaucucguacuugcuuucu

SEQ ID NO: 4099289 - RNA, 63 nt, Human
agaggggcuguugaaguuaguugagcuuuugaaguuggggaaacuucagcuagccucauuucu

SEQ ID NO: 4099290 - RNA, 79 nt, Human
agaggguacagagggcagucucagauugggaagugcguccacaggcuucccacagaggcucugcccuuugguaccuccu

SEQ ID NO: 4099291 - RNA, 74 nt, Human
agagggucaagaaacacaggagaaggaagaaugucauagcacaucaucaucuaaauugugucgcuaaacucucu

SEQ ID NO: 4099292 - RNA, 63 nt, Human
agagguaauuacuauguucagauuccugggaccuuuccagguaucugauguauaaauaccucu

SEQ ID NO: 4099293 - RNA, 60 nt, Human
agagguauuagguaauucaguaggcaaaaugacuuggccuacugaugucagauagccucu

SEQ ID NO: 4099294 - RNA, 70 nt, Human
agaggucacaguaaaagucacucuaaaacagagcuccaaauucaauagggauguggcuuuuugaccugcu

SEQ ID NO: 4099295 - RNA, 73 nt, Human
agaggugagccuaaauaauugugagccauaauugcaggacuuggccaagaaugauaggcucaguuacuccucu

SEQ ID NO: 4099296 - RNA, 94 nt, Human
agaggugcaaaauugguaggggagaguagagggucugauugaaauucugucccuggaacaagaagccaaucagcucucugcuccucucuucucu

SEQ ID NO: 4099297 - RNA, 72 nt, Human
agaggugccacauuuggauaaauauuuaauguucuuuaagcauguuuuaaguguucaaacguacacauuucu

SEQ ID NO: 4099298 - RNA, 64 nt, Human
agaggugcuagaaaaccuagaugccugugauuccauuucaaggcuucacauuuucuaggccuuu

SEQ ID NO: 4099299 - RNA, 73 nt, Human
agagguggcuccaggagcaaugcucugagguuccauggaaggugugaucuugcugugcucccagcccaccucu

SEQ ID NO: 4099300 - RNA, 120 nt, Human
agaggugggcaggcucuggagaaagggcugagaaguggggcuggcguuuccuuccuccuccccugagcuccauccucugcccuacuuucaugucucccccucccagcucucccuaccucu

SEQ ID NO: 4099301 - RNA, 89 nt, Human
agaggugggcagugguguuggcuggaccugggcuggaauucugggggucacuaguuagguuucugucuccagcuaagcugcagaccucu

SEQ ID NO: 4099302 - RNA, 66 nt, Human
agagguuuaacuggcuuaugguucugcaagcuauacaagcaugccacuagcaccuguucaacuucu

SEQ ID NO: 4099303 - RNA, 68 nt, Human
agaguaaccuuucaggcauguagguuugacccucugaucacaggcuuaaaacuuugaaaguguucucu

SEQ ID NO: 4099304 - RNA, 78 nt, Human
agaguaaguagucagacauaccccaugcauuacuauucauaaagucgugguggugguugggcuauuuucugcaacucu

SEQ ID NO: 4099305 - RNA, 59 nt, Human
agaguaagugguagagucaggguuagaaacuaggcagucuggcucaaaauacguacucu

SEQ ID NO: 4099306 - RNA, 83 nt, Human
agaguacuuaguucucuuguuguccaguauaucuaauaaguguuucauauuauuuccacauaagggaaauaagggaguacuuu

SEQ ID NO: 4099307 - RNA, 69 nt, Human
agagucagugcaagcuggcuaggaaggugggggcagccacaaaguccugguaggcuaugucaugucuuu

SEQ ID NO: 4099308 - RNA, 86 nt, Human
agagucagugucugaugcuugcaacaaagaacccugacugacacguagaggguuuucuuauuguaaaguguugucggcacugcucu

SEQ ID NO: 4099309 - RNA, 64 nt, Human
agaguccaggcaucccucccauagcccauagccaaguaugggagaagggugcuucagggucucu

SEQ ID NO: 4099310 - RNA, 71 nt, Human
agaguccccaguacaaggaagcacauauuuuuggauuuugccgugugaccuugucuggcuggcuggacuuu

SEQ ID NO: 4099311 - RNA, 75 nt, Human
agagucgcugagagagcagaugugugccaggaugcuguucccgcagccaccuggaccucugccuguacugacucu

SEQ ID NO: 4099312 - RNA, 71 nt, Human
agagucugagcagaaauccacuguucugcauguggggaaagguuuaaggcacagaggcauuuucagacucu

SEQ ID NO: 4099313 - RNA, 71 nt, Human
agagugaauguucguugcuuuaagccacuacgugugggugacuuguuaaggcagcaacggaugaacacacu

SEQ ID NO: 4099314 - RNA, 61 nt, Human
agagugaggcccagccaccuagguuuuaacaggaccucccaggaaugcugaggcucacuuu

SEQ ID NO: 4099315 - RNA, 58 nt, Human
agagugaugauuaacuucauaugagguacuuaacgugccugaauuagaauuauccucu

SEQ ID NO: 4099316 - RNA, 58 nt, Human
agagugcagaggucaaagaacaggagcuucauuguuuuacaucaacacucuguacuuu

SEQ ID NO: 4099317 - RNA, 81 nt, Human
agagugccgggaagggcauuuagagacucugccguagcgcuaccauugccugggcaggcuccagagcccucuccccuuucu

SEQ ID NO: 4099318 - RNA, 56 nt, Human
agagugcuagccugagggagguggagaaccuagaauccucucuuuucuggcauuuu

SEQ ID NO: 4099319 - RNA, 65 nt, Human
agaguggcagcaagucagguagacuaaggauucuacaggauucugacuccuggcucugucauuuu

SEQ ID NO: 4099320 - RNA, 55 nt, Human
agaguggguuauaggcagacuugggagaccucuccccaaggccacaagucacucu

SEQ ID NO: 4099321 - RNA, 98 nt, Human
agagugugagcauucaagggcaccuagaaacugacagaauauuucccuuaaguauuauuaccuucuaggucaccugccuuuugcuuucucugcacuuu

SEQ ID NO: 4099322 - RNA, 56 nt, Human
agaguguggaaauguucagaguacuucggaaggggugaaagacuuucuacgacucu

SEQ ID NO: 4099323 - RNA, 84 nt, Human
agaguuauauuuugauucauauaagaguauggacuugagcuucaaaggaauaauaaggccaaacuauuauaguucaaggacuuu

SEQ ID NO: 4099324 - RNA, 71 nt, Human
agaguuaucuucuucuaaagcuuaaaauaagaacuacuuaaaagcagcgaauuuagaagaaugagcacuuu

SEQ ID NO: 4099325 - RNA, 56 nt, Human
agaguugggcaaauuaucccagauauucugcagucagggaugagaguccuagcucu

SEQ ID NO: 4099326 - RNA, 121 nt, Human
agaguuucaccauauuggccaggcuggucucgaacuccugaccucgugaucugccagccuuggcuucccaaagugcugggauuacaggcaugagccaccacgcccggccgccaagaacucu

SEQ ID NO: 4099327 - RNA, 72 nt, Human
agaguuugaagcagaggagggucgugaucuaaauguuuuuaacaggcucacucugacuucuaagaauacucu

SEQ ID NO: 4099328 - RNA, 57 nt, Human
agaguuuguguccuuuaucaggaagcauuggcaucaaauggggagggcauaaauucu

SEQ ID NO: 4099329 - RNA, 130 nt, Human
agauaaauauugauagaauaguccaacuagaaugccugaggccugcuuggaauugaauuuugaaugcauagaacaaaaauguuucaauuaagucuuuuaguucaaguuguuugguuugguguuuugauuu

SEQ ID NO: 4099330 - RNA, 73 nt, Human
agauaaauuuuagugcuggggucauauugauuuuuauccauugcacugugauuuccagccauuaaaaaagucu

SEQ ID NO: 4099331 - RNA, 78 nt, Human
agauaacuaauuaguauuuuuggauugaacacgacaggguuuauacaggcugcuucuaaucuacugcauuaguuaucu

SEQ ID NO: 4099332 - RNA, 72 nt, Human
agauaaggaagagagcagcaaacuggagucacuacaggacacuagcugcuccaggcugcucugucccauucu

SEQ ID NO: 4099333 - RNA, 60 nt, Human
agauaauggagggauuugcauuuugcugaagaaaccccaaagugcccuccgacauuguuu

SEQ ID NO: 4099334 - RNA, 74 nt, Human
agauaauucaugacguuuuauucccaugcagcauuugaugacaaaugaggcacagagauguuaauggcuugucu

SEQ ID NO: 4099335 - RNA, 58 nt, Human
agauaccccaguguugaugccugguuguuccauuaugccaggacuccauggggucucu

SEQ ID NO: 4099336 - RNA, 56 nt, Human
agauaccuacuuggaucuguucugggguuccaaucucuccaaauccuaggaugucu

SEQ ID NO: 4099337 - RNA, 85 nt, Human
agauaccugaaacaaaaugucagcauugaugaaauguggguaguguguccauccaugguguugguuguauagcuucuggauauuu

SEQ ID NO: 4099338 - RNA, 69 nt, Human
agauacugaaauccaauggccaguggaacaacuuagcaaugccaaaaaccauucacugauucaguaucu

SEQ ID NO: 4099339 - RNA, 80 nt, Human
agauacuuacaugaauucaagagcaguuauuaucaacguguaccugaaaaaaugugacucugccuugauguuaaguguuu

SEQ ID NO: 4099340 - RNA, 98 nt, Human
agauagauagauagacagaugauagauacuuguagauacagacuaugcuugaugcucuaaauccaaauaaguguccaauuaauuagcuauuuucuucu

SEQ ID NO: 4099341 - RNA, 65 nt, Human
agauagccucaagugaagugguuagcagacugucaaguggugcucugcuuuacuucagaggaucu

SEQ ID NO: 4099342 - RNA, 77 nt, Human
agauagcuaacuccauggcagacaagcugaugcuccccguuggagggaggccuuagcuuuucucuauguuggcuucu

SEQ ID NO: 4099343 - RNA, 96 nt, Human
agauagguuaaaaagccaucaguaaaaugauuuagaauucguaugcacagugaaugugugggccaagucauuugcugagguggcaucuaccugucu

SEQ ID NO: 4099344 - RNA, 55 nt, Human
agccuugaaccaauuguuuagcuugaagaaugcagcuuuuugauuggccaagguu

SEQ ID NO: 4099345 - RNA, 75 nt, Human
agccuugaagauuccacagcuacaucaaucuagagugguuaucuugguucuuacuguguuguggucuguagggcu

SEQ ID NO: 4099346 - RNA, 78 nt, Human
agccuugaauuagcaguagacagacuggguuuggaggaaccacagauuuggggucuccuguuaguucaucuuuagguu

SEQ ID NO: 4099347 - RNA, 56 nt, Human
agccuugacacuggggaaacugggaauguggucgcagacuuccuaugucaaguguu

SEQ ID NO: 4099348 - RNA, 69 nt, Human
agccuugggggaccgcagaggaggccaccgcauaggccaggcauaugcagggucuccaucuccccagcu

SEQ ID NO: 4099349 - RNA, 77 nt, Human
agccuuguggguuacucaggccccuugucagcucugugaucauccuucacaccugaaagcuuguaacccgagaggcu

SEQ ID NO: 4099350 - RNA, 60 nt, Human
agccuuuaagcugccacagcugcuaagagaugccuuauaugcuggaagggcuagagggcu

SEQ ID NO: 4099351 - RNA, 59 nt, Human
agccuuugauaugccaggcuggaaaaagaacaagacuagcauuggcauucacagaagcu

SEQ ID NO: 4099352 - RNA, 57 nt, Human
agccuuuguuccuucuggaaugguacaagaagagucaaugucuaggagagcagagcu

SEQ ID NO: 4099353 - RNA, 67 nt, Human
agcgaaauuuugacagcucgccuuugggguguaugucaccucuuggcuggucauuuaaaaucauguu

SEQ ID NO: 4099354 - RNA, 63 nt, Human
agcgaagcuuaagaggcuguauucuugcuuaagcacgcacagcuugaaucuuaagcucuugcu

SEQ ID NO: 4099355 - RNA, 130 nt, Human
agcgaagguggccaucggugagugagcaagugaucgccuggcugggcaccaggggaggcggaaagaacaugagaacaagccuccccacugcugcccgccuggaagcugucgaucucccacagggcccgcu

SEQ ID NO: 4099356 - RNA, 66 nt, Human
agggcaaaucuuucccuuuacuauccagagcuuucccuuuggauaagagguugaugguagagaccu

SEQ ID NO: 4099357 - RNA, 55 nt, Human
agggcaaguugagugugcgugggcaugaaggauucacuguacgcaucccagcccu

SEQ ID NO: 4099358 - RNA, 76 nt, Human
agcauuuagaguugaguauucauugguccagcucuucccauccagcuuugucacuuaugccagcucuggaagugcu

SEQ ID NO: 4099359 - RNA, 79 nt, Human
agcauuuaugucuuucucauacaagcccaagaagaugaacuuaauucuguaaauggacuucggaaagauaauaguugcu

SEQ ID NO: 4099360 - RNA, 68 nt, Human
agcauuuggggcauuuaguuuucauauucugaaacuguuuagaagauaagacaagugcugccuuugcu

SEQ ID NO: 4099361 - RNA, 61 nt, Human
agcauuuuuuugaggcuuuagacaaaaaguguaaauagagaaucagcuuggagaagauguu

SEQ ID NO: 4099362 - RNA, 76 nt, Human
agccaaaauuaagccucuuauguugccuuggauucuguuacuuuaaauaggcacucaccagauuauaauuuuggcu

SEQ ID NO: 4099363 - RNA, 63 nt, Human
agccaaauauaaagugguuuuggccaggaguuccccggcuaaguccaaggguaugaguuggcu

SEQ ID NO: 4099364 - RNA, 59 nt, Human
agccaacucgaaagcagggugaacagcuugaguccuguugcugcugaucgggguuggcu

SEQ ID NO: 4099365 - RNA, 85 nt, Human
agccaacugcuuuucuucagcagccugaugccccauucuuucuugagcaaaaauaugagauacucugaagugaguuaaguugguu

SEQ ID NO: 4099366 - RNA, 62 nt, Human
agccaagaguucuuuagcgguggaagaagauggggucuuacacgaauggaagggucuuggcu

SEQ ID NO: 4099367 - RNA, 57 nt, Human
agccaaggacucagugguaggcguggaauggcuuugcgaaaucccugauucuugguu

SEQ ID NO: 4099368 - RNA, 65 nt, Human
agccaaggguggcaccuggaagggauggguuacaaagagccguccacacaccugcacucugggcu

SEQ ID NO: 4099369 - RNA, 57 nt, Human
agccacacuugccaggggaagggacuugucccaaaagacccuggaggaguguuggcu

SEQ ID NO: 4099370 - RNA, 56 nt, Human
agccacagagagggagcugcaaauuuuguguauaaauucuguccuaaucuguggcu

SEQ ID NO: 4099371 - RNA, 56 nt, Human
agccacagagcaggagaccuuuuccaagcagagagggucuuccuggcacugugguu

SEQ ID NO: 4099372 - RNA, 61 nt, Human
agccacauggcuaauacgccacuggacacagaugugugcaguuuuguguuugcugugggcu

SEQ ID NO: 4099373 - RNA, 67 nt, Human
agccacauucugcuguugaauguagcuuuaugcucagcagcuacauucaacagcagaguuuuaagcu

SEQ ID NO: 4099374 - RNA, 74 nt, Human
agccacucacagggccucaguuuucccaucugcacagggagaagggaagguucaguggcccugugagcuuugcu

SEQ ID NO: 4099375 - RNA, 61 nt, Human
agccacucagugcuguauugacagaaauuaaauuagccaucagugcgggcaaucaguggcu

SEQ ID NO: 4099376 - RNA, 58 nt, Human
agccacugucucuggcacuaguucuuuccagacaagagcucuuugcuggcaguaggcu

SEQ ID NO: 4099377 - RNA, 59 nt, Human
agccagaagaggagaaguuggguuuaaaacuacaucuaccauaccuaccucaccugguu

SEQ ID NO: 4099378 - RNA, 74 nt, Human
agccagaaguucaagaucaagguuccagcaggguugguuucuucugaggccucuuuccuuggcuuuagauggcu

SEQ ID NO: 4099379 - RNA, 55 nt, Human
agccagagagcggggcuuagggagacuggccuuggagaugccccacucccugucu

SEQ ID NO: 4099380 - RNA, 122 nt, Human
agccagagcaagacucacuggcacuguggacugaugcucccuauugaagcuaaucuugcucuguuuauuuuccauguguuaaagcaucgcuccaucagugucugcaugagucaugucuuccu

SEQ ID NO: 4099381 - RNA, 72 nt, Human
agccagagcaggggagaaaacugcaggucuaccacauggcaggccagcauucucucuccaggccaacaggcu

SEQ ID NO: 4099382 - RNA, 103 nt, Human
agccagaggcuuguuagagagggguguggagaagaaggccacugcagggaugagcccugggccugauuuaucaucuucacagcugaucugagcaagagggguu

SEQ ID NO: 4099383 - RNA, 129 nt, Human
agccagauagagcucaaauuuccuugucaucagcaacgaucacaggcaaaucuucagcucaaggaauuucagcuuugcugaggcagaugucugugacucugggacugggaccagguugacuucuuagcu

SEQ ID NO: 4099384 - RNA, 60 nt, Human
agccagauccaggagacagcucaaaagccugaccuugacuuucuccagguaagucuggcu

SEQ ID NO: 4099385 - RNA, 61 nt, Human
agccagccagacuuuaaaauagaugagaccauucuuagucuuggugagucuugguucagcu

SEQ ID NO: 4099386 - RNA, 79 nt, Human
agccagcucaaauugucuucagccaaaacagaauuauauugauucauguaggcugcaaugcacaagggguaggguggcu

SEQ ID NO: 4099387 - RNA, 66 nt, Human
agccagcucuuggcucauggagagcaaggaccacuccucuugcaugagauccaggagucccuggcu

SEQ ID NO: 4099388 - RNA, 130 nt, Human
agccagcugcuucugcacgcuuuucggguggguaguuguuuaccccuggagccugggcugcuugcugccuggcauggggcucccuggcccuggggacacaacccaccccuugagaggagucggcauggcu

SEQ ID NO: 4099389 - RNA, 56 nt, Human
agccaggauuugaaccugcauccagugauguacuggguaauauuuaacuccuggcu

SEQ ID NO: 4099390 - RNA, 118 nt, Human
agccagggccccaacacuaugacaugccagcaccuuccugcucccuggcuacagaaaagcagcuugcagggggcaucagguccuggcuccaucauuuaccagcuugggggccuuggcu

SEQ ID NO: 4099391 - RNA, 63 nt, Human
agccaggguggacauuuccacaagcuuggacacccuccagcucacaguguccuuccucaagcu

SEQ ID NO: 4099392 - RNA, 76 nt, Human
agccagucuucggcuguuaugcaguguaauuuuaugggaauaguuuuauaauguuaacaucuguagacugagagcu

SEQ ID NO: 4099393 - RNA, 77 nt, Human
agccagugagagcuuauaagcaucaggaccaaguauaccuguauuugucucucuggguuuacuuaacuccaaaggcu

SEQ ID NO: 4099394 - RNA, 55 nt, Human
agccagugcaacagcagugaaguuauucuuugcuacaauacugcuccacuggacu

SEQ ID NO: 4099395 - RNA, 57 nt, Human
agccauagagccgggauaagaaagagccuucugcccuggcugccuggcucugugguu

SEQ ID NO: 4099396 - RNA, 73 nt, Human
agccaucacaguauugcuggagauaacccuauugacuuucccuuggguggugucaagcagaacugugaagguu

SEQ ID NO: 4099397 - RNA, 59 nt, Human
agccaucauuucugucacuggcuauagcacaugcacagaaggacaguagagugcaggcu

SEQ ID NO: 4099398 - RNA, 59 nt, Human
agccauccuccacagccuugaucaccugggccacagggguggggagcagagaggaggcu

SEQ ID NO: 4099399 - RNA, 65 nt, Human
agccaucuuaauggggccaugucucaguguaauagaaagagaaaguggcuagcauuaaaaugacu

SEQ ID NO: 4099400 - RNA, 67 nt, Human
agccaugagaaugaagaagacuuaauggauaucauccuccuuuauaaucuauuugguucacauugcu

SEQ ID NO: 4099401 - RNA, 55 nt, Human
agccaugggagacugugggagacaaugcauucccuccggcucaguucccuuggcu

SEQ ID NO: 4099402 - RNA, 61 nt, Human
agccaugucaaccaguuguuugaauggaucagcccauuccaucauaggaauugaccugguu

SEQ ID NO: 4099403 - RNA, 57 nt, Human
agccauugaaggcacuugagcagaggagugaccugaucugacuuauccuucaaggcu

SEQ ID NO: 4099404 - RNA, 64 nt, Human
agccauugucccauugcgaaugugaguggaccccuccagacucacuuugccaugguauagggcu

SEQ ID NO: 4099405 - RNA, 64 nt, Human
agccauuugccuucucugaaccuauuuccgcaucugcaaaguggaaaucaaagagggcuuggcu

SEQ ID NO: 4099406 - RNA, 63 nt, Human
agccauuuuccugaaauauaacauguuuauguccuuucuagacauauggagggaucaguggcu

SEQ ID NO: 4099407 - RNA, 76 nt, Human
agcccaaagcaaauaucuaaauggaauauuccagagcauugcucuggugguauacaucuaggaguuugaauggguu

SEQ ID NO: 4099408 - RNA, 69 nt, Human
agcccaaugggagagccauuuucugcacaaacauuaaggagaaagugguccugcaaacccguguggucu

SEQ ID NO: 4099409 - RNA, 68 nt, Human
agcccacccguccugcucgggccgccuuccugguccggaccgcgagugccgagagggcagggccggcu

SEQ ID NO: 4099410 - RNA, 62 nt, Human
agcccagaggguagcagaagaaagaaguugaauauuuuuucucucuguucuccucucuugcu

SEQ ID NO: 4099411 - RNA, 86 nt, Human
agcccagccucaaucacugaccugcagaugcaugagccuaauaaaugauuauuguuugaggucacugauauuugaggugauuuguu

SEQ ID NO: 4099412 - RNA, 61 nt, Human
agcccagccugauucuacacccugagaugacauaugggagggguggggaccaugcagggcu

SEQ ID NO: 4099413 - RNA, 56 nt, Human
agcccagugggccgaggcggggaguauuccauaauccaauugccugcucaggggcu

SEQ ID NO: 4099414 - RNA, 65 nt, Human
agcccauggggagauguaucagacugcacgggauaccugucagaggaucaugucccuacucugcu

SEQ ID NO: 4099415 - RNA, 77 nt, Human
agccccacaugggcgagagggcggccuucauucugaacccauuuaggcagcacgggcagcccuccucgccgugggcu

SEQ ID NO: 4099416 - RNA, 58 nt, Human
agccccaguccgcugcgggcgggcgucgacaucugccgcgugagcgcgagcuggagcu

SEQ ID NO: 4099417 - RNA, 70 nt, Human
agccccaugaaucaugccacugagcucccaaguuauugucaacuggguugacagccucagguaugaugcu

SEQ ID NO: 4099418 - RNA, 122 nt, Human
agccccccacuuaaagugaagaauuguguuuguguacaugcucaguuuguguacauguuuguauacauguucguguacauguucaguauuaucagccucuguuauuucuauguggggguguu

SEQ ID NO: 4099419 - RNA, 118 nt, Human
agccccccaggccccucccugucagccaugagcagccgggaggugugcaggcccuguagggaaccagcauugaucccaggcugugggauggggguggggagggaguaggagaggggcu

SEQ ID NO: 4099420 - RNA, 58 nt, Human
agccccuaaaguagcuguucuuaaccuggaaucugaagaacagccuguugguggggcu

SEQ ID NO: 4099421 - RNA, 77 nt, Human
agccccuauuaaucagauauaaacuguucauugacugugcgagcucaacugcacuguguggaaauuugugaggggcu

SEQ ID NO: 4099422 - RNA, 62 nt, Human
agccccugcugucagcauccucgcgagugacacagcucagccugccagcagcagcaggggcu

SEQ ID NO: 4099423 - RNA, 79 nt, Human
agccccuucaaaauuccaggaugcaggaggugcccuggucaccaggaggaguggcuccuguguuuggaaggguggggcu

SEQ ID NO: 4099424 - RNA, 63 nt, Human
agcccuagagcuggaggucaguggauucugguucugccuuggccuugacuuagcucugggacu

SEQ ID NO: 4099425 - RNA, 78 nt, Human
agcccucauuaucacacgccuugcuucauuuacuuuaucagaaagaaaaugguggugguggugguggugagaauggcu

SEQ ID NO: 4099426 - RNA, 55 nt, Human
agcccucucuauggcccucuuguucacacguugcuggagcuguaggugggaggcu

SEQ ID NO: 4099427 - RNA, 67 nt, Human
agcccugaagcuuaguuuacgcuccaaaguuucccuguggagucaggcuaaaggcuguucuugggcu

SEQ ID NO: 4099428 - RNA, 78 nt, Human
agcccugauuuggaaagagauacuacugcggaguuuucagcucuagcuccccuuccuggagugucuuccccaagggcu

SEQ ID NO: 4099429 - RNA, 90 nt, Human
agcccugcccugacuuccccagagaacuucuccuaaaucucagugaggcaagcacuggcauucaggagagcuuccugagaagggucuguu

SEQ ID NO: 4099430 - RNA, 55 nt, Human
aggaagguuuguuucucacuucccaggguauagcccagaggaacauucaccuccu

SEQ ID NO: 4099431 - RNA, 65 nt, Human
aggaagucaggaggugaaggagaaccagugcuaccaucuggcguuuacuuccuuccugucuuuuu

SEQ ID NO: 4099432 - RNA, 69 nt, Human
aggaaguucuauaucugccucaccaacacuucuuccaggaggguggagaaucagauaugaauuauuucu

SEQ ID NO: 4099433 - RNA, 101 nt, Human
aggaauaaauaucuaacauaaguugaaucuguuaaauugggaugaugauuaaagauaucgguuuuauaaagagagucaguuggccuuagauauguuauccu

SEQ ID NO: 4099434 - RNA, 60 nt, Human
agcugcgauuuguuuuuguccuauuagcuccugcaaaggacagaaacagauugcugggcu

SEQ ID NO: 4099435 - RNA, 90 nt, Human
agcugcgguccccuccucccuugaccucuaggcugcccaggacuaagaauuccagccuacagagggcagguggaggggagacagcuagcu

SEQ ID NO: 4099436 - RNA, 61 nt, Human
agcugcguuggaggcuguaggaccggguaugagaaaucccauuacugagccccgggcagcu

SEQ ID NO: 4099437 - RNA, 78 nt, Human
agcugcucuugaacuucucuuguagaggguuuucuagggggaagcccugagcacugcagagaacaguuggaagcaacu

SEQ ID NO: 4099438 - RNA, 62 nt, Human
agcugcuggugcuggagccuagucccuauguucaggcucagggaugguucugcacaguggcu

SEQ ID NO: 4099439 - RNA, 81 nt, Human
agcugcuuucugcaugcugugccuucucugugccagucucugcuuggcacagacagcacagcaaugaacaagggaguggcu

SEQ ID NO: 4099440 - RNA, 89 nt, Human
agcuggaagcacauauacuuuguaagugacuucuuauuaauaauacauucaaauauaagaagcauuauaacaugcaaggucuuccaacu

SEQ ID NO: 4099441 - RNA, 84 nt, Human
agcuggacuguuaucuggcugaggacagaaaaauucccuuacacugagaugggaaucuaaagcccaguggggaaauagcuagcu

SEQ ID NO: 4099442 - RNA, 72 nt, Human
agcuggcagagcauuuguggccucugcucagaugaaauuuuaagcuaaacaccaacagauccucugcuugcu

SEQ ID NO: 4099443 - RNA, 68 nt, Human
agcuggccuguuagagcugaguuguuuugggcugcaaugaggcccuugcucauuuucuggaggcagcu

SEQ ID NO: 4099444 - RNA, 111 nt, Human
agcuggcgcaugguagaugcucauaaauauuuguugagugcuuugaaaacugugaacaguucccacuagacugcuacuuaacaguuaucaggauuuauuuguguuccugcu

SEQ ID NO: 4099445 - RNA, 68 nt, Human
agcuggcucuguucgccaucaggaguucacacccacagagauucuuugaugagaaacaggguaaugcu

SEQ ID NO: 4099446 - RNA, 72 nt, Human
agcuggcuggccccuuccugccuucccguaagucggcccaacggagccaggaagguauguggcccagcggcu

SEQ ID NO: 4099447 - RNA, 55 nt, Human
agcuggcuucuuuaaagcacauacuuuuguaaagugugcuucagaagccauugcu

SEQ ID NO: 4099448 - RNA, 57 nt, Human
agcugggagcugcagugccgugaggguuauggagccuucagcaccauagcuccuucu

SEQ ID NO: 4099449 - RNA, 125 nt, Human
agcugggcauuguggugcacaccuguagucccagcuacucuagaggcugaggcaggaggaucacuugaguccaggaguuuaggcugcaaugggcuaugauugugccacugcacuacagccuggcu

SEQ ID NO: 4099450 - RNA, 58 nt, Human
agcuggggcugugguugugauuguggcuggggcugugguugugguuggggcugcagcu

SEQ ID NO: 4099451 - RNA, 66 nt, Human
agcuggguagauauaaaaacaagacuaaaguaugaucuucuaguaucuuucuauauuucccaggcu

SEQ ID NO: 4099452 - RNA, 81 nt, Human
agcuggucccccacucuaaaggagccuuuccuguucuuccaugccggaaggagcccgugguagaugggaggguguuuagcu

SEQ ID NO: 4099453 - RNA, 56 nt, Human
agcuguaauauaagcaaugaaaagaccguucuucacaugugucuuguguuacugcu

SEQ ID NO: 4099454 - RNA, 91 nt, Human
agcuguauccugacccagugcuuggcacuuugaaugagcucagcaagaguuuguugaacacuuagagugugagugcaugaguuagggggcu

SEQ ID NO: 4099455 - RNA, 56 nt, Human
agcuguauucucuuuguauuaauaucuuuaccguguuucacagggcagaaacagcu

SEQ ID NO: 4099456 - RNA, 57 nt, Human
agcugucucucugguguccauaugcauauguaucuuggugcaauaugagagauggcu

SEQ ID NO: 4099457 - RNA, 56 nt, Human
agcugucucugguauuaugugauauuugcacagcaaacuuuaaugccaggacaguu

SEQ ID NO: 4099458 - RNA, 56 nt, Human
agcugucuugaugauuggaugcuuaacagagcauauaaauucagccacagauaguu

SEQ ID NO: 4099459 - RNA, 76 nt, Human
agcugugacuccguuugcuggcuauggugucuccaggggcuggccccuggccuggcacagagcgguggucacagcu

SEQ ID NO: 4099460 - RNA, 57 nt, Human
agcuguuaucuucuaacuuuuccccugaagggccucgaagggcagagggaacagacu

SEQ ID NO: 4099461 - RNA, 57 nt, Human
agcuguugcagggaucagcaccugugccauccccacaguggcucccugaggacagcu

SEQ ID NO: 4099462 - RNA, 75 nt, Human
agcuuaagugcaggauguugggaaucaggacuccaauucauugaacaugugccugauccuuucaccugugaaguu

SEQ ID NO: 4099463 - RNA, 83 nt, Human
agcuuaagugcuuuugauugaguaaagaaagagggauaaggauuguuuauucuuuaccacuacucuuccaaagauuuuaagcu

SEQ ID NO: 4099464 - RNA, 71 nt, Human
agcuuaugcaauucucuuaauauucuugugguuucuuucuuggcuuauggauuguuuagaagugcauugcu

SEQ ID NO: 4099465 - RNA, 69 nt, Human
agcuuauuagaguuguguucuguuaccugcuacuaugacagcaaaaacaaggaauauucuaaugcagcu

SEQ ID NO: 4099466 - RNA, 61 nt, Human
agcuuccauacuaagacaaaaggguguaauuaugugauuuuugucuuuagcuauggaugcu

SEQ ID NO: 4099467 - RNA, 83 nt, Human
agcuuccuguacagaaauuccuacuacauuucuuuucucaugaugcacauuauguauaggaguuaucuguugugugggaggcu

SEQ ID NO: 4099468 - RNA, 98 nt, Human
agcuucgguggugacugcaucccucacauccgaggagggugagaugcucgccggccagcauucccuucuuaggaugggucaccgccaucggugaagcu

SEQ ID NO: 4099469 - RNA, 55 nt, Human
agcuucucaaguguuugcgggguugcaguaggcagcgcagagaugggaagaaguu

SEQ ID NO: 4099470 - RNA, 79 nt, Human
agcuucucagcgcaggugcccaugagcuccauggcgaugaagacguccgucugcagggagaggggcacccgggggagcu

SEQ ID NO: 4099471 - RNA, 68 nt, Human
agcuucugauguuuucugcuuuagcuacuguguucaccuucuggacuaaagaggaaagauguaaagcu

SEQ ID NO: 4099472 - RNA, 67 nt, Human
agcuucugcuguuuacugugugauaugcucacacacagaggagaugucauccggagacagugaugcu

SEQ ID NO: 4099473 - RNA, 62 nt, Human
agcuucuucuuggucuuucccaccuuuaacuguuggacuucuucaggacuaggucuugagcu

SEQ ID NO: 4099474 - RNA, 78 nt, Human
agcuugaggguugcaaaucagaaguauagauucaaauugcccugaauaugcacucugauuuagcaguacuugcaaguu

SEQ ID NO: 4099475 - RNA, 65 nt, Human
agcuugagguuauuuauuaugcaugaucauguuaaugguuacaugaauacauaaccauucauguu

SEQ ID NO: 4099476 - RNA, 127 nt, Human
agcuugauacacuggggcaaagccaguucuuagagaaagcuugauacacuacuuaaucuguuuuucccuuaaagaggcuggcuacaaaauaauaaugcuucuuuuuauguuucuuaaaaaaaaagcu

SEQ ID NO: 4099477 - RNA, 106 nt, Human
agcuuggcuggcaguucuuccagucucugcugggcuccucaugugacuguggucagcuacagcccacuggguagcucagcuucugggaguuggccagcuauuggcu

SEQ ID NO: 4099478 - RNA, 107 nt, Human
agcuuguacagcugcuuugauucaguaaagcuaaauuucuaagauuuccuugaccuuugcuuaaacugaguuugagacagacuauuuuucuuaucgccugaugagcu

SEQ ID NO: 4099479 - RNA, 80 nt, Human
agcuuuagggauggucagagacaggaucucgaagacugucuucaguccuuggucucucucucuuucuucaucucucagcu

SEQ ID NO: 4099480 - RNA, 62 nt, Human
agcuuuauucauuucaauauucucaggauuauauauuuugggacuggagcuuggagagggcu

SEQ ID NO: 4099481 - RNA, 112 nt, Human
agcuuugaauuuccugauguuuacauaguacaaagguuuauuagaagaggcugacgaaugucuaaaaggcucaguuucuucuauuguauuuucaaauagcagagaaauagcu

SEQ ID NO: 4099482 - RNA, 58 nt, Human
agcuuugagcugcuccugccuuugagacacauuggcugaagguccuuggcuggaaguu

SEQ ID NO: 4099483 - RNA, 75 nt, Human
aggaaaaagcauguggauucaugagugaaacagcagauaccccacugccaauuaccaaaucccgugcacauuccu

SEQ ID NO: 4099484 - RNA, 67 nt, Human
aggaaaagcauuuugccacuugaaguuaaggugugauucaaauuacaggauggcagagucaauuccu

SEQ ID NO: 4099485 - RNA, 92 nt, Human
aggaaaagugauggcaucuauaucauaaaucugaagaggaccugggagaagcuucucuggcagcuugugcuguuguugccauugaaaacccu

SEQ ID NO: 4099486 - RNA, 87 nt, Human
aggaaaaucgcugaucuacaggaaguaaguaaugaaauuaaacuagaauauccaagaguuuagacuuucuguccagugauuucuccu

SEQ ID NO: 4099487 - RNA, 86 nt, Human
aggaaagcaggacugucaugaucgaagaugucacagagugcacacaauuuugauaggaaugaucaugaucagggaaugguuuucuu

SEQ ID NO: 4099488 - RNA, 107 nt, Human
aggaaaggcaugaugagugggggaaggauuggggaaggaggguuguacaaaaggaucagaaauauuuucccccuuccacagugcuuccuaaaaauucugccuuuccu

SEQ ID NO: 4099489 - RNA, 56 nt, Human
aggaaaggcucugugguuccuaaaggcucagacucuuaacuacagcgcacuguccu

SEQ ID NO: 4099490 - RNA, 62 nt, Human
aggaaaguauacuuuguggaugcacaucagaacauuccgugccuuuacaauuuugcauuccu

SEQ ID NO: 4099491 - RNA, 66 nt, Human
aggaaauaaggaagucacaagaaucgcuaggagccuauuuuaggugauucuaaggggcugccuccu

SEQ ID NO: 4099492 - RNA, 92 nt, Human
aggaaaucagaagcucugccugucagcagcuuaagauuaauauauggguuuggcaagaaaaugugauugacaggcacugcuauugucagccu

SEQ ID NO: 4099493 - RNA, 82 nt, Human
aggaaaucuguaagcaauugcucagaggaggaggaaguagaagaaggaauuuggcugagcauguuuuacaugaaguauuccu

SEQ ID NO: 4099494 - RNA, 81 nt, Human
aggaaaugucaaauugucuucugaaguuauuguacaaauuugucaccccaccggcaguguauaaacuuuaacauaguuccu

SEQ ID NO: 4099495 - RNA, 71 nt, Human
aggaaauuuacacagcugggaaaauuuguacaaauaaucauuuguacuuaugagauccuagucguguuccu

SEQ ID NO: 4099496 - RNA, 85 nt, Human
aggaacacagcccccaaagaacagaccaaaaaaggauauuggugcaucuugcacauauccagguuucuuugguuuuguuuuaccu

SEQ ID NO: 4099497 - RNA, 79 nt, Human
aggaacagaaaaaaacaggauucaaaacaaggcacuugaaugaaacaagguccaguuuucaguucucauuuucuuucuu

SEQ ID NO: 4099498 - RNA, 79 nt, Human
aggaacagcauuuggaggagaggcuuuggggcucaaaggcaauuuccaaaaccaccucuguuagauguauuuuguuucu

SEQ ID NO: 4099499 - RNA, 117 nt, Human
aggaacagggccaacaggaauuaggguauuuuauugugugcaucuggaaguuggagaggccaucagguguuuaaggauagugaugucugucuguuucugacuuuuggcccuguuacu

SEQ ID NO: 4099500 - RNA, 74 nt, Human
aggaaccaccgcggagugauggagaaacuggucuaagacaagcgacagcguuuuguuauccgccccgguggccu

SEQ ID NO: 4099501 - RNA, 76 nt, Human
aggaacuagugcaacaggagcgagaccucagaauagauacagaacuaagcucaauucucuuauugcauuaguuucu

SEQ ID NO: 4099502 - RNA, 83 nt, Human
aggaacugcaguuaguguauauugccuucaaacauaacccaaaaauuguauuugaaaauuaagcagugauuuguagugguccu

SEQ ID NO: 4099503 - RNA, 87 nt, Human
aggaagaagccuccucaucuuaggugaugagacaguugauaggguuuucccuacugccuuccaccuauggaugaauauggucuuccu

SEQ ID NO: 4099504 - RNA, 79 nt, Human
aggaagacaaggaaacggauuuggguuaggucaccacugggaccacuguggagaauuaggccaaaucuccaugguuccu

SEQ ID NO: 4099505 - RNA, 58 nt, Human
aggaagacccugccaccauccuuuguauuuacaguguuuugucuggcagggcugcccu

SEQ ID NO: 4099506 - RNA, 87 nt, Human
aggaagacuuucaguuauuccccauucaauaugauauuagcugugggucugucauucauggcuuuuauuauguugagauaucuuccu

SEQ ID NO: 4099507 - RNA, 64 nt, Human
agccugcugugcucuccaccagcugggguucucuucugucggggcuguggggagucagggggcu

SEQ ID NO: 4099508 - RNA, 56 nt, Human
agccuggaagccaggacaccguccguuccaaugagcggcuucugcauuccagagcu

SEQ ID NO: 4099509 - RNA, 71 nt, Human
agccuggaugaacagcagguccuggcaugggugcugcacacccgagcucugaccccugcugcucccuuguu

SEQ ID NO: 4099510 - RNA, 85 nt, Human
agccugggaaguuccucagugucauuuccacgacauucaguugguauucaauugguaugaaugagucacuaaggccagccaggcu

SEQ ID NO: 4099511 - RNA, 76 nt, Human
agccuggguguguuuggcggcagaggcccugcucuuuuccucucuggggagcagcuguccccaaagcuuccuggcu

SEQ ID NO: 4099512 - RNA, 75 nt, Human
agccugugaaaucucugccacuaucaccaauuuuauagaugaggaugcugaggcagaggugaaguucacaaggcu

SEQ ID NO: 4099513 - RNA, 57 nt, Human
agccugugguuaugaauuuucagagaauauguaauauucugacccagagcccaggcu

SEQ ID NO: 4099514 - RNA, 60 nt, Human
agccugugugaagcccucagaguaucauucaugguugcagcagggcuacucacagagguu

SEQ ID NO: 4099515 - RNA, 75 nt, Human
agccuguuauguuuacaaaaaggaggcuugacuuacacaggguaaggcuccucauuugcuagauguggcuuagcu

SEQ ID NO: 4099516 - RNA, 128 nt, Human
agccuguugugauauauuuugaccauuggcuugcacacuauggauugucugugguguaauaccuugcacaauuuggacuucacugguuggcggccgagacucuugaaguuguagauguacaacaggcu

SEQ ID NO: 4099517 - RNA, 74 nt, Human
agccuuaaacaugaugacauuguaagcuucuuacagcaguguaauugaggcauggagauaaugucuucaagguu

SEQ ID NO: 4099518 - RNA, 86 nt, Human
agccuuagacuguuaacacgcaggcaguuaagaaagagaaguaaacuuccaucuuguuuaagccgcuguuaagccacugguaugcu

SEQ ID NO: 4099519 - RNA, 58 nt, Human
agccuucacugggaccuuggauggcugccgaaugaagccaucacguuucagugaggcu

SEQ ID NO: 4099520 - RNA, 70 nt, Human
agccuuggccguaagguaugcucccuaauacagaauaaagggcaggaugccacagugcggccagcaggcu

SEQ ID NO: 4099521 - RNA, 72 nt, Human
agccuuucagagaacucagaaugucuuucaucacagaaggauguggucuguuuucugagaugauuuauggcu

SEQ ID NO: 4099522 - RNA, 62 nt, Human
agccuuucauuuucugagaucaggaagauauuuucuugaagucacacagaaagugaguggcu

SEQ ID NO: 4099523 - RNA, 73 nt, Human
agccuuucucugggcuguuggcagccacugcaggcagcggagggagcgccaccugcccagagcacaugaggcu

SEQ ID NO: 4099524 - RNA, 76 nt, Human
agccuuuggaagagggaaugcccaaagaggauuuucaauuagucuugcuguguauugcaucucccuugccaucucu

SEQ ID NO: 4099525 - RNA, 77 nt, Human
agccuuuucauacaugaguucaucugcuucucuucauuauuccaugagcugggcugaugacucauguuuuauagacu

SEQ ID NO: 4099526 - RNA, 74 nt, Human
agccuuuugggaacugauuaagucaugagaacaucacccuuguauauggaauuaguguccuuauaaaagagguu

SEQ ID NO: 4099527 - RNA, 87 nt, Human
agcgaaauauuugacaaauccuucagcaauggccuaucauucaacauauauuagcacagugcuagguauuugcagugguauuuuguu

SEQ ID NO: 4099528 - RNA, 129 nt, Human
agcgaaccccggcagcacagaauucgaaccgccgcgggagccguugggacgcgccuacccggucacugccccgccccggcgcagacugcgugaggcgccgccgaaggcgcggggcuugccggggaucgu

SEQ ID NO: 4099529 - RNA, 70 nt, Human
agcgaacuucuuggaaucugacggcugugccuucaaccacaggcugcuguauuuauuuucuaggguugcu

SEQ ID NO: 4099530 - RNA, 62 nt, Human
agcgacccugcugugaaacuggcauaugauuuuuaaauuaugugaauacagcaguggaugcu

SEQ ID NO: 4099531 - RNA, 75 nt, Human
agcgagaggguaugugcugggugucuaagagcccagaaaugcauuagaagaagcccagcauggaaccagcucacu

SEQ ID NO: 4099532 - RNA, 63 nt, Human
agcgauucuaauuggagauuaacauguguccucaucacaguugaccuuauuuauggaguggcu

SEQ ID NO: 4099533 - RNA, 75 nt, Human
agcgcaaaggcgccgaacuucauguggcggaucuguguacgcaggacgcucucgcugaacuucuugcucuugccu

SEQ ID NO: 4099534 - RNA, 125 nt, Human
agcgccacaaaauccccuggggccugugagaacacagauguuggggcaccuccccagcauuucugauucaggagggcugggcagggccugagaaucugcauuuccaaugaguccaggguggcgcu

SEQ ID NO: 4099535 - RNA, 73 nt, Human
agcgcggccauggggauggagaugucacagucacaggcucuguggcucugaggaccaauuccuguggcuugcu

SEQ ID NO: 4099536 - RNA, 77 nt, Human
agcgcuuuccucuagucuaggccaauuuauuucacacguuuacuauugaccauuaacacaugcuggagggagggguu

SEQ ID NO: 4099537 - RNA, 73 nt, Human
agcggacuaggagccauaccuuucccagccucucgcacagcugggcagagagcuggaacuccuuggcauagcu

SEQ ID NO: 4099538 - RNA, 99 nt, Human
agcggagccuaagcuucagcugcgacaggggccugagcaucacgcgugaggggcggggcccagguugcaccucagcgcugaaaggcuuaaauuucugcu

SEQ ID NO: 4099539 - RNA, 119 nt, Human
agcggggcgggggggaggugcucuuuucgucucuggccacaaggggucgcugugaccucgccugugcauccgguggucauugacaucaaagccaggucucccccuccccagccccgacu

SEQ ID NO: 4099540 - RNA, 101 nt, Human
agcggugacuggcgagucggcagcgcggcugccagggcaucccgggcucugucuggcuucccugagccgccugccgugucccugcuuggaaauucacugcu

SEQ ID NO: 4099541 - RNA, 70 nt, Human
agcggugccgggagccuuggagaagcagugcugccuggcugcugcagcuccucuggcugccugagcugcu

SEQ ID NO: 4099542 - RNA, 67 nt, Human
agcgguuagagaaaggauauaacccuuuuaguauucuagcauguuugaauuccuuucuuuaccuguu

SEQ ID NO: 4099543 - RNA, 84 nt, Human
agcgguuuaaugcuauucauugaagcacaagugaucuugaaggaaacugagagauauucuuuuucaaggacagcuuuaauagcu

SEQ ID NO: 4099544 - RNA, 75 nt, Human
agcgucauguuggcacugguuccccuugccccucaagucccacagggguaaccuggaugugccaacgugaaugcu

SEQ ID NO: 4099545 - RNA, 129 nt, Human
agcguucacagugcuaggaaugaugcaagacaggggaggauggaagcggcauuggaccagcaguuccagcaggccaggcugccaaagcuucugucuccccucccucgcuucccuauuacugggagugcu

SEQ ID NO: 4099546 - RNA, 56 nt, Human
aggggugggaccaggaauguuugaguuucaaucucagcuauuccugauucaucuuu

SEQ ID NO: 4099547 - RNA, 79 nt, Human
aggguaacuguuguagcugcgcugcuucagagcuuggcauucugaguucuuggacggugggguugacagcaguaucccu

SEQ ID NO: 4099548 - RNA, 75 nt, Human
aggguacuguuuuagucauauaucauaaugcaauuucagaauguuuauugauuguaugauugaaauauuuacuuu

SEQ ID NO: 4099549 - RNA, 66 nt, Human
aggguagcaggcagagagggguuuccagaaccaucauuugaacccucacucugugccggccacccu

SEQ ID NO: 4099550 - RNA, 60 nt, Human
aggguagcauguguuauuaaaacuuguaucacaauacaggccaauaucacaugcuaugcu

SEQ ID NO: 4099551 - RNA, 76 nt, Human
aggguagcauuucaggaggaagauacgggcugacuggcaaucacccccucucuggucucuuucuggaagcuucccu

SEQ ID NO: 4099552 - RNA, 69 nt, Human
aggguagucuucaugcugggguccucuggcugugggagcagcauggggcuccgcaaugaacaaggcccu

SEQ ID NO: 4099553 - RNA, 96 nt, Human
aggguaguuuccauuaccuauuguuacuucuugguaaaggagacaaagaugucauccaugaagagugacagaagguucuuagggaacugggcaccu

SEQ ID NO: 4099554 - RNA, 94 nt, Human
aggguaugcuuggcuugucacagcagcaaaggcucugacaaaugaugaagaagauggggccuuuucugaauguggaaauggccgggugaucccu

SEQ ID NO: 4099555 - RNA, 80 nt, Human
agggucaaaacucugguuucagacucacuugcuccaauucuuaucuaggauuauguuaguuuguagaguagaugugccuu

SEQ ID NO: 4099556 - RNA, 63 nt, Human
agggucaugucccugcuggucagaaggcaggaugagggccggccuugagcaggggcugaccuu

SEQ ID NO: 4099557 - RNA, 77 nt, Human
agggucuccucuaugagcucagcgugggucuguuuuaagcuaauucaaaacccuuccaaaugagcuuauuagauucu

SEQ ID NO: 4099558 - RNA, 62 nt, Human
agggugaacaaucauaccacaauuauuuuguaagaggaaauuuggaagauguuguuuauccu

SEQ ID NO: 4099559 - RNA, 73 nt, Human
agggugacuuuucugaacuugguacuggagcuauucuuagauccaacuuucauuagaaaugcagugucaccuu

SEQ ID NO: 4099560 - RNA, 89 nt, Human
agggugagaaguagucuaucuaugguuaguggccauuuucucuaguucacagaccaugcauauugauuauagauucagaaaguuacccu

SEQ ID NO: 4099561 - RNA, 57 nt, Human
agggugauaguuuagagagucagccuguuagauuggcugauuucucuucuauuccuu

SEQ ID NO: 4099562 - RNA, 57 nt, Human
agggugcagaaggagccuaggagucgaauauacuguccuuuauuccuucuguauucu

SEQ ID NO: 4099563 - RNA, 75 nt, Human
agggugcagcuuucugcaaugucauccagccagucaccacaggggcaggaugaacagggcaggcaagagccuccu

SEQ ID NO: 4099564 - RNA, 63 nt, Human
aggguggcagagaggagguaguuuagagaagucucuacacuaucuuaauuuuucuguaaaccu

SEQ ID NO: 4099565 - RNA, 64 nt, Human
agggugggaagagggucugguagucacuaggguuccccagccauuccuugcucucaucaaccuu

SEQ ID NO: 4099566 - RNA, 88 nt, Human
aggguggggaugguggggacgguggugguccagggacagacaaaggugucacugcucucuaagcaucgccacuucccauccccauccu

SEQ ID NO: 4099567 - RNA, 67 nt, Human
aggguggggcagguuggcacuucccucuggcucuccccggagcagggcuugccgcuuguccuccucu

SEQ ID NO: 4099568 - RNA, 62 nt, Human
aggguggugaaugggauuuuccugaagaaaaauggguugucaguauguuccuucccacaccu

SEQ ID NO: 4099569 - RNA, 60 nt, Human
agggugguuggaguggauguugagggccaccccaccauauccaccauucugcaccuuccu

SEQ ID NO: 4099570 - RNA, 60 nt, Human
agggugucagccacggaaugggacaggguccccagguucccugucugagguugggacccu

SEQ ID NO: 4099571 - RNA, 55 nt, Human
agggugugauuucagacugucuggcugagagucugucucugcuaaucacuacccu

SEQ ID NO: 4099572 - RNA, 129 nt, Human
aggguguggccaacugacuagaucaagauguggggcagggucuggacugaaagcugaggggccacucacacuggcagcuuuggggacagccaagguugccccaugcuucagugggaaggugauuuuucu

SEQ ID NO: 4099573 - RNA, 78 nt, Human
aggguucaugaggaugacugaccccuugucuuaaaaagaaggccuagaagagggcguucagucagugucucuaaccuu

SEQ ID NO: 4099574 - RNA, 59 nt, Human
aggguucugggccuuacaggugagaaaagaaugucacuuccuggcaggcccaggacccu

SEQ ID NO: 4099575 - RNA, 115 nt, Human
aggguugaaguagauuuuuuccacaaggaagaugaugagcacuggagucaaagggaugcaguucaaaucccagcucuguugcuuucuuccugugugauuuuggaugagugacccu

SEQ ID NO: 4099576 - RNA, 75 nt, Human
aggguugcacaggcaccuccagggguauguucuggccacuccgugcugcaaucuuggggcugccugcccaucccu

SEQ ID NO: 4099577 - RNA, 63 nt, Human
aggguuggggaagcccuaagcaccccugagccugaagggggcaaagggagagucccuacuccu

SEQ ID NO: 4099578 - RNA, 110 nt, Human
aggguuuuucuauuuugauccucuaaugaagcugcuuucuaugacuauagaauccccuuccucacuuuuuucaucuggaagcaggcuacucaugauuaaaagucgacccu

SEQ ID NO: 4099579 - RNA, 80 nt, Human
agguaaaauagcaaaaaugacaaaagaagacaugagguguuuaaucacccucuuuuucuuaggucagggcuaugcugccu

SEQ ID NO: 4099580 - RNA, 76 nt, Human
aggaaugaauggagaacaacuuugaaacaugaagagauguuuucuucuaguacagacuguuguuccuguucuaccu

SEQ ID NO: 4099581 - RNA, 81 nt, Human
aggaaugaguaaacuaguuuugagauggaaaugcaggucauuaucagauuuuuagcauauccuauaaaacuacucauuuuu

SEQ ID NO: 4099582 - RNA, 97 nt, Human
aggaauggggcuucgggcgcugggcgcgcuccgaacccggcgcacguaagagccugggagcgcccgagccgcccggcugcccggagccccaucgccu

SEQ ID NO: 4099583 - RNA, 68 nt, Human
aggaaugguuauggggauaguagaaucauuugcuaggggugacagugguaucugcauaacuuauuccu

SEQ ID NO: 4099584 - RNA, 58 nt, Human
aggaaugucugagaaagaggcacuggacugccugccuugaaaaacucagcugucuccu

SEQ ID NO: 4099585 - RNA, 55 nt, Human
aggaauguuaggagaugagucuagagauuaugcucagauuauuccuaagauuucu

SEQ ID NO: 4099586 - RNA, 77 nt, Human
aggaauguuuuucauugcucucuuuccugcccugaaugaggaauagacacuugggguagagaacgaagaacauuucu

SEQ ID NO: 4099587 - RNA, 72 nt, Human
aggaauuacuuugggauauuauuuuagauucuuuuaaaaguuuucagaauauuauuuuaaaggcuuguuccu

SEQ ID NO: 4099588 - RNA, 60 nt, Human
aggaauucuggcauuuuauuauggagcugcacuauugcagaauccuauugucagauucuu

SEQ ID NO: 4099589 - RNA, 73 nt, Human
aggaauucuuguaaauuuugugugaaguauaucaaacauuaaaaaguacuuuuaugaagccaacaaguuuccu

SEQ ID NO: 4099590 - RNA, 70 nt, Human
aggaauugggaaauauggauuguuauuccuuuaaaucaccuugggaaaaugauuuaucuucucugguccu

SEQ ID NO: 4099591 - RNA, 110 nt, Human
aggaauuguuuuucauguauaucccgcugcauuuuacuuaccuguuaguugccugucucuccaacuaggcuguaaagagcuaggaggaagaaugugaauugcagcuuccu

SEQ ID NO: 4099592 - RNA, 72 nt, Human
aggaauuuggaauuuuuccugugugaaauuagaagcccuuggaggcuggugaaggagaaauucgggacaccu

SEQ ID NO: 4099593 - RNA, 109 nt, Human
aggaauuugguacuugggggaacacaagaaagacuacuguucaagcaauguuuucaauuuauuugugcagagaaaucuuucuuggaaaccuccuaaguuucauauucuu

SEQ ID NO: 4099594 - RNA, 62 nt, Human
aggacacagguaagccaguggaugcgggaccuugccccagccauucugaagcucuguguccu

SEQ ID NO: 4099595 - RNA, 62 nt, Human
aggacacagugguggggaaaaggguugucuaggcagggaccuugucuucauuauggugcccu

SEQ ID NO: 4099596 - RNA, 83 nt, Human
aggacagcugcuguugaaucagaaguccuggcucugcuguaugcauggcauagguccuuguucaacugaaaagcaguuggccu

SEQ ID NO: 4099597 - RNA, 60 nt, Human
aggacaguggcaaggcaggacacuagugaagagugccaggaaagagccuuacccuguccu

SEQ ID NO: 4099598 - RNA, 86 nt, Human
aggacaguugugugcugguaaauguuuguaaauuggcucugaggagcagggagcccugauuugcagcauuugucaguaucuguucu

SEQ ID NO: 4099599 - RNA, 71 nt, Human
aggacauaaagacacccagggagggacuagggugacucagaacuucgggucucuuccgugaguguuuuccu

SEQ ID NO: 4099600 - RNA, 61 nt, Human
aggacauaugcaggagcugcauuuuaggaagcuaaguccagcaguuuauguaauaugcacu

SEQ ID NO: 4099601 - RNA, 64 nt, Human
aggaccaagguugucuuuuauacugaacacuuccucugccccagugcucaacagcucggguccu

SEQ ID NO: 4099602 - RNA, 75 nt, Human
aggaccaggcccuuuuggaauugugaauagguuuauugccuuacauccugguacacauguccaaggucagguccu

SEQ ID NO: 4099603 - RNA, 56 nt, Human
aggaccauuaugcuugcugaaacauggaucucccaaguuuucacauacuggauccu

SEQ ID NO: 4099604 - RNA, 57 nt, Human
aggacccaggcucgugggacggcucaggccccugccucgguguccagccuggguuuu

SEQ ID NO: 4099605 - RNA, 95 nt, Human
aggaccugaaauugugagacugaaccaaauaaaacugaaucauguguuuuaaacuauauauuuggucagaacucucuuuaguguagccaaguccu

SEQ ID NO: 4099606 - RNA, 58 nt, Human
aggacgcaaugaucacuuguccugugaacagucuacuuuugucaucauugcaacuccu

SEQ ID NO: 4099607 - RNA, 97 nt, Human
aggacuauaguuuuuacaucuuugcuuuaaugagauuuugccauggguuauuugaugcuagauuuuaguuuggaaugaagauucuaauuaugguccu

SEQ ID NO: 4099608 - RNA, 76 nt, Human
aggacucucccuguguuguuuuauguucacuacuaauucuucaagcaggaacugaugagcagccagggagauuccu

SEQ ID NO: 4099609 - RNA, 96 nt, Human
aggacucuggaggccacagaaaguugucuagaguagagauauacuacaucuccuccucucuuuagacauccaguuucucucagguuucuauuuccu

SEQ ID NO: 4099610 - RNA, 62 nt, Human
aggacugacuuuugccaugaaacuugccagucacuccugugagauggcaaaucgucaguccu

SEQ ID NO: 4099611 - RNA, 86 nt, Human
aggacugcauuuuuccauucucuguuaguaaaauaucucagcugccuuuugauucugcuagcugcgagaauggcagaauggggccu

SEQ ID NO: 4099612 - RNA, 55 nt, Human
aggacuggcaauucucuaaggcugacacucucaagccaaggggguagcuauuccu

SEQ ID NO: 4099613 - RNA, 62 nt, Human
aggacuguauacucuaggugaacugaauuaccuuccguucacuaugcccagaauacaguuuu

SEQ ID NO: 4099614 - RNA, 60 nt, Human
aggacugucugagacuuucauuuguucugugcaacauauaagucaauacagauaagucuu

SEQ ID NO: 4099615 - RNA, 75 nt, Human
aggacugugucaauuaauguuugauguguguguuuccuuacuugacagacauuuuaauuauuaaaucucaguuuu

SEQ ID NO: 4099616 - RNA, 129 nt, Human
aggacuguugcuccuagaaaauaucacuaaucucuuuaugagaagaagguuagauuggguuaccuucuuucuuuguuuuuccucugguuaaagagauuaaauagacauaaggcaacugauuaauaaccu

SEQ ID NO: 4099617 - RNA, 93 nt, Human
aggacuuggccuugaugacaggguggcuggaggaaucagaacggucagaccuucuuugaccugcgggcaccuuuaguuggaauggucaggccu

SEQ ID NO: 4099618 - RNA, 66 nt, Human
aggacuuuagagccagaaagacgugaguuugaauccccuuucuaucacuucuuugcugcaaguccu

SEQ ID NO: 4099619 - RNA, 77 nt, Human
aggacuuucacgguggcugugugagaguagaagucggauucuuucauucccauagccauccggagagagcuucuccu

SEQ ID NO: 4099620 - RNA, 72 nt, Human
aggacuuucuucuccacuggccauuuccucuguuacggagacuaacaaauugccagggaguuaaagagucuu

SEQ ID NO: 4099621 - RNA, 80 nt, Human
aggagaaaagaaagggagaaggauggugugucagaaacuauugauuauucucacaauaucaguucuucuuuucuuucccu

SEQ ID NO: 4099622 - RNA, 63 nt, Human
aggagaaggaagugcaucacuagcagaaaaguugguaaagaguacuuuuccuauuaguuucuu

SEQ ID NO: 4099623 - RNA, 90 nt, Human
aggagaaucgcuugaacccgcgagguggagguugcagugagcugagauugugccacugcacuccaacuugggcaacagagugggacucuu

SEQ ID NO: 4099624 - RNA, 57 nt, Human
aggagaaugguacaauauaucucugaaaugggaagagauuuaguggcuguucuaccu

SEQ ID NO: 4099625 - RNA, 55 nt, Human
aggagacagaauuuaaauuugggucuugcugacuccaaagugaaugcuguuuucu

SEQ ID NO: 4099626 - RNA, 55 nt, Human
aggagagaagcaucugcagccagaagccuugagcacugguccagcuucuucuccu

SEQ ID NO: 4099627 - RNA, 74 nt, Human
aggagagaggaagaugggagagcucuggaaugacugugauuucuccacccugcuuucuuaucucccuuuauccu

SEQ ID NO: 4099628 - RNA, 75 nt, Human
aggagaggaggccaggcccacaccucugcacggccaguuucaggcugaauagguccucgggcugcuuccuguucu

SEQ ID NO: 4099629 - RNA, 100 nt, Human
aggagaggaugugacacaagagaaaugauuccugggcagaucgugauuccuggaugaucccuaugggcuucauuucuugaauucacacagauacccuucu

SEQ ID NO: 4099630 - RNA, 73 nt, Human
aggagaggggcagggcaggacagugaaaauagguugauggaucugaaaugauugaccuguuuagucucucccu

SEQ ID NO: 4099631 - RNA, 90 nt, Human
aggagaugccuggccuagggcuuggucauggcagggauaaaagcccaucacuguuaucuucuacaaggccugcuggccuaggcaacuccu

SEQ ID NO: 4099632 - RNA, 130 nt, Human
aggcugggguccuccugggggacagcacagucaguggagagagccaggggcuggagguggggcccaccccagccucuggucccagcucugcugcucacuugcuguguggccucaagcaggucacuggccu

SEQ ID NO: 4099633 - RNA, 79 nt, Human
aggcuggggugcaauggcaugaucccaguuuaccgcauccuccacuuccuggguucaagcaauucuccugccucagccu

SEQ ID NO: 4099634 - RNA, 63 nt, Human
aggcugguggagagugggcucuggagucagccuuccaguuuugaauccugcuucuaccaacuu

SEQ ID NO: 4099635 - RNA, 64 nt, Human
aggcuggugucucuguccugucaaguauauguuaaaguugcuuacagccacaagagaucagcuu

SEQ ID NO: 4099636 - RNA, 56 nt, Human
aggcuguagugcaugugcuaugaucaugccugugaauaaucauugcacucuagccu

SEQ ID NO: 4099637 - RNA, 59 nt, Human
aggcugugcucagccaaugggaccugcuccucccuugaagguugcagaggccacagccu

SEQ ID NO: 4099638 - RNA, 68 nt, Human
aggcuguguucucaucuggaucucaggauucucuuauaaguccaugugguugugguggaauuuaguuu

SEQ ID NO: 4099639 - RNA, 87 nt, Human
aggcuguuaugagaagguuccuuuagggaaaucgucucacccuugagagugaaucugauuucccuggaggccucauucagauagccu

SEQ ID NO: 4099640 - RNA, 65 nt, Human
aggcuguuuaaugcaaugaaaugaggcauuagauugaagcccauuucaagugcuuugaauaaucu

SEQ ID NO: 4099641 - RNA, 62 nt, Human
aggcuuaacuuaacuuuagagcucuucaaagaaaaucuaagcuacucauguuaagcaagccu

SEQ ID NO: 4099642 - RNA, 79 nt, Human
aggcuuaagugcagugguacaaucacagcucacuguagccucaaccuacugggcucaagugauuguccugccuuagccu

SEQ ID NO: 4099643 - RNA, 70 nt, Human
aggcuuaauaggucaaugggaggcagaacuuggacuacuaauugaaagaauguuuccccugaccaagccu

SEQ ID NO: 4099644 - RNA, 69 nt, Human
aggcuuauuaagucacacuagacaacugagguugccuaagacgucauuguccuggacuugcaagggccu

SEQ ID NO: 4099645 - RNA, 75 nt, Human
aggcuuauucuccagggaugccaagcuuuaccaugcacauauaauaguaacagcagcuucccugugaaugugcuu

SEQ ID NO: 4099646 - RNA, 101 nt, Human
aggcuucuaccacagacgccgaaagaggcagaucugccugcagcaggguacaaccagagcaggcagggacuuugcaaaucuuucuggccggugaaaaguuu

SEQ ID NO: 4099647 - RNA, 80 nt, Human
aggcuucuggguugcuuccuugggaaaauuagaugcaauuuauggguugugucuugcaagacaggcaaauacccuggccu

SEQ ID NO: 4099648 - RNA, 60 nt, Human
aggcuucuuuuagaggggaugguuugauaaaacugaagaccucauguuagaagaaggccu

SEQ ID NO: 4099649 - RNA, 68 nt, Human
aggcuugaauucuuggcccaauuucucucacuucugcaugaagucaccaaaugccagugauucugcuu

SEQ ID NO: 4099650 - RNA, 83 nt, Human
aggcuugcaccaaaguggcaguguggagggaggaguguggucuuuggagccagcccaggccugcacugcccuugggcaagucu

SEQ ID NO: 4099651 - RNA, 104 nt, Human
aggcuugccugccccagccagguucgguggagucgggagccucgaggguuuucccugcugaggcucuuccuccccugcuccuccuggggcaguggacacagccu

SEQ ID NO: 4099652 - RNA, 60 nt, Human
aggcuuuaagcaagcauauuguuguauuuuaauuacuucaacaauacucuuguggagcuu

SEQ ID NO: 4099653 - RNA, 71 nt, Human
aggcuuuagguucagucuuuggaccccuccccagaguggggaguucuccagaggugaaccccacgaagcuu

SEQ ID NO: 4099654 - RNA, 83 nt, Human
aggcuuuuaaagagccauuguaugguuuugggagaacauaugcccauagauaaaaguaaugguuacuuuauaguguugagccu

SEQ ID NO: 4099655 - RNA, 70 nt, Human
agugggucuguacauuuggggaccccagguccauccagugggggccuggccucccagaguggggacaacu

SEQ ID NO: 4099656 - RNA, 81 nt, Human
agugguaaaagccugaaauucugccucugcacaaaccaugcuaaguggaaauuugugacagaagaggcuccuuuuauugcu

SEQ ID NO: 4099657 - RNA, 72 nt, Human
agugguacuuucuuugaggaaaaagauuccaaacaauuccuggaaacucuaccucucuaagaagauggcauu

SEQ ID NO: 4099658 - RNA, 103 nt, Human
agugguagaaucgcugagucacuuggcaaguaucuauaaaguuugauuuacuguguguuuaaguuugaggaauugccaaguuuuccaaagugguuguaucauu

SEQ ID NO: 4099659 - RNA, 76 nt, Human
aguggucacaguucauaacggacauguaguguaaaacaugaacagggucauuuuaugaucugugaacuucaccacu

SEQ ID NO: 4099660 - RNA, 78 nt, Human
aguggucugcaguuuggaaaaugugccucugggauuucaguuuguucuauagaguugugcccaugacugcagaucucu

SEQ ID NO: 4099661 - RNA, 55 nt, Human
aguggucugccugccucagccuccuaaagugcugggauuacaggcaugagccacu

SEQ ID NO: 4099662 - RNA, 55 nt, Human
aguggucuuagcuugcugggcuccaugggggugggaucugccgagcuagaccacu

SEQ ID NO: 4099663 - RNA, 111 nt, Human
aguggugauauggcagugccaagcaguggcaucgccagaguaucuguuugguuagcaaaugagcagucauuuuaggucaugcagauugcugauaucugcccaguagccacu

SEQ ID NO: 4099664 - RNA, 68 nt, Human
agugguggcaguagacagugcaucuacaggagaaguggcccuuuggaaugcauggcucugugacggcu

SEQ ID NO: 4099665 - RNA, 68 nt, Human
agugguuguuucucuggucuugagugacuguguccacaguucauuuuuuuccgguaggaauaacuccu

SEQ ID NO: 4099666 - RNA, 72 nt, Human
aguguaagguuuugagaccagaacguuuggagguugaaagcauuuggagguuugggugucaagaucuucauu

SEQ ID NO: 4099667 - RNA, 73 nt, Human
aguguacaucuaguuaauuguucuaauguuuggcagcacaaugcauauagaacauuugacauuauuugugacu

SEQ ID NO: 4099668 - RNA, 81 nt, Human
aguguagagauucagcagaggugguucacauuguaaguaauacuuauaguuacucaugaucuuauggcuuacuccuacacu

SEQ ID NO: 4099669 - RNA, 72 nt, Human
aguguagccucgcuaugcuuuugcucuguguaaagaaucauacacagagaauucccauaugugauauacacu

SEQ ID NO: 4099670 - RNA, 60 nt, Human
aguguaggugagggccuggguuccaggugggggacugggguuucaggugaagccugggcu

SEQ ID NO: 4099671 - RNA, 55 nt, Human
aguguaguagaggcuuuagagucugaaagaccuggguucaaagucuggcuccacu

SEQ ID NO: 4099672 - RNA, 70 nt, Human
aguguauugauuggaacagccucucucggguugcccaagcccacugauaauggguguuccagugagcacu

SEQ ID NO: 4099673 - RNA, 79 nt, Human
agugucagcccugaaacaaccuccucucaaucacaaaaccaccacuugagaugcuguucuggucaugggcugcaauacu

SEQ ID NO: 4099674 - RNA, 82 nt, Human
agugucaucuucgcagagugauuuuucuuaaaacccuggccucugugauauugagaaagucacaauauuggaaggugacacu

SEQ ID NO: 4099675 - RNA, 70 nt, Human
aguguccacugcguuccugggaagggcugcgaggccugcccuccaaaccugacuggggaugggcggcacu

SEQ ID NO: 4099676 - RNA, 79 nt, Human
agugucuagcaugcaugguucacugacaucucuucccacccccauccgucacccaacagcauauucaugccagacuacu

SEQ ID NO: 4099677 - RNA, 58 nt, Human
agugucugagcuaucauuaggggcacuaauacauuucccuagcaugguuucauauacu

SEQ ID NO: 4099678 - RNA, 57 nt, Human
agugucuggucucugaacuaaaagaacaacccuuuugaauuuuagagauucaggacu

SEQ ID NO: 4099679 - RNA, 55 nt, Human
agugucuguagcugccccuuuccacaaaagguggcaggaagcaucuauagguccu

SEQ ID NO: 4099680 - RNA, 69 nt, Human
agugucuuccuauacugggagcauuuaucuauuuauaagguuugauuuccuaauuuagggauagacauu

SEQ ID NO: 4099681 - RNA, 78 nt, Human
agugucuugauacuguuuuugagaauaguaaugcuucaaauauuuggagcaccauuucucuaaagcacucaaaacgcu

SEQ ID NO: 4099682 - RNA, 61 nt, Human
agugugaccuuauuuaagaaauuccaucuguaaugaugugauuuccaaauaaggucacauu

SEQ ID NO: 4099683 - RNA, 68 nt, Human
agugugaguuuggggugcgggguuccggagccuucucuggcagcccucggguacucacgugcuccacu

SEQ ID NO: 4099684 - RNA, 101 nt, Human
agugugcugauuaaaucauucaauucaacuugccuuuguagcucagggaaaucauuaaaaauggagcuggcuguugaauaauggcauauauuuggcacucu

SEQ ID NO: 4099685 - RNA, 84 nt, Human
aguguggcaggaaucacuucaccaguucggaggguuccccucaggggaucugacuugcugguggguaauguggugggccacacu

SEQ ID NO: 4099686 - RNA, 67 nt, Human
agugugggcugugcagaugggccugggccacucccaggcagaggcucugaugcaagcccagggcacu

SEQ ID NO: 4099687 - RNA, 125 nt, Human
aguguggguguggacuccaggcugucccacagcagaacaggcagggaagcuuguguaaccccaacaaauaaaucaaguacugugugcuucugcuuugaggccuguugccauguggaacccacgcu

SEQ ID NO: 4099688 - RNA, 95 nt, Human
aguguguucuagugacacucaaacuggacucacuauggcuucagauuguucuagucugagcugagugagcccaggcaccugcacaagagcugccu

SEQ ID NO: 4099689 - RNA, 76 nt, Human
aguguuaaacagcuuucagaaucucucauuccuuacuuuaaaaaaaaugagaauuccacuggaguuguauugcacu

SEQ ID NO: 4099690 - RNA, 58 nt, Human
aguguuaauaucuggcccuaggcccgaggcuucugguuaagcucaguguguuaacacu

SEQ ID NO: 4099691 - RNA, 55 nt, Human
aguguuauuuaggcaguauauuuugcuuaaaaugugcuuugcuggaaaugucacu

SEQ ID NO: 4099692 - RNA, 61 nt, Human
aggagauggagcucagugggcaagccagggucucaggucagguccaggggcuccaccuccu

SEQ ID NO: 4099693 - RNA, 88 nt, Human
aggagauuaccaauuuauacaccaucacugccuuggccuggaagcgggauggcucacggcucugugugguguguuacuaguaaucccu

SEQ ID NO: 4099694 - RNA, 93 nt, Human
aggagauuagauucucauaggagcgugaaccuuauuguaaacugcacaagcaagggaucuaggcuguaugcuccuuaugagacucuaaugccu

SEQ ID NO: 4099695 - RNA, 70 nt, Human
aggagauugguauggaugcuuaagguuuaaugaguuaaacgugaaaucucauuauuuauaccauaauccu

SEQ ID NO: 4099696 - RNA, 64 nt, Human
aggagcaagacucacugcaucuugcaguuguacugcagagcuggccugugauuuuugaacuccu

SEQ ID NO: 4099697 - RNA, 58 nt, Human
aggagcagaacugauucugacuuaauugaauuuaaaagcagguauuacaucugcaccu

SEQ ID NO: 4099698 - RNA, 70 nt, Human
aggagcagaauuuaaugugcagggagugggugacuauuaaauucagugacugcagcaaaacuuugcuccu

SEQ ID NO: 4099699 - RNA, 130 nt, Human
aggagcagacuuuucucuugucacuuuggaaggagaggauugugaggcugccccuuuaaauagcauucccguaggaggcagaucacauccauccgucaccuacugccaaagcaucauuuuugguuucuau

SEQ ID NO: 4099700 - RNA, 130 nt, Human
aggagcagcacugucauuuacuugcuuuccagugugccuuccugggagacccagcuguggaguuacagcucacagaggugacugggucccaaggaguaggucagguggguggaugccaaccuguccuucu

SEQ ID NO: 4099701 - RNA, 84 nt, Human
aggagcaggcucccauccagugggacagagaaacccugggguguagcucugugucccacugugugaugacgugugcgugcuucu

SEQ ID NO: 4099702 - RNA, 73 nt, Human
aggagcauugggugaauaaccuacuccaggccuugcagccaacuagccaaggcaggucuguaucuagucuccu

SEQ ID NO: 4099703 - RNA, 62 nt, Human
aggagccauggaggugaggcgggcaagccacagaauaaucccucuucaccuccacugcugcu

SEQ ID NO: 4099704 - RNA, 58 nt, Human
aggagcccuccguugcuucauccucacuaacccugucccagagcagaggaggguuuuu

SEQ ID NO: 4099705 - RNA, 56 nt, Human
aggagcccugcugacaugggugucugugcaccacgcaaggacacagcaggguuucu

SEQ ID NO: 4099706 - RNA, 92 nt, Human
aggagcccugguuccuuacagugagggugacauuuacaaaccacgaucugggugcuuguugugcucacugucacagggauaucauugcuucu

SEQ ID NO: 4099707 - RNA, 86 nt, Human
aggagccuccccagcucgcgggugacgggugugguuuguaaauaguuuaugcaccuguuacauccacguguugcgggacugcuccu

SEQ ID NO: 4099708 - RNA, 85 nt, Human
aggagccucguuguggggagaaauagagccuccccgaagguagacaggugacaggcucuguuucuccaugcuguggcuggcaccu

SEQ ID NO: 4099709 - RNA, 92 nt, Human
aggagcuaaaugaaaugggccagguguuacacgaguguuaaaaugaugguauuuugaccaagcagaauaccugccucauuucuuugccuuuu

SEQ ID NO: 4099710 - RNA, 80 nt, Human
aggagcucagacugcacacccuggucucugacaccaaggcucgcuccaugcccaggacuaggggcagcgugggagcugcu

SEQ ID NO: 4099711 - RNA, 72 nt, Human
aggagcucugggcagggccucccacgcccagccccacuaugcaccaggagacaccugccacccagagcuccu

SEQ ID NO: 4099712 - RNA, 78 nt, Human
aggagcugggaauuggaucaucuaaaacuggggguaaaagaggaaauacucuagacagaggucuuccaaucagcuccu

SEQ ID NO: 4099713 - RNA, 67 nt, Human
aggagcugugcagugggaguucggugcagguuagccggccauugcacucuggcuggaacgggcuccu

SEQ ID NO: 4099714 - RNA, 83 nt, Human
aggagcuuaccaucuuuagugugaauuuauugagggaaauuaagucccugcauuucacagacugagaaauggcuucuguuccu

SEQ ID NO: 4099715 - RNA, 59 nt, Human
aggaggaagggaagacaaguaagagggugaagccagucucccugucuuccuuccauccu

SEQ ID NO: 4099716 - RNA, 59 nt, Human
aggaggaagguagcagacgugguaaaguguuuguuccacauggaagcugcucuucuccu

SEQ ID NO: 4099717 - RNA, 58 nt, Human
aggaggagcccacucaaaggggagacagaggcagugcucccugugagcagcucuuccu

SEQ ID NO: 4099718 - RNA, 93 nt, Human
aggaggagggagggcagugcggacccacagcugugggcccaggggugauccuuggcaccagggcaagggucuuucucuugcaucuuuuuuccu

SEQ ID NO: 4099719 - RNA, 88 nt, Human
aggaggauagugaugauaucucaugauuugaguaguaaacuuccuuuaggaauacuuaacuguggagucauugagaucauuguucccu

SEQ ID NO: 4099720 - RNA, 60 nt, Human
aggaggaugaguugcauuauaaauguacccccuuugguacuaaugcuuaacacauccccu

SEQ ID NO: 4099721 - RNA, 80 nt, Human
aggaggauggcaagaaugcucagucccuggaagcugaacaccucauuauaguaccagagccuggcaucugcauaauuccu

SEQ ID NO: 4099722 - RNA, 66 nt, Human
aggaggcaucaggggagaucugguggucaaggguucucuccaccagagccuucccaugcuccuccu

SEQ ID NO: 4099723 - RNA, 83 nt, Human
aggaggcauucagguggcuucggggaguggcagccugugggggcgcagccgagccccuuccugagggcuuuccuuugcuuccu

SEQ ID NO: 4099724 - RNA, 59 nt, Human
aggaggccaggaugggaacucaaggccuguucuacuuuggauucaguuucugggcuucu

SEQ ID NO: 4099725 - RNA, 68 nt, Human
aggaggccuacgcacaugucuaaauugagcuuccuuuuuaccugcuagacaaguucugugggucaccu

SEQ ID NO: 4099726 - RNA, 56 nt, Human
aggaggccugcagcguggucccugagggcucucggggacccaugaacagguucccu

SEQ ID NO: 4099727 - RNA, 84 nt, Human
aggaggcugaggagugugauggcagucuugcucucuaagaggcuguugucagagggcucuuggcugccugcuccauggccuccu

SEQ ID NO: 4099728 - RNA, 89 nt, Human
aggaggcugcugggguugucccagggggcugugguuugaggggacugugcuguuucggccuccuggggaacucaggcccagcugcaccu

SEQ ID NO: 4099729 - RNA, 123 nt, Human
aguuauuugauauucuuagagcauuuaauucaguguuugauuuuuaggggaagcuuauuguagaacuguuagcuucuuguagaacucaaaaguagagcugaaucuaaaaaaauacagauuucu

SEQ ID NO: 4099730 - RNA, 71 nt, Human
aguuauuuuagacacauacccuugcccaaagguuaauuuagaaccuaagcugaaaugugugucagaugauu

SEQ ID NO: 4099731 - RNA, 79 nt, Human
aguucaauuaaguuuaugaggaaaaguuaugauugucauguuacuaauuguaucacuuuuuccuuauauguugugaauu

SEQ ID NO: 4099732 - RNA, 58 nt, Human
aguucacagaauggccagaacuggggcuuagcacucuucaauucuggccaagugggcu

SEQ ID NO: 4099733 - RNA, 59 nt, Human
aguucagaguuggguuuuauaccuagacuaauuuggauguauaaccuggcuauguuacu

SEQ ID NO: 4099734 - RNA, 60 nt, Human
aguucagccauuuguuaacuauguguucuugggaagcuaauagccaacguguggcuaacu

SEQ ID NO: 4099735 - RNA, 86 nt, Human
aguucaucagcacacacauucauguuuuugacuagugccucucucccaagaggugcacaggugggaaaaugaguggggucagaacu

SEQ ID NO: 4099736 - RNA, 93 nt, Human
aguucaucuguuggcaguaagaacaauaauguguuucugguuaauauccugcuagaucacaguucucuauucguaaguccaauucagagaauu

SEQ ID NO: 4099737 - RNA, 82 nt, Human
aguuccaaauuaauggaguuggaauuaauaagguuaucaugguauuuuuauuggaugggucagcucuauauuauuugguucu

SEQ ID NO: 4099738 - RNA, 76 nt, Human
aguuccauaugguguacuacuggguuucgaggcaguuuuaucauaguuuuccuucuccaguuauauuauguuaacu

SEQ ID NO: 4099739 - RNA, 60 nt, Human
aguucccaagagaagguaggcccuuuaaaguuuuuccagagggguugacccucuuggacu

SEQ ID NO: 4099740 - RNA, 55 nt, Human
aguucuccaggcauuucuccauuuuucaaauugugagaaacauuucuugagaacu

SEQ ID NO: 4099741 - RNA, 82 nt, Human
aguucugggguggaggggaggguuggaggggccucacccagcccugccaaucccgucucucugacagacuccaaugggaacu

SEQ ID NO: 4099742 - RNA, 97 nt, Human
aguucugguagguacggcagaguugggaggugcugugaagguggggauaagaucuuguuuuguacauccuaauucugagugcccuuuuauuacaacu

SEQ ID NO: 4099743 - RNA, 64 nt, Human
aguucuguaggucagaauggaagagucugcucaaaaggcuaagauugaaguauugaccagagcu

SEQ ID NO: 4099744 - RNA, 76 nt, Human
aguucugucuugcugggguaagucugugcuagcacgcagcaagggcagcaaagaaggaaccccaagcugacgagcu

SEQ ID NO: 4099745 - RNA, 62 nt, Human
aguucuguucggugccuuuucuuguguguucuggagcucacaggguucuaucgaagagugcu

SEQ ID NO: 4099746 - RNA, 65 nt, Human
aguucuguugucuagggaagccaggcuaagacaugguucaauggguguccuuagaaagcagaccu

SEQ ID NO: 4099747 - RNA, 78 nt, Human
aguucuucuucuuuauuuuauuucugcauuuuguuuuccaugaggaaggcagcuagagagugaaacugaaggauggcu

SEQ ID NO: 4099748 - RNA, 77 nt, Human
aguucuuuaccacauggcccccagaggcaguucacaacauagaugugaacuuuuucucuacgggccagcaaagaacu

SEQ ID NO: 4099749 - RNA, 85 nt, Human
aguucuuucuuaauauuuacaaauuuauuuaaccugcgaaauuagguauguuagugauaguaaauaguguuuugaaggaagaucu

SEQ ID NO: 4099750 - RNA, 79 nt, Human
agggauuuauuucauauuuugauuauuuaugcaaacacauucauuuagcuaaaaauaaugaaauaugaggaaggucucu

SEQ ID NO: 4099751 - RNA, 70 nt, Human
agggauuuguaggucuuuuccugguacaggcuuauuguucucuagaaagauacuuaaaucaagauucccu

SEQ ID NO: 4099752 - RNA, 56 nt, Human
agggcaaauacaaaguaguuuaguauguuuuuaacuaaacuaaagguguuugguuu

SEQ ID NO: 4099753 - RNA, 113 nt, Human
agggcaaugacaaauguggagaaugauacagaggucugguuacuucuuagccaaugacacagaaucacaauugagaaaacacagaguuuauucauucccauugugcaugcccu

SEQ ID NO: 4099754 - RNA, 69 nt, Human
agggcacaggauacuacaacaggacugucuaauuccaaagcccacacucuuuuugugguugucuacccu

SEQ ID NO: 4099755 - RNA, 60 nt, Human
agggcagaccacgugcaaggaugcucaagaaggcaaacuaagggagaugugggcuguccu

SEQ ID NO: 4099756 - RNA, 57 nt, Human
agggcagagagaugaaugggaugaccccggagggugcuuccaacaccuuucuccccu

SEQ ID NO: 4099757 - RNA, 57 nt, Human
agggcagagggagggcuucugagagcugacacuguucuauuguucuauuuucguccu

SEQ ID NO: 4099758 - RNA, 81 nt, Human
agggcagcacagcugugcuccuguugacaaggggcagaugaugcagaagaguccccaggagccaagaugcugucuggcccu

SEQ ID NO: 4099759 - RNA, 57 nt, Human
agggcagccugagugcuggcccacaaagggcccuggaggaaaaucugaggcugcucu

SEQ ID NO: 4099760 - RNA, 88 nt, Human
agggcaggaaucaggcacagcucugauuagagacauucuucaauuuugauggaaauaucuuuagagcuuaguuagcaauucugguccu

SEQ ID NO: 4099761 - RNA, 56 nt, Human
agggcaggagguccgucccuucagaaucucccugucaggacacggcuuucugcccu

SEQ ID NO: 4099762 - RNA, 58 nt, Human
agggcaggauuuugaguauauuagucuucaccuacaaaugccaaacuucuucugcccu

SEQ ID NO: 4099763 - RNA, 129 nt, Human
agggcaggcaggagggugacauggcagaggaggggcugguggggaaagaggaccaucuggugugugccuugaugguuagcucccacauccacccacucauugccuguguuauuugaccucccugagccu

SEQ ID NO: 4099764 - RNA, 63 nt, Human
agggcagggcaaggacagaugcuaccauccacugagccauagcauugaucuuuauucugcuuu

SEQ ID NO: 4099765 - RNA, 57 nt, Human
agggcaggggguagggccugcugucugcagagaaagcagccagagauccucggcccu

SEQ ID NO: 4099766 - RNA, 58 nt, Human
agggcaucccuuuccccagccuucuccaaggccaccugggcagacgggagcuugccuu

SEQ ID NO: 4099767 - RNA, 70 nt, Human
agggcaucucuaacagucuccuucccccuuagauagugacgagaggcugcgagacuguggaaaugacccu

SEQ ID NO: 4099768 - RNA, 73 nt, Human
agggccaaguaagaucuugaaauuuaagauagagacaucuggucugaguuuucugagaagcuuauugaauccu

SEQ ID NO: 4099769 - RNA, 101 nt, Human
agggccaaugcacacuuugacauuucuuccuucucuuuucugaguuuguuuaacccagaguuuagggcugagagcuuggcagaggccugcacaauggcccu

SEQ ID NO: 4099770 - RNA, 82 nt, Human
agggccagagaauuccacggcuuugaacaaucuuugugaacagagcuuugugucagggcugugguuaugauuuucaggcccu

SEQ ID NO: 4099771 - RNA, 63 nt, Human
agggccaggaacaccugaaggggcaacaaagaucugacucuccuaguagggguuccaggcccu

SEQ ID NO: 4099772 - RNA, 69 nt, Human
agggccaggaucacagccaagaggguuccugucacacaguuucugcuugggcugaugagcccuggcucu

SEQ ID NO: 4099773 - RNA, 65 nt, Human
agggccaugcagggaaaagagauauuauuuaauauuuuaaugauuuaucuucucuuugcugcccu

SEQ ID NO: 4099774 - RNA, 69 nt, Human
agggccccacugagagucagcuucuccuccuucaucugugugggcaggaacaagcaggcucugggcccu

SEQ ID NO: 4099775 - RNA, 56 nt, Human
agggccccauagucacugcccgggcauugucccaggcagcaggauuaggggcaucu

SEQ ID NO: 4099776 - RNA, 60 nt, Human
agggcccccagcaacaaaccagggggagcuccgcauucuuugggcaauugcuggcccccu

SEQ ID NO: 4099777 - RNA, 67 nt, Human
agggcccccuguggcugucuggaggaaaagagcuccaggcagaaggauccgcaggugcaaaggcccu

SEQ ID NO: 4099778 - RNA, 60 nt, Human
agggcccugcaugagauuaagguugguaagaaggaacgccagcugucuaaggcaggcccu

SEQ ID NO: 4099779 - RNA, 90 nt, Human
agggccugagaccugcucugcccucucuuaaggagagaaggcuuuuucugucuggccuggaauccucuggggucagggcacuacagcccu

SEQ ID NO: 4099780 - RNA, 75 nt, Human
agggccuggaaugccucccugucagagaccaugaguacccuggcucccugcccauuuggggcaucccagugcucu

SEQ ID NO: 4099781 - RNA, 61 nt, Human
agggccugggccagcacccuuugaggcccacaacagggcacacaggggagggccaggcccu

SEQ ID NO: 4099782 - RNA, 70 nt, Human
agggccugguucuguguagggaaaaugagagcuuuuccccucucuucucauuccggcacauagcuguccu

SEQ ID NO: 4099783 - RNA, 88 nt, Human
agggcgcgcgcuuugcggugcaaggguagcggcaggcgggcguaccaggcgggcggcuucaucuugcccuuccacagcgugacgcccu

SEQ ID NO: 4099784 - RNA, 58 nt, Human
agggcggggacaguggcuguuuuguuugccagcauagcuagcauaaugucuggcuccu

SEQ ID NO: 4099785 - RNA, 64 nt, Human
agggcuagaaugcagcuugaaaaaucaggagaaccuuucugcaugaacaguuuauuccagcccu

SEQ ID NO: 4099786 - RNA, 58 nt, Human
agggcucagaacaaugaguguagguuggcaucaaccaccuucauauucucugauaccu

SEQ ID NO: 4099787 - RNA, 58 nt, Human
agggcugcuccuccuucaggccuagguuuauugucugcaccuggggguaggcagcccu

SEQ ID NO: 4099788 - RNA, 86 nt, Human
agggcuggccauggcagccaugggagccaccagcgcaccuuagcuauagugaugcugccuuggcugaccaccaaagccaggguccu

SEQ ID NO: 4099789 - RNA, 124 nt, Human
agggcuggucaaggggcagcgcucugucgugggggccuccaugguagucgguaagcccagguagcgguggacuggggcuccagccagguguccccacucagucccgcguguccugccuagcccu

SEQ ID NO: 4099790 - RNA, 65 nt, Human
agggcugguuguugccagcauggaggucgcagucuuugugucagcccgagcacacagccagccuu

SEQ ID NO: 4099791 - RNA, 100 nt, Human
agggcugucaaggcagacgcacucgugacuuugacaaagggaagcagcuggaagguugcgggucccagggucacaggcagcuguauuagugacagguucu

SEQ ID NO: 4099792 - RNA, 73 nt, Human
agggcuguuuuuccaucugugcauguugaagcucucuuuugacuacagaauaacagaugugauaugcagucuu

SEQ ID NO: 4099793 - RNA, 56 nt, Human
agggcuugcugauuuaaagagcugcacagccuuggguagccuuuagaaagcacucu

SEQ ID NO: 4099794 - RNA, 74 nt, Human
agggcuuugagcaucuuauagaaagagcucauuuacugauauuagcucuuauucuccuagagcucaguggccuu

SEQ ID NO: 4099795 - RNA, 55 nt, Human
aggggaaagaccacuugaggaggaugaguuuuucucugucuugugggcuuccccu

SEQ ID NO: 4099796 - RNA, 58 nt, Human
aggggaaccccuaaggucaccccucagccagggggaacuguuuaacagggguuugucu

SEQ ID NO: 4099797 - RNA, 60 nt, Human
aggggaagcgcagugcagccuuugaggaccugacagcuggcagugcccggugccuccucu

SEQ ID NO: 4099798 - RNA, 128 nt, Human
aggggaauggaggcucagcaggguggccgggugccucgcuggcugccagcaccauggucacuuggcugcuggccucuacaggccggccaggcacuaccaccaaaccuccuucuagcugcauucccucu

SEQ ID NO: 4099799 - RNA, 74 nt, Human
aggggagaaaaaugccuucuguuucuguuucugugccgugcaucuaggccaccgggagguuacuuuucuucucu

SEQ ID NO: 4099800 - RNA, 62 nt, Human
aggggagccaugucuccaggccaucagcucaugcagguuagggagucagguggcucuuuccu

SEQ ID NO: 4099801 - RNA, 75 nt, Human
aggggagcugccugagcuggcagagcuugcugagcccuccugcuugcugagcccuccugcuugcugagcccuccu

SEQ ID NO: 4099802 - RNA, 100 nt, Human
aggggaggagauuucuugucugccaaggguaguggaggccccugcaucugucaugcagauccauccagcacucuugccagaucuagcgugcugaucccuu

SEQ ID NO: 4099803 - RNA, 67 nt, Human
aggggcacaauugaacugaauccuggauugcuguacugcagcacuaaccagcaaguucacugcccuu

SEQ ID NO: 4099804 - RNA, 56 nt, Human
aggggcaguuccaaguuuugugaggccuaaaagguaaacaauuuggagacucucuu

SEQ ID NO: 4099805 - RNA, 59 nt, Human
agggagccauggaggguugugggcagagagggccucccccauccacugagugguucccu

SEQ ID NO: 4099806 - RNA, 55 nt, Human
agggagcugacuggcugccauuuugaaucacaacaaaaacuugccagagcucucu

SEQ ID NO: 4099807 - RNA, 59 nt, Human
agggagcuuucagguagcuuaaggucauuuuccacugaugaagaagcagaaaguuuccu

SEQ ID NO: 4099808 - RNA, 59 nt, Human
agggaggaaggauguuccaaaguguccagacugugcgauuuaauuuccuucaccucccu

SEQ ID NO: 4099809 - RNA, 94 nt, Human
agggaggauggagaaggaggugagucauguccagguuauggcucccaugcuuggucguuggccugggcaugaagcaucgugugccauccucucu

SEQ ID NO: 4099810 - RNA, 79 nt, Human
agggagggaggggaaaugcauggaucuuggcagaugcaaaugauaagcuuuaccuaguauaaugcaaccuucuuugccu

SEQ ID NO: 4099811 - RNA, 67 nt, Human
agggagggagugcagggacagaccggggcacuccaggccccauccacuggccacugcaccucuuccu

SEQ ID NO: 4099812 - RNA, 110 nt, Human
agggagggcagcagcagggguccaugcugcagcugcaggaucagaugugguucguuaaaucaguucaauuuuugaaacugucagcuuggcuugccucaaugccccuuccu

SEQ ID NO: 4099813 - RNA, 58 nt, Human
agggagguagcaagccugcagcucaguucaacuauggaguauagccuguggccucucu

SEQ ID NO: 4099814 - RNA, 70 nt, Human
agggaguagggaugcuggugacuccggugggaggcacauggagucagugaucgcgugucucuacuggccu

SEQ ID NO: 4099815 - RNA, 79 nt, Human
agggagucaggggcagugggccagaugcuaggucuuccuguacccagccuggcuucuuuccacuguccuguggcuuucu

SEQ ID NO: 4099816 - RNA, 58 nt, Human
agggagucuggccgucggcuggcucagggcgggccgguuggcuguacccaggcucccu

SEQ ID NO: 4099817 - RNA, 66 nt, Human
agggagugccugguguugcagcugguccgguaggcagagagggccagcagcccagaaggacuuucu

SEQ ID NO: 4099818 - RNA, 85 nt, Human
agggagugggugcugaugcugucugugaccucugcaugucuggaagucaggccagcagaccucagggacucucagccugcuuccu

SEQ ID NO: 4099819 - RNA, 83 nt, Human
agggauaccacagaaugaugacacuucagcaaaacuuuagcaguaugugcaugacauguugacagcuucugacagguuuuccu

SEQ ID NO: 4099820 - RNA, 55 nt, Human
agggauacuugaagcugggaagcugggauccuucagauguccaagaagugccccu

SEQ ID NO: 4099821 - RNA, 71 nt, Human
agggauaucugggcugcagcucggggcuccccucaguccuccagcugccaccagauguuuucuaaaccccu

SEQ ID NO: 4099822 - RNA, 70 nt, Human
agggaucggguggguucugccaucaggaccagggagcccacugaguggccuggagccccgccuggucccu

SEQ ID NO: 4099823 - RNA, 59 nt, Human
agggaucuccuuuugcuuuacagaugaacugucugaauuuugagcccugggagaucucu

SEQ ID NO: 4099824 - RNA, 81 nt, Human
agggaugcuuaauguuucuucugugaggugugugccuguaccacacacauguacacauacaguggaguggaaaguauuccu

SEQ ID NO: 4099825 - RNA, 65 nt, Human
agggauggaaugaauggcagauacauauucuucugguugaauguagucauuuagcucacauuucu

SEQ ID NO: 4099826 - RNA, 74 nt, Human
agggauggggggccaucuucaaggauguggcauuuaucccaaauuaaugucuuaucaugugguucuguauuccu

SEQ ID NO: 4099827 - RNA, 98 nt, Human
agggauguaugguauuuauggcuggguaggaccagaaaugcacuuuguauuacagaguguuaaggcugguugcuauaguauggaacagaaacaccucu

SEQ ID NO: 4099828 - RNA, 56 nt, Human
agggauguuggaaaaugcagucuuuaccugggcuguccuaugcagcuaaaauuccu

SEQ ID NO: 4099829 - RNA, 64 nt, Human
agggcaaaauacuuauaaaggcuaugcuuauuuguccacguaggucggccuuaguaugugccuu

SEQ ID NO: 4099830 - RNA, 59 nt, Human
agggcaauccagccagcugaucugagcauacacuuuuccccugggcugaggucugccuu

SEQ ID NO: 4099831 - RNA, 78 nt, Human
agggcacaucugcugggaauggguagagcggggugggaggaguccuggcaggggagccguuccuaugcaaugggccuu

SEQ ID NO: 4099832 - RNA, 101 nt, Human
agggcacauuaugcagcgguaagaguuuuacguuguuuguaaaauagugcaacauuauuuacagacaaacuguguuaaguugaagaugcauauugcacccu

SEQ ID NO: 4099833 - RNA, 60 nt, Human
agggcacuggcuugcaaacucagaagugucauuggcaucucgagauggguucagugcucu

SEQ ID NO: 4099834 - RNA, 75 nt, Human
agggcagaacaacucuagcugcucagccuucugcccacuuaccaccaggcuguguuuccccuggagcuucucccu

SEQ ID NO: 4099835 - RNA, 68 nt, Human
agggcagacauauguuuuaacagauuauagcauuagucuuaguuuuaauuuugauuugugucuucccu

SEQ ID NO: 4099836 - RNA, 55 nt, Human
agggcagauuguauauucuccacugguuggcacauuagaguauugaauuugcccu

SEQ ID NO: 4099837 - RNA, 69 nt, Human
agggcagcagcccauggcucugacggggcagcucucuuccuguuuaccaucgugguggacugcugcucu

SEQ ID NO: 4099838 - RNA, 67 nt, Human
agggcagcagcugucccugagauucauagauaaagccuugacuugcagaagggauaagcugugcuuu

SEQ ID NO: 4099839 - RNA, 82 nt, Human
agggcagcuuauuauagcucauauguugaaugguuaaaaagccguaucaaagcaaaacauauuucuauuaaagaccugcuuu

SEQ ID NO: 4099840 - RNA, 83 nt, Human
aguaaguuaaaauuagcagggacuuuggcaacagguguuuguuuagaugcguguuuaugaaaauccuugcugaucuucuugcu

SEQ ID NO: 4099841 - RNA, 69 nt, Human
aguaauacaaguugugauaauguaaaauauaugucuaauuuaugccuuuuaauugucacauuuguugcu

SEQ ID NO: 4099842 - RNA, 58 nt, Human
aguaauauccaguccuucugaaauuaaauggauaucaggauaacuauaggauaaugcu

SEQ ID NO: 4099843 - RNA, 56 nt, Human
aguaaugugccugaaauacuugcguagggcuuggcaaguggcaggcgaucauuacu

SEQ ID NO: 4099844 - RNA, 126 nt, Human
aguacauaauugucuccucuuaaggcaaggauguuagguauagcacugcagcgaugggaccuggacccagcugccugcauuuauauccugcucaauuugaccuugagaggguugcugaauuguucu

SEQ ID NO: 4099845 - RNA, 106 nt, Human
aguacccuccuguaggcucaggacuagggcagagcuuguacacgauagaggagaugcucgaucggguucucucuccaaguccugcuucucauggauuuaaggggcu

SEQ ID NO: 4099846 - RNA, 79 nt, Human
aguaccucaguuucugcuuaauacugcagaacuugauucucucaaguucugguggccagaagucugaacugaagguauu

SEQ ID NO: 4099847 - RNA, 95 nt, Human
aguaccuugauuuuggacuucuggcuuccagaacugagcaacaauaacuuucuguugaagccguccaguuuugaagccacccagucuguggugcu

SEQ ID NO: 4099848 - RNA, 62 nt, Human
aguacuuggagccuugaauauguaucaagaaggcacuugauacauauucaacguucaguauu

SEQ ID NO: 4099849 - RNA, 76 nt, Human
aguacuuucggaaaugucuucaguucuguauuguguucacauacacaaacaggcuuuacaagauugcuucgguacu

SEQ ID NO: 4099850 - RNA, 77 nt, Human
aguagacccuggaaugcugguaaaauagcacauuaugcugaugaauauauguaaugauaccagcauccauguuugcu

SEQ ID NO: 4099851 - RNA, 77 nt, Human
aguagacggggacgugggcugcuuuaauagaggcagagugccccaucuggggagggagccacagguccccgccgacu

SEQ ID NO: 4099852 - RNA, 67 nt, Human
aguagaucagagugggucuggcaugagcauguuaauaaaugauuuuugccauuucuuucugagagcu

SEQ ID NO: 4099853 - RNA, 80 nt, Human
aguagccggaauuuacaggugcacucgccaugcccugcagaagccucauguguuagggcgcaccugcaauuccagccacu

SEQ ID NO: 4099854 - RNA, 81 nt, Human
aguagcucuucuacagggaugaccagagggaugugaguacugauuuaagaccacuuccaggguccccugaaggaagacucu

SEQ ID NO: 4099855 - RNA, 90 nt, Human
aguaggacaauauaugaaaacacuuuagaaagggacuugcgauuagguagcuuuuuugagguguuuguuuguuuguuuguuugucccucu

SEQ ID NO: 4099856 - RNA, 75 nt, Human
aguaggagcaacuggaaggaaaaugagagacagaaguggaugauaacuguuuuccuucucagccauugcccuccu

SEQ ID NO: 4099857 - RNA, 60 nt, Human
aguaggccccuggugcccugaggccaaguguggccaaaacagagggcccugguggccauu

SEQ ID NO: 4099858 - RNA, 68 nt, Human
aguaggcuguuuuaugggccaauauuaguucccuauucccaguacugauuacauaaaacaguucuauu

SEQ ID NO: 4099859 - RNA, 130 nt, Human
aguaggcuucacuccgcaagacuaucugcaaguaaaaucugacuuuggaacauacugcugagcuuggucucaauccuggagcacugugguuccaaauugucugcuucagccagugcgagguugcagaacu

SEQ ID NO: 4099860 - RNA, 61 nt, Human
aguagggaacuuaugauaugacuuuagacuuuugucuucauaggaaauaguguucuuuauu

SEQ ID NO: 4099861 - RNA, 129 nt, Human
aguaggggcucgguccugggggcacacaguaggggcuuggucccggagcgcacauuggagauccugaagggagcggacauccagugugggcccggccuccucucuggagcucugccuggcugccuggcu

SEQ ID NO: 4099862 - RNA, 59 nt, Human
aguaggguauugagucuauuccuuuucuuuauacugugguaauagauuaauuauccucu

SEQ ID NO: 4099863 - RNA, 91 nt, Human
aguaggugagagcuucucacagagcugcuuugccaaugcguuccugggucaugggccugggaauggcaguagagcgaggcucccaccuauu

SEQ ID NO: 4099864 - RNA, 67 nt, Human
aguagguuuccuaggcuuauacagcuguugaguggagaaaugggauaugggcucaggaacucgaacu

SEQ ID NO: 4099865 - RNA, 74 nt, Human
aguagucacuuaauagguucaucugaagaaggaaucauuuauucauugcagaaauauuuauugagugacauacu

SEQ ID NO: 4099866 - RNA, 72 nt, Human
aguagucugcucagaauugcgcugguggagccagugcauggcuccaccuacguugucugacucuagacuacu

SEQ ID NO: 4099867 - RNA, 79 nt, Human
aguagugaguagagaggcagagcugggauuugaagccuaguggacuggcuccacaguugcugcuuuuaaucacccugcu

SEQ ID NO: 4099868 - RNA, 91 nt, Human
aguaguuaaauuuuaagccaggguuagaagauagucaaaggggaauaaaaaagcuucuuuacuaaacaucuggcauuaaauuccaaauacu

SEQ ID NO: 4099869 - RNA, 56 nt, Human
aguaguuguuaauacucaguaggguuguuaucaguucuuuaguuauuaacagcacu

SEQ ID NO: 4099870 - RNA, 76 nt, Human
aguauaacagcagcugccugaauuugcucacaucaaauugcagcaacuuguuucauucugguuuugcugucuuacu

SEQ ID NO: 4099871 - RNA, 63 nt, Human
aguauaaguuuuugagaauuuacuaugugccaagcgcuugggauauggcucagagcugguacu

SEQ ID NO: 4099872 - RNA, 57 nt, Human
aguauacacugucuccucuaggugguacccaacauuuaaaauacugcaguguauauu

SEQ ID NO: 4099873 - RNA, 56 nt, Human
aguauacuccccauccuagaaacugaaaaguuuugaggaugcucuugggauauacu

SEQ ID NO: 4099874 - RNA, 130 nt, Human
aguauaggcaagggguacacaaauuuucacugauaggaaacagcuuuuaaaacauaacauuggauucacagaaccaaaugauccuugcaagcugugaucagucaaaguaaauucccccaaaugugauucu

SEQ ID NO: 4099875 - RNA, 62 nt, Human
aguauagguacagcagauauucuuagugagcauguucuguaagaauaacguuguacuaggcu

SEQ ID NO: 4099876 - RNA, 76 nt, Human
aguauaugugcacauaugcauguguguguguguguguguguguguguguguguguguguguguguguguguguauu

SEQ ID NO: 4099877 - RNA, 96 nt, Human
aguauauuuggcauuuuuuccgcauuuuuaaggcuugaaaugaaaucuguaagcaggaaguucacagaguuuauuucaagggauagguguauuacu

SEQ ID NO: 4099878 - RNA, 122 nt, Human
aguaucaccugggagcuuguuagcaaugcucuuuccuggguucccucucauucuauggaaucagaaacuguaggggaugaggcccaggaaucuggguguugucagccuuuccaagugaaacu

SEQ ID NO: 4099879 - RNA, 80 nt, Human
aggggcagaagccuguggauuuggggguccuggaaauaagcauucaccugagggcccucagucccaggccuucugguccu

SEQ ID NO: 4099880 - RNA, 55 nt, Human
aggggcagaggaaguggugcugcauuccuaguucaaaucauugaucuucaccccu

SEQ ID NO: 4099881 - RNA, 90 nt, Human
aggggcagcacaaagcaguggcuaggagucuggcgucuggagccaacugucuggauucagacucuggcccugccacucguguaugacccu

SEQ ID NO: 4099882 - RNA, 58 nt, Human
aggggcaggugcugcacuuagacuggccaagagccauauccgggaagacccugccccu

SEQ ID NO: 4099883 - RNA, 87 nt, Human
aggggcucuacaggucagcuccuauggucucugauguccaguccaaguuuccuucaguuuccauggcuccuugcccuguagccaccu

SEQ ID NO: 4099884 - RNA, 92 nt, Human
aggggcuggagagacaucuaaggaggaaggauggagagaggagggaggguucuccuccugccuuugcuucuuguugucuccccauugccccu

SEQ ID NO: 4099885 - RNA, 80 nt, Human
agggggaagcaggggcaguuucucguuugccaucuuagaggagauguguuuaccaggggaacauguuuucuuuugcuccu

SEQ ID NO: 4099886 - RNA, 78 nt, Human
agggggaugcucaggaggcugcuuggggcuuuugggagaagcaccaugagagggcugagcugccucccgcaccccucu

SEQ ID NO: 4099887 - RNA, 58 nt, Human
agggggauggaauagaacuuugcaaugcaucaacagaggaauccuauuucauccuucu

SEQ ID NO: 4099888 - RNA, 77 nt, Human
agggggccccagugggcucagggaagcuuggccugguguccccaccagccuugugcugaggccacuggggagccucu

SEQ ID NO: 4099889 - RNA, 67 nt, Human
aggggggcuucucugggaguccugguugguccugagacagggacacccucccagugaagcccuaccu

SEQ ID NO: 4099890 - RNA, 86 nt, Human
aggggguucuggcuuuaauuuaguaaggcagugcagaauuuugaauugagaacuuauuuaaugaggguuagaauaaaaaaccuucu

SEQ ID NO: 4099891 - RNA, 65 nt, Human
agggguaaggcccucugagcacugauggaccacagacacgguuaccucaggauugucuagccccu

SEQ ID NO: 4099892 - RNA, 90 nt, Human
aggggucauuguuaauucuguugguuagaguuggagagggagcaucaugcugcuguuuaacccaaauaaccacaggagccaguggucucu

SEQ ID NO: 4099893 - RNA, 62 nt, Human
aggggugaaggcccgauaggagcucagacaauuugaccccugaguuccaggucuguacuucu

SEQ ID NO: 4099894 - RNA, 66 nt, Human
aggggugagccuagcagguguucgaaucacauccgcggauugguacauggcacugcuguuccccuu

SEQ ID NO: 4099895 - RNA, 58 nt, Human
agggguucauauguacucaguucuguccuagggacuguauuaguccauuugagcugcu

SEQ ID NO: 4099896 - RNA, 73 nt, Human
aggguagaaagucccagacuccaguuuucugcuuugucaauuaguagcugggucaucugggacuaguugcucu

SEQ ID NO: 4099897 - RNA, 130 nt, Human
aggguagauacgucagcaagucagauguuuggaaggcuuaauuuaagucacugauuucaguucaagagaagggaccucugccagcugccauggccugaauuuaccuuuauacauacagauacucugcccu

SEQ ID NO: 4099898 - RNA, 70 nt, Human
aucaagagagcacuggcaucuaagggugguagguuugccaccauuuugacugugccagggcucaauagau

SEQ ID NO: 4099899 - RNA, 91 nt, Human
aucaagcuuguuuugcuguuuucccagcuucucaucuuccaaaauuguguaaucauuuuuugggggaggagcugcaagauacaaguaggau

SEQ ID NO: 4099900 - RNA, 82 nt, Human
aucaaggcauuggcagggcuaggucuucuagggcuucaggggagaaucuguugcuugcaucuucuaguuccuagucuuugau

SEQ ID NO: 4099901 - RNA, 55 nt, Human
aucaaugcuugccaaauggaagagagcaagucuuaauuuggcaugaaguauugau

SEQ ID NO: 4099902 - RNA, 75 nt, Human
aucaaugggcucugcucugcucagcuugucucuuggguuacaaaguggcagagccgugcagguaggaccccgggu

SEQ ID NO: 4099903 - RNA, 84 nt, Human
aucaauuacauuuccacaaauaccaguuuccuaacaaaaccaaagguauguuaaaugagauuggaauuuggcuaaugcauuggu

SEQ ID NO: 4099904 - RNA, 105 nt, Human
aucacaaauccaaauucuuucagaaaacuuaucaucaguuaaauuacuaauaggaacaaagugagguugcgauuaguuuuuuaugaaguaguuugggugggugau

SEQ ID NO: 4099905 - RNA, 59 nt, Human
aucacacacuucagauguaauuuguugccugaagcaacaaaccacuaucaaggugugau

SEQ ID NO: 4099906 - RNA, 66 nt, Human
aucacagaaagaagagcuucaguucagccuuggacaacugaaaaaagaagugucuuguuucuggau

SEQ ID NO: 4099907 - RNA, 88 nt, Human
aucacauguggagaauuaaaaaauacugaugccagggccucugggaauguggccagguuugauguauuauuuaaagcucccaggugau

SEQ ID NO: 4099908 - RNA, 80 nt, Human
aucaccagcuuugucugauuccucuuuuuuuguaaugcuaccaagaaguagaagaguaaaauuugagcaagguaggugau

SEQ ID NO: 4099909 - RNA, 61 nt, Human
aucaccauggauggagacugauauggguauguuuuaccugugauucaaauaccauggugau

SEQ ID NO: 4099910 - RNA, 75 nt, Human
aucaccucccccagcaaagccugauggucaaaguccuucagccccuuucuccacgccagcuugcuuaggagggau

SEQ ID NO: 4099911 - RNA, 114 nt, Human
aucaccugagagcuuauuaaaaugcacaggacugggacccacaccuggaaucucugauucagcaggucaggggugggcccaggaaucugcauuucuagcauguucccaggugau

SEQ ID NO: 4099912 - RNA, 80 nt, Human
aucaccugcagccugcagcuuaaaucaggguuucuggcagggccucgggagccacaguuuauagugauugcccaggugau

SEQ ID NO: 4099913 - RNA, 70 nt, Human
aucaccugcuccaccuaccauaagaggcuguugugagaaucagccucuuaugguagguggagcaggugau

SEQ ID NO: 4099914 - RNA, 77 nt, Human
aucaccuggugcccuuuccuuccagagcauucauuagaauguguaagcucugagagagcaaagucaccacaggugau

SEQ ID NO: 4099915 - RNA, 78 nt, Human
aucacucuaucacccaggcuggagugcaguggugcaaucucagcucacugcaaccuugacauccuggguucaagugau

SEQ ID NO: 4099916 - RNA, 66 nt, Human
aucacugaacaguacuuaagggcuaauuggcuuaauacauguaaagcucuuaguacuguuccuggu

SEQ ID NO: 4099917 - RNA, 72 nt, Human
aucacugcaaggacuaguaaaugaauuagaccgaagcugccuuauuacucaagauacugguccuuuuaugau

SEQ ID NO: 4099918 - RNA, 101 nt, Human
aucacugcagaaaguuguauuggacagugcagaucuacacgcuggugaggcccuguguguucauuagcauugccuuggaagauguaaccuucaaaggugau

SEQ ID NO: 4099919 - RNA, 79 nt, Human
aucacuggagccuucggagguugaggcugcagugagccaugaucgggccacugcacuccaaccuaggugacagagugau

SEQ ID NO: 4099920 - RNA, 72 nt, Human
aucacugucgucaucugagauuuaagaacauugcaauuuuaaaucagguaauagcagaugcaacgugguggu

SEQ ID NO: 4099921 - RNA, 77 nt, Human
aucacuugggaguuuguuagaaaugcagaaugacaggcuuuaccccagacuugcauuucaguagaucccugggugau

SEQ ID NO: 4099922 - RNA, 85 nt, Human
aucagaaguauugcauuuaauggguagacauuguuagguuagaauuuaacaaaaaauauagacuugaaauugaagcauuucugau

SEQ ID NO: 4099923 - RNA, 86 nt, Human
aucagaauggccauugcagaguuuugagagaagaaucauauguugugugauuuacaauuguaaaaguuuccucuggcuacuuugau

SEQ ID NO: 4099924 - RNA, 55 nt, Human
aucagaccuuuauuucaugauaggauacuucauguccugugauucaggguuugau

SEQ ID NO: 4099925 - RNA, 126 nt, Human
aucagacucaccuggggacuuguuaaauacagauuguugggucucacuccuagaguuucuucuucaguauucuagggagcagccugugaaucuguauuuccagcaugauuuucaggugcuauugau

SEQ ID NO: 4099926 - RNA, 69 nt, Human
aucagagagauugucuuguacguuugccuguugcaaacaggcugguuuguaaaagauguauguuuuggu

SEQ ID NO: 4099927 - RNA, 55 nt, Human
aucagagcacugagcaggacaccuggaggcaguuugaccuuuucgaggcuuuggu

SEQ ID NO: 4099928 - RNA, 57 nt, Human
aucagagccauaggggcaguaaacuauaguuucucugcugugaaacaugguuuuggu

SEQ ID NO: 4099929 - RNA, 62 nt, Human
aucagauugucaagaggcugcuuugaauugugaaaguaguaguuucccucuggcaauuagau

SEQ ID NO: 4099930 - RNA, 59 nt, Human
aucagauugucagcaugguuggguucuagugagggcucuuuucauggcuugcagauggu

SEQ ID NO: 4099931 - RNA, 93 nt, Human
aucagcaguuggacuuugccacuugcuccagcuuguccuucuucuugauggcauagaaguuggagaagcccuuggcaaagauauugagcugau

SEQ ID NO: 4099932 - RNA, 95 nt, Human
aucagcgagcucucugcacgacuucaccucugggcauucaaaauggauuaugaaacuacagaaaagguaagcucucuguaagagaggccgcugau

SEQ ID NO: 4099933 - RNA, 70 nt, Human
aucagcucacagucaagagcaagauugggccaggccaggcuugccacagcagugcuuugacaguggggau

SEQ ID NO: 4099934 - RNA, 81 nt, Human
aucagcucguacaaugcaggacagucauguggagcaggagaacaacuggaauggcuucuagcauugucacaacuagcuggu

SEQ ID NO: 4099935 - RNA, 83 nt, Human
aucagcucucccgaaugaucauggaagccuaucuugagaggcagccuuucaagcucuucaguguuauuuguggaaaguaugau

SEQ ID NO: 4099936 - RNA, 82 nt, Human
aucagcugaggaccuuguuggaagugcagauucugauuccacaagucugcgauucuguauuucuaauaagaucucaggugau

SEQ ID NO: 4099937 - RNA, 87 nt, Human
aucagcugccagaaagcuuccgcuucagugcuuuguugauacuggugucagcaggacauuaaaagcuugaagcuuuuuacguuugau

SEQ ID NO: 4099938 - RNA, 65 nt, Human
aucaggauccucuuuuccuaggaaggugaugucaucauuccuauguaaaggauggagaaacugau

SEQ ID NO: 4099939 - RNA, 70 nt, Human
aucagggaucuacuuucugucaauggauuauauccagggauaaaaguaagguucucaaauaugaccugau

SEQ ID NO: 4099940 - RNA, 72 nt, Human
aucaguagacagccuuugaacuucagagguuuggaucccugcaggccucugcaacuggcuguggcuauagau

SEQ ID NO: 4099941 - RNA, 75 nt, Human
aucaguaugcugcuuuaagaugauccaacuuuuuaaacagaagaaauguggaucguuuuaaaaaggcaggcuggu

SEQ ID NO: 4099942 - RNA, 58 nt, Human
aucaguguaccuuauggauuuuuuuaauccucuuuaaucgaucccucaguaugcuggu

SEQ ID NO: 4099943 - RNA, 109 nt, Human
aucaguguuuuaaucggauuuuuaaaaaacauuuuauuucuuuguacaauuaccauccuauguaaagaugaaauuuguguugaguugaagauugucauggaauaaagau

SEQ ID NO: 4099944 - RNA, 58 nt, Human
aucauaaagugcuaucugauuggauuucacccaucuuuucagaauuugccucugugau

SEQ ID NO: 4099945 - RNA, 55 nt, Human
aucauagguauaaguaaauuagacauuaggucuugcugacuuuaguaccuuuggu

SEQ ID NO: 4099946 - RNA, 62 nt, Human
aucaucaugagucauuagcacuauuaauaguggcuaugcuauuagcuuuggauucagaagau

SEQ ID NO: 4099947 - RNA, 65 nt, Human
aucaucccagcagccucguaaaggagaacucaauugucacaauuuuacaggcucugagagaugau

SEQ ID NO: 4099948 - RNA, 73 nt, Human
aucauccuaaacuggggaaauggauauuauuauuuacacugaauauucuucaccugagucagucuaggaggau

SEQ ID NO: 4099949 - RNA, 59 nt, Human
aucaucuugcuuucuguuuacuucuaguaaauuucuagaguggacauuaacaggaugau

SEQ ID NO: 4099950 - RNA, 69 nt, Human
aucaugaauucaacccacuauauaucaaacagauuuguuaucaguccaggguuuugugacauucaugau

SEQ ID NO: 4099951 - RNA, 65 nt, Human
aucaugccacagaguuacaaaacagucauugaauuguauaccugcaauggcugaacucuuaugau

SEQ ID NO: 4099952 - RNA, 126 nt, Human
aucauggaaugucaauaaccauuacauaugauuucuggugaggcagcaauaaaaagaauuuuuaauugccuguguagguucaaauuguugcaguuucuaaguugucagguaggauucaaacaugau

SEQ ID NO: 4099953 - RNA, 87 nt, Human
aguucguuuauucauuggccugugacuuccggggucaguuaauuacuagauuucagaguuuauuagguuaauggacacauaagaacu

SEQ ID NO: 4099954 - RNA, 68 nt, Human
aguucuaaguaaauauuuuauauaguuccucaguaguguugaaugagaagauguuuugcuuuagaacu

SEQ ID NO: 4099955 - RNA, 66 nt, Human
aguucuaugccuggcaaccuucagcaaccucggccucccuggacugcuugcuaugcauccugaacu

SEQ ID NO: 4099956 - RNA, 70 nt, Human
aguucucuaucugccacuggccgcguguggcucagaacgcuugaaauguggcuagugcagaugaauaacu

SEQ ID NO: 4099957 - RNA, 62 nt, Human
aguucucuucucaucacccaggaccacuggacagaaguggcagggagacaagaaguagagcu

SEQ ID NO: 4099958 - RNA, 80 nt, Human
aguucuggacuggcaaauucuuuaaguaucucuuguuuuauggaauaauacagugaauacuuacaguguuugcaagaacu

SEQ ID NO: 4099959 - RNA, 124 nt, Human
aguucuggggcugcaggcguuccuccuguguccgccagucagccggggcucucuggcgccuggcugugucaggccugucccagcugaggacggugacccuggagccgcgcccgcgccuggagcu

SEQ ID NO: 4099960 - RNA, 113 nt, Human
aguucuuagacuuuugcucauuacacugcugcauuugcaguccuuuaacccacaggauugagggugaaaagauugggaaugcagcaguauaaugaacaaaaguaaugaaaacu

SEQ ID NO: 4099961 - RNA, 71 nt, Human
aguucuucagccucaaauaguacuucacuggguguuuucaggaaccuacaucuguuuggggaggaauugcu

SEQ ID NO: 4099962 - RNA, 129 nt, Human
aguucuuugcauagugcuaggcacaaaguuggcuugcagugaagacuuucugggguguaaaggugacuuuccuuuacacauggaaugggucuaauuuacgaagcuagauugcguaguuggcaguucucu

SEQ ID NO: 4099963 - RNA, 61 nt, Human
aguucuuuggcagcugggcugguaaacacagaaguuuucuagcaaggacguccaaagaacu

SEQ ID NO: 4099964 - RNA, 74 nt, Human
aguugaaccauaugaaauugcuuuuggguggaucaagaacagcugaauauuggccauuucauuugguucaaacu

SEQ ID NO: 4099965 - RNA, 68 nt, Human
aguugaagcaggguggccagauugucauucuuuugguauccuagguagacaaugaugguguuucagcu

SEQ ID NO: 4099966 - RNA, 91 nt, Human
aguugaagcuuucuuguuaucacugccuuagaacaaagcaggaucuccccugugauccuagucauuguggcaaguccaaaggaagacaacu

SEQ ID NO: 4099967 - RNA, 96 nt, Human
aguugaauuauuuuccuuuucaaugcuuucuguauauuaaguccaguauaaauuuauagaucauuugcauuggucguaagggcagugagucacauu

SEQ ID NO: 4099968 - RNA, 58 nt, Human
aguugacauccauaacaggaagugagguuaggccuuuuucucuguggauguacauacu

SEQ ID NO: 4099969 - RNA, 75 nt, Human
aguugagccuggggagaagcgacucggcuggcacgcuggcuuccagcccugcccuguccuucccgccggccagcu

SEQ ID NO: 4099970 - RNA, 100 nt, Human
aguugauauguaaauccaguuagcaaagagaaaaauuaugcuaauauuaacauugucauuuuuuuugccacaguaagucuggauuugucagacaucaauu

SEQ ID NO: 4099971 - RNA, 93 nt, Human
aguugauuuucuucauuguuuaugugaaauugccauacguuugcuuuggcaaacaguuguuauuuuuauaugggugguugaguugauacaacu

SEQ ID NO: 4099972 - RNA, 73 nt, Human
aguugcagguggaugggucuguguucuggccaaaaauaaugcuagaauaaaugcuaccuaucacaucuggacu

SEQ ID NO: 4099973 - RNA, 77 nt, Human
aguugccuggguagauagcagcagcagcucaccagccccacgcugccaggcugcuggcugcuguccaccaggcagcu

SEQ ID NO: 4099974 - RNA, 57 nt, Human
aguugcucagggacuauggcaaagucgggaagaagccugucuccucucuggguuacu

SEQ ID NO: 4099975 - RNA, 58 nt, Human
aguugcuucccuauucuuagcaggugugaaccuuuccugagguagaggaaauguagcu

SEQ ID NO: 4099976 - RNA, 66 nt, Human
aguuggaauuucauguaagugacucauuagaaugacucaacuacuugagacuccuuucccaugacu

SEQ ID NO: 4099977 - RNA, 64 nt, Human
aguuggcacuuagccccagucuaaagcaaaagucuuaaauuuagcuguggcguaaggcucagcu

SEQ ID NO: 4099978 - RNA, 88 nt, Human
aguugggggaaagaaaaugaaguaaauucagaagugaugaagccagagaccacuuuagauacauucucauuuguuuucuuaauuaacu

SEQ ID NO: 4099979 - RNA, 61 nt, Human
aguuggggugagugauugauuuacaaaccagcaguagauuaaggcugcacuggccuuaacu

SEQ ID NO: 4099980 - RNA, 55 nt, Human
aguugguauuuacugcaguuggauauuagucuguuuugcaaagugaauagcaauu

SEQ ID NO: 4099981 - RNA, 60 nt, Human
aguugguuauucaugagugcuacugaucccucaacagugaccaucagagaauaacaaacu

SEQ ID NO: 4099982 - RNA, 118 nt, Human
aguuguaagagaaaaugguacagcaguuacaagaggauguggacauggaagaugcuucuuaaaaaaaaucucuguaaccauuucuuuuauguacauuugaaaaugcccucuggagacu

SEQ ID NO: 4099983 - RNA, 65 nt, Human
aguuguauuugcaucgcauugguucaaacuuauucacguaguuuccuugggaugcaagugagacu

SEQ ID NO: 4099984 - RNA, 63 nt, Human
agugcuaaaggguuaugaacaagacaauauugaaguugguuucuucauagucuuuuuagcauu

SEQ ID NO: 4099985 - RNA, 61 nt, Human
agugcuaugacagcauuguuaccuguugaguacacacagggccauuaucuguucuaggacu

SEQ ID NO: 4099986 - RNA, 85 nt, Human
agugcuaugguagacaagguggaaacugcauggccuuuuauuaccuaaucuugaaagucacauagcaucacuucugucauacacu

SEQ ID NO: 4099987 - RNA, 81 nt, Human
agugcucaagguuuuggugagagcugaccgugcgaggguuacuggcacguaguucucaaggcaguucucaccuacagcacu

SEQ ID NO: 4099988 - RNA, 76 nt, Human
agugcucaaguuguucaucuuauucuguagguuucucuuuccuuggcuuauugauaugcagaacugacuugguacu

SEQ ID NO: 4099989 - RNA, 61 nt, Human
agugcucaauggggugccuuuuuuacagucaaacugucaggaugguccuuuaugagaagcu

SEQ ID NO: 4099990 - RNA, 62 nt, Human
agugcucaccugcuccagggacgucugaccucgggucucgcccucccucccagguggguguu

SEQ ID NO: 4099991 - RNA, 60 nt, Human
agugcucuucccugauagcaucuguuggccugcugagucacacugcaggugaagugcacu

SEQ ID NO: 4099992 - RNA, 87 nt, Human
agugcugcaugguauaaaagaguaaacuaugcaucauuauucuaacaggaaaaguauuguuuacuguguacuggauuuugcagcacu

SEQ ID NO: 4099993 - RNA, 77 nt, Human
agugcugggcacauguauugacauuauauucuuuuaauccaagagaaaacuuuucauaaugcagugucuaaggcauu

SEQ ID NO: 4099994 - RNA, 76 nt, Human
agugcuguaggcuccauuuuccugcagcugcgcauacacucaauaagccuaaauguagucaaaggagccucgcacu

SEQ ID NO: 4099995 - RNA, 71 nt, Human
agugcugugaauccauuucaggugugcaaggucgggaccucugauuugcgucucauuugaaaucauggccu

SEQ ID NO: 4099996 - RNA, 59 nt, Human
agugcuuaaggcagucugucaaacagagaaugugucggauccucaaugcuuuuagcacu

SEQ ID NO: 4099997 - RNA, 63 nt, Human
agugcuuuauguuguugugcaaauucagcaaaaggccaaaacagccaacaguacugaagcacu

SEQ ID NO: 4099998 - RNA, 61 nt, Human
agugcuuugaacgaaaggcugagagguuaaggaaccacuuacuuuuuaauuucaaaccacu

SEQ ID NO: 4099999 - RNA, 55 nt, Human
aguggaagaacugggauggcuuucuaaagucucuuagaaaugaaguucuuucucu

SEQ ID NO: 4100000 - RNA, 69 nt, Human
aguggagaaaagucuaaauuauucaauaaggguuuuaucuuucauuuguuggauuuggauaacuccacu

SEQ ID NO: 4100001 - RNA, 57 nt, Human
aguggagaauaugcagaaagccugaaaagaacuagagccucugcucucuuuuccauu

SEQ ID NO: 4100002 - RNA, 56 nt, Human
aguggagaggaacccagcucuguuccccuccaacagcccagcucuuucucugcacu

SEQ ID NO: 4100003 - RNA, 61 nt, Human
aguggagcuccggggucagguggguggaagaaguucccguccucagucucccugcuccacu

SEQ ID NO: 4100004 - RNA, 56 nt, Human
aguggauccaacaugcuuccuggguugcugucuuccaagaggcuguggauccuacu

SEQ ID NO: 4100005 - RNA, 71 nt, Human
aguggauuuuaaauugcugugguugccaauagacgcaggccaugcauucuugcaccacacaaaaauuugcu

SEQ ID NO: 4100006 - RNA, 63 nt, Human
aguggcaaaagcaggcuuaggccuacgucuuucugauguuuaagcccauguguuuucuguccu

SEQ ID NO: 4100007 - RNA, 66 nt, Human
aguggcaaggacuuaggauauuacagaacaacuugaaaaagauggacuugucugaguucuuccauu

SEQ ID NO: 4100008 - RNA, 124 nt, Human
aguggcagguuauauagauagacucuuaaauuuggggcaaagaugaucuacaaguucauucauugacuugaaugaaguucuauucauuuucuuugguuggagauuuaucugcauucuuguugcu

SEQ ID NO: 4100009 - RNA, 73 nt, Human
aguggcaguacuuuaucacauggaaucagcuaguguuuacuugaacaauucuguggaugggaguucugcuauu

SEQ ID NO: 4100010 - RNA, 65 nt, Human
aguggccagaaguacuuuaauaggaaaguaaauuaggcuuuuaagaugcuaguauuucagcgacu

SEQ ID NO: 4100011 - RNA, 77 nt, Human
aguggccugacuccccaggcuccugcuguguugacaaaauucugcaagcacaaauggaccuggucagaaagagcccu

SEQ ID NO: 4100012 - RNA, 55 nt, Human
aguggcucacaccuguaaucccagcacuuugggaggcugaggcaggugggucacu

SEQ ID NO: 4100013 - RNA, 55 nt, Human
aguggcucaugccuguaaucccagcacuuuggaaggcugaggcagguggaucacu

SEQ ID NO: 4100014 - RNA, 55 nt, Human
aguggcucaugccuguaaucccagcaugcugggaggccgaagcaggcagaucacu

SEQ ID NO: 4100015 - RNA, 62 nt, Human
aguggcuucuauauugaauuuucuuccuuuguuccggaugacagcuccaugaaguagucacu

SEQ ID NO: 4100016 - RNA, 106 nt, Human
aguggcuuucuuuuucuugcccugaagcagcaaaugaugggagaaauauguguuuguuucuguucuucagagucagagcugcuucaggcauaaaauucuuagcccu

SEQ ID NO: 4100017 - RNA, 57 nt, Human
agugggacaguguagagcgucaggccagagaggcagaaacuauacucuguccccacu

SEQ ID NO: 4100018 - RNA, 63 nt, Human
agugggaggcaucccugagugcucucugacagcugaacggaucuucucagagaugcccuuauu

SEQ ID NO: 4100019 - RNA, 92 nt, Human
agugggaguggugcugguggcuuugcaguuagccuaggauugagcaauugcugcaauuguugcucucugcaucuucgguguuacuucuuacu

SEQ ID NO: 4100020 - RNA, 92 nt, Human
agugggauuguugcagcaaggccacugcucagguuuccgggauagaaucgggccccggggccuagcugggccuuggacagagcaucuucauu

SEQ ID NO: 4100021 - RNA, 88 nt, Human
agugggcuacugaaggacauuauguucaguagcuuaaaaaucugauggucucuuuuaagccccuggacuuugauguuuuaugccuuuu

SEQ ID NO: 4100022 - RNA, 60 nt, Human
agugggcuucagaaagcauggcaucuaugcuguugacgugccuggaucugaggacccauu

SEQ ID NO: 4100023 - RNA, 58 nt, Human
aguggggaagauuuugcagucauucagucauucaaugacuacaucauggucaccuacu

SEQ ID NO: 4100024 - RNA, 104 nt, Human
aguggggaucaugucuccuccuuucuauuauugugagggcaaaguuucuaucaucagaugguggaguuucucuuucaaacugaaauaaggaugauugcuccauu

SEQ ID NO: 4100025 - RNA, 128 nt, Human
aguggggauguuaauaucuuauuagguugccuggaugauugaauuagauccugcauagguugugcuuugcucagagccugacuuauaggaugugcuucaucaaggcaaaccugcuguucauucuugcu

SEQ ID NO: 4100026 - RNA, 74 nt, Human
aguggggccuggccucuguguucaccauagguacucugaguacugagaaccucaugcaggccauggucucugcu

SEQ ID NO: 4100027 - RNA, 77 nt, Human
aguggggccuucaucugggaaacacugcauccccagagugcuuuggggcagguggagugcccacgugcaggcccccu

SEQ ID NO: 4100028 - RNA, 73 nt, Human
augcugaaugggugauuuuggagaacuagcagaugugaaaccuuagaaagcugcuuuagaagaacccaagcau

SEQ ID NO: 4100029 - RNA, 74 nt, Human
augcugccaagucaucgucuguuuucuucaagaaaauguggagaauaggauacauguuugguaaaugauggcau

SEQ ID NO: 4100030 - RNA, 77 nt, Human
augcugccuugaacauccuaaguaucuuuguugcauauauaccuaggaaugcaauugcugggacacagggcaugcau

SEQ ID NO: 4100031 - RNA, 64 nt, Human
augcuggcauacuguggacauucaauaauuagagcuacuguguacugcacagugugcuaagcau

SEQ ID NO: 4100032 - RNA, 66 nt, Human
augcugugguagacagcauuccuuuuucccucccauagaaaaugauauguuguuuacucauagcau

SEQ ID NO: 4100033 - RNA, 64 nt, Human
augcuuagcaggagagaaguuuuaaguuugcaaauaguagacauuucuccuacuuguuauuuau

SEQ ID NO: 4100034 - RNA, 78 nt, Human
augcuuccuaaaugauucagaaauuucaagcuuucauagguaagccugugaauagaguucugugauuauuugggacau

SEQ ID NO: 4100035 - RNA, 76 nt, Human
augcuucuccacauaagacaguaacuacaguucugugguaaaugcaacaggacugaagucauugccaaagaagcau

SEQ ID NO: 4100036 - RNA, 78 nt, Human
augcuuggaaccaaaaguauuuuggaucucagauuuucucagauuugggaaugugcauuauacuuacagguuaagcau

SEQ ID NO: 4100037 - RNA, 55 nt, Human
augcuuuacccacaccaggaugcuaaauugugacaggguguguggguaaaggcau

SEQ ID NO: 4100038 - RNA, 83 nt, Human
augcuuucuaauauccuuuugccugguggcucuuagguagucuugcaagcagccagugggagugauacagaguuuggaagcau

SEQ ID NO: 4100039 - RNA, 59 nt, Human
augcuuugaaaugucaacugagaaugguguggugguugacagauggcacgucagggcau

SEQ ID NO: 4100040 - RNA, 81 nt, Human
augcuuuggcuagguuaagacugggacaaguuaagaugaauggaugaagauaagcaguucucaugucuuuccuacaagcau

SEQ ID NO: 4100041 - RNA, 95 nt, Human
augcuuugucuuuuuucaguugagguggucuauugcguuaccgagcuguggggaugcacccacuuagcugaaguucucaucuaaaaacaaaguau

SEQ ID NO: 4100042 - RNA, 110 nt, Human
auggaaagaauacuagacaaagaguuaggugacuucaguucaaucagaucgugauuacucacucugugacauugaacaucuacacacuccaggcuucaguuuucucacau

SEQ ID NO: 4100043 - RNA, 76 nt, Human
auggaagcagacuuuuuuaggguauggaagcaugcacucauaaacauggcuaucuaaccuuugaaacugcuuucau

SEQ ID NO: 4100044 - RNA, 113 nt, Human
agguuauagaaacucccaaauuuguagcuggcugaucagaagcguggcuggccugggggucccucuugaagcuggcaucugaagucagggcagucuugaggaggacugagccu

SEQ ID NO: 4100045 - RNA, 60 nt, Human
agguuauaugucauacugaagucauacagcugacagugagauuuuuauauguauuagccu

SEQ ID NO: 4100046 - RNA, 89 nt, Human
agguuauguaucuaguaaguagaagagcugugauucaggcuuagaguuugacuugagucuugguuuuugaauacuacauaacacugccu

SEQ ID NO: 4100047 - RNA, 91 nt, Human
agguuauuuauugauuguuuuuguagguuauuuuugauauuuuugcucugugggcaaaauagaaaccaacaaggucagugauucacauccu

SEQ ID NO: 4100048 - RNA, 71 nt, Human
agguuccacuuugcuuagagaacaaggcuuuccuuucaagccuuuaucccuguacaagguguccaaggccu

SEQ ID NO: 4100049 - RNA, 56 nt, Human
agguuccaggucuggguuaugugcucucuuaugugcucccagagcauccugaacuu

SEQ ID NO: 4100050 - RNA, 89 nt, Human
agguucuauuauccuuuuccuuugggugcccuuucagggaaugauuuugaaauggaacccagggucccgaaggagacagcaauaucccu

SEQ ID NO: 4100051 - RNA, 76 nt, Human
agguucucagcacgugguggguggagaacgugcugcccuagucucuucacacuaccccuguguaccuguggagccu

SEQ ID NO: 4100052 - RNA, 105 nt, Human
agguucuuaaguuugagggacacuggcagguuuccuccucauaguaacccuguuggggaggcagugccaggagaucgucacugccuuuuacagaugggaaggccu

SEQ ID NO: 4100053 - RNA, 69 nt, Human
agguucuuuuuuaaaggcagugauugaaaggcccagauaccuaucagacauauuuuuaacaaaguuccu

SEQ ID NO: 4100054 - RNA, 78 nt, Human
agguugagucgaggagaagaaagaaguggaaagguugccccagccuuauuccaauuucuccuacaaaaacucgcaccu

SEQ ID NO: 4100055 - RNA, 66 nt, Human
agguugcauucuagugguuacuuuuuaaaaaaugcuuuuaagcucuuuggcauuuggaggcaaccu

SEQ ID NO: 4100056 - RNA, 99 nt, Human
agguugcuuuaccagcaugaaucucauuuuucuggcuuaaaaucugagacagugaaauuauuccauaggaaagugaauguuauuuugcagaauuagccu

SEQ ID NO: 4100057 - RNA, 73 nt, Human
agguuggaguucaguggcgcgaucucggcucacugcaagcuccgccucucggguucacgccauucuccugccu

SEQ ID NO: 4100058 - RNA, 69 nt, Human
agguuggugcaaaaguaauugggguuuuugcaguuauugcaaaaaccccaauuacuuuugcaccgacuu

SEQ ID NO: 4100059 - RNA, 66 nt, Human
agguuucccagcccacucuggaacccaaucaauguauagaggccccagauucugggcugggucccu

SEQ ID NO: 4100060 - RNA, 81 nt, Human
agguuugcagaaaguaggcagugcuugauuuuccagguuuaugauauuggaacacugaucauugccuuuaucugcaacccu

SEQ ID NO: 4100061 - RNA, 104 nt, Human
agguuuggguggugccuuucuuuuguaaaguggaguaagcauggcuuuggacccagagacuuucuugaccuaguuaauauuaggaaaguguaccacuggaaguu

SEQ ID NO: 4100062 - RNA, 112 nt, Human
agguuuuaucauauaaauuuacuuauaauacacacaacucauuguguaauauuugugugugcgugugugugugugugugugugugugugugugugugugugugauggagucu

SEQ ID NO: 4100063 - RNA, 66 nt, Human
agguuuuuucacuguugauauuuuggcuccuucaauguugaaacaucuuaaacagaggaaugacuu

SEQ ID NO: 4100064 - RNA, 79 nt, Human
agguuuuuugaaggucagaaugagauuagguuaauuuguuaaguuauuaaucuacucaguaacugcuuaggaagaaccu

SEQ ID NO: 4100065 - RNA, 113 nt, Human
aguaaaaaacuguguuuuucugaaagggggcucagaguuaauuggauggguucagauaugggaaccucuggaacuugauuugaaaccccugucacagaaaugaccuuuuuacu

SEQ ID NO: 4100066 - RNA, 92 nt, Human
aguaaaacuguauuacagaaacagguggcaggcuagauuuagcccacaggccauaguuuucugaccccugcucuauaauauuacuuuuaacu

SEQ ID NO: 4100067 - RNA, 60 nt, Human
aguaaaaugacccauuaugccuuaaguuacaaauauuuacaggccuagggucaauuuccu

SEQ ID NO: 4100068 - RNA, 59 nt, Human
aguaaacuuguucucauguugcagaaaugccaugcauaucuuaauagaaacagguuucu

SEQ ID NO: 4100069 - RNA, 82 nt, Human
aguaaaguaaauucaaggaucuguuaaaucugguaaaaguagaucaaaucagagauugacagccuguggagggugcugaacu

SEQ ID NO: 4100070 - RNA, 87 nt, Human
aguaaauauaugacuccacugcaugauuuagugguagaaauagucuauuuauguucacauuuuuuaguagagagucauguuuuuauu

SEQ ID NO: 4100071 - RNA, 84 nt, Human
aguaacaagguggucuugguauuuaaacuguagguggagaaacauacacguaaacaacaaauaccagauuauuuugcaaaugcu

SEQ ID NO: 4100072 - RNA, 57 nt, Human
aguaacacauaucuacaacauguggauaauacaaaucccagugugauaugugucauu

SEQ ID NO: 4100073 - RNA, 62 nt, Human
aguaacacuuggaaugauagcauuguuucuuugcagcaugucauaaaacacaagcuguugcu

SEQ ID NO: 4100074 - RNA, 64 nt, Human
aguaacagaaggccugacuuaaccugccuuuaaacaguaaggacacaaguaugccuauguuauu

SEQ ID NO: 4100075 - RNA, 84 nt, Human
aguaacaucuuugggcaaugaugagggagggggacggaaaaaacaagcccuauuuuauguucccucaacaaucuaaauguuacu

SEQ ID NO: 4100076 - RNA, 88 nt, Human
aguaacguagauaagucuuccauauuucuagaugcagguggcaaaacugaacuauaguaauucuggcaagacuuauguaugucuaacu

SEQ ID NO: 4100077 - RNA, 69 nt, Human
aguaacuggcagggcugguauucaaaauccaguuuaucugauuuuagagugccuguucuuucccaugcu

SEQ ID NO: 4100078 - RNA, 129 nt, Human
aguaagacuucuuuaaugucagccucucucaccuacucuuuacauaguguggacuacucuuuaagcagaccacugguccacacuguguaaagaguaggugagagagacugacauuaaagaagucuuacu

SEQ ID NO: 4100079 - RNA, 130 nt, Human
aguaagauggacuauuguaaagaauuaaucagaguccuuaguuagagaugaauuuugucuggaagaaaauucuuugcagagaaaguggcauuugagcuagaccuugaugacuugguauauuuaaauuacu

SEQ ID NO: 4100080 - RNA, 75 nt, Human
aguaagccccccucaguaaggaugcuucagcggaccccucugauucacaggggucuccauucucacgggcuugcu

SEQ ID NO: 4100081 - RNA, 129 nt, Human
aguaaggcauuacaauuaugaaaauuaauuuucuuggacuaagcuauauuuacccauaguacaaaaagcauuguggguaaauauccuuugugaaaauuagacaugagaccaguaaauauaugcuacauu

SEQ ID NO: 4100082 - RNA, 59 nt, Human
aguaaguccaaggcugggugcaguggcucaugccuguaaucccaaugcuuuggaaggcu

SEQ ID NO: 4100083 - RNA, 83 nt, Human
aguaagugcagcuccucaaauguuucuugaacaccaacaacgggguccauguugagugcugaggauacaggagccacucugcu

SEQ ID NO: 4100084 - RNA, 71 nt, Human
aguaauauuagcuuaucacacaagcugcaaaugcccuagugaaagcagcugucggaaagcuaaguguugcu

SEQ ID NO: 4100085 - RNA, 98 nt, Human
aguaaucaguuuuauacaaguuagaaaguaaaucauuugacaguguuuauucuuuacauguacugguuugacuuauauguguuuguuaagugauuauu

SEQ ID NO: 4100086 - RNA, 97 nt, Human
aguaaucuauguagccccccagaucuuuagaugguggacuaucugacuuggcuaugucgcccgguagaauuuuaccaucugggcuucgaagacaacu

SEQ ID NO: 4100087 - RNA, 65 nt, Human
aguaaugcuguuaugggucaagcaguucuugaaguaggggaacaugaaacccaaacagaauaacu

SEQ ID NO: 4100088 - RNA, 61 nt, Human
aguaauggcuuuggucugggucccaguauaggcagugugggauaggaguagagcuguggcu

SEQ ID NO: 4100089 - RNA, 76 nt, Human
aguaauugucuucuccuuccuggcaauuuguuuuauuauaccuaugaauaugccaacauggagaggauguauugcu

SEQ ID NO: 4100090 - RNA, 62 nt, Human
aguacacagaguuauuuuguguacuuaccgaggaaaaaguacacagaguuauuaugugaacu

SEQ ID NO: 4100091 - RNA, 75 nt, Human
aguacaccugccuccaaugaagccaacucucaggcucuagaagucucugccuugggauggauucaccagugugcu

SEQ ID NO: 4100092 - RNA, 73 nt, Human
aguacagggacauuguaauuagacuuggguuugaaucucaacuuugccuaauaacuagcuguguaacugugcu

SEQ ID NO: 4100093 - RNA, 57 nt, Human
aguacaguuacugaguuaggaaaaccaagaaagugugguuuccuaaaaagcugugcu

SEQ ID NO: 4100094 - RNA, 75 nt, Human
aguacaucaugcagggacuugugcuccauuuucguggauuaugggcuccgccagucccugggaaaugaaguuacu

SEQ ID NO: 4100095 - RNA, 84 nt, Human
aguacauuguaauuugaucacauuguuucauacauauucugggacauccuaaaauuguacaugcagugagucaucuuacgugcu

SEQ ID NO: 4100096 - RNA, 90 nt, Human
aguaccaaauucacccuuguaaugauugaaauacuguguuuuuuucagauacagugccccuuuucacauggacuaggcugaauaaaugcu

SEQ ID NO: 4100097 - RNA, 78 nt, Human
aguaccaagcuagagggauuccaggguaauguuaucucuaucucccucacuaagcccaagucccuuuggucagguauu

SEQ ID NO: 4100098 - RNA, 69 nt, Human
aguacccuggguuacacuaauugaugcuuuagaaauuaaagcagucacuccagugugaugcaggugacu

SEQ ID NO: 4100099 - RNA, 64 nt, Human
aguugaaaacauguccauacagaaacuuguacacucaaguuuguagcagcaugguuuaauagcu

SEQ ID NO: 4100100 - RNA, 78 nt, Human
aguugaagguuggcugauccaugccaggcucagcugaauggcucugcuuucaguucuggaucuggcuggccuucgauu

SEQ ID NO: 4100101 - RNA, 129 nt, Human
auggaagucagugauaccaggccuuuuuaccuuuuucuucaccuuuauuccuuaucaagaagaaugcaaaauaaaucgguugguucaagguaauaagguuugcccuuauaguucauuguuucauuccau

SEQ ID NO: 4100102 - RNA, 68 nt, Human
auggaaucacagaaguugaauuugcaugacuaaauuuaagugaauauuuucuucuguaauuuuuccgu

SEQ ID NO: 4100103 - RNA, 60 nt, Human
auggaaucugccaacuuguuuuaauuaacugaauguggcacaagaccuggcagcuuccau

SEQ ID NO: 4100104 - RNA, 84 nt, Human
auggaaucuucuacagaagcacuugcuuagaugugguuauguuauacccauaugcauguaaugcuuuugcccagguagcuccau

SEQ ID NO: 4100105 - RNA, 80 nt, Human
auggaaucuuggcuggaggagcauuugggaacugcuggacuagauggucccagaggucucugcugguucuuugguuucau

SEQ ID NO: 4100106 - RNA, 109 nt, Human
auggacacaagcaucugccugccccagcaacagaguccugcuucccacagaaaccgguuccaaagccggcagagacggcgcuuugaacuugcucaggccuuuugaccau

SEQ ID NO: 4100107 - RNA, 130 nt, Human
auggacauucauuaaaaugggcucugacuugauagccacguuagcagaaaauggaaaaguccaucuaucacugucuguucccauuuucugcauaaucauuccuggaagaaagaggccugcaaguguguau

SEQ ID NO: 4100108 - RNA, 75 nt, Human
auggagaauuggaagaggacuuagagaauauuuugcugcauguuguaagauguacuuuuguccucaccucugcau

SEQ ID NO: 4100109 - RNA, 60 nt, Human
auggagacugcgucugccaucccugcucccccccagggauguaggacuaggcuucuccau

SEQ ID NO: 4100110 - RNA, 65 nt, Human
auggagaggguagagaccuucugaugaaaggaguagggguuuuucaaagaagauuacccucccau

SEQ ID NO: 4100111 - RNA, 89 nt, Human
auggagaugggcauauguagcguguguucuggacacggcacguggaggcagagcacacaugcauagaguguguaaugcuucacuuccau

SEQ ID NO: 4100112 - RNA, 64 nt, Human
auggagcauucuuuuacuuuaggauaacugacuuugaugucuuccuugaaaagaaugucuccau

SEQ ID NO: 4100113 - RNA, 80 nt, Human
auggagggaaagauacuggaaaaugacaggucuuuuuaacucaacuauaaagucuugucuuauuuuaauagauccuuuau

SEQ ID NO: 4100114 - RNA, 72 nt, Human
auggauaucuacauucuuguaucuucuuucagcaaauauuuacagaaagagagagagagugugugugugugu

SEQ ID NO: 4100115 - RNA, 72 nt, Human
auggauuggauuuuuauggacccacaaaaaucagaacucuauuauggaaggguccauaaaaauccaauccau

SEQ ID NO: 4100116 - RNA, 78 nt, Human
auggauugggcucuauguucucugucagaccuguguggcuuugcuacauauccaggcugagaagauauccuuuuccau

SEQ ID NO: 4100117 - RNA, 85 nt, Human
auggcaccuagagagauaguuuauuuuacugacuaauuaaaauccaccaauugaguaugaauacagauuuucucucuauugucau

SEQ ID NO: 4100118 - RNA, 55 nt, Human
auggcaccugaggaggcaucuggagguuggggccccugcucucccuucuccccau

SEQ ID NO: 4100119 - RNA, 62 nt, Human
auggcagaccugaagguucggcgcucuuuucuagccugugagugccccguuauguuuaccau

SEQ ID NO: 4100120 - RNA, 57 nt, Human
auggcagccugaacacuuccuguucccaggaaugggcuugggaucaaagguugcuau

SEQ ID NO: 4100121 - RNA, 58 nt, Human
auggcaggaaaauaguagaaauuuaucaaauaugaaaacugcuuccaauuccugccau

SEQ ID NO: 4100122 - RNA, 80 nt, Human
auggcaugggauaacucagcugucugcuuagggcauggcuuuaaagucagauaucuggguugaaauccucuuucugccau

SEQ ID NO: 4100123 - RNA, 57 nt, Human
auggcauuauagcaaugguuuguguuaugauuaaagcaaauuauucuuauaugccau

SEQ ID NO: 4100124 - RNA, 68 nt, Human
auggccaaagagggaaugugauugcaccauuuaaauguauaucaggaaggugugagacauccugccau

SEQ ID NO: 4100125 - RNA, 62 nt, Human
auggccacccuaccuaagaagcacuuugcuagauuauaggcugcuggaggacaggguuucau

SEQ ID NO: 4100126 - RNA, 57 nt, Human
auggccagucaagccucuggcugcucauucugguaggucugagguuaguuuggcuau

SEQ ID NO: 4100127 - RNA, 63 nt, Human
auggccaguguuucccucaguuuccauuuuuauucagaaauucacguggugaagcaugguuau

SEQ ID NO: 4100128 - RNA, 61 nt, Human
auggcccucaauuagacgucaaaaagauuaacgagauugucuuuuaugucauugaggucau

SEQ ID NO: 4100129 - RNA, 102 nt, Human
auggcccugcuauugcuagaucucaaugcuuuucucauacccgagguuuagguuugggacugggcuggcguggagaguuuagucccccagcaaggagcacau

SEQ ID NO: 4100130 - RNA, 57 nt, Human
auggccuccgacccaugacgugcuuaggaaaguugauauucaugguuugggggccau

SEQ ID NO: 4100131 - RNA, 74 nt, Human
auggccugcccacuccaggagcaacucauuguggaaacaaguuuaguaugaccugagaguaggaugcaagugau

SEQ ID NO: 4100132 - RNA, 56 nt, Human
auggccuggggagcaugggaagaaggcucagcucuuccagcuaagaccccagacau

SEQ ID NO: 4100133 - RNA, 79 nt, Human
auggcgggucauuguuacuguuuaguugccugauggguuucuggcuccuaaauccaaguaacgaagcagauccugcugu

SEQ ID NO: 4100134 - RNA, 130 nt, Human
auggcgguuguccuguugcaggugcccugcugcaggaggagaggcuggacgcggugacccugcuuuacgccaccucgcugcccagcuucugccugcuggcgggugcagcccuggugcuggaggcuggcgu

SEQ ID NO: 4100135 - RNA, 71 nt, Human
auggcuacaccuauuccuuuauguacagugauggcugcuuucacaguacaaaggcagaauuggguaguugu

SEQ ID NO: 4100136 - RNA, 67 nt, Human
auggcucucuagggcccagguuuucugucaagcauucacuagcuagcuugggggccuggggaaucau

SEQ ID NO: 4100137 - RNA, 62 nt, Human
auggcugggaagaguuagagacagcugcagaugcagcuuuugcagacuucuugcccagcugu

SEQ ID NO: 4100138 - RNA, 72 nt, Human
auggcugugguuauggaacuggcuauggcuguggauguggcucuggcucuggcuacuguggcuaccggccau

SEQ ID NO: 4100139 - RNA, 56 nt, Human
auggcuguuggacuugauuuuagcacagauccagcugauuccaaagccaaagcuau

SEQ ID NO: 4100140 - RNA, 58 nt, Human
auggcuucauucuguaguuaaaacauuuacaguguuuuauacugcucaguguaguugu

SEQ ID NO: 4100141 - RNA, 67 nt, Human
auggcuuccugcugccaguaccuggggcucugcuguuagccuuucucuggcagcaggacaggcucau

SEQ ID NO: 4100142 - RNA, 116 nt, Human
augggaaaauggauguuaacauuucugccugacugauaaucucugauguuacccuugggaagccccagcuuucagaaugauuuauuugucagguuuuggcguuuuuuuagucccau

SEQ ID NO: 4100143 - RNA, 86 nt, Human
augggaacacuaugaauuuuauucagggauaacauccagguuguuuugacccacaguuuugccuuggguuucagguucauucccau

SEQ ID NO: 4100144 - RNA, 81 nt, Human
augggaaguggauaaagcaucuugacauuacuugugauucaaauaauauugucaaaaugacuuuacuacaguuuuuuucau

SEQ ID NO: 4100145 - RNA, 112 nt, Human
augggaauagaaguaauuuaaaauguucaagacauauuaaaugugcgacuguggcuccaaauugccauuuaguaugcuuguauuauaggauauagaaacuacugcaccccau

SEQ ID NO: 4100146 - RNA, 88 nt, Human
augggaauggcaggauaaauguuugauucuauuuaccuauuuuuaaauuaaugaguauaguuccaagcauauuuugaugaugacccau

SEQ ID NO: 4100147 - RNA, 64 nt, Human
augggaggcaaagaucgcagaaugggagguugcuucuuccuuuacauagauuuugccaucccau

SEQ ID NO: 4100148 - RNA, 57 nt, Human
augggagugugcuugaggaguugggauaacagcacuauggcuggagcacaguucggu

SEQ ID NO: 4100149 - RNA, 82 nt, Human
augggauucaaaggacuaaugaauagaugaaucuuggaauuucaaaauuagucuucucauuuggauccuugaaugaacucau

SEQ ID NO: 4100150 - RNA, 75 nt, Human
augggcacauugcaaagcuuaggaaacuuuuaaaggauuagccauuuuagcuucuucagcuuguucauugccugu

SEQ ID NO: 4100151 - RNA, 109 nt, Human
augggcauguaguacaccagugaaagacuucccuaguucuaagucuguuucugcagcgaaacagacucacagcuagagaaggagaaaugugucucugcuucuugcucau

SEQ ID NO: 4100152 - RNA, 66 nt, Human
augggccaccggcugccagauggaggcagcgucagcaacaccuccucucaggcuggauggcgcuau

SEQ ID NO: 4100153 - RNA, 81 nt, Human
augggccagaaaugugaaagagguguucaguggggaguauacuucuaacuugaauacauucuuuucagcauuucuacuuau

SEQ ID NO: 4100154 - RNA, 79 nt, Human
augggcuagaaacaucagcuaaccaaaagugcaaagacuuuauaaccagguaggcugaaguucuuugauucugguguau

SEQ ID NO: 4100155 - RNA, 66 nt, Human
augggcugugagguccggcaggugaggccagcaguugucuaugguccugagugagaccuggcccgu

SEQ ID NO: 4100156 - RNA, 77 nt, Human
auggggcagaauauuugaaaucuggguuacucugggaaauccaggagacaguguuauuuuauuuauggugccacuau

SEQ ID NO: 4100157 - RNA, 76 nt, Human
auggggcauaguacuggaacaaugaaacucuguaguauggcuuugcuugugauuucaaagguucugcaugccccau

SEQ ID NO: 4100158 - RNA, 80 nt, Human
augggggugggccacucugauuuuucuaauacuucagcaucugguuaaguauguuagaaaaucaagugcuaacaucuuau

SEQ ID NO: 4100159 - RNA, 78 nt, Human
auggggugcagcaggcagcugggggaguugagaacuugcucacucacuccucuuuugucuuuacccgcugccccucau

SEQ ID NO: 4100160 - RNA, 100 nt, Human
augggguugggguaggucuucugaaaaccaaaagaauaaaauuuauuuucuuugcuacccugugguuuuuugacacugaagaucuacaguacaaccccau

SEQ ID NO: 4100161 - RNA, 55 nt, Human
auggguagacauuccugaaacucgcugacacaguguaguuguuuuuguuucccau

SEQ ID NO: 4100162 - RNA, 69 nt, Human
auggguauaucauauuuguggucccuuuaucuccagcaaaggggacugcuuaaauauaugauguuacau

SEQ ID NO: 4100163 - RNA, 61 nt, Human
auggguccacuucugcacuguggcuuagccucucuuccuagucacaccaggaguggcccau

SEQ ID NO: 4100164 - RNA, 78 nt, Human
augguaacaguuauuaucacauuagugcccaaguuaugggagcaaucuccacuagaugauaaucagcuggaucaucau

SEQ ID NO: 4100165 - RNA, 78 nt, Human
augguaccccuggagcccagauacuuaaguccuccaacauuuaaguguggauuggcuggagcuaucagaggucaccau

SEQ ID NO: 4100166 - RNA, 73 nt, Human
augguauuucuggagacaucauguugugccuacagcugagagagauuguuuucacaaugaugucagauacugu

SEQ ID NO: 4100167 - RNA, 62 nt, Human
auggucagggggaucugugagguagcgaugcacgcuaagggucaaagauuuccccuggaagu

SEQ ID NO: 4100168 - RNA, 59 nt, Human
auggucauucagucaaagagucaugauuugaacauaaguagacuaucucuggagaccau

SEQ ID NO: 4100169 - RNA, 85 nt, Human
auggucgcuuaacaagccucagcaugcucugugggcucagcgaguuuguggugucacccacagggcugcugauggcagccaucau

SEQ ID NO: 4100170 - RNA, 69 nt, Human
aguugaauuaugagugucuuugauuaucuggcuugaagguuguuuugcagggagacucauaggacaacu

SEQ ID NO: 4100171 - RNA, 57 nt, Human
aguugacagagguaugagguuugaguauuugcaaagcccucaagcagacugacagcu

SEQ ID NO: 4100172 - RNA, 61 nt, Human
aguugacccugaguucuggcagccagggucugugaacuuggcucuuggaaggggcucagcu

SEQ ID NO: 4100173 - RNA, 70 nt, Human
aguggugcagaggugaaagacuagcaagauaauuaaccuuugcagguccggaaccucgccguuggccacu

SEQ ID NO: 4100174 - RNA, 83 nt, Human
agugguggagcugggauuugaacugcaaagucuugcuauuaaucgcugcccuauauugccuucaagacccauccuccaacgcu

SEQ ID NO: 4100175 - RNA, 62 nt, Human
agugguuaagacagcagacuuugguuuuagacugccuagucucaaauccugcuguuaccacu

SEQ ID NO: 4100176 - RNA, 72 nt, Human
aguguaauagugugggcagcuuccacuuaguuagguacuucuggacaaauggaagcuugucugcaugcagcu

SEQ ID NO: 4100177 - RNA, 60 nt, Human
aguguaaugccagaaccacuuucuucuggaugugccccaaguguguucuuggcauuaccu

SEQ ID NO: 4100178 - RNA, 60 nt, Human
aguguagaagggugugccaaacagcagacccagcucuggcccaaacccuuucuagucacu

SEQ ID NO: 4100179 - RNA, 82 nt, Human
aguguaucugugcaugcaaacaugaagagaaagagacuucuauggcaucucuuuauuuucuuugcuauugcuuuaaugcauu

SEQ ID NO: 4100180 - RNA, 59 nt, Human
aguguauucagaauguagcaaaauugacaggaaguagagcuuaugauucugaaugcacu

SEQ ID NO: 4100181 - RNA, 58 nt, Human
agugucaagcuuucugucucuuaugggaugacucagcagaacaaggaagcuuaacauu

SEQ ID NO: 4100182 - RNA, 64 nt, Human
agugucaagguugagaaacccugcucuguacuauacccuggggucauucugugacuuuggcauu

SEQ ID NO: 4100183 - RNA, 75 nt, Human
agugucagaaagccaacuccaacugucuacagcaauaacagugugacaguguaucaggagugggguuuuuaagcu

SEQ ID NO: 4100184 - RNA, 91 nt, Human
agugucaggagagggagaaggaugcugcugucacggccccuugguucucuguugcaggggcugacagcacgccuucuguuacucugguacu

SEQ ID NO: 4100185 - RNA, 79 nt, Human
agugucagguagcugcagagacuauuuuacuaccugcagaacaguuacaaaagacuagauucuguaaguauuugauauu

SEQ ID NO: 4100186 - RNA, 58 nt, Human
agugucaucccaugcucagagacuggcacaaaggacaccucugagcugauaugacauu

SEQ ID NO: 4100187 - RNA, 69 nt, Human
agugucaugguagauaacaacaugggcuuagaaauuuaaagaccuaaguucaaaaucaaccaggacacu

SEQ ID NO: 4100188 - RNA, 121 nt, Human
agugucauuggacuggcugauucaccuuucugggcucuguaucuguggggcuuccuuuguucaggaaggacugcuggguggcagccaagccaaaggagaguggccuggucccugagagacu

SEQ ID NO: 4100189 - RNA, 64 nt, Human
aguguccaaaagagccagccgggcgugguggcucacgccuguaaugccagcacuuugggaggcu

SEQ ID NO: 4100190 - RNA, 67 nt, Human
agugucccucaguagucaugaguaaacuuuuuaaaaaaaagugguuuuucagacuuugagagagacu

SEQ ID NO: 4100191 - RNA, 55 nt, Human
agugucugagccagaauuagaaguuacaggugucuaauucuguguuucagccgcu

SEQ ID NO: 4100192 - RNA, 83 nt, Human
auaucugcaugcauagaaugaagaggcugaacugcaugaugucuaagucuucacccagcucuacguuucuaugaaucagguau

SEQ ID NO: 4100193 - RNA, 101 nt, Human
auaucugugcuaaucuguccuaacaauuagcacagauauuagugaucugugcuaauugguuaauaugucugcuaauuguuucucagaauuagcacagauau

SEQ ID NO: 4100194 - RNA, 69 nt, Human
auaugaauuuggggaggacacaguucagucuauaacauucugcucucucuggccucccagaauucaugu

SEQ ID NO: 4100195 - RNA, 60 nt, Human
auaugacagcggauucacauauccuaaaccuuugauaauuaugugauucaguugccgugu

SEQ ID NO: 4100196 - RNA, 73 nt, Human
auaugacuauucuggaucugaaugugaauagcugauaucugcucugcacaaaacugucgcagaaugggcaugu

SEQ ID NO: 4100197 - RNA, 83 nt, Human
auaugagcacauuucacaugacaggcucuuaaaugcaagugugugugcguguaugugucuguggugugugugugugugugugu

SEQ ID NO: 4100198 - RNA, 79 nt, Human
auaugaugcaagcagagguuuauguauuaggacauguuuuaucuugcugcuuuuggaaacccugugaucaccaucauau

SEQ ID NO: 4100199 - RNA, 75 nt, Human
auaugcagcugcugaggaagggguuggauuauccaauaauauagccaguccuaguucuaccuuacauguugcuau

SEQ ID NO: 4100200 - RNA, 130 nt, Human
auaugccauagcuucauaugccauuaguaaauagcuucguaugccauacagucucuguugaaauuacucagauaugucauuguagcaugaagacagcuauagacgauguauagagaaugagcaugguugu

SEQ ID NO: 4100201 - RNA, 91 nt, Human
auaugcgugcaugcaugugugugaauacauguguguauagagguguaugccuaguguuaauguguguucauguguaugugugagugcaugu

SEQ ID NO: 4100202 - RNA, 66 nt, Human
auauggaaguguuguaucuuuuuaauagauacauaguaaucuauuauaaggauauaaaauggauau

SEQ ID NO: 4100203 - RNA, 95 nt, Human
auauggaauuacugcaugauucagcaauuuuauaucuggguauauagcccaagaaguaaaagcugggacaugaauagauauuuguauacccauau

SEQ ID NO: 4100204 - RNA, 68 nt, Human
auauggggcuaaacacgccuggccuuacagugcuccucaggcucaaggucuugucuuaugccccauau

SEQ ID NO: 4100205 - RNA, 86 nt, Human
auauggggugaugaaggacuccuauuuuauauuuuacacacuuccaaacuauuugaaugauaugugaaaaggaacaugccucaugu

SEQ ID NO: 4100206 - RNA, 60 nt, Human
auaugugcaaaguguacaaauuaaugucuaaaauaguaauuuagugcauuaugcaaaugu

SEQ ID NO: 4100207 - RNA, 64 nt, Human
auaugugcaugugugugugugugugugugugugugugugugugcuugcauacauguuaacaugu

SEQ ID NO: 4100208 - RNA, 56 nt, Human
auauguggaggaaaucgagagaauaauaaauguucucucuggcaaauuucacauau

SEQ ID NO: 4100209 - RNA, 83 nt, Human
auauguguguguauaugcauuuaucuauacauuuguguacauguaugugugugcacuagagagagauauauacacacacauau

SEQ ID NO: 4100210 - RNA, 73 nt, Human
auauguguugggcaguuuucuaugcugcaauuuaucgcaagaauagcagcaaagcaggaucugcucacugugu

SEQ ID NO: 4100211 - RNA, 73 nt, Human
auauuacaagcaaguuauguaagccugcuuuuagcuuuuaacuucagcuaggucuacaagcuuaaaguaaugu

SEQ ID NO: 4100212 - RNA, 96 nt, Human
auauuacugaauuuacuguuuccaucaggauguuuggcugucauauagaacaaacuaucacagucuacauacuagucagaacaguuaauguaauau

SEQ ID NO: 4100213 - RNA, 66 nt, Human
auauuccagcacagaaguauacauugagaugagacauuagcagaucuaaaugcugugcuggauugu

SEQ ID NO: 4100214 - RNA, 108 nt, Human
auauuccuacuuuaugauggaauuuguacugaagauuguaaacugcuucaguagucacaguuuauuugggggaucuucagugcauugucuaaauaaugucagugauau

SEQ ID NO: 4100215 - RNA, 119 nt, Human
auauucuacaugugauauguaauuuauuuguucuuucuucuguuguuuccaauuauuauaaacagcaggcaugaaugacacugaauauguaauaaguugcacauguuauaguagacugu

SEQ ID NO: 4100216 - RNA, 81 nt, Human
auauucuggguauuuacaagauuaauuauuggaguguuuaucaacacucuacuaaggugucuuuuaaguuuaccuaaaugu

SEQ ID NO: 4100217 - RNA, 78 nt, Human
auauucuuuucagguggagauccagucuuugugugaacauaucuaaagcagggaccucacuacccccagaagcaaugu

SEQ ID NO: 4100218 - RNA, 111 nt, Human
auauugagcauuuagaaguuuaggcagaacuuggcuugcuugcagcuuauaguaagcaguuaauguuuugucaauuaaugucuaaagugccuauaaauacacauucaauau

SEQ ID NO: 4100219 - RNA, 74 nt, Human
auauuguauugaccuugcagggaagauguucuauuuagacuuaaaacauguuuccaguguaaggccuacaauau

SEQ ID NO: 4100220 - RNA, 57 nt, Human
auauuuauaaggcaggcaaguaaaacacaaaaacgacuugcuugcucuuaaaaaugu

SEQ ID NO: 4100221 - RNA, 119 nt, Human
auauuuaucuuucagauugcuuguuguaugcacauuuucuguuaguacaaauuggagggauuaucaugaccuucauuuguugacagagacaugaacaggcagaacacagugaugaauau

SEQ ID NO: 4100222 - RNA, 80 nt, Human
auauuuguguaaagaggagggguuuuuuaauuuaauuuuauuacuuuauggcuaagaaucucucuacuuuauuacuguau

SEQ ID NO: 4100223 - RNA, 129 nt, Human
auauuuuaauucuacccuucuguugucauaggcauaaguuauuuaucugugacauagagaaauucuauugaguuacagaaaauacuuaauguuucuaaucaauauauuaguauuuugggauuaaaaaau

SEQ ID NO: 4100224 - RNA, 77 nt, Human
auauuuuggaaauagcuccaguuucauuguguagaaaucugcugaaauguaauauagacuauuuaacuucaggauau

SEQ ID NO: 4100225 - RNA, 65 nt, Human
auauuuuggggugaugugcauccuauaguuuuuguggaccuuguugcccaucagcuccaggaugu

SEQ ID NO: 4100226 - RNA, 129 nt, Human
auauuuuguuauaguaacccaugcugaccaagacagguagaucaacuggggagggaagggacaaccaucuaacuuuccuuucccccauauuuauugucuccuuuuagucucaugugacagaaucuaaau

SEQ ID NO: 4100227 - RNA, 68 nt, Human
auauuuuguucuggcuccuuuuaaauguauucauuuguaauuuuggaacagagcucagaaaauaguau

SEQ ID NO: 4100228 - RNA, 58 nt, Human
auauuuuucuucuagcuuuggugagugaauuauuaauugccauuguaaagaaaaaugu

SEQ ID NO: 4100229 - RNA, 115 nt, Human
auauuuuugggguuaacugcuuacagagaucuuuaaaaguuauuauuauccagagaagagauagcaauaauaguuagggaccauuuuguagcaguuaccacuguccuagaaauau

SEQ ID NO: 4100230 - RNA, 75 nt, Human
aucaaaaguuuugcagauaagagcguggacacuuuauacauuuuccaugcaauuucuguaaaaccaacauuugau

SEQ ID NO: 4100231 - RNA, 65 nt, Human
aucaaauagugugcagccuuuaaauauagagggugugucccuaugguuuaugucacacuuuugau

SEQ ID NO: 4100232 - RNA, 130 nt, Human
aucaaaucaaauuuauauuaaaaauaagaucuuuagaugcuguauucucccucugaggagcugaaauaaaagcaguuuagaaauacaagugagguugauauuuagcauaugaaaacaugaaaauuugacu

SEQ ID NO: 4100233 - RNA, 90 nt, Human
aucaacauaauugugcagaguggaguuuuucagcgggcuugaagaaaguuccuaaaaugugauuccacuuuuauaacacaaguucuugau

SEQ ID NO: 4100234 - RNA, 63 nt, Human
aucaagcaggaguguacugagugccugaaugaggagcuuauucuugcuucacacuccucugau

SEQ ID NO: 4100235 - RNA, 57 nt, Human
aucaagccuaggccuacucugguuugccuggggcagaaagucauggccagguuugau

SEQ ID NO: 4100236 - RNA, 67 nt, Human
aucaauacuugugaguuuccaacaauggauuugguaguggccauuguaaaaguauucuaagauugau

SEQ ID NO: 4100237 - RNA, 130 nt, Human
aucaauaggcuugucgguuucauaugcauuuaaugcagugagccauuaaaugguguuuagggaagggagaaaggaagaucacuuacuggcucucuguaucgaucaucaaaugaaugcuuagccauuagau

SEQ ID NO: 4100238 - RNA, 83 nt, Human
aucaaugagagcaaaucuccuuaaagguaaaauagguaaaauuucauuuuuaauuuuuuuuagguagauuugcuuuuauagau

SEQ ID NO: 4100239 - RNA, 73 nt, Human
aucaauuacuguaaccucuguggguguguaaaauaugaaauuaccagcacccucacagagccacagaauuggu

SEQ ID NO: 4100240 - RNA, 65 nt, Human
aucacaacuuuauauuugaauuuauuucucccuuaaaauuaggauuucagaggugaaguuguggu

SEQ ID NO: 4100241 - RNA, 89 nt, Human
aucacaccuuaaugugucugauggcccugaauugacggucaugucaggagggccucugaucugacacaggcaguuuaggaggcuguggu

SEQ ID NO: 4100242 - RNA, 60 nt, Human
aucacagccauagaugcuuauguaaagcuguguucaguguuacaggcaucuguucugggu

SEQ ID NO: 4100243 - RNA, 64 nt, Human
aucacagggcuugcuuauuggaucagccugcagcuuccaaagaaauugaccaagacuccuggau

SEQ ID NO: 4100244 - RNA, 61 nt, Human
auuccccagccauuugcuucucugaaggaaagucucuccggggccagcaauguugaggaau

SEQ ID NO: 4100245 - RNA, 70 nt, Human
auuccgcaucacacuagcaaaagugaggcacugauucacagugccuuaauacagaugggugguguggaau

SEQ ID NO: 4100246 - RNA, 73 nt, Human
auuccuacuuuauuguaaaugcugauggcugucauuauuuaaguuauuaugcauaggcaauaaugguaggaau

SEQ ID NO: 4100247 - RNA, 71 nt, Human
auuccucagacauguuuuaagacuuauuuaugaaggaggagagagguuuuaaguaaauguccaaauggaau

SEQ ID NO: 4100248 - RNA, 92 nt, Human
aucacuuagcuuauuaaagcacacaucucuggcuggguuucuucaccagagauuuugcuagaauuuguguuucuaaaaagcucaaaggugau

SEQ ID NO: 4100249 - RNA, 109 nt, Human
aucacuuaucagccuuuugaacuuagaacugggcauucugccagaacucaauagcaagaagaggguggagagaaauguccagggcuaggaucugggcuuuaaaggggau

SEQ ID NO: 4100250 - RNA, 59 nt, Human
aucacuuccagcugcccugugugcuggcuaggagaugcaucagcauuagcuggaaggau

SEQ ID NO: 4100251 - RNA, 65 nt, Human
aucagaaacucuuagagcagggccuggugaccuguauuuuaagaagcucugcaggagauucugau

SEQ ID NO: 4100252 - RNA, 88 nt, Human
aucagaagaaaggcacuagauuugaaagucuucaggacuugcacauguaagauucaugggaaagcuuuagguguguguugauuuuggu

SEQ ID NO: 4100253 - RNA, 86 nt, Human
aucagaagcaaaugcaggauuaacagcuuuggagaccaccuuuuuaacccagagagcauagcuguauguuuuuaauuuguuaugau

SEQ ID NO: 4100254 - RNA, 57 nt, Human
aucagaaucuucugaacaguggccuaaaaauacacuacagauuuccuggauucugau

SEQ ID NO: 4100255 - RNA, 70 nt, Human
aucagacauuuacucacuaccuacuauguaucaaguauggugcuggggguucagaugaguaagacuugau

SEQ ID NO: 4100256 - RNA, 60 nt, Human
aucagaccauccagcguggaugcaauaacucccagcugcuucaugcuuuuuggcucuggu

SEQ ID NO: 4100257 - RNA, 128 nt, Human
aucagagaccauaagccuuccaagacagucuuugcaggagaaaggacguuucucuaaauagcagagccuguucuccuucugucuuuuuuuccugugcagagcuggcuccaaacaggcucuccucuggu

SEQ ID NO: 4100258 - RNA, 77 nt, Human
aucagauaagugaagcaaaguuuagcuggacagguauggcaaaaucagcuuauacaggacaaugcuucguauuugau

SEQ ID NO: 4100259 - RNA, 79 nt, Human
aucagauuugcuaaucaaguauuuuccaguggcacagagauuaacaaggccucugccacaauguugaggcaaaguagau

SEQ ID NO: 4100260 - RNA, 55 nt, Human
aucagcgccacgaggaagcagcugaggggcagcaccuuccaccagggccgcugau

SEQ ID NO: 4100261 - RNA, 67 nt, Human
aucagcugugucagcuggaguccugggaagaggaugacauugcugcuuccagcugggaacagcugau

SEQ ID NO: 4100262 - RNA, 63 nt, Human
aucaggaucacugggagucuuguuaaaacacagauuauuacgcccacucccagaaauuuugau

SEQ ID NO: 4100263 - RNA, 68 nt, Human
aucaggccaugggcaaaaacuugcuagcacccaggcugccagcagggcagugcccuggacucccuggu

SEQ ID NO: 4100264 - RNA, 89 nt, Human
aucaguauuuuguacuugcuucuggcagauugcguaauaaagugauuggcauucuagugaugcugcugucaugaguauagacauuugau

SEQ ID NO: 4100265 - RNA, 84 nt, Human
aucagucaggagcucucugaguggcuguacuuucugcuuguauaaaaagggaagaugcccaacccagcuuugcuuccuguuggu

SEQ ID NO: 4100266 - RNA, 90 nt, Human
aucagucuuuuaacuuuggaauuuaguaaaauaaugcaguaacacauaauuguguaauuaguaguaaauucaaaagaagcaagaauagau

SEQ ID NO: 4100267 - RNA, 62 nt, Human
aucaguuccauuuuacuugugagggaacugagguucagcacaguucaagaugguacucuggu

SEQ ID NO: 4100268 - RNA, 62 nt, Human
aucaguuugauaauaaggcuuggagagaugugauuuucaaagcuugaaccuaucaaacugau

SEQ ID NO: 4100269 - RNA, 90 nt, Human
aucauaguugguugcuagcugcuuuguuagcacaaucuauuccugagauuuuaugagaucuggcuuacgaagcacugguugauaaaugau

SEQ ID NO: 4100270 - RNA, 67 nt, Human
aucaucauucuuggauaaagcaauuggccuuuuacaucaagaccauggccugucuaacagaggugau

SEQ ID NO: 4100271 - RNA, 62 nt, Human
aucauccaagcguaguucuucuauaguccugggcaaaccccagggaauugugcuaaggugau

SEQ ID NO: 4100272 - RNA, 55 nt, Human
aucauccauggcugaucauaaaugcuucuccagagagugaauggucauggcuggu

SEQ ID NO: 4100273 - RNA, 57 nt, Human
aucaucuccuuuuguuuaguuguauuaggaagcagcaaauuaggucaaggagaugau

SEQ ID NO: 4100274 - RNA, 61 nt, Human
aucaugaauguuuuguauagaucacuggacaacagaacucagagacugaagcauuuaugau

SEQ ID NO: 4100275 - RNA, 68 nt, Human
aucauguuguauguaaucuuuugggacuuuuuuuuccacuucauguaagaauacguaucaacaauggu

SEQ ID NO: 4100276 - RNA, 72 nt, Human
aucauguuugacagcauauccucauauuuuauuuauaguguugaaauguguauuugcugccaaaugucugau

SEQ ID NO: 4100277 - RNA, 82 nt, Human
aucauuaaguauuggcuuuauguaaguccaaaggcagggagcugucuucacuuccuuauauaaugccugguacauaauaggu

SEQ ID NO: 4100278 - RNA, 82 nt, Human
aucauuaccuucaacaaacuguucacgaaugugucauauauuacuuuugugauguaaguggagguuuguagacauuagugau

SEQ ID NO: 4100279 - RNA, 62 nt, Human
aucauucucugcuugagcacucuucuguaaucucaugagguguccagggaagagacaaugau

SEQ ID NO: 4100280 - RNA, 64 nt, Human
aucauuggauuuguauggauggaggucacuggugaccuugaaaaagcuauuacaaugcaguggu

SEQ ID NO: 4100281 - RNA, 78 nt, Human
aucauuuuucugacccuuugcuuccucauuguuacaauaaggauaacaaggcugagcagggugagugaaauaaaugau

SEQ ID NO: 4100282 - RNA, 62 nt, Human
auccaaacauguaccacacuaaccaguuuccugaggugaaaagaagguacauuauuuugggu

SEQ ID NO: 4100283 - RNA, 68 nt, Human
auccaagauuaauucaggaucaggaaauaagguaauuugguucuagugacacugaauugagucaggau

SEQ ID NO: 4100284 - RNA, 58 nt, Human
auccaagccagggauggaaugauaggggaaagcccaucugcacaauuuugguugggau

SEQ ID NO: 4100285 - RNA, 60 nt, Human
auccacaccgucaagagcucccugcugacaaacagcauggcagugaggauggugcugggu

SEQ ID NO: 4100286 - RNA, 88 nt, Human
auccagcucauggcucagcgccuuucugugguccuucugcuaugaaaucagcagcgucccauggagagguugacccaucagccugggu

SEQ ID NO: 4100287 - RNA, 68 nt, Human
auccaugcucagggugugaggucgcugauaucuauuagggaguauguuccacauuuugagucugagau

SEQ ID NO: 4100288 - RNA, 90 nt, Human
auccauggugccuuguguccuggcuguggcaaccugcaugcugaacugaguccaacagcaggcaccaaggcuaugacauccacugugggu

SEQ ID NO: 4100289 - RNA, 80 nt, Human
auccauuuauguuuuucuuacuguauuuguuuuguuuauuuuggugccaaagcagacgcaguaaggguagauaauuggau

SEQ ID NO: 4100290 - RNA, 74 nt, Human
aucccagucagcccucuaccuuggcuauagaacccacaggaggguuuccccaguuuggagagagcacuuggggu

SEQ ID NO: 4100291 - RNA, 107 nt, Human
aucccauucucuucagacccuccucagggauuaaggucaaaggugggaggaagaaggcuuccauuggccuuuuauccuagagguucuaauggaggggaaaaggggau

SEQ ID NO: 4100292 - RNA, 74 nt, Human
auccccuggcuuacacccucuuuuugauagagcucauccuucaguagcuucuugagaaagggugccucggagau

SEQ ID NO: 4100293 - RNA, 77 nt, Human
auccccuggguaccuacuguauacuacugcuguucuagaguuuggagccacagagaaucagagauacagagguggau

SEQ ID NO: 4100294 - RNA, 64 nt, Human
aucccguugcagcaucacugcugagugucaggaugaucucaaucugugggugcuacaacucgau

SEQ ID NO: 4100295 - RNA, 58 nt, Human
aucccugcccucauggagcuuacagaauaaugaaccagggacucaaggaagcaggggu

SEQ ID NO: 4100296 - RNA, 65 nt, Human
aucccuggacggcgccuccccacggaugcgggaagcacaagugggaaaugaggcuguccaaggau

SEQ ID NO: 4100297 - RNA, 95 nt, Human
auccguaaaauguaugcauuuuucugcuaagacugcuaauuaauuuaaaaagagauuguuagaauaaaaggucagagaguaaacauauuacagau

SEQ ID NO: 4100298 - RNA, 92 nt, Human
auccuaguguuucaugggacacguuuuaaggaaaauuguuauaaaugagucagaauaauuuuucuuacgugguuccaacuggcucuggagau

SEQ ID NO: 4100299 - RNA, 82 nt, Human
auccuaguuauccaggaaaucauaaauugcuuugucauuaacaguaaucauaugauuuucucaaauggaaugugguaagggu

SEQ ID NO: 4100300 - RNA, 76 nt, Human
auccuauugggucucucgcccuccaccagagcccuucuccaaggggagagggugaguggagggagggauccaggau

SEQ ID NO: 4100301 - RNA, 73 nt, Human
auccuauuugcuuuuaagccacauaauuaaaugccuguuguuuacaguggccucaaagaaagagaaguagggu

SEQ ID NO: 4100302 - RNA, 70 nt, Human
auccucccaaauaggcucaagguagagggugcaccuccuaacaacuugcuuuuaucuuagggaaaaggau

SEQ ID NO: 4100303 - RNA, 63 nt, Human
auccucugaggcucagcuuucucuucuguaaaguggccugaugugaugcugcccucugagggu

SEQ ID NO: 4100304 - RNA, 78 nt, Human
auccuggacaacauggugaaaccccgucucuacuaaaaauacaaaaauuagcugggcauggcaccuguacuccuagau

SEQ ID NO: 4100305 - RNA, 80 nt, Human
auccuggguuugugaguuuaugaagaagcugaagagcuccaucacuucccagcuaaacauagcucuucagaucucagggu

SEQ ID NO: 4100306 - RNA, 64 nt, Human
auccugguagauugcuacauuugcauagaaauccugcuugugaagguaagguuugcuugaggau

SEQ ID NO: 4100307 - RNA, 69 nt, Human
auccuguucuguauaaacauauuuucaaguuugucaaaacuggaugugcacugucuguacugaacugau

SEQ ID NO: 4100308 - RNA, 55 nt, Human
auccuuacugaaugcguauuguauguuaaugacuguugagcaaucaguaaaggau

SEQ ID NO: 4100309 - RNA, 104 nt, Human
auccuuauccugcccugccccaugagcuacaggugauugggccuugggugggcgccggacacaaaggcagccaaucaucugccuuugguuugggcaggaggggu

SEQ ID NO: 4100310 - RNA, 59 nt, Human
auccuuccaggugucucuuaaggucuuagcgacugucaguagaaucaucuugaagugau

SEQ ID NO: 4100311 - RNA, 79 nt, Human
auccuuccugccagucauugcaacuguggcuuuuaagguuggcacauggggcgcugcauuggccuguucauaggaggau

SEQ ID NO: 4100312 - RNA, 86 nt, Human
auccuugccuauuaauucuugccaauucuccuuguacaaauucaagguggauuugccuggagaagugggaggaaguaauagaggau

SEQ ID NO: 4100313 - RNA, 82 nt, Human
aucgagugcaagacacuggcugugcuggaguugaggaaaguuuugcuggagaccugcuugcaccauaugucuggucacugau

SEQ ID NO: 4100314 - RNA, 68 nt, Human
aucguuaaucuugugugucaacuuggcuagguuacgguuuccaguuuggugaaacacaaguuuaagau

SEQ ID NO: 4100315 - RNA, 78 nt, Human
aucuaaaacauauacuguuggcuuuggugaugggagugauugguagcuaaagaggcagugaaacaaugauuaguagau

SEQ ID NO: 4100316 - RNA, 59 nt, Human
aucuaaaaugugguuaguugguaagauugcaguuaaagccuaacuaaccacuuucugau

SEQ ID NO: 4100317 - RNA, 92 nt, Human
aucuaaagucucacucucuggcagucugguggaaggccucaguuucucucuacaugagccucaccauauggcugccucaguguccucaggau

SEQ ID NO: 4100318 - RNA, 70 nt, Human
agugucuguuguucagaacucuccaggucaaaucacaggauuuguaaagagauucaggacagcagucacu

SEQ ID NO: 4100319 - RNA, 84 nt, Human
augcaucauugucacucagaguccauaguuuacaguaggguucacucuugguguuguacauucuguggauuuggacgaauguau

SEQ ID NO: 4100320 - RNA, 61 nt, Human
augcaucuuuagccucuccguggcaguucuguguuaaaucuguccaaagcuuuaggugcau

SEQ ID NO: 4100321 - RNA, 85 nt, Human
augcauguaauuuuguaugugcaugcauguauaugguguguggugugugauguaugguaugcaugugguauaugcuuauguguau

SEQ ID NO: 4100322 - RNA, 63 nt, Human
augcauguguaugucuuauucaaagaugugugcaacaguaccauuuuaaguauauaugugugu

SEQ ID NO: 4100323 - RNA, 65 nt, Human
augcauucugugagcugcuggcuuuucuaucagauggaaagcaagacaggaguuucagaaaguau

SEQ ID NO: 4100324 - RNA, 82 nt, Human
augcauugaacaacaagacucaguggguaguuauguugucauaaauguacugcuucacccuugagucuugguuacucagcau

SEQ ID NO: 4100325 - RNA, 56 nt, Human
augccaagcucuaucccugaccaaucagaucagcucugaggguggggcccaggcau

SEQ ID NO: 4100326 - RNA, 66 nt, Human
augccacaguuagcugugugcaccccccugcccaguacuuggcacagggcuagcugacagugguau

SEQ ID NO: 4100327 - RNA, 88 nt, Human
augccacaguuuauuucuccauuuaccuacacaugggcauuuggguuguuuuucauuuuggguaauggagaaauaaaucugcugacau

SEQ ID NO: 4100328 - RNA, 72 nt, Human
augccacauuuaucucucuccggugaaguucagaaugaaaauuuacauguggagggggcauaaaugagguau

SEQ ID NO: 4100329 - RNA, 55 nt, Human
augccagggucccuucagagauucugauuaaucagucuaggauguggccuggcau

SEQ ID NO: 4100330 - RNA, 109 nt, Human
augccauaauggauugaaagaggauuugggcauagaauuuagagacaaaagccccagguuugauucuaaguucugucaacuucuaauaaaaugaccucgaacauggcau

SEQ ID NO: 4100331 - RNA, 71 nt, Human
augccaucacacugccucgccugugcuauuaccaauggaggugcugagcaucaugaggcacuugguggcau

SEQ ID NO: 4100332 - RNA, 76 nt, Human
augccauuagugcagacagcugcaugcugcuuuuagaucuuaaaaaguuauaugugucugucgugcauaaauguau

SEQ ID NO: 4100333 - RNA, 79 nt, Human
augccccaaguuuuauaguccagucugaggaggcagugucugauuuagauaggacucauagauugguucaaucaggcau

SEQ ID NO: 4100334 - RNA, 97 nt, Human
augccccaggccacaugcccugcccauggcugaggcagaagcuuugucagaagugucugccuggccuggagggcacaggggccaucauccagggcau

SEQ ID NO: 4100335 - RNA, 102 nt, Human
auagaauguguauagauguagauuauguguaguauguauucuauaccuacuuaugaaugguauguugucuacaucuauacugaucuacauucauaucucuau

SEQ ID NO: 4100336 - RNA, 89 nt, Human
auagaauuaaaacaugacuuuucucuuccagaguccuggggcugucuaaggaacuauggugagauagaguguuauggguugaauuuugu

SEQ ID NO: 4100337 - RNA, 66 nt, Human
auagaauuugagaagaugugagagugaaguaauauagacagcuuuguacauuuucucagaguuuau

SEQ ID NO: 4100338 - RNA, 59 nt, Human
auagacauauggcuuuguuucuggacucucaauccuauuccauuggucuauaugucuau

SEQ ID NO: 4100339 - RNA, 55 nt, Human
auagagaaucgcucuugucaguuacuacuuuugugacucuugagaaauucucugu

SEQ ID NO: 4100340 - RNA, 102 nt, Human
auagagccaaugaauguuugacuaaagguagcuaaugugucccuaagcccagcaacaaucugacaggaagcucacuccuggucaaacuacucuuggaaaugu

SEQ ID NO: 4100341 - RNA, 61 nt, Human
auagagcuaugaacuuggaauuuuggugucagaaggaccuagguucaaguucaggcucuau

SEQ ID NO: 4100342 - RNA, 59 nt, Human
auagaguccaggucuuccuauuccagguaguucucauucuaccugguaccuggcuuuau

SEQ ID NO: 4100343 - RNA, 64 nt, Human
auagauaauauugagcaggugagauuguucaucuuugaaaucacaugugcucaauuuuaauugu

SEQ ID NO: 4100344 - RNA, 58 nt, Human
auagauauauggguuuaguucuguacucucaagucagugccauugacccuaugucuau

SEQ ID NO: 4100345 - RNA, 80 nt, Human
auagauaugcugugaaaagcaggcuacuuucuauucugccucccuagaaaagaguacuuuucugcuuuuuaauuauuugu

SEQ ID NO: 4100346 - RNA, 76 nt, Human
auagauguggucaggcugggccuucccugccuugccuguccauggguuccgggaggcuggcucuggccacagcuau

SEQ ID NO: 4100347 - RNA, 65 nt, Human
auagauuucugucaccuucuaugcuaacaaacaucgcuuagcguaggguaaugauggguguuuau

SEQ ID NO: 4100348 - RNA, 57 nt, Human
auagcagggauuaaaguuuuucugggauaccuuagaaguucuuucuucucaugcugu

SEQ ID NO: 4100349 - RNA, 128 nt, Human
auagcauaucaucacuguugccaguuuucaccagaugauuuuucuucagcucaguaauuaguucucuguguuuguagaaaaugguuuggggaugguggaaucagagagaugaccuuugucuguguugu

SEQ ID NO: 4100350 - RNA, 82 nt, Human
auagcccaacaaccucagguacacucccuugugcugaucaaugaucagccauugucagugacacuggccauuguuaaccugu

SEQ ID NO: 4100351 - RNA, 58 nt, Human
auagcuaacuuuuacuuaccaucugaggcuugauucauccucuuugaggguuggcuau

SEQ ID NO: 4100352 - RNA, 99 nt, Human
auagcucuuuacaaauauuagcauauggcagaccaauuagaagcaaaaaaguccguauuggugguugugauguggcuguuauagaaguauuugugcugu

SEQ ID NO: 4100353 - RNA, 130 nt, Human
auagcuguaaaguaaugaaauggauucuucuguguagcuuuaugaaaaucuuuguauauuuacuguauauuauguagauaaauuagaaaguuuacuuguagcacaaaggcauuuuuacauuuacaacuuu

SEQ ID NO: 4100354 - RNA, 81 nt, Human
auagcuguaauuaauguauagagugccuaugacaaacacuuuacaaauaucuucauggaaacucugaaaauuaauaguuau

SEQ ID NO: 4100355 - RNA, 70 nt, Human
auagcuguuagauuggggucgaaaaccaccugucuucuccuacaggugagcugcaaauucuaacaauuau

SEQ ID NO: 4100356 - RNA, 60 nt, Human
auagcuuacaggugauaucagcaaggcacacauaugugaguugaauuuauuuguaacuau

SEQ ID NO: 4100357 - RNA, 72 nt, Human
auaggauuaggcugugggacaguuaggagacugcuuuuucggcauuucucccaacuucccuggccuuccugu

SEQ ID NO: 4100358 - RNA, 69 nt, Human
auaggcuguugucuucugguaggaccagagucagguaugaugcucaacugcaggaaguauggugccuau

SEQ ID NO: 4100359 - RNA, 76 nt, Human
auaggcuuugcugaagaauauuuacuggaggauaaagcaaugauuccuuaagcuaguguuucucagaagggccuau

SEQ ID NO: 4100360 - RNA, 130 nt, Human
auagggagaaaaaacuaacucugguccacuuuacauuuaagagaaauauuuaguucacaauccgugaaugaauaacaauccucuggagcuugaagaacgaucuagaugaauuacacuucuucccaguuau

SEQ ID NO: 4100361 - RNA, 77 nt, Human
auagggcuggaaugaauuuggcuuccuccuggagcaccacuuuuggggagaauaaaucagauuuuaacuggcccugu

SEQ ID NO: 4100362 - RNA, 81 nt, Human
auaggguuggugguaagaauaggggcuuuggagccaggcaaaugugauuuguauuccagcucugauucucacuagcucugu

SEQ ID NO: 4100363 - RNA, 129 nt, Human
auaggguuucaccauguuggccaggcuggucucgaacuccugaccuugugauccacccgccuuggccucccaaagugcuaggauuacaagcgugagccaccaugccuggccaagauguuucauuuuugu

SEQ ID NO: 4100364 - RNA, 77 nt, Human
auagguuaauaauuuuggguagauaacaaagaucuuuggccaacuugaagauaauuauuuacuucaaaguuacuuau

SEQ ID NO: 4100365 - RNA, 105 nt, Human
auaguaaaccuggauucugggaaggagguuaucccaguggacuccguaauagauggagaagcauuaaagggggugauuauguccacuggaauuucaguauacugu

SEQ ID NO: 4100366 - RNA, 66 nt, Human
auaguaaauaagauacccuaaguccugguaugaaguaccaggacuucauuagguucuuuguauuau

SEQ ID NO: 4100367 - RNA, 58 nt, Human
auaguaccuaugcauaaggcugguaugaagauucaauaaaucagugcaugagugcugu

SEQ ID NO: 4100368 - RNA, 79 nt, Human
auaguaggucauuaguaguagcaguguguguauuuauggcccuucauuacuauaugucugcuacuguauaaaucuuugu

SEQ ID NO: 4100369 - RNA, 85 nt, Human
auaguaucuacccacugaacacaauauaaaggaagguuuaauaccucuaauaaauguuaaguuuagcaggcuaggccgcuacugu

SEQ ID NO: 4100370 - RNA, 59 nt, Human
auaguauugugucaaggauuuuucuguguaccuuacacagaucaucucgaaacaacuau

SEQ ID NO: 4100371 - RNA, 57 nt, Human
auagucagcuuugaguaaugugaaaagauaaaauccacagggcaugcagcuggcugu

SEQ ID NO: 4100372 - RNA, 77 nt, Human
auagucuuuagcuuuugcccagccaugguucucacuaucccuuuccuagaauuuugcaguaagggcuaauggacuau

SEQ ID NO: 4100373 - RNA, 55 nt, Human
auagugucaaagugcuauguguauuuuuccaguacauuaaguaccagggcacugu

SEQ ID NO: 4100374 - RNA, 74 nt, Human
auaguuacagauuucacuuuucuuccucuacagaaauuccgaggaguuaaaguguaaggaauuuaaguaauugu

SEQ ID NO: 4100375 - RNA, 64 nt, Human
auaguuaccuaacuuaaaacauguggugggguauuuauuaaccaauauaaguauagguaaguau

SEQ ID NO: 4100376 - RNA, 83 nt, Human
auaguuuucaguguacagauaucucacguucuugauuaaauuuauuuuuaaggauuuguuucuuuuugauauugugaaauuau

SEQ ID NO: 4100377 - RNA, 96 nt, Human
auaguuuugaagagugcuacaaaauaacguggcuguugaaagaaaugcuuuuugcccaauuucuuucuggccacgguuuugagaaaagaaaacuau

SEQ ID NO: 4100378 - RNA, 61 nt, Human
auaguuuugcugucagguccuaaagaucaaaggucaacauaguauauugcaguaaggcuau

SEQ ID NO: 4100379 - RNA, 67 nt, Human
auauaaauauuugagggcaauaggguggacuauagugguuugaauucuggcucucaaaaacauaugu

SEQ ID NO: 4100380 - RNA, 102 nt, Human
auauaaauguuuucuaauguuaauuucuuuagaaguggaauaaaagcauuauugagacuuggcacugaggaacuaguuaauagaaugaaaauaauguuauau

SEQ ID NO: 4100381 - RNA, 97 nt, Human
auauaacauuuguguauguguguaugcuuguguguauaugugucugauuauauaugugcauaugcauacacacauguguguauauagauguuuauau

SEQ ID NO: 4100382 - RNA, 87 nt, Human
auauaauaugaguauuuuacaucguguaauugacuacuugaucgauucauaaauuauauuguggugugaaugugucugauaauauau

SEQ ID NO: 4100383 - RNA, 67 nt, Human
auauaaugcugcuuggguuaucagaaaguauugaauacuucagauaagucaaguuaguauuuaguau

SEQ ID NO: 4100384 - RNA, 119 nt, Human
auauaauuuauaguuaucagaucaggguaauucgcacauccaccaucucauauguuuaucauuucuuuauguugagaaugugcaauauccuuccagcuauuugaaacuauauauuguau

SEQ ID NO: 4100385 - RNA, 86 nt, Human
auauacagagagguccaguuuuaugaaugcuuauuagauggaauuuuauaagucuaaugcaguaucagaauagcaaauauguguau

SEQ ID NO: 4100386 - RNA, 77 nt, Human
auauaccucacacaucagaaauaugaaugagaugccaauacaucaguuacuugugaaugaugucucugaugguaugu

SEQ ID NO: 4100387 - RNA, 56 nt, Human
auauagagagagagagagagacuaggcaagaugagggcugucucuccuuucugugu

SEQ ID NO: 4100388 - RNA, 58 nt, Human
auauaggcuaacaacuauugaggauuggggcuuuuuuuaguccucuguugguuuaugu

SEQ ID NO: 4100389 - RNA, 74 nt, Human
auauaggcugauggcuuccugagucuuucuacuugauaguguucucuauccucaggagcuuccucagcccauau

SEQ ID NO: 4100390 - RNA, 62 nt, Human
auauaggucuucuuuaauuucucuuagcaaaguuugcagauuuuaguguagaggacuuguau

SEQ ID NO: 4100391 - RNA, 101 nt, Human
auauauaaauuuguucagaauuccuauuauguaaagguuauugcaggguacagugugcuguagugauaucugcugauuuuucucugugauaaauuauauau

SEQ ID NO: 4100392 - RNA, 89 nt, Human
auggcauugauaagaggaauuacagaagaggcaaacuuugcaccugucuuggcuucuguauuuccuguugagaguaaagaaaaugcuau

SEQ ID NO: 4100393 - RNA, 61 nt, Human
auaucaguauggauucauggauuccucuuguauucaaugaguuauaaucugcuacugauau

SEQ ID NO: 4100394 - RNA, 95 nt, Human
auaucauaaacuuuagaaaagaaauuccacuuccgaggcuaaaguuugaguaauuccucaguguagcuuuggagugggaggccuuucugugaugu

SEQ ID NO: 4100395 - RNA, 55 nt, Human
auauccaguucaaugaaagaaaugauccuauuguguuuuucauugagugugauau

SEQ ID NO: 4100396 - RNA, 87 nt, Human
auauccuagaacaugauggcuguuauuuugggcaguuuauuuguaacguuccauguccaagaaugacucacucuuauauuagguugu

SEQ ID NO: 4100397 - RNA, 58 nt, Human
auauccuauacacuaaccccaggaguuuaggucuuauucccagggucuuaugggaugu

SEQ ID NO: 4100398 - RNA, 106 nt, Human
auaucuccaagagcccuauucccugcucuuauagcuguuuccaagaagacucuggcuuaaugugguagcugcauagggguaaggaucuaggcugcuuuggugaugu

SEQ ID NO: 4100399 - RNA, 65 nt, Human
auaucucuauuaucucccccauaagacauauuuacagccguauuaaaagggagaugaagggauau

SEQ ID NO: 4100400 - RNA, 64 nt, Human
auaucugaggcagcuugccacucuaaauaggcccucccuaucuacugccagcagucucaggugu

SEQ ID NO: 4100401 - RNA, 112 nt, Human
auaucuuccucagagaaaugucuauucaagucauuugcucauauuuuauuuggguugucguuuuguuguugagucguagacauucuuuggauauuaaaccuuuggcagauau

SEQ ID NO: 4100402 - RNA, 72 nt, Human
auaugaauacgcggucauacacaucacaauuaaacuuuuaaaauaccuauguagaugauuguguguaaaugu

SEQ ID NO: 4100403 - RNA, 88 nt, Human
auaugaauggaaucauacaguggguggccucuugagucaggcuucuuagcacagugcauuugagagucauccauuuccuuguuuguau

SEQ ID NO: 4100404 - RNA, 91 nt, Human
auaugacuagaaauuucuguggaacauguccauauacauuuuaauagaaauguauauagaaaugucuaaagauaauggccuaauagcauau

SEQ ID NO: 4100405 - RNA, 62 nt, Human
auaugcaacccgcacuuaaggaauggaaaguuaugcuguaccuccuugaaagugggguauau

SEQ ID NO: 4100406 - RNA, 62 nt, Human
auaugcacuauggaaguagcucauguaaauaaaaacugaauaaucauguccauaguguauau

SEQ ID NO: 4100407 - RNA, 70 nt, Human
auaugcgguguuugguuuuuuguucuugugauaguuuacugagaaugaugauuuccaauuucauccaugu

SEQ ID NO: 4100408 - RNA, 55 nt, Human
auauggaaugguaaucuacaaucacacugugugguagguauuauuaucuccauau

SEQ ID NO: 4100409 - RNA, 72 nt, Human
auauggacaucucaagcuaguguuuauaguaaggauauauccuacuucauuauucuaguuuugagcuuauau

SEQ ID NO: 4100410 - RNA, 72 nt, Human
auauggucuccauucucauaaauccugagaccuauuaauaguagcauguccaggauacugagauuuccauau

SEQ ID NO: 4100411 - RNA, 91 nt, Human
auauggugguaacaaacacaaugccuacuaguacuauuuuguggcacugcuucaauuugugcuaaggcaccgguagucuuauccacuguau

SEQ ID NO: 4100412 - RNA, 129 nt, Human
auaugguuuuauucuggacacaguuuuauaaauuuauugaagaacaucugugaucucuuugggaguauuuaugauucccaacguuaugcaugauucuuuuauuaugaaugcuugucuagguuuccaugu

SEQ ID NO: 4100413 - RNA, 61 nt, Human
auauguacagggauagaacuugaccagauuagaaacuggugaauuuuugaccuguauuuau

SEQ ID NO: 4100414 - RNA, 67 nt, Human
auauguguaugaucagugugcuccagcuguucuuaaugggcagcuuugcaggcuggucagugccugu

SEQ ID NO: 4100415 - RNA, 75 nt, Human
auauguuaacaacacugugagugcugccaaaacucugagaguucuuucaugcggauuauggucuuguuuacauau

SEQ ID NO: 4100416 - RNA, 81 nt, Human
auauguucacagucuaagauucaggugaaaaggcaggaugccaaaucuuguguacuugcugaucuuaucuguguagaauau

SEQ ID NO: 4100417 - RNA, 106 nt, Human
auauguugacagcaguucccucccuucacaggcagagccuucacugugcaguauuuucaggcccugcauuguacugaggggagacaggacugugagguuaauaugu

SEQ ID NO: 4100418 - RNA, 69 nt, Human
auauuacaauaauguuaugaggcugacucaucaaaccuugguaucaggcuuauuacguuauugucauau

SEQ ID NO: 4100419 - RNA, 126 nt, Human
auauuacucaaauuuauucauggucacacagguaggaauugggagucagguucaaauccaagccugguuugcuucauaagcuugccucuuaaucaccucauguguacuucauuaaagagauaaugu

SEQ ID NO: 4100420 - RNA, 67 nt, Human
auauuagggauaauggucucaaaggcagucguuuuaucugcuuuguucacugauguaucccaagugu

SEQ ID NO: 4100421 - RNA, 85 nt, Human
auauuagguuggugcaaggguaauugcgguuuugccauuaaaaauauuggcaaaaaccacaauuacuuuugcacuaaccuaauau

SEQ ID NO: 4100422 - RNA, 122 nt, Human
auauuaugcuucauuuuacaucaguaggaucauauaagcuccagcuaaauucaaaaucuuagcuccuuucuagaguuugcugcaguauauauuucuugggaucuaaacuugaaguguaguau

SEQ ID NO: 4100423 - RNA, 64 nt, Human
auauucaagucaauagguuaguagguaccaaacacuguaucugacaaccuauugacuugaauau

SEQ ID NO: 4100424 - RNA, 59 nt, Human
auauucauaaaaucaguuggaaauucccuuuagcaauguccagcugugauuaugaaugu

SEQ ID NO: 4100425 - RNA, 55 nt, Human
auauuccaaugucaguuauaucaguaaccugaucugaaaaugauguugagaauau

SEQ ID NO: 4100426 - RNA, 69 nt, Human
auauuccuugguagggacaacucugaggcaugugcuacauugucacccagagguccccacugggaauau

SEQ ID NO: 4100427 - RNA, 83 nt, Human
auauucuaugaagugaguuaugguugcuuaaagggccacauccuaggagucagaggcuauaacucagguuuguuagugaaugu

SEQ ID NO: 4100428 - RNA, 60 nt, Human
auauucucugugucugcuuucccacuagagcugugagcuucuuggagacauagacaaugu

SEQ ID NO: 4100429 - RNA, 124 nt, Human
auauucuuaaagaacucaggaacaucuuaagagauacagauguugaauguuauaucuccucuucccucugguauauuuuuggcauguaucuucuguuguuucuuuaaaaguugcuuuugaauau

SEQ ID NO: 4100430 - RNA, 86 nt, Human
auauugaacacauuuuacaguugucuggcuauauuauauaaaugugguaagcaacuuuuguagagauaguacgugugugauaaugu

SEQ ID NO: 4100431 - RNA, 99 nt, Human
auauugaauguuucacuguuccgggaacuauuuuaagcacuugauauggauuaucucauuaaugcuuacaguguccugcgagcuagaaacaauuauuau

SEQ ID NO: 4100432 - RNA, 66 nt, Human
auauugcauggcuuugcugguuaaacaccugauaaucaguuugaaacugcagggcuauaaaaauau

SEQ ID NO: 4100433 - RNA, 67 nt, Human
auauugcucauacaucguuuauuuuaguucaacuguaguuuggauuaguuuaacaauguggcaguau

SEQ ID NO: 4100434 - RNA, 69 nt, Human
auauuuaaacaggguaccaauauaaguuuuucuucugaauggcuuacugauggguaccuugcuagauau

SEQ ID NO: 4100435 - RNA, 69 nt, Human
auauuucaugggguuccauacuaaguagcaauggauuuuccagaguaacaugaaguccccaucugaugu

SEQ ID NO: 4100436 - RNA, 56 nt, Human
auauuucuuaucuugauuuucuccuggauaagauccuggagcuuggugagaagugu

SEQ ID NO: 4100437 - RNA, 67 nt, Human
auauuuuggcauuaagaauaucauuaaaagccaacuguuuuugagaaaacuuuuaauguugggaugu

SEQ ID NO: 4100438 - RNA, 67 nt, Human
auauuuuuugaaauaaggaagcucgaaaucagcuggugguuaucuuuugcuuuguuuuaaaaaaugu

SEQ ID NO: 4100439 - RNA, 129 nt, Human
aucaaaauugucuguagagcuuuuuaaaaauaacuaugcccgguccccaucccagaucuguggauuuacagucuccagaaauggggcuggggagugugcacuuuauaaagcuccauagaauauuuugau

SEQ ID NO: 4100440 - RNA, 58 nt, Human
aucaacaugugagagcaccaguuucacccugacucugcuaguguuauuauuuguugau

SEQ ID NO: 4100441 - RNA, 86 nt, Human
aucaagaaaaaggcacaaaagcagggugaccauacauucaguuugacuggaauagucuuggauugauccugcuguccuggcuugau

SEQ ID NO: 4100442 - RNA, 77 nt, Human
aucaagaugguguugcagaaaaggcaccucugggaccacagcuugggacaugcauacugcugccaacgccacuugau

SEQ ID NO: 4100443 - RNA, 96 nt, Human
aucaagggccaucucucuucaaaugcaggagagcauguuuaagagccugggcucuugauucauguucccugcauuggaaucacgacuccccuaggu

SEQ ID NO: 4100444 - RNA, 73 nt, Human
aucaaggugucuguguuuauaauuguuaacucuugacuuuguuugaaaugauauagcagacauagccuaugau

SEQ ID NO: 4100445 - RNA, 58 nt, Human
aucaaguuggauuuuguauggcuagauacagauggugccauacagauguauccaugau

SEQ ID NO: 4100446 - RNA, 59 nt, Human
aucaauaguauuuauugaacaccugcuaugcuacaggcacucugcugaauacugaugau

SEQ ID NO: 4100447 - RNA, 90 nt, Human
aucacaaacuucauaacaguggcuucagcaaguaaaauguucaauguauguggcauaaacugccuaaagcucuguugucaaccuuguggu

SEQ ID NO: 4100448 - RNA, 76 nt, Human
aucacagaagucccuuauuuugaccugugaauuguucauccuuuaaaaacuccaggaaacuuaggggaaaugugau

SEQ ID NO: 4100449 - RNA, 75 nt, Human
aucaccaguacuuuuggaguagcaaguauuuuauugucauuuguaauaaaggcaacaccaggguaugaagguggu

SEQ ID NO: 4100450 - RNA, 59 nt, Human
aucaccaucgcacugcacacugucauccuucauuaacggcuaaagcagaugggggugau

SEQ ID NO: 4100451 - RNA, 113 nt, Human
aucaccuggaggauuguuagaacagauugcugggcuucaccuccagaguuuguggugcauggauuuggaggagggccagaaaagucugcauuucucacagccuuccaggugau

SEQ ID NO: 4100452 - RNA, 65 nt, Human
aucaccuugggcuuccuguuacaugaauuaccagaaccacagaagcugagagcccagcagguggu

SEQ ID NO: 4100453 - RNA, 67 nt, Human
aucacuccaagugcugaggugacaaggggagcguccuguuggcacuaucucauguuuuggcuguggu

SEQ ID NO: 4100454 - RNA, 79 nt, Human
aucacugaaacacauaugaacaguugaugaggucagauacuuuaagacaacaccaauugaugaauauggugauauugau

SEQ ID NO: 4100455 - RNA, 66 nt, Human
aucacuggggagcacugacauguuccacaaaucuacauuggaugugcugguuucucucuccagggu

SEQ ID NO: 4100456 - RNA, 61 nt, Human
aucacuguggaaaacuguauggcaguuccucaaaaacugaaacauacaauuaccauaggau

SEQ ID NO: 4100457 - RNA, 85 nt, Human
aucacuucuguuucccguucacuugcucugcaucugcucugguugcugccaagggccaucugagggcacugugacgagauuugau

SEQ ID NO: 4100458 - RNA, 77 nt, Human
aucagaaauucuggggacaugaccgucaucuguuuuagcaaguauacccagugauucucauguuccugaaguuugau

SEQ ID NO: 4100459 - RNA, 128 nt, Human
aucagaauuccuuggaggguuuuuuaaaacacagauuucuggucuucacccuuagcaugucugauucaggagauuugggauggagccugauaauuuguauuucuaacaagcucccauguagugaugau

SEQ ID NO: 4100460 - RNA, 120 nt, Human
caaauccagucagauauuaccuccaggugcaauauuuggcacugagaugagcauuaaaguuaaauauuuauuggugccuuaauauugucagagacuuguuccaacacugacccagguuug

SEQ ID NO: 4100461 - RNA, 56 nt, Human
caaauccauagaauguauaacgcuaaaagugcauccuaaugcaagcuauggauuug

SEQ ID NO: 4100462 - RNA, 129 nt, Human
caaaucuuuaagccacuauaauaggugagaguuuuuacaaaagucaagaaacacagaugaugaccccugcuguggcuuugugucuauuguauccaaaaagcuuuuauaccauauuauguguuuuaugug

SEQ ID NO: 4100463 - RNA, 67 nt, Human
aucagguuauccuccuugaaacaaaguaacuuuuaauaaagugggcugguggcagggagaaccugau

SEQ ID NO: 4100464 - RNA, 101 nt, Human
aucaguacuucauuccuuuuuauggcugaauaauguucucuuguaugggauacuuuauacuauuuaucaagggaggguuuucaacagaggaguggccugau

SEQ ID NO: 4100465 - RNA, 63 nt, Human
aucagugaccuguucuuuggcauccuucugaccacuagauucaucagauuuugggucacugau

SEQ ID NO: 4100466 - RNA, 82 nt, Human
aucagugcuuuucucauagucaugccucuuauaguuuuauaauuuuuuaaaaggcaauacuagaugaguuuaaggcgcuggu

SEQ ID NO: 4100467 - RNA, 59 nt, Human
aucaguggaaggaaagcaggaagggucucuucuuucaaauacauucuuugccacuugau

SEQ ID NO: 4100468 - RNA, 62 nt, Human
aucaguuaacugucucaggccaugggcgcuauugacauugauaguuggcuuugagaacuggu

SEQ ID NO: 4100469 - RNA, 77 nt, Human
aucaguuuaguuuucuaguguuuaggaaagcuuaaugaaaaauauaagacaacagacaacuagaaaacuagacagau

SEQ ID NO: 4100470 - RNA, 73 nt, Human
aucaguuucucucaagguccuuggcaugggaucucaaaagagucuacccauaaucuggcuuugagagagugau

SEQ ID NO: 4100471 - RNA, 102 nt, Human
aucauaaagcaaaguugcagggcagugcuaaguagcuggcccaguaggcccuguccuacuugagccagcuccuugccugucaguaaugaccagcuuagugau

SEQ ID NO: 4100472 - RNA, 110 nt, Human
aucauaaggugauacuuccaaagcaagugcccaaaauucuucaguugguucccauuucuuuuaaggaaaaacucaaacauuuuggcauaccuuacaaggugucuuaugau

SEQ ID NO: 4100473 - RNA, 59 nt, Human
aucaucuccauugcuuuugacaaagucuaauacaccuggucaaagcaaagggagaugau

SEQ ID NO: 4100474 - RNA, 64 nt, Human
aucaugggcguggccucuauccaaacauuuaaaagacauauuugcauagcagcuauacccagau

SEQ ID NO: 4100475 - RNA, 69 nt, Human
aucauguagcacuggaacaugguaagcacucauuaaaccugagccauuccaugugcuacacauaaugau

SEQ ID NO: 4100476 - RNA, 67 nt, Human
aucauguccuaacuuugucaucuucccuuucugaaucagaacauggauugucaaagguaagacugau

SEQ ID NO: 4100477 - RNA, 75 nt, Human
aucauuacagaguagauuuuugaauguaaguugguuauauuaccaacuugguuguuggcaauuugcuguacugau

SEQ ID NO: 4100478 - RNA, 57 nt, Human
aucauugaauuugguucaauaugcagaaauuuguguaaaugagccuagauucaagau

SEQ ID NO: 4100479 - RNA, 78 nt, Human
aucauuugucuguucguucagucaacaaauguuuauuaaacaucuauuaugugcugagcaccaaaauaggcugaugau

SEQ ID NO: 4100480 - RNA, 88 nt, Human
aucauuuuucccaaauguuuugaguguaagaaugcuguuuccuuuucucucaggucuacauaucuuuacucaucaucucaaaggugau

SEQ ID NO: 4100481 - RNA, 97 nt, Human
auccaaaccaaucucguguguauuugcuggcugagaucuguuuuccucauguucuguagaagggaaggaguaacauggucuccuuuagaugcuggau

SEQ ID NO: 4100482 - RNA, 83 nt, Human
auccaaagauccggcggccaaggucagccgcucucggagagccgagauucuuggugcuggcugggcugcuggagacagcgggu

SEQ ID NO: 4100483 - RNA, 58 nt, Human
auccaaagauggaaagaacuuuacugagguaaaguuuauuuauguucaucauuuggau

SEQ ID NO: 4100484 - RNA, 85 nt, Human
auccaaagcauguuaagguagcucacuaaauauguauuuacagauaaugguauguaaaagugaucuauuuaauucuuuuuugggu

SEQ ID NO: 4100485 - RNA, 65 nt, Human
auccaacauuccuauuaugucccuaguguuaugccaggcacagagauuacagaggagauugagau

SEQ ID NO: 4100486 - RNA, 82 nt, Human
auccaaccuugcucagcaaugagaacuggcauuucugggagcccaaauucuccagagucagugacuuuugcugagaguggau

SEQ ID NO: 4100487 - RNA, 65 nt, Human
auccacucuugccugcaaugaggaccaaggcaaaaagaguuggcugaaucugcagcaggaaggau

SEQ ID NO: 4100488 - RNA, 62 nt, Human
auccagaagaacuuccuaauauauuuucacaugcagguuguauguggagggaagggauggau

SEQ ID NO: 4100489 - RNA, 70 nt, Human
auccagccccgggauguucuucaacaacauggcuucuuugccacaucugagucacuuccugggccuggau

SEQ ID NO: 4100490 - RNA, 86 nt, Human
auccagucccuaccauaaagcaggcaaaugagaaacuacaaauccuguggagcucuuuucaaaccuguuuauggagaauauuggau

SEQ ID NO: 4100491 - RNA, 58 nt, Human
auccauggaggacaagagcaauaaaguaucaucuuugugucucucugcauccagggau

SEQ ID NO: 4100492 - RNA, 64 nt, Human
auccauggcuuagaaguuccagcccuccaugaaccguuggguugagguucucuggguccugggu

SEQ ID NO: 4100493 - RNA, 67 nt, Human
auccauguuguggcaucuaucaguacucacuuauuuucauuacugaauacuauuucauaauguggau

SEQ ID NO: 4100494 - RNA, 66 nt, Human
auccauugaaccuagagaugcuuaugaacaccacugugugccaggcacuguacuagguacagggau

SEQ ID NO: 4100495 - RNA, 79 nt, Human
aucccaaagagcaagaggagaauggcugauuccaaugcaaucuacaagagguucuccucucuacucagcucuucagggu

SEQ ID NO: 4100496 - RNA, 79 nt, Human
aucccaaugccaggaaguggggcagaggccggccuggugcccagagcccagggccuacgucccaccacccugccggggu

SEQ ID NO: 4100497 - RNA, 56 nt, Human
aucccagacacaggugugccucaauauaaaagcagaagguccugguucucugggau

SEQ ID NO: 4100498 - RNA, 107 nt, Human
auccccagcuuugucagcccaguccagcucucagcgggagacucacuuccugggaugugugagauccagcugcagggcugugaugcugucaggcauugauaggggau

SEQ ID NO: 4100499 - RNA, 55 nt, Human
aucccccacuagaugucacuaguugcccaggacaguggucagaacgugggagggu

SEQ ID NO: 4100500 - RNA, 90 nt, Human
aucccccuguguggaccuauauuucacagaaagaaguggaauuuccucuuccugugaaauauagguccauacaggagcaucaugggggau

SEQ ID NO: 4100501 - RNA, 86 nt, Human
auccccugggagcuuguuggagcagcucaggcucugucccagaccuauucaagccaaaucuggauuuagcaagacucucgagggau

SEQ ID NO: 4100502 - RNA, 77 nt, Human
aucccucagcuuuggagggcaagagcuguuccuagacuaugggcaaggggcaggggugcauccagagaagcaggggu

SEQ ID NO: 4100503 - RNA, 69 nt, Human
aucccuccgauuccaaaccucccuaaaaugauuaaauacauuuuaauggcagggcagaauauuagggau

SEQ ID NO: 4100504 - RNA, 64 nt, Human
aucccucuagccucuugucuagaaguuaaguccuggcugcagcauucugguaaaaggcagggau

SEQ ID NO: 4100505 - RNA, 65 nt, Human
aucccuggaaccugugaauauguucuuuauguggcaaaaggaacuuugcagaggugauuaaggau

SEQ ID NO: 4100506 - RNA, 86 nt, Human
aucccugugacccucucaggaucuaauacaugguaacuuugugacccucuugccaagagguccaggugggaaggcaacauggggau

SEQ ID NO: 4100507 - RNA, 58 nt, Human
aucccuugugcucagccucuugggccacagagcuggagggagaggcuggacaggggau

SEQ ID NO: 4100508 - RNA, 65 nt, Human
auccgagugcucucaugcugacuauuaaagguuucaauuuaaaauguuugcaagagaccagggau

SEQ ID NO: 4100509 - RNA, 60 nt, Human
auccuagcaggugcacuccuaucuuuaaaaaagaauaaaaugcacagcugugaauaggau

SEQ ID NO: 4100510 - RNA, 89 nt, Human
auccucagagagcaggaugaucccuggacuugaguaaguaccucaggaccuaccuaagcucagggaaaggccauuguacucagagugau

SEQ ID NO: 4100511 - RNA, 80 nt, Human
auccugaccuaaagaauuuucauagagcugacugauggucaguuagcuauuaaauagaaaauuuuaugcauuguuaagau

SEQ ID NO: 4100512 - RNA, 116 nt, Human
auccugagugaaaugggagcuggggcagggaaaggcugaugcugugggucggucacuugucacuaauaagcccauuuuccugccuugccuugccccaucuuuuaguuuuucagggu

SEQ ID NO: 4100513 - RNA, 61 nt, Human
auccuggcacauaguaaguacuagauauauuuugacuguugcuuuuauuauuugccaugau

SEQ ID NO: 4100514 - RNA, 89 nt, Human
auccugggcugcccagcccuguguguccuugaccucaguggcugcaauagccucuucaccucgggcacacugcuggcucagccagagau

SEQ ID NO: 4100515 - RNA, 70 nt, Human
auccuggucgcuguguagguucagcuaggucgcuugguaucucugagccuguuuacugacaaaaggggau

SEQ ID NO: 4100516 - RNA, 66 nt, Human
auccugguucaaauauuuggggcacucagaauuggaggaauaaauugaaguguguugagccaggau

SEQ ID NO: 4100517 - RNA, 58 nt, Human
auccugugugccaccugccugcugaaaacccuuuguggcucugugucacauacaggau

SEQ ID NO: 4100518 - RNA, 57 nt, Human
auggcauuucuugacagggcauguuccuaaggauaugcagagaauaacaaaugccau

SEQ ID NO: 4100519 - RNA, 78 nt, Human
auggccagccugguacuuggcacucaggagauacucacuaaauuuaaauguaaacuccauaaguaaccagaugguuau

SEQ ID NO: 4100520 - RNA, 58 nt, Human
auggccuccuucagcauuacaaugcagucuccucaauugcuuugccaaaagaggccau

SEQ ID NO: 4100521 - RNA, 81 nt, Human
auggccuucauccuaagcacaaugcuuugaguaugcaguauuuguuuauuaagugcuuuucguuuugcuuuaggggcucau

SEQ ID NO: 4100522 - RNA, 130 nt, Human
auggcucucaugacccaaccuuagauccuggcucuaauaggcucagacauuuguagaaagugccccugaugacacugguauucaagcgagcagaugucuagggcucauuuagccucuaaaauugugaccu

SEQ ID NO: 4100523 - RNA, 86 nt, Human
auggcugauuaugacagacagcuccuuuuggugcauaucagagaugaauaugcaaagagggcuguagcauuuacauauuuacccau

SEQ ID NO: 4100524 - RNA, 68 nt, Human
auggcugcugcuccugccuggcucccagggacugcgcucuggcaggcagagagcggccuuuagcucau

SEQ ID NO: 4100525 - RNA, 72 nt, Human
auggcugcuucucugauggaguccaaugccuucucuagguuuauccugaacuuccaguagggaggugguuau

SEQ ID NO: 4100526 - RNA, 129 nt, Human
auggcuuaucucugcagagcacuuagcucagcacccagugauuagggcuaccugggguuggccauuaggcugagaugcugugguccacagggaguccgugcugaccuuguccugcacauucuaauucau

SEQ ID NO: 4100527 - RNA, 55 nt, Human
auggcuucugccuugauuguucucucucuaggagcacucaugcugcagaagucau

SEQ ID NO: 4100528 - RNA, 78 nt, Human
auggcuugagagaauuaacuggcaguuagugcuguguucuauagcauucaguuuuuccuguuaaaccuuaaaagccau

SEQ ID NO: 4100529 - RNA, 65 nt, Human
auggcuugcuuuuagagagaucuuucauaauuuucagaugcauuuguuuuucuugggcgagcuau

SEQ ID NO: 4100530 - RNA, 55 nt, Human
auggcuuucagauggugaaagaccagcugugugucugaaaauggaugagagccau

SEQ ID NO: 4100531 - RNA, 55 nt, Human
auggcuuuguguucagagcugagagaucgaucaaagcaugaacucauugagcugu

SEQ ID NO: 4100532 - RNA, 58 nt, Human
auggcuuuguuccaauaaaacuuuauaagaacagacaguagauuuggcccaaagccau

SEQ ID NO: 4100533 - RNA, 65 nt, Human
augggaacuagaacagaaaguacaggaaagauauccucucuuucuuacaaccugaucuaacucau

SEQ ID NO: 4100534 - RNA, 80 nt, Human
augggaaugaggugaggaugcugauaggagggggguaggguaagauguccauacuaacagcauuuaucauaggaucccgu

SEQ ID NO: 4100535 - RNA, 75 nt, Human
augggacacacaaggaaguaaagcaaaggaaacauuuaauggguuauauuuguauacuugccuuauuuguuccau

SEQ ID NO: 4100536 - RNA, 57 nt, Human
augggacuaucucugagguuugcuauuacaacucaaacuaagagaucucugucucau

SEQ ID NO: 4100537 - RNA, 69 nt, Human
augggagagcuaagagucaaacccagggauucagacuccagggucuuugcugucuuugcucucaaccau

SEQ ID NO: 4100538 - RNA, 55 nt, Human
augagauaggaacaaacuuacaggaugcuuaucuggaccuuguguucuaucucau

SEQ ID NO: 4100539 - RNA, 55 nt, Human
augagaugaggaauggcccuccaggagagccagaggcuauuuccacucuucucau

SEQ ID NO: 4100540 - RNA, 84 nt, Human
augagaugaguaaauuaguggauuuaacauggggguauugaaucuaauauacuuaguuuuaauccauuagacucuucagcucau

SEQ ID NO: 4100541 - RNA, 91 nt, Human
augagauucggacuguagaaguucagacugccucaguucagacugccucauggggcagucuggaggucagcuggcuucuggugucucucau

SEQ ID NO: 4100542 - RNA, 58 nt, Human
augagcaaggcuuugugauaguugcauaauuauuucaggcuguuugagcauagcucau

SEQ ID NO: 4100543 - RNA, 74 nt, Human
augagcacucugacacaugaacuugaucuaaaugaguaauggauacaugaucacuguauuauaaugaggcucau

SEQ ID NO: 4100544 - RNA, 64 nt, Human
augagcagggacuuugaguguagucuuuggauucauacagaucugggcuugaguuccugcucgu

SEQ ID NO: 4100545 - RNA, 108 nt, Human
augagcagugccugucuugauguaggggggacaaauuagaccagggcuccuggaaucacuggccacccagguuccuccucaggucucaauuucuccugccuggcucau

SEQ ID NO: 4100546 - RNA, 62 nt, Human
augagcaguuuuuaaguagcaagcucuauuucucggcaaggcuaacgaaaaagcgugcugau

SEQ ID NO: 4100547 - RNA, 74 nt, Human
augagcauaacaaauaccaugaucagucccaugaucuuccagaagucuuguggaggagugugauugucugccau

SEQ ID NO: 4100548 - RNA, 67 nt, Human
augagcaugagcaagccaguuccagaguuagcgcugguaacugcucugcuguguuuguucagcacau

SEQ ID NO: 4100549 - RNA, 90 nt, Human
augagccagauggccugagguggcauccuagcucuauugcuaaccagcgguguugccuugggcaugccacuucccuuccucaugccucau

SEQ ID NO: 4100550 - RNA, 72 nt, Human
augagccauggggggcugacuuguuaggccauugccucugaguccuuggagcuccccucuguacguggccau

SEQ ID NO: 4100551 - RNA, 59 nt, Human
augagcuaguugugcuuggaacagggucuuuccaucuauguagugccagcuaguaucau

SEQ ID NO: 4100552 - RNA, 91 nt, Human
augagcucugcucaccauugcccacauaucuucaugagauuagccucuggauauuguuggugagugucaaugguuagaguaauaggcuuau

SEQ ID NO: 4100553 - RNA, 55 nt, Human
augagcugauuugugcuuaucccuugauaagcacaggcaauagauacagcuacau

SEQ ID NO: 4100554 - RNA, 82 nt, Human
augagcuucugccaggccacacagggcacucaagugaacaagguauagggugcccuggggucaugguaagaaagugucucau

SEQ ID NO: 4100555 - RNA, 67 nt, Human
augagcuugcuuucuucagaggugagcaugacuugcucaggucucuucccggauaaaguaaguucau

SEQ ID NO: 4100556 - RNA, 67 nt, Human
augaggcagcugacagcuguucauccagauauagcccugauguccuaagaacaugucagcuucuuau

SEQ ID NO: 4100557 - RNA, 77 nt, Human
augaggcaucuaacauugcaaaaagaacguugucuauaaauaaauucagucugauugggauguauuaguugucugau

SEQ ID NO: 4100558 - RNA, 80 nt, Human
augaggcucagagaggcucagggacuugcugagggacacacugcuuccugaguaccagucccaugggucuccuggcccau

SEQ ID NO: 4100559 - RNA, 56 nt, Human
augagguauuagcaguaacugaacaaggggaaagugaguguuggcuaaugcuacau

SEQ ID NO: 4100560 - RNA, 71 nt, Human
augaggucacaguucagcugccaggcacauugaccacgcaaccgaucccugggcugagcagugaagcucau

SEQ ID NO: 4100561 - RNA, 61 nt, Human
augaggugcaccauuauucaguugcuuuaacaauaaagagcaaaguuguugcuaaccucau

SEQ ID NO: 4100562 - RNA, 61 nt, Human
augaguaacaaauacuucaguaguguugcugugaauauuaagagagauauuuguaacuuau

SEQ ID NO: 4100563 - RNA, 69 nt, Human
augaguaauuuuuugguuuaaguaugucuccacugcuucaugggacauacuuuuuaaaagauugcuuau

SEQ ID NO: 4100564 - RNA, 59 nt, Human
augaguaucuguugggauuuuguugugucuuagaaaauuaaaaucucccagaaacuuau

SEQ ID NO: 4100565 - RNA, 83 nt, Human
augaguccauugcauuuguggcauggguguugucuuagccacucaagcuacuauaacaaaaugccaucagcugaaugacuuau

SEQ ID NO: 4100566 - RNA, 62 nt, Human
augaguggcugcaucggggugaccagggacuucaagucccuggggcucauugcaguagccau

SEQ ID NO: 4100567 - RNA, 86 nt, Human
augaguuaagacaacugcuucacuuggcauuuggauccaucuauuacuacuccagggcucgggugcuuagucauuucuuagcucau

SEQ ID NO: 4100568 - RNA, 78 nt, Human
augaguuuuccucucucuugccagaaugugaagcuuugcauagugccacgugggaggugaggagugaggaaggaaagu

SEQ ID NO: 4100569 - RNA, 59 nt, Human
augauauugagagacaacugcacaauugcaacgcagagcagcaggucugucaaugucau

SEQ ID NO: 4100570 - RNA, 91 nt, Human
augaucaauuucaagcuaucuucaugaagucacugaacacagagucaggaagaaauguguccagugauucucaugagccggugaaagucau

SEQ ID NO: 4100571 - RNA, 69 nt, Human
augaucagcaguuuucaguguucacuaacaacuucacaaaugguguaaagcuuaaaacuguagggucau

SEQ ID NO: 4100572 - RNA, 73 nt, Human
augaucuuuaggucucaauuccugcuccuguugucguuuuugcaaccaggaagcugugagaccuuuggguuau

SEQ ID NO: 4100573 - RNA, 65 nt, Human
augaucuuuaguagcgcauaguauuucuuuaauucccagugguacacaaagcuauugagugucau

SEQ ID NO: 4100574 - RNA, 92 nt, Human
augaugaaaaguauuaaugucaauaucaggcagaccuaaggcuacacuuccuacagcuguacuaguguuggcaauuuauuuaccuuucucau

SEQ ID NO: 4100575 - RNA, 64 nt, Human
augaugaagaguaacaggcugaagcucaggcaaacgcccccgccaccauguguacauuuaucau

SEQ ID NO: 4100576 - RNA, 77 nt, Human
augaugaauuagcuucagcuuguggggcacacacagauggaaguauaagguggccucaggaguaaguaaauccccau

SEQ ID NO: 4100577 - RNA, 69 nt, Human
augauggggagguacaguuguuuguuuauaagggaugcauuuaucucaagaauugguuuccucugucau

SEQ ID NO: 4100578 - RNA, 76 nt, Human
augcaaacauaauguaugugcaauguuuauauguguacacauacacacauauguauguacauacauaaugaggcau

SEQ ID NO: 4100579 - RNA, 60 nt, Human
augcaacuacccccaggauuuuaagauucaaagaaguggaaauccuugggaguggugcau

SEQ ID NO: 4100580 - RNA, 75 nt, Human
augcaagaagaagcaguauuucucuuaaucacuuguuauggggacuaaaugagauacugucuucaaagcuuguau

SEQ ID NO: 4100581 - RNA, 67 nt, Human
augcaagguugauguugucugcccugccaagcuuuuagcuugucaaggcuuuuaauauucuuuguau

SEQ ID NO: 4100582 - RNA, 83 nt, Human
augcaauaucuaggaaaagacugaauauauuagggauacaaaauuuacauuuugaaucuauguauucaguguaucuacugcau

SEQ ID NO: 4100583 - RNA, 55 nt, Human
augcacaaacccacaauuaguccauauuuagaaaacuuucuguggguucaagcau

SEQ ID NO: 4100584 - RNA, 60 nt, Human
augcacaagguagauuauuauucugaugucaugcaaaugaguaccugugugccugugugu

SEQ ID NO: 4100585 - RNA, 62 nt, Human
augcacaguauguagggucuauuucaggggaagcacauauuauaggaacucaugcuuugcau

SEQ ID NO: 4100586 - RNA, 95 nt, Human
augcacaguuauaauggagcaaggaagugccaggaaggugcccaguguaucaccucgguuccacagguauuucuccuugcucccaucuuguguau

SEQ ID NO: 4100587 - RNA, 58 nt, Human
augcacauugaaccauauauuaguggauuauuucugugauauaaaguucaguguucau

SEQ ID NO: 4100588 - RNA, 69 nt, Human
augcagacucaucaacuguuacaaauguaccacucugaugagggauguugauagugauggaggcuguau

SEQ ID NO: 4100589 - RNA, 72 nt, Human
augcagagcaaauauuaugcuuuccucuuggaaaaccuccaggagcugcaaauauuaguaauccagcugcau

SEQ ID NO: 4100590 - RNA, 64 nt, Human
augcagcagccccuugaggugcuaaucuuuuuuuaauaucuuggcgcuccagucgcuggugugu

SEQ ID NO: 4100591 - RNA, 69 nt, Human
augcagcauccucaguguagauuccuuuaucuauuuuaaagaagaaggcuugauugaggaaugccgcau

SEQ ID NO: 4100592 - RNA, 58 nt, Human
augcagcuauuugagcaugucauucucaaagccccauugaaaugcucuacagcagcau

SEQ ID NO: 4100593 - RNA, 65 nt, Human
augcagcuucagguccuuuauaacaugagguaacaauuucagugucuugggcuugaaugcugcau

SEQ ID NO: 4100594 - RNA, 60 nt, Human
augcaggcagacacugugggcaggaagggcaucuccugucacaguggguggugccuacau

SEQ ID NO: 4100595 - RNA, 74 nt, Human
augcaggcugagaccaccacaccaguguuugaugacuacaucagcaucggguggugguggggcuuguccugcau

SEQ ID NO: 4100596 - RNA, 69 nt, Human
augcaggcuguaaucugaggcuacaaguuuuagcuaauucauccugguggccuuaucagcaggcugugu

SEQ ID NO: 4100597 - RNA, 57 nt, Human
augcagggcagaguacguuagccagcaucucuuuggggcugagguuucuuccuauau

SEQ ID NO: 4100598 - RNA, 88 nt, Human
augcaguauagaguaauucugguaaaucauugagccuaucacauccuaaguucucaguaaacauuagcuaugauuaucauuacugugu

SEQ ID NO: 4100599 - RNA, 127 nt, Human
augcaguccccuucuuuuuccuuggugacuacaggccggcaucagagaguccgauuuauaacaugggcucuaccuuugcaaugcaguuacuuucuuuuccuuggggagagggaaggaaggaagacau

SEQ ID NO: 4100600 - RNA, 85 nt, Human
augcagugcuuugauuauauguaaaugaugacacaagauccccacucauugugcauauuagguacaugcuaauucucaccagcau

SEQ ID NO: 4100601 - RNA, 56 nt, Human
augcaguuuaucuccaaaucaugauuuuucccuuuaugauuugaucauggcugcau

SEQ ID NO: 4100602 - RNA, 81 nt, Human
augcaucucauuugucuucaguagguucuuccauaaucucaucauuauugcuauggcccucagaggacagcugacuugcau

SEQ ID NO: 4100603 - RNA, 62 nt, Human
augcaugaaagaauccaagccuuaagauuucuucagugucuuguacugucuuucuugugcau

SEQ ID NO: 4100604 - RNA, 69 nt, Human
augcaugagaauaucccaugcucucugauuugcagcagcaguugagcgaaaagggcuauuuauaugugu

SEQ ID NO: 4100605 - RNA, 65 nt, Human
augcaugaugaacuugcuuucaauuaaggauuauccuuuaaugaagugcguuguuuaaugugugu

SEQ ID NO: 4100606 - RNA, 76 nt, Human
augcaugcaaagugucugcuuugaaagagggaggauuggaucaggcccauccagcagagcaguguuuugcauguau

SEQ ID NO: 4100607 - RNA, 80 nt, Human
auuagggagaaacaccaauuuauucaucuucuguaacuguaaaaaaauucagguaaaguauauugguguuauuccucagu

SEQ ID NO: 4100608 - RNA, 56 nt, Human
auuagggauagaugcagggcugacuuuauuccuuuucagcuuccauauucucuagu

SEQ ID NO: 4100609 - RNA, 119 nt, Human
auuagggcaauguuuaauuuacugucucauggcuuuuugaguaaauauaaauugucauacuaaagugacagguguaaaacccaggauggcuguguuagagagguuaaucugcuguuaau

SEQ ID NO: 4100610 - RNA, 70 nt, Human
auuagggugaaaaggaauaagaaacuaaaguggcuuccaaauguuugugucuugguuucuucacccuagu

SEQ ID NO: 4100611 - RNA, 76 nt, Human
auuagguggccuggguacaugaaguaucuuuuuggaugccuagaacacaaaaagggacgacaacaggccaccuaau

SEQ ID NO: 4100612 - RNA, 82 nt, Human
auuagguugagcuacaugaaauugcugauauucuaacuuuuuugacuuaaagaaacaucagcuucaugugggucaaccuaau

SEQ ID NO: 4100613 - RNA, 60 nt, Human
auuaguagcacacagagaucagagagacaucaaccucuccucucugcgaaugcugauagu

SEQ ID NO: 4100614 - RNA, 67 nt, Human
auuagucacacguggaaaauagaaacagguuuucagggagaagaagguuuugauuccacugaauaau

SEQ ID NO: 4100615 - RNA, 62 nt, Human
auuggcugcuuuacucugacggggcgauauuaaccuuucugcuuuucucuaaaggagccagu

SEQ ID NO: 4100616 - RNA, 82 nt, Human
auugggaagcagcugaucaccaguuucagguguuuucuaucuauuagaagacagccuuucccuggugccagcugugaccaau

SEQ ID NO: 4100617 - RNA, 78 nt, Human
auugggcagagaggagagaagccagagcucugugguucucacagaaccugccuuuacucuccuuaucaacaguccagu

SEQ ID NO: 4100618 - RNA, 64 nt, Human
auugggcauggcacuacuauuaucuccauuuuauagauguggaaaauugaggcucauguuaaau

SEQ ID NO: 4100619 - RNA, 58 nt, Human
auugggcuggccuucuggagaggccuucuggcuuaauccagaccuagggcaccccagu

SEQ ID NO: 4100620 - RNA, 80 nt, Human
auuggggugacagcggggccugugcuggggagccucacuuccuccccaccugccggcugccuccgcuauaucucucuagu

SEQ ID NO: 4100621 - RNA, 78 nt, Human
auuggguugauaggucucgggauuuguauaagguaaaaagcuuuucuuaaaguaaaaugggaccuauuucaacuggau

SEQ ID NO: 4100622 - RNA, 90 nt, Human
auugguaguggugguuggcuuuagaccugagacuguccuugacucagacauuucagauucaugaagugacaacauaaaacuacuucuaau

SEQ ID NO: 4100623 - RNA, 61 nt, Human
auugguuuuuggugaaaaggaguuaaaagauuucaaacuuaacuuuucaucaacagccaau

SEQ ID NO: 4100624 - RNA, 58 nt, Human
auuguacaaugccuggaacauuguaggugcuccuuaaauguuucagugcuuguccaau

SEQ ID NO: 4100625 - RNA, 68 nt, Human
auuguaguauuacacagauuaugacuuacccuuuagaagaagaagggcagaucuguagguacuaccau

SEQ ID NO: 4100626 - RNA, 57 nt, Human
auuguauauucaagccuaaucuaugccauacaguguucuaggggcuggagauacagu

SEQ ID NO: 4100627 - RNA, 69 nt, Human
auuguaucccccagguguuuaauaauggauccaugucaauccuaaaagaaguaucugguggacugcaau

SEQ ID NO: 4100628 - RNA, 109 nt, Human
auuguauguauuaucggacauguccguauauuuuggggacaacugaacuuaucccaugacacccaggccuuccccaaaauacauggacgugucccaucauacauauaau

SEQ ID NO: 4100629 - RNA, 58 nt, Human
auuguauucugcaccuuuguuacguacccgcaaguaucaaacuggugagaaugucagu

SEQ ID NO: 4100630 - RNA, 94 nt, Human
auugucaauacuuacuagaauguucaaaagcaucagugaagcucuaucuaaagcuauaaaaugauauuugaagccaucugaagauauuggcaau

SEQ ID NO: 4100631 - RNA, 116 nt, Human
auugucaccagccaagucuuacaaacaauaaggccuggcuuaucugggagggagggagcaggagcuggguggcaccuggcccagagagcagagcuuagugaguggcuggugacaau

SEQ ID NO: 4100632 - RNA, 64 nt, Human
auugucagagguggcauugggcaacgcaacuucagaguuccuuguccugccgaucucugagaau

SEQ ID NO: 4100633 - RNA, 60 nt, Human
auugucaucuagagcagugcuggacaaagcacaauccuccagccaaaucuggcugacagu

SEQ ID NO: 4100634 - RNA, 81 nt, Human
auugucugguaauuauguaaagaugcuccagugaaacaccauuuuuggcuuagggaaauauuuauauacuuaccagauagu

SEQ ID NO: 4100635 - RNA, 74 nt, Human
auugugagcuacuuuaauugcgaggaaggggagagagggucuuaacugcaccaucaaauuagagaagccaugau

SEQ ID NO: 4100636 - RNA, 79 nt, Human
auugugaugauaaaaugucuuugaguuuuuauaagagauuucauaucucuuaguuggagauuauuuuguaauuuacgau

SEQ ID NO: 4100637 - RNA, 74 nt, Human
auugugcaaugccagcuuuaaaugcaaauuuaagagcauuuaacucauaugcagaaggccugacauugcacaau

SEQ ID NO: 4100638 - RNA, 68 nt, Human
auugugccuuauugacugguguauuccaaggguuugaaauaguacuuggaacacaguaaaugcacaau

SEQ ID NO: 4100639 - RNA, 60 nt, Human
auugugcugaucugggagugcacggggccacaugcccuugcaauuugacgucagcacagu

SEQ ID NO: 4100640 - RNA, 87 nt, Human
auugugguugucuccucucuuuguuauuguagguuaaaaacauucuuuuagugucauuucaguggaguuuugggagauagccagggu

SEQ ID NO: 4100641 - RNA, 62 nt, Human
auuguguaauuuucagcucauacguggugagccauauuucugggcuuuuaaauuuucacagu

SEQ ID NO: 4100642 - RNA, 80 nt, Human
auuguguguugcauuauugucugaaaagguaaauauuuagguuaaauuaaaugacuuuguaggcugguaaaacauacaau

SEQ ID NO: 4100643 - RNA, 55 nt, Human
auuguguuacuggucucagucugacaucaggucuuugacucuuaaguggcucaau

SEQ ID NO: 4100644 - RNA, 128 nt, Human
auuguguuuuguaaaagcuucucaagagauucucauguacagccaggguugagaaguaugucccuagaaaaaagguuccaacuuugucauauauuauaaucacuugaggaauuuugaaaaauaccaau

SEQ ID NO: 4100645 - RNA, 77 nt, Human
auuguuaaguccccauauuauuaguagcuuguugcuauuagguacauaaguuauggauaaaauguuuacugaaugau

SEQ ID NO: 4100646 - RNA, 67 nt, Human
auuguuacuaauugauuuuugaauagggagcacauucccaugguucaaaauucaaaugguauacgau

SEQ ID NO: 4100647 - RNA, 94 nt, Human
auuguuacuagaaaacgguagcuaccaguauacauuauuucuauuucuauuacgagaugcugugaggaagcuaggacuauuucuugugcacaau

SEQ ID NO: 4100648 - RNA, 72 nt, Human
auuguucacuguccugcaacucuagagccugggaaguccaagaucaagguaucugcagauauggugucuggu

SEQ ID NO: 4100649 - RNA, 67 nt, Human
auuguucuguuauucugcucaguauagcaauugcaucauuguuucacagaaaggauaacauuaugau

SEQ ID NO: 4100650 - RNA, 57 nt, Human
auuguuuauaugaccugccucacaaaauuauugugaggggaaggcaugauaaauaau

SEQ ID NO: 4100651 - RNA, 58 nt, Human
auuguuuuccaaagaugcugcuuccucugcaguuuugcagguuguuuuuggauacaau

SEQ ID NO: 4100652 - RNA, 57 nt, Human
auuguuuuccuggcucugaugaguauuucauauggucaguucugcuagaaaaacagu

SEQ ID NO: 4100653 - RNA, 60 nt, Human
auuguuuuggucugugcauggaguuguuacuggaaacuucaugugucauuggagagcaau

SEQ ID NO: 4100654 - RNA, 116 nt, Human
auuuaaauuuuccaauauauuacuuuuucccuugaauaaagauaucuucauuaggauucagaaauuuuugcuuuaggggggcugcacccagaaguaguagaauaggaaauaggaau

SEQ ID NO: 4100655 - RNA, 117 nt, Human
auuuaacuuuuuggugacuuugcuuuucauuuuugagcaguuuuauaauuaagagggaccuaccacacuucuaaagauucucagaaaaaggcuauaagauacugaaagaguuuaaau

SEQ ID NO: 4100656 - RNA, 83 nt, Human
auuuaagaauucaggagugauguugguuaaguaguauguuauagcuuaauuaaacuacugaauauuaguucugaauacugaau

SEQ ID NO: 4100657 - RNA, 61 nt, Human
auuuaauuuagagcuuuuaaaaguugcuacagagcuagcuuuaugggagcuuagauaagau

SEQ ID NO: 4100658 - RNA, 57 nt, Human
auuuacagacguggauuagugcucgacaaauggagagcauuuuccaaggaaguaagu

SEQ ID NO: 4100659 - RNA, 70 nt, Human
auuuacauuuauuugagaagguuuugauugccaaaauaaagaaaaggaaaaacucucagaaaaugugaau

SEQ ID NO: 4100660 - RNA, 63 nt, Human
auuuaccucagagagaccaagcuuucccagaauugucuggcaccucuggcucugaggcugaau

SEQ ID NO: 4100661 - RNA, 78 nt, Human
auuuacuauuuguagguuuucuggguuuguaguacaauccucauguuuggauuauacaaggaaaauuuuauaguaagu

SEQ ID NO: 4100662 - RNA, 71 nt, Human
auuuacuuuaaugcaucauggaaaacucaguuuuaaaaacaugcaaagcuaugauguauuuugcugugaau

SEQ ID NO: 4100663 - RNA, 74 nt, Human
auuuagaauuuuguuagacuaauugaaucagacuauuaauaaaaagucaaauucagugugacaacauuguaggu

SEQ ID NO: 4100664 - RNA, 62 nt, Human
auuuagagcugugcugccacauguggacagaggcuaucucauuggacagcacaacucuagau

SEQ ID NO: 4100665 - RNA, 110 nt, Human
auuuauaucucuagccugacuauuccuugugcuccagaccaauauaugcaguucuuggauuggacugauugagaaggaaggggauccugaauguuacaauagccauaagu

SEQ ID NO: 4100666 - RNA, 97 nt, Human
cacacuagacugcugugccgaguggaaagaacaccagguugagacuuaaaagacuggauuuaauuuccaguuggcacugcaauuuauuagcugugug

SEQ ID NO: 4100667 - RNA, 82 nt, Human
cacacuagguacauauuaggauggcuuguauaccuucauuuaggagguguacaagaauaauuuuauauaugucauacaggug

SEQ ID NO: 4100668 - RNA, 63 nt, Human
cacacugauagauaaaacuauauuuucagguuuuccugaggucauguuuuuacuaacaguuug

SEQ ID NO: 4100669 - RNA, 66 nt, Human
cacacugucagguaaauaacacgggcuccguuuuguugucacgugauguuuucuccuggcagagug

SEQ ID NO: 4100670 - RNA, 66 nt, Human
cacacugugaacggacugaagcccacuuaacuguucacucuaaagugguucaguucguuacgugug

SEQ ID NO: 4100671 - RNA, 57 nt, Human
cacacuguucuuugcacugagaacaaugugacaaguuuuaagcaaaagaauggugug

SEQ ID NO: 4100672 - RNA, 56 nt, Human
cacacuuagcagcacccaagacaccucuucucggugcucugcggucugcuagucug

SEQ ID NO: 4100673 - RNA, 92 nt, Human
cacagaaagagaaacucagggggcagugccgugggagcgcugugugggccaggagcucgugcucccaggcucuguggucugcguccgcugug

SEQ ID NO: 4100674 - RNA, 74 nt, Human
cacagaaagaggcacuggcaaagcaaagucugguaccuaggucuccugacucccaagcuagugcucuuucuuug

SEQ ID NO: 4100675 - RNA, 86 nt, Human
cacagaaaggucuguuuccugcaugccaugucuguaagagucuugacuguggcccaggugcaagagacagacauccuuuuguugug

SEQ ID NO: 4100676 - RNA, 114 nt, Human
cacagaagagaccagagaagagccuccuggaggagagccugcacuuugaccaugcuguccggaugggugcagugcucuuuucugcaaaguguucacuucucugcuuuuucugug

SEQ ID NO: 4100677 - RNA, 80 nt, Human
cacagacaaagccaccccugagauguguaacagaugguggugacaguacugucuauaugcucucauggccugguccugug

SEQ ID NO: 4100678 - RNA, 63 nt, Human
cacagacccaguacuuacaaaccuaugggaucagcgagaccagucugugaucuuacugcugug

SEQ ID NO: 4100679 - RNA, 129 nt, Human
cacagagccccccggcgcgccugccgugcccccagcuccugcagcuggcucccagggagcagggacaccucuggagccaccaugucugccauggagcuguucacaggcacugggcugggggugccugug

SEQ ID NO: 4100680 - RNA, 68 nt, Human
cacagaggcggaaaauucugaaggaaacaugacuauuuguagcucagagcuauuccugcuucccugug

SEQ ID NO: 4100681 - RNA, 77 nt, Human
cacagauaaggcuuuguccccagcucaguucgcucccaucccccaccugugcauuccgggacugagccuuguuugug

SEQ ID NO: 4100682 - RNA, 70 nt, Human
cacagauauuuguguauucacugucaacugcagugcccugaacacagugaaugcccaagaaaagucugug

SEQ ID NO: 4100683 - RNA, 77 nt, Human
cacagauccuuaguuaagaacaggagugauauggaaagugauagacuacuguuagaauuuaacucaggaauuuugug

SEQ ID NO: 4100684 - RNA, 61 nt, Human
cacagaucuuugagaugauucuauuguguuuagacuaauaacuucaucuucaggauaggug

SEQ ID NO: 4100685 - RNA, 84 nt, Human
cacagauuuuaacauguaauugcugcuuuuucccaaaauaaggcccauuagcuggaaagcagcaacagcuguuagaaugcugug

SEQ ID NO: 4100686 - RNA, 58 nt, Human
cacagcagagggagccauugaaauuugagugaucuguuuggaugcaccuucugaagug

SEQ ID NO: 4100687 - RNA, 55 nt, Human
cacagcagccagaacauuuuugguaaaauggaagucaaauuaugucucugcugug

SEQ ID NO: 4100688 - RNA, 79 nt, Human
cacagcagcuuuaauaaacagcuccauuuagugccuccuccuuguaucuagggaggugagcuggucuggggcugcugug

SEQ ID NO: 4100689 - RNA, 70 nt, Human
caaaaguuacuuuguucucaagauaugucauucuuuugggaauaaauacuucuggugacaaagucuuuug

SEQ ID NO: 4100690 - RNA, 118 nt, Human
caaaauaaaugccaccugcaacauuauguauuacauucauugaagugauucauuuguggacaaaucaguugcuguguaauguuuuccauaaugucuggcacagcugguuuuuaauuug

SEQ ID NO: 4100691 - RNA, 67 nt, Human
caaaauagccuguuacucuucucugaucaguuaucugacaagauuuagcuuaaagggcuuuauuuug

SEQ ID NO: 4100692 - RNA, 84 nt, Human
caaaaucaagacugucccaggaagugagugucagucaaagguuuugaaaucccucaaauaguuacuucugcugucuugguuuug

SEQ ID NO: 4100693 - RNA, 128 nt, Human
caaaaugaauaaugcagggcaaagucugucuuugaaaagggagauagaaauugccuaauugcaauuuuccucauuguuucaaagucaaucuuuuuguucucugauauaucugcagauaguuuauuuug

SEQ ID NO: 4100694 - RNA, 69 nt, Human
caaaauugaguuuucauaaaauuagugucaauauuggugaacugacuguacuuuaugaguucaauuuug

SEQ ID NO: 4100695 - RNA, 103 nt, Human
caaaauuuugacccuguuuugacugugcccgaugacaaaauucacaggugugaaauuuuccacuuguggaauuauguuggcauucaaaaaacuggggauuuug

SEQ ID NO: 4100696 - RNA, 85 nt, Human
caaacaucagcaggguuugacuucuaauguucacagucuuuucuauggacuuaacccaauguaagaucaccucugcugcuguuug

SEQ ID NO: 4100697 - RNA, 76 nt, Human
caaacauucaaguacaagucuuuguguggauauguuuucauuucucuuggguaagagauuugugcuugaauguuug

SEQ ID NO: 4100698 - RNA, 85 nt, Human
caaacucuagagaucugaaaagaguauguaguuuacaaaugaaaguaaaggcgucuuuuagauuuuacaucuuucacugaguuug

SEQ ID NO: 4100699 - RNA, 60 nt, Human
caaacugcaacaugaaguguccccugaaucuccagccugcucuucuaccuugcagauuug

SEQ ID NO: 4100700 - RNA, 67 nt, Human
caaagaacacccagacguuguggaaggaaaaaaguucauggaucuuuuacaacauuuguguucuaug

SEQ ID NO: 4100701 - RNA, 61 nt, Human
caaagacacaugucucuuagauuagggcugggacauuccaaucuaccccaugcuguuuuug

SEQ ID NO: 4100702 - RNA, 81 nt, Human
caaagaccagcauagaaggaaagucauuugaaucugaggauaugguuuauuagaguuuucugucuguugugaauuucuuug

SEQ ID NO: 4100703 - RNA, 64 nt, Human
caaagagcuggaguuugcagcccuuucuaguucugaacccaggcguugcaaauguggcuugaug

SEQ ID NO: 4100704 - RNA, 68 nt, Human
caaagaggggcugccugccagcucaguggcccugccaucuccccugggcugcucagcccccucgcaug

SEQ ID NO: 4100705 - RNA, 60 nt, Human
caaagaguccagcacccucuccuuccagguauauaaacggugcauugcugggcuccuuug

SEQ ID NO: 4100706 - RNA, 61 nt, Human
caaagagugcuccugccagcuuucugguuugucuccggaaccagauucaggggcaacuuug

SEQ ID NO: 4100707 - RNA, 67 nt, Human
caaagaucauucucugguccagaugcucugagcugcacaaaucugaagacaaggaggguggcuggug

SEQ ID NO: 4100708 - RNA, 126 nt, Human
caaagauuaaguaucaggcacacagguuuuuaaugccuagauuauucuguuuuuauaauaaauuaguaaaugagauucuagccauuacaaaucuguguguuguugaaaacugucauuugaucuaug

SEQ ID NO: 4100709 - RNA, 77 nt, Human
caaagcagcacauuucccacccuugggaauucaggggaaacuuuguacagguuccuaggguggaagcaaucucuuug

SEQ ID NO: 4100710 - RNA, 79 nt, Human
caaagcagucauuuggcaccuacuguaugccucgacaaugggauggaugcuauuugggggcuacaugauauuuguuuug

SEQ ID NO: 4100711 - RNA, 129 nt, Human
caaagcaguuguugauuagcaguguuuagaauucagauuguagaagcagagaccuacauuacaguccuggcuucacaacuucuuaauucuuagaccuugggcaaguuacuuaacauacuucagccuuug

SEQ ID NO: 4100712 - RNA, 69 nt, Human
caaagccaggugugauuucaucugagguccaugaauggcccaggagaucuggaucucguccugguuuug

SEQ ID NO: 4100713 - RNA, 66 nt, Human
caaagccggcugaugaaauuugagcagcacagggcugcucuagagagcauuagucacuggcgaaug

SEQ ID NO: 4100714 - RNA, 85 nt, Human
caaagcuggagcugcagugaacuguuuugucccccugguaaaggagcuuggcuggagaguuuauugcaguugccccaaaguucug

SEQ ID NO: 4100715 - RNA, 70 nt, Human
caaaggagaguagguuacuccauuccucuguucccuuuuggaaauggaguacuuuuuuacuuucucugug

SEQ ID NO: 4100716 - RNA, 80 nt, Human
caaaggaguaacuaacagucauuaaaagaacuccuuuugaggugugaauuaaacuguugaguuuuucuuaaacuucugug

SEQ ID NO: 4100717 - RNA, 77 nt, Human
caaaggccaauuugugcuugcagauaagaagucugauuaaaaagucagcuuugcaaguuagaaaauggauaccuuug

SEQ ID NO: 4100718 - RNA, 58 nt, Human
caaaggccauuacuugcuuuuagacucuguguguugagagauaaggagaugguuugug

SEQ ID NO: 4100719 - RNA, 62 nt, Human
caaaggcugccacuguggcugugcauuuuaugcauugcacagagacauuugggcugcuuuug

SEQ ID NO: 4100720 - RNA, 58 nt, Human
caaaggcugguagaaugagccaauaaacccagguucaacaauuaaguaucagccuuug

SEQ ID NO: 4100721 - RNA, 118 nt, Human
caaaggcuuguuuuauuuuauuuguuuaguucaauauagcccuacugaucugacauccccuuagaguuuggguagaguuuaaugaaaaaucugaaaaaugaaauaaauucuuccuuug

SEQ ID NO: 4100722 - RNA, 66 nt, Human
caaagggaagauaugucccucugugaggcuuucuguccucuucagacaaggccaucuuucauuuug

SEQ ID NO: 4100723 - RNA, 68 nt, Human
caaagggcauuuuagugaacugcuaggguacucaaccuaucaucacauuuaauuaaaaugucauuuug

SEQ ID NO: 4100724 - RNA, 83 nt, Human
caaagguagucaggauagaacaggcauaagcauuugcauuauuuuaguaagcuuugugauggcuuccugccugauuacuucug

SEQ ID NO: 4100725 - RNA, 83 nt, Human
caaagguuucaugcaauguuauaucuguauguauaugcauguguguguuuucaucacagaauguaacacauuuguuauuuuug

SEQ ID NO: 4100726 - RNA, 73 nt, Human
caaaguaaguauguggcuugaagucaugucaacacugaguuugaaucacagcuucugccauuugcuagcugug

SEQ ID NO: 4100727 - RNA, 65 nt, Human
caaagucacaucgauuauaaaauuuggacucugaguuccccgaguuaugguuuggugugacucug

SEQ ID NO: 4100728 - RNA, 68 nt, Human
caaagucuccauggauuuggaaaugaugccauugucucuggauuaccgcugaguccuauggagaguug

SEQ ID NO: 4100729 - RNA, 58 nt, Human
caaagugccuguaccacuuugcugaccaaccagcaauguaagaguuccaguuacuuug

SEQ ID NO: 4100730 - RNA, 56 nt, Human
caaagugcuaggauuauaggugugagccacugcaucugacccuacucagcacuuug

SEQ ID NO: 4100731 - RNA, 79 nt, Human
caaagugcugggauuacaggccugagccaccacggccagccgugaaguuuuaaguaggggcacuguggaccagauuuug

SEQ ID NO: 4100732 - RNA, 60 nt, Human
caaagugcugggauuagugcugggauuacacucgugagccacugugcccaggccacuuug

SEQ ID NO: 4100733 - RNA, 57 nt, Human
caaagugcugggauuauaggcaugagccacugggccuggccucuucuaguuacuuug

SEQ ID NO: 4100734 - RNA, 67 nt, Human
caaaguggaggcucuggggccagggucccggaaaacauuaacaaggcccccagaugcuucuucugug

SEQ ID NO: 4100735 - RNA, 68 nt, Human
caaauaagagcuaauaaacuuccuguacacuagcuaugugcugggcauuuuuauggcuccuuuauuug

SEQ ID NO: 4100736 - RNA, 58 nt, Human
caaauacgugcacauacauacaugcauacguguguauguauguguguguauguguaug

SEQ ID NO: 4100737 - RNA, 80 nt, Human
caaauccuaucagucaucuugggagucugggaacauguaaauaaaucauguuucucccccaugauaauuucugugagcug

SEQ ID NO: 4100738 - RNA, 78 nt, Human
caaaucuaggaugcauguagugcuuaagaauauauuguuccugguacaagaauagcuugaaacucauguuuagauuug

SEQ ID NO: 4100739 - RNA, 79 nt, Human
caaaugaaaugcuucucugaaaauacucuugacacuuucccauauuggugugugugcccagguaaagcauuuccuuuug

SEQ ID NO: 4100740 - RNA, 66 nt, Human
caaaugauaaggcuguagcuucagauguagauacauucaugccucugaguuauguccuuacauuug

SEQ ID NO: 4100741 - RNA, 57 nt, Human
caaaugcagucccuuuguugcuaugguaauacauuugguuaggggggcugucauuug

SEQ ID NO: 4100742 - RNA, 58 nt, Human
caaauggagggacagagaccagaaagagcucccuggaaucucugaguuuccuaauuug

SEQ ID NO: 4100743 - RNA, 85 nt, Human
caaauguauacauucuggcaacguuuucuauagguaaagaugauuguuuuacagagguauguaugucucugaguguaaauauuug

SEQ ID NO: 4100744 - RNA, 90 nt, Human
caaauuagguuugugaaguggagugguaugguuuacugaugauaagcagggcuuugagaucauacuacuuguacuaaaaaccuggcuuug

SEQ ID NO: 4100745 - RNA, 84 nt, Human
caaauuggugguaagcagaaguagugggaccucaugcaagucugcaggauugagaagcccacacucuuuccuuuccaccauuug

SEQ ID NO: 4100746 - RNA, 112 nt, Human
caaauugucaagaaggagaggacaacuaaacuggcaacagaacuuggauaccaccuguuacucacugcuauaguuuggauguuugucccuguaaaccucaaguugauauuug

SEQ ID NO: 4100747 - RNA, 114 nt, Human
caaauuguccauuggaucucauuuucuagauaauggcuuuaggguuuuauuugcaucugugcaaagaugugucuauucaacaugaaaacauuagugaguucagucaauaguuug

SEQ ID NO: 4100748 - RNA, 58 nt, Human
caaauuuuguguguucucuagugcccuucagggccuuaaaggacaggaacaaaguaug

SEQ ID NO: 4100749 - RNA, 63 nt, Human
caaauagauuguucaauccugaugaaaugcacaaaaauauuggguuagugagcuuuuuauuug

SEQ ID NO: 4100750 - RNA, 80 nt, Human
caaauauggcccuauuuggaaauagagccuuggcaaauauagucgaguucuacucaauuuaggugggcccuaauccagug

SEQ ID NO: 4100751 - RNA, 74 nt, Human
caaauauucuugaagauugauccaguuugaagcauguugugcauggguuuacuguucaacuugcaaguaauuug

SEQ ID NO: 4100752 - RNA, 64 nt, Human
caaaucagaaggaagaagucaugggagauugcucaaucauguaaugucacuuccucccucuuug

SEQ ID NO: 4100753 - RNA, 56 nt, Human
caaauccauagcuugcauuaggaugcacuuuuagcguuauacauucuauggauuug

SEQ ID NO: 4100754 - RNA, 111 nt, Human
caaaucugauggauuuucucuaguggcuguccuggcucuaacuggaaaaggauucugagguuguaucugggcuuaggcaggaagagaggugaaaucuauuagcaacauuug

SEQ ID NO: 4100755 - RNA, 72 nt, Human
caaaucuucacauucuucccugacuucuuaggcagcaaaugucaaagaaacgaagugaugugagaggaggug

SEQ ID NO: 4100756 - RNA, 74 nt, Human
caaaugaaaauggcgucuuggaaaaacagcacauacaugguugcuucaaggauaucgcccaauaccuucauuug

SEQ ID NO: 4100757 - RNA, 127 nt, Human
caaaugaaaugauguguaggcauaguauuagguauuacaguaaucuggacaugauuuaaagaacuggauacaggagguuguuugcagguuauaugcaaauacuaugcuaauuuauaucauugacuug

SEQ ID NO: 4100758 - RNA, 69 nt, Human
caaaugaagcaguccaucugcucugagauauuaagcccuauauuaagauuguagaaacuguagcauuug

SEQ ID NO: 4100759 - RNA, 79 nt, Human
caaaugaagguucagugccuggaacaggguaggaguccagcuauggccgccucuaugccaggcacugggcaagcgcuug

SEQ ID NO: 4100760 - RNA, 64 nt, Human
caaaugagaaaaaggagaggagccauaaagugacuugcuuaagguuacauccucuuccucuuug

SEQ ID NO: 4100761 - RNA, 61 nt, Human
caaaugagauucuaucuccaggcauaaguuauguguuaagucuggguguaaaucuuauuug

SEQ ID NO: 4100762 - RNA, 58 nt, Human
caacuauagggagagugguuaacaugguauaccauaugaaucuugcucccuaggguug

SEQ ID NO: 4100763 - RNA, 100 nt, Human
caacuauuuacacuucaguauguagaacaaguguuuuaugcauaguucauauuuaaucacauggaauauugaauagacaugcaaucgaagguggauauug

SEQ ID NO: 4100764 - RNA, 61 nt, Human
caacucagaagauauaaugacucagacagacuuuagucugacuuauuuccuuuuugggcug

SEQ ID NO: 4100765 - RNA, 85 nt, Human
caacucaggcucaggcagguggcuggcuaugguuuguaucugauuuguuugcauuucuguggcaggcagcugcugugacugguug

SEQ ID NO: 4100766 - RNA, 76 nt, Human
caacuccuggauucauggauuucuugaaggguguuuugugucucuaucuccuucaauucugcucugaucuuaguug

SEQ ID NO: 4100767 - RNA, 126 nt, Human
caacucugagaucauuugcaucguccuuucuggugucaugucauacuguucuucccaggaggacagccuccuccuggcucagaguaugucaucgccugggagggggaaggcaguuggaaggguugg

SEQ ID NO: 4100768 - RNA, 59 nt, Human
caacugcuuggaggaauacugcugcauauaucuuuuguguuuuccuucugaguauguug

SEQ ID NO: 4100769 - RNA, 71 nt, Human
caacuguaaacuagggcugauaagggugcccaaguacacacuuucauaaugccagguuuguaauccaguug

SEQ ID NO: 4100770 - RNA, 57 nt, Human
caacuguuugaacagauggcuuuuaccauguaaaacauggcauuuguugaucaguug

SEQ ID NO: 4100771 - RNA, 81 nt, Human
caacuuuaccaguguaccacccuaaaguaaugguuuucaaaugcaguccugaaaacuggguuguggucaguggugggguug

SEQ ID NO: 4100772 - RNA, 74 nt, Human
caacuuugaacaauuccucaagcuguacuguucaaccauuugauucaguauuuucaggauuuggaagcagguug

SEQ ID NO: 4100773 - RNA, 84 nt, Human
caagaaacaguuaauugcuuucaguuucuccaucuucaagaaagggacaaaaagguaacugaugaagcuguuucuguuuucuug

SEQ ID NO: 4100774 - RNA, 58 nt, Human
caagaaacuuuauucugccauaagcuaugugacuuuggacagaauauuaggucucuug

SEQ ID NO: 4100775 - RNA, 57 nt, Human
caagaacaaugguuguaagaaaucuauuuuagguuuuucuaggaccaugugauuuug

SEQ ID NO: 4100776 - RNA, 75 nt, Human
caagaagccugugcuuuguucucaaguuauuccaucaaauaagaaugucuauuugcuacaaagccaaacuuuuug

SEQ ID NO: 4100777 - RNA, 55 nt, Human
caagaaggcuauaugggccagggcuucagugauucaugauguccaagccuucuug

SEQ ID NO: 4100778 - RNA, 57 nt, Human
caagaaggugugcuuuauauugcuuaugaagcccauuuugaagcaauaccauuuuug

SEQ ID NO: 4100779 - RNA, 69 nt, Human
caagaauagcagauaucccagcugauuucuguagcaggcagaaguguucuuccuaucugcuguucucug

SEQ ID NO: 4100780 - RNA, 77 nt, Human
caagacagcaauccuugaggucuuugagcaaacgcaagaaccguccuucuccugcugcuggugaccucugcugcuug

SEQ ID NO: 4100781 - RNA, 60 nt, Human
caagaccaggcuccuggaguccaccucgccccuagcugcaugguggccagccuggucuug

SEQ ID NO: 4100782 - RNA, 85 nt, Human
caagacccauugguuguuagagguucuguaauaaacuaagacauguaugauacuauugaaucauugucaaucaagcauggucuug

SEQ ID NO: 4100783 - RNA, 67 nt, Human
caagacuguguuuuaagggguuagccucaacaugauuauauggacaauacuuugaauuacagccuug

SEQ ID NO: 4100784 - RNA, 64 nt, Human
caagacuuauuuugucaucuccagaaauauugaggagaguagaacugacaagauaauagccuug

SEQ ID NO: 4100785 - RNA, 59 nt, Human
caagacuuuggaggaauuuggacuaaguuuaaaauuacucccuuucucaaaagaucuug

SEQ ID NO: 4100786 - RNA, 63 nt, Human
caagagcaucccugcauccagccaucacagugugaagugaguuucagaugaggagaugccuug

SEQ ID NO: 4100787 - RNA, 69 nt, Human
caagagcauuuaguuagcuggucuaggccuugcuaguugggccagcucaguucucuugaucgucucuug

SEQ ID NO: 4100788 - RNA, 62 nt, Human
caagagcccugacggggacagaugggugcuggcugucccccucugucaccaucaggguggug

SEQ ID NO: 4100789 - RNA, 80 nt, Human
caagagcucccugucacgagaggcacagaauagagcuuugucucuuaaaaaggcuugauugcuucuacgugacugucuug

SEQ ID NO: 4100790 - RNA, 89 nt, Human
caagagcugaggcuggauaccaggagacagggggccacagagcccuccugugcaugcaucucccuaguguuccaucggcccagcucuug

SEQ ID NO: 4100791 - RNA, 56 nt, Human
caagagcuuuugggaacgcugcagcaggagacuugcaggugugcagagggcucuug

SEQ ID NO: 4100792 - RNA, 87 nt, Human
caagaggaaggaguggggaaagccaggacagaaacccaggccugggacucucagcugacugcuuuccucgcauugccauucaccuug

SEQ ID NO: 4100793 - RNA, 59 nt, Human
caagagggcuucagcggugaugcccucaauagucucauucagggugcuggggccccuug

SEQ ID NO: 4100794 - RNA, 61 nt, Human
caagaguugcuuaucagagucuucaaugucaugauuauaaaggcucagagagaaacucuug

SEQ ID NO: 4100795 - RNA, 61 nt, Human
caagaguuucucucugagccuuuauaaucaugacauugaagacucugauaagcaacucuug

SEQ ID NO: 4100796 - RNA, 63 nt, Human
caagauagauugacuuuguuugaguaaaaugguuuaggucuaaacacagagugagucugcuug

SEQ ID NO: 4100797 - RNA, 84 nt, Human
caagaucagguaaaggcacuagaaguuaccuuuuuuguggacgcuuaagaaaggugacuggagaggccccaaaaauucaucuug

SEQ ID NO: 4100798 - RNA, 92 nt, Human
caagaucucacagacuuuagaaaagcauccauagauaguacauuauuuauuugauugcuuuucugaaccgugccuuugagaaaaacucuuug

SEQ ID NO: 4100799 - RNA, 63 nt, Human
caagaugaaauugugauauuuuaccuuuuuuccuccuagguuaaguagaucacuguucucuug

SEQ ID NO: 4100800 - RNA, 79 nt, Human
caagaugguucacauucaaccaggaagaacaggcaaggcauggcaucccaucugcugucuuuucugggugagucuuuug

SEQ ID NO: 4100801 - RNA, 67 nt, Human
caagauucuggccaauucgguuccugaugaagaaccccuucauggcuugcagauggccaccuucuug

SEQ ID NO: 4100802 - RNA, 65 nt, Human
caagcacaggguguggcugcagugugaggucucagagcccuggaugcacagccauacccuccuug

SEQ ID NO: 4100803 - RNA, 56 nt, Human
caagcagccccaacaugaggaugaaucguauucccagcuugcaaauggguugcuug

SEQ ID NO: 4100804 - RNA, 58 nt, Human
caagcagguuaugaaauauagaaagccuacugguuuuccugagucacaaaaccucuug

SEQ ID NO: 4100805 - RNA, 77 nt, Human
caagcaugcacgcucguggcaguaaugacguguggguguacccaggcuucacucgacaugccaaugaugcaaacuug

SEQ ID NO: 4100806 - RNA, 68 nt, Human
caagcaugcaucuuuucaagguauuucuaccagcaugaguggaaauggcuugcagacaugcuugcuug

SEQ ID NO: 4100807 - RNA, 129 nt, Human
caagcauguggaacaauuggagcucuauuaccuugcugccaggaguguagagugguuuaaccacacuggaggacuauuuaguaguucugauaaagguaaacauagaucuaccuuaacccuaugucuuag

SEQ ID NO: 4100808 - RNA, 58 nt, Human
caagccacucacaauaacuguccuuaucaguagggacuguuugugugagauguguuug

SEQ ID NO: 4100809 - RNA, 70 nt, Human
auuagguugcugcaaaaguaauugcgguuuuugccauucuuaauggcaauuacuuuugcagcaaccuaau

SEQ ID NO: 4100810 - RNA, 123 nt, Human
auuagucauauaguaauuaagauugcauaugauggcaugauuucuauauuuuuaacuaugauuauaugcuuuagaaaugaguaaauuagacacuauagugugcaucuuuacauauauacuaau

SEQ ID NO: 4100811 - RNA, 62 nt, Human
auuaguggcauagcucaaacuggaauugaaaucuguuugaguccuaaagcugugcccuuaau

SEQ ID NO: 4100812 - RNA, 81 nt, Human
auuaguuagaugcacuaugcaauaucuauuugauggaauuccuucagccauugaaagcgauacuguagaggcauagcuagu

SEQ ID NO: 4100813 - RNA, 78 nt, Human
auuauaaagagauugauguguaucaguguguuguaaaagaauguuuaccaugcugugacacaguaguuaccuuugaau

SEQ ID NO: 4100814 - RNA, 62 nt, Human
auuauaaauggcaauuuaguuuauuuagacaauaucuuuggaugaaauauugcauuuaugau

SEQ ID NO: 4100815 - RNA, 66 nt, Human
auuauaucaugcuauuuuaguaucugcuaccucaaaagaauggcagcuagauaguguguuuauaau

SEQ ID NO: 4100816 - RNA, 104 nt, Human
auuauauuaagaugcaauaauuucuaaugugucuuggaguuuuaaugucauuuuaugauguuugaacacuaaggcuauuucuauaauugucaaauuaaucugau

SEQ ID NO: 4100817 - RNA, 104 nt, Human
auuauccuccgcacauagcaagaaaucuagaagucaguggaugcugaguacauauuuacugacuauucuuugggaacuugguaugugcuaggaauuggggugau

SEQ ID NO: 4100818 - RNA, 58 nt, Human
auuaugaggcauauuugcaaaguaugaccccagaugucgcaaaauaugaccucaaagu

SEQ ID NO: 4100819 - RNA, 68 nt, Human
auuauguuuuccccugcaguggaauaauuuuaaaauuccaauugcuuuuccaagggcagaauauuaau

SEQ ID NO: 4100820 - RNA, 58 nt, Human
auuauucaaauucccacuauacauugugcguuauuguagagcuuggggauuuaguagu

SEQ ID NO: 4100821 - RNA, 60 nt, Human
auuauucuuuaaguugugaaucuaagacagaugacuauuuuagcauauuuaaggaaugau

SEQ ID NO: 4100822 - RNA, 60 nt, Human
auuauugcaaaggaagagcuugaaugaguaauuucucgucgguauucuauugacaguagu

SEQ ID NO: 4100823 - RNA, 64 nt, Human
auuauugccuuaggagugcauaucauugaauaucuucucgauggaucuaccuucaggcucuggu

SEQ ID NO: 4100824 - RNA, 62 nt, Human
auucaaaguaaggguuaaucuacuuuugguagguuaaaaguagaacauuuucuuaucugagu

SEQ ID NO: 4100825 - RNA, 85 nt, Human
auucacaaaguuggagcacuauaauagagauuuucaauaauauauguuaaaaggguuuuuaugugaugucuugcaacuugugaau

SEQ ID NO: 4100826 - RNA, 74 nt, Human
auucacaccuccacaggagcugcagugcucaauaaauguuugaugaaucagugaaugagcuccucguggugaau

SEQ ID NO: 4100827 - RNA, 84 nt, Human
auucacaucacugggcucccaggcuugucauuugaucaggcucucaucugcaugucaaugaggcuuagagcccauggaaagaau

SEQ ID NO: 4100828 - RNA, 129 nt, Human
auucacugguguuaggaacugcuaaguuaaguaguacucucuucacugcgggcucugagaaaggagggcucuguuauucaugaagaggugacauuugacuaggacccaggauccaugaauuuuuugaau

SEQ ID NO: 4100829 - RNA, 62 nt, Human
auucagaagcuauucuuaguucuaaggaauauaaugaacuugagcuuugaguccuacugaau

SEQ ID NO: 4100830 - RNA, 87 nt, Human
auucagaaguuuccagucuaguaaggagacaagguaugaaucagaagaaaugccccucacuagcucacugaaacucuaaucaugaau

SEQ ID NO: 4100831 - RNA, 95 nt, Human
auucagauaguuauugacauuucauuauauagacuuuucaguaccccacauaauaauggcugaagaaauaugauugcuuaauaaaaggucugagu

SEQ ID NO: 4100832 - RNA, 80 nt, Human
auucagcagcuuccuugguugggaguguggaggguggguggaccagcuccugugcaccuccagcggcagccacgcagaau

SEQ ID NO: 4100833 - RNA, 85 nt, Human
auucagccuaguauuuauaaucaugcuuaagucuaacuuuguauucacuuagggguuugggccugaucggaauaaggagcugaau

SEQ ID NO: 4100834 - RNA, 60 nt, Human
auucagcucagacagagaccgugugcugcaggugaggaacacaggcuuuggagucugaau

SEQ ID NO: 4100835 - RNA, 55 nt, Human
auucagcugucaccaguuccuagaaucagaguuaaagcuaggugaccagcuggau

SEQ ID NO: 4100836 - RNA, 82 nt, Human
auucaggaccaagacugcagcagaaacaucuaagcugaauugucaucugucuuuguuuauugcugcaauugugccacugaau

SEQ ID NO: 4100837 - RNA, 94 nt, Human
caagggauggaggcauccucuagaagcuggaaaaggcaagaaacggauucuuuucuagaagcuccaggaggaaugcagcucuguugacaccuug

SEQ ID NO: 4100838 - RNA, 101 nt, Human
caagggcacgugaucccuucuugcccugaauuccucaggcuguggacucccugggaccacaaguuugaacuucuaggaaagaagggacucagguuuuuuug

SEQ ID NO: 4100839 - RNA, 55 nt, Human
caagggcagcagccucaagcgggacacgcugcucggggagaaggagcugccccug

SEQ ID NO: 4100840 - RNA, 62 nt, Human
caagggcucuuuugaggaauguccuaucaguugcaggagagcauuuaccacuggagcccuug

SEQ ID NO: 4100841 - RNA, 63 nt, Human
caagggcugggcuagggaggcaguucccagagcucugcugucccuucccaagcccagccucug

SEQ ID NO: 4100842 - RNA, 110 nt, Human
caagggguugaguuguacuggccagugacuccgggagccaggagaggcugcuccuuggagcccagcuuccucacuaagucauaaaugagccucuugcgacgggcuccuug

SEQ ID NO: 4100843 - RNA, 101 nt, Human
caaggguauuggaaaguuuaauuguauuuugaaauucuuugcaucugucaaagaguaaagacaugcaaagucuaauuaggagcgaugaguuaguauucuug

SEQ ID NO: 4100844 - RNA, 94 nt, Human
caagguauguggcuguggggcugaguggagccagaagggcuggaucuuguaccucucuuccauguuucagccccauccuucaaucaucuucuug

SEQ ID NO: 4100845 - RNA, 59 nt, Human
caaggugcagcguugucaagcugaauccuaauaaugugcgcaacggacccugccccuug

SEQ ID NO: 4100846 - RNA, 57 nt, Human
caaguacaaaaugauauuuagucaauaaauauauauugaauaucuauugugugcuug

SEQ ID NO: 4100847 - RNA, 98 nt, Human
caaguagccuuuaaagauaagcuguacaauguggccaguguuaauaugacaauuuguuaauggacuaggcaguuguaaucaguguuaaaaauuacuug

SEQ ID NO: 4100848 - RNA, 69 nt, Human
caaguauuuauugagcaccuacuauguguccagauacuguucugggcacugggaaugcugaugggcuug

SEQ ID NO: 4100849 - RNA, 67 nt, Human
caaguauuugcggaguuccacguuugccagcuaggaucaaauccccgugguagcuagccaauacuug

SEQ ID NO: 4100850 - RNA, 55 nt, Human
caaguccagggccaugaaguugcacaccuccaggugguugguggcccuggaguug

SEQ ID NO: 4100851 - RNA, 56 nt, Human
caaguccgaguuucgggauuuggggagggguccugcacaccuugagcuuggaaaug

SEQ ID NO: 4100852 - RNA, 90 nt, Human
caagucuaaacugcagcuuaaaggaguucaauaaauuucaaguuguuuuuaaugucaaaggguugaauuuagacaagcuguguugacuug

SEQ ID NO: 4100853 - RNA, 125 nt, Human
caagucuucagguacuucgauacuguucuacuaguagguagagucuaugucccuuccccuugcaccugaggggcuucuguaccuaccuggaagaauaggacacaaaggaaguggcuaucaguuug

SEQ ID NO: 4100854 - RNA, 55 nt, Human
caagugaaguaaaggcagacaccuauuccagguucaaguuugcuacauucacuug

SEQ ID NO: 4100855 - RNA, 63 nt, Human
caagugaaugaugugaaguguaaaccaaccauuguuguguuucauguuacugucauacacuug

SEQ ID NO: 4100856 - RNA, 62 nt, Human
caagugucaggagaagagaagccacauccaucuguccuugacuucuuuguuccuuacauuug

SEQ ID NO: 4100857 - RNA, 78 nt, Human
caaguguuuaugaaauuucaggcauuuugagaaauuugcauguacucaaaagucuuguuacguuccauuguucacuug

SEQ ID NO: 4100858 - RNA, 57 nt, Human
caaguuuguggggcaacagcaggugaagagccagcuucucucuguggucccauuuug

SEQ ID NO: 4100859 - RNA, 116 nt, Human
caaguuuuucagugaugcauguuaacaguuagguccuaaaauucuguggugcuaauucucccauacccaauggugcuuuuguggaugcuaacugcacacaugcugaacaaagcuug

SEQ ID NO: 4100860 - RNA, 78 nt, Human
caauaaucuagaaguuuauagaugucuguauuauaaauuuuaauugguaguggguggcauuuauaauuuuagucagug

SEQ ID NO: 4100861 - RNA, 128 nt, Human
caauaaucugagucuauuucuacguacuuauuagauacacagauuuccacuuaguuuccuaacagaaguggggaugguguaggugauguagaguccuggguaggaguauauuuuagaaaccccuauug

SEQ ID NO: 4100862 - RNA, 90 nt, Human
caauaaugcaacuucagugcgauucugcagauuuccuuccgaagugagagaagaaauagaaucacauuuugauaagauauugcauuguug

SEQ ID NO: 4100863 - RNA, 65 nt, Human
caauaauggugcaucaauauagguucauugauuguaacaaauggaccacucuggugcccauguug

SEQ ID NO: 4100864 - RNA, 100 nt, Human
caauaccuggguaauaagggacugacucgagaugggguuccagcuacugcaaugaauuucccagcuuugaucaguuuucaccaguacuuucgugguauug

SEQ ID NO: 4100865 - RNA, 70 nt, Human
caauacugagauauuaaugagcaaguaagugaaugaauuuuuucauucagcaauuauugauugaguguug

SEQ ID NO: 4100866 - RNA, 89 nt, Human
caauagaauuucucaaugaaagagcaugcauuuuaaaauuuaauuaugugcauuugaaaugccuuaucauugagacagaaauuuuuuug

SEQ ID NO: 4100867 - RNA, 93 nt, Human
caaucauuuuguaucuccagccaggaacacaaugccaagcuuggcuccuccaaacuuggcauuguguuccuggcuggagauacaaaaugauug

SEQ ID NO: 4100868 - RNA, 73 nt, Human
caaucuaaucuaucaagcaacaaagugcucagccuucuaaccuuggguacguuguugguugguugguuaauug

SEQ ID NO: 4100869 - RNA, 78 nt, Human
caaucucuguguaugcguguuugugcauacucacuaaaacauuuggaaggcuguucacuaacauguuaacaaagguug

SEQ ID NO: 4100870 - RNA, 70 nt, Human
caaucugcucuguuguguuuuucuccagcugcuuaaauacaagaagagagacagcacacaguguggguug

SEQ ID NO: 4100871 - RNA, 80 nt, Human
caaucuucacaugauguccgugcugugguuucuucucuguguccaaauuccuccuuuuuagcaggacaucaguggaauug

SEQ ID NO: 4100872 - RNA, 57 nt, Human
caaugaacccuucaagcucugauuugucagaacucagagaaacagcaggguguguug

SEQ ID NO: 4100873 - RNA, 72 nt, Human
caaugaauaaguauaugggaaauagaaggaaggggucagguccaacuuuugaugaaccuauauaauuuguug

SEQ ID NO: 4100874 - RNA, 82 nt, Human
caaugaauccuucaaucauucuaguugucuuccguggccugcaauacagagccuugaagaucuggaaaauugauguugguug

SEQ ID NO: 4100875 - RNA, 73 nt, Human
caaugaaucuugcuguuugggagggcucugucguauaaauggaagcuggcucuuauaaauauuugguuaauug

SEQ ID NO: 4100876 - RNA, 60 nt, Human
caaugaggaacacugaacuccagacacuaggcugggcauugugcauguguucucccauug

SEQ ID NO: 4100877 - RNA, 116 nt, Human
caaugccaaaagagagacaauuagguuaagagcaagaagacacauuuauaagucuuuccuuuuguacuucuuguucuuucuaacuuaagauguuguuacccaugauuugugcauug

SEQ ID NO: 4100878 - RNA, 81 nt, Human
caaugccaaaaguacagugccagacuucuagguggucccaacaugaugacuuggaggggauggcauucuuuuggacauaug

SEQ ID NO: 4100879 - RNA, 71 nt, Human
caaugccagagggcuugguuugggccaagauaucuugcugcccuuaaaacaaaguccaggcucuggcaaug

SEQ ID NO: 4100880 - RNA, 60 nt, Human
caaugcuuguggagugccugcugcaguccaggccugggcuaggugcuuccacacgugcug

SEQ ID NO: 4100881 - RNA, 77 nt, Human
caauggaagaguaaagugcagaacuguucucacuaaugaacuuuagugagaaauguuuguuuuuacuuuugccagug

SEQ ID NO: 4100882 - RNA, 57 nt, Human
caaugggcacuagggccacccaugucaggcaggagguagggagcccagagcccagug

SEQ ID NO: 4100883 - RNA, 78 nt, Human
caaugggugucucuguguccuccagggagaugugaagaggauuuuacaucucccuggaggacacagagacaccuauug

SEQ ID NO: 4100884 - RNA, 122 nt, Human
caaugugcuggccauggagaccucaguuaauucuacagggaacucuggagcugggauggcccuccagagcuguccuacugugagagagcugggccuuugcaucccccaucagccagucauug

SEQ ID NO: 4100885 - RNA, 130 nt, Human
caauguuuaauaaauauuuuuaagugugcguuuuuccuuucucaagagccggcaauccauccugauauugccacaucaaugugcugagcuucuucaaggagaucaaugugcagacuguguauuaggcuug

SEQ ID NO: 4100886 - RNA, 63 nt, Human
caauuagcauuucccauauaaauuucauacuauaaaggagguuguaauggauaaugcaaauug

SEQ ID NO: 4100887 - RNA, 72 nt, Human
caauuagucacaaagucacaauaauuaaccuacaauuagguuaaauauaguugcuuuccagggaacuaguug

SEQ ID NO: 4100888 - RNA, 129 nt, Human
caauucuuauaauuauaugggucaccuggaccauuuuggucugggcaaauccuucugaucuguagucagcuggugguuuggcuggggcugggugaucuaggauggccucacucauaugucugguaauug

SEQ ID NO: 4100889 - RNA, 69 nt, Human
caauucuuucagcugcauuugugguucaaauagaagcaaggaaugcuauaaauguucugacaaggauug

SEQ ID NO: 4100890 - RNA, 55 nt, Human
caauugcauauauaugaggccaugugaaguuguuccaugguucauuuaugcuuug

SEQ ID NO: 4100891 - RNA, 75 nt, Human
caauugcugguauuuuauacacacuuagacuauacaugauguacucagugcuguguaaauguauuacaguauuug

SEQ ID NO: 4100892 - RNA, 115 nt, Human
caauuguuccuaacuuccagugccacuuacagaauuggguggcugguugcagcucuagcuaccugugccugcugcaaaccugccaccugguggacauugcugaagcugacaauug

SEQ ID NO: 4100893 - RNA, 64 nt, Human
caauuguuuuccauuuuuguugugucagccuggcugcagggcaaauguggaaaggagaguuuug

SEQ ID NO: 4100894 - RNA, 85 nt, Human
caauuuaauauguuuguuauacagcaacugcagagcacagaauuuuguacucuuuggauguuuaugauaagguacacauuauuug

SEQ ID NO: 4100895 - RNA, 74 nt, Human
caauuuauucucacagauauuugcuucagguggggugacuccacuuuauguuugauaucuaugggucuagguug

SEQ ID NO: 4100896 - RNA, 104 nt, Human
caauuuccucccucugagugggaaggaacuucucuuggaaggaguuuucuugcuuuauuuccuacaauuagagccucuuuucuacuugacuuaaggguuuuuug

SEQ ID NO: 4100897 - RNA, 74 nt, Human
caauuucuuucucuauuuuuauuaguuaggucuauaaaaagaccagaacaucuugaagauugggaaagcauuug

SEQ ID NO: 4100898 - RNA, 87 nt, Human
caauuuugcaucauucaauguaagcauauauaccauucuauuauauucuagaugucuaugugaaacuacagugagggugugaauuug

SEQ ID NO: 4100899 - RNA, 119 nt, Human
cacaaaaaaaguguaugaguccucuguugcuucucagggccugaugcagucuuagaucaugagugcccagccugagaaaggaguuuggaggggaaaauaacuuauuuggagaacaugug

SEQ ID NO: 4100900 - RNA, 93 nt, Human
cacaaaaacaguuucacugcugauaacccagcagagugaaccucaaaguuggcucugcuaauauuguaguaccagagcauccacuguagugug

SEQ ID NO: 4100901 - RNA, 116 nt, Human
cacaaaagggaccucacaucaaagcccauuacagcuaggcagacugagcucuagggccaaggguuugcccugcaggucgcugcugggguaagggugaggguggggucccuccagug

SEQ ID NO: 4100902 - RNA, 77 nt, Human
cacaaagacagaauuagcuuuucugaaacaccuugcugacgccuccagcauucugaagggcuaagugucuauaagug

SEQ ID NO: 4100903 - RNA, 61 nt, Human
cacaaagucugcagcugcuguacauggacaagaagcccacaagcagcuagaggaccuugug

SEQ ID NO: 4100904 - RNA, 109 nt, Human
cacaaagucuuuauauuugaaaaaugcuuuauaaucauuuuaauuagugguuucucaccaaagcccuggaugugguauuauuggcaccauuuucugagaagaccgugug

SEQ ID NO: 4100905 - RNA, 68 nt, Human
cacaaaguugcccuuuucuggaaugcaaggcuccuaaauuagcugcaggcuggaggagggacuaagug

SEQ ID NO: 4100906 - RNA, 77 nt, Human
cacaaaugacugaaacgacuguucagaguguccccgccagcugagcaguaguuucaaaacaagaaaagucaucugug

SEQ ID NO: 4100907 - RNA, 104 nt, Human
cagcagugucaugcucuguccugucuucaggacccggaauuuuggggucugagugacaccagcauucacuggaccugcagagaaggacaaagcugaugcuacug

SEQ ID NO: 4100908 - RNA, 105 nt, Human
cagcaguuugggaagccgaggcggguagaucaccugaggucaggaguucgagaccagacuggccaacauggugaaaccccgucucuacuauacacaaauuagcug

SEQ ID NO: 4100909 - RNA, 60 nt, Human
cagcauaggacaggguuucaucuuucagcaucuucaacgcaugauacccggucuaggcug

SEQ ID NO: 4100910 - RNA, 56 nt, Human
cagcaucacagugcccgaagucaacuacugaauuuacuucucuggacuagaugcug

SEQ ID NO: 4100911 - RNA, 130 nt, Human
cagcaucucaauuucucaucugauuuguauuagucuucucagauguagaaagauugugagguuagcugggguuaugucacacagcugcucuguuuuauugagaaggcugguccagggaagcugagagcug

SEQ ID NO: 4100912 - RNA, 75 nt, Human
cagcaucuccacaaugggguggucggguugaucuccacgcgcuuuuuggccaccauguagcccauuagagaguug

SEQ ID NO: 4100913 - RNA, 56 nt, Human
cagcaucucguggcuggauagagauggcacagccccagccuccauguagauagcug

SEQ ID NO: 4100914 - RNA, 66 nt, Human
cagcaucuggcaccuggcagcacauugacagacauuuguggagugagugcugggcugaggcugcug

SEQ ID NO: 4100915 - RNA, 92 nt, Human
cagcaucuuaucuuucaauguguucuuuauucauugauucaggguaucauuccugggguauauaggugaauaugacgaugauaauaugucug

SEQ ID NO: 4100916 - RNA, 73 nt, Human
cagcaucuucaugugcaucucccaaacccuccaucucagaaauucagggugcuauuggugugugaugauguug

SEQ ID NO: 4100917 - RNA, 58 nt, Human
cagcaucuucuccaaagcugccuuagagaauuuucuuggugauuuuagagaauugcug

SEQ ID NO: 4100918 - RNA, 57 nt, Human
cagcaugcaggggccugagcaccuguggaagccaugagcucuggccucuggaugcug

SEQ ID NO: 4100919 - RNA, 58 nt, Human
cagcauggaaguuauguaccuuuuuucgaaugagaagaaaacaaugacuugccagcug

SEQ ID NO: 4100920 - RNA, 64 nt, Human
cagcauggagggacuccugcuucuaguaaugaugugcuaaggagcuggaaugguccuuuugcug

SEQ ID NO: 4100921 - RNA, 65 nt, Human
cagcaugggguggugggcaaccucaggugcuggcaucuggcucuaggaagccauuacccucccug

SEQ ID NO: 4100922 - RNA, 57 nt, Human
cagcauguaagccacugcccuguaacuuucugcacaauugcuagggcaugcauggug

SEQ ID NO: 4100923 - RNA, 66 nt, Human
cagcauguccaaauuuuucacauguagaauaugaucacucuguuuccauggaggaauuggaugcug

SEQ ID NO: 4100924 - RNA, 55 nt, Human
cagcauguggugauugggacugaacauuuucagacugagggcaucacauacguug

SEQ ID NO: 4100925 - RNA, 89 nt, Human
cagcaugugucugaaucgcuuccuagagggcuuaugaaaacacacauucccgggcaccaccuucagggguucugauuuaguucguguug

SEQ ID NO: 4100926 - RNA, 79 nt, Human
cagcauguugaaaccugaagaaaauauuugcugagaacauucaguucgauaauuuuccucaauucagugguuuaggcug

SEQ ID NO: 4100927 - RNA, 70 nt, Human
cagcauuagaagggaccucuggggggcaacuaggccaugccccauccccaucacucccauuuuacagcug

SEQ ID NO: 4100928 - RNA, 55 nt, Human
cagcauugaacacaguacuaagagagcaggacuuucucucucuuguucacugcug

SEQ ID NO: 4100929 - RNA, 64 nt, Human
cagcauugcccuuuuucucagagaugugcaucuccucucagaaaaacuuugaggguaggagcug

SEQ ID NO: 4100930 - RNA, 74 nt, Human
cagccaaaauguggggcuggaggcaggagacugugucauucagaaucugugccugcuuccccacccaugggcug

SEQ ID NO: 4100931 - RNA, 66 nt, Human
cagccaacauugugagcagauuuuuaucuagcaguugucuaucugcugucuguguauuuguugcug

SEQ ID NO: 4100932 - RNA, 61 nt, Human
cagccaacucccucucauugagcauacacuuuugagaugugccagggaagagaguuggcug

SEQ ID NO: 4100933 - RNA, 82 nt, Human
cagccaaguuagaaaauagagcagcucggggcugugucgaugugacaacugaagucucuuuuguucucucaggcagggucug

SEQ ID NO: 4100934 - RNA, 60 nt, Human
cagccacaaugcaauuguaagguguguuucagacacaagggccuauaguguauuuagcug

SEQ ID NO: 4100935 - RNA, 58 nt, Human
cagccacucggccauaaaggcuucauucuuuauauuguggcagggcugggaugggcug

SEQ ID NO: 4100936 - RNA, 59 nt, Human
cagccacuuccccucuaugggucucaguuuccucaccuguagaaugggugaagggguug

SEQ ID NO: 4100937 - RNA, 63 nt, Human
cagccacuucgagcuuccugauuaauuggugagagacaaucagggcacauucugcaguggcug

SEQ ID NO: 4100938 - RNA, 76 nt, Human
cagccagacaucuccagggagguagcccagugcuaugguuaagagcaugggcucuggccuuggaccuaccugggug

SEQ ID NO: 4100939 - RNA, 55 nt, Human
cagccagcuucagauccaagccacacuccgaggcugcccugucuguggcugucug

SEQ ID NO: 4100940 - RNA, 108 nt, Human
cagccaggagggcugacagugcuggaguggaccaguccgcggagcuccgggggucugaaugcuccagggguguguggauggcaauggccaggauggcccuccugguug

SEQ ID NO: 4100941 - RNA, 92 nt, Human
cagccaggauaccacgcaauguuuuaaguuucuuuauucuuauguacuaugacauuacagaacugucuugaaauuuuggugugauuuugcug

SEQ ID NO: 4100942 - RNA, 101 nt, Human
cagccagucaaacuccagggugacucugucugaccagauuccagcauccucucuuaguaucuguucuaaccacuaggcgugccuuggccuuugccugguug

SEQ ID NO: 4100943 - RNA, 79 nt, Human
cagccaucguagggucggcugcccaugcgcugguaccaaacuaagccaucacaggggccggcuguccgugcccugguug

SEQ ID NO: 4100944 - RNA, 65 nt, Human
cagcccaagaugaaugaugaaguguguucaggagugaaccacauucuagguaaucaguuuggcug

SEQ ID NO: 4100945 - RNA, 60 nt, Human
cagcccacgucagggccacucaaccaugcgcucugggaggagugggcugagauggggcug

SEQ ID NO: 4100946 - RNA, 68 nt, Human
cagcccagagggguuugaggacucccgggcgaagucuucuagucccuugacacacccucucagggcug

SEQ ID NO: 4100947 - RNA, 55 nt, Human
cagcccaggacugcagguguuuuaagcauuuuacuucacuugcccacuugggcug

SEQ ID NO: 4100948 - RNA, 58 nt, Human
cagcccagugcacgcccguuuccacgacuuuauguuggaaugagugugcaugggguug

SEQ ID NO: 4100949 - RNA, 74 nt, Human
cagcccaugucugacagggugggggaacaggcaacagucaaagggccacgcuucugcccaugugggaugguuug

SEQ ID NO: 4100950 - RNA, 74 nt, Human
cagccccuccuugcaguuguucaaaugagccagauccuguaugucagggcucagggacugcagaaaggaggcug

SEQ ID NO: 4100951 - RNA, 122 nt, Human
cagcccuaucucccugucccugguggccucugcugaauggguuccuuggucaacagauagcagccccucuaggccaguggaggacccauggagaggccagcagggacuggcggaaguggcug

SEQ ID NO: 4100952 - RNA, 67 nt, Human
cagcccuccuacccugccaggcacacucauaaaaggccuggauaccagacagggagggagaaggcug

SEQ ID NO: 4100953 - RNA, 69 nt, Human
cagcccucugagcuagucaccaucauuaacugagacgguggcuaagacgguggaggcucagagagguug

SEQ ID NO: 4100954 - RNA, 84 nt, Human
caaacagcuuacuccauaggcagacucuuuuuggagguccguagcuugccuuuccagugauggggucuggcugguauuuguuug

SEQ ID NO: 4100955 - RNA, 56 nt, Human
caaacaucugcaccuugaccggacucgccaucccgccgugggggugcaggugauug

SEQ ID NO: 4100956 - RNA, 78 nt, Human
caaaccaucagcuuaaauucuaggccugggcugcuugcggaaaacuucccagaggagcauggccuugagaaugguuug

SEQ ID NO: 4100957 - RNA, 77 nt, Human
caaacccaggaagccugcaggugacugcucaccagagggcgaucucacacagcaaaccugcagccuucugaggucug

SEQ ID NO: 4100958 - RNA, 92 nt, Human
caaaccuccccagugugaccucagccucccuccccuccucugggcuugcucugguuucauggauggccgggaggugaugcaccugugguuug

SEQ ID NO: 4100959 - RNA, 59 nt, Human
caaaccugagaacaugugcuguguacuacuuugugguccagacaugagucucagcuuug

SEQ ID NO: 4100960 - RNA, 64 nt, Human
caaaccuguuagaggucaucgugaagguacauuugucaaggcaggaggauauucuaacaguuug

SEQ ID NO: 4100961 - RNA, 75 nt, Human
caaaccuuauguccaggcugcaccccagacccauuaaaucaggaucucuggggaugggaccuggcauaaguuuug

SEQ ID NO: 4100962 - RNA, 66 nt, Human
caaaccuuccuuugaugcugguaccuaagcaccaaacaauagauaccagcaucaaaggaagguuug

SEQ ID NO: 4100963 - RNA, 63 nt, Human
caaacgaccucuggcuucuugcccuggccaaccacagaggacaaugugaggcgaguuuguuug

SEQ ID NO: 4100964 - RNA, 60 nt, Human
caaacuccuacaacaccaugcaucucuauccugguagaugucucugggcaguagggcuug

SEQ ID NO: 4100965 - RNA, 63 nt, Human
caaacucuggagauguuuaugcaugugaaagccuuacauaugcaggaaauauaucugagugug

SEQ ID NO: 4100966 - RNA, 58 nt, Human
caaacuguaugacccuaggccggcaauuuaccucuccuggccucaguguccuuguuug

SEQ ID NO: 4100967 - RNA, 93 nt, Human
caaacuugcagggaaggaggaugcucuggccuugagguucgaacucccgccccggggaggcaagagccaggcaccccuuucuccuaauguuug

SEQ ID NO: 4100968 - RNA, 78 nt, Human
caaagaccugagucagaagccugucugacuuguuuggggaauaacaaggaggccagugcagcuggaacagaguaaaug

SEQ ID NO: 4100969 - RNA, 110 nt, Human
caaagacuguaaagguaggccagaugacaaugaaggaaaauguuuugcuuguuauuuaaggccauauauuuuaaucucauaauuugccugaacuuaauuauagugcuuug

SEQ ID NO: 4100970 - RNA, 58 nt, Human
caaagaguaguccagugcugagcugcacagcugcaauucuggacauagucucaucuug

SEQ ID NO: 4100971 - RNA, 73 nt, Human
caaagaucucagaugcccuugcaucaccucccugaagagggcgggugaagcuuuggugucugcagagaauuug

SEQ ID NO: 4100972 - RNA, 79 nt, Human
caaagauuuugagucuuguaugauuugguaguuaguauuaauuaacugaacugauaacauacacggaguaaaaaauuug

SEQ ID NO: 4100973 - RNA, 83 nt, Human
caaagccaugagaacagcugaguuuccaagucugccaaagaaugacugggcaaggccugcagcucagugugucucuguuuuug

SEQ ID NO: 4100974 - RNA, 85 nt, Human
caaagccucagcccaccugguguggggcucuagggcaagcauaccugucagaauuagcccgaaccagguggaaaugguggcuuug

SEQ ID NO: 4100975 - RNA, 68 nt, Human
caaagcguuucuuucauggcucuguggcuuggucuagcuggguccagagaggcaggaggcuacauuug

SEQ ID NO: 4100976 - RNA, 89 nt, Human
caaagcuucugguagguauucuggaaaagcgauaaaccauuuaaucaccaccacugauuaagcuccuucuauaugccaccccuguuuug

SEQ ID NO: 4100977 - RNA, 76 nt, Human
caaaggaggagucaguugggcugcuuugacauugcaugggcaggcgcuugaagacaucccauuggcucuagcuuug

SEQ ID NO: 4100978 - RNA, 64 nt, Human
caaaggagucuuccagagccugacaagaugcuccccuugaccaaauucuaggcaggcucuuuug

SEQ ID NO: 4100979 - RNA, 74 nt, Human
caaaggauucuggagaggaacagaaagguaaagcauaauuggacaccuuugugaguucuccagaacacccuuug

SEQ ID NO: 4100980 - RNA, 55 nt, Human
caaaggcaguuacugaaugaaggcaacaucccaccaaucauuuugucugccuuug

SEQ ID NO: 4100981 - RNA, 63 nt, Human
caaaggcuggauucagagaggugaauucuaaauuacuuucgccaucuggcacuagagucauug

SEQ ID NO: 4100982 - RNA, 69 nt, Human
caaagggcagcccuugaguugugccagguccccauauuuugauaugaacauugaagaggagccccuuug

SEQ ID NO: 4100983 - RNA, 58 nt, Human
caagauucuaguugagguucaaggucaaucucaaaugcuaccaccuccaagaaucuug

SEQ ID NO: 4100984 - RNA, 81 nt, Human
caagauugaugucuuucuuauggucuguuggcuaaucccaguaugaauggccaguucagcuagaagaaacaaacagucuug

SEQ ID NO: 4100985 - RNA, 80 nt, Human
caagcaccagcucaccuggacucauccauagaggugacaucuuaaucaccagacgcgugggucugaggaagcggagcuug

SEQ ID NO: 4100986 - RNA, 63 nt, Human
caagcagaaaucauuauaugguauugcugauaggguucacaggcuauguagaugauuuuuuug

SEQ ID NO: 4100987 - RNA, 121 nt, Human
caagcaggcagguugugguuacuguucuuguggggaagucaugcugagcacauucuguauuuuauauaauacauaauaaguuuugucuguucucugugaauauuuagcaaugugugguuug

SEQ ID NO: 4100988 - RNA, 81 nt, Human
caagccccuugcuguggggcucucuguuacuguguuccuugaaucacacccuuucagucagagagcucucagcauaguuug

SEQ ID NO: 4100989 - RNA, 55 nt, Human
caagcuggcucuuaugcaaaaagccacacacgcuagguguaugggagucagugug

SEQ ID NO: 4100990 - RNA, 88 nt, Human
caagcuuaaguuuuucuacaacacuucugaaucucccaaguugaauagcugacagauucaggagaguugugaaaaaaacuuaagguug

SEQ ID NO: 4100991 - RNA, 81 nt, Human
caaggacguguugaacuagcucucugcagccuccuuggaggaugugauccuaugggagggguaggaguauucagguccuug

SEQ ID NO: 4100992 - RNA, 62 nt, Human
caaggacucugcucuguauuucacuguauuccuuacagugcuuagcacagaguagacgcuug

SEQ ID NO: 4100993 - RNA, 61 nt, Human
caaggacugugggaggaaaugcuguagagaagcaggcagggcccugaccacacaggccuug

SEQ ID NO: 4100994 - RNA, 60 nt, Human
caaggagauuuuuuucugaagccucuguuuguguuuggcuuauagauggcgaucuucuug

SEQ ID NO: 4100995 - RNA, 57 nt, Human
caaggaggugggaaagcagagccugcuuuauguugcagcucucuuuuccccucauug

SEQ ID NO: 4100996 - RNA, 55 nt, Human
caaggauagggccucugacuuccagucucagugggaagauagaauccuaacuuug

SEQ ID NO: 4100997 - RNA, 59 nt, Human
caaggcacagggccacuuucccaguaaaaguauuuucagcuuuuggggccuuguccuug

SEQ ID NO: 4100998 - RNA, 90 nt, Human
caaggcauauugaagggaagccuguccaaacugccucauuaaagagugaaauggcaaggcagagcuuuuuaacaucuuggauauaucuug

SEQ ID NO: 4100999 - RNA, 62 nt, Human
caaggccuuugccccgauacaggaaugcauccuuaugcuccuguaucugggcaaaggccuug

SEQ ID NO: 4101000 - RNA, 84 nt, Human
caaggcuauagagugguugagagcaggcucucgggggccaggccgccuggguuccaaaugccagcucugccacuuccugcugug

SEQ ID NO: 4101001 - RNA, 56 nt, Human
caaggcugcacuguugccauagccuccuacccguuaccugccacauugcagacuug

SEQ ID NO: 4101002 - RNA, 58 nt, Human
caaggcuggaguacagugcaguggugugaucauaccucauuguagccuccaguucuug

SEQ ID NO: 4101003 - RNA, 64 nt, Human
caaggcuguguccaccuucugugagcuacuuaagguauauaggaaaggaguggucacaaacuug

SEQ ID NO: 4101004 - RNA, 55 nt, Human
caagggaccugagauggucucucuugaaaucaacagcuaugguaggacucccuug

SEQ ID NO: 4101005 - RNA, 77 nt, Human
caagggcaccuggggaaaggugggcacagauggagaagucgggacucgaguucuguccaccuuuuugggugaccuug

SEQ ID NO: 4101006 - RNA, 91 nt, Human
caagguaguuaacuucaccuagaagcacagguuaaaggcauugcaagagucacugugcugguagccuaguuucuuugaaaaacugcacuug

SEQ ID NO: 4101007 - RNA, 58 nt, Human
caagguaguucuggucauugacucacgaauugagugguuuuagauaaagcuguccuug

SEQ ID NO: 4101008 - RNA, 72 nt, Human
caaggucucaaaggagguuuggagaccaaauggggcuucaguuccccaggcucugccaggcccuugaccaug

SEQ ID NO: 4101009 - RNA, 71 nt, Human
caaggugguuauuaugagaagguauggugacuugggauaaauucugucccauaaccgacucaacuuucuug

SEQ ID NO: 4101010 - RNA, 81 nt, Human
caaguaaacauuuuauugacaauaggcaacugaggagaaaauuaacccuuuuuauaguuaauuguaaguggaaguugcuug

SEQ ID NO: 4101011 - RNA, 82 nt, Human
caaguacucuacagauucauugcuacgguggucuccauuuacagagguggcagcuguaagaugagugaauguaaggagcuug

SEQ ID NO: 4101012 - RNA, 74 nt, Human
caaguauacuagugcagcauguauuuaguuuucauuaauuuggaaaaaacauacuuugcuacauuguacauuug

SEQ ID NO: 4101013 - RNA, 78 nt, Human
caaguauauacucagggaauuauuucuguccuauugauaauuuagaaggauuugauuggcucuacugaguaguccuug

SEQ ID NO: 4101014 - RNA, 125 nt, Human
caaguaucacagacugggaggcuugaauaacagaaauugauuucuuacaguucuagggggcuggaaguccaagaucaaaguccugauaggauuuaguuucuguugagggcccucuuucuugcuug

SEQ ID NO: 4101015 - RNA, 65 nt, Human
caccucgcaggcgcagcaccaggugcaggguggacuccuucuggauguuguagucugagagagug

SEQ ID NO: 4101016 - RNA, 94 nt, Human
caccugcaacuuugccaucuggggagggugucacccuguuacguaaauggggcauaacuggggacacuucucuauggagagcaauuguucugug

SEQ ID NO: 4101017 - RNA, 57 nt, Human
caccugcacauccuugagcucuagcgaugauauguuuagggcucucugugucaggug

SEQ ID NO: 4101018 - RNA, 63 nt, Human
caccugcccguuugcuucagagacauuccaggggcuucacuucucuaggcaggcaggcucgug

SEQ ID NO: 4101019 - RNA, 112 nt, Human
caccuggagaacuuguuaaaccacagacuacugggcuccacucccacaguguucuauucagaaggucuaggguggagcucaaauauuugcauuuuuaacaaauucccaggug

SEQ ID NO: 4101020 - RNA, 55 nt, Human
caccuggcuggaagugcuccgggcagggccuggacuccuucaccuccagcaggug

SEQ ID NO: 4101021 - RNA, 111 nt, Human
caccugggccccauuaccucuguaauccaagguuccuacuguugcacuccauucuguccaggacucagcacagcacugggaacccaggaggauuaaagaagggccagggug

SEQ ID NO: 4101022 - RNA, 59 nt, Human
caccugggcuaaacuaugcagggcuuuguaggccaugguaagguguuaggcuaagggug

SEQ ID NO: 4101023 - RNA, 59 nt, Human
caccugggcuuucucugggacucaccuaggaguuccccagugugguagguccacaggug

SEQ ID NO: 4101024 - RNA, 96 nt, Human
caccugguagaucagugccucuuagcaaaugccugugcugcugugcaagguacaagaguacgucagcugggcaucugcagaugauggcuccaggug

SEQ ID NO: 4101025 - RNA, 81 nt, Human
caccugguauccugggcccugaagugauugugaguugagggcaaucccugccgagcucacgccaguugggccugccgugug

SEQ ID NO: 4101026 - RNA, 58 nt, Human
caccuguacccacuucccccagcugaacagcagccuuucagaggagguggguaaggug

SEQ ID NO: 4101027 - RNA, 56 nt, Human
caccugucagaggaucucccgcugcccaaccaguggcauuucuauacuggcaagug

SEQ ID NO: 4101028 - RNA, 85 nt, Human
caccugugcuuucaaggagcucagaugccaaggccagguuuggggggcacaggcugccugaggcuccuuguagagaguggaggug

SEQ ID NO: 4101029 - RNA, 91 nt, Human
caccuguggcuguggccggaccacguggccaugcugcaguucaucagcagugggcugcccaagguggccaugccguccaccauccacugug

SEQ ID NO: 4101030 - RNA, 90 nt, Human
caccuuagauuccucauucacuuugaaauaaacgacuucaaaaagacugaauuugguuaaccugcaaaugugagugacagugucaaggug

SEQ ID NO: 4101031 - RNA, 67 nt, Human
caccuugaacuaauagguaucuuguacugaauuuuccccucuucaguacuguuaguuauucaaggug

SEQ ID NO: 4101032 - RNA, 81 nt, Human
caccuugccaacacugagcauuaucuuggauuuuguaucuuuaacaggaaauaaaugguaaugcauuuuaaguuugcagug

SEQ ID NO: 4101033 - RNA, 67 nt, Human
cacgaaggauuggagcagcugccauggugggccuggccagccaagaaagcagugcuccacacuggug

SEQ ID NO: 4101034 - RNA, 76 nt, Human
cacgaccaucucuccacggcagcucucgggauaaauuggccuccagaggcagccgggggagaacgagcugguagug

SEQ ID NO: 4101035 - RNA, 68 nt, Human
cacgagucuuugcccuucuauuaugguuggaguuuucuuagcagcuuccagagagggcaguucuugug

SEQ ID NO: 4101036 - RNA, 67 nt, Human
cacgcgugcuggcuuuuugggugagccccugggguccucacagcagcucugagaggccagcacugug

SEQ ID NO: 4101037 - RNA, 81 nt, Human
cacgcugcccugugcaucagguaaguguaauauauagagaaaaauuucauguuaagugacuugccagaguaugcaguugug

SEQ ID NO: 4101038 - RNA, 75 nt, Human
cacggaccuggccuuucagguacaccagggaugggccucucucccucgucuuagguucugccggaagccagggug

SEQ ID NO: 4101039 - RNA, 75 nt, Human
cacggcucuauucaugggugggccaccuggcacugugcagaugccacuuccagguuccacccaagacucccugug

SEQ ID NO: 4101040 - RNA, 127 nt, Human
cacgggagcauggugcugguuccuugggguucccugccuggcugucagcagagccuaauagaucugggcucuguuagguggggcaggauggacuagguuggcacagccagcccucagcuguccccug

SEQ ID NO: 4101041 - RNA, 69 nt, Human
cacgguuuuauuuuaguuuuagacauaugacaaaucaugccauguuugaaauuguaaguauauuuugug

SEQ ID NO: 4101042 - RNA, 63 nt, Human
cacgucagagccuggugcaggaagccacauaaggucuugcuguguaacuccuggccuggucug

SEQ ID NO: 4101043 - RNA, 70 nt, Human
cacgucgacacauaugcguauaguuuagucguuuuaacugcuguuaaagugugcgcaugugggagaggug

SEQ ID NO: 4101044 - RNA, 130 nt, Human
cacgugcagcaaggaacagggaaccgcuuaaugauuaaucacugucaaccuuuguucucguuaaagacuugauuguuggacaaggcuuguaaugagggacuguuuuggugucuguugcuaugagauugug

SEQ ID NO: 4101045 - RNA, 130 nt, Human
cacguugauagagcuaaugaaagcugucaaguuugaaaugucucuggauuugcuuuuggcuuuugccugaaaguacaugagauucaaggggaauauuucaccugcgacuuugauuuggaaaauugaaaag

SEQ ID NO: 4101046 - RNA, 74 nt, Human
cacguuugcagucccagcugcucagaaggcucagugagaggaucccucaagcccaggaguuggaggcugcagug

SEQ ID NO: 4101047 - RNA, 116 nt, Human
cacuaacaauugcacuucuauaacuguguuucugcuuccucuuuugacuucuggcaaaaagaaaccaggagcaacuagccaggaugcagagggguuuuuuaaaucaacuguaagug

SEQ ID NO: 4101048 - RNA, 59 nt, Human
cacuaauccugugaaaugcuuugcgauggugcuaaaccauuuuggguauuuucagagug

SEQ ID NO: 4101049 - RNA, 128 nt, Human
cacuaaucuucacaauuuagagguacacagagaaacuagagucagaagccaggaacugccuguuggcuacagggcagcaauuugguuccuggaaguuuguuguuuuucucaaaauuggaaguacauug

SEQ ID NO: 4101050 - RNA, 70 nt, Human
cacuaauuacugcugauauaagaaaagauuaacuuuuguaaauuaaugucaaauaguaguaguaauagug

SEQ ID NO: 4101051 - RNA, 58 nt, Human
cacuacagguuucugaagcaauuuuguggaucucuauaguucugcuuagaaaucagug

SEQ ID NO: 4101052 - RNA, 74 nt, Human
cacuacaugcaaggcacuguggguguggccggacauacagaagaacuugucccugcacuccaaguguuguggug

SEQ ID NO: 4101053 - RNA, 75 nt, Human
cacuagacugugggaucuggaaggcaaaggcuguguuucauugguuuauugucaaucuauucccagggucugaug

SEQ ID NO: 4101054 - RNA, 66 nt, Human
cacuagagccuuccuagcauuugcauuagacacguuugugccuugcagccacucaggagcucagug

SEQ ID NO: 4101055 - RNA, 65 nt, Human
cacuaggcuggagugcaguggcuccaucucagcucacugcaaccuccgccucccggguucaagug

SEQ ID NO: 4101056 - RNA, 84 nt, Human
cagaaaauaaagcugauugucaccauuaguguuaccaauguauaugacacagcagguaacacaggugcaguuuuaaaguuucug

SEQ ID NO: 4101057 - RNA, 77 nt, Human
cagaaaccuggcaaacaggcuuuuaagucaauagguuuuauuugaggacagcagcagucugcgugugcagguuuuug

SEQ ID NO: 4101058 - RNA, 58 nt, Human
cagaaacuagauuuagacacaaaucuguaaacugacaguuguguuuuuuauguuuuug

SEQ ID NO: 4101059 - RNA, 59 nt, Human
cagaaacuucuugucucacaguucuggaagccagcgcugcacucccccaagagguucug

SEQ ID NO: 4101060 - RNA, 82 nt, Human
cagaaagagaaccaaagagccauauaugcagcuagaccuugugagucaugcuggguacuauggcugcuguuuucucuuucug

SEQ ID NO: 4101061 - RNA, 65 nt, Human
cagaaagcaagccauucacugucaccuauaacucuugguuaacagggaauggcuuugcuuuauug

SEQ ID NO: 4101062 - RNA, 56 nt, Human
cagaaagcgggaugcagcauguggcuagcugugcagcaauaacuccuugcuuucug

SEQ ID NO: 4101063 - RNA, 64 nt, Human
cagaaagcucaggaaagggauauguuacaucgugacucagugauacacucccugcugggcacug

SEQ ID NO: 4101064 - RNA, 55 nt, Human
cagaaagcuugguacaauaugcugauuucuauugcuuuucuguauuugcuuucug

SEQ ID NO: 4101065 - RNA, 74 nt, Human
cagaaaggcugcugauuucugauuuccuacguuccaccugaagguuggcagucucagucagauggcccucguug

SEQ ID NO: 4101066 - RNA, 64 nt, Human
cagaaagugcagcuuuuucuuuacaugauuuucaaaaaucuugugcgauugaacugcaugacug

SEQ ID NO: 4101067 - RNA, 118 nt, Human
cagaaauaagauggauggauguauagacaguagaguaaaugguuagauaauugauaagcuaaaaauguuaauggugaaaucuaagucauguacacuguaaaauucuuucauuuuucug

SEQ ID NO: 4101068 - RNA, 95 nt, Human
cagaaaucuagagugggcauaugaagucucaagaagugcuugccaaauuggguuuaggaccccugaggccucacuguagucccuccuggacucug

SEQ ID NO: 4101069 - RNA, 68 nt, Human
cagaaaugaagcaguuuucaucaaguuaugcucagagacagcuuauuugguugcuugcuucauuuuug

SEQ ID NO: 4101070 - RNA, 67 nt, Human
cagaaauggguuugauucucagccaagggacagcaggacugguagagagugucaggccacacagcug

SEQ ID NO: 4101071 - RNA, 55 nt, Human
cagaaauggucuguucagcuuagagugaauguucugagcuugagauccauugcug

SEQ ID NO: 4101072 - RNA, 56 nt, Human
cagcccugcagcuggaucucacacaucccaggaagugagucucccgcugagagcug

SEQ ID NO: 4101073 - RNA, 58 nt, Human
cagcccugcugacacugucugacccaguuugacaaucuggauagaaaucauaggguug

SEQ ID NO: 4101074 - RNA, 72 nt, Human
cagcccuggauucuccauugugccagugucauuuuuucaacuguguauuaggcauuugaggauaaacugcug

SEQ ID NO: 4101075 - RNA, 63 nt, Human
cagcccugggaguuggggccgagcuggguuugugucucuucuugccccaucccucuccugcug

SEQ ID NO: 4101076 - RNA, 75 nt, Human
cagccggaaacuccuuugagagccucaacccaaucucacaacuguugacggacuuuagaaagaguuucuucccug

SEQ ID NO: 4101077 - RNA, 74 nt, Human
cagccguuggucucuugcagggcaggcuacuccacucaugcucuggggagaggcugauccugcagagaaugcug

SEQ ID NO: 4101078 - RNA, 64 nt, Human
cagccuagugcacuggcagggcucauugucugggaagacaccgaggucuaggcagcugggacug

SEQ ID NO: 4101079 - RNA, 67 nt, Human
cagccucaggccccuccacuucucagaucaggucccagaccugcccaugaaaauggggagcaggcug

SEQ ID NO: 4101080 - RNA, 73 nt, Human
cagccuccuguuucagcuacuguuccaugcagaggucguuguuuccuaugcaugcugugauacaggaagguug

SEQ ID NO: 4101081 - RNA, 65 nt, Human
cagccucugcugcuguugagcaccgucguggagagcgggcugcauuguuagcauugcugaggcug

SEQ ID NO: 4101082 - RNA, 68 nt, Human
cagccugacaugguuuggcaaaagccacucauggucgucucugaggcuccagccaggccagcagcuug

SEQ ID NO: 4101083 - RNA, 73 nt, Human
cagccugagaaguugauucuaaaauaggaggaaaugauucaauuauuuccucucaagggauuacucaauguug

SEQ ID NO: 4101084 - RNA, 73 nt, Human
cagccugagguagauguggggugagguugcuaacagucuaguggauuuuucccacaugugaauccucagguug

SEQ ID NO: 4101085 - RNA, 72 nt, Human
cagccugagguuuuucggucuuaacuggaaagggacacaaagaggagagacccugguaaacacuccaggcug

SEQ ID NO: 4101086 - RNA, 85 nt, Human
cagccugcgaggcuccucauucaguaugcuguguugugugguuagcuguuccauagucauacugaaaguggcuucucagaugcug

SEQ ID NO: 4101087 - RNA, 87 nt, Human
cagccuggacaacauggugauacccaguuucuacuaaaaauacaaaaauuagucgggcauggugaugugcaccuguagucccagcug

SEQ ID NO: 4101088 - RNA, 56 nt, Human
cagccuggacagcgaccagaguaguggcucgaccgcuucuggcuccugccaggcug

SEQ ID NO: 4101089 - RNA, 129 nt, Human
cagccuggcuuagccagcuugcucucugucccuguccuuuguucccugucucuggcuccuucuccuacaauggcacaagacagaaaaggcaaagugcugagguauagagggcaaguggcuccgaauuag

SEQ ID NO: 4101090 - RNA, 61 nt, Human
cagccuuagcagauaaaaaccuucagaaaacauuuuugaaaggugcugugugcugauucug

SEQ ID NO: 4101091 - RNA, 65 nt, Human
cagccuuauguugcuacuucgcuugucacauagacauaaacuuggcuagaugguauauaaggaug

SEQ ID NO: 4101092 - RNA, 67 nt, Human
cagccuucacaaagcaaaugugcuuugugcacuuccuugccagagcagauguggccuugguggacug

SEQ ID NO: 4101093 - RNA, 67 nt, Human
cagccuuuuccauguauuguugugcuguaagugccaugcacauauuuccuauauguggaaaggguug

SEQ ID NO: 4101094 - RNA, 77 nt, Human
cagcgauuuggaaggucuguucuaggugaggguuuggugaagauuuucacccugaauauauugauccgaaaaugcug

SEQ ID NO: 4101095 - RNA, 80 nt, Human
cagcgcguuuggcucuugcaagcccugaagggcuggaggcuugugccugccagcuccgaggagcugcagcccaacuucug

SEQ ID NO: 4101096 - RNA, 62 nt, Human
cagcggccuccccugugucccugugaccguggcggcaaagacggacucaggagugcaaguug

SEQ ID NO: 4101097 - RNA, 59 nt, Human
cagcgguggcaaggugacugugcugacccacuguaacacuggugcucuggccaccgcug

SEQ ID NO: 4101098 - RNA, 103 nt, Human
cagcguggcugcagaggcguggaugcuuaggcagccuggggagggacaggugggaacacucgugcuccgcaggcgcccacaggcccagugcccacggcugcug

SEQ ID NO: 4101099 - RNA, 62 nt, Human
cagcguuuuauaaggauugauuagugggacaagcaguucagguaaucacuuauaagacaaug

SEQ ID NO: 4101100 - RNA, 92 nt, Human
cagcguuuuuugguggauuucuuuugaaucuagaauucuguagcuaacgcuuuccugagacuuagucaaaagcuucacucggaaaaucuaug

SEQ ID NO: 4101101 - RNA, 130 nt, Human
cagcuaaccaggcccaagaugaccuugcuguucacuacucauuaguuuagccuucauggaggaagagcaucagcuccaaggcugcaaaacuacauggguugcacaggucaaggacugguugccaugcuag

SEQ ID NO: 4101102 - RNA, 73 nt, Human
cagcuaauguguaggugaaucgaggcugguuuaggcagcugaacuuuguucuuggcuaccuguacagcaguug

SEQ ID NO: 4101103 - RNA, 56 nt, Human
cagcuacuccucccaugacuucccucuagggacggucaugaggacagagugagcug

SEQ ID NO: 4101104 - RNA, 65 nt, Human
cagcuaguaaauggcaagacuagcuuacuaguggcaagucuaaacacagccuuuucuguaugcug

SEQ ID NO: 4101105 - RNA, 105 nt, Human
cagcuaucagaaaucccugagucaauaucugagugugcuuuggcagauuaauggcuaagagcagauuucaaauauuggcagagggaauccuucucucugaagcug

SEQ ID NO: 4101106 - RNA, 69 nt, Human
cagcuaugcucauuuguuuauguguugucuauggcugcucucaagcuguaacacagagcugagugguug

SEQ ID NO: 4101107 - RNA, 63 nt, Human
cagcuauuccaggaguagaaucagcaccccagcuagaaaagggggcaggucucuggaaagcug

SEQ ID NO: 4101108 - RNA, 79 nt, Human
cagcucagcuccuggcagugucuuaucaggagugcagaagcuccagaaagaaaucaguguccuuaggggagcagguuug

SEQ ID NO: 4101109 - RNA, 72 nt, Human
cagcucaggagccuuucuaggguucagaaagcuauggcuguaagagcauuccuggaggguagaguugggcug

SEQ ID NO: 4101110 - RNA, 65 nt, Human
cagcucaggccggagcuacaggcuccuggauccuuuccccauccgccccgcccggcccugagcug

SEQ ID NO: 4101111 - RNA, 55 nt, Human
cagcuccagcccuuugugguucacugaaaggucaguguauggagugcuggauuug

SEQ ID NO: 4101112 - RNA, 62 nt, Human
cagcuccaggauaauaaaguuguucucaccuggggagccuuuuggaguuauucugggaguug

SEQ ID NO: 4101113 - RNA, 59 nt, Human
cagcucccagagugaccagcagagggcgcugggcccaacauggucaguucugggagcug

SEQ ID NO: 4101114 - RNA, 74 nt, Human
cagcuccccagccucugacaccacagucguccgggaucacgugcugggcacagucagggugcaggggggagcug

SEQ ID NO: 4101115 - RNA, 58 nt, Human
cagcuccuucuuugacaaguggcagacuccugagucuucccaaugcaaaguaggacug

SEQ ID NO: 4101116 - RNA, 78 nt, Human
cagcucuaauaaucuguggccagagguacuauuuuaagaauguacuauuuuagguaguggccacaauguuagauucug

SEQ ID NO: 4101117 - RNA, 77 nt, Human
cagcucucccuuagcccgguagggacuccagaaaaccaccucugaggaccaucggggagcugcuggggaaagagcug

SEQ ID NO: 4101118 - RNA, 58 nt, Human
cagcucuccugagccugacaaucaccaucuuuagagaugaugaagagcucagagccug

SEQ ID NO: 4101119 - RNA, 63 nt, Human
cagcucugcaacuucuagcagugucaucaaggaaaagagacucucauuagaguugcagagcug

SEQ ID NO: 4101120 - RNA, 57 nt, Human
cagcucugcugggaggaugcagaaauaaaugaucagcgucccggcgugagagagcug

SEQ ID NO: 4101121 - RNA, 76 nt, Human
cagcucuuacacacuagaugguaggugcggggcucucccaccccaccuguucauuacccaucccaggucugugcug

SEQ ID NO: 4101122 - RNA, 85 nt, Human
cagcucuucacaggggaugauccucccgcagcgugccucgucuucaggccuggcugccgcagaugaaucuccaugaaucaagcug

SEQ ID NO: 4101123 - RNA, 63 nt, Human
cagcucuuccuaauaugaaagagcuucagauuugcuggagccaagagucaaggggaggagcug

SEQ ID NO: 4101124 - RNA, 57 nt, Human
cagcucuuggagaaaccagagccuccauggguccaggcugguugagccaaggugcug

SEQ ID NO: 4101125 - RNA, 83 nt, Human
cagcugaaaugugccaucugggaccuacuaaugcuuguugaacuuuacuggaucucagaagcugggucucagaagcucagaug

SEQ ID NO: 4101126 - RNA, 55 nt, Human
cagcugaagcugacacauagugcucaguuaguuacuugagacuuugcuuuagcug

SEQ ID NO: 4101127 - RNA, 65 nt, Human
cagcugaagcuuucaauuaugucagccuguggaaguaucuaaggugagugauugaugggcugcug

SEQ ID NO: 4101128 - RNA, 87 nt, Human
cagcugacugccugggaauccaggagggcugacuccuuagcccacacuuagcugagagucucagaccuccugguucaggcacagcug

SEQ ID NO: 4101129 - RNA, 63 nt, Human
cagcugacuucuugauccaaugaccauccuuuuucguggugcaucaaauucugaaauuagcug

SEQ ID NO: 4101130 - RNA, 60 nt, Human
cagcugagaccagaaugcaggugccccguaaaaccaaucugcauauucuucugguggcug

SEQ ID NO: 4101131 - RNA, 83 nt, Human
cagcugaguuaugucauuucucugagccucaguuucccaucugggaagcuggggguagugagaaauaaggaagaugacuucug

SEQ ID NO: 4101132 - RNA, 83 nt, Human
cagcugcaguuuaagagaauucugguuuuccuaucuugucaccaacacguagucuuaucagaauuuuuaaguucugcagucug

SEQ ID NO: 4101133 - RNA, 55 nt, Human
cacggugauaacagauggcauccuccugcccgggaggccaggcucuuauucugug

SEQ ID NO: 4101134 - RNA, 89 nt, Human
cacggugaucacuguuccugcugucuaguaucuuaaaaacacagguucugccuauuuuuuaugguuuuagauaggagggugauucugug

SEQ ID NO: 4101135 - RNA, 106 nt, Human
cacggugcugagugucucugcgugcugggcuggcgcauccgacacgugggcgaucaugguggugcggcagccagcgguggccagggauucacgcagcagcauggug

SEQ ID NO: 4101136 - RNA, 67 nt, Human
cacguacagggauaagauccggaacgcguuccugcagaacgccucagccguggucaucuucaacgug

SEQ ID NO: 4101137 - RNA, 60 nt, Human
cacgucaggagcaaggauugacagccuauaccccaagaugucagugauuaucucugagug

SEQ ID NO: 4101138 - RNA, 68 nt, Human
cacgugaggcacugaugaccugcuacacucaugcaggacucacauagcuucagaugacucauuacgug

SEQ ID NO: 4101139 - RNA, 59 nt, Human
cacgugcaucugaucuuuucugagaagcagauuuucacagaaaaguggagagccuagug

SEQ ID NO: 4101140 - RNA, 71 nt, Human
cacgugcucuuggggguguauguuuacuuaaaaugcaaugagucagccuuggcagccccuucaccacugug

SEQ ID NO: 4101141 - RNA, 64 nt, Human
cacguggauggagcagugacccaggaauaaagccaaugggcccuggggagcuguauccagagug

SEQ ID NO: 4101142 - RNA, 112 nt, Human
cacuaagcuaugccaucacuagacacaguugacagggagaggguuagugucagguuucacccuggaggugaucuucaccuuguucuuuggucaagguaagguaagucaagug

SEQ ID NO: 4101143 - RNA, 77 nt, Human
cacuaaguccagagauaaaguaggcuucugcuccauuuuucugcaguuucucaggcucugcuuuucuggauauauug

SEQ ID NO: 4101144 - RNA, 129 nt, Human
cacuaaugaaauuucucuaaaaacuauaaauauagggaauaucuuuguucaaagacaugcugaggaucaacagcauguugggaugagaaggaauaguucucuuuaguuucucagagaaguuccuuaaag

SEQ ID NO: 4101145 - RNA, 75 nt, Human
cacuaauggugcaggagugugucuaauacucacccacggccugcagugaguaugaacuuuauuuuugcaccugug

SEQ ID NO: 4101146 - RNA, 93 nt, Human
cacuaauuagcuaagagacuuaagaauaauugagagagggaguuaguuagccucaaugucuucucaagucuuuuccaauguuaauguuuugug

SEQ ID NO: 4101147 - RNA, 129 nt, Human
cacuacacugcaccaccuugugcguaggggcagaucuggguccucucccaagagcgcaucgugauccauggugucucuggagggacccguuugcagcuucucagacacgugcaaaaggcaggugcuugg

SEQ ID NO: 4101148 - RNA, 126 nt, Human
cacuacuaagacuauuuuuaguuuacuuuaucuuuuuaugucugaucuugguaauucuuuugucaagauggacauaaggagagaauagaagaaagaaaaaaaauugaaaauucuuagaaucaagug

SEQ ID NO: 4101149 - RNA, 64 nt, Human
cacuacuuacauguggcuacugggaaauggaaaugugugcccaaagugauaugugcuguaagug

SEQ ID NO: 4101150 - RNA, 72 nt, Human
cacuagaagcaccuguguucaugccucaugaguagcagagcugagugaugagaggagaaugggauucuggug

SEQ ID NO: 4101151 - RNA, 57 nt, Human
cacuaggcuggagacccgccaagaaauuaugagacguuucggucccagaugccugug

SEQ ID NO: 4101152 - RNA, 65 nt, Human
cacuaguguuuuggagagcacaguuuggaaaauucuguuuuagaaugcucuucaaaaucuagcug

SEQ ID NO: 4101153 - RNA, 68 nt, Human
cacuauagccaggguaagguacuuaguaugcuuaaggucguguuaaguucuaacuuauccugugugug

SEQ ID NO: 4101154 - RNA, 57 nt, Human
cacuaucugccauucauuuacuuguuugauucuguauacacauguggcaguauagug

SEQ ID NO: 4101155 - RNA, 118 nt, Human
cacucauguauggaguagguuggcacaacccuauuagcccuguuauccagaugaggaucauccucuugaucauccucuugacagggaguugaaugccaaugccaccuuauaccuggug

SEQ ID NO: 4101156 - RNA, 56 nt, Human
cacuccacagugccugacuccuggcaaacguccaggaagugcucgcuguggggaug

SEQ ID NO: 4101157 - RNA, 78 nt, Human
cacuccaucccuucaccacagcaguaaauaucccuuugccuagaacaccugcugcugcuggugguggaugaaagggug

SEQ ID NO: 4101158 - RNA, 60 nt, Human
cacuccuaccucaauguuuuuguauaggggcggcaggccaggacagggaugggguaagug

SEQ ID NO: 4101159 - RNA, 63 nt, Human
cacuccugggaggaacauuuaccuauauccauauguaugcauaccuguagccucucaguugug

SEQ ID NO: 4101160 - RNA, 71 nt, Human
cacucgcaaaugaagguggugggucauugucaccauaauaaagaugugccuguuucauagugaugagagug

SEQ ID NO: 4101161 - RNA, 69 nt, Human
cacucuacuuucucaggaauucacagaccucgggcaccgccucgacugucuggaccugaaaggugugug

SEQ ID NO: 4101162 - RNA, 90 nt, Human
cacucuaucuucccaucacauuugcaauugcauuguuugaauuguauuguuugaauauguauuuguacauguguuugugauuauugauug

SEQ ID NO: 4101163 - RNA, 83 nt, Human
cacucuauucucucauuuaucuguccuagccaauggaaaccaaaauuaauccugcugggaacauuuugagcugagagagggug

SEQ ID NO: 4101164 - RNA, 59 nt, Human
cacucugacuggcccugcaggagaggguggcucuuuccccuggagacaaagacagggug

SEQ ID NO: 4101165 - RNA, 85 nt, Human
cacucugauggcugccuguggaguguagaugcuggguuaggauccuucagugcucacaaagcacuccuagaagccaggcacggug

SEQ ID NO: 4101166 - RNA, 57 nt, Human
cacucugcacugcagagaucuguuauauauuccgcaguuguucugcaugugaagaug

SEQ ID NO: 4101167 - RNA, 79 nt, Human
cacucugcuguugagagcuggggcauaaaugccacggcaguugcugggcauuuaugccccagcucuuaacaguggagug

SEQ ID NO: 4101168 - RNA, 64 nt, Human
cacucuguccccaggagcccaguuucacugauuaucagaagcagcuuuccucuggggucaggug

SEQ ID NO: 4101169 - RNA, 79 nt, Human
cacucuucccaugggcauguucuuagccagugacugaguguggcagggauacuaaggcagguccauuccaggaaacgug

SEQ ID NO: 4101170 - RNA, 59 nt, Human
cacucuuguucaaaaaucuggcuggcugagugaaaacagcaaggaguagaacaagagug

SEQ ID NO: 4101171 - RNA, 98 nt, Human
cacugaaauugccaaugaugucaaaugcugcaaacucaucaaggaaaaugaagacugagaaugaguucauugcauuugacaguuggagaucuuuggug

SEQ ID NO: 4101172 - RNA, 88 nt, Human
cacugacagaugacauggcccuuugacagugacgccuguaugagcugacagcuccacuugcagucagucaaguccaugcuuugcagug

SEQ ID NO: 4101173 - RNA, 65 nt, Human
cacugaccauggccaauuggcaccaagcuauuuacaaccuuaaugccagucugcauugguuccug

SEQ ID NO: 4101174 - RNA, 59 nt, Human
cacugacuaaguuugugaaggugcagauaguauaacuacaucauaaacugggcacagug

SEQ ID NO: 4101175 - RNA, 76 nt, Human
cacugagcuaguaggcuuaucuuuuucaaagaguaguugaaacuugugauugagaaagucuaaaggggguaaagug

SEQ ID NO: 4101176 - RNA, 61 nt, Human
cacugcacaauguagcaaagaagaaaagaucaacugccuauuuugcaauauuuguacagug

SEQ ID NO: 4101177 - RNA, 67 nt, Human
cacugcacagaugaagcuguaaaugaacaguacacacacaaauguuauuucuaguuguuuugcagug

SEQ ID NO: 4101178 - RNA, 68 nt, Human
cacugcagagguggggugcagagggcaccgugccuuuguuaguugugccccaccgucuccuccaugug

SEQ ID NO: 4101179 - RNA, 55 nt, Human
cacugcaggcccuuacuuggggcaacaguacuuguccugugaggaccugucagug

SEQ ID NO: 4101180 - RNA, 122 nt, Human
cacugccauuuccaugugccugcuacucccuaacuucagccuggcccugcccucacuucugauggaggagcuggaguccaggcaaguaagcuggagagugagggcgccaauggucuggugug

SEQ ID NO: 4101181 - RNA, 67 nt, Human
cacugccauuuggccucuuggaaacuuuaggagacucaggcacaaguuacaagacuaaauggaagug

SEQ ID NO: 4101182 - RNA, 58 nt, Human
cacugcuuugcucugcccccaggaugguuaacccauucacagggccuucagcgcagug

SEQ ID NO: 4101183 - RNA, 75 nt, Human
cacuggagaguguaugcgcaccccagauagcaugugaauaaaccaucuguuugcuggugcauggguuuccgagug

SEQ ID NO: 4101184 - RNA, 57 nt, Human
cacuggaguuugcccuagcuucugucugcuuuuacuggauccuggguccuccagcug

SEQ ID NO: 4101185 - RNA, 57 nt, Human
cacuggauuuccaggaauacucacuauccuaugauaugcugucucugaauuccagug

SEQ ID NO: 4101186 - RNA, 99 nt, Human
cacuggauuuuauauuuuuaacuuucaaccucccaaguuucaguaagagacauguuauuuggagaaguugcuaaaguguaguuguaugaugucucugug

SEQ ID NO: 4101187 - RNA, 78 nt, Human
cacuggcaacucccagaucugauugccuugauguagccuggagcuacgagagguccuuagaaucuguucuugccagug

SEQ ID NO: 4101188 - RNA, 78 nt, Human
cacuggcuuaaacgaauagggauuuuucuaacaaaauaaaaguuuuggagaaggaggauuguuggugauggcucagug

SEQ ID NO: 4101189 - RNA, 72 nt, Human
cacugggaaaaguucuauguuagagauacauccuagcuccauguggugauguauuauaauauuucccaagug

SEQ ID NO: 4101190 - RNA, 130 nt, Human
cacugggaaagacagacuaaaacaucagcgcuucucccuaagguagagcacaggggucccagugaacugcgacuugggccaagcuuugcaggaguguugcauguauacgucuuccacaaaugccacagug

SEQ ID NO: 4101191 - RNA, 56 nt, Human
cacugggaaucugggaaagagaucccagcaccagccucucucguaggaucccagug

SEQ ID NO: 4101192 - RNA, 63 nt, Human
cacugggaggcagucucucuagaagaggucaaccuucugaggaggucagcagucucaucagug

SEQ ID NO: 4101193 - RNA, 74 nt, Human
cacugggcacauccugaagaagccgcacuguuuacaaaguacugucacccacagcgccuucuuuuguccaugug

SEQ ID NO: 4101194 - RNA, 75 nt, Human
cacugguguauuagagcuagaauaaaauucuuaaggggaagacaaaucagggagaagcuggcucagaacaccaug

SEQ ID NO: 4101195 - RNA, 61 nt, Human
cacuguacaaauauugcaaaauaggcaguugaucuuuucuucuuugcuacauugugcagug

SEQ ID NO: 4101196 - RNA, 66 nt, Human
cacuguagcccucugcucaggugcauaggcuggaagcagccagcacagaagugagaggacuuagug

SEQ ID NO: 4101197 - RNA, 68 nt, Human
cacuguaggcaccuugagagcaggagcugcaucuuauguaucucugcaucccucaagguugcauagug

SEQ ID NO: 4101198 - RNA, 79 nt, Human
cacuguauuaauuucaccguugcuagaaaugccuggaaaauaauaggcauucaauaagucacuguggaauaaauaaaug

SEQ ID NO: 4101199 - RNA, 129 nt, Human
cacuguccuuccauugaucuuuuugcuuuggguagucuuccaauuauccuaagaauaguagacuuugggaaggaagugggaagggucugccagguagagcagaaucaacgaucuucaauccagacagug

SEQ ID NO: 4101200 - RNA, 60 nt, Human
cacugugcuaugacacuugguuucaacuuauuugagaguuggaaacuuucaagcauaaug

SEQ ID NO: 4101201 - RNA, 76 nt, Human
cacuguguagcagcacuaagggcagggggaagaaauuacuauccucuucacuuuguuuauugugcaguuacaggug

SEQ ID NO: 4101202 - RNA, 75 nt, Human
cacuguuagguaauaggacagcagacaauuaguagaucagacuacauuggaauucugagguccuuuaccugggug

SEQ ID NO: 4101203 - RNA, 60 nt, Human
cacuguuuuauuccaacauagguucccagcuggagacuauuucauguuggagagauggug

SEQ ID NO: 4101204 - RNA, 129 nt, Human
cacuuaacggugcauucagggguuuaauuugaagcagugcaggaagugagaugccugaacuccacagcgcucucauaucugggcauacacagccuugcgucaaccuggaacccuuuaucccacugggug

SEQ ID NO: 4101205 - RNA, 57 nt, Human
cacuuagagcccagaguaagcugguccauuuccucccaggcucugcauuucugagug

SEQ ID NO: 4101206 - RNA, 120 nt, Human
cagguacacaugaccuaaaaugacagguuuaggucucagugauggcccauuuggauaaggagagaugucuaaggacaguuauuacugggugacuacaugugguuguucaggucgaaccug

SEQ ID NO: 4101207 - RNA, 64 nt, Human
cagguacugucguuacccuuuuuuaacagaaaaaugagccaggaggaauugacacagaagccug

SEQ ID NO: 4101208 - RNA, 85 nt, Human
cagguacuuaaguccacaggcugacagcggguacaaagauagagaggccuguuaaaaagaccaauggauuaaaaagaauacacug

SEQ ID NO: 4101209 - RNA, 110 nt, Human
cagguagcagcagugaugagaacaagcagagaagucucuaggcuaaaaucaaucuccuuagcuuagcauaugaggccucauuugucuugguuauucccaaagcacuccug

SEQ ID NO: 4101210 - RNA, 58 nt, Human
cagguaggaaaagggugucaggucuuccuacaaagaagcuccuucccuuuucuucuug

SEQ ID NO: 4101211 - RNA, 130 nt, Human
cagguaggcugucgucagcacaggucugacaggccccagccacgguggcccacaggugcaagcaagaaauaagcagugccaacuguagccgcugcgcuguuggagaucuuuguuacugcagcacaaucug

SEQ ID NO: 4101212 - RNA, 61 nt, Human
cagguaguccacagugagggagucagaagucuaggcucaauccuaauuucacuacuaucug

SEQ ID NO: 4101213 - RNA, 66 nt, Human
caggucagaggcgcagcccccaccuccagcccccugaacauguggggguuguguuuucuugaccug

SEQ ID NO: 4101214 - RNA, 76 nt, Human
caggucagcguguggagaacuaagcagaccuguucuucauuaacugcggcucucuggggaugucacacacuaccug

SEQ ID NO: 4101215 - RNA, 96 nt, Human
caggucaguggugcugagaggcuucuguuucuuaaaggugcucuucuaguugauuguaaggggcacugccagaagacuuucagcuugaauggcuug

SEQ ID NO: 4101216 - RNA, 72 nt, Human
caggucaucaaaguccgccugcugccguggcaggaggccacgcuccacuaggcgccggguggcuguggccug

SEQ ID NO: 4101217 - RNA, 100 nt, Human
caggucauuuggggauuuuguagagaauguuaagcacuuuggguauuauccuaacugcaguaggaauuuguugcaagguuuuaaucaaaagaaugauuug

SEQ ID NO: 4101218 - RNA, 59 nt, Human
cagguccacagcccaucacugccauaauaggugaccauagaagagagggcugugaucug

SEQ ID NO: 4101219 - RNA, 85 nt, Human
caggucccagugcaggggaaggaaacagagggcaccugagccccucaggcuggguacccuguuuccccuugaacugcacgacuug

SEQ ID NO: 4101220 - RNA, 73 nt, Human
cagguccucaggaggaagaacucugcaacaccacuacaggugugcauucucaguccuuccuccgugggauuug

SEQ ID NO: 4101221 - RNA, 81 nt, Human
cagguccucgucguugaggagaugcgacucgcggggcuggaagcaguucugacacuugcucuuguugaagauguuggccug

SEQ ID NO: 4101222 - RNA, 62 nt, Human
cagguccucugagaugggaggucuaaagggcuccuuugcucugcuucuauuguaguggcuug

SEQ ID NO: 4101223 - RNA, 68 nt, Human
cagguccugaguggcaggguuugggcugaccugcaggcugguagcucaucaucugccuucagaaccug

SEQ ID NO: 4101224 - RNA, 55 nt, Human
caggucggagccgucccuccuggcauuccaggaaaggaggagacagccucaccug

SEQ ID NO: 4101225 - RNA, 61 nt, Human
caggucugaagagucacaugcccaggggcagaauuuaggggccagauuuucuuagaaccug

SEQ ID NO: 4101226 - RNA, 111 nt, Human
caggucuguuuaagagcucucuuuacagucaauacuaggaccauauuuuuuaaauaaacuguaucuuucuuuaauuggcaugucugaguagaagcagaaaaacaggauaug

SEQ ID NO: 4101227 - RNA, 81 nt, Human
caggucuuucggccauagcgaugauuugggauuuuguaccaagugcaaugggaaagcuauuaaagguuguuuaaggauuug

SEQ ID NO: 4101228 - RNA, 57 nt, Human
caggucuuuucuacugguggagggaagaguggcgacccuccaccaguuaugggcuug

SEQ ID NO: 4101229 - RNA, 68 nt, Human
caggugacuucugaggccuucagaaucacugcucugaguucaacugacagaccucuagauuacauuug

SEQ ID NO: 4101230 - RNA, 80 nt, Human
caggugagccagucccucugccugugguucucugggggcaguguguucagggagucccaggcaggggcuggcuugcucug

SEQ ID NO: 4101231 - RNA, 55 nt, Human
caggugcccagcuccugcuguggcuaaguccuagcaggggcuccgggcgggccug

SEQ ID NO: 4101232 - RNA, 60 nt, Human
caggugccuguuucuuuugaauucagucuuaucuaaauuuacccaaggaacauguauuug

SEQ ID NO: 4101233 - RNA, 78 nt, Human
caggugcugcuuccuuccucuaaggaccuagugaauauugagauguuccugacggccaaagagguggaggagucccug

SEQ ID NO: 4101234 - RNA, 65 nt, Human
cagguggcaggagugggccuugaaguuagcacuagucccaugggcuaaauccuguucaccaccug

SEQ ID NO: 4101235 - RNA, 65 nt, Human
cagguggcuaacggccucauaguguaagcaucugauaaaagagguuguugagggugugggcucug

SEQ ID NO: 4101236 - RNA, 115 nt, Human
cagguggcuauugagcacuugaaaugugucugaccacuguauuggacauuacuauuguagacagaacucgugaaccugcagaggucaaaaacaauauuuuaucauccauuaccug

SEQ ID NO: 4101237 - RNA, 68 nt, Human
caggugggagcgaggagcuacuuuaaguagggacaggaaaaagagacucugaggagcccugagaccug

SEQ ID NO: 4101238 - RNA, 65 nt, Human
caggugggccgggguuuguucuugccuuccaucagaguguguuaaacaggccucaggccuuccug

SEQ ID NO: 4101239 - RNA, 90 nt, Human
cagguggggacccacggccuggugcagcaggucgcggcacucgagcagcccggcggccagcacgcgccggucgaaggugaaguccaccug

SEQ ID NO: 4101240 - RNA, 69 nt, Human
cagguggggagaguguggagcagcucuuggauuaggauuaggaaaggagggcugcucuuccuacacuug

SEQ ID NO: 4101241 - RNA, 65 nt, Human
caggugucagcagcacuguacucccucaaaaaccuauggggguccggggcaguggcucaugccug

SEQ ID NO: 4101242 - RNA, 58 nt, Human
caggugucaucagagacaauggaagcugcagaugagcaguuaaaccagaugacaguug

SEQ ID NO: 4101243 - RNA, 87 nt, Human
caggugugagccacugugccgcuggagcuggaauugaauccuugucuguuggacuccaguguuagccacugugcggcucugccccug

SEQ ID NO: 4101244 - RNA, 96 nt, Human
cagguguggcuguucauucuacaggugauucaggcucugggaagguguccucccauugaccuugagucauuauagcaacuauucuagcuacagcug

SEQ ID NO: 4101245 - RNA, 89 nt, Human
caggugugugccaccacaccuggcuaauuuuuguguuucuaguagagacaggauuucaccauguuggccaggcuggucucaaacuccug

SEQ ID NO: 4101246 - RNA, 84 nt, Human
cagguuagagauccuuuuaacagauacuucucuuuacaagguacagugaaguugaauaauucauagaagcuauucucugagcug

SEQ ID NO: 4101247 - RNA, 84 nt, Human
cagguuaugcuaaauuuuaauacugcuauuguaggaaaaaauauauuuuuguuacagcagaauugaaagagaaccuaugacuug

SEQ ID NO: 4101248 - RNA, 84 nt, Human
cagguucuccaucaccuguuacgagggaauaauaauaauaccuauucccugcuuucuugugaggggagauauggaaagcaccug

SEQ ID NO: 4101249 - RNA, 56 nt, Human
cagguugaugaauuaacaacucuugugagcucauagccacagagguuuacagccug

SEQ ID NO: 4101250 - RNA, 82 nt, Human
cagguugcaggugugggcaggggagcaaugccuggaagcagccacauuugcuggugcaccccagcacuaagcgugcaaucug

SEQ ID NO: 4101251 - RNA, 108 nt, Human
cagguugggguagggacuguggccuggggacacuaucuagguguuacuuaaagaaugguacuuccuaagccaccaaauaauaccuuccaagucuccuccuauaaucug

SEQ ID NO: 4101252 - RNA, 59 nt, Human
cagguuuaguuccacacagcuccuucgacuggaaauuguuagaccuggggcuuagccug

SEQ ID NO: 4101253 - RNA, 69 nt, Human
cagguuuucgaggugugugugcauguguauacgugcacaugcuacacagagcuccucgacaagcaccug

SEQ ID NO: 4101254 - RNA, 124 nt, Human
cagguuuugagcauggaauaaggaauggagaggggagaugaugagaucacugcuaucuuuguucuauauaaccuccacuucuacccauaguucuuuuucuuuuuccauacauaaccagaauuug

SEQ ID NO: 4101255 - RNA, 112 nt, Human
caguaaaaaaggugagaaccaccaucacuagggaaagaacaaggguauuaauaucgccuuaauuuauagaauuucuuggauaaugcugggguugauuuucaucugauuauug

SEQ ID NO: 4101256 - RNA, 62 nt, Human
caguaaaaguugaaaagugaggaauguccagucggugcucauucccaucgucaacuucacug

SEQ ID NO: 4101257 - RNA, 65 nt, Human
caguaaacaagaggcaugaucuuauaauuuagcuuagcauaaaauagcuuaugucuuuugaacug

SEQ ID NO: 4101258 - RNA, 55 nt, Human
caguaaacacugucuuuauauaucccucaugcaaggugauguaacauguuuacug

SEQ ID NO: 4101259 - RNA, 70 nt, Human
caguaaacuuuccuguuuguaacuaacugaaaucagcuuugccucacuuaggugcaaagggaacuugcug

SEQ ID NO: 4101260 - RNA, 129 nt, Human
caguaaagcuuuggucccuuucucucacuuauuugccuggaaagagagagcuguccugggacacccugauccaggucagggugggcgguuuaucucuggugaaggagaggagcuaaagagauaauucug

SEQ ID NO: 4101261 - RNA, 116 nt, Human
caguaaauuacacuaaugauacuuauuaauaugaugaauuauguuaagagaguuucuaauauugagaauuuuuucauuucugacauggucaugauguauuauuccuuaaugugcug

SEQ ID NO: 4101262 - RNA, 65 nt, Human
caguaacugcugaugaccucaaacucuuuccaucguuggagugcggucaacaucagcaguugaug

SEQ ID NO: 4101263 - RNA, 66 nt, Human
caguaaggaugcacauaacuaggaaggaaauucuccccuucuguuuuguuguuguuguuguugcug

SEQ ID NO: 4101264 - RNA, 60 nt, Human
caguaaguagucagggguccagggcaggcccugccuccugguguccuggucugcuagcug

SEQ ID NO: 4101265 - RNA, 127 nt, Human
caguaagugcguguauagguuugcuaccuggguauauugcauagugcugagguucgggguauaaaagauccugucaccuagguacugagcaucuauacccaacagcuagccuuucaacucuugccug

SEQ ID NO: 4101266 - RNA, 129 nt, Human
caguaaguggcagaggaagcauguaaacccaggucuuugacuaauaugcuugcuccugguaaacguccauaaguauucagcgauuaguucaauaagggcccuuaucuuccucugugccugugagaacug

SEQ ID NO: 4101267 - RNA, 70 nt, Human
caguaaguggcaggugcaggauuugaacccaaaucugccuauuuccgaagccugugcuuaucacuugcug

SEQ ID NO: 4101268 - RNA, 62 nt, Human
caguaauagguaacauugcccugagaagagcaaaucacagaauaagcaagcaccuguuauug

SEQ ID NO: 4101269 - RNA, 79 nt, Human
caguaauauuucuuagagaugguuaaaaauagguucugagucaucuuaagcauauuucuaggaauuuguuuuauugcug

SEQ ID NO: 4101270 - RNA, 91 nt, Human
caguacagguguuuuguugcuuccuuaguugacugucuuaguugcuuccccaagcugcuucccuaguugacugaggaagccgacacuacug

SEQ ID NO: 4101271 - RNA, 56 nt, Human
caguacuuuucaaccaguaugaacacacuuccuucuuccucugguugucuguacug

SEQ ID NO: 4101272 - RNA, 68 nt, Human
caguagaaggaaagagcacuuuuugaggcuuuugauaccucaagcaaauguccuuuuguucuagacug

SEQ ID NO: 4101273 - RNA, 81 nt, Human
caguagauucaucuguucacucggcauguauguauucaauagcuaguacauacauagcaggguaguagaucagucagacug

SEQ ID NO: 4101274 - RNA, 80 nt, Human
caguagcacucugucagugaagcgaggguauuuuaugauguuucugaccucccauucuaucugaggaugugcuaacucug

SEQ ID NO: 4101275 - RNA, 90 nt, Human
caguagcaugguaguagcuaggaauacagacacugcccuucacauggcauaacuuuguuuuugucuccuugucugcuuuucaugcaauug

SEQ ID NO: 4101276 - RNA, 74 nt, Human
caguagcuugcuuaggcuuuuaaaccauuuuaauguaggaauauaaaggccuuggcauaaacaaaagcuaacug

SEQ ID NO: 4101277 - RNA, 92 nt, Human
cagaugucauaugauaugucuuaacucuagaaagguuuauuuucuguacaaagaaucagaaacuuggagagauaaucccauauuggcaucug

SEQ ID NO: 4101278 - RNA, 64 nt, Human
cagauguccaggaucuauccccagaaacuaacuaguucacucuaggguaggaccuagacaugug

SEQ ID NO: 4101279 - RNA, 69 nt, Human
cagaugugcuuugaaguucaauguucccacuuuguaauccacaaguaacacggaacuugaagcaaucug

SEQ ID NO: 4101280 - RNA, 55 nt, Human
cagauguggaaugcagcaggcugagcccagcacucugccugugcuccagcaucug

SEQ ID NO: 4101281 - RNA, 90 nt, Human
cagauguuuauuugccuuuucaggguauguucuagaucugacugauuuuuuaaguauuugacacuaggugcccugagcaaacaaaaacug

SEQ ID NO: 4101282 - RNA, 98 nt, Human
cagauuaagaagacuggaggggaaaguucugcacaagggaaaacaaaacuaaggcuaaguuuucuuucugucauuacuuuccucccucuccuuuccug

SEQ ID NO: 4101283 - RNA, 66 nt, Human
cagauuauaguuuucaaggauuggagcuggaaggaguugccuguuugagagcuguguuaaggucug

SEQ ID NO: 4101284 - RNA, 85 nt, Human
cagauucaagaacaauaauuuuagaggaauaguaguucuuaaaagugaaaaaucuauuguuauaauuguugacauuguugaacug

SEQ ID NO: 4101285 - RNA, 62 nt, Human
cagauucaguguuugguuuacaaauuccuccugauuuauaaaccauucagacugaaccacug

SEQ ID NO: 4101286 - RNA, 62 nt, Human
cagauucccaucuccugagccucuauaagcucuuacggcuguuuuuccaggaaaugaaucug

SEQ ID NO: 4101287 - RNA, 130 nt, Human
cagauucuaacagggucaaguauguggacagaucaaggcuuagaguggggugagaagcagcaaggccagcuggcccugagaugccucacccuagucaaagcuucauuaacgguguccuggccuugaucug

SEQ ID NO: 4101288 - RNA, 63 nt, Human
cagauucucacuguauucagguuguaaacacuugccugacaacaacugaaagcaaggaauuug

SEQ ID NO: 4101289 - RNA, 63 nt, Human
cagauucugcagucaacuugcuuucuacucuuccuuccagauucaagaucucugcagaauuug

SEQ ID NO: 4101290 - RNA, 65 nt, Human
cagauucugggagauccaagcagaacuacccauaguauuacuucuggagccucucaaggaaucug

SEQ ID NO: 4101291 - RNA, 92 nt, Human
cagauugccagugaauaauuuuuuuuaguaugaguguccuaaguauuguauaggacauacaugggauuaaaaaauuauuuguugauuaucug

SEQ ID NO: 4101292 - RNA, 94 nt, Human
cagauugcugggugccacccuuagagugucugauucuuggucugggguaaagaccagagaaugugcaucucuaacaaguucccaaaugaugcug

SEQ ID NO: 4101293 - RNA, 68 nt, Human
cagauugcuucagugcucugagccuguuuccuauaaaauuagauaacaguaucugccugacagcacug

SEQ ID NO: 4101294 - RNA, 75 nt, Human
cagauuuagauucgcuggggcugggguggagccugggaguccuuguuucuaaccagcucccaggucugaggacug

SEQ ID NO: 4101295 - RNA, 65 nt, Human
cagauuucugggcaccaccacagacuuucugacucaguaagucuguagaggggccugaaaguuug

SEQ ID NO: 4101296 - RNA, 74 nt, Human
cagauuuguuggcuaagcaguuuaagcacccuggagguggagaccucucugaaagcagcugcucaucagaucug

SEQ ID NO: 4101297 - RNA, 70 nt, Human
cagauuuugugcuugaacacaucuuuuagcuguuaaaacucaguuuuucuuugaguuuaaugcaaaacug

SEQ ID NO: 4101298 - RNA, 72 nt, Human
cagcaaauuguaaggcagggauuuaaaccaagguaauguggucucagaauuccugucuuaacaguucugcug

SEQ ID NO: 4101299 - RNA, 81 nt, Human
cagcaacagcaacagcaagacaaauaauccagaccccauauuuuaguucuggucccaguuaucuucuguugccuuguucug

SEQ ID NO: 4101300 - RNA, 63 nt, Human
cagcaagaacagccugaugugcauccuacaaaauacuccacugcgcggacgggcuuuugacug

SEQ ID NO: 4101301 - RNA, 92 nt, Human
cagcaagcuugaauuuccaaacccagcgagcuacacaugaauggucccugcaugcgugggcuguagcacuggguuagaaaucacaauuccug

SEQ ID NO: 4101302 - RNA, 59 nt, Human
cagcaagguagaauccagaggcugugcuugcuggcggaguccuggacuccaucucacug

SEQ ID NO: 4101303 - RNA, 69 nt, Human
cagcaaguauuaauuuaaucuccaugguauuucuaaugccaguaaccuggggauguuaagauuuugcug

SEQ ID NO: 4101304 - RNA, 60 nt, Human
cagcacaugguaggauugcacuuuucaguccccuugaaguuaagcauggccaugugacug

SEQ ID NO: 4101305 - RNA, 75 nt, Human
cagcacgauauuuauguugauguucacggcgugcauacucagaugcggccaggaagggaagaucagcaugggcug

SEQ ID NO: 4101306 - RNA, 56 nt, Human
caggcagggagccacuguauaauuugugaggcaauuugcagaaggcuuccuguuug

SEQ ID NO: 4101307 - RNA, 77 nt, Human
caggcaguugagaggccacauagcuugcauguagcucagccccuugcaggcgguguggcugccauguaaauugcuug

SEQ ID NO: 4101308 - RNA, 58 nt, Human
caggcauagaagggcaagaauaagacaaaaagugucaucuccagccccucugugugug

SEQ ID NO: 4101309 - RNA, 125 nt, Human
caggcaucugcuugugagugccagagggugugggucuguuuucuagggcugaggugaguagggcugcuuuccagagcugagaaggcuuggccaccaccugggugggcucagaggacagaacacug

SEQ ID NO: 4101310 - RNA, 67 nt, Human
caggcauggggaggugcauauggguagugcuuaaucuaagcacugaaggaaagccuuugcaugccug

SEQ ID NO: 4101311 - RNA, 68 nt, Human
caggcauucaugaauucuacaggauggaguucccugcugggacaccaaaguagaauuaauguaguuug

SEQ ID NO: 4101312 - RNA, 85 nt, Human
caggcauuuccacccugcucaguccccagaugugugcugucuuuggaaaggcaagcacguggguuugagaucugggugcugucug

SEQ ID NO: 4101313 - RNA, 117 nt, Human
caggccaauguggagggaaagcugggguggugcaggccucaugcagcugggucccuccuaccaggccuccagaguccugcaccagcuccaggacagcccucuccuccccauggccug

SEQ ID NO: 4101314 - RNA, 58 nt, Human
caggccacagagagugcaugugcgugcagaagcaugugcauacagguuugugugucug

SEQ ID NO: 4101315 - RNA, 95 nt, Human
caggccaccgagccguuuuaaugaggucucucgcuggccagcccguggcuuucagaggccuugagagacccggagagaggguucccuggugccug

SEQ ID NO: 4101316 - RNA, 92 nt, Human
caggccacucacucagucccuggcacauaauagguggccaguaaauggcaguucccauuauuguuagugacagggugaagacuagaacccug

SEQ ID NO: 4101317 - RNA, 58 nt, Human
caggccagaacagcucugcaccaucacauaucguguugcggcuuagcuguuuggucug

SEQ ID NO: 4101318 - RNA, 109 nt, Human
caggccagggguucccagggagccuggcuccacaggccagggugugggaggaccgccuggccacaccucagccauguggaggcggcaccugcacacccaagcucgccug

SEQ ID NO: 4101319 - RNA, 93 nt, Human
caggccccacagaggaggugcagaguaggguugguacucaguuugcccagcuccccaccagaggcucugccaccuccacucugugguggccug

SEQ ID NO: 4101320 - RNA, 64 nt, Human
caggcccuucuuuguaauaaagauuaggcaauaacucccugauuuugagacacagaaggaauug

SEQ ID NO: 4101321 - RNA, 63 nt, Human
caggccgagggaagcaggcugcaaaaacaucacaaccgggcaaaguucucuuccuugggccug

SEQ ID NO: 4101322 - RNA, 57 nt, Human
caggccucccaaaagcagcugagagauuuuccugcucccuggcccuugggagaccug

SEQ ID NO: 4101323 - RNA, 60 nt, Human
caggccuccuaugagcacuagcagaauacaaacucuccugucagauccugggguggccug

SEQ ID NO: 4101324 - RNA, 79 nt, Human
caggcgaggcccaggugggcaggcgaggcccaggugguccauggcacgccucccgucucccgccucauccccucaccug

SEQ ID NO: 4101325 - RNA, 61 nt, Human
caggcgaugguucuggcugcuuguauuccagcccgaggaugcagugcccagaccacgacug

SEQ ID NO: 4101326 - RNA, 59 nt, Human
caggcuaaccaauguuaaacacugaacgcccgcugcaguguaacugguuaaaaagcuug

SEQ ID NO: 4101327 - RNA, 61 nt, Human
caggcuccucacucaugcucccucacucccaccugggaugcuauagcugaaugaaggcuug

SEQ ID NO: 4101328 - RNA, 56 nt, Human
caggcucgguccaguggcacccagcucccuaccuccugugccagccgacuggccug

SEQ ID NO: 4101329 - RNA, 59 nt, Human
caggcucuuuugguggcaaggaacagagacucauccaaacuugcuacaggagaaggcug

SEQ ID NO: 4101330 - RNA, 59 nt, Human
caggcugagcucuggccugggccucugcucccacaugguccccagcuaggcucagccug

SEQ ID NO: 4101331 - RNA, 79 nt, Human
caggcugcagggcacuguggggcccaugcugagggacagacgagugacuugcagccagcugucccaagugccuggccug

SEQ ID NO: 4101332 - RNA, 60 nt, Human
caggcugccgaggcugcagaauagaaucucacaaagccauuccagcccagguccugccug

SEQ ID NO: 4101333 - RNA, 63 nt, Human
caggcugccuggaagaggacugagauucugcaguucucaacaacuccaggugcagcaaggcug

SEQ ID NO: 4101334 - RNA, 78 nt, Human
caggcuucaguuuggggaggauaugugaguuauuuuaauguuuuugucucaauuucuucauuuuucccuaugaaccug

SEQ ID NO: 4101335 - RNA, 55 nt, Human
caggcuuccgccagguuuccaguauccaggcugcagggagccuggcaggggcgug

SEQ ID NO: 4101336 - RNA, 70 nt, Human
caggcuuguggggaaucugugugccccgagggggcuccccucccagguaacaacauucgucagaagccug

SEQ ID NO: 4101337 - RNA, 56 nt, Human
caggcuuuuucugcuguccucucucacccagaagagauuuagcaggaagcagccug

SEQ ID NO: 4101338 - RNA, 63 nt, Human
cagggaaacuaggaaauaagcucucugggacugacccaggcacagcuaacccuacuuucuuug

SEQ ID NO: 4101339 - RNA, 60 nt, Human
cagggaaagggaugcaguaaaaugauuugaaaacauuuuaauuuauucaccuuuaccuug

SEQ ID NO: 4101340 - RNA, 73 nt, Human
cagggaaaguucuuguccacucuguucuugugcuugcuuauuuuuucagaugaggacaaaaacuuuugcccug

SEQ ID NO: 4101341 - RNA, 128 nt, Human
cagggaaggaucaaccuggugaacugaaucggggagugagggucauaaaaucagccccagauccuaguggcaugcuuuaauauucugcauucuccuuauucuacucaaguaguugcucuccuuccuug

SEQ ID NO: 4101342 - RNA, 55 nt, Human
cagggaagggucugucuucacugagucauugccaaugaaggugacuccuuucuug

SEQ ID NO: 4101343 - RNA, 70 nt, Human
cagggaaguggguggauuuuaaugcuauggauuaagugucuauauuaucauaaaaccauucaauauuuug

SEQ ID NO: 4101344 - RNA, 66 nt, Human
cagggaauugguuauaccugugaugagagagcugagaagccucacaaaggaugaugaauucugaug

SEQ ID NO: 4101345 - RNA, 70 nt, Human
cagggacacagcugcuguggagguuuucacugcauuuucaguaaggcauuauagagacagccuguuccug

SEQ ID NO: 4101346 - RNA, 57 nt, Human
cagggacuacagccagcccucccuguggaagucuggguggcuggagggguggccuug

SEQ ID NO: 4101347 - RNA, 69 nt, Human
cagggacugagauccagacugugccaggcuugaccuaugccugccauggggcuggguauuaguuuccug

SEQ ID NO: 4101348 - RNA, 57 nt, Human
cagggagaagaacucaaguuuguauggcaacaagacuagaaaaugacuuucucccug

SEQ ID NO: 4101349 - RNA, 60 nt, Human
cagggagaguaaugagaguguagccagagacuugacucauucugcaucacucuugcucug

SEQ ID NO: 4101350 - RNA, 56 nt, Human
cagggaugugcagcauccagacacugcuuaaucacagugagcugccgucuucccug

SEQ ID NO: 4101351 - RNA, 67 nt, Human
cagggcaacguggccccugaacgauucucacaugaguugagguuuggcugggccuguacuugcccug

SEQ ID NO: 4101352 - RNA, 80 nt, Human
cagggcaauugaggcuuagucaaucagacucaaugagccgcacuucauugauuuuuggaucugagcugcaauggcgccug

SEQ ID NO: 4101353 - RNA, 65 nt, Human
cagguugcgugugaccguuucccuccccucaucaacuugaagguuggaaauggcacacagaccug

SEQ ID NO: 4101354 - RNA, 56 nt, Human
cagguuuagaggugauuuggaccuuucuguuggcuucagaauuaccccuggaucug

SEQ ID NO: 4101355 - RNA, 82 nt, Human
cagguuugucaaagaucagaugguuguaggugugcagucuuaauucuggguucuuacucuguuccauugaucuacaugucug

SEQ ID NO: 4101356 - RNA, 91 nt, Human
cagguuuguuucacuucuaaggugucucauuaauguacuucaucugagaauuuguuuuaagagcgcacuuuauaaucuugauguuugcuug

SEQ ID NO: 4101357 - RNA, 68 nt, Human
cagguuuuuauguugaugcuacuuggugauauuauucacuaaaaaaguaacaugcaaauaacagucug

SEQ ID NO: 4101358 - RNA, 73 nt, Human
caguaaaaaguuggggcuccggggaaggagaaacacugccaacucauuucacagauccuacagcuugugauug

SEQ ID NO: 4101359 - RNA, 56 nt, Human
caguaaagcauguaugucuucaguucuuacuggagaugagccuucaugcuuugaug

SEQ ID NO: 4101360 - RNA, 58 nt, Human
caguaaagguuuuauggggcuuuccuggaagcuucccauuauggaaacucuugugcug

SEQ ID NO: 4101361 - RNA, 115 nt, Human
caguaaauaaucugauuagguugaaccguaugaaauuuuugacauuugaaugcuuuuaagcuacaaaagcagcaaguuuauauguaguucaaucuaauacacacuagguuugcug

SEQ ID NO: 4101362 - RNA, 60 nt, Human
caguaaaugguaaaggguuuauuagcaauuagugcuacaugaaugcugaauuaugaacug

SEQ ID NO: 4101363 - RNA, 59 nt, Human
caguaaauguccucgcagggaaauccucauuuaauacuccuugaauggacauuacacug

SEQ ID NO: 4101364 - RNA, 71 nt, Human
caguaaucaaaagaugucucacucaguucucauaaaaauacaaugaggucacaguguuuggcauuuuacug

SEQ ID NO: 4101365 - RNA, 87 nt, Human
caguaaucgagaccuucacuuuggcaaugccuguuccccgaacaugcuuaauacacuguuaaagggagaguauaagauuuccagcug

SEQ ID NO: 4101366 - RNA, 63 nt, Human
caguaauggaaauggucaggccauaagaugaaauauaacuucauuggaaugaucguuuugcug

SEQ ID NO: 4101367 - RNA, 56 nt, Human
cagcacguugaaguagaguaaggagguuacacuccagaugcuuuuuuaagcuguug

SEQ ID NO: 4101368 - RNA, 85 nt, Human
cagcacuggagcucagcccagguuccagcucaauugaagaaucuccuccuuccacuggaaaccuccuuggcuggguuccaaauug

SEQ ID NO: 4101369 - RNA, 65 nt, Human
cagcacuuaagaaagacuaaaaagcuguaucaaccagugauaaugcauggaucuuuaugaggcug

SEQ ID NO: 4101370 - RNA, 115 nt, Human
cagcacuucagguuuugauaugcccaggacugagguccuuuuagguuuucagaagacugagaauucuuaggaaccuagacagggccucuguuaaggcugagcaagcugcggucug

SEQ ID NO: 4101371 - RNA, 56 nt, Human
cagcagaaaaugugggugauuucauuaucugggauugcuuugucauauuucugcug

SEQ ID NO: 4101372 - RNA, 89 nt, Human
cagcagaaagaccgggacucggaggguggccagagugucauuuuauucucuuuaacaggaggucuggccaccaguccuggccucuggug

SEQ ID NO: 4101373 - RNA, 101 nt, Human
cagcagacaccucguguuuuuugugcccuguagauccccagugcucagcacuguggcuggcucaucauagguguucaaaauaaacagguggaucccagcug

SEQ ID NO: 4101374 - RNA, 55 nt, Human
cagcagagcugggcuuugaauucaggccaacugcacuuuaagucccagcucuuug

SEQ ID NO: 4101375 - RNA, 80 nt, Human
cagcagauuuuagaguuuacacugauucuguguucuaaaagaagaaaauguaauaucacugugaauguuaucaucuuuug

SEQ ID NO: 4101376 - RNA, 58 nt, Human
cagcagcagcaucaccugagagcuggauagaaacgcagcaagccaggcccugcugcug

SEQ ID NO: 4101377 - RNA, 60 nt, Human
cagcagcauggcugacuaaagacauugacaucaugacauugucauguugcucugcuguug

SEQ ID NO: 4101378 - RNA, 64 nt, Human
cagcagcauugcucuggauuccuaagugagagacaaacacucagaacccagcagcagugcucug

SEQ ID NO: 4101379 - RNA, 61 nt, Human
cagcagcucccauccgcugagcaagacacucaccaggcacgccggcgggaggaagcuguug

SEQ ID NO: 4101380 - RNA, 63 nt, Human
cagcaggaggcauggcuucccuucucccucuuucuucauauggaugaagcaaucuuucuguug

SEQ ID NO: 4101381 - RNA, 63 nt, Human
cagcaggccugcaggcccucagggaggcaacguagcuucccugcagacguccugcgggugcug

SEQ ID NO: 4101382 - RNA, 55 nt, Human
cagcaggcguugggagaaagacagaaugccuauugaacucucugagaugcugcug

SEQ ID NO: 4101383 - RNA, 60 nt, Human
cagcaggguauacagggaauuuggcuucucuggcuccugaccuuuccccugugcccucug

SEQ ID NO: 4101384 - RNA, 58 nt, Human
cagcagguggcauugucccgccagcagugugcuggcguccguggugacaccauaguug

SEQ ID NO: 4101385 - RNA, 72 nt, Human
cagcagguucaaucuguacuugaaaaauuauuuguaugaaaaauuauucugacuacagauaaugccuggcug

SEQ ID NO: 4101386 - RNA, 60 nt, Human
cagcaguagagguaguagcacugucaucagagggaagagacaucugccuuagugcugcug

SEQ ID NO: 4101387 - RNA, 84 nt, Human
cagcaguauuuuaugggacacaguuugcauugcuaggaacaaaaaucacuugcaguguuauguuuucuauaauuuacagaguug

SEQ ID NO: 4101388 - RNA, 130 nt, Human
cagcaguggugguuguaaaacgcuaugaaguagauggcuuugaggaauuugaaucugggaaugccagaagaauuccaagccaccuuaucuagacuuuuauuuuuuucaaacuccaaaccauugcccccug

SEQ ID NO: 4101389 - RNA, 69 nt, Human
cagcauaaugaugcaguuacugucucauguuauuuagcuuggguucaggcaucauuauuuuaucaguug

SEQ ID NO: 4101390 - RNA, 65 nt, Human
cagcauagcugauuaaggcaaaaaacuaaaaugaaaauaagagucaagccuuuagucacuugcug

SEQ ID NO: 4101391 - RNA, 55 nt, Human
cagcauaggggagaacuuggggcacuaaccaggguguucaggauugacccuacug

SEQ ID NO: 4101392 - RNA, 58 nt, Human
cagcauaucugaguugaaagaguagcgaacaauauucuuuugguuauguaauaugcug

SEQ ID NO: 4101393 - RNA, 61 nt, Human
cagcaucucugccugccugcaauuccccucguuuggcagaugcugucggcagaagacgcug

SEQ ID NO: 4101394 - RNA, 61 nt, Human
cagcaucuggauuuccuccacuugcggcuucaaguaagauggaagaagaaucagaggccug

SEQ ID NO: 4101395 - RNA, 64 nt, Human
cagcaucuuuauaaaaaguaaagcugauaaaauucaguacauugcuuucugaagaucucagcug

SEQ ID NO: 4101396 - RNA, 57 nt, Human
cagcaugcuugggggagggagcccugaugggugauuauuuuccagaaaguaucauug

SEQ ID NO: 4101397 - RNA, 63 nt, Human
cagcaugugccuucggcuccuggagcagaggaucccugucucucagugcacgcaccaugccug

SEQ ID NO: 4101398 - RNA, 56 nt, Human
cagcauugucuccaagcaggucucugccgacggaagacgcugacagacgauugcug

SEQ ID NO: 4101399 - RNA, 65 nt, Human
cagccaaagaagaguaacuuuuaacuuuacguggcuacaaguauguuccuagugcucuucgguug

SEQ ID NO: 4101400 - RNA, 59 nt, Human
cagccacaggaaacagagacagccuccuuguugaggaagcuguucccaauccugggcug

SEQ ID NO: 4101401 - RNA, 65 nt, Human
cagccacaguggugagugacugauaggcucuccuccugaugcucuucacacccacgcugucccug

SEQ ID NO: 4101402 - RNA, 88 nt, Human
cagccaccacccuggaaagaaggucuggggaaggcuacccacagucauauccucagcacaucuuuacauuuccagggagagugcacug

SEQ ID NO: 4101403 - RNA, 73 nt, Human
cagccacccagcagaggaggcaagagcauggaaaaugucucuuucagccaauuuuccugaggaacccuggcug

SEQ ID NO: 4101404 - RNA, 55 nt, Human
cagccacguagcccuuggccguggugagggccucggccgccagcacgugugccug

SEQ ID NO: 4101405 - RNA, 62 nt, Human
cagccacugacaggaaugguccggugaagagggacgggaugacuugcugaucagagggacug

SEQ ID NO: 4101406 - RNA, 66 nt, Human
cagccacuggugccaggcuguugucugagauccgggcagagacggugcugucgcucacguggucug

SEQ ID NO: 4101407 - RNA, 64 nt, Human
cagccagaaaaacaccaagaggauuuacacuaugauauuuucuagucuacuugauuuuuggcug

SEQ ID NO: 4101408 - RNA, 64 nt, Human
cagccaggagggaaaggacaauuuuagggccacaaucugaaaguggucugcaucccuucuguug

SEQ ID NO: 4101409 - RNA, 57 nt, Human
cagccagggaggauuacaccccagggcccagccuccuccugggucucccuuuggcug

SEQ ID NO: 4101410 - RNA, 72 nt, Human
cagccaggggcacggggcugagccacgacaacuccagggcuucccagucccugcucucaaguucacugguug

SEQ ID NO: 4101411 - RNA, 67 nt, Human
cagccagucgucuuuauuacagcuucugcagaacacuugcuuagacugugagaagauggcugcguug

SEQ ID NO: 4101412 - RNA, 72 nt, Human
cagccaguucucuagugauauuuuacagauaaacaauauauuuuuauucagaugucuuagaaacugaagcug

SEQ ID NO: 4101413 - RNA, 105 nt, Human
cagccauccuccuuccugcugguguggcggcgcccuguagggaccaguggcucugggcugcaacgggccugccacccguguccucggagccaggaaacauggcug

SEQ ID NO: 4101414 - RNA, 89 nt, Human
cagccaucgcaccagccagaaggggaggucuucguggggcagggccccugccugccugcccuggggggccuccuugcggugggaggcug

SEQ ID NO: 4101415 - RNA, 76 nt, Human
cagcccaucccaugugucccugucugguuuucaugcuuugcugugacaggaacuauguggaugguuuucuuugcug

SEQ ID NO: 4101416 - RNA, 69 nt, Human
cagccccacgugugcuguacuguuucuguuuggcccaaacuagagacuaagccagcauagugcuugcug

SEQ ID NO: 4101417 - RNA, 58 nt, Human
cagccccaggaaaggaaaugaaugggucagaacagcccaauacauuuuuuuggagcug

SEQ ID NO: 4101418 - RNA, 56 nt, Human
cagccccaugaaaagggaggagggccuggucuuuggucccucaggucauugggcug

SEQ ID NO: 4101419 - RNA, 64 nt, Human
cagccccgugucccacaagcagcccacuauccuggcugccccucugugaggagcauggccgcug

SEQ ID NO: 4101420 - RNA, 76 nt, Human
cagccccucuccuccucggggaguuugaccugcauggccacaucagaguccucacccugaggauggacaggagaug

SEQ ID NO: 4101421 - RNA, 89 nt, Human
cagcccuacguuucugucccaggcaaaggcagcucauuggaauugucccagcaggcuuguuaugucugagagugaggaggaagaugcug

SEQ ID NO: 4101422 - RNA, 63 nt, Human
cagcccucagaggagagaaaaccaauucuccaacaaacaggucucuccaacaugguggugcug

SEQ ID NO: 4101423 - RNA, 62 nt, Human
cagcccuggaacagcugacucagccuuccccuaccacuggcagagagucacuucuaggccug

SEQ ID NO: 4101424 - RNA, 57 nt, Human
cagcccuggcagcuuucagggugacuggccagaccagaagccaaguuguggggguug

SEQ ID NO: 4101425 - RNA, 78 nt, Human
cagccgggugaauggcagaaagaauagaggcuauuugaauacugauguggcccucacuuucuucuauuuccauuaaug

SEQ ID NO: 4101426 - RNA, 81 nt, Human
cagccuaccuaacacuggcuuuugcugaggcucuagcagccagccaggggcucugcaugugaguggguggugguagaguug

SEQ ID NO: 4101427 - RNA, 63 nt, Human
cagccucacaccaucuuaaggggacuucuuaagcacuugauucucuuagaugauguguuccug

SEQ ID NO: 4101428 - RNA, 92 nt, Human
cagccucaugguccucaaggcuggaguggcguuggagaaaccaggucauaguuguauaaccaagguacucugcaggauggacuauggagcug

SEQ ID NO: 4101429 - RNA, 60 nt, Human
cagccuccugggacacucaccgcucacaggagacugagggagugcuccgcgagagggaug

SEQ ID NO: 4101430 - RNA, 62 nt, Human
cagccucucuguaucucaggauccucgucuguaaaaccgcaguccuaguugccaugaggcug

SEQ ID NO: 4101431 - RNA, 84 nt, Human
caguaauuguaaaguaguaguacagguacucuguuacuaacucaaaauauguaaacuaccacugauauucuauuuugcuugcug

SEQ ID NO: 4101432 - RNA, 58 nt, Human
caguacagcaugguauggaaagaccaaacaaugagcugccucugccauuugcugccug

SEQ ID NO: 4101433 - RNA, 75 nt, Human
caguacuuauuucuauuuagggauucugggcaucuuccgcagcccuaaaccaccuaaauggacuuauaagagcug

SEQ ID NO: 4101434 - RNA, 61 nt, Human
caguagaaagggcauuagccugggagaugagacacuugguucaaggccagcccugcuacug

SEQ ID NO: 4101435 - RNA, 55 nt, Human
caguagaccgucccggcagcccugcaguccuccacagcugccaggacaguuacug

SEQ ID NO: 4101436 - RNA, 74 nt, Human
caguagagcccagcuaaauuuauauaauuauaauagguaauauuuauggaaugcuugcugugggucaggugcug

SEQ ID NO: 4101437 - RNA, 56 nt, Human
caguagcacuagauauguguggcuaaugaacacuugaaauguggcuagugcuacug

SEQ ID NO: 4101438 - RNA, 57 nt, Human
caguagcaggcacucagcacguggcaauucuccuuccacugccagccuugucuacug

SEQ ID NO: 4101439 - RNA, 57 nt, Human
caguagccacuagacacauguaauuauuguguauuugaaguguggcuggugcagcug

SEQ ID NO: 4101440 - RNA, 67 nt, Human
caguaggcagaaguggcauucggagugggaauaguagacaugacugguggccuuuucauguuuccug

SEQ ID NO: 4101441 - RNA, 62 nt, Human
caguagggggcuggcagcuggcucugggguccuaaaaccccagggaaggccaucuucaacug

SEQ ID NO: 4101442 - RNA, 71 nt, Human
caguagugacugugagucgcugugacacuggcuucucgccgucugcugucuuuugauuuacugucgcacug

SEQ ID NO: 4101443 - RNA, 89 nt, Human
caguauaugcagcaaguggacauuuagaauggcacaguuauccauauaggaauauuguugaggcaguucaucuuguugucccuauagug

SEQ ID NO: 4101444 - RNA, 69 nt, Human
caguaucauccaucuagcgcggggggugcggaguagccucguccccucgugccuauggaccaaacgcug

SEQ ID NO: 4101445 - RNA, 58 nt, Human
caguaucuauaucauaguguuguuuagaggauuaaauaauacugcauguaaggugcug

SEQ ID NO: 4101446 - RNA, 70 nt, Human
caguaugcagugguaucauuuuaaagacauagauuuuguauuuaacauggaaauacuugacuguuuacug

SEQ ID NO: 4101447 - RNA, 62 nt, Human
caguaugucugggcucaaauccuaucuccacaguugcuagcugugugaccccagacaagcug

SEQ ID NO: 4101448 - RNA, 67 nt, Human
caguaugucuguuccuuuucggcaucacuuaaacacccuggacugccaaagaaaggaggcaacacug

SEQ ID NO: 4101449 - RNA, 81 nt, Human
caguauuaucuuugcauucuaugauaucaaaacaaaauaauauccuuguugauagucuccuagaaugacagguuuuugcug

SEQ ID NO: 4101450 - RNA, 67 nt, Human
caguauuugguaauuggcuaccucaaccauugacauuuacugagugucugccacaugccaaguauug

SEQ ID NO: 4101451 - RNA, 61 nt, Human
caguauuuuuuagaaccuggccugauugcagggcaaucaaccaaugucugagggaaugcug

SEQ ID NO: 4101452 - RNA, 81 nt, Human
cagucaacaucacuguuuauacucaaaagauacagguuuuuuuucaucuguuaagucuuuucuuguaaacaauguugagug

SEQ ID NO: 4101453 - RNA, 65 nt, Human
cagucaauagaaucaaauugccaugccuugaagugaugccagcaaauagaagauucuguugacug

SEQ ID NO: 4101454 - RNA, 61 nt, Human
cagucacacaaguggacuuggggucagauccuccagccccucccaagucuccugguggcug

SEQ ID NO: 4101455 - RNA, 55 nt, Human
cagucacaguuucuuuucugauaaagaucuuuugucucaaaggaaucugucucug

SEQ ID NO: 4101456 - RNA, 101 nt, Human
cagucaccucuuucuggucccugucugaagcagccagugcuguuccuuuggccuaguggggcaguggcugacuuuagagacuaggggagagugggugacug

SEQ ID NO: 4101457 - RNA, 113 nt, Human
cagucaccugggcacaguauucaucacugacgcugagauuccaggccccgauaguccaauuuagugucggagaugugggucccggcaucagugaaaaaacauccccagguuug

SEQ ID NO: 4101458 - RNA, 83 nt, Human
cagucagcccuuacacaauacagagaacuagcagccucuacucaauucgcuaaagcacucuggaaaauugugugggggugcug

SEQ ID NO: 4101459 - RNA, 83 nt, Human
cagucaggccuaggguuaaggccacauuuagagucaaaguccgcucuggaguuacugcuggcuuuggcuuguuggucagauug

SEQ ID NO: 4101460 - RNA, 65 nt, Human
cagucaguguugaagccuucuuuggucuuccaagauccacaauugaggacugcacacucugauug

SEQ ID NO: 4101461 - RNA, 84 nt, Human
cagucauuugccuuacugaagaaggagcucugcccugcuuacugaaaugcgguuuuuuuuccucugugauggcaaauaagacug

SEQ ID NO: 4101462 - RNA, 63 nt, Human
caguccagaguaccccaagaagucagaccaaaucuguugucugguauagagggcacugggcug

SEQ ID NO: 4101463 - RNA, 66 nt, Human
caguccagccaguaggguguggcagaguuuaaaucgaguggcccuuacuaccuugcugggggacug

SEQ ID NO: 4101464 - RNA, 62 nt, Human
cagucccacaagaucuccacaauucuggaaacucugccuccagaggagggcuuuggggacug

SEQ ID NO: 4101465 - RNA, 62 nt, Human
cagucccaggguugguucagcugcucaacaacauuaggcucugguuggcaucucugagacug

SEQ ID NO: 4101466 - RNA, 82 nt, Human
caguccuauaugaacagauggcccagcagaggguuuuacucuagagaguccugcuugauucuauguugcacagggugggcug

SEQ ID NO: 4101467 - RNA, 125 nt, Human
caguccucgggauccccagcccacagaaagaaugucuucccuggcaggccaagguuuucaaggugcacuuucaaaaguuggcuuguuaaaaaugcaauugcucugggguggaguccuggaaacug

SEQ ID NO: 4101468 - RNA, 93 nt, Human
caguccuuuucuuuauggcuggugcuuuuuaugucuuguuugagaaauccuugucuuugaggcuaaaggugaccagauugugcugggggacug

SEQ ID NO: 4101469 - RNA, 71 nt, Human
cagucgagauuaaaccagucaagaaucagaaugaaggaauaugucugagguaccagcugguuuaucuucug

SEQ ID NO: 4101470 - RNA, 66 nt, Human
cagucuaaucuguuacucauuagaccucuuugucugaagcauucaagugaguaacagguugcacug

SEQ ID NO: 4101471 - RNA, 61 nt, Human
cagucuaccuuucagacauugacaaugauuucuuggcuaaugauacugagaagggagacug

SEQ ID NO: 4101472 - RNA, 60 nt, Human
cagucuagagaaaggagcaggagcugauuacagauaagcuuugcugaagauuuuaggcug

SEQ ID NO: 4101473 - RNA, 71 nt, Human
cagucuauucaguugugggcaacaaugagauugccuugauaugauuguuguuagcaaaugcaagcuggcug

SEQ ID NO: 4101474 - RNA, 70 nt, Human
cagucuccaaagaauagaggugacauuccuaaauugggaauaauguuaugucauucuucuacuuagucug

SEQ ID NO: 4101475 - RNA, 67 nt, Human
cagucucucuccuugcaggcgugcaggcgacagucagccccagcauguucuguggcagagucagcug

SEQ ID NO: 4101476 - RNA, 83 nt, Human
cagucucuggcugggagcgagcugcucacagggaggcaggggccggaccccaccugaucagcaucuucccagcucggcuccug

SEQ ID NO: 4101477 - RNA, 55 nt, Human
cagucucugggaaagaggacaggccagggucuagucauugucuuuuuugagauug

SEQ ID NO: 4101478 - RNA, 102 nt, Human
cagucucuuugucccgauagccagcagaggcuagggcugcccacucagcugggcugaucucccuuuucucacagugaauggucuaucaggcgacaggcacug

SEQ ID NO: 4101479 - RNA, 67 nt, Human
cagucugaggccgucugggucugcagcuccauggcaacagggccguggcugggauggcacucuucug

SEQ ID NO: 4101480 - RNA, 58 nt, Human
cagucugcagcuguggugggcuucagccauauugaauccuauauaaccuuggaggcug

SEQ ID NO: 4101481 - RNA, 60 nt, Human
cagucuguccccuacccgguccucccacgcuguuggagugaguggccaggaggcagaaug

SEQ ID NO: 4101482 - RNA, 65 nt, Human
cagucugugagugauguaccugccucccccaggguaacccagugcaaguacaaacgcaucggcug

SEQ ID NO: 4101483 - RNA, 63 nt, Human
cagucuuacugccccuuuguucaauggaguggcuuguccacacuaagaggggagguaagucug

SEQ ID NO: 4101484 - RNA, 58 nt, Human
cagucuuagaggugacuguggagagggcccccacagcagaacuuaauuucaaaggcug

SEQ ID NO: 4101485 - RNA, 70 nt, Human
cagucuuagccuucccucacccaggacgcacuaccuggagugaagcauggggaggggcagaugagggcug

SEQ ID NO: 4101486 - RNA, 64 nt, Human
cagucuucucccagggucgcccaaguccgcugggauggcagagacuccuccugggaggggguug

SEQ ID NO: 4101487 - RNA, 76 nt, Human
cagucuugaccuuguccucugcuugcuggaagcccugcuguggcuucuccuggccuuuagguuaagguucagacug

SEQ ID NO: 4101488 - RNA, 55 nt, Human
cagugaaaucuuuccuccugaagugacauacaucacuuuagcuuacguuucauug

SEQ ID NO: 4101489 - RNA, 72 nt, Human
cagugaacaacuccaagggacaucauuuaccuagacuaugaugugaguggugcuuccuggaauuguacaaug

SEQ ID NO: 4101490 - RNA, 89 nt, Human
cagugaacugcugguaguucaugccucugaauguguccagagucuaacacuggcauuagucacgaggcaucagaaugucagcaucacug

SEQ ID NO: 4101491 - RNA, 79 nt, Human
cagugaagcaacagaagauagagugaaugaauaaagacacaugaaugcacuaaaucuuuugugcacauggcuuuuacug

SEQ ID NO: 4101492 - RNA, 60 nt, Human
cagugaaguucuacugaaugguuaacucggaugcugaguaucaugacuggggacucacug

SEQ ID NO: 4101493 - RNA, 81 nt, Human
cagugaaucucugucaagguccaggacuacauaaguugucuaaaaaaaaugagguacuuacauugagcuugagauucauug

SEQ ID NO: 4101494 - RNA, 59 nt, Human
cagugaauguuggaaguuauauagaguaguacucaguuuaacuuuccaauaauucauug

SEQ ID NO: 4101495 - RNA, 105 nt, Human
cagugaauuaaaaauuacaggaauuauuucucacucacauaauaguccaaaacuagggaaguauuuagaggagaaaaguggcucuaugauccuuauacauugcug

SEQ ID NO: 4101496 - RNA, 74 nt, Human
cagugaccuagcugcucugagcccugauucuuggcaggagaggcccuggcuagagcagcuccaggguagagcug

SEQ ID NO: 4101497 - RNA, 58 nt, Human
cagugacucacaccuguaaucccagcacuuugggaggccgacgcagguggaucaccug

SEQ ID NO: 4101498 - RNA, 67 nt, Human
cagugacugugggacccagccaaguacccucuaaagaguugcagcaggcuugucaccauagcuacug

SEQ ID NO: 4101499 - RNA, 71 nt, Human
cagugacuuguagauaggauuugaguguucacauuccugaauuuuuacaauuucucuuuauaucucacaug

SEQ ID NO: 4101500 - RNA, 61 nt, Human
cagugacuuugggcaaguggguggucugaguguggucuaauccaaagcccuaaguuaacug

SEQ ID NO: 4101501 - RNA, 69 nt, Human
cagugagacauuucagagcugagaugccacaggaaucuuguuccuuggagggcugugaguugggcacug

SEQ ID NO: 4101502 - RNA, 75 nt, Human
caugcugaagagugcacaggcuauuugcuguaauauuauuucaauuccauggaucuguagcaaucuucagcuaug

SEQ ID NO: 4101503 - RNA, 59 nt, Human
caugcugggcaccauucuugcaggccucaccucgaauuucugcucucuggugcuucaug

SEQ ID NO: 4101504 - RNA, 67 nt, Human
caugcugggcaucauggacagcagaggugaaucuaagcauggucccugccuucauggugcucacgug

SEQ ID NO: 4101505 - RNA, 56 nt, Human
caugcuggguaaagguggugaagaugugccuuagguucacauccucucccaacaug

SEQ ID NO: 4101506 - RNA, 108 nt, Human
caugcuucccagagcuccaaguccaggcccagcagcuccacuuggcuuuugagacaaagauaaaauaaguccuuauguggaggggcuaggcuggggaaggggagcgug

SEQ ID NO: 4101507 - RNA, 59 nt, Human
caugcuuucuguccaaauguuacggcagaagucaaauauuguauuuuucagaaaguaug

SEQ ID NO: 4101508 - RNA, 60 nt, Human
caugcuuuggccaaugagaagugcauggaugugauacuugucaugaggacuagacgcuug

SEQ ID NO: 4101509 - RNA, 60 nt, Human
caucugcuugguuccuccaagugcacauuaugcaaguguauuuggauagacagggagaug

SEQ ID NO: 4101510 - RNA, 57 nt, Human
caucuggaucuuagacagucaacggaggcaucuccagagacuucugauguccagaug

SEQ ID NO: 4101511 - RNA, 60 nt, Human
caucugguaugagguuuugcuuuucacagaauggcaacaucuaaccucaucacacaggug

SEQ ID NO: 4101512 - RNA, 63 nt, Human
caucugucagcaaaguauucauuuauaacaucguuuggaagauggguaauugauggcaguaug

SEQ ID NO: 4101513 - RNA, 129 nt, Human
caucugugauuuuacucuggugaauaaauuuauuuucauuggcauaaucuaaggacuuagcauugcugguuuuaauggcaccucugguuccuauagauacaguggucgaaaggguaagcuuugcagcug

SEQ ID NO: 4101514 - RNA, 61 nt, Human
caucugugccggguguuugucauuauuaagugacccugaugagaauaaccuugcacggcug

SEQ ID NO: 4101515 - RNA, 63 nt, Human
caucuguggauaugcacagagcagcaacauauuugaguugcucgaugugcuuguuugcagcug

SEQ ID NO: 4101516 - RNA, 63 nt, Human
caucuguuuccagaauguagcugcuuuguauuugggagagcuaacuaccuggaaaugugacug

SEQ ID NO: 4101517 - RNA, 80 nt, Human
caucuuaaccaggugggggagcuacagcaaguagcguaacugcccugugccuugguuuccccaucuguaaaaugaagaug

SEQ ID NO: 4101518 - RNA, 74 nt, Human
caucuucaagagaaagcagacuuugucauuuaauuuguaugaugaagaagcugcaacuucuuaaugggaagaug

SEQ ID NO: 4101519 - RNA, 78 nt, Human
caucuucacaagcuggcuugggagaauuugcagacacagguuuggguuucacauuuucaaaagcuggugcugaagaug

SEQ ID NO: 4101520 - RNA, 130 nt, Human
cauuggaaucccacagacaauuuaaauagauucugaugccuggguacugccccucagagauucuaaacuaaucagugugaggugaagccagggcaucaauauuuuuaaaguccuccaggugauucuaaug

SEQ ID NO: 4101521 - RNA, 75 nt, Human
cauuggcauugucuauuugcauucaugauagccacucuacuguuaggaauuuauucagcaguuagauuugcagug

SEQ ID NO: 4101522 - RNA, 64 nt, Human
cauuggcuccucacgcaaaucgacccaccccuuauuggugcugucuguaucagaggagugaaug

SEQ ID NO: 4101523 - RNA, 60 nt, Human
cauugggguugcuuucagaauguugccuuuaucagcagugaugaaaugagcauccuugug

SEQ ID NO: 4101524 - RNA, 87 nt, Human
cauugguguuggagauaaucaauaaguuauaaugaguucauucauucauuuaauaauuuuugaguagcccaaagcuaacacugacug

SEQ ID NO: 4101525 - RNA, 69 nt, Human
cauugguucuaaugauuucauucaaagcaggacaaauugcuuugagcaaggaaucaauuagucucaaug

SEQ ID NO: 4101526 - RNA, 84 nt, Human
cauugguugguaaugcuuacauccucuguaaagaaaguuaucaauaccauuugugcaagacaugcuaagagaugaccaccaaug

SEQ ID NO: 4101527 - RNA, 75 nt, Human
cauuguauuuuucaauuuuuaaacuaugaaguugccuuuucugggucuuuguagucagaaaaaaaucauacggug

SEQ ID NO: 4101528 - RNA, 88 nt, Human
cauuguccaccaauuagcccaaggcugacucaacagggggcccccgugcugggggccuccauucagacagccuguggcuggggcuuug

SEQ ID NO: 4101529 - RNA, 105 nt, Human
cauuguccuacuuuuuaggggcaaauuugucuuaagacacccaucugcaauacaaaaauaauggauagguguuucauaaaguuuguccugagaauagagauaaug

SEQ ID NO: 4101530 - RNA, 81 nt, Human
cauugucuaggaccugucugcaugaucuaaaaccaucauauuuauuggcuuagccuauucagcacagcuuuccuaguggug

SEQ ID NO: 4101531 - RNA, 73 nt, Human
cauugucugaauuacugaagcucaacucaucugauaaaauaggugagcuuugugguaaugaagucagauaaug

SEQ ID NO: 4101532 - RNA, 84 nt, Human
cauugugaagcagguuugggguucauuuuuaagugauauuuauaucauaaaaauagacucuaaaguuuuccccugcuuuagaug

SEQ ID NO: 4101533 - RNA, 101 nt, Human
cauugugauuuagcuguaagucuguaaaauuaguauaauuguacaccauaacauuguuguaagaauuaaagugauuuagacauaaagugcugaggaaaaug

SEQ ID NO: 4101534 - RNA, 88 nt, Human
cauugugcucuauaauuauugucugaagaguuauuuacugacuguugaauacacuuccaaauauugauuaucuugaagggauacagug

SEQ ID NO: 4101535 - RNA, 75 nt, Human
cauugugguuucuuuugugagguacaagcacaaagcauaaugugucccaaccccucagagaggcagagccacaug

SEQ ID NO: 4101536 - RNA, 67 nt, Human
cauuguuugagcaucugggauccagcuacguucagauggcugggcuuuuccauguacugagccaaug

SEQ ID NO: 4101537 - RNA, 87 nt, Human
cauuuaaaaaaucuuagcauuacaggcugaagaaaaucuugguauggugauuaucuuuagugacaguugugcaagaaaaauuaaaug

SEQ ID NO: 4101538 - RNA, 73 nt, Human
cauuuaacacauuucuggaguuucucaacaggaugauuucucuuuguuagaaaguuugaggugugguuaaaug

SEQ ID NO: 4101539 - RNA, 87 nt, Human
cauuuaacuuauacaaaaucaucucugcauccuuagcauaaaagaauaaauaaacgauugagaggaugaaugaaugauaguugaaug

SEQ ID NO: 4101540 - RNA, 129 nt, Human
cauuuaagaaaagggggcuuccaugugggaagaagggcuugugaacccagugugguugugaauucuguaacggaagucaccagcugggcuuuuucuaggcaggaguuaucuucuuuacuggcaaucaug

SEQ ID NO: 4101541 - RNA, 103 nt, Human
cauuuaaggaaauccaauagucaaaaaaccccuuuuauagaagaacagagcuuuucuaggaaaucugcugauggaagagggguagaucagguuuucuaaaaug

SEQ ID NO: 4101542 - RNA, 60 nt, Human
cauuuaaguagaauuccugggggucauccacugguaacccccaggaguccuauuuaaaug

SEQ ID NO: 4101543 - RNA, 69 nt, Human
cauuuaauccucugggcauaccuugguucucuucugccagagcuauugugugcccagcaggagugagug

SEQ ID NO: 4101544 - RNA, 70 nt, Human
cauuuaccuucugucaaugggaugagauuggguucagauauuugcaucuucaccaucaacagaaugaaug

SEQ ID NO: 4101545 - RNA, 67 nt, Human
cauuuacuggccaacaucuggggcacauuuccuucccggaaaagucacgaaguuggucagagaagug

SEQ ID NO: 4101546 - RNA, 120 nt, Human
cauuuacugguuguuugcuaugagccaggcacuggacuagaugcuuuguauacauuugugcaacacaauguggcauugucauuauugggccagcuuuacauagauuaagucacuaaacug

SEQ ID NO: 4101547 - RNA, 77 nt, Human
cauuuagcaguaagcaacugagcuugccaauguuaacaaaguuauuaggcaagaacaauauguuggcugggaaaaug

SEQ ID NO: 4101548 - RNA, 129 nt, Human
cauuuagguuuauuuccuggcaucugugggcauuugaguguggguugcuuauacuucguuaguucaguuugcccauucauucaacaaauaugggugccuacagggucccagacaccauagcugacccug

SEQ ID NO: 4101549 - RNA, 58 nt, Human
cauuuaucaucagaccuuuuaaaagccucugcuuuuaaaacggacauggugauagaug

SEQ ID NO: 4101550 - RNA, 56 nt, Human
cauuuaucuugggugcacagcgugucaggcgucaggcuaagcacuuugauaaacug

SEQ ID NO: 4101551 - RNA, 65 nt, Human
cauuuaugagaaacugcuuugugauauguauauucaucucacagaguuaaaaguuucuuuuaaug

SEQ ID NO: 4101552 - RNA, 66 nt, Human
cauuuauguacauuuugucugcggcugcuuuugugcuacaguggcagagucaaguagucaugagug

SEQ ID NO: 4101553 - RNA, 55 nt, Human
cauuuauguuuuacuuggucacauuauauaugugacacaggucaaaaauaagaug

SEQ ID NO: 4101554 - RNA, 85 nt, Human
cauuuauuauuugacucucuuccacaauaacauugguucugcuucaguuuguguugagacugagggagucagcuaucuacaaaug

SEQ ID NO: 4101555 - RNA, 73 nt, Human
cauuucacagcugacacuuugaccuagaguagccccgucacucauagcugggagguguuugaguugugauuug

SEQ ID NO: 4101556 - RNA, 59 nt, Human
cauuuccuugggagaaaaaauauauauguguauaauauauauaacuucuagggacaaug

SEQ ID NO: 4101557 - RNA, 105 nt, Human
cauuucuaggaaauugucaugaaaaccaaagaauagccuuuguccaaauuuuuuaaaagauuaggaugaguaugguuaugcuguuuuauauaaauucuucaaaug

SEQ ID NO: 4101558 - RNA, 68 nt, Human
cauuucuccugggugauaaauuuccaccaacuguguucuuucaucuguaguuuauuccaggagaacug

SEQ ID NO: 4101559 - RNA, 65 nt, Human
cauuucugauugucaugcuggguguggagcucaugcuacuggcaucuagcauccagugaguagug

SEQ ID NO: 4101560 - RNA, 63 nt, Human
cauuucuguacauguuuuggugaguucaaaauuuaaaccacaaacuuaaaugugcaagaaaug

SEQ ID NO: 4101561 - RNA, 88 nt, Human
cauuucuuuccacaaaguguuuucuuauuauuuuuccuagucauuccuccuggugucccugggagaugaugaugaggggguagaagug

SEQ ID NO: 4101562 - RNA, 68 nt, Human
cauuugaacauucuaugguugaugaguugauguggaaacagcaaagaaaccagauagaguggacaaug

SEQ ID NO: 4101563 - RNA, 64 nt, Human
cauuugaggaggaggguauauuugaaccugugaaacacaacagagggaucaucuuccugaagug

SEQ ID NO: 4101564 - RNA, 100 nt, Human
cauuugaguuuauaugguagauaagauauaaauccacagagucguccaaauuuagagaguuugugauuugugaucuuugaagauaucaaaacuuauuuug

SEQ ID NO: 4101565 - RNA, 65 nt, Human
cauuugcagagggugacacucugagugauuaaacauuuuacccaaaguuacacaucuaguaagug

SEQ ID NO: 4101566 - RNA, 67 nt, Human
cauuuggcuuuaauagauaagguuucuuuacuucaguuaaaaagccuguaucuauaaaaggaaaaug

SEQ ID NO: 4101567 - RNA, 94 nt, Human
cauuugggucuggauaaaauacaauagggcuuuuguuuauguuuguuuucaauccauaaacaauagucuauuaaguuuuaauguaucccacaug

SEQ ID NO: 4101568 - RNA, 56 nt, Human
cauuuguacagaacagcuuuauaguaauuuuaccuauagagucuguaguauagaug

SEQ ID NO: 4101569 - RNA, 117 nt, Human
cauuuguauuagucaggguucucuagagaaacagaaccaacaggguguguguguguguguguguguguguguguccuguuggucuguuucucucgaggacccugacuaauacacuug

SEQ ID NO: 4101570 - RNA, 73 nt, Human
cauuuguuuacucaaugcauaugcugcagacccaucccaggccugcugcccagugugcauugggguaaaaaug

SEQ ID NO: 4101571 - RNA, 76 nt, Human
cauuuguuucaacacugaucguuuacacagcacuacucuaugccagguaaugugaugggcaagugugaaaugacug

SEQ ID NO: 4101572 - RNA, 56 nt, Human
cauuuuaccuagaagcugaaaguccagcauuuuccaccuuuagcuuagguaaggug

SEQ ID NO: 4101573 - RNA, 72 nt, Human
cauuuuaggaaauuaugguuucagauaugcuguggggacucagacuggacauuugaaauaauuuccugauug

SEQ ID NO: 4101574 - RNA, 81 nt, Human
cauuuuauccuagcuucuucaucuuccucccaccaaaauguaauacuaguauggguuaguguuucccaguaggaugaaaug

SEQ ID NO: 4101575 - RNA, 66 nt, Human
cauuuucaaagcaacugaaaaggaagguauagaucaaccuuuuuguagauuuugcauuugaaaaug

SEQ ID NO: 4101576 - RNA, 66 nt, Human
cauuuuccaaaauaauuguuacugagauagccaguauuccugcggugacuguaucuuuggaaaaug

SEQ ID NO: 4101577 - RNA, 68 nt, Human
cauuuucuacuucuccugaaugucuuaauaggauuaaaucagaaaagggaaggaagaagagggaaaug

SEQ ID NO: 4101578 - RNA, 103 nt, Human
cauuuucuucuagauaccuuuacuugcaccuuguccauuuuuggcccagcuccugaaggcuccuggccuggacaaaugcaccaagguucucgugaaagaaaug

SEQ ID NO: 4101579 - RNA, 85 nt, Human
cauuuugcuagcaguuugugcuuuuuguaggaaugugacugacacggauauucuagcccuggaacggcgacugcugcaaaccaug

SEQ ID NO: 4101580 - RNA, 82 nt, Human
cauuuuggaaauacaaagauacaccacuccuuggaaugucacuggggauuuuccauagugguauauuaguguuucugaagug

SEQ ID NO: 4101581 - RNA, 56 nt, Human
caugaauuagcaauggugugcagggaaggaaccaguaucaccacagcucguucaug

SEQ ID NO: 4101582 - RNA, 96 nt, Human
caugaauugcugaaacagcagccccguagccuccagaaaggugcaacgcauugcaucugggagacccuugcgggaaggguuguuucugcaguccug

SEQ ID NO: 4101583 - RNA, 79 nt, Human
caugaauuuuguuaucucagacugaguuacuuguagcuccacaguguuaaaguaauaacaggcuaguaauaaaauaaug

SEQ ID NO: 4101584 - RNA, 105 nt, Human
caugacaaauauucuucaaaucccgugucaaaucuaucuaauucugagucuauuucuguguuaaagauucugaggcugauuagauccaggaauaguauagucaug

SEQ ID NO: 4101585 - RNA, 55 nt, Human
caugaccagagaggacggccaggaguaggcccugcuuacaucuuuucugggcaug

SEQ ID NO: 4101586 - RNA, 57 nt, Human
caugaccccccaaggccugcagaucaugauugaggugugcaggggggaacugucaug

SEQ ID NO: 4101587 - RNA, 79 nt, Human
caugaccucuggaauagcuugcgaggcagucuauuuagaggcuaccauuguaccaagguaauuuuccacgaggcgcaug

SEQ ID NO: 4101588 - RNA, 74 nt, Human
caugagaugggaaccugucuuaguccauucugugcugccguaacagaauacuacagacugguuaauauauaaug

SEQ ID NO: 4101589 - RNA, 71 nt, Human
caugagcaagcuggccuuccagccuugccucuacaugccaccguaggccacaguugaggccagcaacucug

SEQ ID NO: 4101590 - RNA, 91 nt, Human
caugagccugaauugagauugcuguacacuucuagaucugagauaaucagccucagguuaaugaggaaauagcaguggcaauuucacuuug

SEQ ID NO: 4101591 - RNA, 62 nt, Human
caugagcuaaucagaaagcaaggaugcuuaauuaugcauuuaaaccuccugauucagcuaug

SEQ ID NO: 4101592 - RNA, 75 nt, Human
caugagcuuccagccaaggagauaaaauguugagcugcuccuggcagcuacauuguaacuccugaagugccugug

SEQ ID NO: 4101593 - RNA, 129 nt, Human
caugagggucuacggggagugacaaauacaguguacuuuugaaggauccagaggaccaaauuuaugcaucucaaacaugguccuggucaucugggcuggcagguuucugggcuccugguuccaaggaug

SEQ ID NO: 4101594 - RNA, 71 nt, Human
caugaggugcagcaugaguccaacggagaguuaagggagauuugccuuggaaaucaaugcuguuucuuaug

SEQ ID NO: 4101595 - RNA, 113 nt, Human
caugagguuuuguuucaccuauaauugugauggaaaaugcuguauugcugacaacaaugaacuguaaccacaguuauuuacugcauaaacuauuuguguacuaaccacucaug

SEQ ID NO: 4101596 - RNA, 69 nt, Human
caugauaaauagugaagggagccggucugccugugcuacagggccugguuaauuacacuguaaaucaug

SEQ ID NO: 4101597 - RNA, 106 nt, Human
caugauaguuaauuaauuguggguacauuuaugugccugaaccaaguacagcuguuccaaauaaguucacauugaaaugacccaauaauaacuguuugcuaucaug

SEQ ID NO: 4101598 - RNA, 56 nt, Human
caugaucagaaagagaagcuaggacuuuauuauauagcuuuguauuugugauuaug

SEQ ID NO: 4101599 - RNA, 129 nt, Human
caugaugagaggaaaugagacuuuaggggaaaggauuuuuaggcauugggugcucaagugcuuauuuguuucaacuugacuagucaguguguggacucauccaauaaccauuuauuucuuuuaucaaug

SEQ ID NO: 4101600 - RNA, 91 nt, Human
caugauuaagcaggggagugaggguagaggcaggagugcaaaauuguaaaguuuuagcuuuuugagcuauucucagucccugugugguaug

SEQ ID NO: 4101601 - RNA, 62 nt, Human
caugauuccaagcucagcgcaggggccucccucucuccuccugccagcuggucccaauuaug

SEQ ID NO: 4101602 - RNA, 63 nt, Human
caugauuuaaacuaccaccugaggaguaauucuuuuuccugagauuggcuaguaugaguuuug

SEQ ID NO: 4101603 - RNA, 82 nt, Human
caugauuuguuggugcauugcugugaugauguucugagcucacccagccucaguuacucaaugacagcaaguucaagucaug

SEQ ID NO: 4101604 - RNA, 126 nt, Human
caugcaacccauauaaaaaucccucauaaucugccaaaauuagaaaugcagcuguuuuaagucuuaaacagcaauagcacuauucauuaugccaguauggaggaauaaaauagaaaaauguauuug

SEQ ID NO: 4101605 - RNA, 60 nt, Human
caugcacaaagguaagaugcgucaggucccugaggaaagggaaugugucuuucuuguuug

SEQ ID NO: 4101606 - RNA, 85 nt, Human
caugcagaugcaggucaccugagguuagagcugaagugcagguuucgauacugcagaccuggaguggggccucagguucugcaug

SEQ ID NO: 4101607 - RNA, 130 nt, Human
caugcagccagagggugacagagccacccagggcuccugacuccagguccuguguguuaccuagaaauagcacuggacuuggagucagaaggccugaguggagucaccuuccccacucucuggcugggug

SEQ ID NO: 4101608 - RNA, 78 nt, Human
caugcaguagcuuagagguagcaacaggacuagaauccauuucugaugccugauucacugccaucccagcucugugug

SEQ ID NO: 4101609 - RNA, 61 nt, Human
caugcaugcuucuuauaguacuuacaaauaauuugcaaagguaaguuagaaguguugcaug

SEQ ID NO: 4101610 - RNA, 68 nt, Human
caugcauuagcaaauaucuugaaacagggaggcucuguuuucucuguauuuugacuaauaaaagcaug

SEQ ID NO: 4101611 - RNA, 81 nt, Human
caugcauucagaaucucucacaauuuaagcaguguggucuuuuuucuacccgucuaauucaugugggcuuugaaaugugug

SEQ ID NO: 4101612 - RNA, 59 nt, Human
caugccaacaacaagcaaugagcacaaaggcugugcgaaaugcugcauuuguuggagug

SEQ ID NO: 4101613 - RNA, 86 nt, Human
caugccagcugaccuuugccaggaaggcacccacugcuucccucuagggcaagcccugccccucuugagaagcucagcaaggugug

SEQ ID NO: 4101614 - RNA, 117 nt, Human
caugcccaacucuggggccacuuagcucccuuucuccuccccuugccuucugacccugaaugcacaaagguggaaggaggaagcaggaaaauuaggccguuccuaagagaaagcaug

SEQ ID NO: 4101615 - RNA, 63 nt, Human
caugcccuggacuagcuauacuuuauccugcaaggggaauaaguuauggauuccauugguaug

SEQ ID NO: 4101616 - RNA, 59 nt, Human
caugcccuucaacgugaggauuugcaguaucaaagagaggggucaaaguggaggguaug

SEQ ID NO: 4101617 - RNA, 73 nt, Human
caugccucaguuucuccaucagcgaaaugggcguaaagccagaagauuacugggaggauucauugaggugaug

SEQ ID NO: 4101618 - RNA, 55 nt, Human
caugccuucucuguagucccagcuauucaggaagcugaggcaggagaauggcaug

SEQ ID NO: 4101619 - RNA, 67 nt, Human
caugcuguacucugugucagaaccugcucuagguauugaguauacaguagugaacaaggcaggcaug

SEQ ID NO: 4101620 - RNA, 57 nt, Human
caugcuguagaauccuaggguggccagcaggacagccaggaaccagcuacagucuug

SEQ ID NO: 4101621 - RNA, 83 nt, Human
caugcuguccccagucuuguccauuccaugcugcuguguuacaaacucucagagguaguuugcaggggaggaaggggaauaug

SEQ ID NO: 4101622 - RNA, 114 nt, Human
caugcuuuucagaaugcagcugccggauuguaaccaugaugagcagguauagaaguggaugugcggauccugaucuucaugguucugaccucagugaauucacgguaaagcaug

SEQ ID NO: 4101623 - RNA, 56 nt, Human
cauggaacaaggaagauguuugcaauaguauggccagcaucuauccucauucucug

SEQ ID NO: 4101624 - RNA, 63 nt, Human
cauggacagugggacaguguguuacaugccuuuuucugugugacauauuguccauacuucaug

SEQ ID NO: 4101625 - RNA, 101 nt, Human
cauggaggauuggaauagcagacaacccagaugacccagccaacaugaaauagcccagggacuggauuuucuuuuguuuguuugguuugguuuuauuugug

SEQ ID NO: 4101626 - RNA, 70 nt, Human
cauggagucaagucucuggcaaaugaucuuggaugaauccaguuugcacugggauuugaaacuuuccaug

SEQ ID NO: 4101627 - RNA, 64 nt, Human
cauggaucccagugcuuggcauacagcacaggauaacaugucugcauugucuccugggagcaug

SEQ ID NO: 4101628 - RNA, 72 nt, Human
cauggauggcucuugaauugauacucuguaaagccugaggacauaauaucacauuguaagggcaauucugug

SEQ ID NO: 4101629 - RNA, 85 nt, Human
cauggauguugggcugucacggggccuuggccucaccugggcaccuccuuacacagcaaggccuccugggcccagagaucugaug

SEQ ID NO: 4101630 - RNA, 88 nt, Human
cauggcaaggaagugagagguguuggggaggagaaacaccuagaucuguuccuacuccugcccagagcucuccacucuccaggcaaug

SEQ ID NO: 4101631 - RNA, 90 nt, Human
cauggcccacacuuugggugaugccuaggggcccuggaggccaccgccuggucccaggccccagggcuugucagucuauugguggauaug

SEQ ID NO: 4101632 - RNA, 59 nt, Human
cauggccucuguugcaacucuucaacucuguuguaugagaacagccacagagagcugug

SEQ ID NO: 4101633 - RNA, 74 nt, Human
cauggcugcagauagagccaagaggguggccucggguggcugguggcagucuccuggcugugggggcagaagug

SEQ ID NO: 4101634 - RNA, 69 nt, Human
cauggcuucaugaggguuuugccaauaacuaggguugugggaagcacaggcucucuuggggacaccaug

SEQ ID NO: 4101635 - RNA, 69 nt, Human
caugggaaauaguuuugugagaaagcuaggacagaaauguuuuacuugaaaggaaauuaaggucccaug

SEQ ID NO: 4101636 - RNA, 77 nt, Human
caugggaagccgcagaugcugcuauuucacccugggcucuuugggccucagaauaguaaaagacaucugauuccaug

SEQ ID NO: 4101637 - RNA, 60 nt, Human
caugggccaguuggaauggauacucaggucucccugcaguuaggcccccuggucaccaug

SEQ ID NO: 4101638 - RNA, 60 nt, Human
caugggcugggcugcagcaaaaugaggguguacucagugcacugaggcccauguaccaug

SEQ ID NO: 4101639 - RNA, 62 nt, Human
caugggcuuuggaggcuggaggcugucuauucccaccccacuccacccuccccuaccacaug

SEQ ID NO: 4101640 - RNA, 85 nt, Human
caguuccuccugagacaucucugcuggucacguguuuugccuuggaugucucuauggaagaccacagaggugugggagagagcug

SEQ ID NO: 4101641 - RNA, 98 nt, Human
caguuccugcaaaugcuacccaggacccugaggcugcccagggccagguguccaccccaccucccucgccguccacucuggucgcgucccaggagcug

SEQ ID NO: 4101642 - RNA, 59 nt, Human
caguuccugcaaugcaauguguuguuaacugaauagccagcauauagcagggagaacug

SEQ ID NO: 4101643 - RNA, 56 nt, Human
caguucuccuagaguggaccaaaacauggaaucuugguugcauuguaguuggacug

SEQ ID NO: 4101644 - RNA, 61 nt, Human
caguucucugcuccuagacuuuuggauucacauuaguccuagaagauggaucagagaaaug

SEQ ID NO: 4101645 - RNA, 72 nt, Human
caguucuguggcugugcccuguagauacccaugaugugagguggagagcugcuugcugcagacacggggcug

SEQ ID NO: 4101646 - RNA, 78 nt, Human
caguucuuuugaguauauacccagaaguggaauugcuggaucauaugcuaauucuauuuuuaaauguuugaggaacug

SEQ ID NO: 4101647 - RNA, 81 nt, Human
caguugaaagaucauguggcugccugucuagcccuccacugacagaaauacaaagccagccauuuucaaaugaucugacug

SEQ ID NO: 4101648 - RNA, 70 nt, Human
caguugacauguucuugaaagugacaggucaucuaucuuaagcugguuaccaagcucugcauguuaagug

SEQ ID NO: 4101649 - RNA, 60 nt, Human
caguugcacuagccacauuucaaguacucaguaacauuaacauguggcuaguagcuacug

SEQ ID NO: 4101650 - RNA, 79 nt, Human
caguugccagaaggaugucaugugcuaacugguauagaucaaggcuuuucaauagcaguaacacugacauuuuggacug

SEQ ID NO: 4101651 - RNA, 70 nt, Human
caguugccuuaugaacuuuaagcucugugucaguaucauggaaugaaaauugauauugcuugaguaacug

SEQ ID NO: 4101652 - RNA, 62 nt, Human
caguuggcagauuugucaguaagcugcauauuugaguuacugacuuacauucugucuucuug

SEQ ID NO: 4101653 - RNA, 81 nt, Human
caguugugggaugagugaggacaggguggcagugcuggagucucaguugcacacccuucauuccacucucucccugugcug

SEQ ID NO: 4101654 - RNA, 77 nt, Human
cauacacagacacugugcuaguuguuuuugcaauaauauuagaaaucacagaaacucagacacaguaucuguuuaug

SEQ ID NO: 4101655 - RNA, 76 nt, Human
cauacaguauguaggcuuuucagauuggcuucuuucacuuaauccuaugcuuuugagauuccuccaugucuguuug

SEQ ID NO: 4101656 - RNA, 62 nt, Human
cauacauaccacugcugucuuuuccgagugguauuacaagaaagauuuuugugguguguuug

SEQ ID NO: 4101657 - RNA, 129 nt, Human
cauacauggcuuugauucucugcuacacauuucucagaugguuuuaugagaccucaggaauaauaccuauuucuuggcuuugugugaggacucagugaaacauguuaggaaugcugugaagucugguug

SEQ ID NO: 4101658 - RNA, 55 nt, Human
cauacauuugcuuugauuuucagccagucccuuggcuuuugcaaaccaaugugug

SEQ ID NO: 4101659 - RNA, 60 nt, Human
caucuccaggaguucuacucauaagaguggucaucucugagugugaaaauccuggagaug

SEQ ID NO: 4101660 - RNA, 61 nt, Human
caucuccccgagcuuaccuccugaugaccccuuaucagguuguccacugaagcugggagug

SEQ ID NO: 4101661 - RNA, 60 nt, Human
caucucucccuacauccuugccuagcucaccugcccagggagguagcaggagaaaagaug

SEQ ID NO: 4101662 - RNA, 81 nt, Human
caucucugaguccagcccucugccuccagguggaguagcugucacacccugcagggcagaggcuggugcucuccagggaug

SEQ ID NO: 4101663 - RNA, 82 nt, Human
caucucugcccacccucgcuguguucugugaugaagacagacaugugcugcucacacacagugaaugugaagguaagaggug

SEQ ID NO: 4101664 - RNA, 71 nt, Human
caucucugccucucaggucccugagaucaauggcccaagauaguaggugaugccugagagugcccuggaug

SEQ ID NO: 4101665 - RNA, 108 nt, Human
caucugaaaauugcccauuauguugcccauccaucacagauguuguguggaguaaaaauaauacuaagacacuaacauggugccgggucauaauacgucuucaguaug

SEQ ID NO: 4101666 - RNA, 62 nt, Human
caucugacaucucccucugacauguaaacaagacucuugaaaguguucagaggaagaggaug

SEQ ID NO: 4101667 - RNA, 63 nt, Human
caucugagauuuaauggcuaaucuguucagacagcugcuucuuagccauuaaauuacaaggug

SEQ ID NO: 4101668 - RNA, 67 nt, Human
caucugaggcaggucucuuuucuggaaggugaauuccagcggcugguuggagaucccgcugcagaug

SEQ ID NO: 4101669 - RNA, 99 nt, Human
caucugauaugagcagcaggacagaggguuccaaaauugaugugucuaagaaaaaugcauuaauaaaauaccacuuuguucauuaguuugaaugagaug

SEQ ID NO: 4101670 - RNA, 81 nt, Human
caucuggacugccuuccucguaggcacugagggcccggaacaagacauuuucucagugcugugcuggaagcuguucaaaug

SEQ ID NO: 4101671 - RNA, 74 nt, Human
caucuguagcuccaugacaauuuggcagaauacacauuaaagugaaagcugcugccgucaugcggaaauaggug

SEQ ID NO: 4101672 - RNA, 74 nt, Human
caucuguugguuguggucaaagcugaugggguuuuacucugauucacugcuuuguuuacaacuauuuaaguuug

SEQ ID NO: 4101673 - RNA, 85 nt, Human
caucuguuucugguaaugucacaucuaguaaauucuguuuauaacauauaugcugggacugugacucauggccacaggcagacug

SEQ ID NO: 4101674 - RNA, 62 nt, Human
caucuucagcaucccugccugucccuggcguucagugugcccagcagcagauguuggaggug

SEQ ID NO: 4101675 - RNA, 94 nt, Human
caucuuccacucucugcaggugguacuucuuuuucuuuccuuauuuacaauugcaucaagaaaugagaauauugcuuguuuaagugagaggaug

SEQ ID NO: 4101676 - RNA, 57 nt, Human
caucuugcaggaagcgagucacgucccagcgcugcucccuggaguuucuggaagaug

SEQ ID NO: 4101677 - RNA, 56 nt, Human
caucuugugaggaccuucuugcugcaucauaacauggcagaaggugucacauggug

SEQ ID NO: 4101678 - RNA, 70 nt, Human
caucuuuaauuguagcucccauaauccccccuuuucaugggaaggaccuggugggagauaauugaaucug

SEQ ID NO: 4101679 - RNA, 124 nt, Human
caucuuuagaucuuauuacgccaaugacaucaggcuauguguguccaguguauuaucacucuuagucaucuccaauauacaaagcucuugaaggucaaaacgcucuucuuaauauuugguaaug

SEQ ID NO: 4101680 - RNA, 96 nt, Human
caucuuuucugauccuugcaacucugugaggugggcaggaguauugucagaaccucaucugguuuguaaggcauuucuaagucaauuagaaagaug

SEQ ID NO: 4101681 - RNA, 129 nt, Human
caugaaaaaucauaaucauugcuguucgaagcugcuaaguuuugggguuguuacgcagcaagugauagcugauacacucccuaaaauauauucuuugcauaacagugaguacucuuguuaaaaugcaug

SEQ ID NO: 4101682 - RNA, 92 nt, Human
caugaaaauuaugaauguguuucuagagaaaauauuuacauuggcaauaagccuaguaacuauucucuaggagucucucagaaauuaacaug

SEQ ID NO: 4101683 - RNA, 58 nt, Human
caugaaacugccuacaaagcuagucccaaauacuggcugugaaauggcagugucuaug

SEQ ID NO: 4101684 - RNA, 75 nt, Human
caugaaaggggagaggaauaucauuauauuagcauaguuacuguguguagugauaauccuucuccaucacuucug

SEQ ID NO: 4101685 - RNA, 97 nt, Human
caugaaaugaaaacaaguagaagaagggagugacaaaugcacacuuuggauguguguauugauagcuguguauuuccuuuauaugcauuuuuacaug

SEQ ID NO: 4101686 - RNA, 61 nt, Human
caugaaauguguuaaucucuugaaaagaaagauaaucaaaugagauuauugcacauucaug

SEQ ID NO: 4101687 - RNA, 58 nt, Human
caugaaccaaaccaaagugucccaaaguuaaucaaaggggacgcuuuuaaguaucaug

SEQ ID NO: 4101688 - RNA, 72 nt, Human
caugaacucugggacagcuugccugguacugcaacuggaggacaucauugcauccagagagcuucccacaug

SEQ ID NO: 4101689 - RNA, 67 nt, Human
caugaaggaccauuucacggucucauucaaacggacaugauugcaaccuaguaggggguccuuuaug

SEQ ID NO: 4101690 - RNA, 89 nt, Human
caugaaggauacaguagauggaggcuagaugcagggcuuuuacugucaugcuaaguucugugguuugguuuucauuuuuguaggcaaug

SEQ ID NO: 4101691 - RNA, 71 nt, Human
caugaaggcaguggcuggaaaaccugcuccauuuuucccugacuuagagagcagguauuacuuccuuuaug

SEQ ID NO: 4101692 - RNA, 57 nt, Human
caugacagaggagugcaggugauccuuccuguggaaacaagguaguucucuguggug

SEQ ID NO: 4101693 - RNA, 109 nt, Human
caugaccggcuaugagcaauagaauucaguggaugugaugcuccaauucugaacuuauccucaagaagcuuugcacacaucuuguaauccugagcugccugcuggagug

SEQ ID NO: 4101694 - RNA, 92 nt, Human
caugagacagcagggauaaaucaugaggacauuaugccaagugagauaagccacucaccaagugacaaaugccauaugauuccacuuccaug

SEQ ID NO: 4101695 - RNA, 69 nt, Human
caugagccagguacagcccucaacccucaaccaucaugggagaaggcugagggcuguaccuggcucaug

SEQ ID NO: 4101696 - RNA, 58 nt, Human
caugaggaacauaucauuuacuggcugauuauaaguuacaggaugauuuuuccuuaug

SEQ ID NO: 4101697 - RNA, 130 nt, Human
caugaggguaaccaggcagagaggcacagcugacauguguaaucagcuccgugggcagaggagggaugagugacggagcuguuugcggaauguccuaccuguccaucacuggugccaaaaugcccucuug

SEQ ID NO: 4101698 - RNA, 55 nt, Human
caugauaccucaguuguuuuuacaucaaaucgacuuggaaacagugaguguuaug

SEQ ID NO: 4101699 - RNA, 73 nt, Human
caugauaggcccugauucaguggugcccagaggccacugaggucucuggcaauugcugcugacucacugcaug

SEQ ID NO: 4101700 - RNA, 81 nt, Human
caugauauaugaaaggaaaccauucuuuaucauugaccuauugaagauccuggguaaguuccuuuuaauuuuugugccaug

SEQ ID NO: 4101701 - RNA, 71 nt, Human
caugauccagcccagacaccaucauucuagggcuuuaccauuaucccugaagagcugggcaauggacuaug

SEQ ID NO: 4101702 - RNA, 65 nt, Human
caugaucugauaguuugcaaaugaauucugccaggaaguuucaaaugguuagacuguuagccaug

SEQ ID NO: 4101703 - RNA, 72 nt, Human
caugauuaaagauguucucauuucauagguucuuauaucugaauuguaugagagugaaagcauuucugcaug

SEQ ID NO: 4101704 - RNA, 58 nt, Human
caugauugguggucagcaguauggcuucagagccugugcucucaaucaccacuucaug

SEQ ID NO: 4101705 - RNA, 67 nt, Human
caugcacaaucacaaagagacaagugucaugaagggaauguacaugguccuuugagauuauauaaug

SEQ ID NO: 4101706 - RNA, 55 nt, Human
caugcagcaggaucucauucccauugagggacacaaaguggguugcugcuccaug

SEQ ID NO: 4101707 - RNA, 79 nt, Human
caugcagccaggaauacaaaucuuuguucucuucaaacaccaaaaagaggcagcuacuuguauuuacucuaugcucaug

SEQ ID NO: 4101708 - RNA, 96 nt, Human
caugcagcuaauaugauacuuaagugaaacauguaucucuuuacuccaacuuuaaggauguaaauaggguaagcguguuuacucucaccaugcaug

SEQ ID NO: 4101709 - RNA, 62 nt, Human
caugcaggaggaaaaagcagcuucucugccacuucggaauggcuuucuuuccuaccucacug

SEQ ID NO: 4101710 - RNA, 88 nt, Human
caugcauacagcgcucgccugcuuggugccccagccauuccucuccaggaagcuggaggggccagcagguguagggguugggggcuug

SEQ ID NO: 4101711 - RNA, 63 nt, Human
caugcccuuaugcuucccugaggaucuuaucuaaaugagauagccacagaggcaucuugcaug

SEQ ID NO: 4101712 - RNA, 69 nt, Human
caugccgccuguguucuaauccaucucagccaggggcccaaugucauugccagauggauagaggguaug

SEQ ID NO: 4101713 - RNA, 69 nt, Human
caugccucagugcacaggacagccaccacaaagacuuaucuggcccaugugucaauagcacugaggcug

SEQ ID NO: 4101714 - RNA, 63 nt, Human
caugcucuccauuggacacagagcuuacagcacaccugcuaggugccaggcacggagugcaug

SEQ ID NO: 4101715 - RNA, 61 nt, Human
caugcugauucuuccugagcuuuaacucugugauccucacagcucaugggaggaaggcaug

SEQ ID NO: 4101716 - RNA, 59 nt, Human
caugcuggaauugaccuagaaggaacuggagacauuuugaaagucaaccuuccaguuug

SEQ ID NO: 4101717 - RNA, 65 nt, Human
caugcuguccugaaaagauauucauuacuaugguuaagcauaaauguaaguucuagaacagcaug

SEQ ID NO: 4101718 - RNA, 62 nt, Human
caugcuuauucauauauucucgguagcugauuucaugcuacaaugacagaauugaguagcug

SEQ ID NO: 4101719 - RNA, 63 nt, Human
caugcuucacacacugaaugacagguagaaaaaagggaccauuauuuagaccccagaggcaug

SEQ ID NO: 4101720 - RNA, 57 nt, Human
caugcuugcucucagccuucucaaguacaacuggcaaaggcuggagaugcaggucug

SEQ ID NO: 4101721 - RNA, 67 nt, Human
cauggaagaguggggaugaggaugcuuucaugguuguauggcgucucauccucccgcuaauucugug

SEQ ID NO: 4101722 - RNA, 80 nt, Human
cauggaauuuacccgagaugggauaaauauaauuuuguguuuuuuaacagaauaagguuuaucucuccacaguuuccaug

SEQ ID NO: 4101723 - RNA, 62 nt, Human
cauggagcgguaguuggcaaacuacagccuacgggcaagauuuagccugcugccuguuugug

SEQ ID NO: 4101724 - RNA, 82 nt, Human
cauggagggguccaugugacguuguucuggauucccauuguaacuucaagggaaacuuucacaauguccagagcccuugaug

SEQ ID NO: 4101725 - RNA, 57 nt, Human
cauggaguguuuguuuggagggguuaaugucaauuucuucaauucaacacugccaug

SEQ ID NO: 4101726 - RNA, 58 nt, Human
cauggauaccagcucacacaaucuuugugaucagcaucaaagaaagagcuggccuaug

SEQ ID NO: 4101727 - RNA, 99 nt, Human
cauggauguugccuucucuuuuacuguaucuccuucccuucuuuggcaaguugucaaagcaugguggaugauacaguggauaaaagaggcugcaguaug

SEQ ID NO: 4101728 - RNA, 66 nt, Human
cauggcaacuagcuggauuaguguuuuccacauggaagggcuuugggucagagcuauguagcuaug

SEQ ID NO: 4101729 - RNA, 56 nt, Human
ccaaauggugacaugcuuaugugcaauucuugcucaagagcucuccacuagguugg

SEQ ID NO: 4101730 - RNA, 66 nt, Human
ccaaaugugccuguuucaacaaagucaaucaguuaaagaacaauguuuggagagaggaacauuugg

SEQ ID NO: 4101731 - RNA, 83 nt, Human
ccaaauuaaaaguugaagcaugaaccaaggucaaagguuaaggguuaggaugugggauuuugguguucaugcuccagguuugg

SEQ ID NO: 4101732 - RNA, 67 nt, Human
ccaaauuacacuggugauggucagugacagguuucuuauuucaaagcccugccuggccauuccuugg

SEQ ID NO: 4101733 - RNA, 130 nt, Human
ccaaauucuuugugaauucauggcauugguagccccauucuuuguguuuguacaaugcacuagucuccagagugugcauuccuugaaugauagagguuuuuaguuauaguggcaugggccaucacuaggg

SEQ ID NO: 4101734 - RNA, 76 nt, Human
ccaacaaagauaugacauggaaaauggcauuaagaagguauuuuguccauaaucugcucacauauucuuuguaugg

SEQ ID NO: 4101735 - RNA, 86 nt, Human
ccaacaacuagauuaggaaggacuuggauucuggagccagacagcuucagcuuaaaucccaucuuugucucuuucacguugugugg

SEQ ID NO: 4101736 - RNA, 129 nt, Human
ccaacacaaguguagaaucuaggacaaggaaccacauugggcuugcaugcacggccaggagagcauuggguucuguaagcaugugcuuaauaagguuauugacaaacuggaacuagcguaaaugguugg

SEQ ID NO: 4101737 - RNA, 63 nt, Human
ccaacaucagaauuagccagugaggcucugaagcagagcuaaugaaauauuuucugauauugg

SEQ ID NO: 4101738 - RNA, 85 nt, Human
ccaaccagaugaaaagauaagcagcaauaaaggauaugagaacuaaauucuuuuacuguuuaaaggcuuccuuucugucuguugg

SEQ ID NO: 4101739 - RNA, 62 nt, Human
ccaaccaguaaaacacauaaauuugaacaauuccucagaguuuguugaauuuacuugguugg

SEQ ID NO: 4101740 - RNA, 57 nt, Human
ccaaccccaugcuccauguccccuccaucuucucuggggcuggaaguguggguuugg

SEQ ID NO: 4101741 - RNA, 61 nt, Human
ccaaccguguucgggaacacuugucagaacuacaauugacaaguguuuccaauauggcugg

SEQ ID NO: 4101742 - RNA, 65 nt, Human
ccaaccucauuguuuuuuguauagcuucauaagaggggcuucucucaggggcaugaguuaguugg

SEQ ID NO: 4101743 - RNA, 70 nt, Human
ccaaccugcucuggcaggaccaugaagcguaggguguaauuuuugguuucaccccugcugcagcaguugg

SEQ ID NO: 4101744 - RNA, 61 nt, Human
ccaacggggaagcugcuccugguuuuacaguuuaguuugaaaucagaggcuuccuaguugg

SEQ ID NO: 4101745 - RNA, 121 nt, Human
ccaacuagcucugugagcaaaaggcauauaaagccauuucugcuguauuugcuugguaugacuuccauuuaagugagaucugaaaugaaaugcuuucuuuguguucucagugugaaauugg

SEQ ID NO: 4101746 - RNA, 81 nt, Human
ccaacuaguggcccugguuaccacaggggucucuguagcugaugccugucugugaugaaaccccugggagggccauuuugg

SEQ ID NO: 4101747 - RNA, 68 nt, Human
ccaacugaaguuaauugaaauguacaauaaaaucugagaggauguguuuaugucaaaacuacaguugg

SEQ ID NO: 4101748 - RNA, 90 nt, Human
ccaagaaagggcauccugggugaauuugaaggaaaggauagucugagccuuuauuuuucaccuugaagauagguuugucuucuuacuugg

SEQ ID NO: 4101749 - RNA, 78 nt, Human
ccaagaacacacaguaugacauuggcagagcuguggguaagucuccaccuuuccugauuucauaucuguagcucuugg

SEQ ID NO: 4101750 - RNA, 82 nt, Human
ccaagagcaaauggcaccaacuuuaugauugguuugucagugucccccauuggcacccugaaguuggucacuuaguuuuugg

SEQ ID NO: 4101751 - RNA, 75 nt, Human
ccaagagcggggcuggcguuagggaggcauccccgcagugaaggaugcuuggagaaucagucccagcugccgugg

SEQ ID NO: 4101752 - RNA, 67 nt, Human
ccaagaggaccuugccagggcagugcuaggcagagucucucugccugccuaggucuggccuccuugg

SEQ ID NO: 4101753 - RNA, 56 nt, Human
ccaagaugggcaccccagcaccuccuccucugagaggagccacugccccaguuugg

SEQ ID NO: 4101754 - RNA, 79 nt, Human
ccaagaugguagaaaugcugaauucuauuuuaagucugauuagagcacuaggcuucucagcaugguuacugugauuugg

SEQ ID NO: 4101755 - RNA, 88 nt, Human
ccaagauuauugaaacuaauaucacaguaguuguuuaguugauauuucuggagcuaugcugcaguuguggaguuugaguccuucuugg

SEQ ID NO: 4101756 - RNA, 63 nt, Human
ccaagcaaggcuaauucacuugcccaaagccacacagcuaguaagugaugaagaccuguuugg

SEQ ID NO: 4101757 - RNA, 82 nt, Human
ccaagcagucuuuguuuacaaaaauaagcagugggauauaguuuacugacuguuuuuguacaacaaguuuucuagaccuugg

SEQ ID NO: 4101758 - RNA, 96 nt, Human
ccaagcuccugccggagggucuuuccugggagccagcccggagugcucacugcccugcucucucccuaggcaagugaguucccaccaggugcuugg

SEQ ID NO: 4101759 - RNA, 61 nt, Human
ccaagcucugggauagcagagagcaugccugucguuucacugcugaauucccagagccugg

SEQ ID NO: 4101760 - RNA, 75 nt, Human
ccaaggacaccaggcacagcucuccugcuacucagaaugagaggucagagagggcugggcuuggccccaucuugg

SEQ ID NO: 4101761 - RNA, 130 nt, Human
ccaaggacagaucuccaagaauucaggagggaaaagcgaucccucuucuuuccagcccccuuggggguauuccccugggggucuugaaagggagagggguaccucagauguuggggauaaggcucuuugg

SEQ ID NO: 4101762 - RNA, 64 nt, Human
ccaaggaucccacccgggauaccaaguuacacuuaauuaucgugucucuuuggguuccucuugg

SEQ ID NO: 4101763 - RNA, 55 nt, Human
ccaaggcuggaguguaauggcaugaucucagcucacugcaaacuccaccuccugg

SEQ ID NO: 4101764 - RNA, 58 nt, Human
ccaagggaaaccgagaggcugggagugccaaguacugcagucucucugucuuccuugg

SEQ ID NO: 4101765 - RNA, 65 nt, Human
ccaagggugugagcaucuguaggagcugagcuccggauccugcagcugaagcucauguguccugg

SEQ ID NO: 4101766 - RNA, 70 nt, Human
ccaagugacaccugauuguguuccucacguucuugucugauaccaagaaggccaauagggugcacugagg

SEQ ID NO: 4101767 - RNA, 64 nt, Human
ccaagugcaugcacacccagcugggucaugacagcacccaggcucugggugugacagcaccugg

SEQ ID NO: 4101768 - RNA, 64 nt, Human
ccaaguguccugcauuggcucugcccagaugcaccuuccgggcuccaggcaggcaggaaauugg

SEQ ID NO: 4101769 - RNA, 67 nt, Human
ccaaguuguggcugugcaccgcugccuggguaucacuuccagggggaugggccugcuaccuccuugg

SEQ ID NO: 4101770 - RNA, 68 nt, Human
ccaauacuuagauuaaaauaguuugaccaauugaaauuaaaauuguuuuuaagguagucuaguauugg

SEQ ID NO: 4101771 - RNA, 97 nt, Human
ccaauaguuuugcucuacuuucacauggacuuuuuguucuagcuucucucaucuuucucuggaauguuaauugcaugugaaaucagauaguaauugg

SEQ ID NO: 4101772 - RNA, 76 nt, Human
ccaauaucagacagcugguuccuucuugaagcaacucuuaaagacagauggaccagccaugucuucaaaguguugg

SEQ ID NO: 4101773 - RNA, 63 nt, Human
ccaauaucugucagccagugagcacuuguucugugaucauggcuaaugcaguauauucaaagg

SEQ ID NO: 4101774 - RNA, 89 nt, Human
ccaauggaacauuuuccauccuccaguaguguagucagauguacacggaagguggaugacuggcugcgggguggaagaagaauucaugg

SEQ ID NO: 4101775 - RNA, 90 nt, Human
ccaaugggaagaccaguggaauguaaaauugcuucagcuguauguacuguucaauuucagcauccauugacaucugugucuucuccaugg

SEQ ID NO: 4101776 - RNA, 82 nt, Human
ccaauguccacgauucuuuauuuucauugccuuuacuuuaaugguuauuagaagugaaggauuguuuuucugacuuaauugg

SEQ ID NO: 4101777 - RNA, 113 nt, Human
ccaauguuguccaagcucacgugugguuugugggucuauguguuugcugcuggcaaauuugcaagcagaugggacuccaaggcaaggcguggaagugaugaugggaacguugg

SEQ ID NO: 4101778 - RNA, 65 nt, Human
ccaauucacuccacuucugugucuggcugccaaaagaacagacaggcuucagaaagaguaauugg

SEQ ID NO: 4101779 - RNA, 108 nt, Human
ccaauucaguucagccagccucccugaacacuucuauucccugcacaaagggugcugugcucagugcugguggugguggugugguggggguggguuggaaagaugugg

SEQ ID NO: 4101780 - RNA, 66 nt, Human
ccaauucauuucuuccccugguucccaugccuccugcaggcuacauguugggguggaaggagcugg

SEQ ID NO: 4101781 - RNA, 79 nt, Human
ccaauuccugaagaaacgcacccuuggcuucauccugccuuugggaaugaagccaaggaugccuuucucuaggaauugg

SEQ ID NO: 4101782 - RNA, 69 nt, Human
ccaauucugguauaguauaaauuaauguucaaauauaugauuuacauugaagggcuauccaauaguugg

SEQ ID NO: 4101783 - RNA, 129 nt, Human
ccaauucuucaguggauauguucagaauguuucuaggucaauaauuuuuaaauggcaagaaauuuuuauguaaagauacaaaaaugguuguucuagcaacuucugauuucaggcacauugaaggcaagg

SEQ ID NO: 4101784 - RNA, 57 nt, Human
ccaauuggauuugguuuuaguugguacagacuggcugcaauugccugaucucauugg

SEQ ID NO: 4101785 - RNA, 102 nt, Human
ccaauuguaggaagcagcacuaugugugacuaauaccuaugaucaagauauaaaguggaaaauauggguauuuuauacauaaccugccacuagcagccuugg

SEQ ID NO: 4101786 - RNA, 127 nt, Human
ccacaaccccaaguuacagggaagauaaaaugaaacugaaagguauuuauaggaugucuugcaauugcucaagaaauauuaaaguaucuuucaauuugauugcagguaacuuaaaaguauacugugg

SEQ ID NO: 4101787 - RNA, 58 nt, Human
ccacaaucuaaagggcuguaucucauacccuuaagaguaugcaaacccugcuuugugg

SEQ ID NO: 4101788 - RNA, 68 nt, Human
ccacacccaggcacaccccgaacggaacccgcacacccauggucccgcacaggcauggccuggggugg

SEQ ID NO: 4101789 - RNA, 61 nt, Human
ccacacuaccuaauaauuugauauucagcaccugcugucauacagauuuuggguugggugg

SEQ ID NO: 4101790 - RNA, 78 nt, Human
ccacagaagauggggagaguggauugggauggacagucuccauuauacaugcuauuuucuuacugucuugacuugagg

SEQ ID NO: 4101791 - RNA, 58 nt, Human
ccacagaaucauauugucaguuucugguugacagaugacuagaugaacagauucuggg

SEQ ID NO: 4101792 - RNA, 59 nt, Human
ccacagccagcccugcccuccccuuuaugacaggagaauccagaguuacauggcugugg

SEQ ID NO: 4101793 - RNA, 58 nt, Human
ccacagcugaccgcaggugagccuaacccuugaaggagcauuugcugagcggcugugg

SEQ ID NO: 4101794 - RNA, 61 nt, Human
ccacagcuucugucugauuagcaagcuuuuaaagaagcaauuugcuuacauggaagcgugg

SEQ ID NO: 4101795 - RNA, 56 nt, Human
ccacaggauccaagggaaggcagaaugcguccucuguagcuuggaugguucugugg

SEQ ID NO: 4101796 - RNA, 114 nt, Human
ccacagggugccagucccuacaaccucucacagcauuauccagggcaacaggaagaacaguugccuggggauugcucugggccaugugcuucuggccauaauuccuucuugugg

SEQ ID NO: 4101797 - RNA, 88 nt, Human
cauggcacagggcaggucugggucagccugaagggguacaggaacaugucugucucuucucagcuguuuuaaucuccccucugccaug

SEQ ID NO: 4101798 - RNA, 57 nt, Human
cauggcagcuccuccagugugauggagugugagaucucgcugaagaagcugcacaug

SEQ ID NO: 4101799 - RNA, 61 nt, Human
cauggccaaagaauuauauuuuauuauuaaaaugguauagauguauucauuguuuggccug

SEQ ID NO: 4101800 - RNA, 115 nt, Human
cauggcccuauugaagcccuuucucuagguuuuagaugaagaaauuaccaagcccuacucuuaaacuuucuaugucuuccuuguagaauuuagagcaguguaaucaauuucugug

SEQ ID NO: 4101801 - RNA, 56 nt, Human
cauggccuugagugacugcacuggucaaacguccaugcagcguggcacagguuaug

SEQ ID NO: 4101802 - RNA, 67 nt, Human
ccacaugaacuuuaccauuuagguaacucuagcaauaagauguucucuuugugguaaguaucauggg

SEQ ID NO: 4101803 - RNA, 64 nt, Human
ccacaugcacuucaccacuaggcuauacugcuaugcagauagcaaagaaagugugagggggugg

SEQ ID NO: 4101804 - RNA, 56 nt, Human
ccacaugccaccuggagagacuacugucugcaagggugucacaggaggccgugugg

SEQ ID NO: 4101805 - RNA, 56 nt, Human
ccacauucucauguaauccuuucaacaagccaaugaaauagguuaaggagaauggg

SEQ ID NO: 4101806 - RNA, 91 nt, Human
ccaccaaaccaaccagggacuuggcucccccuaaggcaccaaggaagcccuggggaaccagcccacugguguucucaugugguuuguuugg

SEQ ID NO: 4101807 - RNA, 55 nt, Human
ccaccagaagcugggagaagcugggaacagguucucucugagagcaucuggaagg

SEQ ID NO: 4101808 - RNA, 65 nt, Human
ccaccagcgucuuccucuuacgaugcgcuccguugaaauuuagcguguugggaggagcugcaggg

SEQ ID NO: 4101809 - RNA, 89 nt, Human
ccaccaggcugugugggugucugcggggcauggggagcuggcauggcugggccacuaacagcacuggcaggcacugucuagccugaagg

SEQ ID NO: 4101810 - RNA, 90 nt, Human
ccaccauggccgccuccucugggaagauucagagcccuucugcagccucagcacuuuucugccugccccagagaggccaggccugcgugg

SEQ ID NO: 4101811 - RNA, 89 nt, Human
ccacccaaaucucaucuugaauuguacucccauaagucccacguguugugggagggaccuggugggagauaauugaaucaugggggugg

SEQ ID NO: 4101812 - RNA, 64 nt, Human
ccacccaacgcuucuggaagagcccaagccaacguauggcucaggaucccaggggugugcgugg

SEQ ID NO: 4101813 - RNA, 61 nt, Human
ccacccagugaaggagcaagaggaaugggaagagccacucccucccucccuccugaggugg

SEQ ID NO: 4101814 - RNA, 57 nt, Human
ccacccuaacaauccuuacuguauucaacuaaaagaaaccaaggaucuugguggugg

SEQ ID NO: 4101815 - RNA, 92 nt, Human
ccacccucagauuugccucccagcaugggcagcucagccaaggcagggcggcccugcacgugcugaggacaggggcguuucuaagagggagg

SEQ ID NO: 4101816 - RNA, 86 nt, Human
ccacccucauuuuacaggggcuucuagggugccagaucugcgggggucgauugggaagaacuagaagcuaaaaaggagaagggcgg

SEQ ID NO: 4101817 - RNA, 57 nt, Human
ccacccugccuugggccagugacuggggccagugacuggucuguguggaggguuugg

SEQ ID NO: 4101818 - RNA, 59 nt, Human
ccacccugggcaggcugggaagagcuucuccucuaggggaacugccugcccagaggugg

SEQ ID NO: 4101819 - RNA, 113 nt, Human
ccaccgaccucugagugauggcacugugccacaauucaccagggcacaaggaagggagacagccacccaccucugagugauggcacugugccgcucuucaccagggcaugggg

SEQ ID NO: 4101820 - RNA, 107 nt, Human
ccaccggcugucucucuuccaggcucugagcccccagaagcagagcuuuguuuuggagguucugucugggugccucgaguaccggaagcugcugaccgucguggugg

SEQ ID NO: 4101821 - RNA, 63 nt, Human
ccaccuaauugcugacucaaguugcugguuugcaaugggcacagaacuucucuuaguaggugg

SEQ ID NO: 4101822 - RNA, 76 nt, Human
ccaccucccccgccgggccuggccgccgucccaaccucgagccacagcuggcgcggccaggcccggcggggggugg

SEQ ID NO: 4101823 - RNA, 65 nt, Human
ccaccucucaggguuuccuaaugcaaauccuugaacccugcagaaguaagcauccagagaggugg

SEQ ID NO: 4101824 - RNA, 69 nt, Human
ccaccugugcuugguacuccauaccaauuauuuuguguaagcuaccuuaguacucuccaaaguaggugg

SEQ ID NO: 4101825 - RNA, 84 nt, Human
ccaccuguucuacacuggccugucaagaauaacaauaauaauaauuauuauuuuagagagaggccugcuguguuggccaggugg

SEQ ID NO: 4101826 - RNA, 61 nt, Human
ccaccuucaucuccgccaucgcgaacgccugcccgaugcaguuccuuggggagggaggugg

SEQ ID NO: 4101827 - RNA, 83 nt, Human
ccacgaagaccauggcuccccaguucucauggcacugcagccuggcagugcagguuuagggcuggggccugcuguguuugugg

SEQ ID NO: 4101828 - RNA, 56 nt, Human
ccacgagggaaccagguggggugcacucgugccccucucuccuggauccccugugg

SEQ ID NO: 4101829 - RNA, 64 nt, Human
ccacgcccucccugagcccggccgaaaaucaaccggcucucguggguagcagaggaggccgugg

SEQ ID NO: 4101830 - RNA, 117 nt, Human
ccacgcugcaggagcuaugaggcguacaggagcauggggaagggauaucaacacacauaaacaaaguaguuccauccuugccuuaugucugucuuuuuuauaccuccguagaugugg

SEQ ID NO: 4101831 - RNA, 57 nt, Human
ccacgcuggguggccacuggccacugcuccuuugggugugccaggcaagacaggugg

SEQ ID NO: 4101832 - RNA, 62 nt, Human
ccacguucccgauggugcacugguuuucuuuccugucugaccaacaagccucuggagagugg

SEQ ID NO: 4101833 - RNA, 59 nt, Human
ccacguucugccuuccaccuguaacccaaucauugcagcugauuaaagggcagacgugg

SEQ ID NO: 4101834 - RNA, 58 nt, Human
ccacuauggauucacuauuggaaagagaauggaaaagucucuccuggauccauggugg

SEQ ID NO: 4101835 - RNA, 74 nt, Human
ccacucaggcucauaucccaucagcaaaaacuggcccugaaugccaggaggcuggauaauguagccuguagugg

SEQ ID NO: 4101836 - RNA, 58 nt, Human
ccacucccuaagcucuucccugggcgccuuguuaacagcucagcucuggggucagugg

SEQ ID NO: 4101837 - RNA, 60 nt, Human
ccacucugcugugcuccaugaucaagguuuccucaauucuguggggcuuggcaggugugg

SEQ ID NO: 4101838 - RNA, 63 nt, Human
ccacucuggcccuccugcugccaguccucucccugugggaugaggcaucagcagggccgaggg

SEQ ID NO: 4101839 - RNA, 68 nt, Human
ccacucuucacugcuuuucuaagauucugugggaauguuaacucccacagcaaaggacagagaguugg

SEQ ID NO: 4101840 - RNA, 57 nt, Human
ccacugaaaggcaaugcugacaguccagguuggcugggcugaagucuuuucagcugg

SEQ ID NO: 4101841 - RNA, 93 nt, Human
ccacugaaauuguucaaaugccuugccugcuacaacuuuguucaaaaacaguuuucaaacaugugaucagagcuaggcaacuauuucaggugg

SEQ ID NO: 4101842 - RNA, 61 nt, Human
ccacugaaugcucgcucagcuuccgcugacuguuguugcagaagaauguaggcauaagugg

SEQ ID NO: 4101843 - RNA, 71 nt, Human
ccacugaggcaggcaguaucuagcuugggacaugcccauuugaagucuuuuaaggaucuuccugccugugg

SEQ ID NO: 4101844 - RNA, 129 nt, Human
ccacugauuucuguguaauuuguguccaauauuucaaagccauuuaaaaaaggauuuugacugcaugccuaguagcuguuucagaucauuuuuuaaguacagaauggauaauuagucuucagugauuug

SEQ ID NO: 4101845 - RNA, 76 nt, Human
ccacuggaaagucugagguaaaauuucuauuuugauaacaacucuuauuaaaagaugaagagugccuuucuagugg

SEQ ID NO: 4101846 - RNA, 67 nt, Human
ccacuggauucucuuacacagaugccaauaagaacaaaggcauuaccuggggagaggauaccgaugg

SEQ ID NO: 4101847 - RNA, 60 nt, Human
ccacuggcccuuugguuuaugacugagucccagacucagucauaaaccaaagggaagugg

SEQ ID NO: 4101848 - RNA, 57 nt, Human
ccacuggccgguagagagcauucagagaugaggcuguucuaccagggccaagcuugg

SEQ ID NO: 4101849 - RNA, 129 nt, Human
ccacugggucagugccagcuucugcaggaugaccaugcacagcagugaguucagugccuucucauccucugcagcugacagcugcugcugcgucuccuccagcugugauguacucauuucaccuggugg

SEQ ID NO: 4101850 - RNA, 66 nt, Human
ccacugggucugaaggacagagcaucaaaccaaagaggauuguucuugagccuuuagaccuaaugg

SEQ ID NO: 4101851 - RNA, 68 nt, Human
ccacugucccugggcacaaucugcuggcgaauccuggaggucugcgccggcugcccguggggaggugg

SEQ ID NO: 4101852 - RNA, 60 nt, Human
ccacugugcauuugaagggaucauuuaguggaaaauguucccaguggaaaauguucaggg

SEQ ID NO: 4101853 - RNA, 60 nt, Human
ccacugugguuauuaucacuguuacugcuuucacaguaacggccagcacuaccacagugg

SEQ ID NO: 4101854 - RNA, 93 nt, Human
ccacuguuaugccucuccagaugcugaaauccaguucggggaccuaucgucucugggcugccuuuuagcucuugugggacuugauuaacuugg

SEQ ID NO: 4101855 - RNA, 71 nt, Human
ccacuguuuuaaaugcucaguagcuggcugacccuugcucuccaugggucugccugcugugaagucagugg

SEQ ID NO: 4101856 - RNA, 57 nt, Human
ccacuuccuugagugguacacauuauuauauuugugcugguucaaaaaggaaggagg

SEQ ID NO: 4101857 - RNA, 55 nt, Human
ccacuucuccccacccucccacaccucaguucugcaugguuggggagaagcuugg

SEQ ID NO: 4101858 - RNA, 81 nt, Human
ccacuugauuauucagauuacuugugccugcuggccgugcuugggccaaaugccggguauaauacucugacugaacaaugg

SEQ ID NO: 4101859 - RNA, 73 nt, Human
ccacuuugccauguugccugcagaaacuugaggucaacaagagagcguucugcacagcauggccucagagugg

SEQ ID NO: 4101860 - RNA, 61 nt, Human
ccagaaaauccauggcucuuucguugcuguuaaaugacaauaaagcagguggauuuauugg

SEQ ID NO: 4101861 - RNA, 91 nt, Human
ccagaaaccaggaaaaugcguggaaggauccuuccuccagagacuuuggagggagagugacccuaccaacacauugauuuuggauuucugg

SEQ ID NO: 4101862 - RNA, 67 nt, Human
ccagaaagagccaaggcugagagcuauuucuccccagaaaugugauuccacagucuugguuuccugg

SEQ ID NO: 4101863 - RNA, 92 nt, Human
ccaggaggaagggauggagagggaaggaggccaugugucccaaaggggaacccugggggagugguccuuuccuaucugccacuggugccugg

SEQ ID NO: 4101864 - RNA, 76 nt, Human
ccaggaggauggugggaguggaacguggaagaggggcucacuuccucuaaacugcgagcaugcccccuucuccugg

SEQ ID NO: 4101865 - RNA, 58 nt, Human
ccaggagguggagauugcagugacugagcugagauugcgccacugcacuccagccugg

SEQ ID NO: 4101866 - RNA, 87 nt, Human
ccaggaguagguuaaccacauagguuucugaacaggcuuguuucaacaagggcugcaagucacagaaacagugauugaucacauugg

SEQ ID NO: 4101867 - RNA, 57 nt, Human
ccaggagucaauaaaggaagcugucuucaaguugagcaauccagagaugacucuugg

SEQ ID NO: 4101868 - RNA, 83 nt, Human
ccaggauaguuuaaacaguuuugaaaugaaagaaccaaguuugaauacuuagauuuucugauuuuaaaacuguaaaacuaugg

SEQ ID NO: 4101869 - RNA, 65 nt, Human
ccaggaucuguacaccucugagugucccaccaugccucucugccagcaguguguauggaaucugg

SEQ ID NO: 4101870 - RNA, 83 nt, Human
ccaggaucuuggggucauggguuuagcauucauucauucagucagucaguaggugccuccaucagugccuccaaggugccugg

SEQ ID NO: 4101871 - RNA, 89 nt, Human
ccaggauggucuugaucucuugaccucaugauccaccugccuuggccucccaaagugcugggauuaugggcaugagccaccgugccugg

SEQ ID NO: 4101872 - RNA, 58 nt, Human
ccaggcaaaucccucuggcagauuguaagcauagucccuaugccagaaauuugguugg

SEQ ID NO: 4101873 - RNA, 91 nt, Human
ccaggcagcuuuugacuguaaucucuuuggccagaaaauguuuuggauucgccaaaauuuuaaaaucaggggaugucaaaccacagucugg

SEQ ID NO: 4101874 - RNA, 81 nt, Human
ccaggcagggcccggccuggggccaagagugcagggccucuguuuagaggcuccugcaggccuuguaggguuccagccugg

SEQ ID NO: 4101875 - RNA, 114 nt, Human
ccaggcagguucuggcccugggugcuccuggccacccgacagaaguccgggaugggaaggccggauguguguuuguguugggggcagggaagagggucuaggauaggguacugg

SEQ ID NO: 4101876 - RNA, 71 nt, Human
ccaggcagugacaaguuacuuggauggcuaaaucagaacugguccaccaaacaaaauugugcacugugugg

SEQ ID NO: 4101877 - RNA, 58 nt, Human
cauagauguguguaaguacauaaguauacacauauauucauguaguuuuauaucuaug

SEQ ID NO: 4101878 - RNA, 72 nt, Human
cauagcaccaaaguccuguuagggucugcuuucuguuuuccaccuugauggggcuguuggaguuuugcuuug

SEQ ID NO: 4101879 - RNA, 55 nt, Human
cauagcauuuaucuuuuguuugaguucuuguaaacugaauaaggugaaugcucug

SEQ ID NO: 4101880 - RNA, 73 nt, Human
cauaggauggagggcuagucauuucuuuuuguaucuuuuacauaaaaaucuaugacugcuucuccucugaaug

SEQ ID NO: 4101881 - RNA, 129 nt, Human
cauaggauugcacucacugcuucccaccucuccucacuuuucagguuaggcauggccaugugauugcucuagccuguaaaacaugagcagaagaggcaugaagcacuuggugagugcuucuaagagcug

SEQ ID NO: 4101882 - RNA, 56 nt, Human
cauaggcuguggcagcuggaagugguagugacuaaugcuggaugccaagggcugug

SEQ ID NO: 4101883 - RNA, 81 nt, Human
cauagggacugccuaucuguggggagcaggagccgggagggcccuguuuucuggcuccacaccucacugcaagguccuaug

SEQ ID NO: 4101884 - RNA, 84 nt, Human
cauaguccacagucuguuccuguucaugacauuuacgugagucagaugacauucaggccaggagaucagauugaagguaccgug

SEQ ID NO: 4101885 - RNA, 60 nt, Human
cauagugacucaugccuauaaucccagcacuuugggaggccgaguugggcagaucacuug

SEQ ID NO: 4101886 - RNA, 66 nt, Human
cauauaaacuugagucucagaguaucuugggccagaacaugauguuacugggagugaguuugugug

SEQ ID NO: 4101887 - RNA, 118 nt, Human
cauauacccaccucucuaaaugccacauucaacaaacuucaaguccagugauacuggcaggaagacagucucuucuucaguacagcauugauuuauguggcagaaaggaugcuauaug

SEQ ID NO: 4101888 - RNA, 83 nt, Human
cauauauuagcgcuuacugaguugccaaauaaaugaauccauaggagucuauuaaguuggcaacuuaguaagcacuuuaugug

SEQ ID NO: 4101889 - RNA, 76 nt, Human
cauaucauaugguuuucaugggaaaaaaauauuuggagcugaucuucauauuuccauguuagaacuaaguguauug

SEQ ID NO: 4101890 - RNA, 57 nt, Human
cauauccaauaugacuaguguucuuauaaaaacagaacauuuggacacagggauaug

SEQ ID NO: 4101891 - RNA, 55 nt, Human
cauauccuauacacauaguugucguuuaugauauguguguaugugugugggagug

SEQ ID NO: 4101892 - RNA, 125 nt, Human
cauauccuugagcgcugcucccacucuguggucugauauccuuguggcaaugucccagguggauaaaacguggcacgacaauuggcaccaaugaauuacucuuggaguagcaauugcuggaugug

SEQ ID NO: 4101893 - RNA, 79 nt, Human
cauaucuguagauuuauuggucuuucauugguaagcauuggcaaugaaaguuccaauaagaacuggauuuggggguaug

SEQ ID NO: 4101894 - RNA, 59 nt, Human
cauaucuuuguaaguuagagguagaugauggcuuacugaacugucugugcagagaugug

SEQ ID NO: 4101895 - RNA, 74 nt, Human
cauaugaauaaucauaucgucucacauaucggcaaggagguugaaaaaugugggaggauuauggauauucaaug

SEQ ID NO: 4101896 - RNA, 124 nt, Human
cauaugcauaucuggguauauauuuggauauaugugugcauguaugugugugugcauauuuguguauauauguguacacacauauauguauguguauauauauauguauauagguauauaugug

SEQ ID NO: 4101897 - RNA, 55 nt, Human
cauaugcauugggauauuucugaacaauucuaacagaaucuuuccccaugcaaug

SEQ ID NO: 4101898 - RNA, 65 nt, Human
cauauggccacagcuuguuugcaaagaaugcugaucaugcuuucaaacaaaacuguucccauaug

SEQ ID NO: 4101899 - RNA, 109 nt, Human
cauaugugaaaauuuggauagccagacugcuuuuaggacuuuauauacuaaguaauaagagagaagccugaaagcguagguuggaaacuagagaguuuguauucaugug

SEQ ID NO: 4101900 - RNA, 87 nt, Human
cauauguguguuucaaauuagcaacugucuugaaaacauaugguacuguguaauuuccugauguuagaacugaaaaauacagaugug

SEQ ID NO: 4101901 - RNA, 85 nt, Human
cauauguugaugcacuauguuuucuccauguuaugcuuuugaaaaggaaaguucaucaaagaguaaauauuugucaaagcaugug

SEQ ID NO: 4101902 - RNA, 55 nt, Human
cauauucuuuaagcaaugcucucuaaauuggggcauguucaccuugggggaugug

SEQ ID NO: 4101903 - RNA, 77 nt, Human
cauauuguacaguauugguguuaguagcauauugaguuuaugcuggauuuuuaguguuaccaaguacuuugcaagug

SEQ ID NO: 4101904 - RNA, 82 nt, Human
caucaaccaggugguucugaaaggccugggaguacugggacaggccaaugucauucagccaggccuuggccacccagugaug

SEQ ID NO: 4101905 - RNA, 110 nt, Human
caucaacucacacgugaggaauuuaagaggaugaaucuguguauccccuugugcaggcacucacacucacagauacucggaccucuucucucucaccugucccuugcaug

SEQ ID NO: 4101906 - RNA, 58 nt, Human
caucaagauggaagagcaaauaguuucucaugcuggagaaaugcucuccaguguggug

SEQ ID NO: 4101907 - RNA, 83 nt, Human
caucaagcccagugcccagacuucugggaggaucuggcugcuacucagugaaaggaagccugggagguuugggagggcagaug

SEQ ID NO: 4101908 - RNA, 76 nt, Human
caucaaugaaaccugaaguacguuacauaauauguaaaacucaaugucauguaaaguguagguuuagagaaugaug

SEQ ID NO: 4101909 - RNA, 68 nt, Human
caucacaucuacuauaagugaucuguuacucuuuagcaggcuagcccaaacuuguuuuggaggugaug

SEQ ID NO: 4101910 - RNA, 57 nt, Human
caucacugggcuucuaaucacugggacgaucuuguggacaaugaggccccgguaaug

SEQ ID NO: 4101911 - RNA, 81 nt, Human
caucacuugagaacuugcuaaaaaugcagaaucuuggucccugaaucagaaucugcuuuuuaacaagaucccuaggugaug

SEQ ID NO: 4101912 - RNA, 57 nt, Human
caucacuuugaaugguaggcaucaauaugauugaaacggcugccacuuaauguggug

SEQ ID NO: 4101913 - RNA, 64 nt, Human
caucagaauagcucuguggauacaagagcaaagggaaauguuauccaccacagcuguugugcug

SEQ ID NO: 4101914 - RNA, 129 nt, Human
caucagaaucuccaggaaggcuuguugaaacauacaucauuggguccuaaccccagagucucugauucaguaggucuaggguggggcccaagacuugcauuucugacaaguucccagaugaugcugaug

SEQ ID NO: 4101915 - RNA, 80 nt, Human
caucagagugcuaagagagauaaucugaaaugaaaugagauggauuauucuagaacagagguuucuaaaguguuuucaug

SEQ ID NO: 4101916 - RNA, 55 nt, Human
caucagaguuaacaucaugacuaucuggacagacagcaucaugugacugcugaug

SEQ ID NO: 4101917 - RNA, 68 nt, Human
caucagcugcccagcaauaaaccagaagagcuagaaaauaauguagaucagacuggcugggcgcgaug

SEQ ID NO: 4101918 - RNA, 57 nt, Human
caucaggcuguguuccuggaaccccaauaacccugggcccccagggccagccuguug

SEQ ID NO: 4101919 - RNA, 63 nt, Human
caucagucagucucuucaguauugugcuagauacugugaauagaaagaugacuaagacuagug

SEQ ID NO: 4101920 - RNA, 76 nt, Human
caucauguagagauuaaugcccaaugcaguuagcugaaucaauuuuagagcugcagcguucauuuuuccaugugug

SEQ ID NO: 4101921 - RNA, 70 nt, Human
caucauuggagucuacuuucucuccuuuuuugccuacucagcagaaagggaugagguagcugcuaucaug

SEQ ID NO: 4101922 - RNA, 78 nt, Human
caucauuuuuauuguuuuuaucucuguguacaaccuucuaaaauauaagguugucuuagucagaaauaugcaauggug

SEQ ID NO: 4101923 - RNA, 108 nt, Human
cauccaaaaauaauuuuaaaagacaucuauuucaggcagcucauguauaaaaugauucugcugugaguuuggaggucuacaguuaucuuugaaauuguggcaggggug

SEQ ID NO: 4101924 - RNA, 60 nt, Human
cauccaaggcacuagcaugaguaagucaucagacccuagaucagcucugugccugggaug

SEQ ID NO: 4101925 - RNA, 72 nt, Human
cauccauugucuagaaaaaugugaaagaauuugagaaauggcaaauuuacacuugguuuacuagagaggaug

SEQ ID NO: 4101926 - RNA, 57 nt, Human
ccagaaauccuggccucacuguaacaaaacauucguuuugguugagccagggccugg

SEQ ID NO: 4101927 - RNA, 64 nt, Human
ccagaaaugcagugguucuacuucucagcugaaguucauagagagguagaggauacugugaugg

SEQ ID NO: 4101928 - RNA, 67 nt, Human
ccagaacaucugacuagucuagcuaggguaacaggccuacaccuuggccaggcauaaaggugggugg

SEQ ID NO: 4101929 - RNA, 57 nt, Human
ccagaagcagugagagaugugcacugauucaucugcauccuuucgcauguuuucugg

SEQ ID NO: 4101930 - RNA, 62 nt, Human
ccagaagucaaugcagaugugauuauauaagaaaaucaagaucauaucuuuguuacuucugg

SEQ ID NO: 4101931 - RNA, 59 nt, Human
ccagaagugccuucucuccucuagcagaagaggagcugugaaugggagggguuuucugg

SEQ ID NO: 4101932 - RNA, 57 nt, Human
ccagaauguuugugaacagucuuaaugaccacugugacuguucauuugaugaacugg

SEQ ID NO: 4101933 - RNA, 67 nt, Human
ccagaccaaacuguaaauacagaacuaggcacaucucaauguucugucucuguguuuacauuacugg

SEQ ID NO: 4101934 - RNA, 101 nt, Human
ccagacccuaccucucagaaaccucagccuuggccccaggcaguggugggacaacacaaaccacacagcagagggcacaggagcuggaggagagguucugg

SEQ ID NO: 4101935 - RNA, 89 nt, Human
ccagacuccauacuaucagccacuugugaugcuggggaaguuccucuacacaaguuccccuggugccacgaucugcuucacgagucugg

SEQ ID NO: 4101936 - RNA, 59 nt, Human
ccagacucuugagcugauuguauccgaugucgagaaacuugaggcugcggcaguccugg

SEQ ID NO: 4101937 - RNA, 105 nt, Human
ccagacugcuuggcucugagucagccacuucugcugucauccuuuuuauucugcagauggggaaacugaugcucagagaggggcgaguaggccuaguagcucugg

SEQ ID NO: 4101938 - RNA, 64 nt, Human
ccagacuucagaacuguguaagacagugacagcuaugcuauacagugacuagaaguaaugaugg

SEQ ID NO: 4101939 - RNA, 83 nt, Human
ccagacuucuaucuggugucuucugguacuuacuuugagcccaggaugagcucaggagcaucagaagaaauguguaguuaugg

SEQ ID NO: 4101940 - RNA, 100 nt, Human
ccagagaaaggaaggagggggcugaauucgcaggcccaagguguucacacuuguccagaccugggccuugagaaucauguuucuucccucuucacucugg

SEQ ID NO: 4101941 - RNA, 56 nt, Human
ccagagagaaaauggagggccagguauuuucaggcucuuucaacuagcucugcugg

SEQ ID NO: 4101942 - RNA, 64 nt, Human
ccagagcagggguuucccagguucccaccaaaucagggaaacgagccaugaggagacucccugg

SEQ ID NO: 4101943 - RNA, 56 nt, Human
ccagagcugaggagaugggcuugagugccugcucaucuuagcuucuaagguucugg

SEQ ID NO: 4101944 - RNA, 129 nt, Human
ccagagcuggagccaggcuaucuugggucgugggggucaggcaaaguggcuggccgggagaucugcugagugggucagccggucaguccugagcagccgggccucuggugcccagguccacgugacugg

SEQ ID NO: 4101945 - RNA, 84 nt, Human
ccagagcuucuggaggaaugggaugaggccucuguugugacugcaucacacacaguccauucuuccuccauugaauccuucugg

SEQ ID NO: 4101946 - RNA, 104 nt, Human
ccagaggagaggagcaggcgagggcagaggcggacacggaaggacccaggcagaaacgcugucuucuucugcugucuccaucugcccuuuuccuccuucucugg

SEQ ID NO: 4101947 - RNA, 90 nt, Human
ccagaggcauuugaaauaugugucuuuugaaucaaagaaacauagaggauuugaagauggaggagaccgcauuuuauuuuauggcccugg

SEQ ID NO: 4101948 - RNA, 90 nt, Human
ccagaggcugccugugcugugauauugaagauagaaauacuacccugaaguuccuggcaugaaaaauaucacaguacaggcagccucugg

SEQ ID NO: 4101949 - RNA, 59 nt, Human
ccagaggcuggcaagggcuccugaaccaguugucauuucuaucuugccggucucuuagg

SEQ ID NO: 4101950 - RNA, 79 nt, Human
cauucucucuucuucccugagcuuucucaggcugggccaacccaggggccuggggaggugagggcauguggagagaaug

SEQ ID NO: 4101951 - RNA, 76 nt, Human
cauucuucaguuuguacugaauucaauuuaagaaguuguggaggcuguuggauuauucaauauagucugaaaaaug

SEQ ID NO: 4101952 - RNA, 57 nt, Human
cauucuugaaccaggcacuguguagggagaccacaguguuccaguugguugagagug

SEQ ID NO: 4101953 - RNA, 129 nt, Human
cauucuuuacuucuuaacuaagagcuccucaagggagaaagaaugaguuuaggagaagaaccuaacaugcuagacuccacaugaccacucuuuacuucuuacuaagagcuccucaagggagaaaggaug

SEQ ID NO: 4101954 - RNA, 71 nt, Human
cauugaaacagggacaguuacaucaucagacuuuuauguauaagcugcagauuuuugucccuaccucagug

SEQ ID NO: 4101955 - RNA, 85 nt, Human
cauugacccucaugacuaugauuucauuucugaauaugucuuucaagauaauucagggccagaauccccagacaugaacaaaaug

SEQ ID NO: 4101956 - RNA, 115 nt, Human
cauugagaaccuuccuaacauacuucaguacuucccauucugagcucuacaacuguggacagucauauaguuuaagagaauuugggggugacaguguguucagggaguugcagug

SEQ ID NO: 4101957 - RNA, 98 nt, Human
cauugagguagggaaaagauugaaagagaauuugucaccuuauugcaaagaugggcaagcuuuguuucacuuuaucuuuuuccauuugaccuugaaug

SEQ ID NO: 4101958 - RNA, 90 nt, Human
cauugauugguccaagagaagccauuaugcuauuaguugucuaucuauucugucuauaucagcuucuagcaucggcuuugaccaucauug

SEQ ID NO: 4101959 - RNA, 60 nt, Human
cauugauuugcuugccucucaaugcuguucaaacgucaguaacaaggcagcauguuagug

SEQ ID NO: 4101960 - RNA, 73 nt, Human
cauugcagcauuguagcauuuuaaaugagcauucguaaggagucugcuuaaauaaaguuacauucaugcagug

SEQ ID NO: 4101961 - RNA, 121 nt, Human
cauugcaguggucccuacaccuugaagagcaucagaaucauccggggaaugcaguaaaaacacauggacucagcccuguucuguuuuaguagcuugccaggguuugagaaccacugugaug

SEQ ID NO: 4101962 - RNA, 84 nt, Human
cauugcccugaaauuaaauaugaguuugagauuuugauuugaagucuucucuuugaaaugaaauauuuaagcucuuagggaaug

SEQ ID NO: 4101963 - RNA, 94 nt, Human
cauugccuagggagucaagagcucuugcuucuaguccaggccuugacacagacucugagacuucuggcaaguugcuuuauuucucugggccaug

SEQ ID NO: 4101964 - RNA, 67 nt, Human
cauugccugcuggcugcuuccugggauggaaccacuuuauuguccccagggagcccacaggacaaug

SEQ ID NO: 4101965 - RNA, 83 nt, Human
cauugccuggaguucccugagucucccugagucuccaggcagguggggagcagccacgucucagggcagcuccaggugggaug

SEQ ID NO: 4101966 - RNA, 56 nt, Human
cauugcucuagagacaagccugaaauuggaucccagaugugcaacucuaggcaaug

SEQ ID NO: 4101967 - RNA, 56 nt, Human
cauugcuguuucuuucacugccucagauuauaucugaacagaaaagaugcacaaug

SEQ ID NO: 4101968 - RNA, 62 nt, Human
cauugcuugucucccauccccagacauucuguuuacuuugucugggagagucacaggcauug

SEQ ID NO: 4101969 - RNA, 126 nt, Human
cauuggaaucaccuggggagauuuaaaaauuccugcugccaggccucaucccagccauuaagucagaaucucugggaaugggccuggguaacagaaauugucaaaccuucccaggugauuccaaug

SEQ ID NO: 4101970 - RNA, 77 nt, Human
cauuggaugacauauugcacuguauaguauaucuuuuaauagguacauacagccaaguaugaaguaauuuguccaug

SEQ ID NO: 4101971 - RNA, 86 nt, Human
cauuggucaugagguccuccagcuacuaggcaaauacugauuucugugcuuucugugugccaggcccuggggaccaaggaugggug

SEQ ID NO: 4101972 - RNA, 61 nt, Human
cauuggugacauauugugcauuucuuuuauuauagaaucuauuacaaugauguuaccuuug

SEQ ID NO: 4101973 - RNA, 68 nt, Human
cauuggugauaccugagauggacuuuaaggaugugcaugccaccagagggucaacaggagucaagaug

SEQ ID NO: 4101974 - RNA, 77 nt, Human
cauuggugggcacaggggagaaguuugcaugugaugagcaagguuaauacuacuuuuccuuauuccugcuuacugug

SEQ ID NO: 4101975 - RNA, 112 nt, Human
cauuguauuggaaaucaaauucuuuaauggugauaggcugggcagaggccaaugaagggcuauuugcugugcuuauuccauugugggcucuugaauauuccuaacaacaaug

SEQ ID NO: 4101976 - RNA, 67 nt, Human
cauugucaaauccuugucaucugccucagugucuggcauguaguagaugaucaaggguugauuuuug

SEQ ID NO: 4101977 - RNA, 58 nt, Human
cauugucucaguuaauccuucacaacuuuaugguuguagaggaggaaacugaggcuug

SEQ ID NO: 4101978 - RNA, 59 nt, Human
cauugucugguaggaagugggccggaacacauucgagucauuauccucuuuagauauug

SEQ ID NO: 4101979 - RNA, 78 nt, Human
cauugugaauucuuuaugacugaguugucaauugcuuucuuuaggcaaugagccaauguuuaugaaguagcuacaaug

SEQ ID NO: 4101980 - RNA, 93 nt, Human
cauugugaccuuuggggaauguuaaugcacuucuagcucauggaaaccccggaagccagugucgugugacaugagcccagccggauuagaaug

SEQ ID NO: 4101981 - RNA, 88 nt, Human
cauugugugaugcaaguuuuagaagucauacauuauaaaugacaaaacguagacucugaaagcauaauuugucccagaucacacagug

SEQ ID NO: 4101982 - RNA, 83 nt, Human
cauuguguuccuguguucuugacaucuuugauguguccuuuaaugcuggccagugcaagauguuagauuauggggacacggug

SEQ ID NO: 4101983 - RNA, 69 nt, Human
cauuguugaacaccugcuggaugaccagcccaaaggagaagggagagauguucggcguguucagcagug

SEQ ID NO: 4101984 - RNA, 97 nt, Human
cauuguugugaguuagguggaagacaaagauucaauauucaguuauuaacaccuaauuaaaauguucauuguuuuccauauguuguuuauagcuuug

SEQ ID NO: 4101985 - RNA, 80 nt, Human
cauuuaaacaugguacacaaugcauauuuuuccagaugauauucucugacuagaaguuguguugaguaaauuaguaagug

SEQ ID NO: 4101986 - RNA, 121 nt, Human
cauuuaaaggauauuauuuggaagaaaugcacugguggugagugagggaccagcauaagaagagcuguccuuuaacuaguuaccauguuuuaugcaauguucucaauaugauauccaaaug

SEQ ID NO: 4101987 - RNA, 93 nt, Human
ccagugaaauuaaauggcaauuaagaugugggaaaauuuaaucuauuuaaaauuugaucuaaauguaucacaucuggauagaccuuaaacugg

SEQ ID NO: 4101988 - RNA, 98 nt, Human
ccagugagcaagucagagagacagguccagaacacagguguccuagcuaccaggucaguugcacuuucuagauacugugcugucuuccuucuuuaugg

SEQ ID NO: 4101989 - RNA, 71 nt, Human
ccagugcccuucggugucacugaagcucagcccgcggacggcggugugucagugugcaccgggaggccugg

SEQ ID NO: 4101990 - RNA, 58 nt, Human
ccaguggcuugaucuuuugcuguuucgguuuaucacaaaugauuuuccaagccagugg

SEQ ID NO: 4101991 - RNA, 66 nt, Human
ccaguggucuaggucuugugguguccacuugauggaccagccaagacugccuggaaucccuacugg

SEQ ID NO: 4101992 - RNA, 75 nt, Human
ccagugugaaggucucuguugagaacauuugcuucaaacuagaguacaugucucauggcagaauuuuugagcugg

SEQ ID NO: 4101993 - RNA, 64 nt, Human
ccagugugaaguucuuuagugaggaaaggagauagcuuuuucucucuuaaggaguuuaaaaugg

SEQ ID NO: 4101994 - RNA, 60 nt, Human
ccaguuaccaguuccaggggagagguccaaacacuucugcccauugcaucuugguacugg

SEQ ID NO: 4101995 - RNA, 63 nt, Human
ccaguuagcuuuaggcccccaaaccagaucauuaggucucuggaauuggcugaggcaagcugg

SEQ ID NO: 4101996 - RNA, 65 nt, Human
ccaguuauaggagccauuguauaguucguacuggaaggucuugcuaccaacuggcccugaauugg

SEQ ID NO: 4101997 - RNA, 95 nt, Human
ccaguuccugcaggccaccgcccaggaagaagggaucuuuggugagucccaaccagucagcccaggcuccugcaggcagugguguuugcuggugg

SEQ ID NO: 4101998 - RNA, 70 nt, Human
ccaguucuuucugugugcaacacacucauuuaacuccaaugacaaucucauguaauacagaaggaaaugg

SEQ ID NO: 4101999 - RNA, 76 nt, Human
ccaguugagaaacacagucuuaucccaaccaccacuguaguaguggguuguugguuaugugauuguucuuuucugg

SEQ ID NO: 4102000 - RNA, 94 nt, Human
ccaguuuaaagauuaaacaugcaaagcguuuugaccagccaggaagcacugcuguugucuuuuguuuugccaaguuugauccuuaguaagcugg

SEQ ID NO: 4102001 - RNA, 59 nt, Human
ccaguuuaagacuuaucucaaucucuaaauuuagagauugaggauaggauuuaagcagg

SEQ ID NO: 4102002 - RNA, 80 nt, Human
ccaguuugcagcuguuucggguggagguggaggaaguuacgaaucuauucuacuuauuucuugguacaaauuuaaauugg

SEQ ID NO: 4102003 - RNA, 78 nt, Human
ccauaaauaaacucccagugugaugagguugcuaaaaauaacauaauaacauuuuaggcucuucuaacacuggugugg

SEQ ID NO: 4102004 - RNA, 106 nt, Human
ccauaaauauagaauagaaaagcuauauuauauuuguguuuggugaaaugaaguguuacccaaacucagauguggugaagaccuuuuguguucucuauauuuaugg

SEQ ID NO: 4102005 - RNA, 107 nt, Human
ccauaaguaagagcaugaggcugcagcaucgccaccugccucagucgugcuucaugugcgugagcugugugugugaacguguguauccucaguguuugaugcaaugg

SEQ ID NO: 4102006 - RNA, 72 nt, Human
ccauaauaaucucauugcaaaugucugacugugaugcuccagaguucagcuacugcaaaugugucuuuaugg

SEQ ID NO: 4102007 - RNA, 67 nt, Human
ccauaccauucugguccauacuguucucuuaaauaacagagagaacaguguggaccagaauuauugg

SEQ ID NO: 4102008 - RNA, 98 nt, Human
ccauagcuacaggacucaggccugaugagcuuccagcugagcacugggugucacucgggcuuuaccugcuuaucuucaggaucucucuucugguuagg

SEQ ID NO: 4102009 - RNA, 81 nt, Human
ccauagcuagcagguugcaucugucuuauauaugucccuuaaaauagaagaccuggaucacaacacugcugaucucugugg

SEQ ID NO: 4102010 - RNA, 58 nt, Human
ccauaguacuugcauaguacuauguggaguccacauaguacuccaccaguacaugugg

SEQ ID NO: 4102011 - RNA, 79 nt, Human
ccauauucuuccucaucaaucuguagguaauugcugaaguagagguacaggacuccugcauugaucaggcagaaucugg

SEQ ID NO: 4102012 - RNA, 62 nt, Human
ccauauuuggcgucucucaggagcucaggaaguacuuggcugagugaacauguccauugugg

SEQ ID NO: 4102013 - RNA, 59 nt, Human
ccaucacagggggcuagaagucuaagucaaagcuuuggcaagauugguuccuuuugagg

SEQ ID NO: 4102014 - RNA, 89 nt, Human
ccaucacaugcgguccccaguguggcugcaggggccacuuaggauucuucuguucggggucccaggccacacuuggggaacccuauugg

SEQ ID NO: 4102015 - RNA, 79 nt, Human
ccaucacuggcugcuugggacagccaugaaaccguucgugauuguguacucccaagauggccuuuuguagaguaugugg

SEQ ID NO: 4102016 - RNA, 62 nt, Human
ccaucagaaugaauguucuggagcccuagcuggguuguuugagagcacucauugcuccuagg

SEQ ID NO: 4102017 - RNA, 64 nt, Human
ccaucagcaguuugaaaugaggcauagucuggaaucguuugccauaauuugauaugcuugaugg

SEQ ID NO: 4102018 - RNA, 64 nt, Human
ccaucagccuggaaggcagccuggagagugacggaauuccacaggcuguggaccagcuggaugg

SEQ ID NO: 4102019 - RNA, 58 nt, Human
ccaucaggaagaauuggaugcuacaggcagaacuggcagcauucaucucuuccucagg

SEQ ID NO: 4102020 - RNA, 57 nt, Human
ccaucaugccgggucacuguuaggaacauccaagauucugcugugcucgagugaugg

SEQ ID NO: 4102021 - RNA, 63 nt, Human
ccaucauuccauccacucuugaugacuuuugccaucauucagucaaaaaugauggagagaugg

SEQ ID NO: 4102022 - RNA, 95 nt, Human
cccaagugagcaggagauagaggcuguagccaguacugguguuuuugguaguagaggcuccuucacucuggcaccgccuccuugcauaguugagg

SEQ ID NO: 4102023 - RNA, 78 nt, Human
cccaauaacuagaaagauucucugaaccuuaccaguugccugaugggaagcaaggaaucuuaccucucuauuguuggg

SEQ ID NO: 4102024 - RNA, 77 nt, Human
cccaauagcuccaaugaggcaaagguggaggugggguguugguuuccacuggcccaccuccucagugguccucuggg

SEQ ID NO: 4102025 - RNA, 61 nt, Human
cccaauauauucuuaaagaaucugacccauaccugggcaguaggagaagaggaugcuuggg

SEQ ID NO: 4102026 - RNA, 80 nt, Human
cccaaucugcucugcugucuucuugcaggcugggaaacugaggcccauacaggagacaggagggacacacagaagucggg

SEQ ID NO: 4102027 - RNA, 73 nt, Human
cccaaugcucauauuauucuaguaacagugaucuguuagcaaaggauucugugaaaagaauaauggggguggg

SEQ ID NO: 4102028 - RNA, 78 nt, Human
cccacaagccuaugaugguuaguuaucccugucugaaaaucuggacugagggaaauaaucuauucugaggcuuaaggg

SEQ ID NO: 4102029 - RNA, 121 nt, Human
cccacaccauggguucugggcugccucacccucccucauugccuccugcgugcacagaacauccuuuccaugggggacaugcaucaggaguagagaaggcugggcagggacaugguguggg

SEQ ID NO: 4102030 - RNA, 70 nt, Human
cccacacccacgcagcucaccucccugguggcgcucagccugucaggcagguuggcugcaggucucuggg

SEQ ID NO: 4102031 - RNA, 68 nt, Human
cccacacugugcagauucccugugagguuuggaucuaagaacucacauguacugucugugacaugggg

SEQ ID NO: 4102032 - RNA, 71 nt, Human
cccacagaauuggagaaggugcuggaggauugcuucucucuaaagagaaccuuuucucauucccugaaggg

SEQ ID NO: 4102033 - RNA, 66 nt, Human
cccacagccaggccaccuggggcaggaacuuuccauggcucucugggagguccuggcuagaagggg

SEQ ID NO: 4102034 - RNA, 129 nt, Human
cccacagccuguccuccucucuugagagcuguccuggcucaggcuguggcuggauucucaagcagcaucauguggccagguuaggagcaggaugucacagagagagggguccaaaguucagcugcuggg

SEQ ID NO: 4102035 - RNA, 124 nt, Human
cccacaggcucugccuuccaucccccagccccaguccagugccaugcauggcugugcucagccgagcuggcaucccuggccuucugcuagggcugaaagugccaaggacuccacuaccuuuggg

SEQ ID NO: 4102036 - RNA, 57 nt, Human
cccacaguccuuagacucagcauggcaaacccugagcuuggagucuaaagacugggg

SEQ ID NO: 4102037 - RNA, 110 nt, Human
cccacaucagcccagggacagccuuugaaggggccugaggcacuaacaaggacaaggacuguguccugugaccugcuguguuuguccccaaaguguccgugaggaguggg

SEQ ID NO: 4102038 - RNA, 56 nt, Human
cccacaucccuuccccgcugugcccuuugucacagugacacucaggugggaugggg

SEQ ID NO: 4102039 - RNA, 55 nt, Human
cccacaucucacaucuuggaaccaauggucuucugaagaaaaaugagaugauggg

SEQ ID NO: 4102040 - RNA, 68 nt, Human
cccaccagaccugcaccggcacagcccucgcucagcggggcaggaagcucaugguguaguuucguggg

SEQ ID NO: 4102041 - RNA, 69 nt, Human
cccaccagcugcugcaccgugcaugggucugagguggccccaugugaccugugucaguugcuuuuuggg

SEQ ID NO: 4102042 - RNA, 117 nt, Human
cccaccagcuuucccuuccuuucucucccuuucacuuaacuagcccagccuaauagaggcagugaaggacaggcaggugaggggcagacaggacaaggaagguggaggcuggcaggg

SEQ ID NO: 4102043 - RNA, 81 nt, Human
cccaccaggguccaugaaggagcugcacccacggagccuguuccuccccggaguccuggacaagcccuucacccugcuggg

SEQ ID NO: 4102044 - RNA, 112 nt, Human
cccaccccgcaccccagccagcucccagcccucaggcuuugcugggcccccugcagggauggcucagcaccagaccuagggcgugggccuggugaccaggucuggggguggg

SEQ ID NO: 4102045 - RNA, 88 nt, Human
cccacccgccacguggucuggaggcuucuauagugucuucugggaagagacaagaaacugggagucucugcaaugacaggcagguggg

SEQ ID NO: 4102046 - RNA, 79 nt, Human
cccacccguuucucagcagaccuguugccacggugacugaagcccccagcucugucuguagaaacuucagauggguggg

SEQ ID NO: 4102047 - RNA, 61 nt, Human
cccacccuuuuuguggaggccuggcgcuuacaacgcugcagguggcuccacgagggguggg

SEQ ID NO: 4102048 - RNA, 94 nt, Human
cccaccugcugcugcccugagucaucccugccugccuggggcacccaaagcccaggccccagggcuggcuuuccaggucacugcugccaggggg

SEQ ID NO: 4102049 - RNA, 83 nt, Human
cccaccuguauaggcaaucacauuagugaaacacugaaggaucuccuuuaguauuucuaauguaauugccuauaaauauuggg

SEQ ID NO: 4102050 - RNA, 67 nt, Human
cccaccuucuguugcuauuuugagagucauaguugcuuugaacugugcaaugaguaauaaacuuggg

SEQ ID NO: 4102051 - RNA, 55 nt, Human
cccaccuuuuuccucagguccagcuccccugacuggaggauuccuggaaggcggg

SEQ ID NO: 4102052 - RNA, 75 nt, Human
cccacgcggaggaggucaggaggugacacagguucgcggaagaaagcgggacucaucuuccucauuucuccaggg

SEQ ID NO: 4102053 - RNA, 84 nt, Human
cccacggguggagcaguaggagaacccugagcuccagagugaaucuggccaggguucgaauccguauggcucucuuaccguggg

SEQ ID NO: 4102054 - RNA, 110 nt, Human
cccacguccaggcccaucuuccugaggucaccuggaggcagccuucuccaccccauguucauaggcagggcccucagcagguggccuggcgggggucugggccuggaggg

SEQ ID NO: 4102055 - RNA, 61 nt, Human
cccacuaaguaagcuccucuacaagcugcuacuuuguagggcaguuuaucuuaguugaggg

SEQ ID NO: 4102056 - RNA, 57 nt, Human
cccacuacuggaugagcuuggugcccguagccacugcguggccuguccuguuguggg

SEQ ID NO: 4102057 - RNA, 57 nt, Human
cccacugagccuauacaaacagcagcuggcacagcagguuuugggaaacucagaggg

SEQ ID NO: 4102058 - RNA, 55 nt, Human
cccacugaucuguaaacuccaugggaauauggacucuguuuuccugaucacuggg

SEQ ID NO: 4102059 - RNA, 62 nt, Human
cccacuggagggacgcagacacugagaccccaaggagaguggcugcagaggcccccaguggg

SEQ ID NO: 4102060 - RNA, 63 nt, Human
cccacuggcuaggccugccucugauguccacgacaacauucacagcuaagcuuggucacuggg

SEQ ID NO: 4102061 - RNA, 68 nt, Human
cccacuuuaguggcaaguucuuuagucuuugccuuuuugagcuugagaaugugagccacagaucuggg

SEQ ID NO: 4102062 - RNA, 92 nt, Human
cccacuuugucaguucugccuggccugaucuccacgccucauguuccuuuuuggggugauccugugagaagccuggugcuggcaggucuggg

SEQ ID NO: 4102063 - RNA, 81 nt, Human
cccagaacuuuaccucucuuggccgcagucuucucaucuguaaaaugaggauaagauacuaggagggguugaggguccggg

SEQ ID NO: 4102064 - RNA, 70 nt, Human
cccagaaucucagggcucugggagcacucaggcugcauuggccagaacuaucccugcccuggugacuggg

SEQ ID NO: 4102065 - RNA, 57 nt, Human
cccagagacuuuguccgacgacuggcccaggcgcuggcgggacacucaagcucuggg

SEQ ID NO: 4102066 - RNA, 64 nt, Human
cccagagagucgaugggggacacugacaaacgaaucacaaaguuggugccguuugcucuuaggg

SEQ ID NO: 4102067 - RNA, 70 nt, Human
cccagagcaauucucacagaacucuacuaggagcugucaguuucccauaguucugaaugaggaaucuggg

SEQ ID NO: 4102068 - RNA, 58 nt, Human
cccagagcugagggggcacguuaguuuaucaucgccuugucaauccuucuagccuggg

SEQ ID NO: 4102069 - RNA, 63 nt, Human
cccagagguggaagcucugagcagagccacuguggcuucugcaucucaggauucccuucaggg

SEQ ID NO: 4102070 - RNA, 57 nt, Human
cccagauguuugccacucugugagaccaggggauccaguguugucagaucaucuggg

SEQ ID NO: 4102071 - RNA, 76 nt, Human
cccagauuuucacuccccauguuuucucuccuagucacucaacugcaggugaaaauuaugaggauguauuucuggg

SEQ ID NO: 4102072 - RNA, 77 nt, Human
cccagcaaccucauuacuaaugucugcacuuuauggaugaggccgagguuacacagaugguuaguagaggaguuggg

SEQ ID NO: 4102073 - RNA, 58 nt, Human
cccagcagcaggcagagcagacaagagcaacuucuccuggagccaaugugcugcuggg

SEQ ID NO: 4102074 - RNA, 66 nt, Human
cccagcagccuggauguucuuucaggauaacuaaugucagacuagguacucuucaggcuccugugg

SEQ ID NO: 4102075 - RNA, 80 nt, Human
cccagcaguuuauuccuaacucugaauccucacagcagccuugguggguuggagugacagaugaggaaacugaggcuggg

SEQ ID NO: 4102076 - RNA, 71 nt, Human
cccagcaucugggagcagcucagcagauugaucgagcgcagucucucugguucuccccggaugcccuuggg

SEQ ID NO: 4102077 - RNA, 61 nt, Human
cccagccaaaagcaaguuuaccucuacguugaacagaaggagcuagcagcuuuggcugugg

SEQ ID NO: 4102078 - RNA, 55 nt, Human
cccagcccacgguccugggugggcgucuuccgcaugggaggccgugggcgcuggg

SEQ ID NO: 4102079 - RNA, 116 nt, Human
cccagccccugaagggacgacuuggcucuugacuguggagguggauggcccggacgcccgcuccaggccacgaccuccuggaugagcacaggccagcucguacuguggggucuggg

SEQ ID NO: 4102080 - RNA, 65 nt, Human
cccagccccuucguggaagugcauucuccagugaggcaucgcacguccugaaguggaugacuggg

SEQ ID NO: 4102081 - RNA, 58 nt, Human
cccagcccugaccuauuggaaaccaaagcagcaccagggauaguagugaagggcuggg

SEQ ID NO: 4102082 - RNA, 64 nt, Human
cccaaccauucuuucagguucuauaggaagccuacaguagggcuuccuaucccaucugaguggg

SEQ ID NO: 4102083 - RNA, 67 nt, Human
cccaaccccaacuuccuauguugaaauccuaacccucaauguaauauuaggagguggggccuuuggg

SEQ ID NO: 4102084 - RNA, 56 nt, Human
cccaaccccagacagugcaucuuguucggguuucaagaagccuggguggagguggg

SEQ ID NO: 4102085 - RNA, 72 nt, Human
cccaacggacugagcgaugggaggaagugauaagugcagcugucucuucagcccauggcuucuuccucuggg

SEQ ID NO: 4102086 - RNA, 69 nt, Human
cccaacuaugcccagcuuaaaguacacagcuuguacacagcuuguacacagcuugcggcuauagguggg

SEQ ID NO: 4102087 - RNA, 85 nt, Human
cccaacucacgaggccaucuccuucuggagaagaccuuaaucagauccccauggaaggaugauggaaguugcuuguugagauggg

SEQ ID NO: 4102088 - RNA, 107 nt, Human
cccaacuccuucuuaguugacuugggaggauuguccaucugggaggcauccacucauucuucccuuccuggggcaauuuaaagaguuaauauaauauggaccaaagg

SEQ ID NO: 4102089 - RNA, 56 nt, Human
cccaacucucuuaguuaucucauuggaauaguguagaagugcuccagugaguuggg

SEQ ID NO: 4102090 - RNA, 120 nt, Human
cccaacuucaauuucuaguaaaacuauagcuuuaccauagaagaguauugggaauauuaaauagguuuaaauauaucaugaguaaaacuugauagucuuuuacuagaauuauaaaauggg

SEQ ID NO: 4102091 - RNA, 63 nt, Human
cccaacuuucuguuacguccccagagaccuuuuuagggauuuggaagacagggcaggaaaggg

SEQ ID NO: 4102092 - RNA, 64 nt, Human
cccaagaccagccgagagagccugaccucggagaucccuggcucugccacuucuuggcuguggg

SEQ ID NO: 4102093 - RNA, 75 nt, Human
cccaagccccuuucauauacauuguuucauuuacucauaaaucaugaaaugucagagcuggaaggggcauuaggg

SEQ ID NO: 4102094 - RNA, 56 nt, Human
cccaaguauuccuccucugcccuccccgaggcacccugagaugagagugcuugugg

SEQ ID NO: 4102095 - RNA, 70 nt, Human
cccaaguggguauaugugugugugugcaugugcauuugcauacaucaccuauauauucacaaauauuggg

SEQ ID NO: 4102096 - RNA, 75 nt, Human
ccacagucccaggcuccauggcagccacauccaccuuggaguggagcuugguucuggccaugggcuggggaaggg

SEQ ID NO: 4102097 - RNA, 55 nt, Human
ccacagucccauucgagaguaauggcaguaacuauuaugcuuccagggaccuggg

SEQ ID NO: 4102098 - RNA, 58 nt, Human
ccacagucuaugcaacaagguccagccagaugaagccuguagccagguagaacugugg

SEQ ID NO: 4102099 - RNA, 58 nt, Human
ccacagugccuggaauucugcauuuagaaauuugcucuuuggauuaaagacacugugg

SEQ ID NO: 4102100 - RNA, 100 nt, Human
ccacaguggucuuguuucaucucuucuguaggucagcuggccgaagccacagggcugaagcagauggcugagccugcagauggugcaaggcuucugaugg

SEQ ID NO: 4102101 - RNA, 60 nt, Human
ccacaguucuuuguuuauagcuugauaaaaggcucuagcuccuguagcagggaagugagg

SEQ ID NO: 4102102 - RNA, 59 nt, Human
ccacauaauccuguccuggauucuucuccuacaaaggaaggggucugaggauuaggugg

SEQ ID NO: 4102103 - RNA, 71 nt, Human
ccacauccccgcggaaggcaucuggauggaggaggagcuguccuccuccccaccaggccugcugggauugg

SEQ ID NO: 4102104 - RNA, 70 nt, Human
ccacaucugcaaaguccuuuuugccaugcaagguacauacauaaucacagguuucaaggauaagaugugg

SEQ ID NO: 4102105 - RNA, 57 nt, Human
ccacaucugguggccagugcuaguuaguggguucuuggcuagggcacccaugugugg

SEQ ID NO: 4102106 - RNA, 67 nt, Human
ccacaugaugaggaagcugaacaguaaauucaaccuugcugcauuuacagcgucuacagcuaugugg

SEQ ID NO: 4102107 - RNA, 79 nt, Human
ccacauggcuaguaaguagcauugugaggauucaaacccauauuugacuccaaagccccaugcacuuucuacuauaugg

SEQ ID NO: 4102108 - RNA, 57 nt, Human
ccacauuggccucagagguuagacuuccuccuuuucaaaccucugucccacaugugg

SEQ ID NO: 4102109 - RNA, 125 nt, Human
ccacauuuauuaccuccccuccugcuccacacuaaaucuuguggcaaugcuucuaaaagucaauaaaaugagaaggaagaugcgauaaaauuaagguggaaagugcgauggggagaggaaauggg

SEQ ID NO: 4102110 - RNA, 68 nt, Human
ccacauuucuuuuugcagggcugguaggaccaccaccucaggcagucuuucacugcccuguaacgugg

SEQ ID NO: 4102111 - RNA, 73 nt, Human
ccaccaacaguuagcauguucaucuucuguugguuucacaaaaccacggugauggucaugcuucugugccugg

SEQ ID NO: 4102112 - RNA, 92 nt, Human
ccaccaaccuucauaggaucgaugcugugauuguagaaauauuguacaucaaugucauaaucaaguguggggggguauuaaggucaaggugg

SEQ ID NO: 4102113 - RNA, 73 nt, Human
ccaccaagguggcuauauuugaggauacguccugugaggaggugauaaguguuaaauaaagucauaagggugg

SEQ ID NO: 4102114 - RNA, 56 nt, Human
ccaccaauauccuuugaaaugaagguuuauccuugacaucacagaauauugagugg

SEQ ID NO: 4102115 - RNA, 103 nt, Human
ccaccacaagggaaauucuguaagcauuucaauauaauauucacccuuguaaccaaagugaauuauauggaggagcuuaauaaggauuuguugauuuaauugg

SEQ ID NO: 4102116 - RNA, 81 nt, Human
ccaccaccagcagguagagcaccagcuguaaccagggcacagcuccugagccagcgggcucacuuuucaaucugguugugg

SEQ ID NO: 4102117 - RNA, 58 nt, Human
ccaccacugaggcacaggagccaaaggcugggcaacagcuuugugccugagaaggugg

SEQ ID NO: 4102118 - RNA, 65 nt, Human
ccaccagccugggcaucauggugcgggcacgggacacggccucacccaucggugccuuuaugugg

SEQ ID NO: 4102119 - RNA, 87 nt, Human
ccaccaugggccaagccagaaggcauguguuuauugucgucuuggcucaagacacuguucucacaugcuuggcuccccauagacugg

SEQ ID NO: 4102120 - RNA, 102 nt, Human
ccacccaagaaaugguuuaagccagacuguagaguuugagaagucacuaaaacuugaucuccuugcucugcaucugucuuuucuucucauacucucccgugg

SEQ ID NO: 4102121 - RNA, 88 nt, Human
ccacccagcagccuagcugccuucagcccugacuggccaggggcaggcggcccuggggaaggugcuggaggcccuaggcugcuggggg

SEQ ID NO: 4102122 - RNA, 86 nt, Human
ccacccauuuggucuccauacugguuaguagguacucccuccugccagccucuccacaguaggagaugccccaaaacagagggugg

SEQ ID NO: 4102123 - RNA, 67 nt, Human
ccaccccuacguuccugcuuccugccugugaguauguuagggugcugucagcaggacuguggggugg

SEQ ID NO: 4102124 - RNA, 74 nt, Human
ccacccuacaaaagcaacuaaggcaaggaaaugcaaagaauucagguauguucuuggacuaaguuguugggggg

SEQ ID NO: 4102125 - RNA, 71 nt, Human
ccacccucccaccacagcucugccccucagcuuccugccugcgagaggccauggggugggaugcagggugg

SEQ ID NO: 4102126 - RNA, 61 nt, Human
ccacccucccgucagccccugggcuccacagaccccagcaggcauguugggaggaaugugg

SEQ ID NO: 4102127 - RNA, 86 nt, Human
ccacccuccuucuacccuuccugcucuggccugggcugugguagcucccagacugcagagcgggcagagcacaaguaggugggugg

SEQ ID NO: 4102128 - RNA, 75 nt, Human
ccacccugaggaaugguccggccgggccuagcgaggaugucccuaccgcgaugcugguuccguuacccagggugg

SEQ ID NO: 4102129 - RNA, 57 nt, Human
ccaccgagggggcgggaggcggcaggaccagcaggggcagcccguucucuucgcugg

SEQ ID NO: 4102130 - RNA, 55 nt, Human
ccaccggcgucuuucgaccuggagaacaucaucuucaggauggcggauguugggg

SEQ ID NO: 4102131 - RNA, 88 nt, Human
ccaccguggaauaacgugcaacauugcuucugaacauaggaaacucauuuuauggcaaaagaaauguggcaguuggcuuuuacucugg

SEQ ID NO: 4102132 - RNA, 104 nt, Human
ccaccucaauccggagcguucugggaaaggccuggguguccuggguucugaagaccccagggacgcaccccgcugcggucuccuucccugcccggauggacugg

SEQ ID NO: 4102133 - RNA, 57 nt, Human
ccaccuccuggcucaguagaucuggagucccugggccuuacugggccagcaggcagg

SEQ ID NO: 4102134 - RNA, 74 nt, Human
ccaccucuccaucccccacugcccugucagcaaggggaccccagcauggcagcuuugggaggaggaggggcugg

SEQ ID NO: 4102135 - RNA, 80 nt, Human
ccaccucugggggcuuccuuacccucuuauuuugauuguaaaacaagcaucccagggucagguuaagggagucauggugg

SEQ ID NO: 4102136 - RNA, 68 nt, Human
ccaccucuuccucuguaaaaugggucuaacaguccuuguccugccuaccuugcggagguguugggugg

SEQ ID NO: 4102137 - RNA, 57 nt, Human
ccaccugcaaacagucaccucuuggccauucuuggauuuagggauguaugcuggugg

SEQ ID NO: 4102138 - RNA, 58 nt, Human
ccaccugcagcuaaagauguagggggguucccagucuccccuccaaucuuguagaugg

SEQ ID NO: 4102139 - RNA, 69 nt, Human
ccaccugcucccccaggggcuccgccucgugacucacgcucaggcaagucuccgggcgcgaacagcugg

SEQ ID NO: 4102140 - RNA, 61 nt, Human
ccaccugcucuaauggcuucucacugccacgaaugggcugacaggccagaagagcagcugg

SEQ ID NO: 4102141 - RNA, 113 nt, Human
ccaccuggaaacuuguuagaaauggaaauucccaggccccaccccagagcuacugaaucagaaacucugaggucagggcccggcaauuuguauuuucacaagcucuccagggg

SEQ ID NO: 4102142 - RNA, 87 nt, Human
ccaccugugagcacccccaccugugggcuccugcacugaaccccuugaaggugggaugggaggacaggugggaguaaggacagaugg

SEQ ID NO: 4102143 - RNA, 67 nt, Human
ccaccuugcccugugcaggcuccauaauagacccaucauggucuauggggccucacaggcacugugg

SEQ ID NO: 4102144 - RNA, 78 nt, Human
ccacgagaaccaggagggacccugguggccgcaggaguucaggcccaggaacaggucccaggcucccucuuguccugg

SEQ ID NO: 4102145 - RNA, 72 nt, Human
ccacgagcccagccuugacucagucaguucuggagcuauuuacugagcaucagggcugggaacaauuagugg

SEQ ID NO: 4102146 - RNA, 110 nt, Human
ccacgaugauuuuaggagggguuucuacugugguccuuguaaccacauaguuuguacugagcuggacacuggccauuugaguagaugcuuguucuccaguuauagaaugg

SEQ ID NO: 4102147 - RNA, 98 nt, Human
cauucccagagaguuuguucauuuauuucucuucucuauauucucagaaauucuuucugucucagagauguuagggaagagguuggggcaugcugaug

SEQ ID NO: 4102148 - RNA, 68 nt, Human
cauucccaugacuccugcucaggaauacuauuugauauccccccugaauuauauggagugugggaaug

SEQ ID NO: 4102149 - RNA, 61 nt, Human
cauucccgugacaauguuggaucguacaaggauugaacagauggaauguguuaugggaaug

SEQ ID NO: 4102150 - RNA, 61 nt, Human
cauucccuagaacuguuccugacacauaguaaaugcuuagucaacauguucugggugaaug

SEQ ID NO: 4102151 - RNA, 55 nt, Human
cauucccuuggggaguucaugcuuuuccaguuuacuuuauccucccaggggaaug

SEQ ID NO: 4102152 - RNA, 67 nt, Human
cauuccuccacagugaguucuguacucuggugacucuaguuuacuggaacucacuaguuuuggaaug

SEQ ID NO: 4102153 - RNA, 62 nt, Human
cauuccucugccugugccaccgccucauuucucucaggagauggaagggcacuggcggaaug

SEQ ID NO: 4102154 - RNA, 66 nt, Human
cauucuagcucaucuucccauauaacccugucuaccugaaaagggauuuaguggaugagcugagug

SEQ ID NO: 4102155 - RNA, 77 nt, Human
cauucucgcaaugaguugcacaaaagugugcauauaguuaauacuacuguacuguacauguaaacauugucaagaug

SEQ ID NO: 4102156 - RNA, 58 nt, Human
cauucucugccacucgaagucaaggacucacugagucccuuucacagggcaggcagug

SEQ ID NO: 4102157 - RNA, 120 nt, Human
cauucucugcccuucucagccccacucugagcccaagcaggcugacccugaugggccacaucauucuaguuucugguuggguucagccaauaagaggcacugacuggagaccagagauug

SEQ ID NO: 4102158 - RNA, 64 nt, Human
cauucugagaaacuucuuugugauaugugcauucaucucacagaguuaaaaguuucuuuugaug

SEQ ID NO: 4102159 - RNA, 57 nt, Human
cauucugagacaauugccgucaguuaggagaacuuaauaggggcuuauuuuagaaug

SEQ ID NO: 4102160 - RNA, 71 nt, Human
cauucuuaguucaaggcaucuguagcuaacugaaauuaaacauagcuccagagucugaacuauucagaaug

SEQ ID NO: 4102161 - RNA, 61 nt, Human
cauucuucaucagccaaguuuuugaccuagcuaauucaguuacuguuggaaguggagaaug

SEQ ID NO: 4102162 - RNA, 61 nt, Human
cauucuuuaggaugcuagaaaaacuuucauaaaaugucaucuggcuucuccuagagcaaug

SEQ ID NO: 4102163 - RNA, 85 nt, Human
cauugaaggccauaauuuguaagucagagaggcuaaacaguaacuguaaugcuuuguuuugaucuaacuuggugguuuuguaaug

SEQ ID NO: 4102164 - RNA, 64 nt, Human
cauugaauaguuacuuuugcucuucauuaagucuuagugauuuaagaaaggugacuguaagaug

SEQ ID NO: 4102165 - RNA, 81 nt, Human
cauugacauccccuccccaugaagcugggugagucugugccugcuuggaccaguggauuaugguggaaccgauguuauaug

SEQ ID NO: 4102166 - RNA, 80 nt, Human
cauugaguaauauagcuagaugggaugucagcguuuuuugaaugaagcaucucacaaucuagucagcuucuuacacaaug

SEQ ID NO: 4102167 - RNA, 62 nt, Human
cauugagucuccauuugggcuagcagauucccggcagaaucucugguuaggggagauuggug

SEQ ID NO: 4102168 - RNA, 86 nt, Human
cauugaucugaaguuauucaaagccugaguuggggaagagagaauuuccuuccuugguacagaguagcuuucacaucauaucgaug

SEQ ID NO: 4102169 - RNA, 68 nt, Human
cauugccacuauuuucccaccuuucucuuuacaccccuuuaaggaguaucauggccagauguggcgug

SEQ ID NO: 4102170 - RNA, 129 nt, Human
cauugccaugauuuuucuauaacuuggcgcaggccaaugguuucaggcaggacuuucagagcagacuucugucaaauuugccauauggaguuacugggcucagauuauagagguuuuccugguuguuug

SEQ ID NO: 4102171 - RNA, 69 nt, Human
cccaggggacugagccacuugcucacgugcacaugguugugagugguggagcugggcucagacccuggg

SEQ ID NO: 4102172 - RNA, 72 nt, Human
cccaggggggccaaagcuggggaggggcagggccagcacgagguggcucccacccagcuuugaagaucuggg

SEQ ID NO: 4102173 - RNA, 63 nt, Human
cccaggguaaucaugugaagccaaugaaauaauaaaaaggaccacaucggaugaccccugagg

SEQ ID NO: 4102174 - RNA, 74 nt, Human
cccagggucacacagugagcggggcucagagcuugagugucuuugugcuuuguguacauuguguucucccuagg

SEQ ID NO: 4102175 - RNA, 127 nt, Human
cccaggucacacagcugguaagugccagagcugggauuuaagcccaggccacauaguccuucccugugcuguguggccucucaggcuugaucaauuaucucugcuggguauugagcuaggaccuggg

SEQ ID NO: 4102176 - RNA, 95 nt, Human
cccaggucuggcauuuaacaacugcuuauugagugacugguaugugaaagacauuacauuauucuuugauaaauggcagaugaguuagaccaggg

SEQ ID NO: 4102177 - RNA, 68 nt, Human
cccaggugagagcugccuuuccccagagaagguggugugggacuuggcggggcggagccugaccuggg

SEQ ID NO: 4102178 - RNA, 100 nt, Human
cccagguggaagggucaggcugcuggagcuuggguagggcaggcagauccccaaggggagacuguggacccugagucagacagccugacaccaaccuggg

SEQ ID NO: 4102179 - RNA, 57 nt, Human
cccagucagggcauuuggaaggcacugcugagccuagccucaguguccuggacuggg

SEQ ID NO: 4102180 - RNA, 113 nt, Human
cccagucagguuuggggacaagcuggcugcugggccuguucccguauuuugguccaggugggugccaggcccagggagcggggguggcggcgccgucucccagccuugcuggg

SEQ ID NO: 4102181 - RNA, 82 nt, Human
cccagucugagaugcuuuguaauagcagcaggaauggacuaagacacccagguuuccugcagagacagaggccucaacuggg

SEQ ID NO: 4102182 - RNA, 58 nt, Human
cccagugcccucgaggugugcucagaggucaaacgggcaggccugagagaugacuggg

SEQ ID NO: 4102183 - RNA, 55 nt, Human
cccagugcuaagucccgcuggugauaaagaggacacauaguggaacugcucuggg

SEQ ID NO: 4102184 - RNA, 56 nt, Human
cccaguggcaaagcagcuuagaccacauggagacaugaagcaucuuugaaacuggg

SEQ ID NO: 4102185 - RNA, 82 nt, Human
cccagugggauuuguaaaugaugcuuaauagacuuuaaaagccuauuuaaaguuagacagcaucauuucucagaaugcuggg

SEQ ID NO: 4102186 - RNA, 74 nt, Human
cccaguggguguugaguggggguucgcugacuaauugacugagugagugaagcccugugucagcuuccacuggg

SEQ ID NO: 4102187 - RNA, 65 nt, Human
cccaguguuacgugacagccuguagcuuuuuagucaucacugucaggcuuuugcauagcacuggg

SEQ ID NO: 4102188 - RNA, 128 nt, Human
cccaguuaaauuuaaguuucagguggucagcaaauacauuuuuagcauaagcauaucccuuguaauauuuggggcauauuuauacuaaagaaguauuugcuuuuuaucugaaauucagguaugguggg

SEQ ID NO: 4102189 - RNA, 81 nt, Human
cccaguuauacaaguguuagguguagguuccagguauuagaaacugagcaggucacaugguagcacuucgcuguaauuggg

SEQ ID NO: 4102190 - RNA, 67 nt, Human
cccaguuaucacaguuucuucuuuguccaucguuuuccauaacggaagaagcuauacauaauuuggg

SEQ ID NO: 4102191 - RNA, 57 nt, Human
cccaguuccagugcucacauccauucuugguggaggccagagguacugggacauggg

SEQ ID NO: 4102192 - RNA, 129 nt, Human
cccaguucuuuaguucuaauaauaaaggugaacacaaaugcuacuaauaggcaagugauauuuuaacuucuucauuuuaguaaauuguaguauuuuuaagcauuuuauuucauucugggaaauacugag

SEQ ID NO: 4102193 - RNA, 72 nt, Human
cccauaauguuuguaauaaagcucaccacugggcuuucuggccucaguuucuucaucugcagaauccauggg

SEQ ID NO: 4102194 - RNA, 68 nt, Human
cccauagugcacacugcugcuccaggaggaacuuccugagcuggaagagcuugugcuuacucuauggg

SEQ ID NO: 4102195 - RNA, 60 nt, Human
cccauaugucuguggcaauuguugaugguuguagaaguaucugcuagaucaggauguggg

SEQ ID NO: 4102196 - RNA, 74 nt, Human
cccaucagaggcaggagggcauucucugcugaaaugaagagcuguuaaaaauggaucuguuuugccucugaggg

SEQ ID NO: 4102197 - RNA, 123 nt, Human
cccauccaucucugaaccucuguguccccaucaguuuugaggauggaauggcugagagaggcaaaguguaggccuguggcuucugcucccagaaugaugagggauggggaagaaggggcuggg

SEQ ID NO: 4102198 - RNA, 88 nt, Human
cccaucccugggccagccagcauuugccauaccgcuggagagacaucugacccagcacagugcagaugcugacuggcucugugguggg

SEQ ID NO: 4102199 - RNA, 92 nt, Human
cccauccugacuuggcagggagccugaauguuccagggaaagcauuucccugucccaugccucagguuccacaacugucaaauggggguggg

SEQ ID NO: 4102200 - RNA, 56 nt, Human
cccauccuuccugucugagaagcgaaaacaaauguacaaucagcaguaaugguggg

SEQ ID NO: 4102201 - RNA, 127 nt, Human
cccaucucuggggacacuacaucacccacaaccgucgugugguccugcacccgcuuggccaccugcaaaggaaagguguggagggcggggcccacagcucuguuggagggcaugcccuagagacggg

SEQ ID NO: 4102202 - RNA, 56 nt, Human
cccaucugcacugggagcaugucuggcccacaccagcucaagcacugugugaaggg

SEQ ID NO: 4102203 - RNA, 88 nt, Human
cccaugauuuaacaauugcaguagguggagugaauuuuaacguucuaguguuuguuuuaguuacucauuuuguucccagaucaguggg

SEQ ID NO: 4102204 - RNA, 78 nt, Human
cccaugauuuucaggacagacuagacuagcguggcauucuuucacagcuauaaucgucuucugccucauuauuaaggg

SEQ ID NO: 4102205 - RNA, 123 nt, Human
cccaugcugaggcagacgccaagacccugggcacuugcucacagcucuucagacaccacaagcugaacaggagcuucccugugagagggccugugggacuuucacuaaauuugccucaguggg

SEQ ID NO: 4102206 - RNA, 58 nt, Human
cccaugcugaguggccugagaucuuugugugucucucccuuccagccacccagauggg

SEQ ID NO: 4102207 - RNA, 77 nt, Human
cccaugcuucugccuccuccauccuucucaugcagggugccccagggagugggaagauggagugacaggcagcaggg

SEQ ID NO: 4102208 - RNA, 81 nt, Human
cccauggaauaagucucacuuaggucuucaagggcuuuaagagggugcauuguuaaguccugggugagaacugucccaggg

SEQ ID NO: 4102209 - RNA, 74 nt, Human
cccagccggcagcugucuggggagugcucgcggauggcuccucggagcgcuggcgcccucgcggccugucuggg

SEQ ID NO: 4102210 - RNA, 55 nt, Human
cccagcgagcagaccugccuagggcauucauuugcaugcaggcccuguuucuggg

SEQ ID NO: 4102211 - RNA, 121 nt, Human
cccagcgcagcgagcuaaccccgggacacucccaccccggccggcugaacagguugcagcgcgacaccugcgcugucugcugggucgcucaggaccgcggugcggggccuggugcgcuggg

SEQ ID NO: 4102212 - RNA, 73 nt, Human
cccagcgcccaggggcagggcucucuggccuggcuugugcugguucccagagucccugcugucaggugcuggg

SEQ ID NO: 4102213 - RNA, 85 nt, Human
cccagcgggggucagggcucuggugccuucacagaacagccuugcuugggguguggcccucagguuccugaccuucccugcucgg

SEQ ID NO: 4102214 - RNA, 56 nt, Human
cccagcuaccucugcuaggagaggccacauaagcuccauguagauguguggcuggg

SEQ ID NO: 4102215 - RNA, 71 nt, Human
cccagcuacuagcacggcugugagcuuggucucugcagagcacccagcccagggcgugauguuuagcaggg

SEQ ID NO: 4102216 - RNA, 71 nt, Human
cccagcugcaccucuauggccuuucccugagcauaaccccuagcuccccugggccuugagugugcgguggg

SEQ ID NO: 4102217 - RNA, 65 nt, Human
cccagcuggagggcgccaggccagcagccauggggcagagccuggacaccgcccuugcagagggg

SEQ ID NO: 4102218 - RNA, 58 nt, Human
cccagcuggaggggcgcauggaggggcguccuguucuuucugccuuccccuagcuggg

SEQ ID NO: 4102219 - RNA, 57 nt, Human
cccagcuugcucaccauucccaauaauaacugcuugcauggagagcucucugcuggg

SEQ ID NO: 4102220 - RNA, 64 nt, Human
cccaggaaaucaggcuuucuagccagaguagaaacuccugcagaacuuaccuuguuuccuaggg

SEQ ID NO: 4102221 - RNA, 68 nt, Human
cccaggaaggccaugaccacuugcugugaaucuuaauaggacacaugagcugguuuggcccuccuagg

SEQ ID NO: 4102222 - RNA, 73 nt, Human
cccaggagagaggggauaaagcacagaaggcuccaacucacucuccuaccuucuucuuuccucuucucuuggg

SEQ ID NO: 4102223 - RNA, 62 nt, Human
cccaggagauggugcguggucucuaagugauuagcagaauguaaucacccaucugccgaggg

SEQ ID NO: 4102224 - RNA, 58 nt, Human
cccaggaggcagagcuugcagugagcugagaucgccccacugcaacagaucgccuggg

SEQ ID NO: 4102225 - RNA, 55 nt, Human
cccaggaggccugccuggccggagggaggaggggcugggggcagggacuccuggg

SEQ ID NO: 4102226 - RNA, 56 nt, Human
cccaggaggcugagguugcagugagccgagaucgugccacuccccuccagccuggg

SEQ ID NO: 4102227 - RNA, 56 nt, Human
cccaggagguggagguugcagcgagccgagaucgcaccauugcaccccagccuggg

SEQ ID NO: 4102228 - RNA, 79 nt, Human
cccaggcacaccacccgucugcccacugcucugcugcccauggaacucaaggggacagacagaaaguggcaugccuggg

SEQ ID NO: 4102229 - RNA, 57 nt, Human
cccaggccaagggggaaggagaugcagguacacuucucccucaugccuaggccuggg

SEQ ID NO: 4102230 - RNA, 61 nt, Human
cccaggcccuggugccaacuccugcugcucagggacugaacauggcccagaugguccuggg

SEQ ID NO: 4102231 - RNA, 79 nt, Human
cccaggccuggccuccugcuuuuccauuugauucccugccucuuucuauucggacuggaaugccgggccaggcuccggg

SEQ ID NO: 4102232 - RNA, 56 nt, Human
cccaggcgggagugcuguggcgcgaucuccgcucacugcaagcucugccuuccggg

SEQ ID NO: 4102233 - RNA, 55 nt, Human
cccaggcucagggcagacuuucagucuggggcugagguggcccugugugucuagg

SEQ ID NO: 4102234 - RNA, 89 nt, Human
cccaggcugaguguguucuggcuucugcaggauuacuagggaccuucucugccugaggagucagggcagguacuuucacugugccuggg

SEQ ID NO: 4102235 - RNA, 91 nt, Human
cccaggcuggagcucuguggcacgauugcacugcagccucagauucccaggcucaagcaauccuccugccucagccucccaaguagcuggg

SEQ ID NO: 4102236 - RNA, 79 nt, Human
cccaggcuggagugcaauggcgugaucucagcucacugcaagcucugccuccuggguucacgccauucuccugcuucgg

SEQ ID NO: 4102237 - RNA, 56 nt, Human
cccaggcuggagugcaguagugugaucucagcucacugcaaccuccgccucccagg

SEQ ID NO: 4102238 - RNA, 56 nt, Human
cccaggcuggauuucgguggcacgaucucggcucacugcaagcuccgccucccggg

SEQ ID NO: 4102239 - RNA, 56 nt, Human
cccaggcugggggcaggauggcugccuuuucuguuuucccucccuccagcucuggg

SEQ ID NO: 4102240 - RNA, 90 nt, Human
cccaggcuugugcucucuagguucuggucccugggacaguggucacacagacaaaggagguggacgcagccgagggagcaggggccuggg

SEQ ID NO: 4102241 - RNA, 57 nt, Human
cccagggcacggagaagucaccccccgggccgggggaugugugaaucuggcccucgg

SEQ ID NO: 4102242 - RNA, 67 nt, Human
cccagggcucccugcagccucuguguguggucagggagccagggcaggggcccccaggggcucuggg

SEQ ID NO: 4102243 - RNA, 55 nt, Human
cccagggcuuggggcugggagagaccucucucauccugcacuggcuccuccuggg

SEQ ID NO: 4102244 - RNA, 61 nt, Human
cccagggcuugguggcuuguauccaguuuuauuguugauacagaucuuuaacugcccuggg

SEQ ID NO: 4102245 - RNA, 105 nt, Human
cccaggggcucugggggaagaagaggcuauuuguaaaaggaaccuuauauaaaccuguccugauuccuuuuacaaauagccuccuauucccccaggggcucuggg

SEQ ID NO: 4102246 - RNA, 59 nt, Human
ccaaacauuucaaauuuagagauauuucuuuuaaauaucuuggggagacuaguguuugg

SEQ ID NO: 4102247 - RNA, 81 nt, Human
ccaaagaaacacacggccugugacuucuggucauaucgaaucacugauauucccugauguacacuggcauauuucucuugg

SEQ ID NO: 4102248 - RNA, 70 nt, Human
ccaaagcaugaagcauuuuuauucuugugaaagugaugcuuuugcagaauaaacugcuuuagggcagugg

SEQ ID NO: 4102249 - RNA, 64 nt, Human
ccaaagccaacagccagggcugugccucugaggacccacacaggcccagguauguuuguuuugg

SEQ ID NO: 4102250 - RNA, 84 nt, Human
ccaaaggaaucugaacagggaaguucugcaacaggaggggauucugauccuggagccacggagcuuucaacagacacuuccugg

SEQ ID NO: 4102251 - RNA, 56 nt, Human
ccaaaggcuccuuuaccauucuggaggcccagcuucauugauugcaaggagauugg

SEQ ID NO: 4102252 - RNA, 130 nt, Human
ccaaagucacuuccacauuuugggguauguuuuuagcagugccccacucuacugguacaaauuuacuguauuaguccauuuucacacugcugauacagauauaccugagaccagguaauuuauacagggg

SEQ ID NO: 4102253 - RNA, 59 nt, Human
ccaaaguccacaguuuacauuaggauucacucuugguguuguauauucuaugggcuugg

SEQ ID NO: 4102254 - RNA, 59 nt, Human
ccaaagugugggaaguugcuaaaauauggacauauuuuugacauuuuccuaccuuaugg

SEQ ID NO: 4102255 - RNA, 68 nt, Human
ccaaaguuccuuuugucacugauaagauaauuaggguuaauaguuucagugcaaaaauaggauuuugg

SEQ ID NO: 4102256 - RNA, 58 nt, Human
ccaaauacaauuccugagaauacuuguuuuggaagccuuguguuucaggaguucuugg

SEQ ID NO: 4102257 - RNA, 103 nt, Human
ccaaauagaauuuuggaguuuugacaucuuaaaacuaguuuuccauaauauaggacauucauuuugcaauugugaaaacugggagguuaaaagucuuguuugg

SEQ ID NO: 4102258 - RNA, 62 nt, Human
ccaaaucaaaagccaaaaggucaacaaagcagaggugucagcugaagugcuuuugaauuugg

SEQ ID NO: 4102259 - RNA, 69 nt, Human
ccaaaugguaacacucaauuuacaaacucuggauauuugauucggagucuauccuugaauguacugugg

SEQ ID NO: 4102260 - RNA, 68 nt, Human
ccaaauuaagaguaacucuguagaccuuugaugcuauccaaaaaucucuuuagagacucuugguuagg

SEQ ID NO: 4102261 - RNA, 60 nt, Human
ccaaauuaccaguaauaguaugugagaugauacuauccagcagauauuuuggugaacugg

SEQ ID NO: 4102262 - RNA, 108 nt, Human
ccaaauuaucuucagauaaaaacuagaaagaaguuuuuugagaaacugcuuuguuauguguacguucaucucauagagcuaaaccuuucuuuugauucagcaguuugg

SEQ ID NO: 4102263 - RNA, 69 nt, Human
ccaaauucucaucucuucauuagcauuauugggaauuguagcccaggaguaggugaaagagagagaugg

SEQ ID NO: 4102264 - RNA, 60 nt, Human
ccaaauugccagcccacagaguugugaacuaauaaccugcugugcuggucaguccaaugg

SEQ ID NO: 4102265 - RNA, 72 nt, Human
ccaacaaacauuccgcuucucccaggaucuaggcaauggccagcacuuggugacugagcaacgaaugguugg

SEQ ID NO: 4102266 - RNA, 69 nt, Human
ccaacaaauucagagagguuaaauaucuugugaaaacucacagagauggcuuuucagaggcagaguugg

SEQ ID NO: 4102267 - RNA, 85 nt, Human
ccaacacuauaggguuguuuuuauggauuguaugagauaacauacuuaaaauacucugcacacaguggacaagucuuggaguugg

SEQ ID NO: 4102268 - RNA, 75 nt, Human
ccaaccaacaauccuuucuguauuuaaaagaucugggaguuugucaagagaaauauagaaggguuugaagcuugg

SEQ ID NO: 4102269 - RNA, 85 nt, Human
ccaaccaguucuuuugagauuaagaaaauauccuggaauucauagacauuuucaggacuggaagucucaagagaacuauauuugg

SEQ ID NO: 4102270 - RNA, 103 nt, Human
ccaacccccuugucuggaauucuggcuucuugucuaauuuguuauucuuaauaaaaaauuacucacaggaagagugaauaccaagacucuccccuuggguugg

SEQ ID NO: 4102271 - RNA, 63 nt, Human
ccaaccucugcccucagcucuagggauacgauugcucucuuggagcugacagucagagggagg

SEQ ID NO: 4102272 - RNA, 78 nt, Human
ccaacuaugacccauauauacguaauuuguuuggcuaugacccauauauacguaauuuguuuggcucucauaguaugg

SEQ ID NO: 4102273 - RNA, 130 nt, Human
ccaacucugcuaagagaccucaguacacacaaaacaguguuccugccccucaggacuucaaagcgauagacccagguggcaaauacuguuuuucucuguuuacagauguugcagauuuuagugggauugg

SEQ ID NO: 4102274 - RNA, 63 nt, Human
ccaacugcacacuuagcaucugggagugagcgccuccauccuggguggugagcgugaagcugg

SEQ ID NO: 4102275 - RNA, 73 nt, Human
ccaacugcagugcgcucuuuuucucguuguucuggacagagagaagcaaucaguggccauccacugcagcugg

SEQ ID NO: 4102276 - RNA, 77 nt, Human
ccacgccccuagcccgggcuccuucaugcaucuguucagacugaagcugcaucaugcggaacuggcuuugggggugg

SEQ ID NO: 4102277 - RNA, 97 nt, Human
ccacgccuuccucuuugggaccccagagggagccaccaggguguuaccacaguacccuggggacuuccuuuuauggagcccucgagaggggcggagg

SEQ ID NO: 4102278 - RNA, 59 nt, Human
ccacgcuggcuguuucccuuagcugccaagguggaaagcuccagggaacaggcaguagg

SEQ ID NO: 4102279 - RNA, 55 nt, Human
ccacggaagggagggcuuguuauuggaguaccuaucacaguucuaauuucugugg

SEQ ID NO: 4102280 - RNA, 82 nt, Human
ccacguuuuaguuucucugucaaauggaaacuuauccugucagaugacuguaaggauuggugauauuacagaauguacgugg

SEQ ID NO: 4102281 - RNA, 63 nt, Human
ccacuagcuauacauuauguugaaucacuugauacugaaagcauauuguaugucuauaugugg

SEQ ID NO: 4102282 - RNA, 79 nt, Human
ccacucagccaggugggggucgggaggcucccagugcuguaccauaccugccucuugaccccacaaagggacugaaugg

SEQ ID NO: 4102283 - RNA, 80 nt, Human
ccacucagcugucacauguguuguagccucauucagcagugggggugcaggguggggaaauagcgcccucugcugagugg

SEQ ID NO: 4102284 - RNA, 55 nt, Human
ccacucaguugcucucuguuuucgagaagacaugagaagcugcaacaugaccugg

SEQ ID NO: 4102285 - RNA, 100 nt, Human
ccacuccucguagcccuucucagccugcuccaagugcugccagccauuguugauguccuggggcagggcaggagcaggcagggcuaucacaaggaagugg

SEQ ID NO: 4102286 - RNA, 81 nt, Human
ccacucuacccaugaggaugaguuugguccuggcuugcaagguugcugcaagaccugccagccucauccugguagcaaagg

SEQ ID NO: 4102287 - RNA, 108 nt, Human
ccacucuagaaaacacagccaucuuuaugcuuugcuuccuauauucuauuuggaacuuaauauaccaaaaacagaaaggccagguuggcugguauuauggaccugugg

SEQ ID NO: 4102288 - RNA, 87 nt, Human
ccacucuaguuuccaagguucuaaaucgagucacugagguuuucuuuucuagggcuuccaagaugccuucggaauugcuuggauugg

SEQ ID NO: 4102289 - RNA, 59 nt, Human
ccacucuccucacauguucccaauggaaacccugggacaugaagcaucggaggcagugg

SEQ ID NO: 4102290 - RNA, 102 nt, Human
ccacucuuggcauuaagucuucucucagggagagcugcuggcauguggcauguggcauccuuuucccuggauugggacugauguggcugaugccaggagugg

SEQ ID NO: 4102291 - RNA, 57 nt, Human
ccacugaaggcugcagcucagccuaggccucgggcccauggcagugcagucucaggg

SEQ ID NO: 4102292 - RNA, 65 nt, Human
ccacugaucuguuuucagauucugugcuuugcuuguacagaacaugauauaaacagaagcacugg

SEQ ID NO: 4102293 - RNA, 57 nt, Human
ccacugccaugggcuaggcauggagcagcaaugucuuaaguuggaaggugguagugg

SEQ ID NO: 4102294 - RNA, 55 nt, Human
ccacugcccucacugugguucucagcagcuggggacgcagaaagaguggcagcgg

SEQ ID NO: 4102295 - RNA, 78 nt, Human
ccacugcuccuccagggcuugacagggugccucgcacaaggcagaggcccaauggcuauugggugaauggauagaugg

SEQ ID NO: 4102296 - RNA, 75 nt, Human
ccacuggacaaguuggguaggguuuauugcagagcagguggaguucuggaagauaccucuccuaauuucuugugg

SEQ ID NO: 4102297 - RNA, 59 nt, Human
ccacugucugugacaucagaaacuccaguaggacaaaaggcucugauggcaugauaggg

SEQ ID NO: 4102298 - RNA, 66 nt, Human
ccacuuaaaaagaaugaacuguuuaugaaagaaaccuuuugaaagacagaauauuuuugccugugg

SEQ ID NO: 4102299 - RNA, 74 nt, Human
ccacuuauuacgaugggaacaguacuaggcuuccaucugggagcagccacucucauuccacguggcaaaagugg

SEQ ID NO: 4102300 - RNA, 69 nt, Human
ccacuuccaauagagaugcuagcuagcaggguaaggagcuuacucugagucaugcacuccuuggagugg

SEQ ID NO: 4102301 - RNA, 79 nt, Human
ccacuucgcggcugcgcacuuuggaaugcccccgguuacugugguaaccagggcagccgagguguguccucggggcugg

SEQ ID NO: 4102302 - RNA, 80 nt, Human
ccacuuggagaaugaagcuguuuaaaugacuuacuuuuggcuugaggucugaaauuaguuaucuggaugguuauuugugg

SEQ ID NO: 4102303 - RNA, 60 nt, Human
ccacuuggugaggaacugaagccccugccgacagcaagcacagacuccccgccauagugg

SEQ ID NO: 4102304 - RNA, 66 nt, Human
ccacuuuuaugccugugacagcuucaugaagcacaaaacauggagcaauacauggcaugaaauugg

SEQ ID NO: 4102305 - RNA, 71 nt, Human
ccagaaaauguuggguuauuaaauugauagacauguagugucuacaaugagaaaugaucagucuuuucugg

SEQ ID NO: 4102306 - RNA, 63 nt, Human
ccagaaagcaagcaagguguuacauaugaggccaacagagggagcaauacauugcuugucugg

SEQ ID NO: 4102307 - RNA, 55 nt, Human
ccagaaccuuuuggcacuggaauuacaacuguuauccuccuguagaggguccugg

SEQ ID NO: 4102308 - RNA, 91 nt, Human
ccagaagcccccucagcaggcuucugcugauauuucauuggcuauaaccaugucaauuggcugucacggaggcuggagggugggcauuugg

SEQ ID NO: 4102309 - RNA, 67 nt, Human
ccagaaguccaagaucaaggugucagcaggguuuguuucuucugaggccucucuccugggcuugugg

SEQ ID NO: 4102310 - RNA, 97 nt, Human
ccagaauauugucuauuucacauccugaagccccacugguugaauguaccauuguggcauuaauucaguuacugugaaaaguugugguuaauucugg

SEQ ID NO: 4102311 - RNA, 80 nt, Human
ccagaauguuugauaagagcugcugaaacugacaauaaaaccuugcagauuuuuaaguaguagcucauugucacaacugg

SEQ ID NO: 4102312 - RNA, 72 nt, Human
ccagaauugguuagugagcauuccuucaaaccacccuuguguccuuuugacaugugcuuauaacuuuuuugg

SEQ ID NO: 4102313 - RNA, 63 nt, Human
ccagaauuuagcacaauguauggcacuuaguaguugcuccauaaucguguguuaaauaauugg

SEQ ID NO: 4102314 - RNA, 84 nt, Human
ccagacaaaagacaaggacaagagagcacggucuugggcaugguaugagcuugcugcccccugcuuuguccuugaguugcuugg

SEQ ID NO: 4102315 - RNA, 104 nt, Human
ccagacaauagaguacaucccguaagauucuauuuuuguggaacuguagaauaggcaaagucaaucuauggugauagaaaucagaaugggugccuccggucugg

SEQ ID NO: 4102316 - RNA, 82 nt, Human
ccagacacuggggccuugggaggagaacaaagcuccccuuggagcucugggugagccauucuacuccuaacccuugugcugg

SEQ ID NO: 4102317 - RNA, 114 nt, Human
ccagacagaugggauauguuugcaggcauggaucuggaaucauucccuuuccgggacuguuucuaguccuccauucacuucugccuucucaccuacucuaucccucuaguuugg

SEQ ID NO: 4102318 - RNA, 64 nt, Human
ccagacauagcaacagcaucaagucaaauaaauguuagacuggaaggcugaguugauagucugg

SEQ ID NO: 4102319 - RNA, 97 nt, Human
ccagacauggcagcuuccucagcuucgaggggacggccucuggaacacgcucuguccuuccuggugugcaggggccuccccuugcugcccugucugg

SEQ ID NO: 4102320 - RNA, 97 nt, Human
ccagucucuaugugagggucucuccagccuuuagcccacgcgucucucccucccgguggccucagcaaggcuggcagggucucucagugggaacugg

SEQ ID NO: 4102321 - RNA, 55 nt, Human
ccagucugaggccuggugagggugagauaaaacaucccacaagcagugaggcugg

SEQ ID NO: 4102322 - RNA, 66 nt, Human
ccagucuuuucugcaaaaucuaaguuagaguaggaggcucugacaggauuuuuucaggcaagaugg

SEQ ID NO: 4102323 - RNA, 71 nt, Human
ccagugacagccccaagauggccagcagggacuugacccugagcucaggcccuuggggaaaaugcugcugg

SEQ ID NO: 4102324 - RNA, 73 nt, Human
ccagugacauucucugcugcacugauaacacaugagcccacaugcuuguuaucagaacuagagguuucgcugg

SEQ ID NO: 4102325 - RNA, 67 nt, Human
ccaguggaggcugcagcacagcaaauauugcagaacagcaaauauugcugccugagccuuccucugg

SEQ ID NO: 4102326 - RNA, 55 nt, Human
ccagugggaacacuggcauugcugcucuuuugccacaaugccaauguccuucugg

SEQ ID NO: 4102327 - RNA, 69 nt, Human
ccagugggcagccagguuugggaaccacuucuauggggaugguccaucugggaauuggcuguccacagg

SEQ ID NO: 4102328 - RNA, 72 nt, Human
ccaguggucccugagguugcuggguacacuuaaucccacugucaccacgcacucaccacaggggcacacagg

SEQ ID NO: 4102329 - RNA, 82 nt, Human
ccagugugccuugugaugaaugucucuuuuuacaccuuggggcagccuaucagugauaaagacgugucauaauuaauauugg

SEQ ID NO: 4102330 - RNA, 56 nt, Human
ccaguguguucccugccucacugcagcagccugcaaagggcugagggccacgcugg

SEQ ID NO: 4102331 - RNA, 59 nt, Human
ccaguguguuuuucucugacucaugcacauuauuggcucaaggagaagaacagaugugg

SEQ ID NO: 4102332 - RNA, 65 nt, Human
ccaguguugcugguggcuaccauguucaacaguauagaacauuucuuucuauucaguagcacugg

SEQ ID NO: 4102333 - RNA, 78 nt, Human
ccaguuaaaguuaagacacuuucuaaauagaagucuuguauauggggcuuuugagaaaguguuuucccgugaugcugg

SEQ ID NO: 4102334 - RNA, 75 nt, Human
ccaguuacuucaguuucugccucuacccuucuucuugaaggacugaaauguagaggcagaaacugaaggaccugg

SEQ ID NO: 4102335 - RNA, 58 nt, Human
ccaguucuuggacacucuggaguccauccugagacucacugggucccggaagcccugg

SEQ ID NO: 4102336 - RNA, 92 nt, Human
ccaguugaauagaggaugaaaauuauguuauuuucauacaacagaauacaguuuugcgaugaaaauaaaugaacuacaucuaugugcaaugg

SEQ ID NO: 4102337 - RNA, 60 nt, Human
ccaguugauuuuccuccaugugagcaguuccacugaacauuuugcuggggggaaagaugg

SEQ ID NO: 4102338 - RNA, 124 nt, Human
ccaguugucagccuauauuuuggauaagaaacauuauucuuuccaaagagaaguuuucaucagaaaaaggauugggaaaaauauuguuuguuaucugaaauucaguaggagguuuucaacuugg

SEQ ID NO: 4102339 - RNA, 86 nt, Human
ccaguugugcucaccagagcucagugcaagagaccagggaaccaggaagggucugagcuucagugcacugggagcugagcaccugg

SEQ ID NO: 4102340 - RNA, 61 nt, Human
ccaguuuaggacacaugcccaccccuugagccaccucugguggggaguguucugugauugg

SEQ ID NO: 4102341 - RNA, 80 nt, Human
ccaguuuauucaaucucuaucaguaucuauuucauccucuauauaauggagauauuaauacauuauagggauugugcugg

SEQ ID NO: 4102342 - RNA, 67 nt, Human
ccaguuuucuccuuucuaggucacauaucaaacugauaugugguuuuaagcaaaagagaaaaaaugg

SEQ ID NO: 4102343 - RNA, 82 nt, Human
ccaguuuugcaucuugcuuccuaagaaggaaagauugccuuaaaaaauaucaccuccguuagguaaguaggaucaaaaaagg

SEQ ID NO: 4102344 - RNA, 86 nt, Human
ccauaaacagugauacguuccagcuccuuucucagucucugcauguauaucaaggugcugaucucagcugguacaucacugugugg

SEQ ID NO: 4102345 - RNA, 63 nt, Human
ccauaacugaauguauuacaacagaauguguagaaguuuuguuguggcaaauuuguguucugg

SEQ ID NO: 4102346 - RNA, 66 nt, Human
ccauaacuuaaugaagguauuacaaaagcauaaagccacagacgaauauuucucauaagguuaugg

SEQ ID NO: 4102347 - RNA, 86 nt, Human
ccauaacuuccaauaguguauguugcucuuaaaugauuuaaaaagacaggauuggauagagcuauauacagauuauugaguagugg

SEQ ID NO: 4102348 - RNA, 72 nt, Human
ccauaauuuuuccacguacacuggguacacugaguacccagguaagaaaauguaccugugggaggauuaggg

SEQ ID NO: 4102349 - RNA, 84 nt, Human
ccauacauaggugcugcugcucagugucaucauguucguuccuaucagcguggauguggguggguguuuggcucuuauguaugg

SEQ ID NO: 4102350 - RNA, 78 nt, Human
ccauaccucaagaacuuaggagcaagccacaaucuccugaaauguguuuuguggagguuccugauuuuugagauuugg

SEQ ID NO: 4102351 - RNA, 57 nt, Human
ccauacucucuggcccccaagugccccuuuaccuaguucuucaggucagaaagaugg

SEQ ID NO: 4102352 - RNA, 93 nt, Human
ccauacuguguucaaaauauuccauugguuucccuucucacucauaauaaaaccugaaaguuaguaaaaugggauauauuuuguucagucugg

SEQ ID NO: 4102353 - RNA, 72 nt, Human
ccauagcuccaucuugucuacaagauuuuguuagaagccgucaaaauccugcugacucgagaugcgcugugg

SEQ ID NO: 4102354 - RNA, 72 nt, Human
ccauaggaauguacauuuagaucauuucugcauaauuugugugugugucuauaugugcgugauuccagaugg

SEQ ID NO: 4102355 - RNA, 73 nt, Human
ccauaguuuaacagaugaggaggugagggaacagaaagccucagcacaucucucuguugcacaguuacugugg

SEQ ID NO: 4102356 - RNA, 70 nt, Human
ccauauuccuuguuucacugaaaagggacuuagugucauagcuaaaccuuucacuggagaagagaaaugg

SEQ ID NO: 4102357 - RNA, 109 nt, Human
ccaucaagauaggguuagucuuuacaagucacauuuucugugaaguggcuauuggggacaaucaguugucagauaaaugcuucuaaaggaagaauuacuguuuaaaugg

SEQ ID NO: 4102358 - RNA, 56 nt, Human
ccaucagcaugggagcaugggcucuaggcuagagggugcugccccccugcuuaugg

SEQ ID NO: 4102359 - RNA, 79 nt, Human
ccaucaucuagaacucuucaaaaauacagguuuucagauuccagucuggaugauuuucauuugaaaagguccaugaugg

SEQ ID NO: 4102360 - RNA, 95 nt, Human
ccaucauuauccaggcauggauggaacucugcuguggugaggagguugucucgcccacucacccaaguuuuccaugccuguucugcuuuugaugg

SEQ ID NO: 4102361 - RNA, 130 nt, Human
ccauccacagaacuggggccuccagcucuucccggcugagggucccagacccuaagggcaacacauccuuggggcaagagggggacccuggaggcaggggcugcgguauggccauuggguucuguuucgg

SEQ ID NO: 4102362 - RNA, 76 nt, Human
ccauccagcugguccacagccuguggaauuccgucacucuccaggcugccuuccaggcugaugggccacagggugg

SEQ ID NO: 4102363 - RNA, 94 nt, Human
ccauccaguaggucauuucuuucaacauuauauagccacaugccaggcccuauguuaggcaugggagauauaaugguggaccugauaggcaugg

SEQ ID NO: 4102364 - RNA, 70 nt, Human
cccucuaagccuguuuccaucaacacaugcucauuucugggagauaugcacggauagcagguagggaggg

SEQ ID NO: 4102365 - RNA, 123 nt, Human
cccucucacucugaagcguguuuauuucucugggaguugcaggcucucauguucucagggcuuggugagggccugggucuguacuccuccaaguggaaaugaagagcuacagauuuaucuggg

SEQ ID NO: 4102366 - RNA, 55 nt, Human
cccucucagagccucagcuuccugccucuucagaggcagcuucccucugagaggg

SEQ ID NO: 4102367 - RNA, 58 nt, Human
cccucucauuacgucugugguagauugauaaggucugcuggagacaagugugagaagg

SEQ ID NO: 4102368 - RNA, 66 nt, Human
cccucucucgguugcugugguuuuggagacagguucauggugaagcuggcugaagagacagauggg

SEQ ID NO: 4102369 - RNA, 130 nt, Human
cccucugcugauuccuugaaaagcaacaggaaagagcaggcugcuguggaguagacagacuugagacucucugcaccgucuuguuuuguaaacccuuuugcucccuuuccaaggauuucaguucaggagg

SEQ ID NO: 4102370 - RNA, 61 nt, Human
cccucuggaguuacuucaugccaaaguggcugcuauuuggcaaccagguggucuagggugg

SEQ ID NO: 4102371 - RNA, 75 nt, Human
cccucuggcuuucugaagggcagcagacucuugaguauacugcagaggacaugcuuuaucaguagguccugaggg

SEQ ID NO: 4102372 - RNA, 59 nt, Human
cccucuggucagcugaagccccacacuuaaaagguggccuuucaguggaucaggagcgg

SEQ ID NO: 4102373 - RNA, 63 nt, Human
cccucuucuacauucuugagcugaccuagaauuaggguucccccuuuggcaaugagaacaggg

SEQ ID NO: 4102374 - RNA, 64 nt, Human
cccucuucuagaugauaaaccagcagcgcaagagggugcuugguuuuucuuucaggaucuaggg

SEQ ID NO: 4102375 - RNA, 62 nt, Human
cccucuuguuucuucuaagcagcagccagagaucacugguugguuuacaggaauaagcaggg

SEQ ID NO: 4102376 - RNA, 61 nt, Human
cccugaaauccugugcucugugcugcuggacuaggugguaaagaguguuggauucuagugg

SEQ ID NO: 4102377 - RNA, 72 nt, Human
cccugaaggcauuucagagaucucugaggcugcuacucccaucacaggcccagagugcuagugccuugaggg

SEQ ID NO: 4102378 - RNA, 65 nt, Human
cccugaaucuaucuaaucuucagcugugaacacucagaaacacuaaugcagauggagauucaggg

SEQ ID NO: 4102379 - RNA, 63 nt, Human
cccugacaucugucacccugcugacugugaagccugcagagcuaggauagaugaugucuuggg

SEQ ID NO: 4102380 - RNA, 80 nt, Human
cccugacauugacaagcaguaugucuuagugaccauuuucauaguagaauuaguugcugccaauuuguguaauuucaggg

SEQ ID NO: 4102381 - RNA, 65 nt, Human
cccugacggguggcaguucagggcuucgucgauggauucagccagagacuuuaccugugcaaggg

SEQ ID NO: 4102382 - RNA, 55 nt, Human
cccugagaagaucauugccacggagcagaacacgugugcaauggagaaaucaggg

SEQ ID NO: 4102383 - RNA, 70 nt, Human
cccugagcuccagccucuucuggagguacgugcuacucuggucacacccaggugagguuggggcacaggg

SEQ ID NO: 4102384 - RNA, 58 nt, Human
cccugagggcaaagagcagaggggugcucucugguggcccagcaguucugccccaggg

SEQ ID NO: 4102385 - RNA, 90 nt, Human
cccugauggaucucuuccagcugugcuucucuuugguggccucucucuccccaaccagaagaggacacaguguggaauugccuguugggg

SEQ ID NO: 4102386 - RNA, 61 nt, Human
cccugauggcucuugagcagaauguuuuacgaugggaggugcugggcagcagucauugggg

SEQ ID NO: 4102387 - RNA, 85 nt, Human
cccugauucuacaauggauuugcucugugaccuugggcauuuuauuaaagcucuuuggcacugagcagcaucuguaaaauugggg

SEQ ID NO: 4102388 - RNA, 60 nt, Human
cccugcacacucgugucuugacucacguggccuucaugaucgauaccacgaggugggggg

SEQ ID NO: 4102389 - RNA, 57 nt, Human
cccugcagaaccacagacaaacugucuuuagaccaaaguucucacugaucugcaggg

SEQ ID NO: 4102390 - RNA, 57 nt, Human
cccugcagaucagugagaacuuuggucuaaagacaguuugucugugguucugcaggg

SEQ ID NO: 4102391 - RNA, 56 nt, Human
cccugcagggaggauucugaaggugggaugaugcuucagaguuguucugaguuggg

SEQ ID NO: 4102392 - RNA, 90 nt, Human
cccugcagggcugcccugcccagggugguccacuggcaucucugugagccugaccucuucugcccugggcucggcuggcccugucuaggg

SEQ ID NO: 4102393 - RNA, 58 nt, Human
cccugcccacugcuggccaccacccccggcuccccucaggguggggcccagugggggg

SEQ ID NO: 4102394 - RNA, 57 nt, Human
cccugcccugucugcagccuggcuuagaaagccccugcaucauggggaggagcaggg

SEQ ID NO: 4102395 - RNA, 75 nt, Human
cccugccucuugcaugagcucaugccaccacaagucaaucccuugguuccaugagaucugcagggaugggcaggg

SEQ ID NO: 4102396 - RNA, 75 nt, Human
cccuuacaaugaugauacuuuacuggauacccuuggaccacugaguuuagcccaugugguuuuguuauuugaggg

SEQ ID NO: 4102397 - RNA, 69 nt, Human
cccuuacagggauuguuuuaaucaccugcuauucauccugcuggugagaaagggauuccuguuccaggg

SEQ ID NO: 4102398 - RNA, 69 nt, Human
cccuuacccuuuccuggcuggcaguugugguguggcugacuaccaccuaaggcgcccaggaaagaaggg

SEQ ID NO: 4102399 - RNA, 68 nt, Human
cccuuacuaaacccucgauggaucuuaaaucuggaguuuaggaucaaucaccugagggauuuuaaggg

SEQ ID NO: 4102400 - RNA, 76 nt, Human
cccuuagaaagcuucagugugagcauguaaccuugacucagucaauuagaugcacccacuggaucuuuuacuuggg

SEQ ID NO: 4102401 - RNA, 69 nt, Human
cccuuagagaguacugggcugcccuuaauagcugugugauguuaggcaauucacccagacucucagggg

SEQ ID NO: 4102402 - RNA, 62 nt, Human
cccuuagaggcuggaggcagcaaacagaacgugucccucugcugcuuccuggccacugcggg

SEQ ID NO: 4102403 - RNA, 69 nt, Human
cccuucaaggaaaagauaacuugaugaaauagugaucuuguguugauuucauuuuuuccuuuuuaaggg

SEQ ID NO: 4102404 - RNA, 87 nt, Human
cccuucaccacuguagugagcuccaucugcccuuggggcccccuuccugaacaagagagaugcagcucacucacacagugggauggg

SEQ ID NO: 4102405 - RNA, 65 nt, Human
cccuucagaagccugcagccuuugauuguggccugacuuuuaggggucugcggcauuuugggggg

SEQ ID NO: 4102406 - RNA, 75 nt, Human
cccuucagauauuuuaauacuacagauauacaguauauaauaacuauguuaucaguaggguugaacuuuggaggg

SEQ ID NO: 4102407 - RNA, 120 nt, Human
cccuuccaaagauguugcaguauaguucuuggucucuuuaccggaguguuguuaauuacacauuaaccacaugaagacuugggauggaggagggaggaguucuugcagccuguggaaggg

SEQ ID NO: 4102408 - RNA, 63 nt, Human
cccuucccuggcaguccucuuccucgggcgccgcggggcuccuccagggagacugcggaaggg

SEQ ID NO: 4102409 - RNA, 63 nt, Human
cccuucgccgaugcuugcucugugcucccuccucagcuuccagcacaggcuuuggugugaggg

SEQ ID NO: 4102410 - RNA, 78 nt, Human
cccuucguaucuaugaagguauuuuaaucuaacaacugugcugaaggagagguuaacacuauccagauaugauaaggg

SEQ ID NO: 4102411 - RNA, 56 nt, Human
cccuucuaccugugccuuggugggugcauucaccaugaggcaugugaggagaaggg

SEQ ID NO: 4102412 - RNA, 82 nt, Human
cccuucuggaccccagagccucauucuguugggacccaggagcuauuggcucaagagaggcaggauuguggggcuggauggg

SEQ ID NO: 4102413 - RNA, 94 nt, Human
cccuugagcuccagccuggcuauauccagucccgcuauaaccugggcaucagcugcagggcucacugggaggcuauaaccuggggcucacuggg

SEQ ID NO: 4102414 - RNA, 56 nt, Human
cccuugcacauuugucuuuaaugaaggagaaguuaaggaagaucauuguguaaggg

SEQ ID NO: 4102415 - RNA, 83 nt, Human
cccuuggcauugugacuugggcuggcugcacuuggcuggggaacaauucuggaaccaacaugccaguuguccaacaccaaggg

SEQ ID NO: 4102416 - RNA, 56 nt, Human
cccuuggccuccagagacugggcaggggcauagcccugcuaggcuggccuugaggg

SEQ ID NO: 4102417 - RNA, 74 nt, Human
cccuugggcugcgguuuaagacaggcuucacaguauuuacuguuuauaguuuugagcugacagcuauuuaaggg

SEQ ID NO: 4102418 - RNA, 76 nt, Human
cccuuguaggauauuugcuuaagauagcugggggcuaauuuaauuccagaguugcuuauuugaguuucuaugaggg

SEQ ID NO: 4102419 - RNA, 75 nt, Human
cccuuuaucaucagacugacugugguucuaaaauacuaacaauucagagaauaaaauagucugaagauggguggg

SEQ ID NO: 4102420 - RNA, 70 nt, Human
cccuuucagagacagccugggagggacagccaaggccggcuguuuucucagccuguuuaguauuaauggg

SEQ ID NO: 4102421 - RNA, 62 nt, Human
cccuuuccaugugagauacggcuuggacccuuucaaaauuucacauuucacaugggaggagg

SEQ ID NO: 4102422 - RNA, 71 nt, Human
cccuuucccaaucucagccuugagccuggugugggguggaagccccagacuccucuggcuggugggcaggg

SEQ ID NO: 4102423 - RNA, 130 nt, Human
cccuuuccuaaaguuacuuccauuagugagcaaauucacaagagcauugccugccaugaagaauauaucugucuuucuaguaaagugcuuuuggaauuuuuuuucccuagugagagauuuggaaacuuag

SEQ ID NO: 4102424 - RNA, 55 nt, Human
cccuuuccucugacuucuugucuguaacaagacacugguguugauuuggaagggg

SEQ ID NO: 4102425 - RNA, 78 nt, Human
cccuuucggcuucuuagaggcgcucccucuuuaaugguugcguguucgauuuggggugcccugaguugcuguguaggg

SEQ ID NO: 4102426 - RNA, 86 nt, Human
cccuuugaggcaacagcgucuuuccagcuguucuguuggaaaacagcaggaacagcugcuagagaucugugagagcugcuuuuggg

SEQ ID NO: 4102427 - RNA, 59 nt, Human
cccuuuggcauuuccaggauaugcacacuuucacuguccugagauuauugcccaaaggg

SEQ ID NO: 4102428 - RNA, 84 nt, Human
cccuuugugaguguuuauucauggcuaaugaaaaaaagagaaggacucuuggguuuuguguugccauguuaagcauggagaggg

SEQ ID NO: 4102429 - RNA, 78 nt, Human
cccuuuugcauucuucagacucccucuuuaagaagcuguguugggccugcuuauaugggauuugaaggggagcuaggg

SEQ ID NO: 4102430 - RNA, 60 nt, Human
cccuuuugcucagcugccuccuguaugacaacaugggcagggcagcagcagcaacaaggg

SEQ ID NO: 4102431 - RNA, 55 nt, Human
ccauccccagcccagaugcaucacuucuaaagagcagcuuggugaaaggugaugg

SEQ ID NO: 4102432 - RNA, 58 nt, Human
ccauccuuggcagcucagaccuacccuuuaguacuguguucucugcugccaaggcugg

SEQ ID NO: 4102433 - RNA, 80 nt, Human
ccaucuaguggcaaagugcacuagaauccagauucucugauucugaaucuaauguucuuguccauugcaccaucugaugg

SEQ ID NO: 4102434 - RNA, 71 nt, Human
ccaucuaugguaaaauuggaguauuaugucccuggauaugaguucuucacugccaguuuuaccacagacgg

SEQ ID NO: 4102435 - RNA, 65 nt, Human
ccaucucaaacuacacuguaaauugcacagcucaguucugaugucauuuuguuuguuuggggugg

SEQ ID NO: 4102436 - RNA, 61 nt, Human
ccaucucacucauguuucuagaagccuuaugggccacugugcagagcauagaguguggugg

SEQ ID NO: 4102437 - RNA, 100 nt, Human
ccaucucagcugaaagaucauuuccaaauuagaggaagcugcgacugacugagaaggcaggaggugcccucuaguggcaugguuacauuagcuugggagg

SEQ ID NO: 4102438 - RNA, 70 nt, Human
ccaucuccaagaugcuuuucuggguuucucuguuuacaguuagcucuuuugugagcauuuggccagaugg

SEQ ID NO: 4102439 - RNA, 60 nt, Human
ccaucuccccagacccuggacauaaucaguucugauuaguuagggcuccugaggaccugg

SEQ ID NO: 4102440 - RNA, 68 nt, Human
ccaucucguagucucagcucucacgagugcccaacugcugcccucucugaguauccugaacugccugg

SEQ ID NO: 4102441 - RNA, 81 nt, Human
ccaucucuacuaaaaauacaaaaauuagcugggcaugguggcgggcaccuguaaucccagcuauuugggaggcugagaugg

SEQ ID NO: 4102442 - RNA, 57 nt, Human
ccaucucucucauuuugugcacuguuacuuagcaguuuacauaaaaaggcagagggg

SEQ ID NO: 4102443 - RNA, 74 nt, Human
ccaucugcaccugccagagauuucacacugcuauguugcaaauagggcuugaaauuucuggcugugucaggagg

SEQ ID NO: 4102444 - RNA, 70 nt, Human
ccaucugcaugugaauuuccauuuccaaaagucgucagcaauaguaaaugccuagaaaucacgcagaugg

SEQ ID NO: 4102445 - RNA, 99 nt, Human
ccaucugcccaggcccuggagccaagcacucaacuccuggagccuucucuagcucuagguaggcuguguguggaaacagggcagggccaccucgggugg

SEQ ID NO: 4102446 - RNA, 110 nt, Human
ccaucuguuuuaagauuguguuucuguucauacagaguauaguaucguuagaagcaauauugugcuucuguugugcaauauugacauagaaaguuuuaaagauuaagugg

SEQ ID NO: 4102447 - RNA, 63 nt, Human
ccaucuuggcucacauuacugauaaauauuucaguauuuccuauagugagggccuaaagaugg

SEQ ID NO: 4102448 - RNA, 64 nt, Human
ccaucuugggucacugccccccgccggagggcgguuuuucugaggucagugacccacgagaugg

SEQ ID NO: 4102449 - RNA, 93 nt, Human
ccaucuuuccugucaaacaaugccaugcacauaggccaaaucauuuuuaauguaaauauaaaugauucuuguguguagccauugaggagaugg

SEQ ID NO: 4102450 - RNA, 84 nt, Human
ccaugaaaauuggauugggagaaugugagauauagauuagauuccauaugaucauuauuuugucaaauccauuuucuauuaugg

SEQ ID NO: 4102451 - RNA, 68 nt, Human
ccaugaaccaggaggcagccagcacacagcaaugagaggcuugugaggcugcauaguuuggugauugg

SEQ ID NO: 4102452 - RNA, 67 nt, Human
ccaugaagggggccacuguggagaaacaccccagggugccaucaguucuucucagggucccacaugg

SEQ ID NO: 4102453 - RNA, 59 nt, Human
ccaugacaaauaaaccuuugccauuuuaaucuccuuggauuguggguguuuuguuaugg

SEQ ID NO: 4102454 - RNA, 66 nt, Human
ccaugacaaguacaaugguuagaugcauuuguauugcagagacaaucagaaguugugcaugcaugg

SEQ ID NO: 4102455 - RNA, 79 nt, Human
ccaugagauguacaaauccuuccacacaugcauuccauuucuagaaauguauccuaugggaagauauguauguucaagg

SEQ ID NO: 4102456 - RNA, 83 nt, Human
ccaugaguuaauugcucgagaaauaaccuccagauuuaauaaaagaaaagaggagguucuucaugagcuaguuaaaaucaugg

SEQ ID NO: 4102457 - RNA, 68 nt, Human
ccaugccuuucacugaaccagucaguaucaugggcuugccuaugccugggucaugugaauaggccugg

SEQ ID NO: 4102458 - RNA, 64 nt, Human
ccaugcucuguccagugcaccaucauucauuaacucugggaugauggugcauugauagggaugg

SEQ ID NO: 4102459 - RNA, 71 nt, Human
ccaugcuugugggagaagauuuggucaucuagaacucuguucaguguuguuuucucucacuuugagccugg

SEQ ID NO: 4102460 - RNA, 77 nt, Human
ccauggagaucuucugcauugaaaaauucacaauucugguucagcuugaacuuggguuuuccaaaaguuuccacugg

SEQ ID NO: 4102461 - RNA, 80 nt, Human
ccauggcaguguccucucugcugugauuugcuaccugugaccuucaugaggccaaauggcacagaaagcaaaugccaugg

SEQ ID NO: 4102462 - RNA, 59 nt, Human
ccaugggccaggcuugggaugacacagcccucaguuacaaaccgcacuuggacccuugg

SEQ ID NO: 4102463 - RNA, 72 nt, Human
ccauggggcuggcgcaacagaaaaucuggagaacauacgucaugcuauuuucaguguugucccuccccgugg

SEQ ID NO: 4102464 - RNA, 91 nt, Human
ccauggggcuuggcgugcuggaguggcucucccuggagauaggcauguccugggaguggcacucacagcaggauaugaacacagcccuugg

SEQ ID NO: 4102465 - RNA, 58 nt, Human
ccaugguaaauucuuaauugguuuuguuaaaacuaccagugaagagugaaacacaugg

SEQ ID NO: 4102466 - RNA, 58 nt, Human
ccauguagaguagaauaguacaacuguuccauggcacaguuguauuuauuuuaccugg

SEQ ID NO: 4102467 - RNA, 59 nt, Human
ccauguauggaauccuuuaguuuuucuuaagaaagcugaaaaugagacucuacacaugg

SEQ ID NO: 4102468 - RNA, 97 nt, Human
ccauguccccugcaccuucuuggaguauugggccucaggaagcagccucuguucugaaucccaaacucugaaagcaggaguguccuuggggaccugg

SEQ ID NO: 4102469 - RNA, 80 nt, Human
ccaugucuucaggaagggaaaucauccaucuauccaaaaaaaaguauugauaggagcccuucuauuccauggagaugaag

SEQ ID NO: 4102470 - RNA, 76 nt, Human
ccaugugacaguucgguuuccuguucaaacuauugaggcagcuccagcccagaccagaaggaagccgacaacaugg

SEQ ID NO: 4102471 - RNA, 55 nt, Human
ccaugugccucugagaagugagcuuccccagccaagcccacaggaggacauaugg

SEQ ID NO: 4102472 - RNA, 85 nt, Human
ccagcuggucccuucugaucucagcugccucucccuggaagauguagaucuccuugugcugggccagcuucaguggggcuacugg

SEQ ID NO: 4102473 - RNA, 83 nt, Human
ccagcuguguucccaacagcagccugcagcccuguguccaagcuggagauuuuuguccaggcacuugcgggccgcuuggcugg

SEQ ID NO: 4102474 - RNA, 55 nt, Human
ccagcuuagagauagugagucagaugggaaaucaggauucacaucccugggaagg

SEQ ID NO: 4102475 - RNA, 56 nt, Human
ccagcuuggcucuaagacaccuauugguggaaaucguuggcacuuuggcaagcugg

SEQ ID NO: 4102476 - RNA, 85 nt, Human
ccagcuugucugccuuguccagaacuguuuuuugcugcucaguguagcagcuaagaacuugagcucuggauuuugacaaaucugg

SEQ ID NO: 4102477 - RNA, 66 nt, Human
ccagcuuuagagaaaacauauuuguggcucaacucaccacaggugcggguuugacucugaaguggg

SEQ ID NO: 4102478 - RNA, 85 nt, Human
ccagcuuuccccgugccucagccacucuucacguuccaucucugcucugugcugacccgguauggugguguggggagagcaaugg

SEQ ID NO: 4102479 - RNA, 70 nt, Human
ccagcuuuccugcgaguugauuucacuuccacauaaaucauuucuucuagcuugcuggaaaguuccuugg

SEQ ID NO: 4102480 - RNA, 61 nt, Human
ccaggaaccccuccaggucugaacagcugcucuguguuuaucuguuccucuuggaggcugg

SEQ ID NO: 4102481 - RNA, 85 nt, Human
ccaggaagcuuuuccauaacugaccgaaugcaugacccuuuacagaucaguuuacauguaacuuccucagggaugguuuuccugg

SEQ ID NO: 4102482 - RNA, 74 nt, Human
ccaggacacaugcacuuucccugaccaggccuacacaaaugcuuaucauguuagggagggugcauauguguugg

SEQ ID NO: 4102483 - RNA, 59 nt, Human
ccaggacagugaacauguaagaguuugggagcaugaauccgggccucuuccuguccugg

SEQ ID NO: 4102484 - RNA, 97 nt, Human
ccaggacccagccagggcaauaagguaccauggagccucgggggacuuaagcacuuaauuuccaccaucucucugggccuccugcuggggugacugg

SEQ ID NO: 4102485 - RNA, 62 nt, Human
ccaggaccucaucagucacaaugagauguucuccgacaucuagaagaucugggagauugugg

SEQ ID NO: 4102486 - RNA, 55 nt, Human
ccaggaccuggagcucuaugaaggcaucuaguucucgacucaguccagcuccugg

SEQ ID NO: 4102487 - RNA, 56 nt, Human
ccaggacucaaugaccacagggccucagucuuucuggccuccauuguaucuccugg

SEQ ID NO: 4102488 - RNA, 58 nt, Human
ccaggacucaguggggaaagggcaacauggccagcucuucuccccagcgaauccucgg

SEQ ID NO: 4102489 - RNA, 107 nt, Human
ccaggacuccugucccucuguggugaggggauuuggguggaagaguuugagaagcucugcuguggaauccucuccuuuuuaaauaaagagggacacuccaagccugg

SEQ ID NO: 4102490 - RNA, 82 nt, Human
ccaggagacacuggcuuguuucuauuugccagguaggaugucaguggcugcuuggccaacagcgacagggccagcuuccugg

SEQ ID NO: 4102491 - RNA, 60 nt, Human
ccaggagagcagaagcccaggccuguccucaaugaagcagccugggauaguggccuccgg

SEQ ID NO: 4102492 - RNA, 105 nt, Human
ccaggagauguuaaauguuacucugccgggucagucucuuauuuuuuaaacugaagaugaaaugcuauuuuggcuagaagaauuauuccgcaucuuagccacugg

SEQ ID NO: 4102493 - RNA, 56 nt, Human
ccaggagcagaguagguguucaauucaugucugugaaacaaaccuauuugcucugg

SEQ ID NO: 4102494 - RNA, 58 nt, Human
ccaggaggcccuagcagaagcugcucugguguccagcuccugugugaagccucccugg

SEQ ID NO: 4102495 - RNA, 63 nt, Human
ccaggaggcucagagaccugcgaucugaguggcauuuccucaggccuuguccugaccuccugg

SEQ ID NO: 4102496 - RNA, 56 nt, Human
ccaggaggcucugcccaucccaagcauccgugggugacugggucuccaccucuugg

SEQ ID NO: 4102497 - RNA, 67 nt, Human
cccuuccaauagcaacaaagauuauuuucaucauucgcugaguuaauuugcuaauuuuggaucaggg

SEQ ID NO: 4102498 - RNA, 58 nt, Human
cccuuccaggcuggaggcuugggaucaccaauaaacuccaggaaaaggcuugcagggg

SEQ ID NO: 4102499 - RNA, 117 nt, Human
cccuuccauggcccucuccaccugggccuccauccccagacucuccucuugaagggcucuaggcccugcagggagcucuggggugcagggcuggcugggagggugggguggcaaggg

SEQ ID NO: 4102500 - RNA, 55 nt, Human
cccuuccccacuuucaugagauuagagagauaagaacaggaacauggagggaggg

SEQ ID NO: 4102501 - RNA, 83 nt, Human
cccuucuccacuaaaauauaauuuagaaggggaaacagguuuugucuguuuuguucacugcauuguccuugugcugagaaggg

SEQ ID NO: 4102502 - RNA, 97 nt, Human
cccuucugcagcauccuggagucacuucccgaauaaaccccucacaucaccuccuugucucaggguuugcuucuggggggacccagccugagacggg

SEQ ID NO: 4102503 - RNA, 72 nt, Human
cccuucuuacacugacagcugaaaagcaggcugauagucacugcuccacagcaguuuuuaguguucgauggg

SEQ ID NO: 4102504 - RNA, 68 nt, Human
cccuugaaaagacucuucucucuucuaucauuuuaacaaaaauggcaguagaaaagaaucccugaggg

SEQ ID NO: 4102505 - RNA, 77 nt, Human
cccuugaaccuagauggaucucugugacuauuuugacuaaugaaguguggcagacaagauucuaugugacuucuggg

SEQ ID NO: 4102506 - RNA, 86 nt, Human
cccuugcagccucuuuggggguguccucuuuucuuauucauucauucaacaaauguuugugaagcuggauccuggagcugcagugg

SEQ ID NO: 4102507 - RNA, 66 nt, Human
cccuuggauuuggaacucauagacaugcagaggggcauucuggguggugucuuccaagaccaaagg

SEQ ID NO: 4102508 - RNA, 57 nt, Human
cccuuggccacugcgccagugaacucugggagacaggauugaguacguggucaaggg

SEQ ID NO: 4102509 - RNA, 68 nt, Human
cccuuguuggaguagguuucgugccgcuuuuggcuucuugggggcacacagcggaauuugcucuaggg

SEQ ID NO: 4102510 - RNA, 85 nt, Human
cccuuguugggucagggcaggugguuguggcccaguuguuuggccuucugcaggcugcaccccugcccugcugccugccaguggg

SEQ ID NO: 4102511 - RNA, 60 nt, Human
cccuuuaacacacagaggcugcagugaagcccccaaaccacaggcuugguguugaauggg

SEQ ID NO: 4102512 - RNA, 97 nt, Human
cccuuuauuugaaagaacuagaauguuuucauuauccuaacuguauccugacagauaucagagguauugcaaaagccuagauuccaaguacaaaggg

SEQ ID NO: 4102513 - RNA, 62 nt, Human
cccuuuuguucuuucugagcugcagccagaaauugcugguuaguucacaggaacaagcaggg

SEQ ID NO: 4102514 - RNA, 88 nt, Human
cccuuuuuaaucaauugaaggaagucccauuucaccagcugucccagccuggagguggaagggacugccuagaggaggugaaagaggg

SEQ ID NO: 4102515 - RNA, 59 nt, Human
ccgacccugggagcccagaccccucccagaagguccgguccccuggcccccagcgucgg

SEQ ID NO: 4102516 - RNA, 77 nt, Human
ccgacugccucagcccaguugucagagcagacggcucuuguguccagagcugcugagggcuggagcugaggccucgg

SEQ ID NO: 4102517 - RNA, 75 nt, Human
ccgagccugagcaccuaccagacauucagcuucugcccaaacaugaaguuguuguugagguggguaauggcccgg

SEQ ID NO: 4102518 - RNA, 59 nt, Human
ccgaggcggcggccgagccuggcucaccgcaccauggaagcuggccggccgccgcccgg

SEQ ID NO: 4102519 - RNA, 55 nt, Human
ccgaggcuggagugcaguggcgcgaucucggcucacugcaagcuccgccucccgg

SEQ ID NO: 4102520 - RNA, 55 nt, Human
ccgaggcuggagugcaguggcgugauuuaagcucacugcagccuccgccuccugg

SEQ ID NO: 4102521 - RNA, 55 nt, Human
ccgaggcuggagugcaguggcguggucucagcucacugcaaccuccaccucccgg

SEQ ID NO: 4102522 - RNA, 69 nt, Human
ccgagucccagagaggccaaggucgugguccaaguucacaaggcuagaacccgagucuccugacaccgg

SEQ ID NO: 4102523 - RNA, 60 nt, Human
ccgauuuccuuuaggacugcccagccucagacagcugguccuggaagguccugagggugg

SEQ ID NO: 4102524 - RNA, 77 nt, Human
ccgcaagcagaguacucuuagggcuguggcugcagcagccgagucacaugaucccugggccugguaacaccuugcgg

SEQ ID NO: 4102525 - RNA, 103 nt, Human
ccgcaaggguacuucucugccaaguauaguaauauuguuguagcaguguucaagguugucagcaauucuggcuuacucugcagagagccauaauagugugugg

SEQ ID NO: 4102526 - RNA, 70 nt, Human
ccgcaaucaucucucuuugugccuuucucuucuacaguacuugggcagggcugcagggcagcuggugugg

SEQ ID NO: 4102527 - RNA, 97 nt, Human
ccgcacacugucugagaucugcucagccgaucugcuccggccguaguaauccgugaagaggccgucaggguugagcagguagauggcaauggagugg

SEQ ID NO: 4102528 - RNA, 76 nt, Human
ccgcacuaggcauccagacugggcuugggagccgcgcacccucccuacccagauccaggauggcuagaauuaacgg

SEQ ID NO: 4102529 - RNA, 104 nt, Human
ccgcagcgugaggcgcuguuuuaccuucaaguuccuggucccuggcuuagcucaagucacuuccaucagcuggaaacaggcgagcaccucacgccaucuagcgg

SEQ ID NO: 4102530 - RNA, 60 nt, Human
ccgcaggugaguuuccagcucuccucccuccaagggcagggaugcugaggcucagugugg

SEQ ID NO: 4102531 - RNA, 94 nt, Human
ccgcaguggugggccacagggagggcccugggugcagcucuggugggacccauagccuccaugggagccagugcccucugguggacaccagcgg

SEQ ID NO: 4102532 - RNA, 73 nt, Human
ccgcauccaggacugccagucuggauuggagcucgacucagaaauagacaauggcaguggcacuaggaagugg

SEQ ID NO: 4102533 - RNA, 72 nt, Human
ccgcccccaccgcugcucgugccaggacgcgcaguuugcaguugcagcucaggcacuggcgcgggauggcgg

SEQ ID NO: 4102534 - RNA, 82 nt, Human
ccgcccccgcggcgaggucuggaccaagucgccccuagcaacaacagccgggccggcuuucucaggccaugcugauuggcgg

SEQ ID NO: 4102535 - RNA, 83 nt, Human
ccgccccgcgcugacucggcucucagagggcgacugggaggucggaccugggcgcccagagcugggugggcagcggggggcgg

SEQ ID NO: 4102536 - RNA, 71 nt, Human
ccgcccucacugcugccagugccacacgcgcgguuugcagcugcagaucuggcacuggcgcaggauggcgg

SEQ ID NO: 4102537 - RNA, 76 nt, Human
ccgcccucagugucuggggccccagggcagagggucaccaucuccugcacugggagcagcuccaacauuggggcgg

SEQ ID NO: 4102538 - RNA, 55 nt, Human
ccgccgggcacugcugaagcugcuucgucacagccaauggugaguguccaggugg

SEQ ID NO: 4102539 - RNA, 81 nt, Human
ccgccucagccucccaaauagcugggacuacaggcgcccgccaccaugcccggcuaauuuugguauuuuuaguagagacgg

SEQ ID NO: 4102540 - RNA, 89 nt, Human
ccgccuccgaauucguuuccucaucuguaaaacggggcuaugaagucuuucuugcaaggaugcaggaaauuggaguaugcgagaggugg

SEQ ID NO: 4102541 - RNA, 60 nt, Human
ccgccugcccagcgcggccauuguccggggcuccagaggggcuguguucagggcaugcgg

SEQ ID NO: 4102542 - RNA, 59 nt, Human
ccgccuucugacagcaaaacucagccugucuacagauaacuggucaggucaggcggcgg

SEQ ID NO: 4102543 - RNA, 81 nt, Human
ccgccuugugcuguagagccugugacauuuccaacaaugcaacacuauuugguaaauauuaaaggcugcuagagaaagggg

SEQ ID NO: 4102544 - RNA, 56 nt, Human
ccgcgcccgcgcgcucucggcugggcacgguccggcuccaggccugacgggcgcgg

SEQ ID NO: 4102545 - RNA, 82 nt, Human
ccgcgcguggcagcggcccaggccgucucagccggauuuuuccauccccgggguaggcuugguccccuguacacuccagcgg

SEQ ID NO: 4102546 - RNA, 67 nt, Human
ccgcgcugggugcccggcuggcgcuccucccgcccaaggugcccugaucgcuaggcucccggugcgg

SEQ ID NO: 4102547 - RNA, 57 nt, Human
ccgcgucucggggaugcagagugggcucuucggcgcgcccugcagccaugggagugg

SEQ ID NO: 4102548 - RNA, 67 nt, Human
ccucgcugaccucagggaucucucuggccugcagcuccgcugugggcagggucugaggccacagagg

SEQ ID NO: 4102549 - RNA, 78 nt, Human
ccucgguguguccaaggcacggaugacgguggagaggagccggccaucccuugaagucaccugugccacauacugggg

SEQ ID NO: 4102550 - RNA, 56 nt, Human
ccucguggaugggacuagucaggacacagccaaaagacagucgccuaucaaccagg

SEQ ID NO: 4102551 - RNA, 64 nt, Human
ccucuacagggcauagcccaaagucacuggaaaagagaaucugggaagaguggucuguggcagg

SEQ ID NO: 4102552 - RNA, 58 nt, Human
ccucuaccuacucuuugcauuuuccaaaaugggaaacugaauauaagaaagguaaagg

SEQ ID NO: 4102553 - RNA, 116 nt, Human
ccucuacugauccaccugcguuggucuccuaaagugccaggaauacaggugugagccaccaugccuggccgggucuuggauuuuuauaagaagaaaaaaaaggugugggguagggg

SEQ ID NO: 4102554 - RNA, 68 nt, Human
ccucuagguaaugcacagcuaaagugguuccaaauguuuuaucugaugccagcugugcagccuucugg

SEQ ID NO: 4102555 - RNA, 111 nt, Human
ccucuaguacaauguugaaucaaacagugagagcagacauccuugucuuguuccugaucuuugggauaaagcaucuagucugucacuguuaaguaugacauuaacuguggg

SEQ ID NO: 4102556 - RNA, 65 nt, Human
ccucuauugggauaaucugugccugggggacccacugccucccaggcugcguauccacaauaagg

SEQ ID NO: 4102557 - RNA, 72 nt, Human
ccucucagcacuugagcuuucauguaagaguucuagcugcucuaacacugccaugcuggagucacauggagg

SEQ ID NO: 4102558 - RNA, 56 nt, Human
ccucuccaguuuuaacgugaccaauaaggugauaugcaagugaggauuuggggagg

SEQ ID NO: 4102559 - RNA, 59 nt, Human
ccucuccauggggcugccugacuguccucacaacacagcaucuggcuuccccuggaugg

SEQ ID NO: 4102560 - RNA, 67 nt, Human
ccucuccccauguugugguggugccucuggacucaguccuggugcaccagucacaugggcagaaugg

SEQ ID NO: 4102561 - RNA, 87 nt, Human
ccucucuaggucaucuucuucauucccuuacuuccgagcccuucuucaugguuuuggauguggggauggagugggauguuuggaagg

SEQ ID NO: 4102562 - RNA, 81 nt, Human
ccucucuccugugcacccucccugugguccugagcccugagggaaaggcugguccagggaggccuugccugggaggggugg

SEQ ID NO: 4102563 - RNA, 69 nt, Human
ccucucucggcagggcggcgagcagugucugugcaugaggaccagcuccaggccccugcuggugagggg

SEQ ID NO: 4102564 - RNA, 76 nt, Human
ccucucucugagcuuuagucucuccacuuaaaauuaaagugagaaugggaaugaaaguagcaaccucacagggugg

SEQ ID NO: 4102565 - RNA, 59 nt, Human
ccucucuguagcagcccccagugcucugcucuguagcacuggggguggcuacagagagg

SEQ ID NO: 4102566 - RNA, 59 nt, Human
ccucucuguagccacccccagugcuacagagcagagcacugggggcugcuacagagagg

SEQ ID NO: 4102567 - RNA, 73 nt, Human
ccucucugucuauucccccaccuccguuaccacacauagguaagcagugaggugaggaguguugaccaagagg

SEQ ID NO: 4102568 - RNA, 61 nt, Human
ccucucuuuccagauguuagauuaugucugccugaucaugucugccaauuuggaaggaagg

SEQ ID NO: 4102569 - RNA, 77 nt, Human
ccucugaaagauggugcugggacagagcaguaggguggcagagggggggccggcucugcccaggaccguccuugagg

SEQ ID NO: 4102570 - RNA, 79 nt, Human
ccucugaacuucccaccccagcucucaaggcucccuggggcucccugggccucucugggggcugacuugggaagggagg

SEQ ID NO: 4102571 - RNA, 66 nt, Human
ccucugaccaggcucagccaaggcgaagcugcccauuucccagagggccuugcugagcuucacagg

SEQ ID NO: 4102572 - RNA, 69 nt, Human
ccucugacgguugugaggaggauuaaaugcuucaguaugugugcaagacuuccuaagcaauaaaagagg

SEQ ID NO: 4102573 - RNA, 66 nt, Human
ccucugagagaaggccuucagcucagcagugugcucaugugacaagggcuuauucuuagcaacagg

SEQ ID NO: 4102574 - RNA, 56 nt, Human
ccucugagccagcgucuucucuaauauggagaugaggauagugcuggccucauggg

SEQ ID NO: 4102575 - RNA, 75 nt, Human
ccucugcaaagugaucaagguugacaucaacaguggugucacagugaugaugugaacucuugauaugaugugagg

SEQ ID NO: 4102576 - RNA, 85 nt, Human
ccucugcaacccuuuggcuuuugaaaaggugauguacagcuggugcuagcuguauauacacugauuaggauuuucugggcagagg

SEQ ID NO: 4102577 - RNA, 62 nt, Human
ccucugcacccacaggcacuucccuuuaaaaaauuucaccuagggaaagugcggggcagggg

SEQ ID NO: 4102578 - RNA, 62 nt, Human
ccucugcaugugaauauccauuuguuucagcacaauuuguugaaaagacuguucuguagggg

SEQ ID NO: 4102579 - RNA, 75 nt, Human
ccucugcuaaaguccuuguauacagaaucaaugaagaguucauuuguguaucaucaaggaauuuagcacaagagg

SEQ ID NO: 4102580 - RNA, 58 nt, Human
ccucugcucccucugcccugccccacuacugugacaggcugagcucaggggcagcagg

SEQ ID NO: 4102581 - RNA, 59 nt, Human
ccucuggcucacagcaccaacuucuccaagagacuuaaggcugggguguggggcggagg

SEQ ID NO: 4102582 - RNA, 80 nt, Human
ccucuggcugggugagagcuucucugagaaagagggauguuuccaaccuugcccccugggaauucucucccggccugagg

SEQ ID NO: 4102583 - RNA, 108 nt, Human
ccucuggucacugcaacgcuagcccaacuugacagaagcuggacacagggucgcugcacagugugcaaaccugucaguugcugucagggauagguagugcacuucagg

SEQ ID NO: 4102584 - RNA, 97 nt, Human
ccucuguaacaguaaagugaucaaacacuaaaauccugagcugccacuguaauuagggaaguauuuaguaguuuuacacauuugacuguucaucagg

SEQ ID NO: 4102585 - RNA, 71 nt, Human
ccucuguacaggucagcaucuaggagcgcaaagcacgaugaacaaguguauagagccaaacuguacagagg

SEQ ID NO: 4102586 - RNA, 90 nt, Human
ccucuguagcacacggcccagugcugagcgucuggcagggccuaaugcacagcccugccagguggcugagugacugagggugcuaagagg

SEQ ID NO: 4102587 - RNA, 60 nt, Human
ccucuguccuggggaguggagcaagaguccccccuuguaacccauccauggggccagagg

SEQ ID NO: 4102588 - RNA, 78 nt, Human
ccucuguccugggugguguuuggugaucagaggcuugccagggauggcagggacgccagggacagcaaggacggcagg

SEQ ID NO: 4102589 - RNA, 61 nt, Human
ccucugucugaaaugaccuuuccccacuggcggcagcgcuaguucuuucucaccauagagg

SEQ ID NO: 4102590 - RNA, 58 nt, Human
ccucugucugucacuggggcagaguacauuuucugcauguccauaaugaagauagagg

SEQ ID NO: 4102591 - RNA, 84 nt, Human
ccucugugagaugucuggagcuggagggcaaggcacacacggacaguucuugcuugccaaggagcucugcccaucuuagggagg

SEQ ID NO: 4102592 - RNA, 60 nt, Human
ccucuguggggaagaguaugacuuggcagacuagagaugcggagaaucagccccgggagg

SEQ ID NO: 4102593 - RNA, 69 nt, Human
ccucuguuuuguauuuacguagaaaucuccacuuuacaauuggggaaaauguagcuuacaagauaaagg

SEQ ID NO: 4102594 - RNA, 55 nt, Human
ccucuucccauccauguuagugccuucccuccugggcaguggagauuggaggagg

SEQ ID NO: 4102595 - RNA, 57 nt, Human
ccucuucccucccuuuguccuucagucacaugucuuacuuaaaggaagugggagagg

SEQ ID NO: 4102596 - RNA, 110 nt, Human
ccucuucuccucuuccuaccaagcugcucuucugugccucuguuguaacugggucauguuuuugacucuagcaagaggaaacaaggggccuucagugggaaagcaagagg

SEQ ID NO: 4102597 - RNA, 60 nt, Human
ccucuucugcucugacuugcaaggaacucaagcuguucugcauuccagggccaggagagg

SEQ ID NO: 4102598 - RNA, 96 nt, Human
ccucuugaacuaaggaaucacugaggggaaaggaaugcaagcaggucugacaggaucugcagcuuuccccugauuuauugcaccuugcuuuagagg

SEQ ID NO: 4102599 - RNA, 103 nt, Human
ccucuugccauguugucauggaggccuccccuaaauguguaugccacaaaagaagcagugucagcagcaagggggaggaucccagagaaaauagaagaagggg

SEQ ID NO: 4102600 - RNA, 57 nt, Human
ccucuuggccagagaccagagcagggcuuagcccacucauagcuucaggccaggugg

SEQ ID NO: 4102601 - RNA, 63 nt, Human
ccucuugucacuucaggaagcaacagccaggagugaaacauguaaccugaggugggaggaagg

SEQ ID NO: 4102602 - RNA, 83 nt, Human
ccucuuguccuugcagaggucauaucucagaagagacaucaaauuugcauuucccccagauaugaccuuugagcggguagagg

SEQ ID NO: 4102603 - RNA, 72 nt, Human
ccucuugucuuggaaggucauccugcccagagcuugugaaggugcaguggccugagccaggcuuccaagagg

SEQ ID NO: 4102604 - RNA, 58 nt, Human
ccucuuugagauucaguuuucccaccugugaaaggaaauguaugauucucaucagagg

SEQ ID NO: 4102605 - RNA, 60 nt, Human
ccugaaaauauccucuccuuugcauacgggaacacacagaugggaggaugcgucuucagg

SEQ ID NO: 4102606 - RNA, 55 nt, Human
ccugaacagucugaaaggagacacaauguuaaaguccuugagcaggcugcccagg

SEQ ID NO: 4102607 - RNA, 118 nt, Human
ccugaacccugugucccuucuggccacgugaaagccaugcuccuuccccucugggccggcccggggacgcucggggcaggguaugaggcaagagaaagggacccaagaaaggggcagg

SEQ ID NO: 4102608 - RNA, 65 nt, Human
ccugaacucuaaauagagcagugaacucaaagucaaagcauucagguuuuauucguagguucagg

SEQ ID NO: 4102609 - RNA, 73 nt, Human
ccugaacugagcuuuaucaaaacaguaacugaacuuugaaacgaaacaagagugcugaauugaaagcuccagg

SEQ ID NO: 4102610 - RNA, 56 nt, Human
ccugaagaugcuguggccugguagagcuuuguacacccucccaagcuucucucagg

SEQ ID NO: 4102611 - RNA, 97 nt, Human
ccugaagcugguaauuuucacagaggacaggcaguuuuccagaucagauaugugcuuguguuugucuuugcccugcucgaagaugguuagaaacagg

SEQ ID NO: 4102612 - RNA, 62 nt, Human
ccugaaguccucuuagcuucucagaaaacagaugcagaggcuacagauacagaggcuacagg

SEQ ID NO: 4102613 - RNA, 68 nt, Human
ccugaaguccugucauugcuuugccaaguucuuucuccagccauugguaaacuugacagagaaucagg

SEQ ID NO: 4102614 - RNA, 77 nt, Human
ccugaaugcuggaggcacucucgacaaggguggguacugucugggcccacaccugcuugggugugccucugcauggg

SEQ ID NO: 4102615 - RNA, 84 nt, Human
ccugacacauggaagacauuggguaaauagcugcugaauuaauucauucagcaacuauuuaucaaauuccuacuuugugccagg

SEQ ID NO: 4102616 - RNA, 70 nt, Human
ccugacacccaggccugagagacaggaguagcccucugcccgcuucugugcccagcccuggaugcaaagg

SEQ ID NO: 4102617 - RNA, 73 nt, Human
ccugacagagaaaaaucugccucugauggaaucauuaaguuaaccauccauuuguaccauuucuuuguacagg

SEQ ID NO: 4102618 - RNA, 103 nt, Human
ccugaccaaagccugcuuugccagugugaguggaguucuuggaauaaaacucuauguggcuccuuacucaucagcaacugaagcagagaugaagcuuuucagg

SEQ ID NO: 4102619 - RNA, 56 nt, Human
ccugacccuggcugccgcggucugggcucggccgaccguccggcugucggggcagg

SEQ ID NO: 4102620 - RNA, 73 nt, Human
ccugaccucuugccucaguccaaaccuggcuuccuugaucucagcuuuauuuguucugaagcaaguagggagg

SEQ ID NO: 4102621 - RNA, 111 nt, Human
ccugaccuucucccuggugccccuuuagccccugcagagacuucugccuuucccuaggauacaugguugcuggggguggcagagcuagaaccaggguggugggaaggcagg

SEQ ID NO: 4102622 - RNA, 62 nt, Human
ccugacuaaugagcccaggugacucauacacccggggccuggaugagucugacugggucagg

SEQ ID NO: 4102623 - RNA, 68 nt, Human
ccugacuagcugggacuacagacgcgugccaccacaccuggcuaauuuuuguauuuuuaguagacagg

SEQ ID NO: 4102624 - RNA, 59 nt, Human
cccauuuguccaaaguauaaaacuaggcauuaguuuuaaaauauaugagacagaguggg

SEQ ID NO: 4102625 - RNA, 56 nt, Human
cccauuuuggaacgaguagccaggcugucccugccaccccggaccccgaagugugg

SEQ ID NO: 4102626 - RNA, 76 nt, Human
ccccaaaugugccaacaguagucccaucgcaacauuaugugggcauuacaguucuacacauccuuuucuguugggg

SEQ ID NO: 4102627 - RNA, 63 nt, Human
ccccaaauuaugucacuuucaaggucagcgggcucauuuccuucugccuggacaaaugugggg

SEQ ID NO: 4102628 - RNA, 59 nt, Human
ccccaagcaugcaaucuauccuuaggaagacuuccuggaaauuaugcucaccuuugggg

SEQ ID NO: 4102629 - RNA, 77 nt, Human
ccccacagaauuuuccuuugauucccagaugucguaagagggacaucacuugagaaccaaugggacuugugaugggg

SEQ ID NO: 4102630 - RNA, 79 nt, Human
ccccacagauugagcuuuuucacuuuggaugggagaauagacucuuugaugacagaggaggcaagguuaaaauguaggg

SEQ ID NO: 4102631 - RNA, 92 nt, Human
ccccacauuccuugcaaauugcgaggcagggaagcugcaaaagccggggagccccgggcugggccgucgcccuccuugcucugcaaaagggg

SEQ ID NO: 4102632 - RNA, 56 nt, Human
ccccacccuccaggcccgcgaaucuuggaucuccggcagcaucuggagggaugggg

SEQ ID NO: 4102633 - RNA, 61 nt, Human
ccccaccugcggaaccagccagcugccccuggggccuuugcagcuggcccacagguguggg

SEQ ID NO: 4102634 - RNA, 76 nt, Human
ccccacggccagcgugcccuccguguucauagagcccaggaagaggugggcuggggcucugcgcuaggcggugggg

SEQ ID NO: 4102635 - RNA, 99 nt, Human
ccccagaaagacaauacugcaugaucucacuuauuugugaaaucuaaaaaaagucaaacuuauagaaacagaggucaggcauuuuuugcuuucuugggg

SEQ ID NO: 4102636 - RNA, 59 nt, Human
ccccagaaggggacagaggguagagauauccagaaggucuccaccagccucuccugggg

SEQ ID NO: 4102637 - RNA, 66 nt, Human
ccccagaauauuuguaauuacuguugaugauucauuuauuagcauuucaguacacauguugagggg

SEQ ID NO: 4102638 - RNA, 57 nt, Human
ccccagagaagguggagcuugugugggcaguggcacucagggaaggccuucuggagg

SEQ ID NO: 4102639 - RNA, 66 nt, Human
ccccagagccuagcacuuaggaacugccaucgaucauuuagccaggcccugcacuaggcccugggg

SEQ ID NO: 4102640 - RNA, 113 nt, Human
ccccagcaccuccagccacccugauucagggacaucgcagagauugguguuugacgcuacggcagcagaggcgcagacucuugaguguuggagggugucuggagggccugggg

SEQ ID NO: 4102641 - RNA, 108 nt, Human
ccccagcacucucccagugcaccccuccuccaccuucccaagcugccugaugggaccagccaaugaaagggugcagggacaggugugcagaacugggaggcucugggg

SEQ ID NO: 4102642 - RNA, 60 nt, Human
ccccaggacacauggaccaagucacugcggccguacuuggcccugaaucuguccuggagg

SEQ ID NO: 4102643 - RNA, 55 nt, Human
ccccaggcuaggaccgauuucccugugucuuggggaaauauuucugaccuguggg

SEQ ID NO: 4102644 - RNA, 78 nt, Human
ccccaggcugguaaggggccugcccggaggccgucuggaguuuccucguucucacuguggcucucgccagccugcggg

SEQ ID NO: 4102645 - RNA, 68 nt, Human
ccccagggaagcuuugcuuacuguccuaugucuauaccccuuggguugucucugagcuucucuugggg

SEQ ID NO: 4102646 - RNA, 66 nt, Human
ccccagugcuccugauguacccuugcccucuuauguaggcugggugaugauuugggaguggugggg

SEQ ID NO: 4102647 - RNA, 63 nt, Human
ccccagugucuucagaguaaaucuuuacaacugagaguuuguagcugaaggcaacuaaagcgg

SEQ ID NO: 4102648 - RNA, 104 nt, Human
ccccaucacgggauugucgacuucaucaaauccacaagaccccuuuucacugugaaguaauauagucacagguucuugggauuagaggaugaacaucucugggg

SEQ ID NO: 4102649 - RNA, 95 nt, Human
ccccaucgugacauccaguccaggcuuucaggacagcgagcccgguuuccaggcaggugcuugucgaaggccuggcuggcuguaccgacaggcgg

SEQ ID NO: 4102650 - RNA, 58 nt, Human
ccccaugauggcucugggaccuugggaucacagccccucucugggcccuccugugggg

SEQ ID NO: 4102651 - RNA, 61 nt, Human
ccccaugugaagaaacugaacggcuuuuaugcagguaaaagccaguucuuuuauauugggg

SEQ ID NO: 4102652 - RNA, 77 nt, Human
ccccauuucuuauuuucauggcuucugcucaguguacccaagauagucacugggagucaugaggaaggaggugccgg

SEQ ID NO: 4102653 - RNA, 60 nt, Human
ccauuuauugaugcuacuucuauagauacauuuuacugagguacagcaccagugaauagg

SEQ ID NO: 4102654 - RNA, 56 nt, Human
ccauuucacucuuccugaaggacccggcaggcggguggaggaggggugggaaaugg

SEQ ID NO: 4102655 - RNA, 79 nt, Human
ccauuuccaacuucugaccucaagaacugucaagaugacacaauuggcagugauuuguuucagcagcaauaggaaaugg

SEQ ID NO: 4102656 - RNA, 69 nt, Human
ccauuucucagaaaagcaagcuuucugguugauuaggaacaggaaaacaaaaugcuuuucuggaacagg

SEQ ID NO: 4102657 - RNA, 61 nt, Human
ccauuucuucauguauugcauuguguccuuaggaaggagaauguaauuggcauguuagugg

SEQ ID NO: 4102658 - RNA, 128 nt, Human
ccauuucuugaccaccaggacuccaacuguggcaggggucuuuaggaacgucgggagugaguacaacacagcccuuguacccaggagcuuacaauggaguuggagacaugagucacagauagaaaugg

SEQ ID NO: 4102659 - RNA, 94 nt, Human
ccauuucuuugacuaugcaguugucaugguuucuagacuuuuuagcacacaucuuuagaaacucacguuaucauugccucuuguuaaauuaugg

SEQ ID NO: 4102660 - RNA, 79 nt, Human
ccauuucuuuuggcacagcuucccagacuuacaagaugucuugaagugacugaauggaguuaguguucggcaggacugg

SEQ ID NO: 4102661 - RNA, 65 nt, Human
ccauuugccauuggcaggccucuuguauuagucccuuauaggaacaauggcaugcuagcaaaugg

SEQ ID NO: 4102662 - RNA, 59 nt, Human
ccauuuggugggucuaguugggauuacacucuucagcucucuuccagauccacuugagg

SEQ ID NO: 4102663 - RNA, 61 nt, Human
ccauuugucauuucucaauuacuggucacaacaagaggccacuggagaaaguggcaggugg

SEQ ID NO: 4102664 - RNA, 55 nt, Human
ccauuuguuuucgcuaccauggcagaguugaacaacuguaguggaaaccuuaugg

SEQ ID NO: 4102665 - RNA, 66 nt, Human
ccauuuugagcuuagggaaguuacacucugagaagcccaggguaaaacugagaccagcuaaagugg

SEQ ID NO: 4102666 - RNA, 92 nt, Human
cccaaaaugguguguugaaguccuagaacuccugguacccgugaaggggacuuuauuuggaaauagggcuuuguaaauaucauuaagauggg

SEQ ID NO: 4102667 - RNA, 91 nt, Human
cccaaaccaugcuucacuuucaccaucugaguagagagaaguacaagccucugugucccucugcucagaggguggggcaccuuuguuuggg

SEQ ID NO: 4102668 - RNA, 58 nt, Human
cccaaagcaggcuugucaaauugccauggcuuaggucaaagcaaaagacuucuuuggg

SEQ ID NO: 4102669 - RNA, 79 nt, Human
cccaaaguaaacagggcugggauaaccgaggcugacagcagagaguuuuccuuggcugugcugcccuuugcccuuuggg

SEQ ID NO: 4102670 - RNA, 63 nt, Human
cccaaauacuaaauaugaagaauacgguguuggugcaucacuuauucauaaguuuagugaggg

SEQ ID NO: 4102671 - RNA, 63 nt, Human
cccaaauugcauuuuaaagguagaugccucucaugagacauuugcaucagugagcgauguggg

SEQ ID NO: 4102672 - RNA, 56 nt, Human
cccaacuuugagugaaguguaggguauuuauuuaggcuuccuaucuuagagcuggg

SEQ ID NO: 4102673 - RNA, 56 nt, Human
cccaagaucuaggacagaaagacucaugcaguaacuccugccuuacagaucugggg

SEQ ID NO: 4102674 - RNA, 58 nt, Human
cccaagaucuuucgugcacuaaaugucugguguuuguaauacaaugaacaauuuuggg

SEQ ID NO: 4102675 - RNA, 92 nt, Human
cccaagcaguuugucagggacacagguaucucaaaugauucucugcgguugagaaucacugccuuagguguuacugguagcgcgugcaaggg

SEQ ID NO: 4102676 - RNA, 89 nt, Human
cccaagccaacaucuucccucccugggaccucugccugcaagaagaagcgcguugcgaggugagguuugggaggugucagcugucuggg

SEQ ID NO: 4102677 - RNA, 83 nt, Human
cccaagcuuccugcguuaguuuggggaugcaguuaccugcugaggaaaaugccucccaaacagcacaagaaaaggaagguggg

SEQ ID NO: 4102678 - RNA, 59 nt, Human
cccaaggaagggagugagaccuccacucccagugggggaccuggccacccauccuuggg

SEQ ID NO: 4102679 - RNA, 59 nt, Human
cccaaggaauaggaucccaggaauuuaccucauguuuauaauccuauaaucuucuuggg

SEQ ID NO: 4102680 - RNA, 59 nt, Human
cccaaggaguccugaagcuguuccuagauuuuuuucucccuucucuggauuccguuggg

SEQ ID NO: 4102681 - RNA, 58 nt, Human
cccaaucagaacgcucgaucuucggcucucguccaaugaacgcgcguauuggggaggg

SEQ ID NO: 4102682 - RNA, 98 nt, Human
cccaaucauacuggguguuuaaaccauuuccugacaaucuuuaaauuugcaaauuagaaaugucaaugcuggucuugaaugagcccgauaaggauggg

SEQ ID NO: 4102683 - RNA, 67 nt, Human
cccacacacuggcugcugccaaaagcuccgucuucagggagccgcguggggauggccgggugcuggg

SEQ ID NO: 4102684 - RNA, 121 nt, Human
cccacaccaugucccugcccagccuucucuacuccugaugcaugucccccauggaaaggauguucugugcacgcaggaggcaaugagggagggugaggcagcccagaacccaugguguggg

SEQ ID NO: 4102685 - RNA, 55 nt, Human
cccacagaaucugugacuccaagaaaacguuucuuuggucccacuagauuugggg

SEQ ID NO: 4102686 - RNA, 80 nt, Human
cccacagccugacuugaugaaugaccugggugguggguuuaugagucaacguaggggauuuauggggaagaaggcguggg

SEQ ID NO: 4102687 - RNA, 59 nt, Human
cccacaggcuagggguagggcaguuggaauugauccaugccuucuagcuagacuguggg

SEQ ID NO: 4102688 - RNA, 76 nt, Human
cccacagguguccauccagggucaccaugacacagcgugcacagaagagcuuuggaaugacagagaugccaguggg

SEQ ID NO: 4102689 - RNA, 59 nt, Human
cccacagucuagcuagaaggcauggaucaauuccaacugcccuaccccuagccuguggg

SEQ ID NO: 4102690 - RNA, 59 nt, Human
cccacauagcagaggacugagcagagaagucauuauucugucaggaacuggugucuggg

SEQ ID NO: 4102691 - RNA, 73 nt, Human
cccacaucuguaaaguuaggcauuuggggugcuccaucgugagccuccuuccugcucuaacauucagcguggg

SEQ ID NO: 4102692 - RNA, 129 nt, Human
cccaccaccaaaguccuccucuuccucccucuccaucugccucuugacagaucguggcugugccgugacucagccgucucauacaucuucaggucuggaggggagguuuggaugacaucuccgguuggg

SEQ ID NO: 4102693 - RNA, 75 nt, Human
cccaccagcucugucccuaguagagguggaaagaggaggcccugccauccuugaggaagggcaagagccuggggg

SEQ ID NO: 4102694 - RNA, 90 nt, Human
cccacccaguaggcgaugcuucagggcagacuuugggccuagcaggcagcugggucagaaucucccugugcagggcaaacuggucagggg

SEQ ID NO: 4102695 - RNA, 64 nt, Human
cccacccccugcagcaugacacugccauccugcucaucagguacugcagcugcaggaggguggg

SEQ ID NO: 4102696 - RNA, 71 nt, Human
cccaccccucucgcgugugccuuuccgcuccacuguucgccggugagcuagguggcgcgagagcggagggg

SEQ ID NO: 4102697 - RNA, 70 nt, Human
cccaccgucauuccagaggggauucccggccgccgcuggggccgcggauuuucccgcuggcuacguaggg

SEQ ID NO: 4102698 - RNA, 64 nt, Human
cccaccucacugucuguacuagcugauuagguccaaaucagccaauuacagaacaugauuuggg

SEQ ID NO: 4102699 - RNA, 96 nt, Human
cccaccucccugccucucuguuuggugggagugauuuugaugcacuaaaaaacaaggaggccucuauccagagagacagagucggggcaguguggg

SEQ ID NO: 4102700 - RNA, 64 nt, Human
ccugaagaaaauuccacgagaacucagugccucugggguucaggucuucuggauuuccuuuagg

SEQ ID NO: 4102701 - RNA, 77 nt, Human
ccugaaguauuuucugagauggguggggagcucaggaggaacgggccucccuccaaccuuuucagacaucccucagg

SEQ ID NO: 4102702 - RNA, 67 nt, Human
ccugaauacauuugaaaguucuucugacacuacugauccgguguguuuacugcuuuguguacuuagg

SEQ ID NO: 4102703 - RNA, 58 nt, Human
ccugaaucugccucucuacugcugcugcuugaaauaaguacaaagaaugagguucagg

SEQ ID NO: 4102704 - RNA, 58 nt, Human
ccugaauuguccaauaucagaaagcccuaacaggauguuuugacauauacaguucagg

SEQ ID NO: 4102705 - RNA, 59 nt, Human
ccugaauuucaguuucccauuaagucuguuuguuugaucccuggaaauugaaauguagg

SEQ ID NO: 4102706 - RNA, 63 nt, Human
ccugacaaccagcacugcuggggccugcgugcuccaggcaggcauccaaggcugggcugcggg

SEQ ID NO: 4102707 - RNA, 128 nt, Human
ccugacaauagcuggcuuuucuuccagcuccgggagcaucuuuucuggcagguggaaauguaauaucacguggucagaaggaagggcuccuacuuggauggugagacuaggaucuaguaauugccagg

SEQ ID NO: 4102708 - RNA, 128 nt, Human
ccugacacaugauaaauugcuuuauaguuguugauuaaguguugguaauuacaaugaucauaauuuauaguauucuugugaaagcuaagcaaaugagcaacuaacuguaauguaaacaauguagaagg

SEQ ID NO: 4102709 - RNA, 62 nt, Human
ccugacagccaucugcaagguuggauacugacgcuuuccugacuguggcuaaugguguuagg

SEQ ID NO: 4102710 - RNA, 74 nt, Human
ccugacccuuagcugaguccuuuggaaaguagaaacauuauguacauucaaaauuagguuaguugugggugagg

SEQ ID NO: 4102711 - RNA, 57 nt, Human
ccugaccuguuacauauauuaucuaauuuaauauucacaguaaguguagcagguagg

SEQ ID NO: 4102712 - RNA, 84 nt, Human
ccugacucucugggagcuccuggcagugacagaggcacagauagacagugucacuucauugggaccagggcugugaugggcagg

SEQ ID NO: 4102713 - RNA, 75 nt, Human
ccugacuggccuuuuugugcauggcccagugguaagagacagcccuugcccuggaaccaucuacaguccagcagg

SEQ ID NO: 4102714 - RNA, 83 nt, Human
ccugagaagggcccugagaggugcugguggcugcagaugccugggugcccaggcugcgcccacuugcccuuugaggccucagg

SEQ ID NO: 4102715 - RNA, 84 nt, Human
ccugagaaggggacgggucacaggcuugucagcaugaggcucagcggggcuuagcccacucuggagccuguuccccuucccagg

SEQ ID NO: 4102716 - RNA, 69 nt, Human
ccugagacaugaaccaggcucccaagugaagcuccaaauuucaaagcaaagcaugggucaguuauuagg

SEQ ID NO: 4102717 - RNA, 73 nt, Human
ccugagaccuccauucucccugccaaagcugccuccgccuuuggggguagaggggugguagaaggguuuuagg

SEQ ID NO: 4102718 - RNA, 65 nt, Human
ccugauggaggagagaaauguuuucugugggaccuacaauguucgcauucucucugacacguagg

SEQ ID NO: 4102719 - RNA, 65 nt, Human
ccugauucauuuguggaagugauuguggagcuaugagcaccagagccuucccugaauaauucagg

SEQ ID NO: 4102720 - RNA, 63 nt, Human
ccugauuccugcuuucuucgucaucuaauaagcccagauuucuagaaggagagcugaguuagg

SEQ ID NO: 4102721 - RNA, 75 nt, Human
ccugcaaacagcuggaggucugugagcacugcguggagggagacagagcgcgcaaucucuccagcugcauguggg

SEQ ID NO: 4102722 - RNA, 70 nt, Human
ccugcaaaggggaaguagcaccagagguggguugccauucccaccccucaucaguugcuuccuacacagg

SEQ ID NO: 4102723 - RNA, 80 nt, Human
ccugcacaugcucacacaagucgaaucuguaauaggacuuaaaacucuccugucccagcacuuugggagucugaggcagg

SEQ ID NO: 4102724 - RNA, 67 nt, Human
ccugcaccucugugcuuggaacugaaugugcccucaggaagcaacugucuaagguggagaggugggg

SEQ ID NO: 4102725 - RNA, 72 nt, Human
ccugcacuguggcugcagccuugguccugcccccagacccacacccaggauggggucugcagccuggugagg

SEQ ID NO: 4102726 - RNA, 68 nt, Human
ccugcagaggccuuucuacagugauaugccuguaagcuauccuggggguaggagggcacuucugcagg

SEQ ID NO: 4102727 - RNA, 57 nt, Human
ccugcagaugugggacagcuguuuguacuuagcaguuaagugucccugcaaugcagg

SEQ ID NO: 4102728 - RNA, 69 nt, Human
ccugcaggcugcaggccaguuccaguuaaagcccuuuacuagguaguggccuggucugcugcuuccagg

SEQ ID NO: 4102729 - RNA, 79 nt, Human
ccugcaguguaagugcuuaugugcaguggauagucauuauaaaaucugaggguugugcaagcacuguggcacucgcagg

SEQ ID NO: 4102730 - RNA, 72 nt, Human
ccugcaucacaggagagcugaugcuggugaucuguugaccacauuuuguaaaagcaucuugugucuugcagg

SEQ ID NO: 4102731 - RNA, 70 nt, Human
ccugcauggcugcaagaaccucuggaucacuaagaauuucauugaguccaggcauuccagccauuccagg

SEQ ID NO: 4102732 - RNA, 90 nt, Human
ccugccaaggauauuauagacagagucuucuguuuuugugggcugccaucucagaagcuuugucuagucuugauauauugccugguuagg

SEQ ID NO: 4102733 - RNA, 57 nt, Human
ccugccacugcugaauaagcaguucacaacacaguuugcaucuucaagguuggcagg

SEQ ID NO: 4102734 - RNA, 58 nt, Human
ccugcccagcuucaccucaggcugcuuccaacagugccaagugaggucccuuggcagg

SEQ ID NO: 4102735 - RNA, 61 nt, Human
ccugcccagcuucuuacuuuuaaaauauauuuuuuuaauucugcaggaaguggggugaagg

SEQ ID NO: 4102736 - RNA, 56 nt, Human
ccugcccaggcccuaaguuaggguucccauccauauaacaaagacuucuggucagg

SEQ ID NO: 4102737 - RNA, 56 nt, Human
ccugcccuaguuaaggccuuaguugggggcugccagcugccagggacugggcaugg

SEQ ID NO: 4102738 - RNA, 64 nt, Human
ccugcccucggccugcaggcuaaggcucugagccuguggccuggaaggggcugcucugggcagg

SEQ ID NO: 4102739 - RNA, 68 nt, Human
ccugcccugcucacugucgguauuccaauucaucuacacugauaacuuuggcgggcauggagggcagg

SEQ ID NO: 4102740 - RNA, 74 nt, Human
ccugccucacaagcagaagguggggucuuaucuuagcacuugcgcuaggucccagcaucuucugagcaggcagg

SEQ ID NO: 4102741 - RNA, 70 nt, Human
ccugccucgcaguuuccauccucgcagagccuggauaggaugccaggauauaagagugcgauuuggcagg

SEQ ID NO: 4102742 - RNA, 56 nt, Human
ccugccucuauaggaguccaccagaagacauauccuucugugccccuagaggcagg

SEQ ID NO: 4102743 - RNA, 100 nt, Human
ccugccucugccaggugggcucugagagugggugauucugaacuuccaagggccagggacacagcaucgucucgcugucagagcugcucagagagggagg

SEQ ID NO: 4102744 - RNA, 67 nt, Human
ccugccugagucuguacguuagccauaauugcaucacaagguuauauggcucauaaaacagagcagg

SEQ ID NO: 4102745 - RNA, 74 nt, Human
ccugccugucuuucuaucucuagauuuauucagucauuucugcucuaaguucugaagauaggaaaugguguagg

SEQ ID NO: 4102746 - RNA, 78 nt, Human
ccugccuguuccuggugcugcagguguaucauccuuaaauccaaaccacaugggcagagaguagaggcaacggguagg

SEQ ID NO: 4102747 - RNA, 81 nt, Human
ccugcgacagagagcuccgugccuggcugccagcaguaucugagcugauuggcagaaggaggcugggguuugcuguucagg

SEQ ID NO: 4102748 - RNA, 76 nt, Human
ccugcgcgggcccuggggauguggacgcgggggcucuucccugccgccuacgcacuccggggcaugcccgcgcggg

SEQ ID NO: 4102749 - RNA, 62 nt, Human
ccugcgcuuccuggccucugagcacgcccugcugcugcuguucagcaaugggauggugcagg

SEQ ID NO: 4102750 - RNA, 57 nt, Human
ccugcgucuggccuugcuccaaguacgugaugcuugagcagcuaaaggugaugcggg

SEQ ID NO: 4102751 - RNA, 85 nt, Human
ccugcgugugcacuaaagucaucauuucuuuucaaauccaccaaguguuuugaauaaauaauggucaacuuggcugucacuuagg

SEQ ID NO: 4102752 - RNA, 74 nt, Human
ccugcuaauugugucccuggagcuucugugcggacugaggacugcacaguccuacagagaucagagugagaagg

SEQ ID NO: 4102753 - RNA, 73 nt, Human
ccugcuagagauugcuucugaacucagcauguggccaauuauggccaaugagauggaagagucuggaagcagg

SEQ ID NO: 4102754 - RNA, 61 nt, Human
ccugcucccagguguggccgggccagcaggggccugccugccagacgcaccagggggccgg

SEQ ID NO: 4102755 - RNA, 91 nt, Human
ccugcucccgccccagcagcacacugugguuuguacggcacuguggccacguccaaaccacacugugguguuagagcgagggugggggagg

SEQ ID NO: 4102756 - RNA, 57 nt, Human
ccugcuccucugagguagccacacacugagaucugggucaccacuucagaggagagg

SEQ ID NO: 4102757 - RNA, 63 nt, Human
ccugcuccugcuucccuccccucuggucuggcugagaaaaagguccagaguuggcagagcagg

SEQ ID NO: 4102758 - RNA, 77 nt, Human
ccugcuccuguaagucuggcuuauagcuuucuuucauaacugaaggaaaugcuaaauuucagcuacagguuaguagg

SEQ ID NO: 4102759 - RNA, 68 nt, Human
ccugcucugauagcaaaggacaauagucagugauuuucacacugacucugaugguugauagagcuagg

SEQ ID NO: 4102760 - RNA, 79 nt, Human
ccugcucuggggcaggaggcagaggaugcccagugagcauucagcggaccccggguugcccugccucaggccagcacgg

SEQ ID NO: 4102761 - RNA, 78 nt, Human
ccugcugcagcuuggcacucggggacccuggaugcuuucaugaaggacaggaaagccgagugccauaggaggcauggg

SEQ ID NO: 4102762 - RNA, 68 nt, Human
ccugcugcucucccuuucuauaaggcaagugugagaacaggcuugcaggcaggggaugagcagccugg

SEQ ID NO: 4102763 - RNA, 63 nt, Human
ccugcuggacguggaggaggggcugagccuugggcugcauucucugcacccaccucuaguagg

SEQ ID NO: 4102764 - RNA, 109 nt, Human
ccugcuggacugggaggcacggcucccuuugauuccuggcacugcagugguugauugguaaguggauauugagugcacaggaucguacaccaucccaauguccaccagg

SEQ ID NO: 4102765 - RNA, 83 nt, Human
ccugcuggaggcggagccgucuggcugaccccagugccugggcucagccaugaccuccaccugccucuccuuguaaugcucgg

SEQ ID NO: 4102766 - RNA, 61 nt, Human
ccugcuggagguuggagcaugcagauacagaucuccaguucauggcccucucaaaggcagg

SEQ ID NO: 4102767 - RNA, 91 nt, Human
ccugcuguguaccaggcaccaggcugggcuccggagauaaagugauggauuuuauaccgacucugccugugagugcuuucauuuagcaugg

SEQ ID NO: 4102768 - RNA, 62 nt, Human
ccugcuucaccaccagaagggcaccaacaggagugauucagagcaugguggcuggagucagg

SEQ ID NO: 4102769 - RNA, 73 nt, Human
ccugcuucugucucuagggaaagguuuugcccugauccaugacagagacuauuaccuaaaagauacaaguggg

SEQ ID NO: 4102770 - RNA, 56 nt, Human
ccugcuucuuggcugccccugccggaaacacgcagggcccaagccuggacagcagg

SEQ ID NO: 4102771 - RNA, 61 nt, Human
ccugcuuggcugucauaagguccuggggaacucccaguacugaucccuggcagcccacagg

SEQ ID NO: 4102772 - RNA, 91 nt, Human
ccugcuuuaaagcauaaacaagaauuauuucuaguuaacagaauuacuguugauaugcaaaugguucugcauaaauggcuguaagugcagg

SEQ ID NO: 4102773 - RNA, 72 nt, Human
ccugcuuuagucagauuuagauguagcaagugauuaucacuuauuauugcuauuaaucugacacaaaggagg

SEQ ID NO: 4102774 - RNA, 83 nt, Human
ccugcuuugcucaggggucucccccauuguagggcucacagccuggcccccagagggguguagagaucacugagccaaccagg

SEQ ID NO: 4102775 - RNA, 77 nt, Human
ccugcuuuguccuuaagcggugucuacuccagggagggcucaacccacucuggacacuggcauggggucagagcagg

SEQ ID NO: 4102776 - RNA, 92 nt, Human
ccuacucugaagguuuguugguuugggucuccaaaagucaguauaaguuguuguuaaaugaggccagacugaaaccaacaccucauauuugg

SEQ ID NO: 4102777 - RNA, 58 nt, Human
ccuacugaaaaaucuccucuuguaacuuguuaguaacagcuguugaaauuucaguggg

SEQ ID NO: 4102778 - RNA, 60 nt, Human
ccuacugucuuaguuuggguuuccucucucccaagagcagaaccugagugaagacuuggg

SEQ ID NO: 4102779 - RNA, 73 nt, Human
ccuacuugauguuuaugcaaacaugugaguuaggcgucaguaacaacucaagguaugcaugaggucaccgagg

SEQ ID NO: 4102780 - RNA, 80 nt, Human
ccuacuugcaucauuuauagacugugaaauuuaggcaaguuauuuaacuucucugggucucaguuuguacauguaaaagg

SEQ ID NO: 4102781 - RNA, 58 nt, Human
ccuagacaugagaaacccaccagagucugagaaacucacgugaccagcucaugucagg

SEQ ID NO: 4102782 - RNA, 62 nt, Human
ccuagaccagcugguccuguccugggucaucucguuguccccaguuucuagcugguauaagg

SEQ ID NO: 4102783 - RNA, 56 nt, Human
ccuagacuagaggcagggagcccuauauucuaguugucauccugccacuggcuagg

SEQ ID NO: 4102784 - RNA, 58 nt, Human
ccuagauuaauuuucugaccuuuacaacugcaaggucucugcagaaaguaagucaggg

SEQ ID NO: 4102785 - RNA, 67 nt, Human
ccuagauuauaucaaaugcaagcacagccuucaaucagcucaagcaaguguuugguguaaauaaagg

SEQ ID NO: 4102786 - RNA, 60 nt, Human
ccuagcagcaccuuucuaaucugacgucaauagggugaguugaggauagguguuucuggg

SEQ ID NO: 4102787 - RNA, 74 nt, Human
ccuagcauuuacauccaagaguaccagaaucuaguuccaaauacuggagggccaucuugggugugauggucagg

SEQ ID NO: 4102788 - RNA, 64 nt, Human
ccuaggaaaagcaguacagcgugguaguuagaccagcacagcuucugggaucaggcugccuagg

SEQ ID NO: 4102789 - RNA, 59 nt, Human
ccuaggaagauucaguagcuggcggcaccaugacagcuggcagcuggaaucaucugagg

SEQ ID NO: 4102790 - RNA, 130 nt, Human
ccuaggauuguuguaaaaauuaaguuuauauaauauaucaguaucuauguauuuguguagguauccacacaucuagauaaauagagagguauagauagguuaguguuuagcuuaacguaacaguucaagg

SEQ ID NO: 4102791 - RNA, 75 nt, Human
ccuaggauuuuagaguaccuaaguguuggguuuucucaauauuagcaaauggguagacugauagcaaagacuagg

SEQ ID NO: 4102792 - RNA, 100 nt, Human
ccuaggcagccagauucugaaugccugcagagccagagaaauaauguuucucugggcacauuuuccaggacauuuuuagaaugccauaugacugccaagg

SEQ ID NO: 4102793 - RNA, 73 nt, Human
ccuaggcagcgcuuggcugugcuuugcccaguuucccuccaggcuuuuucuagguagccaaguccugccuggg

SEQ ID NO: 4102794 - RNA, 56 nt, Human
ccuagggauguguuagccagaugggccugggaggucucggguuggcuuaucccagg

SEQ ID NO: 4102795 - RNA, 61 nt, Human
ccuaggggaggggaucaugugcugcacaaaccauguguguauauuguucugucucuucagg

SEQ ID NO: 4102796 - RNA, 57 nt, Human
ccuaggggccucuaggcucagcacaaaaaguaccgcucaguccuguuagccuuuggg

SEQ ID NO: 4102797 - RNA, 61 nt, Human
ccuagucaggugcaccugcauucagcagcuccucauuccagcaugcaucugcauugacagg

SEQ ID NO: 4102798 - RNA, 65 nt, Human
ccuagugacagcaugaucaaggagcccagucauuugggaggccccaucauugcugccagccuggg

SEQ ID NO: 4102799 - RNA, 111 nt, Human
ccuaguuuuaauucgaggggaaaaggaaacguuaaaccauauguaauuaugaggucaauugcccugaguuuggacguuuuuauaauacuaaugaagguuaaagaggcuggg

SEQ ID NO: 4102800 - RNA, 57 nt, Human
ccuauagugcuaacagugcugcuauuaggaaaauggcaguaaaggugacaauauagg

SEQ ID NO: 4102801 - RNA, 74 nt, Human
ccuauaugcauauggcuucauuuaauucuugcaacagcucuugauaggguuagauaagguuauggauaucuagg

SEQ ID NO: 4102802 - RNA, 75 nt, Human
ccuaucaugaguugaaaagcaauuuguccaauauuucaacugcuggggagaauucuuuauuagcuuuuggauagg

SEQ ID NO: 4102803 - RNA, 81 nt, Human
ccuaucugugggauugcaauggucuuuuucugaaucuaggcaaugcuaccuucugaaauucgacuauccaauccagcuagg

SEQ ID NO: 4102804 - RNA, 127 nt, Human
ccuaugcuaugccuccguuucucuacuaagggcagaauagagaagauggcuugggucaucagcccuuucuacuuuccuauuugaggcuaugagaggagaaaaguacaggcauaccagagcaauuagg

SEQ ID NO: 4102805 - RNA, 64 nt, Human
ccuauggaguggcaugguagaguggagccuauaggguggcacacugccacauucacucuucagg

SEQ ID NO: 4102806 - RNA, 87 nt, Human
ccuauucugugaguccagucucuuuccaagcccauguaucuacauauugcaggaacauagagacugcccacucagggcaacaaaagg

SEQ ID NO: 4102807 - RNA, 81 nt, Human
ccucaaacauuaugagcccacuggugaauccccagcuccaccucuguacccccauucaccagugggcugauaguccccagg

SEQ ID NO: 4102808 - RNA, 63 nt, Human
ccuuauuuggaaauagguugcuguagacuuaauuagcuaaaguacagccacauccaaguaggg

SEQ ID NO: 4102809 - RNA, 70 nt, Human
ccuucacaccaucuuuaccagggggauacuacuauuaucuguuuuuauugguggagaaaugcugagaagg

SEQ ID NO: 4102810 - RNA, 63 nt, Human
ccuucacucucagcauaaugaaugugacacugccuacauccauccugugggagaguuaaaagg

SEQ ID NO: 4102811 - RNA, 72 nt, Human
ccuucaggcauggaacauuuauuaacugaaaaugcugaagcaaaugccaggaaauuuauguucuacuuaagg

SEQ ID NO: 4102812 - RNA, 84 nt, Human
ccuucaggccaggguggacuagagccccgagaauugugccugagugucugcaagcaggauuuggccuuucgcaugguaugaugg

SEQ ID NO: 4102813 - RNA, 109 nt, Human
ccuucauguccaaccuacuuugugacauucuguuuauuucagaacaggguuuacucaaaaugcccugugccagagaggcaggagucaccucugcagguaucacaugugg

SEQ ID NO: 4102814 - RNA, 58 nt, Human
ccuuccacauggugauuugauuauaagccaaaggcaucccuucuccaguguggugagg

SEQ ID NO: 4102815 - RNA, 72 nt, Human
ccuuccacuguuugauuucucucaguuagggagaugagaugacuuuacugaaauaaugaaacacauggaugg

SEQ ID NO: 4102816 - RNA, 60 nt, Human
ccuuccagauguaagagcugauaguaagggauugcacaucauucuccaaucuggagcagg

SEQ ID NO: 4102817 - RNA, 71 nt, Human
ccuuccagcuucuagggaaggcagucacacaugugacucuugggaagugugacugugcuguggagggaggg

SEQ ID NO: 4102818 - RNA, 56 nt, Human
ccuuccagggcagggugcgcaugggcagccccuccuuccugucuuguccuggaggg

SEQ ID NO: 4102819 - RNA, 55 nt, Human
ccuuccauuuucuuugcaggguagauuggacucuacuccucaguuccaugggagg

SEQ ID NO: 4102820 - RNA, 63 nt, Human
ccuuccccacugucugggacauguggucugacaaagugccugaguugugggcagaggacaagg

SEQ ID NO: 4102821 - RNA, 67 nt, Human
ccuucccucuuguugcugugagauaccuccauuggcuuucagaaugauuucagcgagcaggggcugg

SEQ ID NO: 4102822 - RNA, 55 nt, Human
ccuucccugaucacgugucaggaguuuuguaaccccaaggacauuucaggguugg

SEQ ID NO: 4102823 - RNA, 103 nt, Human
ccuucccugccgggccaccuguguuccugccuggcucugguccugggcccuccccgcugccucaugcugagccacaggcagugcacuggcucccaggagaagg

SEQ ID NO: 4102824 - RNA, 74 nt, Human
ccuuccgaccugccaugcaguuagucccucacuaguaguuugugcuaaugaguacuuccugaugagcugggagg

SEQ ID NO: 4102825 - RNA, 60 nt, Human
ccuuccuauaaagaggagucagggucaucugagugaaagaggcaggcuuuauauggaggg

SEQ ID NO: 4102826 - RNA, 111 nt, Human
ccuuccuaugccagcugauccccuaggcccuaggcuuccaucauaucacugagcaaagcacagggcaguuugagugggggucagaggccuggggggucuuuggcuggaagg

SEQ ID NO: 4102827 - RNA, 85 nt, Human
ccuuccuccaagcucuccagcaauauguccuugcucccugcauaagcugucagagcagacaauugccuggauggaugauggaugg

SEQ ID NO: 4102828 - RNA, 72 nt, Human
ccuuccuggagucacaucagagaggugggagcugcccacccuggguucugauguggaagcucccagggaagg

SEQ ID NO: 4102829 - RNA, 75 nt, Human
ccuuccuuaagucaucccauaacagugcuggacuaccaaaguccaagccaccacacagggaugacauaagugagg

SEQ ID NO: 4102830 - RNA, 60 nt, Human
ccuuccuuucucuuuugcguuugcaucaauucccagagaagaauguuuaagagaaaaagg

SEQ ID NO: 4102831 - RNA, 57 nt, Human
ccuucgccuauggccgaucagucuugucugucugcgagcugcccagaguagggaagg

SEQ ID NO: 4102832 - RNA, 60 nt, Human
ccuucuaaguagguggaggaaccuucuauuuguccguucuacccacacugcucuagaagg

SEQ ID NO: 4102833 - RNA, 61 nt, Human
ccuucuagagauguucuucuucagguggagccucaccuuuggaaauaaacacucugccugg

SEQ ID NO: 4102834 - RNA, 63 nt, Human
ccuucucaagcuacuaccuuggaucugggacuuacuauugaucaugguccuagauugauuagg

SEQ ID NO: 4102835 - RNA, 57 nt, Human
ccuucucccucugagaggaaccuggagaggcccggguucugcugagguaggagaggg

SEQ ID NO: 4102836 - RNA, 88 nt, Human
ccuucuccucagauuccucuauagccccuggccuguccauuuuguggcuccuuaacuaccaggucagagguagaugagaugaagaagg

SEQ ID NO: 4102837 - RNA, 98 nt, Human
ccuucuccuuucucaguccuuccagccccuccugagccaagccuuuuuaccauggcuagcuucugaggggcugggcaauacuggguggggaggcaagg

SEQ ID NO: 4102838 - RNA, 64 nt, Human
ccuucucuucuguucugugacucccuggaaggcccacaguucacagcaaaguggggaccaaagg

SEQ ID NO: 4102839 - RNA, 56 nt, Human
ccuucuggaagcucuaagggagaaucuguuuccuuccacuuuccagcuucuaaagg

SEQ ID NO: 4102840 - RNA, 59 nt, Human
ccuucuggauggguuccgugggcaaauggcauucuggagcacaaaggacccaccggcgg

SEQ ID NO: 4102841 - RNA, 85 nt, Human
ccuucuguucauucauguagcggucuagggcuugcaccucaaagauguggcugcagucuuccagcugcacaaagcgggcaucagg

SEQ ID NO: 4102842 - RNA, 91 nt, Human
ccuucuuauccuaccuauagguacaauuacaagaccuaaacuaauccauuaugguucuucucaagagugcuguagguggugacuauugagg

SEQ ID NO: 4102843 - RNA, 55 nt, Human
ccuucuuuagaaggcugaaagcuuugccucuucccagucuucccccagaagaggg

SEQ ID NO: 4102844 - RNA, 69 nt, Human
ccuugaagagaagaugagggacaacaauaaccuuuguuacugacuucuauuccuguccucucuuucagg

SEQ ID NO: 4102845 - RNA, 73 nt, Human
ccuugaagagcaccauucaauagccaggauuaauuaaguucuaaguucugcuaugaaaaaagugcugaagagg

SEQ ID NO: 4102846 - RNA, 95 nt, Human
ccuugacuccaggcuuggucuugcagcucgcuuugacuaacugacagaaguggcagggugccaguugcgagucuaggcuuuaaaagguuucaagg

SEQ ID NO: 4102847 - RNA, 97 nt, Human
ccuugaugagucuguaagaucuucucuuuaguagaaacacuauagacccaauauuuagcuggcucuugcuuacgaagguuaaacagauuauacaggg

SEQ ID NO: 4102848 - RNA, 62 nt, Human
ccuugaugcaaggguugccuuuccagccaggcugucuugccccgguaggcaauccugcaagg

SEQ ID NO: 4102849 - RNA, 87 nt, Human
ccuugcacauucuccagguaaccagagcaagagagcaacaggcuuacccuuaccuaggcugccuccugcugggcuggagagcagagg

SEQ ID NO: 4102850 - RNA, 55 nt, Human
ccuugcaugagugugccccuuuuauauguagcaugagggaagugcgccaucaggg

SEQ ID NO: 4102851 - RNA, 129 nt, Human
ccuugcccaguguuucuauaaaauaagggccuuuugcaucugauuuaaguaggaagcugauuccugagccccucagaucugcugaaucagauagcuaagggggcccuggaaucugcauuuuagcaagcg

SEQ ID NO: 4102852 - RNA, 61 nt, Human
ccuccacgccaggcugggguuagauccuaguuccccaaaauagccccagcugcgucugagg

SEQ ID NO: 4102853 - RNA, 76 nt, Human
ccuccacuagguuucagaggugccgggaagucugagccuucgcccuccugcucucccuccauguccaccuaggagg

SEQ ID NO: 4102854 - RNA, 59 nt, Human
ccuccaggaacuugagagacaccaccuaugauugagugugucugugagauccuuagagg

SEQ ID NO: 4102855 - RNA, 75 nt, Human
ccuccauauuagucauucugcucagagucaacauuucauuugauugcuggcaucagugacaauaucuauuggugg

SEQ ID NO: 4102856 - RNA, 59 nt, Human
ccuccaucuucucagucucuuggaucuaccccaaggugucaaacuagaagauguguagg

SEQ ID NO: 4102857 - RNA, 73 nt, Human
ccuccauucucccaggcucagacuggcuuguuuggacuccagcauccacagccucagccugcagagaaauagg

SEQ ID NO: 4102858 - RNA, 64 nt, Human
ccuccauuuguguccgucccaguucugugcugcuacagcuggaggcaguuggggcagaaggagg

SEQ ID NO: 4102859 - RNA, 69 nt, Human
ccucccaaaauucaugucaaaauccuaacccccaaggugaugguauuaggagguggagccuuugggagg

SEQ ID NO: 4102860 - RNA, 82 nt, Human
ccucccaaagugcugagaugacaggugugagccacuacacugggucccauuuucaugucauuccauuucagauucaaggagg

SEQ ID NO: 4102861 - RNA, 73 nt, Human
ccucccaaguacagauuccuccacugccagccuuaggcgguuagggugugaucuuacgaaaagaauuggcagg

SEQ ID NO: 4102862 - RNA, 90 nt, Human
ccucccaccuugaaaugguccuucguggugcaguucugcuuacgggguagacuuuguugccuuccacagaggacaguuagggugggcagg

SEQ ID NO: 4102863 - RNA, 70 nt, Human
ccucccaggaguccagagaagggacaccucucuuccaagugagggucccgucccucugcacccugugagg

SEQ ID NO: 4102864 - RNA, 57 nt, Human
ccuccccacagcccaggagacuucacuaauagaugaagauccuggggucuggggagg

SEQ ID NO: 4102865 - RNA, 64 nt, Human
ccuccccagugugaaccucaccacccuccccaaugugaagggauggcaaguuaaccugaggagg

SEQ ID NO: 4102866 - RNA, 108 nt, Human
ccuccccuaucuaaccacugcucccugacagggucuccucuagaucugcucccugcacugagcacaggaagcugacugcuggcaggggaggagguggcagaggggagg

SEQ ID NO: 4102867 - RNA, 83 nt, Human
ccuccccucucuccccaagcagcagccugaaguacgucagcaguaauugugugcauggcucggcugugcagggaggguggagg

SEQ ID NO: 4102868 - RNA, 83 nt, Human
ccuccccugugcugucaugcugggcguggaagagccggccuagcuggaggccccgcaccacaugguagagcaggagcuggggg

SEQ ID NO: 4102869 - RNA, 56 nt, Human
ccucccggaucaugucccgcacaaaccugguguguuuggucagacguccggggcgg

SEQ ID NO: 4102870 - RNA, 78 nt, Human
ccucccgucucuauuucuuucucuguuuuauuaucucauucuuggcugugagguaaacaggagaaaaugagaaggugg

SEQ ID NO: 4102871 - RNA, 55 nt, Human
ccucccuagguccuauugcccuccagauaauaucaugaagggggaaccugggagg

SEQ ID NO: 4102872 - RNA, 57 nt, Human
ccucccucccugcagaagccacauggcacaaccugggcccuugacaggaguggaugg

SEQ ID NO: 4102873 - RNA, 89 nt, Human
ccuuuagugguuguggcagugaaccaaggcuccaaacaugcuugcaccaggugacuuggucucuuguguuccugucauucaccaggagg

SEQ ID NO: 4102874 - RNA, 83 nt, Human
ccuuuaucccucuuaguuuguaaaaauaauuuuugaguuuugucaugauaauauuucagacuuggagauauuuggaguggagg

SEQ ID NO: 4102875 - RNA, 94 nt, Human
ccuuuaugcaaaagaagaauuauaggugcagcagcuaacaauuauucauaaauguuugugcugcugacuuaagauauuuucuacaagugaaugg

SEQ ID NO: 4102876 - RNA, 79 nt, Human
ccuuuaugguaacagcuccagcuugaguccugagugcaugcucugcggucuggggucaccuggggugcuuaccaguagg

SEQ ID NO: 4102877 - RNA, 86 nt, Human
ccuuuauuauugcuacagcugaucauuuugaagaaugugacucacaccuucaaguaugugggcugaaaauuuauagcauagagagg

SEQ ID NO: 4102878 - RNA, 83 nt, Human
ccuuuauugcaucauuaauugccaaccuuguuggaccaguacucugaugacuacucucucacagcuuggcugauaaauaaagg

SEQ ID NO: 4102879 - RNA, 62 nt, Human
ccuuucagaaagguuaaucuggauuuacuaggaaagaaaaugcagcugacuuuccugaaugg

SEQ ID NO: 4102880 - RNA, 89 nt, Human
ccuuucauggcaaccaguucccuaauguguagaagauguguaaaccucauguucuguuuuaugguagggaaaaaaccaugucagagagg

SEQ ID NO: 4102881 - RNA, 123 nt, Human
ccuuuccucagagcuguuuaugcuuauuuuuaaaaaauugucacagaagcuugacuuauguggucauacagcagguuacaguggcacagagauaacagcauauaguagacccugagagagagg

SEQ ID NO: 4102882 - RNA, 85 nt, Human
ccuuuccuggggcaagcagugaggacagcacugaguggcuuaaaugaguguuuaucccagcugccgcccgccccagcuaggaagg

SEQ ID NO: 4102883 - RNA, 124 nt, Human
ccuuucgucucacccuccagcacuaaagggcucaauucacuuguguuaccaagguuuggugacugcggaguuaccaagguuuggugacugcagagucuaaggggagccuggcagagaugaaggg

SEQ ID NO: 4102884 - RNA, 83 nt, Human
ccuuucuccuggcccagcuuucauuccuugcugacucaggaauuggcagcguucagcugggagcugggccugggcagggaagg

SEQ ID NO: 4102885 - RNA, 130 nt, Human
ccuuucucugguggcuaaugaugcugagcaucuuucugugugcuuacugguguucagaagaugacugcugaacaaagacauggaggaggaugagggaggcagccaugcaguuaccuaggagcauuucagg

SEQ ID NO: 4102886 - RNA, 59 nt, Human
ccuuucuggaaagcaagauacauuaaaaccuuaaaauguuauuguccuuuccaaaaggg

SEQ ID NO: 4102887 - RNA, 112 nt, Human
ccuuucuuucuagaaaaggcaguagcuaaaaggggauuuaagguaagaagaaggguuuuguuuuguuuuguuuagguuuguuuuuaaaauacugcuguuuuuguuggagagg

SEQ ID NO: 4102888 - RNA, 82 nt, Human
ccuuugaaagcuacauuuucacuuaaggaauuucaugauccaagggcauaaaguguauaagugaagaauuggguuuugaugg

SEQ ID NO: 4102889 - RNA, 110 nt, Human
ccuuugaaguuauuuauuggacuguguuaaacauguucagugacaguuauugagguuuccuucaguucacaauugaaacauguuacgcauucccauacauggagaagagg

SEQ ID NO: 4102890 - RNA, 71 nt, Human
ccuuugacauguccaggugguccuguuguuggcaucccuggcugcacuggaccccaggauauggaaaaagg

SEQ ID NO: 4102891 - RNA, 71 nt, Human
ccuuugauagauguuuguguuaucuccauuuuuugaaagauagggaaacugaggcauaaaguuuucagagg

SEQ ID NO: 4102892 - RNA, 129 nt, Human
ccuuugaucauggaaaauucauauaaggugaauaaauaaccagugggagugcuuacaaauaauuauucugguacucaaaauggugguuaugcgcuuuguggguuuuauuuuuuacuacuucaaaauagg

SEQ ID NO: 4102893 - RNA, 56 nt, Human
ccuuugcccuggaccguccucccuaguggcucuggaaagaggaaacaaggcagagg

SEQ ID NO: 4102894 - RNA, 56 nt, Human
ccuuuggcauuuugaggaugcgucugucaaggcuuuuguccccuaaauaccaaagg

SEQ ID NO: 4102895 - RNA, 64 nt, Human
ccuuugggcagugauuaguucaugaggguggaacccuuauaaauggaauuagugcccuuauagg

SEQ ID NO: 4102896 - RNA, 55 nt, Human
ccuuuggggcuuuacuguggaagcauaacuuagucacaguauaaccucauauagg

SEQ ID NO: 4102897 - RNA, 130 nt, Human
ccuuugggggcauauugcagauuguauauaugggagaacguguuaugcauguguaugcagcuuucuugcauguauaugugcacaugugcuucuguauggcuugauccucaauagccugcuucuuuaaagg

SEQ ID NO: 4102898 - RNA, 72 nt, Human
ccuuugggguccacaacagccggcuguccccagacuuguguccagggaagauaguguugagggcccucaagg

SEQ ID NO: 4102899 - RNA, 73 nt, Human
ccuuuggugguuuucagagauccagagcgaccaugucaggaauguugagauauaucuuugaaaccagaaaagg

SEQ ID NO: 4102900 - RNA, 61 nt, Human
ccuuugguguagaugagagagcgugugugaguguaugauacacaucuaucucuacacaagg

SEQ ID NO: 4102901 - RNA, 78 nt, Human
ccuuuguaagaugugaagacugcagaucucuuuucaucacugagauucacagaauaaaguuuuccauauuuauuaagg

SEQ ID NO: 4102902 - RNA, 65 nt, Human
ccuuuguagauuuucucuccaguaugaauuuucuuauguuuacuagacugagaaucagcugaagg

SEQ ID NO: 4102903 - RNA, 74 nt, Human
ccuuuguccuagagauccgggaggggaggugugcgcccugcccuuuaaaguuguggucaugucuaggaggaagg

SEQ ID NO: 4102904 - RNA, 81 nt, Human
ccuuugucugacuuugaucucuuggcuccaaagucuucaaagcuauccuugacuuuugccugagauccgagucugcugggg

SEQ ID NO: 4102905 - RNA, 68 nt, Human
ccuuugugucaugcccugggguccagguuugcagcuuaaggugcucacuccccaggguaggcuagggg

SEQ ID NO: 4102906 - RNA, 75 nt, Human
ccuuuuagguuaaugggcuucuuuugguccaugacuaacacaaugaagaaagaguuagcucaauaacuugaaagg

SEQ ID NO: 4102907 - RNA, 58 nt, Human
ccuuuuaugaacuugagcagguuucaaugaccugaauuuccacgacaaguucaaaagg

SEQ ID NO: 4102908 - RNA, 61 nt, Human
ccuuuuauguacuugguuccagccuaggugaugagugcaaggugcuaaguacugugaaggg

SEQ ID NO: 4102909 - RNA, 59 nt, Human
ccuuuuccaagccaaggaaguguucuggcuccuggacucugcccuguggaggggaaagg

SEQ ID NO: 4102910 - RNA, 66 nt, Human
ccuuuuccuucauucuucuugucuuauccuuacugauagcauaacagguaagagugaggguucugg

SEQ ID NO: 4102911 - RNA, 55 nt, Human
ccuuuuggaaaguugucacuuuagaugaucucuaauuuagguauuuuccagaagg

SEQ ID NO: 4102912 - RNA, 100 nt, Human
ccuuuuguacaguggguuuguguaaugaauagcuuuacugggcuuuccucuguuuguuuguuuagcaaugcuucauuauuuaaacuucugcacugaaagg

SEQ ID NO: 4102913 - RNA, 74 nt, Human
ccuuuuucucguuauauaggaauuuagcaguucauucugaauguuggcugcuggcuauuuaaagaagaaagugg

SEQ ID NO: 4102914 - RNA, 63 nt, Human
ccuuuuucucucauugcaggcagcaucugaagcagacguagaaacugcacugagaaaaggagg

SEQ ID NO: 4102915 - RNA, 56 nt, Human
ccuuuuucugaguuguagcuucacgaguaucaugggccacugacugaagaaagagg

SEQ ID NO: 4102916 - RNA, 58 nt, Human
ccuuuuuguucuucccaacucuucaagccagguggacagagagucggggggacauagg

SEQ ID NO: 4102917 - RNA, 88 nt, Human
ccuuuuuucuguucugucacacacugguacuuuggcauuuguucagugccaaacaaaguucugccaggcuguggcagcaaaggacugg

SEQ ID NO: 4102918 - RNA, 87 nt, Human
ccuuuuuuuuuccuuuuucaucucuggaugucauugccuggaacuuuugcaggcuucugauaccaugagagaaaguaggcuagaagg

SEQ ID NO: 4102919 - RNA, 101 nt, Human
cgaaauucuauuaggcuggugcaaaaguaauugcaguuucugccacugaaaguaauggcaagaaccgcaauuacuuuugcaccugccuaaguagcuccucg

SEQ ID NO: 4102920 - RNA, 58 nt, Human
cgaacauuuuucaaagaugugugaauuuauaauuuauuauguggaugaaagauguucg

SEQ ID NO: 4102921 - RNA, 63 nt, Human
cgaagcagguuuucuucuauauuuggguagaagccaucccuaauuauggaauaauuugcaacg

SEQ ID NO: 4102922 - RNA, 67 nt, Human
cgaauaguuauuacuuggaauuuuucacaccuagcaguggugcugauguuucaaguauagcuuuuug

SEQ ID NO: 4102923 - RNA, 74 nt, Human
cgaaugaagaaauggacaucuuuauggccuugagcaaaucuuucaacuuguguaugacuccguuuccucauccg

SEQ ID NO: 4102924 - RNA, 55 nt, Human
cgacucaggaggacaaggagguucugaaaaccucgaaugccuuccugaggccucg

SEQ ID NO: 4102925 - RNA, 91 nt, Human
cccuauucuuucuuuacauagauggggugucaugucaggaaaagugauauuucucacaugagucacuaucuuaauguggacaugauuaggg

SEQ ID NO: 4102926 - RNA, 59 nt, Human
cccuauuuccaaauaaggucacauucugaggcucuaguuagaugugaauuuggggaggg

SEQ ID NO: 4102927 - RNA, 88 nt, Human
cccucacucacacguaagccccaugagaacagggacuugguuuuguacacggcuucauucccagacccuuucuuggcaugugguaggg

SEQ ID NO: 4102928 - RNA, 79 nt, Human
cccucacucagcucugagcacugugcggcuggggcugugcuugccucaccggcacucaggcucacuggguugcugaggg

SEQ ID NO: 4102929 - RNA, 89 nt, Human
cccucagauucucaaagaagagccucaucuaucagggcuacugaaagguaagguacucagcccaggugagggguucgaaaucuagaggg

SEQ ID NO: 4102930 - RNA, 119 nt, Human
ccuggggcccuggagaacagacagcucugacucagagaauaucuagaaggagugcagaccugggcauccuaagggauuguuuuuucagucugguugaagugguccaguagcaucccagg

SEQ ID NO: 4102931 - RNA, 65 nt, Human
ccuggggcuccuccuggcaggaggccuggccagccccgagcccuugagccuggaggagcucucgg

SEQ ID NO: 4102932 - RNA, 114 nt, Human
ccuggggcuggaaugcuggggguucuggaagcugggcagcacccuuugacuccaauauagagugggcaagugcccuaggcuuuccccuccagccuaacuguugucuaccccagg

SEQ ID NO: 4102933 - RNA, 130 nt, Human
ccugggucagugcucuaagugaauacuguuguguguucugagugacugugaacuguuucugauccuccuuucugauagagaugaaaagaacacaguccccagaucaaaggcugcacagcauguaccuggg

SEQ ID NO: 4102934 - RNA, 78 nt, Human
ccugggugcuuaaucuguuugucucucuccugacccacgguggcccaggugggaccagagggagaggaacagccuggg

SEQ ID NO: 4102935 - RNA, 79 nt, Human
ccuggguguauucauuggccugaucaacacaaugaccaaaucuggucacagugcaggaucaguuaaugacuguccuagg

SEQ ID NO: 4102936 - RNA, 72 nt, Human
ccuggucccuuuuaugugcuggagcaccacccuaaaaacuguuggcuggcuacaucacagagaauucccagg

SEQ ID NO: 4102937 - RNA, 118 nt, Human
ccuggucugagggcucuugaggcugaggagguuaacaucugcauccacccacucaacauuucugcuggagugucugugucuggggugcagccuccuggcuaagagacccuggcucagg

SEQ ID NO: 4102938 - RNA, 59 nt, Human
ccuggugacuauucauugcccauguuugugaauuaucagaaagcagaauucuugccagg

SEQ ID NO: 4102939 - RNA, 68 nt, Human
ccuggugauacuguugguagaaaguuaaagcuuugaaacgauuugaaaaucuacaaaguggcaucagg

SEQ ID NO: 4102940 - RNA, 57 nt, Human
ccuggugucugcucccucacagcuuguugaggccugugucccuugcacacacccagg

SEQ ID NO: 4102941 - RNA, 90 nt, Human
ccugguuagccggaccuuccuucuuugcuccggguuccuccagaaccacgugacccaggccagagaggggagguguggaagauaauaagg

SEQ ID NO: 4102942 - RNA, 72 nt, Human
ccugguuuagugugaguaauugagucugucuucauuccugaugacuauccuuuguucauuccaauagccagg

SEQ ID NO: 4102943 - RNA, 62 nt, Human
ccuguaaguccucccggaagaccaguucacagcucauuggaagaucaaccaggauugacagg

SEQ ID NO: 4102944 - RNA, 68 nt, Human
ccuguacaagucaucauagaaguuccccauaguugugccaguacugugcugaagguggguuguacagg

SEQ ID NO: 4102945 - RNA, 67 nt, Human
ccuguacuuucucucucuccucugucacuggcucauuccaugugacagagagaugggaaagggcagg

SEQ ID NO: 4102946 - RNA, 94 nt, Human
ccuguaguagagguuguuagcucuuugcuugaagauauacuacuuccuugccuaagggagacacgcugcaggcauaaguuagcacccugcuugg

SEQ ID NO: 4102947 - RNA, 79 nt, Human
ccuguauacucuuugauuuaauuauuucaccuuuaggaauuuauccuuaggaaaucauuagcaaagauaugucugcagg

SEQ ID NO: 4102948 - RNA, 68 nt, Human
ccuguaugaguguguguguggguaugugcauguaugugugcacgugugagcauucacaugcauguugg

SEQ ID NO: 4102949 - RNA, 57 nt, Human
ccuguauuauuuguaugugcugcuaauuaugcuugguuuacaugcucuugguucagg

SEQ ID NO: 4102950 - RNA, 60 nt, Human
ccugucacccacccagccugucaccggagccgccugacagacaucugggugggggacagg

SEQ ID NO: 4102951 - RNA, 124 nt, Human
ccugucacuacgccaggcuauuuuuuuuuuuuucauggagacgaggucuugcuauguugcccaggcuggucucaaacuccugggcucaagaagucuucccuccucagccucccaaaguguuggg

SEQ ID NO: 4102952 - RNA, 85 nt, Human
ccugucacuaguggguuccugcucagagcgucuugugugauguuucaucuugaugcuuugacagguuaacaaccuucucaucagg

SEQ ID NO: 4102953 - RNA, 72 nt, Human
ccugucauugagaaguuugugaaaggaaguaaacagaaguguugggauggucacacauuucucaaguguagg

SEQ ID NO: 4102954 - RNA, 65 nt, Human
ccuguccaaggaagggacaucucggcauuguugggcugcucagaaugucuguucuuucuggcagg

SEQ ID NO: 4102955 - RNA, 57 nt, Human
ccuguccccaggggugucauacagguccuggaagccugccaucucugugggaccagg

SEQ ID NO: 4102956 - RNA, 71 nt, Human
ccuguccccucacaaugccacugucuaauuauccaucuucccucccggaccguaggcugccugggggcagg

SEQ ID NO: 4102957 - RNA, 84 nt, Human
ccuguccuaccacuuucuucaucugcaaaauggggaucaugauaguaccagcuugcaggguuaaaguaagguagugggugcagg

SEQ ID NO: 4102958 - RNA, 61 nt, Human
ccuguccugcaucugcuuuauucuaaaauggguccugugaccuggcaugaugauggauggg

SEQ ID NO: 4102959 - RNA, 59 nt, Human
ccugucuagaagggugccgaucuuaguccuggaucaggaucggccuuuuuuuaagcagg

SEQ ID NO: 4102960 - RNA, 66 nt, Human
ccugucuaugucuuugucccacucccagagucugacuuuacugauggaacagagauagagcauugg

SEQ ID NO: 4102961 - RNA, 60 nt, Human
ccugucugaaagaaucucagccugaacugcuggggauuugaggcugucauuucuggcagg

SEQ ID NO: 4102962 - RNA, 63 nt, Human
ccugucugcaugaucccugccagccgguaucagguugaggcagggaacuuugcagcuugcggg

SEQ ID NO: 4102963 - RNA, 68 nt, Human
ccugucugcccucaacccagaggcagugaaaggaagaagccacggccuugggauggggggcgugcggg

SEQ ID NO: 4102964 - RNA, 56 nt, Human
ccugucuguuaccuccaagaccauucuaauagaggucauauggaaggagcaguugg

SEQ ID NO: 4102965 - RNA, 67 nt, Human
ccugucuuccauuucccuuuagccugagaauccuucaaucugaugugaggacuaaggcucagacagg

SEQ ID NO: 4102966 - RNA, 55 nt, Human
ccugucuugucuuucagcauguucagaauaccuguggcugcugugggcagagagg

SEQ ID NO: 4102967 - RNA, 73 nt, Human
ccugugaacucagucucucuugcuacaguuauuccaagguggugaaaagaggggugaguugacuguucacagg

SEQ ID NO: 4102968 - RNA, 92 nt, Human
ccugugaagaagcuggcccaccaugggaagagagacuaauugguaucuccauagcuuggacuauuuuuuccacuggaucugcaguuucuggg

SEQ ID NO: 4102969 - RNA, 55 nt, Human
ccugugaggucuugcaugugaaauggcucacauauucauggcagccacccacagg

SEQ ID NO: 4102970 - RNA, 84 nt, Human
ccugugcaugguuacuugggucccaccuuucucucagguuagaaacucaagcauccugagcugggacucaguagcaagaacagg

SEQ ID NO: 4102971 - RNA, 57 nt, Human
ccugugcccugccaggcuggugccuggaugcucuagggcccagaggagggcagcagg

SEQ ID NO: 4102972 - RNA, 56 nt, Human
ccugugccuuccuuaggcaccuguuguggacucagguggccucgguggugcacagg

SEQ ID NO: 4102973 - RNA, 58 nt, Human
ccugugcuucaaauuguaucuucuugccaggccugguagacagcuuuaaagacacagg

SEQ ID NO: 4102974 - RNA, 66 nt, Human
ccuguggcccagugguuacaacagaaugauuaacagucaauucuuugcaucucuggguggcucagg

SEQ ID NO: 4102975 - RNA, 56 nt, Human
ccuguguaaaagugguugaaaugugcacauaugcaugcaaacacuauugcauuugg

SEQ ID NO: 4102976 - RNA, 71 nt, Human
ccuguguacccucugcccuacagcucagcacaaaucauagugcugcccugucugcagcaggacccaccagg

SEQ ID NO: 4102977 - RNA, 58 nt, Human
ccuguguccauguucuaauuuggcauugcucauagucaaacauauugugagacacagg

SEQ ID NO: 4102978 - RNA, 92 nt, Human
ccugugugccucccugggagggucagaagggccugguucugggcacagggccacuggguccugcuggcccuuccccauuggugguuuuaagg

SEQ ID NO: 4102979 - RNA, 76 nt, Human
ccugugugugccucgucuacugagugccaggguuagugccccacuugccaggugagaggacugaggcucacacagg

SEQ ID NO: 4102980 - RNA, 106 nt, Human
ccugugugugcgugugugugugcaugugugugugugcgugugucucugugugcauguguaugcauaugugugcacacguguaggugugugugcaugcacgcgcagg

SEQ ID NO: 4102981 - RNA, 110 nt, Human
ccugugugugguggccauggugggcaaaggaugcaggggcagcagagccugguggagacugcaaggauuuguggcucugagucugcccuuggcuagccaugagacacagg

SEQ ID NO: 4102982 - RNA, 72 nt, Human
ccuguuacauuucuggaucaugcauugcuugucccaauugggacaguaaccucaugguugcagagauacagg

SEQ ID NO: 4102983 - RNA, 72 nt, Human
ccuguuagcuguuucuugagaguauuacccuucaugagccuaguuaaagaggguauuucagaagcuggcagg

SEQ ID NO: 4102984 - RNA, 89 nt, Human
ccuguucagcggccugcgccugagccugcugucgcuggacccgguggaguuacgggugcugcggaacagcggcucggccgccgagcagg

SEQ ID NO: 4102985 - RNA, 56 nt, Human
ccuguuccauugguuggaagcaagucacaggugcuauccacacucaaggggagggg

SEQ ID NO: 4102986 - RNA, 62 nt, Human
ccuguuccuccuaccccaggccccaccuaggugcuggggaggccugggcaagggggucuggg

SEQ ID NO: 4102987 - RNA, 60 nt, Human
ccuguucucucuuuuuggaccgaccgaaccagugugucgcuguucacggaggaggauggg

SEQ ID NO: 4102988 - RNA, 55 nt, Human
ccuguugagagagcucacugaggucccagcacagaacucagcacuuuuacacagg

SEQ ID NO: 4102989 - RNA, 82 nt, Human
ccuguugagugccucgugagccccugccuguguuccugccguucggguaugagaacacagcggggcuuacccggugugcagg

SEQ ID NO: 4102990 - RNA, 60 nt, Human
ccuguuucacacucuaucauaauugccuccuuacuggucugugagcuuugugaaagcagg

SEQ ID NO: 4102991 - RNA, 55 nt, Human
ccuguuucuccuuguucaucuuucuucuuuauuaaguguacaaggauuaugcagg

SEQ ID NO: 4102992 - RNA, 76 nt, Human
ccuguuugaguuagaagggcagggagaggccagugcuuggcucuguccuccaccugcuuucaggagcuggggcggg

SEQ ID NO: 4102993 - RNA, 129 nt, Human
ccuguuugcaaaaugauauuucaguaggaagagggccagagucuguguagauacuaagacuuacuguuuauggaguaaucuuuacaacuuugguccaaacucuugugagguagguuuuuacagaugagg

SEQ ID NO: 4102994 - RNA, 60 nt, Human
ccuuaaaaagauaggcuuugauaagcacuuaccacuggguuucagaccuaucuuugaagg

SEQ ID NO: 4102995 - RNA, 93 nt, Human
ccuuaaaacaaaauuuagagaaaugcaagacauaaauaaucuuuuuaacaaaauggguuacagccuuggauuucuuuuuagaauuuugugugg

SEQ ID NO: 4102996 - RNA, 77 nt, Human
ccuuaaaacuuggauauggugagagccugaagugaacaaaguacagaugcuggagcuaccuuaucagagugguaagg

SEQ ID NO: 4102997 - RNA, 62 nt, Human
ccuuaaaugagauguucagauauuugguuacugcauugaauaauaucaacuuucauuuaagg

SEQ ID NO: 4102998 - RNA, 56 nt, Human
ccuuaaucacccccuuaaaggcucuaucucgaaacagucacauuggggguuuaggg

SEQ ID NO: 4102999 - RNA, 63 nt, Human
ccuuaauccagcacucgcugauuuuaggauuaguaaaucuugguuuaggaugcuggggagagg

SEQ ID NO: 4103000 - RNA, 63 nt, Human
cgcacccgccaccugcccgcggacugcggcgcagcggucccaggaagugcggcggcggcggcg

SEQ ID NO: 4103001 - RNA, 77 nt, Human
cgcacuccaccucugaagguuucuguuacugucuuuucaagagaaucuaguuucagacuuugaguucuguggcugug

SEQ ID NO: 4103002 - RNA, 64 nt, Human
cgcacugacccuuugagguugugugggguguggucagugcccuccugccugagggucaagugug

SEQ ID NO: 4103003 - RNA, 66 nt, Human
cgcagaacguggugcagcgugugguggcucugccccuggucagggccacgugcaccgcggucugcg

SEQ ID NO: 4103004 - RNA, 69 nt, Human
cgcagaagagguugucuagucccuuccaggacucaugggagcccacgacucuauagccauucuucuccg

SEQ ID NO: 4103005 - RNA, 80 nt, Human
cgcagcacgugcucgcggcgcccgaagcccuugccacacucccagcaggcaaagggccgcgcucccgagugcgucuugcg

SEQ ID NO: 4103006 - RNA, 65 nt, Human
cgcagccccgcacagcaggggaacccaggucuuccuucccucccuuagggcugggugggugugug

SEQ ID NO: 4103007 - RNA, 89 nt, Human
cgcagcugagccaauugcugggcagaaggaagagccaccugggacguuacuuccagguggauccaauucugcuuagggcacucacugcg

SEQ ID NO: 4103008 - RNA, 56 nt, Human
cgcagcugccuugucagccguuugaucuccaaccggcgaggacaagaggaguugug

SEQ ID NO: 4103009 - RNA, 69 nt, Human
cgcaggcaagagaguacaguuaauaucugaagacccuaaaagauaugcccuguggaauuuuaccaugcg

SEQ ID NO: 4103010 - RNA, 71 nt, Human
cgcaggcagcgcucguggccuggccagggagagaggagagucgugaugcugggagugcaggcugccuugug

SEQ ID NO: 4103011 - RNA, 59 nt, Human
cgcaggcucgguucacagagcagauuccaugguggccuccuuugcauaccuagccugug

SEQ ID NO: 4103012 - RNA, 64 nt, Human
cgcaggcuucucaauagguuugaaguggacaagaucuaugaaagccaaguggagaagacuggug

SEQ ID NO: 4103013 - RNA, 69 nt, Human
cgcagugacccugagggugcuggguuucuguuugagggagaagaaacuccugagccccuagguauugug

SEQ ID NO: 4103014 - RNA, 64 nt, Human
cgcaguggaggccacauuacuugguggguggcuugcuugccaccuguuugggcaaaccacugug

SEQ ID NO: 4103015 - RNA, 82 nt, Human
cgcaucaggcagcuuucagucauuuuguuugccaaaggcagcuuccuguggccaugacauggaggcuuugaggcuuugugug

SEQ ID NO: 4103016 - RNA, 84 nt, Human
cgcaucugccccugggcuggucuggcuuagucaggagggcagcccuuggcccagggcacagacacaugccugggaaggaaagcg

SEQ ID NO: 4103017 - RNA, 84 nt, Human
cgcaugcauacucguacagguccacggcgcccaggggugagggcaccucgaagaagggccucugggccagcggggacugcagcg

SEQ ID NO: 4103018 - RNA, 60 nt, Human
cgccaccauagaggaaguccuggaggucuuguucuucaggauccccuugaugggcuggug

SEQ ID NO: 4103019 - RNA, 68 nt, Human
cgccacucagcccacccacuggacugcagcagaggagucggcugccagccagggugggauccaaggcg

SEQ ID NO: 4103020 - RNA, 76 nt, Human
cgccagcccagccuacucugccauagcagggcugaccuagaaucucuggacagaguguaugagggcugggaaggug

SEQ ID NO: 4103021 - RNA, 69 nt, Human
cgccaggagcagcaggaggaggaggcagcgacaagguaagagaagcgguuucuuguucuucucuuggcg

SEQ ID NO: 4103022 - RNA, 72 nt, Human
cgccagucccaagagccgccagaccuucgcacgcgcagcgcgcgcugugggagggaaggcgcggcccuggcg

SEQ ID NO: 4103023 - RNA, 70 nt, Human
cgccaucuccacaugcccacagccucuggucauucaugagggcugauaaaugcgcaugguggggugggcg

SEQ ID NO: 4103024 - RNA, 58 nt, Human
cgcccagguccugccuugguuacccugcacugcuggcagcguauggcagggccgggug

SEQ ID NO: 4103025 - RNA, 60 nt, Human
cgccccagggcugugaggagcggcugacgcccuuugcugucuucccgaggcccuggagug

SEQ ID NO: 4103026 - RNA, 130 nt, Human
cgcccccgccccgccgcgcuuccuccuccgcuccagaguccccagcggcgcgggccgagguuccuggcccgccccgggcaggggcgcgggccggggaggggccgaggugcagcccggggguggcgggaug

SEQ ID NO: 4103027 - RNA, 70 nt, Human
cgccccugcagcgcggcuggaacugggacgccgggcugggggccgugcccaggggccagcugccgggacg

SEQ ID NO: 4103028 - RNA, 74 nt, Human
cgcccguguggaugcgcuggugcugcaugagguuggagcuccagcugaagcgcuugccgcacuccaagcaggcg

SEQ ID NO: 4103029 - RNA, 91 nt, Human
cgcccuccagcagcuuccuguaggcguccagggccaguuccuguacucacgcagcugcugagccauguccugcuuggcuagcugcagggcg

SEQ ID NO: 4103030 - RNA, 65 nt, Human
cgcccuucugugcuucacaguugccaccaaagcaaguucaugguuucucagcauggaauguggcg

SEQ ID NO: 4103031 - RNA, 59 nt, Human
cgccgccccccuucccuaccuuuuaaugaauuaaaggacaggaaggcagaggggcugug

SEQ ID NO: 4103032 - RNA, 58 nt, Human
cgccgccgcuucccuccuccggggccgcucgcucccaggaaaguggaggcggcuggcg

SEQ ID NO: 4103033 - RNA, 67 nt, Human
cgccgcugggauauguccaguucuaccuaccuguaacacaaguaugaacaaacacaucccagcagug

SEQ ID NO: 4103034 - RNA, 58 nt, Human
cgccggcccagcgcagguccugcccugccuuggcccuccguggccugcgcugggugcg

SEQ ID NO: 4103035 - RNA, 71 nt, Human
cgccgggcucggggagcugcagagcucgaaggaaccacgagguggcgcgcuagcacugcguucgcccggcg

SEQ ID NO: 4103036 - RNA, 93 nt, Human
cgccggugugugaacuacaggggguggcaggcggcugcuccgcuguggaaccugcugcccugugccacccugcugccuagucacaggccggcg

SEQ ID NO: 4103037 - RNA, 64 nt, Human
cgccuacuucccuggcucuucuacaucgucaucuuccgacaacgacgagggcagcggaggggcg

SEQ ID NO: 4103038 - RNA, 71 nt, Human
cgccucccgcgggccccuccauccaucaccggggcggcggcgcccgggucuggggaggggcgaggggggcg

SEQ ID NO: 4103039 - RNA, 61 nt, Human
cgccuccucguacagcagacugaaguccuggggacaggcgcacaggguguugaugugggug

SEQ ID NO: 4103040 - RNA, 59 nt, Human
cgccucucaccuccaggagcugcuggccuccacggaaagcauccgccuggaggugggcg

SEQ ID NO: 4103041 - RNA, 69 nt, Human
cgccugaaucauguucugagcacacaagaugagaaugagagaaugugauggccaggaaagaaucaggcg

SEQ ID NO: 4103042 - RNA, 73 nt, Human
cgccugagagaugagaccucucacugagguguguuguccucucacugaggugugugguccucucacuuaggug

SEQ ID NO: 4103043 - RNA, 88 nt, Human
cgccugcgggagcgaagggggcgggucagggggcugcgggcgcccucgggcagcacaguuucuggcccgccgcuuccugcugcaggug

SEQ ID NO: 4103044 - RNA, 87 nt, Human
cgcgcgggagcugggcagaggcaggauaagaacugcggaugaggccgagcgcagcucuuacccuccccuuacccuccgcuccccgcg

SEQ ID NO: 4103045 - RNA, 61 nt, Human
cgcgcugcagacagcggaggccugggccauauuccaggagcagaccguaguccugcaggug

SEQ ID NO: 4103046 - RNA, 77 nt, Human
cgcggccggaagcgcaggacuggcucacggccguccagguaggcggccagugccucgccgcgcuccugcaggccgcg

SEQ ID NO: 4103047 - RNA, 81 nt, Human
cgcucaagguucccucucuggaagccuuccucaacccaaacaaaaggaggcucagggacggggccccuucuccucugagcg

SEQ ID NO: 4103048 - RNA, 71 nt, Human
cgcucauggaagaguagugcuuucagagaugagcaaaagcuacauuuacagagccuucucugcagggagug

SEQ ID NO: 4103049 - RNA, 114 nt, Human
cgcuccuuggggacauucaucgaggaggaggcagugucgguggcaggauguggaagccacacaccuggaugcuggccuugccuuggcuccuuuucggcuguggucucuugagcg

SEQ ID NO: 4103050 - RNA, 74 nt, Human
cgcugagcuuuguggcccgcgccgcgaccagccaacgugaucucugacuggucuguccgcaggucaccuucgcg

SEQ ID NO: 4103051 - RNA, 96 nt, Human
cgcugccugcaguaaauugcugaugccugaacuugaauaucaggaucaccugaaguucuacaagccucagguuccucaguucagucugcgggcacg

SEQ ID NO: 4103052 - RNA, 80 nt, Human
cgcugcugcuucugggaggccuuugugucugugccuguaacaugggccaugauucucugccuuccccaugggcugcugug

SEQ ID NO: 4103053 - RNA, 94 nt, Human
cgcuggcagguucaggcucaggagugagaugcgaucacuugucgagaaacugagaagucacguguguuucauccaugagacugugaugcgagug

SEQ ID NO: 4103054 - RNA, 96 nt, Human
cgcuggcugagugcaagcuggagguccgaggugagggcguggccauccccaacacuggcugacccuugcucgggcccugugccagccuggccggug

SEQ ID NO: 4103055 - RNA, 80 nt, Human
cgcuguccguucucugcuccuuugccacgcugagcgagcuagcuguggccagaugugagcggugugcaggacggacagug

SEQ ID NO: 4103056 - RNA, 65 nt, Human
cgcuuucugcagcugccagugauuucagcuucccaagguauggacuugcagcugccagaugagcg

SEQ ID NO: 4103057 - RNA, 73 nt, Human
cgcuuuggcuccagaguccaugccguuaaccacuucugugcauuuauugagcaacucuggggcucucagagug

SEQ ID NO: 4103058 - RNA, 80 nt, Human
cggaaaaggcuuacugugcauuauucuuaccuuucuuugaucuuuuuuagggaaugcugggagaaauguuggccuuuccg

SEQ ID NO: 4103059 - RNA, 67 nt, Human
cggaagagaauuucucucuuuuuaugcaggacucgaaccugggaaaaugugagggaaaaucuuucug

SEQ ID NO: 4103060 - RNA, 61 nt, Human
cggaagagcgcucccggccccagacuucccauuggauaauuggcagcaagaggcucuucug

SEQ ID NO: 4103061 - RNA, 58 nt, Human
cggaaggguuuaagcaggagagugcuaugaggcagucuauuuuggaaagaucccucug

SEQ ID NO: 4103062 - RNA, 59 nt, Human
cggacaggcuccuggagcuccuccauuaacuaggagcaaaaugauuccagagcuuuccg

SEQ ID NO: 4103063 - RNA, 77 nt, Human
cggacgcugagcccccgcccacccucccccgggcccaacaaaggaaggggguguccaggggguaucccagcucuccg

SEQ ID NO: 4103064 - RNA, 79 nt, Human
cggacggaggugucuuugcggcccgccgcgcccuggcugccuccggggcggcggggagccggggagagcgcuucugccg

SEQ ID NO: 4103065 - RNA, 76 nt, Human
cggagacaggguggggauggugagcuuagcccagggccuuccugacgaggagaaguccccuccccauccugcugug

SEQ ID NO: 4103066 - RNA, 66 nt, Human
cggagagcugugucucauccgccucuggcuggggcuggcacagagggcaugggucacgauucuccg

SEQ ID NO: 4103067 - RNA, 57 nt, Human
cggagcaggaacagaucccuuggagacaccuuaucuucaaaauuguucuaagcucug

SEQ ID NO: 4103068 - RNA, 68 nt, Human
cggagcaguaauuagauucuccagaaaacauuggacuucaguuuccuggaagugcuuuuauagcuuug

SEQ ID NO: 4103069 - RNA, 68 nt, Human
cggagcauaaugaugcucuccaucacccgagacagguggccugcacagggauauggggagcugcucug

SEQ ID NO: 4103070 - RNA, 61 nt, Human
cggagcgcugggggacucugcagcgcgcaggugaccacgcagagacagccccagcgcgaug

SEQ ID NO: 4103071 - RNA, 58 nt, Human
cggaggaauuggcagcuccguggcgggccuggcacccacagagcugccaauuccugug

SEQ ID NO: 4103072 - RNA, 106 nt, Human
cggaggcgcggcgaguggaucgcggcgcggugggugcggggagccgaggcgggcggcccccgccgccgggagcgcucgccggccuuggccgccgccgccgccuccg

SEQ ID NO: 4103073 - RNA, 85 nt, Human
cggagggcucccuuccaugcagagaacugaaguacaucucacagagaagccuuugagcucaguuacugcauagaaugaaccuccg

SEQ ID NO: 4103074 - RNA, 59 nt, Human
cggagucuggcguaaguguuccuccucugcacgccucugaggacauuugcaaaggucug

SEQ ID NO: 4103075 - RNA, 84 nt, Human
cggagugauuuuaugcauauguacccauguucuguguaugcguuuuuaaaguagaaauggaaccacgucauauacaucacucug

SEQ ID NO: 4103076 - RNA, 78 nt, Human
ccuuccaaccuucagacacuuauugagcaaguacuaagaaugggcacugcagguaagugcugucaguuaagagggagg

SEQ ID NO: 4103077 - RNA, 59 nt, Human
ccuuccaauaaauugcuucuugaccaagcugagucaaaaugagcuuuguuauugaaagg

SEQ ID NO: 4103078 - RNA, 92 nt, Human
ccuuccagcuaaauagacaauucuagccaacauugagucacucaguaagucuccaguguguguguuugcugagauugucuagcaguugaggg

SEQ ID NO: 4103079 - RNA, 72 nt, Human
ccuuccaggacugugagugccuagaaaguggaaaccucauucuauucaucuucauagucacagugcuugugg

SEQ ID NO: 4103080 - RNA, 59 nt, Human
ccuuccaggagucucugcaggugagaugagaacguggccagaggcagguccugggacgg

SEQ ID NO: 4103081 - RNA, 72 nt, Human
ccuuccaggccgggcaggaaacaccauaaagccaccaugcuuccuugggguguugucgcuggguuuugaggg

SEQ ID NO: 4103082 - RNA, 63 nt, Human
ccuuccccacacccacagccuggcccaagcacgcagggcagcaggcuucgcucugugggcagg

SEQ ID NO: 4103083 - RNA, 66 nt, Human
ccuucccugcccuggcagccuaccauggggugggcacucccuaugccuguccuagggcaguacagg

SEQ ID NO: 4103084 - RNA, 64 nt, Human
ccuucccuguuccggcauaacaagaagacaaacaucuugacugugcacaucugacgggugaagg

SEQ ID NO: 4103085 - RNA, 60 nt, Human
ccuuccucacacucccccauucgacagaauucugcuuuguaaagggagcugugaggacgg

SEQ ID NO: 4103086 - RNA, 85 nt, Human
ccuaggagaggggcagugcacccgggcccugggugauggggggaucagggcccccaagaagaggugccacucccgcuucgccggg

SEQ ID NO: 4103087 - RNA, 55 nt, Human
ccuaggagauaguuauuuggcaguugcugcuauuguggagugguuguuuucuagg

SEQ ID NO: 4103088 - RNA, 89 nt, Human
ccuaggcaguguaucgagugugugacuucacuuuagccucacagcaguucugagugcuacucaguguuguuaccauuuugcugaugagg

SEQ ID NO: 4103089 - RNA, 82 nt, Human
ccuagggguguucucugcccugagccugcucugccugagugagggcugggccacagacucaaggcaggccacgcccuccagg

SEQ ID NO: 4103090 - RNA, 83 nt, Human
ccuagucuugguuaaauaacuuuuacaaauugucaucaucaucaugauuaucauguuguaaugagguauuacucuacgcuagg

SEQ ID NO: 4103091 - RNA, 74 nt, Human
ccuauaaaucauucaagcccauaugugugcaugcauaugacacaucaaaugccauauaugguugauuuucuagg

SEQ ID NO: 4103092 - RNA, 82 nt, Human
ccuauagagcaggacaggucuuuggucaaggguauucgaguagcuaugcuccccugcuagaaccuccaacaugcucucaagg

SEQ ID NO: 4103093 - RNA, 80 nt, Human
ccuauauauaucgggacauaaaugaaguuugacuaugguguuccauggggaaaauauuggugucuggaagucagaguggg

SEQ ID NO: 4103094 - RNA, 75 nt, Human
ccuauaucuuuaucucuaaaugucauucuucaguaaaggaaaccauggcucauuggagauguaguggauucuagg

SEQ ID NO: 4103095 - RNA, 63 nt, Human
ccuaucacccauccuggaugagauucugcagauucagagcugagaucuuggugggcaggcagg

SEQ ID NO: 4103096 - RNA, 59 nt, Human
ccuaucuaguuaguaauuaacauauuagguuugggugccuaauauguuaauuagguagg

SEQ ID NO: 4103097 - RNA, 69 nt, Human
ccuaucucuuguuuuccugaagccucccuggcuccgggguguucugcuaggggaagggagagaaugagg

SEQ ID NO: 4103098 - RNA, 65 nt, Human
ccuaucuuuagacauacagaauuuccagaaaaaauagucuggaagucuguguuuuuaacaaaugg

SEQ ID NO: 4103099 - RNA, 56 nt, Human
ccuauggcuccugcccuggaguuguucauaagaccuuccaggcagacagcuauggg

SEQ ID NO: 4103100 - RNA, 81 nt, Human
ccuauguauggccugggcuuucaaaaccagccuggcagacugccaggccugggacgggagccgugacaggcugguuauugg

SEQ ID NO: 4103101 - RNA, 73 nt, Human
ccuauuacaugguuuuaccaauucacccggaggcauagcuuuuguucucuggaugauaugugaacuugauagg

SEQ ID NO: 4103102 - RNA, 127 nt, Human
ccuauuauuaacaucuugcauuagugugguacauguguuacaauuaaugaaauaauauugauacauuauuguuaacuauagcaucugguuuacacuaagguucacucugcauuguacauucuguggg

SEQ ID NO: 4103103 - RNA, 63 nt, Human
ccuauuccaguucaugggugauaucuuaaugaggauucuuuacaucauguaacuggauauagg

SEQ ID NO: 4103104 - RNA, 75 nt, Human
ccuauuccuuacacuuccauuuauucuuguccagaugacuaauuaggagaaaaaugaggaagauagaggaguggg

SEQ ID NO: 4103105 - RNA, 73 nt, Human
ccuauucuuggugcagaugcaggucacugggcacauccccaauuccuggguucugccacaaagcuggaguagg

SEQ ID NO: 4103106 - RNA, 56 nt, Human
ccuauuuccagauucugcuuguuggcaacauggucauuccaagcauuggaauuagg

SEQ ID NO: 4103107 - RNA, 99 nt, Human
ccuauuuuuuuuuuucccuuaggacaacaggcagacgucagaaagaugugggauuuuucugaguuuuccugauuggccuaaagcaaugaagaggagagg

SEQ ID NO: 4103108 - RNA, 56 nt, Human
ccucaaaaaugcagguacuccauaauaacauucaaggaaaauugcguauuuugagg

SEQ ID NO: 4103109 - RNA, 58 nt, Human
ccucaacaguggcauaguaagugucagggcuagccacucacugugcaaauguugaugg

SEQ ID NO: 4103110 - RNA, 94 nt, Human
ccucaacauuguuuugagacaaccagugaguauuuguaacagagaugagagaguuucgcuugccaccuuacugacgguuacagaaaaugugagg

SEQ ID NO: 4103111 - RNA, 77 nt, Human
ccucaacuaaaagacgagaacaugaagucuccaagaguuaaaugacuuacacacaguccucagucaguuuggugggg

SEQ ID NO: 4103112 - RNA, 57 nt, Human
ccucaagaaggcauccccagucccuagaugcugagcucagggaaugcuuccuuuagg

SEQ ID NO: 4103113 - RNA, 90 nt, Human
ccucaauuuggauaucaauaucuguggccauacaauuuagaugugaaaagcaaaaauuguaggaucacaugaccuauauucaaauguagg

SEQ ID NO: 4103114 - RNA, 85 nt, Human
ccucacauuuccugcuucccugaugucaagaagaggucuugggaccuuucacgguaucagacaucuaggggcagagggguagagg

SEQ ID NO: 4103115 - RNA, 71 nt, Human
ccucaccacagagccuguccagcccacccgaggcgcucccugccucuggccagcucaggcugugugugggg

SEQ ID NO: 4103116 - RNA, 110 nt, Human
ccucacccuccacauugucucucauccuccaggacacuaacccaggcuucuacacauggugggagcagcguuccaggugaugagaucagcagcugggagaccuggugagg

SEQ ID NO: 4103117 - RNA, 59 nt, Human
ccucaccuauagagagaagaagaaaccguccacuucucaguguuguucugcagaugagg

SEQ ID NO: 4103118 - RNA, 60 nt, Human
ccucaccugccaaauggggaugcugagggcaccucgcucucuggagugggaggugucagg

SEQ ID NO: 4103119 - RNA, 65 nt, Human
ccucacuaauuggaacacuuuuugccucugccagugcuaggaaagagggacccagcuugguuggg

SEQ ID NO: 4103120 - RNA, 62 nt, Human
ccucacugcauuugcuucuccacuguuucaggagaaacucagucauaaagcgaaugcagagg

SEQ ID NO: 4103121 - RNA, 93 nt, Human
ccucacugccugugggugguagggugcugaccuguucucucaagaauggccagggaagaaaauccaucgcugccagcucuagugcccgugagg

SEQ ID NO: 4103122 - RNA, 66 nt, Human
ccucacuguuccucauccuccaaaacacauacuguuauuacgggagccagagggaugcaguugagg

SEQ ID NO: 4103123 - RNA, 56 nt, Human
ccucagagaggaggaagaacuucuuuuguaacaaguauuugcugccaucuuugagg

SEQ ID NO: 4103124 - RNA, 58 nt, Human
ccucagagcagcacccagaugacgaagucaccauucugagaugcugcugguuuugggg

SEQ ID NO: 4103125 - RNA, 55 nt, Human
ccucagagguguggcaucucugcaacccuagcagguggccaugccggcucugagg

SEQ ID NO: 4103126 - RNA, 66 nt, Human
ccucagagguuuucauucuguaggccagugugaggcuugcgaaguucugaaugaacucucugaagg

SEQ ID NO: 4103127 - RNA, 58 nt, Human
ccucagccagaaaguauguuagggagagucuucuccuucuucuucuuuuuugcugagg

SEQ ID NO: 4103128 - RNA, 56 nt, Human
ccucagccucugaggcaggcuggacagcagaauggagucuucuccagaggcugggg

SEQ ID NO: 4103129 - RNA, 117 nt, Human
ccucagcgagugcauugagugauauuggugugaggugggggcagcugggguggcuccaaggcacaguggcccugccagcuguucccacccaaaaccaucaccaugaaggagcugagg

SEQ ID NO: 4103130 - RNA, 55 nt, Human
ccucagcugagccucagcgucugugcugagcugcauaaggccugggaagcugagg

SEQ ID NO: 4103131 - RNA, 91 nt, Human
ccucagcugugacuccagcagcaucuucuaaguaaggcucucagaagcaugaagccugcaagauggcuggucacuuguaaagcaaaugagg

SEQ ID NO: 4103132 - RNA, 65 nt, Human
ccucaggaaaugaauaaauggcuauuuggaguccuggcucccuuugugcuuuuauauuccugagg

SEQ ID NO: 4103133 - RNA, 60 nt, Human
ccucaggcagcugccuucagcuggaugggaaacuucacuucaaccaggcagcuccugggg

SEQ ID NO: 4103134 - RNA, 63 nt, Human
ccucaggcaggaaacugucccgagcucccuuuggggagagccagacagugcuucugagugagg

SEQ ID NO: 4103135 - RNA, 60 nt, Human
ccucagggaaugggaggcuggguauuuauccaacaacuuccugcaccccauugcuugagg

SEQ ID NO: 4103136 - RNA, 88 nt, Human
ccucaguacuuggcucucaaccacuuuguaaucuuaccaacaauccccaguaaagccagaguguguuagagacaacagcuuacuaagg

SEQ ID NO: 4103137 - RNA, 70 nt, Human
ccucagucugucugaucugccagggagcucuggaguauaagucaaaccugagagauggacugacuugggg

SEQ ID NO: 4103138 - RNA, 67 nt, Human
ccucaguuucucugucuguuacauugggauccccacucccucucagugugaauucaggagccuaagg

SEQ ID NO: 4103139 - RNA, 66 nt, Human
ccucaguuucuucaucagaaaaugaagcuaauaguaagcuuuacaugagaugaggacaacuagagg

SEQ ID NO: 4103140 - RNA, 128 nt, Human
ccucauaagccagcacacaccuccagggauuuuacauugcagcuggucaggguaauucuaauucaaggaaucacuccacgggcuccagagguguccucccggugucuuuaaaagccguggccacgagg

SEQ ID NO: 4103141 - RNA, 72 nt, Human
ccucauagagugauguaagguaugugaagugccuggccacaguuuacccucaacaaauucacucuauaaagg

SEQ ID NO: 4103142 - RNA, 60 nt, Human
ccucauauacucuuggcagguaugcaaauuaguacaagagguuaaaagaguaauuugagg

SEQ ID NO: 4103143 - RNA, 75 nt, Human
ccucaucagggucugaaacugaucacagcauccugccaugcuguuucaagugaagucagacauucugcauucugg

SEQ ID NO: 4103144 - RNA, 73 nt, Human
ccucaucguguccgccaucuuggggcgacggccagaaguccagggcuaggagccucagccggcggacgccagg

SEQ ID NO: 4103145 - RNA, 91 nt, Human
ccucauggaccacggagcccagcagaaaguccagccucuggcacagcuccccaagguuggccaagcugcuggcccugugagcaccaucagg

SEQ ID NO: 4103146 - RNA, 60 nt, Human
ccucauuacaucacccuguuuuauaaaaugaguugucacuggaaagugcauguaaugagg

SEQ ID NO: 4103147 - RNA, 96 nt, Human
ccucauucuugggggacugccucugucaccccagcauggggggacccuggaaagcuuggcagggacaggggccggcgucuccgggggcaggugagg

SEQ ID NO: 4103148 - RNA, 70 nt, Human
ccucauuggccaaaguacaaaucucaggagagagaaauugagcaguuugaaucaauggccagaagugagg

SEQ ID NO: 4103149 - RNA, 70 nt, Human
ccucauugggcugaucuguggaagaagacaagcagaaaaagaagagucaacucugcagaggaguuugagg

SEQ ID NO: 4103150 - RNA, 60 nt, Human
ccucauuuacacuaugggaacuacacuauaaguguaguuguuacuuagugucaaauuggg

SEQ ID NO: 4103151 - RNA, 84 nt, Human
ccucauuuuaagaguuuugauuuaaucauaccugcaaagucucuuuugucuuguaaguuaaauucacagauuccagggaugagg

SEQ ID NO: 4103152 - RNA, 72 nt, Human
ccucccaaagugcugggauuacaggugugagccaccaugcccagccuuauuaccugcacuuugaagaagagg

SEQ ID NO: 4103153 - RNA, 71 nt, Human
ccucccacucuccucucucucuuucugucucucucccugcuaagaaagugggaacaauggagaguguuagg

SEQ ID NO: 4103154 - RNA, 91 nt, Human
ccucccagagauuuuguauguugaaauccuaaccuccaaugugauaguauuuggaauggggacuuugggacauaauuagguuuaggggagg

SEQ ID NO: 4103155 - RNA, 74 nt, Human
ccucccagcuaagaggucacuugguuugggcuucauuaggacugagacuuuguugaguucuuucugggacuugg

SEQ ID NO: 4103156 - RNA, 103 nt, Human
ccucccaggaaaaggaaaggguuuucccagagcuguccucaaggagcuggagucgcuugguggaguuucagccucugggugcccuggcuugcccuuggcgagg

SEQ ID NO: 4103157 - RNA, 72 nt, Human
ccucccaguaaucacuguguauugcauuaugcaagucagcaaauucugcucacuuuaauauacaugaggagg

SEQ ID NO: 4103158 - RNA, 120 nt, Human
ccucccaguucuguucuuccuucuuacuuucaccaggcuccucaugaucuuguuucuggugaaaucaagccaaaaccaagggcagcuuugaagauagaacaaggaauagagcuucauagg

SEQ ID NO: 4103159 - RNA, 56 nt, Human
ccuccccgugucugucugcaccaggagcaccugggacugggaaggucaaggggagg

SEQ ID NO: 4103160 - RNA, 94 nt, Human
ccucccgccacucgccggcggcggccggugugcggcugcgacaauguggccauuguuugggagcugcaaaccaggccggcgcgcaggugggagg

SEQ ID NO: 4103161 - RNA, 65 nt, Human
ccucccucagagaccguggugcagugauuucauguuuuucauauaucaauuuuuuuugggggggg

SEQ ID NO: 4103162 - RNA, 56 nt, Human
ccucccuccauugccaucgucugaucaaggggcugggcagggcgacacgggggagg

SEQ ID NO: 4103163 - RNA, 68 nt, Human
ccucccugggugcugggauugcaggcgugagccaccgcgcccccgguccaauuuaguaaccagaaagg

SEQ ID NO: 4103164 - RNA, 59 nt, Human
ccucccugguggcucuggucuagccccugguuuaauccuaggauuggggcuaggggagg

SEQ ID NO: 4103165 - RNA, 64 nt, Human
ccucccuuccuccugcagcagggguucuggaaaaagcccagggcugccagggaggugguggagg

SEQ ID NO: 4103166 - RNA, 72 nt, Human
ccucccuucucuuuccuuucacccccauuucaaaauccaauuugacaaaggcugagaggaaaagaaacgagg

SEQ ID NO: 4103167 - RNA, 73 nt, Human
ccuccggcaucacagagcucccuuccacugggggugaagcacucucccagcagcagcuuagugguccccaagg

SEQ ID NO: 4103168 - RNA, 64 nt, Human
ccuccguaaauacaaugucaaguaaauaaaguaugaucuuaauugacagaaaguuuacgagggg

SEQ ID NO: 4103169 - RNA, 130 nt, Human
ccuccguuucuuuccuugguuuucuaaucucuccaaugggaauguuuuuauuugcuuuucucuuacaucguggaagcaguagaaugcauugcuuuucugaaggacuggaagaaggaaagggaaagggagg

SEQ ID NO: 4103170 - RNA, 59 nt, Human
ccuccuaggccagucagccccagccugaagugaagggagggcuuggcugccuggggagg

SEQ ID NO: 4103171 - RNA, 64 nt, Human
ccuccuccagcucucccugggggugucucagaggagucuccugguucagagagcugagaggagg

SEQ ID NO: 4103172 - RNA, 129 nt, Human
ccuccuccuccuccuccuccuccuccucuucgcuccaagggcgccuccguucccccagcccuuguggguggacggugcuuuuguuucucccgagcuguaaggaguaggggguggaugcuaguguggagg

SEQ ID NO: 4103173 - RNA, 83 nt, Human
ccuccucgggcagcagcaggcgcucggccgucuggaucucccuggaggugauggucgagcgcuuguuguaaugcgccaggcgg

SEQ ID NO: 4103174 - RNA, 130 nt, Human
ccuccucuccuucccaggggccagaccugcaucucgaucugaaggcuuuucuugccuccuccugcacccuaccccaagaaaucucuagcacaucgaaucccauguuagugucugcuucucaggacauuug

SEQ ID NO: 4103175 - RNA, 62 nt, Human
ccuccugaauccaggagaguaggguagccuaacccaaaucucaugaauucagaaaccagagg

SEQ ID NO: 4103176 - RNA, 105 nt, Human
ccuccugagaacuguuguuccaaagucugguuccaggacggguuuguggaaugagugccaauccagcccugugucugggagagaggccagggagcugcugggagg

SEQ ID NO: 4103177 - RNA, 56 nt, Human
ccuccugccuguuuaccuguacuuagucacagugcuguccaggacccagcaggagg

SEQ ID NO: 4103178 - RNA, 61 nt, Human
ccuccuggaaaaauucccuggccucagaaaguguaacaauggccuggcggauuucuggagg

SEQ ID NO: 4103179 - RNA, 63 nt, Human
ccuccuggcaguuccccuugucacuggcgccacccuaugagaaggugacugccuggcauuagg

SEQ ID NO: 4103180 - RNA, 61 nt, Human
ccuccuggggugaaggaugggaaggcuggagaccuuaaaggccagcccgacccccgggagg

SEQ ID NO: 4103181 - RNA, 73 nt, Human
ccuccuggugcugugggucagaauuacaguacaaccugucucagcugugucuucugcuuacagucucauaagg

SEQ ID NO: 4103182 - RNA, 59 nt, Human
ccuccuucuggggccuucugcucagaaccuggacaagagcugugggcucagaggggagg

SEQ ID NO: 4103183 - RNA, 60 nt, Human
ccuccuuugcauucuuuagaggucacauuggcugcuguagggagaaagaguugaaggagg

SEQ ID NO: 4103184 - RNA, 63 nt, Human
ccuccuuuucucagugcaguuucuacgucugcuucagaugcugccugcaaugagagaaaaagg

SEQ ID NO: 4103185 - RNA, 57 nt, Human
ccucggcaccccagcugcccugggccagugccacagagcaggaauaggguguugagg

SEQ ID NO: 4103186 - RNA, 81 nt, Human
ccucggcagccuggcccagcaggaagacauugaagcucaccaggagguggcagggagugucccugggggaagcugcugagg

SEQ ID NO: 4103187 - RNA, 82 nt, Human
ccucggcgcuuuauggccaagcauauacagauugaguuuucagaacauaauuugugcuugggucuuucugcgaugaccgagg

SEQ ID NO: 4103188 - RNA, 130 nt, Human
ccucgugguucccuugccaggaacaauguauguguuuuguggagucugucuuacccaaggccagaugcccuuggcugaacuccaggaugcauccugauccuguuuacaggcgaggaaggaccaagucugg

SEQ ID NO: 4103189 - RNA, 63 nt, Human
ccucuaaauuguuugaaguuggucccagcagcauaaaauggguuggccccaaaggguuggagg

SEQ ID NO: 4103190 - RNA, 84 nt, Human
ccucuaaccaguuggccucaguuuggguuuccaccuauugauggaaugaccuggaauguaugggaacccaaauccaaccagggg

SEQ ID NO: 4103191 - RNA, 67 nt, Human
ccucuacccuggucaugacaggcagcaaucacagaccacagacucucccugcugagccagugugagg

SEQ ID NO: 4103192 - RNA, 67 nt, Human
ccucuacucaggccuccuucuguccuuugugcuacaacaaugggcggaaacacagccuuguuagagg

SEQ ID NO: 4103193 - RNA, 72 nt, Human
ccucucaauggacacagggucaccugggggcugugggggaagccagccagaguggcugugugugaggagagg

SEQ ID NO: 4103194 - RNA, 81 nt, Human
ccucucacagagggaucugccaggacuugggugcacaggguguagggccuagguaccagcagagagccaggcucugagagg

SEQ ID NO: 4103195 - RNA, 62 nt, Human
ccucucagaaguuuaugucagaaguuggaaacucccaguucuaacauucuacuuuugacugg

SEQ ID NO: 4103196 - RNA, 62 nt, Human
ccucucagguccuuacugugcucccuccgcagaugagaaggagacgccagggccuggggagg

SEQ ID NO: 4103197 - RNA, 62 nt, Human
ccucucccugaccuggauuccaggccucucggaaaagggggccaggagggggcagggagagg

SEQ ID NO: 4103198 - RNA, 71 nt, Human
ccucuccugccugucccucaguccacaccgcagggccuuccagagccuguggcugaaggagggaggagagg

SEQ ID NO: 4103199 - RNA, 57 nt, Human
ccucucggcagcccaucuugucaggaaagaucagaucuaggacaggcagccgagggg

SEQ ID NO: 4103200 - RNA, 57 nt, Human
ccucucuagcucucucugcuucagaauucccagggaagcaacucugacuagaugagg

SEQ ID NO: 4103201 - RNA, 56 nt, Human
ccucucucuuuagaagcgucuggcuuuuggaacccagaaccaucaagggagacagg

SEQ ID NO: 4103202 - RNA, 70 nt, Human
ccucucugauucaugaaaaggcaguuuuucuuucccuugggaugcuguauuuauaugaaggcaugggagg

SEQ ID NO: 4103203 - RNA, 66 nt, Human
ccucucugcacccugugguccucuagaguagcuagcucugaggccccaagguggguacaaagcagg

SEQ ID NO: 4103204 - RNA, 83 nt, Human
ccucucugucagccgugcuaguaggagaccuagcucuuuggaauacaagcucagggcugcuuaccuggaauggcuacuggagg

SEQ ID NO: 4103205 - RNA, 69 nt, Human
ccucugagaggcugcccugccaucaagcucuugaaaaguuggcacagggagccccauuuuucucaaagg

SEQ ID NO: 4103206 - RNA, 72 nt, Human
ccucugaggugaacuuguguacuuuuuauugauugauuuuguuuucaagauaguuacaaguuuauucagagg

SEQ ID NO: 4103207 - RNA, 59 nt, Human
ccucugaguccucccugguugcucuuucuucucuggagugaccuggaaggacugggagg

SEQ ID NO: 4103208 - RNA, 58 nt, Human
ccucugcagaagaauuaaggacaggcucagugaggcugcccagcauccucugcagagg

SEQ ID NO: 4103209 - RNA, 78 nt, Human
ccucugcagaggagcugaaacuucucauauggaaccaguggguuuccuccccgaccuucaccuacccgucugcagagg

SEQ ID NO: 4103210 - RNA, 55 nt, Human
ccucugcaugugcaguaccgaguaccuauuacacauucaggacuguacugcaagg

SEQ ID NO: 4103211 - RNA, 75 nt, Human
ccucugcucagcaucccucugagauaggcagaaauuacuccauuuuacagaugaggauacugagguucaguaagg

SEQ ID NO: 4103212 - RNA, 60 nt, Human
ccucugcucuggcaaaguggacauucaggcccucuucuuccaugugccaaggggcagagg

SEQ ID NO: 4103213 - RNA, 76 nt, Human
ccucugcuggcucccugacagcauuuuguagcuguuuguaagugacaacuaaaggcuguugcagggaaacagaagg

SEQ ID NO: 4103214 - RNA, 130 nt, Human
ccucuggaucacuaguucaaaugcaaaaggccauaaaaagcuguuaucuucuggcggacucagugaaaguuuccaggcgauaucagcugccacaaauggcgcucgcgugacaaaugcucggugcacaggg

SEQ ID NO: 4103215 - RNA, 81 nt, Human
ccucugggaugucuugggagggaaggagcugaggaaggagcacagauuucuguccagcugacauucccuuccccacagggg

SEQ ID NO: 4103216 - RNA, 60 nt, Human
cgagggcugucagugacucacugcgugggccacccagggcauguggugcugaggcugucg

SEQ ID NO: 4103217 - RNA, 115 nt, Human
cgaggucagugaagauuuaaacaggggauacagugccucuuaagugucacccaguauagcugagugacacuucagaggcaaagucuaccuugucuuaauugcagucacaacccug

SEQ ID NO: 4103218 - RNA, 64 nt, Human
cgaguauguguaggaggaggacagggugggaccauagacuuugccaaaagcugcagguggaucg

SEQ ID NO: 4103219 - RNA, 62 nt, Human
cgaugaauucugaacccuguagauguuuuguucuacugggaggcacuauucaggaggcauug

SEQ ID NO: 4103220 - RNA, 68 nt, Human
cgaugccagcuagucacauauuagagauucuauauacaacauaucuguaaaagugagaaguuggaccg

SEQ ID NO: 4103221 - RNA, 71 nt, Human
cgauggauuugggcugcagcaauuauuaguguggcauuggccuauugguaguuuuguauuucucuccuuug

SEQ ID NO: 4103222 - RNA, 64 nt, Human
cgaugugaugugcaggcccacuucuuaccccagauagccucgggugcugccuguagucaugcug

SEQ ID NO: 4103223 - RNA, 96 nt, Human
cgauuuaagggauaauugcauggaguuucuuaguccuagagugauuuuuauauuccagagguagcuuguuuugauuaagccaugcuuuuuaaauug

SEQ ID NO: 4103224 - RNA, 69 nt, Human
cgcaagccagggaagaggccuaccucugucucagacuuggcggccaaggaaggcuuccuggaagaggug

SEQ ID NO: 4103225 - RNA, 130 nt, Human
cgcacauuuggggugagugcucagcccaggagcgcacauuuggggugagugcucagccccggagcgcacauuuggggugagugcucagccccggagcgcacauuuggggugagugcucagccccggagcg

SEQ ID NO: 4103226 - RNA, 60 nt, Human
cgcaccuucuuagugcucagggaguggacauccuagacugggagcaugagagaggcugug

SEQ ID NO: 4103227 - RNA, 129 nt, Human
cgcacguaggaccagcggccgugcaccagcaggaggcgcugcaggaagcagaacuggccgagcacgaagucgcuguucugaacugccugcaugcccuccuggcccgccagccccacgcccacguccgcg

SEQ ID NO: 4103228 - RNA, 61 nt, Human
cgcacuuggcuccugacaaugugacaccauguggcgauacaggcaggcauggccaaaugug

SEQ ID NO: 4103229 - RNA, 60 nt, Human
cgcaggcuggcgcggaguggcaggaaucccccgcgcaggggcgcucugccccggccugug

SEQ ID NO: 4103230 - RNA, 79 nt, Human
cgcaggcuucccuggggcccaucgagggcugaggauggccguccagcccacuccccagggccccccucggacagcugcg

SEQ ID NO: 4103231 - RNA, 58 nt, Human
cgcagucaaauuugaaaacuuugaggaugcagcacuggaagaaaaugguuuggcugug

SEQ ID NO: 4103232 - RNA, 61 nt, Human
cgcaguguauuucaauggcugaagugguuaccgcuuccagccaugcaugacaaucacugug

SEQ ID NO: 4103233 - RNA, 109 nt, Human
cgcaguugaaaagguuuguugcauucguuguugaaagguuaaaaguaguauugcuagguaaagcuaugcuuaauuuaucauguacucaaggggcucuuuuaggcugacg

SEQ ID NO: 4103234 - RNA, 64 nt, Human
cgcauggcugaggcagaggacugaaaacucagagcugagaacucugcucccuguucagccggug

SEQ ID NO: 4103235 - RNA, 77 nt, Human
cgcauugugaaguagccaaaacauuuuagguugugcuuuucacgucaauuuauuuggcaaugcuucaccauaaugug

SEQ ID NO: 4103236 - RNA, 118 nt, Human
cgccacuacccagccccugaaggcccagccccagccccaccagggccccugccaccagcccccaacaguggcacugggcccagugguguggcugggggucggagguuggggaagugcg

SEQ ID NO: 4103237 - RNA, 68 nt, Human
cgccacugcccaccccgacgucuacccuggcggagaagcuccugggcgacggggcgggcgggcaggug

SEQ ID NO: 4103238 - RNA, 79 nt, Human
cgccauuugaaauucauucuauaugcagagcuguuccauguugaaaaugauuucugugcaguaaauggugaugauggug

SEQ ID NO: 4103239 - RNA, 59 nt, Human
cgcccagacuccucggaccaaucagcggagcucccucuccgcagcgugugaggagggcg

SEQ ID NO: 4103240 - RNA, 68 nt, Human
cgcccgggcagccccgcacuggagcuggaacgaguccuggcagccggcuccgcgggagcucccgggcg

SEQ ID NO: 4103241 - RNA, 93 nt, Human
cgcccgggcuccagcuuuggcucuggcugggcuccagcuccuucagcugcaccagcuccaccagggccuugguugugaagauggagacccgcg

SEQ ID NO: 4103242 - RNA, 70 nt, Human
cgcccggguccgagccucuggaccccucgggcucccggcugggugucacggggcucgugugacggcggcg

SEQ ID NO: 4103243 - RNA, 73 nt, Human
cgccgagacagaauauugguuacuguugcugcaaccaugacagcaauaauuucuucaagcguucugcuaggug

SEQ ID NO: 4103244 - RNA, 118 nt, Human
cgccgaggugcuugugggacaggcccggggggccuuggaggagaaggacuuucagaaagcagaagggcugcugcuccgggcccagagaccaggccuggcccucaauuauuauaaggug

SEQ ID NO: 4103245 - RNA, 75 nt, Human
cgccucccuugguuucacacugcaugguguaguccaaggacugcacuggcauuucaguuugaacacuaagcggug

SEQ ID NO: 4103246 - RNA, 64 nt, Human
cgccuggccaccugggccugggucuugagggcaggccccagcuucaaccccgugguggucagcg

SEQ ID NO: 4103247 - RNA, 74 nt, Human
cgccuucugugugcccacguuuauuaaauuaccacagaugucgugugaacagaugggcgcaccccugagaggcg

SEQ ID NO: 4103248 - RNA, 55 nt, Human
cgccuuucuguguugcccuauuugguuucgcuaguucugccacagggagaaggug

SEQ ID NO: 4103249 - RNA, 72 nt, Human
cgcgaccccgcaacgccggcaccgaaagggccuuagaaacccucugguccaaggcucgguggcggggaagug

SEQ ID NO: 4103250 - RNA, 69 nt, Human
cgcgcucuuugauggcuucacuguccuggacacccccucagaucugugcugucucagagaaagcaagcg

SEQ ID NO: 4103251 - RNA, 66 nt, Human
cgcggcaucccaugguggucucugcccuccagaggcugccagucuaaugggaaacagcuugcugcg

SEQ ID NO: 4103252 - RNA, 74 nt, Human
cgcggcgcucgcgucacgugccccucggucgaccaaugauccccggcgggcgcggugacgucagaguagcggcg

SEQ ID NO: 4103253 - RNA, 77 nt, Human
cgcggcugcggcggcuucgcgcccgccccgggcagaacagguuccuuccaguuugggugugagcugcgcgcgcggcg

SEQ ID NO: 4103254 - RNA, 63 nt, Human
cgcgggaggccggagcgugaggacugagggccgcguggccauccuccuucuccggccaccccg

SEQ ID NO: 4103255 - RNA, 84 nt, Human
cgcguggaggucuuucucgcaagccuggccagcggcuuggguuugcugcacgcacagccccagcgcggcgggguccuccgggcg

SEQ ID NO: 4103256 - RNA, 67 nt, Human
cgcgugggugccucacccccuggcagcgccuccagggacgcugcuccgggaaagagcagccgccgcg

SEQ ID NO: 4103257 - RNA, 64 nt, Human
cgcgugucuggccugggccugccggugcaacagcaguugucgccaccgguccuaggccgcgccg

SEQ ID NO: 4103258 - RNA, 111 nt, Human
cgcuaagcaggucauaaaguaagaaguggcagagucaggguuuggaaaccagacaguuucacuccagaguuccuacucugaaccacuaagcuauccugccugaacauggug

SEQ ID NO: 4103259 - RNA, 86 nt, Human
cgcuauguuacuuccaauggaagcuuugcaaaggaauccgguugccuaaaaacguauucuuuuaagccccagggauuugcauggug

SEQ ID NO: 4103260 - RNA, 63 nt, Human
cgcucagccucucauguucucccccagcuaaaguaagcagcuggcccaggugagagguuggug

SEQ ID NO: 4103261 - RNA, 130 nt, Human
cgcuccacagggcauggaugggcaccugggggagaggccacggaguagcugaggccugggaagcccagaagccugggaugucuggcucaucucuccagguaaacccccaggcccagcccaggagccccag

SEQ ID NO: 4103262 - RNA, 125 nt, Human
cgcucgcuuauuuuuuguucuagucucucuugcuucaguuuuuauacggcuucuaaaacgcuucgcauuuacaauagugacugaggugcccagaggugacuuuaauuuuccauugagcugagacg

SEQ ID NO: 4103263 - RNA, 69 nt, Human
cgcucugauuucuucauucauuagauggauaucauauuggccucuacgaggauuugagaggugggagcg

SEQ ID NO: 4103264 - RNA, 69 nt, Human
cgcugcccaggauggcuggaggugcucuguccccuagagcacagcaucucccucuguccuggggcagug

SEQ ID NO: 4103265 - RNA, 70 nt, Human
cgcuggaauccacggcaacacugggcccagcuuuccucggugugcgggugcuguggaaggagcuccggug

SEQ ID NO: 4103266 - RNA, 61 nt, Human
cgcuggcagggcugaucugaagacuggcagcaacuccuuuuuauacuccacucugcaagcg

SEQ ID NO: 4103267 - RNA, 124 nt, Human
cgcuggccuuucugucucugaagcaguugcuuagcaaugugacaagaugccagacaguuggagacccaaguaaguguucacaugcuggggggaagcagagggauggcugaauauggggcuagug

SEQ ID NO: 4103268 - RNA, 98 nt, Human
cgcuggcucggagcuccuucaccaccaccugggcggggguguagucggagaaaaucucucccaggaucaccuggucaaggggcacccaggagucagcg

SEQ ID NO: 4103269 - RNA, 56 nt, Human
cgcuggggccugaacagucagcugaaucagccuccugcauuuugugccccacagug

SEQ ID NO: 4103270 - RNA, 59 nt, Human
cgcugggggaacagcgaggguguggagcaggagacacaggcccucugccucccucagcg

SEQ ID NO: 4103271 - RNA, 116 nt, Human
cgcuggugcugagcagaagcgggcagaaguggggucugcuuucaggacuucauuucccccacucguuccggccccgcaugcuccacgucugcccuuuggucugaguuaaaacugcg

SEQ ID NO: 4103272 - RNA, 63 nt, Human
cgcugugcccaucccagugggugcugaggaagcugaacggcagugcugacucugggcacagug

SEQ ID NO: 4103273 - RNA, 82 nt, Human
cgcugugucuucuguaagaugagguccccuccauuacccugggccagggaucucaaaacggaaggccgccaaccagucagcg

SEQ ID NO: 4103274 - RNA, 87 nt, Human
cgcuuaucagcagaucucaggagaguguucaguggaggcccugccggucugcacagcucaccucccugggaacugcucgccugagcg

SEQ ID NO: 4103275 - RNA, 61 nt, Human
cggaaauguugggacaaacacagucugaucucccaagaaagauuuugucucaauacuucug

SEQ ID NO: 4103276 - RNA, 69 nt, Human
cggaccuuaggauuuaggcuuuaacaucuccacaucaugagauucgaaaccuuuaggucuuuucuuccg

SEQ ID NO: 4103277 - RNA, 130 nt, Human
cggagagagugacagaacccaggacgagaucgggagacucaaggaaugacauagaaaggggagaggcauggggcguccucaagucauuccggagaccucugcccaucuuccaccaugagaacacccagag

SEQ ID NO: 4103278 - RNA, 55 nt, Human
cggagauauuuaagguucucuccauguaaggacauuagaaucuaaauuauuucug

SEQ ID NO: 4103279 - RNA, 80 nt, Human
cggagcagaaaugagagaaguccaaggugaaagagaacacauagauuauuacguggcuucuaaaguuucuuuuaguucug

SEQ ID NO: 4103280 - RNA, 69 nt, Human
cggagcuuccuggucagguacuuuuguaagcugcaguacuuacaaguaguaaauuauuaggugguacug

SEQ ID NO: 4103281 - RNA, 72 nt, Human
cggaggcgggaccaggggcggggcgaggcccucagccggcucccagggcacucacccucccuccccgccccg

SEQ ID NO: 4103282 - RNA, 76 nt, Human
cggagggaaggcggggcaagcacagcgagcgugcgcaauagcgcaguagcggcgcaugcccauuuggcuucccccg

SEQ ID NO: 4103283 - RNA, 65 nt, Human
ccucugggccaugcuacugcucuugaauauacuggaacgagacacuaaaagcugcccagaaaagg

SEQ ID NO: 4103284 - RNA, 79 nt, Human
ccucuggguagcaauaacagaaaacuuuccuuuuccuaagaucugggaaugugauuguuguuuuaauucugcucagggg

SEQ ID NO: 4103285 - RNA, 77 nt, Human
ccucugguaaauuuccccuuaucauacccaagauugugguuaacacaguguauguccugaggggagaagaccacagg

SEQ ID NO: 4103286 - RNA, 62 nt, Human
ccucugucuccugccagugccucugauaggccaaacccaauuagaaggcaggagacaaaagg

SEQ ID NO: 4103287 - RNA, 88 nt, Human
ccucugucugcuaucaggcagggugagcagcugucuguauggaugugcuuaucuugggcagcuugcucgcccccugugcacacccagg

SEQ ID NO: 4103288 - RNA, 80 nt, Human
ccucugugcagacauggggaagccccaggcccaaaugcuugcugaagggccuugcaggcauuccaugaaguugcacaagg

SEQ ID NO: 4103289 - RNA, 55 nt, Human
ccucugugggaccucagaggguccccuuccuuggaagcagacagguccagagagg

SEQ ID NO: 4103290 - RNA, 62 nt, Human
ccucugugucuugguuucaagauuuauuuaaaaaucauagaaugguaauuaggacacagggg

SEQ ID NO: 4103291 - RNA, 70 nt, Human
ccucugugugaaccuucggcucaguuagaagcuuccuccuugggaaggguuuggaaagccgagauagagg

SEQ ID NO: 4103292 - RNA, 88 nt, Human
ccucuguugauggugaaucauuuuacugggcaguuugggcuagguuaugccaugguagcaacaucucaguggcuuucaacaacagagg

SEQ ID NO: 4103293 - RNA, 87 nt, Human
ccucuuaaguggcucuggugguuauauuauugugcggugcuaugagucacugucuauuaauauaacuuacccagggcuuguaacagg

SEQ ID NO: 4103294 - RNA, 65 nt, Human
ccucuuacuaggcacugggcuaggacagguagaaugacaauaagacauguccccuaugcuuaagg

SEQ ID NO: 4103295 - RNA, 64 nt, Human
ccucuuacucgcccucauguaccaggaccuacugaucaggccccaugcugggcgcagugaaugg

SEQ ID NO: 4103296 - RNA, 62 nt, Human
ccucuucagacccuuagcugugauuaauguaaaaaggcacuugucaaaaggguuugaaaugg

SEQ ID NO: 4103297 - RNA, 62 nt, Human
ccucuucuuuguugagacagauauuuuacagagaguggaguaaaauuucugcugaggagagg

SEQ ID NO: 4103298 - RNA, 90 nt, Human
ccucuugcacacugaagcaugguuucugacgucaugcugacugcuucaauuugccaacauaacucugaggcugugcucucaggcaagggg

SEQ ID NO: 4103299 - RNA, 62 nt, Human
cggcagcuuguccuucaggagagcuuuauuaaacaaggcacucugagaaguacaagcucccg

SEQ ID NO: 4103300 - RNA, 87 nt, Human
cggcagggacuguggauuugggcagcaggagccugggucugaagcagaggcuuuccuuggugcgccugcugcagcucccgcuugccg

SEQ ID NO: 4103301 - RNA, 70 nt, Human
cggcaugcacggcccggccggguacccggcgcacggccccggaggccuggugugcgccgcgcagcugccg

SEQ ID NO: 4103302 - RNA, 74 nt, Human
cggccaaaagaagaggugaauagaagucaaucacuuuaguaggaagaucaaguuuaucucagaccuauugguug

SEQ ID NO: 4103303 - RNA, 80 nt, Human
cggcccagccguggauuggccuguggucugcguguugccagcagugcagaagcagagccgguggccucgguuuggaaccg

SEQ ID NO: 4103304 - RNA, 92 nt, Human
cggccccugaggggcgcuacuuugcggcgcggaggagcaucguggcggcgaugcgucccccguuggucguugagccugccucugauuggcug

SEQ ID NO: 4103305 - RNA, 64 nt, Human
cucauuccugccaaagcauguacugggcaccuacuguguaccagccucuguuggggguggugag

SEQ ID NO: 4103306 - RNA, 86 nt, Human
cucauuguuucaucucccuuggucacagauuccucgucuguagaagaugaugguuccuccuucaugggaugagaaaugcaacugag

SEQ ID NO: 4103307 - RNA, 56 nt, Human
cucauuguuucuggagggaucuguguuuuaggcaacagcguuaaggaaaggaugag

SEQ ID NO: 4103308 - RNA, 111 nt, Human
cucauuuagcaaagaauaguucuauaugcaaucuuccugcuaggccuguggccugguucaugguggaaugacaugcauuuggcaauuuuuuuugacuaugcuuuuagugag

SEQ ID NO: 4103309 - RNA, 127 nt, Human
cucauuugcugaggugaugggaguucaccaaugcaucccuucacagaugcgauguuuauauugaguacacauuuaucuucucugugcaggagaugcaaagucaaaucccuucaguuggccagauggg

SEQ ID NO: 4103310 - RNA, 77 nt, Human
cucauuugugcccuuauuagaugucaucaagagucuugugugccuccugcugccacauuuaaagaggggagagagag

SEQ ID NO: 4103311 - RNA, 85 nt, Human
cucauuuucagugccuguagaaugaaggacaacaggggagcaggccacaaaccugaacucccucugcuccuucccugaaagugag

SEQ ID NO: 4103312 - RNA, 69 nt, Human
cucauuuugcagccacaucugaccugacaugaacacauuaggugguagagccuggcuugcauugauggg

SEQ ID NO: 4103313 - RNA, 70 nt, Human
cuccaacagaaauguuuguuaauauugugagcuacaggcaaacaaugaagggagacacuugcuguuuggg

SEQ ID NO: 4103314 - RNA, 63 nt, Human
cuccaacgaggcugggguacaacuagaggcgguugucuccauugacccgaguccuucuugggg

SEQ ID NO: 4103315 - RNA, 62 nt, Human
cuccaagauggcaggaaucauaagcuggagacaucuaguuauuguugcugcuguugaugaag

SEQ ID NO: 4103316 - RNA, 91 nt, Human
cuccaaggguaaagguaaaucuguacauuuguguugugaauuuccuggagguucaaauugagaugguauaaauaccacauaacccaugggg

SEQ ID NO: 4103317 - RNA, 61 nt, Human
cuccaaguauguuaaaaucuaaccaucaaugugaugguauuaauaggugaauacuuuggag

SEQ ID NO: 4103318 - RNA, 57 nt, Human
cuccaagugguggaggccccagauggucugggucaggugcuuccagcacugcaggag

SEQ ID NO: 4103319 - RNA, 92 nt, Human
cuccaauauucagguagacauacagugcaguacauaugucagcaggccguguggcuguuucauguguuuuucagugauugaagaaguuggag

SEQ ID NO: 4103320 - RNA, 81 nt, Human
cuccacaacauucacugucuguacccaagacugucaugccuaccaacucuaaguuuuauaugacagcagggauuuuuggag

SEQ ID NO: 4103321 - RNA, 66 nt, Human
cuccacagggauucacccaaaagguugcccaggcauucuuuucuuccacuguguccucuguaggag

SEQ ID NO: 4103322 - RNA, 66 nt, Human
cuccaccugccagggaggcccccuuugcaugugcuccaagcagcugcuccuuuccugcaggcggag

SEQ ID NO: 4103323 - RNA, 60 nt, Human
cuccacuccagccauuuguccccagcccucccugugggccuugugugacuggaggaggag

SEQ ID NO: 4103324 - RNA, 123 nt, Human
cuccagaagugguugccugcaccuaacuggggucuguggaccuggccagauaauuccuaaacaugggccaggcuccgcauagaccccacuuucaguuuuucaucaucagagaccugucuggag

SEQ ID NO: 4103325 - RNA, 130 nt, Human
cuccagauggucccucccuggcccucuggugccggcugcugaguuggccaggagaccacuacgugcuucucccaaccagggccugcaccuguuuauuccacccaaguuggccaguuggggugccaggcug

SEQ ID NO: 4103326 - RNA, 71 nt, Human
cuccagcagagagucagcacauagacuggccaagcugcccccagaucuuuggugauaucucuuugguggag

SEQ ID NO: 4103327 - RNA, 69 nt, Human
cuccagcagcuuugccaagucagccuccgggccaucuggcuguccuuggccaaggcacuguuaacggag

SEQ ID NO: 4103328 - RNA, 85 nt, Human
cuccagcuccuuaauccggaucuccagcucgcagagcuccuccgggugggaggcagaggcgagccugggggucgaggggcagggg

SEQ ID NO: 4103329 - RNA, 60 nt, Human
cuccaggagcugugucuuucuuucaggauaacauagaaguuaagagcacagaaucuggag

SEQ ID NO: 4103330 - RNA, 89 nt, Human
cuccaggauaaagugccacagcuggaucugccucgagccaggggaugacucuggcuuguaggcccaauccgggaaggcaaacccugggg

SEQ ID NO: 4103331 - RNA, 86 nt, Human
cuccaggcauuuuuuacagauauuguacaguuauagaugcaaauacaaauguaauuauagacuucagugucuguugaugucuguag

SEQ ID NO: 4103332 - RNA, 80 nt, Human
cuccaggccaagauuaaguaauuuuuugugaagcaccaagagccacagcuggauaucauauuacuuaaucucuccuggag

SEQ ID NO: 4103333 - RNA, 77 nt, Human
cuccagggccgggaucugcaucuaaacccucuccaagagaaaggcacggguguuuaaugcagauguggguguuggag

SEQ ID NO: 4103334 - RNA, 129 nt, Human
cuccaggggaggguucuccaggggaggguucuccaggggaauguucuccaggggaggguucuccaggggaggguucuccaggggaggguucuccaggggaauguucuccaggggaggguucuccagggg

SEQ ID NO: 4103335 - RNA, 89 nt, Human
cuccagggugugaguccagcgggagaguguugaugagaauuauuuuaugagauauuuauacugcugaguuuaauaaaaucaaauuugag

SEQ ID NO: 4103336 - RNA, 62 nt, Human
cuccaggguuccccgauccacuuacugaucucaguccuggguuuacaggggauacucugcag

SEQ ID NO: 4103337 - RNA, 55 nt, Human
cuccagucuuguuuccuaccuaaugaguuagucagaauaggaacauugauuggag

SEQ ID NO: 4103338 - RNA, 56 nt, Human
cuccaugcuggccccugaaacuuucuuuguugagggacaggggaagaagcaaggag

SEQ ID NO: 4103339 - RNA, 91 nt, Human
cuccaugucaccaguucugguuaagacagacgggcuugucuucugccuccgagacuccuggaucuuagccagauucuggagugaguugggg

SEQ ID NO: 4103340 - RNA, 71 nt, Human
cucccaaagucaggcccaguguuugacaccugcaauauggcagaguggggacagggccuguccucagggag

SEQ ID NO: 4103341 - RNA, 73 nt, Human
cucccaaagugcugggauuacaggugugagccagcaagacugucuuguuucuuuaucauagcaucuuugugag

SEQ ID NO: 4103342 - RNA, 98 nt, Human
cucccaagccacaucgaugcuagggcagucugcucagcccugaguccuccggggagcaggggggcagagcugagcggcugcccggagcuuggcgggag

SEQ ID NO: 4103343 - RNA, 58 nt, Human
cucccaaguccuugaagaaacaguucugugugguagauuugcuucucaaagggcagag

SEQ ID NO: 4103344 - RNA, 58 nt, Human
cucccacacagcccgcucaccggaccccaccccguccgggccagauggcucuggggag

SEQ ID NO: 4103345 - RNA, 96 nt, Human
cucccacaccaguguggcagggucucuacgcacuagaggggcccccgagggaccucuccuggccacguuggagccaguucgucccgcugguuggag

SEQ ID NO: 4103346 - RNA, 98 nt, Human
cucccacauacgcuggugaaagggugguuuuauccucaggcaaagcuuccuggauucagugaaaaccccuuucgaacaucagauggcaugucacagag

SEQ ID NO: 4103347 - RNA, 129 nt, Human
cucccaccucccggccucagccgcccagccccccgguucuucugcccuaucucugagccaacuuucuacuguuugggagucaccugggaggacuggggaggcugugguggaggagaugggcaggaggag

SEQ ID NO: 4103348 - RNA, 62 nt, Human
cucccaccucuuugcuccaauaguaauuuguagccccucuauuagagcaguaauuguggcag

SEQ ID NO: 4103349 - RNA, 92 nt, Human
cucccaccugccacaaugcagcccacaccacucugcucauggacuaagagaccguugacaaguagggugggauuuguuuugugcggggggag

SEQ ID NO: 4103350 - RNA, 56 nt, Human
cucccaggugucccuucugccaccccagggcuuggcgacaucagggauccugagag

SEQ ID NO: 4103351 - RNA, 67 nt, Human
cucccagguugauucuuucccugacacaaaacagacacuaugggcaaagacaccugcagccuuggag

SEQ ID NO: 4103352 - RNA, 72 nt, Human
cucccaguuuguugcuccucugacuguggcuguggcuguggcugcggguggcaugggcaagaggacuggggg

SEQ ID NO: 4103353 - RNA, 75 nt, Human
cuccccacacaguccuggcucugucucggggucucugcagcucuguggggacccagaggggagucuggcagggag

SEQ ID NO: 4103354 - RNA, 77 nt, Human
cuccccagcucagggacaguagcuauguggccacauuuuccucauggcaggcauuagagauucccagagggguggag

SEQ ID NO: 4103355 - RNA, 58 nt, Human
cuccccaggaguuuuacuuugcagggaugucucucuccuucaauaugacccuggggag

SEQ ID NO: 4103356 - RNA, 72 nt, Human
cuccccagucccucucugugccuuucacagugcaacuguagccuaaugaaucuacaggagugaguggguggg

SEQ ID NO: 4103357 - RNA, 84 nt, Human
cuccccaugcauuucuuugaguuaguacaguccagagugggauauggcauuuuccguggaauucugacucaggagaugggggag

SEQ ID NO: 4103358 - RNA, 79 nt, Human
cucccccucuuccuccugggcacacucaccacguggagggugcuggcccuugaugcuggaguggcuggaggagcaggag

SEQ ID NO: 4103359 - RNA, 61 nt, Human
cucccccuggcagcuguuuggcuuggcgggggcccaucuggcaggcucagcagccaaggag

SEQ ID NO: 4103360 - RNA, 91 nt, Human
cuccccugccaggccguguggggcucccuggcagccugucauuacugcauuauggcaggauccuagccacagccccagcuccgguagggag

SEQ ID NO: 4103361 - RNA, 56 nt, Human
cuccccuucuugccagauccuuuggauucuugggacagcugagcaagaauggggag

SEQ ID NO: 4103362 - RNA, 63 nt, Human
cucccgagcugagcccugaguccuggcccacgauauagucauagcucaggugacagucaggag

SEQ ID NO: 4103363 - RNA, 68 nt, Human
cucccuaaaacagagcuacugcggcugacccacagaacuucaagcaauauagagcuuguuuuaggaag

SEQ ID NO: 4103364 - RNA, 55 nt, Human
cucccucucaccggagcccuggcggggcaggccgggccgagacggugggagggag

SEQ ID NO: 4103365 - RNA, 77 nt, Human
cucccucuggccuagcucucugcuugaaagcaucaccacacguuuuccaaaccagugcagugacuggggcaugggag

SEQ ID NO: 4103366 - RNA, 126 nt, Human
cucccugaacccuauugaguuuucuccauauuugagcaaguuaguuauucuugugagcuguguuuuaaaguagcagcaccagaaacaugacucugaagagggauagaacccuaggauucaaaggag

SEQ ID NO: 4103367 - RNA, 71 nt, Human
cucccugcggucucccacgaugccuggacacaaaacaucuaccugcgggugcugaggaagacagcagggag

SEQ ID NO: 4103368 - RNA, 63 nt, Human
cucccuggaggugagcuggcaccuggagagcaaggucagagccagccucccuccagaugggag

SEQ ID NO: 4103369 - RNA, 80 nt, Human
cucccuggucuuggccucuguggcucagccuugcucuggucugccugagugcaggggccaaggggcacagggccagugag

SEQ ID NO: 4103370 - RNA, 66 nt, Human
cucccuggucuuucccaucauucucuuauugacggaggcaacugguggaguggagaggcaggggag

SEQ ID NO: 4103371 - RNA, 92 nt, Human
cggcucaggcagugacaucaauuccaaagacagaagcagcugcuggcuucuucagcuguuuguuugauguguuugggggacuuugccugcug

SEQ ID NO: 4103372 - RNA, 81 nt, Human
cggcuccccaggugagcucgucuccgcgggacuggguccgggaaggccccaggaccgcgcggcugagcggccuggaggcug

SEQ ID NO: 4103373 - RNA, 66 nt, Human
cggcucugaaaccuuugccgauggggucccucgggagggacugagucgccagcagguguugacccg

SEQ ID NO: 4103374 - RNA, 106 nt, Human
cggcugcgacagcucucguguccuuugcagggggagcuuggcuacuccugccuugggcuuaggcagagcgcaguucucucucagaaagucuagagccucgcagcug

SEQ ID NO: 4103375 - RNA, 74 nt, Human
cggcuuaguuccuggcacucugagguccaccuccuuccugaggcuggugguuaccgugcuaaugagcuaggccg

SEQ ID NO: 4103376 - RNA, 57 nt, Human
cggcuucuucaucaggucagcauggguauaauucugucuaccaguugacuggagcug

SEQ ID NO: 4103377 - RNA, 81 nt, Human
cggcuuuggcaugauuguuugccagccccuggaaagggauuaccgcucucagggagggcgagucagcguguacuggaguug

SEQ ID NO: 4103378 - RNA, 115 nt, Human
cgggaaaggaauucugaucuguugaaauuugucuccucuguguguccugcacuaaaugcccaaaccccagcaugggacuuaaugcagagagggacacaggcagaguccaggccug

SEQ ID NO: 4103379 - RNA, 57 nt, Human
cgggaagccaucagucaaaaagccuguguggucacagaugcuuacuggugguuccug

SEQ ID NO: 4103380 - RNA, 66 nt, Human
cgggacacuagagagcaggcauucccguggccgcgggagagccgcguuccuggcuggccauucccg

SEQ ID NO: 4103381 - RNA, 72 nt, Human
cgggaccccaggggcgcgcgccccccaggcccggagaacgggcccagggccugagggcgacgccccuucccg

SEQ ID NO: 4103382 - RNA, 80 nt, Human
cgggagagccaggccuucucccucccucaacuucauggugcaggcaagggacauggggagcacagggugggggucucccg

SEQ ID NO: 4103383 - RNA, 69 nt, Human
cgggagccucugggucacacuggcuacuguguacuugugccacccuguguguucccggaguagcucccg

SEQ ID NO: 4103384 - RNA, 82 nt, Human
cgggagggacuguuaaccugggucuggccacagcugugcggagcggcuggguucggcugcaggccacacacccugugaccug

SEQ ID NO: 4103385 - RNA, 125 nt, Human
cgggagggagcccagccauguggaagacccuacaggaaggagcacaucgggagucaggccauguccccgccaugucuucuuccuucccugugggcagcgcuguaccacaggcugaugcucucccg

SEQ ID NO: 4103386 - RNA, 61 nt, Human
cgggaggguguacguguguguucccggguuguuaccuugcacacccacuuaugcccgcuug

SEQ ID NO: 4103387 - RNA, 55 nt, Human
cgggagucaagaccuaggaucccugaggaaaccagggcaucaaagcugacuccug

SEQ ID NO: 4103388 - RNA, 84 nt, Human
cgggauugccgccagccuccaguagcugaagagacgggaaacagaucguccccugcaguuucuggagggaauguggcccugccg

SEQ ID NO: 4103389 - RNA, 60 nt, Human
cgggcaccagcggccgcacugcccuggccgacccacguccuggcacggccccugggcccg

SEQ ID NO: 4103390 - RNA, 62 nt, Human
cgggccugggcccugcuuugacaggagugcuggucaccaugugaagguggguccaagggcug

SEQ ID NO: 4103391 - RNA, 62 nt, Human
cgggcuuacggccgagcuuaggaaacccagcucagaugugaaacccuaggcuuggcagcucg

SEQ ID NO: 4103392 - RNA, 74 nt, Human
cggggcacgugucuggggugcuggacaucauaucugugcaagugcaccuccucccagcuccugauugugccucg

SEQ ID NO: 4103393 - RNA, 63 nt, Human
cggggcauggagccaggggucagcuccgaggcagguaugugcugugcucccucuggcgccccg

SEQ ID NO: 4103394 - RNA, 76 nt, Human
cggggcgugacugcagaguggagccucggcugggucccaagcacccccugccccgccaccgcgcaccugugccccg

SEQ ID NO: 4103395 - RNA, 84 nt, Human
cggggcuaguggggagcccuguucaggccuccucacuuuaugaaggaugagaaggcccagaauagaauggccugcagugccuug

SEQ ID NO: 4103396 - RNA, 57 nt, Human
cggggcuggcacaggugaccacugcccuggcaucacccagcuguguccggcagccug

SEQ ID NO: 4103397 - RNA, 56 nt, Human
cgggggcagcaacgugccugaugacucuauuguuucaggaggcggugcugccuuug

SEQ ID NO: 4103398 - RNA, 56 nt, Human
cgggggcgucuggugagaccaugcccucacaccugcauucucugacaccgcccccg

SEQ ID NO: 4103399 - RNA, 67 nt, Human
cggggggaauggugggaggcgaacacggagcagcccccaagugacagagcaccccaucuuccuccug

SEQ ID NO: 4103400 - RNA, 62 nt, Human
cggggggacaagagggacgagacuuuccagacccuacucuggugggcccugcuugcucacug

SEQ ID NO: 4103401 - RNA, 75 nt, Human
cgggggggcucggcccucacacgcccggggucccgggggucccaggugcugaaggaggccgcagggcccgccgcg

SEQ ID NO: 4103402 - RNA, 68 nt, Human
cgggguggggauggaacagcugucugugcccuucaccaggagcaugcauuuccauucucacaucccug

SEQ ID NO: 4103403 - RNA, 69 nt, Human
cggguacacuggggcucugggagugaucucggacaaaggaaugcaccucucugagccucaguguuccug

SEQ ID NO: 4103404 - RNA, 123 nt, Human
cggguggcugagccggcgggcggggcggggcgugcaccagggccgcgggcgacuagcgcuguagcaguuggccucagggccccgccgcccgcgcgcccgcccgcccgcagggcggcgcacgcg

SEQ ID NO: 4103405 - RNA, 67 nt, Human
cggguggguguuggguggcguugggggagcugcgccucgcccagagccucgcccggagccucgcccg

SEQ ID NO: 4103406 - RNA, 56 nt, Human
cggucgucuggucuucugcuggcaucuccacaaacaugcccaggggcccgaugcug

SEQ ID NO: 4103407 - RNA, 81 nt, Human
cggucguuauagaacauucuuggguagcucuguaaggucaguuggcagaguacgaugaacucguggaauucucugcgaucg

SEQ ID NO: 4103408 - RNA, 60 nt, Human
cggugacuaugacgaggggacagaggccgagggagaggcuucugccacgucuggugacug

SEQ ID NO: 4103409 - RNA, 56 nt, Human
cggugagcacauucggaguggcuccuuccccacccacugcugacugggccucaccg

SEQ ID NO: 4103410 - RNA, 100 nt, Human
cggugaguuuuauaccuaacacaacuuuagucuggagggaaauggucucacaugaacuuucuuuccugcugaggauacguuaauaucaagacuuucacug

SEQ ID NO: 4103411 - RNA, 59 nt, Human
cggugccagcuacagaggccacauggcuucuaaugaggccaggcccaguuguagcuccg

SEQ ID NO: 4103412 - RNA, 77 nt, Human
cgguggcuuccuccugcagagccacgugccagcgccuagggggcgcucucgaugugcucagcagccccggagccucg

SEQ ID NO: 4103413 - RNA, 55 nt, Human
cggugggauucccagcgacuuccuuaggaguccgcgcuccaugggaguccccccg

SEQ ID NO: 4103414 - RNA, 94 nt, Human
cgguguaggguuuuguguggacacaagcuccggggcugcagcugucuugcccgauggggccuguagcuucugcuuuccaugcaagcuuacaucg

SEQ ID NO: 4103415 - RNA, 61 nt, Human
cgguguggguccaaccugugugugugcgagaccucccacacgagcccuggagccagcagug

SEQ ID NO: 4103416 - RNA, 60 nt, Human
cgguguggugugugaggaagcugagccauucagagcguggccuuccuccacagagcgcug

SEQ ID NO: 4103417 - RNA, 105 nt, Human
cgguugaggagcgcugguucgcugcagggcuggguccugucucauucaguauuuggugucaagugagggagguaucagacucugaaggaauccuccuaguaauug

SEQ ID NO: 4103418 - RNA, 66 nt, Human
cgguuuucuaaucuuaacguuccguggcuuaacauucagcacugagaacugaggauuugaauucug

SEQ ID NO: 4103419 - RNA, 63 nt, Human
cguaaugaaucaacauuaaugaucuuuccaaaugggggucaucuaacaauuugauucuuuaug

SEQ ID NO: 4103420 - RNA, 70 nt, Human
cguagaagcagaccacagaagccuugauagggcuuaaauuguccuuguaaguaauuuguggacuauuacg

SEQ ID NO: 4103421 - RNA, 81 nt, Human
cguagcaagaggaaaaucaaugucuuuuuaaagggauaccguauauguuaaaaaguaaauugacguuuuuucauggcuuug

SEQ ID NO: 4103422 - RNA, 55 nt, Human
cguagcagugcaggcaaaccauggccaaccccagcauugucucaguucugcuaug

SEQ ID NO: 4103423 - RNA, 56 nt, Human
cguauccuuguuucagagucugcuuuggaggaagccaaucuacaacaaaggauaug

SEQ ID NO: 4103424 - RNA, 79 nt, Human
cguaucuaguugucaacacauauuuauauaugcacauuaguagguggcaccuccaagucugugugugaugggagauaug

SEQ ID NO: 4103425 - RNA, 66 nt, Human
cguauuguagcuacaauagacguauuguagcuagacguauucuagacguauuguagcuacaauacg

SEQ ID NO: 4103426 - RNA, 62 nt, Human
cguauuugccucguauguuagcugucaucaaaugaaggcaguaucuguagagugcuuauaug

SEQ ID NO: 4103427 - RNA, 67 nt, Human
cgucagagaaggcugagucacggcuccuaucagcugacugucggccaggcuccaggcccuccugaug

SEQ ID NO: 4103428 - RNA, 68 nt, Human
cgucaguuagacagacugccuguaccacgcacuggccccaccaguguagacagacugccugacccacg

SEQ ID NO: 4103429 - RNA, 62 nt, Human
cguccagggacagccuugggguggcguccaaagagacgcgucggagguugucccuugggacg

SEQ ID NO: 4103430 - RNA, 70 nt, Human
cgucccggcagcuggccccugggcacggcccccagcccggcgucccaguuccagccgcgcugcaggggcg

SEQ ID NO: 4103431 - RNA, 67 nt, Human
cguccucagggcuugcaggagaaaguuucugauuaaggaaauggauccguggaaguugcugaggaug

SEQ ID NO: 4103432 - RNA, 102 nt, Human
cguccuccccuccccuccaggcagaucuggaucgccggcgccugggcuuagggaacuggggcuuggagcccgcgguccacgggcgcaggggcggggcgggcg

SEQ ID NO: 4103433 - RNA, 129 nt, Human
cguccucuuggccuccuuccagcaagccccuguuucagguucucacacgucuacacccuggccauugcugcuccagggcugagaggugcugcagggaaggaaggagggaggagggaagggcaggaggag

SEQ ID NO: 4103434 - RNA, 62 nt, Human
cguccuuacagagggucacagccaauccguaguccguguccugugucuccucugagagggcg

SEQ ID NO: 4103435 - RNA, 56 nt, Human
cgucggccuucaucuccggcaagagcacucgccugucugggaguuuggugcugccg

SEQ ID NO: 4103436 - RNA, 101 nt, Human
cgucggggucgggaaggacccggggcggggcuucccucucugccucagcuuccccgagacugcagagaguugggcugcgccaggggcuccccaccugggug

SEQ ID NO: 4103437 - RNA, 89 nt, Human
cgucgucucugauccucauggcuucucugugugagggagacauuauuguccccauuuugcagaugaggaaacugaggcucagagaugug

SEQ ID NO: 4103438 - RNA, 117 nt, Human
cgucuaauucacucagaauuuuuuaaaaagaaugcuuccuuugaaacugaaguucuuucuacuugguuucagcccaaaggugagcauuuuuuugagaagguuaaaucuuuucagaug

SEQ ID NO: 4103439 - RNA, 83 nt, Human
cgucucuccucccuuagcucacaagcuaaagcaaagagaaagcagacuguugcucuuggugaaggggcugggggucagagacg

SEQ ID NO: 4103440 - RNA, 85 nt, Human
cgucucuuuacaugcuaacaggaugacagcagacauugugugaaaucagucagucugagcacacuguuuacaugcuaacaggaug

SEQ ID NO: 4103441 - RNA, 100 nt, Human
cgugaagcuguuuugaaaaaucagguuguggaagcagauggcaacaugccuucuagauuuuugugcaccuuugggaguguuuauuaagacagaguucacg

SEQ ID NO: 4103442 - RNA, 63 nt, Human
cgugaccucauuuggaaacaggaucuuugcacauguaauuagucaaguuaagauaaggucaug

SEQ ID NO: 4103443 - RNA, 62 nt, Human
cgugagcugcucauucccagcacauggccagcgaggucauagcgagugacgaggagcacacg

SEQ ID NO: 4103444 - RNA, 69 nt, Human
cgugagguguaugcucaguggacggacuggagugguuuuggaauggcccuggcugaguuagauuuggcg

SEQ ID NO: 4103445 - RNA, 62 nt, Human
cgugauacuuggcacugcaaccacagucuugugaaccugugggagcagcaccaaggaccacg

SEQ ID NO: 4103446 - RNA, 61 nt, Human
cgugccauuguugcuguugaacccugcugaggucccugucuugcuccaggaacacuggccg

SEQ ID NO: 4103447 - RNA, 64 nt, Human
cgugccccggugaggaguucagccggccccuagguuccuggaacccaaccucacuugggguaug

SEQ ID NO: 4103448 - RNA, 66 nt, Human
cgugcccugcgcaagugcugcuacggcuacugcauugaccugcuggagcggcuggcggaggacacg

SEQ ID NO: 4103449 - RNA, 85 nt, Human
cgugccgcguacucuucaaacugacagaacaaaagagccaaauuccaaaauucuggucugaaugacuuguuaguugugcuggaug

SEQ ID NO: 4103450 - RNA, 71 nt, Human
cgugccugcacugugcgggcugcugaguucagaagggcucaggcaggaagccccugcacaggguaggugug

SEQ ID NO: 4103451 - RNA, 74 nt, Human
cguggagggagcggaauuuaaacuuccgggucagccucagugcagcuugggaaacguaguuccuaguccccacg

SEQ ID NO: 4103452 - RNA, 73 nt, Human
cguggcaauggagcagucccacucagcaucaauaugcccgugcagcagggaccucuaugugaagacugccaug

SEQ ID NO: 4103453 - RNA, 63 nt, Human
cguggccuuugagugagcucccaucccuggcuccuaggacgggacagcuaacacagagcuccg

SEQ ID NO: 4103454 - RNA, 63 nt, Human
cguggcugcugccugcuacgagggaagacugcaggaggugagcccacagggaggcagugcccg

SEQ ID NO: 4103455 - RNA, 55 nt, Human
cgugggcugcgcccaguucuucaccaaggcugacuacccgcagugccaguccaug

SEQ ID NO: 4103456 - RNA, 62 nt, Human
cguggggcaggcggguguccagaucggcaaugccugcugggaacuguacugccuugaacaug

SEQ ID NO: 4103457 - RNA, 67 nt, Human
cguggucgcaaacugauuuccaaguccguugucugaugcugcgagacacuauccguuuguuacagcg

SEQ ID NO: 4103458 - RNA, 76 nt, Human
cguguacuguuaugaguccucauauacuauuucaucaguuaggaaguuguaaauaaagaaucauaacagugacaug

SEQ ID NO: 4103459 - RNA, 84 nt, Human
cguguggauuucagagccauccgcggcugccggcuguuggggcggccaggaguggccugccagcagauggcgcugcgccgcacg

SEQ ID NO: 4103460 - RNA, 70 nt, Human
cguguguggguguguguguguuacuuuuaucaagauaaacgaggaaaagcucagcaucacagauaacacg

SEQ ID NO: 4103461 - RNA, 85 nt, Human
cguuaaacauggauucugaucacagaucguuucugcuaauuaaacaaauauuuuugcagagcugucucgguuuccgcuguugccg

SEQ ID NO: 4103462 - RNA, 79 nt, Human
cguucccaucuuuccccccuaccuuccccuuaggcacgucugagaaugguggaugugguggagaaagaagaugugaaug

SEQ ID NO: 4103463 - RNA, 56 nt, Human
cguucugguugggacgggcaggaaguuacggauccaagcugguaucagcuagagcg

SEQ ID NO: 4103464 - RNA, 102 nt, Human
cguugaaggagagcgaguggcggauggaguucugccagcgcugcugguucugccgguagaaggggaagagguccaugauccacugguagaucucgcucagcg

SEQ ID NO: 4103465 - RNA, 67 nt, Human
cguugaccuggagacuguggccuuggagcugaacgagaugauucagggcauacucuucaaggucacg

SEQ ID NO: 4103466 - RNA, 70 nt, Human
cguugcccucuccaggcgcuuaccaagcgcucggaaacgccccagggcgcuugcgcgugggaggcgcgcg

SEQ ID NO: 4103467 - RNA, 76 nt, Human
cguugggaguuugcauagacaauauuaaucuucacaaaccuucuguaagguagauguugucaugcccauuuuaaug

SEQ ID NO: 4103468 - RNA, 71 nt, Human
cguuucuggguuucuuuagccagagcgggcaccugcauaacuccugcguggggagaguuacccuggaagcg

SEQ ID NO: 4103469 - RNA, 69 nt, Human
cguuuggugagagacuuuggagccagacugccugaauucaaguccuggcuccccuacuucuuauugacg

SEQ ID NO: 4103470 - RNA, 72 nt, Human
cguuuugucuuuuugucuggcagaggucacuuuugacagugccuuuguguuucagcagaaauggauaaucug

SEQ ID NO: 4103471 - RNA, 58 nt, Human
cguuuuugugaauaagagaaugacagccauagaaauaaggcugacaguuccgagagcg

SEQ ID NO: 4103472 - RNA, 130 nt, Human
cuaaaaguucaaggggaaaaggaaggcaaagaaggacguuuauaugauugagcaucuugguuugaaagaaauuauauguuuaauuauauuauucccuuguccuuccaugaacccuaugaaguauuaauag

SEQ ID NO: 4103473 - RNA, 108 nt, Human
cuaaacaauauuuagaugugugcugcugaaaaacaaagucugcuaugaaguuuacuggcacuggcugaguugcuucagcaacugcaggccuucugaaguuuuggcugg

SEQ ID NO: 4103474 - RNA, 55 nt, Human
cuaaacaccccuuugacauuacgugcgccagcuccugaacacugggguguuucag

SEQ ID NO: 4103475 - RNA, 117 nt, Human
cuaaaccuggaguaaacuacaaaugauuccccagcagugguucucaaacuuuaguguacgucagaaucaccuggagguuuguuaaaccagauugcugggcugcaccuccagaguuag

SEQ ID NO: 4103476 - RNA, 120 nt, Human
cuaaagaguaugcgucacucuguaaguagaggcacccacauacuauucauugauucaacaaauuaauucaacaaauauguauugagugccaacugugcuaggcuuugaagcaacauuuag

SEQ ID NO: 4103477 - RNA, 73 nt, Human
cuaaaucuaguugaaaacaauaggaaagaggauacuuuucccucuaguauuuguucuaucaaccuagacuuag

SEQ ID NO: 4103478 - RNA, 64 nt, Human
cuaaaucucaucucaaauuguaauccccaccugucaaaggagggaccugguaggaggugauugg

SEQ ID NO: 4103479 - RNA, 83 nt, Human
cuaaauuaugcuaaagauuucaacauuugaaaugaaugaauuacaauagugauauuacucauaauguguugauagcauauuag

SEQ ID NO: 4103480 - RNA, 64 nt, Human
cuaacauaaccugguggccaagccuccauaauacucuggggccaggcucuugguuauguuuuag

SEQ ID NO: 4103481 - RNA, 122 nt, Human
cuaacauaguugcaucuugguacucaaagacagauuugaucuagacaaugcacuguaaggaauuccauucauucuuuagcauagugcugaacauuuugucucaucuuauaaugcaguguuag

SEQ ID NO: 4103482 - RNA, 123 nt, Human
cuaacauuuuuuagguacucauguuuuuaguuauuaggaauuuccauuuaacauuucuaauauauuuuccuuagcaaaguuuuguggugauuagguauagcuaaaauaauacagaaguguuag

SEQ ID NO: 4103483 - RNA, 114 nt, Human
cuaaccccaccauuaauaguauaaucacugggcguuugguacuagggcuaggcaaacauuuccuaguggcauauuauuucuagugguacauuauuucaugggagugaggguuag

SEQ ID NO: 4103484 - RNA, 63 nt, Human
cuaaccugcuaaccuacuaugauucugggaaggccuuccaacagaaaugggugguuggguuag

SEQ ID NO: 4103485 - RNA, 73 nt, Human
cuaaccugcuucugcccucacgguagcgugcacaaucuucaucgcauguccuggguggugguaggagcaguag

SEQ ID NO: 4103486 - RNA, 116 nt, Human
cuaacucagggugugggccugggcaacaaucaaggaaaccuguuuucuucucaucuaggccugaaacuagaggggaaaaaggucuuguuuguggcccaacccaacaucccaaguag

SEQ ID NO: 4103487 - RNA, 65 nt, Human
cuaacuuuuacagucauguugccaaagacccuccuagcuccagucagccugcuguagaaguuugg

SEQ ID NO: 4103488 - RNA, 61 nt, Human
cuaagaaggaaaaaaccugcuagcuguccaguguugaacagguauugauuuuucuucuagg

SEQ ID NO: 4103489 - RNA, 56 nt, Human
cuaagaccugugcucccaccaugguagacugccuuggugucaguuuuggucauuag

SEQ ID NO: 4103490 - RNA, 63 nt, Human
cuaagaggaaguacucuguuaugccguucccaaagcacuuuguucagaggcacuuucucuuag

SEQ ID NO: 4103491 - RNA, 83 nt, Human
cuaagaggucaacacagcagcauccuauuucacuccuacagcagccccaagggggaaguggugaccugcucaagaugucauag

SEQ ID NO: 4103492 - RNA, 56 nt, Human
cuaagagucuagaauaucucagaguuuucagaagaaauuuuguauucuaguucuag

SEQ ID NO: 4103493 - RNA, 71 nt, Human
cuaagaugcaggaaggcucacccaggugcugcccaccugggagguacccaggcacgccuugcugaucuggg

SEQ ID NO: 4103494 - RNA, 127 nt, Human
cuaagcacuccauuuccucacaauguccucugucauuagcagugccuugccugucuuccacaguauaagaagggccaggcauucuaacccauuugcagagaauaucuuugauuuacugaguacuaag

SEQ ID NO: 4103495 - RNA, 64 nt, Human
cuaagcaggaaggagcccagggcagagaucugggaucacucccauggcccacuuuauuguuugg

SEQ ID NO: 4103496 - RNA, 83 nt, Human
cuaaggacagagaaggcacuuaggauuuuaaucugagaugagauccaugggaagauuuugagugguuuagucucaugcuuugg

SEQ ID NO: 4103497 - RNA, 125 nt, Human
cuaaggauuugugcugccugcgaccccucucuccccagacucucuccauuuccuccgucagaaguugggguaccuugaggcugggguuagaguagggaggggacgcuggaggggcaaauccaggg

SEQ ID NO: 4103498 - RNA, 71 nt, Human
cuaaggccagagugauguaacauauauuuacuuuaaauguugaauagauuuuauuaauuaccuugccuugg

SEQ ID NO: 4103499 - RNA, 55 nt, Human
cuaagggcuugcuggagccagggcugacuucaucaccacccuuuagggcccuugg

SEQ ID NO: 4103500 - RNA, 83 nt, Human
cuaagguacuuggccuuuggccccagcugagcuccuugccaacaaccaaagccagcacggcgccauggagugagucaucuugg

SEQ ID NO: 4103501 - RNA, 78 nt, Human
ccugucccauggcucugcagcuaugaggcagcuuuccuagggugggucuccuggcugcagcuaagaccaggcaacagg

SEQ ID NO: 4103502 - RNA, 74 nt, Human
ccuguccuaagggaugcuggucaguguaccagaaguaaaacaaauuggcuucuauggcugcacaccaggacagg

SEQ ID NO: 4103503 - RNA, 57 nt, Human
ccuguccuguacuuugaggcccuggagauuuugagauaugcuugaagacaggacagg

SEQ ID NO: 4103504 - RNA, 82 nt, Human
ccugucugggucuuuaguucuccacuggucaaaugacggauuccagugggucagagagcuccagauguaccuccgcggcagg

SEQ ID NO: 4103505 - RNA, 62 nt, Human
ccugucuguccugaguucaaccagucaugaaaaaugacuuugguuggauaggacacagcagg

SEQ ID NO: 4103506 - RNA, 79 nt, Human
ccugucuuaaaagaagcagcuaaggacaaaguaaagugaaguaaucauuccuuuaaagaacugugcuuuucagggcagg

SEQ ID NO: 4103507 - RNA, 106 nt, Human
ccugucuuuuuuuuuuaguucagcacuuuguuuugcucauccagaaacagccccuuuuagugaggaugagcaggggagaggggaugcaagaaaaaucaguuacagg

SEQ ID NO: 4103508 - RNA, 77 nt, Human
ccugugaaaucugagucauuuauagcuaaccuugaauguauuguuauucacaauuagaaguagauaaauuucacagg

SEQ ID NO: 4103509 - RNA, 56 nt, Human
ccugugaaucuugauguuauuucuggaucauugcagaugccacauugaguuauggg

SEQ ID NO: 4103510 - RNA, 115 nt, Human
ccugugacuuaaguuuuauaugcuucauuucagccugguugauauuuacaaguauaccucauaauacagaagcaugccaggcagauaugugagcuuacagaauuuguaaucgagg

SEQ ID NO: 4103511 - RNA, 113 nt, Human
ccugugaguccuccuggauggcagagcccccugcccaggcccacacuugcauccuagugaggaccaaagcaggcccugggccaggggaggcagcuguccugguggauuccagg

SEQ ID NO: 4103512 - RNA, 94 nt, Human
ccugugccgcccuccugguggccuugugauuucacuggugacauguuuggaaagcccacgcagugcugagagauggcagggccuucagagcagg

SEQ ID NO: 4103513 - RNA, 85 nt, Human
ccugugcuccuggaauccauugcugugcugccagggcgaagcaauguugcugguggcaaugcugauaggaucagguagcaauugg

SEQ ID NO: 4103514 - RNA, 63 nt, Human
ccugugcucuugucugugacuaaccagugcuucucuugugggauuagucuucaggaucacagg

SEQ ID NO: 4103515 - RNA, 57 nt, Human
ccugugcuggacagggcugggcuuggaagcaugaaggccucaccaugucaagccagg

SEQ ID NO: 4103516 - RNA, 59 nt, Human
ccugugcuggcuuuauucucaggaagaguauuccugaguggugaaaaagcagcuucagg

SEQ ID NO: 4103517 - RNA, 78 nt, Human
ccugugcugggcagaguugguggagucaguugcccagacagggcaacguccacgucaggcucugggcuccuagcaagg

SEQ ID NO: 4103518 - RNA, 120 nt, Human
cucuugccuuggcaccuggguggcuugcugcccacaaccccgugucuaaaaauacaaaaauuagcugcgcauggugguggguaccaguaaucccagcuacuccggaggcugaggcaggag

SEQ ID NO: 4103519 - RNA, 56 nt, Human
cuccgucuuccucacucacucccauuuggcuaggcuuuuugaguagggaagaggag

SEQ ID NO: 4103520 - RNA, 66 nt, Human
cuccuacgcauggcaaauuuauaagucgagguagaguuagagacacaugcacaugcauacuaggag

SEQ ID NO: 4103521 - RNA, 59 nt, Human
cuccuacucagaagguuuagaaucucagggaugacauucagaagaaaugaguacaggag

SEQ ID NO: 4103522 - RNA, 72 nt, Human
cuccuacugggacauuauaagaaacauuauauauuaaaugcacuuaauaacuguccuucugaaagaugggag

SEQ ID NO: 4103523 - RNA, 110 nt, Human
cuccuagccagaacccuccaggaugcccaagccgagcucucuguuuccccuuccaaagccagguccagcaggagacugggcuuggcucucugauggauucaggacagggg

SEQ ID NO: 4103524 - RNA, 73 nt, Human
cuccuaggguguaauacauuagcaaaccaaagaaucaaagaucuuugcccuuguggaguuuacaugcuagggg

SEQ ID NO: 4103525 - RNA, 71 nt, Human
cuccucacuucccagacgggguggcagccgggcagaggcugcaaucucggcacuuugggaggccaaggcag

SEQ ID NO: 4103526 - RNA, 56 nt, Human
cuccucagcugggaggagucccuuccccaggggucucauucccucccugaccugag

SEQ ID NO: 4103527 - RNA, 87 nt, Human
cuccucaguccuccaaagucugacuagaaucucucccucccuucucagauugggagagggccauaguucuaaggacaggauugggag

SEQ ID NO: 4103528 - RNA, 71 nt, Human
cuccucccaaacuaugggugcauaggguggguguucaguuuaaggaggcucacuaggcauccugggaggag

SEQ ID NO: 4103529 - RNA, 86 nt, Human
cuccucccauaaccuuuggguuugcuccugggaaagcagaaaagacacagucccaucuccaaggagcagauccagaggacgaggag

SEQ ID NO: 4103530 - RNA, 79 nt, Human
cuccuccgggggacgcuggggagccucggggcacggcggaaaacgcagguggggggcuuccgagccugaccuggaggag

SEQ ID NO: 4103531 - RNA, 109 nt, Human
cuccuccuccucugcgggcccgggccucucagggacccagccagccucuuccuuuacgucuggggggcugagauccugagaggagggggcuccagcagcggaggccgag

SEQ ID NO: 4103532 - RNA, 68 nt, Human
cuccuccuggcagcuccuccccggcgggccuccccucaucucggcuggguagaggugccgggugugag

SEQ ID NO: 4103533 - RNA, 88 nt, Human
cuccucggccagggagaggagcacggccuuggguguguucuugaaaagggcugcccaguucugcugcugccccuuccucgcccagggg

SEQ ID NO: 4103534 - RNA, 72 nt, Human
cuccucuacacagcaggucuuguugcugcugacugacauguccugggagcacaugguccugcucuaggggag

SEQ ID NO: 4103535 - RNA, 62 nt, Human
cuccucuauuucuccuggcauugauacaaagcauuggcacuuuaagcuaggagagggaggag

SEQ ID NO: 4103536 - RNA, 56 nt, Human
cuccucuggaaauuccucugcccugugacugucuacagggggcaugaccagaggag

SEQ ID NO: 4103537 - RNA, 74 nt, Human
cuccucuggcucagcugucacuucuaaguuuugcuaagauagcuuacuuuaguacugauaguuacuagugugag

SEQ ID NO: 4103538 - RNA, 58 nt, Human
cuccucugucuggcccugagccagcccugggugggaguguugggagucagaugaggag

SEQ ID NO: 4103539 - RNA, 76 nt, Human
cuccucugugcuguugucugcucuuugagcuccaguugaggcaagggcucugaggcagaucgaugggcagacugag

SEQ ID NO: 4103540 - RNA, 81 nt, Human
cuccucuuuggucuguggcucuccaauggagggaggaauucuuagcugccaaaagggugggcuagauaggaagaagaggag

SEQ ID NO: 4103541 - RNA, 60 nt, Human
cuccugaccucaugauccaccugccuuggccucccaaagugcugggauuauaggcaugag

SEQ ID NO: 4103542 - RNA, 80 nt, Human
cuccugagagcagaggugggcagccugccccaccccuucuauagccaggcugaauccacacccucucuauaauucaggag

SEQ ID NO: 4103543 - RNA, 56 nt, Human
cuccugagcugcagccuugugucaccaaggauaaagcagggacaaagcuucaggag

SEQ ID NO: 4103544 - RNA, 78 nt, Human
cuccugagguguucuucaaggcucccagccugccuggugcugccuccagggauggaagacuugaagacccagcuggag

SEQ ID NO: 4103545 - RNA, 75 nt, Human
cuccugcaaugcaugaauuauaaauauauacaaauuuuacauguauuuaugauagcugcauuaaagaggcagagg

SEQ ID NO: 4103546 - RNA, 60 nt, Human
cuccugccaccgcgguguccugccccuauaggccugaguaggagauccccgggguagggg

SEQ ID NO: 4103547 - RNA, 61 nt, Human
cuccugcuuggugaaucucuuauagcacauugaugcgucuauaucugggaaccaaaggggg

SEQ ID NO: 4103548 - RNA, 58 nt, Human
cuccuggcuaugacuacauuucugaggaugcaagaagaaaagaguccugugugaggag

SEQ ID NO: 4103549 - RNA, 61 nt, Human
cuccuggcuccuggcucuggccaagggaguuggcuucccuguguccaugccaggaggggag

SEQ ID NO: 4103550 - RNA, 59 nt, Human
cuccuggcucucuguuuaguguuuggacguucaaagaucccuagacuaggcggcgggag

SEQ ID NO: 4103551 - RNA, 129 nt, Human
cuccugggcucagcuguaucucucuguucugggagccugggugcucuguguaaggggaacguauacccaagggccccccugcaagacgcccagccuugucugaggcugcagagaaagcgccaaagcccg

SEQ ID NO: 4103552 - RNA, 60 nt, Human
cuccuggggccauggaaggaacugguucuccccugagcuguucccucacguccugcggag

SEQ ID NO: 4103553 - RNA, 72 nt, Human
cuccuggggcucuuugaugugauuccugagcucccaagugagcccucaucacauccuaggagaaccacggag

SEQ ID NO: 4103554 - RNA, 75 nt, Human
cuccuggguguuuucaauguuggcacugcacacggaguuggccuggcuguuuucaauguugauggcaccagugag

SEQ ID NO: 4103555 - RNA, 56 nt, Human
cuccuggguucugggccgcagcgccucugcgaggucugcaggcuucgcucuaggag

SEQ ID NO: 4103556 - RNA, 69 nt, Human
cuccuguacaaucaggauaauaauagugccuauuucacaggguuuugugagccugguauacaguaagag

SEQ ID NO: 4103557 - RNA, 65 nt, Human
cuccugugacuaccacuaugccacugugugcaggucaccaugccagggccauagggagucuagag

SEQ ID NO: 4103558 - RNA, 58 nt, Human
cuccuguguucaagcgauucuccugcuucgguuuccugaguagcugggacuacagggg

SEQ ID NO: 4103559 - RNA, 72 nt, Human
cuccuguuuggguuccuuggagucuccuacacaauacacaguucagagaucugcaggaaugugugcagagag

SEQ ID NO: 4103560 - RNA, 118 nt, Human
cuccuuagcuauuaagaaaggcaguaacaucaacaggcugagcuggcccuugaaaugggagaagcuccuaacagcaucuggucagcuuagcugaugcaauugcaaggcuggccuggag

SEQ ID NO: 4103561 - RNA, 84 nt, Human
cuccuuagggcugggaugggaacugagaaucauuugagggcuuaauaagugauuuuggaggccccaguccccacccuaugggag

SEQ ID NO: 4103562 - RNA, 76 nt, Human
cuccuucacuuugcagcuggaggagccggcugagugcacgcugagugcauuggcaaugucccggcugcugagggag

SEQ ID NO: 4103563 - RNA, 75 nt, Human
cuccuucagagccuccaaauaagagucaagcauggucaacaucuugauuucagccuugugauaucugaagcagag

SEQ ID NO: 4103564 - RNA, 74 nt, Human
cuccuucccgucuuugcuaugccugcccucugcuggaggaacucaugaacggcagcugguuagaagggaaggag

SEQ ID NO: 4103565 - RNA, 71 nt, Human
cuccuucucagccagugugcaccuggagucagcuguguuuggccuuaagguguccaugguccagcagggag

SEQ ID NO: 4103566 - RNA, 67 nt, Human
cuccuucuccagucucaagacauugagucccaaggauggcccucuguuuucugagacagacggggag

SEQ ID NO: 4103567 - RNA, 77 nt, Human
cuccuucuccccaucucuccagacagcucucccuuucuucugagccuccgcagcuguccugugggagggagugggag

SEQ ID NO: 4103568 - RNA, 74 nt, Human
cuccuucuuuaucagaggaggcauuuaaacagaacuagguaaccuccuuucuggccuccuguggaagccaggag

SEQ ID NO: 4103569 - RNA, 61 nt, Human
cuccuugguuccccuagacuccuugucccauggcuaaggcauggcaggaauagggccagag

SEQ ID NO: 4103570 - RNA, 93 nt, Human
cuccuugugguaugcagaggccaaauugaucaucuuuaggcagagauuccuuagacaugaucgaugaggcuauccaucuagcguaacacugag

SEQ ID NO: 4103571 - RNA, 66 nt, Human
cuccuuuaucugaaacuuuugggaccagauauguuuuggaacucagaauuuuucaaaucuuagggg

SEQ ID NO: 4103572 - RNA, 61 nt, Human
cuccuuuccuagcagcugguccugggaacagaaggcugugacaaggcugcgggaaauggag

SEQ ID NO: 4103573 - RNA, 61 nt, Human
cuccuuugaucccaaaugaccccacccgacaugggucacagucauuucugaacagagugag

SEQ ID NO: 4103574 - RNA, 67 nt, Human
cucgaaagcuguuaauggcuugcagcugccuaugauaggaagucugcacaucuuagcuguuuuugag

SEQ ID NO: 4103575 - RNA, 85 nt, Human
cucgagggcugcuggaaaaaugcaggcacccagugggcugggccuaaagauguacauuuuucucccagugauagcagcucuuggg

SEQ ID NO: 4103576 - RNA, 78 nt, Human
cucgcaccuguagccccagcuacucggaagcugaggugggaugaucgcuugagccugggagguugaggcugcagugag

SEQ ID NO: 4103577 - RNA, 98 nt, Human
cucgcagcgaguuaacauuucuuagagacugagagucccuaagugaaaggucacuugcaugaccucugugccucaguuucaugugucgacuccgugag

SEQ ID NO: 4103578 - RNA, 57 nt, Human
cucgcauggcuuggagcaggaugagaugagaaguuuuauaugaaauuagucauggag

SEQ ID NO: 4103579 - RNA, 129 nt, Human
cucgcccagggguagcagugccuaggccaccugcagcauugacaucagcaaacugccagggaggagaguggaggcugcagaacagucaggugcaggcaggggcccagggaggaggcgagaccugagcag

SEQ ID NO: 4103580 - RNA, 87 nt, Human
cucgccccaacccgggucagagggccagaguccuggggucaccugugugucccccaccuugggguccuaagguccggguagggugag

SEQ ID NO: 4103581 - RNA, 61 nt, Human
cucgcuguguccagggccguguugucuugugucucggcaggacccgcacagcuggagugag

SEQ ID NO: 4103582 - RNA, 109 nt, Human
cucggccuccgcugcuggagcccccuccucucaggaucucagccccccagacguaaaggaagaggcuggcugggucccugagaggcccgggcccgcagaggaggaggag

SEQ ID NO: 4103583 - RNA, 99 nt, Human
cucggcucuuugggaggccaaggcaggcggcugggaggugguuguagcgagccgagaucacgccacugcacuccagccuuggcaccauugagcacugag

SEQ ID NO: 4103584 - RNA, 61 nt, Human
cucggcugcuuguuggagagugauuggcugaagacuucuuuagcuuccagcucaagcugag

SEQ ID NO: 4103585 - RNA, 59 nt, Human
cucggugccuguuaagugcuuugacccuccaauauuggucacuggcaagcagugcagag

SEQ ID NO: 4103586 - RNA, 56 nt, Human
cucgguggccucucaugcaagguagccacaggcucuggguucacugaggcucugag

SEQ ID NO: 4103587 - RNA, 66 nt, Human
cucguagacucaaggugguagaagguagaggugacuaaggcuuucuggagccugggggaacaugag

SEQ ID NO: 4103588 - RNA, 75 nt, Human
cucguagggcugcguagagcagguggggagggcaacuccacagcccuagucaccugugagcugcguagacaagag

SEQ ID NO: 4103589 - RNA, 59 nt, Human
cucuugcuucccaaggcgggggaacugaugguuuccuacaucaccagggggaguaaaag

SEQ ID NO: 4103590 - RNA, 80 nt, Human
cucuugggaagauuauucuuaacaugaaaaauaauaaauaaguauuagaaauuauuagugaauagucucagcucauagag

SEQ ID NO: 4103591 - RNA, 59 nt, Human
cucuugggugggcagugggccugggggagucucucuagaacuucuggugcccccaggag

SEQ ID NO: 4103592 - RNA, 57 nt, Human
cucuugguacucucuugaaggccuuucuagcaagacaggugugagagaugcucgggg

SEQ ID NO: 4103593 - RNA, 72 nt, Human
cucagaggcuucagaggaagugcggcccugcugacacuuugcuuuugggcuucuguccucuggaucugugag

SEQ ID NO: 4103594 - RNA, 75 nt, Human
cucagagggauggccaguggcagagaacagagaccuggcugagggcagguuucugcacugucacuggugaaugag

SEQ ID NO: 4103595 - RNA, 66 nt, Human
cucagagucauuuauuauguuuguaaaauacuuggcaguccuuugcaaauaaauaagugcucggag

SEQ ID NO: 4103596 - RNA, 79 nt, Human
cucagauguguuggauggaaaaauauucuacugggcuacaauauuuccaaaaguccuuccaggucuaauauccuuugag

SEQ ID NO: 4103597 - RNA, 59 nt, Human
cucagcaacccuagaacauuugccauucauaacggcaaauuuuaaucaguggugcugag

SEQ ID NO: 4103598 - RNA, 61 nt, Human
cucagcacagcugccucuggagugcgcaguggguggcagucccagccuaggcugugcuggg

SEQ ID NO: 4103599 - RNA, 72 nt, Human
cucagcagaugguagcaacugugguagaaaaugaagccauaucuacaugauguaccaucuaagacagcugag

SEQ ID NO: 4103600 - RNA, 129 nt, Human
cucagcagggcccacugaggcuuggugaagcgccggcagggcucaggggccccaagcugguccagggguaugguggcccucagccaggcccccgagucguugguggaggccucagugugguuggcaggg

SEQ ID NO: 4103601 - RNA, 56 nt, Human
cucagcccuccccggggaauaacucugccuuugggcuuccucaggggugggguggg

SEQ ID NO: 4103602 - RNA, 85 nt, Human
cucagcccugggagcuggaugucugugccaggcacacccguggcaacgggaggugaccagacagagucuagcccuaaggaagggg

SEQ ID NO: 4103603 - RNA, 78 nt, Human
cucagccucccaaagugcugagauuacaggugugagccaccacgcccggcuaaugguagcaauuuuuaagaggcugag

SEQ ID NO: 4103604 - RNA, 122 nt, Human
cucagccuuccuuacucccuuguauauugaaggcuuucuaaggaaaguaccugggauucuccaucugagggcuuucuuuggaauguucaguccacagguguggggcagaaggaagugcugag

SEQ ID NO: 4103605 - RNA, 64 nt, Human
cucagcugcuccaccuccgggucaggcaggugagccuggggcagagaggcugagagcaccugag

SEQ ID NO: 4103606 - RNA, 87 nt, Human
cucaggacaaacuuguucuguuccugaugauucuucuggaacuauagucaaugaaaucaucacgaacacaacagcguuuguucuggg

SEQ ID NO: 4103607 - RNA, 60 nt, Human
cucaggagucugugcaguuccacaugguuccacccaacuguggugacgggaauucuugag

SEQ ID NO: 4103608 - RNA, 64 nt, Human
cucaggaugcaggucacaggacucaugccacucacaguauccgccacuguugccugcuuccgag

SEQ ID NO: 4103609 - RNA, 55 nt, Human
cucaggcaaggcccgcauucuccacuccgugcccauguggacgcccugccuggag

SEQ ID NO: 4103610 - RNA, 59 nt, Human
cucaggcacuuuugucacagacgaauuuuuuguccacauugcugacaaggguggucgag

SEQ ID NO: 4103611 - RNA, 57 nt, Human
cucaggcaggcccuggccgcccagagugucucaggaggccacauuccccugcuugag

SEQ ID NO: 4103612 - RNA, 75 nt, Human
cucaggcucaggaagggugguccacagggaaauauaagucaaauaagccuuauggccccacccugaccgcuugag

SEQ ID NO: 4103613 - RNA, 57 nt, Human
cucaggcugugaugugauggcauuggcggagcccagucaaggcacugacagccugag

SEQ ID NO: 4103614 - RNA, 67 nt, Human
cucagggagggcugcaaugagacagagaauccugagauuguuccucaugugcagaucuucaccuggg

SEQ ID NO: 4103615 - RNA, 61 nt, Human
cucagggauggugaagcacccagcagcuggcaaacggcagggagcugccaccaccccuggg

SEQ ID NO: 4103616 - RNA, 61 nt, Human
cucagggauguuuguucuaagauauucauucagaaauuuacuuguuccaagcaugucugag

SEQ ID NO: 4103617 - RNA, 85 nt, Human
cucagggcucuggaccccuuccccuccgcccccgcagccucugccaggaggugggaguugggugggagacuuccagggcccuggg

SEQ ID NO: 4103618 - RNA, 62 nt, Human
cucaggggucauccgaugugguccuuuuuauuauuucauuggcuucacaugauuacccuggg

SEQ ID NO: 4103619 - RNA, 71 nt, Human
cucagggucaaagugaggagucagguuaaccucacagaggccccagcauggccccacuuuuucucccuggg

SEQ ID NO: 4103620 - RNA, 128 nt, Human
cucaggguuaguuaagcuuuuuauuuuuccuucugugaacuucacgauagccaaagcuauaaacaguagcuuugacauacgugagguuuuucagcagugggcuaccagaucagaaaucuaggauugag

SEQ ID NO: 4103621 - RNA, 89 nt, Human
cucagguaguuauaauagcuaacauugaguucuuacuaugugacagacacuuugcugaguacuuuauguuaguuauuuaaugcauauag

SEQ ID NO: 4103622 - RNA, 129 nt, Human
cucagguguauucauucauucugccaaccacuguugagcaccuaccuuguccagugccuccauggggcacuaagaauacagacagggauuagguguagaccuuguccuuaggcaacauguggauuugug

SEQ ID NO: 4103623 - RNA, 68 nt, Human
cucagguuauuaugagagcuccgauaguggucaccaugcugaacugucagggaucaugaaagcuugag

SEQ ID NO: 4103624 - RNA, 61 nt, Human
cucaguaaauaguggagaugugggcuuuacuugucagagugcauuccauguguuuccugag

SEQ ID NO: 4103625 - RNA, 61 nt, Human
cucaguaggcugacacuauucuacuuccaucuggaagacaaggaauguagcuuacucagag

SEQ ID NO: 4103626 - RNA, 83 nt, Human
cucaguauucaucccauguguuucacagcucacaucagucccguauaugagcucugagacacaaagggugcauauucacuggg

SEQ ID NO: 4103627 - RNA, 61 nt, Human
cucagucaccuggucacugcaggcuggucuuguugcuacuuggugaagucaggugauuaag

SEQ ID NO: 4103628 - RNA, 71 nt, Human
cucagucaggcugaaaggacuccaguuaugaacuuuacuucccucaaggugauguccacagcuugcaggag

SEQ ID NO: 4103629 - RNA, 80 nt, Human
cucagucuuucugccugcuccuaucugggcucauugcuuaaggaagugaacaaagguagugagcaucauagggugcugag

SEQ ID NO: 4103630 - RNA, 69 nt, Human
cucagugauuccucaagaauucuccauuuaauaaggauuaaaugagaaaacacagaggagguaccugag

SEQ ID NO: 4103631 - RNA, 78 nt, Human
cucagugccauagacuacgcucacacuagaccccagccuucuccugggcccugugugaagguagcucuuggcacuggg

SEQ ID NO: 4103632 - RNA, 120 nt, Human
cucagugcccuguuucagcccuuugcgaaccauuguuaccugucuugccucucuaacugguccauugaggacaggaauaaugucuuuugcuaauggcagucagagacaggcagaucuggg

SEQ ID NO: 4103633 - RNA, 87 nt, Human
cucagugguggcaucaauugacuucucucuucaacucucaacccuuaaggaauaaaaaagaggaaucagcugauggccaucucugag

SEQ ID NO: 4103634 - RNA, 106 nt, Human
cucagugucaaggcuuucuuguuugaguagcccaggcuuaguaaguggccuucagucucauugguuacacacagagcugggccugggagagggggaucuacaugag

SEQ ID NO: 4103635 - RNA, 125 nt, Human
cucaguuaaucuauaaaugguaucaggccauuaagauacaaguuaagagaaaggaggcuuaaacaccauccugcuuuacuugugcuugugcuuugguguacucagagacuucuuccuacccugag

SEQ ID NO: 4103636 - RNA, 58 nt, Human
cucaguuaggaugcuuccauagccagggaaaggcaauggucagaauuuuccagcugag

SEQ ID NO: 4103637 - RNA, 61 nt, Human
cucaguuuuaccuugcagcauauagagucccuaucagaaugggggccuugcagagacugag

SEQ ID NO: 4103638 - RNA, 72 nt, Human
cucauaaauauguauagagucuuuuaaauuaucuguugauggauaaggacucugauacauuuacauaaugag

SEQ ID NO: 4103639 - RNA, 56 nt, Human
cucauaacugugcucaggggagauggauuuaucguaacugagucaaagguuguggg

SEQ ID NO: 4103640 - RNA, 60 nt, Human
cucauagaagcaccagaagauaucacccagacaugguucuuuaaacugcugcucugugag

SEQ ID NO: 4103641 - RNA, 63 nt, Human
cucauagaguuguugugagaagaaaguuauuuaauacauguggcacuuacaacaauucaugag

SEQ ID NO: 4103642 - RNA, 102 nt, Human
cucauaggugaccuuggggugcagggcaggggaccgaggcaggcuuacccuggugcagucgcagacaugguccccuuuccucccgccaggacuguccuagag

SEQ ID NO: 4103643 - RNA, 55 nt, Human
cucauauaucuguaagguggauaauaucguuuaccaccacuuugcagauagugag

SEQ ID NO: 4103644 - RNA, 63 nt, Human
cucaucaguggauauagauuagcguggucauuagcauggcuuuauaaauccacugguuuagag

SEQ ID NO: 4103645 - RNA, 59 nt, Human
cucauccaccgcagccccucaguacccacacggccuggaaaauggaugcguggauggag

SEQ ID NO: 4103646 - RNA, 75 nt, Human
cucaucuaauuuuggaacagagacaagccaucucucuuauaagcugcccaaauuucugauccacaaauuaaugag

SEQ ID NO: 4103647 - RNA, 62 nt, Human
cucaucuggggaaaacuccauugcugagauuacucaguacaaguugccuaccuuaaguugag

SEQ ID NO: 4103648 - RNA, 57 nt, Human
cucaucuugaguccaggggaugauaagacaguaagucccguggagaaaaggaaugag

SEQ ID NO: 4103649 - RNA, 84 nt, Human
cucuaaacagcuuuguccugcaaaccugaacaaaaagaaauucagugugacugucaggacagaugcuccagaaacaguuuugag

SEQ ID NO: 4103650 - RNA, 102 nt, Human
cucuaaaucugcugcuguuuccugaggcacaauccuagaauugugaaaauuguugauccaauuuagaugagagagucuuauaaaacagcagcacauuuuaag

SEQ ID NO: 4103651 - RNA, 70 nt, Human
cucuaaaugauucugguugcuuuaagugcagugguucucacacuuuacugugcauuagaaucaccuggag

SEQ ID NO: 4103652 - RNA, 88 nt, Human
cucuaaggucucuuaagauugucagcuucagccucaagcuugaaggaggcuggagauggagacuggucuugaaaagaguccaggagag

SEQ ID NO: 4103653 - RNA, 69 nt, Human
cucuaagugucaguuaggcauuugccuuaauuuugaauaaaaugaaaaaugucuaauuuauuuugggag

SEQ ID NO: 4103654 - RNA, 82 nt, Human
cucuaauacuagaacaauucugaggccugcuuuguuagcaucaaucagcaagcagagcaaagcucagaaaugcuggacagag

SEQ ID NO: 4103655 - RNA, 63 nt, Human
cucuacagcugcugccccuggugcucccaggaagagucucggguacaggcagagguuggaggg

SEQ ID NO: 4103656 - RNA, 78 nt, Human
cucuacguuacugaugucauuagaaacagacugauuggguucguuaagcauuuggaucugagacagaguaagguggag

SEQ ID NO: 4103657 - RNA, 67 nt, Human
cucuacucccuguacuugccucucuuguagcccuuucacaugggacuguaaucugcagugagaagag

SEQ ID NO: 4103658 - RNA, 75 nt, Human
cucuacuuacagguguggaaauugaguaacagaaaaauuaacuugccaagauaacacagcuaguaaauaguagag

SEQ ID NO: 4103659 - RNA, 59 nt, Human
cucuagauuacuucugauaccuaauucaauguaaaugcugugucaguaguugucuaggg

SEQ ID NO: 4103660 - RNA, 86 nt, Human
cucuagcaugauagaaaacuugacagugagacaguuugagucgaaagauaagaaauguugucucugcagcaaugucauagcuggag

SEQ ID NO: 4103661 - RNA, 57 nt, Human
cucuaggagcugagaguagucccuuuugcuagcaaacugacaaucucaguccuauag

SEQ ID NO: 4103662 - RNA, 68 nt, Human
cucuaggauggaaggugguuuggggacuuacaucucucucuuuccuccugucuccuuccuauauugag

SEQ ID NO: 4103663 - RNA, 95 nt, Human
cucuagggugguggugccagggcuuaacuuuucaggaggccagacuauccuuggaguuucaugagauuaggacccugucuguccacuucuuggag

SEQ ID NO: 4103664 - RNA, 72 nt, Human
cucuaugaaauagagcuggguuaaacuuugucaccaacaauggguuucugucccagcucugccacuauagag

SEQ ID NO: 4103665 - RNA, 71 nt, Human
cucuaugacugagcagcacagggcgccaggggauguuugucugcacugcugcuguguugcugacuuaugag

SEQ ID NO: 4103666 - RNA, 64 nt, Human
cucuauggauugucuaacuggacaggcugggaccccaaacucuuccagcugcacaagcaugggg

SEQ ID NO: 4103667 - RNA, 79 nt, Human
cucuauuacuuuauauucuaucugccacaguugggcuggacaagaugggaaggcuggaagguagaagaugaggugggag

SEQ ID NO: 4103668 - RNA, 84 nt, Human
cucuauuggaccaugaucuugcccuuccucucugucugcuuauggcucagcagagaaaugggguaaucuuucaggaagguggag

SEQ ID NO: 4103669 - RNA, 71 nt, Human
cucucaaugaauggcuuacccuggauugugucuuuaugccguaggcauuaucacuguaaguauuuguggag

SEQ ID NO: 4103670 - RNA, 61 nt, Human
cucucacacuugcuuccccaguccagggcacccaggaguuugggguacgcaggucugggag

SEQ ID NO: 4103671 - RNA, 65 nt, Human
cucucaccuauucauuguagaacuaacaagaaguaauaagauuucuggaauguagucggugagag

SEQ ID NO: 4103672 - RNA, 84 nt, Human
cucucacuauccuggcucccgucugguggccaucccugagccaaucacuguggcagcagaggggugguauggaguggaaaagag

SEQ ID NO: 4103673 - RNA, 65 nt, Human
cucucagcagagcugugugggaagggccugaggcuucuagguccuccacauuccucuguuguggg

SEQ ID NO: 4103674 - RNA, 59 nt, Human
cucucaggagccacagcgggaguugcucacugagaagacuuucugugguuaccagggag

SEQ ID NO: 4103675 - RNA, 98 nt, Human
cucucaggccccuucuuuccucaagugucaccagcccccucacgcugucacguugcaccagcuuggcaggguugggccugguggcaugugucugggag

SEQ ID NO: 4103676 - RNA, 94 nt, Human
cucucagugucugccuugcuaugugagauggcucaagccauuagcccauucuggaguuuaguuuucccaucuacaaagcagggagacaucagag

SEQ ID NO: 4103677 - RNA, 98 nt, Human
cucuccaaggccaugugggagguuuucgaugagcccugaagcucuguggaguuucuggcaucugggggaggccucuguuuacauccaagccuugggag

SEQ ID NO: 4103678 - RNA, 65 nt, Human
cucuccacagaagaccaagaaagcuuccaucucucauggagaucuuuguuaucuuuugauaagag

SEQ ID NO: 4103679 - RNA, 57 nt, Human
cucuccaggcugggacaggaccugacccccuucuuccuguccucagauguggacgag

SEQ ID NO: 4103680 - RNA, 64 nt, Human
cucuccauacucaaagguuucugugccauauuaaucaucuuacagguuucucuuuuauggaggg

SEQ ID NO: 4103681 - RNA, 66 nt, Human
cucuccaucaggccgggcagcagcaaaggccuugucuauggggccagacuccuggcugauggugag

SEQ ID NO: 4103682 - RNA, 64 nt, Human
cucuccaugagcauuugaaauguacagcuacaaguugauaguguaugauuucaaauggcuagag

SEQ ID NO: 4103683 - RNA, 62 nt, Human
cucucccaacucagacucguuaucuccaucaugguggagggaccuugauggguuugggacag

SEQ ID NO: 4103684 - RNA, 58 nt, Human
cucuccucuugggaauaccuuucuagacguucuuuuggauugugaguaagaggaugag

SEQ ID NO: 4103685 - RNA, 67 nt, Human
cucuccugguguggaggacagggacuucuccauuccaucccuuucaaucuccuucacagcaggaagg

SEQ ID NO: 4103686 - RNA, 70 nt, Human
cucuccuucccagcaccucagucuggccaaacauguuuuucuggcuucugguagugcuggggagguggag

SEQ ID NO: 4103687 - RNA, 85 nt, Human
cucucuagagaugaaugaugcaaaagacacuguaguuaguuaugguucuagguagugacuuuucaucucaguucuacaaagagag

SEQ ID NO: 4103688 - RNA, 76 nt, Human
cucucuagaggaccauuucagaguuuuggccuuugcugauaggcagccuugggcugagccauuugaaccuugagag

SEQ ID NO: 4103689 - RNA, 70 nt, Human
cucucucaagcauuuugaugaaagcuacuauuuacuuuagggaagugaaaguguauuuauuaugagggag

SEQ ID NO: 4103690 - RNA, 65 nt, Human
cucucucccaggcugccuugaggaaugcagagaaaauacuccuggaaagcggaccuggggcagag

SEQ ID NO: 4103691 - RNA, 106 nt, Human
cucucucggggcuggccccggugcuggacggcugcagccguggacuccgggagcuccaggcauguggccaguacucauggcuccucuggggccagugucuggagag

SEQ ID NO: 4103692 - RNA, 56 nt, Human
cucucucuauuucuauuggcucuuuuucuguggagaacagugacuaauauagagag

SEQ ID NO: 4103693 - RNA, 76 nt, Human
cucucucugggcccaacagcacuggucccgcaagccucaggcccccuaagggcuggucggugcugcacagagagag

SEQ ID NO: 4103694 - RNA, 64 nt, Human
cucucugaggcaggccuguggguucugguguaaguggagauugggccuggaaagccuuagagag

SEQ ID NO: 4103695 - RNA, 56 nt, Human
cucucugaugucaggucgcugaauacaacuucaguggccuaaagcuucuagagcag

SEQ ID NO: 4103696 - RNA, 60 nt, Human
cucucugccucaagugaacuuuucaugcaaaguuguggacagagcauuugggacagagag

SEQ ID NO: 4103697 - RNA, 90 nt, Human
cucucugguuuuaguggaaaaacagagcuuuuuacauuaaugauaacuuauauacaauuguguuaaagggcuuuaacugaauccagggag

SEQ ID NO: 4103698 - RNA, 129 nt, Human
cucucugucuauuuugagauggaguuuugcucuuguugcccaggcuggaguacaauggugcaaucuuggcucauugcaacuucaaacuccuggguucaagcgauucuccugccucagccuccugaguag

SEQ ID NO: 4103699 - RNA, 90 nt, Human
cucucugucucuuuauguaugugugaguguguguguauauacacacauguacauacacauauguaacguguuuuuaauuaguucagagag

SEQ ID NO: 4103700 - RNA, 85 nt, Human
cucucugugaaaauagguguguagguguuugcccagagaaaagacugcgucaaauagacuuaagcaucuguacaaaaacagaggg

SEQ ID NO: 4103701 - RNA, 60 nt, Human
cucucuucgucgcuucauuugcuagcgucaaaauuggugagcugagguaaggcaagagag

SEQ ID NO: 4103702 - RNA, 83 nt, Human
cucucuuggaacuucugcuuuuacaggcagucacacaaauuuguccagcaugacuggggugcaggcaggaguggcugaggggg

SEQ ID NO: 4103703 - RNA, 76 nt, Human
cucugaaaguuugcauagauuaagcauucaaaguagauguauugaaaaaugguuaugucuauguaagcauacaggg

SEQ ID NO: 4103704 - RNA, 62 nt, Human
cucugacagguggcauuaucucauuaucccuauuuuucagaugaggaaccuggggcucagag

SEQ ID NO: 4103705 - RNA, 77 nt, Human
cucugacccucugggauucugaguuuauuuuuagcaccaacuuggugcaaauugcuaaggaucucaugugggcaggg

SEQ ID NO: 4103706 - RNA, 95 nt, Human
cucugacuauucaguggacaggaauguucaagucucauuccacugugaugcuucuccugaacaucccuguacuucccacagaacucuuacaggag

SEQ ID NO: 4103707 - RNA, 64 nt, Human
cucugacuuuaaauacaggaugaaaugacucuuaguuuuggcguaaugccuuuaagguuuagag

SEQ ID NO: 4103708 - RNA, 71 nt, Human
cucugagaagaagcuggggccagggccuuggucugaggggaaaggcccuuccaccaguccucgacucugag

SEQ ID NO: 4103709 - RNA, 57 nt, Human
cucugagaaggguaggcuccauuucauuuaggugugaaggguccuucccuuucagag

SEQ ID NO: 4103710 - RNA, 56 nt, Human
cucugagagagcuggugagcacccccaagccccuugcaucacucucucucucaggg

SEQ ID NO: 4103711 - RNA, 64 nt, Human
cucugagaugauaccuucuggaccguucagccuggguucauagacugguguucaucagucagag

SEQ ID NO: 4103712 - RNA, 55 nt, Human
cucugagcagcggugccgaaguccagcugggcaaugugugugcugacugccagag

SEQ ID NO: 4103713 - RNA, 70 nt, Human
cucugagcgauuaaggaggcauacugauuuagucuugaccucucaagacuaaggcuucuuuaagacagag

SEQ ID NO: 4103714 - RNA, 62 nt, Human
cucugagcugccacuaagaugguucaagucuuccugacccuacuuuaguaugagcuccaggg

SEQ ID NO: 4103715 - RNA, 70 nt, Human
cucugagguccuacagugacccucucuggcaagacaagaccccagaacauauuaagguaggaccccagag

SEQ ID NO: 4103716 - RNA, 68 nt, Human
cucugaguugaggcaggagagucaucaugcuauuuaaugacaaaugcuuucaguguuucaaaauggag

SEQ ID NO: 4103717 - RNA, 81 nt, Human
cucugcaaaggcacaguugaucacuauaggcuucaguuaaaccaacuguggcuucaaggugugucacuggccaguguuaag

SEQ ID NO: 4103718 - RNA, 74 nt, Human
cucugcaccuuguaggaggcaacugcggcagcaacagaaacagcaguguacauugcaaccaccagguggcagag

SEQ ID NO: 4103719 - RNA, 55 nt, Human
cucugcagagccuccagcccaggagagaaccagggcaaaggggacaucugcaugg

SEQ ID NO: 4103720 - RNA, 55 nt, Human
cugacaccacaacuagccauugaaugagccucucaggugcugugugugguaucag

SEQ ID NO: 4103721 - RNA, 56 nt, Human
cugacagagaagcuucugccuccauuucucuuccuggagcccagcuuauuugucag

SEQ ID NO: 4103722 - RNA, 62 nt, Human
cugacagccauguuuuagagaauuugaugacucuuuuaaacucuuuagaaagaggcugccag

SEQ ID NO: 4103723 - RNA, 129 nt, Human
cugacagcccugugucuuuucaaagucaauaaguggauuuuugugccucuaauggagagagccucuucugaggaggagcaaaaacucuagaagcuuugaucucuggaaauacaggauaaaagcucucag

SEQ ID NO: 4103724 - RNA, 82 nt, Human
cugacagcugucaaguuugcauuuguuuagaaccugaaguuaucugucaguugucuaugaaauucacugcuuuagcuuucag

SEQ ID NO: 4103725 - RNA, 61 nt, Human
cugacaguaacuaauguggagauuuuccuuaucauaaagggccugcacuagaugcuggcag

SEQ ID NO: 4103726 - RNA, 88 nt, Human
cugacauauggggagucugggcuagacuccuugagggugagaaacuaugugaagcaaggucuggccaauagacagccccaaaugccag

SEQ ID NO: 4103727 - RNA, 86 nt, Human
cugacaugcugaggugaugucaaauggguuucaugaagaggaauggauuuccaaguuuuuuugacagugaccugaguaaaacacag

SEQ ID NO: 4103728 - RNA, 95 nt, Human
cugacauugcugacagagcugcugugaggaugcuuagaagccaugaauauuuuuaaaugucacagucucgugagcaucugcugugugugugucag

SEQ ID NO: 4103729 - RNA, 69 nt, Human
cugaccacuggccugguggggaccacagcaaacuagagagcacauggcccaucucaaggucacccucag

SEQ ID NO: 4103730 - RNA, 74 nt, Human
cugacccuguggcucuguggcagaggcgccuucucacaacaccgccaugccuuggccccagugccucagggcag

SEQ ID NO: 4103731 - RNA, 107 nt, Human
cugacccuuccccucuggccucucugcgugguaggacucaguucucuuaccuguuaauugggggugagaauccuucucccaccagcugggaagaggguagggagcag

SEQ ID NO: 4103732 - RNA, 62 nt, Human
cugaccgagccgcccuccacgaugucccuccagagcgggcggucagggggcugcucggccag

SEQ ID NO: 4103733 - RNA, 76 nt, Human
cugaccgccuguuccugggaggcaugggcugggcuggcugcauaccucagccagaaccucuggggacagggcucag

SEQ ID NO: 4103734 - RNA, 59 nt, Human
cugaccugagugguacaaggcauuuucuuuuguuuuagaaaccuauugcuuuagguuag

SEQ ID NO: 4103735 - RNA, 57 nt, Human
cugaccuugugaucugcccaccuuggccucccaaagugcugagauuacaagcgugag

SEQ ID NO: 4103736 - RNA, 57 nt, Human
cugaccuugugaucuucccgccuuggccucccaaagugcugggauuacaggugucag

SEQ ID NO: 4103737 - RNA, 65 nt, Human
cugacgggacaggugaggcuggggcagugcuccuggcucccccaaagccucagccugccugcaag

SEQ ID NO: 4103738 - RNA, 90 nt, Human
cugacuagaugccaagugcccugaagugauagaaaauaggcuccuugccucaaagacuauauauuuuauuuggggacuuacacuauacag

SEQ ID NO: 4103739 - RNA, 128 nt, Human
cugacuauggcggcccuaaaaacaaacauacacccaggggguuagaugccuagauuaauuuuaguaacuuaagaaaagugauuugaagaaaguaguuuagacuucaacccuuugauguccacaguuag

SEQ ID NO: 4103740 - RNA, 84 nt, Human
cugacucaugggaaaauuggguuaauuuauggaguugauucauuacacaagucuagaaugugcaccaagcucccuugagaucag

SEQ ID NO: 4103741 - RNA, 56 nt, Human
cugacuccagguuuucucucaaguuuguagaauuuuacaaaugaaccugguuuuag

SEQ ID NO: 4103742 - RNA, 63 nt, Human
cggcgcagucagacgccaucugcuguacaccucugcgcagccauuggcugccuggugcguccg

SEQ ID NO: 4103743 - RNA, 58 nt, Human
cggcgccucugaggagcccgggcgcuucguggccuggcaguguuucuaaggggcuccg

SEQ ID NO: 4103744 - RNA, 57 nt, Human
cggcgcgcuggcuggccagccccggauaggcgccgccggcagccaaucagcgugccg

SEQ ID NO: 4103745 - RNA, 70 nt, Human
cggcgcucucuucuccuggcccgcagccgggagccaaggcccgggggugggcggggaaaggggagaaacg

SEQ ID NO: 4103746 - RNA, 60 nt, Human
cggcgcugguacaguggaagagggcuguccagcccuggaugucuuucauuucuagcucug

SEQ ID NO: 4103747 - RNA, 79 nt, Human
cggcggggcggagggcgacagggcgaccgcgcgcccucugccgggacgcccgcccugcccugccccgccgccgccgccg

SEQ ID NO: 4103748 - RNA, 70 nt, Human
cggcggugggggaaaggagcgguugcccacaaaccauccgagcacagggagccgcucagacccgacgccg

SEQ ID NO: 4103749 - RNA, 65 nt, Human
cggcucgggcacccugguucugguggcugugcugacccacacucuccuccgggcugcccgggcug

SEQ ID NO: 4103750 - RNA, 70 nt, Human
cggcucuggacccuggaguggcugcaggcggcauggggcugcaagccaggcgcugggcguccgggagccg

SEQ ID NO: 4103751 - RNA, 59 nt, Human
cggcugagcagugcugauggaacagguuauucuuucuucauacaccuuuugcugagcug

SEQ ID NO: 4103752 - RNA, 68 nt, Human
cggcuuauguacacacauauauuguaccaagcuggccaaugcaauauuuauguuuguacuuugagcug

SEQ ID NO: 4103753 - RNA, 89 nt, Human
cggcuugggcugagcuggguauauggcuuuaugcugcggcgaaugcugggagccuuuagcugaggcuguggacucaguuuggccaucug

SEQ ID NO: 4103754 - RNA, 85 nt, Human
cggcuugguguuuucagaugaggaaauggagccugaggaaugcuaacuuacagauuccggucaucucuccuuaacagccaaguug

SEQ ID NO: 4103755 - RNA, 59 nt, Human
cgggaaaguuucucacacaugcagagacuugagguucugaauguuaggaaacuuucuug

SEQ ID NO: 4103756 - RNA, 69 nt, Human
cgggagaggguggguacaccagcccucaggcccaggugcggcacugugggcggcuuucagccuuucccg

SEQ ID NO: 4103757 - RNA, 110 nt, Human
cgggagauucuccucucucccugcuuuggcaggcagcuccuggagaggugcagcucccggagaggugcaggucaguggcaguggguacagacaagcuggagaguuucuug

SEQ ID NO: 4103758 - RNA, 62 nt, Human
cgggagcugcaagauaaaagugauguguuggcugggcgcgguagcucaagcuuguaaucccg

SEQ ID NO: 4103759 - RNA, 55 nt, Human
cgggaggaaaggcgaggcucugcaucuagauuuaccucguucucuuuugucuccg

SEQ ID NO: 4103760 - RNA, 73 nt, Human
cgggaggucacgacugggaugccugugcuuuagaauguguuuacgggaagggaaaaccagcgugacuucacug

SEQ ID NO: 4103761 - RNA, 59 nt, Human
cgggcacagguggagcugcugaaccugaggcucaggccucaguucucugccugugcuug

SEQ ID NO: 4103762 - RNA, 58 nt, Human
cgggcagcugccaagugcaucgcagccuugaucagcucgcggccugaccugcugcccg

SEQ ID NO: 4103763 - RNA, 76 nt, Human
cgggccacccacacagccuccucuggcucacggugcaguggcugugggggcugcgggaggcugccugguaggccug

SEQ ID NO: 4103764 - RNA, 87 nt, Human
cgggcccgcccgcgcggccgggcagcggcguggccaugguggcggcggcucgcggccugcgcugcucccgacggcggcccgggcucg

SEQ ID NO: 4103765 - RNA, 81 nt, Human
cgggcucagaggggugggcacagcgcccaggagacaguaagugugagaugaggccucugugccauccaggcaugagcacug

SEQ ID NO: 4103766 - RNA, 80 nt, Human
cggggagcugccgggcgcgcggccugcaaaccugcgaccggcuggggugauacccgggcugugcaccauccaccucccug

SEQ ID NO: 4103767 - RNA, 62 nt, Human
cggggagcugcugaacacaagggucuccugcuggagacccugaauuccuguugcacucccug

SEQ ID NO: 4103768 - RNA, 70 nt, Human
cggggcacagggagccgcaguugcagaccccgcaggagcuaucucggugccugcgcucccuguagcuuug

SEQ ID NO: 4103769 - RNA, 67 nt, Human
cggggcauugaggaggaaacaauggccugugaagcuauugaaaucccuaccucagaggccagcccug

SEQ ID NO: 4103770 - RNA, 55 nt, Human
cggggcuccgaagagcucgguucagaucccggccgccugggcuccaggagccccg

SEQ ID NO: 4103771 - RNA, 100 nt, Human
cggggggcagaugggugcggcagcagggcccccgggugcgccggggcauaucucgacucugguugcggguucugcugcgccugucacccauggccuuccg

SEQ ID NO: 4103772 - RNA, 95 nt, Human
cgggggucggggcgcauuugccaggagacaucuggagcccggcccugcuucugucgggcuccaggguaccccuggauggcugcgcugugcccucg

SEQ ID NO: 4103773 - RNA, 95 nt, Human
cgggggucggggcgcauuugccaggggacaucuggagcccggcccugcuucugucgggcuccaggguaccccuggauggcugcgcugugcccucg

SEQ ID NO: 4103774 - RNA, 87 nt, Human
cggggugguaacugacaccaccaauauguucauauugggagaaaagccacuguuggauggaaugaugguguugccagaacuacucug

SEQ ID NO: 4103775 - RNA, 66 nt, Human
cgggguucauccaugcuguggccuggaucaccgcuuccuuccuuuuuguggcuggaugauacccug

SEQ ID NO: 4103776 - RNA, 58 nt, Human
cgggucucccagaauuaccccuccccauagccagggagggggucguccggaagaccug

SEQ ID NO: 4103777 - RNA, 61 nt, Human
cggguggccaagagauaaaauugugugcauguauccauacacucuaauucuuugguccuug

SEQ ID NO: 4103778 - RNA, 56 nt, Human
cgggugggcccgucguggagcgcacuucugcgccucuaaucucgggcguccaucug

SEQ ID NO: 4103779 - RNA, 70 nt, Human
cggguggggcuggcugguagugcaguagcgccagugucgacugcuugggcggccagcauggcggggcccg

SEQ ID NO: 4103780 - RNA, 72 nt, Human
cgggugggggaucgaggcguucccgaggcgaaugaggcuguuuuucaaaauccgggaggcgccccucgcccg

SEQ ID NO: 4103781 - RNA, 68 nt, Human
cucaucuuugaaaaguuggcuacuuuuucugacacaagccaagaaaagguauuuauuuuaaagguaag

SEQ ID NO: 4103782 - RNA, 70 nt, Human
cucaugagucugucagagucaucgugggagggagaaccuuuguaaaccugaagacaguuuuacucaugag

SEQ ID NO: 4103783 - RNA, 66 nt, Human
cucaugauggacaccuccugagguucugcuuggagcaggccucuagugcauccucaagaagcugag

SEQ ID NO: 4103784 - RNA, 67 nt, Human
cucaugcaagauuuucagcuaauggugcaguuuuuagugauugcacaaacagcaaguuuuaaaugug

SEQ ID NO: 4103785 - RNA, 95 nt, Human
cucaugcacucucuccucaggcacgagccugaugagacugaugacugugcaucgugcuccuggugaggcucugcagaaguagggggggcggugag

SEQ ID NO: 4103786 - RNA, 63 nt, Human
cucaugccacguuguuuuuucucucggcucugcucagagugaaguucaucgugcagcaaugag

SEQ ID NO: 4103787 - RNA, 90 nt, Human
cucaugccauuaacauucuggcacacaaguauuuccuuuccguauguguuccuuaggaaaggcaauaguaguuccgaguguaggcuugag

SEQ ID NO: 4103788 - RNA, 65 nt, Human
cucauggaaggaugcccugcaagucccucuugaguuucuuaagauguuuuggggcccuuucagag

SEQ ID NO: 4103789 - RNA, 75 nt, Human
cucaugguugaauaugacauuuuucugcuuuucccucuaagaaguuuuugagaauguuaauguugaaguaugcag

SEQ ID NO: 4103790 - RNA, 75 nt, Human
cucauuaguacaugcucaguaacuuucaguugucaaccaugucauugaaagguuuugagcagauauuagguugag

SEQ ID NO: 4103791 - RNA, 76 nt, Human
cucauucagguaggcauuugugaggaagccagggaacuccacccuggauucuuucauaaaagucacuucauaugag

SEQ ID NO: 4103792 - RNA, 67 nt, Human
cucauucaguuucuaaaugcuccucucaaugaaaccccaaagggagaggcacugaaacaggcauggg

SEQ ID NO: 4103793 - RNA, 58 nt, Human
cucauuccuggcgcacacaguucacuuugacaucgaggggcgcucugccaggaaagag

SEQ ID NO: 4103794 - RNA, 55 nt, Human
cucauugacagguggcccugcugaccccacaggccacaggaguacugucgguggg

SEQ ID NO: 4103795 - RNA, 78 nt, Human
cucauugagaaguuccaggacaagauguuucaggaugcuacaauuuugccaugauguuuauggaugcuuuuaaaugag

SEQ ID NO: 4103796 - RNA, 67 nt, Human
cucauugcaccccagucccagcuacaccuuuccugacuccaggaagcugaggcugugggugucagag

SEQ ID NO: 4103797 - RNA, 60 nt, Human
cucauuggguauagucugugggcaggacccccucuauucaguguuucugugcccaguggg

SEQ ID NO: 4103798 - RNA, 94 nt, Human
cucauuuaagggugcaggcuucuuuguggcagugagcuggguaaauggugauuacuuuucuuugauuugcuacauaagauuugccuccuguggg

SEQ ID NO: 4103799 - RNA, 70 nt, Human
cucauuuacacacagaggugugcuggagagcuaugggccagcucaugagcaugaggaugugguaggugag

SEQ ID NO: 4103800 - RNA, 79 nt, Human
cucauuuauuacucaguuugagggguagguguuauuucauaaaagaacaaacuaugacucaagaagacugacaagugag

SEQ ID NO: 4103801 - RNA, 66 nt, Human
cucauuucuaacuacugcugcagcauuuugguaaaaaccuguagcaguuuguuacacuggggugag

SEQ ID NO: 4103802 - RNA, 105 nt, Human
cucauuugauaccuuuaugaaaaccugaauuaugccaucacuuaugcauugguguauauagcuacccaucaaguagguccuuucaagauucugguagagaaugag

SEQ ID NO: 4103803 - RNA, 97 nt, Human
cucauuuuauaggaguucgaauuugccauuguuuccugcugagcugcuaugaggaguagcagcaaggaagcgaggaugggacucugugggagaugag

SEQ ID NO: 4103804 - RNA, 79 nt, Human
cuccaacucauuauggcaucugccagggacugaccuaucguucccucuggucuggacgccauauuguaugugucuggag

SEQ ID NO: 4103805 - RNA, 66 nt, Human
cuccacacccuugcuaacacuuguuauuuuccauuuuuuuuaaacaucauuuuagugggugugaag

SEQ ID NO: 4103806 - RNA, 67 nt, Human
cuccacaugaccuagauuaacauucugugaaaugcaaauuuuauaaaauguguuuuaggaaacgggg

SEQ ID NO: 4103807 - RNA, 60 nt, Human
cuccaccagagacugcauuucucugaaauaccaauucgugauaaaagcaguguuuggcag

SEQ ID NO: 4103808 - RNA, 80 nt, Human
cuccacccugcugggaaucccguucuucgccauggguaacuauccauccuugugguaaucggauucuuaccgguuugggg

SEQ ID NO: 4103809 - RNA, 129 nt, Human
cuccacccuucccugccccgcgcuccacccaaugggaagcugaccugcauggacagcaucaauggucucccuugcccucuggcuucugguuggguuuggcaaauaacgagcacugcagggcgacuggag

SEQ ID NO: 4103810 - RNA, 71 nt, Human
cuccaccguagugcuccaacauuagugugcuuuucuaaguggguaaguuacuguugcaguaugccaaggag

SEQ ID NO: 4103811 - RNA, 77 nt, Human
cuccaccuccuaccuacacacauauccucuugaguuuuccugcuuaauuuuucucauagugugugguauagguagag

SEQ ID NO: 4103812 - RNA, 71 nt, Human
cuccaccugccugccucaugcugccugcagcccccuccuuggaggccaucagccugggguaggggugugag

SEQ ID NO: 4103813 - RNA, 79 nt, Human
cuccaccugcgcaacccucccagaugggcuugagguugggguguggccgggacccgggcggggagggguagggguggag

SEQ ID NO: 4103814 - RNA, 106 nt, Human
cuccacugagcggcuccacugggcuguuuuaucacagaauaagaagucauuaagacaagucacuuaaaaccuaugagaaacagauauggccagcugaucuaaggag

SEQ ID NO: 4103815 - RNA, 82 nt, Human
cuccacuuuugauauguuucucuuggaccugacauagcaagagagaguuccagguucagcaggaggcaucccaagggugugg

SEQ ID NO: 4103816 - RNA, 55 nt, Human
cuccagaauuguccauuggaaacacgaguucaagugccucagggagauucaggag

SEQ ID NO: 4103817 - RNA, 57 nt, Human
cuccagagauacacggucuugcagccucacuggugguuuagguugugggcuuuggag

SEQ ID NO: 4103818 - RNA, 57 nt, Human
cugcuguggccagccaggucaaaggugaggguggccuggacuagguacucauggcag

SEQ ID NO: 4103819 - RNA, 67 nt, Human
cugcuguuagagaaugacgugcaagccuccagugccauuggaagagcaugcauuuucugagagucag

SEQ ID NO: 4103820 - RNA, 57 nt, Human
cugcuguuccaccucugaaugcugggccacgucuggccuggcuucgugcagcagcag

SEQ ID NO: 4103821 - RNA, 61 nt, Human
cugcuguugugcuuggaaaggggcccggggugccggaggccucucccaggcgcggcggcag

SEQ ID NO: 4103822 - RNA, 91 nt, Human
cugcuuaagguugcugauagugucaugagugauuuucuacggaccuucuuugaaagcugucacugcagacaaccucagucauccuggagag

SEQ ID NO: 4103823 - RNA, 67 nt, Human
cugcuuagcaugauuacaugaagccagguagaaauccacuuaccuauuuaugcaauuaugaaaacgg

SEQ ID NO: 4103824 - RNA, 64 nt, Human
cugcuuaggcagcaggaauuuaaauuuauacaaacacuguguaaauccauucccgcuguaacag

SEQ ID NO: 4103825 - RNA, 86 nt, Human
cugcuuagugcccuaccauaaaugccucauuuucucucacugaaaucccgaugucaguguuugaguuugcggcauugggcgggcag

SEQ ID NO: 4103826 - RNA, 58 nt, Human
cugcuucauagcccuggucucuccuaggauccugagaccuuuggggcugagaacguag

SEQ ID NO: 4103827 - RNA, 57 nt, Human
cugcuucucaccugcuacuggagcaugcucugccugcccccgucagaggugaugcag

SEQ ID NO: 4103828 - RNA, 75 nt, Human
cugcuucucagcugugagggcugcucugggugguaugacccagcaaugugaccccugacagcaggugugaagcag

SEQ ID NO: 4103829 - RNA, 83 nt, Human
cugcuucuuguaauaucacucaugagggucaaguucuucuaguucugauccuggaaauugugggaagauguugcaggagagag

SEQ ID NO: 4103830 - RNA, 118 nt, Human
cugcuugcgaaguuuggugccacaggguugaagagcauaaaguacaucaccucuuaguuucacuguccacuuucuccuucuucagcucuuuccugcaucuuaaccucuugcucuguag

SEQ ID NO: 4103831 - RNA, 59 nt, Human
cugcuugcugccuuccucucagaccaacuguuuagcaaugaaggaauggcuuuaaguag

SEQ ID NO: 4103832 - RNA, 73 nt, Human
cugcuuggcuuggggacagaucuggaggggcaggcgggcauggagcgugugccagagguccccugccaggagg

SEQ ID NO: 4103833 - RNA, 90 nt, Human
cugcuugugucucuuuuuucaucaggucuuugaugauacaacaaccacaguacaucaauaggguuugaaagcaagagcuacaagauacag

SEQ ID NO: 4103834 - RNA, 56 nt, Human
cugcuuuaacaaggcugaucagggaaacucauccugaucaggcgaccuuugagcag

SEQ ID NO: 4103835 - RNA, 55 nt, Human
cugcuuuaaucccugccuggaagagcucauccaugaccagguggaacugagguag

SEQ ID NO: 4103836 - RNA, 61 nt, Human
cugcuuuauauugagcuugaaaaacauccgauuucaugccccuuauucaacugugaagcag

SEQ ID NO: 4103837 - RNA, 78 nt, Human
cugcuuugcaucuaauguuagauuccuccaccuaggaguauuuuuccugggagaguauuucuuauuaaagaugagcag

SEQ ID NO: 4103838 - RNA, 129 nt, Human
cugcuuuggggucugcucugagaggccuggcugugugauggagcacagcagcuuuguuggcccccaccugggagcuggcagaagagcugguucaacuccgcagugguagggcagcccccagcucagcag

SEQ ID NO: 4103839 - RNA, 56 nt, Human
cugcuuuuccccucacagcauuugccaguuuguaagcugugcaggauugaaagcag

SEQ ID NO: 4103840 - RNA, 121 nt, Human
cugcuuuuuccuuuaaugaucagguuagcaccaugauggaagagcugcuucaggaaaaugauggcucuuguagcuaacaugugugagauauaauugaggggaguagauagauaagaagcag

SEQ ID NO: 4103841 - RNA, 76 nt, Human
cuggaaaauuuccuucaaaaugugcccccagauuuauuuagcgaauugcuggaccauagguuuguaaauuuuccag

SEQ ID NO: 4103842 - RNA, 74 nt, Human
cuggaaacuuaugucaaaaugguugagauuguuagggauuuagagaucaaaucauucaaccuuuucauuuccag

SEQ ID NO: 4103843 - RNA, 63 nt, Human
cuggaaagaagcuuuagauggcuauggcacucaaugcucauaggcuuucucauuucuuucugg

SEQ ID NO: 4103844 - RNA, 80 nt, Human
cuggaaagacucaggaaaugagaggcucucuuguucugacaaggcaggcugagagcucucauuuagggucaucacuccag

SEQ ID NO: 4103845 - RNA, 56 nt, Human
cuggaaagugcugagacaauugcuauuggcauuugacucuaaauuuacuuuuccag

SEQ ID NO: 4103846 - RNA, 75 nt, Human
cuggaaaguucuauguagauaaggcugcucucuaucacuaggaucuguguugucuagguggaaaguguuuuuuag

SEQ ID NO: 4103847 - RNA, 81 nt, Human
cuggaaauaacuguacacuggccccagggcggggcugcugaaaucuagcagcccucuccuugcuagacuguaaguguccag

SEQ ID NO: 4103848 - RNA, 59 nt, Human
cuggaaaucacuacuagucaauaccuagagcacuauauagguauacagaguauuucuag

SEQ ID NO: 4103849 - RNA, 82 nt, Human
cuggaaaugagaaagaggcaaggaagaauucuccccuagagccuuuugugggagaauggccuugcaaacaccuuaauuucag

SEQ ID NO: 4103850 - RNA, 77 nt, Human
cuggaacacagggcaaugcauuguaacucacugauguauccagauacauaaacuauguaauuugcucuauguaucag

SEQ ID NO: 4103851 - RNA, 74 nt, Human
cuggaacagggaaccacagcacagcuuccuaguugagaaucuucaggaagggcucagucugugcccugucccag

SEQ ID NO: 4103852 - RNA, 77 nt, Human
cuggaaccacauuccccagaguucucuuucuuguaugguucuguauggccaugagagacauucugugugaaauccag

SEQ ID NO: 4103853 - RNA, 110 nt, Human
cuggaacgaggaccaaacuuuuuaauuauggcuuugaaguaauguaauugugguuuuuaaugccucauucaucugcuugaaggauuauaugaguuuguucaaaguucugg

SEQ ID NO: 4103854 - RNA, 67 nt, Human
cuggaacgcauuucuaccaccggggccucccagcuucugcucagcuccuggcaggcagugugugugg

SEQ ID NO: 4103855 - RNA, 79 nt, Human
cuggaagaaaacuggagaguugugaccuaguuuaacaccaguaugaugaugaaaauugcagcucugagauuucuacuag

SEQ ID NO: 4103856 - RNA, 57 nt, Human
cuggaagagugacuuugcauuuacucuuuguuucugacugugaugucucuccuccag

SEQ ID NO: 4103857 - RNA, 80 nt, Human
cuggaagcugguuagaaaugcagaaucuuggacccaacccagacccguggaucagaaucuucauuuucaguggaucccag

SEQ ID NO: 4103858 - RNA, 78 nt, Human
cuggaaggcaaggagggaagccaccucucucuggaguucucagggacuaauggaggcucuccuggccuugucuuccgg

SEQ ID NO: 4103859 - RNA, 89 nt, Human
cuggaaggguagaauuguugucuagaucagcacaggaauuucuggacucccugugccaaaaucuaggcagucugaauggacuuguccag

SEQ ID NO: 4103860 - RNA, 55 nt, Human
cuggaaucaguuucuuggcaaguuuaaauguuaggcuggagagauuagauuucag

SEQ ID NO: 4103861 - RNA, 70 nt, Human
cuggaauguauguaucuuaagaugcuuucuugaaagacagguaaaaugaccuuagggacaugaauucuag

SEQ ID NO: 4103862 - RNA, 106 nt, Human
cuggaauguuuggugacugugaugcuuuucucagugaaguuuagaacauguuauugaacauuuuucucuuuccacugagauuucauagacauacagaaauauccag

SEQ ID NO: 4103863 - RNA, 85 nt, Human
cuggacaaaagaucucugagaaauuucuuugugaugugcgcauucaucucacagaguugaacuuucuuuugauugagcaguccgg

SEQ ID NO: 4103864 - RNA, 76 nt, Human
cuggacaaugagggagcugaccuuucugugcucaauaaaccaauugccacuagagaguagguucccuggugaccag

SEQ ID NO: 4103865 - RNA, 77 nt, Human
cuggacaccuacuuugugcagauuuuagaugcuugggacucagcagugaaagucucuguuauagagaaggaaaacag

SEQ ID NO: 4103866 - RNA, 75 nt, Human
cuggacaguguuuucaaugcuucucauuagccaaugaguaauaaauguacccaguuuugagaaguauauugccag

SEQ ID NO: 4103867 - RNA, 62 nt, Human
cuggacaguucacauucacuuuccuuguaccuagcagggaaacuuguuauuguauuuuccag

SEQ ID NO: 4103868 - RNA, 81 nt, Human
cuggacaguuuccacucuccagucaauuucaguucugagauucacuacugguauggccuggagaaugcagacccuguccag

SEQ ID NO: 4103869 - RNA, 66 nt, Human
cucucacuuuccuccuucauccuucuaaacucacccuaccaggaggugccaacugagagcugagag

SEQ ID NO: 4103870 - RNA, 61 nt, Human
cucucagacugaagggccugugggucugugggaaggcugcucaggagcccuggauuggggg

SEQ ID NO: 4103871 - RNA, 55 nt, Human
cucucagcaaggaaagaggcagggaacagguucuaccucacagcuuuguuaagag

SEQ ID NO: 4103872 - RNA, 78 nt, Human
cucucagcagcagccacuguguccagagaaacucacagcucgggacugagccucgggaugguggccugugcuugagag

SEQ ID NO: 4103873 - RNA, 115 nt, Human
cucucagcuaccuugucacuccaccaauuaagauuuucaacaucuggagcaagauuaagagauguauauccauuguugaccuguuccagaugcagaaaugaugguaguugcugag

SEQ ID NO: 4103874 - RNA, 107 nt, Human
cucucagcuaucccuguauagcuccaguccuguucauguucucucucaccagcaguacaucugugcugugaggauguuaaggggaugagugaagagggguuugagag

SEQ ID NO: 4103875 - RNA, 91 nt, Human
cucucaugacauuugaguuacuuaguacugaaugcauuuugugauguauucagaaaaugcauuucacuaauguuucccuaauucauggggg

SEQ ID NO: 4103876 - RNA, 57 nt, Human
cucucauguaguaucuguauggccucccagugcagucaguguugacuacaugcagag

SEQ ID NO: 4103877 - RNA, 130 nt, Human
cucuccaaagggaauaagagggcugcuuggaccagaagcuucuacacaggagaacccagaagcaaaacaaauaaagaauguggucccugcuaagagucuuuuggcauccaucagccuacugucuugagag

SEQ ID NO: 4103878 - RNA, 56 nt, Human
cucuccacucagcgucauguccuauuuucagaugcauggcagacacucguggaggg

SEQ ID NO: 4103879 - RNA, 58 nt, Human
cucuccaggagagcacuuugagauaugaaaagaccaugugugugugcuccuuguagag

SEQ ID NO: 4103880 - RNA, 71 nt, Human
cucuccaguccucaucucaaaacccaaggggcaguuuaaucugucucuguaguuugagagagcagggagag

SEQ ID NO: 4103881 - RNA, 63 nt, Human
cucuccaucugugugaccucccccauuugaggcugaaaauuuggggagaagggcugaugagag

SEQ ID NO: 4103882 - RNA, 56 nt, Human
cucucccauggcuuucccucaagagcaagaaauucuuugacaagagucaggaagag

SEQ ID NO: 4103883 - RNA, 82 nt, Human
cucuccccacgaaagaacaguguccugggacucggggugcggggcagccggguucgcuggagcuguucagugcggggaagag

SEQ ID NO: 4103884 - RNA, 78 nt, Human
cucucccccaguuucuuccucccccagagacccuaugaucuccuccauuuucacagaggaggaagcugaggcacaggg

SEQ ID NO: 4103885 - RNA, 56 nt, Human
cucucccuaugccucccaggagcaucugaugauggaacugcugggagaggggaggg

SEQ ID NO: 4103886 - RNA, 61 nt, Human
cucuccggaugccuuuguucaggguucucacugcacagccacacacagcaggcccggaggg

SEQ ID NO: 4103887 - RNA, 57 nt, Human
cucuccucaccaccagcagcagaccccaaauucagaggguuuggguagagaagagag

SEQ ID NO: 4103888 - RNA, 62 nt, Human
cucucgacagccuggcacaguggcauuccggugugugcuacccgugccuggcuggugaagag

SEQ ID NO: 4103889 - RNA, 87 nt, Human
cucucuacuaaaagauucaaggcuaaauucuguacugcauguaccaaguaaaauaugcaagcagauguggucaucuuggugugaaag

SEQ ID NO: 4103890 - RNA, 95 nt, Human
cucucuccuuguuuauguuccugugggguuaacccugacuagaaaagugcaggacauucugccaucacguguagagggaacaucggggaagagag

SEQ ID NO: 4103891 - RNA, 79 nt, Human
cucucucguuuucucccugcccaccgugugcacgugcgugcgcgcgcgggcgugcgagcguguggguuucucgggagag

SEQ ID NO: 4103892 - RNA, 106 nt, Human
cuaugagaaugcugggaaccaagaaacaagcccaaggaugggagguugaaaauguaaaauuagucuccagcuuaggguuuggguuguuucucuagcaccucaaugg

SEQ ID NO: 4103893 - RNA, 126 nt, Human
cuaugcaguccaacuuugggggacauucacacuauggccuucugaauggcuguguaugcucaacuccaaugggcaucauucagauagacugcaaugugaauuuauccccagaauugugcaacaugg

SEQ ID NO: 4103894 - RNA, 111 nt, Human
cuaugccacugaagggcauucaucacaucaugauguuuagugcuacuuuuccuaacgaaauacagaugcuugcucgugacuuuuuggaugaauauaucuuuuuggcuguag

SEQ ID NO: 4103895 - RNA, 63 nt, Human
cuaugccugacccucauccuauaccaaauaaauuaaauaaugguagaugggguccaggcauag

SEQ ID NO: 4103896 - RNA, 81 nt, Human
cuaugcuacucugaccaaagaguugcuuguauucggcccucuaguggaugagacguguaauuuuuaugguaaggugcagag

SEQ ID NO: 4103897 - RNA, 116 nt, Human
cuauggacuuuagcagaggaaugcagccaccagcagaaaaggggccagagggauaaauaccuggaccucacugucugcugguacaaucuguugcauggcauuuuggugaacuguag

SEQ ID NO: 4103898 - RNA, 77 nt, Human
cuauggcagucaauauuucaauaacccauuuucacuagaagauagggcauccuuuauugagauuugcaugacuaugg

SEQ ID NO: 4103899 - RNA, 82 nt, Human
cuauggcucaggggcugagagcagggacuugagccagacugaggcccaguccuggcccugccacucacugcugagucccuag

SEQ ID NO: 4103900 - RNA, 85 nt, Human
cuauggcuccaaggcuccggcccuggcgucugggcucggucggggacaguuuccacgcgaggcggagccuagcuggaggucacag

SEQ ID NO: 4103901 - RNA, 62 nt, Human
cuauggcugauuucauuuguuucccagaagaugagcugaagacacauaggagcagcuauugg

SEQ ID NO: 4103902 - RNA, 79 nt, Human
cuauggugccugagcuugggcuuuaggaccacacuguguggcuuuacuccuggaucuacucucaauugggcaacuaugg

SEQ ID NO: 4103903 - RNA, 100 nt, Human
cuaugguuuucuuccacauuaaaaaagccuuaauaagauguuuuucagcuaugauguucuuacauuacucaugaauuuaauuguuagaggaaugccauag

SEQ ID NO: 4103904 - RNA, 82 nt, Human
cuauguaaaauggcaagcugaacucagaagacaggguauucacgguccuauuuaguuucaggauucauuuccauuuccaugg

SEQ ID NO: 4103905 - RNA, 119 nt, Human
cuauguagaauuaaucuuuauucuuuaacugugccuagcagaguaucuugcaaauuagggaacguuuuuggaaacaagguaacuuugcaaggcuuggaagaugaguagaguuugcauag

SEQ ID NO: 4103906 - RNA, 84 nt, Human
cuauguagagugcuuucuguuuccuguaguacuugacuuggaugauaccagagauagaugcaggaaacagaggcucaaauaugg

SEQ ID NO: 4103907 - RNA, 72 nt, Human
cuauguugaaauccucacccccagaaugaugguaucagaaggugaggucuuugggaggugauucauuuaugg

SEQ ID NO: 4103908 - RNA, 70 nt, Human
cuauuaugcgguaacaguugugggauguuggucaacuuauuacaguuacugguacuguuaacuauaauag

SEQ ID NO: 4103909 - RNA, 91 nt, Human
cuauuauuuguucuugggagauauuguucuuuacauuuauacauuuacuuauauuuguuggaaggacagaucaccucaagaagaguaaaag

SEQ ID NO: 4103910 - RNA, 60 nt, Human
cuauucaagcagagacuagauagcugucaguaaaggaugcuagagagauuucugcuuuag

SEQ ID NO: 4103911 - RNA, 62 nt, Human
cuauucauuaauuuccaggcacugugcugggaaacagcauagagcaggaaguuaagagauag

SEQ ID NO: 4103912 - RNA, 122 nt, Human
cuauucuaucaaugcuacacauaauaggauuaacugauauugaaaaacaucagguuauauuuugauucuaugauguaagagauacacuugauuuuaauuaguuggcauuuagugauaaauag

SEQ ID NO: 4103913 - RNA, 95 nt, Human
cuauugcauucuucagcaaacuauuucuaggacaaaguacuaggaaucugacauaaaguacacuguuccugaaauuguuaugauagaugcuuugg

SEQ ID NO: 4103914 - RNA, 63 nt, Human
cuauugcucuuaggugccuagugcuugauauguggaagaugaucagcacauguaagaguaaag

SEQ ID NO: 4103915 - RNA, 55 nt, Human
cuauuguaguaagggaaagccaugcuggucaggcaggcuuuucugaguauaguag

SEQ ID NO: 4103916 - RNA, 82 nt, Human
cuauuguuauuauacagucauuuuggcugcugucuucauuauaacuaugcaagccaaguuggaagacugaauaaugaauuag

SEQ ID NO: 4103917 - RNA, 62 nt, Human
cuauuucccagggccugggauuugaguuuucccugcacucaaguccuuuucccuacaaauag

SEQ ID NO: 4103918 - RNA, 80 nt, Human
cuauuuguaaaguaagaggcuuguauucauugauuccugugguucuuuggaaugcuagcauucuauuaauuuauaacuag

SEQ ID NO: 4103919 - RNA, 65 nt, Human
cuauuugucucauaaguaaucugucacauucauuuuaaguugaaguguggauaugugacaggugg

SEQ ID NO: 4103920 - RNA, 57 nt, Human
cuauuuuaagaggccauuagguguccauugggaucaauuaauggccucuuggaaugg

SEQ ID NO: 4103921 - RNA, 82 nt, Human
cucaaaccaucaaggagccaaacauauugagagagauugaguuuucuuuccccuacauuugguuaaagacaugggcuuugag

SEQ ID NO: 4103922 - RNA, 67 nt, Human
cucaaaguagaugcaaacuuguguacaugacacagacacgugugcacacacucugcauauacuuggg

SEQ ID NO: 4103923 - RNA, 59 nt, Human
cucaaaguuuuugagaauuacaugacauaaugcauguaaauugcucaguaaacuuuugg

SEQ ID NO: 4103924 - RNA, 63 nt, Human
cucaaauauguggucagaaagccaggugcgugcccaggcauuuguaauaaccgcguaaguggg

SEQ ID NO: 4103925 - RNA, 93 nt, Human
cucaaaugcaagucaccuucuucaaaacaacacuggccuggauuccuagugcuuugagcguuugaaaagggguggcuuggcccauugauugag

SEQ ID NO: 4103926 - RNA, 57 nt, Human
cucaacauccccuucaugucaugauccuugcauggauuuuuucaaggggcugcugag

SEQ ID NO: 4103927 - RNA, 63 nt, Human
cuggacaucagugugccuggcuggguccuaguggacaaggccucugcuuaugcugaugacugg

SEQ ID NO: 4103928 - RNA, 62 nt, Human
cuggacgacgcccugccuggcugagcugcccugggagcugucaacacgggugugcgugcugg

SEQ ID NO: 4103929 - RNA, 70 nt, Human
cuggacugugucucuguguccuucuggggcuccaggacgucugggccaccuggacucagagccaggccag

SEQ ID NO: 4103930 - RNA, 62 nt, Human
cuggacuuuggcccaucugccagcucugagucagcuggcaggaaaaagggccagaggcucag

SEQ ID NO: 4103931 - RNA, 63 nt, Human
cuggagaacagagcuguuuagacuuuucugcaugaugagaacuuagcaguuguugauuuccag

SEQ ID NO: 4103932 - RNA, 62 nt, Human
cuggagacucugcaucugugacagcuauuaggcaguaauuaguugugacacagaauuaccag

SEQ ID NO: 4103933 - RNA, 73 nt, Human
cuggagaggcagcaggcugaggaggauuggaaucaucacccaaccgccugacccaccuguggcuuuuagucag

SEQ ID NO: 4103934 - RNA, 69 nt, Human
cuggagaucugguuaaaaugcagauucaguagguggggccugggagucugcauuucuaacaaaucccag

SEQ ID NO: 4103935 - RNA, 89 nt, Human
cuggagaugaccugagagaagcuugugccggccacucaugccacuguggccuucgaaaacccagcuguuucccgugucauacccuccag

SEQ ID NO: 4103936 - RNA, 61 nt, Human
cuggagccagccagggcccucugugcaggggccuacugcaagagcccaacgcugugcccag

SEQ ID NO: 4103937 - RNA, 55 nt, Human
cuggagccuagguugaccugggugaaggaaaauacccaacugcagugggcuccag

SEQ ID NO: 4103938 - RNA, 75 nt, Human
cuggagccugggaaguucaagaucaaggcacugacggaauuggugucuggggauggucuacuuucugguucauag

SEQ ID NO: 4103939 - RNA, 55 nt, Human
cuggagcuaauaauccaucugaauaugaagaaucagaaggauuucaucaguccag

SEQ ID NO: 4103940 - RNA, 66 nt, Human
cuggagcuggcccaggcuggccuccccugcagacaggccgcgucuagggccagcugcucaucccag

SEQ ID NO: 4103941 - RNA, 63 nt, Human
cuggagcuguuuuuucaggaaaucagucccuacugccucucuuccuggagcacagcuauccag

SEQ ID NO: 4103942 - RNA, 70 nt, Human
cuggaggaaucuggcuauuucuggucggggcgcgcccgcuggcccgggccaggguuggccaguccuccgg

SEQ ID NO: 4103943 - RNA, 79 nt, Human
cuggaggaccaggcaagcugaggcgggggccaaguggguaguucggggccaacccccaucagcggccaauggccucuag

SEQ ID NO: 4103944 - RNA, 66 nt, Human
cuggaggcauuaauuauuaccaguuuugaaaagaacuuugcuugguguguacauuuuugcuucugg

SEQ ID NO: 4103945 - RNA, 99 nt, Human
cuggagggauuuuuggaucccuggccacgaagcugcccaggguagcuggggccugggcgcuuucugggucagggcuggagaaggaggcauuuguuccag

SEQ ID NO: 4103946 - RNA, 67 nt, Human
cuggagucaggagccccuucugcgucucuucccuccccuucaagggcagugggcugcugcgcuccag

SEQ ID NO: 4103947 - RNA, 58 nt, Human
cuggaguggccggugcuguggcccacacauuagggagucugcucuggcucaccuccag

SEQ ID NO: 4103948 - RNA, 79 nt, Human
cuggaguugucuauccagagggcauuccaagcagaacuaguaauggcacugaagcuggaaagccugaggcaaagaccag

SEQ ID NO: 4103949 - RNA, 70 nt, Human
cuggauaauuuggguuguggaccccccugaaauaucgucuugaguuaucucuaucaccuaaauuaaacag

SEQ ID NO: 4103950 - RNA, 123 nt, Human
cuggauaauuuuagggugguaaagagagaaugcauguaggcacucuaaagccucgguggcuguucccugcugccgcuacaggagcugucacaugcuuuuauaacucugccuccuuaaguucag

SEQ ID NO: 4103951 - RNA, 68 nt, Human
cuggauagaagcugugaaauagauuacacagugguuggugguaugaguuccucagcuucaguguccag

SEQ ID NO: 4103952 - RNA, 57 nt, Human
cuggauauguugcaacauuucccacuaauuacuuggugacuggugucagauguccag

SEQ ID NO: 4103953 - RNA, 56 nt, Human
cuggauccaacagaguuggguucaaaucucagcugaauguaacacuauugggccag

SEQ ID NO: 4103954 - RNA, 96 nt, Human
cuggaucccugguguucagacaggcagcugggcugggagaucacugcaccuucccaugcagccugucugagauggcaucuuuucagggugaaccag

SEQ ID NO: 4103955 - RNA, 67 nt, Human
cuggaugacggaugcagauuagcucugguucuaaagaguuacaacugagugcauuuaguacaucuag

SEQ ID NO: 4103956 - RNA, 62 nt, Human
cuggaugcucacuucugcaggguucaaggauuugcauuaggaaacccugagaggugguccgg

SEQ ID NO: 4103957 - RNA, 84 nt, Human
cuggauggccacucccuguugucaccccaugaucugggugagauccaggauugcaggugcacaacugcccagagagagguccag

SEQ ID NO: 4103958 - RNA, 59 nt, Human
cuggaugugcuauauacagugcagcuaaugucugaggcugcugaaguguggcaaucuag

SEQ ID NO: 4103959 - RNA, 70 nt, Human
cuggauguugaggugcugugcaggaggcagaaugagcuuugcuucaaggccaagacaccuuaaggucaag

SEQ ID NO: 4103960 - RNA, 73 nt, Human
cuggauguugcggggcagaggcuuggauuaggaagccgugucgaggccuggugugccggaugcagcaucucag

SEQ ID NO: 4103961 - RNA, 59 nt, Human
cuggauuauagaacaugcauuugacuguaacauguuuaaaugcauguagaauaauagag

SEQ ID NO: 4103962 - RNA, 63 nt, Human
cuggauucggcugcagaaguacuuccggaugaguucccggcuggaggccgccugcagcuccag

SEQ ID NO: 4103963 - RNA, 90 nt, Human
cuggauugucaaaaaguagucauuucuguuuuacaugauuagcuaaaacagccgacucauggcuuuuuggaaacaacacucuuccuccag

SEQ ID NO: 4103964 - RNA, 129 nt, Human
cuggcaaacguguuccuucucucauaauucuuagcuucucuacagguguccaguguucuauggcugccccuacucuuugcagucucagccacacagaccuaugaaaagcugcuauucuggaguccccag

SEQ ID NO: 4103965 - RNA, 87 nt, Human
cuggcaagaguaaaaguacaaucuuucuguaaaggcaauuuggaaugugaaucaaaagccuuaaaauugugcuucucuuugauccag

SEQ ID NO: 4103966 - RNA, 61 nt, Human
cuggcaagaguugaagcuccaggauagaucugauccauuggagcuguaacuuucaugaaag

SEQ ID NO: 4103967 - RNA, 68 nt, Human
cuggcaaggcuggagguuuguugcggcuggauuucuaauagcuagggacagauaccagccaguggcag

SEQ ID NO: 4103968 - RNA, 97 nt, Human
cuggcaauuugggguugucugccaccuacagugcuugucagucacccucacucggugccaggccacaaggcuguuggucacaaaccaccccagccag

SEQ ID NO: 4103969 - RNA, 66 nt, Human
cuggcacacagaggcccucgggaaauguggaaugaaagaauaaacccagacagcccuugugcacag

SEQ ID NO: 4103970 - RNA, 67 nt, Human
cuggcagaccaggaaggguuucugggauaugucugucuccuaaaccauccugguaccaaccuguuag

SEQ ID NO: 4103971 - RNA, 75 nt, Human
cuggcagacccucuucuauuggugggaaccaugucucaugggcacucacaguuacaagggagucugaaacaccag

SEQ ID NO: 4103972 - RNA, 65 nt, Human
cuggcagauagccacgccugucaaggaaaguauacuccaagcggucaggcuggggcugcugccag

SEQ ID NO: 4103973 - RNA, 84 nt, Human
cuggcagccucucccucccuggggcuguagggaaugcuccccucacuggccagccaggggugggguucaaaugggggaagccag

SEQ ID NO: 4103974 - RNA, 57 nt, Human
cuggcaggaaggagacucagccccugcauggcggggcugguuguccuuugugcucag

SEQ ID NO: 4103975 - RNA, 63 nt, Human
cuggcagggaugguggagguugcaaguuggagguuggcuucacccaucaucuccucuaaccag

SEQ ID NO: 4103976 - RNA, 60 nt, Human
cuggcagggcucuuugggugcuggaugcagcaaauucuacaccuagggaugcucuuccag

SEQ ID NO: 4103977 - RNA, 67 nt, Human
cuggcagguggauggggacucccaggcuccccacgcuggguggcaucucccaucacgccugugccag

SEQ ID NO: 4103978 - RNA, 84 nt, Human
cuggcaucagacugcaucugaaacaugggucaacauaugugcaugacugagcauguuuccuuaggccugcagcucugcugccag

SEQ ID NO: 4103979 - RNA, 65 nt, Human
cuggcauggggcuuuccaagcuuaauuagcucauguuuguaaaguucuuaggaagcucaggccag

SEQ ID NO: 4103980 - RNA, 65 nt, Human
cuggcauuaaaagaucuguguuaacucaaggaagguggcuccauucccagguuugauugagccag

SEQ ID NO: 4103981 - RNA, 55 nt, Human
cuggccaaaaaaucacuuuuauaggcagcugagguagaguugugugauuugccag

SEQ ID NO: 4103982 - RNA, 63 nt, Human
cuggccaauccauuaauuuguuaauauuuauauuaaugaguuuaggauuuaugguuuggcuag

SEQ ID NO: 4103983 - RNA, 71 nt, Human
cuggccaggcccggcccgggcuggugcggcugcgcacugcagcccagcggagcgggcccgggaggagccgg

SEQ ID NO: 4103984 - RNA, 83 nt, Human
cuggccaggccggccuguugccagcugaaugggucccaggcuuggaaguacucaccccagcuggcagcccuggcccugcccag

SEQ ID NO: 4103985 - RNA, 64 nt, Human
cuggccaguccccagaaacaacgaggcucuguggacugggaagggcugcuggggguuggcacag

SEQ ID NO: 4103986 - RNA, 72 nt, Human
cuggccccagcagguauuagagagccugaaagauuaccucuguuucucuccccuacucuaaaucugcacuag

SEQ ID NO: 4103987 - RNA, 83 nt, Human
cuggcccuccccacugggccuccucuuuccuuaccucacugagagggagccggagggccacuggcaggaugauggggggccag

SEQ ID NO: 4103988 - RNA, 60 nt, Human
cuggcccugcagaacuagccugggcaucagagcccaccagaggugacugccagcggccag

SEQ ID NO: 4103989 - RNA, 97 nt, Human
cuggcccuuccugccauacccagcugcagucaucuucuagaaagcuucccccugcugcuucuggaaaucagcagagggugggcaagggggaagucag

SEQ ID NO: 4103990 - RNA, 89 nt, Human
cuggccuagacuucagguggggcagcugugggcaggggauggcuugucuuguccaucuaaguauccagccugacacaugacuaguucag

SEQ ID NO: 4103991 - RNA, 58 nt, Human
cuggccucacagaggcuaagccaugaaacauuuauguggagugguuuuuggagggcag

SEQ ID NO: 4103992 - RNA, 63 nt, Human
cuggccucugugggagcugagcaugggaagcuucacugagcaaaugcuuuguaccuuagguag

SEQ ID NO: 4103993 - RNA, 55 nt, Human
cuggccugaggccgccuucagaugccuucuuccuagugccauaacuucaggccag

SEQ ID NO: 4103994 - RNA, 101 nt, Human
cuggccugcagguaccauguggcuguggcauugccgaggcuggcgagcuccaagagcagcucagggcacugcgcagcaggcaugaggcccgcgagacccag

SEQ ID NO: 4103995 - RNA, 62 nt, Human
cuggccugugugccuuuaccgugcuugcgucuucaugcugagcauccagcagguacugccag

SEQ ID NO: 4103996 - RNA, 77 nt, Human
cuggccuuaaagauacggagaugaagacagcccagcucugguccucgggcagcucaccucugguccagggagggcag

SEQ ID NO: 4103997 - RNA, 56 nt, Human
cuggccuuuagccccagugucucuucaaaggaagagacgcuuuuauaaagacucag

SEQ ID NO: 4103998 - RNA, 63 nt, Human
cuggcgcauguguguucaaugucuguuaaacaggugaguagacaaaugaacaaauaugugaag

SEQ ID NO: 4103999 - RNA, 60 nt, Human
cugauuucaaauggugcuagauacaaagauggaaaaaucuaagccaccaugugaaaccag

SEQ ID NO: 4104000 - RNA, 67 nt, Human
cugauuugguaaguaugaaugcaguagacaaaaaucucuguucuuaaagcauucuugcuaaugucag

SEQ ID NO: 4104001 - RNA, 57 nt, Human
cugcaaaucaaguucuuauaaucccauucuccuaggggaaacuaauuugauuuguag

SEQ ID NO: 4104002 - RNA, 66 nt, Human
cugcaaaugaauaagacucugcuagaaauucaguagcuuaaugaauuuuuauggucuuauuugcag

SEQ ID NO: 4104003 - RNA, 68 nt, Human
cugcaaaugacugcagugugauacucccuugguuccauggagugucacuugaugcagggcauuugaag

SEQ ID NO: 4104004 - RNA, 65 nt, Human
cugcaacucuaguccagggcugucuccacugugaaacagcuuccugaugcaagagggcuuugcag

SEQ ID NO: 4104005 - RNA, 96 nt, Human
cugcaagcagccagggucagagacagggcuugguucugcuuccuggugaagcauggcuucggggugcugccucucccucccuguuugaaucugcag

SEQ ID NO: 4104006 - RNA, 67 nt, Human
cugcaagccaaugagagugaucugggaggaaacuaacacugccagcaccuugaucuuggacuuccag

SEQ ID NO: 4104007 - RNA, 60 nt, Human
cugcaagccagggagagaugccucaggagaaaccaaaccugcugcucuuugggcuuccag

SEQ ID NO: 4104008 - RNA, 61 nt, Human
cugcaaggaaaauguugcaugcugaccuaauagauaauagcacaaaguguuuuccuuguag

SEQ ID NO: 4104009 - RNA, 67 nt, Human
cugcaaggcaagaaaagaggucucaccagaaacagucucugcuagcaccuugcucuuggccuuccag

SEQ ID NO: 4104010 - RNA, 55 nt, Human
cugcaaggcuggggugagcuggcacccaaauuuagcucauacuccagucuagcag

SEQ ID NO: 4104011 - RNA, 100 nt, Human
cugcaagguuguuaugcugaauaggggucccaaagauauccauguacuaaucuuuggaaucuuugaauguuaccuuauacggcaaaaagggacuuggcag

SEQ ID NO: 4104012 - RNA, 55 nt, Human
cugcaccauccuucaugcucuggacccuggguccgugcaugacuucauggagcag

SEQ ID NO: 4104013 - RNA, 66 nt, Human
cugcacccccagggaugcuuucccaggacucuuucagucuuuuaugugagcauccacugaggucag

SEQ ID NO: 4104014 - RNA, 72 nt, Human
cugcacuaauugagaaugcaaucuacuauggcaccuauuugcugauuuuuggagcauuuuuaauuuauguag

SEQ ID NO: 4104015 - RNA, 61 nt, Human
cugcacucaguacuuuauguauaugaucuuauuagauccuuacaauagcacugagaagcag

SEQ ID NO: 4104016 - RNA, 68 nt, Human
cugcagaaagccaccuuacacaggagccaggaugcuaaaggcuguccaucagaaaggggcuuauguag

SEQ ID NO: 4104017 - RNA, 57 nt, Human
cugcagaauagaaauggcacagagaccugcugcugugcuggagagcuaguucugcag

SEQ ID NO: 4104018 - RNA, 73 nt, Human
cugcagaauggggccaaguggaucauuauuuucaccaguugaaggagucagauccggcauggugucauggcag

SEQ ID NO: 4104019 - RNA, 67 nt, Human
cugcagagcaugaggaggucugaugaugaguaaaacguccuggaaauagaccuguucaguuaaguag

SEQ ID NO: 4104020 - RNA, 93 nt, Human
cugcagagccaagcagaaagcagguucccauuucuacagcagccuuuaucgcacugcauuguaauugcuuguuuaccugcuggcucaccgcag

SEQ ID NO: 4104021 - RNA, 73 nt, Human
cugcagaggaggcgguauacacugcacacccucccaaguccaugcagugccccgugcuguccuccucccacag

SEQ ID NO: 4104022 - RNA, 55 nt, Human
cugcagaggcacuccgugugcugaaacagcugaaucacaagaggaguucccugag

SEQ ID NO: 4104023 - RNA, 62 nt, Human
cugcagaugcuccccaagccaggaccuggaugaacuugaaccaguuccaggcagcaacugag

SEQ ID NO: 4104024 - RNA, 58 nt, Human
cugcagaugguauuguucugguucucgagaaggaauccaagauaaaggcugucugggg

SEQ ID NO: 4104025 - RNA, 80 nt, Human
cugcagauguaauggaacuguggauggauguuugaacagauuccuauuguuaaacauugcuccacggguuacauagagag

SEQ ID NO: 4104026 - RNA, 126 nt, Human
cugcagcaugggguacccuccugguggcucugaacauggggaggagucaccggucauuuccaggcagggucccuccuuguuugugagccuuguucaugugccagaguggguccccucuugcagcag

SEQ ID NO: 4104027 - RNA, 68 nt, Human
cugcagccccuggagauggcuugguggagaauaucccuacaccagccagccacaguggcuccuagcag

SEQ ID NO: 4104028 - RNA, 69 nt, Human
cugcagccucgaccuccccaggcucaggugauccucccaccucagccucccgaguaguugagacuacag

SEQ ID NO: 4104029 - RNA, 62 nt, Human
cugcagcugcucauguuacuugugggaguggaauagccaggaguugcuaaaugcggcuucag

SEQ ID NO: 4104030 - RNA, 60 nt, Human
cugcaggauucucccaguuggacguucuguuaaauugcuccaugggaagcauccucgcgg

SEQ ID NO: 4104031 - RNA, 60 nt, Human
cugcaggcagcugaaaggugccuuagacugcuggggagacaagaaguagccugcuugcag

SEQ ID NO: 4104032 - RNA, 55 nt, Human
cugcaggcaucuaacugugggccagagagggccuggaccaggaugguggcugcag

SEQ ID NO: 4104033 - RNA, 67 nt, Human
cugcaggccuccccugcuggagcugcaggcugucccuucccugagccccggugagggaguccugugg

SEQ ID NO: 4104034 - RNA, 56 nt, Human
cugcaggcucccagggagggauucccagucagaagcccaccuuguuaguccugugg

SEQ ID NO: 4104035 - RNA, 65 nt, Human
cugcagguggccuccagggcauagguggggcaaacccuacccuguuggggcccuggggccuguag

SEQ ID NO: 4104036 - RNA, 59 nt, Human
cugcaggugucuccagggcaggucugcucccacagauuccgugaccaugacaccugcag

SEQ ID NO: 4104037 - RNA, 60 nt, Human
cugcagguuggccuucuccugguuuagcugcaacugaagcuucugguucaggucaagcag

SEQ ID NO: 4104038 - RNA, 60 nt, Human
cugcagucagcuuuuaagaucuucuaucaaaaauagcugauugguaaaagugauugacag

SEQ ID NO: 4104039 - RNA, 76 nt, Human
cugcagugcucagccacugaacuccuggcuauguagucagaaagacaucauguccagggcuuuagcggggcugcag

SEQ ID NO: 4104040 - RNA, 104 nt, Human
cugcagugucaugcucuguccugucuucaggaccuggaauuuuggggucugagugacaccagcauucacuggaccugcagagaagaacaaagcugaugcugcag

SEQ ID NO: 4104041 - RNA, 69 nt, Human
cugcauaaguggggcuauugagcccugauggccaccgggagccacaguagcagcuacuuuauggggcag

SEQ ID NO: 4104042 - RNA, 78 nt, Human
cugcauaucauacaaauauaugcauguguguauauuuauguguuguguguguacauacauguauguguguauuuacag

SEQ ID NO: 4104043 - RNA, 58 nt, Human
cugcaucacuggccaaggguguaaccaaauccucauccaauguggucaugugugucag

SEQ ID NO: 4104044 - RNA, 62 nt, Human
cugcaucagcuucacccagaguuguagaccuuacugcugucagcagcuacuuggagcagcag

SEQ ID NO: 4104045 - RNA, 59 nt, Human
cuguauuucuaggaugauggcuacuuaaaaugggguggcucaccuucagaauauaccag

SEQ ID NO: 4104046 - RNA, 88 nt, Human
cuguauuugcuuuuuaagaauggguuauggcugggagggaugugugaagcugcccccagagcauaacguaucuugaagguuaaaucag

SEQ ID NO: 4104047 - RNA, 130 nt, Human
cuguauuugugcugaccugggccuccuggccucgcugcugucgccgagcugcaugcugguccucaacgcccgcaacgacgaugcgcugcggcagcuggaggccgagcugggcgccgggcggucugacuug

SEQ ID NO: 4104048 - RNA, 76 nt, Human
cugucaaguugacaugugcugucucuuaaauuacucuucgguaugagaagcaaaguugcauguuuauuuuugucag

SEQ ID NO: 4104049 - RNA, 103 nt, Human
cugucaaugaccugggcaucugugaugagggccugguggcugugccggcugcucagcagauacgcagggcaugggcccugucugcaggugccauucgugacag

SEQ ID NO: 4104050 - RNA, 67 nt, Human
cugucaauguucuugguauauccuuucuggucuugccuuguagaagauagccagguacauugaagag

SEQ ID NO: 4104051 - RNA, 68 nt, Human
cugucacauccauuuugcaaguauuucagacuaacguuuaaaguaaacugggaagggaaguaggccag

SEQ ID NO: 4104052 - RNA, 67 nt, Human
cugucacccaggcugguaugcaguggcacgaucucggcucacugcaaccuccaccucccggguucag

SEQ ID NO: 4104053 - RNA, 63 nt, Human
cugucacugucacguucugaaacugucacuccauugacaccuucugagaacugagcagaccag

SEQ ID NO: 4104054 - RNA, 70 nt, Human
cugucagaggcugcacuugcucaugauguuuauuuuuauaccagcacagagcaaugcguguucucuaugg

SEQ ID NO: 4104055 - RNA, 66 nt, Human
cugucagauaagugguauuuuuagcuuuuaugugaaaccacuuuuuaaaguugaucauuuugacag

SEQ ID NO: 4104056 - RNA, 56 nt, Human
cugucagcaaaucagugucuggacagccagcugcagggccugagcauggcuggcag

SEQ ID NO: 4104057 - RNA, 64 nt, Human
cugucagcucccagucagagagaaagggccucuucagucugucucaggagacugggagaaacag

SEQ ID NO: 4104058 - RNA, 70 nt, Human
cugucaggaagaguuugaccugugccauccagaggcaccuaugcauggacagucagucaaaagaccacag

SEQ ID NO: 4104059 - RNA, 59 nt, Human
cugucaguaggcucccaucauuaaaagcagguuuacagagaggcagcauuacuuggcag

SEQ ID NO: 4104060 - RNA, 65 nt, Human
cugucaguguccuuauuucugucucucacuuuggggugagagauuaggauaagugauaucugcag

SEQ ID NO: 4104061 - RNA, 74 nt, Human
cugucauagccaaaggauucuauggagauauuaacaaacaaaugugaugugugcuggauggaauccuggaacag

SEQ ID NO: 4104062 - RNA, 130 nt, Human
cugucauugugccacuguauaccagucuggacuacagagcaagaccaucuuuaaaaaagccugcauauccaacuuuuugagauggagucuugcucugucaccaggcuggggugcaguggcaccaucucag

SEQ ID NO: 4104063 - RNA, 70 nt, Human
cugucauuuagacauuauguauuaaguucuuggucuaugccaggaaccuugcuagaugcugaggugaaag

SEQ ID NO: 4104064 - RNA, 105 nt, Human
cuguccaaagcuccugguucagcgaaugauggaagugaaugucucccugaggaauucuaccuggagucacuuucucuuccagugagacccugaguuuugagaugg

SEQ ID NO: 4104065 - RNA, 55 nt, Human
cuguccacguggggcuugauguagccgcgggcuuccagguccagcacgugcacgg

SEQ ID NO: 4104066 - RNA, 74 nt, Human
cuguccagugggauggccuggccagagcucugcucaguugaagcaucgcuccaggcccucccuacucuggagag

SEQ ID NO: 4104067 - RNA, 99 nt, Human
cugucccaagcagagaauucuucaaguacaaguguauuuggcuugauauaccugauuaugagggcaaauauuuuuguaaauuuucuaaugcugaaccag

SEQ ID NO: 4104068 - RNA, 57 nt, Human
cugucccauccuuacucuacccucuugcuucuggaagcagagaaagagaaggggcag

SEQ ID NO: 4104069 - RNA, 91 nt, Human
cuguccccguuguucuggaucauccagcuccugggggccaccgugugacccacggggccccuguggcuugaugcccacagcuaggaaacag

SEQ ID NO: 4104070 - RNA, 77 nt, Human
cuguccccucugcccuugcagggugacgacuggauaaucacagugaaugagcuccugccagggccagaggccagcag

SEQ ID NO: 4104071 - RNA, 126 nt, Human
cuguccccucuguuauggugcuugugucugugucuguucuuggcugugaaauggaaaaaauauuuucuucuuuuccuuaucucuacagagagucauagacucaucaugagccucucauaaugacag

SEQ ID NO: 4104072 - RNA, 82 nt, Human
cugucccuggaggcugaggccaugaggcucuaacccuaggaagaguuggcaaagcccugagccuaugagccucucagggcag

SEQ ID NO: 4104073 - RNA, 64 nt, Human
cuguccuagaaugugcagacuuagggggcucuccuguacuccugggucccgcacaucuguccag

SEQ ID NO: 4104074 - RNA, 88 nt, Human
cuguccucuaccaggaccuuaugaauugcccugaaaggugcugguuauaccugcaaaaggagagucuugagucacugguggagagcag

SEQ ID NO: 4104075 - RNA, 70 nt, Human
cuguccugaaagcauuaacuccacuucccuucccaguggaagaggugagaggaugugacuuuuggcucag

SEQ ID NO: 4104076 - RNA, 57 nt, Human
cuguccugauggugccacuggugugugauggcaucaccuguagcccaaucauggcag

SEQ ID NO: 4104077 - RNA, 63 nt, Human
cuguccugcaaauguguuuuaaaccaaagaaaucaucuuuggcaugggcuauuugcuuuauag

SEQ ID NO: 4104078 - RNA, 102 nt, Human
cugucgcugcugucugcaaccccaccgggccucccagagccgaggugacagccugggccucggggaagcccgugucucaugggcgguuguccagcugcucag

SEQ ID NO: 4104079 - RNA, 56 nt, Human
cugucggauaaggugaccccgagugucgccccacucuggguccgauguccugacag

SEQ ID NO: 4104080 - RNA, 55 nt, Human
cugucucaagacugcaggcacugaaacgugaccccggugucucaggcugaaacag

SEQ ID NO: 4104081 - RNA, 98 nt, Human
cugucuccuugcucuucccuagccccagauaucucacacacuccacuuuaauggauccgugugacuaucugggguuggauuuagucagagagaucugg

SEQ ID NO: 4104082 - RNA, 61 nt, Human
cugucucuagagguacucaaguguauuuuuaauaaugauugacuggaguacccuagagaag

SEQ ID NO: 4104083 - RNA, 71 nt, Human
cugucucugucucuguuuauccgagcagaaccuggaaggggcuggcaaggacuaggcaacagaugggacag

SEQ ID NO: 4104084 - RNA, 81 nt, Human
cugucugcacugcuuaguugguaaaugugucuguagcaugacuaucaucacaacugccaucugagcagcagagccagaugg

SEQ ID NO: 4104085 - RNA, 65 nt, Human
cugucugcccuggccagagcccccaggacugacugcccugggcacugccacgggcccauagauag

SEQ ID NO: 4104086 - RNA, 59 nt, Human
cugucuggccggcccagcuuccucuuuuaugagcucaugggcaaagccaggccaggcag

SEQ ID NO: 4104087 - RNA, 70 nt, Human
cugucugggaagccauguuucuaggaggucaaaauuguggugucugcagaagccauggccuugcucgcag

SEQ ID NO: 4104088 - RNA, 90 nt, Human
cugucugucauggugaauaccaaaccagaagcucgcaccacgggauucgaugccuugugccuggcuuguauucacaggcaaggcagacag

SEQ ID NO: 4104089 - RNA, 129 nt, Human
cugucugucccucgccuaccuggggcugcuuccuagagccggcagugaggcggagccugcaggaccuaguucaguucuuacagccacucugugaagcaggcuccaaggcagagggcugagggacaccag

SEQ ID NO: 4104090 - RNA, 64 nt, Human
cuggaucugucuuuuggaucccauauccaagacucuaccuacugggauccuugagauguccuag

SEQ ID NO: 4104091 - RNA, 60 nt, Human
cuggauggggcucaggcuguggaguuuuagugucaccccagccucugggucuucauccag

SEQ ID NO: 4104092 - RNA, 120 nt, Human
cuggauguaaauguaaaacuucgcgacuuuauaaaacuggcauuccuaggggaggggcuauuuauccuacaggucccugccuccuggcagugccaugguaugugugcauggauauaccag

SEQ ID NO: 4104093 - RNA, 57 nt, Human
cuggauguuuugcuaaggacucaauacaguugggugaaguggaaguagaacgaccag

SEQ ID NO: 4104094 - RNA, 91 nt, Human
cuggauuaaaauacuuugcugaaguauugugaauccuagcucuuaagagcugggagcauuuauuuuccguuaguuguuuuagauuauccag

SEQ ID NO: 4104095 - RNA, 64 nt, Human
cuggauucagcugaucagaaucacuuuuguaaauuauuugguucuucucaauuaguugauucag

SEQ ID NO: 4104096 - RNA, 84 nt, Human
cuggauuucggacccacagaaucuuuuuagauaauauauauuuaugugucaaguuguuaaguucugggguaauucguuaugcag

SEQ ID NO: 4104097 - RNA, 58 nt, Human
cuggcaaguacugggccagcucgccuccuggagcugguucccucccagagcucgccag

SEQ ID NO: 4104098 - RNA, 66 nt, Human
cuggcacaaguugucuccaugcagugaaugcacuauuaguuuaaacacugugggacaucuuacuag

SEQ ID NO: 4104099 - RNA, 61 nt, Human
cuggcagacuuaccaucagacaggaacaugggaggcuacugucugauggucggucuuucgg

SEQ ID NO: 4104100 - RNA, 95 nt, Human
cuggcagagcaaaguaagaauuggaauuaguaagaucguuuuaauaaaaacauuuguuuggcuucaauuacugaaauaacugcuuucucggccag

SEQ ID NO: 4104101 - RNA, 66 nt, Human
cuggcagccguggagggcaggggugcuccugggggcucggagaccucugcucccuucaugguccag

SEQ ID NO: 4104102 - RNA, 58 nt, Human
cuggcagcguguuuaugaacaucugcaugaaacugugcuuggcauaaacacguugcag

SEQ ID NO: 4104103 - RNA, 72 nt, Human
cuggcagcugugcuucauucuuucugaggaaguaaaaaccacaaggaaauagaaugaagcuacagaggcugg

SEQ ID NO: 4104104 - RNA, 101 nt, Human
cuggcaggguuggccagggcgcccggugcaguggagggcuugaggcacgaccacgugcagcaccgucccacuggcuacgggccccucuggacaccagccag

SEQ ID NO: 4104105 - RNA, 59 nt, Human
cuggcagugacauugcaggugcucacccccuuugcaaacuucccugcagugccugucgg

SEQ ID NO: 4104106 - RNA, 63 nt, Human
cuggcaugugauguucaguaccuagaagacucgguuuccuugguagagagaauauuuggcuag

SEQ ID NO: 4104107 - RNA, 76 nt, Human
cuggcauucccauuaaggaagccuauucucuccucaugaaauacaugggaugagaugcugccuuggccaaugccag

SEQ ID NO: 4104108 - RNA, 88 nt, Human
cuggccaaaaggaaagacaggacggaauuccugggaaguccuacagcugcugucuaccauagaguuccauugucuucuccucugcuag

SEQ ID NO: 4104109 - RNA, 55 nt, Human
cuggccacucccgcacaagacguuuucuuaucugucucuguguucaaggugccag

SEQ ID NO: 4104110 - RNA, 56 nt, Human
cuggccagacuacacaugugugccuuuaggucagguguccacucguggucugucag

SEQ ID NO: 4104111 - RNA, 89 nt, Human
cuggccagagugggaggcucucuccugggguggggcccggaagucugggccaggcuggggggagaugucucccugguuuucuuggccgg

SEQ ID NO: 4104112 - RNA, 69 nt, Human
cuggccaggauagcagcauuucuuccaaggauugucgcuugaccucucuuggacauguggcucugcuag

SEQ ID NO: 4104113 - RNA, 82 nt, Human
cuggccaggcaggagguggggagucccugcugagggagguugaaugcccccagagaaguguccuacagcuccugccugccag

SEQ ID NO: 4104114 - RNA, 60 nt, Human
cuggccaguugccuuccugggugaaauuacagcuuccaggcucagaggcugcugguccag

SEQ ID NO: 4104115 - RNA, 64 nt, Human
cuggcccuaugagccuccugaugcccuggagagugggggcuccaaaagaagcucuuggggcuag

SEQ ID NO: 4104116 - RNA, 65 nt, Human
cuggcccugggcaucuuucgugaccugcugauaaaaacggucaagguuaggcgccccaggcccag

SEQ ID NO: 4104117 - RNA, 59 nt, Human
cuggcccuguggccuaaggacucucucaaggaggucagcggagcaaucacagggcucag

SEQ ID NO: 4104118 - RNA, 78 nt, Human
cuggcccuucuaaccauacacauuguuuccgggaggcuaaauauaaccccucaggcagugguauggauggguggccag

SEQ ID NO: 4104119 - RNA, 94 nt, Human
cuccuuuggggguaucccuaggcagauggagaaguggcuuggugagcccugguggcgcugagcuccucuccucugccuggccuccgagagggag

SEQ ID NO: 4104120 - RNA, 60 nt, Human
cuccuuuguucuguguaucuuugugagaagggagagccugcaagggcauagaaaagggag

SEQ ID NO: 4104121 - RNA, 96 nt, Human
cuccuuuucuucccuuccuuccuugcggccccugccuaggagucucccuccugugcggcucugggcuguaaagagagacacggggcugggaagggg

SEQ ID NO: 4104122 - RNA, 62 nt, Human
cucgacaugguggugguuuaauucuggcgccaaacaccacaacuggagccacccugugcgag

SEQ ID NO: 4104123 - RNA, 96 nt, Human
cucgacugggggcgucucaccgucggacucggcaaggcuaugcagcgccagcucgccauggaaguccuugcggaaauccggguggcccaccucgag

SEQ ID NO: 4104124 - RNA, 70 nt, Human
cucgagggagguccaucccugcagagaaaagccagugcugccuaaacuuuugcauggaggcugccccgag

SEQ ID NO: 4104125 - RNA, 78 nt, Human
cucgcaccccucuucugugcucugcuguuggggccuuauaaauagcuccaaggacuggacacacagguuggagguggg

SEQ ID NO: 4104126 - RNA, 81 nt, Human
cucgcacuccaccucugaagguuucuguuacugucuuuucaagagaaucuaguuucagacuuugaguucuguggcuguggg

SEQ ID NO: 4104127 - RNA, 64 nt, Human
cucgcccuuagggccacugucacugcugggucacaggaaaccggcagggcccuugggggcaggg

SEQ ID NO: 4104128 - RNA, 62 nt, Human
cucgccucccuuagggcacacugaccuuugaauuuaaagucagccugcacucagggagcggg

SEQ ID NO: 4104129 - RNA, 66 nt, Human
cucgcgggcucugguccugaacugaagcagaaagccuugguucuggggagcagcagcagcagcgag

SEQ ID NO: 4104130 - RNA, 79 nt, Human
cucgcucacugagguagguccugccucccagacaauaaaucccucaaggucagcccaaagccugccucagcuagcugag

SEQ ID NO: 4104131 - RNA, 62 nt, Human
cucgcucauuacugccuggcccugcacgaggaacaagggauacagguguacagugagcugag

SEQ ID NO: 4104132 - RNA, 89 nt, Human
cucggacucucucacagcuuggcagaauuaguggaacagcaugugucuuuuaucuagaauuuugccauauagcucuggaguuaucuaag

SEQ ID NO: 4104133 - RNA, 127 nt, Human
cucgggcgggguccugugcugggcggugggcucaucccccgggugggcuccucccaggcgggguccugugcugggcggugggcucaucccccgggugggcuccucccaggcgggguccugugcuggg

SEQ ID NO: 4104134 - RNA, 78 nt, Human
cucggggacucaagauguaagguggggggcuccagccacugcaugugcugcugggcccugcccuugucuguccuugag

SEQ ID NO: 4104135 - RNA, 61 nt, Human
cucggggcguggcaguagcaugcugggagcugcagcugauggcugugccaugacccucgag

SEQ ID NO: 4104136 - RNA, 80 nt, Human
cucggguuccuugacaaaaauucuauugucaugacauuguucaguuuauacauggagaauuuuugccauugauuucuggg

SEQ ID NO: 4104137 - RNA, 60 nt, Human
cucgguggccacaugcgucugugaggcaggacacugccuggagcucaugugggcauuaag

SEQ ID NO: 4104138 - RNA, 79 nt, Human
cucgguguagagcgggcacuccauauccacacugcccaucugguaguggaggguguagcugcuggcaucauggucugag

SEQ ID NO: 4104139 - RNA, 56 nt, Human
cucgguguuucuuucagcaauuguuaguuucauuugcugagauaaagaaugcaggg

SEQ ID NO: 4104140 - RNA, 123 nt, Human
cucgguugccgcuucucucuucuacugucccagcugucucuguuuuuuaggcaacuuucuguggcuuuuucaagaguggagauuuggcuggagcaggauuagguaagaaaagagggaacggag

SEQ ID NO: 4104141 - RNA, 73 nt, Human
cucuaaaauccaguaugagguagggcuugggcaaaaacaaacaaaucuuaagacuauuuuuaacuguuuagag

SEQ ID NO: 4104142 - RNA, 89 nt, Human
cucuaaacaguccagcuuauacgugcuucuuuaagauacucacacaugucuuugaaggagcucaaugaugaugcucuacuuuuucaggg

SEQ ID NO: 4104143 - RNA, 82 nt, Human
cucuaaaggccuuuccacauuccuuacauucauaggguuuuucacccguaugaagucucugauguugaguaaguucuuggag

SEQ ID NO: 4104144 - RNA, 95 nt, Human
cucuaaauggugaggaaauaugggacuaagauguucauagaggcuggaauuaaauuuagaauuugacucuuagcccaggacucuaaccaugugag

SEQ ID NO: 4104145 - RNA, 109 nt, Human
cucuaacacauugucacugagugggcuagagcauuccaaacucuuucccugucguuucuccuuaagaugcagaccagacuuaggagcauagcccucagucgcaucagag

SEQ ID NO: 4104146 - RNA, 68 nt, Human
cucuacaggauaucacuucauuucuuuaacaaauaauugcauggaaaagagggagguggacugaaggg

SEQ ID NO: 4104147 - RNA, 90 nt, Human
cucuaccugccuggcaggacuguuguaagaaauaaaugaaaucauauauguaaaguauucauaaaaguaccugacagaguagaaaaagag

SEQ ID NO: 4104148 - RNA, 86 nt, Human
cugagggcuaggaaugauaagacaugaguagaggguuuuaaaaaugagcucuuuguuuuccacucuucaucaugccuagaucucag

SEQ ID NO: 4104149 - RNA, 60 nt, Human
cugagggcuuccuaagcucuggggugauguuuggacuuggagacaguggggagcuccuag

SEQ ID NO: 4104150 - RNA, 57 nt, Human
cugagggcuuccugauauggaaugaaggacaacuuacauuguggauggaguccuggg

SEQ ID NO: 4104151 - RNA, 56 nt, Human
cugaggggauaaagguuuggguuaaagauaaauaugaccuugccucuacccuacag

SEQ ID NO: 4104152 - RNA, 85 nt, Human
cugagggugggugggaugccucuggagaagugccugguccugaugaaccuccaccuccccauuaggucacccacucugcuuucag

SEQ ID NO: 4104153 - RNA, 101 nt, Human
cugagguaggagaaucgcuugagccugggaggcggagguugcagugagccaagauugcaccacugcauuccagccugggcgacagagagauccugucucag

SEQ ID NO: 4104154 - RNA, 68 nt, Human
cugaggugacaugaaggaauaauuguuuagacaucaaugaaaaaugucugucugcucauuuaccucag

SEQ ID NO: 4104155 - RNA, 61 nt, Human
cugaggugcuuggauguuuguaguaagagcuucuaacucugcugcuccacccggcucucag

SEQ ID NO: 4104156 - RNA, 55 nt, Human
cugagguuccugagaggcuuuagggguuucccagagguuccuuagggaccaccag

SEQ ID NO: 4104157 - RNA, 66 nt, Human
cugaguaagauacagaagcuccaacauuuugcuuaauuuguuccauguauucuguauucugcucag

SEQ ID NO: 4104158 - RNA, 56 nt, Human
cugaguacugagcccuggacgcuaggcugccuuaguccagaggaggacagacucag

SEQ ID NO: 4104159 - RNA, 79 nt, Human
cugaguagacuugauuugcgguuucguuauugauguugggcaaaaaaagaugacaaaagaguaaguaaugugcugccgg

SEQ ID NO: 4104160 - RNA, 130 nt, Human
cugaguagggaauaaauauaggauaaauuguuggcagaaagcuuucgaucggaugaauuuucucugagcgaaaagccaagcuuucucuaagucauuuuuacccacauagucuuuuucucuguaugcucag

SEQ ID NO: 4104161 - RNA, 65 nt, Human
cugagucaccucuggauguagcggaaugacacagcuuccucagacugcaaaugcaaggugaccag

SEQ ID NO: 4104162 - RNA, 68 nt, Human
cugagucacugcuuucuaagacaacacucugauuuuccuuggaguguguccauucaggcacugaccag

SEQ ID NO: 4104163 - RNA, 96 nt, Human
cugagucaguaacugaaugucuauguaugauauuuccaguaucaugauuaaaauggagccccgaaaugucauuauaaggccuaguuguggacuggg

SEQ ID NO: 4104164 - RNA, 82 nt, Human
cugaguccucccuccuggugagcaggggcuagaacagagguaguccugcaggccucugccucaucugggcacaagggcuuag

SEQ ID NO: 4104165 - RNA, 70 nt, Human
cugagugaaucugcccuggguuuuaugggaguccuagaaucagaacugcugucccaggguaguccauagg

SEQ ID NO: 4104166 - RNA, 70 nt, Human
cugagugacuuccauuucuggccucccuuccuuaucuguaaaauggguagguugaaauagguuaucuaag

SEQ ID NO: 4104167 - RNA, 55 nt, Human
cugagugaggggagcuugaugguguauauauauuccucucaaggaccucacugag

SEQ ID NO: 4104168 - RNA, 69 nt, Human
cugaguggaggcauugugacugcugaacuugcauuggaggugauucagcacaucgugucuugaaaucag

SEQ ID NO: 4104169 - RNA, 58 nt, Human
cugaguuuugcgagaaucguuagugauauagacacagcuagcauuccagaaaacucag

SEQ ID NO: 4104170 - RNA, 74 nt, Human
cugauaaauacuugucagaugaauaagaguuuaauguuuucuaaaauuuuaauuuugagcaaguauuugauuag

SEQ ID NO: 4104171 - RNA, 94 nt, Human
cugauacacaaugugugauauaugcauacaaugagauauuccuuggccuuaaaaaggaaugaaguacugaugcauacuacaagauggauaauag

SEQ ID NO: 4104172 - RNA, 102 nt, Human
cugauagucuuaaauauuuuuuagccauauauuucucuguucaaacuaaacgcauuguguggaaguucaauagaaaaauauauuaaagaagaggcgcuccag

SEQ ID NO: 4104173 - RNA, 74 nt, Human
cugauauguuaucagaguagccuuuaaucuucuagaaccaagacauuguuagagaaauucugguaauguaaaag

SEQ ID NO: 4104174 - RNA, 69 nt, Human
cugaucucuccagguucagucgauggaagaucucagagacacauuucauagacugggccugggaaccag

SEQ ID NO: 4104175 - RNA, 79 nt, Human
cugaucugcagugcagccacccucaaggcugaauccuuaagugaaggaccaagccaggcuucagggugacugugaucag

SEQ ID NO: 4104176 - RNA, 88 nt, Human
cugaucuggcauggaacuuuggguaaugcuucaauuuguuaaaaauaaauuuaaguuuugcauuaagguuuuccucagugcuuuucag

SEQ ID NO: 4104177 - RNA, 81 nt, Human
cugaucuucauuaauguuuccagucuaugaugguuucguguuaugguguccauggaucuggaaaugggaaaggagaugaag

SEQ ID NO: 4104178 - RNA, 96 nt, Human
cugaugacaucacuuggacccuuucacagcugcugggguaaacagaccccacacaagaagugauggaaggagccaguccaggcugauuggucucag

SEQ ID NO: 4104179 - RNA, 64 nt, Human
cugaugaggaaauugaggccuacgaagauuaaggaaguugcccaaggucugauuccagaaucag

SEQ ID NO: 4104180 - RNA, 56 nt, Human
cugaugaggucauggaagagugauacuauuuauucauuccacaaauacuuaucuag

SEQ ID NO: 4104181 - RNA, 62 nt, Human
cugaugaugaugaauauaauaacgaugacuaacauucagugaguauguauuuaucaugucag

SEQ ID NO: 4104182 - RNA, 80 nt, Human
cugaugcccaagagcagcaguguuggugggagcaucugcucuggggagcagagaggaggccaucaacacugugguauaag

SEQ ID NO: 4104183 - RNA, 83 nt, Human
cugaugccuuugccacagauuaggaucucuccuaagguccacccccguuucagagcuucucauuugacugguugaggucucag

SEQ ID NO: 4104184 - RNA, 80 nt, Human
cugaugcugauauugauguuucccguuaagagaaaaaucccguuuuuuaggcugacacaggaaauaccacucagcacugg

SEQ ID NO: 4104185 - RNA, 63 nt, Human
cugauguguugcaacugcugaugagacccuugaaaugaaguaucucuuaauugcucacauuag

SEQ ID NO: 4104186 - RNA, 70 nt, Human
cugauguuaacuuguucugccucuuuuggucagggucaacuuuaugggauggcagaggaaguagcagaag

SEQ ID NO: 4104187 - RNA, 68 nt, Human
cugauuaaaaacagguucugagaaauaucugcaaaacagaugguauauuuaaaucuguuuacagucag

SEQ ID NO: 4104188 - RNA, 125 nt, Human
cugauuaagguuuuauagaggaucuggggugggguuuuaggcugcugcaaauugaccuaagccaauuuggucaugcaaaacuauuaggcucuuuuugggaaacuucuguagccuccaguaauuag

SEQ ID NO: 4104189 - RNA, 78 nt, Human
cugauuaauauuuguaagguguuuaccgcaguuucuggcacaugauaagcacuauauaaguauuuguuaaauaauuag

SEQ ID NO: 4104190 - RNA, 89 nt, Human
cugauuagagacuggaggcugugugcaugagaccucccuaaagcagagguuucagaaaccugcacauuguuuaaacugguuacccucag

SEQ ID NO: 4104191 - RNA, 84 nt, Human
cugauucacuagccuuuacuuccacuuccuaguuucuaugucauaaaauaacuacuauagugggagggccauauggugaaugag

SEQ ID NO: 4104192 - RNA, 59 nt, Human
cugauucaguaggugugaacuuauucaggacaccugagaguuuguuucuaaugagugag

SEQ ID NO: 4104193 - RNA, 96 nt, Human
cugauucauaauccuggccuugccaugcauaagugcagcagauuugcuuaauacagcaaacccuggcugugacuuugcagguacccuuugagugag

SEQ ID NO: 4104194 - RNA, 79 nt, Human
cugauuccauauauuauuccuaagucccaacuacaugccaagcacugugguggguacuggggaaauaaaggaaaucuag

SEQ ID NO: 4104195 - RNA, 72 nt, Human
cugauucugaaauuuuaguuauagaaaauggaacagcuuucccauuucagguggaaguuuuagaugaaucag

SEQ ID NO: 4104196 - RNA, 57 nt, Human
cugauucuuugguuguggauuugcaaagcaauuugcaccaguuucucagagaaucag

SEQ ID NO: 4104197 - RNA, 66 nt, Human
cugauuggcauggcucacagcccuguccccaagcccuccccagacagagcaguccuugucaaucag

SEQ ID NO: 4104198 - RNA, 59 nt, Human
cugauuggcccaguuuaguguuggauugagucuugguccaauucaauugggucaggaag

SEQ ID NO: 4104199 - RNA, 79 nt, Human
cugauuguagcucacacuauuuaaggguaaggguugauccuguaugccugcuacaaaauggaauguguuuauaauucag

SEQ ID NO: 4104200 - RNA, 57 nt, Human
cugauuucuccagaguuucucucacuggcaguugacucuaguguuuuucuggagcag

SEQ ID NO: 4104201 - RNA, 69 nt, Human
cugcaaaaaaguacagugcaugguaaguguccaauaacuagcugcuguuaugauguuacuuucuuguag

SEQ ID NO: 4104202 - RNA, 70 nt, Human
cugcaaagacuuccuacacaguuaugccagagagagaauauauuagucauucuggccuguguggcugcag

SEQ ID NO: 4104203 - RNA, 66 nt, Human
cugcaaauucacuugccugcuuagcuucaagaguugaacugggaugguaggguaagugagaagcgg

SEQ ID NO: 4104204 - RNA, 82 nt, Human
cugcaaauucucucucuacagugccuccuggaggccuuucaagucuuuugaauuccagugguaguaaagaggucuuuuguag

SEQ ID NO: 4104205 - RNA, 76 nt, Human
cugcaagauugggaaaaggcuuggaaccuuucccuuuaggagggaaaugaagugagccuugucucuaaccuuucag

SEQ ID NO: 4104206 - RNA, 67 nt, Human
cugcaagccaaggagagaggucuugggagaaaccaaaccugccaacaccuugaucuuggacuuccag

SEQ ID NO: 4104207 - RNA, 76 nt, Human
cugcaagccaggaagagagagcccuccacagaaccugacugugcaggcagccucaucucagacuuuuggcuuccag

SEQ ID NO: 4104208 - RNA, 82 nt, Human
cugcaaggagcuggagaaaauccauguguaugaggggcugagcagcccuguguaccauucaguuuuuuccucuauuauggag

SEQ ID NO: 4104209 - RNA, 56 nt, Human
cugcaagggaucuucagguagcacucauugcugucaaucuggcucagauccugcag

SEQ ID NO: 4104210 - RNA, 67 nt, Human
cugcaaguccaagaucaagaagccagaaggguugguguccucuguggccucccuccuugguuugcag

SEQ ID NO: 4104211 - RNA, 102 nt, Human
cugcaauacaucagcugggagucaacccucacgagcaaacagauuaguucagcuuauaucccugaaacagcuuguuagguggggucuggcucugcugagcag

SEQ ID NO: 4104212 - RNA, 58 nt, Human
cugcaauagcaaguaguuguuagagagagacucgaaaccuagacuacuuacuaugugg

SEQ ID NO: 4104213 - RNA, 79 nt, Human
cugcacaauucguuuuucaucuguagugcaacaauccauauuugucucugaugcugccagggaaaauauacuagugcag

SEQ ID NO: 4104214 - RNA, 65 nt, Human
cugcacacauucuagccuuuugugacucauuccaaauuagcagcucacauuggcaaugugucuag

SEQ ID NO: 4104215 - RNA, 57 nt, Human
cugcacaugagagagaguagcugaagucuacugacuuuaaugaaauucucugugaag

SEQ ID NO: 4104216 - RNA, 77 nt, Human
cugcaccauccgauucaguguuuguguugaaagccaucuguuccuguggcuugugcauaagaagaccugagguguag

SEQ ID NO: 4104217 - RNA, 67 nt, Human
cugcaccccauuuucugucuuugguccugucuguuauugguuuauaaagucacccaaaggcaugcag

SEQ ID NO: 4104218 - RNA, 68 nt, Human
cugggaagaggcgcuccucacuuccuagaugggauggcggcugggaagaggcgcuccucacuuccuag

SEQ ID NO: 4104219 - RNA, 72 nt, Human
cugggacuacucacuuccccacaccccuuggaggcugaggccccagggucaguguguggagggucagcucag

SEQ ID NO: 4104220 - RNA, 80 nt, Human
cugggacucccuuucuugugggcagauggggccagauguucaggucaggcuucugccacgagagggaaguggggucccag

SEQ ID NO: 4104221 - RNA, 76 nt, Human
cugggacuugccucgagggcugccagaaacuugaguuuguccacucacaucacugcaucccguggagaagucccag

SEQ ID NO: 4104222 - RNA, 72 nt, Human
cugggagagcccccgccuugcugggccagggguaaaauaaggcuccugucugaaggcagggggaugguugag

SEQ ID NO: 4104223 - RNA, 68 nt, Human
cugggaggccuucagcaacuuuggaauguuuaaaguagaaauauguaaccaaggugaaguuguuccag

SEQ ID NO: 4104224 - RNA, 87 nt, Human
cugggagggcuguagugggagaggggcggggaggucaggaacugcccccaccacccagccagcuucucccugccaggccccucccag

SEQ ID NO: 4104225 - RNA, 84 nt, Human
cugggaggggacacagguccugcagggagaguaaacagccuggcuccaaugucaccuccuucaggagucuuccccaguuccuag

SEQ ID NO: 4104226 - RNA, 94 nt, Human
cugggagggugcagggcuccaggccccagcguuccgcguacaugaccugccggagcgggacacgggcgcuuggucacucugccccucgccccag

SEQ ID NO: 4104227 - RNA, 68 nt, Human
cugggagguggcccuugcucagccuuccacaccccucuuugugcaagucugagggcagccccucucag

SEQ ID NO: 4104228 - RNA, 60 nt, Human
cugggagucuggaauuuugguauguccuaggcagacagucccuacauuaccagcucccag

SEQ ID NO: 4104229 - RNA, 125 nt, Human
cugggagugagagaugggaaauagccugggaaggcagguuggugagaagacugcagaugcccuuaaacuguagacuggagcaguagcuuuguaucuucccugcucuccuuccucucaaggcucag

SEQ ID NO: 4104230 - RNA, 85 nt, Human
cugggagugguuguggcuacagacuggaggccccucaucugcgaggugagaggcuagaucagcucugugcuggagccccguccag

SEQ ID NO: 4104231 - RNA, 85 nt, Human
cugggauaaaguuaagguauuggcagggcugaguucuuucuggagccccugagccuccagaaccuguuuucuugcuuuuuuccag

SEQ ID NO: 4104232 - RNA, 61 nt, Human
cugggaugagcuaauguacucguaccagaauaugaggaucauucuauuagcuagcuuccag

SEQ ID NO: 4104233 - RNA, 66 nt, Human
cugggaugauagugcuaguauugcagcagcugcugcuacugcuacuauuagauuauuucaugccag

SEQ ID NO: 4104234 - RNA, 70 nt, Human
cugggcaaagauaugaauuauuuauccaguucuaacaacgaacuggcuugaaguagauucaaauccccag

SEQ ID NO: 4104235 - RNA, 72 nt, Human
cugggcaauauggugaaaccccaucucuacaaaaaauuagccaagcaugguggcgcguaccuguagucccag

SEQ ID NO: 4104236 - RNA, 64 nt, Human
cugggcaauuggauucuuaguaaaucuuguuggauuugauaaagacuaauucuuaauugcuuag

SEQ ID NO: 4104237 - RNA, 72 nt, Human
cugggcaccacugcugccuuguugcccuguggcugugaggugccauagugccaagucuucagcacgccccag

SEQ ID NO: 4104238 - RNA, 68 nt, Human
cugggcagcagcaaagccagacucgaggcaccuagaccugaguuuggagcacuguuagcugaauccag

SEQ ID NO: 4104239 - RNA, 90 nt, Human
cugggcaggguggggugcauggacgugacuuggccaagugguccuuucccagcugccacucccccuuccugccacccugccuuugcccag

SEQ ID NO: 4104240 - RNA, 57 nt, Human
cugggcaguuuacauuccuaccaccuggcuuggggccggaauguacaggccgcucgg

SEQ ID NO: 4104241 - RNA, 63 nt, Human
cugggcauggggcuggaaaggugggugggucuggcaccugaauaucccugaguuccagcccag

SEQ ID NO: 4104242 - RNA, 76 nt, Human
cugggccaacauagaggugagauuguggugcugcuggugguggcagaucuuacuccagcucuagauuggaagucag

SEQ ID NO: 4104243 - RNA, 61 nt, Human
cugggccaccgcugaccuggaguaggcugagacucuaguggccacucugcggaggccccag

SEQ ID NO: 4104244 - RNA, 82 nt, Human
cugggccacgggaagaacaaaaucuaauuugggcauuucauuuuaugaguugaucauuauuugguuuccuuuccugguucag

SEQ ID NO: 4104245 - RNA, 64 nt, Human
cugggcccuggagggcgccgcacaguccaggggauggcgugggccaaggcccccaagagcccgg

SEQ ID NO: 4104246 - RNA, 110 nt, Human
cugggccgggaaaggccugugcuggucuccgccgcucccugaucuagagccaugagaagcccguucaugggagcaagguggggcaccagccacuccugucucucucccag

SEQ ID NO: 4104247 - RNA, 62 nt, Human
cugggccuggguuccuccugggcaggggcugcaucccaggccucuggagccccagugcucag

SEQ ID NO: 4104248 - RNA, 68 nt, Human
cugggccuuaguuaucacacagcucuacauaaaucaagcaagagggcuggucaggaaacuaggcucag

SEQ ID NO: 4104249 - RNA, 67 nt, Human
cugggcucuggccagugaguuccucucuuagaaggaaaacuggagagagagcucauuagcugccugg

SEQ ID NO: 4104250 - RNA, 78 nt, Human
cugggcugcaauccucagggccucauggccggggugcccaaggcauggguucugaggcccugccaggugcugccacgg

SEQ ID NO: 4104251 - RNA, 59 nt, Human
cugggcugcuugcugaagggguggggcugacugacaaaacuuugguggggguagcccag

SEQ ID NO: 4104252 - RNA, 100 nt, Human
cugggcuggcgucuuuucccagacagggaccucgcuccagagcugaacaggguuguuucugggaggcugggucccguccgugacucagagccaggcccag

SEQ ID NO: 4104253 - RNA, 71 nt, Human
cugggcuguccagcaccugggcuccagcugccaaaggcaggcaggugagcaccaggcuguuggaagcccag

SEQ ID NO: 4104254 - RNA, 86 nt, Human
cugggcuuauguaugaaggaauugggcuuaugguugcggaaauaauuccaaagcaaauauuucuaauuccugaaauagguacuugg

SEQ ID NO: 4104255 - RNA, 55 nt, Human
cugggcuuucaggcccuaaggccagugggucccccuccucggggucugaagucag

SEQ ID NO: 4104256 - RNA, 124 nt, Human
cuggggaauuuccuugcccagagggaggagcuggggccaagcucaccuucugauggaguauguggguuucucgucccagaaggaggagcuuuucccaagcccagcuuuccagggccuuucccag

SEQ ID NO: 4104257 - RNA, 66 nt, Human
cuggggacaccaggaggacaggccccuacuuugcugagacuagaccugugcuuccuggcaccccag

SEQ ID NO: 4104258 - RNA, 58 nt, Human
cuggggacuuuuuggaauaagggagaaguugguuaccuuuuaacaaggauuucccuag

SEQ ID NO: 4104259 - RNA, 72 nt, Human
cuggggagcccgccaggugccuacuccgugcccggcccaaggggaggggcagcacccagccgguucucccag

SEQ ID NO: 4104260 - RNA, 58 nt, Human
cuggggcaugggccccuagaggcagggacuccgauccccacuccccagcugcccccag

SEQ ID NO: 4104261 - RNA, 64 nt, Human
cuggggccaaauuuggccaugagcauuuucacuuugggagaugucaggacaaguuggcaggcag

SEQ ID NO: 4104262 - RNA, 64 nt, Human
cuggggccaccuggguucgacugggccccacgggugguggcccagcgggauggguuggagccgg

SEQ ID NO: 4104263 - RNA, 55 nt, Human
cuggggccucugagcagcuuuccaggcucaagagaauggaaggaguggaccccag

SEQ ID NO: 4104264 - RNA, 77 nt, Human
cuggggccuuggccucauuagaugaaacucucccucuuccuaucaggcuggggaauuuuugaggaccagaaccucag

SEQ ID NO: 4104265 - RNA, 56 nt, Human
cuggggcugcagcgaucuucaucagucacuggugaccuugagugaaugagccucag

SEQ ID NO: 4104266 - RNA, 77 nt, Human
cuggggcuuuucuuuggggucuccagcauaggucgugcccauucauauuuguuuauggaucucccagaguccuccag

SEQ ID NO: 4104267 - RNA, 86 nt, Human
cugggggacuggaaggagccgagcucuuccccacucaggucuccuuuccgcuguccucugugggggcucugcugcuccuccuccgg

SEQ ID NO: 4104268 - RNA, 66 nt, Human
cuggaagcuuguuugccagucuguuguucacauuauacucaagaccauaggcagcaggcugcccag

SEQ ID NO: 4104269 - RNA, 75 nt, Human
cuggaaggauggaagggaaguagugcuccucauaucuagggagagauugaagauuaaaugcuuccuuccuucuag

SEQ ID NO: 4104270 - RNA, 70 nt, Human
cuggaagggagcacuguagagagacaagggcaaaaaucaggcagcgucucuagcaguagcccaaauccag

SEQ ID NO: 4104271 - RNA, 85 nt, Human
cuggaagggauaagaaauaggacucuaggggcuuuggaggagccuggcucuuccaauaccuagauuuuggacuucuagccuccag

SEQ ID NO: 4104272 - RNA, 64 nt, Human
cuggaagguucuuugugugccugaugcuguguuggcuacuguugggacgcaaaggacuuuuuag

SEQ ID NO: 4104273 - RNA, 75 nt, Human
cuggaaucuagggccuagaucacaggguuacugaagacagaguagagacuuggacucugggauucuggauuucgg

SEQ ID NO: 4104274 - RNA, 62 nt, Human
cuggaaugucagcuacaagagggcagggacuguggcuauuuuguucucugcuacauucucag

SEQ ID NO: 4104275 - RNA, 127 nt, Human
cuggacacuggaccuggcuggcaccacuaggggcccacccauggcugcuggcucggucccuggggcccugccccacuggcacuggucccaguagcuugggucccuaccagccaggugcucuguccag

SEQ ID NO: 4104276 - RNA, 98 nt, Human
cuggacagaaugugaaaugaggggauggagggugaagguggagguggagcugaccuggcuucugccuugcacuuugucagaccaaacguucugaccgg

SEQ ID NO: 4104277 - RNA, 60 nt, Human
cuggaccucagcuguggggaugcugccagcucgugacagccuccacuagcugcaggacag

SEQ ID NO: 4104278 - RNA, 56 nt, Human
cuggaccugguuguuuugagucaguucaguggcuuggcccugccgccuggguccag

SEQ ID NO: 4104279 - RNA, 59 nt, Human
cuggaccuucugccuccucaugcuguaauaugcauaagagguguccuagaaguauucag

SEQ ID NO: 4104280 - RNA, 83 nt, Human
cuggacgguuggucucuucuuggagauguuguaaagacaaauuuauuucccccaucuucaaagaagccuuggauuaauugcag

SEQ ID NO: 4104281 - RNA, 70 nt, Human
cuggacucaaagguuagacagcucugcauacagugaaaauuaugacacagagugggucugaggaggacag

SEQ ID NO: 4104282 - RNA, 76 nt, Human
cuggagccaggaaugucgucauaaacaugaagccccguaccagggcaucuuggcagggcaauguuccuagcugcag

SEQ ID NO: 4104283 - RNA, 68 nt, Human
cuggagcccaggaggucgaagcugcagugagcugugauuguaccacugcacuccagccugggugacag

SEQ ID NO: 4104284 - RNA, 104 nt, Human
cuggagccuggguucucugcaguggagacucuggucagugaauuccuaguuuccuaauagguagacuuggugaauauggucuccuuccagagcuuggggaucag

SEQ ID NO: 4104285 - RNA, 64 nt, Human
cuggagcugauacagcuggcuuuuagaaacuuuugacaaguaaccagggccuugugcagcacag

SEQ ID NO: 4104286 - RNA, 61 nt, Human
cuggaggaaaugguccugggguggcaggugggcagcuggccccaggucguggucuucccag

SEQ ID NO: 4104287 - RNA, 74 nt, Human
cuggaggaccaagugcacucuuagggccccacacugcgagagcacagggccaggagcugcacagggcucugcag

SEQ ID NO: 4104288 - RNA, 57 nt, Human
cuggaggagaauuuauggucgaauaaaaucugugcuuauuucccauuccuccuucag

SEQ ID NO: 4104289 - RNA, 61 nt, Human
cuggaggcacugcagggcuucugaaagcggcccaucccaggagccuggcaaacacccccag

SEQ ID NO: 4104290 - RNA, 56 nt, Human
cuggaggccccuaaacccaccucauugcuuuuggaaacccuggaaggggucuccgg

SEQ ID NO: 4104291 - RNA, 71 nt, Human
cuggaggcugggaaguccaagaucaaggcaccagcagauucagugucuggugugggcucucugcuucacag

SEQ ID NO: 4104292 - RNA, 56 nt, Human
cuggaggcuuuucugguaggcggccuuggggcuguccaccuccagagccuuaacag

SEQ ID NO: 4104293 - RNA, 87 nt, Human
cuggaggggcgcaggucaggcuguagggccccuggagcuggcucccuggcuugagagaaagggccacagucaccuucgccugcccag

SEQ ID NO: 4104294 - RNA, 58 nt, Human
cuggaggggcuggcaugguagccauuuugaucucugucauguguaauagccucugggg

SEQ ID NO: 4104295 - RNA, 73 nt, Human
cuggagggggcggccggggucggucuaguuccgguuacaaacuggacagaaaaggccacuggagucucgcuag

SEQ ID NO: 4104296 - RNA, 87 nt, Human
cuggagguaggucuacuaucagggacauuuagacacugauggucuuuacuaucuguggauaugaccuuccugguggacuuucucagg

SEQ ID NO: 4104297 - RNA, 58 nt, Human
cuggagguuggguccaggccaggauggagcccaggcuccuggcaucugggcccuccag

SEQ ID NO: 4104298 - RNA, 100 nt, Human
cuggaguauuuucuuggacuccuuguuuugucauuugugcuuuuauaaaauagaaaauuaugacauaugaguacaaguaaaaugaguuaguagaaaccag

SEQ ID NO: 4104299 - RNA, 97 nt, Human
cuggagucuacagauacuaugggagcuagaguuuguaggguagagcaucacugaucuauaggacaacuucaagacuccuaauaaaguaagacuggag

SEQ ID NO: 4104300 - RNA, 57 nt, Human
cuggagugacuuuguuccuuuuauccucuuugaaccccugcaaaguauucacuccag

SEQ ID NO: 4104301 - RNA, 88 nt, Human
cuggaguuccucucuuguaaaacaaacacccaaaggcaaggaaaaacaccguaaaguucuuuguauguauguuucaaaggaaugccag

SEQ ID NO: 4104302 - RNA, 82 nt, Human
cuggauaacccggcguagcuguccaggagugcagagauugggaaccagauccugggcucuuggcagcuucagcuuuaucugg

SEQ ID NO: 4104303 - RNA, 76 nt, Human
cuggauacaaaacuagagaaaauuugacugccgaggacucuucagggcauguauguuucuuuaauuuuacucacag

SEQ ID NO: 4104304 - RNA, 70 nt, Human
cuggaucagucuuuuggcuuacuuugaccagaaggaucuggugaaaagugaugccaggagucugguccag

SEQ ID NO: 4104305 - RNA, 124 nt, Human
cuggaucauucucucuuuuugaccagccugacuauggcugcagguguuuuucuuccuccccuguauaugauaaucucaccugggcagucauggauggguacauucaauuuggguagaaauccag

SEQ ID NO: 4104306 - RNA, 80 nt, Human
cuggauccaagcaagucacucuguggaagauuccaggcguuugaaaauagacuucacuuucgacaggaguugcuauccag

SEQ ID NO: 4104307 - RNA, 72 nt, Human
cuggaugauauuuugcaaauucuugucuagccuuugaaagaaagcaggcuauugauuuggaaguuuccccag

SEQ ID NO: 4104308 - RNA, 91 nt, Human
cuggauggcaaccugaaacccaaggccaugagcagcgagugugugugagcccagcauggauuagugcgguggccuugggaggcccuuccag

SEQ ID NO: 4104309 - RNA, 90 nt, Human
cuggauggcggcgucauucccgagauggagagcugaguggggccaggggagagggcagguucaguuccauuucagguggguugaguucag

SEQ ID NO: 4104310 - RNA, 56 nt, Human
cuguuaggacuccccagaagcugccagagaauugcugcacugaagagucuuaggag

SEQ ID NO: 4104311 - RNA, 56 nt, Human
cuguuagugaucaaagggagagguagucaucaaaacagcuccccuucacugaacag

SEQ ID NO: 4104312 - RNA, 73 nt, Human
cuguuauagugaagcccucuguauuaucuuaguaacuuguauuugcagaggaggaagagcuuuaaaauaacag

SEQ ID NO: 4104313 - RNA, 63 nt, Human
cuguuauuauguuuccagagccuuuccuaaccaaggaaggcuucauauuuaggcauaugacag

SEQ ID NO: 4104314 - RNA, 87 nt, Human
cuguuauuauugucaucagcauccagcauccuauagaaaaagagacacuuuuuucuacagguugauggguuuggugacuuguuucag

SEQ ID NO: 4104315 - RNA, 129 nt, Human
cuguucaagauucguuaaauggcagaaggaacuuuacagauaugauucaguugagaaucuuauaauagagagauuagccuggauuaugcaggugggcccuaaauguaaccauaaauuuacuuauaauag

SEQ ID NO: 4104316 - RNA, 57 nt, Human
cuguuccucuggcauauggagaaacuugagaugagcaucuuugugucagauggacag

SEQ ID NO: 4104317 - RNA, 68 nt, Human
cuguucuagcacacuuuuggcauguuugguucuuauagaagagccugugcuagcagugguaaguuuag

SEQ ID NO: 4104318 - RNA, 72 nt, Human
cuguucucuuuuccugcugagccaacugagggggagccuagccaggaggagcggcagauggagugggagcag

SEQ ID NO: 4104319 - RNA, 98 nt, Human
cuguucuuucuaucaguaguguuuugaaggggaaucuagguucccagagcaauuugauguucuggagagaucuuccacaacacaggcagagggaucag

SEQ ID NO: 4104320 - RNA, 70 nt, Human
cuguugaauaguauaccauggugugaauauccuuuaucaauuuucacacacauggauaguauuuuuucag

SEQ ID NO: 4104321 - RNA, 129 nt, Human
cuguugaauucuuuaucugaacaccaguuuucuauaugaacugagagagauggcaagaaauaaagaauugguacuuucuuaggcuguauaaaugagaggauugugcaaaucaugauagacaaaacccag

SEQ ID NO: 4104322 - RNA, 59 nt, Human
cuguugaauuucucguguguuccugggacccauuaggaauguaaaucuagauuuuacag

SEQ ID NO: 4104323 - RNA, 129 nt, Human
cuguugcacauccucaaggcuggugacagugcacacagauuucaggacucaaaacgauaauucguguaaagccguuguuguuaucuuuaggcugugacuagcugccagacuaugagaggugaccccgag

SEQ ID NO: 4104324 - RNA, 65 nt, Human
cuguugcagaggcuggcucgccggguuccagcuccgcugccugcggcucggcagucucugcgcag

SEQ ID NO: 4104325 - RNA, 68 nt, Human
cuguugcccaggcuggaaugcaguggcgugaugucaguucacugcaaccuccgccucccggguucaag

SEQ ID NO: 4104326 - RNA, 62 nt, Human
cuguugccuaaaugccuuuccuaccuaacaguagcuguucagugggugcauuggcccuacag

SEQ ID NO: 4104327 - RNA, 63 nt, Human
cuguuggggggaucugaggccauucugagacuccaggacuggcagcagcagcccuugggucag

SEQ ID NO: 4104328 - RNA, 66 nt, Human
cuguugguuaaagucaaucaugguauaauuccuuuucuguaggcagagcaugugacguaaccacag

SEQ ID NO: 4104329 - RNA, 66 nt, Human
cuguugucuugguaccucuuugaagugcaaaaacauuacaacuucaaaagcgguccaggaagaugg

SEQ ID NO: 4104330 - RNA, 82 nt, Human
cuguuguuaaaaccugcuuccccacugcucagccugccaucagccauccagcugcagagcaguggagaguaggucucaccag

SEQ ID NO: 4104331 - RNA, 118 nt, Human
cuguuguuaaauugcaggucauguuggugagucuggggcacacacacacagccugucuauuccacugcgggacuuguucugccagcacuucucagcuuugaccugcuaagugauucag

SEQ ID NO: 4104332 - RNA, 69 nt, Human
cuguuuagucaggaucaaauugaaguuaucagagaaagcucuuauaacccaaaugauucacuguuacag

SEQ ID NO: 4104333 - RNA, 65 nt, Human
cuguuuauaaaccaccaguuuagggcauuuuuauuaaugcagcccaaauggccucagauaagcag

SEQ ID NO: 4104334 - RNA, 58 nt, Human
cuguuuaucuaggaguugcagggccauucgggauggcugcaugcucauaggaaaauag

SEQ ID NO: 4104335 - RNA, 69 nt, Human
cuguuuaugaagcugugguuuagauguccucaagacuaggaugauacuuccagcuucaagauugaacag

SEQ ID NO: 4104336 - RNA, 56 nt, Human
cuguuucaauuugaggaucagccagaaguuaugaggugacaauucaggugaaacag

SEQ ID NO: 4104337 - RNA, 56 nt, Human
cuguuucaugaaugcaauuucaucggugucuggaaauugcacaguuuauggugcag

SEQ ID NO: 4104338 - RNA, 79 nt, Human
cuguuuccacaaugccaggggcaucacugguacuguauucuuggguaauggugcucccuggaguugugcagugggacag

SEQ ID NO: 4104339 - RNA, 115 nt, Human
cuguuuccccaucuguguuggggcaugguguguguguguguguguguguguguguguguguguguguguauguguauacacuauauaaucccaauggauuuucuagguaaaauag

SEQ ID NO: 4104340 - RNA, 65 nt, Human
cuguuuccucaccugugcaauugaagucaugguccccaucuucuggguguggagugaggacacag

SEQ ID NO: 4104341 - RNA, 99 nt, Human
cuguuuccuuaauaggccacuucccuccaaggauucagggaccauucaucaccguggugccuaguccccaggaggucaguggccugcugcggugcucag

SEQ ID NO: 4104342 - RNA, 95 nt, Human
cugagcaggcuucccucccuccugcauggaagcaguuuggcuccagggauggggcuggccagcugacagcagggcugggagggaagagggugagg

SEQ ID NO: 4104343 - RNA, 56 nt, Human
cugagcagggagacaacucuggugcagggucucacuagucuucaucccaugcucag

SEQ ID NO: 4104344 - RNA, 86 nt, Human
cugagcauguuaugcauauugugauggauuucaggguuaauauaccuccuuuuuccucaucacaauguacguuaaaaugugcaugg

SEQ ID NO: 4104345 - RNA, 70 nt, Human
cugagccagggugagagggcuuuguauuuggagagugaaaagaauacgguuguuuaggcuuuggacucag

SEQ ID NO: 4104346 - RNA, 71 nt, Human
cugagcccugaacaacagcaggaaaaaagagagcuuagguguucuuuucaugaugauuguugggggcugag

SEQ ID NO: 4104347 - RNA, 58 nt, Human
cugagcccuugucuuccuggucccucugcagaccugggauuggaagaaggagcugcag

SEQ ID NO: 4104348 - RNA, 83 nt, Human
cugagccucguacccucugcagcccuaaguugggacuacucacaccucccucccucugagagugcucagaggguacagcucag

SEQ ID NO: 4104349 - RNA, 63 nt, Human
cugagcuacauguguuugcuaacccugcaagauguuaucucugggccaggcacaugaagccag

SEQ ID NO: 4104350 - RNA, 62 nt, Human
cugagcucaggcugaaucauccuagcuuuucuauaaacaugagaagccagcugccagcucgg

SEQ ID NO: 4104351 - RNA, 68 nt, Human
cugagcucugcugcugagcacacuccuaugggaccuucugugggauucagcugggcggcauggcacag

SEQ ID NO: 4104352 - RNA, 86 nt, Human
cugagcugaggaguuugcaaccugcuguaggagcaaugcucaggcuucuuacaugcaggucagacugcauuucagcaauaacucag

SEQ ID NO: 4104353 - RNA, 60 nt, Human
cugagcuuccauggacgccaucugccauucagugucgguggugguggacaugaggcccgg

SEQ ID NO: 4104354 - RNA, 95 nt, Human
cugaggaaaauucuccaaacgucauacauggauuaaucccacucaaggauacuccuggauuugucuaggucaugacuuucaagcaguuuucucag

SEQ ID NO: 4104355 - RNA, 71 nt, Human
cugaggaaacacuuuaagugaggaggaucuuagcaaugaguagauuuucaucaaaauuaaagauuucuggg

SEQ ID NO: 4104356 - RNA, 99 nt, Human
cugaggaagaugagagcaagugguccaaggguugaguggaggugcugggaacggaaacccaccuuccaucuccuuggcuagugcacuuggagguugcag

SEQ ID NO: 4104357 - RNA, 98 nt, Human
cugaggaauagaaaguuugucucucuguauucuucguaaugccugaugcaggcauaagaacacagacacaaaguaaaauugguucuaugaauucucag

SEQ ID NO: 4104358 - RNA, 72 nt, Human
cugaggacagcauuccuaguuccaaaaagccccaagggggcacuguuuagacacuagggaugcaguggucag

SEQ ID NO: 4104359 - RNA, 62 nt, Human
cugaggacuacuacauuggacagcaugagucuaaggcuuugcuacucaaaguguggucccag

SEQ ID NO: 4104360 - RNA, 64 nt, Human
cugaggagaaaugggaugguuccugugagcagaaagacaaagaacugucucuguucuccauuag

SEQ ID NO: 4104361 - RNA, 63 nt, Human
cugaggaguuuggguuguucaaagcuauguagcuuccuguuugcaaagccugaaacucuucag

SEQ ID NO: 4104362 - RNA, 105 nt, Human
cugaggauuaagugaguaauaauagcuguaaagugcuuagaacauggugugaugugccauaaucauuguuaacauuacaguuauuauuauucuuuguauucucag

SEQ ID NO: 4104363 - RNA, 55 nt, Human
cugaggcacagugaacuucuccugccagguagggagaggcccacaggagcuucag

SEQ ID NO: 4104364 - RNA, 60 nt, Human
cugaggcagagaaugaguuuguggugcucaagaugaguggacagaguuccuccugcccag

SEQ ID NO: 4104365 - RNA, 107 nt, Human
cugaggcaggagaauugcuuuuaaaaacccagggggcagagguugcagugagccaaaaucaugccacugcacuucagccugggcgacagagcaagacuccaucucgg

SEQ ID NO: 4104366 - RNA, 99 nt, Human
cugaggcaggggaaucgcuugaacccaggaggcggagguuguggcgagaucaugccauugcacuccagccuggguaacaagagcgaaacuccgucucag

SEQ ID NO: 4104367 - RNA, 124 nt, Human
cugaggccaccugcugucauccuaggcuguucccccucccacccucucccgauauuugguggucugaggauagcuagagguagauggguuagaggcagugugagaaugcaguuggaggccucag

SEQ ID NO: 4104368 - RNA, 85 nt, Human
cuuacgaaucuugagccugguauaacguaaacacucagaaaacacuuuauuguuuacaguauaguaggacucaucccgucguggg

SEQ ID NO: 4104369 - RNA, 92 nt, Human
cuuacuacuguguaagugagagcaaggguugguuuucugacaaagacaucuauaugcagagagccagcucucucggcaagacauuuccuaag

SEQ ID NO: 4104370 - RNA, 98 nt, Human
cuuacugcuugcugauauuuauguaaaaagcccagccgcugagagggccacgauauugccaauuucagcucuacuuuuugcauuuaguaagauaaaag

SEQ ID NO: 4104371 - RNA, 83 nt, Human
cuuacugugguucucacugugccuuuucccaaacauuguagcuaauguugggaaguguguguacagugugaagacagagucag

SEQ ID NO: 4104372 - RNA, 71 nt, Human
cuuacuuugucucugugguacguuucaucccgaggcucuugggacagaggguugacagaguauggagggag

SEQ ID NO: 4104373 - RNA, 84 nt, Human
cuuagagaauuugacugggaccugucacucaggagucauuuuugauucccugugugugcuacaggcuuccaucuuaccucuaag

SEQ ID NO: 4104374 - RNA, 70 nt, Human
cuuagagccuacccagcaccuaggcugccuuuacuaucucugcaggucagacacagugcugggugcugag

SEQ ID NO: 4104375 - RNA, 91 nt, Human
cuuagaggacaggggcuggugucuuccuaguuuuguauucauucccaccuacaucauggaggacaguggacacuagucccuguccucaagg

SEQ ID NO: 4104376 - RNA, 68 nt, Human
cuuagcaggguuacgaugauuucauguguuuuucagaagacacugguucucuuaacccuauuguggag

SEQ ID NO: 4104377 - RNA, 105 nt, Human
cuuagcccugcaucuccaggcaggcaccgccuucccaggguccuguggcucugggcugugggccucaggaccugaagacaggcaggugcaggaugcaggacuggg

SEQ ID NO: 4104378 - RNA, 101 nt, Human
cuuagcucugcuuccuuauugacucuaaguuccucaaaugcagagauucuuuccaucuuugucauauugaaggugcuuaauaaauuugguguauaaauaag

SEQ ID NO: 4104379 - RNA, 84 nt, Human
cuuaggaaaugguauauaacuaccaagggagagauuuaauguaaaauuaauauacuucccauaguuugaauaaaauuucuagag

SEQ ID NO: 4104380 - RNA, 71 nt, Human
cuuaggaaugcguuuccugggucccaguuauaauuuaaaacccauggaucacuaggcagcgagugacugag

SEQ ID NO: 4104381 - RNA, 58 nt, Human
cuuaggcaaccaggucaaugcuggcacauuugccaagauggugacuacugguuccagg

SEQ ID NO: 4104382 - RNA, 62 nt, Human
cuuaggcagacugcugaugcaggaguacaaaacugcagagauaucaagcagucugauuuagg

SEQ ID NO: 4104383 - RNA, 58 nt, Human
cuuaggcaguuuaggaaagagacauugaucacaauuuuuccuuccuuucuguacugag

SEQ ID NO: 4104384 - RNA, 61 nt, Human
cuuaggccacucuccuuugucucaugugaugacaauucugagcugagugaguuggccuggg

SEQ ID NO: 4104385 - RNA, 79 nt, Human
cuuaggccagugcuucucuucacacccaacuccuccaguccugggucaagugguggagagaugaggacacaggaagaag

SEQ ID NO: 4104386 - RNA, 62 nt, Human
cuuagggacagggacuacagaaggagaggguaguccucucucuuguagucccugccccuaag

SEQ ID NO: 4104387 - RNA, 105 nt, Human
cuuaggggaaaggacuagaaauacaguagacaaucucaugaaaacgcugucugccucacuaagcuuuucaggacagacugcuacuguaucagucaugcucuucag

SEQ ID NO: 4104388 - RNA, 79 nt, Human
cuuagguaucugucuccaguguccaguggucuuucuacuccuccaugaggacuuuaucuggggugaaggauuaccugag

SEQ ID NO: 4104389 - RNA, 66 nt, Human
cuuaggugcccaccugcuuacucuguucccaaccccaacuccugaaguagcagguggcgucugcag

SEQ ID NO: 4104390 - RNA, 67 nt, Human
cuuagguuuaagguugaagaacagaauaauauucacauuuaaucucaaaucaaacuuugagcuuaag

SEQ ID NO: 4104391 - RNA, 91 nt, Human
cuuaguacuuucuuuacgguguuauuguaaagauucuaagaaauacaugaaaaguuuuuaguguagucaccguggguccauaaguacuaag

SEQ ID NO: 4104392 - RNA, 90 nt, Human
cuuaguaggacuguggugggaccuggcaauuugcaucucucacaagcucucaagugauggugaugcugcuggucuggaaccuccuuugag

SEQ ID NO: 4104393 - RNA, 129 nt, Human
cuuaguauauuagauuugagacuuaaaguuugaggauugaaauucaucuaguuagaauucuugacagguggcuuccauuuucuaaaaguaucuaaacauuggguuuuaagcucuuuuuucauacuucug

SEQ ID NO: 4104394 - RNA, 59 nt, Human
cuuagucucugcuggcaggggagcaggccagcuuugguuucucugcagcagaggcuggg

SEQ ID NO: 4104395 - RNA, 64 nt, Human
cuuaguguccucuauuaugacuuuauauagcuugaguauuuaaagcucauuggaggacuuuaag

SEQ ID NO: 4104396 - RNA, 62 nt, Human
cuuaguuucuguugcguucuguagcuuuuuugugaauaaagucugaaugaagcaaagcuaag

SEQ ID NO: 4104397 - RNA, 71 nt, Human
cuuauaagcuguaugaccuaaaucuugugugguuaccacgaaaacacgcagaucauauauccagcuguaag

SEQ ID NO: 4104398 - RNA, 130 nt, Human
cuuauaauuucccaauuuauuuagucaaggacacagaaaaauggagucaagaggaacacagcagaaacagauacagcauguuucagaguugucuucuugaccucugaggucuuuaacugggaacaugaag

SEQ ID NO: 4104399 - RNA, 69 nt, Human
cuuauauugucaggaagugaucaaguaugcaauuauuuuguguaauccuugcauuccuguuaguauaag

SEQ ID NO: 4104400 - RNA, 77 nt, Human
cuuauccuguaaacuuagugauguuccuccaucugcaagcacgcuugcaggaaaaccaacacgccuugcaggaaaag

SEQ ID NO: 4104401 - RNA, 65 nt, Human
cuuaucuccacauucuauuggcuauaacuagauacaagcuaagugcaagggaagguggaaauaag

SEQ ID NO: 4104402 - RNA, 67 nt, Human
cuuaucuuccucuucuggggugcaugcagguuggccaccuuagccaugcccuagaagaggaaggaag

SEQ ID NO: 4104403 - RNA, 55 nt, Human
cuuaugagggaggcuuuaagcagaucggugguuugcuuagagaccuccucaucag

SEQ ID NO: 4104404 - RNA, 92 nt, Human
cuuaugcgccuccugcccacaggaagacaccagcggugacuacaagaacgcccugcugagccuggugggcagcgaccccugaggcacagaag

SEQ ID NO: 4104405 - RNA, 129 nt, Human
cuuauguagcacuuagaacauaauuauuuguuuauaugugugccacucuuacugagaagugagcuccucugaguagcggcuauguguaacuuauccauuauuucuuauuacaguguuuagucaaaaaag

SEQ ID NO: 4104406 - RNA, 55 nt, Human
cuuaugucucuggaacugcugcuguugcaaacagcaguaacuucagaaacaucag

SEQ ID NO: 4104407 - RNA, 85 nt, Human
cuuauguguacauacaugguggaaugguuaagguaagcuaauuagcauacacaguagcucauuucucauuuuguuguguggugag

SEQ ID NO: 4104408 - RNA, 67 nt, Human
cuuauguguuaucagauaucucugcuguuuuuuuaaauguagaaugagagaucugaagaaccauuag

SEQ ID NO: 4104409 - RNA, 97 nt, Human
cuuauuaggccuucagucuaguauccuuccugacuuucagaaguggaagauacuuucaaagucaagaaggauacuagacuuaaguagucuagucuag

SEQ ID NO: 4104410 - RNA, 64 nt, Human
cuuauugaagaucuauuaugagucagguccaugcaugggcuuuacauuaauagacuuauuugag

SEQ ID NO: 4104411 - RNA, 58 nt, Human
cuuauuuccugacauggaaagauauuuccagcauuuuucuauguucuaagggaaaagg

SEQ ID NO: 4104412 - RNA, 92 nt, Human
cuucaaauauucuaaacacugugcuccccaggcuguaguucaaccugucaaagccacagcacuuauucagcacaguguagaagcguuucaag

SEQ ID NO: 4104413 - RNA, 64 nt, Human
cuucaaaucccccugaguuugauacuguguuacauaauggucucagaacauuaaggauuugaag

SEQ ID NO: 4104414 - RNA, 60 nt, Human
cuucaaauuuuucuauggagaaggcaguugugauugacuguuuacaaggagaauuugagg

SEQ ID NO: 4104415 - RNA, 80 nt, Human
cuucaacuagagagagcugugguggcucuaucccaacugcccuguucuuuccagagccugggcagcuccucuggcugggg

SEQ ID NO: 4104416 - RNA, 67 nt, Human
cuucaacucauguccaacuuucuuuaucuuugacaaagguaaagaaggagugagacuuggguugcag

SEQ ID NO: 4104417 - RNA, 62 nt, Human
cuucaaggaagccacguugggaggcuauaccauuaucccaaugaugcugccauugcucaaag

SEQ ID NO: 4104418 - RNA, 80 nt, Human
cuucacaaccuacucugagcgccuccgcaucugccagauguuuguugggaugcggagccccaagcuugaagagugugagg

SEQ ID NO: 4104419 - RNA, 61 nt, Human
cuucacaaucaccuuuucggaaacagcaaugacuucauccuacaagaggugguuggggaag

SEQ ID NO: 4104420 - RNA, 62 nt, Human
cuucacacccacuaggauggcuauaauaaaaaagucaaacaaauguuggugcggauguggag

SEQ ID NO: 4104421 - RNA, 59 nt, Human
cuucacacuguuuuucauagugguuguacuaguuuacauucccaccagcaguguagaag

SEQ ID NO: 4104422 - RNA, 55 nt, Human
cuucacagucuuuauuuccuccccucuaaaaugagagagaagaaguuaugugaag

SEQ ID NO: 4104423 - RNA, 75 nt, Human
cuucacauugaauggguuuuaauauuuuuaacacuucuacaagugucauggucuguaaggagcccuggagugaag

SEQ ID NO: 4104424 - RNA, 115 nt, Human
cuucacauuguuuaugaacuuaguaugccagcuuuuuaagugugguggggucugguauuccacacuuauaugucucugaaucccacccuugugcugaugcuaagaugaacugaag

SEQ ID NO: 4104425 - RNA, 130 nt, Human
cuucaccucagagagaguuuaaagucuuauuucagacuuagugaguucuaaguuuuguacaagacugagguacaucaacuguguccgagguaaaauuuucuuuuaacuuuccugaguauuuguguggaag

SEQ ID NO: 4104426 - RNA, 55 nt, Human
cuucaccucuaggcuauuaugagucuuugaagcuuugauauuucuggaaguggag

SEQ ID NO: 4104427 - RNA, 129 nt, Human
cuucaccuucaauaccugcacgcaucuccaucagucacugauggucuuucugguuuccucuuuuaucuaccacaugaaaagacuaucugauuauaauuugaugccugauaauuucuaaguuagguggag

SEQ ID NO: 4104428 - RNA, 59 nt, Human
cuucacggugccuacuugugucuaugcuugucucugcuuaaaacacaagcaccuugagg

SEQ ID NO: 4104429 - RNA, 68 nt, Human
cuucacuacugaaaagcuacgggaagacacaguuguucuaaacugaaguauuuuaaauguaguagaag

SEQ ID NO: 4104430 - RNA, 71 nt, Human
cuucacuuugaaauguguaagagagaguuucugcaaguguuuugugcagucuucuuacaaauuucaggaag

SEQ ID NO: 4104431 - RNA, 129 nt, Human
cuucacuuugauuuuuauuugucuguuuuuccacuuucauucuucagagcugcgcuuuuggccugaauuuucagugacaaauagaaaagcugaauggauggagacaaugacucuuuaauucaauguaag

SEQ ID NO: 4104432 - RNA, 64 nt, Human
cuucagaagucacacuguuaucugcuacuuggugcuguaguaagaaacugaauuauuucugagg

SEQ ID NO: 4104433 - RNA, 69 nt, Human
cuucagacaauuagcacaucacggggguguauauuuuacuccaaauaccagaugggcuaaugugagaag

SEQ ID NO: 4104434 - RNA, 97 nt, Human
cuucagaccuggccuuggggcuugggagggcucauggcucacucgugguccaagaccgccaugggcgcacaggccuggagcgcaguaggcuaugaag

SEQ ID NO: 4104435 - RNA, 59 nt, Human
cuuccugaagucaccuaguuuauuaauuaaugucagagcuaggaaucggacccaggaag

SEQ ID NO: 4104436 - RNA, 62 nt, Human
cuuccugcccacuuccugcuggaggauuccaacuggaagcaggccagaguuggggagaggag

SEQ ID NO: 4104437 - RNA, 88 nt, Human
cuuccugggccuggcauggccuguaagacggagaggucacuccagguccucucuccucucccuggcaggacccugugggcacaggaag

SEQ ID NO: 4104438 - RNA, 56 nt, Human
cuuccuuaacaagcaucauguagcugcauaaacuacagcaaugggcagugaggaag

SEQ ID NO: 4104439 - RNA, 63 nt, Human
cuuccuuaacugugugauguuaagggggaaaaaaaucuauaaaaugcacagcaguugaaagag

SEQ ID NO: 4104440 - RNA, 59 nt, Human
cuuccuuggcuucuggggugugcacacaagcacuggaccaaggaugaggcucaaggagg

SEQ ID NO: 4104441 - RNA, 77 nt, Human
cuuccuuucugcucugccucuggccucaggcccaggccccacuugggccucacucuagaaggcacaggaggaugaag

SEQ ID NO: 4104442 - RNA, 66 nt, Human
cuuccuuugaaggggaccugggcagcacaucuccacagaaacucuguaggguccuguucuuggaag

SEQ ID NO: 4104443 - RNA, 98 nt, Human
cuuccuuugucauguagacuaacagccuaaaauaaucaaauggaugcauuuaacacaucuauuuuaaauggcaguaaacguggauucagaguaaaaag

SEQ ID NO: 4104444 - RNA, 85 nt, Human
cuuccuuuuacaaccucacaaugggcaaugugaagacagcuguuuuuaaacaugaaaguuauucugaguuggcacuuuaggggag

SEQ ID NO: 4104445 - RNA, 64 nt, Human
cuucgaaucaaucuauaaauaucaguuuccuugcgcuauaggcaaagugauaauagauuuggag

SEQ ID NO: 4104446 - RNA, 72 nt, Human
cuucgaccuugcaacucauggucacauagguguuggaaaagaauguguuuaugaguuacguagggguugcag

SEQ ID NO: 4104447 - RNA, 113 nt, Human
cuucgaguuauuucauucuccuucucuuccccuuaguuuccuuuaagagugauaaaaauggaaaagggggcugagguggaggaaggagaccuuuuguccugaaaugaaugagg

SEQ ID NO: 4104448 - RNA, 59 nt, Human
cuucgauuuaauucuuaaccuuccuucauaggaacaauaggugaagauuuagaucaagg

SEQ ID NO: 4104449 - RNA, 72 nt, Human
cuucgcuuguuuauagaucaauauuuagaaacuuucucaguuucagagaaaaagaaugaucucaagcugaag

SEQ ID NO: 4104450 - RNA, 77 nt, Human
cuucuaaaugucaugcuuaccugugucauuaaagaauggugacacaaaggaaagcauaauccacucugcauaggaag

SEQ ID NO: 4104451 - RNA, 115 nt, Human
cuucuacuagaugggucagauccguucucugacuugaugcaauggccacugucccuucagucuggccccucagcaucugagucagugggaaugugaugggccccauauguagaag

SEQ ID NO: 4104452 - RNA, 108 nt, Human
cuucuagaugaaacugaguugugucucuccuggaagcacguguuugugguugagguguaauagguaggugguuuuaggcagagacaucuuuaguauuguauauaggag

SEQ ID NO: 4104453 - RNA, 55 nt, Human
cuucuaggggcucugggaggaaaucugugcaaggcucucuuccagcuucuggagg

SEQ ID NO: 4104454 - RNA, 81 nt, Human
cuucuagucacuguaauaaucugcuuauuuucgucugcuagagcaaugacaucacuuagcggaaugugcugcagacagaag

SEQ ID NO: 4104455 - RNA, 69 nt, Human
cuucuauauucuggauugagugacuggguuagugaugaugccauuuacugagauuagaagcacuggaag

SEQ ID NO: 4104456 - RNA, 56 nt, Human
cuucuauucuucugucaaauucagguauguccacagacugaacagaugaguugaag

SEQ ID NO: 4104457 - RNA, 84 nt, Human
cuucuauuuaagagaacguggaauguggcuccuuggucccauucagccuguaaggggauacuuccacuuucuuugggaaaggag

SEQ ID NO: 4104458 - RNA, 70 nt, Human
cuucuauuucagggagaauaaauuugcugcaaucuaugggcagcuaguuaauugaaaccugaggaagggg

SEQ ID NO: 4104459 - RNA, 74 nt, Human
cuucucacuggaaacccuacaagggugggaacgugccuuauuugccuguauccucagggucuagcagagagaag

SEQ ID NO: 4104460 - RNA, 60 nt, Human
cuucucaucuauucacauuaacugucugagaguugagcacgggaagugggagaugggagg

SEQ ID NO: 4104461 - RNA, 60 nt, Human
cuucucccaacauguggaggucagaugccuugugcugcccucaccucaugucgggaagag

SEQ ID NO: 4104462 - RNA, 82 nt, Human
cuucuccugacaccagcucuaauaccagugucuucccuccagagccugauuauagacacaguuugggauggguugggggaag

SEQ ID NO: 4104463 - RNA, 69 nt, Human
cuucuccuuuucugugucucggccucucuccagagggauaaggcugcuggggacgugggagaggagaag

SEQ ID NO: 4104464 - RNA, 95 nt, Human
cuucucuagaccacauucaugcacauaaggcauugaucuguaugcauuaagggaaaccauugagguguacaucagucaugguuuggucagagaag

SEQ ID NO: 4104465 - RNA, 68 nt, Human
cuucucucuaggcaguuuccucaguuugguguauuaaauugccugucaggaagcugcccagauaguag

SEQ ID NO: 4104466 - RNA, 69 nt, Human
cuucucugaacagcauggaaucauuuuuuaaacuuguuuacaacaaugaguuugauguaguuugagaag

SEQ ID NO: 4104467 - RNA, 77 nt, Human
cuucugaacaaagucugcacucagguggaggucaaguccgaaauggucuucacaggagguguagguccuucaaggag

SEQ ID NO: 4104468 - RNA, 68 nt, Human
cuucugacaacauaggagcugaagggaccuuggauguuggguaagcaguucccacugucugucacaag

SEQ ID NO: 4104469 - RNA, 116 nt, Human
cuucugcaggugguuggauuacauggucucaaagcugcugugaauuuacugagagaguuaaauuaucaaauuucaguuaccuuuacguucauguagaaucacuaucaucuuagaag

SEQ ID NO: 4104470 - RNA, 67 nt, Human
cuucugcauggugaggugggccacagugagaaaagugacccuuauggcucucucagugcugcagagg

SEQ ID NO: 4104471 - RNA, 57 nt, Human
cuucugccaucaagaugcucuggcuaucccuuuggcuuaaagaggaugaggcauaag

SEQ ID NO: 4104472 - RNA, 122 nt, Human
cuucugcuugccccucugucacugcaagccaugcaugcauguguggaguugcugggaggaccacaccuggcgccugcagagcagcaacugcgugcgcaaaguggccgagaggcugguaaggg

SEQ ID NO: 4104473 - RNA, 116 nt, Human
cuucuggaaauggaugugauguguauuucuugagacucgucuuccacaggcuuugaacuuugcagcuggugcagacaggggcuuaggaaaggacaagucugugucccugucagagg

SEQ ID NO: 4104474 - RNA, 65 nt, Human
cuucugggacuuguagucucggcgcuggucggggcccgcagccuccgcacugcgaguccuaggag

SEQ ID NO: 4104475 - RNA, 64 nt, Human
cuucuguacaguaauaaaaugagcuacaugagacagugaugugguuuuucaguugcuggagaag

SEQ ID NO: 4104476 - RNA, 56 nt, Human
cuucuguacauacgcgaauguuugggagaggguccacauaggcgaauguucgggag

SEQ ID NO: 4104477 - RNA, 58 nt, Human
cuucugugaggacuucucaaggacaucgucgcuggagaggucugaguccucggagaag

SEQ ID NO: 4104478 - RNA, 57 nt, Human
cuucugugcuaaaugcaaaaccuuuguaauuccggaugugagucuuuugcacaggag

SEQ ID NO: 4104479 - RNA, 55 nt, Human
cuucuguugcuugcaucucccacuaagcuauauagggaggucaaaugaugagaag

SEQ ID NO: 4104480 - RNA, 68 nt, Human
cuucuuaauucaacagucaguuaucucagaggguuucucucuagugucucuuccuguuugaaaggaag

SEQ ID NO: 4104481 - RNA, 58 nt, Human
cuucuucauguauugauagucuucuagcacaggaagauugucugaaugagugaagggg

SEQ ID NO: 4104482 - RNA, 62 nt, Human
cuucuucuacccuugccuguggcugcgguccugcugaaucuguaggugagggcagauagagg

SEQ ID NO: 4104483 - RNA, 70 nt, Human
cuucuuguuuaacuagagcaguguuggaaaaauaauuuaacagaaauuuuaguuagggggcuacgggagg

SEQ ID NO: 4104484 - RNA, 62 nt, Human
cuucuuucaauuucccaagaccauagauggaaagaccuuucuuuccuggggaaugauagaag

SEQ ID NO: 4104485 - RNA, 72 nt, Human
cuucuuuccacccaguugacuacaaaggggccagcucuucagccccuuguuggccaggccugggggaggaag

SEQ ID NO: 4104486 - RNA, 60 nt, Human
cuucuuucugccuauuuaugauccauucagcaucugacaggugucuaaggcagacagcag

SEQ ID NO: 4104487 - RNA, 84 nt, Human
cuucuuucuuaggucagguucccuagcagcaaagccugagacagacuuucuugugcuagggaaaaccuguaaggaagaaagagg

SEQ ID NO: 4104488 - RNA, 79 nt, Human
cuucuuuguguauuuccugaagguaaggacaaaguccaucuuguucccaggacauaacacaaaaucugauaaauagaag

SEQ ID NO: 4104489 - RNA, 65 nt, Human
cuugggcaggguauuguagaagacauuauacuacauuauauuauacaauagucccuguccgcaag

SEQ ID NO: 4104490 - RNA, 84 nt, Human
cuugggcauaaacuuucucuucuuguaaggacuggugauagcuuauuagggcuggaugcaaggaaagagacagaaaggcuagag

SEQ ID NO: 4104491 - RNA, 56 nt, Human
cuugggguaauuucaugccgaugaucacaggaucaugacaacuauauuauuccaag

SEQ ID NO: 4104492 - RNA, 55 nt, Human
cuuggggucuuccuccuccugagaucuccuuaggagggcuucaucagacccccag

SEQ ID NO: 4104493 - RNA, 69 nt, Human
cuuggguuuaugagggucauuccgugggccaguguguaacaguaggucuggaggcccgucagcccuaag

SEQ ID NO: 4104494 - RNA, 98 nt, Human
cuuggucaugauguucugcccuggaaaacguaucuuaucugagcagaagcuacugaguuaguuaguccaggugcagggcaagcauggaaaaguccaag

SEQ ID NO: 4104495 - RNA, 80 nt, Human
cugaggccagcuguggggccgagccugacucucccugucucucauucaggccaggcaaggccccuggauuggcagcuugg

SEQ ID NO: 4104496 - RNA, 105 nt, Human
cugaggcccagagaucucauggucacacaggcacucggggaacagaucuggaacuuggguccaggaguccuggguggcccccgugggaacaguuucaggguccag

SEQ ID NO: 4104497 - RNA, 68 nt, Human
cugaggccuaagacaugaaugaguugagcaagucauuauugcuucauucuugaaauccuaggccucag

SEQ ID NO: 4104498 - RNA, 88 nt, Human
cugagggaaaugccuuucuuuuccauauguauauagcuguuaucuuaauaaagcuguuauugcauugggauauuugcauugauuucag

SEQ ID NO: 4104499 - RNA, 67 nt, Human
cugaggggauacgguacacauugugggguaaauaagacguugcaguauuaguucuggucucuucuag

SEQ ID NO: 4104500 - RNA, 71 nt, Human
cugaggggguccagucagccuuccagguacauccugaacacagaagcagcuaggaucuucauuuucaucag

SEQ ID NO: 4104501 - RNA, 73 nt, Human
cugagguaggagggugaucagcaugguucaaucagcguccuagauccagcucucaccaauccuuuucauucag

SEQ ID NO: 4104502 - RNA, 86 nt, Human
cugaggucauguugacaagacuuuguuugagacuccaggcagauguauuugcaaacucucagagaagugaugagcaauugccucag

SEQ ID NO: 4104503 - RNA, 56 nt, Human
cugagguccacugaggcaacagggcuacacaacuccugccugggaagggcuuguag

SEQ ID NO: 4104504 - RNA, 62 nt, Human
cugagguggcgccucucuuuaauaccacagagaagguauuaaaggagucagagccaccaaag

SEQ ID NO: 4104505 - RNA, 74 nt, Human
cugagguucaauggaguggaguuaauauuagcacugucuucaguguuucuuggucuuuucuauuaaauauacag

SEQ ID NO: 4104506 - RNA, 69 nt, Human
cugagguuuuucugaacuuaaacugaucucuuaaaccaguuaguugagcaaggccagagaagcccucag

SEQ ID NO: 4104507 - RNA, 61 nt, Human
cugaguaacgaccucaucucugacguaucuaucuaccgucaaaggaggcaucguucugcag

SEQ ID NO: 4104508 - RNA, 59 nt, Human
cugaguacugugccugccgaaggccuggccaggggaggggcugugcaggccgggcugag

SEQ ID NO: 4104509 - RNA, 85 nt, Human
cugaguaucuaaacuuguucaauguugggaauagagaacaucucuuucccuuagaacauuaacaaagcaucaguuuaugacucag

SEQ ID NO: 4104510 - RNA, 72 nt, Human
cugagucacuguggggugcgaggcagugagaacucuucgucgcuggcuggaaagcaucccaagguggcugag

SEQ ID NO: 4104511 - RNA, 71 nt, Human
cugagucuggacuauucuggucuuuuugaugccucacauggggucuuaagaaugaauaaccaagauauuag

SEQ ID NO: 4104512 - RNA, 95 nt, Human
cugagucugucucccccaagcccuuccugcguggucaggcacagaucacugggccagguggauaagguuucuggacaacugggggauggguacgg

SEQ ID NO: 4104513 - RNA, 85 nt, Human
cugaguguagcguucccagagggcugcccugaguucgugacagccaggaggucaggcagcuccucaucaacggaccaaaccucag

SEQ ID NO: 4104514 - RNA, 62 nt, Human
cugagugucccagggaagaaggcagcacgggcucccuguguccugccacccugggcuuucag

SEQ ID NO: 4104515 - RNA, 101 nt, Human
cugagugugccuaaaggcaguagagguaugggauguuagcacuggcuuucaugccaggguggcuucagacugugcuucuguugcugugggcccauacucgg

SEQ ID NO: 4104516 - RNA, 91 nt, Human
cugaguuauucuauaucauggagauuaacauuccaagcuucauuuccauuuguggaaugguaaacuuccaugacuguuaaagguauuucag

SEQ ID NO: 4104517 - RNA, 81 nt, Human
cugaguucagcuguucuuccaguugggggacagauguguguuucucucccucagucccuggacaggcacaacugcucucag

SEQ ID NO: 4104518 - RNA, 81 nt, Human
cugaguugagggguggucagccccggugagcccuggugucucaucaugguuuccccauggcugucuccaccccucuuccag

SEQ ID NO: 4104519 - RNA, 55 nt, Human
cugaguuuucugggauucauuuaugggguucacccagugcuuuuuaagagcucag

SEQ ID NO: 4104520 - RNA, 59 nt, Human
cugauaauuguaacuuccuaaagagugguugugagguucuuaggaagucacaauuucag

SEQ ID NO: 4104521 - RNA, 83 nt, Human
cugauagaaggaaaugcacugaauauuccaaauguuucugcugcauuuuggauuuuucuguuuucugcauuuacccucuucag

SEQ ID NO: 4104522 - RNA, 66 nt, Human
cugauaggcuccuguuuguuuguuccugacagccuguuuccuguuacauaagcagagccuagcaag

SEQ ID NO: 4104523 - RNA, 93 nt, Human
cugauauaguucugauuacaaugggaaaagguuuuagugauugcgccaaaguaaaauauggaaagcucuuuuugauugcagacuauucauuag

SEQ ID NO: 4104524 - RNA, 57 nt, Human
cugauauuauugaagcuggaguugcacauucauuuugcuuuggcuuuuuuguaucag

SEQ ID NO: 4104525 - RNA, 65 nt, Human
cugauauuccagauaccuguaaacacucaugaguuccaaugaggugaaaggugcuggagcaucag

SEQ ID NO: 4104526 - RNA, 69 nt, Human
cugauauuucucuaugggacauuuuuggcugcccucccaaaggugucauuguuuauggagaaugaucag

SEQ ID NO: 4104527 - RNA, 58 nt, Human
cugaucaaugguguaacuuguccugugucacauaggcaaguuuggacccuugagucag

SEQ ID NO: 4104528 - RNA, 89 nt, Human
cugaucagugaaauuguguccugauuugacacaauuaaaccucugcuggccagauucugucacaggaccccauaauucauuguacuuag

SEQ ID NO: 4104529 - RNA, 90 nt, Human
cugaucauauaaagacugaguugaacauaugcaaucucucauuuaugcugcugcaagagaucugugugcuuaauucauuuucuauuccag

SEQ ID NO: 4104530 - RNA, 59 nt, Human
cugauccaugaaggugccugcggucauaaccauuccugacccagagcuccuggaugcag

SEQ ID NO: 4104531 - RNA, 65 nt, Human
cugaucccuacaguucacaguaucauaaauucacuguugucgauuuauaguuugaaggggauuag

SEQ ID NO: 4104532 - RNA, 86 nt, Human
cugaucuugaacuccugaccucaagugauccacucaccuuggccucccaagguaguuggauauuugagaucggaguucugagauag

SEQ ID NO: 4104533 - RNA, 71 nt, Human
cugaugagggaacugguucauaccccagcacaaccuggaaauacacgugugagcagguuugaccuaagcag

SEQ ID NO: 4104534 - RNA, 65 nt, Human
cugaugagucuuuguauuuacuucccauauccuaaauuucaugggggguauuuauaagauuuuag

SEQ ID NO: 4104535 - RNA, 67 nt, Human
cugaugauaucccuggcccugccaucagagaucaauuguugaagcagagugaaggugaauucaucag

SEQ ID NO: 4104536 - RNA, 61 nt, Human
cugaugcccagaccccacucccgaccacacuuagaauuucuggagauggggcugacaucag

SEQ ID NO: 4104537 - RNA, 116 nt, Human
cugauggaagugacgcuccuuacguccagcuccagcuuuugcaccaaggcacuggggucuaucuugguccuggcaaagauguugguguugacgaacggagguauaauucuuauuag

SEQ ID NO: 4104538 - RNA, 55 nt, Human
cugauggauuugcugaaugaaccucugugcucugguuugauucacaaggcaucgg

SEQ ID NO: 4104539 - RNA, 79 nt, Human
cugauuauaacaacacauuaugaagucaaugaccugcuucuugaagagcaucuguugaauauaauauuguuauauuugg

SEQ ID NO: 4104540 - RNA, 76 nt, Human
cugauucaaacacuguacaaucugcagggagaacuuauuaaaagggcuuugcagauuuguuuagugcucuguucag

SEQ ID NO: 4104541 - RNA, 63 nt, Human
cugauuccauccuaguuucucucauccaauaaugaaggggagcaaaagcugggaaggagacag

SEQ ID NO: 4104542 - RNA, 59 nt, Human
cugauucugucucucgggccuuucucucuccuucugccgggaagccugggagggaacag

SEQ ID NO: 4104543 - RNA, 76 nt, Human
cugauugcagaaacagauuguaaccugauagcccggcccaccuggcccgucgugugccaguuucuuugcagaucag

SEQ ID NO: 4104544 - RNA, 72 nt, Human
cugauuucaaggacuacuuuucaaucuuguagaugaagauuuuagaauuggagucugugugcuugguuucag

SEQ ID NO: 4104545 - RNA, 115 nt, Human
cugauuugcauuuugccuguuuuucucuggccucagucggucucuccugaggauauucucuaauggggagaccaucugaaggugauccagagacccugagcggggcccagaucag

SEQ ID NO: 4104546 - RNA, 60 nt, Human
cugauuugcuaaaugucacaucuccugcacagagguagguggggugaauggcauagucgg

SEQ ID NO: 4104547 - RNA, 120 nt, Human
cugauuuguguggucauccuuagcaccuuucuggauuugugaucgugcgugaugaaucuuauaaaugguucaauauuuccaugauucaaaaugaaagugcuaaggcaaacgcaaaagcag

SEQ ID NO: 4104548 - RNA, 62 nt, Human
cugauuuuguuucccccuggagucaggcucuuucucagccguuccaagggcagcagaaucag

SEQ ID NO: 4104549 - RNA, 64 nt, Human
cugcaacucucuccagaggcugcaaugcacuggcugugcagaaagccuagggugagaggggcag

SEQ ID NO: 4104550 - RNA, 73 nt, Human
cugcaagccaggaagaaggucacaccagacaccaaccaugcuggcaucuggaccuuagacuuccaggcuccag

SEQ ID NO: 4104551 - RNA, 66 nt, Human
cugcaaggcuggcugcacaggggcucacuuuuaugaaagcuggauuccagugcagucaccuuucag

SEQ ID NO: 4104552 - RNA, 82 nt, Human
cugcaagguccuguguuauuuuuuaugcuuucaaaccuaaccauguuaggucagguuuuuaggagugaccucagacuuucag

SEQ ID NO: 4104553 - RNA, 66 nt, Human
cugcacagagcggcaguucuuaucuucagacuucagucaaguuucauuacugugguuuauguguag

SEQ ID NO: 4104554 - RNA, 118 nt, Human
cugcacccuaagcucauuauccacaaggcugugcaaaauaauaaaucacuguuguuaggacgcaaaguuugguagugguuuguuauguagucguggauaacugcagcagggaucucag

SEQ ID NO: 4104555 - RNA, 68 nt, Human
cugcacugccagauauaaaaacuguguuacaaaauaacaguaauuaaaacagcgugaaucuggcacag

SEQ ID NO: 4104556 - RNA, 89 nt, Human
cugcacuguuggggcaaagaugugcugucuugccacucaucugcuguguggucuugggcaagcgcugcagucucugguucuaucugcag

SEQ ID NO: 4104557 - RNA, 55 nt, Human
cugcagaaaagauagaggauugcacuacgugaguguaguguauuuuuuucuguag

SEQ ID NO: 4104558 - RNA, 57 nt, Human
cugcagagcagccagucccccaaucccacaugaucucaggguugcccugcccugcag

SEQ ID NO: 4104559 - RNA, 61 nt, Human
cugcagagccugcucacgucucuguuucuaaguucauaacaugcugcucugggcuuugcgg

SEQ ID NO: 4104560 - RNA, 68 nt, Human
cugcagagcuaggcugagugaaugaagggcuaggugaggucugugaacugcugggcuuggguuuguag

SEQ ID NO: 4104561 - RNA, 78 nt, Human
cugcagcauaucacugaugacuauauaugacuagugcugacaucagugagcguuuauuuagcaucuacuaugugucag

SEQ ID NO: 4104562 - RNA, 79 nt, Human
cugcagccaaccaagcuggcuccauccuaggcaaaugaguagaugacagccagccaggauggagaccaugaauaugcag

SEQ ID NO: 4104563 - RNA, 80 nt, Human
cugcagccuaggugcagcugggccacagggacccggugaggguggggacugugcggggccagccugcagcccaggugcag

SEQ ID NO: 4104564 - RNA, 80 nt, Human
cuggugguuugaaucuuugaucuuuauugcuaagugaguaugagcuuggcaaguuggagcaagugaguucagaguagugg

SEQ ID NO: 4104565 - RNA, 62 nt, Human
cugguguccuucaggaugaaggaggcagcagaaaugcucccugacucaguuccugagaccag

SEQ ID NO: 4104566 - RNA, 67 nt, Human
cuggugucuucagcagucaucuggggcaacaaucccaccugcccauugugguuguugaggauaucag

SEQ ID NO: 4104567 - RNA, 66 nt, Human
cuggugugcaggagguaacauagcaaaauaauucauuuuuccuucugaugccccuugcaguucuag

SEQ ID NO: 4104568 - RNA, 59 nt, Human
cuggugugggagauauuuggaucaagcacauccuuguguccucuaaucucaccacccag

SEQ ID NO: 4104569 - RNA, 64 nt, Human
cugguguguauucuaauguuagcucuuacuugcugauugucagagcuuagggaauucacaugag

SEQ ID NO: 4104570 - RNA, 67 nt, Human
cugguguugauguugcaccauaguuuuauagguuucacuaugaagcacaggcauacacaaccuacag

SEQ ID NO: 4104571 - RNA, 79 nt, Human
cugguguugugcgggccuggggguuucucucggcccagccugcguacaagaggaaguaaucaggaccugcccaaaccag

SEQ ID NO: 4104572 - RNA, 65 nt, Human
cugguguuuaguauguauuuaauggacugaagcuaucaauucauauggauaugcuaguauauuag

SEQ ID NO: 4104573 - RNA, 71 nt, Human
cugguuaaugcuuggcagcucaugucaguguuuucaacacugcucuaguggguagagcauugauauaccag

SEQ ID NO: 4104574 - RNA, 55 nt, Human
cugguucaauggggcugagcccaggugaggguucagggcaguucccauugaccag

SEQ ID NO: 4104575 - RNA, 63 nt, Human
cugguugauguccucagugccagggguuugcuuuuaaagcuccaaacucaagacauuaauaag

SEQ ID NO: 4104576 - RNA, 70 nt, Human
cugguuguuuuggugacuggaaaacauacucugaguaagcauuucauuucaaucaccauaaagcaacugg

SEQ ID NO: 4104577 - RNA, 80 nt, Human
cugguuuagcuuccaaggaguucugucaugugagugcagugacucaggaaaaauguagugauaggauuuuuugaugccag

SEQ ID NO: 4104578 - RNA, 88 nt, Human
cugguuuccauuagaaauaugccuauaggaaucaaagagagaaccguacaguuuucuagaugcuuauaggcauauuaguaaugaucag

SEQ ID NO: 4104579 - RNA, 81 nt, Human
cugguuucucaugagguauucuugugcuguuaaugguacacauuagauauauuauggcuuaagaaugcuuuuguggacuag

SEQ ID NO: 4104580 - RNA, 80 nt, Human
cugguuugagguuuggauuccaugcucuccgggguuccugccaguccugguugugugaggguccaucacuguagaaucag

SEQ ID NO: 4104581 - RNA, 80 nt, Human
cugguuugguguugaauuuugucauuguugaauauaaauagauauucacaaaaugauauagauacauacaccuaugcugg

SEQ ID NO: 4104582 - RNA, 71 nt, Human
cugguuuuaagccacugaguucuggagcuguuuguuaugcagcauuauccagcagagguugauaauaccag

SEQ ID NO: 4104583 - RNA, 64 nt, Human
cugguuuuccaauguuuugacuggagggcaaaauuuuacuacuacucaucuuuuuggagaccag

SEQ ID NO: 4104584 - RNA, 57 nt, Human
cugguuuugucagaagcuuuauuucauugaugguuuacugcaucuacuuagagccag

SEQ ID NO: 4104585 - RNA, 89 nt, Human
cuguaaagugugugagcucgggucccagcguccccugccaacacacacagaucccaggacaggugcaaauuugacuucacacaucacag

SEQ ID NO: 4104586 - RNA, 59 nt, Human
cuguaacucaaccugugcuuuuacauccuacucuagaaaugcagggucgcagguuacag

SEQ ID NO: 4104587 - RNA, 106 nt, Human
cuguaacuuuagacccagauucaggcagugucccaggaagccaccugugagugugugcagcuucuaggaucugccccaauuuuaucuacaaagggucuaaaugcag

SEQ ID NO: 4104588 - RNA, 69 nt, Human
cuguaaugcuucucuggggagcacaugcgauugcuuacuucuuugugcccauuacacagaggcauucgg

SEQ ID NO: 4104589 - RNA, 83 nt, Human
cuuuuguuagguauguuaagguauuguuuauauguaauaaaauucacauuuuauagggacaguucuuggaguuuugacaaaag

SEQ ID NO: 4104590 - RNA, 112 nt, Human
cuuuuuauuuuaguaaaguucuugaacaaagguauaaguuaauauacagauaaaaaauaauaggaugaugucuuuauagcuuuguguacagcaggaaauauuacuuaaaaag

SEQ ID NO: 4104591 - RNA, 60 nt, Human
cuuuuucuuccccaugggacuguaaauaaguaaccugaacacacaauagggaagagaagg

SEQ ID NO: 4104592 - RNA, 71 nt, Human
cuuuuugaaaggggagaugucaugggcccugagaugacugagaggugcaggacucccuuuuuaucaagaag

SEQ ID NO: 4104593 - RNA, 57 nt, Human
cuuuuugucucuguccugaugaucaaaguccccaaggaaccagucagagacagaaag

SEQ ID NO: 4104594 - RNA, 65 nt, Human
cuuuuuucccuuccucuggauuuucucuuuaaccacagauagaggaaguuaugaagggagaauag

SEQ ID NO: 4104595 - RNA, 67 nt, Human
cuuuuuugguauuucuuucuuugacagagucacuacaauuauaucugucacagaaugccugaagaag

SEQ ID NO: 4104596 - RNA, 59 nt, Human
cuuuuuugucugugcucugacugaguguaaucuaagucaucauguacagagagcaaaag

SEQ ID NO: 4104597 - RNA, 65 nt, Human
cuuuuuuucccacauucauauuugacugcgcauuaugugaaaaauugaauuugggaaacauugag

SEQ ID NO: 4104598 - RNA, 86 nt, Human
gaaaaaaagcagauucuggaacuccaucucccugagauugucacucauggggucugcaggaaguuucaggaaucugcauuuucuuc

SEQ ID NO: 4104599 - RNA, 130 nt, Human
gaaaaaaagggaaugcaggagugauguuguaugcuauuuuacauaggaaugguaagggaaggccacccuauguaaaguagcaucuacccccuccucccacugcuacacuacucugucuuugcuuuuguuc

SEQ ID NO: 4104600 - RNA, 87 nt, Human
gaaaaaauagugcguccucuucauggugaccaucucuggaaaucaguaaggaauaggaacuaggaacgggguuugcacucuguuuuc

SEQ ID NO: 4104601 - RNA, 127 nt, Human
gaaaaacauuuucauuaaacuucagaaaguggcuaguacagaauaugcgucaguaaaagacaaaacaaaacaacggaugauguuaccaguacuuagagcuauaguuugcuuuuaaaaaauauuuuuc

SEQ ID NO: 4104602 - RNA, 99 nt, Human
gaaaaacuuugggagaauuaacacaaguuaccaaaaaagauucagggacagucucugaagcaaugaucuuuugguggcucagauucuucaauuuuuuuc

SEQ ID NO: 4104603 - RNA, 79 nt, Human
gaaaaagugucauggaaaauugcaauggcauuguuuugauuuaaugucauuggaaaaugucuugacaaucaacuuuuuc

SEQ ID NO: 4104604 - RNA, 93 nt, Human
gaaaaauaguuuaauuucuguagcuguguucauuuugcauauguuaaacggauguaacaugcacccagggcauugcuucagagacuauuuuuu

SEQ ID NO: 4104605 - RNA, 101 nt, Human
gaaaaaucauggguuaauacaauaaacauuuaugucagcauaucugugggucugaaauucaggagcugcuuaaaugguugguuuuggcucagagauuuuuc

SEQ ID NO: 4104606 - RNA, 119 nt, Human
gaaaaaugcauacaaaaaagcaaaguaagaacauuaagguaguaguagcaaaguauuaacaguagucuuauggugugauuacauugguaauguuuauuuguauacuuuauguauuuuuu

SEQ ID NO: 4104607 - RNA, 60 nt, Human
gaaaaauuaguguuuucuuacuggugucacugaggccagcugagaaaucauugauaauuc

SEQ ID NO: 4104608 - RNA, 68 nt, Human
gaaaaauuauccaggaggaacucauuuugcauuaauguugauauaaaguguaauucuccaggauuuuc

SEQ ID NO: 4104609 - RNA, 84 nt, Human
gaaaaauuugguuugcacuguguuuuuuaaaaacuucaaagguaauugccaguggaguuaaaaacaggaugcacaccuguuuuc

SEQ ID NO: 4104610 - RNA, 75 nt, Human
gaaaacaaacucaaauggaagaguguccuuguauauuaaugaacaaaauuuacuucugaaugugaguuuguuuuu

SEQ ID NO: 4104611 - RNA, 72 nt, Human
gaaaacaagagcuguauaauaaugaaaauagccuaaacuguuuucauuguuacuaugagcuaugugcuuuuc

SEQ ID NO: 4104612 - RNA, 120 nt, Human
gaaaacagugcuuuagaagaauuaaucuaguaaagacaaaugggauuauagggaacagaaacuguuaaagaaaaauauauccauuugucugcuaauuuuuuuuuaucagugccugauuuc

SEQ ID NO: 4104613 - RNA, 88 nt, Human
gaaaacccagcccucagccaagcucugugcuuaauuauuucugucagucaccugucagcagaaguggugcacucaccuuuggcuuuuc

SEQ ID NO: 4104614 - RNA, 88 nt, Human
gaaaaccuacaggaaucuggcugagggagacagugcggacuaauauuucauuucuccccacuccucccucugaggaauccaggacuuc

SEQ ID NO: 4104615 - RNA, 73 nt, Human
gaaaagaagggacuuugucagcuuuccaggaaagaagcugggacgccuuugacaaaguuuccuuagcuuuuuc

SEQ ID NO: 4104616 - RNA, 60 nt, Human
gaaaagacucuggagucagcuaggauucaggucaggacucagccccuccggaguuaccuc

SEQ ID NO: 4104617 - RNA, 87 nt, Human
gaaaagagucaguggaccacggugggcauugggggguggaaaaugccaacuuucuggguuaccauuugugguuuauuugcucuuuuu

SEQ ID NO: 4104618 - RNA, 79 nt, Human
gaaaagauaauuauuuauuuccaagacugaguuucagaaacucacuggaauuucacuggaaaagauaauuauuuguuuc

SEQ ID NO: 4104619 - RNA, 69 nt, Human
gaaaagauccagcuauuggcaagaagugguguuuggugagggcaucauagaaucaaaggcugguauuuc

SEQ ID NO: 4104620 - RNA, 71 nt, Human
gaaaagcaauggaaucaaggauugcaugugaaagcacugaguguggggccuggguuucagagcugcuuuuc

SEQ ID NO: 4104621 - RNA, 63 nt, Human
gaaaagcaggcucagagcagauuagcaaagacauuguuuguuaagcuguggagucugaacuuc

SEQ ID NO: 4104622 - RNA, 67 nt, Human
gaaaagcccugguuuuggcuucucuguuuuauaaagugaaaaagguugauccagauuaggguuuuuc

SEQ ID NO: 4104623 - RNA, 79 nt, Human
gaaaagcuucugaauugcugacuuuaauauuauauaagaaaaauuaugaaaauacaggacaguaauuuuggagcuuuuu

SEQ ID NO: 4104624 - RNA, 66 nt, Human
gaaaaggaaggguucuuucuguuuauaggcagccuauccucauauccaaaagacucucuccuaguc

SEQ ID NO: 4104625 - RNA, 62 nt, Human
gaaaaggagggaagugaguucucagcugccacaggcaggaggcugcucagcuuucccuuuuc

SEQ ID NO: 4104626 - RNA, 60 nt, Human
gaaaaggaggugauacauuccccauggucugacccacagacuuuaugaccuacccuuuuu

SEQ ID NO: 4104627 - RNA, 77 nt, Human
gaaaaguaaaugacauaagugcagaugcuacggcacaacuuagcauguaagcguccuguaaauguuaguuucuuuuc

SEQ ID NO: 4104628 - RNA, 70 nt, Human
gaaaagucauaucccuugacugccuaugcccuccccauaauaacagaauguagggagauaugcucuuuuc

SEQ ID NO: 4104629 - RNA, 77 nt, Human
gaaaagugauuagcucaaagccuucauuuuuuucucccaaccacauauaugacagaagugucugagcuguauuuuuc

SEQ ID NO: 4104630 - RNA, 77 nt, Human
gaaaauaaacaagggcuaacucuccacccagacaaugaguggcuuacuuaauggagauuuagcacuuacguauuuuc

SEQ ID NO: 4104631 - RNA, 75 nt, Human
gaaaauagaaaggaucuuggcugccucauaaaaagaaagucccuauaugcacaccuggguccuugucuuauuuuu

SEQ ID NO: 4104632 - RNA, 78 nt, Human
gaaaauagauacuacuuagauguagcaaauugguuccuuuuccuuugccucuuguauaccuuuauguaguuuauuuuc

SEQ ID NO: 4104633 - RNA, 62 nt, Human
gaaaauagcacuuauagauuuggucucuaguaccaagagagcugaauucaagugcuggcuuc

SEQ ID NO: 4104634 - RNA, 111 nt, Human
gaaaauauaggaugcccaguucacuuugaaucucagauaaccaaaugggacaggcuuauacuauaauaugaaacuuuggauaucugagauucaaacuuccuuucgauuuuc

SEQ ID NO: 4104635 - RNA, 87 nt, Human
gaaaauauucauccaucauuaguggcauuuuccuaaaauugaagcuuggauuccaauuuguuugaugauggaaagggugaauuuuuc

SEQ ID NO: 4104636 - RNA, 58 nt, Human
gaaaaucccagcagcuauguaugggaugguuacaccagacacugugcuaaggauuuuc

SEQ ID NO: 4104637 - RNA, 106 nt, Human
cuggaucaugaaaacaaagggugaguauaguucagaugcauuugaaggcauaggcagaaaaugcaucaugcuuuauugcuucugggcacgcuucccuucuuuccag

SEQ ID NO: 4104638 - RNA, 90 nt, Human
cuggaugagaagguguucaguccugcuggcuucaggagauucauuccugaauaccuugcuguagccacgcagugauggagcuccugacag

SEQ ID NO: 4104639 - RNA, 59 nt, Human
cuggaugcaucuuaucaaaaauuauaucuguauacaguguauacauaagguguaaccag

SEQ ID NO: 4104640 - RNA, 56 nt, Human
cuggaugcuuccucucugcuagccacuguucuuggcugcacauggcagccaucuag

SEQ ID NO: 4104641 - RNA, 109 nt, Human
cuggauuuggaugagcagagaggagucccuaucacaguucacuaaauuaaauaaaauuuugguugacauacagguauuuuuuucugucuuaacauuuaaaaaaauccag

SEQ ID NO: 4104642 - RNA, 56 nt, Human
cuggcaagcgugccacuccuaggccagcuccgggcuaggcuggcacuccuggccag

SEQ ID NO: 4104643 - RNA, 64 nt, Human
cuggcaagguuucgaguucccaaccacagcacccucagugaugguuuucagaagaccuuguuag

SEQ ID NO: 4104644 - RNA, 59 nt, Human
cuggcaaucuggcccuuugucagaguauugaaggagacagcaagaggaccagaugugag

SEQ ID NO: 4104645 - RNA, 73 nt, Human
cuggcaccauggcuggguucucgcucugcagggauaaucugccagcugguaggcaccuagcccugugggccag

SEQ ID NO: 4104646 - RNA, 86 nt, Human
cuggcacucaggcaguaagacuucaaacgacauuuauuuuaaacuuuauuugugacugucuuuaguuuuacugucuggagaaucag

SEQ ID NO: 4104647 - RNA, 71 nt, Human
cuggcacucauaggccaguucaccaggucugagcagagacagcaccaacugagcuccuugaggcaugccag

SEQ ID NO: 4104648 - RNA, 67 nt, Human
cuggcacuuccuggacacccagagcacaggcuaagccagcucugaaggugcuagagaaagcuguugg

SEQ ID NO: 4104649 - RNA, 56 nt, Human
cuggcagcagcuucuggaucgaucgacgcuccgacaggccgggaagcaguugcuag

SEQ ID NO: 4104650 - RNA, 60 nt, Human
cuggcagcaguuaugaaacaauguuacuuguucuuaguaaaguucaggcacuuuugccag

SEQ ID NO: 4104651 - RNA, 69 nt, Human
cuugguugaacagauaauuucuaaguuacuuuuccacuuaagguaauaugauuuuauuuggauaccagg

SEQ ID NO: 4104652 - RNA, 65 nt, Human
cuugguuuguuauuaagauccaugaaaaaccuaauguguuucacaaaugucuuuaacuugccagg

SEQ ID NO: 4104653 - RNA, 80 nt, Human
cuuguaaaauucuuucacuuagagccagaugcauaguagguacuauuagcuaaucugaaucugaaauugaauuuggcaag

SEQ ID NO: 4104654 - RNA, 81 nt, Human
cuuguacuguuuacucucagcuaucugagaauaacccuuuugaggguugcauuuuuagaggcucagcgucuucaguucuag

SEQ ID NO: 4104655 - RNA, 55 nt, Human
cuuguagaccccuggacucacgaccugauaggcgcaggggcccggggucugcgag

SEQ ID NO: 4104656 - RNA, 81 nt, Human
cuuguaggagaucaguugcucucaucagaagguggaggcuucucaugaggggcuuuaugugaguagcacugucccugggag

SEQ ID NO: 4104657 - RNA, 79 nt, Human
cuuguaggauaagcaguggagggaaaugggaaggggcacuggcauucaucauccauuguccucacauuagcccugugag

SEQ ID NO: 4104658 - RNA, 81 nt, Human
cuuguagucaaggccagagaggcaaauccuagcaucccuccugggaaugguauuggggaccuuucuggccacggcuuuggg

SEQ ID NO: 4104659 - RNA, 91 nt, Human
cuuguagucgccaccagcugcaacaccaucuccugcagcuccagcagcuucaccuggagggaggggugcucagcugucacgcugcugccag

SEQ ID NO: 4104660 - RNA, 69 nt, Human
cuuguaguucauugauaagaauguauagaauuccagaaauuacauuuauuuauccuucuggauugcaag

SEQ ID NO: 4104661 - RNA, 75 nt, Human
cuuguaguuuagcagaggcugucugacuuaacugggcccuuugguagaggaaagcagccacugccaaucuacagg

SEQ ID NO: 4104662 - RNA, 57 nt, Human
cuuguauugcaaacuggccaggcauuacuucuacugcguucuacugggcaaugcaag

SEQ ID NO: 4104663 - RNA, 92 nt, Human
cuugucccaggucagccaggcuggccucggcagcaggaacagcggguucaagccccugcuucucccugagauaguguggcacuuggggcaag

SEQ ID NO: 4104664 - RNA, 72 nt, Human
cuugucccugccuuuaggggccucucccucuccccaagaaaaguggucucacugaaguuuaccagguucaag

SEQ ID NO: 4104665 - RNA, 62 nt, Human
cuugucuaauucagugacuuugggccaguguaaaagaaauugccucagacaaguuagacagg

SEQ ID NO: 4104666 - RNA, 57 nt, Human
cuugucuaccuggcuccugagacagaaccagggccucugagacccagguggacacgg

SEQ ID NO: 4104667 - RNA, 108 nt, Human
cuugugagaugguuugguggugagaguggggaggcaggggaagugcgcagagagaccaucgcuucccucugcuccuugguccaugacacaacaucuauuucucagaag

SEQ ID NO: 4104668 - RNA, 84 nt, Human
cuugugcaaggauauuuagucuaguguuauuccuauaauaaauaacaaaaauuggaagccacuuaaauguuccuacagcagagg

SEQ ID NO: 4104669 - RNA, 99 nt, Human
cuugugccaagagccaggagcccagaugguagcccuagaauucagcugcucaccagaaguuguucugcuaauuugauggccuugucuguugggagcagg

SEQ ID NO: 4104670 - RNA, 74 nt, Human
cuugugcugcaguuucccugcuugaaaacguggucccucaugggagcguugcauggguacuggggacacacaag

SEQ ID NO: 4104671 - RNA, 92 nt, Human
cuugugcuucaugguuguuuuguugaagggaauuuaccucuguugcuguguguuggauauucugucuuuuuaaaauaauacuucaguaugag

SEQ ID NO: 4104672 - RNA, 104 nt, Human
cuuguggaagcuagcaccguggcagccacugcuucuggaggaauuuggccaaguguuuggugaaccuggggcuguugcugguaggcagugcuggcagucacaag

SEQ ID NO: 4104673 - RNA, 59 nt, Human
cuuguggagauauccaugucugccccacacauagggaaggcaacuugcaucucggcaag

SEQ ID NO: 4104674 - RNA, 68 nt, Human
cuuguggguggggcucccccuucugagucauagcaaaugccggcuggggcuguccccaugacuauagg

SEQ ID NO: 4104675 - RNA, 130 nt, Human
cuuguguaauuugacaaaugcaguccugucuguugcucagaagccacuugucugccagacucuaaggggcagcagugccgcaucuugugaccauucacacagcugacuguauguuuucaagguucacgag

SEQ ID NO: 4104676 - RNA, 83 nt, Human
cuugugugugugugcauauguguauuuaguucuauacaauguuaacauauguguagauuugcauauuuaccaccauagucaag

SEQ ID NO: 4104677 - RNA, 58 nt, Human
cuuguguucuuuucacuggcuguucccaaacugugggacaguuuuaaggagcacaugg

SEQ ID NO: 4104678 - RNA, 67 nt, Human
cuuguuaaaaugcagauuccaaugccguaggucuggcuggggcuagagagucugcauuucuagcaag

SEQ ID NO: 4104679 - RNA, 66 nt, Human
cuuguuaaauuagguaguguuuuuaaggauuuccuuguaugaauguauccuaauuuuuaaaacaag

SEQ ID NO: 4104680 - RNA, 69 nt, Human
cuuguugcccaggcuggaaugcaguggcgugaucucggcucacugaaaccuccgccucccgguuucaag

SEQ ID NO: 4104681 - RNA, 85 nt, Human
cuuguugugcaguggcauuugagagcgcaugcuuaaguugucaaaugcagauauuuaaugcaauuuucucaguccauucaacaag

SEQ ID NO: 4104682 - RNA, 79 nt, Human
cuuguuguuuucuuauugugcuaagggauuuauugagauucaucgaaaguccuuggagaauagaaaggaaaguaggaag

SEQ ID NO: 4104683 - RNA, 79 nt, Human
cuuguuuaucucuguagcccugguuuuguuuaccacuuaauaguauucaccucauugggcugcuggaagacugaacaag

SEQ ID NO: 4104684 - RNA, 64 nt, Human
cuuguuucuuagcgaugcuugauaaauggcuguugcuuauuugaugugcagauugagagagaag

SEQ ID NO: 4104685 - RNA, 58 nt, Human
cuuguuuucuucugcagucuauccaucugaauugaaggggaggguggaagaaagcaag

SEQ ID NO: 4104686 - RNA, 129 nt, Human
cuuuaaaaacuauugcugauaagaggaaaacaaaguuauuagugaguguucuguucuguguguuuuucccuuuagagucacaugagcacuaauuagggaaaaaucuuuuccuugaagcaguauuaaaug

SEQ ID NO: 4104687 - RNA, 64 nt, Human
cuuuaaaaccuuaauucugagcuccuuugggggacaagggaaacuagaagcaggguuauaauag

SEQ ID NO: 4104688 - RNA, 64 nt, Human
cuuuaaugcaugaaacuguacuguggacuaccaccucaguauguacucuuaucauguaguaagg

SEQ ID NO: 4104689 - RNA, 99 nt, Human
cuuuaauuuuuuucccccacugagauccuguaggcagcuaagaauguaugauagggccuuuuggaugcuuuaggacuugauguaggauaaagaaaaaag

SEQ ID NO: 4104690 - RNA, 57 nt, Human
cuuuacacauccuaaccaguguccaggaugauuccagcacaggggaggagugugaag

SEQ ID NO: 4104691 - RNA, 70 nt, Human
cuuuacagauaggaacuacucaguuuaacuguuucuuuuugagugaguuugguaguuugugucuuugaag

SEQ ID NO: 4104692 - RNA, 82 nt, Human
cuuuagaagaugaguagguagcauuaguaaucuuauagcaguuugcaaagauuaagauagaauuaauguugaauuucuaaag

SEQ ID NO: 4104693 - RNA, 71 nt, Human
cuuuaggaauccuugguuuuaagcaauagaaauagaguuuuucuagcuuaggcaaagaggaauuuauuagg

SEQ ID NO: 4104694 - RNA, 65 nt, Human
cuuuaggcaaagcuggaauccagggccuuguaguucccacccguuaguccugguuuugccuucag

SEQ ID NO: 4104695 - RNA, 83 nt, Human
cuuuaggcggcucaguuugaauagcauaggauuacauuugcuugucugcaggucaaaccucacuauuuagauugucacuaaag

SEQ ID NO: 4104696 - RNA, 60 nt, Human
cuuuaggucuguaauaaacuuuauugcuaagaguacaguuuaugaaacacagauuugagg

SEQ ID NO: 4104697 - RNA, 90 nt, Human
cuuuaguuaauaauaauguguuaguauugauuugucaauuguaacaaaugaagaaauauacaggacuaaugcaauuuguuaauaauagag

SEQ ID NO: 4104698 - RNA, 62 nt, Human
cuuuaguuauuuagacuacaguaaacuucuugugaguggucaugaauucuagaugacuggag

SEQ ID NO: 4104699 - RNA, 61 nt, Human
cuuuaguuuguaagagcaagaguccaucagcgggacauguaguugaauaugcaaacugaag

SEQ ID NO: 4104700 - RNA, 59 nt, Human
cuuuauaauguuuuccauggacugagcuauuuucagaacaauugggaaccauuaugcag

SEQ ID NO: 4104701 - RNA, 129 nt, Human
cuuuauacaaaaccaggucagcacacugugucuuggaggcugaugcugccucacagagaugacuccuuucuguagaaaacugcagccuuagcauccagggccagacucuuaccucaugcaaugauagag

SEQ ID NO: 4104702 - RNA, 64 nt, Human
cuuuaucuaggguaagaaaaccaggaaaagaggugggaaugguaagucuggacuacagaugaag

SEQ ID NO: 4104703 - RNA, 55 nt, Human
cuuuaugaaccuguucagcuugagacaauccuacaagccaaacuguuucaugggg

SEQ ID NO: 4104704 - RNA, 61 nt, Human
cuuuaugugcugggcauuaaggcaggggggauuucuguuuugaucugucuguauaaugagg

SEQ ID NO: 4104705 - RNA, 72 nt, Human
cuuuauucagaaauugucagugauaugauacagcuaauuaaggcaugcaugguguuaacaguuucauuagag

SEQ ID NO: 4104706 - RNA, 62 nt, Human
cuuuauucugcaaauugccuugaaagaaaugucaauuaaagaaaggcuguuuguuaauaaag

SEQ ID NO: 4104707 - RNA, 78 nt, Human
cuuuauugucuuccccugccaggugccuuugugcagugcgcaaacuucacaacuguacauggcagcucugcaauggag

SEQ ID NO: 4104708 - RNA, 66 nt, Human
cuuuauuugccuccagaagggcuagaagcaaaccccaucugcauucccaagggaggcaggauaagg

SEQ ID NO: 4104709 - RNA, 56 nt, Human
cuuucaaagaguaggagguuuuuuggucucagaaguucucacuagugcuuugagag

SEQ ID NO: 4104710 - RNA, 67 nt, Human
cuuucaaaugaagcagcaccauuuuagagcaaggaaacuggcuuuuguguguucuaucaccuggaag

SEQ ID NO: 4104711 - RNA, 97 nt, Human
cuuucacaggaucuugcugucagacagcagugguaaauccguuggaaauucagcacucucuguugccgacugucugggggccaaacuuuugugagag

SEQ ID NO: 4104712 - RNA, 67 nt, Human
cuuuccacuuggaggcccccugugcccugcagccucaggguaggccgugggucaccaggcuggagag

SEQ ID NO: 4104713 - RNA, 60 nt, Human
cuuuccagccagauuugcuggguuucugaacaguuuaacacaguuuucuuggcuggaggg

SEQ ID NO: 4104714 - RNA, 66 nt, Human
cuuuccaguuuuugucucuuguccugucuagggaaaaacaaagaggcauaaaauuuauaugggaag

SEQ ID NO: 4104715 - RNA, 55 nt, Human
cuuuccccaguauaucauugcccuagcaaauggacacauguaccuuuggggaagg

SEQ ID NO: 4104716 - RNA, 110 nt, Human
cuuuccucaccuguacagugaaggguuuucaaggucuucuccagaacaauauucuaagaaugcuuugcaaaauuaaauaugcauuuauugauaauuuacuauguggaaag

SEQ ID NO: 4104717 - RNA, 58 nt, Human
cuuuccuccacucccuaggcuuagaagccccacccuagccuuagagcugcuuggagag

SEQ ID NO: 4104718 - RNA, 66 nt, Human
cuuuccucugcuacuguuaaaccauuuggauuuucuuaagugguuucccccgguagugcuggagag

SEQ ID NO: 4104719 - RNA, 76 nt, Human
cuuuccugccugcaggcuggaccgugccccacuaggcaaacuguggcccugcuggacacgccugcugguggggagg

SEQ ID NO: 4104720 - RNA, 62 nt, Human
cuuuccugguuggggacgugguuguuuuagccugaauccaauuacaaccaagaacuggaagg

SEQ ID NO: 4104721 - RNA, 74 nt, Human
cuuuccugucuggucccuguagguauuugacuuagugaccucugaguuaaaaucauagcagugacuugggaaag

SEQ ID NO: 4104722 - RNA, 67 nt, Human
cuuuccuuuucauaugccccgcgucagaauucuuguuccuuuaucugaguggcagggaaauggaaag

SEQ ID NO: 4104723 - RNA, 63 nt, Human
cuuucuagccuauccacuuuucaaucacaaaagagcuuuggagggggaguuucaguuagaaag

SEQ ID NO: 4104724 - RNA, 56 nt, Human
cuuucuauagaagcggguuguagguaauuggacauacaaauuguuuauauaggaag

SEQ ID NO: 4104725 - RNA, 57 nt, Human
cuuucucaaugccggaaggcacgucauugcaucaugaugccuucuaggguuggaaag

SEQ ID NO: 4104726 - RNA, 61 nt, Human
cuuucucaguguuuaaaaagauuuccagagacuuaauucugggguucugauacagagaaag

SEQ ID NO: 4104727 - RNA, 60 nt, Human
cuuucucuagaccuguuuccucugcccucuguucaaagaggucuuuuggucugcagaagg

SEQ ID NO: 4104728 - RNA, 98 nt, Human
cuuucucugucuccuuugauuuuccuuauagcuagacccaccuaaaagugaaguuacauauguggauguuuauaugaagaauaaaggacacaagaaag

SEQ ID NO: 4104729 - RNA, 71 nt, Human
cuuucugagauuauaagauagagucauucacgucagugcucuggagauucuauguuguugauuauagaaag

SEQ ID NO: 4104730 - RNA, 117 nt, Human
cuuucugcacugaagaugcagccuguuucuagcacuguauguaguuccuaagauuccucaagauagaggucuuacccacagcaucuagaaagcaagacagggcaagaugcagccugg

SEQ ID NO: 4104731 - RNA, 130 nt, Human
cuuucuucuucuucuuguuauaauugugcuuuucccagccagucaugagguuucuggcugcuggguuucacagaugccuuggccaacaccuugcaaacuggcugaagugcccugucugacacggagaaag

SEQ ID NO: 4104732 - RNA, 97 nt, Human
cuuucuucuuuccauuccuuuuugcugauaagcagaauucaguucuacagguaguauggauauguuuauaguaugaaguuuggagauuauaggaaag

SEQ ID NO: 4104733 - RNA, 115 nt, Human
cuuucuuucucuuuuaguucuugacuauuucuauccuuccaauaauaucuauugccaauacuuaaaauacauucaaaggaaggauagauaggaaggaaggaaggaaggaaggaag

SEQ ID NO: 4104734 - RNA, 77 nt, Human
cuuucuuugccuuaauacuuagauaccaguguauacguaaguguauccugcuuugacuguuaagaaccauagggaag

SEQ ID NO: 4104735 - RNA, 75 nt, Human
cuuugaaaagcacaucucauugggugcacacauguuugcacacagacaugguuuauuuuaaugguguauucaaag

SEQ ID NO: 4104736 - RNA, 63 nt, Human
cuuugaaaguucuaaaacucuuugugagcugaaguugcaggaggauuuuguggagcuggugag

SEQ ID NO: 4104737 - RNA, 76 nt, Human
cuuugagauucugucuugaucacuuucucuucuugcucaaugagcucuaucugggaaauugucaacacucucaagg

SEQ ID NO: 4104738 - RNA, 79 nt, Human
cuuugagcaaccucauuucucagaaaaggaaucuucuuuauagaagauacaacucagaagugugguuacuuccucaagg

SEQ ID NO: 4104739 - RNA, 57 nt, Human
cuuugagucagauguuuugaaaguucuuuuccaacuuucaaauaucaugauucuagg

SEQ ID NO: 4104740 - RNA, 100 nt, Human
cuuugauauagcauugaccugucaucuccuuaauucugugcaauauguuuauaacauuuagcacuuguaacagagaaaggaauaggaacauauuuuaaag

SEQ ID NO: 4104741 - RNA, 55 nt, Human
cuuugcaauagaggcacacauguuuucaugaugccacuggauucugcuugcaaag

SEQ ID NO: 4104742 - RNA, 67 nt, Human
cuuugcaccauugcugggcuaguucccucaugguccuggggaaggaagccuaguaauggagucagag

SEQ ID NO: 4104743 - RNA, 101 nt, Human
cuuugcagugucacugagagaggcgugucuugccccuggcucuaauuugggagcuccuggcaaggucaugguggccccucuuguuugugauucuguuuaag

SEQ ID NO: 4104744 - RNA, 69 nt, Human
cuuugccacuuucuauguucaaagggugcuaguccacacuucuuugcaaacuauggagugugcuuaagg

SEQ ID NO: 4104745 - RNA, 63 nt, Human
cuuugccaggagcucaucugagggaagagacacagaccuucccuggagcuagucugagcgggg

SEQ ID NO: 4104746 - RNA, 77 nt, Human
cuuugcgagcugcucccuguauuccauccuaugucaguuacaaagaugaggaaaacagaccaaggagcucgacagag

SEQ ID NO: 4104747 - RNA, 62 nt, Human
cuuugcuaaacauaaaguucauacuggagagaaaucuuacaaauaugaagaauguggcaaag

SEQ ID NO: 4104748 - RNA, 60 nt, Human
cuuugcuacugugaauagugccacaauaaacauacgugugcaugauuuauaguagcaugg

SEQ ID NO: 4104749 - RNA, 63 nt, Human
cuuugcuaggagcucaucugagggaagagacacagaccuucccuggagcuagucugagcagag

SEQ ID NO: 4104750 - RNA, 78 nt, Human
cuuugcuauugugaauagugccgcaauaaacauacguguucaugugucuuuguagcagcaugauuuauaauccuuugg

SEQ ID NO: 4104751 - RNA, 63 nt, Human
cuuugcugaugcaugccaugugccaguugccaagcaacauacauaacacauucaucagcagag

SEQ ID NO: 4104752 - RNA, 115 nt, Human
cuuugcugccacugugucaguugggucuucuccaaguagaagcuaaguugcaaucgugugugcagguacucuacuggggagaaauaccugugaaugaaagccagaggaagcaagg

SEQ ID NO: 4104753 - RNA, 130 nt, Human
cuuugcuggucagauggcagaggcgggaacgugcaggaaucaggaugcugucaguuaccagaccgugcaagagcugguggacauggcccugacagguccugggcaagucagcccugucuggcucccaagg

SEQ ID NO: 4104754 - RNA, 70 nt, Human
cuuugcuuuaacugaaagugcuccugaauuuaaguguucauuugugaaggagcacuuucaguuuguaaag

SEQ ID NO: 4104755 - RNA, 78 nt, Human
cuuugcuuuucauagagaaggaguguccccaaggaaccugccuccaugccauggcacagcccucucuguggacaugag

SEQ ID NO: 4104756 - RNA, 58 nt, Human
cuuuggaacacaugggcaugguucuuaaccuagaccaggcagggaagugauuucaggg

SEQ ID NO: 4104757 - RNA, 69 nt, Human
cuuuggaaugucugcucuacucaggaggugaucuggugccagccucuugcagagaaggagacaaaaaag

SEQ ID NO: 4104758 - RNA, 84 nt, Human
cuuuggacaguccuguacaggccauaucuccaaguacuccaucugcuccugaaggauacgaccugaaaauaggacuuucuuugg

SEQ ID NO: 4104759 - RNA, 75 nt, Human
cuuuggaucacuguuccucugggaaaaaaacaggaagaaacuguagaguccagaaaauaauagugauggcuaaag

SEQ ID NO: 4104760 - RNA, 83 nt, Human
cuuuggaucgugccucagucauuggccuacacuuuaccuuuuccugaggcguagaugauugaagcaagaguagagauccagag

SEQ ID NO: 4104761 - RNA, 93 nt, Human
cuuuggauucaucauggagaauauaccaaaugcuuaaaagauucuuacuuugcuuauagcuuuggaugaucuuugauacugagaaucacaaag

SEQ ID NO: 4104762 - RNA, 58 nt, Human
cuuuggcugcuagaugguguuagaccaaagaacugguuucacguugucucaguuaagg

SEQ ID NO: 4104763 - RNA, 77 nt, Human
cuuuggcuuggagaauuuaagugacuuuguaacacuuucagucaugaaguccagugcuuuagauuccaaagccagag

SEQ ID NO: 4104764 - RNA, 92 nt, Human
cuuugggaaacgcuuugaagugauuaaccaugcucugcuuugcugcuucugggggagcagcaguguguggucauguuugaaguaggccaagg

SEQ ID NO: 4104765 - RNA, 55 nt, Human
cuuugggaagauugaacuugcuaccuuucucacggcuguucaucuuuuucuaaag

SEQ ID NO: 4104766 - RNA, 89 nt, Human
cuuugggacuugcguugggucagcgacaccacagcagguguucagccuugcgccuucaguagugucagcuguacacauacauccuagag

SEQ ID NO: 4104767 - RNA, 58 nt, Human
cuuugggcaaagggccaauucgggaugcguuucucucugauuuggagccaugccaaag

SEQ ID NO: 4104768 - RNA, 59 nt, Human
cuuugggcacugaaguaugggugaggugcucugauucaugauccuuccggugcccacag

SEQ ID NO: 4104769 - RNA, 67 nt, Human
cuuugggcuuauugauuacaaagcuucuucauuacuucuguggagcugcagaucaauaggcucacag

SEQ ID NO: 4104770 - RNA, 68 nt, Human
cuuugggcuuuggccaacucuucgcuaauacaguuugcuggccugagugaauagggccagaaccaaag

SEQ ID NO: 4104771 - RNA, 77 nt, Human
cuuuggggaauaccacuuugguauuucaauuuuagccacagcaaagucaggaagugcaaaaguugaaguucucaggg

SEQ ID NO: 4104772 - RNA, 90 nt, Human
cuuugguggugagggugugaaaugagggggugcacguggagggaaaaaagggacuccccucccucuuggcuucuaucccaccaacccggg

SEQ ID NO: 4104773 - RNA, 55 nt, Human
cuuugguucuguccuucccagaaaccugaaaguugaagccaagacaggaucaagg

SEQ ID NO: 4104774 - RNA, 80 nt, Human
cuuuguaaacugagcacuuuucaaagagagcuccaaauuccuacagagcugucuuuaagugagcuuugaucuuugcagag

SEQ ID NO: 4104775 - RNA, 58 nt, Human
cuuuguaaggauucucugcagggcuagaguucugaguccacagguccucuuugcaaag

SEQ ID NO: 4104776 - RNA, 62 nt, Human
cuuuguaggauaaaaggucgggucaacuuuucuccaggagcugaaauucuuuguccucagag

SEQ ID NO: 4104777 - RNA, 57 nt, Human
cuuuguaggccuggcggcccguggcgugcgggcggcuucuucgaggugucugcgagg

SEQ ID NO: 4104778 - RNA, 69 nt, Human
cuuuguauugggaugugcuuugaaucuugaaaaaugcuuuucacacuuggagcaacacuuauggcagag

SEQ ID NO: 4104779 - RNA, 75 nt, Human
cuuuguauuuacugauuuuaaacuuacuuaagccuuguuucaaaaaaggccuaagugguuaaauggcuuacaaag

SEQ ID NO: 4104780 - RNA, 90 nt, Human
gaaauccaaccuauuccuccagucuuucagaugucccuguauuucaugcagguaguacaugcuugaggcuacugaugaauaguuugcuuc

SEQ ID NO: 4104781 - RNA, 71 nt, Human
gaaaugaaccaaugcuggauaccaucugccauuguuaaaaggaagauucuaguccagugggccuucauuuc

SEQ ID NO: 4104782 - RNA, 76 nt, Human
gaaaugaaggcuuguuuguuccuucuuggccaaucaaaguagaagacucagaggaccaaaaggaaagcaacauuuu

SEQ ID NO: 4104783 - RNA, 83 nt, Human
gaaaugaaugaaaauuauaagaaacaaggcaaauuuugaggguaucauuuaucaugauaucuuguuuuucaugcauccauuuc

SEQ ID NO: 4104784 - RNA, 111 nt, Human
gaaaugaggccucauucaguuuccuaauuuccaagauucuuuuucagcacccagcugaauaaaguauguccugggaagagagaagaagaaagucuuaaugaggcccagcuc

SEQ ID NO: 4104785 - RNA, 61 nt, Human
gaaaugaugacaggauaaagaacaaugaucaaguuguagcuugaauucuugucauucaguc

SEQ ID NO: 4104786 - RNA, 82 nt, Human
gaaaugaccuugguuuaauuaccugcaucucaaugagugaaucuacauagaaagugaagguuaauuaaugaaggaucguuuc

SEQ ID NO: 4104787 - RNA, 61 nt, Human
gaaaugaguugauucagagacucuggucaucaucccagcgucacugccucuuaacuuuuuc

SEQ ID NO: 4104788 - RNA, 89 nt, Human
gaaaugauaauguguguaccauuuugaaacauuucaucauuuguuaaugugacaugaaaguccagauguguccauacagugguaauuuc

SEQ ID NO: 4104789 - RNA, 88 nt, Human
gaaaugaugucucuaguauaauauagcaaaagguaagcaauaugaaaccuacaucuuuugguagaaugauauuggaugugcaaauuuc

SEQ ID NO: 4104790 - RNA, 59 nt, Human
gaaaugcaccuugcugugagacuguggagauaaaacaggauuuaaaggcaaugcauuuu

SEQ ID NO: 4104791 - RNA, 85 nt, Human
gaaaugccaaguggaaccaaagccgaccuugcacuagcacgugauacuagucaaggaggugcuuggcuucacucugcugcauuuu

SEQ ID NO: 4104792 - RNA, 58 nt, Human
gaaaugcccucccacugaauguaccuugugacuugcaaaagugaugggauggcacuuc

SEQ ID NO: 4104793 - RNA, 63 nt, Human
gaaaugcugagguguguuuaauuuagaagucagauauuuugaaaugaaaaaucuuagcauuuu

SEQ ID NO: 4104794 - RNA, 86 nt, Human
gaaaugcuuucugaaaugcuggcuuuggagccaaaacuguauggauucagaguaacuuuggcaaguuuucagaauuucuacauuuu

SEQ ID NO: 4104795 - RNA, 83 nt, Human
gaaaugcuuugaguagaaauguaguguagagaaacauucugugucguuucagccuagucacugcauuucuauauggcuuuguc

SEQ ID NO: 4104796 - RNA, 60 nt, Human
gaaauggcaagaggccacuuaacagguuuagucaacccuccugaugaggccagccauuuc

SEQ ID NO: 4104797 - RNA, 66 nt, Human
gaaauggcauguggcuggguuuucauagcaccuuuacuuugaggcucagagcaccugcuccauuuc

SEQ ID NO: 4104798 - RNA, 129 nt, Human
gaaauggcugggcuacauaugauacccuguaagcguuaucaaacuggcuuauggaacuggaauggcaagaaguuauaagccucgaugguaagccugaguuauggggaggacauaucugccaccccaagc

SEQ ID NO: 4104799 - RNA, 67 nt, Human
gaagauauauucgacgugaaugaggcuuuuccuccuugagucucucuccugcacugaauuaugucuc

SEQ ID NO: 4104800 - RNA, 95 nt, Human
gaagauauuuccacaucucuuacauuuauaaggcuucucuguguaugaucucccaaaugcagaguaagggauaagguuugagaggaaauguuauc

SEQ ID NO: 4104801 - RNA, 73 nt, Human
gaagaugauuucuccauucccuucuccgagcagagcucuugaagaagaugggaguuaggagaagugaaucuuu

SEQ ID NO: 4104802 - RNA, 103 nt, Human
gaagauggaacuuuugauucuggaaauuuugaacaguuucuaaaagguuaaaaucaauggaaaaacugaaaaucucacagauguuguuaacagugaaugcuuc

SEQ ID NO: 4104803 - RNA, 64 nt, Human
gaagauggguauaacauagccauguuugccugcagaacuugaauaugagauauacuuauucuuu

SEQ ID NO: 4104804 - RNA, 71 nt, Human
gaagauucccugagggcaugaacauuccauaugccuguaaugauggaauauaccuucgggagaggaacuuc

SEQ ID NO: 4104805 - RNA, 71 nt, Human
gaagauugcgugaggauuuuguuacuguucaacuuugagagcuguuuguaacaagaaccucaugugacuuu

SEQ ID NO: 4104806 - RNA, 65 nt, Human
gaagauuuuagaaucuguguucaaaccuacugucuuuagugucucagaaacagauucuuaucauc

SEQ ID NO: 4104807 - RNA, 61 nt, Human
gaagauuuucuccuuuaaaugaucccaguacauaugcauggcucuuaaagaagaggaucuc

SEQ ID NO: 4104808 - RNA, 63 nt, Human
gaagcaaacuuucuguguuauuacugucucugacgagcagcauuaacacagaaagcuuccuuc

SEQ ID NO: 4104809 - RNA, 75 nt, Human
gaagcaaagcagccugcaguguggacagaaggacugaaccaaaaaguccacacugagagcucagcuuccggcuuu

SEQ ID NO: 4104810 - RNA, 76 nt, Human
gaagcaaagccaggcuguggggaacuugaacgcacaaaaagguguuuagacuuuacccuauguuugauguagcuuc

SEQ ID NO: 4104811 - RNA, 64 nt, Human
gaagcacauggcuauagcuauugccgaugaucuguaacguuguuuauagcucaggccaugcuuc

SEQ ID NO: 4104812 - RNA, 58 nt, Human
gaagcacauggcugugagcaacucggcauggcuucugcccuugugcagcuguggcuuc

SEQ ID NO: 4104813 - RNA, 129 nt, Human
gaagcaccucuggagugcagguccucagcuacugagcacagugcaaacccucgggaaaguacacgucuuguacauuucucaccugcaccugcgacggugguggaguuugccugacagcagaggugagac

SEQ ID NO: 4104814 - RNA, 97 nt, Human
gaagcacugcuguguauagugaaaauagagcaaacuuuaggggcaaacagcacuuuugaguuugagcccuggcucuuucacuuacugugugaucuuu

SEQ ID NO: 4104815 - RNA, 59 nt, Human
gaagcagcaugaagggagcuggguuuggggguguuggcugggcacugagggugcugcuc

SEQ ID NO: 4104816 - RNA, 55 nt, Human
gaagcagcugccagagaugucuaugcaaagggacguuucugggauucaggguuuc

SEQ ID NO: 4104817 - RNA, 84 nt, Human
gaagcagggcguucucauucuucagcuccucgaucuggcggacacgacggaggucaagggagcugagggccagcgccuugcauc

SEQ ID NO: 4104818 - RNA, 58 nt, Human
gaagcagguguugccuaaauugacaaggccagugaagccuggcagacacaccuucuuc

SEQ ID NO: 4104819 - RNA, 56 nt, Human
gaagcaguagcaacugugucuuccacuguucggaaaacaacaguuguuacuucuuu

SEQ ID NO: 4104820 - RNA, 57 nt, Human
gaagccaagugcaaaugccuuaaaaguaauucuaggcauagcuguuaauuugguuuc

SEQ ID NO: 4104821 - RNA, 69 nt, Human
gaagccacuauacucugacuuuucaggccucaaccuugacauuugcuguuuagcaguagagugugcuuc

SEQ ID NO: 4104822 - RNA, 72 nt, Human
gaagccacucaugaaaacucucccuccucgacaugcucagaggggcuuuaggggccagugaccaguggcuuc

SEQ ID NO: 4104823 - RNA, 72 nt, Human
gaagccacugugagugguuccaaagcuugcuuaauugcaagccacaagagggcagccaugucccagggcuuc

SEQ ID NO: 4104824 - RNA, 67 nt, Human
gaagccagucuuaggagaaacuacagaauuguaggccuuuucugucuuauucuccugacauuaauuc

SEQ ID NO: 4104825 - RNA, 82 nt, Human
gaagccauugagauacaugugugaccaaagagugaugagguggauauuucuuuguguccuauaugcauguucucauuacuuc

SEQ ID NO: 4104826 - RNA, 64 nt, Human
gaagccauuucuucauuucuaagauggacaugucuuuacauuuucugaaguugagauggacuuu

SEQ ID NO: 4104827 - RNA, 76 nt, Human
gaagcccugugcagggucagccaaagcugucucuaagccugcaucacagcucagcuuugcccuuugcccaaucuuc

SEQ ID NO: 4104828 - RNA, 78 nt, Human
gaagccggggaagaauauguauuuuuacaguuaaaggacauuuuugagguauauucacauauaucuuccuaacauuuc

SEQ ID NO: 4104829 - RNA, 77 nt, Human
gaagccuccgucccuguccucuguccucagcaggacacaucccuguccucugcuggaagggcaagaggccuggcuuc

SEQ ID NO: 4104830 - RNA, 78 nt, Human
gaagcgaccaugugcacgugucucuuagcgacaauaaccuugcuggucugauguggagacacuguuuuguguggcuuu

SEQ ID NO: 4104831 - RNA, 130 nt, Human
gaagcgcugggcugagaaaggccggugggugugacaguggacaugacucuccugccuucccugcaguuuugccugagcgcaugucuuuguuaugcucaccaacucaucagcuaggagcagggcuuggaau

SEQ ID NO: 4104832 - RNA, 75 nt, Human
gaagcguuugagauucugaauuucuaacaagcuccuagaagauggcaguguuacugguucaugaaucuuaccuuu

SEQ ID NO: 4104833 - RNA, 63 nt, Human
gaagcuaaaccacagcuaagaaucagauacucuuggugauucuuugaguugugguuugguuuc

SEQ ID NO: 4104834 - RNA, 59 nt, Human
gaagcuaaagcccuguccuuccgugucccugaauacuggagaagcaggugcuuuggguc

SEQ ID NO: 4104835 - RNA, 63 nt, Human
gaagcuagucaagaggcaugggacaggcuccucacagcccucagaaggugccacugacgcuuu

SEQ ID NO: 4104836 - RNA, 69 nt, Human
gaagcuaugaucucugggucuggagcuuugcccucuguacccaaggcucugcacucagagucauucuuc

SEQ ID NO: 4104837 - RNA, 57 nt, Human
gaagcucuuguugaaucuugucaugacacgcaugacuccugagauuacagagccuuc

SEQ ID NO: 4104838 - RNA, 55 nt, Human
gaagcugaugaggaccagauugccaugcuucucacaugccuuccucaucuccuuc

SEQ ID NO: 4104839 - RNA, 73 nt, Human
gaagcugcguguagccauacuuauccucacaucccauuagugagaauuuagucacauggccacaccuagcuuc

SEQ ID NO: 4104840 - RNA, 57 nt, Human
gaagcugcuggaaggaaaugcuuucuucuaucauaugucaccuaaaccagcaguuuc

SEQ ID NO: 4104841 - RNA, 62 nt, Human
gaagcuggaggauggacuggaagaacacgacuuguguuucgggccccaccccaccacguuuc

SEQ ID NO: 4104842 - RNA, 56 nt, Human
gaagcuucaccuugcugaaaaguuuaggcuggcaucauucagcaggcugaagcuuc

SEQ ID NO: 4104843 - RNA, 56 nt, Human
gaagcuucuggcauuucucaaagggaggggaagucugggagaggagccagaauuuu

SEQ ID NO: 4104844 - RNA, 92 nt, Human
gaagcuuguuacgguauuuucaauauaaacauuuuuaucaugaaaaauuuuaaacagacauaaaaaguagugagaauggcgcaacgaacuuc

SEQ ID NO: 4104845 - RNA, 75 nt, Human
gaagcuuguuuggaugaaauuaugaauuauauguguaccauagccaauuccaaauguuuucaauccaaaaguuuc

SEQ ID NO: 4104846 - RNA, 65 nt, Human
gaagcuuuauugcaagugaggcaauaaaaagggaagaaauccaauuacuuuaugugcagagcuuu

SEQ ID NO: 4104847 - RNA, 63 nt, Human
gaaggaaaacagaucugccugauggcugucauugaaaaaucucuuagguggucauuuuccuuc

SEQ ID NO: 4104848 - RNA, 84 nt, Human
gaaggaaagaaucguguguaguuugaaaacagcagaauuuuguccuacugcuuugauuuguuuuuagacaugauauuuauuuuc

SEQ ID NO: 4104849 - RNA, 75 nt, Human
gaaggaaagcacaguccauuugucauuuuugacauucaaaguccagaagguccuggugaccauggaguucccuuc

SEQ ID NO: 4104850 - RNA, 57 nt, Human
gaaggaaaucugugauuuaugcucuguaacuucugggugguacacaguaauuccuuc

SEQ ID NO: 4104851 - RNA, 61 nt, Human
gaaggaagacugguuuaaaugugcagauaucugcauauugacauugcugcuagcuucuuuc

SEQ ID NO: 4104852 - RNA, 77 nt, Human
gaaggaauaaagaaucugguucccccacuagaacacgagcuccuaugcuaauagggggaacuacauucuauuccuuu

SEQ ID NO: 4104853 - RNA, 58 nt, Human
gaaggaauuauuucaguuguagugugaacuugaacaguacaauaaguauaauucuuuc

SEQ ID NO: 4104854 - RNA, 55 nt, Human
gaaggacaagcaaaaccacaacaagcagaaaacuggaugugguggagcugccuuc

SEQ ID NO: 4104855 - RNA, 113 nt, Human
gaaggagaaauguuuuguaaccaaaggauaugggcaaauuggcuuuucagaguacaauauuuugacagacuacugccucuauugcugaguguucacaaauucauuucucaguc

SEQ ID NO: 4104856 - RNA, 64 nt, Human
gaaggagagggucaaggauaauaagcaauacuaauuuucuucuguuucuuauccccucuuguuc

SEQ ID NO: 4104857 - RNA, 80 nt, Human
gaaggagccagaugguucccgucugcugccuugagucaaugcacuuccucccacagacuggagcccuuuugcccuccuuc

SEQ ID NO: 4104858 - RNA, 82 nt, Human
gaaggaggaaugauggugccuagauuaugguugcuguugccagugauguuacaucuauaguagagcaauacauuccggcuuc

SEQ ID NO: 4104859 - RNA, 56 nt, Human
gaaggagggugcggaucugagcgcugaggcucucugaucgauuacgccuuuucuuu

SEQ ID NO: 4104860 - RNA, 100 nt, Human
gaaggauagaaagacuuuggaaggagggugugguccagcagauuucggcuuccucccagcccaucagugacuccuucuuccugcuccucccuuuccucuc

SEQ ID NO: 4104861 - RNA, 73 nt, Human
gaaggaugaagggcgagugagucuauggauaaugaaauaaucagugacugaaaccauuuucccaucauccuuu

SEQ ID NO: 4104862 - RNA, 104 nt, Human
cuguccugcuagcuuaauuuuaaguuugcauuguuugauaggugaauuauuuggaauaauucaguugacagcuaaugccuaaacugauuuggguuaaaauacag

SEQ ID NO: 4104863 - RNA, 59 nt, Human
cuguccugguacuuugagguucuggggauauagugauaaaugucaggguuuuaggagag

SEQ ID NO: 4104864 - RNA, 75 nt, Human
cuguccuucagaaaagugucaguugcuuagaauacagaaugaccucugauaagacagcugauuugaagucuucag

SEQ ID NO: 4104865 - RNA, 57 nt, Human
cuguccuuggcuaaagggaacugcuuuuucuaaggucauuccccuccccagggauag

SEQ ID NO: 4104866 - RNA, 61 nt, Human
gaaaugguguguauauguaaauggaccugaaaggcagugguucuucaauacauggcauuuc

SEQ ID NO: 4104867 - RNA, 74 nt, Human
gaaaugguugcuggaagagcauuugcauagggcauucucuuguucugagcucuugcucauuccuaccucauuuc

SEQ ID NO: 4104868 - RNA, 81 nt, Human
gaaauguaacagcaacaacaauggcaugcaaagaaugagaaaaucauuuauuagguaaaucuguuuuguacguuacauuuu

SEQ ID NO: 4104869 - RNA, 68 nt, Human
gaaauguaugucuucccccauugcaguucaguuacuuuggagaauaugggaggaagagaagauauuuu

SEQ ID NO: 4104870 - RNA, 83 nt, Human
gaaaugucaguagauuucaggagacaaaauggaaaggagccauugcuccaccaccuuuuccuggaagucuuacucuauauuuu

SEQ ID NO: 4104871 - RNA, 56 nt, Human
gaaaugucauagucuucaagccauuuuaggagaagggcugaaggcaaugacauuuc

SEQ ID NO: 4104872 - RNA, 56 nt, Human
gaaaugucauugccuucagcccuucuccuaaaauggcuugaagacuaugacauuuc

SEQ ID NO: 4104873 - RNA, 106 nt, Human
gaaaugugugcagauaaagaaaguaagcacccuucagcccagccuggaggaauagucuucaggcaaggugaagggugcaacuuccauuucccaaaccccguauuuc

SEQ ID NO: 4104874 - RNA, 111 nt, Human
gaaauguuucaccuucucaccacacucucagcuuuucaacuuacuguauacccauacacacugcagugagugcugguuguuguugaugauggcagugauggugaauauuuc

SEQ ID NO: 4104875 - RNA, 64 nt, Human
gaaauguuugggaggagucaacccucuggugccaaauuggaacacugauguuuccagaugucuc

SEQ ID NO: 4104876 - RNA, 85 nt, Human
gaaauuaauuugaggucaaguaaccacuggaagccuuuauauuuuccauuggugaaauauuugaaggucuuuuaaaguuuuguuc

SEQ ID NO: 4104877 - RNA, 84 nt, Human
gaaauucaggcaugugaaguaacuguccaggauccagugacaacaucauggugggccaggugcagugcuuuaguccucuaguuc

SEQ ID NO: 4104878 - RNA, 71 nt, Human
gaaauucaggggcuucuuccuggcuccuauuaauuaucagguugggugagugggaaaagcccagaaucuuc

SEQ ID NO: 4104879 - RNA, 55 nt, Human
gaaauuccucaugugccagucauuuugaagaauggcugccuagacuuggaauuuc

SEQ ID NO: 4104880 - RNA, 64 nt, Human
gaaauugccagaucuaguagaugcggcaccuuuuacugcuaugaguaguggguuuggugguuuc

SEQ ID NO: 4104881 - RNA, 75 nt, Human
gaaauugcgcacauuucuccguugcugcauuaauacuagaaagggagugaacugaacagagaaagugccaauuuc

SEQ ID NO: 4104882 - RNA, 56 nt, Human
gaaauugcuacuggaguuuauguauaugcucauuaaauuucaguguuugcaauuuc

SEQ ID NO: 4104883 - RNA, 55 nt, Human
gaaauugcugucaagucaccacaccuccugucuguggcucgauuuauagcauuuc

SEQ ID NO: 4104884 - RNA, 73 nt, Human
gaaauuggccauggugggaguauuuacaccacaggaauuggcaaaugcuacauacacaucagggcuuuauuuc

SEQ ID NO: 4104885 - RNA, 69 nt, Human
gaaauuguaaaggauugcgccaauucuuaacaucauugguuauucugcgaugcaauccugguauauuuc

SEQ ID NO: 4104886 - RNA, 56 nt, Human
gaaauuguguuagauaugguugugcauuuuaacaucuguucaucugacacagauuc

SEQ ID NO: 4104887 - RNA, 96 nt, Human
gaaauuuauucauauauggcccagugaggugugcaugaaagaaagaaucugguucuacauucauguauuaccucaagccauucauaugaaaaauuc

SEQ ID NO: 4104888 - RNA, 90 nt, Human
gaaauuucuagcgggcuuauuccuggguuccagcccagaucuauggaauucagagucucuggggcuggagccagggaacccgcauuuuuc

SEQ ID NO: 4104889 - RNA, 96 nt, Human
gaacaaacacaaggggauuuuaaauggcaguuuuacaaauuuguauuccugugaaaguuugugucagagcuguuaccaucucugcuuguucuguuu

SEQ ID NO: 4104890 - RNA, 66 nt, Human
gaacaaauuggagaaaucaggauugauuacguuaugugcucucuuugucuuccuccggguuuguuc

SEQ ID NO: 4104891 - RNA, 101 nt, Human
gaacaaggauucuaaaugauuaggguuacacuucuaaaaaaagcaggccuugucuuuuaugucuguguuuuguguuagagugcauuuagagauuuuuguuc

SEQ ID NO: 4104892 - RNA, 104 nt, Human
gaacaauuaauguggauaauucaaagacauuggacaauccagagguccucauuugaccuguguugcuauagucuaauguucuagauuuaauuuauaugguguuu

SEQ ID NO: 4104893 - RNA, 89 nt, Human
gaacacaacuuauuugacuuucugugguccucuugaaggugauuaaucaccaauuuuagagcaccaagaauugcacaauauuaauguuu

SEQ ID NO: 4104894 - RNA, 63 nt, Human
gaacacagugguuguuuggaggagcuccagaggaagugccucuccuuaccccauuguauguuc

SEQ ID NO: 4104895 - RNA, 62 nt, Human
gaacaccuacccccucugcagcacuacauuucaccaaacuccagaggguuucucagguguuu

SEQ ID NO: 4104896 - RNA, 55 nt, Human
gaacacgagucucaccuugaaucugagcucuaguaaagguccaaacucuguguuc

SEQ ID NO: 4104897 - RNA, 60 nt, Human
gaacacugagaggggaguggcaccuucccaggcugcccagcucagucucuugcccuguuc

SEQ ID NO: 4104898 - RNA, 56 nt, Human
gaacacuuagcauauaccaggcacuguucuaggcacugggaauaugcugaggguuc

SEQ ID NO: 4104899 - RNA, 56 nt, Human
gaacacuuuccugccuuucugauguaaucacuuugcgcaaacaguaggaaauguuc

SEQ ID NO: 4104900 - RNA, 61 nt, Human
gaacagaauugugcagauguacugcagcggugugucagugucugcuuaucaguucuuguuc

SEQ ID NO: 4104901 - RNA, 55 nt, Human
gaacagauaauuuaauuaaugcauuuucagaaugcaugugugaauuauuugacuc

SEQ ID NO: 4104902 - RNA, 127 nt, Human
gaacagcucaguucuggcacagaucuuagggggcgcaaggcagagccgccccuggggccugccccgccuaggccugcagacguguuuuccucagccccaccggagcucacugcgaggguagcuuuuc

SEQ ID NO: 4104903 - RNA, 84 nt, Human
gaacaggguuuugguuuaucuguggaucucuuuguugcucuccuaacagugaccacagaguaaaucaggucuguaaaccaguuc

SEQ ID NO: 4104904 - RNA, 62 nt, Human
gaacaugaugacaaagguauauuuuauuaucuccaaguaagguguauaucaauauuauguuu

SEQ ID NO: 4104905 - RNA, 66 nt, Human
gaacaugggccgggaaugacaugccugagucauugacaagggcccacaucuccugccuccauguuc

SEQ ID NO: 4104906 - RNA, 64 nt, Human
gaacaugguggaaucggcgugaaugggagaguaacaaucuccauucuacacguuccauuacuuc

SEQ ID NO: 4104907 - RNA, 62 nt, Human
gaacauuguuuucccuauauccaccuauauucauuguuggaauaagggagccaacaauguuu

SEQ ID NO: 4104908 - RNA, 77 nt, Human
gaaccacugccagcaaugugaccaugcugugucauucaagcacguggaaagcaggcuaaucuugcugaacaggguuu

SEQ ID NO: 4104909 - RNA, 87 nt, Human
gaaccaucagauaauauauuuguguuguuuuaagccacccuguuuguggaaauuguuacagcagcaauggaaagcaacacaaaguuc

SEQ ID NO: 4104910 - RNA, 55 nt, Human
gaaccaugagaaauugcuauuuuuaaagugaaauaguaguaauuuccuauggauc

SEQ ID NO: 4104911 - RNA, 66 nt, Human
gaaccauggacucugguuuggggagcugaucucuuggcucuaaagcagcaggaguucauaaaguuu

SEQ ID NO: 4104912 - RNA, 68 nt, Human
gaaccucuagagagucaggacagcauagcaguuaagaguagggcuucugaugucagacuucuggguuc

SEQ ID NO: 4104913 - RNA, 55 nt, Human
gaaccugagcgggcagcaagcgguuaaauauggcuucccuggaggguucagguuc

SEQ ID NO: 4104914 - RNA, 78 nt, Human
gaaccugauaauaaccagagagucuucuucauugagguccugacgcuacaauugacuuucuguuaucacuuagaguuc

SEQ ID NO: 4104915 - RNA, 83 nt, Human
gaaccuggguaaugaaacuggcauuugacugggacugccacucagaacccaaguuaaaauucagugcucacuacagcagcuuc

SEQ ID NO: 4104916 - RNA, 75 nt, Human
gaaccugggucucuggcgccaucugugcaaacggcugcuccuuucccacauguccuggcgcugagcccuggcuuc

SEQ ID NO: 4104917 - RNA, 77 nt, Human
gaacgaguuacaucaacuccacauggcugucagugugaacuuucuaaaacacacaucacugcugccggagacucguc

SEQ ID NO: 4104918 - RNA, 108 nt, Human
gaacgcaacaaaaauugaagaaauuaaggaaugcaacgaacuaugguaaaaacuguaaaagaaugguuacuguugcucaguuuagugugagcuucaagcuguggauuc

SEQ ID NO: 4104919 - RNA, 56 nt, Human
gaacguguggggcuuggacagcauagcuacuguugcuggcucugccccaccuguuc

SEQ ID NO: 4104920 - RNA, 115 nt, Human
gaacuaauuuuggauaugcugaaaguauuugguaauuuauuuugagagauuauuagauuuaacuuuaaggcuauaaauuaugacaauuaauuuuggcauauauauuuauuauuuc

SEQ ID NO: 4104921 - RNA, 90 nt, Human
gaacuauuuggucauggcacagauguucugauuauuacaggaauuguguccuuaauuaaauuuguacucuagugccaauucaaaaaguuu

SEQ ID NO: 4104922 - RNA, 106 nt, Human
gaacuauuuuugaaagcaaugauguagaguagaagagauauuuucacuagauucagaauauuucuguuuauuuguacaucacuguuaacauuuguaaaaguauuuc

SEQ ID NO: 4104923 - RNA, 86 nt, Human
gaacucagcccagggaaacauuguguucuacagauuuaaaaaccaaaaucuguuaagaacagaaauguugggcuugggcugauuuc

SEQ ID NO: 4104924 - RNA, 129 nt, Human
gaacucuugacuuuggucugcucccugccucauuuuucagucagugacuaagcaguuuuugaguuaauaaguaacucuuaggugacugauuaaaaauucuaggaggugacuuagaaaggagucuaaaac

SEQ ID NO: 4104925 - RNA, 71 nt, Human
gaacucuuggcagugcugcagugcccuuaaugcuggcauugguggccuugauggcaucugcacuggguauc

SEQ ID NO: 4104926 - RNA, 56 nt, Human
gaacugaaacuugguuuaaagcaggacuuaaacucuuuacuaaguuuguacgguuc

SEQ ID NO: 4104927 - RNA, 95 nt, Human
gaacugagcagaguacaccacauuggaacucauuagcccauagagcagaauguuuacacugccuguggucugugaucuaaacgguuguuugguuu

SEQ ID NO: 4104928 - RNA, 56 nt, Human
gaacugagguuuacuugaaggagaagaaauucugccuuugacuauagccucagauc

SEQ ID NO: 4104929 - RNA, 59 nt, Human
gaacugcauugugguauauguugggauugguccaauuccaaucacagggugcuuaguuc

SEQ ID NO: 4104930 - RNA, 79 nt, Human
gaacugcauuuauuggcauguaguagguaguagagaaguggaaauuauuagacuuauuauugucaguagcaugcgguuc

SEQ ID NO: 4104931 - RNA, 69 nt, Human
gaacugcggaggucggugcugcgggcugggcagacccagccagagcucacagcccaggccagcguguuc

SEQ ID NO: 4104932 - RNA, 74 nt, Human
gaacugcuuaguuuauggucuuuaguaggagaugcuuauuaacuacuaauugaugauaauguggcaaauaguuc

SEQ ID NO: 4104933 - RNA, 59 nt, Human
gaacugugucucauucaucauugucaccaaccaggaggacaguagcugacacacaguuu

SEQ ID NO: 4104934 - RNA, 58 nt, Human
gaacuguuugguuuucgaguaaaugcugcauauuagaggacuugaaagcagagaguuu

SEQ ID NO: 4104935 - RNA, 73 nt, Human
cuucaucugcaaaccugaggagagaggauuagcgccaugcaagguggcauccucucuucugagugccaagaag

SEQ ID NO: 4104936 - RNA, 75 nt, Human
cuucaugagccugcugcuuugagccuuuuauccucuuaaccccuggcugaggacaggcucagcagguguauaaag

SEQ ID NO: 4104937 - RNA, 67 nt, Human
cugucuuaucucugcuagccuucuucagggcagaaaccagcucugcagcaggacaggagggggacag

SEQ ID NO: 4104938 - RNA, 87 nt, Human
cugucuucccccacucaguaugagcuccgugagaacaggggccaaaccuguuuuuggucaacaguacaugcggugcauggaaggcag

SEQ ID NO: 4104939 - RNA, 75 nt, Human
cugucuuucagcuuuaacuauguguuaaagauuauagcgguuauuucucuaacacauaagcugagaccaugacgg

SEQ ID NO: 4104940 - RNA, 83 nt, Human
cugucuuugccugugucuucacucaagucucuugggacagccugagcugcugagauguggugguggagaggaaacagagaugg

SEQ ID NO: 4104941 - RNA, 61 nt, Human
cugugaaauaaugaauaugugcuguuuuacaccucuaaguuugcagcaauucguuauacag

SEQ ID NO: 4104942 - RNA, 63 nt, Human
cugugaagcuaguauuaacucagauuauucagaugagaucaaguuauuaaguagcuuucacag

SEQ ID NO: 4104943 - RNA, 112 nt, Human
cugugaaguauuguugccagucaacaagguuugcuuaucuuucuuccagcuaccuugcuaggacaucuaauuguagguauaacuuugugagugguccacuuauaugccacag

SEQ ID NO: 4104944 - RNA, 74 nt, Human
cugugaauacuggcuucaccuccccagguggcuucacggagcagacgagaagggagauggaguggauucagcag

SEQ ID NO: 4104945 - RNA, 55 nt, Human
cugugaauuaaguauuguuauccacgauuuacagauaauaaacuuaaggucacag

SEQ ID NO: 4104946 - RNA, 69 nt, Human
cugugaauugaauaugacuauguuuugcuccugaauuucaaauacagaugauagucauguuauucucgg

SEQ ID NO: 4104947 - RNA, 87 nt, Human
cugugacaucaguucuauuauuuaccuauuuuacaggugaggaaacuaaggcauuugagaugguaaauaacuuuccuuaggucacag

SEQ ID NO: 4104948 - RNA, 118 nt, Human
cugugaccacacccccuucccaauaucuacuugagcaggccugcagguauggccgggcugaggagucaagcucugcgggcuccaagauaauguuaaggaagaggaggaaggguaacag

SEQ ID NO: 4104949 - RNA, 57 nt, Human
cugugacuuccacuacugaucagcacauuaaaacaacugucagugccugaggcacag

SEQ ID NO: 4104950 - RNA, 78 nt, Human
cugugagaacccaucuugcugagauugucgcuggcagauuuacuuccagugugauuguugcaagaauuugucuaacag

SEQ ID NO: 4104951 - RNA, 61 nt, Human
cugugagcuggguggccaggacuacucccggagcgugauucauggugcauccaccucacag

SEQ ID NO: 4104952 - RNA, 55 nt, Human
cugugagggccagagucagggccagucaugguaaugggccugaaggcacuuccag

SEQ ID NO: 4104953 - RNA, 88 nt, Human
cugugagggcugggugggccaggcgucuaggcccuggagccaggaaguccagguaccguccacgucuggcccugacucacucuuuugg

SEQ ID NO: 4104954 - RNA, 83 nt, Human
cugugagucguauuugaagagacauuauugggcacuauuuuacucuauuuggaauauuuucuuccuaaauaugauuuccacag

SEQ ID NO: 4104955 - RNA, 56 nt, Human
cugugaguucauugugccaccucaggguaccuuguugcacaguuugggaaccaugg

SEQ ID NO: 4104956 - RNA, 68 nt, Human
cugugauacaguauuuaaagagcaacgauaaaagucuacacaugaugcucugguugugcauguagcag

SEQ ID NO: 4104957 - RNA, 82 nt, Human
cugugauggaacguguuuacacuucaagguuaagguuaguucucucuucucuucgcuuacuguguaaggaguuuuaugacag

SEQ ID NO: 4104958 - RNA, 63 nt, Human
cugugaugggcagaggcagcagaaaccuggauguccggguuggagcgcuuuugcuacacacag

SEQ ID NO: 4104959 - RNA, 66 nt, Human
cugugauuuuucaucuauuuuagacuauugauuaaugguaucuaagaaagauuaagaaauuugcag

SEQ ID NO: 4104960 - RNA, 108 nt, Human
cugugcacagcaccaagaguugacugagcccggacuugcuucugagcugcaacugggucugaagcaagcccaggcucagucaacucuuacugguuccacuucuagcag

SEQ ID NO: 4104961 - RNA, 68 nt, Human
cugugcaccagggacaaugcuagggguauacggcugugaccaccauagucacugucccuuucucauag

SEQ ID NO: 4104962 - RNA, 102 nt, Human
cugugcagaguaguguuccacacaauacuuaccaauguuuuuguguagguugcaaaucuccaagaccauggggcugaguauuuuggaaugaauaucuuacag

SEQ ID NO: 4104963 - RNA, 76 nt, Human
cugugcagcuccaauuucaagggaauaugaaauucagggacugaguagcucuggaucgcuuccaugaaacugucag

SEQ ID NO: 4104964 - RNA, 58 nt, Human
cugugcaggagcuucuggccugaccaggccgcgcagguggucaggucguuccugccgg

SEQ ID NO: 4104965 - RNA, 57 nt, Human
cugugcaugcuccacagcccauucauccuucugguggaggacuucagagugugccag

SEQ ID NO: 4104966 - RNA, 92 nt, Human
cugugccaccaggggccuguccaccucagagaccucucaggugcagcucagcugcauccacaggggguccugagucccuaggcccugcacag

SEQ ID NO: 4104967 - RNA, 98 nt, Human
cugugccagccugcuuaccucuagcucuuugcuugugacauuuucuccaacuagaacacagagcaauaacagggagaggaagagcguggcugauacag

SEQ ID NO: 4104968 - RNA, 65 nt, Human
cugugccaggcugucaauucacccagguaccucucugggacaaguggcuuggcagccugucaaag

SEQ ID NO: 4104969 - RNA, 55 nt, Human
cugugcccucuuugcuggccuuacagcuccagguaaggucacaguggugggccag

SEQ ID NO: 4104970 - RNA, 57 nt, Human
cugugccugcaggccacaucaaaggacgcccugaauguggcacagaugcaggagcag

SEQ ID NO: 4104971 - RNA, 60 nt, Human
cugugccuggggggcagagcugggcuguagccaaggcuguucuaucuacucagaguauag

SEQ ID NO: 4104972 - RNA, 82 nt, Human
cugugccuucagacugucaaguaucuuucuagcaacuaaaucccauuugaugggauccugaaagguagacaaaggaucacag

SEQ ID NO: 4104973 - RNA, 89 nt, Human
cugugcgacaguagauaagaugcuucguuuuucugagucucaguuuguucauuguaaaaugaguucaaagacagguauaggucgcagag

SEQ ID NO: 4104974 - RNA, 57 nt, Human
cugugcugcaauucauaauccgaggagguauuuuucuucuccuguuuugcaccacag

SEQ ID NO: 4104975 - RNA, 71 nt, Human
cugugcuggaggucacccuuagaacaugguaaugacaggcuauaguuaccauguccuggcuaccagcgcag

SEQ ID NO: 4104976 - RNA, 65 nt, Human
cugugcuggauucugaggcuacaaagagaaauaagauaccaucucaggccucuaaaaucucacag

SEQ ID NO: 4104977 - RNA, 63 nt, Human
cugugcuguuauacuuagcugguuaucugugcagaccacacuuugaccaugugauagguauag

SEQ ID NO: 4104978 - RNA, 71 nt, Human
cugugcuuuagcaagcauuccaggacauuuggcacagcucaaguccagcagugcuuguugaucuaagacag

SEQ ID NO: 4104979 - RNA, 75 nt, Human
cugugcuuugcauuguuuaaucaggaagucaacauauuacagagugaaauccuuuacaagcaugugcaaacacag

SEQ ID NO: 4104980 - RNA, 77 nt, Human
cuguggacaucccggguucaguucuuggcugcccaucuucuucuggcacagcugaagguaggaaccaggaguuauag

SEQ ID NO: 4104981 - RNA, 72 nt, Human
cuguggauccugcuugguucuuuuucugugaacucucggcccagaagcaagagccggagcuaguuuucacag

SEQ ID NO: 4104982 - RNA, 62 nt, Human
cuguggcagaggugacaccucuugguucuggauuuggcuggugggugugcuucuagugacag

SEQ ID NO: 4104983 - RNA, 75 nt, Human
cuguggcaggcaaguucauuuccaggcagcugagugucugccccgugcuggcaacugugugccccagugccacag

SEQ ID NO: 4104984 - RNA, 70 nt, Human
cuguggccaggcauucagauaagacacagcagggaugauaugucugcacucugaaugucuaagcccucag

SEQ ID NO: 4104985 - RNA, 56 nt, Human
cuguggcccugugaucuggcacuugggacccuccuggugugcccaagggguggcag

SEQ ID NO: 4104986 - RNA, 66 nt, Human
cuguggcucuccauugacauggaauggagccuuccuuauuuucauguaauuauggagagaaugcag

SEQ ID NO: 4104987 - RNA, 62 nt, Human
cuguggcugcgccaucgaaaacaccuagggggaaauugucuggauuuuauggccacccacag

SEQ ID NO: 4104988 - RNA, 64 nt, Human
cuguggcuggccugucugacauuugcucugggagaugagccagggucugcccaggccaccacgg

SEQ ID NO: 4104989 - RNA, 60 nt, Human
cuguggcuuuggggcggaggacucacucccuauugugucuugagccuuugaaugcuucag

SEQ ID NO: 4104990 - RNA, 55 nt, Human
cugugggaugaguggugagggaggugaagucucucccaggccauaaaacucagag

SEQ ID NO: 4104991 - RNA, 56 nt, Human
cugugggaugguuuugccagaauuccaagcacgacucgaucagauccaucccacag

SEQ ID NO: 4104992 - RNA, 90 nt, Human
cugugggcccacugucauuguacauguuauacaaguagauuccuucuuccacauuguauaauguguuacuguauggcuacugggcuucag

SEQ ID NO: 4104993 - RNA, 59 nt, Human
cuguggguuugggugguggaaguagcaacguaaaccuugcuauccuagaccauacacag

SEQ ID NO: 4104994 - RNA, 99 nt, Human
cugugguacugccaggggacaguguugccucuguugagccuuggcugcugugggaaguuguagguuccugacugaggccugaggugguggugcugucag

SEQ ID NO: 4104995 - RNA, 70 nt, Human
gaacuuccagccugagagucuccagaccuuggggagaauccgugucugggcucccauggcagagugguuc

SEQ ID NO: 4104996 - RNA, 122 nt, Human
gaacuucugccagagcucuucugaaucccccuggagcucuucugagugugcuacuauuuccuuaauggcacuucucacucagaucagcucuguugggaugacaaagaauucugcugagguuu

SEQ ID NO: 4104997 - RNA, 117 nt, Human
gaacuugagagaauuggucuuucuacaucuuaugaagagcaacuugaauaaguuuauuauagagcaguuuuauuucaugagacuguugauauguggcccuaagugucuauuauguuu

SEQ ID NO: 4104998 - RNA, 97 nt, Human
gaacuuguuaaaauacagauuucuggggcccucuuacagagauucugauugagcaagucuagggugggguccacaggcuuauauuuauaacaaguuc

SEQ ID NO: 4104999 - RNA, 111 nt, Human
gaacuuucccacagaacauaaauaaaaugcacgcuacccagcuagauuuugguguuagaaaucugugcugcaggagucugcauggcuuuuugaaaugaucugagaaaguuc

SEQ ID NO: 4105000 - RNA, 72 nt, Human
gaacuuugcuuguuauuuuugcccaagguaggcuuuuaauauccucugccaagaugacagguaagaaaguuu

SEQ ID NO: 4105001 - RNA, 79 nt, Human
gaacuuuugagcccuuuuaagggagacuagagaucuguaagaucuagucccugcccuugaagagcuuacaaucuaguuu

SEQ ID NO: 4105002 - RNA, 129 nt, Human
gaagaaaaauguugggcaagaaaaauaucaaguucuggguuuuguccugagcauuaagcaauugugggccucugugccauucacaaagugcacaagaugagaaccaggacuugacugaauauggaauuc

SEQ ID NO: 4105003 - RNA, 77 nt, Human
gaagaaacaacagguguuggagugugaaaaauuauuucaaaacauugacuauuuuuuauagauuccauuguuucuuu

SEQ ID NO: 4105004 - RNA, 74 nt, Human
gaagaaacaauggcagauaauuuuccagauuugagaaaggcauugauuuggaaacaugcugaccaugguuaauc

SEQ ID NO: 4105005 - RNA, 82 nt, Human
gaagaaagaagaaaugcauuugugcuccaaucacuauuuugaagauuuguuuaugagcacaguguguugugauuucauuuuc

SEQ ID NO: 4105006 - RNA, 85 nt, Human
gaagaaagaagagggaagagccagugggaaagucuuggacuccggaggcaaacucaccuggcucaaauccugguuuuauuucuuc

SEQ ID NO: 4105007 - RNA, 63 nt, Human
gaagaaagagaugugccaaauagccuuauggugccagggcuagaauccgcgucucuugacuuc

SEQ ID NO: 4105008 - RNA, 84 nt, Human
gaagaaauacuaaagaauauucaucuacauuuuucuucaaguucuuaagaaguuuguagcuggaugucuguacuggauuuguuu

SEQ ID NO: 4105009 - RNA, 128 nt, Human
gaagaaauaggacuggagcuggaggacaggcaccgggggcaugaaugaggauaggcggauuggggcugaguccugccuaugagacguuuugccuguuugaacuugagcgaaugcccuuccuuuucuuu

SEQ ID NO: 4105010 - RNA, 76 nt, Human
gaauauuaacacauuuuuucagauugaguguuaauuucuaugggaagucaaauaccauaauggaauguugauguuu

SEQ ID NO: 4105011 - RNA, 74 nt, Human
gaauauuagggcugcuuuguauucugcuaauuucaaaagauauguagcucaagugcaagcauucuauuguauuc

SEQ ID NO: 4105012 - RNA, 65 nt, Human
gaauauuccaggcagagggaauagcaagugcaaaggcacugagguggggucugcuuggaguguuc

SEQ ID NO: 4105013 - RNA, 55 nt, Human
gaauauuucuucucaacagggugacagccacuguuacuaagagaaguaaauauuu

SEQ ID NO: 4105014 - RNA, 80 nt, Human
gaaucaccugauuuccuuguccgcaaucccugggagacacucuucagggucugacugaauggaaaaggaagcagggaauc

SEQ ID NO: 4105015 - RNA, 91 nt, Human
gaaucacuuauaaaggccccagaguuuugauuuuuugcauugcugaugcagagauuuggcucuuaaagcucuuaucuuuuauacauuguuc

SEQ ID NO: 4105016 - RNA, 65 nt, Human
gaaucagaacuccuaccacagagagugauuucugaaucaaauuuuauagggagggguucuguuuc

SEQ ID NO: 4105017 - RNA, 58 nt, Human
gaaucaucaacucucccaguuugccccagacugaaggguuucuggggaugugggacuc

SEQ ID NO: 4105018 - RNA, 79 nt, Human
gaauccacagcuagugacugcuagagcaaggaugcaaauccaagcugauccaguuccaaagaucauuuacugugcuuuc

SEQ ID NO: 4105019 - RNA, 63 nt, Human
gaauccugucaucauaguacuugaagguuugaugauacuuggagaucauucugacuaggauuu

SEQ ID NO: 4105020 - RNA, 69 nt, Human
gaauccuuagcagggccgggccugggucacugggcuccgugcucccggcgcccacccugcuggggucuc

SEQ ID NO: 4105021 - RNA, 96 nt, Human
gaaucggccuagcuucugagcugacauuguacucuuagcguuguuuuuguaaaaaaugguauagguaguauauguacgcgaagacuugguuuauuc

SEQ ID NO: 4105022 - RNA, 63 nt, Human
gaaucuaugccucauauagaccagagauggagacguucuacccuaauguaaguguauggauuc

SEQ ID NO: 4105023 - RNA, 117 nt, Human
gaaucucuggggguggagcuuagguguccacauuuuaaacuuauggaccagguaaaucuaauucauacuaaaguguaagaugugagaaccacguuuuauccacucccaaagggguuu

SEQ ID NO: 4105024 - RNA, 78 nt, Human
gaaucugaccucccgccuuggcuccucagacauugccaaaguagauucugugagagucaaaguuaggaguuucuauuu

SEQ ID NO: 4105025 - RNA, 64 nt, Human
gaaucuuagaaagguuaaggaacuuggucaaagucauacacguuaauuagcaaagcugagauuc

SEQ ID NO: 4105026 - RNA, 68 nt, Human
gaaucuuuggggaccaauuuauagucucucuguuguguuucagucugagagaauugccuuagauguuc

SEQ ID NO: 4105027 - RNA, 87 nt, Human
gaaugaaauaauuggagagacuauguauuagcaauaugcguuuucacguaugcauaaggcauauagucacuuuuuucuagaucauuc

SEQ ID NO: 4105028 - RNA, 65 nt, Human
gaaugaaaugagauaauuuaagugccuggugcacaguaagcacucgguagaugucauuauuauuu

SEQ ID NO: 4105029 - RNA, 105 nt, Human
gaaugaauucagcacauggaauucauguucauauuuacauuuauagcuuacagaauuucuaugucauugaccccaagcugauaaacauaauuacaaaguucauuu

SEQ ID NO: 4105030 - RNA, 64 nt, Human
gaaugaccucagagcacccagaacagaauuuaucaggcccuucuacacaccucugaggacauuu

SEQ ID NO: 4105031 - RNA, 72 nt, Human
gaaugacuuucagcuucuacuguggggggauuauuaggaagacugacagcauagaauaagcugaagucacuc

SEQ ID NO: 4105032 - RNA, 90 nt, Human
gaaugagaagucucuggugaugcaggaaaaguaaaacuccauacucugcuuuucucuuuuucuguguauccaggcuuccuuuaauuauuu

SEQ ID NO: 4105033 - RNA, 58 nt, Human
gaaugagguugcauuuguuuguguaguuacuauacaaauuuauagaugcauuuuguuu

SEQ ID NO: 4105034 - RNA, 77 nt, Human
gaaugagucgaucugggggugcaauggucugcaguuagcuaauacgaaaauagaucuguuucccagcccuuuuauuc

SEQ ID NO: 4105035 - RNA, 117 nt, Human
gaaugaucucaucaagaaauguguuaucacuucaaauuuucagaagaaauggaagcaaaucaugaucacuugaaaauuugggagaaacugauaaagcaaguuugaaagaguccguuc

SEQ ID NO: 4105036 - RNA, 70 nt, Human
gaaugaugagggaggcaaggagaugcuauucauucucacaaauggagucucauuuuacuccuucucauuc

SEQ ID NO: 4105037 - RNA, 61 nt, Human
gaaugauuaacuaguugauacagacuuuaguauuugagucacuaucagcuuauaaugauuu

SEQ ID NO: 4105038 - RNA, 57 nt, Human
gaaugauuacagucacuguacuuuuauucuccagaagugcuaaguacuguaaucauc

SEQ ID NO: 4105039 - RNA, 101 nt, Human
gaaugauuuaagcaguuucugaugcauauuucccuuuacauguauuuuguaaaauuucugcaugcugaaggugaauugacaauagaaagcuaauauuuguc

SEQ ID NO: 4105040 - RNA, 66 nt, Human
gaaugcaggaaugcacaugccuucgauacacaaaccaaaaaugauacaaugugcaauuuuguauuu

SEQ ID NO: 4105041 - RNA, 57 nt, Human
gaaugcagugacggaggcuuacagucuuacaucgagaugccucaaaucagugcauuu

SEQ ID NO: 4105042 - RNA, 66 nt, Human
gaaugccccuguuugcuuggcagcaaccugucaugguaguuaggauugcuguaugcaggagcauuc

SEQ ID NO: 4105043 - RNA, 114 nt, Human
gaaugcggcauuuuugucauuccuccaacaggcuuuauguuuaaaguuaaauucccuuaggagcuuuuaacugaggcugucgaugggauagaaacaaucaguuaaugccauuuc

SEQ ID NO: 4105044 - RNA, 76 nt, Human
gaaugcucuguggucuuuaaauuugugccuguuuuuucuccaguccagcaaaauuugaggauugccuggggcucuc

SEQ ID NO: 4105045 - RNA, 59 nt, Human
gaaugcugguguucagaauuuuuuguguauugacauggauucugcaugccaugcuauuc

SEQ ID NO: 4105046 - RNA, 60 nt, Human
gaaugcuuaggcugguuacuguuccgcccacuuagagaagguaacaagcacucugcauuc

SEQ ID NO: 4105047 - RNA, 56 nt, Human
gaauggaugcuggacaaaaugcugggagggagaccuguuauuccaggcauucauuc

SEQ ID NO: 4105048 - RNA, 80 nt, Human
gaauggcacauggagaauguccaggccacuuauacauagauuuaaguaguuaggaacauucucucuugguuuaucuauuc

SEQ ID NO: 4105049 - RNA, 56 nt, Human
gaauggcauagcuuucuuuacaaacuuuaguaaauguaugggagagcuugucauuc

SEQ ID NO: 4105050 - RNA, 60 nt, Human
gaauggcuggguucuucuauagguauagguuuaacuuaaucagaaauugcccagcuguuu

SEQ ID NO: 4105051 - RNA, 62 nt, Human
gaauggcugucuggaccuuggaaaguaagagucugaaucuuuaucuagucagucagucauuc

SEQ ID NO: 4105052 - RNA, 62 nt, Human
gaaugggaaacucuaaacuugaguaaggcauuucaccuugcucuguucaguguaucuuguuu

SEQ ID NO: 4105053 - RNA, 75 nt, Human
gaaugggcuuggcaggcaccaacuuccuggggagccaacugggcagcuucccgggggugccaggagugcaaaauc

SEQ ID NO: 4105054 - RNA, 120 nt, Human
gaauggucgauaaaaauuuguggcuuuuauugaugaaaaauuuuccuucaguuucauaacuuguuauuggaaaugucaugcaaauuuuuagaacugcuaucaaauuugagaaaaccuuuc

SEQ ID NO: 4105055 - RNA, 89 nt, Human
gaaugguuuaguugcccuugauuuuauauauagugauccagucauaaaacuguaguuuauguguauaauuacaggaagacaauucauuu

SEQ ID NO: 4105056 - RNA, 77 nt, Human
gaaugguuucaaauuaaagucuuaagagacaugacaaccaaagcaaugcaucuucaagauuaaauuugagauugauc

SEQ ID NO: 4105057 - RNA, 113 nt, Human
cuucuccaaagugccggguuucucaagguuuugauuugcacguggcuuuccauuuuuaaacucccauggggaggcguggagacaacucuggggugagggcgagggugggggag

SEQ ID NO: 4105058 - RNA, 58 nt, Human
cuucuccguaggggccuugccugggacuacaacucccaggaugccgcaggcggagaag

SEQ ID NO: 4105059 - RNA, 96 nt, Human
cuucuccuccaagcaauggggcuugggaaauguguuucuggaccaccacccugugguaucuaggcauuuuccaagaggaaccagcuccuggagaag

SEQ ID NO: 4105060 - RNA, 70 nt, Human
cuucuccuccuuuuuucaacauaguccuauuuacuaucagacaaucaggcuggguauuaaagaggggaag

SEQ ID NO: 4105061 - RNA, 81 nt, Human
cuucuccuuauucagugcgggaacucagccgguuauauacaguuaacugguuccacaaaugcgcaaccugaagcagagagg

SEQ ID NO: 4105062 - RNA, 65 nt, Human
cuucuccuugccaaagcuuucucuuugagucccuauaaacuacuaguacuuuggcaggagggagg

SEQ ID NO: 4105063 - RNA, 57 nt, Human
cuucucggauuacacaccuucuggagugacuagucuccagggauguugaacugaaag

SEQ ID NO: 4105064 - RNA, 73 nt, Human
cuucucugccuggugaguuccucagcuuaaauguuaccucuauugugaugccuaacuccaccaggcagguaag

SEQ ID NO: 4105065 - RNA, 63 nt, Human
cuucucuggcuccucagcgcccaggaccucccugaugccgggguggggaaggggccggggaag

SEQ ID NO: 4105066 - RNA, 63 nt, Human
cuucucuuucucuuuuccauguucuagguuguuuuaguggccugguggugaaggguggaggag

SEQ ID NO: 4105067 - RNA, 61 nt, Human
cuucucuuuguguucacugcagugcuugguacauauggcauucaaugaaaacaaagugagg

SEQ ID NO: 4105068 - RNA, 56 nt, Human
cuucugacugucuuggcuucuggacuuuuccagggcuagaaauucugcaguggaag

SEQ ID NO: 4105069 - RNA, 70 nt, Human
cuucugagaggggcuaggagcagauuuuaguauauuaaggugucuacagagcuccaagccccuuuagagg

SEQ ID NO: 4105070 - RNA, 85 nt, Human
cuucugauaucugauagcauuuauuucuuugaaaaauggauaaaaaugaucuacaaaggcauagugaauguuuuggguauggaag

SEQ ID NO: 4105071 - RNA, 59 nt, Human
cuucugcagagcccugaaccugccaaugucgauuggaaaggucagcccagcucuggaag

SEQ ID NO: 4105072 - RNA, 68 nt, Human
cuucugcaggugccauagacgggccuggggggagcaugcccgccgguaguugagggcacuaguugaag

SEQ ID NO: 4105073 - RNA, 64 nt, Human
cuucugcccggagcuggcaaaggcugccacaaaugcaggacugguuaaaguuccgaggcagagg

SEQ ID NO: 4105074 - RNA, 74 nt, Human
cuucugccgucccugcaguacaggcaacagaaagucauacaaauugcaaagagggacuccagggaugacagaag

SEQ ID NO: 4105075 - RNA, 55 nt, Human
cuucuggaagcuguaggggaaauucuauuuuguugccuucuccagcuucuagaag

SEQ ID NO: 4105076 - RNA, 55 nt, Human
cuucuggaagcuuuuggagagaauccauuucuuugcuuuucucagcuucuagcgg

SEQ ID NO: 4105077 - RNA, 127 nt, Human
cuucuggagaaaacaagguggcauucuugaauaauuucuaucauuccuguuucacucaauguaaaggaaacucuaggacgaugggauaguugaccuuuauugugcuuucuucuaugcucucacgaag

SEQ ID NO: 4105078 - RNA, 71 nt, Human
cuucuggcuggggcacagucugaauguuucugaauccagcaaagaaugcagauuugccucagggcuugaag

SEQ ID NO: 4105079 - RNA, 75 nt, Human
cuucuggguagaagauuccucaggagaggaccugaaaucugugguugucauuucuguaucuucagugcccagcag

SEQ ID NO: 4105080 - RNA, 67 nt, Human
cuucugguucuuauaaguuaauauuuccaauuaggaacucucauuggcaacuuacuggaguuagagg

SEQ ID NO: 4105081 - RNA, 77 nt, Human
cuucugugacguaugugaggacagcgacguuccccuauaucaguucuggucuucaggcagcauugcaucagcgggag

SEQ ID NO: 4105082 - RNA, 59 nt, Human
cuucugugcgccucuauucccuacuuugucugauuuguggugaaggcuaagcacagagg

SEQ ID NO: 4105083 - RNA, 57 nt, Human
cuucuguggcugagaaggcagcugcuuuaucagucugcagcuucucugcaacaggag

SEQ ID NO: 4105084 - RNA, 55 nt, Human
cuucuguggcuggagaacuugucuaacuacacgagacagacaagcagccgcaaag

SEQ ID NO: 4105085 - RNA, 73 nt, Human
cuucugugugcuaguuuugucaguauuggugucaugaaauaauuauaaggacuugaauuagacauuuaagaag

SEQ ID NO: 4105086 - RNA, 79 nt, Human
gaauauaaacaguaggcuaaagcuauaucuuacccucaaaucugggugaaaugaucaguuugguuacugcuuuauauuu

SEQ ID NO: 4105087 - RNA, 73 nt, Human
gaauauagucuuaaguaguagacucuuguuuuaauuaauaaagcuacgaguuaaauagcuuaggauucauuuc

SEQ ID NO: 4105088 - RNA, 72 nt, Human
gaauauauagaaacccaggauuuguauuuguauuuaaauguaaauacaaaaggucugggucucuguaucuuu

SEQ ID NO: 4105089 - RNA, 69 nt, Human
gaauauaugaaguuacagguaagaaacugcccaaacagaaaguuuguuauuacuaauuuuaugcuguuc

SEQ ID NO: 4105090 - RNA, 73 nt, Human
gaauaucaugcuaaaauaucugaagauuaugcuauaagcaaaguaaacacagguguuuuguguaguuguguuu

SEQ ID NO: 4105091 - RNA, 80 nt, Human
gaauaucauguuacaguggcuuuuuaaacacuuaagaacguuucucuuauuuguaagcaucacugugaugugguuuuguc

SEQ ID NO: 4105092 - RNA, 64 nt, Human
gaauaucccaaagaugaaauaacugcuuagagaaacagcaaguucucugucacuggggguauuc

SEQ ID NO: 4105093 - RNA, 107 nt, Human
gaauaugaauggcaguaauuaggucucugaguuuaggaccaggcugagcaaaggaaaggaaguucaugucugggcuagugcucacaggcccugcacuuccuuuauuc

SEQ ID NO: 4105094 - RNA, 74 nt, Human
gaauauggagacuaugccagacugugagcuucuugaaggcaggaacaucaaagucugcaucaucuuuuauauuc

SEQ ID NO: 4105095 - RNA, 129 nt, Human
gaauaugguugguuuuggccuuagggagggcucuuuuuguaaguuugcuguuuauuaacuccacacguaaacaguguacuaaauaguaagaggaauccucugcuaauguucugccucaaaccuaaguuc

SEQ ID NO: 4105096 - RNA, 88 nt, Human
gaauaugugaguauauacaugugugagcgaagaugugagcacguaagcauaugugagugucucaauauguguguaaguucauauguuu

SEQ ID NO: 4105097 - RNA, 114 nt, Human
gaauaugugccuccaaagaugucauaaaaauguggguaacugagggugaagugugcauacauacacacaugcauuugccuuaugaaagugaucucuuaggagugucaaauguuc

SEQ ID NO: 4105098 - RNA, 74 nt, Human
gaauauugccucaguguagcaggcuucuuagcauucaauugcugcagaauuuccuucucauuauucuaauauuc

SEQ ID NO: 4105099 - RNA, 130 nt, Human
gaaucaacaaugacuuuuuggagugaaugaaaugguuuagcaaacaaaugaaaugguuuuagcaaacaaaacauuugucuuguuucucaacccucauuuauuguuuccuguucuuguuugaauuuuauuu

SEQ ID NO: 4105100 - RNA, 67 nt, Human
gaaucaacagguuugcugcuguuuuaggauuugccaauuguuaacauaguggcgcaucugcuguuuc

SEQ ID NO: 4105101 - RNA, 63 nt, Human
gaaucaaucaaucacccucuuuuuaguaaaaauccaaauggguuuugguggugguuuugguuc

SEQ ID NO: 4105102 - RNA, 65 nt, Human
gaaucacaaggcuuucaucuggcauaagcagaauuggcauaugccaauauaauacuuugagauuc

SEQ ID NO: 4105103 - RNA, 104 nt, Human
gaaucaccucaugacuagcggggcaggccucuaauucaccgcaggauuuccaguagguuggauugugggguugguguuugcacuccaaagaguuggcgugauuu

SEQ ID NO: 4105104 - RNA, 69 nt, Human
gaaucagacuacaaaugaccccugguccaugcccggccuguaacggggccauuuguaguuucugccguc

SEQ ID NO: 4105105 - RNA, 66 nt, Human
gaaucagagaagcugccaggcgagcuguuguguucaagagugcuuggccuuagcugcucuccaguc

SEQ ID NO: 4105106 - RNA, 71 nt, Human
gaaucagcagagguuuugcuccaugaucccuagucugggucauaaaagcccguggagccucugcuugauuc

SEQ ID NO: 4105107 - RNA, 58 nt, Human
gaaucaggaagggaaaauaguucggggaaugcccccacuguuuucuucauccuagguc

SEQ ID NO: 4105108 - RNA, 60 nt, Human
gaaucauagaacauuaauagaagugcucuccuaggucucuauucaaauguucuuugauuu

SEQ ID NO: 4105109 - RNA, 87 nt, Human
gaauccaaagaugaaguagacuagaggaucagcaagggcuccaaagaaagaguauuuggugaaucuauggucaggcuuuagugguuc

SEQ ID NO: 4105110 - RNA, 58 nt, Human
gaauccaagaguuugguaaagcaggaauacaaguuugcucugcugaguccuaggauuc

SEQ ID NO: 4105111 - RNA, 106 nt, Human
gaauccgaaacccggggugggacacagccaucuguguuuuaacaacccccuuuaaggcucguuaaagcacagauggcugcgucccacccaagguuucaugugauuc

SEQ ID NO: 4105112 - RNA, 57 nt, Human
gaauccuaauuugcugaaugcuuaguuuugccucaaugagcauccagucaugggauc

SEQ ID NO: 4105113 - RNA, 79 nt, Human
gaauccuagcucaacugauuuacuggaauucuugcugaaagcaggcuagagugaucagauaucagguguggggggauuc

SEQ ID NO: 4105114 - RNA, 84 nt, Human
gaaucgcuugaaccugagaggcggagguugcagugaagccaagauugcaccacugcacuccagccuggugaaggagugagauuc

SEQ ID NO: 4105115 - RNA, 60 nt, Human
gaaucucuuugucccugaguuucagaagcaaauagugaagcuuugggcagaagaggauuc

SEQ ID NO: 4105116 - RNA, 94 nt, Human
gaaucugcucauguucuguauauugagguuauaguuggcucaaauauauaaccaucugcuauuucuauauuauaaagaaaugaagugcagauuc

SEQ ID NO: 4105117 - RNA, 56 nt, Human
gaaucuggucguuggugucuaaaugugccuguuacuugugcccaauguccagguuc

SEQ ID NO: 4105118 - RNA, 106 nt, Human
gaaucuucuuaggaauauggcuuauauugaggaucuccugcuaauuguuuguccuggucuaauugguauguuuucucaauuaacguuauuuuuaagauacaaguuc

SEQ ID NO: 4105119 - RNA, 109 nt, Human
gaaucuuuuuagucuuugccagucugauaggggagaaguagcagcucauuguuguuuaauuugcauuucucucauuguuagcuagguugagcauuuuaaaaauauauuc

SEQ ID NO: 4105120 - RNA, 59 nt, Human
gaaugaacaaggauguucauccgguauauuauccugcaaguugagaaccauguucauuc

SEQ ID NO: 4105121 - RNA, 73 nt, Human
gaaugaacacagcccugcuggcaaugaugaguaaucauauucaucucagcugugcagggauggcucaguauuc

SEQ ID NO: 4105122 - RNA, 82 nt, Human
gaaugaagucgugacuuucaauugcaggccuguguucugcaaugagcuuaugggucccaaucugaaaugucaugcuuuuguc

SEQ ID NO: 4105123 - RNA, 118 nt, Human
gaaugaauauauaacagacuuugcagcuaaccaggauaucuugaggucggaggcugcuguuguuucuccaggcucccucaggaugcacuguugccagucagcguuacucauuuuauuc

SEQ ID NO: 4105124 - RNA, 86 nt, Human
gaaugaccagcaauuuuacucuuccucuuccaugacauuguuauuauuuugaaccuuaacaguauugaaagaggauguggucauuc

SEQ ID NO: 4105125 - RNA, 109 nt, Human
gaaugaccgguggaagccaaguauugcuggauccacaggaggguuuggaaaagcaggagaauguuugcuucaccccaccuuguugccaguuuuuguccaccaaucaauc

SEQ ID NO: 4105126 - RNA, 89 nt, Human
gaaugacuaccagguuacuuaguuugaugccugggaauuuggccuaaguaacaaaggauaacuugguuuagaucuaaagugggucauuu

SEQ ID NO: 4105127 - RNA, 62 nt, Human
gaaugagaggucagaacaggaaagugugugauaccaccacaccccuuuuugacuugucauuc

SEQ ID NO: 4105128 - RNA, 70 nt, Human
gaaugagcugcugcuguuccaccguuugcuauguugaaggugcuauuccuauacagcauucagcucauuu

SEQ ID NO: 4105129 - RNA, 73 nt, Human
gaaugagggucuugaggaucugaacuguauuuuugaauaugggauaccaaaggacccuauacaaaacuuauuc

SEQ ID NO: 4105130 - RNA, 95 nt, Human
gaaugagguguucugguuaauuuaauuuucugguugagguuuaacauaauuuaaucuuauuuuuuaaugacagagaaacuugaauagcuuuauuc

SEQ ID NO: 4105131 - RNA, 87 nt, Human
gaaugaguaauucaguauaugccagagagauagcuacacuuuauagauuuuguaguuccuuacauguacuguuaacaaugcuuauuu

SEQ ID NO: 4105132 - RNA, 56 nt, Human
gaaugaguacccaugcaagcugaaagaugagaauuucagcuguagagauuacauuc

SEQ ID NO: 4105133 - RNA, 77 nt, Human
gaaugagucauggugauuauuuccauuuuucuuuagucauuaaugaaacucgaaauaaucacauucguggcuuuguc

SEQ ID NO: 4105134 - RNA, 58 nt, Human
gaaugaguuaauauuugcuuggcaucauagugagcauucaguaaauguuagcucauuc

SEQ ID NO: 4105135 - RNA, 62 nt, Human
gaaugauuugguuguuuagauuugucaugacucauugacuauaaauagcaacagaauuauuu

SEQ ID NO: 4105136 - RNA, 56 nt, Human
gaaugcaaagcucucuauguuauuuccuaauggauguuuaacaucggcuaugcauc

SEQ ID NO: 4105137 - RNA, 63 nt, Human
gaaugcacacgugugugcaugcacugugagcuggugugugcaugugcacuggugugugcguuc

SEQ ID NO: 4105138 - RNA, 96 nt, Human
gaaugcagugauaaauauguauggaguucaugaauucuacaaugauugacaagcuguuuaugaacuacagauauaacuaacauccuuuuugcauuc

SEQ ID NO: 4105139 - RNA, 57 nt, Human
gaaugcauucuaaaguguuuuauaccuauauauuggguccucuuuuugaauguauuc

SEQ ID NO: 4105140 - RNA, 127 nt, Human
gaaugcucugaauugauuugguuguaguguagccuuaaaauugguagucacucaaaauucagggcagauggucuuuaguguuugcguguacuccugggcauuuaucaauuagaauucagcagcauuu

SEQ ID NO: 4105141 - RNA, 61 nt, Human
gaaugcuggaagccucaguagauuuggggaguccauaucaguuuggugcuuucagugauuc

SEQ ID NO: 4105142 - RNA, 60 nt, Human
gaaugcuguagacagacucuauuaagucccaaaucuuugggcaguuuuucuccagcauuc

SEQ ID NO: 4105143 - RNA, 78 nt, Human
gaauggaguagacccaugccucucuugagugucucuuuguuuauaauucucuuugagaguaauguuuuuacuguauuc

SEQ ID NO: 4105144 - RNA, 89 nt, Human
gaauggcaugaaccccggaggcggagcuugcagugagcagagauugcaccacugcacuccagccugggugacagagugagacuccguuu

SEQ ID NO: 4105145 - RNA, 85 nt, Human
gaauggcuuugguuccuuucuggaggcccaagggcagaauccacuuucuucccucucccaguuucuagaggcucacagccccuuc

SEQ ID NO: 4105146 - RNA, 65 nt, Human
gaauggggaggggagguggaggcuuccacuuaaaaauuuuccccuuuguuuucuccugcccauuc

SEQ ID NO: 4105147 - RNA, 72 nt, Human
cuuauguaacugccuaauacaugaugauagguacacaacaaaugauuacuuuaucaauguauuaugcauagg

SEQ ID NO: 4105148 - RNA, 67 nt, Human
cuuauguauaggggcugcagggagagguuaggcuguggcauugagcccugauagccccuaucaucag

SEQ ID NO: 4105149 - RNA, 81 nt, Human
cuuauguuuugaaacuuaauccccaaugcaacaauauuaaaagguauagauguggccuuugggagauuauuaagucaugag

SEQ ID NO: 4105150 - RNA, 65 nt, Human
cuuauuaauggaauccuaaugagucugcuggugcccagccugagcuauuggaucuaagaaauggg

SEQ ID NO: 4105151 - RNA, 61 nt, Human
cuuauuagaaagaaaagacaugguggguuuuuuccccuuuauucuuugcuuuucuaagagg

SEQ ID NO: 4105152 - RNA, 67 nt, Human
cuuauucacacugaaucucccaugccuuguauagcacuaggcacagaauggcauucaguguuuugag

SEQ ID NO: 4105153 - RNA, 57 nt, Human
cuuauucuacuccacaagcucuucauaggagaaauggaggcuuggaguggagaugag

SEQ ID NO: 4105154 - RNA, 123 nt, Human
cuuauugcaccauauuuuuauuucagcaucucuucacugccauaaauaagagaaaguagaauguuuacuuuucuguguggcagucaccaugcuagacauuuacaaccaguguaaaucauugag

SEQ ID NO: 4105155 - RNA, 59 nt, Human
cuuauugccucugcggagcuguacaucaaaauauuuuggugcccccuagagguaaucag

SEQ ID NO: 4105156 - RNA, 68 nt, Human
cuuauugugggcauugaaaacugaugcauguuauuaucaugaaaucaauugcaauguuuauucuuaag

SEQ ID NO: 4105157 - RNA, 65 nt, Human
cuuauuuccaccuucccuugcacuuagcuuguaucuaguuauagccaauagaauguggagauaag

SEQ ID NO: 4105158 - RNA, 74 nt, Human
gaauugaagauuacuacggaacaugaccugcaaucacagacccaguuuauggccuauaggaucugaagcaauuc

SEQ ID NO: 4105159 - RNA, 98 nt, Human
gaauugacuguuguaaaaugugcguggauagugguugauuguuucuuuggcagagucauuauuuaugcaauuauuuguaguacacacauuaacaauuc

SEQ ID NO: 4105160 - RNA, 64 nt, Human
gaauugcuacugaagagcuugccacauucaugacauuuguaaggcuucucuccaguaugcauuc

SEQ ID NO: 4105161 - RNA, 59 nt, Human
gaauugcugaugaccuaaugcagaauaguuucauuccugcauauggagguuagcaacuc

SEQ ID NO: 4105162 - RNA, 77 nt, Human
gaauugguuccuucugcgggucaucagggagaacguguuccacgccccucucauuggcuuguagauauggccaucuc

SEQ ID NO: 4105163 - RNA, 90 nt, Human
gaauuuaaugucauauaugguagggaaauuugcucaguuagaauggcuacagaauggguuuuucauugucuacauaugacauuuuaguuc

SEQ ID NO: 4105164 - RNA, 67 nt, Human
gaauuuaauuauagcauuggaguggccuuugacaaauggcugcuauaaauuuuaugguaccaaauuc

SEQ ID NO: 4105165 - RNA, 101 nt, Human
gaauuuaguauuccaguccaaauguuuuccugagcucuaggcaaaauaaauaaaaagaaaccaacacuuagaaacaucuuggcaacuggaagaaaaaauuc

SEQ ID NO: 4105166 - RNA, 72 nt, Human
gaauuuauuccuuuauggcuggaggacucaugguaguuugcuuuuucaaagcuaguaaagagaguaagauuc

SEQ ID NO: 4105167 - RNA, 129 nt, Human
gaauuucacaagggacucauaaggugaauaaacuaagcucuggcauugauuauggaaagcaguggcuguaugaugucaggguugcugugaucaguccagccagaaauucacuuuucagugccuugauuc

SEQ ID NO: 4105168 - RNA, 65 nt, Human
gaauuucagguaccugugggauccccaagggagaggucccuuuggauagggguagcugacaauuu

SEQ ID NO: 4105169 - RNA, 72 nt, Human
gaauuugaacccaugcugaugaacuucuacuugcggugaaccuuagcuagacuucaauucagcuuucaaauc

SEQ ID NO: 4105170 - RNA, 99 nt, Human
gaauuugaguauauugaacuuuuugaccccuguguaagauggagauaacaauaaauuuuugcaaggguguuuugagguguaaaucaauucacauaguuc

SEQ ID NO: 4105171 - RNA, 96 nt, Human
gaauuugauccuuuggcagagaaccugggcuuugugaaggucaguucucacaaccacuaagagaguuugagguuucugacuaaagcuucacuguuc

SEQ ID NO: 4105172 - RNA, 71 nt, Human
gaauuugcaaaauuauucccagcaugacagacuguuuucaggucugaaugugacuauuugauuuucaaauc

SEQ ID NO: 4105173 - RNA, 65 nt, Human
gaauuugguugcgguguacucuccuccgauaaaaggcaagagagggcaaacuuguagcuaacuuu

SEQ ID NO: 4105174 - RNA, 78 nt, Human
gaauuuguuacagcagcaacagacagcuaauacaaacuuuauuuguacuaaaugugaaaugcuauugugacaaauauc

SEQ ID NO: 4105175 - RNA, 61 nt, Human
gaauuuucauacaugagacuagaugcauauucuaugugcucaguuccaugaguggaguuuc

SEQ ID NO: 4105176 - RNA, 129 nt, Human
gaauuuuguuauagaagcccgaacgaaucaggacagagaucagaacuucucugauguauuggaauaaucuucagugaaacuggagucugagcuuguguccuggacuuagugucagggcugggacuuuuc

SEQ ID NO: 4105177 - RNA, 85 nt, Human
gacaaaauagugucuguccagaacguacaucuugggugcucaaacccgacagugugccgucugagacgccgacgcaagugaaguc

SEQ ID NO: 4105178 - RNA, 72 nt, Human
gacaaaaugaaaaugggugagauuuguauaguacauaaugucuaaaaugcagaucuacugguaaaucauguc

SEQ ID NO: 4105179 - RNA, 72 nt, Human
gacaaaauugaaacaaugagcuuuuacacacugaugguaaaaacagcaguuugaaaaacauuguuuuaaguc

SEQ ID NO: 4105180 - RNA, 129 nt, Human
gacaaacagaaucuggaaagaguuauuugcaaauguauuugggcaugaagaaggaagugggucacaaaauuaugaccccugcauauuuagucuaauacacauccucauuccagacaacuaacugugagc

SEQ ID NO: 4105181 - RNA, 80 nt, Human
gacaaacucugcucagaacauuuaaaaagugguugacuuagguccuaaauaucuuuuugaaauguuaacaggguuugcuc

SEQ ID NO: 4105182 - RNA, 60 nt, Human
gacaaacuucccagacaagcuccuuugugccucuacguggagaggguguggaaaguuauc

SEQ ID NO: 4105183 - RNA, 55 nt, Human
gacaaagggaguugggguggccugccaggucacugggcuccagcuccucauuguu

SEQ ID NO: 4105184 - RNA, 60 nt, Human
gacaaagugaauugcuucagcaguggguagauaacccacuguuuuucaguuaacuuuuuc

SEQ ID NO: 4105185 - RNA, 87 nt, Human
gacaaauaguccucaugauagacuuuuugagcugaauaacuuggcugagguuaugcuuuuagaauuuagcaugaggagaguuaauuc

SEQ ID NO: 4105186 - RNA, 62 nt, Human
gacaaaugagucucauacccggaggcauuccuugucucagaguuggucugagaucguuuuuc

SEQ ID NO: 4105187 - RNA, 72 nt, Human
gacaaauguacacaaugauaaauuauuaagcaaaaccuugagugguaauuuacgcauuucuguaacuauguc

SEQ ID NO: 4105188 - RNA, 60 nt, Human
gacaaauuaaugaauggaugaaucaauggaucgaucagucgguccaccagucaaucuguc

SEQ ID NO: 4105189 - RNA, 62 nt, Human
gacaaauuagcccaggaaaacagggcaggaaaaaacugucuuuacuucugcuuguuauuguc

SEQ ID NO: 4105190 - RNA, 87 nt, Human
gacaacggugauaucaagacauaagugcuaugacauuguuuagcauagaauaggugauaaacaacuuauguuauugagaauucuguc

SEQ ID NO: 4105191 - RNA, 70 nt, Human
gacaacucuggcuuaguaugcuccaaaucagcacaaaacagauauggguguuaauggugagagauauguc

SEQ ID NO: 4105192 - RNA, 67 nt, Human
gacaacugcaggcaguuaauaugaacuaaagcccuacaggaaaguucagacugccuucagcauuguc

SEQ ID NO: 4105193 - RNA, 81 nt, Human
gacaacuuuuaagaaaaauucacagucaauaggcucuuuucugagagccugugggagguucugugaguccucuauaguuuc

SEQ ID NO: 4105194 - RNA, 128 nt, Human
gacaacuuuuuuuuucccccaggauagugauccccaaaggacaaaaugaaaagcuagccgcuccccucccaaaagcuagcugcccaucuuuccuuuaggagcuaggacccugggauccugacgauguc

SEQ ID NO: 4105195 - RNA, 69 nt, Human
gacaagaacauuuguuucguuaugugaacuuugaucaugaguuuaauaacaugaacaaguaaucauguu

SEQ ID NO: 4105196 - RNA, 58 nt, Human
gacaagacugguuuauuuaagggcuuaguucuccuuuggaaauggagcuaaucuuguc

SEQ ID NO: 4105197 - RNA, 72 nt, Human
gacaagagaaugacaaggagaaccuaaauuuggagaaucacagggaccaggagcuccugcaugcuuccuguc

SEQ ID NO: 4105198 - RNA, 76 nt, Human
gacaagagucucccugggguaacauuagagggucagcaggccugcauuccuuaugaagacccuaggagagaauguu

SEQ ID NO: 4105199 - RNA, 62 nt, Human
gacaagcaaguagguauuugacaaauguuuaucaguuugauugguuaccuauuugugauuuc

SEQ ID NO: 4105200 - RNA, 74 nt, Human
gacaaggaaauacucagaaagcaaucuggugaggugacaaacuucagucuccaaugcucugugaauuuccaguc

SEQ ID NO: 4105201 - RNA, 55 nt, Human
gacaaggcagcuauugucuccauaguuucuauuaucuuaccacagcugucuuguu

SEQ ID NO: 4105202 - RNA, 67 nt, Human
gacaaggccuuaagaacaaaacuauuuggauccacugaaauaaauggucucuaagggucuucuaguc

SEQ ID NO: 4105203 - RNA, 61 nt, Human
gacaaguaaaggcaaauagagggauggcagacagcauuccuguaucugcuucuuacuaauc

SEQ ID NO: 4105204 - RNA, 69 nt, Human
gacaaguagguuauuuuuagcaaccaacauuaugaaggugacaaaaugagagaaauagccuuccuuguc

SEQ ID NO: 4105205 - RNA, 62 nt, Human
gacaagucacucuaucauuuucaacuuaacaagagagaaguggaaaggcugggagauuuguc

SEQ ID NO: 4105206 - RNA, 76 nt, Human
cuuccauugcccuauccauuucauuuuggaacccagauacuccaguuccaaaaugaaauggauagggcaauggaag

SEQ ID NO: 4105207 - RNA, 63 nt, Human
cuucccaagggcucugugugccuccccacggccccugcugugaugggaagagcccuugaguag

SEQ ID NO: 4105208 - RNA, 67 nt, Human
cuucccacuaguaucacagagcuggucuuaaacuuugaccauuugauuucucuguguuggugugaag

SEQ ID NO: 4105209 - RNA, 64 nt, Human
cuucccagacaauggaaagcccgaaucaacaauaacaauuuuugugggcagauuccauggggag

SEQ ID NO: 4105210 - RNA, 55 nt, Human
cuucccagaggagauuugcuuauauuugaguguaaugagcaaucuuucugggcag

SEQ ID NO: 4105211 - RNA, 70 nt, Human
cuucccaggcuggauuuugcaguucacgaacucuugagccaugcagaugggcugcgaucuccccgggaag

SEQ ID NO: 4105212 - RNA, 60 nt, Human
cuucccaggugcucuuagcaugugggcguaguccuaacaucugcaagcauccugaggggg

SEQ ID NO: 4105213 - RNA, 74 nt, Human
cuucccauccuuggaaauuugaagacuuuucugcuggcugguagagaauccucuacauguuuuuuugggggaag

SEQ ID NO: 4105214 - RNA, 62 nt, Human
cuucccauucuuuccauggaaccaggcuggacccaguauuccaggaccaggaagaggggaag

SEQ ID NO: 4105215 - RNA, 59 nt, Human
cuucccauuuaaggcacauaugucuuaccuuccuggcuguguucaucuuuaaagggaag

SEQ ID NO: 4105216 - RNA, 90 nt, Human
cuucccccaacccauccaugaggccagcaacgcuuguagagaucacucugggcuguaauguggcacugaugggcugggacauaagggaag

SEQ ID NO: 4105217 - RNA, 68 nt, Human
cuuccccuagcacccauagaggccgcuugguaacacagccaggugccaccucuggugcugucuggcag

SEQ ID NO: 4105218 - RNA, 63 nt, Human
cuuccccuugauaagcaggguugucagugcgucacugaggccagcacaugcucaucagggaag

SEQ ID NO: 4105219 - RNA, 124 nt, Human
cuucccuacacacuccaguauuugcaugcuaauuuuuuccuucaugacuuaagagccucugaagcucuuaauguucugguugaggauauguagccaccuagaacugaccagacauuuggagagg

SEQ ID NO: 4105220 - RNA, 90 nt, Human
cuucccugcgacccagagcaucacuguccucuccccgccaggaaaggggugcgggguggggagaggggaggagugggucuuggaggggag

SEQ ID NO: 4105221 - RNA, 70 nt, Human
cuucccuuaaacugcaaugauguauuuguccugucccaagaugagacaauauccuuuguaaccagggaag

SEQ ID NO: 4105222 - RNA, 128 nt, Human
cuuccgugugucgccgccguugccgccucagcuucagccucguuacuccugcgguucugugacugugcugcuggcguuaacggcgcgaggugaagggaggugacggagugugcccgcgcgcgcggggg

SEQ ID NO: 4105223 - RNA, 130 nt, Human
cuuccuacuguccauggcuuuugggcccauggguuuuccucccugccuuguguggccaggagccaggggaauaaaggagaaaugcccaugacugcuugaaaacuagccuugacaacggcaggucaggaag

SEQ ID NO: 4105224 - RNA, 110 nt, Human
cuuccuagaagcaaaagagccaggaaagcauugguaggauuugaacccagauaagugugacuccaaggccacaugcauuccacuuaguuuuacuugucuucaucaggaag

SEQ ID NO: 4105225 - RNA, 101 nt, Human
cuuccuagcuccccaaggauggauaacacuaacauauagucagugggaaagaaaucucagaaaauaacuguuaguuugucacugucaugggaaaugggaag

SEQ ID NO: 4105226 - RNA, 79 nt, Human
cuuccucacccacaccuccguauaucacuaagugagcaaggaugagagugauauauaaugaggugagggauguuggaag

SEQ ID NO: 4105227 - RNA, 55 nt, Human
cuuccucccggcccaugcucuggccucaggcuagggugugugugcuggguggagg

SEQ ID NO: 4105228 - RNA, 81 nt, Human
cuuccucggacuguguucagcaccuuaggugaagaaucaaucguucuaaaucacagaaaagcugagcaucagauggagaag

SEQ ID NO: 4105229 - RNA, 67 nt, Human
cuuccucuguguccugggcuucuagcacagagggucagaaugaaacaagcccaggacacagaggaag

SEQ ID NO: 4105230 - RNA, 87 nt, Human
cuuccugagucuuaauuucuucagcucuaaaauggagauaauaacauacaucccauggaguugacaugaagguuaacucaagugaag

SEQ ID NO: 4105231 - RNA, 59 nt, Human
gacgucuguuuccgauucucuuggguuugucccaggagugagcuuuggggucagauguc

SEQ ID NO: 4105232 - RNA, 80 nt, Human
gacgugaucccacaggguaacucaagugccuccuuugugguggccuuugugguggcccaguguggacggaucucauuguc

SEQ ID NO: 4105233 - RNA, 86 nt, Human
gacuaaacagagacaaacacugcaacuucugaggccacagcaguuacuaggcuagauaagaggaaguuuguagauguuucuuaguc

SEQ ID NO: 4105234 - RNA, 60 nt, Human
gacuacauuucauccagggagagcuaucuggauggcucugauuuaggaugcagguguguu

SEQ ID NO: 4105235 - RNA, 123 nt, Human
gacuagaauauuuacaaggaagguagaggccagcaccagagucaagaaaugcaguuuccgcagcuucucacugcuucuggcuguguuacuaccagagcuccuaggugucugucuguucugguc

SEQ ID NO: 4105236 - RNA, 59 nt, Human
gacuagcccuguaggcacuugaguuucaacccauauuuaaggccugcuuacugcuaguu

SEQ ID NO: 4105237 - RNA, 62 nt, Human
gacuaggagcacacauccaaaugcccgcagcauaccuggggcaguguggucgugccuuuguc

SEQ ID NO: 4105238 - RNA, 93 nt, Human
gacuauaagcuccaugaggacaggcaccuugucugucuugcucauugauuuugguggcagacacagugccugucacaugaggggagcucaguc

SEQ ID NO: 4105239 - RNA, 83 nt, Human
gacuaucuguacuuuauauaaaaggaucuguuugguuuuaaaaugaauucaguuucuguuuuaaauagcaguauaaaauaguc

SEQ ID NO: 4105240 - RNA, 112 nt, Human
gacuaugauuuguuugucuuuauaucugucccagcugcugagauagugcuugucacaucauagguauucaacucuuugcugaaugaaugaagacauuaacaagugaaaaguc

SEQ ID NO: 4105241 - RNA, 69 nt, Human
gacuaugguuuaguuagggcuuuucagauuugaaaaguguaucugagggaauuugacaaaauuauuuuc

SEQ ID NO: 4105242 - RNA, 66 nt, Human
gacuauuaaacagccuccccuuucacucucaaaaaugucugaguguggaugauagguugugugguu

SEQ ID NO: 4105243 - RNA, 76 nt, Human
gacuauucauuagauaauguuauuguaauuuucauuuucugauguuaaguuguacugauuuaucugagagaauguc

SEQ ID NO: 4105244 - RNA, 65 nt, Human
gacuauuccaagcacagcaacccagaagagccaaagcccuggaguugggaugugccuggaauguu

SEQ ID NO: 4105245 - RNA, 81 nt, Human
gacuauuccacaaugucucuauaucucauaagaugcuuuaccuaacugcagagucucuuccguggagaugcuuggguuguc

SEQ ID NO: 4105246 - RNA, 57 nt, Human
gacuauugcacacuucucucaccccgcucgugggucuuagaagggcuggcaggaguu

SEQ ID NO: 4105247 - RNA, 101 nt, Human
gacuauuggcucugagagcuuuuauuggauuugccagcaaacccugccauccuauguuggcaaaauuuaaagaagugauaauaaaauuggagcucaaaguc

SEQ ID NO: 4105248 - RNA, 58 nt, Human
gacuauuuaaaaagaacuacugcaguggggaguuugcaguaguggagagagaucaguc

SEQ ID NO: 4105249 - RNA, 71 nt, Human
gacuauuuaguuucagauuaguugacaaaguaacgaacaagcuuggggugaucuugaacuaaauaaacguc

SEQ ID NO: 4105250 - RNA, 73 nt, Human
gacuauuuucuaaucaugccacauguagggaccaucuuggggacaagacagcaucuguguggcaggaguaguu

SEQ ID NO: 4105251 - RNA, 63 nt, Human
gacucaacacagccauuccccuagaaguuacagcacuucuagggucaccuguguucagagauc

SEQ ID NO: 4105252 - RNA, 72 nt, Human
gacucaacgcagugagucuguaaaaggcucuaacauguaggagccuuugaccaguuuccuguuuucuguguc

SEQ ID NO: 4105253 - RNA, 59 nt, Human
gacucacuaccuaaaccagacuuccugcuucuaagucuugugcuggaggguagugaguc

SEQ ID NO: 4105254 - RNA, 60 nt, Human
gacucagagaguuaagugaauuacccaaggucacauaccuuguggcacaacugccugauc

SEQ ID NO: 4105255 - RNA, 66 nt, Human
gacucagcugguucaguuucugggccucgugugggcccccagcagcuuaaccacuucucucaaguc

SEQ ID NO: 4105256 - RNA, 67 nt, Human
gacucaguggcucaugccuguaaucuuagcacuuugggaggcugaggcaggcagaucacuugagguc

SEQ ID NO: 4105257 - RNA, 63 nt, Human
gacucaguucucuuaccugugcggaagaugcuaagaucugaucagcagaugaugaggcugguc

SEQ ID NO: 4105258 - RNA, 66 nt, Human
gacuccaaccugcaucauuaagguacaguuggcuccaguggauuagugcugaaaugaugggaaguc

SEQ ID NO: 4105259 - RNA, 74 nt, Human
gacuccacagguguacuguaccuuccgcaggugacaggaggacccuggcugaaggucagucacacugugggcuc

SEQ ID NO: 4105260 - RNA, 86 nt, Human
gacuccgcugcgcugaggccugguagccgagccccaggggccaccucuggcagcccgggaaaccaagccugagcccagccaugguc

SEQ ID NO: 4105261 - RNA, 101 nt, Human
gacuccuccauguacaccgcgacucacuuagaggcuggaggcucucuucucucaggccuuugcacgugcaguugcccugccuagagcaccuuuucuaaguc

SEQ ID NO: 4105262 - RNA, 78 nt, Human
gacucucacacuuuaguaugaagagguaggccacuucuguaagccugauuccugacuuuuugcugaagagacugaguu

SEQ ID NO: 4105263 - RNA, 90 nt, Human
gacucugacuucugguuguguuacguucuguggugccaaugagacaggaacagaaaggccuuuagagcaaacgccaccuacagcagaguc

SEQ ID NO: 4105264 - RNA, 83 nt, Human
gacucugaggguguuccugacuaggagggcuaagguuugugaucuaaccuuagcccuccuggucagugaggccaaagaaaguc

SEQ ID NO: 4105265 - RNA, 64 nt, Human
gacucugauuuaucugcguuccuuggacaccaacaggaauugcaggcagaucucaaucagaguu

SEQ ID NO: 4105266 - RNA, 88 nt, Human
gacucuggaauauuaacuaauuuucccaaggccuucuaucuaacaagggauggggccuguauuuaaaauucaguuuuauuccgaaguc

SEQ ID NO: 4105267 - RNA, 58 nt, Human
gacucuggaugagguccugucuguuuucaagaaagagacccuggaguucuucacuguu

SEQ ID NO: 4105268 - RNA, 58 nt, Human
gacucugggccccagguggagcugugcugccccuacagccugcagaaggcccaggguc

SEQ ID NO: 4105269 - RNA, 65 nt, Human
gacucuggggcagcuccaucuauuccaaagcaacaacuuuaugugauuauguuagucccaggcuc

SEQ ID NO: 4105270 - RNA, 55 nt, Human
gacucuguggcuguuaucuuuauaucuuuucuugagauauuaauagcucaguguc

SEQ ID NO: 4105271 - RNA, 79 nt, Human
gacucuugcccucugaugucugggggcuggauaacaacagaauuuauuauccaaaccuggacaugagugggaaaggguc

SEQ ID NO: 4105272 - RNA, 62 nt, Human
gacugaaacugggcccagucugaguugggccuagggcuuaguucagggcucaguuugcuguc

SEQ ID NO: 4105273 - RNA, 55 nt, Human
gacugaaauuauaccaagugguuaacguugggcaaauuacuuggcaaagucaguc

SEQ ID NO: 4105274 - RNA, 65 nt, Human
gacugaagcauuguuugaauaccauaauuucuuaccucagaaaaugguuuacaauguuuucaguu

SEQ ID NO: 4105275 - RNA, 109 nt, Human
gacugaauugugcaaaugaguagcgaugcacauuagaaaacaacauuauaaaaucagguaugugaaauccugagauguacuugcuuuauuuauuuuaacaagggcaguu

SEQ ID NO: 4105276 - RNA, 80 nt, Human
gacugaccuugguuggaauccugccucugcuacuuaaaagcuaagugacauugggcagguuuccuuaaucuccuucaguc

SEQ ID NO: 4105277 - RNA, 60 nt, Human
gacugacucccacagcuuuauuugcuccaagcaggugagcuuauacaugugaagucaguu

SEQ ID NO: 4105278 - RNA, 61 nt, Human
gacugagaaacaguacauuaccaggacuccauaaaaccguccuucauacugucuucugguc

SEQ ID NO: 4105279 - RNA, 73 nt, Human
gacugagcuuugagauucuuaugguagcucuuaacuccugggaaugaggugccaagggaagcuaagagccguc

SEQ ID NO: 4105280 - RNA, 57 nt, Human
gacugaggcagguuccucaaauugcaucugcaaguaggaaccuaagagccugcaguc

SEQ ID NO: 4105281 - RNA, 65 nt, Human
gacugaggcuuaaagcuagagacuuaaauguuauaaagauaaggcagcauaauuaggccacgguc

SEQ ID NO: 4105282 - RNA, 57 nt, Human
gacugaggugaccuaggacuaccucugccaaguagacugugugagggucccucaguc

SEQ ID NO: 4105283 - RNA, 65 nt, Human
gacugagucaggauuauaauccccaugggcuucauuauguccagauuucauuucuacuccuaguc

SEQ ID NO: 4105284 - RNA, 74 nt, Human
gacugauauaguuugugaaacacagcaguuguuuuuucaacccugcaaggcuccaaauuaccaagcucucaguc

SEQ ID NO: 4105285 - RNA, 82 nt, Human
gacugauggcagcagggcuugauuauguuacuuucuaauacuuccugaaaugcaugguauuuuuccuguuugcccauugguu

SEQ ID NO: 4105286 - RNA, 70 nt, Human
gacugcacuccagguuuuuucacugaaggggcaauacaccuuuaaugugagacaaaccuggcuuccaauc

SEQ ID NO: 4105287 - RNA, 55 nt, Human
gacugcaugauguuccagaggaguuuagucuuuaccuuuagauuucuaugcaguu

SEQ ID NO: 4105288 - RNA, 57 nt, Human
gacugccauaggcuuugcaguauaaugaaguauuauuucucaguaguaauggcaguc

SEQ ID NO: 4105289 - RNA, 70 nt, Human
gacugccccagcaucaccgccauuucugaugugaagacacccuccgcaguauguaggugcuguuucaguc

SEQ ID NO: 4105290 - RNA, 77 nt, Human
gacugccccagugccaggcaggugugcccugggcucugccgccacccuccacgcuugcuggcaacacugguaugguu

SEQ ID NO: 4105291 - RNA, 60 nt, Human
gacugccccaguucaaauccuagcugugcuacuuaccagcuguguggccuugggcaaguu

SEQ ID NO: 4105292 - RNA, 76 nt, Human
gacugcuacgcuuuaacgugagaagaagggccucuugauucccagccagcccuuugcauuugaaaccuggcagcuc

SEQ ID NO: 4105293 - RNA, 63 nt, Human
gacugcuacuagcuguaugcauuuguguguauugcugugagugcauguccaguaguuuauguc

SEQ ID NO: 4105294 - RNA, 83 nt, Human
gacugcuuuggugcuaguuguuuuucaguuuguuguaucuaaacuccauaagcuggaggauaacucacuucucuuaguauguc

SEQ ID NO: 4105295 - RNA, 124 nt, Human
gacugcuuuugccuaggaccugugagagguuccuguuagaacugcaggacgauucagcaucuuuaaguuucagaguuuugagaggaaucaucuaguguguacaggcuuaaaggcauggacaguc

SEQ ID NO: 4105296 - RNA, 75 nt, Human
gacuggcaugguucccuaagcauugcaauggcguucacacagugugccaggaggcggcuugggaaagugcugcuc

SEQ ID NO: 4105297 - RNA, 90 nt, Human
gacuggcugcaguuguuugugaggcagaacaaauuauaaaaugauuauggcuucagagauguauguuucuaaaugauugcuucgccaguc

SEQ ID NO: 4105298 - RNA, 86 nt, Human
gacuggcuucuauuguuuauuucuugcguuuuuguugcauuucguugcagauuuaagagauaaacaguggaaggcgcuuucaaguc

SEQ ID NO: 4105299 - RNA, 94 nt, Human
gacuggcuuuuucauuaaguagaugaaugugaauguuucuugacagcaaggacaauguuuccauguucaauuuacuaugaaaagaacgccaguc

SEQ ID NO: 4105300 - RNA, 71 nt, Human
gacugggggagaggugaaggcugcccuggguuggccccagcccuggggaggagcguucacccuuuccaguc

SEQ ID NO: 4105301 - RNA, 93 nt, Human
gacuggguguaguaauuuaggauguggcuauuuauugaacaggaaugaaagcugacuugggaguauaagcuauuucucuuauuauauccaguc

SEQ ID NO: 4105302 - RNA, 85 nt, Human
gacugguggaagcccugucggaacugcgaccucuggaggccccccgggcucugcacguucuggcguccugguccucccaccuguc

SEQ ID NO: 4105303 - RNA, 79 nt, Human
gacuggugguucuucaaggcuauuaauucugugaguuuggagcaaggcaucugguaaugggccuggggugcuauuaguc

SEQ ID NO: 4105304 - RNA, 95 nt, Human
gacugucuaucgagccccagcaaccuugauauuugcggaucucagacucaaguaagggcugcugggcagauguuguugcugggaguugggugguc

SEQ ID NO: 4105305 - RNA, 68 nt, Human
gacugugaggaggaggucuccuccgcagggggaguguacuccccggagcaguccuccccuucaggguu

SEQ ID NO: 4105306 - RNA, 69 nt, Human
gacucugcuugugucaggcaugcuaauuucucacuggccaaagcaagucacaugaccaagcccaguguc

SEQ ID NO: 4105307 - RNA, 58 nt, Human
gacucuggcugccuugugagcaucaacuauagagaaugaggauggaggcagacagguc

SEQ ID NO: 4105308 - RNA, 94 nt, Human
gacucugguaucucugagucacucuucccagcuuagcuuacuguccccacccugucucuaagcuguucuccagugacucaggagcccagauguu

SEQ ID NO: 4105309 - RNA, 76 nt, Human
gacucuuagaaaggaaaauaaucaacucacauaggaagcacuaaugugcaaauuauuuugccagacucugaggguc

SEQ ID NO: 4105310 - RNA, 111 nt, Human
gacucuugaugaaugucauagcaggguguuuuaauuuaauagauccagaauaacaucugguucuaauauuuuaaaagccaauuuauauggaaauuuauuuaauacacaguc

SEQ ID NO: 4105311 - RNA, 97 nt, Human
gacucuugggagggguuugcugggggaaagagacauugagaggcaagauuaaauagcucaguguuuaccccaaucaguuuacucccuacucuuuguc

SEQ ID NO: 4105312 - RNA, 77 nt, Human
gacucuuuuacugaaaguauacauuucugcacuuacauuucaagauguaguuaugucucuuucagaagauugugguc

SEQ ID NO: 4105313 - RNA, 59 nt, Human
gacugaaggucuaauuccugaguuugaucuuccuggcuuucaaggaaaggccucauguc

SEQ ID NO: 4105314 - RNA, 68 nt, Human
gacugaaucaauugugaagacuaugaugccccaaagagcagagcaugauaucucaucaaugguucauc

SEQ ID NO: 4105315 - RNA, 64 nt, Human
gacugacaaacagcagggacuugaauggaagaugcuucuuguuuugcccaaguuguauucgguc

SEQ ID NO: 4105316 - RNA, 64 nt, Human
gacugagaauaggcaucccgagguguuugucuuaacaauggaacccagagugucugucucaguc

SEQ ID NO: 4105317 - RNA, 92 nt, Human
gacugaggcauauuagauccuacgaucugaauagacuugcuaaggcuguuuggcuuucacaguucagaucaguuuagagugcuggaucaguc

SEQ ID NO: 4105318 - RNA, 82 nt, Human
gacugauguugcuauguguuaguaauggacuugcucacuacaauaauuaaaacaagaugccauuggcacaaguagcuucauc

SEQ ID NO: 4105319 - RNA, 65 nt, Human
gacugccugugaucagcugaguucaaguuucaucuuuuaaauuagccgaucauaggaaaugaguc

SEQ ID NO: 4105320 - RNA, 58 nt, Human
gacugccuugggggugaaagaggcuagcacuuaguuuaacgacauccccaaagugguc

SEQ ID NO: 4105321 - RNA, 72 nt, Human
gacugcgcuccucuagaagcugaccuggagauauggguucaucuucaggcaguuuauuggagaagugauguc

SEQ ID NO: 4105322 - RNA, 55 nt, Human
gacuggagucaaugagcagcaccugguggcagauguguuuugugugacccagcuc

SEQ ID NO: 4105323 - RNA, 63 nt, Human
gacuggagugccuccaggaaagcaggaagcaagacauguuuuuaaccugguaaguauuuaguc

SEQ ID NO: 4105324 - RNA, 66 nt, Human
gacuggauguuuaaucaacagaggaacaaagaaaauguuccaauuuugugugaaaauauuuaaguu

SEQ ID NO: 4105325 - RNA, 65 nt, Human
gacuggccucuuucuucccuuugacugggaaugggucaaaggcggugcaggaggaggaucugguc

SEQ ID NO: 4105326 - RNA, 79 nt, Human
gacuggcuucguuugccaauuucuuuguuuugcacuagaaagcauuucugcaacucaguuggcauauucaagcacaguc

SEQ ID NO: 4105327 - RNA, 126 nt, Human
gacuggcuuugcugcagcaccuuagccuaucuucacuaagagcauccuauguaugacuuauauccucaaaguugcucugugguccaagauggcugcuugagccaccugugugugacagcaccaguu

SEQ ID NO: 4105328 - RNA, 55 nt, Human
gacugggcuucucccccuggcagagggcuucucucugccacaugaggauuuaguc

SEQ ID NO: 4105329 - RNA, 73 nt, Human
gacugggggugcugggacggcagcucaggcaccaggcagggcacagcucaggucccagcucaggccccagguc

SEQ ID NO: 4105330 - RNA, 90 nt, Human
gacugggguggaaggccuggauuuagguugugagccaaauggaacuguuaauaucaaacccaagaaucaggcagcuuaucaccaucaguc

SEQ ID NO: 4105331 - RNA, 56 nt, Human
gacugggucccacagccugcuggggugagcccaggauggcuggagggccuuuuguc

SEQ ID NO: 4105332 - RNA, 63 nt, Human
gacuggguccucugcuuauggucucaaaaggcuacaaucgagcugucaucagggacugcaguc

SEQ ID NO: 4105333 - RNA, 79 nt, Human
gacuggguccuucaucuggagccuggucccacaucagugugacaagcaggcuccugaagaaauaaaugacaugcuaguc

SEQ ID NO: 4105334 - RNA, 77 nt, Human
gacugggugggaaggaugggaguggaggaaaaaaguuacuuuuaacuuaucacccauuuccuccuaaauccacuguc

SEQ ID NO: 4105335 - RNA, 59 nt, Human
gacuggguuccaucggaaaggaacuguuagauuuguguuccuaacucuggcaccuaguc

SEQ ID NO: 4105336 - RNA, 63 nt, Human
gacuguacaaauucauugaacuguacauuuaaauugugugcacuucauuguaaauuguaccuc

SEQ ID NO: 4105337 - RNA, 55 nt, Human
gacuguagcuuugcuacuuaaggugagguccucaggccaguaguauagcacaguc

SEQ ID NO: 4105338 - RNA, 85 nt, Human
gacuguaguaauuuguguucuugguuucauucuccuagcaugguugaaauggauaaucaugaacuuugaguuaggucuggcaguc

SEQ ID NO: 4105339 - RNA, 55 nt, Human
gacugucgguucugguuucacaugcacugugugaacacgcuucauacagaggguc

SEQ ID NO: 4105340 - RNA, 55 nt, Human
gacugucucugugaaugguaggguaacuguuucccugccacuguaggugacaguu

SEQ ID NO: 4105341 - RNA, 61 nt, Human
gacugugacuucugaagcaauagcugccuaaaaugaaggugcaggcuccagaauucuaguc

SEQ ID NO: 4105342 - RNA, 81 nt, Human
gacugugccucugggugaccaaggagcagccaagauagcagagagauggucguagccuuggaggauccaucaggggcaguc

SEQ ID NO: 4105343 - RNA, 60 nt, Human
gacuguggacucucaugauagagauaaacuuuuauuuucugucuuguuuaggccacuguu

SEQ ID NO: 4105344 - RNA, 55 nt, Human
gacuguggauagaacacugcagcuaguccugcagaugcucuccucauccccaguc

SEQ ID NO: 4105345 - RNA, 112 nt, Human
gacuguggcaaaacauuccuauaaaagccagugcagcuggaaauucaccuaucagaggguagaacaaccaaaauguauguguacuauaguguuguguauuuuuguuugaguc

SEQ ID NO: 4105346 - RNA, 59 nt, Human
gacugugggaagacuguagguuacucauuggugcaggcgcuuucagaagucucauaguu

SEQ ID NO: 4105347 - RNA, 69 nt, Human
gacuguuuacuccauuugcauguggcccuuccccuuaacuggagcucuaagcaaugcuguaguucaguc

SEQ ID NO: 4105348 - RNA, 65 nt, Human
gacuguuucaggagcauccugauuggccucagucucacgagguugaccagagaccugaaucaguu

SEQ ID NO: 4105349 - RNA, 63 nt, Human
gacuuaaauuucugguccaucuagugcauauuuuaguguaaguuguaacagaaauuuaauguc

SEQ ID NO: 4105350 - RNA, 66 nt, Human
gacuuagcuaugaaagggaagugaaggcauuggggaaaugugcacagacaacucuuucuagaaguc

SEQ ID NO: 4105351 - RNA, 67 nt, Human
gacuuaucuuugaugccagauguuacuuaugaagcaaugagugaucugucuuaaucauagauuaguc

SEQ ID NO: 4105352 - RNA, 111 nt, Human
gacuucccugaggaauuguacauggugcucugagagugcaugauagcacaugacuuucucccgugcuuaucaagcugcacucuucccauuugcgccuccacauucaugguc

SEQ ID NO: 4105353 - RNA, 58 nt, Human
gacuucugccucaggggaaggucuugguucaaauuugaucauucucucaguagagguu

SEQ ID NO: 4105354 - RNA, 65 nt, Human
gacuucuucaugucuuuuccaccucuuucauauaaucuaagggggauauggaccuuggaggaguc

SEQ ID NO: 4105355 - RNA, 71 nt, Human
gacuugacagguauuuuauagauaaguaaaccaaggguuuauagauaaggugaaauaaauuguugaaaguc

SEQ ID NO: 4105356 - RNA, 64 nt, Human
gacuugagacccuccccagagcacaucuucucagaacugcucuggggcccagggaucacagguc

SEQ ID NO: 4105357 - RNA, 68 nt, Human
gacuugagaugcgggagaaugugaaugagcauggaguccgugccacaggcaaucccugcacgcaaguu

SEQ ID NO: 4105358 - RNA, 94 nt, Human
gacuugauuuuuuccauuuuagugacauuuacgaaucuuaucccuuuguuuaauggaaaggggaaaugggagcaaguguuacaauugucagguc

SEQ ID NO: 4105359 - RNA, 74 nt, Human
gacuugcacugacuccaugaugaucaacucugcccaggaaguugucucagagggucaccaggaagugcacgguc

SEQ ID NO: 4105360 - RNA, 93 nt, Human
gacuugcuuucuagagccacauauuucccuucagggacuagcuacuuguucuucucagagaaaugugucaccaucuuuccagcagagccaguc

SEQ ID NO: 4105361 - RNA, 82 nt, Human
gaaaugaggacaaaauccaaacuucuuagcagaauuuacaacucccugcaaguucuggcuuuuguccuugcaaucucauuuc

SEQ ID NO: 4105362 - RNA, 59 nt, Human
gaaaugaguuaaugggcuaauggaugggggcauuuacccuuuugccuuuaauucauguc

SEQ ID NO: 4105363 - RNA, 77 nt, Human
gaaaugcaaauucuuaggcuccaucccagacucauagaaucaguaacucugugguugggcccaagaaucugcaucuu

SEQ ID NO: 4105364 - RNA, 77 nt, Human
gaaaugcagauuccugguuccuacaccaaaccuagugaauaagaaccucuggggaaaggcccaggaauaugcauuuu

SEQ ID NO: 4105365 - RNA, 104 nt, Human
gaaaugcaggauaucuguagaguuaacuaaauuaagagacaacaggguugaauuuuuuccccauuugcucauuaauguagaguaacacuuacgaugccucauuc

SEQ ID NO: 4105366 - RNA, 93 nt, Human
gaaauggaagcugcucucuuaggagcaagagaaguggaggguucuucuaaugucccugcuuucagugugcuccugagggcuaguuucuguuuc

SEQ ID NO: 4105367 - RNA, 77 nt, Human
gaaauggauuuccacaaguggcuggggaaagggagucucuuuuuagaaugucucuucuuugguccacugucucuuuc

SEQ ID NO: 4105368 - RNA, 61 nt, Human
gaaauggccaguagagcucagauaguuucucauuacaaagaaauucuuugguguccauuuc

SEQ ID NO: 4105369 - RNA, 73 nt, Human
gaaaugguuagaaucaaguugcucauaacucuggaaauuaaccaaaggccugcagcaaccuuggaagcauuuc

SEQ ID NO: 4105370 - RNA, 120 nt, Human
gaaauguaaagagaguugauuuugcucauuuuguaguuugaaagaagccagacucccaauacagcacacuaaaagcuuggcuuucgcuauagagcacggccaacucuagaauaaaauuuc

SEQ ID NO: 4105371 - RNA, 59 nt, Human
gaaauguagaaucucaguggggccccaccacacaccuacugaauuacagucugcauuuu

SEQ ID NO: 4105372 - RNA, 68 nt, Human
gaaaugucagguauuaauaaauggagaguaguaauguauuccauuaguguuaauaucucuauuauuuc

SEQ ID NO: 4105373 - RNA, 121 nt, Human
gaaaugucaguucucagaccacacuccaaucugcugugucagaaacucuggggaugucucacuugcauuccuugaaccacuggcuugguggguguggaauguuguucuuacucaucauuuc

SEQ ID NO: 4105374 - RNA, 102 nt, Human
gaaaugugaggacaugagauuuggguggggccacggguggaaugauaugguuuggcuguguccccacccaaaucucauccugaauuauaacucccacaauuc

SEQ ID NO: 4105375 - RNA, 59 nt, Human
gaaaugugugacaaguuucaauuucccgagaaggacauugauucuauuccacagauuuu

SEQ ID NO: 4105376 - RNA, 81 nt, Human
gaaauguguuguuagaagccaggauggagcagguuuugccaaacccugaguccuaguggcuuguaacagcacacauauuuc

SEQ ID NO: 4105377 - RNA, 86 nt, Human
gaaauuaauccucuggggcgugguccuggacccucagacaagaggagagguccucugcuaggugccccauaguauccuuuguuuuc

SEQ ID NO: 4105378 - RNA, 88 nt, Human
gaaauuaguucucagacaguaugauauaugaauacauuuuuuucucuguggauucauaaaaauaucaacuguaaagggagaugcuuuc

SEQ ID NO: 4105379 - RNA, 88 nt, Human
gaaauuaucaccccaacgacuguucacagauuagucgaugcaaauguuaaaaacguguuggcaagcuggaugagcagguuuguauuuu

SEQ ID NO: 4105380 - RNA, 59 nt, Human
gagaauggcuucacauggcauacaugcuguaaaaugcacgugcccugugggcuauuuuc

SEQ ID NO: 4105381 - RNA, 86 nt, Human
gagaauggggcaacagacuuuuauucuuuaagaccauaauauucaaagagugguccagggaucuuuagagucuuugagacauuuuu

SEQ ID NO: 4105382 - RNA, 76 nt, Human
gagaauuacagaggcuggguuuucagggacccaggacacugaaaucccuggaacugccaagccucaguaguuucuu

SEQ ID NO: 4105383 - RNA, 59 nt, Human
gagaauucauuugauccugaugcuggaaauauauccugcuuggaguagaaugcauucuu

SEQ ID NO: 4105384 - RNA, 87 nt, Human
gagaauugcuugaacccuggagguggagguugcagugagccgagauugcaccauugcacuccacccuaggcaacaagagcaaaacuc

SEQ ID NO: 4105385 - RNA, 68 nt, Human
gagaauuugucuugaauuuuaaacaacauuugauuccaaaauggggagauuuagcagacaaagcucuu

SEQ ID NO: 4105386 - RNA, 71 nt, Human
gagacaaagacaagcaucaaaucaggcagugcuuuuccaucacucauguuugguucucuuagucuugucuc

SEQ ID NO: 4105387 - RNA, 63 nt, Human
gagacaacccaagugaaagugcuacguaaauucuagaaugccguagacuuuuacuuauguuuc

SEQ ID NO: 4105388 - RNA, 67 nt, Human
gagacaagcacuucacuguccucugcguuuuacagaagaaaguagggcacagagaugugcuguacuc

SEQ ID NO: 4105389 - RNA, 66 nt, Human
gagacaaguuuuugauagacuagaaaauugucucuuaagguucuugucaggucaaaaaccuugcuc

SEQ ID NO: 4105390 - RNA, 118 nt, Human
gagacaauaguaauagagggauguucuuaagucaguaagaugcaauuaggaguacuaauagcucacauucuauggacuugggcauuacuaaaauuccuuauguugauauaaaauacuc

SEQ ID NO: 4105391 - RNA, 103 nt, Human
gagacacccccuggggggcaagaagcagcacagcaaugacucuauuccccgggauggaguggaaucauugcuguguugcuucuugccuuucccaccugggcuc

SEQ ID NO: 4105392 - RNA, 68 nt, Human
gagacagagaggggaagacucugacggagguuuuaacuguaugcaugccagucuuucccacucgucuu

SEQ ID NO: 4105393 - RNA, 100 nt, Human
gagacagagggaucacuugagcccagaaggucgaggcugcagugagcccaugacugcgccacugcacuccagccugggcaacagagugacacccugucuc

SEQ ID NO: 4105394 - RNA, 89 nt, Human
gagacagaucagcuggccaguuguccuggcuugggcagcuucucaggugcagccaggucgacagcaugaccagcccacgagcucgucuc

SEQ ID NO: 4105395 - RNA, 56 nt, Human
gagacagaucucggcuccaugcagcuuaaggcagaggugggugccgaguuugucuu

SEQ ID NO: 4105396 - RNA, 55 nt, Human
gagacagaugcugcuggagcauuugaaauaugaagugugcaguggccaucuucuc

SEQ ID NO: 4105397 - RNA, 71 nt, Human
gagacagcccagcgaagucuuacacauguuauuuggaaguauugugacaggcacgaaauugggcugguguc

SEQ ID NO: 4105398 - RNA, 63 nt, Human
gagacagcugcccagcuaggaagaaggucuaggagccagaccuuccccgugggcagccgucuu

SEQ ID NO: 4105399 - RNA, 63 nt, Human
gagacagggaggaaagagacugcuuuccucccacaaaagcaguuuccacaaccuccccugguc

SEQ ID NO: 4105400 - RNA, 57 nt, Human
gagacaggucugugugcacagugcucgcggcuguugacaugcgcaugcagacugcuu

SEQ ID NO: 4105401 - RNA, 69 nt, Human
gagacagguugaccuuuucugugccuuaguccccgcuccugcaagguggcaugaaaacagccugugcuc

SEQ ID NO: 4105402 - RNA, 60 nt, Human
gagacagugguugcagaagcucuaggaucagacucccugagcuggaaucuggcugugcuu

SEQ ID NO: 4105403 - RNA, 67 nt, Human
gagacaucuccaaggcaaccuguucagaccaaugacugaggaugaaacaggauaaugggggugucuc

SEQ ID NO: 4105404 - RNA, 117 nt, Human
gagacaugcugugggcaucaggacgggaguuaucuggccuguguugguggccccugggccuuguguggggagcagggcauagagcuagcuguacgcucuuggugacacaacugucuu

SEQ ID NO: 4105405 - RNA, 112 nt, Human
gagacauggccccagcaaugauggauucuaaaugugacucaccaucucauaagcaagcagucuauuagagggucaaggucccauaggagcauauuaugcaggcccuguccuc

SEQ ID NO: 4105406 - RNA, 75 nt, Human
gagaccacagccaccuugaugccuuuccaagaugucuuaucuuaggugcagaggcauuuugggugaagucauuuc

SEQ ID NO: 4105407 - RNA, 82 nt, Human
gagaccagcugggguugcacacauuuugagggugagaaaaugggugggccuccaagauugaacucaacccugcucugguauc

SEQ ID NO: 4105408 - RNA, 68 nt, Human
gagaccauccuggccaacgugguaaaaccccguaucuacuaucuugcuauguugcccaggguggccuc

SEQ ID NO: 4105409 - RNA, 78 nt, Human
gagacccaucccaagagauucuagccccguagauguguggcagggcucaggcucugggauucugauguaguuggucuc

SEQ ID NO: 4105410 - RNA, 78 nt, Human
gagaccccaacagugggcuuccagaacaucccaggaccauccuucuugcugucuucucugaggucccuggccacucuc

SEQ ID NO: 4105411 - RNA, 77 nt, Human
gagacgacagcuauauuguuuucuacuguauuccuagcacauggcauacagaaaacauaaguauauguuguugacuu

SEQ ID NO: 4105412 - RNA, 66 nt, Human
gagacgacugggugauagaagaaugcugaaugcuguguucguauccugcuucaugcccagaguuuu

SEQ ID NO: 4105413 - RNA, 108 nt, Human
gagacggagguggaagcagugauucuugucugagggcucacggcugucucuggaaauaagacccgagcagcugagcuuuuccguggaucacgucucccccuuccucuc

SEQ ID NO: 4105414 - RNA, 74 nt, Human
gagacgugggcaguggggucuucugccgaugcugauucuaccgccuugggcagcuggccuccucgcccacucuc

SEQ ID NO: 4105415 - RNA, 77 nt, Human
gagacuaaaaggccaccagaccgagaaguucuccaggccacccuguggccacggggauuguugaguugugggguuuc

SEQ ID NO: 4105416 - RNA, 59 nt, Human
gagacuccugggaccaugggcauauuuucuaauauugccaaguggagcucaggaaucuc

SEQ ID NO: 4105417 - RNA, 61 nt, Human
gagacucuugcuuuaauagcccucuuaggcagaagcuuuauauaauaaagcaggauuucuc

SEQ ID NO: 4105418 - RNA, 92 nt, Human
gagagaaaagggaguucucgcugauuagguuuuguuuguccaauaaaggacauuugacauuuaguaucagcuaggugcucuaacauucuuuu

SEQ ID NO: 4105419 - RNA, 65 nt, Human
gagagaaaagggggaauugauucuaguuguuuucagaugacuuuuuucuauuccuucuuucuuuc

SEQ ID NO: 4105420 - RNA, 68 nt, Human
gagagaaagggaacuggcaaagccacucauucucacugauucuguggguuugucauucuuuuugucuc

SEQ ID NO: 4105421 - RNA, 58 nt, Human
gagagaagaauguuccgaggccgagcggggaagcggccugguuugauuuucuucuuuc

SEQ ID NO: 4105422 - RNA, 86 nt, Human
gagagaagagcgaugcugugucagggaccacgucuccugcucugucgaauagagcagaugugucucugcacugucuguuuccucuc

SEQ ID NO: 4105423 - RNA, 57 nt, Human
gagagaaggguagcccauucuccccuggccccagaggacucagacuaucuuucucuc

SEQ ID NO: 4105424 - RNA, 89 nt, Human
cuuuccgcaccugcuccagcuugaagaugugcugguugaaguaauacugcagcugcucauuggcguaguugaugcagaacugcucaaag

SEQ ID NO: 4105425 - RNA, 82 nt, Human
cuuuccuccauggauuuucucacaaugcagaaggaacaaggauggauucuggcucugcauauggaacugccaugcaggaugg

SEQ ID NO: 4105426 - RNA, 56 nt, Human
cuuuccucccaacucaggcccuacucaugcuuagccgccugaggugggguggaagg

SEQ ID NO: 4105427 - RNA, 125 nt, Human
cuuuccugcugcuuguucgccgggagcccugagcuggagucuguggcuccucagccuccuugggacucugcagcuccggcccaggagugucugucuguggugauggcaucuuggcagcaggagag

SEQ ID NO: 4105428 - RNA, 73 nt, Human
cuuuccugcuguguccucacacagccuuuccucagcucauaggaggggaaauguaggaggagcagagggagag

SEQ ID NO: 4105429 - RNA, 83 nt, Human
cuuuccuuccuucuucccauuaguaaugaagugucucccuuauguuacuucauaccugcuagaaugggaagcuugaagguuag

SEQ ID NO: 4105430 - RNA, 55 nt, Human
cuuuccuucucgugguucucaccaaaaaacaggggagagagcacaggcaggaaag

SEQ ID NO: 4105431 - RNA, 120 nt, Human
cuuucgaugccuguucuuuagaguuauaaaggaaaggccuuugcauuugguuugucucuggaggcuuuucugguaucaaaugcaguaaagguuuuaaaugacucugaggcaagguggaag

SEQ ID NO: 4105432 - RNA, 81 nt, Human
cuuucuaggagucuggagcucuccagagccccguccccagcccugggcagcugggagugaagggcaccaggccccugaaag

SEQ ID NO: 4105433 - RNA, 62 nt, Human
cuuucuaguaggaaguagaucaaccugcccagaaaccuaggcccuucuacuccugaaggaag

SEQ ID NO: 4105434 - RNA, 81 nt, Human
cuuucucaucuccauuauagcaucaugccugccuuuucuacucauuaaggcuuguuggcugaauaaauggggaugcaagag

SEQ ID NO: 4105435 - RNA, 77 nt, Human
cuuucucuauaucaguguauuaaauuuugccucuccaaagcuguagaaugaaauagacuugcacuauauggacagag

SEQ ID NO: 4105436 - RNA, 56 nt, Human
cuuucugaucccugcaacccucuuuccucgagcugucagggcacagggacagaagg

SEQ ID NO: 4105437 - RNA, 55 nt, Human
cuuucuggaagaauguucucuuugcuuguccaagcccagagagaauuccaguagg

SEQ ID NO: 4105438 - RNA, 65 nt, Human
cuuucugguugcuguugcugugaugagauuggauuuauggggcagguggcagcagaaucagggag

SEQ ID NO: 4105439 - RNA, 56 nt, Human
cuuucuguagggauuucacaguuucugguuggcagaguaaggacccaagcaggaag

SEQ ID NO: 4105440 - RNA, 57 nt, Human
cuuucugugcugagcucugagauguggggagaugcccgacacccucagcccagaaag

SEQ ID NO: 4105441 - RNA, 67 nt, Human
cuuucuucuuagacguaucagguuccugcaggguaaagaccugacuaucugaaguuugagaggaaag

SEQ ID NO: 4105442 - RNA, 78 nt, Human
cuuucuugcuacagauuuugugaagaaguguuacucaaacuuuaggugacauuaacaccauaaguguguuaggggaag

SEQ ID NO: 4105443 - RNA, 86 nt, Human
cuuucuuugcaauuugacauugagagagcaccuuggaaggguuauuaugaagaccaagcuguucucuaaguuucaugcagagugag

SEQ ID NO: 4105444 - RNA, 65 nt, Human
cuuucuuuuccauguauucaccaggugucacccacacaucauccggugggcacaggagagcagag

SEQ ID NO: 4105445 - RNA, 121 nt, Human
cuuucuuuuuuuuaggaggugauuuagauuauuuaguucauaauuggaugaggagguucaacugugaauuuuaugauaccaagaaacacuauuuagaauauuuuaaauguuaaggagaaag

SEQ ID NO: 4105446 - RNA, 67 nt, Human
cuuugaaaguuuauggagucugcagaguauauuuguccuacgaugcaggagccuuggacuugaaaag

SEQ ID NO: 4105447 - RNA, 70 nt, Human
cuuugaacaauuugguauacaaacaccuuugauauuuagggcugaguuuggggauuaaauuguaaggaag

SEQ ID NO: 4105448 - RNA, 81 nt, Human
cuuugaauaaauagcuuaaacucuuugaaguuauaguuucucacuuauaaaacacaagaguugggcuagguugucacaagg

SEQ ID NO: 4105449 - RNA, 70 nt, Human
cuuugaaugaggcccugaccugggagaucuaggccucucuuggccuacccgugagggucuacaucugaag

SEQ ID NO: 4105450 - RNA, 79 nt, Human
cuuugacaucaucuggaaugucacagcaggaguauucuuugcaaacuagugcaaggguuggauuuauuccaugucaggg

SEQ ID NO: 4105451 - RNA, 79 nt, Human
cuuugacuccaucucucuuuguuagucucacucuuuccauuaauucucugugagagguaaagagacagaggagucaagg

SEQ ID NO: 4105452 - RNA, 58 nt, Human
cuuugagggacuuagcuagguuuagaaagacuuuuggagagcagcuaggcccuuuugg

SEQ ID NO: 4105453 - RNA, 74 nt, Human
cuuugagguuuuuugauuugguugaaacuaauaccaaaauuggaaaucuuuuauuacaccagguuaacucaaag

SEQ ID NO: 4105454 - RNA, 55 nt, Human
gagaguagggacugggcucugugucauauacgcaaagcagcagcaccugcauuuc

SEQ ID NO: 4105455 - RNA, 59 nt, Human
gagaguaguuaugaggcaagcagagcuuuguaagugccugagugcuuuggcuugcucuc

SEQ ID NO: 4105456 - RNA, 61 nt, Human
gagagucuaggaaccucauauaggugcaaucauaagugugucuuuuugagccugacuucuc

SEQ ID NO: 4105457 - RNA, 105 nt, Human
gagagucuguuuggccaauacugagucauguauucacuuagcuucugcugggaugcaaggguguauguaugauggguggucucagacuugcccaggcaggcucuc

SEQ ID NO: 4105458 - RNA, 61 nt, Human
gagagucuuaucucguuaaugaaugaaaaauagaaaucaauuauucugagaugagauucuu

SEQ ID NO: 4105459 - RNA, 61 nt, Human
gagaguggucccagaagccucuccaaaugcuccauccagagagucuucuggggccacuuuc

SEQ ID NO: 4105460 - RNA, 98 nt, Human
gagaguucauguauuuauguugucuuaagguuuucaaacuacuguaugaucguaaacacaguuuguaaacuugagcuagccauguacacuguacuuuu

SEQ ID NO: 4105461 - RNA, 84 nt, Human
gagaguucuuuauuacucccaggggaacuaucaaguagaaagaguuugcucugaagcuucuugggcaaauuugaagaugcuuuu

SEQ ID NO: 4105462 - RNA, 118 nt, Human
gagaguuuacaaacaaacacacagugugcagaaagcuuaggcaaguuggaggagaggaguguccccugcaauugccuaauuuucauacacaaauuacgugguuucccuguagaugguc

SEQ ID NO: 4105463 - RNA, 64 nt, Human
gagaguuuaggagacagguagagaggaggaaauuccagacccauuuaucuguuuccugcuuguc

SEQ ID NO: 4105464 - RNA, 66 nt, Human
gagauaaaguugcagugaaauaaggcucaggucauucaaggccuuagcggucauagcaaagauuuu

SEQ ID NO: 4105465 - RNA, 71 nt, Human
gagauaauguacacaucccagacucccaggaacuggaaggaggccauccugggagagugggacuguaucuc

SEQ ID NO: 4105466 - RNA, 82 nt, Human
gagauaauuaaaagauaacccaugaguaauuaugacccaacuaagcuuggguaacauucauuggguaguuauugauuaacuu

SEQ ID NO: 4105467 - RNA, 130 nt, Human
gagauaauucauuacaggggcauagcaagcauuauguuuaaauuuguagcuauguaauuaaaaucaacuuuuaauuggcuuugagaaguuugaguuaaugauuuugaauugcccauguuuguauuuuuuu

SEQ ID NO: 4105468 - RNA, 83 nt, Human
gagauacauuuucaaaccuaucuaagaaauagcccugauauugaaauggcuucuguggaauagguuugacagauguaagucuu

SEQ ID NO: 4105469 - RNA, 70 nt, Human
gagauagaggcuccugauccuggggucuggagaugguguagcuccugaccccucaggcugcuuagaccuc

SEQ ID NO: 4105470 - RNA, 57 nt, Human
gagauagaguuggcacaguccugcuuugagacagggcaauggaugugaugacuccuc

SEQ ID NO: 4105471 - RNA, 100 nt, Human
gagauagcgaccaggggcaagcuagacacagggguuugccaacuugaaauauggguucucucaaacuuuguguuugccuuauggccuggggcuuuuauuc

SEQ ID NO: 4105472 - RNA, 69 nt, Human
gagauaggaggauugcuuguggccaggaguucaagaccagccugggcaacauaguaaaaccuccaucuc

SEQ ID NO: 4105473 - RNA, 72 nt, Human
gagauauaucuccuaaaguuuccagaagaaucgaaucacugaccaucuuccugcuuuggugaggcuuauuuc

SEQ ID NO: 4105474 - RNA, 61 nt, Human
gagauauguuagaaagcuauugaacaggucacaaaacugaagugcugaaaaagcaugucuc

SEQ ID NO: 4105475 - RNA, 59 nt, Human
gagauauguuggcagcugguaugcacuucaucagagggcaaauuacugccacacauuuc

SEQ ID NO: 4105476 - RNA, 62 nt, Human
gagaucagcuggguggggcuaaagacugucagggagagcaacuuuauuccacugggcagcuc

SEQ ID NO: 4105477 - RNA, 93 nt, Human
gagaucauuagacccacauccguauuugacuauugcaccgggguaaaguuugguggcaggaaccagauaucagggaugggaggauaugauuuc

SEQ ID NO: 4105478 - RNA, 65 nt, Human
gagauccucaguggauuggaugaugccacccacacuggggaaggcuguccacuccacucggucuc

SEQ ID NO: 4105479 - RNA, 64 nt, Human
gagaucgccuguucacaccuguccagguaacacaucccaucuggacaggguaacuggugguuuu

SEQ ID NO: 4105480 - RNA, 77 nt, Human
gagaucucuaaucaccagcucuagcagccucauaggcuguauaucaccccaagcagcugagacucuuagagaugcuc

SEQ ID NO: 4105481 - RNA, 83 nt, Human
gagaucugcuuuagggacagcuucuagaggaauuggugacaaaacacagagacuuggagcaggcugaccagaguucaaaucuu

SEQ ID NO: 4105482 - RNA, 65 nt, Human
cuuuuaagcuguggcauuaauucuugauuaucagcugucaggucuuucauuacauggguuaaaag

SEQ ID NO: 4105483 - RNA, 74 nt, Human
cuuuuacuugacacaggggggcgcuagaagauggcuuguucgcuuucuuuucuguaacucagugucuagggaag

SEQ ID NO: 4105484 - RNA, 67 nt, Human
cuuuuagcuguuuccauggcaaccaacacccagaccauuuaguugcuagucaacugacagcuguaag

SEQ ID NO: 4105485 - RNA, 78 nt, Human
cuuuuaguucaaaggcaaagguuugugucauccuuaacugacaaacacuuacauugucucuugcugagcagcugagag

SEQ ID NO: 4105486 - RNA, 130 nt, Human
cuuuuauacuguaugaguaucauagucugucuucuguagccaguaacauauagaaguuaguuuuuguguugucuauguuuuugagguuaaagaaaacagaauacuaaauugcuauauacuaaucuauaag

SEQ ID NO: 4105487 - RNA, 105 nt, Human
cuuuuauacuugaaaaugacaggcuuaaaugcucauaucagucacaaauccaggauguacugucuuguuguaugugagcuuuguagagauuuuuaaaaauauaag

SEQ ID NO: 4105488 - RNA, 70 nt, Human
cuuuuaugguggucugaagugucugauuaaccaacccugagguuucccuuuccacuggaccucaugagag

SEQ ID NO: 4105489 - RNA, 70 nt, Human
cuuuuauugcugagcaguguuuaauuguaugguugcacuauauaauguuuauccauuugccagcugaaag

SEQ ID NO: 4105490 - RNA, 77 nt, Human
cuuuuauuuaagccaguuuccagauauuaacucugucccccaggaccaagugauaacugaagaggcccagaugcaag

SEQ ID NO: 4105491 - RNA, 98 nt, Human
cuuuucaauggcagcguauuauugcauagauuaugccauaugaugccagugcucuguuguggcauaauuuguugaaugaguucccugucaaugaaaag

SEQ ID NO: 4105492 - RNA, 67 nt, Human
cuuuucacugugauguuuaagagaauguaugaacaguuuacauuuuccuuagaaauacauugauggg

SEQ ID NO: 4105493 - RNA, 74 nt, Human
cuuuucagcuuuaggacucauaauaaacugggcacuguccaguuuaugagcagcgaguuccuauaguuugaaag

SEQ ID NO: 4105494 - RNA, 81 nt, Human
cuuuucaguucuuucacucaagaaggaucugcaacuugaauucagcagguuuggucuucaguggggccuggaaguggaagg

SEQ ID NO: 4105495 - RNA, 80 nt, Human
cuuuucauucaguaagacuuugaguguuuuugagccaggaaggcaagauguuagaggucaugcagaguccaagagagaag

SEQ ID NO: 4105496 - RNA, 63 nt, Human
cuuuuccaaggauguggucaauuggaauaacagcauuucucugauuacacuauuugggaauag

SEQ ID NO: 4105497 - RNA, 62 nt, Human
cuuuuccaguaccuugggacccagcagccaugcugugaaaaagcccaggcuacauggagagg

SEQ ID NO: 4105498 - RNA, 74 nt, Human
cuuuuccauuaacaccuguacguggcacgcaauagacacucaaugugugacgagugcauauguggauggauuag

SEQ ID NO: 4105499 - RNA, 125 nt, Human
cuuuuccugcacugucuucccuucugcuucuguaucuuucuucaagauuauauucucuucccuuagaucuuguuauaguaggaucaguucccaagcggauuugagagcaguuucucaccgagaag

SEQ ID NO: 4105500 - RNA, 115 nt, Human
cuuuucuccuugugcacuccuuauaaccccagggguaggaggauggugguauaaaacauacucacuguccaugcuugcuaacccaugguaaaaggcagugugguauagaggaagg

SEQ ID NO: 4105501 - RNA, 95 nt, Human
cuuuucugcgggacucuucugucuugcacaugaggagccaguucuggaaagaaaaguucugagugauguugagucagaauguccacccagaaaag

SEQ ID NO: 4105502 - RNA, 58 nt, Human
cuuuucugcugcuuauuccuagugucauuguuggcccuagggcuccaaagcugagaag

SEQ ID NO: 4105503 - RNA, 55 nt, Human
cuuuucuggaaucaucucuaacucagagcuccuagaaagagaguaucuagaaaag

SEQ ID NO: 4105504 - RNA, 57 nt, Human
cuuuucuucucugauuaaggcucacguccugugauuguugugguuggggaggguugg

SEQ ID NO: 4105505 - RNA, 85 nt, Human
cuuuucuuuggucacuauuguuuaugagaaauauuguuacagcuuuuucugguuagccaauaaugccaacaaguguucaggaaag

SEQ ID NO: 4105506 - RNA, 61 nt, Human
cuuuugacucuguccuuagcugcacucaucccccaguuugcagacaggauuggguuaauag

SEQ ID NO: 4105507 - RNA, 58 nt, Human
cuuuugcagcuucuaccacuguuucccuuggaaaccaaaguagcagcugccuacaaag

SEQ ID NO: 4105508 - RNA, 86 nt, Human
cuuuugcauaugaacugcucuuguguuuuggucaacugaucucacaccaggccugaagccaaaaccaagaacauucauuucaaaag

SEQ ID NO: 4105509 - RNA, 87 nt, Human
cuuuugcuucaauugcuucaacuguucaaugggcuaauaauaauaucugccucacagaacuguugcaaggauuaaaugagcuaagag

SEQ ID NO: 4105510 - RNA, 58 nt, Human
cuuuuggaaggguuucaguuagucuuuguagagguaacuggagcuacuucccaggaag

SEQ ID NO: 4105511 - RNA, 100 nt, Human
cuuuuggguccugauaacaugcaucagaauguuagagaagggaaaaaguuaaccacuggcucccucaaugacauuuugaaaaguucaguagauucaugag

SEQ ID NO: 4105512 - RNA, 78 nt, Human
cuuuuguauaacuuagccuuagggauugagguugcuggagucuagccuucaaguccacugagaagaguucugcaguag

SEQ ID NO: 4105513 - RNA, 70 nt, Human
cuuuuguaugcagcucuuuuacccuugaaucuguggauuauuuuuagauucuaaaggcugaauauagaag

SEQ ID NO: 4105514 - RNA, 129 nt, Human
cuuuuguccuguguagcuggaccccuccguggguuccagaggcccuguaagguguggagauggaggcuggccccgagccacagaugguggugggacccaggggugguaaaguuuaacagagacuaaaag

SEQ ID NO: 4105515 - RNA, 81 nt, Human
cuuuugucucgggcucguuuuucauugcuuacucagugugggcugaaugagcaauuaacagagucuaaaaugaggcuuagg

SEQ ID NO: 4105516 - RNA, 77 nt, Human
cuuuuguugcauugugauuacagagguguauuuucucuaugcuuagaaaaaacgcuaaucagcaaugcaaacauaag

SEQ ID NO: 4105517 - RNA, 61 nt, Human
cuuuuguuggaagcugaagugcggcagcucaccuugggagcauuacagcaguucaacuugg

SEQ ID NO: 4105518 - RNA, 84 nt, Human
cuuuuuauaggucucagauaugguuuuucaaguauucagaauguuuucuggcuuuucuugggacuuaugggagaggaugaaaag

SEQ ID NO: 4105519 - RNA, 64 nt, Human
cuuuuuggaaagacacacaguuuuaauucuuuaauugaaauuuggugaguuuuugccaugaaag

SEQ ID NO: 4105520 - RNA, 80 nt, Human
cuuuuugggaacccugugcagagaagugagcggcguuaccuuacagcugccacacagcuguaugagggaagcccaggagg

SEQ ID NO: 4105521 - RNA, 57 nt, Human
cuuuuuguguaugcuacaguugcacaauaguuguaugacuauagcauauucagaaag

SEQ ID NO: 4105522 - RNA, 74 nt, Human
cuuuuuucuugucaugcccuugguaacugcugggaauagcugcaguguaucaugguuggcagacacuaaguaag

SEQ ID NO: 4105523 - RNA, 61 nt, Human
cuuuuuuuauccuuuaguuuccugccuauaggaggugggcaggcaaugaggaugggaagag

SEQ ID NO: 4105524 - RNA, 77 nt, Human
gaaaaaaaaguuaaaguuaaucuuggaaguuaguuuuuucaagguuccaagugaaaguagcuuuguucuuucauuuc

SEQ ID NO: 4105525 - RNA, 130 nt, Human
gaaaaaaaaugcugcucuagcaguuugcagccaaacuggaagcacaggaucaguggaaucucuuagaaaaguauucuuuugaaauucuuguggucaauguaugcugaaacugagaaaggacagauacauc

SEQ ID NO: 4105526 - RNA, 61 nt, Human
gaaucucuccaguuccuguucauuuuacuuuagaauaagaggccaggaauggaugggauuu

SEQ ID NO: 4105527 - RNA, 63 nt, Human
gaaucugcuuuaaaacccucagcuggucagugaauuacugccaguuuaucuuuaguguagauc

SEQ ID NO: 4105528 - RNA, 75 nt, Human
gaaucugcuuucaaauucacuuaguacauuuacagaauccauuuccuugaggcugugugacugagagccuggcuc

SEQ ID NO: 4105529 - RNA, 59 nt, Human
gaaucuggucuaagugaggauagcugaaggcauucucaguuuacgcauggauaagauuu

SEQ ID NO: 4105530 - RNA, 72 nt, Human
gaaucugucuuuuaucagcuuaguuuauagggcacuagucaauaaccuaggaggguagagguaaaaagguuu

SEQ ID NO: 4105531 - RNA, 74 nt, Human
gaaucuuacacuguccaaucagggauuuuccuucucuuacccuggagaguggcugauguaggcaguggggauuu

SEQ ID NO: 4105532 - RNA, 59 nt, Human
gaaucuuagucuccuaacggcugcgauuuauuuauuuauaguuuuugagacugaguuuc

SEQ ID NO: 4105533 - RNA, 63 nt, Human
gaaucuuauccccaguccuuaauccuaaacagguuuaacaguuggauuuggggaaaaugguuc

SEQ ID NO: 4105534 - RNA, 86 nt, Human
gaaugaagacccagaccugagcccgguggggccucugggaacacuccuuucaaggccagcucacccuggcuccuuucuguucauuc

SEQ ID NO: 4105535 - RNA, 69 nt, Human
gaaugaaucuguaagugacaagguaccuggguucuaauccugucucugucagucacuuacagaacauuc

SEQ ID NO: 4105536 - RNA, 86 nt, Human
gaaugacaauugugugagacaauuggcuguggcauuuuuauaguaguaaaagcgaugaaaccaccuaaaugcuuauacauacauuu

SEQ ID NO: 4105537 - RNA, 61 nt, Human
gaaugacaugcuuuuuaauuauaguacccaaauuagguuuuaucuuuaagaggcugcauuu

SEQ ID NO: 4105538 - RNA, 90 nt, Human
gaaugaccuacuguggcuuaaaucaaauaguccuguaagggaaagaaucuugcacaugauagaugauuucucagucauauuggguuauuc

SEQ ID NO: 4105539 - RNA, 96 nt, Human
gaaugacgcuuaggaaaaugcuuagugaggaaugaauuuguucuucaaaaccagagcauacauuuaacauuuggaucauauuugugaguuucauuu

SEQ ID NO: 4105540 - RNA, 75 nt, Human
gaaugagggucugggcacuccuggggacagcugagugguaggacuccuggguccccagggggcagguccaucuuc

SEQ ID NO: 4105541 - RNA, 87 nt, Human
gaaugaguaauucaguauaugccagagagauagcuacaccuuauagauuuuguaguuccuuacauguacuguuaacaaugcuuauuu

SEQ ID NO: 4105542 - RNA, 81 nt, Human
gaaugaucuaguauuuuacccuauauuuaagcugaauuaccugucacaguuucauggauguugguagaaaacaugacauuc

SEQ ID NO: 4105543 - RNA, 62 nt, Human
gaaugcaaagaguugcuuaucaaagccuggcuugucauaagauuaacuuuuuguuucuauuc

SEQ ID NO: 4105544 - RNA, 59 nt, Human
gaaugcacagcguuccaugcuugaacucgaacugaucuucaagaaugagcuaugcauuc

SEQ ID NO: 4105545 - RNA, 77 nt, Human
gaaugcagcuucucagaggccucacuuccagccagggaaacuuaagaccugaaaggaauaaggcucuuuguguauuc

SEQ ID NO: 4105546 - RNA, 68 nt, Human
gaaugcuggaagggccugagccccagcgcaccacagcaccugacuccccugggccccauccagccuuc

SEQ ID NO: 4105547 - RNA, 71 nt, Human
gaaugcuugggcuugcuuccacccagggccugcccaccacuggcgacugucauuggcagccucaggcguuu

SEQ ID NO: 4105548 - RNA, 64 nt, Human
gaauggcaggacagauuuuguggauuaaugggcagauguugacgcacagagucuugcagcguuc

SEQ ID NO: 4105549 - RNA, 55 nt, Human
gaauggcugaaugucuuaaauucauagauuagauacccaaggaauucagcuauuc

SEQ ID NO: 4105550 - RNA, 87 nt, Human
gaauggcugcaaaagggcugauuagaguguuaaugaggaggccaaagagauuaccugcuguguggggcucuaacagcucagcuauuc

SEQ ID NO: 4105551 - RNA, 79 nt, Human
gaaugggcaugcuucuaguugaaagguuauuugacucuugaaguuauuuucucuuuucacugggccaugcaacuaucuc

SEQ ID NO: 4105552 - RNA, 129 nt, Human
gaaugggccauaaauacugaggaccauauuugcguguuuccaaagugagggguucugcguccuaucaaggagauguaaacuacugacuacacuaccgaugaugcuggcuuuuugcuccauugccuuuuc

SEQ ID NO: 4105553 - RNA, 83 nt, Human
gaaugguaagcauaauagcuaacacagagugcuuauuaugugugagaugguauucuaauagcuuuacauguguuaaaucauuu

SEQ ID NO: 4105554 - RNA, 75 nt, Human
gaaugguaagugcguauuuaauuuuguaaguaacugacaaacuauuuuccagagugacugugccacuuuacauuc

SEQ ID NO: 4105555 - RNA, 62 nt, Human
gaaugguauuuucuucagaguccuagcuuaggaugcugcaaagaccucugagaaugccaguc

SEQ ID NO: 4105556 - RNA, 123 nt, Human
gaauggucaaggcugaaugcacacugagguuuccaugugcucagcucagcagauucagguaugaccccuacagagcuuggacucugaacuggcacugacauucucuacgcucagcgaccauuu

SEQ ID NO: 4105557 - RNA, 66 nt, Human
gaauggugguuaagcacagaaucuggagccuggcugucugguucaaacacuggcuuagccaauuuc

SEQ ID NO: 4105558 - RNA, 59 nt, Human
gaaugguuaagccuauaucuugaagcgcuucuuucagauuuagacugccuuaaucauuc

SEQ ID NO: 4105559 - RNA, 83 nt, Human
gaaugguugagguaguuuuucaaguauuuggggcagaaaaacacacauuuaccucagauauuuggauaauugccuccacuuuc

SEQ ID NO: 4105560 - RNA, 70 nt, Human
gaauguaaagacagauaaaacagcaucagucuuuucuuuccuuugaugcaguugaccaugcuuuauauuu

SEQ ID NO: 4105561 - RNA, 77 nt, Human
gaauguaauccaucagaacgugagcuccuugugcuuccagugacaagcgggccacagugcugguggcauguugcuuc

SEQ ID NO: 4105562 - RNA, 56 nt, Human
gaauguacacugaaagccuaucaggagccaagcccugggcuaaguacuuuacauuc

SEQ ID NO: 4105563 - RNA, 83 nt, Human
gaauguauacuauuagauaaucucuaggcuucauguagucuaaaaaacacuauaguuggaguuggagguuauggauaacguuu

SEQ ID NO: 4105564 - RNA, 74 nt, Human
gaaugucacuguuguuauuguuauuauuccgcucuaauggaaugccaggauauauaucaauacagcaggacuuc

SEQ ID NO: 4105565 - RNA, 77 nt, Human
gaaugucuacauucugaauucguauccacaaaauuuuaagaaaauugaggaacaaaaugaaaagaauggagauauuc

SEQ ID NO: 4105566 - RNA, 60 nt, Human
gaaugucuauguaaccgagggguccccuccuccuuuuaaaacugugguuauuuagcauuu

SEQ ID NO: 4105567 - RNA, 65 nt, Human
gagagacauggagaggcaaaguuacacagcaaguuagugaaccaaaaccacacuccaugccucuu

SEQ ID NO: 4105568 - RNA, 56 nt, Human
gagagagagagagagagaauaaagugugauacacaggaaucuguuucuccuuucuu

SEQ ID NO: 4105569 - RNA, 55 nt, Human
gagagagaggccuggaagaucuuggaacaggaacauccagcccugcuucucucuu

SEQ ID NO: 4105570 - RNA, 106 nt, Human
gagagagauaauauagacucuuucaaugucaucugugaaugcauuaaucaaguucuuuaugugcuacagagcauugcaagguaauaagucuauugcaccuuucauc

SEQ ID NO: 4105571 - RNA, 69 nt, Human
gagagagcaggcuggcagggccagggacagucuucagaggccccuggcucaggcagcuuuguuucuguc

SEQ ID NO: 4105572 - RNA, 66 nt, Human
gagagaggccccgccaccacccgcccugugcuucgggguuggacacuagguaggagcggccuccuc

SEQ ID NO: 4105573 - RNA, 101 nt, Human
gagagaggcugguaggaggagagcugucguccagguggggucaucauucauauggaugcucccccuggcaggcuggccucucagcucccucacccucuguc

SEQ ID NO: 4105574 - RNA, 59 nt, Human
gagagaguaucugcugguucaccacacuucagauguugugucagcaacaauacuuucuc

SEQ ID NO: 4105575 - RNA, 85 nt, Human
gagagaguuuuaaagggaauagcucucaccacuacauucaacauaauuuuggauguuguguuugacuguuacccaaacucuccuc

SEQ ID NO: 4105576 - RNA, 74 nt, Human
gagagaucuguugcuucagaaguucugcuuguugaccagcagagggcagugaauuuugaagcucaguauuuuuc

SEQ ID NO: 4105577 - RNA, 77 nt, Human
gagagaugacuagaaauguauugguagcugagcugggaacaguuuucaacaugcuuuauuucuaaacauuccaucuu

SEQ ID NO: 4105578 - RNA, 68 nt, Human
gagagaugcuccacugugcguggccauaugucugcugcaaucuguggccuuauggauggagaacucuc

SEQ ID NO: 4105579 - RNA, 70 nt, Human
gagagauuaaaacugaagccuuggagugacagagggaauuuuuguccuaccugauuuucaguuuucuuuu

SEQ ID NO: 4105580 - RNA, 112 nt, Human
gagagauuuaucucagaagggcauugucucuaagugugaucuucauuuuuaugagcugagcuugaagucccugacauuuagaaaugauaguguguugaugugagguucuuuc

SEQ ID NO: 4105581 - RNA, 102 nt, Human
gagagcacacacagaauggaugggcauguguggaaguucagggaucuuuguuuuguucacuggcauuuccucagugcucagaauagugcauggugggcucuc

SEQ ID NO: 4105582 - RNA, 76 nt, Human
gagagcacauuuggggucaacagaauuuguacucagccuagagaagaagguagaggguuguugaaucaaugcuuuc

SEQ ID NO: 4105583 - RNA, 93 nt, Human
gagagccaacgaaggcgucgggcagguacuggggagugaagaugugauguagcucucacuccccacgcgccuacacaugacuguuggccucuc

SEQ ID NO: 4105584 - RNA, 86 nt, Human
gagagccauggccucagauuucaggggugggaggaaaaguuccaguucugcccuuugcccacucagaagcccugaggaaagcucuc

SEQ ID NO: 4105585 - RNA, 129 nt, Human
gagagcgagucaaagucauaauugcuagcauuuauuggauguuuaccacaugccgagcacuguucuaagugcuuuacacagaugaauauuucccaaacaguguaaaguagguacugugauuaugcucac

SEQ ID NO: 4105586 - RNA, 55 nt, Human
gagagcgugggcuuuagaguuuagcagacuuaggcuaggucuugacucuguucuu

SEQ ID NO: 4105587 - RNA, 89 nt, Human
gagagcugcaccagaccaccucucaggguuuccuaaugcaaauccuugaacccugcagaagugagcauccagagaggugggagcuacuc

SEQ ID NO: 4105588 - RNA, 58 nt, Human
gagagcugcauucucagacacacaagaacccaaacaguguuguuugguugccucucuc

SEQ ID NO: 4105589 - RNA, 58 nt, Human
gagagcuggcaguguuuacagguacugguaggguaaagagaacaauuuguuagcucuc

SEQ ID NO: 4105590 - RNA, 60 nt, Human
gagagcugggcuuugggugaagcuggggaacuggacgugacucauccagaggccacucuu

SEQ ID NO: 4105591 - RNA, 56 nt, Human
gagagcugugguuugaccaggcagcccccuaugccucuuccagacucaggcuucuc

SEQ ID NO: 4105592 - RNA, 78 nt, Human
gagagcuuagcagaaauguagaaugucgggcuccaucucggaccuacugaaucaaaaucugcauuuuagcaagaucuc

SEQ ID NO: 4105593 - RNA, 97 nt, Human
gagagcuuuaugguaaugcugaugucagccccaucuccagaaauucuaaguguggucgggaguggggucugggcaucagucguuuaaagaaacucuu

SEQ ID NO: 4105594 - RNA, 78 nt, Human
gagagcuuucuuggguuccaguucccagacucacaacuccuauucugucugcugcuacucagcccuggaaauguucuu

SEQ ID NO: 4105595 - RNA, 64 nt, Human
gagaggaaaaaagccuaggcuuuuuccuaaguuacuuaacuugggaaaccaaugggcuccuuuu

SEQ ID NO: 4105596 - RNA, 130 nt, Human
gagaggaaaucaguuaugggaauaugaugcugagguauaguauuuucuuaauuuacuuauuauuugaugcuuaagcucaguuauauauuucaacauucaacauuuaaaucuuaagcugguuuuuaucuac

SEQ ID NO: 4105597 - RNA, 93 nt, Human
gagaggaagggggagaaccaggaaugccaaccagugcaugguuuaaguuaacucuaaugccacuuagcuucaacguuuuccacccuuccuuuu

SEQ ID NO: 4105598 - RNA, 125 nt, Human
gagaggacaacaauuaugggagggagaucuuuuuacauccaguggucagggaaguugucuuugaucuugacagcucccaaaacacuggacauauuagucuuccucaaaaaguguuaguuccucuc

SEQ ID NO: 4105599 - RNA, 60 nt, Human
gaauuugggguuugugauuccuuagguuuacccccauaagggaacaaaacucuaaaauuc

SEQ ID NO: 4105600 - RNA, 79 nt, Human
gaauuuuaucucugggucccaggccugaugguaccuucaaccuuuagcugccuuuugccugggucuagagauaagagcc

SEQ ID NO: 4105601 - RNA, 110 nt, Human
gaauuuuccagauguuuaaguucugcuucccuuuugauuaaaaauuuacucuuuaaauucucucuucuuguauuuuacuaucaagagaagcgaagccacaucuuccauuc

SEQ ID NO: 4105602 - RNA, 67 nt, Human
gaauuuugggcuuaccgcuuauggauuuuggucccucagucuccguugacuuggaagcccugaauuc

SEQ ID NO: 4105603 - RNA, 106 nt, Human
gaauuuuguuuuuaauguaggcuuuuaaaugggcuuugauggaacuugguuccauagaaggaaucccagauaaggcuuuuuaaaagccgagcccagccauggauuc

SEQ ID NO: 4105604 - RNA, 75 nt, Human
gacaaaaaccagugucaggaucaguauauuucaguauauuaaaucugacuauacugugugcuguacaaaaauguc

SEQ ID NO: 4105605 - RNA, 77 nt, Human
gacaaaagauuaaaggggacugagcucuggaugcauccacuuaugcuuugccagacaguucccuuccuuguuuuguu

SEQ ID NO: 4105606 - RNA, 80 nt, Human
gacaaaauauauuuagcacuggauuaaucaaaguggggacuaucucaaggauuaaauauccaaguuuauuuauauuuguc

SEQ ID NO: 4105607 - RNA, 64 nt, Human
gacaaacccugcccuucccaagauggcggcggcggcagggcaaagggcgggguuagacgcuguc

SEQ ID NO: 4105608 - RNA, 82 nt, Human
gacaaagaaaaggauacuuugaagaaagggcccucgucuacuggggccucuggucaagcaaagagguuuguuuuucuauguc

SEQ ID NO: 4105609 - RNA, 74 nt, Human
gacaaagaaaugacugaagcaauugcagugucacagguaaccugcuguuagauuucagucacaugccuaauguc

SEQ ID NO: 4105610 - RNA, 116 nt, Human
gacaaagcccaguguucaggcuaaagcuuugagcauguuuccuuucucuuguagggcacacacaugguauuguucagaacagguuguaguaugauugaagcacuggguucuuuguc

SEQ ID NO: 4105611 - RNA, 74 nt, Human
gacaaaguaacugguccucggauguuguggaguugguaaauagcucuaauacaaggcaggaagcaguaacuguu

SEQ ID NO: 4105612 - RNA, 70 nt, Human
gacaaaugaauagggagugugaugucucuggccaagagccgugauuuguuccaugcuuuguugguuuguc

SEQ ID NO: 4105613 - RNA, 121 nt, Human
gacaaauggucuacuguguaaauuuuagaaagaggcagacaaaaguuggaaggccgguuaauuuuccccucuuucuccugcuucagcuuugucuccuuggguauccaguguccacaauguc

SEQ ID NO: 4105614 - RNA, 59 nt, Human
gacaacaggguaaggcaggccaugugaagagagacgcaguggauggcagauccuguguc

SEQ ID NO: 4105615 - RNA, 62 nt, Human
gacaacaguagucucaggaauaggcagaaacacuucugcuagcaaggugggacuacuguguc

SEQ ID NO: 4105616 - RNA, 102 nt, Human
gacaacucuaucauucaacuguaaacuuguucacugacuuccaccaaaccugucaguggaguuuaaggacagaugaggaugccacaguaaaccugaguuuuc

SEQ ID NO: 4105617 - RNA, 58 nt, Human
gacaacugccccauuuuaaaugagguaaccaaggcccagagagguugggugaguuguc

SEQ ID NO: 4105618 - RNA, 83 nt, Human
gacaagaaaaaugaguguauacuugcauauauauauaaauuuuuaugucacauugccgucugugcacuuguuugcuuuuuguc

SEQ ID NO: 4105619 - RNA, 67 nt, Human
gacaagacaauccuggacagucagcauuggauuuucaucuccagcugauugauuuaguauuucaugc

SEQ ID NO: 4105620 - RNA, 84 nt, Human
gacaagaugguuagugaauuccuaauaggaagaccuggugauacuaucucuuuccagauguugggggucagguagcuauagguc

SEQ ID NO: 4105621 - RNA, 93 nt, Human
gacaagccuuggggugagcaacgaggcccugagaaaaucccugcagccucuggcugcagcaccacguggcuuccuucguucccaaggcuuguc

SEQ ID NO: 4105622 - RNA, 113 nt, Human
gacaagcucucuuugauuuuccuugcacaggguggaagauggucacgcaagauccauauucauaugaccaucagucacauguagagaaggucucagcuagccuagcuuaaguc

SEQ ID NO: 4105623 - RNA, 68 nt, Human
gacaaggaaggaucucagaauuucucauuccuucucagggugacaauuguugugaauucuuccuuguc

SEQ ID NO: 4105624 - RNA, 71 nt, Human
gacaaggccaaugggcugacaagacaugcauauuucacuggcauaugccuugcaccuuuggcuuucuuguc

SEQ ID NO: 4105625 - RNA, 58 nt, Human
gacaagggugguauuuaacaacuggagucugguuuggcuccggguacccaccguuguc

SEQ ID NO: 4105626 - RNA, 78 nt, Human
gacaagguaugaaggcuuuaugugaccaaaagaagguucagggaguucuguuguacacaugggguuuucaccuuaguu

SEQ ID NO: 4105627 - RNA, 64 nt, Human
gacaaggucuggaugaugggugugcucauugcuauugaggcgucaccgcuccccagaccuccuc

SEQ ID NO: 4105628 - RNA, 78 nt, Human
gacaagugaaucaugucucagaguguucuagucuccaacauaauuaauagccaggagauuuuguacauagaauuuguc

SEQ ID NO: 4105629 - RNA, 68 nt, Human
gagaucaaagcagccauuagucuagagcugauuuuuuccaacuauaggcaaugcccugcugagaacuc

SEQ ID NO: 4105630 - RNA, 70 nt, Human
gagaucaauagcaugugugucuagugguuaucauaaaggacagcacagcucuugacaacagcaacuucuc

SEQ ID NO: 4105631 - RNA, 69 nt, Human
gagaucagggucccagccuggacugggucuugugagcauucucuuacagguugcaggcugugacuucuc

SEQ ID NO: 4105632 - RNA, 88 nt, Human
gagauccugcagaguggcccugugugcaggcugcacuggugccccuaaaagcaucuguggauccuggccagggcccuccuuggcccuc

SEQ ID NO: 4105633 - RNA, 75 nt, Human
gagaucuucaagguuuuagauaacuaaaccuuauacucagaggugugauguuaucuaaaaugguuugaugaucuu

SEQ ID NO: 4105634 - RNA, 125 nt, Human
gagaugaagggaggcugagagccgcugaggccagccucaucccuugauaguuuugcagaaguugagcugucuuuggagagggagaggaggacugagagcagcaggcuggaguccaucaaaaucuu

SEQ ID NO: 4105635 - RNA, 65 nt, Human
gagaugacagucacagcagaaacucggguuuucagcucagcauucuacuuugugaacuguaacuc

SEQ ID NO: 4105636 - RNA, 79 nt, Human
gagaugauccagaaacucaaagauuauuaagucacgucaccuguaaaugaauggcuuugaguauuuucuggaguuuuuu

SEQ ID NO: 4105637 - RNA, 62 nt, Human
gagaugauuggggucguuuuaggaaguauagcucucaaaggacccauaauuaaaaccuucuc

SEQ ID NO: 4105638 - RNA, 89 nt, Human
gagaugcaagauacuuuggcucaccuggagccuguugagucagccaaguguuuuaacaagguuucuggugaagacaagcuaucagucuc

SEQ ID NO: 4105639 - RNA, 66 nt, Human
gagaugccuuccuuucugcuuuuagguaaugaacauuuauuacuguggcaaagaagcaggcuccuc

SEQ ID NO: 4105640 - RNA, 87 nt, Human
gagauggaagggaguccucagauaccuggcagaucaacugugcuaguuauagcugucauguacugagcauacucucccauccuccuc

SEQ ID NO: 4105641 - RNA, 97 nt, Human
gagauggagacucgcucugugcccaggcuggagugcaguggcauaaucucgccucacugcaaccuccaccucaggguucaagugauucuccugccuc

SEQ ID NO: 4105642 - RNA, 99 nt, Human
gagauggagucccacucuguagcccaggcuggagggcaguggugcaaucucggcucaccgcaaacucugccuccuggguucaagcgauucuccugucuc

SEQ ID NO: 4105643 - RNA, 99 nt, Human
gagauggagucucauucugucacccaggcuggagugcaguggcgccaucucggcucacugcaaccuccaccuucaggguuaaagcgauuuuccugccuc

SEQ ID NO: 4105644 - RNA, 98 nt, Human
gagauggagucuugcugugucaccaggcuggagugcaguggcgcgaucuugacucaaugcaaccuccaccucccggguucaagcaauucuccugccuc

SEQ ID NO: 4105645 - RNA, 77 nt, Human
gagauggauuaaagauuaaaaugacaaaacugcuaguaaaacaagauauugucaucuuggucuggaauaagccuuuc

SEQ ID NO: 4105646 - RNA, 68 nt, Human
gagaugggaggaucccuugggccaaggaguuggaggccagccugggcaucacagggagacaccaucuc

SEQ ID NO: 4105647 - RNA, 80 nt, Human
gagauggggggcaagggcuggccgaggaguccugaggcagucacccccuccugcuuccuugucuuuagaccccaauucuc

SEQ ID NO: 4105648 - RNA, 67 nt, Human
gagauggggucuugcuauguuguccaggcuuaucucaaacacuggcuucaggcaauccucccaucuc

SEQ ID NO: 4105649 - RNA, 77 nt, Human
gagaugguggugaagagcacagugaggaacagccggcauuuaggaaguaccaucgcguagcuguugacccccauccc

SEQ ID NO: 4105650 - RNA, 59 nt, Human
gagaugucuucagauggcaagagaaagggcuaaaucuaaugcuugacugggggcuucuu

SEQ ID NO: 4105651 - RNA, 66 nt, Human
gagaugugacaggugugaugauuuaggcuuucccugcaggcaagggagacaucaugaccuuauuuc

SEQ ID NO: 4105652 - RNA, 81 nt, Human
gagauguuguagccauuuuuauuaaugcuggagaagagaugguguauucuuuagaauuauggaaagugagcaaaacguuuu

SEQ ID NO: 4105653 - RNA, 58 nt, Human
gagauuagaguuguuucauugugucugcagccucacuacuggucacuucucugaucuc

SEQ ID NO: 4105654 - RNA, 58 nt, Human
gagauuauauguaugugugcauauacuuauguguguauuuacacauucauaagauuuc

SEQ ID NO: 4105655 - RNA, 70 nt, Human
gagauucagaaaagggaacugucauacugaguuggaagaauuacagaaugcaguuccuuauuaggaacuc

SEQ ID NO: 4105656 - RNA, 102 nt, Human
gagauucagggaugugguagagucaauaaaagcuuuagauucagaccugggucugaaucccaaucuguuauugacaugcaaccuuaggcaaaucagauucuc

SEQ ID NO: 4105657 - RNA, 96 nt, Human
gagauucaugagggaaauagcccaggcuuugagauuggaaagguaacagggggcugccuuugcaacagaaagaccugacugauucuagaauggcuu

SEQ ID NO: 4105658 - RNA, 64 nt, Human
gagauucugggccucucugcagacuaagcaaucagaaacuuugcagguagggcccagcagucuu

SEQ ID NO: 4105659 - RNA, 69 nt, Human
gagauugcucugucaaagccuguggauaguuuggagauaauuugcuucaaacagguuucagagcaucuu

SEQ ID NO: 4105660 - RNA, 82 nt, Human
gagauuggagacuuggaugcuagcucucaaagcuuccaccuggaagucacacuuuaacaguuccauucaauuuucauugcuc

SEQ ID NO: 4105661 - RNA, 76 nt, Human
gagauugguaaagaaccagguuacaaauucuaaaccccacaccccugugaugauggaacagccuuugccaaaucuc

SEQ ID NO: 4105662 - RNA, 89 nt, Human
gagauugugggagucagguaucccuugcuguccagccacaggagguggacagaucuggacagaaagggcugcuguguccccagauucuc

SEQ ID NO: 4105663 - RNA, 104 nt, Human
gagauuguugaacagcugcuuucucuuacuauggagucgacauuaacauuaagcaaaaagguuggagcauaggaaugugagugaaagcauaauucuucaguuuc

SEQ ID NO: 4105664 - RNA, 77 nt, Human
gagauuuaucacuaaagugcaccccuuugagauauauuaaccagauguccagaaugccacuuugguccuuucaucuu

SEQ ID NO: 4105665 - RNA, 63 nt, Human
gagauuuguucugaaaacucaagucccgugaaacgguacucugaaaccccagaaucauauuuc

SEQ ID NO: 4105666 - RNA, 129 nt, Human
gagauuuuuuauauuaauguguguauuuuguaauguaugugguauguguauauauauguuuauuuuagacacauuugacuacauuuauauauucauagagauuuacauagaggcauuaaaaaaacaggc

SEQ ID NO: 4105667 - RNA, 106 nt, Human
gagcaaaagucucugugguggucuucuguaagagcuuagcuaaggaugugcugcauaguaugccuaaagacaggacucucugaagcuuaccacagagugauugcuu

SEQ ID NO: 4105668 - RNA, 90 nt, Human
gagcaaacaaaacaagggcugagcacagugagccaacagccuuuugcugacugugguuucacauggcucagccaagucuuaguccugcuc

SEQ ID NO: 4105669 - RNA, 71 nt, Human
gagcaaacaaaacugaugugacugugcugugaaaguucuuaaguaccgugugcaucuguuguaguuuguuc

SEQ ID NO: 4105670 - RNA, 82 nt, Human
gaggauaagguuauucuuguuaguggacacugccucuuauguagaaauuuccuaaccacagggugaaugugacauuaucuuc

SEQ ID NO: 4105671 - RNA, 61 nt, Human
gaggauacauugaggcaguagcuggaggucuagagauuucaucccaccucagugugcccuu

SEQ ID NO: 4105672 - RNA, 126 nt, Human
gaggaucaucacuaccacuggacaccagagcugaauccauggaaggugcugcuuaacuccagggaggcccuaucugccuugccugcagcgucuccagcaggaagcucucaguguaugauccaccuc

SEQ ID NO: 4105673 - RNA, 71 nt, Human
gaggaucugugcugcuugaaucuugggauaaaaauuaaaaggcaguguuccccugaaagcaucacaugcuc

SEQ ID NO: 4105674 - RNA, 67 nt, Human
gaggaucugugucugugcugcuuugguuucuaauccucucaguugcaagcacagcgcgguguuccuu

SEQ ID NO: 4105675 - RNA, 67 nt, Human
gaggaucuugcuguagaggauagaggaugaagucaaggacagcucuauccuuucaucagugaucuuu

SEQ ID NO: 4105676 - RNA, 58 nt, Human
gaggaugcuccauaaacacucugggaugacugcagaaugaguguucugaguacuccuc

SEQ ID NO: 4105677 - RNA, 69 nt, Human
gaggauggacagcucuuaugugggcauguuacaaaggccguacugacguaguagaguugcuucuuucuc

SEQ ID NO: 4105678 - RNA, 62 nt, Human
gaggaugggcuagaaaauaggagccaaagaggauggaauauuacacaucuagacccauuuuu

SEQ ID NO: 4105679 - RNA, 74 nt, Human
gaggaugguuugacauguauuagucaugcacagaauauuaucauaauuaaugcauuaauaauacagcuguccuu

SEQ ID NO: 4105680 - RNA, 62 nt, Human
gaggaugugauaguucucccaggcaagccuccagucaucugcuagggaugccaguacuucuc

SEQ ID NO: 4105681 - RNA, 112 nt, Human
gaggauuaauuuuuacuuuuucuuugagaucuauuguacaguguggugaauauaguaaauaacaguguauuguacauuucaaaguagcugagaguaaauuuugaauauucuc

SEQ ID NO: 4105682 - RNA, 94 nt, Human
gaggauucuuuauugggagagacuucugccuuagcaagaagcagccuagaaguuucuugccuggggcagaugguugauucugugugcaaucuuc

SEQ ID NO: 4105683 - RNA, 87 nt, Human
gaggcaacagcaaggccauuggaugcagucuuuauuuguccagguggccauaauuucaacacugcaaaucagccuugcugcuguuuc

SEQ ID NO: 4105684 - RNA, 76 nt, Human
gaggcaacauguaaaaagaagaaucuggagcuagcccugguucagauccucacuuucuuauuagaaauguagccuu

SEQ ID NO: 4105685 - RNA, 99 nt, Human
gaggcaagaggauugcuugagcccaggaggucgaagcugcagugagccaugaucucgccacugcacuccagccugggugacagagcaagacccugucuc

SEQ ID NO: 4105686 - RNA, 55 nt, Human
gaggcacauauauacagagcccagcauuugaacugggguucagagauguugccuu

SEQ ID NO: 4105687 - RNA, 102 nt, Human
gaggcacccaagccuugaaccuucucuuccagccgggcuugcaccugggagccaacugcugcaauccuggacugugaggacagaggaagaggcuggggccuc

SEQ ID NO: 4105688 - RNA, 56 nt, Human
gaggcaccugcuccuacuucugcuuagcgugugagcaguguggugaccagggucuc

SEQ ID NO: 4105689 - RNA, 99 nt, Human
gaggcacgagaaucgcuugaaccugagagguggagguugcagugagcugagaucgugccacugcacucuagccuuggugacacagcgagacucugucuc

SEQ ID NO: 4105690 - RNA, 58 nt, Human
gacaaguggagcuugggaugaguugcagucccuacuuguuuccuuagcugagcuuguc

SEQ ID NO: 4105691 - RNA, 87 nt, Human
gacaaguucugcugcugcuggaagaauuccaugcuggcauuaucagaaaugcagagucauugacuuccaggaguaauagauuuuugc

SEQ ID NO: 4105692 - RNA, 85 nt, Human
gacaauuugcuuuuuuugaguugccucuaagucccuggugauguuauuguauaaauaccaacaaggcaauaagagcucaauuguc

SEQ ID NO: 4105693 - RNA, 75 nt, Human
gacacaacuggagcucuguugcuguggcacaggaaggcucgauaagaucucccagccacagcauucuuuuguguc

SEQ ID NO: 4105694 - RNA, 74 nt, Human
gacacacgcuuuccaggccugccugguguuugcccagggagacugcaagcucucugcaggcagagcccacuguc

SEQ ID NO: 4105695 - RNA, 64 nt, Human
gacacagaaguacauaaaggaauuagccaugaauagaauggagaugaauauguguaccuguguu

SEQ ID NO: 4105696 - RNA, 57 nt, Human
gacacagaauuccccuccaaguggggcuugguauaauuuggaaggaguucugguguu

SEQ ID NO: 4105697 - RNA, 60 nt, Human
gacacagagggcaccagauaugggaaaguuucucucugagaccauguuugcuucuguuuc

SEQ ID NO: 4105698 - RNA, 77 nt, Human
gacacaggccucauuugggggucuccucaggcacuucccccuuggcuccugaggccagaacccgacccugcuguguc

SEQ ID NO: 4105699 - RNA, 91 nt, Human
gacacagugacagauauaaagucaagguuuagacuagagaaacucaagauuccuucuaguuagaaacuaugauagucugugaugauuuguc

SEQ ID NO: 4105700 - RNA, 65 nt, Human
gacacagugggucauagguacaauuuugcuccuuucacuccgggagucuuaggcacagcuguguc

SEQ ID NO: 4105701 - RNA, 55 nt, Human
gacacaguucccuaugagguaaaggaugagaagugcugaguaggcaaccuguguc

SEQ ID NO: 4105702 - RNA, 94 nt, Human
gacacaucauuaacacccugagcccauaguugacauuagguucacucuugguguuuuacauucuauggguuugaaaaauguauaaugacauguu

SEQ ID NO: 4105703 - RNA, 67 nt, Human
gacacaugugggcagauacacagacacggauacacacguucauaugucugugugcccacacacaguu

SEQ ID NO: 4105704 - RNA, 68 nt, Human
gacaccaguaaauauucaaaaggagcuaaucaguaaauauuagcuccuuuugaauauuuacugguguc

SEQ ID NO: 4105705 - RNA, 74 nt, Human
gacaccugcacuagaagucaguugaaaccagacucaucaucuuuccucuguauuuauucuucugguguuuuguu

SEQ ID NO: 4105706 - RNA, 86 nt, Human
gacaccuugccccuuaccugacauucugaguuuccuucagaaagcuucaaggaaacucaaagugucagguaaggggcaaacuuguc

SEQ ID NO: 4105707 - RNA, 57 nt, Human
gacaccuuugacccuuaccuggacaucgcccuggauauccaggcagcucagaguguc

SEQ ID NO: 4105708 - RNA, 56 nt, Human
gacacuccaugcaggcaugccguuugcucuuguaccacugggccugcaugguuguu

SEQ ID NO: 4105709 - RNA, 56 nt, Human
gacacucuuaauccuaucccugaaaccaauaugguaaggauaagguuggagugauc

SEQ ID NO: 4105710 - RNA, 77 nt, Human
gacacugaagcucagagaaauuauaggaauugcucaaggucacaugaaauuccaaucuuucucugagcuccaggguc

SEQ ID NO: 4105711 - RNA, 103 nt, Human
gacacugauguggucuguguguucguauuuaugucgcagaagggaacugcuuuucuggaauuucuugucacauaagucacaugcauacauaccacucucuguc

SEQ ID NO: 4105712 - RNA, 58 nt, Human
gacacugcucacuucuucccuuggauuuuccaagauuaacuuggagugggacagaguu

SEQ ID NO: 4105713 - RNA, 83 nt, Human
gacacugucucucaguaacugcacugauggugagugagacugugucccucaguaacugcacugacagugagugagacaguguc

SEQ ID NO: 4105714 - RNA, 61 nt, Human
gacacugugugacuucugagacuaggcuagaaaaggccaagcucaagcuacacacagaguc

SEQ ID NO: 4105715 - RNA, 77 nt, Human
gacacuguuuagacagcggcucugaaccaugcuauuugcaggcugaugguuagcuguuuguuucuuuguuuaguguc

SEQ ID NO: 4105716 - RNA, 76 nt, Human
gacacuuacauuacgaaugcugaggcaagaaagcagaguaucaccuuguucaaucucagcuaguaacguacauguc

SEQ ID NO: 4105717 - RNA, 69 nt, Human
gacagaaaagcauuucaugucuagaaagcacucuaaaaugcuucuuagacauaaacuguugccacuguc

SEQ ID NO: 4105718 - RNA, 104 nt, Human
gacagaacugaaugccauuucuucuuggguacuuucccgcugcuuuuaacauuugggugaccccagaagaggauccaaauuggcguuuuucaggucuaaagguc

SEQ ID NO: 4105719 - RNA, 73 nt, Human
gacagaaggaacccggucccagaccaaaagacgccuggcucugugguggcugcugcuuggucuucuuccaguc

SEQ ID NO: 4105720 - RNA, 72 nt, Human
gacagaaggggaucuaggauauuucaugaauaauaauaaauucauagacaugucugguucuaaaccaugguc

SEQ ID NO: 4105721 - RNA, 67 nt, Human
gacagaaguugaggcuggcucaaaggaaaaggggaaagcauuggccgaagccaguccaaguucuguc

SEQ ID NO: 4105722 - RNA, 80 nt, Human
gacagaaucaauagauuagguauuagauucuauugcuacuauaauuagaauguuaaugcagaaauuuaaaaaauucuguu

SEQ ID NO: 4105723 - RNA, 74 nt, Human
gacagaaugcaagacuggaggaccccugccuggaagaccccaucuucccacugcaccucccagcuucuucuauc

SEQ ID NO: 4105724 - RNA, 56 nt, Human
gacagacaggaggcauucagggaagacagagucccauugaguggccagaugcuguc

SEQ ID NO: 4105725 - RNA, 57 nt, Human
gacagacaugggacuucauacugacaccauuaaucaugauggggcccuguggcuguc

SEQ ID NO: 4105726 - RNA, 81 nt, Human
gacagagaauuuuguuugauuugaaauucuuggguaaaaaaaauucuuccuuuaauccucugcagacgcuguucuauuguc

SEQ ID NO: 4105727 - RNA, 119 nt, Human
gacagagcaagacuccaucuugugggggaaaagaagguguggaaagaugcucuacuccucagagcaucuuguucccaacuucuccucccagguuuuuugguuagucuuuuguuugcuuc

SEQ ID NO: 4105728 - RNA, 69 nt, Human
gacagagcuuuuuaaaggauuuuuaaaggauuguaagaucuaaccauccuuccuuugagaggcuccauc

SEQ ID NO: 4105729 - RNA, 68 nt, Human
gacagaggagaucuggugguugaaguaaucuuaauugccuaacuucagaaauacuaucagcuuuuguu

SEQ ID NO: 4105730 - RNA, 67 nt, Human
gacagaggcaggccuggcagguggcccugagcccccagggccugcuuuccgagccugcaggaagguc

SEQ ID NO: 4105731 - RNA, 84 nt, Human
gacagaggcuuaauuaaaaacuaaugaagugaagacgcugggcuuacccaguaugcaaauuauuucauuguauguuacccuguu

SEQ ID NO: 4105732 - RNA, 60 nt, Human
gacagagguguccuugaguccacagggccucugguccagcagccacgggacgccucuguc

SEQ ID NO: 4105733 - RNA, 81 nt, Human
gacagagguuagagagcuacugccuugcuguugccuccagccacaugcacucucacugugcucuucuacgugaccucucuc

SEQ ID NO: 4105734 - RNA, 59 nt, Human
gacagaucuugacuuugcagcagaacgaagguugugcucacucuaaauuaagauguguu

SEQ ID NO: 4105735 - RNA, 60 nt, Human
gacagaugaguuagaauaggcaggcagggucuugcagacugcuuugauagcuuauuuuuc

SEQ ID NO: 4105736 - RNA, 126 nt, Human
gacagcaaguugauuaccuuuuugugucucccuuuucaaacacaucgcugaagccaagaguaauugugcauucagcauugguaugaaaacccaugaucacguuaaaguaauuguagcuuuucauuc

SEQ ID NO: 4105737 - RNA, 85 nt, Human
gacagcaaucaauguugccaugguaauagccaauccgagccacccccugcugucugcugcccaggcaacauugacuucauguguc

SEQ ID NO: 4105738 - RNA, 60 nt, Human
gacagcaaugaguaacuccuugggccacucaacacccagacugacguuaucauugcaguc

SEQ ID NO: 4105739 - RNA, 56 nt, Human
gacagcagacaaaccauguuuuacuuugauucaguucagcgguggugccugcuguc

SEQ ID NO: 4105740 - RNA, 60 nt, Human
gacagcagcauaauacaugaacucauacauuuucauauguucaguaugcgucaugcuguu

SEQ ID NO: 4105741 - RNA, 58 nt, Human
gacagcaguccuuggcuucauccgagucucuggccuggggcucucagggucaugcuuc

SEQ ID NO: 4105742 - RNA, 55 nt, Human
gacagccaggcauagggaguaugauuuacugccugcauuuuguggcuggcuuguu

SEQ ID NO: 4105743 - RNA, 78 nt, Human
gacagcccugacaggaggggcaugaaagacgguggcucccucucugucccuccugucccuuccucucuggugucuguc

SEQ ID NO: 4105744 - RNA, 108 nt, Human
gacagccgcaggugggcgaugcgcagccucugcagcuaggggucuugagcugggagaggcuucuggaggagcugggcugauccaagcccaccucuaugugguuuuguc

SEQ ID NO: 4105745 - RNA, 62 nt, Human
gacugccacaggcauuucuguucaaccuugaagccuucgcuacaggagaccgccuggcaguc

SEQ ID NO: 4105746 - RNA, 93 nt, Human
gacuggaaauuuuacagaaucaaugagggagggagaacuuuauuuaggauauaaauuuuacuucccucaguguagcugauacucacucuaguu

SEQ ID NO: 4105747 - RNA, 80 nt, Human
gacuggauuuauagauaucauaauaauuaucuagauguacauagauguauagaacugugaucucuauaggauucaauguu

SEQ ID NO: 4105748 - RNA, 71 nt, Human
gacuggcaugcacccuucuugcuucaaguauuaauauucucuuuggguuugcaggguuugugcugugaguu

SEQ ID NO: 4105749 - RNA, 129 nt, Human
gacugggaacuauuuacaaaaacauuaagcugcauuggugaaaaggacuucugaggucaagucgcauuagggaaauaagagcuuauucagcguugacucaggggccuuaccuuucaggugugcaugugc

SEQ ID NO: 4105750 - RNA, 78 nt, Human
gacugggaccacagauuccuaaguggcaggaugaaauuccaaccgaguucugcuugacuccaaagucuguguucuuuc

SEQ ID NO: 4105751 - RNA, 58 nt, Human
gacuggggcagugacuuguagagcuucugguccuuugcaaauaccaugcuguccuguc

SEQ ID NO: 4105752 - RNA, 63 nt, Human
gacugguaguuccuauuggaaugaaaggaucauaaauccauucaugccaaacugaacacaguu

SEQ ID NO: 4105753 - RNA, 117 nt, Human
gacugguauauaaaauaaaguuguccauuucagacacccuuugucuucaaggaaagcugucuagguggcccauggguggcaaaggcgcugaaaggaaauggaaauugauaaucgguc

SEQ ID NO: 4105754 - RNA, 67 nt, Human
gacuguacucuucuagccaucugaaauacguuuucuagguagagauagauuguguaaggguacaguu

SEQ ID NO: 4105755 - RNA, 60 nt, Human
gacuguauauacagcucaaggaaguaagccauauuaucuuuugguagcuuaugugcaguu

SEQ ID NO: 4105756 - RNA, 78 nt, Human
gacuguuagguggaagcaacccuggcaggaggugccuuggaaucucacagccccuggaagggggcuuccccaaauguc

SEQ ID NO: 4105757 - RNA, 65 nt, Human
gacuguugaaucucaggggaguuacuggaguguccuaacuuccaguucuucugagaaucauuauc

SEQ ID NO: 4105758 - RNA, 62 nt, Human
gacuguuggguacuguuuucuccuggcuagggagccaccauugaaauacuuacccaacuguu

SEQ ID NO: 4105759 - RNA, 66 nt, Human
gacuuaaaagaccucagaguaggucucagcugugucauccacuagcuuggugccugucuggaaguc

SEQ ID NO: 4105760 - RNA, 60 nt, Human
gacuuaacagacauuauuuaccuccuuguucuaaaagagagguggggaugguuugugguc

SEQ ID NO: 4105761 - RNA, 58 nt, Human
gacuuaaguggugugauaagugccauuauuaugggaaaauucacacuauuucagaguc

SEQ ID NO: 4105762 - RNA, 114 nt, Human
gacuuaauguaacuucuucaguaaagcacaguaugagcauugggaaaaaucggagcuacucaauccaucacucaguucaaacuguauguuucacugaugagaaagcuauguguc

SEQ ID NO: 4105763 - RNA, 85 nt, Human
gacuuacuugucucacuuaauccucauguaaauaugcugaaguagacacugcuccucacaugccacagaugaggcaaauaugguc

SEQ ID NO: 4105764 - RNA, 74 nt, Human
gacuuagagaucggcaugggaggccacugccuggaaagccagaucucagggcugugcccaucuuccccugaguc

SEQ ID NO: 4105765 - RNA, 77 nt, Human
gacuuagcugaucguggcaguguuuuuuccagucuguuuaauuuuugacucugaaacaucaccauuuuaccuaauuc

SEQ ID NO: 4105766 - RNA, 80 nt, Human
gacuuagcuuggcagcucugcuccacaugaguuuauucuaagacucaggcuacaggggcagaagcuauucaagagaaguu

SEQ ID NO: 4105767 - RNA, 58 nt, Human
gacuuaggccaguugguggcccuggacacauuugcuccuuaaggcugaggccuggguc

SEQ ID NO: 4105768 - RNA, 117 nt, Human
gacuuaucaaagugcuuccuugugcacacauucuauggggcugacuuaaugaauguacaaaacccauucgcaauuagcaacacccauuugugugccaacaacucacaugcaaaaguc

SEQ ID NO: 4105769 - RNA, 78 nt, Human
gacuuauccaauaauucuucaaguguuuugcauugaagucauuugucuagaauacuugggaauggguuaauuuaaguc

SEQ ID NO: 4105770 - RNA, 65 nt, Human
gacuuauccagggaggguccuguggcuucauguuuauggaguugcuaggucucugccucaugguc

SEQ ID NO: 4105771 - RNA, 118 nt, Human
gacuuauuuucugauauugucugcauauguauguuuuuaagagucuggaaauagucuuaugacuuuccuaucaugcuuauuaauaaauaauacagcccagagaagaugaaaauggguu

SEQ ID NO: 4105772 - RNA, 91 nt, Human
gacuucacaucaacaguaugaagcugaaugauuuuaucuuuguaguauucaguaaaaccauuccugcuuucauggaguugaaguuaauguc

SEQ ID NO: 4105773 - RNA, 58 nt, Human
gacuuccaaguuagaacuugaacacuaggauuuaaaugaucaggacugacuugaaguc

SEQ ID NO: 4105774 - RNA, 108 nt, Human
gacuuccccuugccguuuccugcaaccuggccuguggcuuaaggucugugaggacacagacuugguguuuggcaggcaugcagaagauguaaagggcucacagagguc

SEQ ID NO: 4105775 - RNA, 60 nt, Human
gacuucuucagaucaggaugcagcaacauuuucaaacaggagaacauccugauaaagguc

SEQ ID NO: 4105776 - RNA, 63 nt, Human
gacuugaccuucuauuagcugagagauauuugucuauaucgugcuaacguuuaagguuauguc

SEQ ID NO: 4105777 - RNA, 130 nt, Human
gacuugcacucauugacuguuuucugaaaggaaauucuuuuaagauacuguuauggauaaagugaaugaguugucaaagcaugguuuugaaagacguuguuugagucuguuuugugaguaagacacuguc

SEQ ID NO: 4105778 - RNA, 68 nt, Human
gacuugcccuggcauugagggucacaaggcuacucauggacucaggccccaccuugcuauuccaaguc

SEQ ID NO: 4105779 - RNA, 82 nt, Human
gacuugcuuuggcuuuccuccccaaaucacacaacuaguuucccuuuguaacauuuggugagguagccauuguuagaaaguc

SEQ ID NO: 4105780 - RNA, 57 nt, Human
gacuugggucacaugaccuaccucaccauagggagagguauucucacugaccugguc

SEQ ID NO: 4105781 - RNA, 64 nt, Human
gacuuggguccggugcccauauagacauggcaggcaucaucuguccaggucuggacccugagcc

SEQ ID NO: 4105782 - RNA, 79 nt, Human
gacaaaauuggaagcaugaaggucacuugcaaaccaaauguuugcaagaaugacccaucuacccaaugaggauucuguc

SEQ ID NO: 4105783 - RNA, 97 nt, Human
gacaaaccugaagucaauuaugacaagaugacaucauggcuucugucucagguaacagcagccaugcacgucauuaugaugaucugacuugguuuuc

SEQ ID NO: 4105784 - RNA, 89 nt, Human
gacaaagauacaugagcagacuuucaaggagugaaggcacuuacauuggcuggacuuuuugcaggucauuugagcugguguauuuuuuc

SEQ ID NO: 4105785 - RNA, 57 nt, Human
gacaaagcgccugcucgcgggccccuucaccaucucccggagacgggcgucuuuguc

SEQ ID NO: 4105786 - RNA, 82 nt, Human
gacaaagcugcaagacugagccuugaagcuagauaguucuaggugacaaaagagaauuucuaguuccugggccagcuggguc

SEQ ID NO: 4105787 - RNA, 61 nt, Human
gacaaaggaauauucaaaacagucaucaguauggucgauuguacugaucauuucuguaguc

SEQ ID NO: 4105788 - RNA, 73 nt, Human
gacaaaggauaaaugaucuagauuuucuuccagaaggagguuugguuccauuugcugcuuucuuuucuuuguu

SEQ ID NO: 4105789 - RNA, 63 nt, Human
gacaaaggggcgcugcgguccucagccacacagccaggguggcggggauaacagccccuuguc

SEQ ID NO: 4105790 - RNA, 68 nt, Human
gacaaaguacucgaggaggaggagcaaaagaccuggaaaaggugcuuuaaucuccacgguucuaaguc

SEQ ID NO: 4105791 - RNA, 65 nt, Human
gacaaagugacaaggccugaagcuccugaagccaggugguccaggauugaagccuuuuaucuguc

SEQ ID NO: 4105792 - RNA, 66 nt, Human
gacaaauccagugaacuccagugggagauacauacuuccucccugcuggacgcauugguauuuuuc

SEQ ID NO: 4105793 - RNA, 62 nt, Human
gacaacagcuaguggucuagacuuugaaaugagauauuaaacaguuuuccuagcugucuguc

SEQ ID NO: 4105794 - RNA, 60 nt, Human
gacaacauacuguaccugguaaacuccucuuaccaggaguucuucuauauaguaugaguc

SEQ ID NO: 4105795 - RNA, 73 nt, Human
gacaacauggcgaaaccccaucuccacuaaaaauacaaaaauuagccagguguggugguguacgccuguaguc

SEQ ID NO: 4105796 - RNA, 108 nt, Human
gacaaccaaaaauguucuaaugauaaguuugucuuuguaaagauauucacucauagcccauucuauggucuuuggaaagacaaaguucaugucagauguugauuuguc

SEQ ID NO: 4105797 - RNA, 67 nt, Human
gacaaccagcuucccggcaggcacguccugucucagacacgggacccucaccggggugcuauguguc

SEQ ID NO: 4105798 - RNA, 98 nt, Human
gacaacuguuuuugcauuuuagagacgcauacugaaguauuuaggguaaaacgugugucaguaauauucuuuaaaauacucaagcaaaaaaaaaaguc

SEQ ID NO: 4105799 - RNA, 71 nt, Human
gacaaggcagaaagcuuaaaggguuuguucuuuuuuaucaaccacacuuuaaacuuuagaccugcuuuguu

SEQ ID NO: 4105800 - RNA, 92 nt, Human
gacaaggcggaggaccugggccuccacgggccaucacauauagcaggggcucagagugaugucuugggggcccaggccugugugaugguguc

SEQ ID NO: 4105801 - RNA, 71 nt, Human
gacaaguccugccaccuauaagccuccguuuccaugucuauacacugggguuccuagcucacgggacuguc

SEQ ID NO: 4105802 - RNA, 56 nt, Human
gacaauaaaaugaucuuacaguuucaguagaagguguaugguuaauuuuauguguc

SEQ ID NO: 4105803 - RNA, 86 nt, Human
gacaaugaaugaagucuugacaacuggcagauauauaaaucuguaugaaaagauuaguauauauucaucaguuaggcuauucuguc

SEQ ID NO: 4105804 - RNA, 59 nt, Human
gacaaugcagaaguacuuguucaucaugcuucagagggcagguagcucuucugauuguc

SEQ ID NO: 4105805 - RNA, 90 nt, Human
gacacaaauucuaauaacccaugugauauugaaaaucugacauagugaagauauauugcaaugcauauggcuugagggaauaggucaguc

SEQ ID NO: 4105806 - RNA, 64 nt, Human
gacacacacagcugugggccugacguggcagaaccaucugcuauaagcuccacgcuguagcugc

SEQ ID NO: 4105807 - RNA, 58 nt, Human
gacacagaaggucacauguucaucuugcaaacaaacaggcuaugugaauuucuguuuc

SEQ ID NO: 4105808 - RNA, 58 nt, Human
gacacaggaaaagcuccagccccccaggggguguggugaaggcuggggcccugcuguc

SEQ ID NO: 4105809 - RNA, 63 nt, Human
gacacaggaacucaagcucgcuugcuuguaaagugaauaaaauuguguucuuaugcaaguguc

SEQ ID NO: 4105810 - RNA, 106 nt, Human
gacacaggggcuuggcuguucuguuacagcagugggaaggagucagccaagcaggagaauggcugcgccuauuugcucuugagagaacaucaccagcugcuguguc

SEQ ID NO: 4105811 - RNA, 57 nt, Human
gacacaguagccagugcagugaugugucauaucccauucuuugcuuguuucuguguc

SEQ ID NO: 4105812 - RNA, 89 nt, Human
gacacauccagaggcguggaaggcuuugaccgaacagugggguccccaagccuuuuccaggucuguggccugccguucauauguguguc

SEQ ID NO: 4105813 - RNA, 59 nt, Human
gacacaugucagacggacacccuuucugcaguaagauucggugagagucugcuauuguc

SEQ ID NO: 4105814 - RNA, 69 nt, Human
gacaccaaaguaccucucagcugcuggugccaagacagagguagcaucuggccugguuacuuuuguguc

SEQ ID NO: 4105815 - RNA, 68 nt, Human
gacaccaguaaauauucaaaaggagcuaauauuuacugauuagcuccuuuugaauauuuacugguguc

SEQ ID NO: 4105816 - RNA, 62 nt, Human
gacaccauuaccuuucuauauugcagguccccauggucaugcaguuagcaggugcugguguc

SEQ ID NO: 4105817 - RNA, 74 nt, Human
gacacccagagucagacagccaugggcugaaaucccaguuccacuccuacuggcugaguggcucugagcaaguc

SEQ ID NO: 4105818 - RNA, 63 nt, Human
gacaccugagaaaaaugagucagguacaacuucuuccugccuauuucucauaguucaggucuu

SEQ ID NO: 4105819 - RNA, 91 nt, Human
gagaagcugcauagagagauggcaugaaaugcagcauaagguacguguucauucaacaugucaucuaagcucccuuugcaucaaacuuuuc

SEQ ID NO: 4105820 - RNA, 71 nt, Human
gagaaggacuuuugcaauggcuuucccaaaugacaagcacaaaaugggucagaauccauucagaccuucuc

SEQ ID NO: 4105821 - RNA, 79 nt, Human
gagaaggagcaacaggggaaugugcauguaguuuugauucauucaauauauaaugaguacuuuccauguguuuugucuu

SEQ ID NO: 4105822 - RNA, 56 nt, Human
gagaaggaguagcugaccugggguuagaacuugaguccuaggccaguauacuuuuc

SEQ ID NO: 4105823 - RNA, 74 nt, Human
gagaaggccaggaacccagugucuauucagcacuuugcugaauucccuauguccaucuugguucugguuuacuc

SEQ ID NO: 4105824 - RNA, 64 nt, Human
gagaaggcuuaaaacauggaauauguccuguauguacauauuccaaaauaguuaagcacuuucc

SEQ ID NO: 4105825 - RNA, 61 nt, Human
gagaagggcuugggagucaacacggccaggaguauuucagugucaggacaaagcccuucuu

SEQ ID NO: 4105826 - RNA, 83 nt, Human
gagaaguauucacaaucauaauguauguacauauaugcauuccauguuuucaaguuugcacauauuauguugguuggcuucuc

SEQ ID NO: 4105827 - RNA, 76 nt, Human
gagaaguauuuggcuaaaagacaagcuaggaaaagaauugucaaacugguuucuguuuuccgcacaaauauuucuu

SEQ ID NO: 4105828 - RNA, 55 nt, Human
gagaaguccguguaagcuguuuuaagacagagaacauuguucacaggggcuucuc

SEQ ID NO: 4105829 - RNA, 72 nt, Human
gagaaguggcugacaacuggguuaacaaccugcagcaucugguaggaguuaggcuacugucacccauuuauc

SEQ ID NO: 4105830 - RNA, 96 nt, Human
gagaaguuccagugacaugaugagaaugucuguacaacauguagcccaguacuugcugugugguguucucagaacaugcuuggucuuaaacuccuc

SEQ ID NO: 4105831 - RNA, 92 nt, Human
gagaauaguaaaaacaagcaauuuaacaauuuguguccauuuagugaauuaguugagugacuuuaguugaaucuuguuuucgugcuauuuuc

SEQ ID NO: 4105832 - RNA, 82 nt, Human
gagaauauuaucagaaaugccuuaaauuggaguuucacaauguauguucuaguuuguugagauauuuuugcaaaauguuuuc

SEQ ID NO: 4105833 - RNA, 58 nt, Human
gagaaucuacaggaaaccgaagagauuagacguucuaccaugauuuccugaaguucuu

SEQ ID NO: 4105834 - RNA, 81 nt, Human
gagaaugaagagauugguuauaagagauuucuggugugagaaccaaaaggaguuuuguauaacuaccuucaaaauauucuc

SEQ ID NO: 4105835 - RNA, 60 nt, Human
gagaaugaugauuuccaauuucauccaugucccuacaaaggagaugaacucaucauucuu

SEQ ID NO: 4105836 - RNA, 92 nt, Human
gagaauggcgugaaccugggaggcggagcuugcagugagccgagauugugccacugcacuccagccugggcgacagagugagacuccaucuc

SEQ ID NO: 4105837 - RNA, 101 nt, Human
gagaauggugugucacccucuggcaucauuuagcacaguguuuuuccaucagagguacucaauaaacaucuguugauugauguuacagucacauucgacuc

SEQ ID NO: 4105838 - RNA, 91 nt, Human
gagaauguaaguuugacauuuacuauuccugguuaaaucuguuauucuggcuaugacuucaugaauagucaagugugggagguauauuuuc

SEQ ID NO: 4105839 - RNA, 84 nt, Human
gagaauguaauuuaaauguuuaaaacucgugacuggcuaccagcaguuacggucucuugacauuuagacaacgcuuacuuucuu

SEQ ID NO: 4105840 - RNA, 61 nt, Human
gagaauguguaugauuaaugccucagggcucuuuucuucgcaaauucaacagcacauucuc

SEQ ID NO: 4105841 - RNA, 59 nt, Human
gagaauguuucugucugcccuuggccaucugagccacacaagagguagauaagauuuuc

SEQ ID NO: 4105842 - RNA, 86 nt, Human
gagaauugcuugaacccgggaggcggagguugcagugagccgagaucgugccauugcacuccagccuaggcgacagagcgagacuc

SEQ ID NO: 4105843 - RNA, 61 nt, Human
gacaguccuugcccaguaucuaguccccgucgccccgugcaggagacguagguaggacguc

SEQ ID NO: 4105844 - RNA, 63 nt, Human
gacagucuggccuaaaggguuaugguaccaacaucaaauauucuacuaaagccagauuuuguc

SEQ ID NO: 4105845 - RNA, 85 nt, Human
gacagugagauauaugagaauuacaaaugagucacauuacugaaaaaaauuugcucaguuugauaauuugaaauauguuuucuuc

SEQ ID NO: 4105846 - RNA, 80 nt, Human
gacagugcuuuguaguuucauuguguaaggcuuucacuucuuugguuaaauucauacaauaaacucauagguauuuuguu

SEQ ID NO: 4105847 - RNA, 55 nt, Human
gacaguggauucaucuagucaaccccguauaauuuugauaugugaaaacacuguu

SEQ ID NO: 4105848 - RNA, 70 nt, Human
gacagugugaacaucuaauaguacuauguuacucuuauggguuaauuccuuguuggauuucaugacuguu

SEQ ID NO: 4105849 - RNA, 62 nt, Human
gacaguuggcuucaaaggcagagaggguaagaaggagacgccaucagcuucaagccaacuuc

SEQ ID NO: 4105850 - RNA, 98 nt, Human
gacauauccaagacauccuagccagcaggaaugauauucgaggagaugagugauuucaacaccaaaugacaucauuuuuggcauguugugguaauguc

SEQ ID NO: 4105851 - RNA, 60 nt, Human
gacaucaacauaaagaaguccucaggugugugcuugggugauguguauuuguguugucuc

SEQ ID NO: 4105852 - RNA, 59 nt, Human
gacaucauggagaggacaaacagauuggcaagccuuuuuaugucuuuuccaaugcuguc

SEQ ID NO: 4105853 - RNA, 62 nt, Human
gacauccaggcugauccaugaagaaugaaugucuucagccucugugucucaaccuggcuguc

SEQ ID NO: 4105854 - RNA, 63 nt, Human
gacaucccagcagcuugcacagugcuggcggggcacgcuguaagugcucagcugaugguuguu

SEQ ID NO: 4105855 - RNA, 73 nt, Human
gacaucgccguguccgagaucuuugucagccagaaggaccuggugggcaucguucccuuggcuauggugaguc

SEQ ID NO: 4105856 - RNA, 84 nt, Human
gacaucuagaucagugcaguagaacuuuaguuaauuccaguuauaaaauagcuauuaauuaggguuuucauuggcuuaaauguu

SEQ ID NO: 4105857 - RNA, 68 nt, Human
gacaucuuggggccaccuugaauguuccucaacauuuucuaagaaucauucaagugcucuaaaauguu

SEQ ID NO: 4105858 - RNA, 56 nt, Human
gacaugcaaugcagugguaaguuacaacagggauugugaccagguaagugcauguc

SEQ ID NO: 4105859 - RNA, 73 nt, Human
gacaugccaaagauguuugauagaagcccugagaagacauaaaaaggguuuuuuauuacaguuuugguguguu

SEQ ID NO: 4105860 - RNA, 64 nt, Human
gacaugggcugcuucuccagcaccugcuuccaacaggguacuguggucagcagcaaccaguguc

SEQ ID NO: 4105861 - RNA, 76 nt, Human
gacauggggcuagaggcagggucuggauuugaucugauccucagcucuaagaccaggcccuugcaagucccaccuc

SEQ ID NO: 4105862 - RNA, 82 nt, Human
gacaugucuaaacuuucuucuugaguaaccagauuuucccuuacagucuuuugucacuuaagagaacucauaggcaaucguc

SEQ ID NO: 4105863 - RNA, 80 nt, Human
gacaugucugauauaguaugggaagaacuuuguaguagaaacauuucuauuaauggccccauuuuaugucucuacauguu

SEQ ID NO: 4105864 - RNA, 60 nt, Human
gacauguuuaauugaagguggcaagaagggcuagcucaguuaacauucaauuaaacaguc

SEQ ID NO: 4105865 - RNA, 59 nt, Human
gacauguuuacauuaggugauaucgcuggauaacaccagugauacccagugagcguguc

SEQ ID NO: 4105866 - RNA, 88 nt, Human
gacauuaaacaguacuucagaggcugcccaggaguucuaugaugaugagauggacccaccgggagcccuggaguaaugguucaguuuc

SEQ ID NO: 4105867 - RNA, 91 nt, Human
gacauuaacuucaacuccaugaaagcaggaaugguuuuacugaauacuacaaagauaaaaucauucagcuucauacuguugaugugaaguc

SEQ ID NO: 4105868 - RNA, 68 nt, Human
gacauuagagauucuuguuugaugauaugcuacacauccaauuuugacaaggauuuguuccuaauguu

SEQ ID NO: 4105869 - RNA, 58 nt, Human
gacauuaugagcaugccaaauuggggcaucuaaugccuagauucaaagcuuauaauuc

SEQ ID NO: 4105870 - RNA, 96 nt, Human
gacauucaaggguuaaacugguuucuaguaaauacugugcuuuaaaguaguacauacugugagcuguguuauuagaaaccugcuuguccuuguguc

SEQ ID NO: 4105871 - RNA, 75 nt, Human
gacauucuccuacuguguuuuccugcugaggcaucguuuuaacagaugcucagacuuaagaagaucagaguuguc

SEQ ID NO: 4105872 - RNA, 58 nt, Human
gacauuggcccaaaucuggggcagcuguaaugagagaaguccugggcugggccagguc

SEQ ID NO: 4105873 - RNA, 74 nt, Human
gacauuuaucaguaauuaccuaugacucgaaguuuccuucagugaugaguuacugauuauucuuaggaaguguc

SEQ ID NO: 4105874 - RNA, 57 nt, Human
gacauuuauuggauuuuacgagcuaguggaucugacucagaaagccgaucagauguu

SEQ ID NO: 4105875 - RNA, 92 nt, Human
gacauuuuauuggcuuaugguucugcaggcuguacaggaagcauaaguagcuucugcuucuggguaggccucaggaaacuuucaaucauguc

SEQ ID NO: 4105876 - RNA, 64 nt, Human
gacauuuuccaauugcagaucagauacaugugcacugcacauuggaaaugcauuggaaagaguu

SEQ ID NO: 4105877 - RNA, 97 nt, Human
gacauuuuggguuuuggaguuuuaucuguucugcuugauuuugaaacuuauuuucagaacuaaguucuuagaaugaauaacuugaacucagcuuguu

SEQ ID NO: 4105878 - RNA, 103 nt, Human
gacauuuuguauuguuuugauguguuuuuugagugugucuaagacagaaaacuuacauaacccuuuggaccagcuccucgggagacgagaaaccuuaaauguc

SEQ ID NO: 4105879 - RNA, 81 nt, Human
gaccaaacuacacaguucacacuuuugauaugugaacccaccacagauaguucaggucaauggugugacuaaguuugaguc

SEQ ID NO: 4105880 - RNA, 68 nt, Human
gaccaaucuuaccuuucucagaggucuauuuuauguuuagugggcuucuaagugaaaguguaaauguc

SEQ ID NO: 4105881 - RNA, 99 nt, Human
gaccaaugaaugcacauuaaguuuauuuucuuccuuagcugcuuguuaaucccuaauugcuagcagacagguaggaggauaaauuuuacagcuauuguc

SEQ ID NO: 4105882 - RNA, 106 nt, Human
gaccacaagacauauaaggcauuugacaguguuggggcaggcugaggaggugaggcuugucagucacucaagucacguuaaagaauuuaaaguuuauccugagguc

SEQ ID NO: 4105883 - RNA, 79 nt, Human
gaccacguuggcaccaggcugggcauaggccaugucaugggguaagauaaggcuccuguccuccuggagcuccaagguc

SEQ ID NO: 4105884 - RNA, 69 nt, Human
gaccacuggcuggagccccucaagagcagggcuuguucuuucucaugucaugguucccagcaccugguc

SEQ ID NO: 4105885 - RNA, 72 nt, Human
gaccagcaagcaccugcaccggucgccuuugguccuucgacaagguuucgggagcgggucuggaaggggguc

SEQ ID NO: 4105886 - RNA, 83 nt, Human
gaccagcuacaucagaauguuauggggggcucucagaacucagacugccagucccuaccucugagauucugguucagcagguc

SEQ ID NO: 4105887 - RNA, 84 nt, Human
gaccaggacauucaaguuucugcucaugggagguguauaccacaagcccccguggggccagcagaaagcuuucuguguaugguc

SEQ ID NO: 4105888 - RNA, 71 nt, Human
gaccaggcauguggcuggcacucuguccagugucccacaggggcuguggacuaugccagcagggccucguc

SEQ ID NO: 4105889 - RNA, 56 nt, Human
gaccaggcucugcugcuuucuaaucuuaugagcuugggaaagucauagagcuuguc

SEQ ID NO: 4105890 - RNA, 126 nt, Human
gaccagggccucuagcuuggaaauggaggccauuccugcccuggcucuccacuaguuuaauccuuuagauuggcaugucagguagacaccugaauccucccuuuuuauucgucccucacccugguc

SEQ ID NO: 4105891 - RNA, 84 nt, Human
gaccagguuugagaagauguaauguuaagccucaggccauccaauaccugaauuaacuuaccauauguacuuuucaaucuguuc

SEQ ID NO: 4105892 - RNA, 60 nt, Human
gaccauagauguauggguuuauuucugaacuuucaguucuaauccauuggucuauauguc

SEQ ID NO: 4105893 - RNA, 80 nt, Human
gagagacaugaaacccagccgugguccugaggcaggcaugugacagcugggaccagagcucgggcuucucaugcccucuc

SEQ ID NO: 4105894 - RNA, 62 nt, Human
gagagacccagacaccaugcaucugaugauaagcaucuucucuuggugccuuggagucucuc

SEQ ID NO: 4105895 - RNA, 80 nt, Human
gagagagacuguuagagguuccaggaaagucagaugcacuucaugcaauuagauuuuaggagauuuuacuguauucuuuc

SEQ ID NO: 4105896 - RNA, 83 nt, Human
gagagagagagagagagagagcuaauauuaagcuucaaaagugauaggcuuuaggguuuagcuuucucucccgacuuucuguu

SEQ ID NO: 4105897 - RNA, 79 nt, Human
gagagaggaaggcaucucuggacuuauuucccuaaaugugagcaaauaucuccaggaaagauaagucucuaaaucucuc

SEQ ID NO: 4105898 - RNA, 56 nt, Human
gagagaguuuuuacuggagggcaucuuagugaugggcugccccuuaagaguuucuc

SEQ ID NO: 4105899 - RNA, 78 nt, Human
gagagauaccaugaagauaagaccaggcuggaaaaaucaauuugcacagugucuggcuauuuucuuugcacuucuuuc

SEQ ID NO: 4105900 - RNA, 79 nt, Human
gagagauacugugggaagcaggauucagauguuuaaaaucaaaauuuucaacacugaccucuacccucaguuaagacuc

SEQ ID NO: 4105901 - RNA, 81 nt, Human
gagagaucauggucagcagaggagugucuugcccagcaauuaaauacuugggcauagaaauaacuucugucacuucuacuc

SEQ ID NO: 4105902 - RNA, 75 nt, Human
gagagaucugacugcugucuuuauuucacugcuaaauuaagguuaagcaaaacuaaagacacagacagcaaucuu

SEQ ID NO: 4105903 - RNA, 67 nt, Human
gagagaugaacacauuggaagccaagaaugguuuauggauuauauuugcuaaaugugugcaauccuc

SEQ ID NO: 4105904 - RNA, 71 nt, Human
gagagaugauggcucucuugaccuaggcacaaguuauacuugcugccuacauuucagugagccuuacucuc

SEQ ID NO: 4105905 - RNA, 59 nt, Human
gagagauuuggaacuguuucucagaagaaguagagaaagucaacaguuuccagauucuc

SEQ ID NO: 4105906 - RNA, 77 nt, Human
gagagcagacacggagcuuggcuggaccucacggaucacuaguccaugucacugcacaauguucuuccucuguucuu

SEQ ID NO: 4105907 - RNA, 72 nt, Human
gaggguggcccguguucgucuuucccagcuuuguggagguguagcugggccugugggcacacggacgcccuc

SEQ ID NO: 4105908 - RNA, 61 nt, Human
gaggguggccuuuagagcccaugaacuguaucuuucagcuuccuuuguucagaccaccuuc

SEQ ID NO: 4105909 - RNA, 68 nt, Human
gaggguggggaaggggcaggccuguuauuugacacuuucuguugggcuuggcccaggccucacuccuu

SEQ ID NO: 4105910 - RNA, 61 nt, Human
gagggugucuggaugcuagacuuauuuugagaaccuucugugcugaguauccagagucuuc

SEQ ID NO: 4105911 - RNA, 60 nt, Human
gaggguguuccuguaaaggcugcuguuauaaugauagcaccaaaacugaagaacaugcuc

SEQ ID NO: 4105912 - RNA, 83 nt, Human
gaggguuggaagaacacacauaagaaacuacaaagagcaucugcgagacggcuugugugaacugauggugugggccaaccuuc

SEQ ID NO: 4105913 - RNA, 89 nt, Human
gagguaacacuguagcugagggcaugcguucaggaguuaaucugcccaauucaaauucuggcuugacagccuucuagcugcaugaccuc

SEQ ID NO: 4105914 - RNA, 68 nt, Human
gagguaacauguauggagcauuuaccauaggccaagcacuguucuaagaacuucggacauguuaucuc

SEQ ID NO: 4105915 - RNA, 78 nt, Human
gagguaacccgaacuagggccaggaagcuaagguauuucuccacagcacccuguuuauccugaguucagggauacuuc

SEQ ID NO: 4105916 - RNA, 74 nt, Human
gagguaacuaggacugcagguguaaugcucuaguuaugcggaccucugcccacaguccaauaguugugcuccuc

SEQ ID NO: 4105917 - RNA, 70 nt, Human
gagguaagggcaggagagugaacagcacaucuggccugucuugugugauccuguccacagcccugaccuc

SEQ ID NO: 4105918 - RNA, 92 nt, Human
gagguaauacaugaaagagaauguaucaacaaauuguacagucuuuugagugacaauaugugcuagguauuuguuccauguaaaauuacuuc

SEQ ID NO: 4105919 - RNA, 70 nt, Human
gagguacuagucugcagcggggagggguguugggacccuggggcccucucuucugcagccuccaaaccuc

SEQ ID NO: 4105920 - RNA, 56 nt, Human
gagguagaauaagaaaagguaugagacuagaccaauuucauuccaaguucuaccuc

SEQ ID NO: 4105921 - RNA, 99 nt, Human
gagguaggagaaucucuggaaccuggaagguggagguugcagugagcugagaucaugccacugcacuccagccugggcgacagagcaagacuccaucuc

SEQ ID NO: 4105922 - RNA, 69 nt, Human
gagguaggauuuaggacuugggagugaagauugaacauguguguugacuuccaguuauaggaacucuuc

SEQ ID NO: 4105923 - RNA, 72 nt, Human
gagguagggagggacugccugauuagcacugugcccuugauaugccagcaucagguccagcuccugugccuc

SEQ ID NO: 4105924 - RNA, 99 nt, Human
gagguaggguuuugcucuguugcccaggcuggaguacaguggugugaucacaacucacugcggccucaaccucccaggcucaagcgauccucccaccuc

SEQ ID NO: 4105925 - RNA, 72 nt, Human
gagguaguauuuuaaagagacuguagauuuaagacuaauaaagucaguuaaacuuuguaaaguagauaccuc

SEQ ID NO: 4105926 - RNA, 80 nt, Human
gagguaugaauaugacauuugagcauacauguaaagaccuaaaggaagucuuuagagugaggugacuuagagucagccuu

SEQ ID NO: 4105927 - RNA, 69 nt, Human
gaggucagcaaguggaccauccugggguucaugauugucugauucccagaccucuccccuugcuauuuc

SEQ ID NO: 4105928 - RNA, 70 nt, Human
gaggucaggcaggagcucucaucgucagggccugcuggggcccuuccuugaagaguucuaacccugccuc

SEQ ID NO: 4105929 - RNA, 67 nt, Human
gaggucaucugcuucuucuggucagugccuuuuaaggcaaugauauugaagugaugaagacacccuc

SEQ ID NO: 4105930 - RNA, 77 nt, Human
gagguccugguuauaguucugacucccauuugcugucuagguagccaugagcagaucacuauaccucuuuggaccuc

SEQ ID NO: 4105931 - RNA, 56 nt, Human
gaggucgggaaagggggccccgcagcagccccuuggcuucccuucucccuugccuc

SEQ ID NO: 4105932 - RNA, 77 nt, Human
gaggucugggcuugggccugguuuuguuuuccacggcuugcgguguucagacacaggcucagcaggagccugaccuc

SEQ ID NO: 4105933 - RNA, 70 nt, Human
gaggucuguaaguaguuuaucacaauaaauaauucugacaaaugucgcuguuucugugguguauagccuc

SEQ ID NO: 4105934 - RNA, 60 nt, Human
gaggucuguggaaguaccacagugacuggagucaucauguuugauuuccacaguuuccuu

SEQ ID NO: 4105935 - RNA, 66 nt, Human
gaggucuugacucagucugggguggggcuggggacacccauaacccugcccauugagcaggacguc

SEQ ID NO: 4105936 - RNA, 78 nt, Human
gaggugaugggcaagaaggaugacacuggaugauuaaaauccaccaaaaaucuccagccuccuauuuacccuaacuuu

SEQ ID NO: 4105937 - RNA, 103 nt, Human
gaggugauguaagcaaagcaucagaacaguaccuagcacauaguaagugguuaucaucagcuugugugucugcuguauaugcugaacugcuugaguccaucuc

SEQ ID NO: 4105938 - RNA, 68 nt, Human
gaggugcucaaggguuucaauuguagccugucuguuuugugacaacaucagcugagaccuucacauuc

SEQ ID NO: 4105939 - RNA, 108 nt, Human
gaggugcuucgcugcagcucaacuccauggcuuucgcaucugcaaugaaaauaauaaacaagagaaguuauugcaggaggccccauggaaccgaccagcagagcucuc

SEQ ID NO: 4105940 - RNA, 98 nt, Human
gagguggaggauugcuugagcccaggagguggagauugcagugagcccugaucucgccacugcacuccagccuuggcaacacagcgagacuucgucuc

SEQ ID NO: 4105941 - RNA, 68 nt, Human
gagguggaguuggcacugagcugugauugcaucacugcacuccagccucagugacagagccagaccuu

SEQ ID NO: 4105942 - RNA, 60 nt, Human
gagguggcacugugaggagcacgcuggggugacaccuccaugguccucacaugccaucuu

SEQ ID NO: 4105943 - RNA, 55 nt, Human
gagguggcagaggccuggaccugccgucaaagguguguugauguuuccccaucuu

SEQ ID NO: 4105944 - RNA, 79 nt, Human
gagguggcauuaagauucugguuguagucacugaaggcccuaaaacggcccugguucuucagaaucugugagcuaucuc

SEQ ID NO: 4105945 - RNA, 98 nt, Human
gaggugggaggauugcuuguuccccggagguugaagcuacagugagccuugauugugucacugcacuccagccugggcaacagguaagacucugucuc

SEQ ID NO: 4105946 - RNA, 59 nt, Human
gaggugggagggcagucccuaacagccacggaugccuggcggggcgcucacuccaccuc

SEQ ID NO: 4105947 - RNA, 66 nt, Human
gagguggguggaucaugaggucaggaguucgagaccagccuggccaacauggugacaccccaucuc

SEQ ID NO: 4105948 - RNA, 67 nt, Human
gaggugguaauauucagaacaucaagcuuuaggauauuccuguggacaagugcugaauaacuacuuu

SEQ ID NO: 4105949 - RNA, 99 nt, Human
gaggugucagacugcagaaguugauuccaggcuuguauuugugucuguuaauuuugguuuuacagguacauacuugggauccacacagcacuuagccuc

SEQ ID NO: 4105950 - RNA, 99 nt, Human
gaggugucaguuguuugccugccgacgcucucaugugaacuaagagaauggaaccggacauucgugaagugcucaguaagcaaacaaaacgaagacuuc

SEQ ID NO: 4105951 - RNA, 59 nt, Human
gaggugucaugagggccugcucaucacuugcuuagugcauagacccuugggggcaucuc

SEQ ID NO: 4105952 - RNA, 61 nt, Human
gaggugucugcuguguucaaaggacaguggcacugaaaacucaggacucagagacacucuc

SEQ ID NO: 4105953 - RNA, 61 nt, Human
gagguguggguaauguuacagauagguugauccuggauauuuuguucauagcucacucuuu

SEQ ID NO: 4105954 - RNA, 70 nt, Human
gagguucugggcugugcccucagccuuuccuacauccugcaguggcccuugaagcagcuucaugaaccuc

SEQ ID NO: 4105955 - RNA, 65 nt, Human
gagguugauagaucccuucaaaguucuaaucucugguuuugaaacuugaagaggauauaucgcuc

SEQ ID NO: 4105956 - RNA, 59 nt, Human
gagguuguggcugagcuguguuuaggaaacuggugcacugagcaccagccacagauuuc

SEQ ID NO: 4105957 - RNA, 81 nt, Human
gaguaaagucuguugugcucuauagagaucuaaucgucagaucaagaugaugggguugauuguaagcucaacuucucucuc

SEQ ID NO: 4105958 - RNA, 88 nt, Human
gaguaacagaugcacagugaccaaucacugaaugauuuugaaagaaguaaugcgauuggucacugauuaugaugaacauuugucacuu

SEQ ID NO: 4105959 - RNA, 75 nt, Human
gaguaacuagggagcagcccugccacuccucaugugaugcaccaggagccagggaagcugcuuucuaggggauuc

SEQ ID NO: 4105960 - RNA, 68 nt, Human
gaguaagggugguagauccaguuuuggcaaccucagacgauggaugauuagacucugccacucuucuc

SEQ ID NO: 4105961 - RNA, 95 nt, Human
gaguaagucacuucccuccuuuaucaaaaagagaugcuauuuauacacuuucuuucucacuugguggaaugaggguaaaaugugaaguauuacuc

SEQ ID NO: 4105962 - RNA, 61 nt, Human
gaguaaugcucaaggucuguuucuaauaauuaguaguauuaugacccugggcaauucacuc

SEQ ID NO: 4105963 - RNA, 64 nt, Human
gaguaauuuucuugauuucuuaguuacuucaucauagcuuuucauaagaaacaggagaauucuc

SEQ ID NO: 4105964 - RNA, 76 nt, Human
gaguaccuagcaucuuugggaaucuuugugcaugacuaaaggcagaaguccugugugacuucccaaaugcuggcuc

SEQ ID NO: 4105965 - RNA, 107 nt, Human
gaguacgagauaaaauauaagauuaacaggaagacgugaguacaugguguaaagagucaggaaaaauggcuaccuuuccaccaacucacuucccuguuuucgugcuc

SEQ ID NO: 4105966 - RNA, 116 nt, Human
gaguagaaaagcccgacaaaugguaucuuaggugaucaaggucaacauuaauaauaauaaauaauuugauauuuugcacgcuugguaugauauaaugaaaauggcgcuuuccucuc

SEQ ID NO: 4105967 - RNA, 78 nt, Human
gaguagaacaggcugucagagcgggaaaguggcuuuaauacccugaaaagcaaaggaauccgccugucagcuuugcuc

SEQ ID NO: 4105968 - RNA, 77 nt, Human
gagaagaugcaugagaagaaaccauacugauauagucaucaacaccucagugugaauucauuuuagauaguuuucuc

SEQ ID NO: 4105969 - RNA, 57 nt, Human
gagaagcacaagauaagggaucaggauuucugccagguuccaaggucuaugcuucuu

SEQ ID NO: 4105970 - RNA, 90 nt, Human
gagaagccagcugcagcaaauguuaagugacuaguaacuaaugauaauaaaaguaauaaucacaauaacauuuauuguaggcuaacucuc

SEQ ID NO: 4105971 - RNA, 59 nt, Human
gagaaggauguggcucauagcugagggauucagccacaugcucagucacauccugacuc

SEQ ID NO: 4105972 - RNA, 101 nt, Human
gagaaggcugaugauggcuguccaguuucuagagaagaaaccucuccuuaagaggaaacccuuaucuuuagcuaacuggaugccaaaacgaaagguuucuu

SEQ ID NO: 4105973 - RNA, 64 nt, Human
gagaaggcuucuuuuccucugauaaaauucuguuuguccuucaggggaaagguuaugcuuuguu

SEQ ID NO: 4105974 - RNA, 56 nt, Human
gagaagggcuuuuucucccaccagucauaguuguauucugggaagaaauucuucuc

SEQ ID NO: 4105975 - RNA, 76 nt, Human
gagaagggguugaagaguagucucuaauauccagcaccaguuggccuuagguucccugccuccagaccuuauucuc

SEQ ID NO: 4105976 - RNA, 91 nt, Human
gagaaggguuauaaaucuggauguaacgaagguuucaccccagugguaauagaguuagagggugaaagguugcaucuuguucaaccuucuc

SEQ ID NO: 4105977 - RNA, 59 nt, Human
gagaagguggaccugaaggagcggguagagaaacuagagcuucaauucauccaccucuc

SEQ ID NO: 4105978 - RNA, 59 nt, Human
gagaagguggaugauggucuccagguaagagauaaugggugaaauuauucuuccuuuuc

SEQ ID NO: 4105979 - RNA, 107 nt, Human
gagaagucacagcuuaauuuaccgagcaccuaccuaccucaugccaugucauagaggaugacagaugcuguggggagguaaaaggaacucguuuugcagugcuuguc

SEQ ID NO: 4105980 - RNA, 67 nt, Human
gagaagugcacuugcuccuggaaaaaccauuauucaaaagcuuuugcagaaguaaggguaacuucuc

SEQ ID NO: 4105981 - RNA, 57 nt, Human
gagaaguuguugggugccauggccuuauguagggcuaaggcacaaauagcuuugcuc

SEQ ID NO: 4105982 - RNA, 102 nt, Human
gagaauacaggcagagccaauacugcugccugcaaauuauacucagugagauuauaaucucugcaauggcacagucuuugcuuugcucaguucuguauuuuc

SEQ ID NO: 4105983 - RNA, 90 nt, Human
gagaauagacagaucagcaggcauguuaaucaucuuaaaaagcucccuuuuaaggaugaugugauauauaaccguuagacauaucuucuc

SEQ ID NO: 4105984 - RNA, 72 nt, Human
gagaauaucaggaugcaaagcuguguuuuucucugaugaugaauaccuucuuccaguguccuaguauuucuc

SEQ ID NO: 4105985 - RNA, 65 nt, Human
gagaauaucuuggcaguuccugugaugguccaaaugugauugacagagacugccaagauauucuc

SEQ ID NO: 4105986 - RNA, 63 nt, Human
gagaaucuggguuuuggcuaucgaggaugaauuauuuaacuggucugaagccucagguuccuc

SEQ ID NO: 4105987 - RNA, 71 nt, Human
gagaaugagccauaucugguucccuaccuucauggaguguacaguucagggaggagaauggacuccuucuc

SEQ ID NO: 4105988 - RNA, 71 nt, Human
gagaaugaggcagcaucacuugucuccagcagauaugucugcuaagaaggucugaucugaucucaugucuu

SEQ ID NO: 4105989 - RNA, 84 nt, Human
gagaaugauaggcacugaccuucucagauugcucugaaaucucaagaagugcacuuugaaaagacaguagcucuagcgucucuc

SEQ ID NO: 4105990 - RNA, 88 nt, Human
gagaauguuaauaauuauugaagcuggaugaugaguauuugggggauuauuauacucuugucucaacuuuuguauguuugacauuuuc

SEQ ID NO: 4105991 - RNA, 80 nt, Human
gagaauguuuucaucaucaaaauagugaggucuauuuuaaauaguuuggcuaauuaggugcugauuaaauugcauugcuc

SEQ ID NO: 4105992 - RNA, 62 nt, Human
gagaauucaguuucuauggaguguucauucauaucaaugcugccaucucaacugcccuucuc

SEQ ID NO: 4105993 - RNA, 60 nt, Human
gagaauucuguucuucggguguguggugcuaagauuguugagcgcucccacagaggucuc

SEQ ID NO: 4105994 - RNA, 77 nt, Human
gagaauucuuucacagcuuccacuuaaggauuaauguuuaagaaauuugucuuucuaguggagcuggauuauucauc

SEQ ID NO: 4105995 - RNA, 87 nt, Human
gagaauugcuugaacccgggagguggagguugcagugagaugagaucaugcuacuguacuccagcucugggugacagagcaagacuu

SEQ ID NO: 4105996 - RNA, 97 nt, Human
gauauucuggcaugugggagggcacugagaacaggcugacuuggcugaaagccaggcaggaugccccggucuagugcuuucucccagcagauguguc

SEQ ID NO: 4105997 - RNA, 78 nt, Human
gauauugaaaauuuaauuuagccucauuuuugacauagauuuucuuguuaaaaaaagggauaaaaguuuuuugguguu

SEQ ID NO: 4105998 - RNA, 56 nt, Human
gauauuuauuaagugguugguauguaccagauagcaugcuaagcacuuuaaauguc

SEQ ID NO: 4105999 - RNA, 77 nt, Human
gauauuugcuaaaccugauagauuuucagaaucaugcuugccauaauucuauaagaugaucaaggucaguggacauc

SEQ ID NO: 4106000 - RNA, 67 nt, Human
gaucaaacauugaauuucagugcugugauagaaaauccuuuuacacgugcaaauucaauguauguuu

SEQ ID NO: 4106001 - RNA, 79 nt, Human
gaucaaauuuccuguaccauuauucacaugaucuuuuccaaggaaaggagugggaaaaggaaggagaaggaagaguguc

SEQ ID NO: 4106002 - RNA, 55 nt, Human
gaucaaggcaguagggccagcuguggacuggcagugaccuuggugccuuugacuc

SEQ ID NO: 4106003 - RNA, 64 nt, Human
gaucaaguucugggucacccugcccagacugcugcaguucuuuuaucagggccccagaauuauc

SEQ ID NO: 4106004 - RNA, 73 nt, Human
gaucacuacaaaaucugcacaugaagaucuuuaucuaucacagcaaaagugugcagagcuuguaacagugguu

SEQ ID NO: 4106005 - RNA, 64 nt, Human
gaucacucccagcacuguaauucuuuggcuauuggugccugagauggccagugcugggaugguc

SEQ ID NO: 4106006 - RNA, 57 nt, Human
gaucagaaugggacauauccugcaguacaauuagcagagaugggaaauauucugauu

SEQ ID NO: 4106007 - RNA, 97 nt, Human
gaucagacugggggagugugaggauugcucuggagaauuuuucaugcaugcucugaauaaucacuccagcguaauucacuccuccuucagcuagauc

SEQ ID NO: 4106008 - RNA, 90 nt, Human
gaucagagugccuccuuggaaaucucuggguaaaguucucucauuguuagaugaggaaacugaggcccagagaaguuaaggggucugauc

SEQ ID NO: 4106009 - RNA, 65 nt, Human
gaucagcaggaggugagcagcaggugagcaagcauuaccaucugagcuccgccuccugucagauc

SEQ ID NO: 4106010 - RNA, 67 nt, Human
gaucaggagauggccucagaccucacaaggcacuggaagaggucaaaaagcaaggcccucccucauu

SEQ ID NO: 4106011 - RNA, 60 nt, Human
gaucaggguguucuaaugaucuugaccuagcauggucagguucuggugagggcccuuuuc

SEQ ID NO: 4106012 - RNA, 60 nt, Human
gaucauauaaguuuggcuuuacuuagcacaagugcaauuugaacacagauuugucugauu

SEQ ID NO: 4106013 - RNA, 59 nt, Human
gaucaugcagacaagaagaaccaaggaacuuuguuccuggcuuccacuccucuguuauc

SEQ ID NO: 4106014 - RNA, 60 nt, Human
gaucaugcagaggugccacgaggcuuaauuuauuaauguuuguguuacacucugcagcuc

SEQ ID NO: 4106015 - RNA, 77 nt, Human
gaucaugucauuuucuccuaacucaaauuuaagaguuucuaauuugucuugggcugaaaugugcuugugacagaauc

SEQ ID NO: 4106016 - RNA, 55 nt, Human
gaucauuaacaaccuuacccuuaaaaaucaaaguaaugguaagaguugagugauc

SEQ ID NO: 4106017 - RNA, 109 nt, Human
gauccaauugcugaggaguacaggcgagguagcugucaguuuccucuggugucuucaacgaaagucacaggaaacaggcagccuuugaaccuggucuugagcgaugauc

SEQ ID NO: 4106018 - RNA, 98 nt, Human
gauccaccugccuuggccucccaaagugcugggauuacaggcuugagccaccaugcccagccuauccaagcgcuuuggaaggccaagguggguggauc

SEQ ID NO: 4106019 - RNA, 67 nt, Human
gauccacuugcucaguggcagggcugguauuuagagcugugcaggcagauguacugagggagggauc

SEQ ID NO: 4106020 - RNA, 79 nt, Human
gauccaucaguagggaaugugggaggcuguguggucacuccuaacccagccccucccacaaauuuccuuccaauggcuc

SEQ ID NO: 4106021 - RNA, 79 nt, Human
gauccccaguuccauuucugcagccacgagucacagcccaggugcgucugagcuuugugcugguagguggucugggauc

SEQ ID NO: 4106022 - RNA, 83 nt, Human
gaucccuuauaugcccucuuauuucuugcauaaacuccuuuguaguaguuaucuuugcaaagauaugagaagcuguaggauuc

SEQ ID NO: 4106023 - RNA, 60 nt, Human
gauccuacagcaaacacugugggccaauuuuuaacuuguugcauguuaugcuguaguauc

SEQ ID NO: 4106024 - RNA, 78 nt, Human
gauccugagcuggcccucgagagccaauuguacacauguucccaguucccugucaagggauccagugacaucagguuc

SEQ ID NO: 4106025 - RNA, 77 nt, Human
gauccugcagcugcaggcuucaggaagucuccuggggcuaucagauggcuccuucuuguagcagcagcugugggguc

SEQ ID NO: 4106026 - RNA, 66 nt, Human
gauccuuacaaccuucuccccaaaagcugcaaauacaaugagaacugauuugaagguugggggguu

SEQ ID NO: 4106027 - RNA, 72 nt, Human
gauccuucaaacuucaccucagagaggcuuccagauaacucaugccaaguuucucucagggacugauggauu

SEQ ID NO: 4106028 - RNA, 61 nt, Human
gaucgccugcucaugcuccucauuggccaaacccaacugggaggcaaagagcaaggaaguc

SEQ ID NO: 4106029 - RNA, 88 nt, Human
gaucuaggaaguaccugucucauuugccauuuuuauaccaaacagggcugagacuagagugaggcauguaaggugcucaucuuggguu

SEQ ID NO: 4106030 - RNA, 117 nt, Human
gaucuauauaauguauguuuaugucuauauagucaauaaucauuaggucaguagauauuuauuaaacagcuacuacauugaaauuacuguaaaggcauuguauaacuaauaaugauc

SEQ ID NO: 4106031 - RNA, 61 nt, Human
gaucucaagacucugaagucauugcaugagcaucccuucucggcaacaucagagugagauc

SEQ ID NO: 4106032 - RNA, 75 nt, Human
gaucucagacaaacuaaacauguagcuuuugugguuuucaagagaauccauugcaaacaguuugguuucuagguu

SEQ ID NO: 4106033 - RNA, 66 nt, Human
gaucuccuccuucugggccuggcaguggcugaggagcugcugagccgcacccaggagcugggcguu

SEQ ID NO: 4106034 - RNA, 73 nt, Human
gaucucuuacaaacugguuuucagggaccguuaacaccugcucacuggaagaacuccaguucugugugagauc

SEQ ID NO: 4106035 - RNA, 64 nt, Human
gaucugcucuaauaucagauagacugccuuuaaauggagugaguuucuguaauuagacgcauuc

SEQ ID NO: 4106036 - RNA, 66 nt, Human
gaucugggcgaugaucugguacuccuguccuaugcagggcucaucagaguaguuguugcccagauu

SEQ ID NO: 4106037 - RNA, 74 nt, Human
gaucugucccaggcugaaguacaguggcacgaucauagcucacugcagccucaaaggccugggcucaacggauc

SEQ ID NO: 4106038 - RNA, 62 nt, Human
gaucuguguccuuauaagagacaccagaguucucucuugaucuacuaugugaggacacaguc

SEQ ID NO: 4106039 - RNA, 127 nt, Human
gaucuuaggaggcaacgccuggcuugcaccgugggacauggagacguuugcagggcaggaauguuuggagcagauguucugugucucacaaaccaugccuuauagggggcuuguccuggcuaagauu

SEQ ID NO: 4106040 - RNA, 96 nt, Human
gaucuuaucaggcuuuguugacaacaaugauucccagucagaacacacugguacagucacacugguuguuuacagugagcauccauuugauugguc

SEQ ID NO: 4106041 - RNA, 67 nt, Human
gaucuugacaugagcauaaaucagucacgagcaaauguuaugugcuaucaaaugcucauuucagauu

SEQ ID NO: 4106042 - RNA, 90 nt, Human
gaucuuugggcaauugcccuuacuuugugugcuucuugguccaguaauggaauccacgagcaguagguaauuguagcagccucaacuauc

SEQ ID NO: 4106043 - RNA, 63 nt, Human
gaggucagauuuccuugcaguuuggaacuuccuuggaauuccauaguacuagaaacugaccuu

SEQ ID NO: 4106044 - RNA, 62 nt, Human
gaggucagucagaccaggguuugauuggaagcacaaugacuuuggacaaguggcuugaccuc

SEQ ID NO: 4106045 - RNA, 82 nt, Human
gaggucagucagguaaaugacauucuuaagucuugggcacugaccaucaagaaagauaagaaacauucucccuggugcccuc

SEQ ID NO: 4106046 - RNA, 55 nt, Human
gaggucauugaaguuauuuucuugccccugggcaagaggcacugacaggggccuu

SEQ ID NO: 4106047 - RNA, 81 nt, Human
gagguccaacuaaggcuaugaucuuuuucaugagguuuuucucagaucaaccaaugauggcaucuucacaaguuggacuuu

SEQ ID NO: 4106048 - RNA, 87 nt, Human
gagguccaggaucaugauuauucuuucuuuugugcuacuauuuagugacaaguuagguuuuaauccaaaagugugcucuggggccuc

SEQ ID NO: 4106049 - RNA, 56 nt, Human
gaggucucacuauguugcccaggcuggucucgaacuccugggcucaagugauccuc

SEQ ID NO: 4106050 - RNA, 61 nt, Human
gaggucugccuucaggagaguucuuaguaucaccccgccuccauuuugaccugcagacuuc

SEQ ID NO: 4106051 - RNA, 66 nt, Human
gaggucugugcgcuguugauagaaauccugcagacaugaugcugagcucugucagugcaucaccuc

SEQ ID NO: 4106052 - RNA, 62 nt, Human
gaggucuugcuggccaugcucaguauccggagaacucugcaguggauggccagcaggggcuc

SEQ ID NO: 4106053 - RNA, 78 nt, Human
gaggucuuuucugggaagccacaggguguggggcugagugaggaacagagcaccugccuggcuuccagaagagacuuu

SEQ ID NO: 4106054 - RNA, 130 nt, Human
gaggugaaaagggguagguaacucauguccucugagucuucagaagaucacaucaguguaggaugaacagggguaacauucguguuaucuucugagcacucagaagacaugaguuaccccuguucaucuc

SEQ ID NO: 4106055 - RNA, 57 nt, Human
gaggugaugguugcacaaugcuguuaguguacaaaaugccaugcgaucauacacuuc

SEQ ID NO: 4106056 - RNA, 65 nt, Human
gaggugcugggggguuugugggucucacuugcacaccugacuucacauuuaaccccucagaccuc

SEQ ID NO: 4106057 - RNA, 60 nt, Human
gaggugcuuacagucuuuuagggaacuaagcagaugguuaucuagaguaauaaguacuuu

SEQ ID NO: 4106058 - RNA, 59 nt, Human
gagguggaaggcaggaacaaauggugaagcuaaagaaggccaaguuucucuuccauuuc

SEQ ID NO: 4106059 - RNA, 60 nt, Human
gagguggccucaagcagucuucagcuacgugcuuaccugcccggcuguugaugccauuuc

SEQ ID NO: 4106060 - RNA, 65 nt, Human
gagguggcugggaguagggaaugcucccuuuaggcugcaaaggucaccucucccaugcuuaccuc

SEQ ID NO: 4106061 - RNA, 92 nt, Human
gagaauugcuugaaccugccagguggagguugcagugagccgaggucgcgccacugcacuccagccugggugacagagcaagacaccgucuc

SEQ ID NO: 4106062 - RNA, 68 nt, Human
gagacaaaguucuguagugcacugacuucuaucauacucagagucggagugucucagaacuuugccuc

SEQ ID NO: 4106063 - RNA, 90 nt, Human
gagacaauaaccauucauuugccuugagcaauauuuuuccuuugaucagggaguggagcaaaagagguagauggguagguauggggucuc

SEQ ID NO: 4106064 - RNA, 84 nt, Human
gagacacacugguuucaucucaguguacagggagucuaguuacuaaguggacgaagaacucccgcacauugagaucugguccuc

SEQ ID NO: 4106065 - RNA, 57 nt, Human
gagacacaggcacagaagaggcuggccaagcccagaggaaucuucuccuguguguuc

SEQ ID NO: 4106066 - RNA, 85 nt, Human
gagacacuggacuagaggacauuuagaaaaaacggucuaauagaucaaugguuuccaaaugcccaucuacacagaccagugucuu

SEQ ID NO: 4106067 - RNA, 77 nt, Human
gagacagaaagccaggcagccaagccaguguggggucucugaaauaacacugugcuagcugcuacuuucccugucuc

SEQ ID NO: 4106068 - RNA, 69 nt, Human
gagacagaaccuucgguuuggcugccauaaggccugugggagaggugggcagagccaggguuuuguuuu

SEQ ID NO: 4106069 - RNA, 64 nt, Human
gagacagacgcugccuggcccugcugccauuaauaugugucccagcccuguccaaugucugcuc

SEQ ID NO: 4106070 - RNA, 58 nt, Human
gagacagagagguacucaacauuugcagaaugaaugaaugagaaauggucucugucuu

SEQ ID NO: 4106071 - RNA, 72 nt, Human
gagacagcagacuuggcagugggaauggacaaacagggccauuuaccccuucuacccuggcaccugcuuuuc

SEQ ID NO: 4106072 - RNA, 65 nt, Human
gagacagcaggugcaggugcggccgcuuuagcccugagcaggcucugccgcugcuugcaggucuc

SEQ ID NO: 4106073 - RNA, 99 nt, Human
gagacaggagaaucaguugaacccgggaggcagagguugcagugagcccggauugugccacuguacuccagccugggggacaaagugagacuccaucuc

SEQ ID NO: 4106074 - RNA, 100 nt, Human
gagacaggagaaucgcuugaauuggggaggcggagguugcagugaaccaaggucgcgccauugcacuccagcccgagcaacaaaagcgaaacuccgucuc

SEQ ID NO: 4106075 - RNA, 129 nt, Human
gagacaggagagcaguacguuucugcacuugguggugucaggguugaagucugguugccuguugcuucgugagggugguuauuaguuucaccuggacuuccgcagugcagccugcugugcguuuuuccc

SEQ ID NO: 4106076 - RNA, 106 nt, Human
gagacaggaucucacucugucacucaggauggggugcaguggugugaucauagcucacagcucacugcagccucaaauuccugggcucaggugauccuccugccuc

SEQ ID NO: 4106077 - RNA, 56 nt, Human
gagacagggcugcugagagacagagagaccucugaucccauuggcaguccagucuc

SEQ ID NO: 4106078 - RNA, 68 nt, Human
gagacagggucuugcuacauugcccagguugaucucaagcuccuggcuucaagcaauccuccugccuc

SEQ ID NO: 4106079 - RNA, 55 nt, Human
gagacagugcuccguggguccagauagguacucuggagucuguggaugcuguuuc

SEQ ID NO: 4106080 - RNA, 67 nt, Human
gagacauggcaaaagcacuggucuuacauugccagaagaaauauaaagacuaaugcuugaaugucuu

SEQ ID NO: 4106081 - RNA, 61 nt, Human
gagaccaggggauggaucugcugaccuuagagaagagucauugcaggcauuccccugccuc

SEQ ID NO: 4106082 - RNA, 87 nt, Human
gagacccagggcaacugaaaagauucuacgcagacuggcuacagugagccccuaaagcgguuguguguguuuucagggcccucucuc

SEQ ID NO: 4106083 - RNA, 80 nt, Human
gagacccuagaaaugauugguugagcucugauuuauugauuaggaaagugcuugaacaguuuacaacuuuacuagggcuu

SEQ ID NO: 4106084 - RNA, 58 nt, Human
gagacccucuuccucccuacaggcucaucuguuggcaccucccuaggaagaaggucuc

SEQ ID NO: 4106085 - RNA, 91 nt, Human
gagaccggguuuuauaauuguaagaucucacuuuugugaauugcugauuagaauucacaaaaguuagauccauggugcagugccucuucuc

SEQ ID NO: 4106086 - RNA, 78 nt, Human
gagacgcccaucugggucugaagauaaugaugccaugaaauggaaaucuaaguuuuaggccacagucagggcagucuu

SEQ ID NO: 4106087 - RNA, 61 nt, Human
gagacgggguuugagacggguuucuccacguuggucaggcuggucuccaacccccgaucuc

SEQ ID NO: 4106088 - RNA, 66 nt, Human
gagacgggguuuuaccauguuggucacgcuggucucaaacuccugaccucaugauccgcccaccuc

SEQ ID NO: 4106089 - RNA, 92 nt, Human
gagacggugucucgcucuguggcccaggcuggagugcaguggcacaaucuuggcucacugcaagcuccgccucccagguucacaccauucuc

SEQ ID NO: 4106090 - RNA, 92 nt, Human
gagacggugucucgcucuuucacccaggcuggacugcaguggugcuaucuuggcucacugcaagcuccaccucccggguucacaccauucuc

SEQ ID NO: 4106091 - RNA, 71 nt, Human
gagacuaaagggaagggugauggagcugccuccagauaggcagacaaaccaguaaacccuuccucaguguc

SEQ ID NO: 4106092 - RNA, 95 nt, Human
gagacuaaugugugugugugugugagaguguguguguguguguguguauauauacacaucuuuuuaaauauuauaccagcuaagcgcaguggcuc

SEQ ID NO: 4106093 - RNA, 89 nt, Human
gagacucaggagagaugcccacuggaggagcuagcaugaaaaaaagagaaaauugcugccuuuagggggugcucagcccugaagugcuc

SEQ ID NO: 4106094 - RNA, 73 nt, Human
gagacucauaauagcugcucacuaaaaaguuuauggaugacugcaugggaguuaguuauacugugacaauuuc

SEQ ID NO: 4106095 - RNA, 69 nt, Human
gagacucuuuauuguuuguggcuaggaucugauauaagccauuuagcccagguuguaaagauuugucuu

SEQ ID NO: 4106096 - RNA, 78 nt, Human
gagacugagccagauguuccccuggaggccucuugggagccagcaagauggccuuucuggcacauuuccucucuucuc

SEQ ID NO: 4106097 - RNA, 78 nt, Human
gagacugaggcugcugugaauuuuuuaaaugccuuggguccagguuuuuauuagucacaguuagcugccaaauguuuc

SEQ ID NO: 4106098 - RNA, 64 nt, Human
gagacugagguuccagucugggguucccuuugggcaagucccuuucccacugggccucaguuuc

SEQ ID NO: 4106099 - RNA, 57 nt, Human
gagacuggcuaacagagguuccaugugugcucauugucaucgauguuagccaguuuc

SEQ ID NO: 4106100 - RNA, 98 nt, Human
gagacugggugguuuuggugccaggcugagcaugauuggagcuagagacugcugcuucacaggcaaguuaagccucauuguaccuacuaugcaguuuc

SEQ ID NO: 4106101 - RNA, 83 nt, Human
gagacuggucacggcggugcaggcucacccuggagcugagugauggucuucagcuccugggucugcucuuccacaucugucuc

SEQ ID NO: 4106102 - RNA, 64 nt, Human
gagacuucagagagaacccuaaaugagauaugauaguuauguuuuauuuuggucuuuauguuuu

SEQ ID NO: 4106103 - RNA, 66 nt, Human
gagacuugucugauugccauucucuauaugauaacuucauauaccugaaguugguaauuaaguuuc

SEQ ID NO: 4106104 - RNA, 83 nt, Human
gagagaaaagccccaggaaggcguuguuccucucaggcgggcgccagggaggcgcgcuccuuccggcccggcguccgucuuuc

SEQ ID NO: 4106105 - RNA, 100 nt, Human
gagagaaaauaacaguuugaaaguaguuuacuguuugauuuguuuguuuuauuguauuauuuuauuucaaauguaauuuauuguuuuauuguugucuuuc

SEQ ID NO: 4106106 - RNA, 59 nt, Human
gagagaaaugccagaacccagccgagcugcggcugguccacauccugguacgucuccuc

SEQ ID NO: 4106107 - RNA, 61 nt, Human
gagagaagcucuggacagugaagaagagcucguuuuggccacacucacuagagccccuuuc

SEQ ID NO: 4106108 - RNA, 56 nt, Human
gagagaagggggauaugagccugacauccagccccaugcauuccuccccuuuccuc

SEQ ID NO: 4106109 - RNA, 82 nt, Human
gagagaaucuuucggugaccagugaugcugaggagugugacuaauuuaaacucaugcaucugagcuggcuccugccucucuc

SEQ ID NO: 4106110 - RNA, 106 nt, Human
gagagaaugaagggaaauggggcaacagucagcaugagcaagggcugaccuauggugggucuuagccuuuacugugcucaguggccccacagcaccaucgucucuc

SEQ ID NO: 4106111 - RNA, 55 nt, Human
gagagaaugggacgggcucacaccaacuuguauagccccuuccaguucucagauc

SEQ ID NO: 4106112 - RNA, 86 nt, Human
gagagacaacaauggaauucugggagagaucugacaucagcagguucaucugaucucucucaggagagagaaguguuuguuuacuc

SEQ ID NO: 4106113 - RNA, 76 nt, Human
gagagacagcuggacagacacugaugacuuacuaaaccucccucuuggucccaggucccggggccagcugcugcuu

SEQ ID NO: 4106114 - RNA, 74 nt, Human
gagagacaggcaagcaaggggucuugaaaugaaaguuuguuuaacuucauggcaacuuguuaacucuuucucuc

SEQ ID NO: 4106115 - RNA, 66 nt, Human
gagagacauguccagaguguccuggaaagucuggaaaguccuugccuucccucggaaugugcucuc

SEQ ID NO: 4106116 - RNA, 56 nt, Human
gagagagaaccccgugcccuucauagcacagugccugggucaaauguucugcuuuc

SEQ ID NO: 4106117 - RNA, 118 nt, Human
gagagagcaauugagauugggacugacuaacaguugcuugcccugcagcauacuucagguaaauagcuuaaaaguagcuuaguguaacaaggggucauuucuuuuuucuuucucuuuc

SEQ ID NO: 4106118 - RNA, 69 nt, Human
gaggaugccaaagaaguaucaaagaugccagcacuaauauucuggcugcaggcagugcuucugcuucuu

SEQ ID NO: 4106119 - RNA, 55 nt, Human
gagagcuccuucaggaagcuucaaggucaggagccaucugcuaaggggagcuauc

SEQ ID NO: 4106120 - RNA, 69 nt, Human
gagagcugaggggccuggcacugggagcaagcacugggcugugcgucaccgagugccagcucugcuuuc

SEQ ID NO: 4106121 - RNA, 104 nt, Human
gagagcugcccagacaaugagcuguugggugaguacucggagugcuuuggagaugauccacacuccugaaguauuguuugaguaaaagcagugucugaguucuc

SEQ ID NO: 4106122 - RNA, 60 nt, Human
gagagcugggggacuguggaugucaucugaaauccaguuuuggcagucaucugagcuuuu

SEQ ID NO: 4106123 - RNA, 57 nt, Human
gagagcugucacauagagccagaacaauaaucugucugucucaguaugacagcacuc

SEQ ID NO: 4106124 - RNA, 110 nt, Human
gagaggaacaugcuucuggauuuaguuggcauuuugugacuacggcugcuaauugcuaaauggcuuggcugguuugacaaacugacaaugauccauguauuuaaacucuc

SEQ ID NO: 4106125 - RNA, 70 nt, Human
gagaggaaugaauuauuugauaauuuaaaaauuauucucuaugaagucagaugguuccaucauuuuucuu

SEQ ID NO: 4106126 - RNA, 62 nt, Human
gagaggacagucagcucaggguguugguucuacuuagucauugugagcuggcugagccucuc

SEQ ID NO: 4106127 - RNA, 56 nt, Human
gagaggagagaauaaagcccaaguggcaucuuuggggcuucuggucauuccucauc

SEQ ID NO: 4106128 - RNA, 63 nt, Human
gagaggcaccuucacaccugauucacagagaugucacugaggcucagagagagggugccacuu

SEQ ID NO: 4106129 - RNA, 63 nt, Human
gagaggcagggaguagcugaauucugguguucagguuuuuaaguucugccuccccagucucuc

SEQ ID NO: 4106130 - RNA, 55 nt, Human
gagaggccagcagugccuaucugucuugagagucaggagaaccuguggcucuuuc

SEQ ID NO: 4106131 - RNA, 88 nt, Human
gagaggcgaguaauauccugacauucagguguucaaugccagcugucagccucuggccccugccaguguuaggaaugauuccccuguc

SEQ ID NO: 4106132 - RNA, 86 nt, Human
gagaggcugggagauugauucaauuaagauuagcagagucggaaaaauggcauggguuaguuuugauuaguauugucuucucucuc

SEQ ID NO: 4106133 - RNA, 75 nt, Human
gagaggcugucuggaggcacuuucucaugaccucucgaguucugaugaguuauaaggccucuuaccccaccccuc

SEQ ID NO: 4106134 - RNA, 56 nt, Human
gagaggcuugugugaagaacaaguacacagcucacuguucuuccaauaaggcuuuc

SEQ ID NO: 4106135 - RNA, 73 nt, Human
gagagggacuggagaaagggaacuuacagagugauaacuggucucuccaauaacuuguuuuuuccucccuuuu

SEQ ID NO: 4106136 - RNA, 57 nt, Human
gagagggagugagacacaaaagaacaaagcuuggaguccuguucauuacuuccuuuu

SEQ ID NO: 4106137 - RNA, 55 nt, Human
gagaggggcacagcagcuguugcacaggcuggugcaagauucccugcuucuucuc

SEQ ID NO: 4106138 - RNA, 89 nt, Human
gagagguauuaaaauccugcuggccuccacuugcuccucuuccccguggagcaaggagcacugagccagcauggguauaucuggcuuuc

SEQ ID NO: 4106139 - RNA, 89 nt, Human
gagaggucaagaggcucauuaaaagucacacagcuggugaguauuaucauuacaaacaggcuguacuucuaaucaucucuuauccuuuc

SEQ ID NO: 4106140 - RNA, 57 nt, Human
gagagguccauuccccugucagaccagucuccgugccugcagggcucugcuucucuc

SEQ ID NO: 4106141 - RNA, 83 nt, Human
gagaggugaauaauuucaguagaaaaucuugauucuagucucaagagaugaaguuaagauuguuuuuaaccugaaggccucuu

SEQ ID NO: 4106142 - RNA, 56 nt, Human
gagaggugacaggacaggagcuggugaaccucaccuggacaccugcugucaucucc

SEQ ID NO: 4106143 - RNA, 59 nt, Human
gagaggugagucauuaccuagugaaaccagaagcccacaggucuccagcaucaccucuc

SEQ ID NO: 4106144 - RNA, 93 nt, Human
gagagguugggugcuuugcugaggguugcacagcaaaugaguggcagggcagaaucuguccccuagucugcuggccccaacacacaaccucuu

SEQ ID NO: 4106145 - RNA, 80 nt, Human
gagaguaauauaaauggcucaaauuaggcucuauuuggaugaugguccaacugagugauuuaagcuauuuuuaacgccuc

SEQ ID NO: 4106146 - RNA, 86 nt, Human
gagaguaggagguggggaggugacugaaugcuagcaagagaaugaggcaagauucauaccguuucuucuccaucacucugagucuu

SEQ ID NO: 4106147 - RNA, 125 nt, Human
gagaguccaccucagucaagaacuccuuccucugaaauggcuuggaaaaaucaauuugccuuccugucugagauuucuuggucacuuuucacggacauagguguccuugguaugcaguagcucuu

SEQ ID NO: 4106148 - RNA, 63 nt, Human
gagagucccugggucuguuccaucuaaacacuguugaagcaagagacagaucugagggaccuc

SEQ ID NO: 4106149 - RNA, 58 nt, Human
gagagugauuuuggucugaguuccaggcacugcuggugagcuccugaggguuacuuuc

SEQ ID NO: 4106150 - RNA, 81 nt, Human
gagagugggggaugcugaguuggaaacacacaauucagugugguuuucaaaugauuuugcguuuuccaaaaccugccucuc

SEQ ID NO: 4106151 - RNA, 66 nt, Human
gagaguuacauagugggacuggaggcuuugcaccaaaucuuuuaucacucccacugcuguagucuc

SEQ ID NO: 4106152 - RNA, 65 nt, Human
gagaguuaguuuggcugcagaaucgguaauauuagccucgugcguucugggccaugcugcuucuc

SEQ ID NO: 4106153 - RNA, 77 nt, Human
gagaguuguuguacaaacuaaaugaguuaauauauguaaucgauuagaaugcaauuuaguuucuaguaguggcucuu

SEQ ID NO: 4106154 - RNA, 62 nt, Human
gagauagaaguaaagacuugagauacugggauuauccauuaucacauggacuuugcuuucuu

SEQ ID NO: 4106155 - RNA, 71 nt, Human
gagauauaguuuuaaauccaaauugaggaaguguuauauuauuucaacacuuuuggaauuaguggugucuc

SEQ ID NO: 4106156 - RNA, 66 nt, Human
gagauauugcaggacaaugauggucccucugaaggcacuagggaagcaucucuguucugucuucuc

SEQ ID NO: 4106157 - RNA, 129 nt, Human
gagauccaguugauaagggaauugaaagaaauagaggacagcuggaucacacuaaugaaagccauuuaugacuccuaguugcugaagucucuguagcuuuuuagguuaacuucuucuacgucaggccuc

SEQ ID NO: 4106158 - RNA, 73 nt, Human
gagaucuacauuccaaaggaaacuggcuagggagaccuuuaagccgugccuacucuuuggaggagggacucuc

SEQ ID NO: 4106159 - RNA, 84 nt, Human
gagaucucagggcagauggaacuuccccgagagaaggaccucuuucucaggccucugggaaguccucugucaugcucaugucuc

SEQ ID NO: 4106160 - RNA, 125 nt, Human
gagaucugacugauagagacuuuucagauguuuugcccuuuaggagaacguggauccuuggggaucuucaaauuguuuugucuaauagggcagguuguguguuacacugugucaugccagguuuc

SEQ ID NO: 4106161 - RNA, 66 nt, Human
gagaucugagucauugcagauguggaggcagauaccaucuguuccaaggcgauggcgcagaaccuc

SEQ ID NO: 4106162 - RNA, 130 nt, Human
gagaugaaagcugcccaggauggggauuacagcagugcccgagcgcucuucauuaucgagacacuucuggaggugacggggccucguuguaaaaugccuauuuucccauauuuuccagucucaaaagcuc

SEQ ID NO: 4106163 - RNA, 76 nt, Human
gagaugauaaagccuugugcucauguccuuucacugcaucgcugggugucaauggaggugacaugaguguuuucuc

SEQ ID NO: 4106164 - RNA, 102 nt, Human
gagaugaugccacuccagguacuugaagacgcacugacucguuuuugucuuugcugaugcguguacagucuaucuuuuuuccaucucaagucuagccaucuc

SEQ ID NO: 4106165 - RNA, 77 nt, Human
gagaugcagaucaccacaugcucaccaagucccuggaguaaaggacuccagacucuggaguugucugaucucaucuc

SEQ ID NO: 4106166 - RNA, 60 nt, Human
gagaugcaggcuccaagcaagaagucaggagacuggggugcugggcagguguuugaucuc

SEQ ID NO: 4106167 - RNA, 60 nt, Human
gagaugccagcagaaauaaauacuugacuuuuaguacaagauucuuuuuugcugguccuc

SEQ ID NO: 4106168 - RNA, 55 nt, Human
gagaugcuauggcuauuccccugaagcagcaggguggagagagugacagcaucuu

SEQ ID NO: 4106169 - RNA, 92 nt, Human
gagauggagucucgcucugucguggaggcuggagugcaguggcgcgaucucugcucacugcaagcucccccuccuagguucacuccauucuc

SEQ ID NO: 4106170 - RNA, 99 nt, Human
gagauggagucucgcucuguugcucaggcuggugugcaguggugcgaucucagcucauugcaaccuccaccuccuggguucaagcgauucuucugccuc

SEQ ID NO: 4106171 - RNA, 79 nt, Human
gagauggauaacauagcauggccugugacacuuuguaagugcugcaaaaagucauauucuuguuccuucaauccauuuu

SEQ ID NO: 4106172 - RNA, 88 nt, Human
gagauggauaaggaguggggcauaucacagaaucccagaauaggagaugcagaaugucuuuggaaaugaccccgucuaagucuggcuu

SEQ ID NO: 4106173 - RNA, 63 nt, Human
gagauggccagugccaggacaacaguggggaagcugugucuuuuccuaagcucuggcagucuu

SEQ ID NO: 4106174 - RNA, 84 nt, Human
gagauggcgucucacccaggcuagagagcaguggcacgaucuuggcucacugcaaucuccgccuccuguguucaugcaauucuc

SEQ ID NO: 4106175 - RNA, 69 nt, Human
gagaugggaggaucacuugaggccaggaguucaagaccagccuggucaacagagugagacccccaucuc

SEQ ID NO: 4106176 - RNA, 75 nt, Human
gagaugggcuuccagacgaucauguaagaccacuacuugugagguuuuccaggagagucuagagaacuccaucuc

SEQ ID NO: 4106177 - RNA, 76 nt, Human
gagauguacaauguguauuaauuaacauuuuaggaguuguggauauuaacuuucauugauauauaguguauguuuc

SEQ ID NO: 4106178 - RNA, 75 nt, Human
gagauuaagacaagccucgcauuuguaagguuaacagggaagaugcaccuuuuaaagugaguuuguuuuguuuuc

SEQ ID NO: 4106179 - RNA, 106 nt, Human
gagauuaaguggcuuacccaaaguuucacaguuagcaugaggacuacuggggauucaaauucaagucugugacucauuggaucucacuuuuuaagccuuuaaucuc

SEQ ID NO: 4106180 - RNA, 73 nt, Human
gagauuaaucacagaaaugcccauucagccuuaauuauaaugauggucuggcuugcauuucugagauucccuc

SEQ ID NO: 4106181 - RNA, 111 nt, Human
gagauuacaugcuuuguuuuaauacuuuggucacuauuauuggcuuuguccuucuugauacaauucuaaaguacauauggcuaaauaguggaacaaugucuugucuugcuc

SEQ ID NO: 4106182 - RNA, 85 nt, Human
gagauuauggccuggguucuuggcacagcaggauucuaggguguuuguuuuucauuccugucccaagaaugcaccugauaaccuc

SEQ ID NO: 4106183 - RNA, 75 nt, Human
gagauugaagguguggaaaagccccacaggacucgcuaggcaaggcggcugucccuugucccaccuugcaguuuc

SEQ ID NO: 4106184 - RNA, 59 nt, Human
gagauugaguuuccuacugguccagcagaaggggcccagagcugauuaaacuuaaucuc

SEQ ID NO: 4106185 - RNA, 56 nt, Human
gagauugcgcaaccuccugggaaccauuucacuuccccagaagguuugccacuuuc

SEQ ID NO: 4106186 - RNA, 77 nt, Human
gagauuguuuuuguaucugucauauaguuuuaagugguugaaguuuauaggacuuucuucagaugagaugcaaucuc

SEQ ID NO: 4106187 - RNA, 56 nt, Human
gaugaggcuugauuugcccgagagggauuguuucccccuucuuacucaagcucauu

SEQ ID NO: 4106188 - RNA, 68 nt, Human
gaugaguacugugacaguugccagauggcaaauauucaauugcuguuggccuuucaucaguaaucauc

SEQ ID NO: 4106189 - RNA, 113 nt, Human
gaugaguauaguuugaaucuaugaggauauucacuguuaaguaugaaguaaggcagucucauuguugagcaaacagcuuaacaguguccucaagaauucaggcucuuuccauc

SEQ ID NO: 4106190 - RNA, 55 nt, Human
gaugagucauucacagucgugaaugccaaauaaucacagauauggaagacucauc

SEQ ID NO: 4106191 - RNA, 58 nt, Human
gagguugaggguggagacaucugcugucuuagaaguccagucuuggcucucaaccauc

SEQ ID NO: 4106192 - RNA, 110 nt, Human
gagguuggagaacugcuuuugcuacagggcuuugauguccaugaggagaagguauuucuccuuccugcagcacaaaccccuaaauggcaaaugcaaucgcucauaacuuc

SEQ ID NO: 4106193 - RNA, 72 nt, Human
gagguuggugcaaaaguaauugcgguuuugucauuuaaugguaaaaaccucaauuacuuuugcaccaaccuc

SEQ ID NO: 4106194 - RNA, 89 nt, Human
gagguuguguaacuuguacacggucacagggcuggggagauucaaaccccaaacccaucugucugucugcagaucacacacacuaccuc

SEQ ID NO: 4106195 - RNA, 55 nt, Human
gagguuucaccaugauuuuuagcugucucuacauagcuggaaugauagagaccuc

SEQ ID NO: 4106196 - RNA, 90 nt, Human
gagguuucuagcagaaguugcaaacuagggguuuccauuugcucuauuuaccuggaagucucuugcacuuacuuuuuucuagucugccuc

SEQ ID NO: 4106197 - RNA, 81 nt, Human
gagguuuugcuuccugggucuggagacuggagccaagcccuggguccaagccucccugacccagacaggagacagggccuc

SEQ ID NO: 4106198 - RNA, 58 nt, Human
gaguaaaaguuggauuacaaaggcauaugaagugccuugugguugcaacuauuugcuu

SEQ ID NO: 4106199 - RNA, 82 nt, Human
gaguaaacaacaaaugaauuccuugaucucccggugcucaaaggaagcaaggcucggucagggugauucccaguugguacuc

SEQ ID NO: 4106200 - RNA, 81 nt, Human
gaguaaagucugauuuaguuuagagggcaaagauuuauuaaagaaagucauuugcaaaccaacaagaugaagacgaugcuc

SEQ ID NO: 4106201 - RNA, 61 nt, Human
gaguaaaucgucauugcagcauacacugauuuauggcaauuuuuguuggaaugaugaacuc

SEQ ID NO: 4106202 - RNA, 107 nt, Human
gaguaaaucuuuccaaaaaccuagauuuuuguguaaaaugagccuaaagucaauuggcaugcuaggcauuuuaugggaauaaauugggugcuuugugaaguacacuc

SEQ ID NO: 4106203 - RNA, 70 nt, Human
gaguaacauaccaaaauucacaugacuauucuguuacagaucuggacuuugaauuuuggcuuguuugcuc

SEQ ID NO: 4106204 - RNA, 66 nt, Human
gaguaacauaguuugugcuucaucauugcuugcuaguuggaggagucacaaauucuguagaugcuc

SEQ ID NO: 4106205 - RNA, 72 nt, Human
gaguaacuaucauccugcugccuuuguuuauaauuuccuuaacuuagaaaucuaggccgggugcgguggcuc

SEQ ID NO: 4106206 - RNA, 121 nt, Human
gaguaagauggagaauuuccuugcuuuucccaagacuugccauuuagagguuaaaccugacccuaauuagagacugcaaugagugguagggaguggggcaaggaggucaaaagagggacuu

SEQ ID NO: 4106207 - RNA, 62 nt, Human
gaguaagggagcagaagcugugaaaugcuguauugcccuuucacagcgucuuucucuugcuu

SEQ ID NO: 4106208 - RNA, 68 nt, Human
gaguaaggucugacucuuugccacauagacauuaaccucugugaccuugggcaagucaguccuaacuu

SEQ ID NO: 4106209 - RNA, 60 nt, Human
gaguaauauucuguacuggaggcuguuaagaaacauagaugcaauagacagaauauauuc

SEQ ID NO: 4106210 - RNA, 82 nt, Human
gaguaaugguguugagucucucuucacauguccuuuggccauuuggauaucccauucugugaggugccuaauaccgugacuu

SEQ ID NO: 4106211 - RNA, 56 nt, Human
gaguacacagccccugaaggcaaugcuccauaaaugcccaggaucuggcgaugcuc

SEQ ID NO: 4106212 - RNA, 60 nt, Human
gaguacaccugugugccuggcaacauccagcucuguguuucugcuccauugaggugucuc

SEQ ID NO: 4106213 - RNA, 69 nt, Human
gaguacucaguggcaaguccgguauugaaguugggccugucuaacuacaaagcuuguacugugugacuc

SEQ ID NO: 4106214 - RNA, 129 nt, Human
gaguacuuacuuacuuuauagaauuauuuuuaguuccaaauuaauauacuauauguuagauauaccagucuaagacauuagaacauuaauauugggaguucaggguagaguuugugaccuauuguacuu

SEQ ID NO: 4106215 - RNA, 76 nt, Human
gaguagaaggaugagacaauacgaaggccagaagaggaauacuuuuuuccuagcgauuugucagcauucaguauuc

SEQ ID NO: 4106216 - RNA, 129 nt, Human
gaguagaucuuuugggaaauauauacggaaguggauuaaguuugacuaacuuuauguaagccacaucuagaagagaacaguuacaaagaguuuggucucuagauuuauuuguacccagcagaucaacuu

SEQ ID NO: 4106217 - RNA, 70 nt, Human
gaguagccauugacuuaaagcuuauucaggaaaaaccaccuuucaaauaagacuucgguuagugccacuc

SEQ ID NO: 4106218 - RNA, 71 nt, Human
gaguagcuggguugaggucaucuacgucugaaaucucucagaccacugugguaggugagaacccagcucuc

SEQ ID NO: 4106219 - RNA, 56 nt, Human
gaguagggguagggaauuugacagaccuagguuuaaauucugucugccgcuuacuu

SEQ ID NO: 4106220 - RNA, 83 nt, Human
gaguaguaaagucuaacacacuggcccccaguacugacagauuuccuguuauacagcauugcuagugauguagauuuacucuc

SEQ ID NO: 4106221 - RNA, 76 nt, Human
gaguaguagagagguguguccuagguaugcauuaauaaauagucuugcacacaguucgugcuuuucuauucugcuc

SEQ ID NO: 4106222 - RNA, 65 nt, Human
gaguagucacauugggaauguaaguuaucugcuccuacaacuuauuuuuccugcuggaucugcuc

SEQ ID NO: 4106223 - RNA, 65 nt, Human
gaguauaaguaauuucaagcaagaucccugauuauuucaaggcaaaauugaaguuauuuacauuc

SEQ ID NO: 4106224 - RNA, 56 nt, Human
gaguauagcauacugcugagcaauuucagagauggcuccagcaguaugcuauacuu

SEQ ID NO: 4106225 - RNA, 76 nt, Human
gaguaucaguggaagugauacguguuuauuuccagguuaagacuuggaaacacugcauguucaccccaccauucuc

SEQ ID NO: 4106226 - RNA, 88 nt, Human
gaguaugagguggaggucaggcaauauaggcuuugcaaaaggaggacuuaucuauugcuuucaguugcuuugagcuuuuucucugcuc

SEQ ID NO: 4106227 - RNA, 83 nt, Human
gaguaugguuaucaaaggaagcaaagguaacaguuauaaccaggggaccaacuccugaccuuaguuuccuugugacugaacuu

SEQ ID NO: 4106228 - RNA, 84 nt, Human
gaguauuuggauauaaugugggaagagcaguggcagcaguuggaucugauuugcuaccucuuccuaaucguauacuagaaacuu

SEQ ID NO: 4106229 - RNA, 75 nt, Human
gaguauuuuacagcuacuguccuauuuccaguccccuuccucuggacggcuaugggaugugcuguggaugcccuc

SEQ ID NO: 4106230 - RNA, 67 nt, Human
gagucaaaagaguaaagcaaagcacuugugucacaaaacgcuguuugcuuauugauuccucuggcuc

SEQ ID NO: 4106231 - RNA, 73 nt, Human
gagucaaggcacugaauauccaguaaaauaaaauagcuuucuuguacugucuccaguagccuaguuuugauuc

SEQ ID NO: 4106232 - RNA, 64 nt, Human
gagucaccaugauguaguaaaaagaucaagaucaagaccuuggaucugguuucaucauggacuu

SEQ ID NO: 4106233 - RNA, 75 nt, Human
gagucaccuuucccagaagccaggccauucucugguuccuccugcaggcucagaguggccuggcuaggguggagc

SEQ ID NO: 4106234 - RNA, 59 nt, Human
gagucagaagaaacuauuuacaggccagagaggugcagccugaugggucauucuggcuc

SEQ ID NO: 4106235 - RNA, 76 nt, Human
gagucagauuuggcuuccagccccagcucugcugaaucugagcagccagacccuggggaaagucacuuccuuucuc

SEQ ID NO: 4106236 - RNA, 93 nt, Human
gagucagcagggcauaggggaacuggcacagggcaggggccacgggagagauaacccagcccagagccaguucccgcuugcucguccugacuc

SEQ ID NO: 4106237 - RNA, 55 nt, Human
gagucagccuucugaggaccugggagcagugauguuucccaggcaaaggcuucuc

SEQ ID NO: 4106238 - RNA, 55 nt, Human
gagucagguuucugccuauagagagacacauuccugaaggcuuaacucugaccuc

SEQ ID NO: 4106239 - RNA, 60 nt, Human
gagucaguagucacccaguugcagagagcagaagauuucucacuggaauacaauugauuu

SEQ ID NO: 4106240 - RNA, 59 nt, Human
gagucagucuugagccaugcuggagaggaacaaguauucuuuagcaaaagggacugcuc

SEQ ID NO: 4106241 - RNA, 78 nt, Human
gagucauauucccaguggggaccucugggugacaauguagcacaugccucagaguugucccuaccaaggaauauuuuc

SEQ ID NO: 4106242 - RNA, 87 nt, Human
gagucaucccaggcuggcagggugguugagagaggugugucacuccucaccuccccucaccucuccugcuuccugcacccauggcuc

SEQ ID NO: 4106243 - RNA, 55 nt, Human
gagucauuguuggucccuccccucuguucugagauggcaggaccccaguggcauc

SEQ ID NO: 4106244 - RNA, 74 nt, Human
gagucauuuguaauuucuuaucuguguacacuagaugacaaacaucaaaacauaaaaggaagugacaaagauuc

SEQ ID NO: 4106245 - RNA, 76 nt, Human
gaguccagccaacaccuugauaguuaccugugaaagacccugaagcagaggacucaaucaagguaugcuuggauuc

SEQ ID NO: 4106246 - RNA, 62 nt, Human
gaguccaggagacaaagaugacugcugaaauucaucaccugcagccacuucucuccuuccuc

SEQ ID NO: 4106247 - RNA, 68 nt, Human
gaguccagugauguuccuggucucuccccagaaguacagacagguugggccacguuaacacuggacuu

SEQ ID NO: 4106248 - RNA, 55 nt, Human
gaguccaguucuuuccagcagugaccacaugguacccugggaugggcuuggacuu

SEQ ID NO: 4106249 - RNA, 57 nt, Human
gaguccauugagauuggaauuuuaaucaauucaagagauacugauucucaauggcuc

SEQ ID NO: 4106250 - RNA, 60 nt, Human
gagucccacccacucaguauagacuccaggauccaggaguccagagaagggaggggacuc

SEQ ID NO: 4106251 - RNA, 62 nt, Human
gagucccuagucgcaucuguggagaaugcagccauugagcugcggucccagugaagggucuc

SEQ ID NO: 4106252 - RNA, 84 nt, Human
gaugguggcagcagaacaugaaacccauugcgggguccuucuaagcacuggguuccaugugacugcgcgguucauaagcccauc

SEQ ID NO: 4106253 - RNA, 97 nt, Human
gauggugucagagaucaacugaauuacuggacaccuagcugguguucagagaauuggauaauucguugaugugaaaagaaaccucugauuugguguc

SEQ ID NO: 4106254 - RNA, 80 nt, Human
gauggugucaugaauauaugcauaugucaaaacuuaucaaauuguauacuuuaaacaugugcaguauaccuuaugccauu

SEQ ID NO: 4106255 - RNA, 58 nt, Human
gauggugucuucugaugguccugggcugguucaggugccacucucaugggcuaccauc

SEQ ID NO: 4106256 - RNA, 68 nt, Human
gaugguucagggcacccagggguuccaugcugccacagaaaccacccuggggcacuugaguccucauc

SEQ ID NO: 4106257 - RNA, 77 nt, Human
gaugguuguuugcugugacaccugugugaguguuaacaugaacagucaacagaguggccgcagcguguagcgccauu

SEQ ID NO: 4106258 - RNA, 87 nt, Human
gauguaaugaagcagcuuugccuuacgcuuuacccauggagccauuguuugcuacaaguuucugaagcaggccuacuucauugauuc

SEQ ID NO: 4106259 - RNA, 104 nt, Human
gauguacagaaggggaauugggguugaugccuugaauagaauggcuggaaaauucuaaaaguauacuuucaaaggagacaacccucaaaucucuucccuaaauc

SEQ ID NO: 4106260 - RNA, 98 nt, Human
gauguacagcuuuuagaaucagguugucugggugugaaugccagcuucccucuuucccagcuggcuaucccagccaagugaucugaccgcccugcauc

SEQ ID NO: 4106261 - RNA, 87 nt, Human
gauguacuauggccaccaucucuaaaacacagcagcacuacuuacuuuacugccaguaaguugacugagaugugguuuuaguucauc

SEQ ID NO: 4106262 - RNA, 58 nt, Human
gauguacugaccacgguuaccaagggagcaguuuccuuggcaauggccaacagucauc

SEQ ID NO: 4106263 - RNA, 83 nt, Human
gauguagaacuggugggcagauuuaagauauuuguauugcaauaguccagugagaagcugucuuagaucagugcaguagcauc

SEQ ID NO: 4106264 - RNA, 94 nt, Human
gauguagagaagaaggcagacugaaaagggaguuuagggccaaagcaaugacauugcaaugaguucccugaguuuucuuucugacucauauauc

SEQ ID NO: 4106265 - RNA, 81 nt, Human
gaggccagcucuacccuuggacuuccuaaguaaugagcuaacacacuccccuccugcuuagucuaguuggaguugagucuc

SEQ ID NO: 4106266 - RNA, 59 nt, Human
gaggccaggggccuggagaugaaggagaccagacgucgugcuguagagcccccgguuuc

SEQ ID NO: 4106267 - RNA, 81 nt, Human
gaggccagggugggggcaggugcuuuuagaaguugcucuauugggugagagcccugcuccuaucccagaaacaccagccuu

SEQ ID NO: 4106268 - RNA, 56 nt, Human
gaggccagugugcuguguuuucugaaauaggaaggaaacaaaccacagugagccuu

SEQ ID NO: 4106269 - RNA, 94 nt, Human
gaggcccaaagagggugugcagggaagggcaugcuauuggcaaagcgaugaagauggugaugcuuuucugauuugugccucccucuuugggccc

SEQ ID NO: 4106270 - RNA, 65 nt, Human
gaggcccaauuucuucacccgcaaauuaaagaauuugacuaaacgugggaggaaaaaugggcuuc

SEQ ID NO: 4106271 - RNA, 83 nt, Human
gaggcccagauucuaauucagagacucauucuggagcucaagcuuuuaacaaugauuuucugaaaccugucuuaccuggccuu

SEQ ID NO: 4106272 - RNA, 122 nt, Human
gaggcccaugcauaggauucaggcucaaucugaaacaggucugggcucagccucagucuguggcuggcagcccaguccagcucacugggcccgacguggccugcguccaugugcuuggcuuc

SEQ ID NO: 4106273 - RNA, 73 nt, Human
gaggccuaacagucaaaugucuaucuucuucucaucaccaagaagugaugcuacgacuuugacauagugucuc

SEQ ID NO: 4106274 - RNA, 76 nt, Human
gaggccuaagacuccuaaauagccguuggaaggguaguguuuuuccaagggaauguuuaugaguaacuagaggauc

SEQ ID NO: 4106275 - RNA, 59 nt, Human
gauaagcacauuuuccagcagcucuggagucauggcugcuuacaaaaacugugccaauc

SEQ ID NO: 4106276 - RNA, 94 nt, Human
gauaagcccccaauaaacaugggcuaauucuuugauuguuuugaggaaaagaaagacaaucugaaugugaauggcauauguuuauuagguuguc

SEQ ID NO: 4106277 - RNA, 72 nt, Human
gauaauaaauguguguuauuugaugcuguuaaguuugagguauacagcaacggaaaauacacauagggaauc

SEQ ID NO: 4106278 - RNA, 65 nt, Human
gauaaucuauuggucuccacuuguuuuagagacaacucucugagcuauguaagacuuggauuuuc

SEQ ID NO: 4106279 - RNA, 62 nt, Human
gauaaugagcuuuugaauacugauuuuauaugacacagggucauauuuaaaagcuuuuuauc

SEQ ID NO: 4106280 - RNA, 96 nt, Human
gauaaugaugaagaugacagugaggugcccagccugccccugggacugacaggagcuguugaauauacuucauuugcuucucuguauaaucuuguc

SEQ ID NO: 4106281 - RNA, 63 nt, Human
gauaauggccgggggcugaaugcugcugaacaguaaagagcauagaugccaaaggucauaauc

SEQ ID NO: 4106282 - RNA, 66 nt, Human
gauaauuuugagagucauuuaagguguuguguaccucugucguagcaccugucuuuuaaaaauauc

SEQ ID NO: 4106283 - RNA, 81 nt, Human
gauacaagggcaguggauguuugcugggcaguaggacaaauacucgagugcauuacuuuggcaaacuccugcccuuggauc

SEQ ID NO: 4106284 - RNA, 80 nt, Human
gauacacacucagaaacauuguuuaccugucccuuuugcaagcauaagaggacuugugaagauguacugccuguuccauc

SEQ ID NO: 4106285 - RNA, 65 nt, Human
gauacacuauuuuacugauacaaaucuaccagaaacaggagauuugugguuggagagauuguauc

SEQ ID NO: 4106286 - RNA, 75 nt, Human
gauacagaaggacaguaccacucaugagcucacauuugggcuggcucaaugaaugcagcacuguuuuucugcauc

SEQ ID NO: 4106287 - RNA, 90 nt, Human
gauacaggagacagcuaucaggcucagccacaggggaaggggaugcucucucuaaggugcugggucucaaacuugguuguacauuguauu

SEQ ID NO: 4106288 - RNA, 58 nt, Human
gauacaguguguuaacgagaaacauugcaaauauuuuuuccuuuggacaggcuguauu

SEQ ID NO: 4106289 - RNA, 120 nt, Human
gauacauaccugcaacugugacugucaacuugcuauuaaugacuaagcaaucaugaauagcaaguugcuauuaaacagucauuaauagcaaguugacaguuuuaggugcaaggauguauc

SEQ ID NO: 4106290 - RNA, 83 nt, Human
gauacaugagaugcacguuuauuugcuugugauuucuuuuucuugaaaucaggauccaccuugagccugauaucuacauuuuc

SEQ ID NO: 4106291 - RNA, 67 nt, Human
gauacauuucaaggaggacugggcagcugcacuugugagcggugacagaucucugugaaauauaauc

SEQ ID NO: 4106292 - RNA, 129 nt, Human
gauaccuauuccuugucaaauauuugaagguaugaaaguuaauuuugaaugucuuuuugccuuuuaauagagucaggaacauuguagaauugaaacuguauuauuuuuucuauuucccaccagggguuc

SEQ ID NO: 4106293 - RNA, 72 nt, Human
gauacguagcucuuugagauugguucuugucaucaacugacaugcccucaagauccauucaaauuauguauc

SEQ ID NO: 4106294 - RNA, 81 nt, Human
gauacguauuaugggcugcaaugcuucaguuguugagaugcagcacuuagcauuuguagagugccagcccucugcuguauc

SEQ ID NO: 4106295 - RNA, 55 nt, Human
gauacuaggcauggcugggcauccgacauucaggggagagcuagggccuagaauc

SEQ ID NO: 4106296 - RNA, 108 nt, Human
gauacugguuuguuuuauacuugcaucuaagguggauaacuucuccccuuaggggagaauggcuggaaguuauccaccuuagaugcaaguauaaaacagaccaauauc

SEQ ID NO: 4106297 - RNA, 75 nt, Human
gauacugugggauguugugauuagaaugucagcugauaaacauagcuagaaacuauagcaacaacuuaugguguc

SEQ ID NO: 4106298 - RNA, 90 nt, Human
gauacuuaacacguucauggucuguuaggagcuacuuuuguaugcuucacugaaagugccccagacaagaccccugaugugugugugguc

SEQ ID NO: 4106299 - RNA, 58 nt, Human
gauacuuuccauccaaaugcauuccuacugaaugcacacggacagaguggagagaguc

SEQ ID NO: 4106300 - RNA, 69 nt, Human
gauagaaagcugcagaucuuguguacuugucugagcucagcguuuaagugaugaucgucuuuuuuuauc

SEQ ID NO: 4106301 - RNA, 87 nt, Human
gauagaacccucugaagacucauuugagacgaugauggagcauaagaauccaucaucaaaacaaauggaguccuccgagggcucauc

SEQ ID NO: 4106302 - RNA, 86 nt, Human
gauagaagcagaggcagaggucaucucugggaguggggagggaguagcucaagccaaggccggcccucugaccugcugcuaauguu

SEQ ID NO: 4106303 - RNA, 81 nt, Human
gauagaagccagaaucagaugccuguggggucuaggguaaacccugccugcagaaaguaucuccagaauuuggcugaaauc

SEQ ID NO: 4106304 - RNA, 120 nt, Human
gauagaggcugggcauggucucucuuggcuuaauugugguucucugcuuacggagauguaccuggcaagcccaguauugagcuacaggccugagaugucuugcuuugcuagccuucuauu

SEQ ID NO: 4106305 - RNA, 59 nt, Human
gauagagggccgcuggagccugguugucacacacaauuaauaucccccgccguucuguc

SEQ ID NO: 4106306 - RNA, 90 nt, Human
gauagaguuggaaacuaguaaguggauuuaaagaaucucugugacuuauuccugagacuuuagauacgucuucuucuuuuggacuaaauc

SEQ ID NO: 4106307 - RNA, 70 nt, Human
gauagcaaaucgacuguagagacuuggcggcgguggcauugccccaggucgucagcagugugguauuauc

SEQ ID NO: 4106308 - RNA, 71 nt, Human
gauagcacaaagaugucaguuugaaauaacacuuucauaaaauguuuggucaauggcaucuuugaaauguc

SEQ ID NO: 4106309 - RNA, 83 nt, Human
gauagcagauuauuugcuuugguccuccaagcauaggcuguguugaggcuggaaggaacaaggaucagaaacaagcugcuguu

SEQ ID NO: 4106310 - RNA, 56 nt, Human
gauagcaggacuucuguuggaacagcuguuuguugauccagcugacauucucuuuc

SEQ ID NO: 4106311 - RNA, 56 nt, Human
gauagcauauaaguuauaaaacugggacaaacacuuaguuuuucagauauguuguc

SEQ ID NO: 4106312 - RNA, 125 nt, Human
gauagccacccaaacaaaguguugaaugauuaguuccacaaaaggucuaguuuaauguacauugaauagaucucugauuguuuuaaaaggggagaaucuuggaaauaucuuuguuaaugugcauc

SEQ ID NO: 4106313 - RNA, 101 nt, Human
gauagcuuguuagaaauacacauucuuggacuccacucuaggccgcucaaaucagaaauucugagggugggguccagcaaucuauguuucaacaagcuauc

SEQ ID NO: 4106314 - RNA, 110 nt, Human
gauagcuuuugcaaaauuuacauacccagcagccuccccaucagcugaauaagaauugcaauguggauguggcagaggcaaucagguaugugggguuagaagaagcuguc

SEQ ID NO: 4106315 - RNA, 65 nt, Human
gauaggcaagugugagggguucuuugauaugaauauucauggaaaagggucuuucauuuccuuuc

SEQ ID NO: 4106316 - RNA, 58 nt, Human
gauaggcagcugcuccagugcacgugugugcauucccugggcuuagcagcuccugguc

SEQ ID NO: 4106317 - RNA, 78 nt, Human
gauaggcauuuuagaauauagguaguuuacuuguuuauuuuguugguaaaucccuacaucuguguuuugauacuuauu

SEQ ID NO: 4106318 - RNA, 92 nt, Human
gauagggccucaauucauaauggaugauuaaauggaugaagagacaaauauuauccaagcuuucuguuuauccacucauccaugccucuauc

SEQ ID NO: 4106319 - RNA, 76 nt, Human
gauagguaaacuuccacguuugaucaugcagcuggaaaacuuaauagugaauuaaauguuggacguauacauuguc

SEQ ID NO: 4106320 - RNA, 55 nt, Human
gauagugaguugauuaggugauuggaaacaggcuucagcuuugcaacugcacauc

SEQ ID NO: 4106321 - RNA, 71 nt, Human
gauagugcuaugcuuggggauaugagacaacuagaauaauuguagcucacauuuaucaggcacuuacuauu

SEQ ID NO: 4106322 - RNA, 76 nt, Human
gauaguguuagaaucuuauuuuuaaaucuuccauagugcagucauuaggagauuuuugaugagguuuugaugaguc

SEQ ID NO: 4106323 - RNA, 68 nt, Human
gauaguuacaaaccaacaggcagcgucucguuuuuguuguuguuguuguuuguuuguuuguuuuaauc

SEQ ID NO: 4106324 - RNA, 106 nt, Human
gauaguuuaccucuuuagccuguuuuaacauuuguaaguuguucuuagccucacaagguuguacaaagauguuuaaagcauuuagcaaaguuccuggaaaacuguu

SEQ ID NO: 4106325 - RNA, 76 nt, Human
gauauaacagugaaaauaaggcugguucuuguuuuuauccacugaggcaaauacugaguuuauuuucaaagguauu

SEQ ID NO: 4106326 - RNA, 57 nt, Human
gauauaacgacuucccaggucuuuacaugucugagcugaaacuggaguccuuauauc

SEQ ID NO: 4106327 - RNA, 85 nt, Human
gauauagacagugggaaaagggcacacaaaggcagcauuugagcauagcuaacauuugcuucuugugccuggucuccuaaauauc

SEQ ID NO: 4106328 - RNA, 83 nt, Human
gauaucagugaacgaacaaaucuuaaaguaauucaaauguaugucaagcauugaaauagagaucugcuuguuugcuuaguguu

SEQ ID NO: 4106329 - RNA, 56 nt, Human
gauaucauaucagacaaccucuguaguaacccacuggugaauugugauaugauauu

SEQ ID NO: 4106330 - RNA, 67 nt, Human
gauaucccaggccuugaugggaguugggguugcauagagcacaauuuuucuuagguccuggcauauu

SEQ ID NO: 4106331 - RNA, 65 nt, Human
gauaucuguucaugaaacuuaacuguuggggcuuagacuucuacuguaaguuuuggagcuauauu

SEQ ID NO: 4106332 - RNA, 61 nt, Human
gauaucuucaauuuagaauggauuuaucugaacauaaccccaucauaaguugaggagcauc

SEQ ID NO: 4106333 - RNA, 65 nt, Human
gauaugaaaagagcugggaacuacaugacaagugucccauuguuucacagcuuuuauucugcauc

SEQ ID NO: 4106334 - RNA, 78 nt, Human
gauaugagaugcgcuagaaguauacucccaccuuugcucucuauuugagagcuacagcuguacucugcaggucauauu

SEQ ID NO: 4106335 - RNA, 73 nt, Human
gauaugagauuugggagggaacagggguggaaugauaugauuuggcucugugucuccacucaaaucucauauu

SEQ ID NO: 4106336 - RNA, 79 nt, Human
gauaugccaagcuuugcaccgguggcuggaggccuagcggggauuccaccggaaaucugguucuagagaaugguauauu

SEQ ID NO: 4106337 - RNA, 60 nt, Human
gagggcccacuaugucugagcaaagcccuucacacaguguacagcaccgaguaggcccuc

SEQ ID NO: 4106338 - RNA, 68 nt, Human
gagggcccuacugagaagucaucaaugguuaaauuucagccuugggggcauauugaguagugguccuc

SEQ ID NO: 4106339 - RNA, 77 nt, Human
gagggcgucugacccauuaccaucuccaagauuaagacacagcacuugaaguuacaugaugaggucauagcacccuc

SEQ ID NO: 4106340 - RNA, 100 nt, Human
gagggcguuugcacaugaaucauuuagcucugcauggagacccuguucucaacuuuuauuucuccuguaggucaggcugaguggaugcucaggaacccuc

SEQ ID NO: 4106341 - RNA, 70 nt, Human
gagggcuaaugauagcaagauaaacaacuaauguuuacagcuaggugcauauccaguuuuauuagcuauc

SEQ ID NO: 4106342 - RNA, 55 nt, Human
gagggcuccacacgggcccagcgcacaguaggugcuuggccaguguuaugcucuu

SEQ ID NO: 4106343 - RNA, 61 nt, Human
gagggcugugggagggccuggaauaugggugacugaacgcagccucuaagcacagccucuc

SEQ ID NO: 4106344 - RNA, 120 nt, Human
gagggcuuacagaucuguggcaagaguaggaagccagggucagaauuugggcagaaaaauaaucaagucaaugucccaggaacauucuggcuaggauucuaccaucagaacuggacucuc

SEQ ID NO: 4106345 - RNA, 79 nt, Human
gagggcuuuucauugaaucucgaggcuauagaagugccuuuuccgauguggauggcacugcuuuauucaugaggcucuc

SEQ ID NO: 4106346 - RNA, 75 nt, Human
gaggggaauuaggucauucccugagcagaugaauuugcuaucugaauuaucuggggaacagaccugauuuucuuc

SEQ ID NO: 4106347 - RNA, 69 nt, Human
gaggggacgugugggcugcacaggauucuggggggcugaccuaggaggggcagcagugcaaguccucuu

SEQ ID NO: 4106348 - RNA, 57 nt, Human
gaggggaggaucagggcugcgacucccagagcacugcagcaggguggucuacuucuc

SEQ ID NO: 4106349 - RNA, 57 nt, Human
gaggggcuggcuguggucccaucgacagugugugaggacagggagcugagcacccuc

SEQ ID NO: 4106350 - RNA, 62 nt, Human
gagggggagaccuccuggaccacugagcaauuaauucauuuacauuaggaaguuucuccguc

SEQ ID NO: 4106351 - RNA, 80 nt, Human
gagggggaggaguguacagguuuauuuuagaguccaggcuggaauuugcauugcuuuuuguggauccacaccucccccuc

SEQ ID NO: 4106352 - RNA, 55 nt, Human
gagggggauggaaaaguuggguugaagucagaauccaagaagagccuuucuccuc

SEQ ID NO: 4106353 - RNA, 65 nt, Human
gagggggcgaacagaagcaaggaucaaaacaaauuccauccuuauuucuuuuguuuucccuccuc

SEQ ID NO: 4106354 - RNA, 66 nt, Human
gagggggcugggauuugaacccagggcugcacaggugaggccuggguuguuuuuucuaaccuccuu

SEQ ID NO: 4106355 - RNA, 56 nt, Human
gagggguaugcaggcaggaggcuccaugugugaguuucaagucucuaggacuucuc

SEQ ID NO: 4106356 - RNA, 93 nt, Human
gaggggugacauggagggagaaguccagggugcgguccccacagcccguggccuccuacgcagcuugaggaugcauccugccucccuccccuu

SEQ ID NO: 4106357 - RNA, 105 nt, Human
gaggguauugcaggaggaaugagaauuauuagaggccagauuguugacagugauaaacagauauuuugguagcucucaaugaaccauuucucuuaucaugcccuu

SEQ ID NO: 4106358 - RNA, 84 nt, Human
gaggguccaggcugagggcggggaucccuggcuuugggaaacccuccucagacagggcuccccgcaccgcagcccuggccccuu

SEQ ID NO: 4106359 - RNA, 80 nt, Human
gagggucccuggcugugcugcaggcuuuggggcuuguguuuucuccauucauuuguugucagccuucuuuauggacucuu

SEQ ID NO: 4106360 - RNA, 59 nt, Human
gaggguccuggcuaagucugacaagugcuggcauacuuuggauucuguuaggcaccuuc

SEQ ID NO: 4106361 - RNA, 83 nt, Human
gagggugcaggugagcaggucaggaaguacauugggcagcugcaugcucagcuaauucaucaccugcuccucugcuuaaccuc

SEQ ID NO: 4106362 - RNA, 75 nt, Human
gaggguggagcucguguuugcucagggcaucccaggucugacguggggacugccuuccacagacacucgacccuu

SEQ ID NO: 4106363 - RNA, 88 nt, Human
gaggguggcaaauaggcaagguaaguaggagcagcccucgaccaucucagaucagcuucuucagccuaccuugaccucugccugucuc

SEQ ID NO: 4106364 - RNA, 84 nt, Human
gaggguggggcugggagggggugggaugggcagcagggaagcucucuccuaucgcccucuggcucuucucaggccgccuccuuc

SEQ ID NO: 4106365 - RNA, 86 nt, Human
gaggguggguagguggggcguggcagggcaggagguagcugcugaccaccugccuugacguaacgcaugacccaucuguuccccuc

SEQ ID NO: 4106366 - RNA, 58 nt, Human
gagggugucucacgugaaaguaaaucgcucauguuuguucuuuuuaaaagaugcccuu

SEQ ID NO: 4106367 - RNA, 127 nt, Human
gaggguucccugguagguucuucacugugaugucugcauauagaaaccauguccuguucuccuuuaugcccaccauaaaaggaagacucgcaggucuauggcugucauggcccucccuggcacccuu

SEQ ID NO: 4106368 - RNA, 81 nt, Human
gaggguugguuucagaggcuugaagcccaagccguuuccaccccauggccuggguuguucagcuguugucuuccguuccuc

SEQ ID NO: 4106369 - RNA, 110 nt, Human
gagguaaaucuuugaguuugaauuuguuuauguucccaagggauagaaagaacuaggaccaaugguuaguuaugaugggagacagauuuuugacucaaugugaagaccuc

SEQ ID NO: 4106370 - RNA, 63 nt, Human
gagguaaguaaccauuccauggcuacacaguggguccuuaauggagcugguacuagcuaccuc

SEQ ID NO: 4106371 - RNA, 61 nt, Human
gagguacagaguguuccaaugucugcuaccaggauggcacugaaauuggcaugcugaccuc

SEQ ID NO: 4106372 - RNA, 66 nt, Human
gagguagacccugaggcaaaggcuagaguuagugguuuggcuccaguuugugccuucagcuacuuc

SEQ ID NO: 4106373 - RNA, 97 nt, Human
gagguaggagaauggcgugaacccgaggcggagcgugcagugagccgagaucgcgccacugcacuccagccugggugacagagcaagacuccaucuc

SEQ ID NO: 4106374 - RNA, 73 nt, Human
gagguaggagugcagaaugcacuuuccuggagucuagaauuucaaaauucuguaucuguacuauuccugccuc

SEQ ID NO: 4106375 - RNA, 128 nt, Human
gagguaugcaccccggaugccugaaggugggcaugagaguggugggugggggcgggugcccuucugaaacugcauucucuacacuccugcccugccuccucauucccuuuuggggaaaaaaauaucuc

SEQ ID NO: 4106376 - RNA, 68 nt, Human
gagguauugacuaugggauggcccaagucuucuagaucugacccuggccaccccuuaguccugaucuc

SEQ ID NO: 4106377 - RNA, 113 nt, Human
gagguauugggaaacuuauguagaugacaucugcuauuugugccugacuagagcaccuucuaacaucuugcaguagcagaacuuagguuuuucuuguaagcccccucuuccuc

SEQ ID NO: 4106378 - RNA, 56 nt, Human
gagguauuugauccucugcagugaaccauaaaaaacuagcgugggaucagaaucuu

SEQ ID NO: 4106379 - RNA, 78 nt, Human
gagguauuuucauggcagacuguaauaggagaauuauaaguaauuuucaaaccacaggucugcaagcaugcauaccuu

SEQ ID NO: 4106380 - RNA, 68 nt, Human
gaggucaaggcugcagugagcugugaucgcgccaaugcacuccagccucagugacagagcaagaccuu

SEQ ID NO: 4106381 - RNA, 89 nt, Human
gaggucacacagcaguugguuaggucaggauucagacugagacugaugcuccguuguccuuguuccuaaccccucugcugugcaacuuc

SEQ ID NO: 4106382 - RNA, 58 nt, Human
gaggucagaaggcaguuaaacaaacuccaacaagccuuuguuuuuaucuucugauuuc

SEQ ID NO: 4106383 - RNA, 103 nt, Human
gaggucagauugaggggagauuucaggagugcagcaguuuggagaucaaacgcacaugugaucuucugaucuggauuccuaacucuccccucuaguagaccuc

SEQ ID NO: 4106384 - RNA, 73 nt, Human
gaggucaugaccaugggaauaaaguuauuucaauaguugacucuuuugaaaaguuuguuacucacaugacuuc

SEQ ID NO: 4106385 - RNA, 69 nt, Human
gagguccagaaauucccauuucagauucugccaaaacauucuagcaggaaaggaaacaauuucaaccuc

SEQ ID NO: 4106386 - RNA, 57 nt, Human
gagguccagagcagguucagugguucaaacgugcucagcuccccuucucugggccuc

SEQ ID NO: 4106387 - RNA, 55 nt, Human
gaggucccccauggcugugacuuagaaaggucaagccaauuuuaugggagaccuc

SEQ ID NO: 4106388 - RNA, 56 nt, Human
gagguccucuguguccgcgggcucgggcgucuccgcagaguggccgcagaggccuc

SEQ ID NO: 4106389 - RNA, 56 nt, Human
gaggucucacuuuguuguccaugcuggucucaaacuccugggcucaaaggauccuc

SEQ ID NO: 4106390 - RNA, 64 nt, Human
gaggucuggggccagauggagggguggggacccacgcuucaguucccagcuggccugggaccuc

SEQ ID NO: 4106391 - RNA, 63 nt, Human
gaggugaagccuguagugaccagaagacaugaaaauucccugagcuucaucaggcuuuuccuc

SEQ ID NO: 4106392 - RNA, 64 nt, Human
gaggugacuuggcuuuuccaucucugcagcacaauugcugugugaccuuaggcaagucaacuuc

SEQ ID NO: 4106393 - RNA, 57 nt, Human
gaggugagcauugggcucagccagaaaugcuccugcccucccagugcucacugccuc

SEQ ID NO: 4106394 - RNA, 67 nt, Human
gaggugagggcccauuucuuaaagaggaugcuuguccagcggcgugaaugauggugcuccucaucuu

SEQ ID NO: 4106395 - RNA, 62 nt, Human
gaggugauggauauguuuauggcauagauuugaugaugguuucaugaauguguucuuaccuc

SEQ ID NO: 4106396 - RNA, 85 nt, Human
gaggugauucuuaaaauacuguggaguguugaaaaaauaucucagugugauuauggguuuuaacacucagcacuaucucuaccuc

SEQ ID NO: 4106397 - RNA, 87 nt, Human
gaggugcacugggcaccaccgggcggugggaggagggaccgucuccauugcucccacacuacucggaggcauucagaaaggcuccuc

SEQ ID NO: 4106398 - RNA, 84 nt, Human
gaggugcaggcacuugcugaggucacggcggccagacuggagcccagaacucugucugcaccuaagcacagugucccuuaccuc

SEQ ID NO: 4106399 - RNA, 90 nt, Human
gagguggaagucguaccuuuggggucaggcccuugagccacagccucuuucccaggccucucagggagccuggacuucaaggccugccuc

SEQ ID NO: 4106400 - RNA, 90 nt, Human
gagguggagucuacagaggcaggcaggcuuccuugaacugugguggacuccacccaguucaagcuuccuggcugcuuuguuuaccuacuc

SEQ ID NO: 4106401 - RNA, 68 nt, Human
gcaagugcaaggcuauucacauguauuaucuauauaauaaugcuucauuugcauagcuuuuuauaugc

SEQ ID NO: 4106402 - RNA, 124 nt, Human
gcaagugcagacagaagacauagaugccccaguacucuugccugccucaucuaggauaaagcaucuuccccaggagaggggacuggaugaggggaaagagacagguacuuccuguuccacuugu

SEQ ID NO: 4106403 - RNA, 56 nt, Human
gcaaguguggcuuaaaaguuuccagagagucagggaagauccaagcaggcacuugu

SEQ ID NO: 4106404 - RNA, 63 nt, Human
gcaaguuagaccauagaaagagcauccaacuuggagcuuggggcauauggugcuaccuucugc

SEQ ID NO: 4106405 - RNA, 79 nt, Human
gcaaguugugaaguuuuacuaggugaauuugcaaacuuacaugcaaauauccucccagaacuccuuucuccaacucugc

SEQ ID NO: 4106406 - RNA, 73 nt, Human
gcaaguuuccuaaucuucaacguggaacaaggaguuacuuaguuuucaaguggcgagauaaggaagcuucugc

SEQ ID NO: 4106407 - RNA, 58 nt, Human
gcaaguuuucauucguuagcauaaccuggguaaaguuuuuuguuaaaugaagauuugc

SEQ ID NO: 4106408 - RNA, 94 nt, Human
gcaaguuuuccugugagcauauguuuucagcucucuuaaguauaugccuaggaauggaauugcugaaucauauguuuaaccuuucgagaacugc

SEQ ID NO: 4106409 - RNA, 75 nt, Human
gcaauaaagaguuuuauguguauguuacuuuccagaaguuuggcaaaguuacuaucacaaugaaauuuccauugc

SEQ ID NO: 4106410 - RNA, 78 nt, Human
gcaauacacacagaggccaugggauuuccaacuggcugucaaaaaggaaaguucugagucccuggccugucugauugc

SEQ ID NO: 4106411 - RNA, 59 nt, Human
gaguaacagcauaaauuugugacuuguuguacuggauaauucaggaguuaguugugcuc

SEQ ID NO: 4106412 - RNA, 86 nt, Human
gaguaagaaacauaucagaaucuacaugcaauauuuuuagggggaaagccuuuguuuucauugauuguagagaugauuuuuugcuc

SEQ ID NO: 4106413 - RNA, 121 nt, Human
gaguaagacaugcugucugugucacaaacauacauuauagauauaaucuuucugaacacaugaauaucuguauauauguguaugugugugagauacuaguacaaauacagcuugcaguuuc

SEQ ID NO: 4106414 - RNA, 69 nt, Human
gaguaaggccaugcuugaguugaaggcucugaaaucuucagaccucacugaggucgugguuuauggcuc

SEQ ID NO: 4106415 - RNA, 62 nt, Human
gaguaaucauagcuaagcuccagagugccugggucaccuggcagucuggcgagcuaucacuc

SEQ ID NO: 4106416 - RNA, 85 nt, Human
gaguaaugcaauuaccauccuuggcucgcucucugugggauguucucacagaucaguggcaaaggguugguaggcuauuuuccuc

SEQ ID NO: 4106417 - RNA, 63 nt, Human
gaguacagaccugucucuuccuggaauuaaggugcccaggauggagggagggcuguuaaacuc

SEQ ID NO: 4106418 - RNA, 72 nt, Human
gaguacagagauagugaauaaauuuaugcucccauagaaauguguguaaauuuauuuacauaaauuugacuu

SEQ ID NO: 4106419 - RNA, 56 nt, Human
gaguacauguauagagauuaaccugaucaaagauuaguuuagccccacgugugcuu

SEQ ID NO: 4106420 - RNA, 76 nt, Human
gaguaccagcaggacccaggaauccugcaguucugggaucugucccuauaggguaguugugggcuugcugugucuc

SEQ ID NO: 4106421 - RNA, 104 nt, Human
gaguaccauugacauaaauaucuguguuuguccaaguucuccaaggagacagaacuauuaggagacacauauacagaaagagauuuauuuuaaaaaauuggcuc

SEQ ID NO: 4106422 - RNA, 85 nt, Human
gaguacgcaggccuccucccacggucucaggaagcccagacgccgcaggcuuccccgccguagaggagcugccggggcguaauuc

SEQ ID NO: 4106423 - RNA, 92 nt, Human
gaguacuugcaucaaguucacagcagcuugucuguucuuuaaguucacaaacugacuuaagggaaacuucauagcugcugcuguaaguacuu

SEQ ID NO: 4106424 - RNA, 86 nt, Human
gaguagaauucagggaggcucuuauuuguucaacaucccccagaugguaugugauggagugaggguuucuacuuaagucugaucuc

SEQ ID NO: 4106425 - RNA, 96 nt, Human
gaguagacacagaggagggcagucaggcucagccucucugaaagcgcuccaccccagagggcugccugucuguuucuuuuaugcaaaugucaguuc

SEQ ID NO: 4106426 - RNA, 90 nt, Human
gaguagaccaucccugcaagcaccacccucccaaccugucccugggacucaggacucacgagggaggugggcguggaggaggugcugcuu

SEQ ID NO: 4106427 - RNA, 60 nt, Human
gaguagagugcggugauuaagacuuugcauacuggagucagaccgacugggcucauauuc

SEQ ID NO: 4106428 - RNA, 81 nt, Human
gaguagcaaaauucuuccaagucuaaguuauaaaucucagaacucacugaaggauuugugaguuaacuuguuuuguuguuu

SEQ ID NO: 4106429 - RNA, 63 nt, Human
gaguagcagccacagaggacccaagcccaagucuuggccugaguuaaguuagugcuauugcuc

SEQ ID NO: 4106430 - RNA, 57 nt, Human
gaguagcauucuagaguaugcuaggagaaucuaaguaacaacuggacaauguugcuc

SEQ ID NO: 4106431 - RNA, 68 nt, Human
gaguagcauuugcaggcuauaauggaaacaguuccaacuguguucaaucccuagucucagagccacuc

SEQ ID NO: 4106432 - RNA, 72 nt, Human
gaguagccucagcugggugaguguucugcaacuauagugcuugcaaacgacuuucaccuaaguuaccuacuc

SEQ ID NO: 4106433 - RNA, 92 nt, Human
gaguagcuaugacaaugaggaguuuuaagagugagaaaacacaaugucuaugagaacauggacuucucuuuuagaggcuccaugagcuacuc

SEQ ID NO: 4106434 - RNA, 56 nt, Human
gaguagcuguuuucaguuuggguuuuuuccaccaaagcgacuuuaaaacacugcuc

SEQ ID NO: 4106435 - RNA, 72 nt, Human
gaguaggaagagcucaggacuggggcugggggucaggagacccaaguucaaguccuggcucugccacugcuc

SEQ ID NO: 4106436 - RNA, 85 nt, Human
gaguaggagaaagguauuuagugugaaagcuauguaaaaagucuaacacaugguuguugcucaauacauguccauucuccuccuu

SEQ ID NO: 4106437 - RNA, 62 nt, Human
gaguaggauggugcagaguuggugagauucacuccgggugugagaucugccugcacccucuc

SEQ ID NO: 4106438 - RNA, 58 nt, Human
gaguaggcaguggauuuaugguaaaugacagaguguuugcaaauuuuccugacuacuc

SEQ ID NO: 4106439 - RNA, 97 nt, Human
gaguaggucgaggaaggggaggccugcgcuuucgggagggaagccgcuggggcuagucuggcugaagcugggcacuuccuuuuuucccucgauacuu

SEQ ID NO: 4106440 - RNA, 80 nt, Human
gaguaggucucaguagucaagcuacaggagccuuccuuaucuucaagaggcagcugagcauggcuaccuuugcucugcuc

SEQ ID NO: 4106441 - RNA, 87 nt, Human
gaguaguaacaguaaugaaagcuuucuucuaguuguacaguaaagucuauuuugcuagcaggaggaggagucacugugaaauugcuc

SEQ ID NO: 4106442 - RNA, 117 nt, Human
gaguagugagggacugcuggggccccaggaguaaagugcccagggaaagcgggcuucugcgguuuaaccaucccagaaucccugucccucuuuuggggagccaucccucaccugcuc

SEQ ID NO: 4106443 - RNA, 81 nt, Human
gaguagugccacucuggguccugccauucacugggagggagaccucaggagggaccaggucagggcucugacuggacacuc

SEQ ID NO: 4106444 - RNA, 86 nt, Human
gaguaguugaacugaaguauuucgagccagcauguuagaauuuuugggauggggauaugugacuugacaaagcuucccaggugcuu

SEQ ID NO: 4106445 - RNA, 83 nt, Human
gaguaguuguugggauuaacuuuuuacuuagagcuaaauaacuuuggaugaguauuuuaaguucucaaucccucgauucccuc

SEQ ID NO: 4106446 - RNA, 71 nt, Human
gaguaguuguuuucuggauaucuauuccucauacuaccaugaauagaagucucucaagaaacauacugcuu

SEQ ID NO: 4106447 - RNA, 58 nt, Human
gaguauauauagacaugucacacuaaugguggagaugugugacuaucugcuugugcuu

SEQ ID NO: 4106448 - RNA, 60 nt, Human
gaguaucucauuuuccacgagaaguuggaaaaccugacuuuucaugugaugugacauuuc

SEQ ID NO: 4106449 - RNA, 66 nt, Human
gaguauggugagucuuucuccugcccuggggauuuccuccagacuacaggagaaacucacucacuc

SEQ ID NO: 4106450 - RNA, 55 nt, Human
gaguauguguuucuggguuuagucuuccuagaggacaaucuagaaauauguguuc

SEQ ID NO: 4106451 - RNA, 80 nt, Human
gaguauguugguaauugagagaauuaaauuacugugugauuacuauacuaaauaguuuaauuccucauugggacauauuc

SEQ ID NO: 4106452 - RNA, 57 nt, Human
gaguauugggauuaugggugugagcuacuacagcuccuggccccagaucccaaucuc

SEQ ID NO: 4106453 - RNA, 90 nt, Human
gaguauuuccagaguucccugggacucagacauggaagucauaggacuauaucuaggaacccugagauuacccagggaccucaaaugcuu

SEQ ID NO: 4106454 - RNA, 64 nt, Human
gagucaaaugcaauguuuucaggugaaccugagacuacagaauggcauuguuuuuguggaacuc

SEQ ID NO: 4106455 - RNA, 62 nt, Human
gagucaagcugcccuacccgaggcacucuccaaggggagagaaacuccuaggccagcgacuc

SEQ ID NO: 4106456 - RNA, 69 nt, Human
gagucaaggcagagucuaucuuggaaguuuaauucauugaaccuuuauuagauguagacuuucuuacuc

SEQ ID NO: 4106457 - RNA, 61 nt, Human
gagucacacagcuuggaguuaugguucaaacuuggaucaccuggcucugaguuugguauuc

SEQ ID NO: 4106458 - RNA, 76 nt, Human
gagucacauagcucugguuucuugacuauggauaggauauaaagucaucuuaaagggagacuagugcuauguuuuc

SEQ ID NO: 4106459 - RNA, 69 nt, Human
gagucaccuuggccgcugucccggaggggagcgcugggagcgcggcgccgggacgcggcggagucauuc

SEQ ID NO: 4106460 - RNA, 77 nt, Human
gaugcuguguuacugagauccggccccuggaggaguuuucuuuuacaauuuccccuaugccauuucacacagacauu

SEQ ID NO: 4106461 - RNA, 70 nt, Human
gaugcuuuccaaaguguugaguucaguccagggcagcuucccuguucuguuaauuaaacuuugggacauu

SEQ ID NO: 4106462 - RNA, 61 nt, Human
gauggaaaaacagaagcugaauuuauacuacucagaauugucaggggcuguguuuuccauc

SEQ ID NO: 4106463 - RNA, 64 nt, Human
gauggaaagagcauggaauggagauccaggaauccuggguuucagucuaugcuuugaacucauu

SEQ ID NO: 4106464 - RNA, 73 nt, Human
gauggacuuacuugggcacacaucuuaagugucuuugugacaccucuggucugugucauaggcugaguugauc

SEQ ID NO: 4106465 - RNA, 72 nt, Human
gauggagacugaaugaggggugaucugggacccucccacgggaccccaggaagccauauuuauuucuucauc

SEQ ID NO: 4106466 - RNA, 65 nt, Human
gauggagagaaggcccagugaggcgugcaggacuggaguucagugccgugcugggucgcugcauu

SEQ ID NO: 4106467 - RNA, 73 nt, Human
gauggagagcgcaaggggccaagccugaguucagggaaaggcugagccaggcuacuccuugcugacagccauc

SEQ ID NO: 4106468 - RNA, 55 nt, Human
gauggaggcugucuugugcacuauaguauauuuagcagcauuuuuagccucuguc

SEQ ID NO: 4106469 - RNA, 67 nt, Human
gauggaguaugaggccauggucugcccucagcagauggggcaucugacaaggccacauauucucuuc

SEQ ID NO: 4106470 - RNA, 71 nt, Human
gauggaguguccuggagugcuugggggaaggggccgcuuccugcuacaauggcuauuuuggggccugaauc

SEQ ID NO: 4106471 - RNA, 71 nt, Human
gauggauauaccaaggcacugaaaaauuguguguagaauaacgcuacaacuaauuuucugggcuuuccauu

SEQ ID NO: 4106472 - RNA, 60 nt, Human
gauggauaugcuguuagaugaacuggagccaaaugcuguguauacuaacauauaucuguu

SEQ ID NO: 4106473 - RNA, 69 nt, Human
gauggaugccuuaaggcgagauacuuaagucacaccaacuucaguuucuucaucuguaaggaugcuguu

SEQ ID NO: 4106474 - RNA, 58 nt, Human
gauggauggacagguggauagguggauugguagaucaucuguuucuuugcuauauauu

SEQ ID NO: 4106475 - RNA, 55 nt, Human
gauggcaaugcuagaaauuuaggagcuacagcuccucucuaacaugaaugcuauc

SEQ ID NO: 4106476 - RNA, 86 nt, Human
gauggcaggauggagguggguaucaugagagauuacuaacauuuguucauuucuugcuaugcgccacgcacuuaacgccuguuauc

SEQ ID NO: 4106477 - RNA, 85 nt, Human
gauggcaguuuuuauccugccgaguacagccauagaaaauugagaucauuucucugcuguguuggcagcugagaaaauggccauu

SEQ ID NO: 4106478 - RNA, 83 nt, Human
gauggccaaggucaggggcuccuuugaccacuuagaaucagaucuggucucagcuggaguccuuggucccuccucugaccauc

SEQ ID NO: 4106479 - RNA, 55 nt, Human
gauggccaaguacauggcugggguguugaaggucucaaauaugaucugggucauc

SEQ ID NO: 4106480 - RNA, 58 nt, Human
gauggccuuguuuucucccuucucucuauuuaaugacuuuugaggaguugaggcuauu

SEQ ID NO: 4106481 - RNA, 71 nt, Human
gauggcgggggaggagcugcaggcggcagagaguaaucaagcacucauuuacgcgccuccuuccuuucguc

SEQ ID NO: 4106482 - RNA, 60 nt, Human
gauggcgguggccaccuccuuggagcacuuaacacccagaccgacguggccauuguaguc

SEQ ID NO: 4106483 - RNA, 91 nt, Human
gauggcgucauuguacaauccucacauuccaugagcuucuggcuuuccauaaacaaggcaagaacagacaugggagugggcacaggcuauu

SEQ ID NO: 4106484 - RNA, 62 nt, Human
gauggcucacucccuugauuauuggcagaaauucuugguuccucagaugggagugagccauc

SEQ ID NO: 4106485 - RNA, 92 nt, Human
gauggcucagcguaggaaggugagcguggucuucugugggugcacagcagaaagauaggucaccccaggagguccgggcuccccuccccauc

SEQ ID NO: 4106486 - RNA, 77 nt, Human
gauggcugaugaagcacggugaagaucuggccucagaugguucugugggagaugcuucuuguguuuauuugguuguc

SEQ ID NO: 4106487 - RNA, 66 nt, Human
gaucaccugugaaacuggacagcacuuggguuugaacccuaguggugacauuucacaagcuguauc

SEQ ID NO: 4106488 - RNA, 89 nt, Human
gaucaccuuuaaaugaauccugacuaaugguauuagaggagagauggugagaauugguuggauuuacaacauaguuugaagguagaauc

SEQ ID NO: 4106489 - RNA, 79 nt, Human
gaucagaugggaacauauauaugggcucuuucaggugcauugaggcaucagaaauguuuauauguggugucaacugguu

SEQ ID NO: 4106490 - RNA, 57 nt, Human
gaucaggacauagcuauaggcuuauuugagcccaggccuuaagcuacuucccugcuc

SEQ ID NO: 4106491 - RNA, 64 nt, Human
gaucagggaguggauauguuuagcaaaguugccugcuguugcuaggauucauucuauacuaauc

SEQ ID NO: 4106492 - RNA, 79 nt, Human
gaggcaggggaucuugacguccucgauggggaacuuauagucauagguaaucuccucauugacguuaaugugcugcuuc

SEQ ID NO: 4106493 - RNA, 68 nt, Human
gaggcagguggaucaccugaggucaggaauucaagaccagccuggccaacauggugaaaccccgucuc

SEQ ID NO: 4106494 - RNA, 68 nt, Human
gaggcagguggaucaccugaggucaggaguucaagaccagccuagccaacauggugaaaccccgucuc

SEQ ID NO: 4106495 - RNA, 56 nt, Human
gaggcaguuccugagugacaaggcuauuuguguauccugcauauaaaaauugccuc

SEQ ID NO: 4106496 - RNA, 80 nt, Human
gaggcauaagcugcagaugugccuguggauggcagcuucugacagcuguuccuggacacuaucagcagacaaauguacuc

SEQ ID NO: 4106497 - RNA, 107 nt, Human
gaggcaugagaaucacuugaaccugggaggcagaaguugcagugagcagagaucacagcacugcagcacugcacuucagccugggugacagagugagacucugucuu

SEQ ID NO: 4106498 - RNA, 75 nt, Human
gaggcauuagcggcauucugcauaggcuauauuuguucagccacauugaauaacuuacucuaugcuuaguaccuc

SEQ ID NO: 4106499 - RNA, 63 nt, Human
gaggccaaguuggagaccagguuuagaagagaaaaacuuucacuugacuccuaauuuguacuc

SEQ ID NO: 4106500 - RNA, 92 nt, Human
gaggccacacauugcagagaggagagcccagggcaggggagauagagaucugaguccuaguucugguucugucacucuuacugugugaccuu

SEQ ID NO: 4106501 - RNA, 57 nt, Human
gaggccacgugcuuauguuucugaaugcuagcagccagccugugagcccgugaccuc

SEQ ID NO: 4106502 - RNA, 55 nt, Human
gaggccacuuccuacuggaggagacccuggaagucucccuggaggugguggcguc

SEQ ID NO: 4106503 - RNA, 62 nt, Human
gaggccagaaugagcugaaugccauccuuuggccuccacagcucaguucagcuccugguguc

SEQ ID NO: 4106504 - RNA, 59 nt, Human
gaggccaggacucugaacagggcucaggaaaggccacagggcccugagagcuuggguuc

SEQ ID NO: 4106505 - RNA, 57 nt, Human
gaggcccaaauuuccacaaacacauagaauguguaaauugaaggaaauuugugcuuu

SEQ ID NO: 4106506 - RNA, 70 nt, Human
gaggcccagaaucugguggacgugaagauuccaguucuaucuugugggcagggacacauccccaggccuc

SEQ ID NO: 4106507 - RNA, 55 nt, Human
gaggcccaguguggcuuccuggaguugugaacagcuccuggccucccuggggcuc

SEQ ID NO: 4106508 - RNA, 96 nt, Human
gaggccccagucccagcuucccccaugcagccugcccucggcccuuucuauccauggagcuuccaaacagccuuugcauggagccugggauuccuc

SEQ ID NO: 4106509 - RNA, 58 nt, Human
gaggccccucucucugugcuugggccacuggcuuuuaaauaggaaagggaggggcuuu

SEQ ID NO: 4106510 - RNA, 58 nt, Human
gaggcccuaaaagacugugcuggcagcuccaggaaaagcucagugcuuucauugccuc

SEQ ID NO: 4106511 - RNA, 75 nt, Human
gaggcccugcuggacuuggagagauacaagcccuaaacagggggcuuucuucauacucaagcauccagcugccuu

SEQ ID NO: 4106512 - RNA, 108 nt, Human
gaggccgaccugaaagagguggauccccaaagcagugauccuuaaaggaacaucucaaaagagacauccaacuggggguuauugcuuuuaguaucuuuuucauaccuc

SEQ ID NO: 4106513 - RNA, 66 nt, Human
gaggccggcucugcccugcugauccccguggcccaacuuuucggggggcuagcuagaccgagucuc

SEQ ID NO: 4106514 - RNA, 55 nt, Human
gaggccuagucugccugcucaccucaucuucaauguagagagcagccugggccuu

SEQ ID NO: 4106515 - RNA, 87 nt, Human
gaggccucagagaaauccuggccuagcugggcucagaggagccccgccucccugagagcuaaaccugggcuaggacccugaaaccuc

SEQ ID NO: 4106516 - RNA, 58 nt, Human
gaggccucggguuuuccacaggagucuuuauuacaguguaaauccaagcucaggccuc

SEQ ID NO: 4106517 - RNA, 79 nt, Human
gaggccugcugccugcugacauucuuuauauuucauagcggggucuggagggguuuagagggacacaugcucaggcuuc

SEQ ID NO: 4106518 - RNA, 56 nt, Human
gaggccuggcaugaaugggaaccgaugaaguuccucagugugugacccauggccuc

SEQ ID NO: 4106519 - RNA, 63 nt, Human
gaggccuggggagcaugaauuagaacagcccauagggacucuggaucggguuccucaggucuu

SEQ ID NO: 4106520 - RNA, 58 nt, Human
gaggccuggguuggaggugcauuucuuuggauuugcauuaauuuuugccagguuccuc

SEQ ID NO: 4106521 - RNA, 58 nt, Human
gaggccuuagagcuuuucuagauuuaaaauaugagccaugggaaagucuaagugccuc

SEQ ID NO: 4106522 - RNA, 56 nt, Human
gaggcgagaagcuggagaugguaugagguuggcucuccucuuuacucccuugccuu

SEQ ID NO: 4106523 - RNA, 72 nt, Human
gaggcggaggcugcagugagccaagaucgugccauugcacuccagucugggaacaaagcgaaacucugccuc

SEQ ID NO: 4106524 - RNA, 99 nt, Human
gaggcgggaagaucacuugagcccaggaggucaaggcugcagugagcugugauugugccacugcacuccagccuggguaacagagugagacucugucuc

SEQ ID NO: 4106525 - RNA, 98 nt, Human
gaggcgggagaauugcuugaaccugacaggcggaggcugcagugagccaagaucgugccacugcacuccagccuggcaacagagcgagacucugucuc

SEQ ID NO: 4106526 - RNA, 68 nt, Human
gaggcgggagagcgcgcuagggccgagcccacgacccggggccgcuccgcgcuucuccugggacccuc

SEQ ID NO: 4106527 - RNA, 66 nt, Human
gaggcgggcgaaucaugaggucaagagagcgagaccauccuggccaacauggugaaaccccgucuc

SEQ ID NO: 4106528 - RNA, 68 nt, Human
gaggcgggcggaucacgugaggccagaaguuugagaccagccuggccaacauggugaaaccccgucuc

SEQ ID NO: 4106529 - RNA, 80 nt, Human
gaggcggggccuuuucuggaacugucugcguucggguaaucuccccccagaaugcauugcuucugauggggcgccgccuu

SEQ ID NO: 4106530 - RNA, 68 nt, Human
gaggcggguggaucaccugaggucaggaguuugaaaccagccugaccaacauggugaaaccuugucuc

SEQ ID NO: 4106531 - RNA, 68 nt, Human
gaggcggguguaucaccugagguuaggaguucgagacaagacuaggcaacauggugaaaccccgucuc

SEQ ID NO: 4106532 - RNA, 85 nt, Human
gaggcguggggggaugggaaccagggcaugcaggacuguggcagagugcuccucugccaccugugcagccuccauucugggucuc

SEQ ID NO: 4106533 - RNA, 80 nt, Human
gaggcguucgggugcagcacuggggggauucggagcuggacagcccagccacguugccacccgggugacccugagcccuc

SEQ ID NO: 4106534 - RNA, 76 nt, Human
gaggcuaacuuuauacacaaugacuuaagaugucaaggaaaaauuagcuuugauucaaauauuguguaugauccuc

SEQ ID NO: 4106535 - RNA, 75 nt, Human
gaggcuaagaaucuuuuaggggauccugaggguuggugcuuucugcaaaauaccucuaaaaggccuuguggcuuc

SEQ ID NO: 4106536 - RNA, 71 nt, Human
gaggcuaccacagucugccauuagaugguuuuuuaucccuccaucuaagucuuuggaguguggaaagccuu

SEQ ID NO: 4106537 - RNA, 57 nt, Human
gaggcucacgacgggacgaacucaacucaaagaccaguucuguugacugugggcauc

SEQ ID NO: 4106538 - RNA, 55 nt, Human
gaggcucaguuauuuuagccuggggauuuugccuggggaaaaauguaugugccuc

SEQ ID NO: 4106539 - RNA, 81 nt, Human
gaggcucaguuuacaugucuggugaaugagaagaaucaaccuaaguauucauuuauagggcauugaaaacuggcgagccuc

SEQ ID NO: 4106540 - RNA, 129 nt, Human
gaggcuccuuacucuguguguuuaaacaaauuguugcugggauucugcauugcucacaaagauuuuaccaaaauuguuuugauuugauucagauuuggcaauguguaaauuucacuuugagguucccuc

SEQ ID NO: 4106541 - RNA, 85 nt, Human
gaggcucggcaguagggauguccugagacuuggcucggcacugccccaccuccagccaccucuuugucucugccgccucugccuu

SEQ ID NO: 4106542 - RNA, 55 nt, Human
gaggcucucucucugcucgcuggaacggcagcuagaaaacugggaggagagcuuc

SEQ ID NO: 4106543 - RNA, 83 nt, Human
gaggcugcucacugucaucugguagaugaugggauggaaagaacacgucugauuugaaagccaggcugauaugccagugccuc

SEQ ID NO: 4106544 - RNA, 59 nt, Human
gaggcuggcauguggcagcugguucaguggcaacccucagcccagcccagugcccacuc

SEQ ID NO: 4106545 - RNA, 57 nt, Human
gaggcuggggucugccuuucuggaagcuucccugccaccucuugcagcuccagccuc

SEQ ID NO: 4106546 - RNA, 68 nt, Human
gaggcuggucagcccuaagaucccuuuuaacuacaauaaccugggauucuaacuggcuugacaguuuc

SEQ ID NO: 4106547 - RNA, 60 nt, Human
gaggcugguuuucaguuacugaguuggaggggucccugagacagaacugagaacagucuc

SEQ ID NO: 4106548 - RNA, 58 nt, Human
gaggcuuggccaaagugggcgcuucugguucagaaggccuaacuugggggcaauucuu

SEQ ID NO: 4106549 - RNA, 56 nt, Human
gaggcuuuugcuguguuuuccagaguaauuauuuacucugccuuagggggagccuc

SEQ ID NO: 4106550 - RNA, 69 nt, Human
gaggcuuuuuggauccagagaaacuggucagauagggcaggccugaccuacucuggcuuccaaagcauc

SEQ ID NO: 4106551 - RNA, 64 nt, Human
gagggaaagcuccccgaaacccaccucugagguggccaaggagaaugggcaaggggagccucuc

SEQ ID NO: 4106552 - RNA, 99 nt, Human
gagggacaaguggagcugaaguacagucaccccaggagccucugcggauccaugaggagcucuggaggugggagggacuguccuuuggacuuguuccuc

SEQ ID NO: 4106553 - RNA, 57 nt, Human
gagggacagaacugccuugauuccuggugaguuuccaguucauggcuuuagucccuc

SEQ ID NO: 4106554 - RNA, 70 nt, Human
gagggacauacagcccucucccuggugcccucaggcggcagggggaacgggcugucucugcuguccccuc

SEQ ID NO: 4106555 - RNA, 56 nt, Human
gagggacccaggcaccaggcagugaguguggcacugauggcccaccuuggucucuc

SEQ ID NO: 4106556 - RNA, 86 nt, Human
gagggacuaaagaacguugaaugguuaauuuguauucagugcuaucccugcauacagucuucauauuaaguuuuuguugggacuuu

SEQ ID NO: 4106557 - RNA, 69 nt, Human
gagggagagaaggucacuaaggacccacagaugccaaccuugugguguuccggagggccucucucucuc

SEQ ID NO: 4106558 - RNA, 83 nt, Human
gagggagcaggggaccaugaacuuguaugccagacucagggccugggugcccagcucugggcugacaugcucccugcuugcuu

SEQ ID NO: 4106559 - RNA, 96 nt, Human
gagggagccgccuuggccccgccguccugccaugccagcaugcccgucgcccacgggccggcggucggcggcgcgggguuggggauggcgccgcuc

SEQ ID NO: 4106560 - RNA, 69 nt, Human
gagggagcgccuuugccuaccaggccggagaacccuguucuucagucgccuuggcaggggcagccccuc

SEQ ID NO: 4106561 - RNA, 55 nt, Human
gagggaggaauccauccuuuaccaaauaaguggccccaggacacauucuucccuc

SEQ ID NO: 4106562 - RNA, 71 nt, Human
gagggaggccagggaugcaaugagagguggggaggaggggcucacauucuccugaguucccaggucuacuc

SEQ ID NO: 4106563 - RNA, 65 nt, Human
gagggaggcucagagggacuuucaagauacuuuauuucaguuccucuuuugggcucugaccccuc

SEQ ID NO: 4106564 - RNA, 121 nt, Human
gagggcacauguauaauugauuauuagcuaaaggcuauuuuuagauguuugccuauuaccacugaaugcacagauauuuuuaaacauuugagaagccgugcauauauauauauaugcuuuu

SEQ ID NO: 4106565 - RNA, 63 nt, Human
gagggcacugcuuuccuuucaaaauguaggguucaaauccgaugaagggguggcagugugcuu

SEQ ID NO: 4106566 - RNA, 66 nt, Human
gagggcagagcugguguguccuggcaugggggcccgugugcacagagcuccaguguuuuugcccuc

SEQ ID NO: 4106567 - RNA, 81 nt, Human
gagggcagagggaguucuuaaugaugagcaaagcuuuucauuuggaauacugagccacagugagagcuccugaaugucuuc

SEQ ID NO: 4106568 - RNA, 130 nt, Human
gagggcaggauugcucccugguucccaggaacuuuguucacaggguuguuguagugacuuccuuuagucuuugcuucuacucugucagcagaguucugcagcugugggcuucucccaauucagagcccuc

SEQ ID NO: 4106569 - RNA, 57 nt, Human
gagggccucuaccucgagggagugggguguagauuuuuccuggaggugaagguucuc

SEQ ID NO: 4106570 - RNA, 98 nt, Human
gagggccuggccugucugggggaggcuggugacuccugguuccaaugugcucagcucugagccagaggccagccugccucagacggggcauuuccuuc

SEQ ID NO: 4106571 - RNA, 79 nt, Human
gagggcgcgugccaggugccugcgggccgcggcgcaccgagagccuucacgaagcugggcagccuggccgcugccacuc

SEQ ID NO: 4106572 - RNA, 91 nt, Human
gagggcguggcuuucugguaccgugucagaaacccaagcuaucgcgcugagguuccauucuugaucacgugcucaguuuuagcuaccuuuc

SEQ ID NO: 4106573 - RNA, 81 nt, Human
gagggcuacucugugcauuucaggaccugaacauccugucuaauuguguaucauuccaggaguguacaguuccccauccuc

SEQ ID NO: 4106574 - RNA, 57 nt, Human
gagggcuccauuccccgugcccgguguuuccucuggccggauuggcaugcagccuuc

SEQ ID NO: 4106575 - RNA, 80 nt, Human
gaggggaaggguuugaaaaggcagucucauggauaauugauuguauucagugacuuugucccuuucaaauccaacucuuc

SEQ ID NO: 4106576 - RNA, 57 nt, Human
gaggggacaggaguagcauacuucagggcaccaggugcccugagauuccuccuuuuc

SEQ ID NO: 4106577 - RNA, 57 nt, Human
gaggggagaggcuuauggaucaagucccauauucuugcugcuguaaucucucuccuu

SEQ ID NO: 4106578 - RNA, 61 nt, Human
gaggggagggagaagagaaguaagagauaagagcuaucucuaaaugcucucccauccccuu

SEQ ID NO: 4106579 - RNA, 82 nt, Human
gaggggcagaggugccagaugcacagcugaauugagcagagcuauuucagauguucagucuguuccuacacuucugcuccuc

SEQ ID NO: 4106580 - RNA, 66 nt, Human
gaggggccgaaucaguguguaaaguggcugccuaggcuggggcagcacugggugcugaaguccuuu

SEQ ID NO: 4106581 - RNA, 60 nt, Human
gaggggcuccuuugugcugcguccacugcaucugcggcagacauugcaugguggccucuu

SEQ ID NO: 4106582 - RNA, 55 nt, Human
gagggggaaagucccuggagucaggcuguggccuuucucccccagcuucccccuu

SEQ ID NO: 4106583 - RNA, 79 nt, Human
gagggggcggguuccugggggccaggccagggcagcauguggggcuuuccuggaggguccccagcagagaagcccucuc

SEQ ID NO: 4106584 - RNA, 62 nt, Human
gagggggcgugcaaggcuccgccggcccccccgcagcccgcgcccgacuugggcgcccccuc

SEQ ID NO: 4106585 - RNA, 95 nt, Human
gagggggcucaugguauuuuagacaggggcaaaauaagggagauugagaaaaacaucugucuuggccuccugcugcugcuauaacgaauucucuc

SEQ ID NO: 4106586 - RNA, 69 nt, Human
gagggggcucugucaaccaggggacacuaguggggacagguguguagcuccuggcugcagggccuccuc

SEQ ID NO: 4106587 - RNA, 68 nt, Human
gagggggguggaucaccugaggucaggaguucgcaaccagccugaccaacauggugacacccugucuc

SEQ ID NO: 4106588 - RNA, 56 nt, Human
gaggggguagcccugcaggcgcuggcuucugccugcuggcuuccagcugcucccuc

SEQ ID NO: 4106589 - RNA, 55 nt, Human
gagggggucuccuaucauggaagaacugccuuguuugccuuuuggggauccccuu

SEQ ID NO: 4106590 - RNA, 82 nt, Human
gagggggugcccacagcaggaagcuggagggaaaucucacuguuguccccuggucucucucuaucucauccucugcccccuu

SEQ ID NO: 4106591 - RNA, 59 nt, Human
gagggggugguggccuuaggagcugaacuuagaucuucugcuccaaauacuuuucccuu

SEQ ID NO: 4106592 - RNA, 62 nt, Human
gaggggugaguggauaaacaaaaauguggucuauccacacaguggaguauuacucagccuuc

SEQ ID NO: 4106593 - RNA, 57 nt, Human
gagggguguggagccaucaguuagcaaauauaggggaacuggagcugcacaccuuuc

SEQ ID NO: 4106594 - RNA, 71 nt, Human
gagggguguguguguguguguguguguguguguguguauguauauguauaugugugcacgcacagccucuu

SEQ ID NO: 4106595 - RNA, 61 nt, Human
gagggguucccuuccugagauacuauuccuuuucaccugucuuagaaguggcuauuuccuc

SEQ ID NO: 4106596 - RNA, 68 nt, Human
gaggguaaagaagggccagcuggacaccugggucccucuaucugcuucugaggcccaucugcaucuuc

SEQ ID NO: 4106597 - RNA, 64 nt, Human
gaggguaauauugcuggaaaauggugugaucaaauugauuucucaguaaucucagcaauuccuc

SEQ ID NO: 4106598 - RNA, 81 nt, Human
gagggucagacuucuacagaggacacaaagaucuuuugaaccaucgaaggcaucaaucuccccucuggaauccagcuccuc

SEQ ID NO: 4106599 - RNA, 91 nt, Human
gagggucaguguuugaucucugcucuggugcugggcaggggcuuaggaguugagccaaaggcaccagagacacuuggcagaaauggcucuc

SEQ ID NO: 4106600 - RNA, 61 nt, Human
gaggguccaacugaggcugaacugagcgugaacuacauucagcggccuaggcagugcccuc

SEQ ID NO: 4106601 - RNA, 57 nt, Human
gagggucucuuaaugccagggguuugagaccagccugggcaacauagugagacccuc

SEQ ID NO: 4106602 - RNA, 86 nt, Human
gagggucuugcagagauaugugugcaucaagcaggaauaagaagcacuuaccugagcccagugcagcauauucugaacagauguuc

SEQ ID NO: 4106603 - RNA, 110 nt, Human
gagggugagugauauuuauugagcaccuacuguauuccaggaacuguguagacagucucaugugcaaaucuggaugugcugggugucuguacacauugucauucaucuuc

SEQ ID NO: 4106604 - RNA, 84 nt, Human
gagggugcccguaggauuaacugggaagggugaaauaucugauaauuuuucagucauuacggacuaguacuaccaaggccccuu

SEQ ID NO: 4106605 - RNA, 63 nt, Human
gaggguggcauagauugcgggguggaugccuggucugggcuucaccugugcacucuaccccuc

SEQ ID NO: 4106606 - RNA, 63 nt, Human
gagggugggggcaagcaggggagcuggguuccaaccagcuuguuaaacagccuccacugccuc

SEQ ID NO: 4106607 - RNA, 56 nt, Human
gaggguggguuucuugcacgucggccuuucuucuggucagcguguccccgcgucuc

SEQ ID NO: 4106608 - RNA, 61 nt, Human
gagggugugcuguguacuuggcaaugggaaaacaaccaugaacaagacaaagcccaucuuc

SEQ ID NO: 4106609 - RNA, 62 nt, Human
gaggguguggaaguuaguaagagggaccuggugaagguccaaaggggcaguguccagcccuc

SEQ ID NO: 4106610 - RNA, 72 nt, Human
gaggguuagaggauggagaugaggaaaauuagaaacccucuugucuacucacaucucuguuuucuaaaucuc

SEQ ID NO: 4106611 - RNA, 84 nt, Human
gagguaaugagagcuaacauugauucagugccugcuauguuuugcacuguuagguacuuuacauguuaucucauguaauaccuc

SEQ ID NO: 4106612 - RNA, 83 nt, Human
gagguagaagucuauuugcuguccgagcaacagguguuccgaagguucccucuugcucuggcaaguaaagauuuuguuuccuc

SEQ ID NO: 4106613 - RNA, 56 nt, Human
gagguagagaugugaaucagacaaguccuuaaaugcaugauucaucuaacugccuc

SEQ ID NO: 4106614 - RNA, 99 nt, Human
gagguagaugaccuauuccaagacuucaagaagagcuucuauuaaguauggguaucuucuaugaaucauuggaacagggcacacaaggucagcuaucuc

SEQ ID NO: 4106615 - RNA, 63 nt, Human
gagguagcgugcagggcccgaagugcgcuguuucguaagguacccucccugcacccuacucuc

SEQ ID NO: 4106616 - RNA, 68 nt, Human
gagguagcucagggucaucuugcaugggaaaggagcuugccaagaggguugcccugagcguguuccuc

SEQ ID NO: 4106617 - RNA, 99 nt, Human
gagguaggagaaucgcuugaacuugggaggcagagguugcagugagcugagaucaugccacugcgcucuagccugggagacagagagagacuccaucuc

SEQ ID NO: 4106618 - RNA, 69 nt, Human
gagguaggagacuuucuggcagaucagccaggccaccuucacacuguccagucagaacgucauuaccuc

SEQ ID NO: 4106619 - RNA, 55 nt, Human
gagguaggcugugaaagggggugggaacacaccuucuggaaccacugucuuccuu

SEQ ID NO: 4106620 - RNA, 60 nt, Human
gagguaguaagcagagugggguuaaaagcuguauuuccugacucuguaccugucugccuu

SEQ ID NO: 4106621 - RNA, 73 nt, Human
gagguaguuccuuccucuacuaugugaggacucagugagaaggugccauccaugaacgaggaagugggcccuc

SEQ ID NO: 4106622 - RNA, 78 nt, Human
gaggucacacagcaaugggcagaguggggacaggaaccaguguguccugccagcuuucccccaccacugaauggcuuc

SEQ ID NO: 4106623 - RNA, 78 nt, Human
gaggucagaaaaggagagcauuguucuuuucagcccaguagagauaguggaguucaaucaccucuccuuucugagcuc

SEQ ID NO: 4106624 - RNA, 61 nt, Human
gaggucaggcuugcagcagggucggcuggcuguguuugggugugcugugagccguggccuc

SEQ ID NO: 4106625 - RNA, 56 nt, Human
gaggucauguggcaggcagccagugugccucaagggccccugccugcucugaucuc

SEQ ID NO: 4106626 - RNA, 73 nt, Human
gcaaguuucaaacggugcagcaguuuguucagcuuccacugaagggagcauagaaagcuauacugaaauaugc

SEQ ID NO: 4106627 - RNA, 103 nt, Human
gcaauaaaacagguuuaugcaggaggaugcauagugaagcugacagaagugacauuugcugucagaaccuucaggugcuuuucaaagcucacccuuaccuugc

SEQ ID NO: 4106628 - RNA, 129 nt, Human
gcaauaaaacugggucuugaagugaugaagacaaguaggaaugguugaaguuguccaaaacauuuuauguuaucuuuaguuaugauucucugcucuucauuuuuauaaagccauuaauauuuuuguugc

SEQ ID NO: 4106629 - RNA, 100 nt, Human
gcaauaaaguguaauuaaauaauaguuggggugcaguuacauuuuaagucagaaacuugaaauguaguccugccuucacuguguuuugcaaaauuauugc

SEQ ID NO: 4106630 - RNA, 62 nt, Human
gcaauaaauaggucccuguagcaucauuuuaaauggcuguguaggauccuguuguauuuugc

SEQ ID NO: 4106631 - RNA, 119 nt, Human
gcaauaaauauuauuaggcuagugccccucuguacauauucaagcacuucuagaagauaaguuccuggaagcagcauuaaugaguuagcgguggcuacauaugccguggugauagcugc

SEQ ID NO: 4106632 - RNA, 103 nt, Human
gcaauaacguauauguguguugugugugcaugcauagacaccacacaauacauauguguguguugugugugcaugcauagacaccgugcaguaacauaggugc

SEQ ID NO: 4106633 - RNA, 56 nt, Human
gcaauaaguuuucucuucugucaagauagugcuaauggaagggaagucuugguugu

SEQ ID NO: 4106634 - RNA, 59 nt, Human
gcaauaauuuuuacaugaaauaaugacuguuucaguuauucagcagugggauuuguugu

SEQ ID NO: 4106635 - RNA, 66 nt, Human
gcaauacaguugaagagauugaugguucuuaugaauuguuugccuuuucuuuucaauggcuguagc

SEQ ID NO: 4106636 - RNA, 86 nt, Human
gcaauauggaggucauugcugacuucaaccccucuucccuuucugccaugaguggaaggaagcagccagagacccucaccagaugc

SEQ ID NO: 4106637 - RNA, 70 nt, Human
gcaauauuguguuauuuuucuaaguaucuauuuuuguuguggauaagaaaauuguaauaacuguuauugc

SEQ ID NO: 4106638 - RNA, 65 nt, Human
gcaaucaaugauuuauauuuguaaaguggguagaaacaguccuagaacaauaacucauugauugc

SEQ ID NO: 4106639 - RNA, 109 nt, Human
gaugcuugggacuuuuaaccaugacuucauugcucuugaauauggguuucaugcaucugguugcuuggcuguuuucagaaaguagggguaacagucccaucaauguauc

SEQ ID NO: 4106640 - RNA, 76 nt, Human
gaugcuuucaucuggaauuuauguuauaggaauuauguauuuuuuauuaagauuuuuaauuucagguaaaaguauu

SEQ ID NO: 4106641 - RNA, 101 nt, Human
gaugcuuuggagucuuguguguaccuugccaauguauagagauagcugugugugucucaccacaccaugagcuuccuauauagggucacuucuaauucauc

SEQ ID NO: 4106642 - RNA, 72 nt, Human
gauggaacaggugugggcagaauugaaucuuuaaacauguuaacuguuuaugcucaucucauuugucccuuc

SEQ ID NO: 4106643 - RNA, 72 nt, Human
gauggaauaaggcagaaauagggaaagugucagacccaagacaacuuuccucuccaucucugcuuggccauu

SEQ ID NO: 4106644 - RNA, 58 nt, Human
gauggaauaugaauuacaguauaugagcaaggcuauuauauugugauagguguuaauc

SEQ ID NO: 4106645 - RNA, 102 nt, Human
gauggagaaggcucuggcucauuuccuccugagaggcccccgguagagcaguccacugggcuucugaaggcuccucaggaaagugcacaguuuguauuuguu

SEQ ID NO: 4106646 - RNA, 55 nt, Human
gauggaggaaaaguuggaaugcagccucuggugcuguuugagcgaucccucuauc

SEQ ID NO: 4106647 - RNA, 96 nt, Human
gauggaggagucugaacuguugaagugugagcuugcaaugguaugauuuauuuuccccaauugcugcuuucauuuauacaguguaggcccucuguc

SEQ ID NO: 4106648 - RNA, 55 nt, Human
gauggaguggggacugcaguggaacaaagacagaugauucauucaccacuucauc

SEQ ID NO: 4106649 - RNA, 92 nt, Human
gauggagugugguucaggagguuuggauucaguuauauuauuuucauaugacuuaccauuuuaacuuccuuagggaaucacuuaaauuaguc

SEQ ID NO: 4106650 - RNA, 119 nt, Human
gauggaucaaccagagaaccaggcgauguaaagaucacgucccaggacucgguggcugggccugagccaaggggacagugacacauuucuucacugcugcacuggccuugggaucuguc

SEQ ID NO: 4106651 - RNA, 55 nt, Human
gauggcagauggcuggagcaggucucccggagaugagugacaucauuaugcuauc

SEQ ID NO: 4106652 - RNA, 67 nt, Human
gauggccaagguguucugauaugccaggcacacucagcacgaggcacgacaaagacacuuugccauu

SEQ ID NO: 4106653 - RNA, 89 nt, Human
gauggccauccuuguucuuccucagcagggcugccugaguaucuuugagaaaugcccaaggguccucuugaggaaggggaucguccauu

SEQ ID NO: 4106654 - RNA, 78 nt, Human
gauggccauugcugguguaagccccuguuuuggagccauuugcuccucagcaguaaacguccggaacauggguccauc

SEQ ID NO: 4106655 - RNA, 80 nt, Human
gauggcccaagaggcuugguggugggagagcuuucuggaacugcacuggcucuagguucucacccuccucucuggccauc

SEQ ID NO: 4106656 - RNA, 121 nt, Human
gauggcccucuccccuggcacuuugaaucuccagcagcaaugaacagucuguaccugcauccuggccucagcugugauuccugcuguccagccuucugaagugcccuugguugguuccauu

SEQ ID NO: 4106657 - RNA, 58 nt, Human
gauggccucauggcugcaggcccacuucuagucggcuuagcaacuccugaggcucguc

SEQ ID NO: 4106658 - RNA, 56 nt, Human
gauggccuggggagaauuuucucaugaagggauaagaaaauagccccaggcucauu

SEQ ID NO: 4106659 - RNA, 57 nt, Human
gauggcuaacauagaaaauuacagcaauacaaagguaauugaagauguggagccauu

SEQ ID NO: 4106660 - RNA, 78 nt, Human
gauggcuacagugcagagugucuguggacugaaguaauaaccugagcuccuuggccaucgagacucauguacaucauc

SEQ ID NO: 4106661 - RNA, 61 nt, Human
gauggcucagauguuggcugugcagacuccuauggccauagccuagcugugugaggccauc

SEQ ID NO: 4106662 - RNA, 70 nt, Human
gauggcucugccaccuuucccuaagagguccagaagaaaucuuuuacuuggaaugggaggcagaggcauu

SEQ ID NO: 4106663 - RNA, 68 nt, Human
gauggcuucccaguugccaaacuccaaccauccccaagucuuuggagucauuggccugggugacuuuc

SEQ ID NO: 4106664 - RNA, 71 nt, Human
gaugggaaacaaaccuucccuauacgucuucaucuuauuaucacugaagaguguguguguuuauuccuauu

SEQ ID NO: 4106665 - RNA, 58 nt, Human
gaugggaaggaauauagaauuccuuucagacagaaaccuuuuaugucaccuuccuguc

SEQ ID NO: 4106666 - RNA, 82 nt, Human
gaugggacagugcuccacgcuuggcaagacuuuugguaucuaugacuccuugggcucuaaaugccagugacacugucugguc

SEQ ID NO: 4106667 - RNA, 82 nt, Human
gaugggagaucuuaacuguucucacaguggcugguagagaggccuuggguucagcuuuugucagaaauuguaagaauucauc

SEQ ID NO: 4106668 - RNA, 116 nt, Human
gaugggaguggcucucaguggaaggggagcuggaaaggggaugguaugggaagaaggggaucuuuuccugaagcccagcugucuccagccaggcuccucuccaaagucaugccauc

SEQ ID NO: 4106669 - RNA, 68 nt, Human
gaugggcauaggaagaaaccuugacccuuuugaaacugaacuguaaagcaucuuuuccuagcuccauc

SEQ ID NO: 4106670 - RNA, 108 nt, Human
gaugggcgugaugagucagugaugucugccaggguccugggaacagagaguugggcccauggaccagguagguuccaucccugcuuucuuuuguaguuaaagcucauu

SEQ ID NO: 4106671 - RNA, 77 nt, Human
gauggggagacugagacccagugggggccugaucugucuaaagccacacacagacagccgcugguguccgccccauc

SEQ ID NO: 4106672 - RNA, 108 nt, Human
gauggggaugcuguauccagagagaggagagagaugacuuuagggagaggugguguacccucugagaggcacacuuugagaacuacuuucucugcgcaaguuuucauc

SEQ ID NO: 4106673 - RNA, 72 nt, Human
gauggggcugcugugccaugacccugugggcucacgggcagugcuugugggccucaugcccagccacccauc

SEQ ID NO: 4106674 - RNA, 87 nt, Human
gauggguauucuacucugaaugugcauguaaaucaaugcauuacuuuuguagaggauaagucugcauauucagugugaccucucauu

SEQ ID NO: 4106675 - RNA, 70 nt, Human
gaugggugaucaauguuuugauagcccagagacacaauguuccuucugcguuaugaacuugucaccccuc

SEQ ID NO: 4106676 - RNA, 72 nt, Human
gauggguguuucucugucaguauggaaaggccccaccagcaaggugggccagccuacugcuagaccccuauc

SEQ ID NO: 4106677 - RNA, 58 nt, Human
gaugguacauaguuuaaauaaggcagacuuauaucuugucuaugaucugugugcuauu

SEQ ID NO: 4106678 - RNA, 76 nt, Human
gauggucacaccuguucucaucccauucagugucuuuauugcacucaggaguaguucagcagcuguucagaccauu

SEQ ID NO: 4106679 - RNA, 92 nt, Human
gaugguccaguucacagccacaucagguaauaggcucuuuuuaagaaacuugacaugcuuguuuuccuugaagugcacuugaacugucuuuc

SEQ ID NO: 4106680 - RNA, 55 nt, Human
gauggucuuugucucugauaagaaguucaccagcaucuuagggauaaugacuguc

SEQ ID NO: 4106681 - RNA, 55 nt, Human
gaugguggaaauaaacauccaauucugcacagaguuuuguuuguuucucacuuuu

SEQ ID NO: 4106682 - RNA, 55 nt, Human
gauggugucuuuuaauuccagggagguuucugugagcugaaucagagauauuauu

SEQ ID NO: 4106683 - RNA, 58 nt, Human
gauggugugaggcaauuguagcuuugaauuagguuagaguggccuacucacacucauu

SEQ ID NO: 4106684 - RNA, 56 nt, Human
gcacagccuugcccugugcccugggcccuguucuuuggcugcugguuuggcucugu

SEQ ID NO: 4106685 - RNA, 76 nt, Human
gcacagcuugaauaguucuuuuaucugcuugguaccaaagccaaaauccugguauacaagagcaauuuaggggugu

SEQ ID NO: 4106686 - RNA, 72 nt, Human
gcacagcuuuuccacggugguacuggggagaggccuggccugcuccagggccuccaguggggaggaaguugc

SEQ ID NO: 4106687 - RNA, 61 nt, Human
gcacaggaagcaagccuggggccccaccccugucuggcccagaagcacugcucuccugagu

SEQ ID NO: 4106688 - RNA, 83 nt, Human
gcacaggaguaugcgcccagcagcugggaaggaggcugaccucagacgguggccuguggaucccagcucugucauuuccuggc

SEQ ID NO: 4106689 - RNA, 83 nt, Human
gcacaggcucagaaaggucaagaaacuugcucacggucucacagcuggugaguagguugucagacuccaaagaugugugcugc

SEQ ID NO: 4106690 - RNA, 71 nt, Human
gcacaggcucuaaguaaauagcuuaaagaauuuaugagcaucacuuucugcauuuauguauagcuuguugu

SEQ ID NO: 4106691 - RNA, 67 nt, Human
gcacagggaccuuggaagcuggaaugacacuuuggaguuguuccauuuggaacaagagucucugagc

SEQ ID NO: 4106692 - RNA, 70 nt, Human
gcacaguaagucaacaaacaugggggcggagguacaagacugaauacucccauguuuguuguugcugugc

SEQ ID NO: 4106693 - RNA, 69 nt, Human
gcacaguaggucagcaugagagcucaucucacuuccaguuuuacuccaccaugcugccuccauugaugc

SEQ ID NO: 4106694 - RNA, 56 nt, Human
gcacagucucgaagccaagcuccagcacgcuggggcacucggccgugaacucgugc

SEQ ID NO: 4106695 - RNA, 63 nt, Human
gcacagucuugagcaucagccagaccaguguucacauccuggaucugccucuuaggucugugu

SEQ ID NO: 4106696 - RNA, 86 nt, Human
gcacagugaggacuugaagcaggauggcuugcaggaggcugugagaguuggagccucauggucauuccuuuggagccucagugagc

SEQ ID NO: 4106697 - RNA, 75 nt, Human
gcacagugaguuacucugguucucauuuagacacacuaaauucuaaauaccacaugcauagcucauuuuaugugc

SEQ ID NO: 4106698 - RNA, 57 nt, Human
gcacaguuagccuauccugguucaacuccugaaugaaggauuuacuauuaacugugu

SEQ ID NO: 4106699 - RNA, 61 nt, Human
gcacaguuuaugaucucagugaaauguuauagaaccauugcaaugauuauaaagauugugc

SEQ ID NO: 4106700 - RNA, 83 nt, Human
gcacauaauaggcauucaacaaauguuugugguugaugauacugcuacuagcagcuacuguugauugaacaccuauugugugc

SEQ ID NO: 4106701 - RNA, 60 nt, Human
gcacauacccacugucaagcacaguaacugucauuuagcaggugcucaguacguauuugu

SEQ ID NO: 4106702 - RNA, 69 nt, Human
gcacaugacacuauuuuguucuauuuuuggugauguuaacauuggucucuugguuaaaauagugucugc

SEQ ID NO: 4106703 - RNA, 55 nt, Human
gcacaugcaguuuacgucacugaccacuguuggucaaaacaaucauuggaugugc

SEQ ID NO: 4106704 - RNA, 74 nt, Human
gcacaugcuauauguauauguuuccauuuuauaaaauucuaggaaaugcaaauuaacauauaguagauuagugu

SEQ ID NO: 4106705 - RNA, 56 nt, Human
gcacaugucuuauucacuguuauguccuguuggauacacagugccuaacacagugc

SEQ ID NO: 4106706 - RNA, 75 nt, Human
gcacauucauccauagcuugaucuguucccuuggagcaaggaaggggaacugaggaacgaacugggaaaaugugc

SEQ ID NO: 4106707 - RNA, 61 nt, Human
gcacauucuagaagagcuucacuugucacucuauacaggaaugaucuguuuuagaauuugu

SEQ ID NO: 4106708 - RNA, 58 nt, Human
gcacauuuagagguuagcaugguauuuugcagauaccuugaguuagcacugaauuugc

SEQ ID NO: 4106709 - RNA, 58 nt, Human
gcacauuugacaccugggcauugguagauuuaaagagcuccaggugauuguaaugugu

SEQ ID NO: 4106710 - RNA, 58 nt, Human
gcacauuuuuacugccaacuuaaaaccauuuuuugaaguauggaauguagaagugagc

SEQ ID NO: 4106711 - RNA, 126 nt, Human
gcacauuuuuguucccuucuggcaguuaauuggucuguguuuucugcaggugauuugugugggucagauuuucugcacuguggcugcugacaaacaugaucaugccaagcaggccacaaaaguggu

SEQ ID NO: 4106712 - RNA, 70 nt, Human
gcaccaagauugagaaacucuggguuagaaucuucuucgcugacuuugaccacucuuucucagccuuugc

SEQ ID NO: 4106713 - RNA, 79 nt, Human
gcaccaccacacccagccauguucaguucucuagaguauauaccuagaaauggaauugcugggucauauggugaacugu

SEQ ID NO: 4106714 - RNA, 63 nt, Human
gcaccacuagaguagagaugguuuuuuggcuuacuauuccauuuccagugucuaggauggugu

SEQ ID NO: 4106715 - RNA, 77 nt, Human
gcaccagcaucaccuggaggccugcuggaaacgccuaacuucagguccuaccccaggccuucugaguuggaaucugc

SEQ ID NO: 4106716 - RNA, 56 nt, Human
gcaccagccugagccucuugcagcacagagcagcuggaagagagaagugcuggagc

SEQ ID NO: 4106717 - RNA, 59 nt, Human
gcaccagcucuccaccagguuucuagcccugggcacacagagaugggugaggcaggugc

SEQ ID NO: 4106718 - RNA, 79 nt, Human
gcaccaggccuggcugggcagccacaggcccaggaagaaagcagggccgcagcgugggguccggcacuggggccugggc

SEQ ID NO: 4106719 - RNA, 72 nt, Human
gcaccaguguggaauauacucagaacaggcuccucugagggauggggagcucugguauuucuuuaauccugc

SEQ ID NO: 4106720 - RNA, 68 nt, Human
gcaccaugacagugaggagaacggagcacaguuccuuccgugccuccugccggcgcugcucaaggugu

SEQ ID NO: 4106721 - RNA, 77 nt, Human
gcaccaugagggaagacucaggucaugauuucaaggacauucauuccuucagagaugacaccugguguuuccucugc

SEQ ID NO: 4106722 - RNA, 81 nt, Human
gcaccauuugucuagaagucugguugcaaagcgcuggcggcugcaagugcuuauaccaaagacucuuagcuccaguggugu

SEQ ID NO: 4106723 - RNA, 76 nt, Human
gcaccauuuguuagcugugcuuuagccuucuguggagauuacgacuggaaaggcuugagacauugaugacugguuc

SEQ ID NO: 4106724 - RNA, 56 nt, Human
gcacccaggcuugggcagcaacugcugugugccauuguugugcugggcuuggcugc

SEQ ID NO: 4106725 - RNA, 69 nt, Human
gcacccauugugugcagcucugcccucaucuacccaucucuggcuauggagcuacaugcagugggucgc

SEQ ID NO: 4106726 - RNA, 98 nt, Human
gcaccccuuccucaagaugacugacauuuauuagaaaacuaucauaguaacuauccacacaaugacuaugaggugaauggugucccuggaagcugugc

SEQ ID NO: 4106727 - RNA, 84 nt, Human
gcacccggaacuugauccugcuggguacuacuguaugaggcgugauucagaggugucccagcagaggggcgagggagcuggggu

SEQ ID NO: 4106728 - RNA, 61 nt, Human
gcacccucgggcccgcggacaaaggguuaacgcguuggcagugacugcgggccccggaugu

SEQ ID NO: 4106729 - RNA, 60 nt, Human
gcacccuuuuaagcagaagaaaagcaagcaucauuuacauuucugccugcuuguaggggc

SEQ ID NO: 4106730 - RNA, 79 nt, Human
gcaccgacuggccucaggccucugccucauugguggucggguagcggccaguagggcgugggagccuggccaucccugc

SEQ ID NO: 4106731 - RNA, 58 nt, Human
gcaccucauuuugcagguagaagcauaaggaaugaugaugucaccaugugugaggagc

SEQ ID NO: 4106732 - RNA, 69 nt, Human
gcaccuccccacaugguagugaguauccuguccuaaaagcaacucaaaaaagccauuuggugggugugu

SEQ ID NO: 4106733 - RNA, 59 nt, Human
gcaccugccugggacugaagauacaagaaagauucaguuuaaaauuaugaggugggugu

SEQ ID NO: 4106734 - RNA, 55 nt, Human
gcaccuggcugcccagguggagagcacauugccccgccgcuuggcaguaaggugu

SEQ ID NO: 4106735 - RNA, 64 nt, Human
gcaccuggcugugaagccuggguuucuuccuccugggaugugcacugggcucucagcaaggugu

SEQ ID NO: 4106736 - RNA, 77 nt, Human
gcaccugggcaggccggacgcuggggacaauggcuaugcucuggcgcugcagcccggccucccgccugcccgccugc

SEQ ID NO: 4106737 - RNA, 92 nt, Human
gcaccuggggcuuugcaggguuuagcaccuguagcugcucucaugggcugggcugguguugagugccuguagcuuuuccguacauggggugu

SEQ ID NO: 4106738 - RNA, 80 nt, Human
gcaccugugauauagcugacgcuaaauaaauguugaauuugaaugaaaaugcacuacguugugucggcaguauucagguc

SEQ ID NO: 4106739 - RNA, 78 nt, Human
gcaccuguuuguguuuggacugcauuucaguggcuagcacaguuccuggggugccccggauaugugucaagcaggugc

SEQ ID NO: 4106740 - RNA, 91 nt, Human
gcaccuucucaugccaggccccacgcugggcaggggagccagagaugccacccucgcccaccuguggccccagccuggcuggagagugugu

SEQ ID NO: 4106741 - RNA, 103 nt, Human
gcaccuuguggugaugaagcaguucuggauauggauuuuggugacguguacacauucuaugugaucaaauugugcagaauuauacguccacacacaggagugc

SEQ ID NO: 4106742 - RNA, 77 nt, Human
gcacgaacgggaucuucuccgaguccugcagcagcugccagcggcggcccaggcgcuuggagaucucggcguugugc

SEQ ID NO: 4106743 - RNA, 65 nt, Human
gcacgaaggcagaugagaggagcaggcaggggcgagcccgccugggaacucugaucuccugcugc

SEQ ID NO: 4106744 - RNA, 59 nt, Human
gcacgcacccagccagcaucucagagcacuccugugugcugccugagcugggugcuggc

SEQ ID NO: 4106745 - RNA, 84 nt, Human
gcacgccaagcggggcuggggugcauccugggcaggggacugaaauguaccugucaggguuugccucagaagugccuggugagc

SEQ ID NO: 4106746 - RNA, 55 nt, Human
gcacgcgcgcgggcggggccuggcgcuccuccccggucccgcccacugagcgugc

SEQ ID NO: 4106747 - RNA, 93 nt, Human
gcacggagugggcuuccaggucacagagaaauguggcacaaacgguugcaaucuuuugaguuuccuuuuuuuugagaugaagucuccuuuugu

SEQ ID NO: 4106748 - RNA, 86 nt, Human
gcacgggaggauaaugcuaaccuguggacauugcuguugcuucagaggcaugcugcagugaaaucaggaagcaaucccaaccuggc

SEQ ID NO: 4106749 - RNA, 70 nt, Human
gcacgggagguggucgaggagggguacccugguuccagggguccccaaacaggcuugagcaucuaccugc

SEQ ID NO: 4106750 - RNA, 82 nt, Human
gcacgggcccuagaguuagcuucauauccagacucuaccacuugcuguaugucccugggcaaguuuacucuucucucugugc

SEQ ID NO: 4106751 - RNA, 86 nt, Human
gcacguggcgguggcgacgcaggcacgacguguugcggaaggccuugccacacuccccgcaggcguagggccgcucgccagagugc

SEQ ID NO: 4106752 - RNA, 66 nt, Human
gcacuaaacuaggcugggaagaaagauucucggggcagaauucugaaaucuuugccuuagcugugu

SEQ ID NO: 4106753 - RNA, 78 nt, Human
gcacuaaagccaggauugguucccaggcagguggagguagauuccauacaccagguuaccaaucacugcucuaguugc

SEQ ID NO: 4106754 - RNA, 115 nt, Human
gcacuaaauuuuucuccuuccucacagcuugggcuuuaucaugggucuggugccuccaaaauggaccuggccaugguacggagcagcgguggcaccugguggaagauucuggugc

SEQ ID NO: 4106755 - RNA, 84 nt, Human
gaugguuuuugaaggugggggagacuuggucaagacucaacucuugguucugucuguucucuacaggacuucaagaggcugauc

SEQ ID NO: 4106756 - RNA, 64 nt, Human
gauguaaaugaauuuugucuggaggaaauaaaacaauucuccuucaagaagguacauuuacauc

SEQ ID NO: 4106757 - RNA, 71 nt, Human
gauguaagacuccagguaggcacauugacauuuucuagacaugaauguuagagcccacgugguccaauauc

SEQ ID NO: 4106758 - RNA, 81 nt, Human
gauguaagauucaaggcuaaacuuucagaguaugugaugauuuggggcuugauuuacugcucuuuggccuugguuuguuuc

SEQ ID NO: 4106759 - RNA, 89 nt, Human
gauguaaucuuggugucuaaaaugcagagagagauuuugguguauaauggcacugguuugucuauugucauucagacacaagcugcauc

SEQ ID NO: 4106760 - RNA, 115 nt, Human
gauguacaggaaauggauauagugcuguggauacugagagauccuccagccuggaaguuggcugcccucaaaaugcaucucguuaccauagccuugucccuuuguucuugucauc

SEQ ID NO: 4106761 - RNA, 73 nt, Human
gauguacucugugacugauggaggcuuuugaguuaacacucugcaggaagcugacagggcacagguuacacuc

SEQ ID NO: 4106762 - RNA, 63 nt, Human
gauguagagcauuuggauuuaguagucccucuagagaaaugaccagaugcaaaugcagacauu

SEQ ID NO: 4106763 - RNA, 77 nt, Human
gauguagagggaagauuuuaaacaucaagagcaacacugauuugcacaaaccuguguagaucuuccucuucugcauc

SEQ ID NO: 4106764 - RNA, 59 nt, Human
gauguaggagugaauuaauucauccaaauuuauggcuagaauuauauaacuccaacauu

SEQ ID NO: 4106765 - RNA, 94 nt, Human
gauguauuauagguuggugcaaauguaauugcgguuuuugccauugaaaguaauggcaaaaaccgcauuuacguuugcacuaaccuaauauauu

SEQ ID NO: 4106766 - RNA, 62 nt, Human
gaugucacuuaaccuuucugagcuugaguauucugagcuacucauucuuguuaagugucauc

SEQ ID NO: 4106767 - RNA, 78 nt, Human
gaugucaucacauuuaugagcaccuuggcccagagcaugggcucugacaccagacagccauaguucaguccuggcauu

SEQ ID NO: 4106768 - RNA, 56 nt, Human
gaugucggugcaggagcugaaggugaguggagugcugccaagaauaugcccgacuc

SEQ ID NO: 4106769 - RNA, 82 nt, Human
gaugucuaaauguagguaaguucguagauuugcuugccuuuaugagaaggccugagucuuuagaauucuaacuuuuuacauc

SEQ ID NO: 4106770 - RNA, 57 nt, Human
gaugucuacugguacauguuaagugauuuccggaucacauauguagaaguggaauuc

SEQ ID NO: 4106771 - RNA, 98 nt, Human
gaugucucucagucuuaguuuccuuaucuguaaaauggauacaaugucaaguagcaaugacuuggaucugcagugggaauuaagucugauuaugcguc

SEQ ID NO: 4106772 - RNA, 57 nt, Human
gaugucugccaaagaaucaagcuucaugcugugcuugauucagaccugucagacuuc

SEQ ID NO: 4106773 - RNA, 78 nt, Human
gaugucugucacaggugcgggguaguagcuagcagauauuuguucuguguuugccauccuugcuccaggacaugcauu

SEQ ID NO: 4106774 - RNA, 61 nt, Human
gaugucuuagguaacauucuauugcagaucucugccuucggagcaguaacuugagaugauc

SEQ ID NO: 4106775 - RNA, 67 nt, Human
gaugucuuggucaacuugggcugccauaacaaauagcacagacuggggggcuuaaacaacagacauu

SEQ ID NO: 4106776 - RNA, 55 nt, Human
gaugucuuucugugugccuagagccuggaacaaugccuggcacguagaagccauu

SEQ ID NO: 4106777 - RNA, 57 nt, Human
gaugucuuuuuccaggcucuuuugcuuuauagcaauagacccaagaguaaaggcauc

SEQ ID NO: 4106778 - RNA, 99 nt, Human
gaugugaauucuuaugucuauuucugcaggaugcucugguggugcugugacaugccaccugcacccuccuccuucaggacagacguucucauucccauc

SEQ ID NO: 4106779 - RNA, 76 nt, Human
gaugugaccuuucuugucuucuugggauuuuccuguagucaaaaaaggaaggugucacugggacaggaaagacauc

SEQ ID NO: 4106780 - RNA, 66 nt, Human
gaugugagggauaauaugcgggguuuuuuguguuguacuuagccacugcauguuuauuugcgcauu

SEQ ID NO: 4106781 - RNA, 112 nt, Human
gaugugcuagaggaugaugaugauggugcugauaguaacaauaauaacuaugacauguauauagaguauuacaauuuacauugcacuuucagacacauuaucucuuucaauc

SEQ ID NO: 4106782 - RNA, 130 nt, Human
gauguggagaaacuggaacccucauacacugcugguggaauuguaaaauaguguggccgcuuuggaaaacagucuggccauucaucaacugauagccauagaguuaacauaugacacagaaauuccacac

SEQ ID NO: 4106783 - RNA, 77 nt, Human
gaugugguuuaaauaacaucucguagucaaaaaccauucauucccuaagacuauaucuccaguguuuaagccacauu

SEQ ID NO: 4106784 - RNA, 77 nt, Human
gaugugguuuauaggcuauuauaguucaucugacuuucacaauaaguacguguuaauggcuaugaacugauuacauc

SEQ ID NO: 4106785 - RNA, 60 nt, Human
gaugugucauuuggucaucugcuuacuggcauuggguuagaagaugucuauuugacuauc

SEQ ID NO: 4106786 - RNA, 72 nt, Human
gauguguggcugagggauguggauuuugguccccucugggacuccucagucacccucagcuuaucacauguc

SEQ ID NO: 4106787 - RNA, 59 nt, Human
gauguguggguacagaugauuguugcaaaaaacuuugaagcaaccaacacccgcaccuc

SEQ ID NO: 4106788 - RNA, 80 nt, Human
gauuuuaucaaaugggagcucuuuaccaggucaggacuauacuagaucugacuacaaaguagggagaaucauauaaaguu

SEQ ID NO: 4106789 - RNA, 78 nt, Human
gauuuuaucuuugguugcacugcagguguucagcucuccagauucgccacaucuguuaccaaccgauagucaagaauc

SEQ ID NO: 4106790 - RNA, 84 nt, Human
gauuuuauguuuuaaguacugaauuuugagcaaaugagagacugacugagaauucuuggugguuagaauaucuauaucaaaauc

SEQ ID NO: 4106791 - RNA, 79 nt, Human
gauuuucaugugacaguuaaaagaagucuaucuuagaaguuuaauuguaacuuagaaguuuaauuguauacugaaaauu

SEQ ID NO: 4106792 - RNA, 81 nt, Human
gauuuucgaaugcuuugaaguuuaacuugcuggacauuuuagcuuguguaaguuauauuaaaauuucagagcucagaaauc

SEQ ID NO: 4106793 - RNA, 67 nt, Human
gauuuucugauaggugaaauauucaaaauguagugaaccuacauaggguuguuaucuacacugaguc

SEQ ID NO: 4106794 - RNA, 127 nt, Human
gauuuugaguuggauuuuugcccuguaacuucgcuuucugaugagcuuaagaaaaaauaauuuuuaguuugucuuucuuucccuuauuauaaaugcuggagugaugcccuuaucagcucucaauauc

SEQ ID NO: 4106795 - RNA, 130 nt, Human
gauuuugcccaacuguaggccaauguaaauguuguaaguacaucuaagguaugucaggcuaagcuauagacguuugguagguuagauguauuaagugcauuuucaacuugugaauuauaguggguuuauc

SEQ ID NO: 4106796 - RNA, 80 nt, Human
gauuuugcuucucccagagaacagacagaugcaaugaagacacaucuuaucaauggguuuugcuuucucaagcuaaaguc

SEQ ID NO: 4106797 - RNA, 77 nt, Human
gauuuuuaauacacuucauguuuucaucuguggauguuaauuacagaauagcugacagcagaagaguauuuuagguu

SEQ ID NO: 4106798 - RNA, 55 nt, Human
gauuuuuaccuacucuacugcucaaaguugugagacccagggucaggugaaguuc

SEQ ID NO: 4106799 - RNA, 80 nt, Human
gauuuuucucucaguuuucccagaauaucuuccaagugugacauacgcacuucauguucuuggugaaaggccauaaaguc

SEQ ID NO: 4106800 - RNA, 97 nt, Human
gauuuuucuguauugcucgaaauaauuuagaauauagagccuaaaguuuacuaucuucucugacauuagauuaauuggaagcaagaacacagagauc

SEQ ID NO: 4106801 - RNA, 60 nt, Human
gauuuuucuugccaaaguguguucacaaagccaguuugcauaguuuggagugggaaaguc

SEQ ID NO: 4106802 - RNA, 64 nt, Human
gauuuuuguccucuggggauaagcacacccagggugaauucauucuccagagugggaggaaauc

SEQ ID NO: 4106803 - RNA, 83 nt, Human
gauuuuuucuggucacgugccauauuuccugauccauuguguuuggcaccaggaaacaacuuggcaugagccaguaagaaauc

SEQ ID NO: 4106804 - RNA, 76 nt, Human
gauuuuuuuaaauaguucagguuagugguuauagaaaaugcuguguucacccuagcacuuaacuccuuugagaauc

SEQ ID NO: 4106805 - RNA, 91 nt, Human
gauuuuuuuaaguuuuauuauugggagauuuuuuccuaggcaaguauguucucuaagucucuaaagaagccucccuaaaacuggaaaguuc

SEQ ID NO: 4106806 - RNA, 70 nt, Human
gauuuuuuucugaugcuuaauauuuucuuugaaauaagaaauagcaugggacagguacuagaaagggauc

SEQ ID NO: 4106807 - RNA, 121 nt, Human
gcaaaaacuggaaaaagauuuuuaacagaaagucagagaugccaaagauuaccuuccuuuuuauucagguaaacugguaggcaucauuugauuaauggagaauauuaaauucauuuugagc

SEQ ID NO: 4106808 - RNA, 72 nt, Human
gcaaaaaguccagagggcacacugaaggauucuuacaggaagcuuauagccugucuccuuuggcuaauuugc

SEQ ID NO: 4106809 - RNA, 96 nt, Human
gcaaaaauacaguaaucuuaagggaacaccauuuuaugugcagucugccauugacgcacauacaaugguguuauuuggcauaugacuguaauuugc

SEQ ID NO: 4106810 - RNA, 59 nt, Human
gcaaaaauucugagauccacugagagcuuggaugacucucagugaaucucagaauucgc

SEQ ID NO: 4106811 - RNA, 70 nt, Human
gcaaaacaccuucaugucugccuuuucaagugaugcucacagcucuauuugaucagccaggcaguuuugu

SEQ ID NO: 4106812 - RNA, 119 nt, Human
gcaaaacacuaaggaacugggagguugaaugacuucuuugacauagcacaacugguuaacauuugaacuagaaucuaugucaggaacucaugccuaguacguacuuucuguuucccugc

SEQ ID NO: 4106813 - RNA, 55 nt, Human
gcaaaacgcgcuggacaagaugcacaagcaaaaacuugucugcaguguuuauagc

SEQ ID NO: 4106814 - RNA, 76 nt, Human
gcaaaacucuuuuaucagacaacauguugggcaucacccaauuacuaucacauuugucuggcuagaaaguuuuugc

SEQ ID NO: 4106815 - RNA, 90 nt, Human
gcaaaagaaaagaaacacauucaagaugcauucacuuagccauuaucuuuuuuccuaaguuuuguuguguacugaguucauuucuauugc

SEQ ID NO: 4106816 - RNA, 58 nt, Human
gcaaaagagccagcuaccucaguuuccaaauaugucaaacaaaguacuggccuuuugu

SEQ ID NO: 4106817 - RNA, 86 nt, Human
gcaaaagcagcugcuuucagcaggagggaacugugguggagaaggccaggaucucucuccuguggagggcauugcuuugagaaugc

SEQ ID NO: 4106818 - RNA, 85 nt, Human
gcaaaagccagauauuauugaugauuuaguguguuggcugggcuguaacgaaacaucuaugaucauuaauugcuggugggagugc

SEQ ID NO: 4106819 - RNA, 56 nt, Human
gcaaaauauugacauuggcguggaagaugagcccaugcacuguuggauauauuugu

SEQ ID NO: 4106820 - RNA, 64 nt, Human
gcaaaaucauacacucacauaaacagauacgugugugugugugugugugugugugugugugugu

SEQ ID NO: 4106821 - RNA, 102 nt, Human
gcaaacucacuugagucacucgcuugaaauguaaucagucugagagauggggaauaaagacugagcugcaagucagggagguaucaggccaaagagggaggc

SEQ ID NO: 4106822 - RNA, 71 nt, Human
gcaaacugcaaacuugugagcuaaauaaauggucauuauuauuuuaagugucuaaguuuugggugguuugu

SEQ ID NO: 4106823 - RNA, 63 nt, Human
gcaaacuggcuaugggaaucuugcagccagauuguaagauaaagcuaaccuuacacaguuugc

SEQ ID NO: 4106824 - RNA, 55 nt, Human
gcaaagacaaauuagaacuccuuuucucaaggagacuucugguuauuguauuugu

SEQ ID NO: 4106825 - RNA, 62 nt, Human
gcaaagacagaggggucacagccugaaggagcagcauccuugccaacgcccucugucucagc

SEQ ID NO: 4106826 - RNA, 92 nt, Human
gcaaagacauuauaagguauaaggccuauuuuuaguagacacuauguaaacuuauacuagaaaauaggcagaugcauuguauuaaacuuugc

SEQ ID NO: 4106827 - RNA, 69 nt, Human
gcaaagaguuuuuucauauaauggcaguugcucaaccuccuguccuuauauuucuaugacucuaguugc

SEQ ID NO: 4106828 - RNA, 60 nt, Human
gcaaagcuggauaugugaugugauaauauauucuacaucaucaugcacucucagguuugc

SEQ ID NO: 4106829 - RNA, 78 nt, Human
gcaaaggacugcauguagcuaugagugaguugucuggacacaggguuuggaggacucugcaggcugcuccuucuuugu

SEQ ID NO: 4106830 - RNA, 102 nt, Human
gcaaaggaugaauuuaaauauuagaacaagugauaaaggggaggaagugugcuacacucagccaaucuuaucuuuauuuucuacuuuauuauucugcuuugc

SEQ ID NO: 4106831 - RNA, 74 nt, Human
gcaaagggcacuaaaugaugaagugcuucaaguuauuuuguaaguuaguggagaguuauuaucagcccuucugc

SEQ ID NO: 4106832 - RNA, 80 nt, Human
gcaaagguaauuuucauggauuucuucagagaagaguuauuuuugugaaucuuuucuagcaaauccaggaguacuggugc

SEQ ID NO: 4106833 - RNA, 85 nt, Human
gcaaaggucauagagugugagccuacaggccaaagcuguccacaaacauguuuugcuggcuucucaguauuuuaugacuuugagc

SEQ ID NO: 4106834 - RNA, 114 nt, Human
gcaaaggucuaacagggguauugauaucagaguggguuuuaaaaguguauuaacuauaaucuuacuuuuagccuauuugauucuacuuauuucagaacuauuaaugacguuugu

SEQ ID NO: 4106835 - RNA, 78 nt, Human
gcaaaguaaggaggcagucauuaucaggugccggcgugcacuggugcggcugagagugagugucuccguaaauuuugc

SEQ ID NO: 4106836 - RNA, 96 nt, Human
gcaaaguaucucaguuuuaaugaaugauuuuauguaaaugaauagacagccuauuauuucauauaauguuaucaauggauuggaguguugcuuugu

SEQ ID NO: 4106837 - RNA, 84 nt, Human
gcaaagucugauugggccaaacccugggaaauguaaauauauuuauucuuauuuuacuauuuggcaaagucuccugauaauugu

SEQ ID NO: 4106838 - RNA, 94 nt, Human
gcaaauaaauauauacuguucugugagguaaugugacagagauagugcguaacaaauguacauaugcucaucugcauucccuugcauuauuugc

SEQ ID NO: 4106839 - RNA, 79 nt, Human
gaguuuuagauuggaaagcaacuuuugagaguuguuuggaacucccuuagcuacuuuuauuugcuucuaauaaacacuc

SEQ ID NO: 4106840 - RNA, 80 nt, Human
gaguuuuagcucuuacauuuaggucuaugauaaauuucaaguugauuuuugcauauagugugagguaaggguccaagcuc

SEQ ID NO: 4106841 - RNA, 66 nt, Human
gaguuuucuaaacugugaaaugcuauccaaaugucaggaacuguuacauaguuauagaucuugcuc

SEQ ID NO: 4106842 - RNA, 100 nt, Human
gaguuuuuaguagggaccugcuuuugagcccagugcucagcuugaacagguuaauugagccuucugggacaaaucucagcauugguuauauuauuauuuc

SEQ ID NO: 4106843 - RNA, 74 nt, Human
gauaaaaaguuuugacucaguggacguacuagcuuguaaagguuaggaccugcugggauuacaaauaaaacauc

SEQ ID NO: 4106844 - RNA, 80 nt, Human
gauaaaacauaguucagagcagcagaccucugaaaaaagagaacugucacauugcuuuaaaagacuugaaauguauuauc

SEQ ID NO: 4106845 - RNA, 71 nt, Human
gauaaaauguguaucccagaggcacuauucagaaccuucugagcuauguuccucgaugcucaguuuuuauu

SEQ ID NO: 4106846 - RNA, 130 nt, Human
gauaaacaacgaaucccuuuuuaauguaugucccaugcaauaugugugauaaagaauaauuuuuuuagcauaauuaugucucagguauugaaugggaacacuguuacuaauacaagaucaguuguuuauc

SEQ ID NO: 4106847 - RNA, 110 nt, Human
gauaaacaggcacccccguccccagcagaaauagcaucagauagcaauuugggcaggggcuuuucucuguuuuguuguguuucugugcugaaauggggcccuguugaauc

SEQ ID NO: 4106848 - RNA, 74 nt, Human
gauaaagagauuuucuuucaugcaugcaggaaagauuccucuuuuaguguaagcauaaagaacauuuuugguuc

SEQ ID NO: 4106849 - RNA, 100 nt, Human
gauaaauauccggagggcacacuaaaauaguuuagcucucauuucagccaacagguuuugaagucagagcuugagcucuuccugcccccuuguguuuguu

SEQ ID NO: 4106850 - RNA, 77 nt, Human
gauaaaugaaauacuguaaaguuauuauuauuuuucagcugagcagaguaaucauuuuacaguguuagaaacuuguc

SEQ ID NO: 4106851 - RNA, 75 nt, Human
gauaaauuagguuacgcuaugggaacaaacucucaauguuaauaaaaguugauuuccuagcugacaugaaauauc

SEQ ID NO: 4106852 - RNA, 66 nt, Human
gauaaauugcaauuaacauaugucaacuguuuugaacagugccuggcauuuguuaaguguuuuauu

SEQ ID NO: 4106853 - RNA, 130 nt, Human
gauaacugacuacauauuuuauuuuuuaaugcagauguucagcauucuauaaauauggauucuuaaugacuugggacaaaaauauuagaauguaugaacaacugaagaauggaaugaguggcugcagagc

SEQ ID NO: 4106854 - RNA, 105 nt, Human
gauaagaaaacugaggugcagaagagauuaagugacugaccucuugccuaguugguagcaaagucaggauuugaacucaggucugucugcuucuguuuuucuguu

SEQ ID NO: 4106855 - RNA, 61 nt, Human
gauaagauuuccuuaauuagagcaagacacaccuaguaucuagagccuggaagucuugguc

SEQ ID NO: 4106856 - RNA, 82 nt, Human
gauaagauuugcacagaugagggugaugcuauggggucccccagagcaauuaauuuauucauuucuucaguaaauauuuauc

SEQ ID NO: 4106857 - RNA, 129 nt, Human
gauaagcacuucaggugauucuaaugaagguuuaaauaugaaaaucacugucuucccccacagaggacauuugacucuguucauauuauuaagcccagugcagauacacccugaagaaugcuuuauauc

SEQ ID NO: 4106858 - RNA, 70 nt, Human
gauaagcagguaagaauggcagaacacuggcuuauugucaaccaauguuuuuuuauauaccugaaguauu

SEQ ID NO: 4106859 - RNA, 95 nt, Human
gauaaggaaacgcacaaagaaguuagaugacuuguugaaaguaucuauuauuuaacauaggcagcaucucauuugacuucugcauuuucuuuauu

SEQ ID NO: 4106860 - RNA, 58 nt, Human
gauaaggcagucccuuaacaaggcucaguaucuggaucaaggucuuguacugcuuuuc

SEQ ID NO: 4106861 - RNA, 74 nt, Human
gauaaggguggguucauuauucuugggcguccuggcugugcugugacaccagagacugaugaggccaccccauc

SEQ ID NO: 4106862 - RNA, 72 nt, Human
gauaagguggcuuaagauuugcgauaccuaaugccagcuagguauuagguaucucaaaucuuaagccccauc

SEQ ID NO: 4106863 - RNA, 56 nt, Human
gauaauaggucugaaacuucuggaagccccuaggccagcagguggagccucuuguc

SEQ ID NO: 4106864 - RNA, 76 nt, Human
gauaauaugagcaagcagugaaguugaauguaauauauagguuaaguaauaauaucauuguuugcauaguguaauc

SEQ ID NO: 4106865 - RNA, 113 nt, Human
gauaauuaauacugaaagcuuagcacagugcauggcaaguggcauagaauagccaaaacggcugcuguuguuacugugugguuacugugcuuguucuugucgcuauugauuuc

SEQ ID NO: 4106866 - RNA, 102 nt, Human
gauaauucugccagacuguuggaaagaagggcugagcaaggucauaaugacauucacuguacuugugucccugcuuucccuagucuuuuugguaggauuauu

SEQ ID NO: 4106867 - RNA, 88 nt, Human
gauacaaucccaagguagccucuugaaaugaacauggauaauugcuccaauguuauuaucuagaggcaagaaccuugagaaauguguc

SEQ ID NO: 4106868 - RNA, 57 nt, Human
gauacacauuacuuucugucugaguagcguucucacccagacuugugaauguguguu

SEQ ID NO: 4106869 - RNA, 60 nt, Human
gauacagguaauaauaacagaaaaacaaaucuguuuuucagccaugaauuacacuguguc

SEQ ID NO: 4106870 - RNA, 127 nt, Human
gauacaugaaacuauuuaaaacggcuuuacgucucagaagaauuuaauccuucaaaguaauauaauuuugaauaaacgguuaauguucauuuuaagauggauuuuagaguuuguagucauauguauu

SEQ ID NO: 4106871 - RNA, 76 nt, Human
gauacaugggaagugcuggcccauagcugcuggcugaacaaggcuagucucuggaggucagggcugccacuguguc

SEQ ID NO: 4106872 - RNA, 61 nt, Human
gauaccagugaauuaggacaaaagggcuucaguucaagcacuuacuuccuaauucccuauc

SEQ ID NO: 4106873 - RNA, 55 nt, Human
gauaccucuaaauagcucacuaaguccuauaaggaucauggcugcugagagguuc

SEQ ID NO: 4106874 - RNA, 102 nt, Human
gauaccugaggaaaggucuguggucggagcugaguggguuuauugaucuuacuggaaaaugggcauuucagcuucucuccaaggaaccagcccagacguguc

SEQ ID NO: 4106875 - RNA, 88 nt, Human
gauacugcuacugucaaacagcugcuggauaaucaucccaaaggagaagggagagauguucauucagcauguucagcaguguggcuuc

SEQ ID NO: 4106876 - RNA, 104 nt, Human
gauacugcucugucugccucuuucacauuuaucuguucuuucuagccagcuauagaguuucucuagaaucccaaauggacugggaagucagaccuggcagcuuc

SEQ ID NO: 4106877 - RNA, 62 nt, Human
gauacuguaaguaucuaauuuaauccuuuugacagucagaggaaggagguccuaacaguauc

SEQ ID NO: 4106878 - RNA, 91 nt, Human
gauacuuaguuucucacuguaguucuuggccaagucacuacuuuucuggaguuccuugugccaugaacuguaugaaggacugaauacuauc

SEQ ID NO: 4106879 - RNA, 66 nt, Human
gauacuuucucauuuacccaagaacagggcuuucacaggcauggagagggugggagagaggguguu

SEQ ID NO: 4106880 - RNA, 58 nt, Human
gauagaaagguguugaaauccaucagggaagacuuccuggauaaaggcacuuuucauc

SEQ ID NO: 4106881 - RNA, 66 nt, Human
gauagaauuugcagccugcagauauaaccaucuacguucgucaucugaaggcugucaaugcguauc

SEQ ID NO: 4106882 - RNA, 74 nt, Human
gauagacccaaaagagcaguuuaaaaugcuuuaauuuuuuuaaaugugauacuguucuuuuuaaggguucuuuc

SEQ ID NO: 4106883 - RNA, 90 nt, Human
gauagagcaaagaauauuuagaugcauuuggauugcuucagggcucacagaugucugcacccauauggauuugaggauucuggcuuuguc

SEQ ID NO: 4106884 - RNA, 127 nt, Human
gauagauuugagguuugacuuucuacugccuguauuuuccaaaaaccacucaaguagauauuaacaaaagaacaguucuauguuaguaauacuggggcacuugguggaagcaaacaccaaaucuauu

SEQ ID NO: 4106885 - RNA, 67 nt, Human
gauagcagcucuggggucagacugacaacaaggggcuggaccccuuuucugccuccagcuguuuauc

SEQ ID NO: 4106886 - RNA, 71 nt, Human
gauagcauggccaggaagcuggggacugggauuccaacccaggcagucuggcuccugaguccaugcucuuc

SEQ ID NO: 4106887 - RNA, 95 nt, Human
gauagcauugacuucuagguuucugaguuuccuguuuaaaauuuaugaacaguauugguugaacucaagaaaguucuuuuaagaucaaugaaauc

SEQ ID NO: 4106888 - RNA, 77 nt, Human
gauagcauuuaaacaaauauuucagguagguacuucaaaugcauuugacauuuaucaaagaaaugguaagugcuguc

SEQ ID NO: 4106889 - RNA, 83 nt, Human
gauagccaauggccagggccaaaagagaugccuuuggaguagugcuagccaauaucucacuugagcuuugcuuuucuguuauc

SEQ ID NO: 4106890 - RNA, 60 nt, Human
gauagccuuaggaagauuguaguugaccaggaagcccaauuuguaucuuccaaaguuauu

SEQ ID NO: 4106891 - RNA, 82 nt, Human
gauaggagcucaugcugcaggcccaggcaggcaggugcucugaaugccuagaaaucugccuggguguggagcagagaggguu

SEQ ID NO: 4106892 - RNA, 69 nt, Human
gauaggagugccccagauucuagcagcaagacccuguuggcgaccucuggcuucuggggccucuguuuc

SEQ ID NO: 4106893 - RNA, 62 nt, Human
gauagggagacaggagaacacugaauuaagaaucaagaugcuuugcucugucucuagcuauu

SEQ ID NO: 4106894 - RNA, 59 nt, Human
gauagggucuuuacagaggugcuuauguuaaaauaaggccauuauggugggcccgaauc

SEQ ID NO: 4106895 - RNA, 86 nt, Human
gauaguaguauaggaacagggaggugggccaagguaagauaaauuaucagacaaugucucauauucguguuccauuucuauuuauc

SEQ ID NO: 4106896 - RNA, 91 nt, Human
gauagugacagcagcuuggggccaguagcaccuguguggacccagccucagguuccggggugugguaauggcagcaggcaguagcacuauc

SEQ ID NO: 4106897 - RNA, 58 nt, Human
gauauaacgacuucccaggucuuuuacaugucugagcugaaacuggaguccuuauauc

SEQ ID NO: 4106898 - RNA, 65 nt, Human
gauauaggcagaucugagaauauuagcuauuuaauauccuggcuggguaaucuuucugauauauc

SEQ ID NO: 4106899 - RNA, 55 nt, Human
gauauaggcucuuguuaaccuuuuauuuugagagguucuuuugagagguuaucuc

SEQ ID NO: 4106900 - RNA, 71 nt, Human
gauauaugcauuuuauagugcaaagcauuauuucacaguuauauagcgcuuuguaucuguuaaauguuuuc

SEQ ID NO: 4106901 - RNA, 69 nt, Human
gauaucaauguuauuucugaucuaguugugacauuuaaaguuccggcuucaugagaaaugacagauguu

SEQ ID NO: 4106902 - RNA, 89 nt, Human
gauaucauuguucuucauuguugucuuuaccuguauuucaauguauaugaaguggaggauuagcauaguuuaauaaauacaaugauguu

SEQ ID NO: 4106903 - RNA, 81 nt, Human
gauaucucagauaugcacaguuacaagaauaucaggugguagcugcacuugcugugaaauaauauugugcaauuuuauauc

SEQ ID NO: 4106904 - RNA, 78 nt, Human
gauaucuugcuuuuuauuauugcuugauacagaaaucauuuuacugaaacauugcaauaacaaagggccucugguauc

SEQ ID NO: 4106905 - RNA, 58 nt, Human
gcaaauaagaagcagaauguucuacccuaucaauaguaacaaucuguuuguugucugu

SEQ ID NO: 4106906 - RNA, 67 nt, Human
gcaaauaugugaggcaaaguuuauaggaguuaaauauuucuaagaauauugcucuuaaaagguuugu

SEQ ID NO: 4106907 - RNA, 55 nt, Human
gcaaaucaccaccuagcuggaugguaugaacugcuaaccacuauggaguguuugc

SEQ ID NO: 4106908 - RNA, 76 nt, Human
gcaaauccaaugaaagcaacugccuauaagaaaauacuuuacauuuuuguuauagguuuguuuuacaugaaagugu

SEQ ID NO: 4106909 - RNA, 78 nt, Human
gcaaaugaaucuugugagauuguucagaguuucuacuagaggaguacagcuguucauuucaccuuagagaauuauugc

SEQ ID NO: 4106910 - RNA, 74 nt, Human
gcaaaugaauguaaaauugccuacaagacagaauaggucagagaaggcaauuuuaugguucuuuuuucauuggc

SEQ ID NO: 4106911 - RNA, 126 nt, Human
gcaaaugagguccauuacaggagcauuccacaucuucuuaacuccaaagugugacacuuuuaggcacuauggaagauuuugagagauaaauuuggggcuugcuccaguacccuuuaaaucacaugc

SEQ ID NO: 4106912 - RNA, 56 nt, Human
gcaaaugcacugcauuuagauugauuuuugucuuagucaaacugggguacauuugu

SEQ ID NO: 4106913 - RNA, 76 nt, Human
gcaaauggcagauuuuuauugguaagauuuuauaacugauuaaguucuaccuccuagaaaaucuggagccaaaugu

SEQ ID NO: 4106914 - RNA, 60 nt, Human
gcaaaugugugugcaugugaauguguguguaaacacacacaggcauagccauacaugugu

SEQ ID NO: 4106915 - RNA, 60 nt, Human
gcaaauguuuuugaguguuuacuguguagcagucagaguaggcacuuaaccaauguuagc

SEQ ID NO: 4106916 - RNA, 64 nt, Human
gcaaauuagguuauguugguugauugcaguguucacagcuucuaacaugucccugauucuuugu

SEQ ID NO: 4106917 - RNA, 57 nt, Human
gcaaauucuuaacuggacuguggaagccaggguuuggcagcuggucucagagcuugc

SEQ ID NO: 4106918 - RNA, 80 nt, Human
gcaaauugcagaauguacauguaaguugguuuuauugaaguuauugccaauaaggccaaguucauauacaacuugcuugc

SEQ ID NO: 4106919 - RNA, 82 nt, Human
gcaaauugugaccaaggaaucuuagggucuaugugaguggucacaggagaacccacagauucucaagcugguuguaaagugu

SEQ ID NO: 4106920 - RNA, 77 nt, Human
gcaacaaggcagggggaggcucccagcuaauccagacuugaaucucagcugugggugggagcacccugucuggaggc

SEQ ID NO: 4106921 - RNA, 57 nt, Human
gcaacacaauaucccaguacaucauaagguuggaugcugaagggaaaguugugcugu

SEQ ID NO: 4106922 - RNA, 67 nt, Human
gcaacacccugguccugggcccaagccucauucugcugcggggcuggccagaguuggaggguguggc

SEQ ID NO: 4106923 - RNA, 63 nt, Human
gcaacagaaacuguagugcuucgaucugaccuggcggucugaaagcauuacaguuuauuaggc

SEQ ID NO: 4106924 - RNA, 85 nt, Human
gcaacagaaaguguacuguuggauguugcaguuuucuuuuccacaccaggaaaacuaaacuacaucucauggaugaggcuguugu

SEQ ID NO: 4106925 - RNA, 81 nt, Human
gcaacagagcaagcaugucagaagaacaaugagauauaggauuuguguuuuuuucuacccugacauuuugcuuccuguugc

SEQ ID NO: 4106926 - RNA, 69 nt, Human
gcaacagcaauagugugaugaaauuacuugccauuucuaugggugucaaugucacacgauugcuagugc

SEQ ID NO: 4106927 - RNA, 78 nt, Human
gcaacaggaaagauuauggcauugaaauacucauuuauacuuuuaugguaguucaaaaugguggucuuauuucugggc

SEQ ID NO: 4106928 - RNA, 109 nt, Human
gcaacaggacaagacuguacggcuaccagguugucuaauuccaaggggcacuuuaacauuauagucucugugaauggcgucaccugggguugugcagugcacugucugc

SEQ ID NO: 4106929 - RNA, 57 nt, Human
gcaacaguuggauuccagaggagcucuuucaucuucuuaagagaaucaacuguuugc

SEQ ID NO: 4106930 - RNA, 90 nt, Human
gcaacaugucacugucagcccacauguacagaagcaggcugggacacucccagccccagaucucucguacaugugggugcacacaguugc

SEQ ID NO: 4106931 - RNA, 80 nt, Human
gcaaccacuacaccaccuccgaggucagggucuuuggugucccagagguucuggagaacuuggaggugaguggcaucugc

SEQ ID NO: 4106932 - RNA, 81 nt, Human
gaucagugcccuuuuuguuugacuuuggaagagcaacacaaauaaauacaguagguuccauuuaaacaaagaacucugauc

SEQ ID NO: 4106933 - RNA, 57 nt, Human
gaucaucucaggcauggguacugcagucaagaguguagaaauacagcagggaugauc

SEQ ID NO: 4106934 - RNA, 60 nt, Human
gaucaucugggcuccuuguagugauggacacauuuucaugaggcaaggucuuagaugauu

SEQ ID NO: 4106935 - RNA, 63 nt, Human
gaucauuucaguccaguaaauacaggcuaucccaggauagcuuuuacagguccugcagugauc

SEQ ID NO: 4106936 - RNA, 118 nt, Human
gauccaauaggucuauagcuuggccccaaagucuggugauucugacugagacaggaggucucugaaccucacucugagaaacacuaaaccaugggguacuuguaggagcagacggauc

SEQ ID NO: 4106937 - RNA, 56 nt, Human
gauccaguucucagugcuuacaguaguuauccuauuguaaguaaagaaauaggauu

SEQ ID NO: 4106938 - RNA, 70 nt, Human
gaucccagccuccaaggccccaagguccacagcucugauucuggcaaaggcagauggaagaggcuggguc

SEQ ID NO: 4106939 - RNA, 83 nt, Human
gauccccuugaugacuugggcuugggcguggguuuagugagcacccgaaccuaccggguucagguuguuugaggccauggguc

SEQ ID NO: 4106940 - RNA, 84 nt, Human
gaucccgggaccugaaacuggaguccggguguuuauaagagcaaggcuaaauuucaguuauugaaacagguccaggcugggauc

SEQ ID NO: 4106941 - RNA, 63 nt, Human
gaucccucauguggauuuccauuggcuguuuagucacaaccacuggaagaugcugaggucauc

SEQ ID NO: 4106942 - RNA, 95 nt, Human
gauccuaaaugccuuugauucuuuuuugagagguaaguggguguuaaauuauacaugaaauuacuucuuacaaaagaaauauuuuauuaaaaauc

SEQ ID NO: 4106943 - RNA, 65 nt, Human
gauccuagaguucuagugacaacgggagggaaaaauuguaguagucccacuggaagauuaggguc

SEQ ID NO: 4106944 - RNA, 78 nt, Human
gauccugaacuaacacaugguucugucaggaaggucuucaucucccugaacacuacuaugaugcuggaguuugggguu

SEQ ID NO: 4106945 - RNA, 76 nt, Human
gauccugccuugcucauuccgugagaagauccuuguaccuuaagaaagcagagauacgggaagagcaagguggcuc

SEQ ID NO: 4106946 - RNA, 97 nt, Human
gauccugguuaugcuagcucucugcagcacuuaauguuucgugaaugcuacaugauaaauuagguguauguaaauagucuuuuagauagcugggauc

SEQ ID NO: 4106947 - RNA, 62 nt, Human
gauccugucuguggagucagcacagacagaaacuguucccuggcuccgaagacuccaggauc

SEQ ID NO: 4106948 - RNA, 55 nt, Human
gauccuguuucauggguuucuggguauaccccuugaaacaccagagucaggaguc

SEQ ID NO: 4106949 - RNA, 80 nt, Human
gauccuucucaaucagagcagugugacuuuaccacauuacuacuaggguuuucaucaagauuguucuggaggaaaggauu

SEQ ID NO: 4106950 - RNA, 74 nt, Human
gauccuuuauuuuaagauauuuggcuugagaaacuugcuuagcucacaggccaauuucuugucauuuagcgauu

SEQ ID NO: 4106951 - RNA, 56 nt, Human
gauccuuuccuauuuggagcugugggguuggggaagugacagggaaggauaggauu

SEQ ID NO: 4106952 - RNA, 69 nt, Human
gauccuuugcuacuuugcagcuagcuaggacccaaaugguccacugguauccacaguggggaagugauu

SEQ ID NO: 4106953 - RNA, 63 nt, Human
gaucgcauagcccugcaugauacuggaauguuccguggugagguauugcagaguuaugugcuc

SEQ ID NO: 4106954 - RNA, 83 nt, Human
gaucgcuauucaccaaguauauuugaacauguaaaugcuuaagaaauaagcauaaugcggauauaguuuggguuaauaggauu

SEQ ID NO: 4106955 - RNA, 79 nt, Human
gaucggggggguaagacaaagggguccuuggaugggggcaccugugagcagggaccccuuugucugagcuccccggguc

SEQ ID NO: 4106956 - RNA, 59 nt, Human
gaucuacccuuuguccuguguucuguugcugcuugcacagggcuguccagggcuagguc

SEQ ID NO: 4106957 - RNA, 55 nt, Human
gaucuaggcucggcucagaugugcuugucucaaagcagugaguuaaguuuagauc

SEQ ID NO: 4106958 - RNA, 66 nt, Human
gaucuaguagugucuuaaacaaggucaaagguaguuucuggccuuuggaaaguaagcagcuagauu

SEQ ID NO: 4106959 - RNA, 113 nt, Human
gaucuauagcaagcaaaucaucgguuuuuauucugcauguagguuugcucacuuaaccaaaguacugccaugucagaauaaacaagaacuaaaugguaaugauuguuaggauu

SEQ ID NO: 4106960 - RNA, 130 nt, Human
gaucucacuugauaaacuuuugauuauauuuccaguugucuuaucggagcacuuuguaaacggggugauuuauccauuuucugguugggaaaacuguaacucagaagaauuuaguaauucauuugagauc

SEQ ID NO: 4106961 - RNA, 58 nt, Human
gaucucagguccuuuaguguccagaaccucggcaacgggcucuuagaggauggggguc

SEQ ID NO: 4106962 - RNA, 130 nt, Human
gaucucauuuauccauuuuugccuuggcugcuugugcuuuggggguauuauucaagaaaucuuugcccagaucaauuuccuggagaguuuucccaaaguucuucuucuaguaguuucaugguuugagguc

SEQ ID NO: 4106963 - RNA, 66 nt, Human
gaucucuaaggucuugcugcucaaaauguuguccauggaccagcagcagcagcagcaccagggauu

SEQ ID NO: 4106964 - RNA, 87 nt, Human
gaucugaaagucauagguccauauuauuauuuuuaaacaaaucauacugauucauguaacaguuauaacaauguggccaugaggguc

SEQ ID NO: 4106965 - RNA, 63 nt, Human
gcaaguagaagagaugacaaaggagcauggggaugguugguauguauuccucaucucauuugu

SEQ ID NO: 4106966 - RNA, 78 nt, Human
gcaagugauugucacgucccuuaugccucuuuuggucaaaagcaauucauaacacagggacuugaccaauugucuugu

SEQ ID NO: 4106967 - RNA, 59 nt, Human
gcaagugcuugaggggaauaaaaagaaccuuaagguagguuccuacccucaagcaaugc

SEQ ID NO: 4106968 - RNA, 130 nt, Human
gcaaguggcuauuuggaguacaaaauuuaaggaggcacucacucucagggucacagagcucagagucggcacccucaggacccgaaagugagcaccuccuuaaauauuguacgccaggugucucgcuugc

SEQ ID NO: 4106969 - RNA, 123 nt, Human
gcaaguuaaccaaaaugcauuucuaagggauagaauuucaaggggugugagaaagucaaguguggaauuucaugccucuugagaaagaugcuuuuagcccuggaagccuuuucaguaccuugu

SEQ ID NO: 4106970 - RNA, 63 nt, Human
gcaaguuaaguaccauguucauuugccgggauuccucccugcaggauuucaugggcugacugc

SEQ ID NO: 4106971 - RNA, 85 nt, Human
gcaaguuacccaaaugagaaugucacaaaagcaaucaacgcaggacccagcuugagaggcuguugacauucuguguaauuauugc

SEQ ID NO: 4106972 - RNA, 75 nt, Human
gcaaguuaguggaggagccaaagugaaaaugcaauauccucacugcuaaucuuguacucuuuccauuguauuugc

SEQ ID NO: 4106973 - RNA, 85 nt, Human
gcaaguuuaggguauuuaacuauaaugaguuaacuuagugcugauaggauauucaugaccccaugguugauugaaaugagcuugc

SEQ ID NO: 4106974 - RNA, 87 nt, Human
gcaaguuucaccaagccgaugaaauugaucuugaacuuuuggugagagaaaggaagaaaggucauuuuagaagugaguggaaugugc

SEQ ID NO: 4106975 - RNA, 118 nt, Human
gcaaguuugugucuucuuuuucuucuucuuucuucucuuuuaauaagacuaauaacuagaggucuuaguuaaaauaauggagauguugaaaguggauuugaaaaugcacgguagcugc

SEQ ID NO: 4106976 - RNA, 58 nt, Human
gcaaguuuguuuugaguguuaaauaagauaauccuuuaaacauuuagaauguacuugc

SEQ ID NO: 4106977 - RNA, 57 nt, Human
gcaaguuuuguuaucuuagauaucugacucucagaauaucuuuuagagcaagcuugu

SEQ ID NO: 4106978 - RNA, 85 nt, Human
gcaauaaugccagccgauauugugaauuuuagagaguaugcugaguaauuuuuggccuuucuacaauuuuuggcaugagcaaugc

SEQ ID NO: 4106979 - RNA, 97 nt, Human
gcaauacaaauuuaaaagaacuguaauuuuuacauaguaagcuagcuaaaguuguuuuaaagcuguuaacaaugugagggugcaguggacagguugu

SEQ ID NO: 4106980 - RNA, 57 nt, Human
gcaauaguggcaaugguaguaaggucaccaucccuuuucuauuggcgucacuguugu

SEQ ID NO: 4106981 - RNA, 108 nt, Human
gcaauauuugucugguuucuuuuucuuuaaaugaauucucuguaguuccaguuucccuacugcaugcaaugugaagaaagcuaugggaacgcaggcucaacucaaugc

SEQ ID NO: 4106982 - RNA, 66 nt, Human
gcaaucccagaucugaaugucaccuuuugucccacuguccagggucagcuucagcccuaggauugc

SEQ ID NO: 4106983 - RNA, 77 nt, Human
gcaaucucagccuaugaugcuguuauuaucuauacuuuuaagaauauauuuagcaguguuaaacuugcugaaguugc

SEQ ID NO: 4106984 - RNA, 97 nt, Human
gcaaugaagccuggagagucucaaggcaggaaacugaucagucauauggcucaccucuuuuguuuccugucucucaggggccacuuuucuucauugc

SEQ ID NO: 4106985 - RNA, 61 nt, Human
gcaaugacagagcugugcggcugguauucggaaccauccucacaguguucgugucagaugc

SEQ ID NO: 4106986 - RNA, 87 nt, Human
gcaaugagaaugaagcugcucacagggauucaugcuguagaagacaggccaggacccuggagggcaucugagaucaucacucauugc

SEQ ID NO: 4106987 - RNA, 108 nt, Human
gcaaugagaaugcuagccuggcaguggugaagaagaggccucagauaugugagacugagaauuccucaauuuacuucccacuguucagcagagagcacccuucugugc

SEQ ID NO: 4106988 - RNA, 61 nt, Human
gcaaugaggagugguagggauaagcgggcacuuuucugcccuccugccacaccucaguugc

SEQ ID NO: 4106989 - RNA, 68 nt, Human
gcaaugaguaagauaggcaauguguuagucuacucauauaacaucaugccauaacuaacuuaacaugc

SEQ ID NO: 4106990 - RNA, 61 nt, Human
gcaaugcaccugaacuccaucagcugaugcuucuccagcugcugagccaggcugauguugu

SEQ ID NO: 4106991 - RNA, 62 nt, Human
gcaaugcuggaacuugacaauuuaggauaagucaaaauccuuagagacaagaccaguuuggc

SEQ ID NO: 4106992 - RNA, 61 nt, Human
gcaauggaguuuuuaaguuucuguuauggucuguacaggggacagagacugagacacuugc

SEQ ID NO: 4106993 - RNA, 61 nt, Human
gcaaugggaaaagaguaugauuuagcucccacuuucuggaucacaucuacuuuuucuaugc

SEQ ID NO: 4106994 - RNA, 86 nt, Human
gcaaugggcaggguguguccugggaacucacaguccagggcugggcagggcugggcuggauucccuggagccccuugugcccuugc

SEQ ID NO: 4106995 - RNA, 55 nt, Human
gcaauggggagcucaccaccuguuuugaagccaggcagguuugggcucuucuugu

SEQ ID NO: 4106996 - RNA, 74 nt, Human
gcaauguccacaccugggucagugugacagucgguuccuugcuguccuuccuggcuggggugugugcaccuggc

SEQ ID NO: 4106997 - RNA, 130 nt, Human
gcaaugugaugcacacagaaaugaagaaugaccauuuagaaacuguuuuuaacaguuugacauuguugugucauccaugugugauaacauuuuucuaguaauucuuguauuuacaaaaguaucacaucgc

SEQ ID NO: 4106998 - RNA, 55 nt, Human
gcaaugugcccgucucucugcagccagucaagugcaaagaaaucugggucauugu

SEQ ID NO: 4106999 - RNA, 129 nt, Human
gcaauguugaucaguuaaacaguaaguuaucguaaacaucuuguacugcacauuuuacccuaaucggguggagucaacaaauauguaagugauaucucuguuuauauauugucaauaguauuuauuugc

SEQ ID NO: 4107000 - RNA, 69 nt, Human
gcaauuaaccagaccuugauucaaucguggcucuacuauugacugucugcaaggccuggaucuaguugc

SEQ ID NO: 4107001 - RNA, 78 nt, Human
gcaauuacuccuuuggucaccuccacucuuauucucauuagcaauugaaguaagggccaguggagagggaaaaauugu

SEQ ID NO: 4107002 - RNA, 84 nt, Human
gcaauuccaggccauuaaugagaucaagaaucccaacucugaaauaaagcagugauuuuaugucauugguagcuagauuuuugc

SEQ ID NO: 4107003 - RNA, 58 nt, Human
gcaauucucaggaauuucaucuguggcuuuugcaagcuauauaugagcugagauuugu

SEQ ID NO: 4107004 - RNA, 62 nt, Human
gccagcuuugguguucauuaaacauggucuugcugcaucaacuccagggcuccaagcugagu

SEQ ID NO: 4107005 - RNA, 66 nt, Human
gccaggaaaaugugacaguguuugacagaugcucagcugggcuuuccccaggcauugcauucuggc

SEQ ID NO: 4107006 - RNA, 55 nt, Human
gccaggaaauucaugccagaucuacugaaagaaaaggcaagaugaaauucuuggc

SEQ ID NO: 4107007 - RNA, 89 nt, Human
gccaggaccaggagcucagagcccuuggcuccccagggcgggaagacgguuauuuaccaaggcaggaccaggagcucagagcccucggc

SEQ ID NO: 4107008 - RNA, 64 nt, Human
gccaggacugccuguaucucuucuuccuggugacagggagacaguucagauaguuucuuuuggc

SEQ ID NO: 4107009 - RNA, 62 nt, Human
gccaggagaaugcuagcagaggauucggaucaaaggagcuguucuguagguuuucuuauggu

SEQ ID NO: 4107010 - RNA, 61 nt, Human
gccaggagagcauugcacagaggcccgugucuuuuuuguucauugcuuuccccaucauggc

SEQ ID NO: 4107011 - RNA, 91 nt, Human
gccaggauggucuagaucuccucaccuugugauccgcccaccuuggccucccaaagugcugggauuacaggggugagccacugugccuggc

SEQ ID NO: 4107012 - RNA, 91 nt, Human
gccaggauggucucgaucuccugaccucgugauccacccgccuuggccucccaaaguguugggauuacaggcaugagccaccguaccuggc

SEQ ID NO: 4107013 - RNA, 64 nt, Human
gccaggcagccuuuauggaaaggccuggcauuugcuuugugaaggucacauggagguugaaggc

SEQ ID NO: 4107014 - RNA, 55 nt, Human
gccaggcagcuagcaaccccugugagggggcaggcacagcuggacucugccuggc

SEQ ID NO: 4107015 - RNA, 60 nt, Human
gccaggcaggccacgcuguguugacgcugcacucagcacguggguguuggcucugccggu

SEQ ID NO: 4107016 - RNA, 58 nt, Human
gccaggcauggggcugcagucaggucuccagacccgcgcugugcccucugccccccgc

SEQ ID NO: 4107017 - RNA, 77 nt, Human
gccaggcccagaggcuuccugccaccugagaggagccauugaagaccuccuuggguggucagagcuuagggaaaggc

SEQ ID NO: 4107018 - RNA, 93 nt, Human
gccaggccugagcagguccuuucugggcaggaagugccaagugugggucucucuuugcucugcccacgucuugcccagaagcucaguuuuggc

SEQ ID NO: 4107019 - RNA, 57 nt, Human
gccaggccugcaagugcugguggagcuguucccacuggccugggcuuaggggcuggc

SEQ ID NO: 4107020 - RNA, 55 nt, Human
gccaggcucuucccacacaguacuagacuucacugccucugugggccuuccuggc

SEQ ID NO: 4107021 - RNA, 56 nt, Human
gccaggcugggccaggccugcagggucacgacuggagggugugggcccggccaggc

SEQ ID NO: 4107022 - RNA, 68 nt, Human
gccaggcuggguaaaggcugcuuuucuaggacuggacucgugauagaagacuuuauagcccagcuggc

SEQ ID NO: 4107023 - RNA, 80 nt, Human
gccaggcugggugguacugggggcccacaggggaggccaacggcuggccugcuggaggagccucagggccucccagaggc

SEQ ID NO: 4107024 - RNA, 57 nt, Human
gccaggcugguuauuuaaugaguuuuaugauacauuaaaucuuccagaccucacggc

SEQ ID NO: 4107025 - RNA, 66 nt, Human
gccaggcuuauucccugcugucuauccagagccuagaacagggcuggcacacaguggaugccuggu

SEQ ID NO: 4107026 - RNA, 68 nt, Human
gccaggcuugagcaaaucagaaguuuagaugcuaauguauuugagcuucagugaugcuuucugcaugc

SEQ ID NO: 4107027 - RNA, 58 nt, Human
gccaggcuuuuucugggucggagaacuggaguucugccuggauuuuggaaagcuuggu

SEQ ID NO: 4107028 - RNA, 95 nt, Human
gccagggaaagcuucucaaggagggugaccuauuagcagaaauuugaauaauaagaaagagucagcuucagaaauuugggaagagcauuccaggc

SEQ ID NO: 4107029 - RNA, 65 nt, Human
gccagggacacucccuccuggugucaauuccagacaccuggcacacacuggggaguguccugggu

SEQ ID NO: 4107030 - RNA, 57 nt, Human
gccagggacuuugcauuguuuaugauuauauacuuaauacccaaaagaguuccuggc

SEQ ID NO: 4107031 - RNA, 78 nt, Human
gccagggagucuuggcagagccccagccuuggagccaaucagaccaggguucaaagcuuggcucugccaccuucuagc

SEQ ID NO: 4107032 - RNA, 55 nt, Human
gccagggccagucagaucugaucaaagccuaaaagaucaucucacagggccuggc

SEQ ID NO: 4107033 - RNA, 56 nt, Human
gccaggggagggucgucuaguccuuaagcauaaacacuggcugucuuccuacuggu

SEQ ID NO: 4107034 - RNA, 68 nt, Human
gccaggggccggggucugccgcggccaccgggggagagggagcaucuggcagacccugccuccgacgu

SEQ ID NO: 4107035 - RNA, 125 nt, Human
gccaggggggugaaacgcaguaggcagugaaagggaagauggggggagagucugcaagccaaugggcagaauuuuugauuaucuacucguuuagaucaucugucucacugcuucccuccauuggu

SEQ ID NO: 4107036 - RNA, 58 nt, Human
gccaggguugccaaugggggcagggccgcggaaggagcuguuuguguggggccuuggc

SEQ ID NO: 4107037 - RNA, 108 nt, Human
gccagguaagaucaagugaggaggcugaaccuuaggaagcacacaguaaauauucacacuucuaauggauagugcuuuaguucagcuuucuucauuccucugccuagc

SEQ ID NO: 4107038 - RNA, 78 nt, Human
gccagguacagcagggcacaguuauggaggugggguaccauggcagggcaccacccugguuacugugccaggccuggc

SEQ ID NO: 4107039 - RNA, 55 nt, Human
gccagguccaggguggagcgcucacacacagcagcccccaucuuuaggaccaggc

SEQ ID NO: 4107040 - RNA, 55 nt, Human
gccaggugcauauuagaagcauuuuccucaauaauguauuaaaaauguauuuggc

SEQ ID NO: 4107041 - RNA, 74 nt, Human
gccagguuagugcaguugguuagaauguggcaauauguccauaauuauuucccaugugaaucaauuggcuuggc

SEQ ID NO: 4107042 - RNA, 81 nt, Human
gccagguucucccaggcaggucagugaagaaggaggagcaggugcucacucggcucacgaacugcuugguuggccucuggc

SEQ ID NO: 4107043 - RNA, 85 nt, Human
gccaguaaucuuuuauccuguacaagagccaucuggauguagcaaacugcaguucacucuuuugcaggguaagggcucagcuggc

SEQ ID NO: 4107044 - RNA, 113 nt, Human
gccaguaaugucuuuaauggacagauaacuuucuuugcagugagccagagcuucaauuugcuuccucacggugcaacaggaauggcaucucauuaaaauugaacauuaagggc

SEQ ID NO: 4107045 - RNA, 67 nt, Human
gccaguacuggaaggcuggaagucaggacaggaguacaucugacucuggggcuuccagaaagcuggc

SEQ ID NO: 4107046 - RNA, 122 nt, Human
gccagucccagccagaguguaaagacguuuagagaggcuaugagguucugugugcaggguacugcaucaugagaagccauacccuagugaaaccuuugccacuuugcugagcuggacauggc

SEQ ID NO: 4107047 - RNA, 55 nt, Human
gccagugacacugaacaagucacucauuuccaggagcuucaguuuccucacuggu

SEQ ID NO: 4107048 - RNA, 61 nt, Human
gccagugcagaggugcaagcauguuugagacagcugauaguuaccucuguccagaacuggc

SEQ ID NO: 4107049 - RNA, 89 nt, Human
gccagugccaaggaacuggaauauuuguaggaugaaaccauauccugacggguuagucuucauguauauccaacuguuccuuguuuggc

SEQ ID NO: 4107050 - RNA, 87 nt, Human
gccaguggggcccuguggucacaaggcagauaauaaggagguugccucuuuggucuguggcuugggucugaaaggguccuacugugc

SEQ ID NO: 4107051 - RNA, 80 nt, Human
gccagugggugaaugcaggaacagcaccaggagcuagagcccaacucuggccugugggcugucuccggguccucagaggc

SEQ ID NO: 4107052 - RNA, 68 nt, Human
gccagugucugugcaacuccuuccacagacagagggcugucuguggucagagggcacugaacacuggc

SEQ ID NO: 4107053 - RNA, 61 nt, Human
gccagugugcaagaaaacagaaaauagcauaaaucacaauccguacaacuugcauauuggc

SEQ ID NO: 4107054 - RNA, 66 nt, Human
gccauagcugugauguagaggucaggaagcucuacugcugcuggcuuagauaucacugccacaggc

SEQ ID NO: 4107055 - RNA, 78 nt, Human
gauuugucuuucuaggacuuaccagaauuuguaaacuuauuuauucccuaccauguaaguucuaugagaagagaaauc

SEQ ID NO: 4107056 - RNA, 69 nt, Human
gauuugugcagggcaguuuguuucggcaugguacucugccacauggugauauauuugccugcagagauc

SEQ ID NO: 4107057 - RNA, 129 nt, Human
gauuuguucaucaguugaaaguuacucgggucacaucugaaggcggcucuaggucacccuagaggccuaggcuggcugucuucaggucagggggcugaguugccauucaaagacucaaaggagugaauc

SEQ ID NO: 4107058 - RNA, 59 nt, Human
gauuuuaucugcagcaugacuucuggauaaucucugcaagaagccaugccaguaaaauu

SEQ ID NO: 4107059 - RNA, 85 nt, Human
gauuuuauuacuuaccugagcuucauucguuggggcaacaucccuuggaagucugcugcucaggaguuuuggaguaaugagcguc

SEQ ID NO: 4107060 - RNA, 55 nt, Human
gauuuuauuagcccaaacuuugaggcuuuuauugccuuuacugggaaauagaauc

SEQ ID NO: 4107061 - RNA, 123 nt, Human
gauuuuauuuauaugguuuaaacaauaacauggcucauaaacucaguucaguucugaauuguagagacuagagguguaguuugggaauuguguguuugugacuguuaagcugauguuaaaauc

SEQ ID NO: 4107062 - RNA, 99 nt, Human
gauuuucagaguugacuacagauagccaauuaaguacauagucauaccauuguuuggugauaacaaauauauuuggucuuaucuguagaugcuagaauc

SEQ ID NO: 4107063 - RNA, 60 nt, Human
gauuuucauuauagcuaguuucaaagugcuugaauugggauuaguuacuuagugagaguc

SEQ ID NO: 4107064 - RNA, 76 nt, Human
gauuuuccaugauuaaucuguucaucaguucguacauauuuacuaaaugagaggugucaggguagucaugaugaac

SEQ ID NO: 4107065 - RNA, 85 nt, Human
gauuuucccuggacuaacaguaaaguaaguuagcuuagguuuaauuggaauggggcugucuuacuugauugaacuaaugaaaauu

SEQ ID NO: 4107066 - RNA, 71 nt, Human
gauuuuccugagggcauuuuggugacuaaauccagggauuuagacucagguaccuuucaggaauacaaguc

SEQ ID NO: 4107067 - RNA, 81 nt, Human
gauuuucuaagcuuggaguuuggcguauuaaucaaaguaucaucuuugcuguaccaaagauuccugagguuccagaaacuc

SEQ ID NO: 4107068 - RNA, 117 nt, Human
gauuuucuucagucaaaaaaaagauacagguguuuuggaggaugauuuaagacaauacuuuugccuggucaucucuuucucagccucaccuuuguacuuuuguaccugaagagacuc

SEQ ID NO: 4107069 - RNA, 73 nt, Human
gauuuugaggccaugccuccugaucaguuuuauaucugaaucaagaacugaguuauggguaugccuugagauu

SEQ ID NO: 4107070 - RNA, 67 nt, Human
gauuuugcuuauauuuauugggcuuagagucaaaccacauucucugugcucuaaaguaugggugauc

SEQ ID NO: 4107071 - RNA, 93 nt, Human
gauuuuggaaaguguuguuuucauugagcaccugaguaacaaagacuugucugccagaccugacucaguagaaucugagauuguuccaaaauu

SEQ ID NO: 4107072 - RNA, 67 nt, Human
gauuuuucuuuaguugcuaaugagguuggucccuucuacccaaucuucaagggaagaaagaguaguc

SEQ ID NO: 4107073 - RNA, 129 nt, Human
gauuuuuggaauugucacaacugagaaacauugcuggugguguauggucugcaaguguaaagauguuccuugugaauugcuugcauccaacauuaagggcugguuuuuaccuuuuauuuuccaauccuc

SEQ ID NO: 4107074 - RNA, 95 nt, Human
gcaaaaauuauauauauggcuaaccauauaucaagacaacucaucuuaugacuugauucauggacaggccagguguauggagauacaauuuuagc

SEQ ID NO: 4107075 - RNA, 55 nt, Human
gcaaaaauuccagggacgacucccauuggcaggagcccgucucugaaauuuucgc

SEQ ID NO: 4107076 - RNA, 78 nt, Human
gcaaaaauuuugccaaauugaauuacauaauucaucuagcagauuugaugaguuccuggaugcaauuugcaaauuugc

SEQ ID NO: 4107077 - RNA, 108 nt, Human
gcaaaacucaacagcuuauuucuuggaggagauagggagagaaugucuuuuaauuauuugucuccaccaucaucuuaccaaaucauauuuaaccucuugacccguugu

SEQ ID NO: 4107078 - RNA, 82 nt, Human
gcaaaacucaguaucacuuuugagagugagaagacagccugucuucuuaauuucagcaggauaccacguaacuaauuuuugc

SEQ ID NO: 4107079 - RNA, 81 nt, Human
gcaaaagagaaagcugauggcuugcuggcugacagauaaaagcaccaugucuguauccagucugucuucagcuucuuuugu

SEQ ID NO: 4107080 - RNA, 59 nt, Human
gcaaaagugaugcuguuuaacuucugaaucauuaagaaagaugcagcuuccacuuuugc

SEQ ID NO: 4107081 - RNA, 69 nt, Human
gcaaaaucagaaaggugggcaagcagaugacauaguuaaucuauuguccaaucuuucaccuguuuuugc

SEQ ID NO: 4107082 - RNA, 75 nt, Human
gcaaaauuagaguucuauuucuaacauguuaucuaaugcugauggguguaugugaaauagaaaucuuauguaugc

SEQ ID NO: 4107083 - RNA, 78 nt, Human
gcaaaauuuagcuauguauaaccaaaguacaauguccugggaccacuugugcucuguguuauuuaaggcucaagcugc

SEQ ID NO: 4107084 - RNA, 63 nt, Human
gcaaacaccagcuccugcagaacacaagccuuaauuaauuuccagcaggaaaugagugauugc

SEQ ID NO: 4107085 - RNA, 71 nt, Human
gcaaacagaacugaauugguuauacugggcucccagcugaaggggaaaggcccacagucagucuaccuugc

SEQ ID NO: 4107086 - RNA, 85 nt, Human
gcaaacagcggggaguguggugaacaggagcacccuagguuccucuaaaggguguggcuucgaccacacuucaaaccuaguuugc

SEQ ID NO: 4107087 - RNA, 63 nt, Human
gcaaacaggaauugaugggaguccucugacauuuugaggauaucccuacacaucacugcaggc

SEQ ID NO: 4107088 - RNA, 58 nt, Human
gcaaacauaauaugaagacacuguaaagauugugucucaguuucauacuguguauugc

SEQ ID NO: 4107089 - RNA, 81 nt, Human
gcaaacauguauacauaguaccacauuugacauggaacagacauucuuuuaagugguagcuaguauucgguaauuguuugc

SEQ ID NO: 4107090 - RNA, 62 nt, Human
gcaaaccuguccuuuugucuccuuaggcauuuucuugaagugggauugcuggaugggcaugc

SEQ ID NO: 4107091 - RNA, 96 nt, Human
gcaaacucuguccuucacgaggaaagccaggguccaggccugccuucuagaggcaggucuguaaguuggccucucucugugaagucaugauucugc

SEQ ID NO: 4107092 - RNA, 62 nt, Human
gcaaagaaauugggucuguguuuaauuuugauguuucaaauuuugagcuuccaagucuuugu

SEQ ID NO: 4107093 - RNA, 67 nt, Human
gcaaagacacagggacgugcucugccucaugcaaaugagcuguucuaaaagcgucccuguguccugc

SEQ ID NO: 4107094 - RNA, 102 nt, Human
gcaaagaggagaggguguagccccugcuggcagauuggggucagcagugccugucggcuaggagcuugcugauguaucugcauggcuugcccuuuccccugc

SEQ ID NO: 4107095 - RNA, 129 nt, Human
gcaaagcaaacaguauuugauuggucauaguggagcaguagccuuauuuggaucauuucaguggaaagucccuaguuagagguuaguugacaguuucugcuugguuaagcuuaaauuuuguuuuacugu

SEQ ID NO: 4107096 - RNA, 108 nt, Human
gcaaagccaugguacucagaggcagcugcucaccccaugcucucagccuccuccucuucccagcauguauuccaaaugggugacaucuuuucuggcagauggcucugc

SEQ ID NO: 4107097 - RNA, 59 nt, Human
gcaaaggcuuagacacagaacuguuguuacugauacuucugcaaaugcuaagcuuuggc

SEQ ID NO: 4107098 - RNA, 60 nt, Human
gcaaagggaaaguggcagggucaucgggcuuuugucucuuccacugcccuucucuuucgc

SEQ ID NO: 4107099 - RNA, 85 nt, Human
gcaaaggguuuucaguggaugguuugucuugccuuuuuucccgcugggaucuucaggcauucaguacccucaugcugcccucugc

SEQ ID NO: 4107100 - RNA, 72 nt, Human
gcaaaguagcauuugaaauacagaaucuguuuuguuccaggacagaaucuauauucaguuauuuaccuuugu

SEQ ID NO: 4107101 - RNA, 59 nt, Human
gcaaagucacuucgugagcacugacuguaccagaauaaucagcaugcucuguggcuggc

SEQ ID NO: 4107102 - RNA, 78 nt, Human
gcaaagugcucugcugcagggagguuccuuguucugaccccaggacgcuucaaggacucccuuucagcuaaguucugc

SEQ ID NO: 4107103 - RNA, 65 nt, Human
gcaaagugugcacaucuuuggaguagucaaagagacacacuuccagaacagguacauuuuuaugc

SEQ ID NO: 4107104 - RNA, 61 nt, Human
gcaaaguuacagaugggguugcaauaaacagguguggauucaacuucgugugugugugugu

SEQ ID NO: 4107105 - RNA, 77 nt, Human
gcaaauauagcaguggauaauggaguugaucuguagcuagccuauagcaacugccuuuacuauauuuuaauaugugc

SEQ ID NO: 4107106 - RNA, 130 nt, Human
gcaaaugaagguugagggcccaggaaucugccuuuuucaggcucccugcaggccagugagaaaccucagcuucagggucgcagagccugcagaggccaagaggcugaggccagaggucccccaaagcagc

SEQ ID NO: 4107107 - RNA, 72 nt, Human
gcaaaugcaaacaagcugccugaagauucuuucaagauucuuuaguccagcucugugcuccuugcauuuugc

SEQ ID NO: 4107108 - RNA, 57 nt, Human
gcaaaugcaggaaauuaugcuuuuuauuucuaugaugagcucauuccugcauuuugc

SEQ ID NO: 4107109 - RNA, 55 nt, Human
gcaaauggaguggcuggacuuuguaauaaauuaaaagucugguugauuccuuugc

SEQ ID NO: 4107110 - RNA, 83 nt, Human
gcaaauuccagcgaagaagccaugcugucccaggcucuagggaugcgcggagcacugagggaggguuucuucugaggaagagc

SEQ ID NO: 4107111 - RNA, 69 nt, Human
gcaaauuccaguuuaaagaaggaugggaguugggaguccacuaauucaagcauccucuucaaauuuugc

SEQ ID NO: 4107112 - RNA, 60 nt, Human
gcaaauugauuuugugcuuuccuacguugaugauguaaagaaagacgcagaguuaaaggc

SEQ ID NO: 4107113 - RNA, 82 nt, Human
gcaaauuguuaugaagacugaaauagugcacaccaagugcuuuaggaaugugcuugguauauuuuuaguccucaauaauugc

SEQ ID NO: 4107114 - RNA, 83 nt, Human
gcaaauuguuuucuuucuaugucccuuuuauuuccaguugaauaagaauucuuugggcucagagagggaggagagcaaaaugu

SEQ ID NO: 4107115 - RNA, 105 nt, Human
gcaaauuuucugaguaugguguaauauucagcuauugaguugaagaguguuguucacuguaacuacuaguuuugaauauaauaugaauaaucagcaugaaauagc

SEQ ID NO: 4107116 - RNA, 86 nt, Human
gcaacaaaauagaucccuacauugaacuaugaguucaguuagcugggaagcugauuuucagugcugggggucauagauuuuauugc

SEQ ID NO: 4107117 - RNA, 77 nt, Human
gcaacaaggcagggggaggcucccagcuaauccagacuugaaucucagcugugggugggagcgcccugucuggaggc

SEQ ID NO: 4107118 - RNA, 65 nt, Human
gcaacaaguguaaacaugcauugguauuuacaaugucccaggugcugugcuaugcacuuguaugu

SEQ ID NO: 4107119 - RNA, 91 nt, Human
gcaacagacuugcucauugcuucucucuuauguaauguauguaaaugcauuucaugccguggaaguccugugcauucaaagcuuuuguugc

SEQ ID NO: 4107120 - RNA, 55 nt, Human
gcaacagcccagguucuguguggagucauugaaugaacuggagcuugggcuuugc

SEQ ID NO: 4107121 - RNA, 64 nt, Human
gcaacagugaggugaauaugcucccuuguucggguccaacaggagacauacugccucaucuugc

SEQ ID NO: 4107122 - RNA, 97 nt, Human
gcagaggauccagaggcagcagugauaagauaggacagaggaaaacuuucugaacucuauuccugcuucuccucauuccugccucucauuccugugu

SEQ ID NO: 4107123 - RNA, 70 nt, Human
gcagagggaaggaagccaggggcuggggagccggccacacaacugcccagugccuauccuucuccugugc

SEQ ID NO: 4107124 - RNA, 67 nt, Human
gcagagggcagagcacugaauugggaguaaagacacuuggucuggauuucugccucuaccucucugc

SEQ ID NO: 4107125 - RNA, 70 nt, Human
gcagagggcccagcacugaacugaaccugaggagacuugcguauuccucagucuccgugcucaccuuugu

SEQ ID NO: 4107126 - RNA, 55 nt, Human
gcagagggcuggacgcagguuggaaggucucaccucccacagcgccagcuccugu

SEQ ID NO: 4107127 - RNA, 55 nt, Human
gcagaggggguacuucggcccugggucuacccucuggcucccagcucuccuuugc

SEQ ID NO: 4107128 - RNA, 60 nt, Human
gcagaggguggggcaugccaguuuccugagcuaaaaggaaauauaugcaaugcuuucugc

SEQ ID NO: 4107129 - RNA, 81 nt, Human
gcagagguagauguuugacuuuguguuuuguguaaaaauucuuucuggguuaacagagaacauagaaguagcuaccuaggu

SEQ ID NO: 4107130 - RNA, 71 nt, Human
gcagaggucuggggaagucagggcaucaggcugagagagcccucugcagucuuguuuccccaggcuggggc

SEQ ID NO: 4107131 - RNA, 60 nt, Human
gcagaggugaccagcagcagggaauuucugcaauauuuucucucugcuguccacauuugc

SEQ ID NO: 4107132 - RNA, 97 nt, Human
gcagaggugcugagcugugauagggacgggggucagguggggcuuugcccacuggcccccacaccugucagggaaaaaucuucguuucacucucugu

SEQ ID NO: 4107133 - RNA, 105 nt, Human
gcagagguuaaguaacacgcugaggacacaggcuucagagaggggugaagcuggccuuugaagcuagguuguccaucucuagaagccacacccuuaagccucugc

SEQ ID NO: 4107134 - RNA, 78 nt, Human
gcagagguuccugcacagagagucccgggugccccuaaguggggcccugaaucucucucugucagucuuuccaucugu

SEQ ID NO: 4107135 - RNA, 81 nt, Human
gcagaguaaaugguauucaugugucuauucagugaaucaacaaauacguacugagcaccugcuaaaugacaguuacugugc

SEQ ID NO: 4107136 - RNA, 72 nt, Human
gcagaguaggcaggcucuuggccuuaugagcacaggacuguuccucagacccccagagcugcuaacagcugc

SEQ ID NO: 4107137 - RNA, 69 nt, Human
gcagaguggguggggcaauuccaaagggacuuuuccauuuucccuccugggcugcacuccauuuucugc

SEQ ID NO: 4107138 - RNA, 92 nt, Human
gcagagugucuguugaguuucaaaaggcuuaaauaagggaucucacuacuucauaaaucuaaagcucaacaggcacuauuuuucauauuugc

SEQ ID NO: 4107139 - RNA, 66 nt, Human
gcagauaaaugugaaaugagcaguuauguuguaaguaagacaugcuuuguuccaucauuugugggc

SEQ ID NO: 4107140 - RNA, 88 nt, Human
gcagauacugagggcugggcuggcggggacgggugugaggagccauucacuccucuacuuaccacucagccagccagcaagugccugu

SEQ ID NO: 4107141 - RNA, 63 nt, Human
gcagaucuucugaacuggaguaucugggaagagagcucccaaauauucuuuuuuaguaagugc

SEQ ID NO: 4107142 - RNA, 56 nt, Human
gcagaugagugagauagacuuccuugcugacuuggaaguuuuauguugccauuugu

SEQ ID NO: 4107143 - RNA, 75 nt, Human
gcagauggagcagcuguugccccuggugagggcacuguccccacccuugcacagggcaccaguuggccaucuugu

SEQ ID NO: 4107144 - RNA, 67 nt, Human
gcagauggcugggcucguccgcagaguuucugcuucaguaggacugcgguggggcccagucauuugu

SEQ ID NO: 4107145 - RNA, 61 nt, Human
gcagauggugggggaggaguacauacggacgaauuugaaucacaauuuccucacuauaugc

SEQ ID NO: 4107146 - RNA, 75 nt, Human
gcagaugugaucaggaaauuauuuauuaauauuggcuuuaaaauuuuguaaugaauaaacuugagagucaucugc

SEQ ID NO: 4107147 - RNA, 80 nt, Human
gcagauguuggcuccagggcaccagcgucccccuggcaugcacgcggggaccagcuggguccuguuguccggggaccugc

SEQ ID NO: 4107148 - RNA, 61 nt, Human
gcagauuauaagcuucuuuuauucaguuuaucaacugguugaagaaaagcuaguauggugc

SEQ ID NO: 4107149 - RNA, 107 nt, Human
gcagauucauuccuuuuuguucuuugauugcaaauuauuuuagucccuucagguauuauaugacaaguggauguaauagauuguagaauaauucugagugaaauugu

SEQ ID NO: 4107150 - RNA, 70 nt, Human
gcagauuccaggucccguuccccagagauucugacucaauaaagucugaguaugagguccuagaaucugc

SEQ ID NO: 4107151 - RNA, 83 nt, Human
gcagauuccuggcagcagagcucaacauagauaccaaaaauaaaugaaagugguuugcugugacugcuggccagcaaugaugc

SEQ ID NO: 4107152 - RNA, 69 nt, Human
gcccaauuucagcuuucuguuuuauggaucuguccccgaggcugcaugacaguuuugcugaaauugagc

SEQ ID NO: 4107153 - RNA, 70 nt, Human
gcccacaagauggucacauaagugcagcugcugugguuuugcugcagguuucugugaucguuuuguaggu

SEQ ID NO: 4107154 - RNA, 72 nt, Human
gcccacacaugguuccgcaggaugcaggagggucuuucccaggaguggguuuuguguagccagugagugggc

SEQ ID NO: 4107155 - RNA, 66 nt, Human
gcccacauccaggcaccacaaccagcucugugggaggaguggcaggugugggcuugggggaugggc

SEQ ID NO: 4107156 - RNA, 82 nt, Human
gcccacgcccgaccuugggcugaacccugcagcugagggugucccucucagccccacggggucagccaaggaggcccugggu

SEQ ID NO: 4107157 - RNA, 87 nt, Human
gcccacuggcaaacuugcauguuauuuuuauaggcacugggaacucuuaguaauuuuaaacaagggaaacauguaauuagcaguggc

SEQ ID NO: 4107158 - RNA, 100 nt, Human
gcccacuugucugcaggaacagcugggccuuguccccucagcuguggcugggagccugccgcggacugcacaauccuggcuguguccuggggacccuggc

SEQ ID NO: 4107159 - RNA, 130 nt, Human
gcccagaaagagugcugaauuuuugcugcauaugcuuaaaaacgcagagaguaaugcugaacuuaaggguuuagauguagauucucuggucauugagcauauccaagugaacaaggcaccuaagaugcgc

SEQ ID NO: 4107160 - RNA, 72 nt, Human
gcccagaaagcagggcagaccuccagccuauuaggucauuucugauuugggauucguccuacuauauguggc

SEQ ID NO: 4107161 - RNA, 69 nt, Human
gcccagaccaagcucuaaggcggugaggagcacauuucugcccugccaggccagugagcuuccuggugc

SEQ ID NO: 4107162 - RNA, 67 nt, Human
gcccagagaaugaaacccaccagacuuuuuccaucuacaaagaagcugaauguaauguucuuugggu

SEQ ID NO: 4107163 - RNA, 60 nt, Human
gcccagagacuggagugcaguggcgcgaucuccgcucacugcaagcucagccucccgggu

SEQ ID NO: 4107164 - RNA, 70 nt, Human
gcccagagagcacagguggugggagggugucaacaaacgucacagcccccagcuggcuuuccaagugggc

SEQ ID NO: 4107165 - RNA, 81 nt, Human
gcccagagaggaggggcacagugaguggccaccuagagaggugaccagagaaaggcacuggaaggucccaccuuacugggc

SEQ ID NO: 4107166 - RNA, 69 nt, Human
gcccagagcaucuugaaggcaggcuuuauuacuuauuuggcucugcugguaagaugccucugguaaggc

SEQ ID NO: 4107167 - RNA, 130 nt, Human
gcccagaggaugcugggcgaggccaagugaggcaggucuggccucgggcacccccauccccuggccuggauggcaccccucugccaggcagcccgcggcucucguuccagaccaaugucauccgcacggc

SEQ ID NO: 4107168 - RNA, 71 nt, Human
gcccagcaagaaguggagcaggagcuucagccaaauggaaugaggcaggaugcuugcacaggucuugaggc

SEQ ID NO: 4107169 - RNA, 60 nt, Human
gcccagcacuccucucugacauuugaucuaaaucuccugaagucauaggggaggcugggc

SEQ ID NO: 4107170 - RNA, 104 nt, Human
gcccagcagcagcuuccucagcaguguucaggccucugugggagggagggaccacgcagccucuccuuccugcagaucugagaugccaugguuugcuguugggc

SEQ ID NO: 4107171 - RNA, 81 nt, Human
gcccagcagcucugauuuccuuauucugucaccagucagaucucuucccugaagugacagagucggggcaagcugugaggc

SEQ ID NO: 4107172 - RNA, 57 nt, Human
gcccagccccuggguggacguguugggggugaccccucguuuucccaggguugaggc

SEQ ID NO: 4107173 - RNA, 61 nt, Human
gcccagcccugccauucucuggagcucagccagauugagcgggugccaggcagggcugggc

SEQ ID NO: 4107174 - RNA, 89 nt, Human
gcccagccugaauugcuuacccuuaaacauguuuauuuuuacugccaggccuuaaugagucaguaauggauaugucauuuuagcugagu

SEQ ID NO: 4107175 - RNA, 71 nt, Human
gcccagccuggcuccaggaggcucccgcgucugccaugcaggcguucuuccuuuugggaggaggcaugggc

SEQ ID NO: 4107176 - RNA, 79 nt, Human
gcccagcgcucaguuucuccaaacgcaggcugaggcucgaccagcccagaccugaggagcacugagccagucccugggu

SEQ ID NO: 4107177 - RNA, 58 nt, Human
gcccaggaauuggaggcugcagugagcuguguucacgccacuguacuccagccugggc

SEQ ID NO: 4107178 - RNA, 58 nt, Human
gcccaggaggcagagguuguagugagcugaaaucacaccacugcacuccagccucggc

SEQ ID NO: 4107179 - RNA, 58 nt, Human
gcccaggagguggagguugcagugagccgugaucacaccacugcacuccagccugggc

SEQ ID NO: 4107180 - RNA, 58 nt, Human
gcccaggaguucaaggcugcagugagcuaggaucgugccacugcacucuacccugggc

SEQ ID NO: 4107181 - RNA, 55 nt, Human
gcagcgguggaccaggggcggccccgaccccgcgugcccaggggccaaccgcugc

SEQ ID NO: 4107182 - RNA, 56 nt, Human
gcagcggugggcagggcuagggccccuggcuaccggggcauccuuucccacccugc

SEQ ID NO: 4107183 - RNA, 56 nt, Human
gcagcuaccacccaggaaggaccaugaaaauguuugcugaaugaauggaugguugc

SEQ ID NO: 4107184 - RNA, 63 nt, Human
gcagcuagaugguucaugccagagaggaacauaacuccucaucugauaaaucacucuuacugc

SEQ ID NO: 4107185 - RNA, 76 nt, Human
gcagcuauaagacuggggaucccagcuucuuauuguuugucagcaacuagaagccauucucaguuccugaggcugc

SEQ ID NO: 4107186 - RNA, 59 nt, Human
gcagcuaugccuccccugugucuuuuaugccugucgguauguccggacagaggcucugc

SEQ ID NO: 4107187 - RNA, 91 nt, Human
gcagcucaggcaauccuucaaggggcugacagcuggaggcucugccugcucccuccuagcacaguuuucauugcaggguuaucugggcugu

SEQ ID NO: 4107188 - RNA, 85 nt, Human
gcagcucaugggguagaagcaaugucugcugguggaaagagcagagguuuagaaucagaagauuugacugugaccccaagccugc

SEQ ID NO: 4107189 - RNA, 57 nt, Human
gcagcucauuccucaaucuaggagaaauuuuucuaccuugccccaggaaagagcugc

SEQ ID NO: 4107190 - RNA, 85 nt, Human
gcagcuccacagaccacuucagccagcuggggaugcggaggagaacagaguggccuccucccccgagcuguguuuguggggcugu

SEQ ID NO: 4107191 - RNA, 79 nt, Human
gcagcuccaccuccuccagggaggucugcaggacuggguucaauggcagugaugaggaccucuuuggccggugggcggc

SEQ ID NO: 4107192 - RNA, 94 nt, Human
gcagcuccaggaggaauuugcggaaggggguccucuggagacggugacgccccaccucuuugccuucuccucuucuguggauucccugagcugu

SEQ ID NO: 4107193 - RNA, 64 nt, Human
gcagcucccaagcagagaggucaacuaauaagagauagucucuucccuuuuuuaugcuagcugu

SEQ ID NO: 4107194 - RNA, 61 nt, Human
gcagcucccuggcugcaaaugaauccaucggauacagaaguuuugaggugaguggaguugc

SEQ ID NO: 4107195 - RNA, 58 nt, Human
gcagcuccuccugggcuggagacuaggugugcaccacucccccucuggguggggcugu

SEQ ID NO: 4107196 - RNA, 86 nt, Human
gcagcucguuuguaacuugggcaaguuauuucauuggaacaauguaggcagucauauuggaguaaguugaggagcaaccgaguggc

SEQ ID NO: 4107197 - RNA, 63 nt, Human
gcagcucuacaaagugugcccaugcugaggcuugagccugcagaggguacuuuuuguucaugu

SEQ ID NO: 4107198 - RNA, 76 nt, Human
gcagcucuguuuuccauggcauuucccuucuuguccaagucugggacuuagggacccauagagagaccaguguggc

SEQ ID NO: 4107199 - RNA, 56 nt, Human
gcagcucuuggugcucuuuucaccuuaguuuuggguggaaugaggcugagcagugc

SEQ ID NO: 4107200 - RNA, 57 nt, Human
gcagcucuuuucuuaaagagauggaauccauuuuccuacuccuugaaucagggcugc

SEQ ID NO: 4107201 - RNA, 73 nt, Human
gcagcugagucugagguucuuugcagaauuaaauucuugauuuaaagauucaaaagccaagacuuugaguugc

SEQ ID NO: 4107202 - RNA, 76 nt, Human
gcagcugcagcuguuuucugagugcaugugagacuuccagaaauaguguauuccugaauaaacaggugucagcugu

SEQ ID NO: 4107203 - RNA, 71 nt, Human
gcagcuggcuucacugcucaagugauuauccugaaccauccaggccaaaucccuguuggcagugccccugu

SEQ ID NO: 4107204 - RNA, 66 nt, Human
gcagcugggcucaucaucugugcauuucacaauaaaauuuuaugaugcauccagacacccagcugc

SEQ ID NO: 4107205 - RNA, 67 nt, Human
gcagcuggucuggccuagaguaccugccuucaauucacuagcuccuucuuggccaucaagacucugc

SEQ ID NO: 4107206 - RNA, 83 nt, Human
gcagcuggugacauuauccuggccgugaauggaagguccacggaaggccucaucuuccaggugccgggggucaugggcaaugc

SEQ ID NO: 4107207 - RNA, 58 nt, Human
gcagcugucgcuaggagcugugacucagagccagagcagugacuccucgcgaagcugu

SEQ ID NO: 4107208 - RNA, 98 nt, Human
gcagcugugacacugauguauuuuauauuggauauuacuugucaguaaguucacuuacaagcagcuacauaucacagaagaggcaugguuucaccugc

SEQ ID NO: 4107209 - RNA, 91 nt, Human
gcagcugugcagaagccaugcuuccuggcccugccagagaucaacaguaggccuuguugaacuccuggagggcccaccgcuucucaguugc

SEQ ID NO: 4107210 - RNA, 55 nt, Human
gcagcuguguguaaauuuuuugucaggaauaaauaagugguuuacauccagcugu

SEQ ID NO: 4107211 - RNA, 66 nt, Human
gcagcuucagacuggagcagaggaagauguaggucaucugacuuuuuugugugugaagcauaaugc

SEQ ID NO: 4107212 - RNA, 87 nt, Human
gcagcuucccuugcccauguguguccaugugacuaaguucuggccaauggaaugugagugauaaugauacauacagagggaggcugc

SEQ ID NO: 4107213 - RNA, 64 nt, Human
gcagcuuccugaguguggacagcaagccaggaggccugggggaaugccguccucagggaucugu

SEQ ID NO: 4107214 - RNA, 81 nt, Human
gcagcuugaacgggggcaggucuggaacuuugauguaggaaaaaccacaauucacuuuucaaaccuucuccuggaaggugc

SEQ ID NO: 4107215 - RNA, 61 nt, Human
gcagcuuugaagacuuauuugcaucuugguucuugguguuuucuggauaaguugagguugc

SEQ ID NO: 4107216 - RNA, 57 nt, Human
gcagcuuuuuagaaucuagggcaaaagguuugcuggacuggguucaagagagaaugc

SEQ ID NO: 4107217 - RNA, 57 nt, Human
gcaggaaagguugagacuuugcucuuaaagaucuagcagcuccaagaucuucccugc

SEQ ID NO: 4107218 - RNA, 106 nt, Human
gcaggaaaugacccugaggaaagccacuugaugucauucuuugaauguucugcugucagcucccaaaacugucaggaaugaggucguaagugucuccuucagcugc

SEQ ID NO: 4107219 - RNA, 55 nt, Human
gcaggaacuugggugaagucagcgcucaguuuugauuuuaucuuugaaguuccgc

SEQ ID NO: 4107220 - RNA, 72 nt, Human
gcaggaagcuggcauguguuuggcuccuguuguguaacaggcacuuugacaugccaucucuauacuuucugc

SEQ ID NO: 4107221 - RNA, 62 nt, Human
gcaggaagguggagcagguggggacugcaguugcaggaccucucuguguggccucuccaugu

SEQ ID NO: 4107222 - RNA, 86 nt, Human
gcaggacaggggccuggggugagacuccugggaagcacaugggcaacauuagcuuccaggucauucucacccugcccucuucaugc

SEQ ID NO: 4107223 - RNA, 83 nt, Human
gcaggaccaaauucuucuuccuccacagggcccaccaggcugguagggcagauucgguggaguuugaggagagcuguuucugu

SEQ ID NO: 4107224 - RNA, 65 nt, Human
gcaggaccauauuacuuuggugacaguucuuauauaugaacuauugcuuagagcaauggggaugc

SEQ ID NO: 4107225 - RNA, 77 nt, Human
gcaggacugaauuccuucuggaugugcuaaggaagaaucuauuaauuugccuuuuccaguuccuagaagccaccugc

SEQ ID NO: 4107226 - RNA, 59 nt, Human
gcaggagaaaugaagauugggugaaggcguccuucuuccaggcacgcauuucuucuagc

SEQ ID NO: 4107227 - RNA, 92 nt, Human
gcaggagaauugcuugaacccaggaggcagaaguugcagugagccaaagaucgcaucauugcacuccagccugggugacagagcgagacugc

SEQ ID NO: 4107228 - RNA, 56 nt, Human
gcagagauggcugccucugagucacccucccuccuugacucaucugccaccucugu

SEQ ID NO: 4107229 - RNA, 55 nt, Human
gcagagaugugggagaugcuucugcaggaagcacacugguaucuccucacucugc

SEQ ID NO: 4107230 - RNA, 64 nt, Human
gcagagauuucagguuggggcagaaggcggugguaagccuucuccuggaacacuggagaggugc

SEQ ID NO: 4107231 - RNA, 113 nt, Human
gcagagauuugcuuucaucacaccauauuggcauccucucccuccuccuugcgguaagccaaggggacugaaugccagucuauggaagaugguuuucaagaagcagugucugu

SEQ ID NO: 4107232 - RNA, 76 nt, Human
gcagagcaaggauggcuuugugcaccaugauuuucacuuccaaauuucaaacagggcugucccaaaccuugccugc

SEQ ID NO: 4107233 - RNA, 80 nt, Human
gcagagcaauuacacccagcauuggcuaagagaggacucuguucaucucgccuaucuggagugaaccuguugcuauaggc

SEQ ID NO: 4107234 - RNA, 74 nt, Human
gcagagcacagugaucuugcugauuuaggagacagagaucugaguccagguaggccaagacagcuauaauuugc

SEQ ID NO: 4107235 - RNA, 84 nt, Human
gcagagcagcguggaggccuguuccuuccugggcacgcggcacagccagggugaggcccgagggggaaaggugcaugacucugc

SEQ ID NO: 4107236 - RNA, 59 nt, Human
gcagagcaggcagaccaaggaguucaucuucucagagcugcuguccaaccugcacucgc

SEQ ID NO: 4107237 - RNA, 71 nt, Human
gcagagcauaguagguaagccauggucuuuggagacaagaaagccaaaguucauaccuaccauuugccugc

SEQ ID NO: 4107238 - RNA, 60 nt, Human
gcagagcaugacuuaaucuagaaaccuuaucuuccagaauuaguuaagcauguaaucugc

SEQ ID NO: 4107239 - RNA, 59 nt, Human
gcagagccugggggucugcggaucaugguaggagccccucagguccccuaagacucugc

SEQ ID NO: 4107240 - RNA, 75 nt, Human
gcagagcucaagaaauauggucaggagaagggcugucaugacgcuugcuugauuaugaucauaaaacugcucugc

SEQ ID NO: 4107241 - RNA, 60 nt, Human
gcagagcugggucuguauccaagccucuggcuccugcuacagcauagauagcagcucugc

SEQ ID NO: 4107242 - RNA, 79 nt, Human
gcagagcuuguggaguacacuugucacccuuaagacuguucucaaauggccugggacaguuguccuccacucuaucugc

SEQ ID NO: 4107243 - RNA, 84 nt, Human
gcagaggacagcccaucccaccucaaucugaagcuccggaaugacugggaacaggaaaggagggaugcuagggauagucccugu

SEQ ID NO: 4107244 - RNA, 69 nt, Human
gcagaggagggcuugcuggauggggcgcaaguagcuugaggcccuguggacccaggaacucuucucugc

SEQ ID NO: 4107245 - RNA, 56 nt, Human
gcagaggccugaagguggcgggagcucuguguauccuccugcugcccacccucugc

SEQ ID NO: 4107246 - RNA, 93 nt, Human
gcagaggugucucagccaaagucauauggcuauuuagugggaggaacaagggcucuucucccaggcucuuaugugacuugcaagacauccugc

SEQ ID NO: 4107247 - RNA, 60 nt, Human
gcagaggugugggaggggccacagggccugcccucuucggccacagcccagcacuuuugu

SEQ ID NO: 4107248 - RNA, 100 nt, Human
gcagaguauuuugguugaacuacaaaaaucaacauuuagugauauauccuaaguggacugucuuugauauuuguuuucuuuuagcacaaugaauuucugu

SEQ ID NO: 4107249 - RNA, 102 nt, Human
gcagagucccagggauucauccaaaggccugggaggccucucuuccugcugccgaugcggaugaagacaggccccuugcugcugcaugcgccgugguucugc

SEQ ID NO: 4107250 - RNA, 59 nt, Human
gcagagucugggcagccuccauccacuggcuugcacaacugcugcccagggcucuacgc

SEQ ID NO: 4107251 - RNA, 63 nt, Human
gcagagucuuuagaagguguuugugguacaagaagagaggcaauaaauucugagaggcucugc

SEQ ID NO: 4107252 - RNA, 56 nt, Human
gcagagugguuucagaguugagaguaaauuaagucucuugauucuugcuacauugc

SEQ ID NO: 4107253 - RNA, 78 nt, Human
gcagaguguguguggggucauacgaugacucuugauaauuagucaaagagacagagccauguuucuacacaacuuagc

SEQ ID NO: 4107254 - RNA, 68 nt, Human
gcagaguucugggccccgcccuagacuggaugaaucagaauaucuggggacggggcccagcaaucugc

SEQ ID NO: 4107255 - RNA, 113 nt, Human
gcagaguuggguuaaggaaucauuacacaugaaguauccuaguuaccagaaaaaggucacuggacugaagcaggaaacuucuuguuuugguucuuuaagguauucuacucagc

SEQ ID NO: 4107256 - RNA, 63 nt, Human
gcagaguuuaauuaaguguugugagcagccuagugagaaacacacuuuaaauuaaaccucugu

SEQ ID NO: 4107257 - RNA, 73 nt, Human
gcagauaagcucacuguaagaacugauguaguaaaaucuucacaguuauugaagugagcucuaaauucacugu

SEQ ID NO: 4107258 - RNA, 63 nt, Human
gcagauaugcaacaucugguagaaaucccucggauucucuuggauguaggcauaggcuuuugc

SEQ ID NO: 4107259 - RNA, 56 nt, Human
gcagaucagagaaugugcugggaauaacguaaucugcauucaaauccugauccugc

SEQ ID NO: 4107260 - RNA, 80 nt, Human
gcagaucccggugcagcugaaggcuggccagcugcaguguauccgcuuagcccagucuguaucaggcacccacguucugc

SEQ ID NO: 4107261 - RNA, 57 nt, Human
gcagaucugcaccaugggccaaguuucucagaaaauacauggcuuccugcgggcugc

SEQ ID NO: 4107262 - RNA, 92 nt, Human
gcagaucuucccuggggcugagggauggccgcugcccaaguaccugggcuccuguggcagauuccucgucagcaccagcaccagaccgcugc

SEQ ID NO: 4107263 - RNA, 93 nt, Human
gcagaugaaauaagaggacagauguuuggugugguuuucagggccuuauaaaacuuccucucccccucagaugucucuccauuauuuacuugc

SEQ ID NO: 4107264 - RNA, 61 nt, Human
gcagaugaggaagcuaaugcugagaagaaccucaucaacaaguugguuucucauauccugc

SEQ ID NO: 4107265 - RNA, 60 nt, Human
gcagaugauuccuguaggaugucuuuaagcaaugaugcgcaccugcuggaaucagucugu

SEQ ID NO: 4107266 - RNA, 59 nt, Human
gcagaugcagaacucaguggguuuucauucaauaugcauuuacugaguaucugccuugu

SEQ ID NO: 4107267 - RNA, 70 nt, Human
gcagaugcuggagugauacucagaaugugggucauguucuagaauuccauauuuuaagcauuccggaagc

SEQ ID NO: 4107268 - RNA, 60 nt, Human
gcagaugcuguggugauagaaguuccugaccuagauaaggauaucauauaugguuucugc

SEQ ID NO: 4107269 - RNA, 61 nt, Human
gcagaugcuuggcacugacaguauuugucucauuguggaauggucagggcuaaugucaugc

SEQ ID NO: 4107270 - RNA, 68 nt, Human
gcagauggcucagcccauggaagaaaacuuucucaagaugcuuuucuuccaggccugggcucaggagc

SEQ ID NO: 4107271 - RNA, 65 nt, Human
gcagauuaagaaguaugccucauguauggugaacauuaaaucgaugcugacuucuuguuaucugu

SEQ ID NO: 4107272 - RNA, 80 nt, Human
gcagauugcauuucauugggcaggaaaguugcuuggucucucggggcuauuuggccaagcugcccacaggugcccacugc

SEQ ID NO: 4107273 - RNA, 80 nt, Human
gccccucgcacaccgugggugauguacuggaggccaagaugcggcauggcuucucuggcauccccaucacugagacgggc

SEQ ID NO: 4107274 - RNA, 68 nt, Human
gccccugaaaaucccagauuguguuguuuccuguacuaggaaacauugauauugggaaagaaaggggu

SEQ ID NO: 4107275 - RNA, 97 nt, Human
gccccugagaauaugggaaggaaaaguauccacagcucaggaggaagggauagcauuggccucauggagggagugcucuucccauagagcaggaggc

SEQ ID NO: 4107276 - RNA, 79 nt, Human
gccccugagucaaguccagugaggcugaauggccacucauccugcauuaaucucagccagggcucuggccucagugggu

SEQ ID NO: 4107277 - RNA, 76 nt, Human
gccccugaugucuuucucacagccaguucauauccucugauuguggaguugcugagacagaacacacucacagggc

SEQ ID NO: 4107278 - RNA, 59 nt, Human
gccccugccuuugaaccuggagauccugaccaugaucuccuggugcugcuaucaggggu

SEQ ID NO: 4107279 - RNA, 62 nt, Human
gccccuggagauccuggcgcgcggggggcggcgacugcuccugccguggucgggacuggggc

SEQ ID NO: 4107280 - RNA, 55 nt, Human
gccccuuaaagacauaggaucagggagauggaaucaucucucagccgucuggggc

SEQ ID NO: 4107281 - RNA, 126 nt, Human
gccccuuccccacccccacacacucagagccucaccauugcugucuggcucaagacuggggccugcagaguuuuuuucuauaaagggccagauaguagauauuugagguuuugugggccaaggggc

SEQ ID NO: 4107282 - RNA, 101 nt, Human
gccccuuccuaagcagcugaaacacaugcacaacaguucuuuccaucuaggcuggauaagggccagugggcaguagcagcugaaguaggucacaagguggc

SEQ ID NO: 4107283 - RNA, 88 nt, Human
gccccuugggauagaguggcuugcucagcuagcagaauaguuuaucuagcuccuggugagccuacucuuuccucccaccuuggggagc

SEQ ID NO: 4107284 - RNA, 97 nt, Human
gccccuugggggaaucacauuuuguugugcguuuguuugguuuugaucaacucuaaacacuauguaagcaagaaccuugucuggcuuucucacuggc

SEQ ID NO: 4107285 - RNA, 64 nt, Human
gccccuugucuccaggccccaaaggcaucuggccaggcugggggaggcuuguggaggcaggggu

SEQ ID NO: 4107286 - RNA, 69 nt, Human
gccccuuuaggcucucuagaaacugugccuuccuuucuaggaaggagaacacaguagaaagaccugggu

SEQ ID NO: 4107287 - RNA, 69 nt, Human
gccccuuuccucuccaccaggaggucuucugguucccagggugcccucugcuggaggaggcuaggcagc

SEQ ID NO: 4107288 - RNA, 75 nt, Human
gcccgaccaguugggcuggaccgcgaccccugagcacugccagggagccuggugugucagccgcugcuagcgggc

SEQ ID NO: 4107289 - RNA, 66 nt, Human
gcccgagcacagaacuaaaugcugguagugagagucgaccucucucaucaggguucugugaugggu

SEQ ID NO: 4107290 - RNA, 72 nt, Human
gcccgaggcgccccgcgcguugucccgcagguugcuugcugcgaccggagguggcguccggggacuucgggc

SEQ ID NO: 4107291 - RNA, 65 nt, Human
gcccgagguccagagagauaaagugacuuuccccaaauuuuagaguuuucuguuccucuaagggc

SEQ ID NO: 4107292 - RNA, 80 nt, Human
gcccgauaccagcugcaggcagaggaguccaggcagaaagugagcugugugugugggcugcugcagcuaaggugaggugc

SEQ ID NO: 4107293 - RNA, 97 nt, Human
gcccgccccuaggggaggcagagggaagccccgaggaggcacccggcccgcuggggcgcgcugcccggggcuuuagggcuuuuucuugugggccggc

SEQ ID NO: 4107294 - RNA, 72 nt, Human
gcccgcuucacagcccggcuuccccgguugcuaggcagauuucgccucgcacacuuccggguugaggcgcgu

SEQ ID NO: 4107295 - RNA, 129 nt, Human
gcccggcggcccucaagcugggcacccaacagcugaucccuaagagccuggcuguggccagcaaggcaaagaccccagcccgccaccagagcuucggggcggcuguacuuagcagggaggccgcccggc

SEQ ID NO: 4107296 - RNA, 78 nt, Human
gcccgggccuuguaggcugggcauucuggccaggccaggggcacugguuccccaggugccuaguggaaggccuguggu

SEQ ID NO: 4107297 - RNA, 66 nt, Human
gcccggggaggcucuugagaggggaguaggcuacuccaggcugcauuccagggagccuccuagggc

SEQ ID NO: 4107298 - RNA, 55 nt, Human
gcccgugguugggaaaggcaguaucauauaugcagucuuucuaccucuauguggc

SEQ ID NO: 4107299 - RNA, 59 nt, Human
gcccgugugcagagugggagcugggccaaaaggaagccaauuacaucugcaacacuggu

SEQ ID NO: 4107300 - RNA, 83 nt, Human
gcccuaagccuggguggcccaugcauccugugcagccgucuuggcucucuccucgcggcugguguuagucacuccuggcgggu

SEQ ID NO: 4107301 - RNA, 82 nt, Human
gcccuaaucccaaugugccuguguuuggaguuaagaccuauaaggaggaaauuaagacuaaaugaggucauaaggauggggu

SEQ ID NO: 4107302 - RNA, 101 nt, Human
gcccuacuacagacaaaaaucacuguguccuuuguguaucuauaguaguuugaauuuccagauacagugcauagaggcaugauacuuuggucuucuggggc

SEQ ID NO: 4107303 - RNA, 58 nt, Human
gcccuacugugugcucuuuaugagacacuuacuucacauucaauuacacagauagggu

SEQ ID NO: 4107304 - RNA, 92 nt, Human
gcccuagggugugccuucucccuaaccaaauccugaaauaagccaguauaccaaggaugugggguuagagggggucuggacuuccuuggggc

SEQ ID NO: 4107305 - RNA, 59 nt, Human
gcccucacaggcuaaauuuaugcagguugcugaugcuuugugugaaucagccugggagc

SEQ ID NO: 4107306 - RNA, 92 nt, Human
gcccucaguaccucagaauaugaccuaauuugggaauagggucaagguacauauaacuuguuaaaaugaggucauucuggaguaaggagggc

SEQ ID NO: 4107307 - RNA, 71 nt, Human
gcccuccauggugauccaggccagugcuucucaaaccuuagcaagaggggguuggaaucaccuggagaggu

SEQ ID NO: 4107308 - RNA, 61 nt, Human
gcccuccccacuugcuccaccuuccucccaggacgaaaccugagccagaguggggacaagc

SEQ ID NO: 4107309 - RNA, 82 nt, Human
gcccuccccccagguuuggucuccuuugucaaggccccgcugccucagugguggccagguggcuguccuggcgugggagggc

SEQ ID NO: 4107310 - RNA, 63 nt, Human
gcccucccugaagaaguuacucuugugcagagauaugaaggaaagagacucuucuggaagagc

SEQ ID NO: 4107311 - RNA, 61 nt, Human
gcccuccugcaggggcuucuggccuggaugguggcaaucaaggggccauggcaggggaggc

SEQ ID NO: 4107312 - RNA, 66 nt, Human
gcccucgccagcuguccuuccuggugggcgccgagggaaggcgguccaggauggcuggcaagcggc

SEQ ID NO: 4107313 - RNA, 79 nt, Human
gcccucucagcucucccuggauccaucgggucccgagugggauugcccacugggcuccaaggaccuggaggaagagggc

SEQ ID NO: 4107314 - RNA, 58 nt, Human
gcccucugaugcucaccgaggacaacuguggccuugucuggauuguuacacagagggc

SEQ ID NO: 4107315 - RNA, 58 nt, Human
gcccucugccacaggacgccagccucggccucagagcugccggcugcugcagagaggu

SEQ ID NO: 4107316 - RNA, 69 nt, Human
gcccucugccuguaacuuucugaagcaguaguuuuucacgugugccugacaguguuacgggaggggagu

SEQ ID NO: 4107317 - RNA, 67 nt, Human
gcccucuggaggccuaaggaaguggcagcucuuuaaauccccaguggccacuccgcccccagagggc

SEQ ID NO: 4107318 - RNA, 57 nt, Human
gcccucuggggaagcagccagcuggggagugcucucggccugugaccccgggagggc

SEQ ID NO: 4107319 - RNA, 58 nt, Human
gcccugagagcagcuuccugcuuaggccaacuuuagcacaaggugcugccugcaaggc

SEQ ID NO: 4107320 - RNA, 58 nt, Human
gcccugaggcaaaagaacagucacugcaaguucaaggcugccauaaugucucggaggu

SEQ ID NO: 4107321 - RNA, 65 nt, Human
gcccugaggcaguaggagcuuuucuuguuuauggaagggaaaggaggccagcgugccuggggugc

SEQ ID NO: 4107322 - RNA, 77 nt, Human
gcccugaguucuggggaaccccaaaagcuccugauccgggagcugaccugcagguuccccuaaccccacucaugggc

SEQ ID NO: 4107323 - RNA, 86 nt, Human
gcccugcaggcucucugcugccagaugacgagugaagaugaaaguccugaugucuauugucugugugcacagagcuuuggaguggc

SEQ ID NO: 4107324 - RNA, 65 nt, Human
gcccugcagugcucugccuauaauggaauagaagccacuuccaccaaggagaacacucaguaagc

SEQ ID NO: 4107325 - RNA, 55 nt, Human
gcccugccagaugugcuucaguuucucaaugcuaaacugcuucccaucuuagggc

SEQ ID NO: 4107326 - RNA, 58 nt, Human
gcccugccaugguagacuuccaggggaaacaucucuguggcuguuuuccugugcgggc

SEQ ID NO: 4107327 - RNA, 70 nt, Human
gcccugcccucuugggacccugcacuugggccacggggacccagcuccagccaccggggggugccagggc

SEQ ID NO: 4107328 - RNA, 74 nt, Human
gcccugcgcuggcucccggggaucgagcaccgcgagagguugggcgcccggggccgcgggggugggcguugggc

SEQ ID NO: 4107329 - RNA, 90 nt, Human
gcccugcggcuucaggcaucugcugcccuucuggaaccugugaccuccaggacagcggcaggcagaucuucagccccagagguccagggc

SEQ ID NO: 4107330 - RNA, 60 nt, Human
gcccugcucaccugccucuucuccuuccugucugggagggggcuccuuggugugcagagc

SEQ ID NO: 4107331 - RNA, 62 nt, Human
gcccugcucuuuugcccacccaccugaccuccuguuguuuguguuggccaaagugccagugc

SEQ ID NO: 4107332 - RNA, 57 nt, Human
gcccuggaaaggaaccugggcuuacuuuuccacgccagcccaguccuuguccugggc

SEQ ID NO: 4107333 - RNA, 60 nt, Human
gcccuggagccagggcuggcucugaugggcuccagggcuggcucugaugggcuccagggc

SEQ ID NO: 4107334 - RNA, 69 nt, Human
gcccuggaggcagaaauaggacuugugauucaccuucaguuuaaaagcgcuaauuucugccuucugggu

SEQ ID NO: 4107335 - RNA, 58 nt, Human
gcccuggagggccagcgacuggagggugagugauucccaggucuggaaccaccagggc

SEQ ID NO: 4107336 - RNA, 66 nt, Human
gcccuggaggucaagacugcagugagccgugauugcaccacugcacuccagucugggcaacagagc

SEQ ID NO: 4107337 - RNA, 88 nt, Human
gcccuggcacccaggacaaggucccagccccucuuggcccagcagagcgagggaccaggagaacugaggccacucuggggcccagggc

SEQ ID NO: 4107338 - RNA, 76 nt, Human
gcccugggaagggcagaaagggacgcuuuguauuaguaggacaaagcugugacuuuuagccuuucaaaaugagagc

SEQ ID NO: 4107339 - RNA, 61 nt, Human
gcccugggaauggucucucagcuguggccccuucugggucccacaggggccuuuccagggu

SEQ ID NO: 4107340 - RNA, 110 nt, Human
gcccugggccaggcuugggugggguuuguggugcaggcaguccaggugggcaucgucccagaugcucugcugguaccaguggccgucaccuaugaccugguuccggaugc

SEQ ID NO: 4107341 - RNA, 57 nt, Human
gcccuggggccucaggccuuuuccuagcagucugcuaggcuccugaggacuccaugc

SEQ ID NO: 4107342 - RNA, 57 nt, Human
gcccugucagcaccuaauucagcuucccauggagaaaggccucccuguugacagggc

SEQ ID NO: 4107343 - RNA, 61 nt, Human
gcccugucaugucagugucuguguguggccucccagcccaaccagaaauugacagagaggc

SEQ ID NO: 4107344 - RNA, 88 nt, Human
gcauggcuucuguacuguaaaaauugguuuggaagcucagggaucacaggacccuggagugccggaaucaagauacaaccugccuugu

SEQ ID NO: 4107345 - RNA, 130 nt, Human
gcauggcuuugaggcuagaaucaugagcaaucucucauaaacaagucuguuaugcaccuggagauacucaagauuugccucuguuagcauggccacuuagagauuacucuguucuacuucagagacccuc

SEQ ID NO: 4107346 - RNA, 89 nt, Human
gcaugggaacuguuuagggugguaagaggaucaaggcggugcacaaagagauguguguagugauuuucuuccaaccaguuuucccaagc

SEQ ID NO: 4107347 - RNA, 56 nt, Human
gcaugggagccaacucugaggguggugagauugccaagccucacagacuuccaugu

SEQ ID NO: 4107348 - RNA, 58 nt, Human
gcaugggaggacagucugggcuguugaagucgguguggauugauagcucuuccggugc

SEQ ID NO: 4107349 - RNA, 74 nt, Human
gcaugggaggcagcccuguggagaggcccacguuagugagcuuggaaguggauuuucuacggccugccaccagc

SEQ ID NO: 4107350 - RNA, 69 nt, Human
gcauggggaguaguuagcuaggugccaaggggaggggaaaguauuccaggcaaaaggaacugcuugugc

SEQ ID NO: 4107351 - RNA, 74 nt, Human
gcaugggucaccagcagucuggaugcccuucuuccucaagguggcugguccaggcugcagccugcugccccugc

SEQ ID NO: 4107352 - RNA, 69 nt, Human
gcaugguggagaggggagucugugagugcuccuccagccucugugcacagcuuccuacuuugcugcugc

SEQ ID NO: 4107353 - RNA, 63 nt, Human
gcaugguggcagcugggacagaggugggugcucagccgccguugucacuguugccacugcugc

SEQ ID NO: 4107354 - RNA, 86 nt, Human
gcauguacacauuugauguuucugucaccuagggcugcauaucaaagcaucccaaggcauauggcugaaaccaacauguauuuugc

SEQ ID NO: 4107355 - RNA, 130 nt, Human
gcauguauccaggagacagaagcacucagcaucccagucccuccuuccacuccugcucugagguugcagugaagcaggguuuggggauuggcacccagcaugaugacugugugucucuggauguacaugu

SEQ ID NO: 4107356 - RNA, 60 nt, Human
gcauguaugcugaucaaucuggggacauaauuuucaugauaggcugguuaguguaucugu

SEQ ID NO: 4107357 - RNA, 57 nt, Human
gcaugucaugucauguaggaauggcauacacagaaccacuccuacgugaaggacugc

SEQ ID NO: 4107358 - RNA, 69 nt, Human
gcaugucugugcuugguauaauaagccuauuaaaaggaaguggucugucuauaccugauacagaguugc

SEQ ID NO: 4107359 - RNA, 58 nt, Human
gcaugugggagggucuucccacacugacacacccucaaggguauacccccucauaugc

SEQ ID NO: 4107360 - RNA, 74 nt, Human
gcauguggugcucucagaaguaacuuguccaugaucacaaaccaguaaguggcaauuuaauuuugaacacaugu

SEQ ID NO: 4107361 - RNA, 66 nt, Human
gcauguggugggcuggccacucggggcugcaguuccaauuuccaaugucuccaguucuucacaagc

SEQ ID NO: 4107362 - RNA, 84 nt, Human
gcaugugguuccuggcuuccugcucuugucaaguaacuaguggccugauuggagcuggcagccccuuugggaaccgcugagugc

SEQ ID NO: 4107363 - RNA, 69 nt, Human
gcauguguaagauucuaagaguuaaugcagagacuuaucuuuauugaugaaagggauuuuggauauugc

SEQ ID NO: 4107364 - RNA, 60 nt, Human
gcaugugugcguguguauguguguguguguguguucccgugugugugcaugcgcacgugu

SEQ ID NO: 4107365 - RNA, 55 nt, Human
gcaugugugcugcacuuuguugugccugaaguacccaaaguacaaguaaacaugu

SEQ ID NO: 4107366 - RNA, 63 nt, Human
gcaugugugcugugcaugcacauauguguuguacaugcacauauguguuguacaugcaugugu

SEQ ID NO: 4107367 - RNA, 57 nt, Human
gcaugugugggguuaugguguauaugggaaaucuuuguacauuucacuccauugugc

SEQ ID NO: 4107368 - RNA, 91 nt, Human
gcauguguguguauaaguguguagaguaagagaucuuccagaaauauaacuuuucuuuucccuuuagcacuuguuuucuguguacaugugc

SEQ ID NO: 4107369 - RNA, 72 nt, Human
gcauguguuucuuuucaaaauugcucugaaaaauauuaguuauuucaagcagcgugaaaaacgacagagugu

SEQ ID NO: 4107370 - RNA, 129 nt, Human
gcauguucaauauccuagcauauggaccagugguugagguuccaugguauaggccauugggggcagcugcauagcuccucccuguaccauuccucugcuccauuuuauuauguauugcguuggacuugu

SEQ ID NO: 4107371 - RNA, 87 nt, Human
gcauguucauucauucauucauuccucauuauuuacugaggacuuaacaagugccaagcauggggaggaaugaugugaugauuaugu

SEQ ID NO: 4107372 - RNA, 66 nt, Human
gcauguucucucagacauccaaagucuuuugcugauagucugagacuuugagcucuuagagaaggc

SEQ ID NO: 4107373 - RNA, 83 nt, Human
gcauguugaaucuucucuuucugcugggcuggaaggauuaucuuacugugcuucccauguucugggaggagaaauacaacagc

SEQ ID NO: 4107374 - RNA, 79 nt, Human
gcauguugcagcuuucccacgcaguggaugagaacgaagguuacgaccauugugugggaggcgucuguguagcaauugc

SEQ ID NO: 4107375 - RNA, 76 nt, Human
gcauuaaaagcuugguuaccaguuggaacguggagagaacucuguauaguuaguuucauaaucauguccuuaaugc

SEQ ID NO: 4107376 - RNA, 77 nt, Human
gcauuaaacuaggauuuaggagcuggcuaacguuaaccaauagaaaugaagccacuuuccagaaucacauuuaaugu

SEQ ID NO: 4107377 - RNA, 61 nt, Human
gcauuacacauagacauucguucaauauccuuuuccugugugugugugugugugugugugu

SEQ ID NO: 4107378 - RNA, 67 nt, Human
gcauuacacauagacauucguucaauauccuuuuccugugugugugugugugugugugugugugugu

SEQ ID NO: 4107379 - RNA, 71 nt, Human
gcauuacauagucaaggugucucauuucuaacaaauaccagaaauuacacuuguaaauggcauguaugugu

SEQ ID NO: 4107380 - RNA, 79 nt, Human
gccguggccguggggggccgucgucccugguugggggucuuggcccagaggcuggcggccgccccgagcagguccaggc

SEQ ID NO: 4107381 - RNA, 55 nt, Human
gccgugucauccaagaccagugugguugugggcacauuagcuuggagacaguggc

SEQ ID NO: 4107382 - RNA, 77 nt, Human
gccguguccugcaggccaggaauggguccggagcaguuuccacaucuuucccacaguccgggcuggcaggacagagc

SEQ ID NO: 4107383 - RNA, 80 nt, Human
gccguuacuuggccauuauuuggcugcagaguccacugagcuacacaggcacccugcagagggaugggggcaguacaggc

SEQ ID NO: 4107384 - RNA, 66 nt, Human
gccguucugauucuaggcguuccucucaguccuugagugagugaauaucuaagucagcauuagggc

SEQ ID NO: 4107385 - RNA, 70 nt, Human
gccguuuguagauaggguccuuauaaagcuuagugagcuuaagcuggguacacguugucacaaaucaggc

SEQ ID NO: 4107386 - RNA, 61 nt, Human
gccuaaaacgcucucaguaauauuccugagucaucccucagggcugggcuugguguuaggc

SEQ ID NO: 4107387 - RNA, 58 nt, Human
gccuaaaacugcaugcaugcauguuuuauauuuuuauguacaguguauguauuuaggc

SEQ ID NO: 4107388 - RNA, 58 nt, Human
gccuaaagguuuuacuagaugguucuauuugcagccaucacuugagaaucuauuaggu

SEQ ID NO: 4107389 - RNA, 112 nt, Human
gccuaacuuggaguuucuugcagagaaggaaacggcaaaacugcuuaguuggcccaaauccaaacugacaagccuuuucuccuuuuuaaguauuucccaauugcuguuaggc

SEQ ID NO: 4107390 - RNA, 55 nt, Human
gccuaacuuggcuuuguucacccuggcucaggcugaagcaacuggacaaguuggc

SEQ ID NO: 4107391 - RNA, 55 nt, Human
gccuaagacugaggcuuuugucuaacaguaagacacuuaccacucagucuuuggc

SEQ ID NO: 4107392 - RNA, 85 nt, Human
gccuaagcuuuguuaagauucagccaaauuguucauccauugcaggugagagaguaaauugguucaguuaccuuagaacucuggc

SEQ ID NO: 4107393 - RNA, 65 nt, Human
gccuaaucuauuuuauuacauccagagagacuuuuauaaucucuggaagugauguucauaguggu

SEQ ID NO: 4107394 - RNA, 57 nt, Human
gccuacauaucuaagacaagccagaugagauugguggacauucuggaugugcuaggu

SEQ ID NO: 4107395 - RNA, 58 nt, Human
gccuacauuucccaguugaauguaauuaauuuggcaaaaaucacuggguguauguggc

SEQ ID NO: 4107396 - RNA, 85 nt, Human
gccuaccucauaagauuacagugagaaauaaaaugcuuuauuaacauuguuagugucugugcuguuguuuaaaagaggguugggu

SEQ ID NO: 4107397 - RNA, 84 nt, Human
gccuacuagauauguaugaggaguauguauuuuccacacauuuucccaggacacgaaugcuuuuccucuguaaauauuuguagc

SEQ ID NO: 4107398 - RNA, 108 nt, Human
gccuacucugucuuuguggugcugguugugcauuuaugaagaaguucuuauuuuggaagaacuucuugcucaugaguauaaagcacauucuucguuuuaaaaguaggc

SEQ ID NO: 4107399 - RNA, 94 nt, Human
gccuagaagguagauaauuaagguguucaaacuaugacuucagcuaccaggaaguguugauccaagugguuuguauaucucucucuuucuaugu

SEQ ID NO: 4107400 - RNA, 94 nt, Human
gccuagaauuauaauacaauauaacacaucguaauaucggauauuauaccacguuuaccucccauuaggauguguauauuguguuaggcugugc

SEQ ID NO: 4107401 - RNA, 81 nt, Human
gccuagcuugcucuuaggguccugccuacagagacagaaguauucucucuguccuuacagggcucuagggguugguccagc

SEQ ID NO: 4107402 - RNA, 64 nt, Human
gccuaggcuucccgcucacaugcccccgcgacgcggcgggcgggccggguuggggaggcugggc

SEQ ID NO: 4107403 - RNA, 70 nt, Human
gccuagguuuggaccugauguuuagucuuguuccacaugguggcaagaaggcuucagguagcuccagggu

SEQ ID NO: 4107404 - RNA, 85 nt, Human
gccuagucaucucuuucuccacacuuucucucccaggccuaagaagguuuacaguccccaggugaggauaaggacaugucuaggu

SEQ ID NO: 4107405 - RNA, 66 nt, Human
gccuagucuugcugugcuaugaguuugccuggauugccauuacuuauaggccaaguagacuguggu

SEQ ID NO: 4107406 - RNA, 82 nt, Human
gccuagugaaaagcccauggggagauggggaggccagcuuguuuucauaugcuaggcuucaaaaucucccugcugacuuggc

SEQ ID NO: 4107407 - RNA, 76 nt, Human
gccuagugaugcacucuugaguuagcaaguggggugacaccacucugaaagcaaaacuagagaaagcagcaugggc

SEQ ID NO: 4107408 - RNA, 58 nt, Human
gccuaguucacaguagguuuucagacaguguuugaauaaaugagcagugaauuaaggu

SEQ ID NO: 4107409 - RNA, 84 nt, Human
gccuauaugggaaguucaggugggaauugagcaacaaaaggccaucucacuaucugaaacuuaggaacguaugaaauaaagggc

SEQ ID NO: 4107410 - RNA, 86 nt, Human
gccuaucacaucagauagaaggauagauuucuagauagaagaaauuugggcccaucuguuaucuagaaauuucuuuuguugaaggc

SEQ ID NO: 4107411 - RNA, 60 nt, Human
gccuauggaugacaaauauucuucucagauucuagcaguagaguuacugucauccuaggu

SEQ ID NO: 4107412 - RNA, 74 nt, Human
gccuauuaaagagcuuggagcaaguuaguaguaccucaugacauauguuugugcuccagccucuuugauagugu

SEQ ID NO: 4107413 - RNA, 63 nt, Human
gccuauuuaaaauaagccccaguggaugcaaugagucuuccauggagugaauuuucaauaggc

SEQ ID NO: 4107414 - RNA, 76 nt, Human
gccucaaauggaauuaugcaaccaaugaccacgacuuucccagacgcuguucacaggcugcauaaugacgaagggc

SEQ ID NO: 4107415 - RNA, 72 nt, Human
gccucaagacagggagcagaggugagaaguucauugcauacuguuuucuuagcucccugcuuuccacggggc

SEQ ID NO: 4107416 - RNA, 80 nt, Human
gccucacacagagucccagaucuacaggagggagggguugcuccugacugggggauccuggaagacuucauggagggggc

SEQ ID NO: 4107417 - RNA, 82 nt, Human
gccucaccauaccccucagagguaccagcagccucugggcagugcccaguucuccaaggucugagccucugcucugggaggc

SEQ ID NO: 4107418 - RNA, 78 nt, Human
gccucacccagaccuuucccccagguguguggugcuuaccuguccacagacuggagugagagaaauaaguuuggaggc

SEQ ID NO: 4107419 - RNA, 74 nt, Human
gccucacuaggcaucugugaggguagauuggcucaauuccuacugguaucccuacccauaggugcuuagguggc

SEQ ID NO: 4107420 - RNA, 66 nt, Human
gccucaggcuugugagccuucagaggggcaaagcaaugccuagagcugcucucccaggucugaggu

SEQ ID NO: 4107421 - RNA, 55 nt, Human
gccucagggauaggaugagcauggcagugagcacaagugaugucccccaugaggu

SEQ ID NO: 4107422 - RNA, 57 nt, Human
gccucaguaaccuuaggggauaaauaacccauguuuuccagaugucgauacuggggc

SEQ ID NO: 4107423 - RNA, 59 nt, Human
gccucaguguucucaucuguaugucgagcacugcacagaaucggaucaugcgcugaggc

SEQ ID NO: 4107424 - RNA, 99 nt, Human
gccucaguuuccucaucuguaacauaaaaaaggcuuaacuggaaauucucuaacauccuuuccagcuuugagauuuuauggaacaauguagacucaugc

SEQ ID NO: 4107425 - RNA, 96 nt, Human
gccucaguuuucacucugucaauauguaauaacugaaucugucuuuguggugaggauucagugaguuaacauauuugaagugcuuaaaaaugaggc

SEQ ID NO: 4107426 - RNA, 55 nt, Human
gccucaugacugccaucaaucuuaaagcggaaauugcugaggugcaguaagaggc

SEQ ID NO: 4107427 - RNA, 70 nt, Human
gccucaugugguagagggcagaugggcaaaaagggaugaacucccuuugucuaaguucuuucauagaggc

SEQ ID NO: 4107428 - RNA, 59 nt, Human
gccucauuuauccaucugugaggggacuggcucagcuccucgcaggagggagaugaugc

SEQ ID NO: 4107429 - RNA, 73 nt, Human
gccuccaccuccccagcacuaccagaagccagaaaaacauguuuggccagacugaggugcugggaaggagagc

SEQ ID NO: 4107430 - RNA, 73 nt, Human
gccuccagcucagaggaugcuccuuuauguugauuugacaggaauuccacauaaucacccuccgggcugcagc

SEQ ID NO: 4107431 - RNA, 71 nt, Human
gccuccaguguggucaaaggggaauguucaccaaaggagugauaggaguuugguuugggccagauggaggu

SEQ ID NO: 4107432 - RNA, 97 nt, Human
gccuccauaggagagugugugauguaaagaacuggggauguagcaguucaguuacugcaauuccucagcuuuuauuucacuugccuuuuagaugggc

SEQ ID NO: 4107433 - RNA, 108 nt, Human
gccuccauggcccagcuuagcucucaggacagaaggcugccaggguccucugugggaugcuggcucaacuuccuucuccuccccucagcuaagcuggaccacggaugc

SEQ ID NO: 4107434 - RNA, 75 nt, Human
gccucccaaagugcuaggauuacaggcguuagccauggcacccggcugaauuuuaguaauuugaauuauagaggc

SEQ ID NO: 4107435 - RNA, 69 nt, Human
gccucccaaagugcugggauucaggcaugagccaccgcacucaucccuuaucugguauuuuuuagaggc

SEQ ID NO: 4107436 - RNA, 85 nt, Human
gccucccagcaggaaaccugucugauuauggagacugccaauagcaaguuucaguuaacccagacuaauugggcugcugggaggc

SEQ ID NO: 4107437 - RNA, 95 nt, Human
gccucccuuuuaaaauaaugaaacaaacauuguuuaaguuaaauuguuacuugguuccuccccacaguguuacuugauaguguauguuacgaggu

SEQ ID NO: 4107438 - RNA, 75 nt, Human
gccuccuccugggagcucggcgcccucaggugcucccugagaugccagcaccugaacgaccugcuccagggaggc

SEQ ID NO: 4107439 - RNA, 104 nt, Human
gccuccucgaauguugaugaucagacucccguugaugacggugcauccucggagcuccugggcagacgucaccgagucgauggucuucucgccuucuaggaggu

SEQ ID NO: 4107440 - RNA, 70 nt, Human
gccuccucucuuaaaucauauuacuauccuguacaucagcagagucaguauugaauugaaauagggaggc

SEQ ID NO: 4107441 - RNA, 66 nt, Human
gccuccucugucacuuguaugucuauaauucaucaacuaaauggcuuugguggcggggauggaggu

SEQ ID NO: 4107442 - RNA, 59 nt, Human
gccuccucugugauuuugugagccagagcucccugcuugaaugcucuuuccggaggggu

SEQ ID NO: 4107443 - RNA, 74 nt, Human
gccuccucuuuucuguuccuuugagcuggccagcaccagcaaggccuacagagaggggcccaauaugaugaggc

SEQ ID NO: 4107444 - RNA, 62 nt, Human
gccuccugccgcugcugaccacucaucauccaauguguccuggaugagguagcagcuggugc

SEQ ID NO: 4107445 - RNA, 80 nt, Human
gccuccugcucugcugugccgccagggccuccccuagcgcgccuucuggagaggcuuugugcggauacggggcuggaggc

SEQ ID NO: 4107446 - RNA, 56 nt, Human
gccuccuguuaugccaugugccgccucugaaggccaacggggcagaccagagaggc

SEQ ID NO: 4107447 - RNA, 56 nt, Human
gccuccuucagucugcguggcuguguuguuaucaaggcuauguggaaugaaggugu

SEQ ID NO: 4107448 - RNA, 64 nt, Human
gccuccuuccacagcucacacuggucugaccccuucucaugccagugauugccuggaaggaggu

SEQ ID NO: 4107449 - RNA, 65 nt, Human
gccuccuucuccucgggaggccaggaggacccgggucacuuugccaauucugcggagggggaagu

SEQ ID NO: 4107450 - RNA, 64 nt, Human
gccuccuuucucugcagcuuggcauucacccccaggggcuuccagcugcaggagaaacagaggc

SEQ ID NO: 4107451 - RNA, 57 nt, Human
gccucggccccggccccgggguuucuuggcgccaucggugggcguggaggccgaggc

SEQ ID NO: 4107452 - RNA, 60 nt, Human
gccucgguuucuucaucuuucacauucuuggaggguugcugagaugaauagagaccucgc

SEQ ID NO: 4107453 - RNA, 74 nt, Human
gccucguguaacucaaauacuuauguuacuuggugaaggcaacacauuaguacaaguauuagaguuauucuggc

SEQ ID NO: 4107454 - RNA, 57 nt, Human
gccucuaccagauaacaagccagaccacccaucacuggcuugucauguaucugaggc

SEQ ID NO: 4107455 - RNA, 75 nt, Human
gccucuaggucagugcagcucccucaccugcuugauguaaaucucaaguuguaccuaagcugcgaucuaagaggc

SEQ ID NO: 4107456 - RNA, 62 nt, Human
gcagcugccaguccccuuccaggcccugucaugggauggagcagggcaucacugugcggcgc

SEQ ID NO: 4107457 - RNA, 75 nt, Human
gcagcugccaugacauguccugcuggccagccucagaaaggucuugggugaggacagggcugacuuggcagcugc

SEQ ID NO: 4107458 - RNA, 55 nt, Human
gcagcugcgaagaagucuaucucccauauggcuuuuaggacacuuugcaguaugc

SEQ ID NO: 4107459 - RNA, 87 nt, Human
gcagcuggaaggucuuggcuguggauuuugguuugucuacacuccuuuuuauauuagagaaaacuugucacagcucucacacguugu

SEQ ID NO: 4107460 - RNA, 77 nt, Human
gcagcuggaaguccaagaucaaggugucaggaggguugguuccuucugaggccccuccuugacuugcagacagcugu

SEQ ID NO: 4107461 - RNA, 58 nt, Human
gcagcuggacccacacggcuuaccagacuuuucugcaaguuguguguuuuccaccugu

SEQ ID NO: 4107462 - RNA, 79 nt, Human
gcagcuggccaugggcauucucuuaggugaugagccccugacccauaggcccucucauuccagaggcauuggccaucuc

SEQ ID NO: 4107463 - RNA, 89 nt, Human
gcagcugggggcugugucagugaaccaggcugcgucccugaguacuuccaguagguggggguguccuggugcacacagcucaagggugc

SEQ ID NO: 4107464 - RNA, 72 nt, Human
gcagcuggugauggccuaagaaggucuguguaaaggaaaacacaugucucccuguuugcuacgcuaucuugc

SEQ ID NO: 4107465 - RNA, 73 nt, Human
gcagcuguagcuuuguguccugauuuagcugaccuaaaauucaugcacucccagaucacagagcauuggcugc

SEQ ID NO: 4107466 - RNA, 66 nt, Human
gcagcugucuucuaccuucaaccuccagcucccauccugaaggccugugguagugagacguucugc

SEQ ID NO: 4107467 - RNA, 56 nt, Human
gcagcugucuuuucuaaauauuaagcacucacuugguuacauagggcagauggcgc

SEQ ID NO: 4107468 - RNA, 64 nt, Human
gcagcuguugaaugcccugugcuggguuggggacacaucauugcuuccagggcucagucacugc

SEQ ID NO: 4107469 - RNA, 78 nt, Human
gcagcuucuugagggaauccucacaucaaucuuuaaaauaaauagugaugaugccccgauuuuccaucuggaaacugc

SEQ ID NO: 4107470 - RNA, 57 nt, Human
gcagcuuggggacaugaaaagacuuguaguuugaugcuuucuuauguccguaggugc

SEQ ID NO: 4107471 - RNA, 73 nt, Human
gcagcuuuccuuauucaaugcuggaaauguuguucuuauugaacaggcacuugcauugaugaggucuuguugc

SEQ ID NO: 4107472 - RNA, 57 nt, Human
gcagcuuucuacuuccuacagcuuuugggguggaggaaaacggggugagggagcugc

SEQ ID NO: 4107473 - RNA, 80 nt, Human
gcagcuuugugaaauguuucaaaauagucggggcuauucguccuauccuguauuauuuuucaauuuuacaguuuucuugc

SEQ ID NO: 4107474 - RNA, 79 nt, Human
gcaggaaaagcguaugaaugcaggguucugggcuagagaagugacuucccuucuuggggucuuguguugccuuuccugu

SEQ ID NO: 4107475 - RNA, 100 nt, Human
gcaggaaaaucagguucggggccagacagacuugaguuugaggcucagcaaugccgcuucugagcugugugguccugggcaaguaacuugaccucccugc

SEQ ID NO: 4107476 - RNA, 122 nt, Human
gcaggaaauaaucagaagggggaaguugcagguuucagcgauucuuucagggaaccaggaauuccuggaaucccgcaauggaggauucaagccaaggacgugggacuuugccacccaccugc

SEQ ID NO: 4107477 - RNA, 69 nt, Human
gcaggaaauguuaggggagagaugcaaguguacuacugauuuuuauaacucuuuugugacaagccuagc

SEQ ID NO: 4107478 - RNA, 58 nt, Human
gcaggaacccggccgcccuggcuucaaccaagccacagaauugcacgugggguucugc

SEQ ID NO: 4107479 - RNA, 75 nt, Human
gcaggaagucuucccaguucugcuugagggggcccuuccaaaguacucccagagggccuguucuagaacuccugu

SEQ ID NO: 4107480 - RNA, 85 nt, Human
gcaggaaugagugcuggaggcaguggaggugccugacgaagguccagcaggacggacagccccagugucuguagaucaggccugc

SEQ ID NO: 4107481 - RNA, 74 nt, Human
gcaggacagcaggaugcuuagacaggagggcauuugcaaucccccucagcuccuccacagcauccugcuccugc

SEQ ID NO: 4107482 - RNA, 78 nt, Human
gcaggacuguguuucuuucuggaggcucuaagggauaaucuuuuuucuugccuuuuccagcuuccaggagcugccugc

SEQ ID NO: 4107483 - RNA, 63 nt, Human
gcaggagagcugguauaugaagacaugaauucagauauucuguuuccauuuucaguacucugu

SEQ ID NO: 4107484 - RNA, 72 nt, Human
gcaggagcagagggaguauuagagcuuggaugcucauuucuaaaccucucugagguucccucaacuaccugu

SEQ ID NO: 4107485 - RNA, 68 nt, Human
gcaggagcccagaguccucagcucuucccagcuaacccucugcggcuugggaccugugguguuccugu

SEQ ID NO: 4107486 - RNA, 69 nt, Human
gcaggaggauaugauuccuagauuccugaaggaaaacucuuuuguuuagaggaacuggaaucagccugc

SEQ ID NO: 4107487 - RNA, 129 nt, Human
gcaggaggcaggagaccaugaggucagcaggagaaugggagccagccuuuccuugggggccaggagcgaggaaccugggcuuccauccuagucugcuuguccucccugggccucagucuacccaccugu

SEQ ID NO: 4107488 - RNA, 68 nt, Human
gcaggaggcuugugugcaaguuaucugagcucugacugagcagaugaagaugccacuaagaccagagc

SEQ ID NO: 4107489 - RNA, 74 nt, Human
gcaggagggugggaagcaguuuuauuuauuuauguauuuauuuauuuauuugagauggagucucgcucuguugc

SEQ ID NO: 4107490 - RNA, 57 nt, Human
gcaggaggugagcagcaggcgggcaaagagcauuacugccugagcuccgccuccugu

SEQ ID NO: 4107491 - RNA, 109 nt, Human
gcaggagguuccagccucuucuggccggcuacccucagaccccugcugagcuucaccauccuugggggacaggcuaggcugaaggugguggcuggggcuguccaccugc

SEQ ID NO: 4107492 - RNA, 79 nt, Human
gcaggagugccaggagguacugguuuagauagagcagccauuaagggccucacugagcagugguucuugagcgcagagc

SEQ ID NO: 4107493 - RNA, 58 nt, Human
gcaggaugggagcuucacuuugucucaguuguucuggcaaagagaagccucaccuugu

SEQ ID NO: 4107494 - RNA, 81 nt, Human
gcaggauuauaugcucauuuuauugagaaugaccuuaagcagauuagguaguucucaaguuugaaugagcuuuaauuuggc

SEQ ID NO: 4107495 - RNA, 114 nt, Human
gcaggauuucuaugaauauucauuacugcacgugggacauauauauuuuaucagaucugggcuuaaacauagagguaccuuugugcagaaagaauaauucaacauggacucugc

SEQ ID NO: 4107496 - RNA, 77 nt, Human
gcaggauuuuauuguuuuaaaaauccaugacuacuggaaauaguaaugaauggaauguuaaaccucaaugauccugu

SEQ ID NO: 4107497 - RNA, 97 nt, Human
gcaggcacaagagucuucaucugguuaggucucuccuuggccugaaaugcuggcccaggcuuuugaggacaaagcccaggugcuggucucugccugc

SEQ ID NO: 4107498 - RNA, 82 nt, Human
gcaggcaccauguuucugaccacccucuucauccguacucacauaccugcuagacaguggaucgggaugcacugguggcugc

SEQ ID NO: 4107499 - RNA, 57 nt, Human
gcaggcaggcacuacucaacaugguacaaugugugcuuguuccuaucugccuccugc

SEQ ID NO: 4107500 - RNA, 58 nt, Human
gcaggcauaugauggaacugggauuuaacuaaaggucuuucuuaauucaagugcuugu

SEQ ID NO: 4107501 - RNA, 61 nt, Human
gcaggccagcugugcagaugggcugugaggaggcaccugcccaggugagcagcaggucugc

SEQ ID NO: 4107502 - RNA, 83 nt, Human
gcaggcuaugagugucuuuaugagcagcuugauuuauuuguaucagauuauauaagcugucaggagguuaccuuuuggucugu

SEQ ID NO: 4107503 - RNA, 57 nt, Human
gcaggcuccaggccggccccuugaaucucaccgcgaggaaggcacccugcugccugc

SEQ ID NO: 4107504 - RNA, 59 nt, Human
gcaggcuccugagaggcagaggcugcgggagugcagcucuucaguccucgggagugugc

SEQ ID NO: 4107505 - RNA, 84 nt, Human
gcaggcugcacggcagcucucagcgguuggaguuagguucuguagcucuuccaggcuagaguuguugcacacuuguggcucugc

SEQ ID NO: 4107506 - RNA, 85 nt, Human
gcaggcugcucugaauauuucgauagaccuaacaauugcuucucaagguugcuguuuuacaucugguggguuuugagcaggcugc

SEQ ID NO: 4107507 - RNA, 95 nt, Human
gcaggcuuguuugaggacuugacaagcugauucuaaaauuuauuaucccaaauauuaauaauuuuaaagaaggcuagagaacuuaagcuaccugc

SEQ ID NO: 4107508 - RNA, 72 nt, Human
gcagggaacagcauaucugaaggguuucuacaaagaauuacauccucaggguaggcuauguauuccuagagc

SEQ ID NO: 4107509 - RNA, 89 nt, Human
gcagggaagccgauuuggaacuuaaacaagcucccaaguugugaucagucgagcuuggcaagcacuguuugagagaguagguguccugc

SEQ ID NO: 4107510 - RNA, 56 nt, Human
gcagggaaggggacggaaccaggcuucgcccccugugugugucucuggucucuugc

SEQ ID NO: 4107511 - RNA, 76 nt, Human
gcagggagcaguuaucgaagaaucaggucaaguggggguuugcuggcauuaccuguguuucuguaguggucauugc

SEQ ID NO: 4107512 - RNA, 60 nt, Human
gcagggaggacgagauaccugggucccccuuccggacaagacaccucucuccaucccugc

SEQ ID NO: 4107513 - RNA, 80 nt, Human
gcagggagguuaggugggugacuuccauggggguucuuucuuguccugccauguguacacccacuuccauuuccuacugc

SEQ ID NO: 4107514 - RNA, 69 nt, Human
gcagggauaguagaauguucuaugucaauguguguguguucacgcauugugaaccuuucucaugccugc

SEQ ID NO: 4107515 - RNA, 62 nt, Human
gcagggcagccacaggcccccucaggauauagggaggaggccaauggaaggggcugcccugc

SEQ ID NO: 4107516 - RNA, 61 nt, Human
gcagggcagcucacugugguucauucaacucaauuugauuccgcagcuaguauguuggugc

SEQ ID NO: 4107517 - RNA, 111 nt, Human
gcagggcaugguagcugccgccuguaaucccagcuucucaggagucugaggcaggagaauugcuugaaccugggaggcggagguuguagugagccaagaucgugccacugc

SEQ ID NO: 4107518 - RNA, 61 nt, Human
gcagggccaggucugggauuugaugcaggggccgagcaccugcuuccagaggaggccccgu

SEQ ID NO: 4107519 - RNA, 103 nt, Human
gcagggccgguuccaggcccagacggggugagggagucccacaccugagacagauggccuugccccaucugggaaucccuggagguugugccgagucccuagc

SEQ ID NO: 4107520 - RNA, 57 nt, Human
gcagggcucaacaggacaccccugccagagcaggagggccuccucggugggcccugu

SEQ ID NO: 4107521 - RNA, 64 nt, Human
gcagggcuccaggcucacagcaucccaggaaggcuucagggaacaggugggcuuugggccaggc

SEQ ID NO: 4107522 - RNA, 82 nt, Human
gcagggcuguauuucugucuggaagcucuaggggagaauccauguccuugguuuuuccggcuucuagggaaaugcuuccugc

SEQ ID NO: 4107523 - RNA, 64 nt, Human
gcagggcuugcaggugcugaauuuggacucccacugagcccauuugcggcuucugucaccuugc

SEQ ID NO: 4107524 - RNA, 75 nt, Human
gcagggcuuuucucuucaaaagucuaauccuuauaacaaguaguggagaggauguggagaaauuggaaacccugc

SEQ ID NO: 4107525 - RNA, 63 nt, Human
gcaggggagaggcggcccagagcuuugucuggccuggaccagccuccgccuucacuccccugc

SEQ ID NO: 4107526 - RNA, 82 nt, Human
gcaggggcagcugaggccacgagugaagggccugcucauggguagcccacgcccccuccucagggcccucagcagcccuugc

SEQ ID NO: 4107527 - RNA, 56 nt, Human
gcaggggccaaggguccagaccucccucuaggcagguccauuucuaagcacccugc

SEQ ID NO: 4107528 - RNA, 71 nt, Human
gcaggggcggcuggguuuccaggggcggcagagccaccaagagcgauggaaacccacccccgagucccugc

SEQ ID NO: 4107529 - RNA, 99 nt, Human
gcaggggugcucaggggcugcuccccuuuuauuaaugacagcgguuucucucaaggaaguguagugcccuccccuuugggauaguugccugaccccugu

SEQ ID NO: 4107530 - RNA, 74 nt, Human
gcaucuugucaccacuggcugaaacaccagcaauaaacaucagcugaacagccagcagggugacgggugggugc

SEQ ID NO: 4107531 - RNA, 60 nt, Human
gcaucuuguucacugcuguauuugcaguacccagaacuguucauggcagaugauaagugc

SEQ ID NO: 4107532 - RNA, 83 nt, Human
gcaucuuucuccuguuauuuaucugagcauuuaucacucauuauugugaugcucagcucaaauaucaugguuucugagagugc

SEQ ID NO: 4107533 - RNA, 69 nt, Human
gcaugaaauucagcaggugaguacagggcugaaagaugcuccuaauauuuaccaguuuggagauuaugu

SEQ ID NO: 4107534 - RNA, 67 nt, Human
gcaugaaguucauucccuccagcuguggcuaccucaauaugguggcuggaggguuagugagauaagc

SEQ ID NO: 4107535 - RNA, 120 nt, Human
gcaugacaguagccaugagaagucaccuuagaccugagcaggagcuaaugauggugaauuacuguccccaccacugcgggagcuccugcacccagccuugagcagaucucaucuucgugc

SEQ ID NO: 4107536 - RNA, 56 nt, Human
gcaugacagucgaaagguuaacuucugagaaguuacaacuuuccugugucaaaugc

SEQ ID NO: 4107537 - RNA, 101 nt, Human
gcaugacuuucaagaagaaucauuguaaaguucuguauuugguucaaagaaaaucaacaacacaaauucacagggauuccugacuuggcagcaguucaugu

SEQ ID NO: 4107538 - RNA, 130 nt, Human
gcaugagaauccucuggaaggcuugcugaaacagauggcugggcccgauccucagaguuucugguugagcaggucugaggcgaggccugagaacugguauuucuaagaagcuuccaggcgauggugaugc

SEQ ID NO: 4107539 - RNA, 71 nt, Human
gcaugagaccagugaguaggccuuagauuggauguguccacauauccucugagucgcucccuggauccagc

SEQ ID NO: 4107540 - RNA, 81 nt, Human
gcaugagaggaaauguugagguagagaaaggaaaugagaaaaguuucauuuucauuguuuugcuucagcuugcucuaaagc

SEQ ID NO: 4107541 - RNA, 74 nt, Human
gcaugagcagcugucugggccaggccuggccgaagagccauucaucccugcacuccagccaguaaaugcucagc

SEQ ID NO: 4107542 - RNA, 67 nt, Human
gcaugagcuuuguggguaaagagagcucaccaaauucagccuccagcagcacacacagcucaguagc

SEQ ID NO: 4107543 - RNA, 55 nt, Human
gcaugaguaauucacaaaacagaugaauuggauccucucauuugugaagcucagc

SEQ ID NO: 4107544 - RNA, 84 nt, Human
gcaugauaacauaaagcagacugauuugcaucacuugguauugucagcccuguguguuugaguuuguucucuuauuuaauaugu

SEQ ID NO: 4107545 - RNA, 67 nt, Human
gcaugauacagguaauaauaacagaaaaacaaaucuguuuuucagccaugaauuacacugugucugu

SEQ ID NO: 4107546 - RNA, 69 nt, Human
gcaugauucagucuuuuaaaggccuagaaccacacacuuaacuaggaauauuugauaucugaauuaugc

SEQ ID NO: 4107547 - RNA, 94 nt, Human
gcaugcaauuaggcagaaaugagcuuagguucagguugggccaucugugaauggaacauucuugggcaaguuacuaaaucucucuaauucgugu

SEQ ID NO: 4107548 - RNA, 78 nt, Human
gcaugcacauuuguucaucucuugccaaaguuugacccacugguuauucuaaagguaagagaggauccaguuugcagc

SEQ ID NO: 4107549 - RNA, 58 nt, Human
gcaugcagacagucugagaccacagggccacucuuuccacaggacaaugucugcaugc

SEQ ID NO: 4107550 - RNA, 75 nt, Human
gcaugcagugauuugaggauuauugcucacgguaagaaaaacaugaguaauauauugucuucaaagaaccuaugc

SEQ ID NO: 4107551 - RNA, 75 nt, Human
gcaugcauccuuucuaagauacugcaacuuuugugaaauaagugaaaguuaccucguuuuggaaaggaaaguagc

SEQ ID NO: 4107552 - RNA, 100 nt, Human
gcaugcaugugugugcgugugugugcaugcacguaucugcgugugugcgugucugcaugcacgugugugcgugcgugugcgugcacguuugugugcgugu

SEQ ID NO: 4107553 - RNA, 59 nt, Human
gcaugccaugugugaggagaggagugucugagccugaaguucucuaucaaauauggugc

SEQ ID NO: 4107554 - RNA, 77 nt, Human
gcaugcccauuuugagagcugcugagacuguccugguauuucucagggccuucaggauaggucucuucagggccugc

SEQ ID NO: 4107555 - RNA, 59 nt, Human
gcaugccugccuggugggcguggccuggaagcccggguagcaccggcagugguaggugc

SEQ ID NO: 4107556 - RNA, 69 nt, Human
gcaugcuaaaaugaaugacugagguuucauuaauaagauuagugucuuuagcaaguuuagucagcaugu

SEQ ID NO: 4107557 - RNA, 96 nt, Human
gcauggaaaggcagcagaguauggaaaaugaaaugagaugggcaaaagguuaaguacaugggaguuuauuauucuguucucucuacuuuuuuaugu

SEQ ID NO: 4107558 - RNA, 57 nt, Human
gcauggaauucccuuaugggccccaaacucuggauugcacucugagggaguccaugu

SEQ ID NO: 4107559 - RNA, 58 nt, Human
gcauggagaagugggaacagguccuuccaggcagccuggcucuuccuucucaucaugu

SEQ ID NO: 4107560 - RNA, 66 nt, Human
gcauggaugaaggcgaggaugaggggcuaggacuaggaggugccucagcuuccuuacaucuaaugc

SEQ ID NO: 4107561 - RNA, 63 nt, Human
gcccuagacugugugcuguggggagaggaagucccuaucuucuuggcuguucauggucagggu

SEQ ID NO: 4107562 - RNA, 93 nt, Human
gcccuagauaggcagcaguggccuuacagaugcugacagaugaucugauuagaugcacaguugcuggguggcgucuggggccagucuauuggc

SEQ ID NO: 4107563 - RNA, 102 nt, Human
gcccuauuguuccaagagccccagagcagggagaggugcagggagggagguuucagcucccucugagugacagccuccucucaaucugggcucacagagggc

SEQ ID NO: 4107564 - RNA, 71 nt, Human
gcccucaccacugcccuggggguugccaucuggaggagccuggggauaaggguaacccagggaggcugggc

SEQ ID NO: 4107565 - RNA, 98 nt, Human
gcccucagagcugaguggcaggcucuggcguccaauggagcgggcggauggagacuucugcaccaaugggcgugggggaggcggugccgcgggggggc

SEQ ID NO: 4107566 - RNA, 57 nt, Human
gcccucagaguuccccacagugacauauagcuguggggaaaauuaucuaugaggagc

SEQ ID NO: 4107567 - RNA, 70 nt, Human
gcccucagcuccuucccuggugggcucugagcaccgcgccucucccaagggguaagggagcugugagggu

SEQ ID NO: 4107568 - RNA, 74 nt, Human
gcccuccugagcuagcacguguuugccugguucacaccuguccccauauugggucugcagcuagccaggggggc

SEQ ID NO: 4107569 - RNA, 60 nt, Human
gcccucggcgcuuugcgacacuggccccuguccccagaacccgcacagccugccaggcgc

SEQ ID NO: 4107570 - RNA, 76 nt, Human
gcccucguccuugcugccgccuuccucucugggcucccccaccucagagccccuugugggcgcacagcacguuggc

SEQ ID NO: 4107571 - RNA, 75 nt, Human
gcccucuacaaugaauuccagaugcuuguauuuaaaucugacaugaucugaaugcuguguugggacagggugggc

SEQ ID NO: 4107572 - RNA, 61 nt, Human
gcccucugcacagcucugagcaggagugucugaucuggcagcgaccugcugugcagggggc

SEQ ID NO: 4107573 - RNA, 89 nt, Human
gcccucugccucuggaccccugccuuggcccuaguucauggcuccucucuguuggacugggauggccgaggcuauagcccaggcggggc

SEQ ID NO: 4107574 - RNA, 58 nt, Human
gcccucuggccagagaaaggccaguucaggcugucagcuucuccuggccagaagaagc

SEQ ID NO: 4107575 - RNA, 59 nt, Human
gcccucuggugggugagccccgggcugggugagcccuggggugggugagccgggguggu

SEQ ID NO: 4107576 - RNA, 90 nt, Human
gcccucuuacaguuguucuaucagcaugaaaagaauauacccuaaccagcuuucauguucuaggaagauaagaaacagguguaagagagc

SEQ ID NO: 4107577 - RNA, 71 nt, Human
gcccucuucagcugacagcaauuccuagagagaacucagaugagugcuuucagcugcucgaggaggagggc

SEQ ID NO: 4107578 - RNA, 83 nt, Human
gcccucuuccacccccaggagcuccagggacacugccaggcagcuugauccccaggacuagggggugggagugcaaacauggc

SEQ ID NO: 4107579 - RNA, 92 nt, Human
gcccugaggcuggggagacugggacauauaccugcucacuuccagugacagaaugugacucucagaugugaccuuucccacaccugcagggu

SEQ ID NO: 4107580 - RNA, 55 nt, Human
gcccugcaaggccuggccgcagccccuccucgcuguccuccaggaccugcagggc

SEQ ID NO: 4107581 - RNA, 56 nt, Human
gcccugcacgaucaauucugucauuaaccccauaguacagaugaggaugcggaggc

SEQ ID NO: 4107582 - RNA, 65 nt, Human
gcccugcacuaccucucaccaagugugccucagccccuggcagguucugaggauggugccugggc

SEQ ID NO: 4107583 - RNA, 59 nt, Human
gcccugccuccagggaccccucagguguucugagcccagaggguuccauggagcauggu

SEQ ID NO: 4107584 - RNA, 64 nt, Human
gcccugccugucugcugggagggcccgcauggagccucuugcccagcugcagacaagggagggu

SEQ ID NO: 4107585 - RNA, 76 nt, Human
gcccugcgagcuuggaggggugcgcgguccgcgcaaaagugcgcgccggggcugcacgccucucagcuugcggggc

SEQ ID NO: 4107586 - RNA, 126 nt, Human
gcccugcuuacuggaguugcgggguagggucuggucucccacuguccugcucagccauucucugggcccucugaggcuggaugggaugccuccccaccccgucauuguccuguucugagucagggu

SEQ ID NO: 4107587 - RNA, 97 nt, Human
gcccugcuuccucagaagagcuggcaacgcuagaugccacucccacauagcaacaauuagagggagcccagucauagcugcccuucugggacagggc

SEQ ID NO: 4107588 - RNA, 95 nt, Human
gcccuggagaguucugaacacaagagcuacuugaucagauuuauaucucuaaagggaucauucuagcuguuguguugagaauagacuaugagggu

SEQ ID NO: 4107589 - RNA, 79 nt, Human
gcccuggaguccaggcagcaucagucugcuguauucuaccagucacagcagucacaggcuagcacagauucaauagggu

SEQ ID NO: 4107590 - RNA, 62 nt, Human
gcccuggaguucgacugaguugaaugcugacucugcuauuuacaaacucugugacuuugggc

SEQ ID NO: 4107591 - RNA, 62 nt, Human
gcccuggauggcaggagccaucaccaguggccacgaaucccugcuauaaauguacccagggc

SEQ ID NO: 4107592 - RNA, 58 nt, Human
gcccuggcccacgugcaguccaugugguguggcugugaggaccagguggggcgguggc

SEQ ID NO: 4107593 - RNA, 83 nt, Human
gcccuggcccuuuccuggcuggcgguuuugguguggcugacuaccuaccaccuugggcgcccaggaaagaagggggccagggc

SEQ ID NO: 4107594 - RNA, 74 nt, Human
gcccuggccgccuggggccgggugaauccgccggccagugcggguauaaauuacccgggcccgcgcggccgagc

SEQ ID NO: 4107595 - RNA, 71 nt, Human
gcccuggccuggccauagggcccugguagccucuaggcggcuggacagaaguggcugggcagguccugggc

SEQ ID NO: 4107596 - RNA, 84 nt, Human
gcccuggcuagggagcuccgagucccggccgccugguccuuucauucugggcuucuucgagauucucgagggcuuccagccggc

SEQ ID NO: 4107597 - RNA, 83 nt, Human
gcccugggcucccagccuucgccagucugaaaaagggccaugaagaaucagacaacucuggaggcuggcugcuggccuggggu

SEQ ID NO: 4107598 - RNA, 59 nt, Human
gcccugggcucccugcuccacagccacaccgagcugaggcaggggugaggcccaggugc

SEQ ID NO: 4107599 - RNA, 86 nt, Human
gcccuggugcugagaacuccagguucccggucccugcggggaccccagggcucaccacugggauccuggcagagcggcccuggggu

SEQ ID NO: 4107600 - RNA, 66 nt, Human
gcccuggugugcccagcaugggcuccugggugcaacacugggagauugcuuagggcacaaggaggc

SEQ ID NO: 4107601 - RNA, 62 nt, Human
gcccugguuuuggcauuuaugaucauugaguauaguauuuaagcuaaugucauaauuagggu

SEQ ID NO: 4107602 - RNA, 114 nt, Human
gcccuguauccccucaccauuuauauucauagugcauccuggccugcugaacauagcacagaacacuggugagucccuguaguugguggugagugugggugugcauggaagggc

SEQ ID NO: 4107603 - RNA, 65 nt, Human
gcccuguaucuauagugguuuauaagagcaauuuuaauuucuugcauacacuauauguacagugu

SEQ ID NO: 4107604 - RNA, 79 nt, Human
gcggacuucccguaauuguuaugucucaaugccauugggaccacuaauaguguuugaagcaugauagcaaauugucugu

SEQ ID NO: 4107605 - RNA, 64 nt, Human
gcggagauuguugguuucccacugcaccuccaugaagucagagucgccgacagucaacaucugc

SEQ ID NO: 4107606 - RNA, 60 nt, Human
gcggaggcaggcaggcagcagguggcgccaugggccgggcuuguuuccuggcuguucugc

SEQ ID NO: 4107607 - RNA, 55 nt, Human
gcggaggcgcggggcguggcacacgggcagccccgcccaggccuggcgucuccgc

SEQ ID NO: 4107608 - RNA, 67 nt, Human
gcggcaagacagaccuuacaagggacucagggccaagcccuggcccagacucugcucuuauccacgc

SEQ ID NO: 4107609 - RNA, 60 nt, Human
gcggcaccaucagacuucugggcaggcaagauuaccugugacucugucugauggucucgc

SEQ ID NO: 4107610 - RNA, 58 nt, Human
gcggcagccucugaugauggccguagguaucuccuacuccauucuggaggcucccugc

SEQ ID NO: 4107611 - RNA, 105 nt, Human
gcggcauucauguauuauuauuauuuuuuuccaagccacuuuuuagaauucaguccugcuuuucagcuuagcuggaucccugugggagugguaugaugagacugc

SEQ ID NO: 4107612 - RNA, 55 nt, Human
gcggcauuccacucugggcccuuugaagccuuugggccacaagcggaggagccgc

SEQ ID NO: 4107613 - RNA, 68 nt, Human
gcggcccaccuccugggggacagcggcagggccccaggguccccaccuucugccucagggaggucugc

SEQ ID NO: 4107614 - RNA, 55 nt, Human
gcggccgcggcugcccugagccagcagcagagccugcaggagcggcugcggcugc

SEQ ID NO: 4107615 - RNA, 65 nt, Human
gcggccugggcuguaccugugcgcggcguccuuucugcgcugagccagggcaccccggagccugc

SEQ ID NO: 4107616 - RNA, 75 nt, Human
gcggcgcacgaaaggucaccgcgguggcauuccucuccgcgcuguuuacgugacuuaauguacucgcugcgccgc

SEQ ID NO: 4107617 - RNA, 97 nt, Human
gcggcuagcauuucuugagcacuuacugucaggccccguggagggagcugguaugcugggucuuggccagggggcuuggugaggccaugauggcggu

SEQ ID NO: 4107618 - RNA, 65 nt, Human
gcggcucaucccagauggcuguggggucaaguacauccccauucguggcccucuggauaaguggu

SEQ ID NO: 4107619 - RNA, 65 nt, Human
gcggcugaggaaaggcuggaagggaggcucucccuugccugccuuuucucauuauuucuagcugu

SEQ ID NO: 4107620 - RNA, 57 nt, Human
gcggcugccgagacaagccggugcgcaucaccaugcgcggccuggcuucggagccgc

SEQ ID NO: 4107621 - RNA, 102 nt, Human
gcauggcaaggucaccuugggcacagagaggccucccucaccaugacccgcuguuagagacaaggaggucuggggggcccucccaggccugaccugccaugc

SEQ ID NO: 4107622 - RNA, 57 nt, Human
gcauggcaauaugaugcacuguuugcgggaguccugcgagggcacauuguuccgugc

SEQ ID NO: 4107623 - RNA, 70 nt, Human
gcauggcauuuauucagcucagucgguuagacuugaacucuaguuggccuaaugaaggaauuaguuaugc

SEQ ID NO: 4107624 - RNA, 57 nt, Human
gcauggccauggcacuauggacaccaguccgguccugaguccagucccaaggccagc

SEQ ID NO: 4107625 - RNA, 126 nt, Human
gcaugggaaaugagagacccuggaggauuuauucuggcagcagcaucaguggcuccauaaccuauucuaggaguggcagagguugacugcagugauguccuguguccauuucugaaguagucaugc

SEQ ID NO: 4107626 - RNA, 58 nt, Human
gcaugggcaggguggccggugcucagcagcagcacugggccuggccucccaguccagc

SEQ ID NO: 4107627 - RNA, 57 nt, Human
gcaugguaaaagauauacugugcauuucccugugccagaacuugucucuuugccugu

SEQ ID NO: 4107628 - RNA, 93 nt, Human
gcaugguccacucauucucaguaucagccagcccuggggcuucccggaggccaugccgacuugagagccaggccugagugguagccagggugc

SEQ ID NO: 4107629 - RNA, 122 nt, Human
gcaugguccugggaucaucagcaucaguguuugcaugggagcuuguuagaaaugcugagucucaggcccuagcuagaccuggugaaucugaauguuauaugauccccaggucauugcuaugc

SEQ ID NO: 4107630 - RNA, 84 nt, Human
gcauggugacucugugucagcugggugugcauggguacccugcauuguugaccaguugugcauuugagcuaauauuuaccaugc

SEQ ID NO: 4107631 - RNA, 55 nt, Human
gcauggugguagugaaaagaauaacgaguguauuuuucuucacuuugccccaugu

SEQ ID NO: 4107632 - RNA, 90 nt, Human
gcaugguguuccauuccuuggaccacucuuuaagaaggacaaagucaaauaggccuucauucaaagaggcauccaagagggaaaguaugc

SEQ ID NO: 4107633 - RNA, 87 nt, Human
gcaugguuaaagaaagccauucaucuaauguccugugaacuuuauaagugguuaaguaguucaugugaguagcugcuuucaccaugc

SEQ ID NO: 4107634 - RNA, 59 nt, Human
gcaugguuuacagaacuccuagcaugcuuuggcaugcaugucuucuguugaaugcaugc

SEQ ID NO: 4107635 - RNA, 56 nt, Human
gcaugguuuaggaacuaaggauuauuucaguaauaauccuauuucugaaaaccugc

SEQ ID NO: 4107636 - RNA, 104 nt, Human
gcauguaaaucaccuggggaucuuguuaaaaugcagauucuaauucauuauuucuggggcuugagaaucugcauuucuaacaaguucccagguaaugcuguugc

SEQ ID NO: 4107637 - RNA, 58 nt, Human
gcauguaccagaauauucuuccauuuuaaggcugaauaauauuccucugugugcgugu

SEQ ID NO: 4107638 - RNA, 79 nt, Human
gcauguagcaaggacuguuucuaaaaccauguaggcuaaaaugucauacuacaaggcaguuaaaaugguuaauaugugu

SEQ ID NO: 4107639 - RNA, 73 nt, Human
gcauguaggaaaauguacgggaguagaauuagagaaggaaaaaucacuagucaugacccgauguuacuacagc

SEQ ID NO: 4107640 - RNA, 62 nt, Human
gcauguccaggucagcagcagggaccugaauuccaggacucucagcucugccuggaacuugu

SEQ ID NO: 4107641 - RNA, 62 nt, Human
gcaugucuguguacacaugcacacagcaugucugaaugugugucuguguauacacggcaugu

SEQ ID NO: 4107642 - RNA, 90 nt, Human
gcaugugaacacccaguuuucugauugaagagccuauccuuuccccaucacguauuuuggaugcucuugucaaaaauuaguugacuaugu

SEQ ID NO: 4107643 - RNA, 66 nt, Human
gcaugugacuauauagagcauaaaguccauugguguaaacuuucugcaaaauaaauagugacgugc

SEQ ID NO: 4107644 - RNA, 79 nt, Human
gcaugugcucguggcugaaucauuugugcauccaaagcugaggucccuggcugcuguugauuuaguccaaugcauaugu

SEQ ID NO: 4107645 - RNA, 57 nt, Human
gcaugugggaacacuuaggcacuaauaauuuaaguaaguugccuaaagccacacagc

SEQ ID NO: 4107646 - RNA, 74 nt, Human
gcaugugugcgccucgguguguagugaggggcguagcuucccacagcgccuggcagcgugccgagcugcgcugc

SEQ ID NO: 4107647 - RNA, 68 nt, Human
gcauguuagaaaacuacauuucuuuaugggaaugucauucauccuagcuugucaguucucuaaaaugc

SEQ ID NO: 4107648 - RNA, 65 nt, Human
gcauguuuaagugaaaacuucaaaggaauuccaaguuugaagucagacacugcuuuggaauaugc

SEQ ID NO: 4107649 - RNA, 78 nt, Human
gcauguuuccuugugaaccugagugagcuucuuucaauuauuuacauaggagagaaauuccuaagguacacaagaugc

SEQ ID NO: 4107650 - RNA, 129 nt, Human
gcauuaaauggccacaaaguucccuuccaauguugagguuuugugagauacgagguuugcaaauguucgcugucugcaucucuagagcuuggcucaaaguugguuccuaaauguucuguguucacgugu

SEQ ID NO: 4107651 - RNA, 57 nt, Human
gcauuaauacuccuguucaaggaugaggguuuucuucuaaaagcagguguauagugu

SEQ ID NO: 4107652 - RNA, 64 nt, Human
gcauuaauacuggagcguuacaguaacaauaagagcuaacuuuuacugagaccucacagugugc

SEQ ID NO: 4107653 - RNA, 55 nt, Human
gcauuacaggcuguaagaugcaguaaccuauauuguaagguauucucuguugugc

SEQ ID NO: 4107654 - RNA, 87 nt, Human
gcauuagauuuucaaaaggagccacaaucuagaucccuugcaugugcaguucacaauaggguuugugcuccuaugagaaucuaaugc

SEQ ID NO: 4107655 - RNA, 59 nt, Human
gcauuaggacagagaugucaagaggcauucccaccccucuuauauuccuuuccugcugc

SEQ ID NO: 4107656 - RNA, 79 nt, Human
gcauuauugaggcgauaggauuacuggguggcuauaaacacaucugcugcacagcugacauuuaucuucuacaaugagc

SEQ ID NO: 4107657 - RNA, 80 nt, Human
gcauucagaaggagagcugucagcguagcaccgaauucaagaccaaggcgugcuaccugagcugacagcuuuuugaaagc

SEQ ID NO: 4107658 - RNA, 70 nt, Human
gcauuccauuguguaaggauaucggaggaugcaaguccccaagaccuccccgacacugcugguggagugc

SEQ ID NO: 4107659 - RNA, 78 nt, Human
gcauuccuggaggguuggcagaugaacacaacuggaaauacuuccaguaaaucucacugucaugucuagauggaaugc

SEQ ID NO: 4107660 - RNA, 73 nt, Human
gcauucuagagcauauggguuguguaauuggaugguucacccaaucccaucaccaucugcucuccagauaagc

SEQ ID NO: 4107661 - RNA, 64 nt, Human
gcauucuggaggcuggcuuccccuggcucauaaaaguggccaaagcucagcccugcauggaugc

SEQ ID NO: 4107662 - RNA, 70 nt, Human
gcauucuguggggacgggcuuuuggaagacuucuaugcucuugaugaaagcacaaguucuaacaggaggu

SEQ ID NO: 4107663 - RNA, 76 nt, Human
gcauucuuaagaaagcccacccagaagauguuaauuaagaaauauugauauuuucccaggguuuucucauuaaugu

SEQ ID NO: 4107664 - RNA, 55 nt, Human
gcauucuucacaguauuccuccuugaucuauccgaaggagaggcuggagggaugc

SEQ ID NO: 4107665 - RNA, 98 nt, Human
gcauucuuccucagcagcagaaccagaaaggaauaauagaauuggccaaaaaaucauuuuuuuaaaguugccuuucucuuccuguagagagaaaaugu

SEQ ID NO: 4107666 - RNA, 80 nt, Human
gcauucuuuagguuuaggagugaaggugaacauugagguuagcucgguuucaccuugaauaugucuuaaauccccuaugc

SEQ ID NO: 4107667 - RNA, 60 nt, Human
gcauugaguccacucugucuuuugaaacacuucauuuugccagugaguggauuuucaugc

SEQ ID NO: 4107668 - RNA, 60 nt, Human
gcauugccucaggcaccuggcagguuuugugaagcuggcaugucaccugagaaucagugc

SEQ ID NO: 4107669 - RNA, 62 nt, Human
gcauuggagaacagaggcucaucauuacauuuuauguacugaauagcccuucugucuccugu

SEQ ID NO: 4107670 - RNA, 64 nt, Human
gcauugggcggggaccucggcugcagcccuccagcuccccacagucgacugugcccucccgagc

SEQ ID NO: 4107671 - RNA, 90 nt, Human
gcauuguaggcagaacuuaaugauuucaugcauguugcaucauuuuaucauuucaacaagguaagaaacauuggcuucauuuuauaaugu

SEQ ID NO: 4107672 - RNA, 79 nt, Human
gcauuguauagauagaccacaguuuguuguccaucagcauucaccuauugauggacagugugucuguuuccacuuuugc

SEQ ID NO: 4107673 - RNA, 70 nt, Human
gcauugucccugucaugcgggugaagcccaccgaggucgucacucucuaagcaugacagacagacagugc

SEQ ID NO: 4107674 - RNA, 76 nt, Human
gcauuguuuccucugaugggaauccccuaguguuuuucaaccaacaaaugccuauuuguuccuucaggggcacugc

SEQ ID NO: 4107675 - RNA, 55 nt, Human
gcauuuacuauaugucaagcuuacuuguaggugaugaaaguucaguagugaaugu

SEQ ID NO: 4107676 - RNA, 57 nt, Human
gcauuuauaggaagaauguaagauuggguugucaguaaguauucuguccuaugaagc

SEQ ID NO: 4107677 - RNA, 79 nt, Human
gcauuuauuuccauauuguccauggcugcuuuggucuaacagcagacuugaguagcagagacaagaccaaaugaauugc

SEQ ID NO: 4107678 - RNA, 95 nt, Human
gcauuucaugcccacaacuuagacaacacagguucugcaaaggaaaugguuuuucuugcguauuuguguguguauguuguaggagaaauugaugu

SEQ ID NO: 4107679 - RNA, 61 nt, Human
gcauuuccccugcgagagcugcuggagacucuucagagcugcccaugcaaggggguuaugc

SEQ ID NO: 4107680 - RNA, 85 nt, Human
gccucccaggaacaucuaaagccaguuugucucuuuaaaguugagguuaacuuugaucauuugguuaaggugauuucugccaggu

SEQ ID NO: 4107681 - RNA, 76 nt, Human
gcauuuugagcaucuuuucauaguaucuauugguuucaguaucugugagacccuggagaaugaaagugcucaaggc

SEQ ID NO: 4107682 - RNA, 58 nt, Human
gcauuuuguaagcaguguuuuuacagggguggaauugucucuguuuguuugcauaugu

SEQ ID NO: 4107683 - RNA, 129 nt, Human
gcauuuuguuuccuuuuugggccaucuuuauuucucuaauggugaugauuagaguugccuuuaugaauguaguuuagcucaucaguauauagggucacugauacuccuaagaggguucauauaguaugu

SEQ ID NO: 4107684 - RNA, 92 nt, Human
gccaaaauaaauuauucucauguguuucuugguaauguucuuucuaacuuaacaggaaggaaggaaagaaaacaugaucuaauuuaauuggc

SEQ ID NO: 4107685 - RNA, 56 nt, Human
gccaaacuacaaguuaaauuuucagacuagauugagaacuugucuuccuguuuggc

SEQ ID NO: 4107686 - RNA, 83 nt, Human
gccaaacugcuccagagcagagacuagguuggcuuacauucaagguaagaaagccagucucucucccuggagauguuucaggc

SEQ ID NO: 4107687 - RNA, 95 nt, Human
gccaaacuucagaguuuucacauuuuuuauauaccaagguggguuaaagcagccucuuuguauaaggaauauuuuugaaacuguugacauuuggc

SEQ ID NO: 4107688 - RNA, 122 nt, Human
gccaaagaaauucucuccugagugccuuaccauaccuaaauaauaagaucuguuggccuugcaacagauacagauuuuauuauucagguaugguaaggccaacagaucuaggaacaauuggc

SEQ ID NO: 4107689 - RNA, 106 nt, Human
gccaaagacacggcuccaggcccugccuggagcccaggccuggugucugugagcagaagcagaggccaggcagcccaagguggggcagaggcgccguggaaguggc

SEQ ID NO: 4107690 - RNA, 63 nt, Human
gccaaagcagucuugccucugccauucuuuuuucacucaaagcagaggccucaugcucugugc

SEQ ID NO: 4107691 - RNA, 106 nt, Human
gccaaaggcucaagacaugaagauucuuuugacugcccgagccucccaguucucaggagccauccugcugaggcucugggugucacuguuucauggaaaugcaggc

SEQ ID NO: 4107692 - RNA, 55 nt, Human
gccaaaguaccuagcccucugcucacccuucuguggcauccgagguaucuuuggu

SEQ ID NO: 4107693 - RNA, 76 nt, Human
gccaaauauagucccauuuugagguauuuggagguucaaugucaacaaauaaauuuuggaagggacacaauuuggc

SEQ ID NO: 4107694 - RNA, 68 nt, Human
gccaaauaugcaggagaccaauuggaugguguaauuugcaaacccauuauuuauuucugucauauggc

SEQ ID NO: 4107695 - RNA, 76 nt, Human
gccaaaucucucugagcccugcuuuuucaccucuguaaaaugaggggguuaggugagcuacagaguuccuuuuggc

SEQ ID NO: 4107696 - RNA, 111 nt, Human
gccaaaugcaauuaagucgccuuuuacugcagggcauuguaacucuuuguucauuuuggaaguguugaauuaaagagaggacuuguuuugcagacuuaauauuaauaaggu

SEQ ID NO: 4107697 - RNA, 66 nt, Human
gccaacaacagugcagggaugcuucuuggacacucuaacuggagccccucugccacugugucaggc

SEQ ID NO: 4107698 - RNA, 64 nt, Human
gccaaccucaguggcaagagcauuccucauucugaauagugccugugaaaacccugggguuggc

SEQ ID NO: 4107699 - RNA, 63 nt, Human
gccaacuuaauccauuuuaauucauugugaaaccugcagugcaaaugagauggauucaagggu

SEQ ID NO: 4107700 - RNA, 88 nt, Human
gccaagaauaggaaaaccaaagugugaauuaugaaguagucuguauguauauggcuuuuuauucaucuuacagauugguccuguuggc

SEQ ID NO: 4107701 - RNA, 83 nt, Human
gccaagaccccagcagccacagcagaucugagucagggcccuccccuuuccuuugcucucuugguggcuguccugggauuggc

SEQ ID NO: 4107702 - RNA, 61 nt, Human
gccaagauuuagcuuaccucguuacugacuuuuuguuucaggucggugcuaaguuuugagu

SEQ ID NO: 4107703 - RNA, 63 nt, Human
gccaagccuguagacacaagcuucccacccccucuuucaaagccucccucuucagguuugugc

SEQ ID NO: 4107704 - RNA, 60 nt, Human
gccaagcuguuuuucagagacguaaugcagacacguguuugaucacuuuagcuauuuggc

SEQ ID NO: 4107705 - RNA, 55 nt, Human
gccaagcuuauaugaugcuugagguccccuucuacgguaagcauggaagcuaggc

SEQ ID NO: 4107706 - RNA, 65 nt, Human
gccaaggagcugcaggcacuuguuuaucuucuggugcguacgaguguguauggcuccccaguggc

SEQ ID NO: 4107707 - RNA, 56 nt, Human
gccaaggccugcagcaccucauacucgaccugguggugcaugcucucggccuuggc

SEQ ID NO: 4107708 - RNA, 81 nt, Human
gccaaggcuggggcugggcgugcccuagucaugaccccaguacacuggggaagcugagaggcagccagacccucccuuggc

SEQ ID NO: 4107709 - RNA, 63 nt, Human
gccaagggggcgcuccugcgcuacuucaggcucauagagcccaacugcaggagugaccccggc

SEQ ID NO: 4107710 - RNA, 99 nt, Human
gccaagguguccaaaaagccucacuuccuccagaagcuguaggggaggauccauugccuggucucuuccagcuucuagaggaugcccacauuccuuggc

SEQ ID NO: 4107711 - RNA, 81 nt, Human
gccaaguauuguacauuuuacuuuguuugaaugcuggauauauuuguauucuuauagucuugaggugugcugauauggggu

SEQ ID NO: 4107712 - RNA, 65 nt, Human
gccaagucuugugcaucucuucaugaccagagccuggcacacaggagugcucaagaaacauuggu

SEQ ID NO: 4107713 - RNA, 58 nt, Human
gccaagugcaguagaaagacccagugagguaagaacuaagucauucauuaaacuuggc

SEQ ID NO: 4107714 - RNA, 71 nt, Human
gccaagugccuagcacagcaccuggguauggugugugcuccuuccaggagugugugcuaaugggcgccagc

SEQ ID NO: 4107715 - RNA, 58 nt, Human
gccaauaacugccauuugcuuuucugaauccauaguugcauuaaaagcaguuguuggu

SEQ ID NO: 4107716 - RNA, 70 nt, Human
gccaauacacuuuauagaagaaaaagaggauuauugccuccuggcgaauuucuuuugaauaguguguggu

SEQ ID NO: 4107717 - RNA, 114 nt, Human
gccaauaggacccuccagaucccugcccagcaggcuggacuucagucccaaggugauaacuagaacaagggggccgagccuagucuguccagcagcggguggaggagccgcggu

SEQ ID NO: 4107718 - RNA, 75 nt, Human
gccaauaucagaaucauuucaucccuaucacgugccuuucuuguuguauggauuuucaaugaacuucugccuggc

SEQ ID NO: 4107719 - RNA, 66 nt, Human
gccaauauucagcaagcugagugcccauuuguuuuaagaugaggaacagacuugcuggauaagggu

SEQ ID NO: 4107720 - RNA, 75 nt, Human
gccaaucacaaccucuucuccauaaucaacacucuuuaccugaaggcaggcuugauauggggggacugugagagc

SEQ ID NO: 4107721 - RNA, 111 nt, Human
gccacaaaagcuaguuuuucagcuguugagaugguuucagagugguccugcuuauuuaaaauaaacugugaccucucaaucagugccaguggaugaacuguuuguuguugc

SEQ ID NO: 4107722 - RNA, 65 nt, Human
gccacaaguggucagaggaggaauaggacaugagguuuuauguucucauucucaggcccaguggc

SEQ ID NO: 4107723 - RNA, 65 nt, Human
gccacacagagccagggaauacagugaaaagagguccuggagcugacuucuugggucuguuuggu

SEQ ID NO: 4107724 - RNA, 69 nt, Human
gccacacagcauauucauucagugagacuaggacgucuacauuuucuuuccagcuaaugaguugugggu

SEQ ID NO: 4107725 - RNA, 86 nt, Human
gccacagagugugcagaagacacaagacauugccuacaauccaaaggcauguuuaugccauuucugccaucuguuuuuggaccggc

SEQ ID NO: 4107726 - RNA, 63 nt, Human
gccacagcaacaauaaugcagccauauuauuagguaucacuacuguuuuguucugcugugagc

SEQ ID NO: 4107727 - RNA, 71 nt, Human
gccacagccccgcggcaggaaacauuccaggagcaccuguuuccugaggacccugucaggggcucccgggc

SEQ ID NO: 4107728 - RNA, 119 nt, Human
gccacagcugcuuugcucauuauuucugaugaauggacaucaccuggcgucuccggugauggcgccagcucaggacccaggugugaccugcacaacaaagaaaagcaagauagcuuugc

SEQ ID NO: 4107729 - RNA, 55 nt, Human
gccacagcuuagaucacagccuggugaguaaacacagguugaagagagguguggu

SEQ ID NO: 4107730 - RNA, 99 nt, Human
gccacaggaugauaauggugguuaagagcagggacuuuaagugggauggauuuaaguucaagucccagcucuucacuuacucuuaguuugaccuuuggc

SEQ ID NO: 4107731 - RNA, 87 nt, Human
gccacagggcugacaagcaggaaguagucuguaagcaucagcugccauugcuguugucuagucuuccugcuguugugcccccguggc

SEQ ID NO: 4107732 - RNA, 56 nt, Human
gccacagugggcuggggccagagaggggaaguuccaggguccccaccuaguugugc

SEQ ID NO: 4107733 - RNA, 89 nt, Human
gccacaugugagcagcucaggguggucucuagaauaauucucauguucacaguggugagaccugcagcuguagucugcgagcauguggu

SEQ ID NO: 4107734 - RNA, 68 nt, Human
gccaccaaggccaggguggaguuuggggagcaggcagcuuccugcagucugcacucugccugccuggc

SEQ ID NO: 4107735 - RNA, 68 nt, Human
gccaccagggggugcaagguccagcauccuaaaucauguccucaacuuugcaggccuuuucuuguggu

SEQ ID NO: 4107736 - RNA, 66 nt, Human
gccaccauuuacugagcaccuacugcaggccaggcccugugccagcauggugccagugaguccagc

SEQ ID NO: 4107737 - RNA, 62 nt, Human
gccaccccaucgguagcccacccccuuccccgaggcuaagggaggcaugccgugguaguggc

SEQ ID NO: 4107738 - RNA, 76 nt, Human
gccacccugggccacccuggaccacccugggcugugaugacacagagucuggguauagggugugccuugguuuggu

SEQ ID NO: 4107739 - RNA, 74 nt, Human
gccaccuagugacuccuuuacguguaaucccuuggaacuaucacagacuagaccaaggaauccuggaaaguggu

SEQ ID NO: 4107740 - RNA, 84 nt, Human
gccaccucacugcaugggcaccagucucuagguggugaugggacaguggcaaccagggauggagcuugcagagcaugaaguggu

SEQ ID NO: 4107741 - RNA, 61 nt, Human
gccaccucuucccacugcccaugggcaggccaaccaguccugggugcagcaggaaaauggc

SEQ ID NO: 4107742 - RNA, 78 nt, Human
gccaccugccugaaguugagcugaugccuucaagaucuguuuccccaaggcccuucugcuguuagguagccagugagc

SEQ ID NO: 4107743 - RNA, 102 nt, Human
gccaccuggggccuggccaggccgcauacccucuggugaggcuuccaacuucuggggcauacagagaggauguggcauccagucagaagcccugguuaaggc

SEQ ID NO: 4107744 - RNA, 86 nt, Human
gccacgcccauuugcuuucauauugccuaugacugcuuuugaaauauaacagcagaauuaagucauugcaauagagacgguguggc

SEQ ID NO: 4107745 - RNA, 103 nt, Human
gccacgccugggcuccgcgcccagggcugcucauauugcuggucuccaggggaccuggcgucagugcuuuugagaagcuccuggagugaguccgauguguggu

SEQ ID NO: 4107746 - RNA, 93 nt, Human
gccacuauguaaagcaauauuccugauuaacgaccuuucaaucaauucaacaauuuugaguuuuaguuggucaugaauaauuacaugguuugc

SEQ ID NO: 4107747 - RNA, 60 nt, Human
gccacucaugggaggugugcaauucuuaaaucgauguguacuaccugaacauuaguaggc

SEQ ID NO: 4107748 - RNA, 74 nt, Human
gccacucuacguuuaauaacuuucaaaucucuagguguaaauggggaaauggauguugaguuaaauguuccugc

SEQ ID NO: 4107749 - RNA, 81 nt, Human
gcggcuggaagcgggaggccaguccuggccgggcugggcgacccgaauggagccagggccggcgcuggucccagcggccgc

SEQ ID NO: 4107750 - RNA, 73 nt, Human
gcgggaccagagccucucagccccuugggguccuccccuccccggucccaucucaggguugaagguucucugu

SEQ ID NO: 4107751 - RNA, 98 nt, Human
gcgggagaaacgccggaaggggcacggaccccagggagagcgcggaggcggccacgcggguccuuccuccaccugggcccaggcacuuccggucucgu

SEQ ID NO: 4107752 - RNA, 59 nt, Human
gcgggaggcacgaggcgcgcagugcgugugugcgcgugugcgcggcgcgcgugccccgc

SEQ ID NO: 4107753 - RNA, 70 nt, Human
gcgggagggggcucugccaaccuguccccaucccuuuguuccuuuggacagcucugagcaccccuccagc

SEQ ID NO: 4107754 - RNA, 55 nt, Human
gcgggaggggugugcggagcgcugggcugugcuccggcaacuucacuccucccgc

SEQ ID NO: 4107755 - RNA, 89 nt, Human
gcgggccaggagccggcugggccagcugaagugccgccccggcgggggccgggccgggccgcgcucaggauggcacagcugcggcccgc

SEQ ID NO: 4107756 - RNA, 96 nt, Human
gcgggcgcgcggaacugggaauuuggcgcuuggagcugcggccccgcgcuucgcaguccgggagcucgugcgcccaggugcccugacgcugcccgc

SEQ ID NO: 4107757 - RNA, 68 nt, Human
gcgggcgggcgguuccgcagcugcggggcacaaugagcgcucccagugcgcaggcgccaccugucagc

SEQ ID NO: 4107758 - RNA, 80 nt, Human
gcggggcugggucguggccagcuucgccccugggucugaagaccucugggcggcccaggccaaccuugcccugccgccgc

SEQ ID NO: 4107759 - RNA, 99 nt, Human
gcgggggaaauccaguuggcauuaaggaagggggcuccggcauuccuuggcaugcaguggcagcuagcuguuuucaugcucaucugugauuauccuggu

SEQ ID NO: 4107760 - RNA, 56 nt, Human
gcgggugcacaguucugcagugagaucuuuuuuuaagagguggaacagcaauucgu

SEQ ID NO: 4107761 - RNA, 64 nt, Human
gcggguuucauuucauuaugaaggcuuuccuugugccaguuucuaggaugcugaugagacccgu

SEQ ID NO: 4107762 - RNA, 63 nt, Human
gcggguuucgguggaacaguucccugguaacuuaaguguggguuugauucccucuaaacucgc

SEQ ID NO: 4107763 - RNA, 75 nt, Human
gcgguauuaagugcugucguggaacugggcugcuguccuacugcaguacugucuuccugauggcaaggauaccgc

SEQ ID NO: 4107764 - RNA, 69 nt, Human
gcggucggcagaggggcucugcucaucacaggcuaucaaggaugacagcagaccccucccuucugccgc

SEQ ID NO: 4107765 - RNA, 59 nt, Human
gcggucggcgaagcugaggggcugcagcccgguuccaggcucuggcuccgcgugaccgc

SEQ ID NO: 4107766 - RNA, 63 nt, Human
gcgguggacagaauaggaauugaauaggcaugaugcgccuuugugucuguguucugucauugc

SEQ ID NO: 4107767 - RNA, 59 nt, Human
gcgguggcagggagaagccauuggggauuugucuugcuggaaacucucucugccggagc

SEQ ID NO: 4107768 - RNA, 82 nt, Human
gcgguuagcugagagcucacuugaggaugugggcugggaaccuuauuucuucuccagugagcuacuuggacuuccucacggc

SEQ ID NO: 4107769 - RNA, 98 nt, Human
gcgucacucucgcccuccugcuuuccgcgcucucacccgcucccgccuccugagggcacgacuuguggaggagcgcgggcggcggggcgugagcgagc

SEQ ID NO: 4107770 - RNA, 69 nt, Human
gcguccccgcgguggcggccuccagcgccagucccacccggacggcgccagccgcgcgccgcagggcgc

SEQ ID NO: 4107771 - RNA, 60 nt, Human
gcgucguucucugccagggcguugguguagaacagcaaagccuggggagaguaaggaggc

SEQ ID NO: 4107772 - RNA, 55 nt, Human
gcgugcaacagccucuuccauuuuagguuccuauccugaaagacauguugccugc

SEQ ID NO: 4107773 - RNA, 68 nt, Human
gcgugcccacccuccuggucccugagcgcuguccgggcagcucugggugacaggagggccuggcacgu

SEQ ID NO: 4107774 - RNA, 79 nt, Human
gcgugcucaugccaaggcagccuccaagcuagcccagccuggcaacauggacaggucugccuuaggaccugagcauugc

SEQ ID NO: 4107775 - RNA, 56 nt, Human
gcguggagccgagcuccggagcgcuuucugaccguguggagcuccagcguccaugu

SEQ ID NO: 4107776 - RNA, 79 nt, Human
gcguggcaaugugugagcuaagcaaauaugagccaucauacuggcucugcugcacccuuggcuccucacacaugucugc

SEQ ID NO: 4107777 - RNA, 87 nt, Human
gcguggcccguagauuguuucuuaauaucccuucaagccagaaauuuccuuugguaguaagaguuaagcaacagauaccagccaugu

SEQ ID NO: 4107778 - RNA, 61 nt, Human
gcgugggcuggacugggaugaaaugagcuuaaucgccagacacucaguaccugcccgcugc

SEQ ID NO: 4107779 - RNA, 86 nt, Human
gcgugguggggaaugggaggugcucaagagggcauccucucugaaaggggugacagccgcuuggcgcuagcuaauuauugccacgu

SEQ ID NO: 4107780 - RNA, 73 nt, Human
gcgugguguggugaaacaaugauaaaauuuggaaucagaaaaccaaauucaaguccagcuucucuacacuggc

SEQ ID NO: 4107781 - RNA, 101 nt, Human
gcgugguguuuaggagcauguaauucuagcuacuugggaggcuaagacaugacaguagcuugaaugcaggaggcagagguugcagcgaacugagaucaugc

SEQ ID NO: 4107782 - RNA, 93 nt, Human
gcgugguuggagggcagccuguggaucccugcacuggagucuugcugucuucgaugcagguuggaucauacauuguuaccuccuacuguaugc

SEQ ID NO: 4107783 - RNA, 62 nt, Human
gcgugugcgccuggcaggcgggcggcgaaaagacguccagggcagccgcgggugcgcacagc

SEQ ID NO: 4107784 - RNA, 59 nt, Human
gcguguguagggcccuguugggagaccucucuacccaggaggugugcccaacucgccgc

SEQ ID NO: 4107785 - RNA, 57 nt, Human
gcguuauuuccugucugauuucccgaggggagaaaucucuggaggggguaguaaagc

SEQ ID NO: 4107786 - RNA, 130 nt, Human
gcguucaggucccaaucaauggcucugcaucuuuuaaaucuucuacaucaucauaaugucauuauuguugucauuguagaggauuucagaagaucuuuugaguuccuuguuaguaaagauuugucuuugc

SEQ ID NO: 4107787 - RNA, 64 nt, Human
gcguucuuuggaaggaagaccuuucagaugaccugaccaguccuccucuucagaacccggaugc

SEQ ID NO: 4107788 - RNA, 116 nt, Human
gcguugaccguggagggcaguucaggcgguuuguugggguccaggcccaggcccggugucucgggcccggcucccgacgcccggccaggacaguagggcccauagggaucauaagc

SEQ ID NO: 4107789 - RNA, 67 nt, Human
gcguugguccaaguuaacuguacaccaaaacaucacuuccuguguagauguuaacaauuacuaacgc

SEQ ID NO: 4107790 - RNA, 59 nt, Human
gcguuuacggaucauauauguacuguuuccaaaauguauauguagacucguuagaaugc

SEQ ID NO: 4107791 - RNA, 114 nt, Human
gcguuucaagcuggagcaaagguuucuuuucagcauuguggcagagaaugguagauuuuaaccuauuuccucauucuugccgcauauguuccuccuuuguccugccacucuugc

SEQ ID NO: 4107792 - RNA, 71 nt, Human
gcguuucuggcgccggggcaggccggcgauguccgagucgucgaagggcaugcacccggugaccaugacgu

SEQ ID NO: 4107793 - RNA, 57 nt, Human
gcguuucuugucugcccugcaggcagaaugaacugugaguggguuaucaggaaaggu

SEQ ID NO: 4107794 - RNA, 129 nt, Human
gcguuugacuucaugcaggaauuucacaccuucccagaccuuagagugcagguggagggugucuggcagagaaggcgccaaguacugccugcuggggcugggaaggacugcucccauggcaagggaggc

SEQ ID NO: 4107795 - RNA, 56 nt, Human
gcguuuguucccacuggaggaugcagcaacaagcugccauccugggagcagacagc

SEQ ID NO: 4107796 - RNA, 66 nt, Human
gcuaaaaauggaggugauuaauaugcuaaguaggaaaaccuuggcugucagucgccugcauucagc

SEQ ID NO: 4107797 - RNA, 56 nt, Human
gcuaaaaccaccaguggugugauggaugguuucauuucuucuuggacuguuuuggc

SEQ ID NO: 4107798 - RNA, 76 nt, Human
gcuaaaagguggccuaguuuuuucugguagguacaauaaguuguagcuaaugacauaacuggguucuaugcuuugc

SEQ ID NO: 4107799 - RNA, 89 nt, Human
gcuaaaauuaaguaccauguagcaucuauccugauaaaaguagugacuuauaacaguuuagguggugucauuuguaaguuaacuucagu

SEQ ID NO: 4107800 - RNA, 86 nt, Human
gcuaaacauauauauccaugaauguauuuccucaggaauguuaauaauagaacauuuacccuggaacauuggauagauaagucugc

SEQ ID NO: 4107801 - RNA, 62 nt, Human
gcuaaacuuaaauuggaugaguuaaguucaggguugagaacugcucugauccauuaaguagu

SEQ ID NO: 4107802 - RNA, 100 nt, Human
gcuaaacuuagaguguuaaaucuguuucucauaggguaggugacagcuaaaauaucaacuacuuuaguuucagauggacuauuuagcaucuucauugagc

SEQ ID NO: 4107803 - RNA, 66 nt, Human
gcuaaagaguuuacaaauuagguaauuuucucuaaagugaauuugccucagcuguugaccuugagc

SEQ ID NO: 4107804 - RNA, 55 nt, Human
gcuaaauaaucuucuucugacauguauagcagcacagugugaaguguuguuuagc

SEQ ID NO: 4107805 - RNA, 58 nt, Human
gcuaaaugacagagcugggacuaguagugcacaggcacgcugaccccugcugucaugc

SEQ ID NO: 4107806 - RNA, 64 nt, Human
gcuaaaugaggucauuaauggugggauccuaaucugauaggauugguggccucagaaaaagagc

SEQ ID NO: 4107807 - RNA, 79 nt, Human
gcuaacaguguucuuggcgcugagugcgauauagaagaaggcacaggauccgcccaaggcacuugcaaccuaaguuagu

SEQ ID NO: 4107808 - RNA, 59 nt, Human
gcuaacauguuccugagcuguuuagggcuuuucccacccucaggaucuuauauauuagu

SEQ ID NO: 4107809 - RNA, 99 nt, Human
gcuaacugcacuaaccaggagagcuggcugguuggggagaagacacuaacccugugagucugaccucagccagcuaaccugcccuggggugccaccagc

SEQ ID NO: 4107810 - RNA, 56 nt, Human
gcuaagaaggccauaucagagaaaaaauaacacucuagaucaugguauucuuuggc

SEQ ID NO: 4107811 - RNA, 68 nt, Human
gcuaagcagcuuucuuuccugugaagcugaaaaacgugcugcuucaaaccuacaagaggagcugcagc

SEQ ID NO: 4107812 - RNA, 77 nt, Human
gcuaagccugguucuaagggcuugaaauguaucagcaaacaaaguagaucaagcccuuacagagcuucuauuuuggc

SEQ ID NO: 4107813 - RNA, 88 nt, Human
gcuaaggauauugauaacuuuuaaaacuugugaaaaauuugguauuuuacaugaagaaaauuaagcaguuguaaaugucuguaauagc

SEQ ID NO: 4107814 - RNA, 66 nt, Human
gcuaaggcccagcuuuucacuuccacacgcuugcugcgcgauguggggauaauacugguaccuagc

SEQ ID NO: 4107815 - RNA, 73 nt, Human
gcuaaggugaaugucucuuagucucauuuucugcucacuucagcaugaacagcuugagagaugcacacuuagc

SEQ ID NO: 4107816 - RNA, 69 nt, Human
gcuaaguaacaggugcuuaguuuauucagugaauaaaugaauaaauggaagacaucugauaucuauagc

SEQ ID NO: 4107817 - RNA, 130 nt, Human
gcuaaguauugcuaaauucucuuuaugugcagaacaguguacuagguacauguucccgggaagccagguaauuugaggggcacuguacacugugcauggaauugcaaggcccugagguuucagcauuagc

SEQ ID NO: 4107818 - RNA, 61 nt, Human
gcccuguggccaagccuugacagauggugaacagaaucuggaaagacagagggcauggggc

SEQ ID NO: 4107819 - RNA, 64 nt, Human
gcccugugguuccaggaagcaaaacccaacccaccgccaagugcgcucccaaaccaccaggggc

SEQ ID NO: 4107820 - RNA, 59 nt, Human
gcccugugugaucacaugaacaucuuuaaauauuguuuuucaaaaugugguccagaggc

SEQ ID NO: 4107821 - RNA, 58 nt, Human
gcccuguuagguucuuugcucuuaccauugguucagucuuugaaguucugacagaggc

SEQ ID NO: 4107822 - RNA, 67 nt, Human
gcccuguuuggauggggacccagcuggggcugucucugaccugggugauuccuguccaggcaaaggc

SEQ ID NO: 4107823 - RNA, 82 nt, Human
gcccuuaaacucugauaugauauugaguauguugccagaagaugcaagaauaaaauaaaguaugauuuuuagaguuuguggc

SEQ ID NO: 4107824 - RNA, 76 nt, Human
gcccuuaagugcuucaguauccuccacauguuaagauuucucucauuaaauuagagcauuugaagcaaaugggggu

SEQ ID NO: 4107825 - RNA, 60 nt, Human
gcccuuaggcaagcagaagcccaaucacaugaaccugggcugcccucgcuugguuaaggc

SEQ ID NO: 4107826 - RNA, 58 nt, Human
gcccuuagucagcacuuucacuucagucacugugauugcaaaguucugacuguagagc

SEQ ID NO: 4107827 - RNA, 55 nt, Human
gcccuucauugcccaaagagccuccagacaggugggcuccugcuuugugaggggc

SEQ ID NO: 4107828 - RNA, 114 nt, Human
gcucgaacagauugacagggauuuuuuguuaaagugcagauugugauucaggaggucugggccagggcuugaaguucugcauuucuaauaaacugagacucccuauccaugagc

SEQ ID NO: 4107829 - RNA, 64 nt, Human
gcucgagccugggaggcagagggugcagugagccgagauugcaccacugcauuccagccugggc

SEQ ID NO: 4107830 - RNA, 62 nt, Human
gcucgaggcugcagaugccaccacuguugggagcuagcagugacagggcugcugccuugggu

SEQ ID NO: 4107831 - RNA, 71 nt, Human
gcucgccgccggcggggccacuucauaacgcgccgugcgugacgugaggggcuccuguugcaauggcgagc

SEQ ID NO: 4107832 - RNA, 129 nt, Human
gcucggguggaauguugugaugaauuauuccuuaaaugcccugagacugagcauggguuccaaucuggauguuuccagcucagcugcaggaggagggagaauuuagacagagacguuguccgccaaagc

SEQ ID NO: 4107833 - RNA, 92 nt, Human
gcucuaaaugguuaaaaauauguuuauguugggcuauauuuaaagcaauuuaaagauguguaagaaauaaacaacauggggcuauuuucagc

SEQ ID NO: 4107834 - RNA, 99 nt, Human
gcucuaauuauauugaaauguucagaggacaauauaaaccacagaggcaaaauacaagugguguguucaugucacuggaauccucaaugugcuuguagc

SEQ ID NO: 4107835 - RNA, 56 nt, Human
gcucuacgaacaugaaggucaauuugaaaccaagaccauugcuguauuuguagagu

SEQ ID NO: 4107836 - RNA, 64 nt, Human
gcucuaggguccucaucuguaaaugagggcagugguguuauuuauaagugaggauccacugagc

SEQ ID NO: 4107837 - RNA, 55 nt, Human
gcucuaugucagagagcuugggccagcugaugcaccaggcaugacugcagagagc

SEQ ID NO: 4107838 - RNA, 65 nt, Human
gccuugauuuucucaucucugagagaugaacacaagaguuuguauuucauugaaugagauaaggu

SEQ ID NO: 4107839 - RNA, 59 nt, Human
gccuugccaaggggcagcagagcuugcguggagcccccuccucucuccuuuggcagggu

SEQ ID NO: 4107840 - RNA, 74 nt, Human
gccuugccugugugcucuaaugccuaguacucuguuagcacagagaaggugcuuaguaagagauauguguuggc

SEQ ID NO: 4107841 - RNA, 57 nt, Human
gccuugcgcccccggagucggcucagaggagagauugacugccaugagggugagggc

SEQ ID NO: 4107842 - RNA, 81 nt, Human
gccuugcuaggcaguucuaauugcguuuucuugcauaguaacuguuauggagagugagugauuaggacaguguggaggggc

SEQ ID NO: 4107843 - RNA, 69 nt, Human
gccuugcucaucccccagugccucauuuuauaaauaaaaggcagugcaguggagggauagaagcagggu

SEQ ID NO: 4107844 - RNA, 56 nt, Human
gccuugcugauuaccuuccuuuaaaccaguccaucuaaagguugguguuaagaggc

SEQ ID NO: 4107845 - RNA, 59 nt, Human
gccuuggcacaacucuucagcauuuuacaaggauaagaaugccuuggagcagccaaggu

SEQ ID NO: 4107846 - RNA, 78 nt, Human
gccuugggugagagaaaagaaacacuguucuuuguaaagaaauguucucuaaucuuucucuuuauccaaucucugggc

SEQ ID NO: 4107847 - RNA, 78 nt, Human
gccuugguaccccagcccucagcaaagacaucuaugcguacgggcagugucugaacugggugcugacgguggcaaggu

SEQ ID NO: 4107848 - RNA, 115 nt, Human
gccuugguucugcaggcaaccccagcccugcauggccacgucugggcagaccggcaccccuacccugacacccaucugugccaguccugcacggcaaacaccucagagcccaggc

SEQ ID NO: 4107849 - RNA, 85 nt, Human
gccuuguaaacaguaguauuuaaacugaacuaacagacaauagaacaagaaaguuagaaguuugugaaauuacuguacgaaaggc

SEQ ID NO: 4107850 - RNA, 63 nt, Human
gccuuguauucacuguaacucagcaauagaaagcucuguuuggugggagcagggaagcaaggu

SEQ ID NO: 4107851 - RNA, 60 nt, Human
gccuugugguaaguugggcccuggcaggauguucccaggguccagagaagccauuagggc

SEQ ID NO: 4107852 - RNA, 77 nt, Human
gccuuguuugcugccagggugaggcgcagcagcuguuuaacagcccugugagugacccuggucagcacuuucaaggc

SEQ ID NO: 4107853 - RNA, 61 nt, Human
gccuuucaaugugccugccuuggggauagaaccuagcucccaggaguuucacugcaaaggu

SEQ ID NO: 4107854 - RNA, 66 nt, Human
gccuuucacgcguuuuuuccugugucucaaacgggguaccaggaggcucagggaaacagcgcaggc

SEQ ID NO: 4107855 - RNA, 81 nt, Human
gccuuucagcccccauuccgcuccccuuccuugcgcugcgucgggaaagggaaugggaucccuaggggugcaaauacaggc

SEQ ID NO: 4107856 - RNA, 56 nt, Human
gccuuucucuuugcugaucaugucugauuuggacaacaagagcuaaggguaagggc

SEQ ID NO: 4107857 - RNA, 83 nt, Human
gccuuucugggcuguccugauggaaaaugugccugcucagcacauagggguuacauuucucauaggagagccaccucuggggc

SEQ ID NO: 4107858 - RNA, 66 nt, Human
gccuuugaauuguuguggugaguaggaauauguuuuguuuccguguauuacccauucagucagagc

SEQ ID NO: 4107859 - RNA, 89 nt, Human
gccuuugagcaccuguggccagaaccaggagaaugauauacuuuccauucacaguuaucuucuccuuuucugucccaaggcucaauagu

SEQ ID NO: 4107860 - RNA, 56 nt, Human
gccuuugcauaaagugccauaguauuacuaagguuuacagggcacucuuaugcagc

SEQ ID NO: 4107861 - RNA, 82 nt, Human
gccuuugcuauuguaaauagugccacaauaaacauaugugugcgugugucuuuauaguagcaucauuuauaauccuuugggu

SEQ ID NO: 4107862 - RNA, 82 nt, Human
gccuuugcuauugugaauagugccacaauaaacauacgugugcaugugucuuuauaguagcaugauuuauaguccuuugggu

SEQ ID NO: 4107863 - RNA, 56 nt, Human
gccuuuggagaugucauaggaucagcuucugggauuccauguacauuugcuaaagc

SEQ ID NO: 4107864 - RNA, 67 nt, Human
gccuuuguaccuuaaauccuguggggccuguguccucuuucuacaggaucucuagggugcuggaggu

SEQ ID NO: 4107865 - RNA, 67 nt, Human
gccuuugucuuuugccaaagaucaguugaccguaguuaugugagucuguucugcgggggaagggggc

SEQ ID NO: 4107866 - RNA, 57 nt, Human
gccuuugugaugggcgggcaccaggagaacgaggaucugugccugccccguaagggu

SEQ ID NO: 4107867 - RNA, 105 nt, Human
gccuuuguguggagaucuggcuggccucucuagcauccagccuguccuguccuguuaugucucgguuugagguugugcugaggggucucuucccauagaggaggc

SEQ ID NO: 4107868 - RNA, 65 nt, Human
gccuuuguuagcaguuaaagacuccacuggacuuaucaucaguucuggcugcugcugucagaggu

SEQ ID NO: 4107869 - RNA, 66 nt, Human
gccuuuuacagaucaucaagguauaaugauucuguucauucauacuaugguggcugucccagaggc

SEQ ID NO: 4107870 - RNA, 67 nt, Human
gccuuuucccuuuuuaagccuacuucucuucaucuacaaagugaaagguugggugaaugguggaggc

SEQ ID NO: 4107871 - RNA, 63 nt, Human
gccuuuucugaugucacgaggucuaacucuacuuagcagaagacuggggcauaagaagauggc

SEQ ID NO: 4107872 - RNA, 70 nt, Human
gccuuuucuuccugugucugugcccccauuuuccuggaagacucccugcacauacuacacagaaaauggc

SEQ ID NO: 4107873 - RNA, 68 nt, Human
gccuuuuuaagaugaaugcgcaaaaaggggaagaggaaucugaaaagcaguucgucuuagaaaauggc

SEQ ID NO: 4107874 - RNA, 81 nt, Human
gccuuuuuugucuucuccugcuucuuagagcugcucuggaugcugcagguucguucucaguucaggaaggacauguacggu

SEQ ID NO: 4107875 - RNA, 121 nt, Human
gcgaaaucugagccuuggggggugcaaauggaccccuuucccuucuggcucagggagguuuugggcuuacgcucgaguccuggccgaaguggaaagggcauaacucaguuuuggagaacgc

SEQ ID NO: 4107876 - RNA, 103 nt, Human
gcgaccucccucaggcuucugugcagcuucuccaucuccuuguauucacucccgacaucuacaggagagcagaaagcucacaucaggacuugguguccguugc

SEQ ID NO: 4107877 - RNA, 73 nt, Human
gcgagaagaguuggugagccccugugcugaugaucccaucuagaucagcuaacuuuccaguuuucuuaguugc

SEQ ID NO: 4107878 - RNA, 55 nt, Human
gcgagacgggcccccggcgccuccggucggucagagagcggcggggcgcgucugc

SEQ ID NO: 4107879 - RNA, 80 nt, Human
gcgaggacaggaagaagcagggcauuugaaugcauuuuaaggugccauuuaaauacagguucuguuacuuccaggccugc

SEQ ID NO: 4107880 - RNA, 65 nt, Human
gcgaggacauaguccagauggcaaucaaggaagaccccgcccucuugcuuauggcacugcuuugc

SEQ ID NO: 4107881 - RNA, 55 nt, Human
gcgaggcagugcauugucuaggggagauuaaagccccagggccguauugucuggc

SEQ ID NO: 4107882 - RNA, 61 nt, Human
gcgaggccagaguuaaggagaacagcuaggaaagaguugcagucacuaauguggcacucgu

SEQ ID NO: 4107883 - RNA, 89 nt, Human
gcgagggcagccugacuucucuggccuggugcagaaugucuccuggagaccagcugagggggccaagagcucaggugacuuuccuuugc

SEQ ID NO: 4107884 - RNA, 88 nt, Human
gcgaguggggguccuguggggaggccgcgcgcgugggcguccagggcggcggccccguccaccgcgucccacacgcuccccgcggcgc

SEQ ID NO: 4107885 - RNA, 69 nt, Human
gcgauauuuucacaauugugagaauaguuuaauuccacuaggaguaucuuuucacaaugaacaugucuc

SEQ ID NO: 4107886 - RNA, 102 nt, Human
gcgaugcuuucccuucuuggagagauuaucagaccagcaaucuuuuagaaaagguccguaggaauuuugugagcuuucccagaagauagguaggguaucugc

SEQ ID NO: 4107887 - RNA, 72 nt, Human
gcgauuuccuuggagaauguuuuccugcagugcuucacacuggcagagggaaaaccauuccccaacaggagc

SEQ ID NO: 4107888 - RNA, 76 nt, Human
gcgcacccacggcugccaguccugagccucuucugcuuucagggaggugucaucaggcagcucugggccacugggu

SEQ ID NO: 4107889 - RNA, 74 nt, Human
gcgcagccauccagggguacccuggagcccgacagaagcagggccgggcuccagauguccccuggcaaaugcgc

SEQ ID NO: 4107890 - RNA, 55 nt, Human
gcgcagcucugcaugcuacuaucaugaguguagguggcaggaguggaugcugagc

SEQ ID NO: 4107891 - RNA, 65 nt, Human
gcgcagcuugggggcgcuggccucagagacacccucacuugaccccgagcucaccacagcugagc

SEQ ID NO: 4107892 - RNA, 89 nt, Human
gcgcaggaccggcagcccgaggcggagacgaagggggcccgcagggacuccuggccuugcgucuugggagagcgcacgcuggccugcgc

SEQ ID NO: 4107893 - RNA, 92 nt, Human
gcgcaggcugggcucagaggaguggccugggagauguuuucugagugaaagaaagaaugagccuaggcauuuguuuagcuucagcucugcgc

SEQ ID NO: 4107894 - RNA, 55 nt, Human
gcgcagguccagucugcuguugauaaucaauuuucagcuucuucugugaccuggu

SEQ ID NO: 4107895 - RNA, 129 nt, Human
gcgcagguguuugagcagcgcagagcccuggccgaagcccuuggcgcacaccgggcacuuguggggccgcgggccgccgugcgugcgcaggugcugugccaggagcgagccgugcccgaaggccuugcc

SEQ ID NO: 4107896 - RNA, 101 nt, Human
gcgcaguccugugcuauugugcauaugucauucgauccguguucagccugguccuggagaucaauaugcauuacuaaucaaaauggcauaggaaucagugc

SEQ ID NO: 4107897 - RNA, 71 nt, Human
gcgcauuuguccuuacagcgccauggcuuccaugaguaauuagaugaggccuccugcagggaugagugugu

SEQ ID NO: 4107898 - RNA, 63 nt, Human
gcgccagggccagcccacuagcgaggaggaggaagccgccucggugggaguuggcugaggggu

SEQ ID NO: 4107899 - RNA, 66 nt, Human
gcgcccggcuuccugccucucgccgcccgcccuccgggccgcggcauggcgagcaggacugggcgc

SEQ ID NO: 4107900 - RNA, 55 nt, Human
gcgcccucugguggccgccucggcugucccagcccaggucaggcuucagagcugc

SEQ ID NO: 4107901 - RNA, 55 nt, Human
gcgccuauuuucauuaucaaggccacauuccugggauuccuuggugacuaggcgc

SEQ ID NO: 4107902 - RNA, 64 nt, Human
gcgccucuacccaccugagacaugcaggggggcaccugucuuccuucccaguggggagaggugu

SEQ ID NO: 4107903 - RNA, 126 nt, Human
gcggcagcggugucuggcucucgcgcuuucuccagcugcaguucguuccagcucucccgacuucgcgcucggcgccggaguuggugggcugcagcugcagaccccgcgacgcuucgcccgugccgc

SEQ ID NO: 4107904 - RNA, 82 nt, Human
gcggcccugcugcucccccaaguauggcucaccaaagcuccagaggcggucuguguccaagcuggacagcagcaaggaccgc

SEQ ID NO: 4107905 - RNA, 59 nt, Human
gcggccguggccucagcccugcggaggaccuccugccgcaaguacugcugccuguccgc

SEQ ID NO: 4107906 - RNA, 58 nt, Human
gcggccuuguggcggagcaggcucugcggagccgaguaggacuugccgcacaggucgc

SEQ ID NO: 4107907 - RNA, 114 nt, Human
gcggcgaggcccugccauguuccccgagagcugcacauugccaccuguugcuauggagaagccucuuuaucgcaaacacuggguaaacagcugcugcugggagccccuuucugc

SEQ ID NO: 4107908 - RNA, 98 nt, Human
gcggcgcccagaguuucaaccggugcguucagccugcaucccucgaauuccuugacccagcccggggcuggagccuggcggugguuucuaggcgcugu

SEQ ID NO: 4107909 - RNA, 59 nt, Human
gcggcggcgguagcaaaaaugaccccgggacuuugcccuggccgcuaccguugggcugc

SEQ ID NO: 4107910 - RNA, 61 nt, Human
gcggcuuaggggcagaagcggcgguccagggccgccuggcgcagcagccugucccagccgc

SEQ ID NO: 4107911 - RNA, 79 nt, Human
gcgggagcccagagaggcuggcagugccagguucaaacuuagagccaugggcucccaguccuuucaacuggguucuuuc

SEQ ID NO: 4107912 - RNA, 57 nt, Human
gcgggagggugggccccuucugugccaucuggaacagaggccacaccagccucccgu

SEQ ID NO: 4107913 - RNA, 82 nt, Human
gcgggcacccucagguauccugggcugcacccucagccucugggacaccaagggcaaggggguaguugaggagugggccugc

SEQ ID NO: 4107914 - RNA, 57 nt, Human
gcgggcaggcugaugccucuugggacauguaagugcagaaggcaaggccugccacgc

SEQ ID NO: 4107915 - RNA, 92 nt, Human
gcgggcgggacaggaagcacaggcugggcagccuccccggccagggaggagccaggcugggccaccucccggucugucugccgacuacccgc

SEQ ID NO: 4107916 - RNA, 58 nt, Human
gcgggcuggcugcagcugcuggagccagagacggcucucaagccagaccaggccucgc

SEQ ID NO: 4107917 - RNA, 89 nt, Human
gcggggacauggcagaggcaaugauucugacuucacaccucgguuugauuggcucuucaaagucucugcuucuguaacaugaaaccagc

SEQ ID NO: 4107918 - RNA, 79 nt, Human
gcggggaccacguggaggggccuggucagcaaguggcaaggacgcggcgcaaagccaggcuuucuaauguacaauccgc

SEQ ID NO: 4107919 - RNA, 81 nt, Human
gcggggcaccguaggaggaggguggaagagcugcugagaccgcaaguuuaccagccucccacccaccacauggugcucagc

SEQ ID NO: 4107920 - RNA, 63 nt, Human
gcgggggcgcgcacgccagacagccucccgugcggccucgggcugagcgugcgcgccaccggc

SEQ ID NO: 4107921 - RNA, 92 nt, Human
gcggggggauugcuugaacccaaagguugaggcugcagugagccauguuugugccauugcacuccagccugggugacaaagcaagaaccugu

SEQ ID NO: 4107922 - RNA, 60 nt, Human
gcggggugugagugugugugugugcgcgcgcgugcacacacaugugaguacaugccuagc

SEQ ID NO: 4107923 - RNA, 83 nt, Human
gcggguccagcuuugaauaugugcuuguuaaauugucugugugaggagccgaggggcacuguucaauagguagcuggauaugc

SEQ ID NO: 4107924 - RNA, 119 nt, Human
gcgguacgcuuuuccgcaguaaguacaaauguaagcuccuuuggcucgagaucucaaguuccucuugaugacuugcugugcuugggagcuacucugucccugaaaaccaggcuugccgc

SEQ ID NO: 4107925 - RNA, 55 nt, Human
gcggugccuccuccaguguugcugcuguccagcagcucaguggcuggggcgcugc

SEQ ID NO: 4107926 - RNA, 58 nt, Human
gcgguggcgguggugcaugugggcaugagggugguggugccgcauguacacgucaugc

SEQ ID NO: 4107927 - RNA, 65 nt, Human
gcguaacucagagcucugcuuggguucuuaggggcuuagcugucccuggcagaagccugauaugc

SEQ ID NO: 4107928 - RNA, 57 nt, Human
gcguccaggacguggguuucuucccucuuccaggcgagaggcccucggacugggcgu

SEQ ID NO: 4107929 - RNA, 56 nt, Human
gcguccccguggcgggagaggccaccucguggucgcgcgcccaggccgccgggagc

SEQ ID NO: 4107930 - RNA, 109 nt, Human
gcguccuccucucugcugccccguguguuuucuccucugggagaccucuccccacagcaggagcuccucagaagaggguaacacaugggugggggcuugaggaggaugu

SEQ ID NO: 4107931 - RNA, 69 nt, Human
gcgucgcucuggacaggggcgcuuuggggugagaugugcgcucgcggccuugauccauuuaguggacgc

SEQ ID NO: 4107932 - RNA, 78 nt, Human
gcgucgggaagccaggccagguggucaugcuugcugagucauuuagcugcaacuguccuugccuuguuuccugauagu

SEQ ID NO: 4107933 - RNA, 68 nt, Human
gcgucuagucacauggaauguggagcagagacuaugcuacaucuucaccacauucucauucugacugc

SEQ ID NO: 4107934 - RNA, 66 nt, Human
gcgugccugggcagcuuagcaccguaaauccaccgcugcuggcuggcagagcagugcccaggcggc

SEQ ID NO: 4107935 - RNA, 79 nt, Human
gcguggccaggugcuggcugcuggccugaggaugccaacuggcauucaggguucacggucaacuccaccugagucaggc

SEQ ID NO: 4107936 - RNA, 78 nt, Human
gcguggcgggagggucuuccuaauuugcuauuaggaugaauuccuagcaagauauuauggaaugacaauuccacaugc

SEQ ID NO: 4107937 - RNA, 57 nt, Human
gcguggggcagcccagggcuucagcuccagccuggagaccugcuucuugucacaugc

SEQ ID NO: 4107938 - RNA, 87 nt, Human
gcguguggggccagcacaggucaguuuuuuaagagccuccguagaacagggucuuauuuuuguuccugagcugaaaugcacacaugc

SEQ ID NO: 4107939 - RNA, 99 nt, Human
gcguuaaaauagccuaucugcauguguauauauguguguauguguauguauaugcacucacacgcauaaauacacagucuauuuaguuaccuuuaaugu

SEQ ID NO: 4107940 - RNA, 60 nt, Human
gcguucuugccagcauccucagguucccgagccggugaccagggaccugugcgggaaagc

SEQ ID NO: 4107941 - RNA, 79 nt, Human
gcguuuacuguguaccaggcacuugccuaggcucggaauauucacuggcccacaacagugccuaguauauaggaggcgc

SEQ ID NO: 4107942 - RNA, 59 nt, Human
gcguuuguucacuaauucagcuggggaacccuugccaucuggacugaggagacagucgc

SEQ ID NO: 4107943 - RNA, 58 nt, Human
gcuaaaacuggccuaucagcaugagucuucacuaacagauuacaaugggcuagcuagu

SEQ ID NO: 4107944 - RNA, 95 nt, Human
gcuaaaccauaguuuugggauaauuuaaauacuucucauccguuuggacaaaacugaggagaaauuugagugaagcuuaaggcucuuguuucagc

SEQ ID NO: 4107945 - RNA, 105 nt, Human
gcuaaaggcugcgguuuuuguggugugaguggacauaggacucuuucaucaggguaauuuauaguccaauguccauuuguuuuagaacagacugaaauugcuggc

SEQ ID NO: 4107946 - RNA, 63 nt, Human
gcuaaaguuuauggacaucuuuuggccuuucccuuguggucacaagauaaacauagcuccagc

SEQ ID NO: 4107947 - RNA, 77 nt, Human
gcuaaaucagaugcaagagauggacuuguguucuauuauuagaauauaaauuucuugucuuucuguauaugauuagc

SEQ ID NO: 4107948 - RNA, 62 nt, Human
gcuaaauuuaagccuuucuccucuuagggcggaagccaugaggaccagagccuuaauauagc

SEQ ID NO: 4107949 - RNA, 86 nt, Human
gcuaaauuuuaccaaggucuuuuaaguccuuuggcugaaacagguauucaggacaguauaggcuuuaggagaauaugguauuuggu

SEQ ID NO: 4107950 - RNA, 95 nt, Human
gcuaacaaauuauuggagaaaaucuugcauuaacaacuugugauuuauagguaauuucuugucagugacagauuuaugaucucuuaauuuuuagc

SEQ ID NO: 4107951 - RNA, 108 nt, Human
gcuaacaggcuuuugaaagaaugggcaagaauaggcucagggcugggugacgggugccugcccauucacugagaucuauagcaugcccacuccucagggccuugaagc

SEQ ID NO: 4107952 - RNA, 129 nt, Human
gcuaacccuuggaauuaccugggaagauuuuuaaaauucagaugcuccagucucaucaugcagugauucuagcaucaggcucaagcacugauauuuuugaaagcuccccaggugacucuaacguucagc

SEQ ID NO: 4107953 - RNA, 74 nt, Human
gcuaagaaggcacacagaccccagcaagucagaccuggaagcauacucacugcuggaggccugggguccuuggu

SEQ ID NO: 4107954 - RNA, 63 nt, Human
gcuaagaaguguuugcccagccauauacauugaaacaaauaugccugggucuuauuucuaagc

SEQ ID NO: 4107955 - RNA, 96 nt, Human
gcuaagagaguaagaguagaagauguugucguuagugaugaaugcagaggaaagcagcucggcuaauuguuaguaucaacccuuacuuugcuaagc

SEQ ID NO: 4107956 - RNA, 88 nt, Human
gcuaagauuguaagggacucuugaguaauauuuacaugugucuuagccacauucaguguuaaauucaaagaguugguuucaauccagc

SEQ ID NO: 4107957 - RNA, 73 nt, Human
gcuaagcacagacacaaaaggcuuuccuggugccuugcccugaucgggaaaaauaagccaugucugugcuagc

SEQ ID NO: 4107958 - RNA, 72 nt, Human
gcuaagcuucauacaguggcugcacuccagccaguaaaaaggcuggagugcagucacuguguguagcuuagc

SEQ ID NO: 4107959 - RNA, 95 nt, Human
gcuaaggaucuaagguugacuugaaucaaaauuugacuuacauuuccccuagugcuuaaagcuugauucgaagcuuaaauacuuggguucaaagu

SEQ ID NO: 4107960 - RNA, 64 nt, Human
gcuaagguuucuggacagcaagaucaguuaauaaaguggcagagugagcuuccagaaguuuugc

SEQ ID NO: 4107961 - RNA, 68 nt, Human
gcuaaguccugcuuuaaguauucaacaaaguggcucaugugaagaauauugaagcaguuggaaguagc

SEQ ID NO: 4107962 - RNA, 57 nt, Human
gcuaagugcuucuuucuccucaagccuucccucaaggagagguggaaaaagcacagc

SEQ ID NO: 4107963 - RNA, 61 nt, Human
gcuaaguuucaggggaugccaacugaguacuuuaugcugucuugugucuucugaagagagc

SEQ ID NO: 4107964 - RNA, 65 nt, Human
gcuaauagcuuaugggauagauguuacugcuagaugaagaaacaucuucagagaagcuaaguagc

SEQ ID NO: 4107965 - RNA, 88 nt, Human
gcucuuugaaggaauagaaugccuuagaauguucacccuaguacauacccuggcaaaugaacuuaacggcaacuauuuaagaaugagc

SEQ ID NO: 4107966 - RNA, 87 nt, Human
gcucuuugacaacagggcuuacgugauaacuucucaaaaacaagccaaaaauacuuuuuaagacaaucauguacuguagucaaaagu

SEQ ID NO: 4107967 - RNA, 83 nt, Human
gcucuuugcacaguggguggucauguacagcacucguaacgguuucacgaggaccauguggccgagacccccaggguaggggc

SEQ ID NO: 4107968 - RNA, 56 nt, Human
gcucuuuggcuccacuuggaacgauuccucauucuuccagaaggaagccggggagc

SEQ ID NO: 4107969 - RNA, 74 nt, Human
gcucuuugguuuucagcuguuugcauccaaaugaagacacauuuggcaacauuaauugaauccuuauaaagggc

SEQ ID NO: 4107970 - RNA, 67 nt, Human
gcucuuuguaugucaugacaacugugccaauuauuuuuggcacaguucacuuuuuauaucaaagagc

SEQ ID NO: 4107971 - RNA, 68 nt, Human
gcucuuuuccuccuucagauucagagggcuaggaggucagagugcagccuuugagggaggggcagagu

SEQ ID NO: 4107972 - RNA, 75 nt, Human
gcugaaaacucuuuguggacauuaaauuccuccuggaaaagaguaguuugaugauuacagagaaaaugaaucagu

SEQ ID NO: 4107973 - RNA, 66 nt, Human
gcugaaaagauaauuugaguaaauuaauuuaggcuggagaguuagucaugacucagauuauucagc

SEQ ID NO: 4107974 - RNA, 56 nt, Human
gcugaaaagaugccagaucuuagcgaagaacugcaagaagaugguuaacuuucagu

SEQ ID NO: 4107975 - RNA, 77 nt, Human
gcugaaaauucuuuauucagcuguuugcuucuacugauuccauaaucuugaugacaaaggcugaaagggaaaagagc

SEQ ID NO: 4107976 - RNA, 129 nt, Human
gcugaaacuugcucuaaguuauacaaagaguggagacagagauagccaauuggaagccgguuacaucuaggccauguguuauuucuguauuuacguagucuucucuguguaauuagaacugcuauaggu

SEQ ID NO: 4107977 - RNA, 63 nt, Human
gcugaaauuagacugcagaaguccuugcugguugcagaaugguuguaaaucuaguuucacggc

SEQ ID NO: 4107978 - RNA, 83 nt, Human
gcugaacacaggcuacaugaacucuugcuuuauuucagcacagggcuucugauauugcaauuuauaccauguuuguuucuagc

SEQ ID NO: 4107979 - RNA, 59 nt, Human
gcugaacacauuucuccugccuccaggacagagcaucaggcaugaggaaucauugcagc

SEQ ID NO: 4107980 - RNA, 85 nt, Human
gcugaacauuaggugaagugcaucacuacucauuacaguauuuuuugacaaucuauauuuaagaguuuagugccaccuggucagu

SEQ ID NO: 4107981 - RNA, 113 nt, Human
gcugaaccaaaguguguguaaugauauacuggaugcuggcaugaacuuauguugucucaaaugguaacaaaguucacugaccagcacuggucugcaaucacccuuugaguagc

SEQ ID NO: 4107982 - RNA, 109 nt, Human
gcugaaccccagcaaacagaggaagaggacugcccccucccgcggaggcccacucacgcugggcacuagugacaaggggacaucagccuuuguucuccuggggcuuggc

SEQ ID NO: 4107983 - RNA, 64 nt, Human
gcugaagaagcugcagccuggaggggaagugccucaccaaaggccacacagugaauucuuuagc

SEQ ID NO: 4107984 - RNA, 57 nt, Human
gcugaagagcaaggcugggucuccuuuuccagagacugagcccauuacccucucggc

SEQ ID NO: 4107985 - RNA, 70 nt, Human
gcugaagaugcaucccuucucuucuuuuccccuaaauaaguaaagcuggaaaaguaaugcauucuacagu

SEQ ID NO: 4107986 - RNA, 80 nt, Human
gcugaagcauuuauuuccaagagcuuauuucugaaugacaaacaucuucauacaugaaauaggauucuggagguuugagc

SEQ ID NO: 4107987 - RNA, 98 nt, Human
gcugaaggaguggacuggggcacuuaaugggcacagagauugauuaauucauucaauaccuuugugccauuuaguguugugccaggcacuuucuaggc

SEQ ID NO: 4107988 - RNA, 56 nt, Human
gcugaagggcauggggccugggcuccucagaaagaaacaagccugccccaugcugc

SEQ ID NO: 4107989 - RNA, 56 nt, Human
gcugaaggucucuggagaggucaugggucaggucauguucaucuccugucuucagc

SEQ ID NO: 4107990 - RNA, 58 nt, Human
gcugaagguuacuccugugucugcggaaacccugucugcaggcuggucaaaccucagu

SEQ ID NO: 4107991 - RNA, 61 nt, Human
gcugaaguccuaaucccaaguacaguagaaugugccuguauuuggagauaaggccuucagu

SEQ ID NO: 4107992 - RNA, 56 nt, Human
gcugaaguggcgugaucagaauuauuauuagggcugugaacauggccaucuucugc

SEQ ID NO: 4107993 - RNA, 61 nt, Human
gcugaaugaagcugaaaaaggcauauauugauauugauauagguaacacauuuuauucagc

SEQ ID NO: 4107994 - RNA, 90 nt, Human
gcugaauuuugaacagcccugagaaggaggaucucuauucaccuacgaacugaaggaccuuguccaggguuacuuaguuguuuaaacagc

SEQ ID NO: 4107995 - RNA, 58 nt, Human
gcugacacuuagaagugcccugucuauagcccucugaccuugacuucuaauugccagc

SEQ ID NO: 4107996 - RNA, 81 nt, Human
gcugacagcgcaggugcugcuggagcagcaggcacuacagagccaguguucuccaguaagcccucugccacuguucuuugc

SEQ ID NO: 4107997 - RNA, 116 nt, Human
gcugacaggaaguggcuuuuuauccugcagcagauggcugaggacaaggccucugugaaagcccaggugacguccuugcucggggagcugcaggagagccagagucgcuuggaggc

SEQ ID NO: 4107998 - RNA, 68 nt, Human
gcugacauggucucugguaagcagcuuuaauuugauauggcuggauguacuuuggggcuggcugcagc

SEQ ID NO: 4107999 - RNA, 57 nt, Human
gcugacauucuaaaaaauauggaagggaaggucuucuaguauuuuagggugcucagu

SEQ ID NO: 4108000 - RNA, 85 nt, Human
gcugaccuggugcuguagccugauugaggggcacagccuuuuccccagucuuggugucuguagcacguauguucuuagucucagc

SEQ ID NO: 4108001 - RNA, 68 nt, Human
gcugacuaaccuggaguuguuucauugcagagaggcuggcuguggcagaugcaacugcaggugagugc

SEQ ID NO: 4108002 - RNA, 114 nt, Human
gcugacuaagacaggcaggagcaaauaguacacacugcaggccugagaagagacacugucacagugcaccagugugaagcuuguugaagccugcaaagaacuggucaucacagc

SEQ ID NO: 4108003 - RNA, 62 nt, Human
gcugacucagcagcugaugauccuugggaugggcuaggauaugaagcuaguguuggguuagc

SEQ ID NO: 4108004 - RNA, 77 nt, Human
gcugacugacuacauguccugucauuuucuuuacaugcacgauugauaaaacaaugacaguggcacagucacuuggc

SEQ ID NO: 4108005 - RNA, 89 nt, Human
gcugacugagugccagguccugaaaguguacuaugucaugaacacucuaaaguauucucugaucaguauuacuacuguucacucuuagc

SEQ ID NO: 4108006 - RNA, 61 nt, Human
gcugacugauggacacagcaccugaguuccucagauuuugcuggaguuuacucaggccagc

SEQ ID NO: 4108007 - RNA, 60 nt, Human
gcugacugcucagggccagcuggcuuuggcuccugcagguuuggucucagagcaggcagc

SEQ ID NO: 4108008 - RNA, 106 nt, Human
gcugacuucaugggccuaccuggcuaggaauccaugacucuccuguggaggucauuagccauugccugucgccaguggcccuacaaacccccacauggaagucagc

SEQ ID NO: 4108009 - RNA, 57 nt, Human
gcugacuuggccaaggccccggguuagucgcagaccugggauggggccagguuuagc

SEQ ID NO: 4108010 - RNA, 129 nt, Human
gcugacuuucuucuuccuucuuguugaauaucugucugguugaggaaucaggaauccuucccugcuuccuucuucaauuagauagcuauugccucuccugccagccaaaggaaguagggauguuuuggu

SEQ ID NO: 4108011 - RNA, 104 nt, Human
gcugagaaagggcgggcagcugagcaggcagccaagccagccggagcauugugugugaucugcaggcugaggcuggcucaacugccuuggagcucuuugacagc

SEQ ID NO: 4108012 - RNA, 75 nt, Human
gcugagaccuguaaugagaaauugaaagugcuaucagucaaccuggugaugugauuugcucuugagggucucagc

SEQ ID NO: 4108013 - RNA, 55 nt, Human
gcugagagugugagaucagauuagagagacuggaagucuggcuccgccucuuagu

SEQ ID NO: 4108014 - RNA, 87 nt, Human
gcugagauaaacugcuggaauauguuugcuaaccaaacuuccagcagcuuggcagcaagaauaauuuggguaguacaucacuucagc

SEQ ID NO: 4108015 - RNA, 66 nt, Human
gcugagaugcggguuccgggcuccuguuccccucggggaaggaggcacccugagccugccuucagc

SEQ ID NO: 4108016 - RNA, 78 nt, Human
gcugagauuauaggugggugccuauguauguauauaauauauaguauaucauauuguaagcaccucauaaguuucagc

SEQ ID NO: 4108017 - RNA, 69 nt, Human
gcugagcaguggggccagcucccgcccacccccaggagacuggugaggagagcuguccggcugagcagc

SEQ ID NO: 4108018 - RNA, 59 nt, Human
gcugagcccuagucuaguauuauagccagggaagguguagggaggaaagggcucuuggc

SEQ ID NO: 4108019 - RNA, 84 nt, Human
gcugagcggccacgagcagggcuggccgggccgccauuaaugauuaacuuggggccugggccuugaccucgugggccucugagu

SEQ ID NO: 4108020 - RNA, 78 nt, Human
gcugagcugaugguaacugaaggaagugacugagaccugaauuaaugucauuucuauugcuacugucugaggcuuggc

SEQ ID NO: 4108021 - RNA, 77 nt, Human
gcugagcuguguggcauguggaccuguuuucccaggagggagcacuccugggguuuuggccgcagcugcacaucagc

SEQ ID NO: 4108022 - RNA, 78 nt, Human
gcugaggagguagauguccuuguuaauaauuguuaauuaauuaacaauuaaggauuauacucuccuuucauucacagc

SEQ ID NO: 4108023 - RNA, 60 nt, Human
gcugaggauugaagaguugccaguuguucuaacaacaugguggccauuauuaaccuuagu

SEQ ID NO: 4108024 - RNA, 105 nt, Human
gcugaggcaggagaaucgcuugaaccugggaggcagaaguugcagugagccgagauugcgccacugcacuccagccugggccacggagcgagacucugucucagu

SEQ ID NO: 4108025 - RNA, 56 nt, Human
gcugaggccaguuuaaugaggacucauugacuuucuucauugggccugccugcagc

SEQ ID NO: 4108026 - RNA, 77 nt, Human
gcugaggcuccaugccuguggcaauaguugcuucacauggcggcaacucuucuugcaauggggaacauggaggcagc

SEQ ID NO: 4108027 - RNA, 72 nt, Human
gcugagguggcacaggguuguuggucauaugauuugcuaucugauggccugaugcaccugucccaccacagc

SEQ ID NO: 4108028 - RNA, 71 nt, Human
gcugaggugucaccuugcugggccaagaggaaaagagcagcugggauuagcaacuugguggcauuaacagc

SEQ ID NO: 4108029 - RNA, 108 nt, Human
gcugagguguucuuauaacuuguucuagcgagggaccuagggauuucugagucucuuuuuugcauucaccccaaauucccaguggaauagguuacuggaaaccauagc

SEQ ID NO: 4108030 - RNA, 88 nt, Human
gcugagugcuauuuuucucuuuugcucucucacucucuaagguguaaauagauugaguaaacaguuucuuagaagaaaaguugucagc

SEQ ID NO: 4108031 - RNA, 83 nt, Human
gcugaguggaaggcuucuccagggcuuacuucaguucuucguggauuuugcccagucgcccggaggcugcaguuccaccaggc

SEQ ID NO: 4108032 - RNA, 83 nt, Human
gcugaguuacauguccugcuggcaaggaagggacugguuguccuguuaccaguccugaccagaacaggucugcaaagcucagc

SEQ ID NO: 4108033 - RNA, 128 nt, Human
gcugaguuggcucugucaauccuauacaaaucccugcgugcauuaauauuuccuugagccagagcaaaggaauucuagaauauuggcauucugagggugaauagugauggauauaguaaacuuuuagc

SEQ ID NO: 4108034 - RNA, 72 nt, Human
gcugaguuucuuaagugggaagaauugggugauucuaguuauucuguucuuguccccacuucaguccucugu

SEQ ID NO: 4108035 - RNA, 68 nt, Human
gcugaguuugagaauuugcuuugagucugugcagaguuucacagcuacaaagcucuucuacaggcagc

SEQ ID NO: 4108036 - RNA, 61 nt, Human
gcugauagacccucuuuggguuauuaaccaguuaguuucuuccagaaaagaggucauuagc

SEQ ID NO: 4108037 - RNA, 57 nt, Human
gcugaucuggauuauucaucugaaggcucagcugggucuacaggauccucauacagu

SEQ ID NO: 4108038 - RNA, 63 nt, Human
gcugaucugguuccaggacauugcaaaagauuuauuuacaaucacccaaagagccagaauagc

SEQ ID NO: 4108039 - RNA, 98 nt, Human
gcugaucuuuuccaaaaagguuuacagaaaauguguuuuaacuuauugccaugaacaaauggaggcaaccuacauuuuuuugaauuuuugagauuagu

SEQ ID NO: 4108040 - RNA, 97 nt, Human
gcugaugaguucugccuucugagagcacugagugagcaaggccuuucaucaguguuuuggccuucucauugggugaggaagacauugaaccaacagc

SEQ ID NO: 4108041 - RNA, 61 nt, Human
gcugaugggggcgaguuucuaaagccggcaaagaaagagcagguaggcuggccuucacagu

SEQ ID NO: 4108042 - RNA, 56 nt, Human
gcugaugucccacugacagccagcaucaacugccaggugugagugaagauaucagc

SEQ ID NO: 4108043 - RNA, 58 nt, Human
gcugaugugaugucagaagaggccaauuagacaaucaggacuuucaacaucacucagc

SEQ ID NO: 4108044 - RNA, 71 nt, Human
gcugauguuaagguagugaguuuccugucacuggagagauccaagcagaaguugaucuaccauauaucagc

SEQ ID NO: 4108045 - RNA, 60 nt, Human
gcugauugauaaaugacuaaaucagagagcaaaagagacugauucuguuuuaucaucagc

SEQ ID NO: 4108046 - RNA, 89 nt, Human
gcugauuuuauuugaaggcauacauuuugagguucagacuccuacagagggaucuuuguuuuaaaguggugcuuugaaauuuauuuagu

SEQ ID NO: 4108047 - RNA, 69 nt, Human
gcugauuuucagucuggcuggacccagaguucuguauuuuuaacgaguccaggugacugagagaugagc

SEQ ID NO: 4108048 - RNA, 77 nt, Human
gcugcaaaggggaaagacaucagguugccugcaucagcugauggcagcuugcccuggucucaacucaacuuggcagc

SEQ ID NO: 4108049 - RNA, 78 nt, Human
gcuuaaucucuacacacagaaucggccgauggugcucugaaaagugguaggucugaagucugguuaaauggagaaggc

SEQ ID NO: 4108050 - RNA, 68 nt, Human
gcuuacaaggguaggaagucuaacggguuuuauuuguaccucugaguacauuccacuccucugugagc

SEQ ID NO: 4108051 - RNA, 56 nt, Human
gcuaguuucuugaauacucuaagauauuagcuggggaguauuuauacagagacugu

SEQ ID NO: 4108052 - RNA, 62 nt, Human
gcuaguuuuaagccuagaacucaagaugccuaggcucuugaguucuaggcuuaaaacuaagc

SEQ ID NO: 4108053 - RNA, 59 nt, Human
gcuaguuuuagcucuuugggggauacuugccaaacucuucaucaaaaguuaacacuagu

SEQ ID NO: 4108054 - RNA, 58 nt, Human
gcuauaacuaucugucaaaguuugauaaggcaaacuuugccccaaagaaguugguagc

SEQ ID NO: 4108055 - RNA, 55 nt, Human
gcuauacaucccaauuucagagacccauguuauggguuuuccagagauguguggu

SEQ ID NO: 4108056 - RNA, 74 nt, Human
gcuauacauuauaccaguggguacauugagaucaauuuguaccaucugguauacagacaaauuuuaugaauagc

SEQ ID NO: 4108057 - RNA, 55 nt, Human
gcuauacccuagcuuucuuuagggcuuuagcccuagagaaagucauggcuguggc

SEQ ID NO: 4108058 - RNA, 90 nt, Human
gcuauaccuaagugucuuuuuguaaaauccuauuugugaaacuauguuuaauuuuaggaaugugguuuuugagcagauaugguaauaagc

SEQ ID NO: 4108059 - RNA, 70 nt, Human
gcuauacuacaucacagccaagaagcggcuagcugcagcagccaaagauuucucugggugaugagguggc

SEQ ID NO: 4108060 - RNA, 58 nt, Human
gcuauaggguacauuuguguuugacuuaucccuugugaaacauggauagcucuguggc

SEQ ID NO: 4108061 - RNA, 82 nt, Human
gcuauauacucauggcauuguuuauagauugcaugagacaaugcauguaauauacuuagcacagugcagccugucauauggu

SEQ ID NO: 4108062 - RNA, 121 nt, Human
gcuauaucuuacuuuguaucucuacuguucuuugauuaucggugugaauguuuuaaugaaguucucaaauuaacuuccauuauaaugaaaggcagugaucuuuuuaacuuuaaauuauggc

SEQ ID NO: 4108063 - RNA, 84 nt, Human
gcuauaugaacauuugcauaggguucaaaggcuguagaguugcuuuuuaaaagucuuuaaaauucuguaauaaugguuuauggu

SEQ ID NO: 4108064 - RNA, 63 nt, Human
gcuauaugcucugaaguucacuuugccacucaacuauauggcuggcauuucaggcauguuugc

SEQ ID NO: 4108065 - RNA, 121 nt, Human
gcuauauuuuacuuuguaucucuacuguucuuugauuaucggugugaauguuuuaaugaaguucucaaauuaacuuccauuauaaugaaaggcagugaucuuuuuaacuuuaaauuauggc

SEQ ID NO: 4108066 - RNA, 71 nt, Human
gcuaucuacuuacacugaagcaaagauacauaaagaaauaugucucuacugcuucugugagugagucuugc

SEQ ID NO: 4108067 - RNA, 55 nt, Human
gcuaucugcaggaacugauaucuauuauauacaguaauugcccugcaaugauagu

SEQ ID NO: 4108068 - RNA, 70 nt, Human
gcuaucuggugaauagagauguagcggguaaauguuuuguaauuuacucagauguucaauccaggauagc

SEQ ID NO: 4108069 - RNA, 66 nt, Human
gcuaucuguagucucaugguuccugcggugacuucacccacuccagugccauggcugcuagauggc

SEQ ID NO: 4108070 - RNA, 71 nt, Human
gcuaugacgucaucuuguggucugcugaaaggcuacuggagccacagcagccagacaagauacaucaaagc

SEQ ID NO: 4108071 - RNA, 83 nt, Human
gcuaugagaagaggaaggaaagauucucucucuagaaugggagaauccauucauggggaugcucuuaucuucugacugauagu

SEQ ID NO: 4108072 - RNA, 66 nt, Human
gcuaugagauuuuuauguuuuacucuggguuuguaaauccguuucauaacuguaaagaucuguagc

SEQ ID NO: 4108073 - RNA, 70 nt, Human
gcuaugauuucucacuguggauuuccucagagugccauuaguguaccaaggagaacacaggggagauugc

SEQ ID NO: 4108074 - RNA, 85 nt, Human
gcuaugcaauguuucuagcuuuuuaugacaaucuuggccaaagcaggcuagauggcaauaagaaagacuagaauuguugcauggc

SEQ ID NO: 4108075 - RNA, 89 nt, Human
gcuaugcagcugggagaugcugugucuguucccuugauacauauccugggaaugcaggggacuaggacaccaucaccugcccauauagc

SEQ ID NO: 4108076 - RNA, 85 nt, Human
gcuauggggcuaucucuuagaauucugaauuguguucaucacuugucaaaggagagagcauggcacagaggggugccccuguagc

SEQ ID NO: 4108077 - RNA, 72 nt, Human
gcuauguaagugaugccaguaagucucagcuaggguggaaaaaucaggcugacaacugagcauuuucguagc

SEQ ID NO: 4108078 - RNA, 77 nt, Human
gcuauguccuuagaucagaggcucuuccuauguggcauuucuguguauuggagcugccucucuugagguuacguggu

SEQ ID NO: 4108079 - RNA, 115 nt, Human
gcuauuauaauuucuguuuaacaagucaaauuucuauuuaaccaguuaaauuuccauuucacaauggagauucaaagggguuaagugacuugccuaaagucacagaucugguggc

SEQ ID NO: 4108080 - RNA, 70 nt, Human
gcuauuccacagguguguccuggucuuguggugacugccacaggcccuggguacaugaccugccuucagc

SEQ ID NO: 4108081 - RNA, 82 nt, Human
gcuauugcggugcagagcugcagcgaggccugggucacacagugcuccgggugucugcaggcugcaggccgagcccaguggc

SEQ ID NO: 4108082 - RNA, 75 nt, Human
gcuauuggugucucaacuguauugguggcucaacauuggucucugccacuggcaguuugagaaugcauugucagc

SEQ ID NO: 4108083 - RNA, 62 nt, Human
gcuauuucuaauuagggaaaauuuacuuguaggggguuacaaguauauucuagugauauagc

SEQ ID NO: 4108084 - RNA, 70 nt, Human
gcuauuucuguuugcuacuauaaguaaucuaagugguuguauucaugcucuguaguauuuaguaaauagc

SEQ ID NO: 4108085 - RNA, 65 nt, Human
gcuauuucuuuaaauugaucuccagcagaauuccaaauguaaaggucagcaggcaaggaaauggc

SEQ ID NO: 4108086 - RNA, 68 nt, Human
gcuauuuuugagccauuuauaaagccaguuuucaauaggcuuguguuauagaaggauuaaauuauagc

SEQ ID NO: 4108087 - RNA, 80 nt, Human
gcuauuuuuguugugcaccaugguaggagugaggccauaucucuucuucuucugcugcugcugcacccaaugcccauggc

SEQ ID NO: 4108088 - RNA, 72 nt, Human
gcucaaaugccagcuccugcagcuccuguaccuccucggucguagcaggaaccccgggaggcuggcaucagc

SEQ ID NO: 4108089 - RNA, 63 nt, Human
gcucaaggcaggcagacaugaguuucccuccucgccauacucacuagucaagugccuuugagu

SEQ ID NO: 4108090 - RNA, 109 nt, Human
gcucaaggcaggccccaggccggcagcuggacacuuggcuuuuauccugaggaguucacacccucagcauucaauguccaguccgucugcucaggagauugcaaagggc

SEQ ID NO: 4108091 - RNA, 60 nt, Human
gcucaagggaugggagugggugggugauauguuuugggauagucccaccccauccucagu

SEQ ID NO: 4108092 - RNA, 85 nt, Human
gcucaagucuuuucuugaauuccuagagagaggauuguaaacagcuuauuuuuaucuuuaggacuuugcagauuaugacuuggac

SEQ ID NO: 4108093 - RNA, 70 nt, Human
gcucacacauuuauuacaugcaugugucgccuauccucccauagauauauguagugcggugaaugagagc

SEQ ID NO: 4108094 - RNA, 62 nt, Human
gcucacagucugccccacagcaaaugauuguuuaacccaaauaucugugcagcaaacugagc

SEQ ID NO: 4108095 - RNA, 128 nt, Human
gcucacaguuuaggaggcguuaguagaguugguuccuuccagaggcucugagggagagucuggucucuauaccucucuuguagcugcuggugguuggcaacauuuuuugguguuucuuauuuuguagc

SEQ ID NO: 4108096 - RNA, 99 nt, Human
gcucacauggaugcagucagauggccuguauuugggccagagcuagaacacugauguuccacuauaggcuaucaaaagaugaaguguaaauggaugggc

SEQ ID NO: 4108097 - RNA, 86 nt, Human
gcucacaugggcccuuggaagagaaugcuauggugaaaagagaaaaucagaauguguuuauuuucauaguuggcccagcaacgagc

SEQ ID NO: 4108098 - RNA, 63 nt, Human
gcucacauuuuucugcaguuuuccaguggaccugccuauggaauacuguaaagaaaaaucugc

SEQ ID NO: 4108099 - RNA, 102 nt, Human
gcucaccagagcgagacauuuucuguucaacuuuggagauuuaauaauagcuuuaggauggucacuacugguugcguggcugaaaugcucuggccugggagc

SEQ ID NO: 4108100 - RNA, 61 nt, Human
gcucacugguaggcggcccuggaagucaaagaucugcugcuccagcgcugccaccaguugc

SEQ ID NO: 4108101 - RNA, 66 nt, Human
gcucacuucaccuggcgagggaauggccaggacgcgucccccccaaggccaggcugagaccggagc

SEQ ID NO: 4108102 - RNA, 63 nt, Human
gcucacuuguaaccccuuccucagguccaagagaaugggaggagggucauguugaaguguagc

SEQ ID NO: 4108103 - RNA, 97 nt, Human
gcucagaaggcucuucucuuugacauuauucagguggugucccagcgaaucaguaccguggaucucucguguuacagccucgaggagguuccugagc

SEQ ID NO: 4108104 - RNA, 63 nt, Human
gcucagaauguaucccauucauguauuguuuugaaauacauguauugaagugugcaucugagu

SEQ ID NO: 4108105 - RNA, 79 nt, Human
gcucagacacaacaccuaaaaaucauuguugaccccucccugggaucaacucugucugggauguagcucuggucugagc

SEQ ID NO: 4108106 - RNA, 60 nt, Human
gcucagagagauuaaauaauuuguguaaagucacacacauuauuaguugucuauuugagu

SEQ ID NO: 4108107 - RNA, 64 nt, Human
gcucagagcaucccagugaaugccaccagggaggugucagcucacuuugauguaauugaaaagc

SEQ ID NO: 4108108 - RNA, 70 nt, Human
gcucagagcugcugguugcuggugccucccaucagccccagggaggagcugcaaaaccggccgcuggggc

SEQ ID NO: 4108109 - RNA, 61 nt, Human
gcucagaucuggaaagugugguggagagaauuucuuucacuugacuuuccagucuuggggc

SEQ ID NO: 4108110 - RNA, 61 nt, Human
gcucagccgaacuucagagcagaaggcugguucuucuugcccuuguuguucgguggugagc

SEQ ID NO: 4108111 - RNA, 88 nt, Human
gcucagccugacauuugacccuggcagcauuuuuuucagaagcgaccauccuucugaaugagaucugcccuagauguacucugcuugc

SEQ ID NO: 4108112 - RNA, 73 nt, Human
gcucaggacuguggggaagccuugagcuccucugaggagucugucuuuggcuucaccacaccccaagcugagc

SEQ ID NO: 4108113 - RNA, 87 nt, Human
gcucaggagggauggagggcccaggagcugggagcuuuggucaucugcaguccagucaugguguccucacaaccgcuuugucugagu

SEQ ID NO: 4108114 - RNA, 76 nt, Human
gcucaggaucacuaugggcugggaucugagugucaugcuuaggaaauggcauuuuguucaguauaugguggagagc

SEQ ID NO: 4108115 - RNA, 61 nt, Human
gcucaggcaccagccaccuauuucuaggcagcacuuucuguccagggccuggugucugagc

SEQ ID NO: 4108116 - RNA, 58 nt, Human
gcucaggcaggagugcaguggcgcaaucauagcucacugcagccucaaccuccugagc

SEQ ID NO: 4108117 - RNA, 68 nt, Human
gcucaggccacccagagcuggcucugcauguacagccuaugugcuuacagaccagugucuccugaagc

SEQ ID NO: 4108118 - RNA, 56 nt, Human
gcucaggcucucccaggggaauguagaggccuguccuggguucccagggucugagc

SEQ ID NO: 4108119 - RNA, 81 nt, Human
gcucaggcuggagugcgauggcgugaucuuggcucacugcaaccuccagcucccagguucaagcgauucuccugccucagc

SEQ ID NO: 4108120 - RNA, 55 nt, Human
gcucagggaacuuuuugcaggcacauccuaugcccagcagggaguguccuugagc

SEQ ID NO: 4108121 - RNA, 65 nt, Human
gcuuacacagcuaggaaauggaagaacuagaauuugaaucuaaauuuucugucuccagcuauagc

SEQ ID NO: 4108122 - RNA, 70 nt, Human
gcuuacaguguguaggcuauuacuuuacaguguaucgagagacauuguuucagcuguaugcuauguaagc

SEQ ID NO: 4108123 - RNA, 77 nt, Human
gcuuaccaguuagauauuuuuauauguguuguguugagcuuacauacaucuaucuagaugcucagacugugaugagc

SEQ ID NO: 4108124 - RNA, 69 nt, Human
gcuuacccauagaagaaacacuagguagauaagcgcaguaauaucaguagugauucgauguggguaagu

SEQ ID NO: 4108125 - RNA, 59 nt, Human
gcuuacguacccaccugggucaucugucaucaaaaugcccccagguaggugccaugagu

SEQ ID NO: 4108126 - RNA, 59 nt, Human
gcuuacuagaaaguuuccagaguuauaacauugauauaaugguuggagacuuucuaagc

SEQ ID NO: 4108127 - RNA, 98 nt, Human
gcuuacuauggugagacuacuguagaagcuagggugccccagccaacccuggaggucuacagugcaggcaguuccaccaaugaagaaugguggugagu

SEQ ID NO: 4108128 - RNA, 56 nt, Human
gcuuacucucaggguuaguacaggaagauuugauuucacuguuucugugagugagc

SEQ ID NO: 4108129 - RNA, 72 nt, Human
gcuuacuuguaacaaucugucauaaauguccuuagaaauauaaaugcuugauuacagguuguuacuuuaggu

SEQ ID NO: 4108130 - RNA, 81 nt, Human
gcuuacuuuggguauaugugagauguuguauaagauauauuuauuccaacauucuuaucacuauaagccucuagucuuagc

SEQ ID NO: 4108131 - RNA, 79 nt, Human
gcuuagaacaucugaggccgggacuaucaaagguuucucaagaccccuuaauucaggccuggccuuuauguucaagagc

SEQ ID NO: 4108132 - RNA, 55 nt, Human
gcuuagcucaugaacuguaggcccuucucuggcccugguaguaaaugaguagagc

SEQ ID NO: 4108133 - RNA, 55 nt, Human
gcuuagcugaagaggguauuguagguaaaagcuucagagucuuuuuuaguaaagc

SEQ ID NO: 4108134 - RNA, 57 nt, Human
gcuuaggugagguuacaagaguucaugucaaaauggagcuuuaaaucucuccuaggu

SEQ ID NO: 4108135 - RNA, 127 nt, Human
gcuuagguucuucuuuuucacauuagagacuuucuucaaacuuauuguuuccuuggcugucuguucauauuuaaugguaagguucuacaguguugaguaaaagcucugggugcuuggugggucuggc

SEQ ID NO: 4108136 - RNA, 72 nt, Human
gcuuagugugggcugacagaggagugcugggaucuuaccauggaacuagcuucaugcuucaccacgcuaagu

SEQ ID NO: 4108137 - RNA, 88 nt, Human
gcuuauagcuguaauccaacucugaauacugcugauaagguuaucaauacuaaaucuuugaagaguuugauagaguugaguugaaagc

SEQ ID NO: 4108138 - RNA, 64 nt, Human
gcuuauauuaucaucauuggcaggugagaaauucuucucuuucuacagugugauuguguaaagu

SEQ ID NO: 4108139 - RNA, 124 nt, Human
gcuuaucaaaauuguuuucauauagcaauuugacauuacaacacaaucucuauaggcucccccuuggaauguuaugaugaugguaaauugcauucaaaugagugggaauagaauuaugauaagc

SEQ ID NO: 4108140 - RNA, 75 nt, Human
gcuuauccagaaaguuuagguagccuguucaaguucauaagggcugaaugcagccuccuggaguuucugggaugc

SEQ ID NO: 4108141 - RNA, 72 nt, Human
gcuuaugaaacaugcuuuguggaugacaccugggcagcagcccaacucagcuaugagguggugguucuaggu

SEQ ID NO: 4108142 - RNA, 130 nt, Human
gcuuauggugcauuguuuccuaauagcuuucuggucugagaacuacugaggauaaggauuucauuuugcucaucuauuuguucucagcauuuuaguacaguaccugucauagaaaauucguauucaaagu

SEQ ID NO: 4108143 - RNA, 76 nt, Human
gcuuauugugcagcagugguaccuggaaccccgcagaaaggcaugggggaucaggcacggcugaaugcacauuggc

SEQ ID NO: 4108144 - RNA, 61 nt, Human
gcuuauuuccacuccagaacugaauaugcagagcauugccaguccugcuagugugaaaagc

SEQ ID NO: 4108145 - RNA, 60 nt, Human
gcuuauuuucaccuucucucaggauggagccucagaauagagaccagguugaaaaucagu

SEQ ID NO: 4108146 - RNA, 55 nt, Human
gcuucaaauuaaggugaaucccugaagacgucagauagguucaaaaauuuggggu

SEQ ID NO: 4108147 - RNA, 70 nt, Human
gcuucaacauacacagagagaggccugaaaaacauaacuuggucucuaugucuaaguuuauguuguuagu

SEQ ID NO: 4108148 - RNA, 81 nt, Human
gcuucacagacaucucggggaagagaguuccuggcagagggagcugcuagugcaaaggcccugagauggaacugugcuggc

SEQ ID NO: 4108149 - RNA, 77 nt, Human
gcuucacccugagaaagucacaugcauucuccugugaucugcagcccaugcuugagugugguuucucagguaggagc

SEQ ID NO: 4108150 - RNA, 74 nt, Human
gcuucacuggcagacagcaaauagcaaugcaacagacguugcauugcacgggcgucugucuguuggagaugggc

SEQ ID NO: 4108151 - RNA, 70 nt, Human
gcuucagaaggaaucacucaacugcauuuaucuggcaggagaaaaaugcagguaguauuuauuuuggggu

SEQ ID NO: 4108152 - RNA, 92 nt, Human
gcuucagcuuuccuugcuuuagauuccuaacucacuguucacuaaauuagcugugggccuuguccuuaaucugaggcuaggagagcauaugc

SEQ ID NO: 4108153 - RNA, 59 nt, Human
gcuucaggguuaugcaagagugagaaacaaaugagaccacaucagcugagccuugaagu

SEQ ID NO: 4108154 - RNA, 62 nt, Human
gcuucaguaucaugcgguagccauguuggccacugggccccucaugccaugucuacugaggc

SEQ ID NO: 4108155 - RNA, 74 nt, Human
gcuucagugcaauguugugggugguuccaacugccuuugaacuagguguugacagaaaaauaacauagcacagc

SEQ ID NO: 4108156 - RNA, 66 nt, Human
gcuucaguuucuucccugugaaauggggcaaaaaauaaccccauagugugguuggaaaacugaagu

SEQ ID NO: 4108157 - RNA, 81 nt, Human
gcuucaugauacuaagcugaaguguuggugguuucaguauuaaugugugauaacuaauauauuuuaguguguguuuugugc

SEQ ID NO: 4108158 - RNA, 75 nt, Human
gcuucauggaggaguuaggugugagucuagcaaagaccccagcccaugauacucagccuaacuccccaauguggc

SEQ ID NO: 4108159 - RNA, 59 nt, Human
gcuucauuuugcccucugguggaaaacgaaguucuaaaguuccauuaggcaaaaaaagc

SEQ ID NO: 4108160 - RNA, 64 nt, Human
gcuuccaagcgguagauagcauuuuucucuccuacagcauguuucucugauggcccuuggaagc

SEQ ID NO: 4108161 - RNA, 64 nt, Human
gcuuccagaguugcguucucggucuuaguccuuaauaugagaucagcuccaucacucuggaggc

SEQ ID NO: 4108162 - RNA, 75 nt, Human
gcuuccauccuuggagaaucuuguuuuacuaagagaauugcacuuggaugauaacagcauuucaacuguggaagc

SEQ ID NO: 4108163 - RNA, 101 nt, Human
gcuuccauuacucacagagaacuaggugguuauaaauucaaggcuguuggcuaugaauauccaugaucagcauuucgauuaggccuuuggggcaauguagu

SEQ ID NO: 4108164 - RNA, 58 nt, Human
gcuucccacagcuggacuggggcuccgcguuacugcacccagaaguuccauggggggc

SEQ ID NO: 4108165 - RNA, 66 nt, Human
gcuuccccuuggcuuggucaagaggcugagcuccguguucccaggcuagaugccaaggggcagagc

SEQ ID NO: 4108166 - RNA, 67 nt, Human
gcuucccucacucacucagguugcucaugauggcaauaugacagccagugcuccgugaggacagagc

SEQ ID NO: 4108167 - RNA, 69 nt, Human
gcuuccgugugaccagcaugucagugucguuugugucccggaaugaagcaagcugcuguguuuggaagc

SEQ ID NO: 4108168 - RNA, 88 nt, Human
gcuuccuagagagaguuauauucugcuucugguggccugcgguuuuauuugguuaccaauuauggaagcuaguuguguuucaggaagc

SEQ ID NO: 4108169 - RNA, 105 nt, Human
gcuuccucaguuuuccugugcuagagucaauguguucaggauccaaagucucagagagugagucugauuuuucuagcauuuggucgcauaaaacuguagucaagc

SEQ ID NO: 4108170 - RNA, 71 nt, Human
gcuuccugcaggccaggguagggacuagagugaccagagcucauggcuggucuccucuggcugcaauaagc

SEQ ID NO: 4108171 - RNA, 66 nt, Human
gcuuccuggcuccucuacacacccaaauugcuaaucaaugcugcaauggcaggagccacuggaagc

SEQ ID NO: 4108172 - RNA, 75 nt, Human
gcuuccugggagccuggacucuacuugcauuuagacuccgcuuccugcaggucaaucuucagguuccugcugagc

SEQ ID NO: 4108173 - RNA, 56 nt, Human
gcuuccugggcccaagauguacuggggagucucggagacauggcaucccaggaggu

SEQ ID NO: 4108174 - RNA, 93 nt, Human
gcuuccuucuuccaggcugcucaguacucugcuguaggaaucuuugaagauuugggcacagauauuaaguauaaaagucagggagauggcagc

SEQ ID NO: 4108175 - RNA, 55 nt, Human
gcuuccuuucuuuguuugacaucuucaaagugaaaagugucauugccagggaagc

SEQ ID NO: 4108176 - RNA, 55 nt, Human
gcuucuaugcuucaagagagagcccagagguaacuuccuaaguggcuguagaagc

SEQ ID NO: 4108177 - RNA, 90 nt, Human
gcuucucaaagggccuuucuuuugaaucucugcagaaugaacugauuccucagcaggucaugaaagaaaaccagcuaauauugaugaagc

SEQ ID NO: 4108178 - RNA, 79 nt, Human
gcuucucaguacacaggaauagcaugccucaaaucuaagacaaauuuugaaaugagcauuuauucuuuaucugaauggu

SEQ ID NO: 4108179 - RNA, 99 nt, Human
gcuucuccauggcagcagcaccuccauuguuuuuaguccauuccaggagcaagcccaugauguagaugcugaaacauggaggcguguuguacgaggagc

SEQ ID NO: 4108180 - RNA, 78 nt, Human
gcuucuccuaauuguaagcuccuugagggaggcaauggguuuaaccacugcugaauacccagugugcaugggagaugc

SEQ ID NO: 4108181 - RNA, 57 nt, Human
gcuucucgcgcucgccccuccuaccgcaucuccggccaggggcaccugcgacggggc

SEQ ID NO: 4108182 - RNA, 77 nt, Human
gcuucugagagauacaaggaggcaacugauaagaagcgcaucagaagggcaguuaauugccuccagucucucggugc

SEQ ID NO: 4108183 - RNA, 91 nt, Human
gcuucugagagcgguuuugcagauguguuaccuauugugcggcacaaaaggugccagcauaguaagcagucaucaauaccgagucaggagc

SEQ ID NO: 4108184 - RNA, 64 nt, Human
gcuucugauagcuuuuugggauguggcauaucauuguggguauuccaauugguuguaaagaagu

SEQ ID NO: 4108185 - RNA, 66 nt, Human
gcuucugcgcacgcuucuucccucccuauuagucuuuucuggggaagaggacagaaugggugaagc

SEQ ID NO: 4108186 - RNA, 55 nt, Human
gcuucuggagucuucagaggaaacuguugucuugccuuuuccagcuccuagaggc

SEQ ID NO: 4108187 - RNA, 69 nt, Human
gcuucugggcuuuugcacuggccauucccuuugccuggaauguucuuccucugcacagcuacagaaagc

SEQ ID NO: 4108188 - RNA, 70 nt, Human
gcuucuggggguugcugugcacaugaauguuugcuauuguuccaggcgcacgucggccuuaagaaauagc

SEQ ID NO: 4108189 - RNA, 61 nt, Human
gcuucuguaauuucagcuugagugucugccauugaccugcagcagcugaaaucacaggugc

SEQ ID NO: 4108190 - RNA, 82 nt, Human
gcuucuguacaaguuguggcugcucagaagaggcccaaggagccccguaaugagugucacaaaccugccuuguaaagacagc

SEQ ID NO: 4108191 - RNA, 62 nt, Human
gcccucucuuuccacuccuauugcaucucagaguccuuuucuagucgggggaaggggagggu

SEQ ID NO: 4108192 - RNA, 59 nt, Human
gcccucugaccuccugccacaguuccccacugauggaacuggaccagaaggcagagggc

SEQ ID NO: 4108193 - RNA, 68 nt, Human
gcccucugcaguugguggguccucgguuccguugcugugcauggacugacaucaacuguaaggugggu

SEQ ID NO: 4108194 - RNA, 64 nt, Human
gcccucugccacugugaugcaugauaauaaaagcuuugucaugcccaggagcaagguaaugggc

SEQ ID NO: 4108195 - RNA, 66 nt, Human
gcccucugccugugucgccaccacagcccacagggcucagaugugguuucacagacccagaugggc

SEQ ID NO: 4108196 - RNA, 58 nt, Human
gcccucuguguaacaauccagacaaggccacaguuguccucggugagcaucagagggc

SEQ ID NO: 4108197 - RNA, 57 nt, Human
gcccugagccccaggaugaagggcgugggcacagccucucuuucugguggcuaaggu

SEQ ID NO: 4108198 - RNA, 62 nt, Human
gcccugcccagcgcgcucuaggacaccgcggcgccuccgcgcagcuccggcgugggcggggc

SEQ ID NO: 4108199 - RNA, 59 nt, Human
gcccugccucuguggaaaugguggucgggaagcagccccgccccucauggaggcguggc

SEQ ID NO: 4108200 - RNA, 80 nt, Human
gccuaguggguagggacuuagcuggcugaauaagcuaaguuuagccuauaaggguugaguuucuuucauauuugcuaggc

SEQ ID NO: 4108201 - RNA, 61 nt, Human
gccuagugugggcccccagguuagcccuucuagggcuguccuggcggggacgcaaaguggc

SEQ ID NO: 4108202 - RNA, 74 nt, Human
gccuauacugauuuuggaauuggaaagugcuguggucaccucaugagcuaguuccaaguccaugaguaacaggu

SEQ ID NO: 4108203 - RNA, 65 nt, Human
gccuauagcagaagcagaggcucuggaauuuuugucugaagauccuugguucugcuuucccuggc

SEQ ID NO: 4108204 - RNA, 73 nt, Human
gccuauaguugaguauggauggcccuccgugagcaguucacugugcccauguggggguacacguacacauggc

SEQ ID NO: 4108205 - RNA, 76 nt, Human
gccuauaugauggagggaaguauuuuggcaaagcaugcaugccuggcucaugacaauauguucuuucauuauuagc

SEQ ID NO: 4108206 - RNA, 66 nt, Human
gccuaucggccucuccuaaccuuggucuuguuuucuggcaggcagagguggaggagacacugaagc

SEQ ID NO: 4108207 - RNA, 73 nt, Human
gccuaucugcuggggcucuucuuuugccucaugcuuaugcugucuguggagaagcaggccucacagaucuggu

SEQ ID NO: 4108208 - RNA, 130 nt, Human
gccuaugacaucuggguugguuccaagucuuugcuauugugaauggugccgcaauaaacauacaugugcaugugucuuuauagcagcaugauuuauaauccuuuggguauauacccaguagugggauggc

SEQ ID NO: 4108209 - RNA, 81 nt, Human
gccuaugacucagcucccugaggaagggguguggugggucaccgacccucaccccacucccaggaccaugagucacuaugc

SEQ ID NO: 4108210 - RNA, 71 nt, Human
gccuaugaggauucuuuagagaaccuauauugaauugugugauauaacacucagaaagaaucaugaugggu

SEQ ID NO: 4108211 - RNA, 74 nt, Human
gccuauggaaugucaagaagcaguaaggguguaauguuagcaccuuaauaagcaauuuaugagcauuucaaugc

SEQ ID NO: 4108212 - RNA, 79 nt, Human
gccuaugggggaggacugugcuaucuacugaauuauauguugugugugaaggugccuagcauaguguuuggcccagugc

SEQ ID NO: 4108213 - RNA, 75 nt, Human
gccuauguuucuguguugauaauuuuggagaugauauuuacuucauggcuaagaauguuaugcagcaauguuggu

SEQ ID NO: 4108214 - RNA, 68 nt, Human
gccuauuuauguuguuucuacuaauaggccaguacuucgcuacuuauaaggaggcacacaaaaaaggc

SEQ ID NO: 4108215 - RNA, 69 nt, Human
gccucaaaauucuuguauguaugcaaaaucaaaaucucaucuugauucuucauaucaguacaaggaggc

SEQ ID NO: 4108216 - RNA, 67 nt, Human
gccucaaacccaggucuuuggcuuccaggaaauaaaccuguaaccacuccaccugcggccuugaggu

SEQ ID NO: 4108217 - RNA, 76 nt, Human
gccucaagcuacuuuaacaauucgcaagaaaaauuugauuuaauuguuuuuggugaaauguucaguuggcacaggc

SEQ ID NO: 4108218 - RNA, 130 nt, Human
gccucaauacucaaaggugaccacauguagauucugagacaggaaguggagggugaauaggucacccuccuaacauuuccuuuuuugcugucuagucauccuuguuggucuucugcuucuugguauaggc

SEQ ID NO: 4108219 - RNA, 76 nt, Human
gccucacacucugugauucucauguaccacugagaacauuuggaagcagaaguggaacaugcuacagguguguggc

SEQ ID NO: 4108220 - RNA, 76 nt, Human
gccucacauauucaugguuacugagacagaauuauggcgauugaaguaaggggcugaggauuaugauuugugaggc

SEQ ID NO: 4108221 - RNA, 80 nt, Human
gccucacugugaggcuggcaggggccaggcucuggggcagcucccagcccucucugcuucucccggcuucaccguggggu

SEQ ID NO: 4108222 - RNA, 70 nt, Human
gccucagaaagguuagaaaccacccggcuaguaugugguggggccagggcuccaaccucuccuauguggc

SEQ ID NO: 4108223 - RNA, 61 nt, Human
gccucagacacugccuggguguccccuccuaggacccugccauguggggcaggucuggggc

SEQ ID NO: 4108224 - RNA, 87 nt, Human
gccucagacccauugaacacugaaccguaaaugauuuaggaaagcugcgagaaguuauacuaugggguucuuuaaagggucugaggc

SEQ ID NO: 4108225 - RNA, 75 nt, Human
gccucagccacaaaccugagcucuguguggcuuggguggaggucccauccugggcacagacuccugggcuggggc

SEQ ID NO: 4108226 - RNA, 87 nt, Human
gccucagccagacaacuguugcugccuuggagaagcuccugcugcugcagcugcugcuuggggcggcugcacgccuggggcugaggc

SEQ ID NO: 4108227 - RNA, 59 nt, Human
gccucagcucuucccugugcacaccuauuuucagaugaacaguagugaaggguuugggu

SEQ ID NO: 4108228 - RNA, 56 nt, Human
gccucaggccuauagcugcuguggccacaccuuccgccagccaugcuugccuaggc

SEQ ID NO: 4108229 - RNA, 70 nt, Human
gccucagugggcccuugucacacugauuugaggaaaggcuuuggaagguggaugauggggccuucugagc

SEQ ID NO: 4108230 - RNA, 56 nt, Human
gccucaguugggccaguucuaggggccaucccaaccccuguguggccagcugaggc

SEQ ID NO: 4108231 - RNA, 65 nt, Human
gccucaucaggugaugcucugguucccauuuuauagauuguggaaacagagacuacuuaagaggu

SEQ ID NO: 4108232 - RNA, 60 nt, Human
gccucaucaguucccaggcccagacagacucugcugccaccugguggcugaaggguaggc

SEQ ID NO: 4108233 - RNA, 78 nt, Human
gccucauuuauaaaaaucuggcaaaaggcuuuguagugacaccuuacuugcuuggauuucaccagacuuaaaugaggc

SEQ ID NO: 4108234 - RNA, 63 nt, Human
gccuccacucucagggcagguggccuuuccccagggaaaucucgccaagcaccugggccaggc

SEQ ID NO: 4108235 - RNA, 58 nt, Human
gccuccagaacugggagagaauaauaauuucuguuauuuaagcuacccggucuguggu

SEQ ID NO: 4108236 - RNA, 74 nt, Human
gccucccaaagugcugggauuacaggcaugagccaccacugcuccugaccugguccuuguacuuugaaaagggc

SEQ ID NO: 4108237 - RNA, 69 nt, Human
gccucccaaagugcugggauuacaggcuugagccacugcgccuggcccaguuuucccaugucuugaggc

SEQ ID NO: 4108238 - RNA, 86 nt, Human
gccucccagccucagccagcugugugcuucugcauuauugcaguggggcgggcaagcguggagggcacagcuggcagggcagaggc

SEQ ID NO: 4108239 - RNA, 74 nt, Human
gccuccccacccacggcugguggaaccugagggcccccggcgccaccagagcuucguggcuuaaugggggaggc

SEQ ID NO: 4108240 - RNA, 85 nt, Human
gccuccccagauaguauucaucauuuggguggugugugugaauauucaaagcauggccaggaaagguagaaaccucugggauggu

SEQ ID NO: 4108241 - RNA, 60 nt, Human
gccucccccaggugugggcauugggcagagccagcaguggccaccaccagggucagaggu

SEQ ID NO: 4108242 - RNA, 67 nt, Human
gccuccccucugcccucagcucuaucucccucggccugggaguggcacucugaggcggggggagagu

SEQ ID NO: 4108243 - RNA, 58 nt, Human
gccucccgcagcccccacagccacugcaccgugagccagaggaggcuguguggguggc

SEQ ID NO: 4108244 - RNA, 58 nt, Human
gccucccugcuucaacucagauuccuauagcagagaaaagucuguugagcagagaggc

SEQ ID NO: 4108245 - RNA, 63 nt, Human
gccucccuggccagagcagcagccccugcgcucuccucagccgcugcugugggccagggaggc

SEQ ID NO: 4108246 - RNA, 63 nt, Human
gccucccuggcccacagcagcggcugaggagagcgcaggggcugcugcucuggccagggaggc

SEQ ID NO: 4108247 - RNA, 60 nt, Human
gccucccuggggcuccuccuauuucccugaggaaguaauagaagcucuaagggcacaggc

SEQ ID NO: 4108248 - RNA, 99 nt, Human
gccuccuaaaugcuuugaccuggauaugcaccacaucacuucugcucacaacccauuggugagaaccagucaugugggcacaccuggaggcaaaggggc

SEQ ID NO: 4108249 - RNA, 55 nt, Human
gccuccucacaauguacccacguacagguggugucuucggcacugugcagggggc

SEQ ID NO: 4108250 - RNA, 65 nt, Human
gccuccucagagcagcccuccgcauauaaccuguauguaggagugugagcucugaaacacagggu

SEQ ID NO: 4108251 - RNA, 81 nt, Human
gccuccugacggggucauagaagcagggcagggaaaagcaaaucacuuugcuccugcugcaugcaucucccacaaggaggc

SEQ ID NO: 4108252 - RNA, 78 nt, Human
gccuccugcggggccuggacagggagggggccagaccacagcggccccuccuccggucauugugcgggccucugaggc

SEQ ID NO: 4108253 - RNA, 57 nt, Human
gcuucugucuguaaacuucucaauuguuugauacgauuuaaguacuguagacagagc

SEQ ID NO: 4108254 - RNA, 58 nt, Human
gcuucugucuuagcuaccucccgucuguuuuggaauggggugggauauagauaaaagc

SEQ ID NO: 4108255 - RNA, 67 nt, Human
gcuucuguuuugcacagacuugaaucuggccauauguuucucuuuucaauucugguaagacagaugc

SEQ ID NO: 4108256 - RNA, 127 nt, Human
gcuucuguuuuugacugcucucauauuuucuaaaguacauccuagucucuuucaacucauggggaaaauugcagagaguuagggcccguauaguaugugacaccaaucaagacauaaauaaugaagc

SEQ ID NO: 4108257 - RNA, 70 nt, Human
gcuucuuaaauucucagaauacucuucuugugguagaugcuacaaguuccauuuugaaagugaaggaagc

SEQ ID NO: 4108258 - RNA, 127 nt, Human
gcuucuucaaauucuagcucacaagaguuuaaaauacugacaacuuuuucugugaaagguaggaaacaauaggaaauaggaccagacaaagccauaacucuuugagcaggcagaaugaggaggaagc

SEQ ID NO: 4108259 - RNA, 80 nt, Human
gcuucuucaugaaggauuauuuagagcucuaaugccugugaaaggaauaguuuuacuuaauucuuggucaugcagggagu

SEQ ID NO: 4108260 - RNA, 86 nt, Human
gcuucuuuccuuuguggugacaucugugcaauagguauucacuuaguauccugggcaagucaaugucccaagcaaaggacucuagc

SEQ ID NO: 4108261 - RNA, 130 nt, Human
gcuucuuuuagggaaaagauagguguguuaagaauaacuucuaaucuguacaguuuucauuuucuuuugugaaaauguguguuauuuagaaaauaguucucuacaguacgaguuuaccccugaaaaaggu

SEQ ID NO: 4108262 - RNA, 70 nt, Human
gcuucuuuuuguuuaguguucuucuuggaccaaucuugucuuuauguggaaauacuaaacacaaagcagu

SEQ ID NO: 4108263 - RNA, 73 nt, Human
gcuugaacccgggaggcggagguugcagugagccaagcuugugccacuguacuccagccuuggcgacaagagc

SEQ ID NO: 4108264 - RNA, 59 nt, Human
gcuugaagccaguugccugguggacaacuauugcuauccaugagaugugggcuucuagu

SEQ ID NO: 4108265 - RNA, 64 nt, Human
gcuugaauuacugcugccuccuggcugaguuuaaauguuucucaaggaggcaauguagauaagc

SEQ ID NO: 4108266 - RNA, 60 nt, Human
gcuugacuaggcucuggcgacaagaacuggacgcuucuggaaacucaggccuggacgagc

SEQ ID NO: 4108267 - RNA, 86 nt, Human
gcuugacuugauaguguuguauguacagucugaaaugucaagaaaaucugaaaugucaagaauauaaauacuuucaaaagacaagc

SEQ ID NO: 4108268 - RNA, 72 nt, Human
gcuugagaccagcagguugagggugcagugagucgugacugggucacugcacuccagccugggcaacagagc

SEQ ID NO: 4108269 - RNA, 65 nt, Human
gcuugagcauaugcauuuccaauuggcacagcaauugccggcauguaaauggauacugcuuuugu

SEQ ID NO: 4108270 - RNA, 72 nt, Human
gcuugagcccaggaguucaaggcugcagugaacugugaucacauuacugcacuccagccugggcaacacagc

SEQ ID NO: 4108271 - RNA, 64 nt, Human
gcuugagcccaggaguuugaggcugcagugaucuaugaucaugccacuauacuccagccuaggc

SEQ ID NO: 4108272 - RNA, 87 nt, Human
gcuugaggcaguagcucuaggacaugaauguuauacuuuauuaaauucugaaaauaaugauacuaguuauguugaaguuacugaagc

SEQ ID NO: 4108273 - RNA, 65 nt, Human
gcuugagguuugcaggguaauuaaaggcacaguaggcaggugucauuaacuuguuaaccuaaagu

SEQ ID NO: 4108274 - RNA, 70 nt, Human
gcuugauacuuauggcugugaaaugguaggugguuaauucagccacaucauggauacaguuauguuaagc

SEQ ID NO: 4108275 - RNA, 70 nt, Human
gcugagucaccacacggugcugacucacccucuucacgugacagcccuuccuguguguggagaccacagu

SEQ ID NO: 4108276 - RNA, 61 nt, Human
gcugaguccugggaggggcugguccugaugcugucugaccagcccugcccagggaagcagc

SEQ ID NO: 4108277 - RNA, 61 nt, Human
gcugaguguacucucaagaugcauuucucucaggaaguguguuuucaguguacuuaaaagc

SEQ ID NO: 4108278 - RNA, 74 nt, Human
gcugaguuucuaugugaaaugcacaugucuuuuuccuucauccagacgcgcauauuccaagcauaggaaacagc

SEQ ID NO: 4108279 - RNA, 68 nt, Human
gcugauagacugaauguugggagacagagagaaagcagccauggaugcucccagucuuuggucugagc

SEQ ID NO: 4108280 - RNA, 91 nt, Human
gcugauauuucaaggacuagacuuaggagcugacaucucuuagauaauugucagagggauucagaauucccaggacgcuuuugaauucagu

SEQ ID NO: 4108281 - RNA, 61 nt, Human
gcugaucaccaguuguagguauuuucuagccauugggagacugccuuucccuggugccggc

SEQ ID NO: 4108282 - RNA, 58 nt, Human
gcugaucauucagguugggcaagugucacaguccuggcaauugagaccugagugaagu

SEQ ID NO: 4108283 - RNA, 58 nt, Human
gcugauccuuuuaugucuagcuugauguuuacaguaacucuggagguagaggguuagu

SEQ ID NO: 4108284 - RNA, 63 nt, Human
gcugaucucagagcuggaggguuuaugcgggacuggccagccccuucagcugagugggacagc

SEQ ID NO: 4108285 - RNA, 61 nt, Human
gcugaucuucaugcacuaguggccucuggauuggcugguauacagugcauggggggacagc

SEQ ID NO: 4108286 - RNA, 76 nt, Human
gcugauguaauggaaguuaaauaugguaugggggaacuacauuacauaguaauuuuuuacuuuuaauuacaguagc

SEQ ID NO: 4108287 - RNA, 88 nt, Human
gcugauguugcuggugucaggaccacacuuugaguaggaagagucuagaagugguccucauaauucagugagcauaaaauuuuccagu

SEQ ID NO: 4108288 - RNA, 63 nt, Human
gcugauucugggaacuuugucucucagggcacugauucugagagcauuauuucuagaagcugc

SEQ ID NO: 4108289 - RNA, 70 nt, Human
gcugauuuauguuugcauuuuguuccaggacagcagauuauagcccaaguucugaggcaaaggcagcagc

SEQ ID NO: 4108290 - RNA, 63 nt, Human
gcugauuuauugaccuagugguauuuuaauuuuguuuuauuuacccuuuguuuaugaaucagc

SEQ ID NO: 4108291 - RNA, 67 nt, Human
gcugauuuuauuugaagcagaaggcacagacucucgucuggcagaagugcugucaguaagaagcagc

SEQ ID NO: 4108292 - RNA, 69 nt, Human
gcugcaacucagaugccaaaggcagcgggcauuucuuggcaaacucccuuuggcucugaucaguggagc

SEQ ID NO: 4108293 - RNA, 68 nt, Human
gcugcaagacccagaugucagguucagggaugcauuuucucuggcagggauaucuggcuccucucggc

SEQ ID NO: 4108294 - RNA, 57 nt, Human
gcugcaagcaugucauccucacauuuggccccuuggcccagagauggcauuggcagc

SEQ ID NO: 4108295 - RNA, 84 nt, Human
gcugcaauuaucuuagaugaggcuauggguugcuugauuucuccagggagucugguaauguagcucaaccucuccuguugcagu

SEQ ID NO: 4108296 - RNA, 106 nt, Human
gcugcaauucauagccuguuaguagcugugucuucaauguacugggaaauuuaucuuuguacaggaaggcacuguuucaagacccagagcuguguuccucaauagu

SEQ ID NO: 4108297 - RNA, 113 nt, Human
gcugcagagcugagugcgcaccuucuugggccaggccuuaccauagcuguagcaccgucugccgcagugcggggagggccccaugugccacaggguccacucggaccugcagc

SEQ ID NO: 4108298 - RNA, 66 nt, Human
gcugcagaggucuugcugauggugugugcauauccucugauuggaaccacagcaugacaccugggc

SEQ ID NO: 4108299 - RNA, 57 nt, Human
gcugcagaucccacccauucccagagaccagggcugaggacagugugaucugccagc

SEQ ID NO: 4108300 - RNA, 60 nt, Human
gcugcagcaagcccuccaggggauuaugauaccugccccucugagaacuucugcugcagc

SEQ ID NO: 4108301 - RNA, 71 nt, Human
gcugcagcagaaauggauuuugagauuuaauaaaugcauauuuagacucugcuuccacuuuugcuaacagc

SEQ ID NO: 4108302 - RNA, 60 nt, Human
gcugcagcagaaguucucagaggggcagguaucauaauccccuggagggcuugcugcagc

SEQ ID NO: 4108303 - RNA, 55 nt, Human
gcugcagcagcugcaggguugugaagagggaaaugacucuccggcugccagcagc

SEQ ID NO: 4108304 - RNA, 63 nt, Human
gcugcagcccgcagcuccuugcagagaugucuaccugcuucucucuggagcuggggcaugagc

SEQ ID NO: 4108305 - RNA, 111 nt, Human
gcugcagccuggccugguccugucugccuggcugucaaacccagaagaccgugguuucugguggccucugugugacagcggaggagguggggcgaggccuggaagugaagc

SEQ ID NO: 4108306 - RNA, 110 nt, Human
gcugcaggagucgggcccaggacuggugaagccuucggagacccugucccucaccugcacugucucugguggcuccaucaguaguuacuacuggagcuggauccggcagc

SEQ ID NO: 4108307 - RNA, 72 nt, Human
gcugcaggccuugagggcaguacuugggauaguauaucugcuggcccaggccaaagcccuggacgcuguggu

SEQ ID NO: 4108308 - RNA, 65 nt, Human
gcugcagggccauggguucuauagaacagaauacagagcuauaggauauacaagguucugugagu

SEQ ID NO: 4108309 - RNA, 57 nt, Human
gcugcagguugggcaacagaguguguguggagaggcuuugaaggaccggccuggggc

SEQ ID NO: 4108310 - RNA, 63 nt, Human
gcugcaguucuucuccucaaggccuccaaaaaagcgucaugagaaauaaaggaacugugcagc

SEQ ID NO: 4108311 - RNA, 93 nt, Human
gcugcaugggcuaaacuuagaggauauaaaacaagcacagucuuaaacagggugaagauaagcauguuuucuagaguuuaaaaucugugaagu

SEQ ID NO: 4108312 - RNA, 75 nt, Human
gcugccaaaggccaauguuguucucuugugaugccuuuuuggcguguuacauaacauugagcagcauuccucagc

SEQ ID NO: 4108313 - RNA, 79 nt, Human
gcugccaauucaugacacuucugaaacggaaguugugauuuuaaaauaacuuucuggaagccuuguccuaauugguagc

SEQ ID NO: 4108314 - RNA, 77 nt, Human
gcugccagagacagaguguuuuuuaagguacuguacugcucuuugcucuguacucagagaacauucccagucuuagc

SEQ ID NO: 4108315 - RNA, 76 nt, Human
gcugccagauuuaugucuuacuacagcaauuaacaaaguuauuuuuggaaguaagcauuuaauaucuucuuguagc

SEQ ID NO: 4108316 - RNA, 73 nt, Human
gcugccagccagaaaacucuacaugcuugugguagaaagcugcccuagcuaagcacaguuuucuggguguggc

SEQ ID NO: 4108317 - RNA, 68 nt, Human
gcugccagccuccccggccugugaaguggagcagaugcagagucugccaggccgggugagcaggcagc

SEQ ID NO: 4108318 - RNA, 64 nt, Human
gcugccagcgucagaccuggggcuuaccgaggaccuggggucagggacgcugugcuuucccagc

SEQ ID NO: 4108319 - RNA, 79 nt, Human
gcugccaggagaggucucccuuccccagucaccucaugccccacggucauacugggguggaugggccuguccugacugu

SEQ ID NO: 4108320 - RNA, 72 nt, Human
gcugccaggccaggcccucaggcaagggcucugaagucagggucaccugcuugccagggccgaucuuggugc

SEQ ID NO: 4108321 - RNA, 61 nt, Human
gcugccagggccaccgcggggggucagcuuccauugcugagcugugcuacgcccugggagc

SEQ ID NO: 4108322 - RNA, 60 nt, Human
gcugccaugccacagcacucacauacccacuaauucugugugaugagugaggcuggcggc

SEQ ID NO: 4108323 - RNA, 61 nt, Human
gcugccauuuaguugaagcaugugccaagcucucagcaauaacaucuuaacuugauggagu

SEQ ID NO: 4108324 - RNA, 56 nt, Human
gcugccccagcgccgacccuugcccgcauggcacaggaugauggguugagggccgc

SEQ ID NO: 4108325 - RNA, 60 nt, Human
gcugccccccggacucggcggggcugcggggaggccgccgcugggaucuaggggugcagc

SEQ ID NO: 4108326 - RNA, 66 nt, Human
gcugccccucgaccaagcgcgucccuaaucucucugcugaaggaacagauugcuuggagggccagc

SEQ ID NO: 4108327 - RNA, 60 nt, Human
gcugcccugacaagcuacucccaggggagaguacugagagaagccugaugcaggaacagc

SEQ ID NO: 4108328 - RNA, 81 nt, Human
gcugcccuggccagaugcugaaagcaggagcccucugccaagcaggggcugaacucaagucagcuccgccuaaaggacagc

SEQ ID NO: 4108329 - RNA, 62 nt, Human
gcugcccuuccagguugccacagugcagucugcacuuggccugcccagccagaaggagcagc

SEQ ID NO: 4108330 - RNA, 80 nt, Human
gcugccuauggacagaccucuaagauguugccuggaucucuggguaaguccuauuccaggucucuccaucacugcauugc

SEQ ID NO: 4108331 - RNA, 71 nt, Human
gcugccuccaagaggugugagcccucugucucggggaugaacaagcagagucugggcuaccucuugacagc

SEQ ID NO: 4108332 - RNA, 61 nt, Human
gcugccuccacuggcucccaguagaacccaaacuggcaauaugcuuucaguggccggcagc

SEQ ID NO: 4108333 - RNA, 57 nt, Human
gcugccucccagagcccugcagcuuccccagcccgcaggggccuuuugugaggaagc

SEQ ID NO: 4108334 - RNA, 61 nt, Human
gcugccugacuuaggagcucaauggcagcaccaggaagcugcacugggcuggagucagggc

SEQ ID NO: 4108335 - RNA, 71 nt, Human
gcugccugccuggcccaggaaccaguaggccucaaagaucuuggucaggucucgagccaggcagcugcagu

SEQ ID NO: 4108336 - RNA, 75 nt, Human
gcugcgauccucucugugacagggaacggcucgggaaacgcuuggcgcguucccuccugccacgggaggagcagc

SEQ ID NO: 4108337 - RNA, 55 nt, Human
gcugcgcagccaggccguggugcuaaugacauccaggccucuuccaugcagcagc

SEQ ID NO: 4108338 - RNA, 97 nt, Human
gcugcgcuagccauccugggcuuccaguccugugucccuugguggguucccuccaggaaccaaggggcggcucucacuccagguggcagcagguagc

SEQ ID NO: 4108339 - RNA, 69 nt, Human
gcugcgggcaggcggggcccagcucugcuccgugcggaggcuguguucugcccucucccugcccacagc

SEQ ID NO: 4108340 - RNA, 74 nt, Human
gcugcgggcugugucgguguuccauguggugggagaguccgccccagccaguugagcggcgacaccucccgagu

SEQ ID NO: 4108341 - RNA, 117 nt, Human
gcugcuacauagucugcuucuguuaauuuuuuaaccacuguuuaaucuggccauaauuaaguuuggcuuucuucguuguuugagauuuucagaauucaaggcaagcuaguagaaagc

SEQ ID NO: 4108342 - RNA, 79 nt, Human
gcugcucaauggccuuguucuguuaugcugcagagggucuguacuucggcagcaaaggaagccagguccagcauagcgc

SEQ ID NO: 4108343 - RNA, 85 nt, Human
gccuuagcagagaauaugcuuucagaaagcauuggccuacauuccaacuuguagggccugugcuuccugagauaacugcuuuugc

SEQ ID NO: 4108344 - RNA, 58 nt, Human
gccuuaggggucagacagagcuggauauggggguccuuguucuguaggagcuuaaggc

SEQ ID NO: 4108345 - RNA, 70 nt, Human
gccuuaggugguugucugcuuuccuaaggacucccauuuccaguauuaaagagagaaucaucaucaaggc

SEQ ID NO: 4108346 - RNA, 65 nt, Human
gccuuauugagucaguuagcuaacucuaugcuuugcuucuauguggcugcuuguuuuagugaggc

SEQ ID NO: 4108347 - RNA, 113 nt, Human
gccuucaguuuccuuccuuugugcucuucuuugugcugugguuuucucagccuggaauacccuuuuuccaccugccagaauccaagccacaguacaaaucccagagcacaggc

SEQ ID NO: 4108348 - RNA, 61 nt, Human
gccuucauaggagaauuuaagcacagaagaucugccuguuuccuucugucucuuuggaggc

SEQ ID NO: 4108349 - RNA, 79 nt, Human
gccuuccagaugaucugucacuuaucacauuuaaguuuguagauggauuagaugcugauugaauagauuucugaaaggc

SEQ ID NO: 4108350 - RNA, 101 nt, Human
gccuuccccaaggcccucugacgaucugagcaucuagcuugcaucacgggggccaggcaggcugugaggcucagaugggcuggggguccugcggacaaggc

SEQ ID NO: 4108351 - RNA, 72 nt, Human
gccuucccccacuggcccuuaagucugcuuaauaauaaguccuuugcuucugucauucuccugggggauggc

SEQ ID NO: 4108352 - RNA, 84 nt, Human
gccuucccugagcuccuguuccagccauucuccuguuuuccuuucuggugggaggaggcugggcacaguggccucguggaaugu

SEQ ID NO: 4108353 - RNA, 98 nt, Human
gccuuccggcagaagaggguaaagguggagaugaauuggccuuucugcguuucagaaaugugaauuucauuuccuuccacaccucucuguccaguggc

SEQ ID NO: 4108354 - RNA, 56 nt, Human
gccuuccuuacaccugcucagccucucacagcagagcugcgcagaccuaagagggc

SEQ ID NO: 4108355 - RNA, 91 nt, Human
gccuucgauguucuugcugacuucuggcaggcaaucggcucugggaguuucugucuagggaccccuccagcagcaguaucugcguaggggc

SEQ ID NO: 4108356 - RNA, 65 nt, Human
gccuucuaccauaucuggcauuuucaaguccugaucccuuugaggcucuaugugguagauuaggu

SEQ ID NO: 4108357 - RNA, 57 nt, Human
gccuucugaucgcuggacugacucucucgcccucucuuggugcagcccucgggaggc

SEQ ID NO: 4108358 - RNA, 57 nt, Human
gccuucugaucgcuggacugacucucucgccuucucuuggugcagcccucgggaggc

SEQ ID NO: 4108359 - RNA, 57 nt, Human
gccuucugauugcuggacugacucucucgcccucucuuggugcagcccucgggaggc

SEQ ID NO: 4108360 - RNA, 59 nt, Human
gccuucuguugcagcaguauguagccuuguggagaaaugagucugucugcgcaugaggu

SEQ ID NO: 4108361 - RNA, 68 nt, Human
gccuucuucucucagcucgucaaagucauucuccauccagcuuugauccguugcuggugaggaacugc

SEQ ID NO: 4108362 - RNA, 70 nt, Human
gccuugaacucauguauauugauuuuuguugcuaucacaaaucagguagaaaauguuuaucaguucaggc

SEQ ID NO: 4108363 - RNA, 74 nt, Human
gccuugacuguuaugggugucagcuuaacauuccauagaugggugguuaguuuuuauaucccauaauauaaagc

SEQ ID NO: 4108364 - RNA, 56 nt, Human
gccuugcaggaaggagggacagcaggacugagcgacucuguccuuucugcuaaggc

SEQ ID NO: 4108365 - RNA, 63 nt, Human
gccuugcuucauggacaauuuacagcagcugucugaagcacaguugcuucuggaaugcaaggc

SEQ ID NO: 4108366 - RNA, 84 nt, Human
gccuugcuuucaugguuuuucaaauuccuaagcuagcuaguggaagauggcuaguuugaagaaggaucuaugaaauaauagggu

SEQ ID NO: 4108367 - RNA, 89 nt, Human
gccuuggaccuuauagugcacuucaacucacuguaucccugcaucucuaagauccugcaggaguuaagugcucuccugguucccauggc

SEQ ID NO: 4108368 - RNA, 75 nt, Human
gccuuggauggauucaauguugcagauggaauuaacuucucuugauaccaacuguuauauugaaggguaaagggc

SEQ ID NO: 4108369 - RNA, 57 nt, Human
gccuugggagaaauugcagagucuggcuugaaagggacaugugagucucccaugggc

SEQ ID NO: 4108370 - RNA, 59 nt, Human
gccuuggucagucagagaauggagucaucugauuuaccauccugugaauggcccuaggc

SEQ ID NO: 4108371 - RNA, 73 nt, Human
gccuuguggcucgugagauguuagggaggccaaaagaaauugcuagaaccagaacucaugagugccucaaggc

SEQ ID NO: 4108372 - RNA, 76 nt, Human
gccuugugguguguugagucauugcucuggcaaaagaucuguuugcuccagcaacaggcuuagcuuucaacaaggc

SEQ ID NO: 4108373 - RNA, 61 nt, Human
gccuuguuuaaaugguugcuaucuugccucugcaggaagccaagcagcguuuaaaaaaugc

SEQ ID NO: 4108374 - RNA, 118 nt, Human
gccuuuacuaccacuacaugcacucacuuguuuucucagcacuauuagccuccacugaccucaaagggaagcauguguauaagcugggcaggagguaggcaugggccguguuaaaggc

SEQ ID NO: 4108375 - RNA, 71 nt, Human
gccuuuauguuucugcagcccccucgccgagucugcccggagaaccagggaaagcugcagauaacgcuggc

SEQ ID NO: 4108376 - RNA, 59 nt, Human
gccuuuauuuucaacggaguguugccauaauuuaagcaaauauucugaggaaugagggc

SEQ ID NO: 4108377 - RNA, 71 nt, Human
gccuuucaaaugucuucaaauauugaaauccuggguauacacucuaggauucguuuaguuaaggauaaggc

SEQ ID NO: 4108378 - RNA, 66 nt, Human
gccuuucugacucccaggcagauauggacacagcaucagagguguccggggcugggagggagaggu

SEQ ID NO: 4108379 - RNA, 93 nt, Human
gccuuucuuaaauuucuuuccuguacagcccacuccacugggcagauaaucaggcagagggcuucccuaggagugagagcauaagagaauggc

SEQ ID NO: 4108380 - RNA, 119 nt, Human
gccuuugaaggcagcaguccuugauauuucuuaggcugacuuguuucauaaagauuucuaaaagaguuuuuagagagccagugagccccgugauuuaugaugauugcucaagcaguggc

SEQ ID NO: 4108381 - RNA, 120 nt, Human
gccuuugcccucaauugcaaacagaguggagugucucuuagcuaagaaguuugugcugcucaaggguuugcacaaauacaaaguugagaaauacuccuugcugaaagggguguaaaaggc

SEQ ID NO: 4108382 - RNA, 123 nt, Human
gccuuuguauguucagaaggagaagaaaauggagucuggugaauacucagcaauaccugccucuccagccagguauuccaguggucaccaagauacccccugucagucagaaaguacaguugc

SEQ ID NO: 4108383 - RNA, 75 nt, Human
gccuuuuaacccuccccaagaggucgugccucugagccccaaagcugaaggccccucuugggggugggugcgggc

SEQ ID NO: 4108384 - RNA, 63 nt, Human
gccuuuuagguugucaaccucuugggaguagcccuacuccuggcagacagcacugaagcuggc

SEQ ID NO: 4108385 - RNA, 64 nt, Human
gccuuuucucaguuuccuuccuuguuuuugaugacuugagagcacugaggaaagcugguuaggu

SEQ ID NO: 4108386 - RNA, 79 nt, Human
gccuuuuguagaccacccucucucugucucaacuacucaacucugaaauuguacaaaagugagugugucucagaauggu

SEQ ID NO: 4108387 - RNA, 59 nt, Human
gccuuuuucaggaguugugggagaccaucuguacuuuucucucauuauauccaagaggc

SEQ ID NO: 4108388 - RNA, 64 nt, Human
gccuuuuucuguuugcuucaagacauuauuuuucgaagaugaauugaggaaaacagucguaggc

SEQ ID NO: 4108389 - RNA, 73 nt, Human
gccuuuuugcagucucagagaacaguuggugcuucugggcaggaggagcugggcugcugcugggagccagggc

SEQ ID NO: 4108390 - RNA, 75 nt, Human
gccuuuuuggauuaucugucacuugggauuacuuguacugugauccugucuaugaguagauaauugaauguuggc

SEQ ID NO: 4108391 - RNA, 55 nt, Human
gccuuuuuuguugcucugucacuuagagagacuuuccauucgagcaacagaaggc

SEQ ID NO: 4108392 - RNA, 63 nt, Human
gcgaacaguuacccuuaagaucuuuccuaguuaggaaacacucgccugcaaguguagcugcgc

SEQ ID NO: 4108393 - RNA, 64 nt, Human
gcgaagagguuuuagggaagaguuaguaaccauacagaggcuuugcccuggaaaccaauguugu

SEQ ID NO: 4108394 - RNA, 117 nt, Human
gcgacaaacagaagcacuucuuauucuuuuuaugcucagcaacauauuuauuucagauacacaaaaaagacaggcugaagucagaaaagaauuagggagaauggcgaaguuugaagc

SEQ ID NO: 4108395 - RNA, 79 nt, Human
gcgagacagugacuuagugaccagacccaggcuccuaguucuuggcccugugaucuugucacuacgugauacugcuugu

SEQ ID NO: 4108396 - RNA, 74 nt, Human
gcgagaugggcgggggcggguguaaguaggacagcgcuuugugcgcguugcuauggcgccgccgccgcccgugc

SEQ ID NO: 4108397 - RNA, 85 nt, Human
gcgagaugguuuuguugggagacaauucucuugugaucucucacauuucugcaagucuaauuuucugaacaaagccauuaucagc

SEQ ID NO: 4108398 - RNA, 77 nt, Human
gcgagcggugggcgcgggcgcgcggccucgggaggggcgcaauuccaggccagcggcccgcgcguucugcugcccgc

SEQ ID NO: 4108399 - RNA, 130 nt, Human
gcgagcuccagaggugccucccaugaacagaaaggaugcugucaggccugucgugagucccagggcacugagcugugcagggacuggcacagggcugggagcugguaggucccagaaacaggagcugugc

SEQ ID NO: 4108400 - RNA, 88 nt, Human
gcgagcucucuggagcuguuuuccugguuagagacauuguucuggaaagcagacuggguugccauggugacggcucccggggccucgc

SEQ ID NO: 4108401 - RNA, 59 nt, Human
gcgaggaggaaacgcggagaacucaggccacuucuccugggucccacguccccucccgu

SEQ ID NO: 4108402 - RNA, 55 nt, Human
gcgaggcagaggggcagaggacaauggggacagguccucuccaugaucuguuugu

SEQ ID NO: 4108403 - RNA, 84 nt, Human
gcgauauuuuauuucuacauugaguuuuagcaacucuaaaaaggcuuuguaaaaauuaacuguaggauggaauaagauauuugc

SEQ ID NO: 4108404 - RNA, 59 nt, Human
gcgauggccagaugaaauaauagaguuaaauacaucuauguuguucucugguuuaaagc

SEQ ID NO: 4108405 - RNA, 71 nt, Human
gcgaugguaggggcugggcaggaguuggagcaugaacaucugagacaauggcuuagcucagcgcucagcgc

SEQ ID NO: 4108406 - RNA, 103 nt, Human
gcgauguggaaaaguuuuauugccauuucaaggugcaggaggguuuuuuucgaagaugauaugaggauuaacugaccuaguguuuguaaagauuuuacguugc

SEQ ID NO: 4108407 - RNA, 59 nt, Human
gcgauuccagaagugguaauggguugugcugagcuagccccacacucucucugagaagc

SEQ ID NO: 4108408 - RNA, 73 nt, Human
gcgauuuucauuauucaugcuaguuaugcucuauauauaaaguugcaagcacugaauuagugaaaacugacgc

SEQ ID NO: 4108409 - RNA, 74 nt, Human
gcgcaacaccucuauuuacaaguauuaucauucugcuccugugagaagugauggcagugaauaaggcugugugc

SEQ ID NO: 4108410 - RNA, 80 nt, Human
gcgcaagcccaucuucuguugucguaaugauggugccuuugaauauuuaucugccagaugacaaacaggacaucuugugc

SEQ ID NO: 4108411 - RNA, 61 nt, Human
gcgcaccaccuccagguggccgucgaagcaggcggcgcggagaggcguggaguuggugcgc

SEQ ID NO: 4108412 - RNA, 56 nt, Human
gcugcucucucccuaaguugggcuugagaaacaguuucuauaggagagggaggagu

SEQ ID NO: 4108413 - RNA, 57 nt, Human
gcugcucuggcucugcagugucugaugugaugcuugaaaacaagaaggcagagcagc

SEQ ID NO: 4108414 - RNA, 68 nt, Human
gcugcugagacaccuaagguaaaucucuauauauuaguccauuuacuaaauaggucagucaugguagu

SEQ ID NO: 4108415 - RNA, 59 nt, Human
gcugcugcacucaucuccucuccuggcacaagggccagggcuggagacaagugagccgc

SEQ ID NO: 4108416 - RNA, 82 nt, Human
gcugcugcagggacuugagacccccugaguuauggccugaagaacggguccacuucccaggaggguuguccacugacagagu

SEQ ID NO: 4108417 - RNA, 81 nt, Human
gcugcugcugcugacccuugcccaucccggagcucacuuugagagcuggcugagaucccaggcaggguggccaguggcugc

SEQ ID NO: 4108418 - RNA, 65 nt, Human
gcugcugcuguggagauaagcaguccagccccugagggaucuggaagguuccucccagcuccagc

SEQ ID NO: 4108419 - RNA, 63 nt, Human
gcugcuggugagauuuuauguuuccccugugccggggacaaaauauuuuucucccaucuaagc

SEQ ID NO: 4108420 - RNA, 58 nt, Human
gcugcugucacccacaucugucuugguaaugaaacauuaacaguguugugagagcagc

SEQ ID NO: 4108421 - RNA, 60 nt, Human
gcugcuguccuuagggaguucucugucuagugggagaacauagauaccuaagacagaagc

SEQ ID NO: 4108422 - RNA, 61 nt, Human
gcugcuguccuucaagucugcguugccaagguaacuggggauuuggaagggacagccaagu

SEQ ID NO: 4108423 - RNA, 61 nt, Human
gcugcuguuuucgagcuuuaaauguggguucuuuggcauuagcuuuauuugaaauaggagu

SEQ ID NO: 4108424 - RNA, 92 nt, Human
gcugcuuauugugaucuugacagugaugccgggcgagaaugaauagaccgugaggccguucauauuccuggcacugacgagcccacugcagc

SEQ ID NO: 4108425 - RNA, 124 nt, Human
gcugcuuccgaguugggccaggguuuuaaagcccgggcugcagggagcugaggucacauacaaaagggguggcucacaggacucucugggccugggaggggcuuccggugcagcaggagggagu

SEQ ID NO: 4108426 - RNA, 64 nt, Human
gcugcuuccuagaaggcccaguucaggugcauaagaaccucacaguggagcuuucugggacagu

SEQ ID NO: 4108427 - RNA, 79 nt, Human
gcuggcggccaucucgccgcaggaggugggcgugcucacggggccggacaggcacaccuuccugcaggcgggccugagc

SEQ ID NO: 4108428 - RNA, 86 nt, Human
gcuggcgggggccuggaggccggacugagaggcauccauuuugucuagagccucucacugucacccucccacuguucuugcugugc

SEQ ID NO: 4108429 - RNA, 67 nt, Human
gcuggcguauucuuccuagaguugccuccuuauauauguaguugcaaguuaggaugaaugccuuagc

SEQ ID NO: 4108430 - RNA, 83 nt, Human
gcuggcucagagucacauuaauuuaauuuuaucugugauccacaucagccuagaaugcuauuaauucggauuugacugccagc

SEQ ID NO: 4108431 - RNA, 63 nt, Human
gcuggcucuacauuugaggucauuaauggauuguuuaauguguauuccauuguagcagcuagu

SEQ ID NO: 4108432 - RNA, 80 nt, Human
gcuggcucugaagagagcagcagaucuuccagcacagcacucgagcucugcuaagggauaggcugccuccucaagugggu

SEQ ID NO: 4108433 - RNA, 64 nt, Human
gcuggcucuguggcuuccuucauggacccucaagaggccagagggcugcugcacagugcucagc

SEQ ID NO: 4108434 - RNA, 59 nt, Human
gcuggcucuucaguggagauagguuuguuaccugacucauauuuguugagcuuaucagu

SEQ ID NO: 4108435 - RNA, 65 nt, Human
gcuggcugcgucaucacagggcugccacuugcaccuccucagucacugauguuacagcagccagu

SEQ ID NO: 4108436 - RNA, 74 nt, Human
gcuggcuggaacuagcaguuggcaggggauuagauaaggguggugucaagaaugacggcuggauuccugccugc

SEQ ID NO: 4108437 - RNA, 70 nt, Human
gcuggcuggaaugggagaagaaaugcacacacacuuucccaugcaggguucuccuuuuccaguucccagu

SEQ ID NO: 4108438 - RNA, 55 nt, Human
gcuggcugggacagauuccauugagucauuccucuaaagaaaugccuaguccagc

SEQ ID NO: 4108439 - RNA, 72 nt, Human
gcuggcugggcugcggcuguaccugcugacuuaacuguccaguuauucccaggaccgcccaccccagcuggc

SEQ ID NO: 4108440 - RNA, 55 nt, Human
gcuggcuguaucaccuggccagguauuauuugcauuaauaggagaacagcuaagc

SEQ ID NO: 4108441 - RNA, 60 nt, Human
gcuggcuguggcuuaagcaaacgcaaucacagaauugccuagcugugagucagagucggc

SEQ ID NO: 4108442 - RNA, 65 nt, Human
gcuggcuucagcugccaucaaugcugcugccgccacaugggaugguuguugaaaacugauccagc

SEQ ID NO: 4108443 - RNA, 70 nt, Human
gcugggaaauuguauuucuauuucaaagaugggacaccaaggcucagaaaaaugaagacaaagucccagc

SEQ ID NO: 4108444 - RNA, 63 nt, Human
gcugggaacauguaccaagucuuguucaaagaucugucuucaacuuuuggcuacaugcuuagc

SEQ ID NO: 4108445 - RNA, 100 nt, Human
gcugggaacuccaggaaggaaggggugggguugaggguggggaagcuucucuauuacccuccuuaccaccacagcuccagccaagcuuggagugaucugc

SEQ ID NO: 4108446 - RNA, 70 nt, Human
gcugggaaggacccucuggggucucagugcccuccccuggcauuugaggccagucuggguccuucaaggc

SEQ ID NO: 4108447 - RNA, 82 nt, Human
gcugggaaggcuugaagcccggagagaccauggggagcagaggcuucuccccagcucugugcuuccacugagccaccccagc

SEQ ID NO: 4108448 - RNA, 95 nt, Human
gcugggacugauugcagucuuugaggagguccuggguuuacucuucuugcugagaucccaccagauguucuucauuggacuccauuacaccaagc

SEQ ID NO: 4108449 - RNA, 59 nt, Human
gcugggagagggggaggguuguagucacuuuugugguugcaggguauccuugucucugc

SEQ ID NO: 4108450 - RNA, 75 nt, Human
gcugggagcagaguuuguauuuuugcuaacuuuuccugcuucugacaggacagcagugcccauucugcccccugu

SEQ ID NO: 4108451 - RNA, 58 nt, Human
gcugggaggcagcaccuuuagcaacccuugaagucugagaacacugugcucuccuagu

SEQ ID NO: 4108452 - RNA, 60 nt, Human
gcugggagucuaagcuagcaccguuugaacuaauuguguacaauuuagcauuccccaagc

SEQ ID NO: 4108453 - RNA, 56 nt, Human
gcugggaguuacugucuccuuuaucaccauuuugaaaagcagaagcugcucucagc

SEQ ID NO: 4108454 - RNA, 65 nt, Human
gcugggaucugaggagaugguggugcugggaagcugcagggccaagggcugcugagguguccagc

SEQ ID NO: 4108455 - RNA, 130 nt, Human
gcugggauucggucucuuuuagggaugggauucagggcaaaagggaaaccauucugugaagauuggcccuagaauggcaccuuugucuuaguuccucuugauuuacuuugggauccuucaaguuucuagc

SEQ ID NO: 4108456 - RNA, 72 nt, Human
gcugggcaacagcaguggguugccagugggcaagaaugaucuccucucuggcacuucauugcugugcccugc

SEQ ID NO: 4108457 - RNA, 55 nt, Human
gcugggcaaugccagagaggagccccccagcgccacaugcucugcauuccccagc

SEQ ID NO: 4108458 - RNA, 75 nt, Human
gcugggcaucucugcugccggccuaggaucaaggcaggaaaaggccaggaaaggagggcagaagagaaguccugc

SEQ ID NO: 4108459 - RNA, 97 nt, Human
gcugggcccccagggaucccacuggauugcaggcucugacaccaggcucuggcuggagcugucuugcucacucuugcagccaucccuggggaacagc

SEQ ID NO: 4108460 - RNA, 69 nt, Human
gcugggccugggcccucaccgccggugguccucuccccaggcgcgccgucggcgggcaccgggccuugc

SEQ ID NO: 4108461 - RNA, 70 nt, Human
gcuggggaacacuacuuuucauaaaaguaagcucagagaaaggcuugcuuuucuagauagugugaauagc

SEQ ID NO: 4108462 - RNA, 62 nt, Human
gcuggggaggaguggccagagcaccggccaaaucuucaugcucuggggagcuccucugcggu

SEQ ID NO: 4108463 - RNA, 57 nt, Human
gcuggggcagccgaggcuggcggccauucugcuagucgccccgaggcagcccuaugc

SEQ ID NO: 4108464 - RNA, 56 nt, Human
gcuggggcugcucacuggcauaucugaaaaggugggccuggcuagaagcuccuagc

SEQ ID NO: 4108465 - RNA, 55 nt, Human
gcuggggcuguaggaggacuuauguugugguuuaagagcuuccuacagcccuugu

SEQ ID NO: 4108466 - RNA, 62 nt, Human
gcugggggcaagaucagaaaacugggccaucaauacagcuguccuuuauuccugcccccagc

SEQ ID NO: 4108467 - RNA, 89 nt, Human
gcugggucaugcugugaugagggggcagcagcccucugccuccgcccagccuccuccugcugcuccccagcacacagcacccacccagu

SEQ ID NO: 4108468 - RNA, 89 nt, Human
gcugggugcugugggugaaggaggggucugugcaagcaugugcacaugugugcagccucugucuuuggugccagacguagguauccagc

SEQ ID NO: 4108469 - RNA, 129 nt, Human
gcuggguggagaccuccuaagaagagguaagagucuuguucuuucucuguaaaaggaaaaugguuuucuaacguuuuacuguuccagagaaagacaaaacgcccaaccuccauuuacaucugucucagc

SEQ ID NO: 4108470 - RNA, 62 nt, Human
gcuggguggugacuguccuagggauggugggauccaguagaccagaauugucagcaccuugc

SEQ ID NO: 4108471 - RNA, 78 nt, Human
gcuggguuacaagcugacccugaagaugaucagacaaggcaaaacgaaauugaucauccucgcuaacaacuacccagc

SEQ ID NO: 4108472 - RNA, 62 nt, Human
gcugguaaacuucuggugccauuggauuagagaaaauucccucaccucugaaaguuuccagc

SEQ ID NO: 4108473 - RNA, 102 nt, Human
gcgcacgcgccccggggcccgucgggccuuauuucacggccccgccuuccuccuccgcgagcgccaaauaaguguccggcccucccagccccgugcgugcgc

SEQ ID NO: 4108474 - RNA, 88 nt, Human
gcgcagccauucagaccccacaguccacauuccuuugagccaguccauugaggguccucagggaauguggcggguccccuggucucgc

SEQ ID NO: 4108475 - RNA, 76 nt, Human
gcgcagcccuccuguccugcaccgugggggcgccgcccucccaggcgggccucggagcgggucagagaggggaagc

SEQ ID NO: 4108476 - RNA, 61 nt, Human
gcgcagggaagacccggagcagcgguuuaccuaaggaacgggccgcgcggucuugcugcgc

SEQ ID NO: 4108477 - RNA, 64 nt, Human
gcgcaggugaugcgucugccuuggccucccaaagugcugggauuacaggcgucagccaccgcgc

SEQ ID NO: 4108478 - RNA, 76 nt, Human
gcgcaguuuuaaugauagcuguuucacaugugcaugcggcacucaugugggcagagcugucagaagacuguaaagu

SEQ ID NO: 4108479 - RNA, 79 nt, Human
gcgcauugagacuuucugaaguuuaaguucuaacuuacgucuucuaaauuagcaaaccuggacuacagaucaaagcagc

SEQ ID NO: 4108480 - RNA, 56 nt, Human
gcgccagcuuuguuuuuacuagagauagauacauguugcugagagcagggcugggc

SEQ ID NO: 4108481 - RNA, 128 nt, Human
gcgcccagccaauaccuggccuuuuaagaaguuugcugacuccugguauggaugacagaaaauggaauaacguuuuguuucuccagucuaggaaaagcaagucagguaguggauagacugacuggcgu

SEQ ID NO: 4108482 - RNA, 95 nt, Human
gcgccgcuguaaguaccuucccgcuucuuccgaaucgcgaagagacgguacugaucgcggggaaguggugggcuaaggggccaagccagcggagu

SEQ ID NO: 4108483 - RNA, 60 nt, Human
gcgccugggcacacagugacucugcacuuucugguccaguuuccuguggcugccuagggc

SEQ ID NO: 4108484 - RNA, 58 nt, Human
gcgcgccucugcccgguguucccccugcccgggcggggaggcuggagagagcgcgcgc

SEQ ID NO: 4108485 - RNA, 55 nt, Human
gcgcgcgcccugacacgcaggcaugcgcgcgccugugggaagucggggagcgcgc

SEQ ID NO: 4108486 - RNA, 67 nt, Human
gcgcggcgcgggcggaggaaggaagggcggcucuaggggcguccuggcuagucguccgcgaccgcgc

SEQ ID NO: 4108487 - RNA, 69 nt, Human
gcgcuaugcuacuucaaccuucucuauuagauaaaguaacugucaguaacuggguugaagcuagagcgc

SEQ ID NO: 4108488 - RNA, 56 nt, Human
gcgcucaccaccaccugcgguugcgucaggaagcgcccgcagguggaaggagccgc

SEQ ID NO: 4108489 - RNA, 76 nt, Human
gcgcuccuggcaggguggcagcgggugacauggaaucaggcuugucuagcuugcuugccgcucuccaagugagcgc

SEQ ID NO: 4108490 - RNA, 75 nt, Human
gcgcugcgccuccucuuccgcagccccguccgcaacccgucgcuggcggagagggugguacaauuggaacagcgc

SEQ ID NO: 4108491 - RNA, 61 nt, Human
gcgcuggaaauugccguuggcuuuauacaucucuauagagagaggcuaaagagucuugcgu

SEQ ID NO: 4108492 - RNA, 89 nt, Human
gcgcuggggaaggucgugauuucccacucaggccgcggcgcuaaggagacgcuuguccgaggucccgugggaucuccgacccucggggc

SEQ ID NO: 4108493 - RNA, 80 nt, Human
gcgcuggugagcggcgccgagcuuggccaggccgccacgucggcgagcgcgggcaaacccaggcuggacgccgccagugc

SEQ ID NO: 4108494 - RNA, 130 nt, Human
gcgcugguggacacgguagucacuggcacucuaaauguggcuuuuaugacugaggacauaaauguuuaacuuugauuguguuauaucuaaauagccacauguggcuaaaggcuacuguguugaacagcac

SEQ ID NO: 4108495 - RNA, 77 nt, Human
gcgcuuagaagauucugaaauuaacagacuggacugaauauuuucauuuuaguccuaaauuuagauuuucuuaguac

SEQ ID NO: 4108496 - RNA, 130 nt, Human
gcgcuuagcaucgcguguucucuuggaagucguacaggaagcccuggcaaugucagaugagggguauucuaauuugagcuaugggcaucuggauacgaauucuuuugggggcucaugaagggauaggugc

SEQ ID NO: 4108497 - RNA, 68 nt, Human
gcgcuugcagacugccuucaugcagaccccugacuccagcacgucugggcugccagguaggcacacgc

SEQ ID NO: 4108498 - RNA, 101 nt, Human
gcgcuugcgcaggaagucugcggcaggagggcguccucuugacucuaggagagcugggagggggagggaaagcuugaucugucucggagccugcgcagugc

SEQ ID NO: 4108499 - RNA, 86 nt, Human
gcgcuuggcuggguggugguaguaguaguaguaauuguuauucuuuauuuauuauuauuguugcggcuguuaccguugucauucgc

SEQ ID NO: 4108500 - RNA, 88 nt, Human
gcggaaugcuccuggugaaacacaaugauuuguaaaacaacuguggcgggguucucagagauuuuguuucccuuaggagacauuuggc

SEQ ID NO: 4108501 - RNA, 77 nt, Human
ggaccaaggcagggaccagaggaaugggaggggaggcauggcuggcccucacucagguuuggacccugccucgggcc

SEQ ID NO: 4108502 - RNA, 59 nt, Human
ggaccacagcacuuggcuugagaguaaaauccaacucagacccagguuaucugaggucc

SEQ ID NO: 4108503 - RNA, 70 nt, Human
ggaccaccgcagacacugaggguccggggugcucaccgcucccgucuugcuguugucugcguuacagucu

SEQ ID NO: 4108504 - RNA, 68 nt, Human
ggaccagcuccggucccugcccuuucuggucuuuugcagcuggaaauccagaugcuggaucuuggucc

SEQ ID NO: 4108505 - RNA, 67 nt, Human
ggaccauaagauucauguuaaacuuagugccagaaauaaccuuggguagccauguuccuuaugguuc

SEQ ID NO: 4108506 - RNA, 99 nt, Human
ggacccaaauuguaguaagguuuuacguucccacuagaaaugguaaaauauugagucuaaguagaaugugaaaaguuaaaaauuuauauauuauggucc

SEQ ID NO: 4108507 - RNA, 60 nt, Human
ggacccaagagaucgcauguaguugauaguaaucuccuuuugucuauuucuugguuuucc

SEQ ID NO: 4108508 - RNA, 78 nt, Human
ggacccacacagauccugccaauggaagcagguggggcucugccauccucugcugcagcaggauucucugugcacucc

SEQ ID NO: 4108509 - RNA, 57 nt, Human
ggacccaggaugcuggaacucaggccuucggccuagaaagacagagguuuugucucc

SEQ ID NO: 4108510 - RNA, 93 nt, Human
ggacccaugcugucuuggucaugcuaugucucagcugcagaagugaccuggugcuagaaaucugaaacuagcauuccaccgggaugacaaucc

SEQ ID NO: 4108511 - RNA, 112 nt, Human
ggacccccuuuccugcaccucuccccuuccugagccccccggcuguccuccaccacagccagagggaacugggccucauuagggggacaguuuguuccucauuaggggcacc

SEQ ID NO: 4108512 - RNA, 61 nt, Human
ggaccccggagagggugccuggaagccaggcugggcagguauggcugcauccucugggucc

SEQ ID NO: 4108513 - RNA, 76 nt, Human
ggaccccugggcuccaggaucacugccuggggccccugagugcacccacagguucuggguccuggguccugggucu

SEQ ID NO: 4108514 - RNA, 72 nt, Human
ggacccugagggagcaagaggagaugauggccccuagcuccacagcuccuaacaaaggcucucucugggacc

SEQ ID NO: 4108515 - RNA, 56 nt, Human
ggacccuggagccgucugaggcagguccuuccuggcccuguccgugauuuaggucc

SEQ ID NO: 4108516 - RNA, 77 nt, Human
ggacccuuauuaaggcguuggcgugcuuauuuauggaacauuaaauaccguuuguuugcgcugugacgaggccaucc

SEQ ID NO: 4108517 - RNA, 61 nt, Human
ggaccucgguguugggaacguggucuuccugguagacacuucccuucucugcucauggucc

SEQ ID NO: 4108518 - RNA, 55 nt, Human
ggaccucucugcuugcuggauagccaacuuugaugguaagcaggcugcagaggcc

SEQ ID NO: 4108519 - RNA, 77 nt, Human
ggaccucugauucucaaaacauaacuucacugcuccgcucacacaauugcagucaaggaauugaggacuagagguuu

SEQ ID NO: 4108520 - RNA, 70 nt, Human
ggaccucuggcauucuuguuucuggaaauauugacuguuuuuuacacaggagcaagagagccaucugucu

SEQ ID NO: 4108521 - RNA, 66 nt, Human
ggaccucuuauucucaaauagugacauauucuccguagucacuguuucagaacugaguaaggaucc

SEQ ID NO: 4108522 - RNA, 64 nt, Human
ggaccugcuuucccuggccuucuucucccuacuugucagagaauccuggccaggucagagcucc

SEQ ID NO: 4108523 - RNA, 60 nt, Human
ggaccuggaggcuuuucccaagacaucaugauggagucuucagggucugccccaggggcc

SEQ ID NO: 4108524 - RNA, 62 nt, Human
ggaccuggugacuggugcucuaggacacuuacucaugauuauuagagcaugaaguccuaucc

SEQ ID NO: 4108525 - RNA, 62 nt, Human
ggaccugguggggcuuuccuucugcuuggccauacagaguagagagaagccuggccuuugcu

SEQ ID NO: 4108526 - RNA, 66 nt, Human
ggaccugucuguuuuucuugccauaccugagaucaucagaaauggcauugcaagggcaggaggucc

SEQ ID NO: 4108527 - RNA, 58 nt, Human
ggaccugugcacagucagcccuggggggagccugucccccaagccuggcacgggaucc

SEQ ID NO: 4108528 - RNA, 93 nt, Human
ggaccugugcugucuguuugcucuggggucugggcaguccuguuguuuggguagaggccucagagggcccuagggacagacugacccaggucu

SEQ ID NO: 4108529 - RNA, 70 nt, Human
ggaccugugucuacagcaugugcaaccccaacuuuccuuuaugccuugcuuugccuggacaaucaggucc

SEQ ID NO: 4108530 - RNA, 55 nt, Human
ggaccuuauagauucucuguagcugcuuggcaacagaaaucauuuguaagguacc

SEQ ID NO: 4108531 - RNA, 74 nt, Human
ggaccuugaacaagaagcuguagggauuaacucccucccuugggcagucugucccugcccuucuaucagggucc

SEQ ID NO: 4108532 - RNA, 62 nt, Human
gcugguagaagcuaagaagagagggucugauggaagagucuagaacccucuggcuucugagc

SEQ ID NO: 4108533 - RNA, 68 nt, Human
gcugguagaccucacugcacucacugucuaaauuguccauggaguuacugugcugaugguccauuagu

SEQ ID NO: 4108534 - RNA, 77 nt, Human
gcuggucugggccaaggccucugcaggaugaguaguagcuguuccugcugggcuuugggcagccccuagacccuagc

SEQ ID NO: 4108535 - RNA, 108 nt, Human
gcuggucuguuucucugcuauaauuaugcucaaaauguaggcauucauauaugcucaggagugcuuguacaugagcugaguguaauuacagguaauaaagaagaaagc

SEQ ID NO: 4108536 - RNA, 122 nt, Human
gcuggugagccuguccaacuaaucugccucguuuguuuucacagcuuugcccggaacauuugcagggauggcccgacacuccccgcagagccugagagcgaguggcgagccaagauaccagc

SEQ ID NO: 4108537 - RNA, 102 nt, Human
gcuggugcccaggggugugguaacuguagaugugauuguuuguaccucuggcuuccagagacaaugccaaugcacacguggcccagauuccuguuucccggu

SEQ ID NO: 4108538 - RNA, 68 nt, Human
gcuggugcccucccuguacugucaggaggccagagggcccuucuccagcucaucagggagggaacugc

SEQ ID NO: 4108539 - RNA, 80 nt, Human
gcuggugccuccaggaggaggaaggcugccaggcuuccuggaugacagaucucagcccccuuuucuuggauagcaucugu

SEQ ID NO: 4108540 - RNA, 64 nt, Human
gcuggugggacaaagcuuugccaacccuucauggaggucuggagccaguguugcccaacacagc

SEQ ID NO: 4108541 - RNA, 61 nt, Human
gcugguggucaguuaggcaaucauguccagggagggaucuggugucucacuguccagaggc

SEQ ID NO: 4108542 - RNA, 86 nt, Human
gcugguuaugaaugaggauccuugaccuuaucacaggccuacuaaucacaaucucuaggguaaggcucaggaaucuccuuuucagc

SEQ ID NO: 4108543 - RNA, 70 nt, Human
gcugguugcauuucuccaccuuaacugugccugacaggcagcagagcauggugggaagggccugcacagu

SEQ ID NO: 4108544 - RNA, 68 nt, Human
gcugguuuguccuuuccaaaggacaaucuuauccuacauaagacugagacuggggaaagacaggaagc

SEQ ID NO: 4108545 - RNA, 73 nt, Human
gcuguaauaaacuggaagagugaauauaacugguuuucucaguccugugaguuuuucuaguuaccuguugagc

SEQ ID NO: 4108546 - RNA, 80 nt, Human
gcuguaaugacugcugcuuuauagggcuuccauguccuuagccacaugacaagguuuauaaggcuugccaucuauccagc

SEQ ID NO: 4108547 - RNA, 83 nt, Human
gcuguaccugcauugugcccucaaagggugcgucuucuuguuuugaggaccugcccacucugaggacaucuugugggaccagu

SEQ ID NO: 4108548 - RNA, 77 nt, Human
gcuguagagggccgaggcuuauaggugcuuccagggggacacggacccuggaaugagcagggcuuaugguagacagc

SEQ ID NO: 4108549 - RNA, 67 nt, Human
gcuguagcagccccucccaaccuccccuuccuguggcugccccagagccugugagggaugcugcagu

SEQ ID NO: 4108550 - RNA, 61 nt, Human
gcuguaggaaggaagagaggagcuuucucuggcuccugcuugaaacucugccuuccugagu

SEQ ID NO: 4108551 - RNA, 58 nt, Human
gcuguagugaauggccgcguucuggcccuggucccgguccguggccugcacucgcagc

SEQ ID NO: 4108552 - RNA, 90 nt, Human
gcuguaguuuuuaauguagugcuucauuaauauuauuaauauuguuguuauacacguuuauggagcuacuaggaaguugaugagcacagc

SEQ ID NO: 4108553 - RNA, 56 nt, Human
gcuguauccauacuaauugcuaaaucccaugggaucucacuaagaugagauauagc

SEQ ID NO: 4108554 - RNA, 60 nt, Human
gcuguauucaacagugaaaagagaguucgguuggauauuauagucggugauggacacagc

SEQ ID NO: 4108555 - RNA, 119 nt, Human
gcuguauuucuucuccuuugacuuagaauggaagguugagaagaacuguggccuguucaaccccaggccuucucuuagcacuuuguguuacuguguugggggccaaaaaggaaucaggc

SEQ ID NO: 4108556 - RNA, 56 nt, Human
gcugucacaaauuggguucuuuggaaacagaugcugagacauaguuuguggcaugc

SEQ ID NO: 4108557 - RNA, 86 nt, Human
gcugucacaugcccaggcaauaaaggguugguugggaggcacaccugcuacccuuucuuuuaucgcugggagcaaacaaugccagu

SEQ ID NO: 4108558 - RNA, 74 nt, Human
gcugucagcccagguccuccuccuccaggaaggcuuccucgagguccugggaggcaggaccccuuuccuacagc

SEQ ID NO: 4108559 - RNA, 78 nt, Human
gcugucagcugcccagauguggcucuggcuuuccaggcgggacuuuuugcuuguccucagccacugugcacugauugc

SEQ ID NO: 4108560 - RNA, 72 nt, Human
gcugucagucacauuguuacagauuucuaagucaauuguauuccgaucagaaaauacagucugccugacagu

SEQ ID NO: 4108561 - RNA, 113 nt, Human
gcuguccccaggccugcaccauacgaagcauccguugucuuugggggccccgcaggagggcuguauccacagagacaggguccuugcucuuuauuccagcugguggggacagu

SEQ ID NO: 4108562 - RNA, 60 nt, Human
gcugucccuaauuugauuuuaaauagccacauauagccaguggcuacugauuuggacagc

SEQ ID NO: 4108563 - RNA, 73 nt, Human
gcuguccuaauuauggcacauuuuuacuuucuagguucugugauuuacagaguggucuggcuauguggacagc

SEQ ID NO: 4108564 - RNA, 59 nt, Human
gcuguccuggggagggagaaugaucuggggugagauaaugcuccuuggcucaggacagu

SEQ ID NO: 4108565 - RNA, 88 nt, Human
gcugucgacuuaacuuuugccaguuucccuggauguguaaguagaauuauauuuucacagaacuugcaaaaaucucagacucggcugc

SEQ ID NO: 4108566 - RNA, 61 nt, Human
gcugucggccuuuggcuucuccuguguucuagaaccaggaguuuugaccaggggcggcggc

SEQ ID NO: 4108567 - RNA, 84 nt, Human
gcugucuacagugaugagggaauuuugugcacuccacauugcuuuccaguacuagugccauagacauucagcacucacuacagc

SEQ ID NO: 4108568 - RNA, 81 nt, Human
gcugucuagugguuuauaaaaucagauuccucucgacaaucaggacuuuaaauguauuuuuagaccuuuagaccaacuggc

SEQ ID NO: 4108569 - RNA, 58 nt, Human
gcugucucgccugacacuggcuuuccugcccacagcgggggacgggcaggcgggcagc

SEQ ID NO: 4108570 - RNA, 86 nt, Human
gcugucucggggccaccacugggugugccgcugccuggccgggggcuuaugccucccaugccauacuggccacccgggcccucagc

SEQ ID NO: 4108571 - RNA, 76 nt, Human
gcugucucuccaguugggauucuugguucugggguccucccgccccaaccaaggaugcccagcuggccaagucagc

SEQ ID NO: 4108572 - RNA, 56 nt, Human
gcugucuggcauggcguggcuggugcucuguucuggccaccucgucucggagcagc

SEQ ID NO: 4108573 - RNA, 121 nt, Human
gcugucugucuaaacgaagaucuuuuccucgaugucccuaaagaaacagacauuuggguauagccaacuguuagaagaauuuagggggauagaggagagucaucuuacagaaugacagagc

SEQ ID NO: 4108574 - RNA, 57 nt, Human
gcugucugucucugucccaccacuuucuaggcugugauuggguccagggauuacagc

SEQ ID NO: 4108575 - RNA, 68 nt, Human
gcugucugugagaggucacugccaagcauggcacagccauugcuccaggugugccucucauggaaggc

SEQ ID NO: 4108576 - RNA, 89 nt, Human
gcuugucauugaguguucuuugcuguugauguagaagauucucuugaagaaaucugcauaauugcagacacaaacaauggccuuugagc

SEQ ID NO: 4108577 - RNA, 65 nt, Human
gcuuguccuauugcugaaucuaaggcuuccaguacaauguucacuggaaagcauuaagggcaggc

SEQ ID NO: 4108578 - RNA, 129 nt, Human
gcuugucuacccuccagcauuggaacccucuuagaaggcuaaucaauucccaucguggcaacuucuccccagugccacaguuguuugugcucuagaggacucuaacacugcuccuuuuagaaacuuugc

SEQ ID NO: 4108579 - RNA, 59 nt, Human
gcuuguggagagauuuugaggagguuccaggagagaagucuggaagguuucucuuaggu

SEQ ID NO: 4108580 - RNA, 112 nt, Human
gcuuguggcccugguuuuccaucaggugaccugagccacuauggguuaccccuuccauggcaucuguguggccuccaagguuccugaagagcagacaucuugggccaugggc

SEQ ID NO: 4108581 - RNA, 105 nt, Human
gcuugugggcuggacccuggagcccagcugcacccuggugggucccaggcggcugagcagagggcucggacagugugcgucuggccucgggguccucccaucugc

SEQ ID NO: 4108582 - RNA, 67 nt, Human
gcuugugggugugcccugggagaucccuuuuccuuggccacugggcucuccuggguccaacccaugc

SEQ ID NO: 4108583 - RNA, 59 nt, Human
gcuuguguguaugugugugugugugugucuaugcaugaacacaauacgugcaugcaugu

SEQ ID NO: 4108584 - RNA, 93 nt, Human
gcuuguucaaacacagauuucuuugucccaucuccagaauuucugauuuaguaaaggugggauaaaccuugagaauuugcguuucuaacaagu

SEQ ID NO: 4108585 - RNA, 105 nt, Human
gcuuguucuucaccuuggcucuauugccuguagcauccccuucagcuuuuucuugggcauggcagugaugcggcaggacauaugcuauggaugcaggaaugcagc

SEQ ID NO: 4108586 - RNA, 74 nt, Human
gcuuguucuuugcaaagucuuuggcaagacauuuaacugucuggccagugaaaugcagaauaguggaaucaggu

SEQ ID NO: 4108587 - RNA, 96 nt, Human
gcuuguuucuagaacucuggccauugugacccagggccugauugucaccaugccacuguacucaacaauaguuuucagguuuuuagauacuucugc

SEQ ID NO: 4108588 - RNA, 63 nt, Human
gcuuguuugcacauuguuuuaggaauucagaacacauuucccauagaaacaaugcagacaagc

SEQ ID NO: 4108589 - RNA, 106 nt, Human
gcuuuaacaugugagaauguguguucggggcccagagaaagggccuggcuauugugaaaccucagcucuggagucccgacccgcacugcagucagcaugcuggggu

SEQ ID NO: 4108590 - RNA, 61 nt, Human
gcuuuaaugcuucguggggccaaagggaucccagcuuacccuucagcgagggcauuaaggu

SEQ ID NO: 4108591 - RNA, 55 nt, Human
gcuuuacacaugagaccugcaauaauuguuauuauucggugugaugguguggagc

SEQ ID NO: 4108592 - RNA, 77 nt, Human
gcuuuacucgaaauuuacuaagguguuucuuuugugguucuuguaaucuacaauccaacaguguuuuugaguagagc

SEQ ID NO: 4108593 - RNA, 63 nt, Human
gcuuuagacugagugguccauuauuguaguuaguguacugcaaaugcccauuuauuuucuggc

SEQ ID NO: 4108594 - RNA, 65 nt, Human
gcuuuagcucaggcuucuucuauaaagauugucucauggucuuagauggcagcuagagcuccagc

SEQ ID NO: 4108595 - RNA, 69 nt, Human
gcuuuagcugacuagaaaacagcucaguagaaaauuauuuuacaaagauuauauucaguuagcuaaggc

SEQ ID NO: 4108596 - RNA, 87 nt, Human
gcuuuaguggaguucaaguuagagauauauuuaguuuugguuaaaugggaccuauuuaugugguuuucugacaauuucacauauagc

SEQ ID NO: 4108597 - RNA, 72 nt, Human
gcuuuauccaaggguuuuaacuguaaaacacagucaucugaguaauaagcaggucaaaucuuuggauauagu

SEQ ID NO: 4108598 - RNA, 69 nt, Human
gcuuuaugagugaggcaggauaaccugguagagaaauuagguguuuuuuccuuccuucucucaaaaggc

SEQ ID NO: 4108599 - RNA, 92 nt, Human
gcuuucaaaaacucccaaguccaggugggcaaauaaagaaggaaacuaauuuuguuucugcaauaccuauagauuuucaaguuguuuaaagu

SEQ ID NO: 4108600 - RNA, 77 nt, Human
gcuuucacacguaguggguggaaaugacuacagcucuuuuacaguuuuguguaguagcauucacgaagugugaaagc

SEQ ID NO: 4108601 - RNA, 56 nt, Human
gcuuucacagucauaugaugaauuuucuuauagguuaccauagagacuaugaaagu

SEQ ID NO: 4108602 - RNA, 106 nt, Human
gcuuucacguauuucccaggucaucuggcuuuuacugaauugcucccacauuccugacagcaaagucaguggaaccauccuaugcuuggaacacauguuugaaggc

SEQ ID NO: 4108603 - RNA, 69 nt, Human
gcuuucacucauuugcagacguccucucugaugacagugcagaggauucacugcagaagacauggaagu

SEQ ID NO: 4108604 - RNA, 94 nt, Human
gcuuucaucauuuuauaauacugccaacaauacugagcauuugauagugaacaggucuacaguuuucuugggaguuguauaaauaaggugaagc

SEQ ID NO: 4108605 - RNA, 58 nt, Human
gcuuuccauguggcuugggcuuccucacaacaugguggccuagggcaagugggugggc

SEQ ID NO: 4108606 - RNA, 80 nt, Human
gcuuucccugcagcuacgcaugacugaguucuagccaaagagaguaaggaggguacaauggguggaaaucaugggaaagu

SEQ ID NO: 4108607 - RNA, 55 nt, Human
gcuuuccuggcugucacucggguugaagcuugcuuugcucuacagugagggcagc

SEQ ID NO: 4108608 - RNA, 96 nt, Human
gcuuuccuuuguuuaaucauuuauaucuucucugagaacacugagcuaaaguuuaauauuacagaaagggaugauugaucuaaaugccaacaaagc

SEQ ID NO: 4108609 - RNA, 125 nt, Human
gcuuucucaaugucuuuggacagcaggaggagggugauuuggaaaugacucugccugacuugagaagaaggaagaagcaugcugggucauuuuugccuuguuucuagcugcaugaauugaaaagc

SEQ ID NO: 4108610 - RNA, 62 nt, Human
gcuuucucagauuccccuuuuaauauugugauguaaaggagggaaauuuugguaaaggaagu

SEQ ID NO: 4108611 - RNA, 89 nt, Human
gcuuucugaaacacaguuauauguucacaaggacugaccaauccugauggucuaauucauuagugucaugugacugucagucuggaagu

SEQ ID NO: 4108612 - RNA, 63 nt, Human
gcuuucugaagcaguguuucucaaagggugguccagcaucaccugggaacuuguuagagaugc

SEQ ID NO: 4108613 - RNA, 92 nt, Human
gcuuucugaguuucugggacaggcuuacuguuucauaggguggagugaccuucccaaagcagcuuggccauguucuccggaugucaggaagc

SEQ ID NO: 4108614 - RNA, 68 nt, Human
gcuuucuggcucucugauuucacauuccgaagaccaggagugaaaaaggaagggccauaauuuaaggc

SEQ ID NO: 4108615 - RNA, 81 nt, Human
gcuuucuuuuauucuacaucacuuaacaugcuaauuucuuaguaaauaauuaagugauggguaauuuuagguaaggaaagu

SEQ ID NO: 4108616 - RNA, 56 nt, Human
gcuuucuuuucaagaauguauuuccauacuucuuuuggguuucuagaaaagaaggu

SEQ ID NO: 4108617 - RNA, 66 nt, Human
gcuuugacacagaucaauauucaacuuagcaagaaugagaugaaaggaauugauuuguguucaagc

SEQ ID NO: 4108618 - RNA, 74 nt, Human
gcuuugaucuguaguccagguuugcuaauuuagaagacguaaguuagaacuuaaacuucagaaagucucaaugc

SEQ ID NO: 4108619 - RNA, 69 nt, Human
gcuuugauugaaguguucuguuccaggcagccucaaugauugcuuguucacagagacucuaauccaugc

SEQ ID NO: 4108620 - RNA, 69 nt, Human
gcuuugcaaguuaugaagcugguccuguuggcauauaugacuuccaauuucagcucaaacuuguguugu

SEQ ID NO: 4108621 - RNA, 59 nt, Human
gcuuugcacucugauccuucccaauguucagauagcaagauggagugaagagugaaagc

SEQ ID NO: 4108622 - RNA, 69 nt, Human
gcuuugcagccaagaagcaagaaggagccucgcccuauuggggcugccccagugcucauggcugaaggc

SEQ ID NO: 4108623 - RNA, 61 nt, Human
gcuuugccaauggacgguuggcugugauuuccagggacaguuguucuuccagaagcaaagu

SEQ ID NO: 4108624 - RNA, 67 nt, Human
gcuuugccuugaacucucauguuguguacaaugaagaauauaaagacauggacuucuggguaugagc

SEQ ID NO: 4108625 - RNA, 94 nt, Human
gcuuugcgcuaauggacuguuauaaaaugcacaguuguuucuugcagucacugccaaaugccucccauucuacugacaguuuugugcauuaggc

SEQ ID NO: 4108626 - RNA, 55 nt, Human
gcucccugcugggagaugaccuuauuuccugaugggucccaggccagcugggagc

SEQ ID NO: 4108627 - RNA, 87 nt, Human
gcucccuuaccuaccucuuaggauaguugugaagauaggcugagauaacggauaacuucagauuaaguucgaaggagguguuggugc

SEQ ID NO: 4108628 - RNA, 62 nt, Human
gcucccuucuggggaggagcugaccaaaaugucguccagcuccugcuugacagaagaggugc

SEQ ID NO: 4108629 - RNA, 55 nt, Human
gcucccuuuaggcuggguauggugucucucagcacuuugcgaggccaaggcgggc

SEQ ID NO: 4108630 - RNA, 73 nt, Human
gcuccgggagugguaaugagcagauuaggguuauuacagccgaauggcucagagcgcacuugcucacccgagc

SEQ ID NO: 4108631 - RNA, 77 nt, Human
gcuccggggcugcugggaggucucuugcggccuaggccaggcucagggccgccggggaucucgccuccaucccgugc

SEQ ID NO: 4108632 - RNA, 73 nt, Human
gcuccuaaacaaacauccugcccuaauccagagacuagguuggugcuuauuggggggcggugagugggggagc

SEQ ID NO: 4108633 - RNA, 63 nt, Human
gcuccuacuuccucuguggcuucacccuugggugccaccccuguagagggacagacugggagc

SEQ ID NO: 4108634 - RNA, 81 nt, Human
gcuccuagagagacauuuauucacacauuuauuuuuaaagaagaaaagaauaaguauguauagugaguggccuccagaagc

SEQ ID NO: 4108635 - RNA, 57 nt, Human
gcuccuagugagauccgggggauuaguuuccaaaucuggaaugguacucacuggagu

SEQ ID NO: 4108636 - RNA, 114 nt, Human
gcuccucacagcuccagaaaucugugaagccgagaugguauuuuuaacgcagccauuuuaaacaaugucugugccgaaccacuuuugcuuucgcuguuggcgcaggugaggagc

SEQ ID NO: 4108637 - RNA, 93 nt, Human
gcuccucauuccaagcguagauuugggccaaggcugaaugcuuaagcuguuuaaaaagaauuuccuucccagauuugguucucuaaaaguagc

SEQ ID NO: 4108638 - RNA, 70 nt, Human
gcuccuccggaaauuagaccuuuggaaaucaaugcagaguuucuauuacauuucuggacauucagagagc

SEQ ID NO: 4108639 - RNA, 105 nt, Human
gcuccuccucaucgucguccgugucccgggggccgggggcccgggaacgagcccggcuggagcugccagcccucggggucugaguggcuguugaggugugggagc

SEQ ID NO: 4108640 - RNA, 83 nt, Human
gcuccucuuucucuucucagcacggcauuccuccuucccucucgcucacugagggagacaaucuggcucagaagaagaugagc

SEQ ID NO: 4108641 - RNA, 72 nt, Human
gcuccugaaugcccaccuaacaguguuuggauuguuuccuaagugcaaauccuguuuggaguaaguuggagc

SEQ ID NO: 4108642 - RNA, 56 nt, Human
gcuccugcaggacccaggagacacccaaauacagugacuuccccaacugcaggagu

SEQ ID NO: 4108643 - RNA, 63 nt, Human
gcuccugcccagcagccuccggggcagugugggccaauuguccugucaggcugggggcugagc

SEQ ID NO: 4108644 - RNA, 73 nt, Human
gcuccugcccaucuccgagccauucgcaggggaaggccuggaaugagagcccggggauccugggaccaggagc

SEQ ID NO: 4108645 - RNA, 74 nt, Human
gcuccuggaaggccuguggcugcugagggcugccuggucccccucaggacggccgggggagccucuccagaagc

SEQ ID NO: 4108646 - RNA, 62 nt, Human
gcuccuggagagcagggacccuggcuuauuagcagcucagcagccagucuguuuucuagugc

SEQ ID NO: 4108647 - RNA, 88 nt, Human
gcuccugggcucuugcuggugucgugccuucacuggugacacuuccugaacuuaaccaguggauggacaugggcaagaggccaguggc

SEQ ID NO: 4108648 - RNA, 69 nt, Human
gcuccuguaaagagcuaaaguauaaggggcuuaaaaaaauauucaaugcuuuuguucuuuacucacugu

SEQ ID NO: 4108649 - RNA, 85 nt, Human
gcuugcugguggagagcccuggcagucugggauggagccccugugagcccaaguccccaagcaugccaggcaagccaccauaagc

SEQ ID NO: 4108650 - RNA, 84 nt, Human
gcuugcuuccugagacaacauugaguacuugguuuauuguuaugaucauuauagcucugguucucuuagaguaguggagcaggc

SEQ ID NO: 4108651 - RNA, 83 nt, Human
gcuugcuuucccagcagacccugucuggagcuggcacagagcauccucuguuccagauucggcgugggacguuggaagcaagc

SEQ ID NO: 4108652 - RNA, 115 nt, Human
gcuuggaaacuuacuaaaaauauaauacaaauuauuggaucccacaccagacuuacuaaaucagcaauucugggaguggguccaaggaaucuguacuuuaucaagccuaccaggu

SEQ ID NO: 4108653 - RNA, 61 nt, Human
gcuuggaacuauggaaguuggcucggcauaggugucagagcuggagaaguggauuuaaagu

SEQ ID NO: 4108654 - RNA, 67 nt, Human
gcuuggcagcaacaggcauccccgagacaccaagggccaggugaugucucuuuuucgugcuccaagu

SEQ ID NO: 4108655 - RNA, 73 nt, Human
gcuuggcccuaggcugcccaugaguuugccaaagguguacuguagcccacucugaggcaggucagggcagagc

SEQ ID NO: 4108656 - RNA, 57 nt, Human
gcuuggccucauccauuucaguuuaacuuuuguauaaauugaugguauggguuaagc

SEQ ID NO: 4108657 - RNA, 75 nt, Human
gcuuggcuaaccuaguucaacaacugucuguaacccaaagcagaauggaaucaggaacuaguuagcacuacaagu

SEQ ID NO: 4108658 - RNA, 69 nt, Human
gcuuggcucucuggggccugaguuugaaaagggccacggaggggccgguagccaggccucaaguuaagu

SEQ ID NO: 4108659 - RNA, 79 nt, Human
gcuuggcugaagagguuggugagugguagagcugggucacuguggcucuuccgccaccagccacaccuuccauggaggc

SEQ ID NO: 4108660 - RNA, 57 nt, Human
gcuuggcuggagaaaguuaccucuuuuuaucaaaaaugugacuuagcccaguccagc

SEQ ID NO: 4108661 - RNA, 71 nt, Human
gcuuggcugguuuuaauacaugccauaauuacagauacuaaguuggcagguuucguuaaaaaugguuaagu

SEQ ID NO: 4108662 - RNA, 63 nt, Human
gcuuggcuucuugcagcagggugaauucacucugcgccaggguguucauucugcuguccaggc

SEQ ID NO: 4108663 - RNA, 55 nt, Human
gcuuggcuuugucuuguucacugucacagccugagcaucuaaaacagagccaggc

SEQ ID NO: 4108664 - RNA, 129 nt, Human
gcuugggaagacuaugugagggagagugcugggguaugagcagagaagagucuggccucucuuuuggcugaucugccccaacuagagaaccaugcucuuuuccauuuccaauccuuuccuuccccgucc

SEQ ID NO: 4108665 - RNA, 72 nt, Human
gcuugggccuggaaggcagagguugcagugagcugagaucaugccacugcacuucagccugggugacaaagc

SEQ ID NO: 4108666 - RNA, 57 nt, Human
gcuuggggcuccuguaagcaagaacucaaagguccuugagaggacagagccauaagc

SEQ ID NO: 4108667 - RNA, 129 nt, Human
gcuugggucuuguuuggucaauuggucaaagacuggauucucuuuguuuuacucagaggcaugcuugauauccaugccuaaaagaaaauaaacauuaaguuaaagacaauguugaguaaaagauuauuc

SEQ ID NO: 4108668 - RNA, 65 nt, Human
gcuuggguucgauguauauguagcccgggcauggggcagggcuucuuaacauuuggacaccacgc

SEQ ID NO: 4108669 - RNA, 60 nt, Human
gcuugguacucccuugggaugguucaguagagaugaggcaggcagaaggaaguaccaggc

SEQ ID NO: 4108670 - RNA, 69 nt, Human
gcuuggugucugaaaauaugauuuugccuggagaggauccaaggcugucaucuuugcaggcagcauggc

SEQ ID NO: 4108671 - RNA, 116 nt, Human
gcuuguaaugugucauuccuuuuacugugucacaugguuuacugcagcauaucccuacaaaauuuauauugugcugugcuggagugacugguauguuggaguggauuuuuauuagc

SEQ ID NO: 4108672 - RNA, 91 nt, Human
gcuuguaggagauauaagacucuccugaggaaaagcuuggucagguguaccuggagaaagcucccaggagguucuaauaccuucccacugc

SEQ ID NO: 4108673 - RNA, 57 nt, Human
gcuugucugugguucuaaugguggcugugcuccuccaugcuccagcuccagacaggu

SEQ ID NO: 4108674 - RNA, 78 nt, Human
gcuugucuuuugcuuuucauccaagaucuccaaucauaaccagacugcugagacaguggauaggggcuggagagaagu

SEQ ID NO: 4108675 - RNA, 78 nt, Human
gcuugugauaucugauguucaacuuaauauguaaguuuuaugagcuuuuaauacguaaguugaacaucagaaacaagu

SEQ ID NO: 4108676 - RNA, 83 nt, Human
gcuugugauuucacuccaucuuugcuacugguuuugacaacagggaaucauuuaaagacuuuaggcaguguagugacgugagc

SEQ ID NO: 4108677 - RNA, 100 nt, Human
gcuuguuacaggaacagccaggaggccucagcccuguccacagccucuguccagguccguccacagcucugaggucucccugcugugacccuuggcaggc

SEQ ID NO: 4108678 - RNA, 55 nt, Human
gcuuguugucaauguuaauuguucagguaaggcuuacaaaguauugaggacaagu

SEQ ID NO: 4108679 - RNA, 72 nt, Human
gcuuguuuuaggggcaugaaauucuuauagauaacaacauuucugagaacaucauuuccuacaacgacaagc

SEQ ID NO: 4108680 - RNA, 90 nt, Human
gcuuguuuugcucucagaagcuuccaguauggauuguagcauguguuguggccccauuugggaaucuuccauggaaggagcaaagcaggc

SEQ ID NO: 4108681 - RNA, 97 nt, Human
gcuuuaauuucuuggaccauuuuuacagagcauucauuuuucagcuauuacgaugaacaaaauugauuguuuuggaagaaugucuagggcuuauagc

SEQ ID NO: 4108682 - RNA, 93 nt, Human
gcuuuagcuacuauuguaguggccaaagaacucuugggaaaaagaccaagcuauuucauuuuggucacugcugggagcuaauauaugcaaagc

SEQ ID NO: 4108683 - RNA, 69 nt, Human
gcuuuauggaaucaaagacuggaaggaaaucaaagcacccuuccauccagcuccauuauuuuauauagc

SEQ ID NO: 4108684 - RNA, 89 nt, Human
ggagaaucacuugaacccaggaggaggagguugcagugagcagagaucaugccauugcacuccaucuugggcaacaagagugaaacucc

SEQ ID NO: 4108685 - RNA, 88 nt, Human
ggagaaucacuugaacccaggaggcagagauugcagugagccgagauugugccacugcacucuagccuaggugacagagugagacucc

SEQ ID NO: 4108686 - RNA, 87 nt, Human
ggagaaucacuugaacccaggaggcagagguugcagugagcugagaucgcggcacugcucuagccugggugacaagaaugaaacucc

SEQ ID NO: 4108687 - RNA, 88 nt, Human
ggagaaucgcuugaaccagggaggcugagguugcagugagcugacaucaugccacugcccuccagccuggaugacagagugagacucc

SEQ ID NO: 4108688 - RNA, 86 nt, Human
ggagaaucgcuugaacccaggguggagguugcagugagccaagaucgcaccauugcacuccggccugggugacagggugagauucc

SEQ ID NO: 4108689 - RNA, 88 nt, Human
ggagaaucgcuugaacccggaagguggagguugcagugagcugagaucacgccacugcacuccagccugggugacagagcaagacucc

SEQ ID NO: 4108690 - RNA, 88 nt, Human
ggagaaucgcuugaacccuggaggcagagguugcagugagccaagaucgugccacuguacuccagccucggugacaaagugagacucc

SEQ ID NO: 4108691 - RNA, 89 nt, Human
ggagaaucgcuugaaccuggaaggcggagguugcagugagcugagaucaugccacugcacuccagccugggcaacaaaagugaaacucc

SEQ ID NO: 4108692 - RNA, 88 nt, Human
ggagaaucgcuugaacucgguaggcggagguugcagugcgccaaguucaugccacuguacuccagccugggggacagagugagacucc

SEQ ID NO: 4108693 - RNA, 88 nt, Human
ggagaaucgcuugaacuugggaggcggagguugcagugagcugagaucacgccacugcacuccagcccgagcaacacagugagacucc

SEQ ID NO: 4108694 - RNA, 88 nt, Human
ggagaaucgcuuggaccugggagguggagguuguggugagccaagauuaugccacugcacuccagcccgggcaacagagugagacucc

SEQ ID NO: 4108695 - RNA, 85 nt, Human
ggagaaucgguugaacccaggaaguggagguggcaauaagcugagaucauaccacugcacugccuggguaacagagcaagacucc

SEQ ID NO: 4108696 - RNA, 88 nt, Human
ggagaauucuuugagccuaggaggcgggggcugcaguaagccaagacugugcugcugcacuccugccugggcaacagagcaagacucc

SEQ ID NO: 4108697 - RNA, 89 nt, Human
ggagaauugcuugaacccaggagauggagguuguggugagccaagaucgcaccauugcacuccagccugggcaaugagagcaaaacucc

SEQ ID NO: 4108698 - RNA, 88 nt, Human
ggagaauugcuugaacccuggaggcaaagguugcagugagucaagauggcaccacugcacuccagccugggugacagagcaagacucu

SEQ ID NO: 4108699 - RNA, 88 nt, Human
ggagaauugcuugaaccuuggagguggaaguugcagugagccaagauggugucacugcacuccagccugggugacagagugagacucc

SEQ ID NO: 4108700 - RNA, 89 nt, Human
ggagaauugcuugguuggaggcggaaguugcagugagccaagauugcgccacugcaccucagccugggcgaccgagcgagacuaucucc

SEQ ID NO: 4108701 - RNA, 123 nt, Human
ggagaauuuugaccagagaacagauggccaauagguaaugauauggagaaacugaacacaagagucggcacacuggaguuuuuccaguugccucagucaguuuguugcucuagcaauuucucu

SEQ ID NO: 4108702 - RNA, 90 nt, Human
ggagacaagcuguauagauucgucuccugccugguuucaccuugaaaaaaggaaaccagauaagggaggcugaaaauaaauccuguuuuc

SEQ ID NO: 4108703 - RNA, 60 nt, Human
ggagacacaguacaguggagagagaagcuaacuucuccaaauacaauauuguuguuagcc

SEQ ID NO: 4108704 - RNA, 65 nt, Human
ggagacagaggcagccacuccuucuggcuccccggccccaggguugccugccucugcuguucucc

SEQ ID NO: 4108705 - RNA, 72 nt, Human
ggagacagaggguaugguggugccacucccuucuguguagaagcuggaguaggaccaugcuugaugaacucc

SEQ ID NO: 4108706 - RNA, 59 nt, Human
ggagacaggccaguuuugauuuaagcccuuacugcaaggcuugggugaauugccuuucc

SEQ ID NO: 4108707 - RNA, 61 nt, Human
ggagacagugacuuagagacugaggcaagagugccguggucaaucaugggucauugucuuc

SEQ ID NO: 4108708 - RNA, 75 nt, Human
ggagacaucuuagcauucugccuccuauaucaacuaucuuauuagaggugaggacaaagaagcccagaagucuuc

SEQ ID NO: 4108709 - RNA, 56 nt, Human
ggagaccacaggaugaccuggagccaaagaagaagggcccaggucccagggucucu

SEQ ID NO: 4108710 - RNA, 66 nt, Human
ggagacccagcucagggaggcaguuggcagugcaguggaugcugcuccgucugagcucugguugcc

SEQ ID NO: 4108711 - RNA, 62 nt, Human
ggagaccgugccuuagugguguaccaggaggugcaaacaauuuccuauaaaguuaugguucc

SEQ ID NO: 4108712 - RNA, 58 nt, Human
ggagaccuuaaggugcuuccuauaagucuggcuuuugaggaaauacucuaaggucucc

SEQ ID NO: 4108713 - RNA, 72 nt, Human
ggagaccuuaggaacagccucaaauuaguaucauucuaacugugcaaccuugggcaaaucacuaacgucucc

SEQ ID NO: 4108714 - RNA, 58 nt, Human
ggagacguucccagugaucccuguugaacuugaaugcggaacauuguuaauagucucu

SEQ ID NO: 4108715 - RNA, 89 nt, Human
ggagacucacuugaacccugggaggcggagguugcagugaguggagauugcgccacugcacuccagccugggugacagagugagacucc

SEQ ID NO: 4108716 - RNA, 57 nt, Human
ggagacugaaugaugcugcuuguuuucuugauuaaauaguguuugcucacagucucc

SEQ ID NO: 4108717 - RNA, 102 nt, Human
ggagacugaguaaaggaagaggaagaaagcaggcaugaguguugaaguucgguuugacucaugucauguguucuuuacguuccuuuugaauauauuaaaucc

SEQ ID NO: 4108718 - RNA, 98 nt, Human
ggagacugauuuucuccauuguaaauucuguggaaguucuggagaauaauuucaucacuaccacccagcaguaugcaaucuagaaauuucagcuuucc

SEQ ID NO: 4108719 - RNA, 108 nt, Human
ggagacuucugacuaaggaaggugagaguaauugagauuuguaugaaggguagaacuuucauagacccagaacucauuaacuucacauaucucagaguagaagcaucc

SEQ ID NO: 4108720 - RNA, 104 nt, Human
ggaacaggcauuggcguguaccugacuucagcuguggcaccaccccccagcaauggugugguggcaucagugaaguacaccguggucacccccaugcugaaccc

SEQ ID NO: 4108721 - RNA, 59 nt, Human
ggaacagggauuuggccugguuuuuucugugaacuggggcuaggcccaguuucuguucu

SEQ ID NO: 4108722 - RNA, 104 nt, Human
ggaacauggaucgguaccugcacauaguaaguacucaaucaauuuuuguugaauaaaugaguugaaugcucacucugugccagguacagugaccagugauuucc

SEQ ID NO: 4108723 - RNA, 58 nt, Human
ggaacauguagagggccuguagguuaucacccugcuuugccaguuaauacuguguucc

SEQ ID NO: 4108724 - RNA, 97 nt, Human
ggaacauguauuaccucugggcagaagcagugcaaaguccccagagagcccucuagcucacugcugcugcuauagaggucuagaaaucucauguucu

SEQ ID NO: 4108725 - RNA, 57 nt, Human
ggaacauuuccuggcagagagggcauuucuccccuccccucucccagagcuuguucc

SEQ ID NO: 4108726 - RNA, 69 nt, Human
ggaaccagaugcuaaacaaaggacuuuguaccccacaguuuuaaacagagauccuaugaagcaucuucc

SEQ ID NO: 4108727 - RNA, 69 nt, Human
ggaaccaugcacuuaccugaaauucaagucuuugacggaaaacuugguuucaaugaugcccgugguuuu

SEQ ID NO: 4108728 - RNA, 68 nt, Human
ggaaccauuuauguagcuuaacauuccccaauguguggaggccugugagcccuugcauguacuguucc

SEQ ID NO: 4108729 - RNA, 55 nt, Human
ggaacccaggucucucugacuccaaacccauguucuuuucaggauccaggguucu

SEQ ID NO: 4108730 - RNA, 70 nt, Human
ggaacccuuacgcauugcuggugggaaugcagaauagugcagccucuguagaaagcaguguguugguucc

SEQ ID NO: 4108731 - RNA, 74 nt, Human
ggaaccgauaccuucugcaagagcaucaguugugaaauggccuagguacaaggauguucuuagaaucagguuuc

SEQ ID NO: 4108732 - RNA, 80 nt, Human
ggaaccuucugccuuuuaaagccaguguuauuuuggucucuguuaaaguagcuaaaccaguaugugaaggcagggguucu

SEQ ID NO: 4108733 - RNA, 72 nt, Human
ggaaccuugagaggaacguggucaugcaaccugaguccgguggcaugcaggcgcaacuucuacaaguuuucc

SEQ ID NO: 4108734 - RNA, 77 nt, Human
ggaacgcauucacccgggugugcacgugcgacgggggcuugggugugcauguggaccccuggugccuccguggagcc

SEQ ID NO: 4108735 - RNA, 77 nt, Human
ggaacggcagccuggcgggggccgcgcgggggaagcgcgccgcuucuuguaaacgguuccccgaagggcgcugggcc

SEQ ID NO: 4108736 - RNA, 57 nt, Human
ggaacgguccgacuccaugggcuccaucugccuaagauuggugugcacugugcuucc

SEQ ID NO: 4108737 - RNA, 72 nt, Human
ggaacuaaggguugcaaggucagaggaauaaagggggcuuuguaauaccugagauuuaacccuucuuauucc

SEQ ID NO: 4108738 - RNA, 58 nt, Human
ggaacuacaguaagaauugauguucagaauaaugacauuaagaugugcuguaggauuc

SEQ ID NO: 4108739 - RNA, 62 nt, Human
ggaacuacaguauguccaaagaaugugaaauauauuuguaauaaaagaccuacuguauuucc

SEQ ID NO: 4108740 - RNA, 57 nt, Human
ggaacucagacuugcuuuuuauggaauuaaucuuaaauuccucagaguuuugguucc

SEQ ID NO: 4108741 - RNA, 73 nt, Human
ggaacucuguggaaguucacguugcauugcauaguaauaaauguuaaugaacuccgaacauuuacauagcacc

SEQ ID NO: 4108742 - RNA, 60 nt, Human
ggaacugcuuguaaauaauguugauuaauuugcaaucagcacuuuuuaaagcagcauucc

SEQ ID NO: 4108743 - RNA, 71 nt, Human
ggaacugggguuauaucaggacgcuauguugcaaccuuauaaugacauggccuccccuaacagccucuucc

SEQ ID NO: 4108744 - RNA, 82 nt, Human
ggaacuguggugcauucaucuuccuccaugcagauuaaauagcagagaaagcugcagagagagauaagaaugaagcagcccc

SEQ ID NO: 4108745 - RNA, 90 nt, Human
ggaacuucuguuuucaaagcugcuacuuaguguccauacagucccaggcuggagagcacugguagcaguuaaguuaggaaaagagguucu

SEQ ID NO: 4108746 - RNA, 91 nt, Human
ggaacuuguaaaaucccuuaccuuugaucaauuauaguuacgugucuaaugauacauagcaaggaaaugacagagaagagauucaaguuuc

SEQ ID NO: 4108747 - RNA, 61 nt, Human
gcuuuauggauuguaaacugcauaggaaauucuauguuugaagaguuugagauccuagggc

SEQ ID NO: 4108748 - RNA, 87 nt, Human
gcuuucacucuucugcuuucgagccagcacuuuuucucugggcacagcacugcugggagguuguccuggcagcagucuugaguaagc

SEQ ID NO: 4108749 - RNA, 72 nt, Human
gcuuucacuggaggucaguggagcacugggguugcaaugauaggacagugcccugggccuuccaggacaagc

SEQ ID NO: 4108750 - RNA, 96 nt, Human
gcuuucagaaauaagccuuucuuugaaaaucagagaauauauuuagaagauuauauuguuuuccuuugaggaucaaggaaguuuuucccuguaggc

SEQ ID NO: 4108751 - RNA, 129 nt, Human
gcuuucauuaagaaguaaucagaggaagaacagccugcucugagguugaacuuugcaaagcugggaauguuccuucuuugaaggagaucuuaguuuaggcauucauuuuuauuuuauuuuuuauagagu

SEQ ID NO: 4108752 - RNA, 57 nt, Human
gcuuucauugcagagucugugugcugaccuccggcagggccaucugcaauggcgagu

SEQ ID NO: 4108753 - RNA, 127 nt, Human
gcuuuccaaggaggcaguuuucaggccugaaggaggucccuguggcaaucagcacuccucuuuccugggaugugcagugugaccagggcugccucuuacucccucuggcauauccuucugggaaagc

SEQ ID NO: 4108754 - RNA, 59 nt, Human
gcuuucccgccaagugcagccggaggacagacagccaugcguguccuuggcgggagagc

SEQ ID NO: 4108755 - RNA, 64 nt, Human
gcuuucccuacagacuuuccuguucaauuaacaccugucacugccaggcucuguaggagagggc

SEQ ID NO: 4108756 - RNA, 79 nt, Human
gcuuucccuauucaaggcagcuucaugugacuguggacacuguacgccauccucaucaaagcgcuuggaguaggggugc

SEQ ID NO: 4108757 - RNA, 97 nt, Human
gcuuuccuaccggcaccgccucugcuccugcccacagccagcccugagaacuagcucugccuggcauggagaagagaaggucuggccguaggguggc

SEQ ID NO: 4108758 - RNA, 75 nt, Human
gcuuuccugcccugucuaagcugucaguauagccuauaccuaugguuuugcugacagucaagauagcauauuagc

SEQ ID NO: 4108759 - RNA, 71 nt, Human
gcuuucuacauccuaaaugaaggcuaguuauagaacuuuuuugacuaucagucauauugauguagagcagc

SEQ ID NO: 4108760 - RNA, 68 nt, Human
gcuuucucuuacccaaggaucuggagggccaucugcuaggcuggacaguggcuugggaagcagaaggu

SEQ ID NO: 4108761 - RNA, 75 nt, Human
gcuuucucuuccagucuguaggacuaggccuccaacagggcccugggauuacaaauugaagacucaacagagagc

SEQ ID NO: 4108762 - RNA, 58 nt, Human
gcuuucuggcuuauauucagcagagugcauaccacacugugaaugcuaguaagagugc

SEQ ID NO: 4108763 - RNA, 65 nt, Human
gcuuucuuccagugugcagagugacccuggugcaucuccgcagggggcucagugacugaaguggc

SEQ ID NO: 4108764 - RNA, 79 nt, Human
gcuuugaauagauuucacaugcugcucuauuauugacuuuauucaggaaauggaguucuugcaguggcacagucagagc

SEQ ID NO: 4108765 - RNA, 67 nt, Human
gcuuugauuuggcuaacugcaaaaaguacagguuuaaacuggacuugccuuuaguuaaaauaaaggc

SEQ ID NO: 4108766 - RNA, 73 nt, Human
gcuuugcaagauauguguuguuagcucucucuucacagacgagguaucacauugcaucucaucuggcaggagc

SEQ ID NO: 4108767 - RNA, 80 nt, Human
gcuuugcagagggggugggagcuguguauggcauguuugauggagaccgaaaugaggagcucccgcgccugcugcagugu

SEQ ID NO: 4108768 - RNA, 67 nt, Human
gcuuugccacauucuucacauuuguaggguuucucuccacuauaaauucucugauguauaguaaggu

SEQ ID NO: 4108769 - RNA, 60 nt, Human
gcuuugccugccauauggggucuguuacauaacuuaacucugcuauugcagugcaaaagc

SEQ ID NO: 4108770 - RNA, 65 nt, Human
gcuuugcugaggccaggccccaccggagugaggacacuacuggcauggguggcccucggcccggc

SEQ ID NO: 4108771 - RNA, 58 nt, Human
gcuuugcugaggucugaggauuggcucagccaagggacccucaagccugagcugaagc

SEQ ID NO: 4108772 - RNA, 79 nt, Human
gcuuuggaagacuacauaugccacaugaagaauacauuaguggaaauugacuucuguguuaaaugagucuuuuaaaagu

SEQ ID NO: 4108773 - RNA, 87 nt, Human
gcuuuggaauaguuugaauuuacagccuugaaaacagcagauguacaaauagguguaauugucuuuuaaugcugcuauucccaaagc

SEQ ID NO: 4108774 - RNA, 95 nt, Human
gcuuuggacucacacugaaacacuggcuaguacugggucuugaggcuauuggccuuagacuggagcuaugccgucagcgcuugugagcccccagc

SEQ ID NO: 4108775 - RNA, 82 nt, Human
gcuuuggaguguccauguaucgguuagcuauugcugcguauuuguugcacagcaauagcuaacugauacauggacacaaagc

SEQ ID NO: 4108776 - RNA, 75 nt, Human
gcuuuggcuguuagauuuggcuguaguaacuggaucaggaacccuguauuagaguuaguuagaucaagucaaggu

SEQ ID NO: 4108777 - RNA, 61 nt, Human
gcuuugggaaauucaucuucauaaagcuugauuuuuaauugaagcaaauuuuucucagagu

SEQ ID NO: 4108778 - RNA, 101 nt, Human
gcuuugggagguuuuguucaugcugugugguuagaacuguuucuauauugaucuuuuuuucagcagugcuacaccucauacagccuaaacaccacuaaagu

SEQ ID NO: 4108779 - RNA, 58 nt, Human
gcuuugguauuugaaaugugcuagcuacuuacugcugagcaccaguuuuaugccaggc

SEQ ID NO: 4108780 - RNA, 72 nt, Human
gcuuuguaucuccaugucuguaacacaugacuagaaugacuucuugucagugucuuaacagagauuagaagc

SEQ ID NO: 4108781 - RNA, 72 nt, Human
gcuuuguggucuuggaagaaguugcuaccaguaugaggagagacaaucaguuuccuccaggauccagagagc

SEQ ID NO: 4108782 - RNA, 68 nt, Human
gcuuuguugcccaggcugguccugaacuccugggcuccagugaucuucccgccugggccuccaaaagu

SEQ ID NO: 4108783 - RNA, 108 nt, Human
gcuuuguuuuuaguauuugguaugaaauuggcaauagagaauaaauuguaugcacuugcauuaucucuucuauaugcuagcuuucuguugagguuugaagacuuuagc

SEQ ID NO: 4108784 - RNA, 68 nt, Human
gcuuuuagagagagagcugggcacucuguggaguuucuuuauaugaccugaggccuuacucuaguggc

SEQ ID NO: 4108785 - RNA, 71 nt, Human
gcuuuuaggaaaaugcaaaccuaccuacauacauacaaguguguguguuuauaguguaucuuccagauugc

SEQ ID NO: 4108786 - RNA, 80 nt, Human
gcuuuuauuaagcacuuucugugagguaaagcacagaaauagauucguauuuaaguguguauuaucucauuaaugaaagc

SEQ ID NO: 4108787 - RNA, 120 nt, Human
gcuuuuccuuuuccuuuuaaugaauguucauacauaagcaaaggauuuugaucuuuugaguagccacuuuagagaauguucuuugcaauguacauacaguuuuggaaagacuagcaaagc

SEQ ID NO: 4108788 - RNA, 96 nt, Human
gcuuuucuugauuguaacuuucagauaaaaauuccaggcagaaaugugagugauuccuauuuacaugcagucggaaugaaagcuacuuaggaaagc

SEQ ID NO: 4108789 - RNA, 58 nt, Human
gcuuuugaugaaaggcagccauuuuguaagcaagacauugcugcuuuuaauuguccgc

SEQ ID NO: 4108790 - RNA, 130 nt, Human
gcuuuugaugcacuugauuuccuuucaaggucucauuuucauaugucauuuuagggauaggaaaaauaauugugauuauggcaauuguaaauggaaagaaauggaaggaaaaaaagacuguauuaauacc

SEQ ID NO: 4108791 - RNA, 70 nt, Human
gcuuuugauggccugagggauucugcuugccaccugcauggcaggucagaagugccagggaauuaaaggc

SEQ ID NO: 4108792 - RNA, 66 nt, Human
gcuuuugcaccugucccucuuuuuuguuacuguagugacauguccugagaagauggcugcagaugu

SEQ ID NO: 4108793 - RNA, 62 nt, Human
gcuuuuggaaugaggaacauccagcauuuuccucucuguuagagauucagcaugccaaaagu

SEQ ID NO: 4108794 - RNA, 78 nt, Human
ggaaggggcaugauauaaaguaguagauaagcagcuucacgcuuucuccacuauauuccuacuuucuaucccuuuucc

SEQ ID NO: 4108795 - RNA, 57 nt, Human
ggaaggggggcacgcugaagagcucacgcacacggaucuccagggugcccuuguucu

SEQ ID NO: 4108796 - RNA, 89 nt, Human
ggaagguacugggugaggggagagugaaagaaagaaaagguuagaauuuuauuuguuuauccuuucuccaucuuaccuacuuuucuucc

SEQ ID NO: 4108797 - RNA, 80 nt, Human
ggaagguagauaugguucaguuccucguguuuuuuucauguagacagaaacagagaaauauuggcuauaugaucucaacc

SEQ ID NO: 4108798 - RNA, 60 nt, Human
ggaagguauuucuccuugaguguugggccuauugugccaagcucaguggagaaaugcacc

SEQ ID NO: 4108799 - RNA, 56 nt, Human
ggaaggucagagauggggagaugcccggcgugcccuuccuccuuucucugccuucc

SEQ ID NO: 4108800 - RNA, 72 nt, Human
ggaagguccugggcaggaaugguuaaucuaaaguggugggccaccuuggccuugcuauuucuccaaccuucu

SEQ ID NO: 4108801 - RNA, 123 nt, Human
ggaaggugguaccaucuuuccccaguggcaggguggaagauggcacuaucuuucugugguggcgggguggaagguuuuaccaucuuuccccaguggcaggguggaagguggcaccaucucucc

SEQ ID NO: 4108802 - RNA, 83 nt, Human
ggaagguucuagacccagccaagcagcaggggccugagcuguagcuugagucacagccuugccuuggucacacuagccuuucc

SEQ ID NO: 4108803 - RNA, 77 nt, Human
ggaaguagagauucauuaggagacauucagucagcuacuguuggcugaccucauagauguagucuccuacaacuucc

SEQ ID NO: 4108804 - RNA, 63 nt, Human
ggaaguagcagagcugggauugaaucugggcugccugacucuaaaccccacucugcugguucc

SEQ ID NO: 4108805 - RNA, 97 nt, Human
ggaagucagagagguccgagccugagcuagggcuggugaggagcgugcucagaucugcuccccgacagccaggcucuccucguacagcucacgcucc

SEQ ID NO: 4108806 - RNA, 75 nt, Human
ggaaguccagaguauucaaguaacuugacugagaucacacagcuaaguuugugguuauacuugauugagauuuuc

SEQ ID NO: 4108807 - RNA, 98 nt, Human
ggaaguccucuuggcguuggucaucucaucuacuugccacaggcagggcuguaccuccuuuggcccugagagaugauuaugguaaguggcccacuucc

SEQ ID NO: 4108808 - RNA, 130 nt, Human
ggaagucgagucuucuuuccauaaugucuauagugcugaacaauaagauugguucuaaacugaaguuagaaugucuaaguguucagcccaagcguauuagaaaaauuacuuugguagaacacuuacuuuc

SEQ ID NO: 4108809 - RNA, 64 nt, Human
ggaagugaaauaugcccauugcugucuucacccagagaaaauagauugcucauauauuacuucu

SEQ ID NO: 4108810 - RNA, 71 nt, Human
ggaagugaaauugagguaaauucuggcccaaacagcagggggcuguuugcuuccuacuucuuuuccuuucc

SEQ ID NO: 4108811 - RNA, 122 nt, Human
ggaagugcuggcgcccacuccuggaaaggcugagacagcacaggucccaaagcccagaggcugggcgugcauuacucagcaaauccuuacagagcccccggcgucacaggcauucacagucc

SEQ ID NO: 4108812 - RNA, 61 nt, Human
ggaaguggaaguaguugaugacaaaggaaacuuaauuacugcuucuuuuccuuccacuucc

SEQ ID NO: 4108813 - RNA, 64 nt, Human
ggaagugguagagccaugagugacucugcccaggugguuucuacccugugugcuuuaccacucu

SEQ ID NO: 4108814 - RNA, 72 nt, Human
ggaaguucucagcuaggugaugugugaagacgguaagggagugagccacacagaucccugaggagagcaucc

SEQ ID NO: 4108815 - RNA, 57 nt, Human
ggaaguuugggagcugguaaucaacauggaaacauguaucaagccaucaaauauucc

SEQ ID NO: 4108816 - RNA, 126 nt, Human
ggaaguuugguggugguggccagggcugugggcgggucgggggaagggggucuaaaugcuugcuggaugaguggauggaugugucgcccuggcucuccagggggcccuagacacacacuugcuuuc

SEQ ID NO: 4108817 - RNA, 89 nt, Human
ggaauacuuucauugaagauucugacaucagaaaccaugacggcaagggucaaaugccuucugaugucauucugggaugaauaaauucu

SEQ ID NO: 4108818 - RNA, 60 nt, Human
ggaauauugcaguauuguaaguguaggccaaguagucaacauuugugaugagcaaacucu

SEQ ID NO: 4108819 - RNA, 88 nt, Human
ggaaucaagcuguaugauuugguugcaggaagcaauugccuaaaaagcaguuauguccucagcaaaucaagagcccuugaacauuucc

SEQ ID NO: 4108820 - RNA, 65 nt, Human
ggaaucagcagaggcgauugcuaucauuuuuuauuacuguucaguguuugauuucugcuguagcc

SEQ ID NO: 4108821 - RNA, 70 nt, Human
ggaauccgugugauguggacuaggccugucucucuccauugccaguaagcucuccacauggcuuuauucc

SEQ ID NO: 4108822 - RNA, 88 nt, Human
ggaaucucaccuucucaccgaggcuggagugcaguggcacaaucuuggcucacugcaacauccaccuccugaguuuaagugauucucc

SEQ ID NO: 4108823 - RNA, 95 nt, Human
ggaaucucacucugucgcccagcuggagugcuggagugcaguggugcgaucucagcucacugcaaccucugccuccugggcacaagugagucucc

SEQ ID NO: 4108824 - RNA, 82 nt, Human
ggaaucucacugucgcccaggcuggaagugcaguggcaugaucuuggcucacugcaaacgccuccuggguucaggugauucu

SEQ ID NO: 4108825 - RNA, 58 nt, Human
ggaaucugccagcuucccacuaugggaaaaucugccacuguggaagcuggcagauuuu

SEQ ID NO: 4108826 - RNA, 78 nt, Human
ggaaucugguggccuccucgggcugacccuggggauggacgcccagcagcagccccaggaagguucugagucagaucc

SEQ ID NO: 4108827 - RNA, 65 nt, Human
ggaaucugugcuuuucacaagcuuugcugaugguccuuaugcagcagauuugggaaacacugucc

SEQ ID NO: 4108828 - RNA, 73 nt, Human
ggaaucuuugaaggauuuuaagggggcugugauuauaguuagauuugcauuuuaaaagcuuuuggagaauucc

SEQ ID NO: 4108829 - RNA, 66 nt, Human
ggaaugagucugugggcugaacgaaucgaucugucacagagcaacagauugcagcuauagacugcc

SEQ ID NO: 4108830 - RNA, 77 nt, Human
ggaaugagugggauuucaggugucaaggauaggcugaggaaggaauuccacauccuuuuaugauacccacucaaucu

SEQ ID NO: 4108831 - RNA, 98 nt, Human
ggaaugaguuugcaguuagaaaaccaguguugugacuaugaaauuacaauauuucaguuuuauaacuuuggccucauaaucacugcaagcauuuuucc

SEQ ID NO: 4108832 - RNA, 67 nt, Human
ggaaugauaugcagauugaccuuacagucauuuauaggcugugauucucaaauugugauaucgaacc

SEQ ID NO: 4108833 - RNA, 57 nt, Human
ggaaugcacaauguuuugauuugagauaguuuuauucucuagucauaaugugcuucu

SEQ ID NO: 4108834 - RNA, 71 nt, Human
ggaggggacacgcugugccacaguucacaugccacaagccagugcugccuugggacagugauggcuccucc

SEQ ID NO: 4108835 - RNA, 63 nt, Human
ggaggggagauguuugggcucaugaaagccaucgagucuucuaagauuucuaugcaccccucc

SEQ ID NO: 4108836 - RNA, 62 nt, Human
ggaggggagauugcuggauuccaggugggcacauccauuuggccucaugaauuucuugcucc

SEQ ID NO: 4108837 - RNA, 80 nt, Human
ggaggggaggacucucugagaagccuugauggggauguggacuccuccuccauacuugcuucacaagagacucugccucc

SEQ ID NO: 4108838 - RNA, 63 nt, Human
ggaggggcaagaaguuggccucucgguugacauuccagagaaauggccagacuugccccuacc

SEQ ID NO: 4108839 - RNA, 57 nt, Human
ggaggggcagagagaaggaagcuugcacccacugugcuuuugaauuucugucccuuu

SEQ ID NO: 4108840 - RNA, 73 nt, Human
ggaggggcaggguggcagaggcucagaacagaaaugguucaaugacaaauggucugccugucccugugccucc

SEQ ID NO: 4108841 - RNA, 62 nt, Human
ggaggggcggcuccgcgaugcucuccccaccgcucccggcggcccggcuggagcagcucccc

SEQ ID NO: 4108842 - RNA, 117 nt, Human
ggaggggcugcuucugcugguagacaaaguucagggagauuuggggacucaaaguucucagcuuugucuugucugcccaauguccuuaucuccugucuuacagcucugcuucuuucc

SEQ ID NO: 4108843 - RNA, 57 nt, Human
ggagggggaaacuuuggcugccaauuucagggcagccagccagaagauucucucucu

SEQ ID NO: 4108844 - RNA, 55 nt, Human
ggagggggaauucagccccagccugugugacucaaaguuccuguuucccaccucu

SEQ ID NO: 4108845 - RNA, 113 nt, Human
ggagggggcggcuccgaccugucccuucucaucacaucaguuacuuuccauuagcgggaggggaaaucagcagaugcuggugaggggggucccggcgggaagcagaccccuuc

SEQ ID NO: 4108846 - RNA, 82 nt, Human
ggagggggcugggggucaggaugaggccuugggcuuggcccaggcucuucccucuggccaagacuuguccagccccaccucc

SEQ ID NO: 4108847 - RNA, 81 nt, Human
ggagggggugagguggaggaaugacuaacuguuaggauugaauaacaacggaguucccuccacaacuucucacacacuucc

SEQ ID NO: 4108848 - RNA, 59 nt, Human
ggaggggugagaauggcugccuguaaccccaacccaucuaggcagccccucuuccuucc

SEQ ID NO: 4108849 - RNA, 85 nt, Human
ggagggguuaaauuggucuagaauucagggugacaggggcacauggagcaacuuucugaauucugacaauuugaauauagcuuuc

SEQ ID NO: 4108850 - RNA, 70 nt, Human
ggagggguuugcagggguggaggcuguccugugcauuacaguauauuuagcaacauccuuggccucugcc

SEQ ID NO: 4108851 - RNA, 76 nt, Human
ggaggguccccagcagcaugaagguccagauucccccaauaguaacuccuuagcacaugcucguuggguuucuucc

SEQ ID NO: 4108852 - RNA, 62 nt, Human
ggagggucccugcucagggccaggacccgugcauuuaugggggcuggaaggagggacuguuc

SEQ ID NO: 4108853 - RNA, 92 nt, Human
ggagggugaagaaaaggccgucuggcggugacugagcuguguuugugcccccacacgccagccacguuagacuggcccauaccuuaaccucc

SEQ ID NO: 4108854 - RNA, 69 nt, Human
ggagggugggcaaggucccugccagcucugucucugggaccagugggcaggggccucugccucaccccc

SEQ ID NO: 4108855 - RNA, 71 nt, Human
ggagggugguggggacgggauggcucacugggcagcuaacccguguaggccacuuccuccucgucacugcc

SEQ ID NO: 4108856 - RNA, 60 nt, Human
ggagggugugccugccggguggccaggcuaucugccuuccuggcagcagcacaugccuuc

SEQ ID NO: 4108857 - RNA, 61 nt, Human
ggaggguuagcuguuacugguuacacggaagcccguguccagggggcuuaccuggaggucc

SEQ ID NO: 4108858 - RNA, 76 nt, Human
ggaggguugguacaaaguuagauuuaacuugaguuaaaauaacaaaagaaaucugauauuuguuucacaacuguuu

SEQ ID NO: 4108859 - RNA, 70 nt, Human
ggagguaaaggaauaucaguuuggaggcaauguauuaggucacugucaaucagaacaauuccaugccucc

SEQ ID NO: 4108860 - RNA, 59 nt, Human
ggagguaagaggcccugggccgaggugcagugacccugcaggccagcccuccaaccucc

SEQ ID NO: 4108861 - RNA, 112 nt, Human
ggagguaagggguucggggacccgggcugggcuccaggaguggccuggacaccuccuucggggccccaguucacuccuggccgaguugcauccuugagcccacgucaccccc

SEQ ID NO: 4108862 - RNA, 68 nt, Human
ggagguagaaaacacauaugcagguaugaacaaucaaagaaaacuugcacuuuguggauuguauuucc

SEQ ID NO: 4108863 - RNA, 64 nt, Human
ggagguauggcaagaugacauguucucccugcugcuuggugggggaaauguggucuuuacuucu

SEQ ID NO: 4108864 - RNA, 65 nt, Human
ggagguauguaugcuacauucuuuaguuaauuucaugugagggaucaucagguauauauauuucc

SEQ ID NO: 4108865 - RNA, 74 nt, Human
ggagguauuggugcuucucaagcucgcacauugaggaagacccuucucuugugaggagaggcccagcucccucc

SEQ ID NO: 4108866 - RNA, 68 nt, Human
ggaggucccaggccuggcagcaucagggcccaccacuaggcggggcugcugccugggccucggacucc

SEQ ID NO: 4108867 - RNA, 58 nt, Human
ggaggucucacuuuauugcccaggcuggucugaaacuccugggaucaagugauccucc

SEQ ID NO: 4108868 - RNA, 91 nt, Human
ggacagaacguguacuacaggggaauauuugucuugaguugucuuacaaacuuacaagauugauuugcuuggccacugacaguuuugaucc

SEQ ID NO: 4108869 - RNA, 64 nt, Human
ggacagagaugagucaacacagcugcugcccccaggucugggcaaagcuggcucuucuuugucu

SEQ ID NO: 4108870 - RNA, 55 nt, Human
ggacagagcguggggcaggggacccacaugcuuggccuccagucccagcucugcc

SEQ ID NO: 4108871 - RNA, 82 nt, Human
ggacagcaauagcuuugacaguugcaggcagucuugccacauuacaucccucuguuugcaugcuagucagugauuccuguuc

SEQ ID NO: 4108872 - RNA, 60 nt, Human
ggacagcauaucagcagggcagggucaggucccugcuacucuggcuguaugacccugacc

SEQ ID NO: 4108873 - RNA, 70 nt, Human
ggacagcccaaggcaugggcacuuucucaugguugcagcacaggguggugugugcuuagggcuagggucc

SEQ ID NO: 4108874 - RNA, 69 nt, Human
ggacagcugcauccucagacacaaaaccccugacggcccguguguaccacagagggugacgguaugucc

SEQ ID NO: 4108875 - RNA, 75 nt, Human
ggacagcugguagaguguuuaggguccugagauaauaaggaauccaggcagccuuuagacagucugcuguugucc

SEQ ID NO: 4108876 - RNA, 76 nt, Human
ggacagcuguggaagaggcucaggcaggaauggcggauccacugucggccucacugucggccucgcccgggaaucc

SEQ ID NO: 4108877 - RNA, 59 nt, Human
ggacaggagugaggcggguuccccccaccuuuuuccggagagaucccgcuuaacuuccc

SEQ ID NO: 4108878 - RNA, 60 nt, Human
ggacaggcccccucaggacugauuucuuggcagucuauccaaguccuugggugucugcac

SEQ ID NO: 4108879 - RNA, 55 nt, Human
ggacaggccuggcacaguacugauuucccuuuaaacagccugggcagccuugucu

SEQ ID NO: 4108880 - RNA, 62 nt, Human
ggacagggcucuuggcacuccuugccucucagacuccauccaggaagccagagaccacugcc

SEQ ID NO: 4108881 - RNA, 80 nt, Human
ggacagugacucaugaugagauuagccgcaauccugacuugauccagagucaccacugugauagucgauugucacuuucc

SEQ ID NO: 4108882 - RNA, 92 nt, Human
ggacagugguauuccuuuuagcugacauucuuggagucagccaaccaaaucugggcuagcagagagguuucagcuaauguaccaauuugucc

SEQ ID NO: 4108883 - RNA, 62 nt, Human
ggacagugguuuaggucaaggggaggcagcagaugcuggaaccuggccugagcuaccacucc

SEQ ID NO: 4108884 - RNA, 109 nt, Human
ggacaguguguggcuuccagagucuagaaacaagguagagcucccauaagguuucaugggagcucacuuucccugcuuugugucuguaacucugaggcaugggcuguuc

SEQ ID NO: 4108885 - RNA, 103 nt, Human
ggacauggagaagcugagcuguggagccagcaggaccuuuucuccuggaagagaaaaaugaaacggcugguuggcugcgaguuguucagcugaguccuugucc

SEQ ID NO: 4108886 - RNA, 97 nt, Human
ggacauggggcuguagcuuguuuggaugaagagcaugggcucugcaguaaugugggguugagucuucugcucugucacuaacuaggggcccauguuc

SEQ ID NO: 4108887 - RNA, 55 nt, Human
ggacaugguacugcugagguuggccugauguuggaguaaccuggagaccaagucc

SEQ ID NO: 4108888 - RNA, 119 nt, Human
ggacauucccaguaaguaaucccggggaaguauuauagcauauuagccccuccacagagaugggcuggcauugcucuauugccuccuccggggcagagucccuucuggcauaugugucc

SEQ ID NO: 4108889 - RNA, 74 nt, Human
ggacauuuauguauauauacgugcauauauauauguauguauguaugcauguauguaucgcuagaggaaugugc

SEQ ID NO: 4108890 - RNA, 62 nt, Human
ggacauuuccaggaggagguacuagagggaagcccuuuacaaaguucuucaugggaguaccc

SEQ ID NO: 4108891 - RNA, 80 nt, Human
ggacauuuuacaacucuggaugcacauuuugagguaacucaacaguguugcaaucugaaaaacuauuuuguaucauguuc

SEQ ID NO: 4108892 - RNA, 76 nt, Human
ggaccaagcagcagccaagucuccaggagcuccagugacucagaggccuggagucucuucuguagcuacaggguuc

SEQ ID NO: 4108893 - RNA, 84 nt, Human
ggaccaagcagcagcucccagagcgguggcccagcaaacacgacuugacucgaggccaaggcucuugagggcugagcagugucc

SEQ ID NO: 4108894 - RNA, 100 nt, Human
ggaccagauacuuuuuaaacaugcuaauucccaggccccaagccagacauucugauugaauugggcaauuaggcagaguggaaacuagaugucuguguuu

SEQ ID NO: 4108895 - RNA, 124 nt, Human
ggaccagccucagcaaaaacaaggagaaacgggcuuuuuaaauauauauauauauauauguauguauauguauguguguguguauguauguauguauuuggggcaauauuguugaaguagggcc

SEQ ID NO: 4108896 - RNA, 66 nt, Human
ggaccagggggugcaggcccugugaccuguagacagaguccucugggcagcugccccaccuggacc

SEQ ID NO: 4108897 - RNA, 61 nt, Human
ggaccaucucuagccagagcuuuccaccucuauuacugauagcuccaggcuccugggguuc

SEQ ID NO: 4108898 - RNA, 77 nt, Human
gcuggaacagcucaaaauugaauaauuaauuacacucagcuucaaucgcagugacuaauugaucaggggcugccagc

SEQ ID NO: 4108899 - RNA, 63 nt, Human
gcuggaaggcgcagugaugaugcucgucaucugaccuucacgagccacugccagccuccaugu

SEQ ID NO: 4108900 - RNA, 73 nt, Human
gcuggaauccuggcagucuugguucaucauggcucuaccggagcuugaggucugagacugugcaggguuacgc

SEQ ID NO: 4108901 - RNA, 79 nt, Human
gcuggaauuauuuacugauaaggauucguuauuuaauaaaagaaaucaccaggauuccuaucaguaguguguucacagu

SEQ ID NO: 4108902 - RNA, 66 nt, Human
gcuggaauugcauaauauguccuucuaguuuuaaauauguaggacaaauaagcaauaauauucagc

SEQ ID NO: 4108903 - RNA, 75 nt, Human
gcuggacagggagcagggccacuucuguaccucugcacacuucuagaaugcggacucauccugcauccauccagu

SEQ ID NO: 4108904 - RNA, 103 nt, Human
gcuggaccauucacgcccucugugaaguuuagggaagucugagcgcugccuucccagccagccacuucccagacuggccagcagagggcacccagcugccagu

SEQ ID NO: 4108905 - RNA, 63 nt, Human
gcuggacugcguuacggacaugggcuuccuucggguggcaucaguuuggagaggcgguuuggc

SEQ ID NO: 4108906 - RNA, 58 nt, Human
gcuggagaacccaggaggaagaggaaaaaaguuuuuuccuccucuacacuccccaugc

SEQ ID NO: 4108907 - RNA, 64 nt, Human
gcuggagagucagacauggguuucaggccuggcccugacacuuauuagcugugugaccuugggc

SEQ ID NO: 4108908 - RNA, 76 nt, Human
gcuggagccuggucucuuucaugucagugccuccugauccauacugcuaguguauagggaccaguguucuguuagc

SEQ ID NO: 4108909 - RNA, 63 nt, Human
gcuggagggacaagguaugcauuuuuugaauaaguaauguuucauuuaguugucuccuccugu

SEQ ID NO: 4108910 - RNA, 74 nt, Human
gcuggagggaggaaguggggcagggcugcuaggauucacagcaguccauagaggcugcuuucauccacuucagc

SEQ ID NO: 4108911 - RNA, 57 nt, Human
gcuggaguuagaacuagccuggcugacuccaaguucugggcucuuucugucuccagc

SEQ ID NO: 4108912 - RNA, 77 nt, Human
gcuggaucaggauucugcgaugaggacgagcuuaucccagauaaggcaggcugccacgucgaggguccaaggccagc

SEQ ID NO: 4108913 - RNA, 57 nt, Human
gcuggaucauauggugguucuauuuuuaauuuuuugaagaaccuccauaaugacugc

SEQ ID NO: 4108914 - RNA, 59 nt, Human
gcuggaugcaagagguacauggggacuuccucacugucuccagugucucuucauugagu

SEQ ID NO: 4108915 - RNA, 122 nt, Human
gcuggaugugguggcaugcaccuguaggagucccagcuacuugggaggcugaggugggacgaucccuugagccuaggagguuggggcugcagugagccaagaucaugcuacugcacuccagc

SEQ ID NO: 4108916 - RNA, 79 nt, Human
gcuggauguuacagggcagggaaguagggguccccaaggagccccucacaaaugucuccuguccugugaaucacucagu

SEQ ID NO: 4108917 - RNA, 91 nt, Human
gcuggcacaccgcugacauuuaguaucccacugacauuagcacaccgcugacauuagcacccugauacuagaauguuaaggaugugccagc

SEQ ID NO: 4108918 - RNA, 69 nt, Human
gcuggcacuaaugccugcugcaucgcugacccacucagcuucaguguuuuggccauuagugugaucagc

SEQ ID NO: 4108919 - RNA, 62 nt, Human
gcuggcagacugggggcagaaccaaggcccaugcggggcaggaaguggcccuagacuccagc

SEQ ID NO: 4108920 - RNA, 56 nt, Human
gcuggcagacuuccucuggaacuuccucuggacaucuggagggacguccugucagc

SEQ ID NO: 4108921 - RNA, 98 nt, Human
gcuggcagauaucuggaggauucugggacuugauauuguucuguuauuuuaagguauuguaguaagccaggaaacuuccccaggcaauccaagucagc

SEQ ID NO: 4108922 - RNA, 72 nt, Human
gcuggcaggauaacuucuaagcuccuugacuucugucaccauuccuugccuuggacuuugucucuagccagc

SEQ ID NO: 4108923 - RNA, 68 nt, Human
gcuggcagucaguggaaccugcuggggguaucuuuacaccucuccaggggaacauuguuccugccacc

SEQ ID NO: 4108924 - RNA, 68 nt, Human
gcuggcaguuggcagggcugccagaaagccuuauuuuuaacuugaucuccacccuguagcuugccagc

SEQ ID NO: 4108925 - RNA, 72 nt, Human
gcuggcaguuggggcuucucucaguuucuggccacuugggcuucugcuuagagcagcucacaacauggcagc

SEQ ID NO: 4108926 - RNA, 59 nt, Human
gcuggcauuuggucuggccaaaaagccaaaauggcuuugauaguugauuaaauuccagu

SEQ ID NO: 4108927 - RNA, 59 nt, Human
gcuggcccagagcucuggccuuuagcccugggaucagagcagagguggcucugaucagc

SEQ ID NO: 4108928 - RNA, 79 nt, Human
gcuggccuuugcuccagaggucugagaggcuggcccugccucuucugcuucaggagcacuucuuugcacugaggccugc

SEQ ID NO: 4108929 - RNA, 123 nt, Human
gcuggcgaagaggauguacaggagccagaggcccaggaagagcgcggugguggcgagcuuggguccgcgcgggccgcccagcucgccgccgaugugcggccggcgccgguacagcagcacggc

SEQ ID NO: 4108930 - RNA, 118 nt, Human
gcuggcgcgcuggcaggggcagacagaucagugggccuggaggaggugcccagaugggcuggugaucauuucugcccaucuccuuuggucuacuuccaaccccccauccuuggcaagc

SEQ ID NO: 4108931 - RNA, 70 nt, Human
gcuggcucuggcuggcucggccgggagugaggagagugucucagccacugccgcucugccaggugccagc

SEQ ID NO: 4108932 - RNA, 81 nt, Human
gcuggcucuuuucugugugucccucgacaggcucuuggccucucugagaggcugggguaugcagacaagcaagaagugggc

SEQ ID NO: 4108933 - RNA, 56 nt, Human
gcuggcucuuuuugccgggcucgccuccuuucaggagccacagucagaggagccgc

SEQ ID NO: 4108934 - RNA, 78 nt, Human
gcuggcugucucuccaccucuugugugccaggcaucacuguaggcacaggaaucugugaagugcuagacaaagccugc

SEQ ID NO: 4108935 - RNA, 56 nt, Human
gcuggcuguguuccuucugccaucuuccauugauuaaagcaggccacagggccagc

SEQ ID NO: 4108936 - RNA, 55 nt, Human
gcuggcuuccuucugcagcuaguuuucucuaguuaguggcagagauggccacagc

SEQ ID NO: 4108937 - RNA, 66 nt, Human
gcuggcuugcuuucaugaagucuauagagaacccuuuucucugcugcccaugaugguauagcuggc

SEQ ID NO: 4108938 - RNA, 64 nt, Human
gcuggcuuguacugguaucggcuaaagaauucccauuggaaucagcccacaucuagucauuagc

SEQ ID NO: 4108939 - RNA, 85 nt, Human
gcuggcuugugauguuauuagauacaaaccauuuuauauaaauuuaaaaauacuauugaaguuguucucauaacguauagccagu

SEQ ID NO: 4108940 - RNA, 72 nt, Human
gcugggaagcugggccaggcagagcuccaguugccagacacuguggccgcucugguaccagcuacuccuagu

SEQ ID NO: 4108941 - RNA, 70 nt, Human
gcugggaaggacccucuggggucucagugcccuccccuggcauuugaggcagguccggguccuucaaagc

SEQ ID NO: 4108942 - RNA, 89 nt, Human
ggaguuuugcucuuguugcccaggguggagugcaguggcgugaucucagcucacugcaaccuccgccucccggguucaagccauucucc

SEQ ID NO: 4108943 - RNA, 87 nt, Human
ggauaacgcacaucugugacccagaggcugacuaacacaugccugcugauggucucauuucuagggucucaggugcuauguaaaucc

SEQ ID NO: 4108944 - RNA, 62 nt, Human
ggauaacugcaucuuuugugugaugguuuucuuuucacuguguacacaaugauugcagagcc

SEQ ID NO: 4108945 - RNA, 69 nt, Human
ggauaauccuagaauauuuguggagguucccagacugucuugggaccuagagcuauauuuuggguguuc

SEQ ID NO: 4108946 - RNA, 83 nt, Human
ggauaauggccauuggaguugcaaaagaagugccuguuuucauuauuuauacucucuggcacucccuuauggcuccuuuauuc

SEQ ID NO: 4108947 - RNA, 99 nt, Human
ggauacaaaauucagaucugcuguuucucaaaauuaaguacacccuuguuagcaugacacuuaaauuugaucaugcagucucucugauuaaagccuucc

SEQ ID NO: 4108948 - RNA, 78 nt, Human
ggauacaauaaauauuuagugcuucauguuucucauguauauuugggguaucaugaauauuuaguauuuacuugguuc

SEQ ID NO: 4108949 - RNA, 77 nt, Human
ggauacaguuguguuacaaacuguuguuucuauagauggaaguucaugaaaauaauuacuuguauuauucuguaucu

SEQ ID NO: 4108950 - RNA, 65 nt, Human
ggauacauuccacuagugacuggcgggggaaagacacauguccugccaggcacgugagaguggcc

SEQ ID NO: 4108951 - RNA, 58 nt, Human
ggauaccauugcauggguagcucugccacccuacaccugccucagugcagcuggaucu

SEQ ID NO: 4108952 - RNA, 87 nt, Human
ggauagaaugagguuugagccucuugacccagucuacugagaucugggacugcuuuggucaugaagcuacacaaaccuuucucuucc

SEQ ID NO: 4108953 - RNA, 79 nt, Human
ggauagcaacuauuuuucugcagguuguaugcucauucuuuuaggaaaucuagcaacuucuacagauauagcauuaucc

SEQ ID NO: 4108954 - RNA, 64 nt, Human
ggauagccacggucuaagcaugguuaucaauaaacagauuagauguucaaagaucgugcuaucc

SEQ ID NO: 4108955 - RNA, 91 nt, Human
ggauaggagaggagaccacaguuaagaauaguuuuuccuuugcauuauaaaggcaggaaaaaagucugugauuauaagguucucugcuucc

SEQ ID NO: 4108956 - RNA, 84 nt, Human
ggauagggaaaggcaggaagaugagcucagguaaacuccaaguuuguuuggucaaauuaucuccuccugugccucguuuuauuc

SEQ ID NO: 4108957 - RNA, 62 nt, Human
gcuguggucugugagcuccaaagucagcaaucuuugcagcagaugcuuucauggacaauggc

SEQ ID NO: 4108958 - RNA, 102 nt, Human
gcuguggugagcaggugaggcccccaggguggaugcaagcagcagauggcuucugugcugcuaugugccaccugggaauggauuagcuuugcuccugacagc

SEQ ID NO: 4108959 - RNA, 83 nt, Human
gcuguguauacauaaaaucaaauauaauaauuuucgcuggaucccaauguggagaguuuguguguguguguguguguguuugu

SEQ ID NO: 4108960 - RNA, 74 nt, Human
gcuguguauuuuaugucccuucaaauguuuacuuuugcacaaagaugaguguuuggaggacauggaagacuggc

SEQ ID NO: 4108961 - RNA, 62 nt, Human
gcugugucuuuaaguuucccauuuauaaaaugaaucauaauacgaacuuggccaggcacagu

SEQ ID NO: 4108962 - RNA, 55 nt, Human
gcugugugaccuugagccugcuacuuagguucucugaggcuaguguuacaccugc

SEQ ID NO: 4108963 - RNA, 81 nt, Human
gcugugugacuuccgaagccaggucauaagaagccuugcagcuucuugauucucagaaugcuugcucuggaagaagccagc

SEQ ID NO: 4108964 - RNA, 68 nt, Human
gcuguguuucuccaggcuuuuugugaauuguuugauguaaggcaacacuacaguuuggaaggcacugc

SEQ ID NO: 4108965 - RNA, 74 nt, Human
gcuguguuugacaacaggcucacagaauuccugaacccuugacaauggauucucacaagcccuugcgagccagc

SEQ ID NO: 4108966 - RNA, 75 nt, Human
gcuguuaaaucagugguucccagcccaggaugugcacugauacccugaugccuagagccccugaugaaugacagc

SEQ ID NO: 4108967 - RNA, 66 nt, Human
gcuguuagaauuccuaguuguacuuagugaaaagucacugcucuccaauguggaguuccuaagagc

SEQ ID NO: 4108968 - RNA, 73 nt, Human
gcuguucauauuaucgucaucaucccugucccugaaacuucaguacaagugaugugguaaaaacuagaauagu

SEQ ID NO: 4108969 - RNA, 56 nt, Human
gcuguucauuaaacuacugugugggagccccacuggagaacgucugaugaagaagc

SEQ ID NO: 4108970 - RNA, 63 nt, Human
gcuguuccugcuuagaggucgggaaguugagaccgugcugcgaucucuagaggcagaaacagu

SEQ ID NO: 4108971 - RNA, 66 nt, Human
gcuguucuauggcugaaaauagaauuuaggguugauaaugcccagauuucuaggcuaugaagcagu

SEQ ID NO: 4108972 - RNA, 58 nt, Human
gcuguucuguaaaguaaggauaaaaacaccuaucccgugacauguuuugcagaacagc

SEQ ID NO: 4108973 - RNA, 72 nt, Human
gcuguugagauucuaucucaugacuagauuaguaauaugcuauuuuagcuaagacauagauucuuguaaggc

SEQ ID NO: 4108974 - RNA, 70 nt, Human
gcuguugcauuacauuugcucagucuaguuaugucucuuauauuuugagacuuggaaauggaaugucagc

SEQ ID NO: 4108975 - RNA, 67 nt, Human
gcuguuggcgugcuacaaguccucacccaccuuccacggagaaggacuaaggcuugggcccagcagc

SEQ ID NO: 4108976 - RNA, 78 nt, Human
gcuguugucagcuauuguauuugacugucugcauggaggugcuuaugugacagaucucuauacaugaagauaauuugc

SEQ ID NO: 4108977 - RNA, 72 nt, Human
gcuguuuacaguaugagaguugaaucaaggagacagaguauugccuugcucaaucucagcugggaacuaggc

SEQ ID NO: 4108978 - RNA, 62 nt, Human
gcuguuuagcuggguaaauggagacaaaacaauguuagucuucaagaagcccaaagacuagc

SEQ ID NO: 4108979 - RNA, 55 nt, Human
gcuguuuccagacaaugucuuuuuuggaucagccagaagagaccugggagccagc

SEQ ID NO: 4108980 - RNA, 59 nt, Human
gcuguuugcccccacuccuucagugcgacagacagccucagagcugguggggagacagc

SEQ ID NO: 4108981 - RNA, 81 nt, Human
gcuguuuuagucauucauuuauuagauaguugaaugcuacccauauauaagugucaaguacaugguagugauuaaaacagu

SEQ ID NO: 4108982 - RNA, 70 nt, Human
gcuuaaagaaugaagccagguagaagagaaugcugacauuuucugauugcuuuuugguuuuccauuaagc

SEQ ID NO: 4108983 - RNA, 81 nt, Human
gcuuaagagagggugaaggauuggagggcaucuuuuauucaugguccaggguacccuguauccaucccuuauucuauaagc

SEQ ID NO: 4108984 - RNA, 76 nt, Human
gcuuaagauaacacccauuuacaugucacaccucuguaggucagaagugugggcaaaggguagcuggguucuuagc

SEQ ID NO: 4108985 - RNA, 56 nt, Human
gcuuaagauguuuguggcaauuugacauauuagcaaauuggagagaugucuuaggu

SEQ ID NO: 4108986 - RNA, 92 nt, Human
gcuuaagauuuugauuacugacacagguagaauaaaguacuauuaggagagguaaugcuuuaaauccuaguguaaaugaagacucugaaagc

SEQ ID NO: 4108987 - RNA, 92 nt, Human
gcuuaauaaaauucacauucuagggcccuacuuugcaccuguugaauugaaacuucuggggauguagccugggaauaugaauuuuaucaagc

SEQ ID NO: 4108988 - RNA, 92 nt, Human
gcuuaaugacucuuugugcaucuuggaccaucagcuccuccuggauuuucauuaaucccaggggcaauggcuuagaccacaaucauuauugc

SEQ ID NO: 4108989 - RNA, 73 nt, Human
gcuuaauuggcaguguuuuucaaugcuuccacuguaauaaacauggacaaguaaaagcacuuccccccgaggc

SEQ ID NO: 4108990 - RNA, 81 nt, Human
gcuuaauugucagaaauuauccccugaauuuaccacuuuucugagggagggugguucuuuuaguggaagaauugguuaggc

SEQ ID NO: 4108991 - RNA, 87 nt, Human
gcuuacagaggaagcccugucauucugcugccugaugaccucacggucuccuguccugcaggauggagccucagcuccuuugugggc

SEQ ID NO: 4108992 - RNA, 55 nt, Human
gcuuacaggacauuuucuugggucaauuucuguuucuaaggucugucugguaggu

SEQ ID NO: 4108993 - RNA, 76 nt, Human
gcuuacuaugugccaggcacuuugaaauuuggagcucaaugcuuuuagcuccacaaucuggugucaugguguaagc

SEQ ID NO: 4108994 - RNA, 74 nt, Human
gcuuagagcaccauuagcguugggccggugccacagagcaaauaggacugagccccaucugaggugcccagagu

SEQ ID NO: 4108995 - RNA, 74 nt, Human
gcuuagcuucucugccuggaaggagcaaggggaacucugguuccucucccaccucccuccagguuggcuguugc

SEQ ID NO: 4108996 - RNA, 61 nt, Human
gcuuagggauguucuggaacuccagauggcacccugggauuccugccuacaugccuuaugc

SEQ ID NO: 4108997 - RNA, 71 nt, Human
gcuuagggcucugagaguucagccugggccgugauguucaggagcagcugucuaccugcagaguccugggc

SEQ ID NO: 4108998 - RNA, 55 nt, Human
gcuuagguuagcuggcauuuaaaggguuucuuucaaaaugcaguucugccuuggc

SEQ ID NO: 4108999 - RNA, 66 nt, Human
gcuuaguguuucuuuaggcuguguugccaagacuucuugucaacuguguuuggaguggacacaagc

SEQ ID NO: 4109000 - RNA, 70 nt, Human
gcuuaguuagagcccuauguuaggguuagaauccucugcccuaauguucugaggguucuugcuguugggc

SEQ ID NO: 4109001 - RNA, 89 nt, Human
gcuuaguuuucugccuugccuuuaugugugcuuuugguuaagauaauacaauaaggaaauguacaaaugaagauggcuaaggacugggu

SEQ ID NO: 4109002 - RNA, 77 nt, Human
gcuuauagauggcggaguuggcauuauggccagggucugcuuuacccccaagucuugucccagcucugccacucagc

SEQ ID NO: 4109003 - RNA, 105 nt, Human
gcuuauagcaggugauggggguagucugagcaauuuccaaaauuugaaaaagccucauggaaauugugcauuuagcaacaccuccucucauaagucugcacaagc

SEQ ID NO: 4109004 - RNA, 61 nt, Human
gcuuauauuuguuucuaguggcagcaaguucuguuuugcucaccugagaagaauagagggc

SEQ ID NO: 4109005 - RNA, 85 nt, Human
gcuuauccucccaggauuuugcagacauugucuuuugaagcgagggucugaagcaugcguuuguaaacuccuucagacaauaagu

SEQ ID NO: 4109006 - RNA, 66 nt, Human
gcuuaucuccaggcacuuggcugcuacugaggacagaguccaagugagucuggauaguuuuguagc

SEQ ID NO: 4109007 - RNA, 89 nt, Human
gcuuaugagucugagagugguucagcucagaagagcaaucuggaugcauuuucaguuaacuucuugggcugccaguuucagaaaggagc

SEQ ID NO: 4109008 - RNA, 77 nt, Human
gcuuaugccauuauuucugcauaucagggacuauuaguauuuucacuaauuuacuacugcuaucuagaaggcagagc

SEQ ID NO: 4109009 - RNA, 73 nt, Human
gcuuaugguucugcaggcuguacaggaagcauggugcugccaucugcuucuggugaggccucaggaaguuugc

SEQ ID NO: 4109010 - RNA, 56 nt, Human
gcuuauguuuugccauugaagagacaaugagcuuuucuucuauggcugucaaaggc

SEQ ID NO: 4109011 - RNA, 68 nt, Human
gcuucaaagcagccgguucccuggucucccugggugggcugggucccugggggccggcugugggaagu

SEQ ID NO: 4109012 - RNA, 55 nt, Human
gcuucaacauucuagaacugauaaguggaccuucagugugcaagaauggagaagc

SEQ ID NO: 4109013 - RNA, 57 nt, Human
gcuucaagaaucugaguaauuaguugaacugucuuguuuaacuaaagaucuuuaagc

SEQ ID NO: 4109014 - RNA, 84 nt, Human
gcuucaauaauuugauuucuuuuugcugcagugauuaauauuuagaauccaccaagagcauuagaagaaaugauuauagacagc

SEQ ID NO: 4109015 - RNA, 84 nt, Human
gcuucaaucuauuuugugauuaauuuucaaccucgguuuuuuuaacggacuggaaaaggguuaaugacauugucugguugaagc

SEQ ID NO: 4109016 - RNA, 61 nt, Human
gcuucacccuggaccagaaauugggccaccugccaucauuuucugaccaggcugauuuagc

SEQ ID NO: 4109017 - RNA, 74 nt, Human
gcuucacuuggcagauuccucaagaguuggaugaacuccagccaaugucugagucucuguaucccauguggggc

SEQ ID NO: 4109018 - RNA, 57 nt, Human
ggaggcugcugccucacgugggccaccucuagcacuacaacccaggcaggagcaucc

SEQ ID NO: 4109019 - RNA, 68 nt, Human
ggaggcugcuguauuccuuggcucauggaucucuuucuccaucuuuaagccagcaacacagcaucucc

SEQ ID NO: 4109020 - RNA, 56 nt, Human
ggaggcuggccuucagacggguguccuccuccccagccuccugaagcccagcuucc

SEQ ID NO: 4109021 - RNA, 55 nt, Human
ggaggcuggucuuugcaggucuguuauuaacuuggccugacuugaucggcucucu

SEQ ID NO: 4109022 - RNA, 69 nt, Human
ggaggcuguccugaaguuuucaugagaggaugucaauucuaaccucuaugaggcugucaggacgaaucu

SEQ ID NO: 4109023 - RNA, 56 nt, Human
ggaggcuucaauuccuuacccagugggccuuuccacugggcugcuugagugccuuc

SEQ ID NO: 4109024 - RNA, 129 nt, Human
ggaggcuuccaggggcacacugugagcaggagcccucucuggaccccgcagggucagguggccuuacuuucauucugcaccccgcagggucagguggccucaccuucauucuguacccguggcaccugc

SEQ ID NO: 4109025 - RNA, 81 nt, Human
ggagggaacagccugagcaaaggcccagagggaggaacuugcaccuucauaagagacucuuggggcucccugcugcccucu

SEQ ID NO: 4109026 - RNA, 106 nt, Human
ggagggagaagggaaugcucaguuugggacacuuugaguugaaggggucuacaggaguagaccuucaacucaaagugucccaaacugagcauucccuucucccucc

SEQ ID NO: 4109027 - RNA, 78 nt, Human
ggagggaggaggaggugaggagaaggagcuaccaagacugaauguggcuaauaaagccucuuuaguuccuggcccuuu

SEQ ID NO: 4109028 - RNA, 61 nt, Human
ggagggagggagaaucucaucggccaccacagaaggaaaaggcccaggguuuccucucucc

SEQ ID NO: 4109029 - RNA, 56 nt, Human
ggagggagggcuagaccaaagacagcagccaaagucugggcuccugcccucugucc

SEQ ID NO: 4109030 - RNA, 60 nt, Human
ggagggaugggcugaaagguagccccaggccagagcugggguagcugacagucaucuccc

SEQ ID NO: 4109031 - RNA, 91 nt, Human
ggagggaugggugaauggauggauggauggauugauggauaacuaaaguuccagucaaucauucuugccauuuauuuucucaggaauuucu

SEQ ID NO: 4109032 - RNA, 112 nt, Human
ggagggaugggugggagugccauaguggguggauagagcagccgccccaggcagaagguugggcaggcuggcuuuguuccaggugaaucccaggacuugcggacauccuucc

SEQ ID NO: 4109033 - RNA, 56 nt, Human
ggagggcacaggaccagaaaucaggagcccugcuuuuuaguuacaccucugccacc

SEQ ID NO: 4109034 - RNA, 59 nt, Human
ggagggcaggagcagggaagcagaugggacagucggcuguggcccugcuucaugcagcc

SEQ ID NO: 4109035 - RNA, 63 nt, Human
ggagggcaggggccucccucuucacugcggcgccuccccugccagcugcaggcuccugucccu

SEQ ID NO: 4109036 - RNA, 60 nt, Human
ggagggccacagucaguuuugaagcaacuccagcaagugauccaaccagcuguccccucc

SEQ ID NO: 4109037 - RNA, 105 nt, Human
ggagggccccgggucucucgggcaagcucuggagccggaggauuuccaggaacagaggcugggaucgccuggcggcuccacagccccgccaaccugccucccuuc

SEQ ID NO: 4109038 - RNA, 55 nt, Human
ggagggccccuccagugggcagcccgggcugccggccacccacgcgggcucugcc

SEQ ID NO: 4109039 - RNA, 98 nt, Human
ggagggcucugggaagccccugaccugcugccccgcugacccugaggcccgaugugggcggcuuugcaggcagcaucaaggcuggccgccgcuccucc

SEQ ID NO: 4109040 - RNA, 57 nt, Human
ggagggcuguagaggagaccugaauuuagggcccaucagauuuucuucuuuaccucc

SEQ ID NO: 4109041 - RNA, 88 nt, Human
ggagggcuucaggaaggcucuguggcugcguaggucuggcacccggugcugccuguuguggggccacgugagacuuccacagcuuucc

SEQ ID NO: 4109042 - RNA, 81 nt, Human
ggagggcuuuuuuacaucugaccuaauuuugcuaguuuauaaaauguaaagauuagauuacaugaauuuuaaggucccuuc

SEQ ID NO: 4109043 - RNA, 75 nt, Human
ggaggggaggcaaagacagugcugcauagacccccaccgaacaaaaugugauugcuugcuuauuugcccuucucc

SEQ ID NO: 4109044 - RNA, 66 nt, Human
ggaggggagggacccagucugggcccaggugucaucaucucagccacagcagggcccucucaggcu

SEQ ID NO: 4109045 - RNA, 80 nt, Human
ggcaagcagaguguugaagcaggaaccagcagcauuggcaaacuggcaaaugcuucuguuuugcuaaacaccugcuuuuc

SEQ ID NO: 4109046 - RNA, 61 nt, Human
ggcaagcaugugcgaguccucacagccuccagauaaugacggcugggaguucacugcugcc

SEQ ID NO: 4109047 - RNA, 73 nt, Human
ggcaagccuggaucuuucugacugacaaaagagacuguuuccccuugguagugguaaagaaucaccccuugcc

SEQ ID NO: 4109048 - RNA, 93 nt, Human
ggcaaggacugacaugauaagacaggaauacaagugaggcaauaacuggcugcuaugucaauauauuccauguuuucucucaggucuccugcc

SEQ ID NO: 4109049 - RNA, 81 nt, Human
ggcaaggagaucugaagggaaguggaaggcagaaaaacacccagacuucuucuucuucucauccuuuaguauccucaugcc

SEQ ID NO: 4109050 - RNA, 77 nt, Human
ggcaaggcaggauaaauaguaaauguaaguaauaauaaaauuuagccuuugcuuuacuuauuuauugagagccagcc

SEQ ID NO: 4109051 - RNA, 61 nt, Human
ggcaaggggucaggcugagacacaggcaccucugcaggugacgaggccugcaccuccugcu

SEQ ID NO: 4109052 - RNA, 63 nt, Human
ggcaaggguugaagauaaauaagguagcaaugucuacuuuauauuuuuggccuuaauuaugcc

SEQ ID NO: 4109053 - RNA, 59 nt, Human
ggcaaggguugaagauaagguagcaaugucuacuuuguauuuuuggccuuaacuaugcc

SEQ ID NO: 4109054 - RNA, 61 nt, Human
ggcaagguacucuagagcacauaccaagaguggaauugcuaaguuauagaguaucuuugcu

SEQ ID NO: 4109055 - RNA, 88 nt, Human
ggcaaguauggcagauggguugagaacacaugcuuugcaaacugcagcaguauagugcuaacccauccagaaauaacccauuccuucc

SEQ ID NO: 4109056 - RNA, 62 nt, Human
ggcaagucacuggcaaaagcugcaguuuuggaaguggcugacagcuguugcagugaaugguc

SEQ ID NO: 4109057 - RNA, 102 nt, Human
ggcaauacagagaauguuauuuggaaaaguugacuucaaaccuuuuaauuuuucuuuccauuaaauagcgugucuuccauuuauucaaaucuuuguguuacu

SEQ ID NO: 4109058 - RNA, 83 nt, Human
ggcaauauucuaggucuguaaaugagagagacaggaccugugaguugcuuucuuauaccgauagaauaccuggaaggguagcc

SEQ ID NO: 4109059 - RNA, 61 nt, Human
ggcaaucugguucuucuuaggcaucaacaucuugauggcuguaggguccggggccagggcc

SEQ ID NO: 4109060 - RNA, 99 nt, Human
ggcaaugaaagcuuuuaaggaggacacacagaauacaaauccacaggagugaaacuuaaaaggcucugcaggucugugacugcccccugcuuucaugcc

SEQ ID NO: 4109061 - RNA, 79 nt, Human
ggcaaugauugcauuagaagaugaagcuacuaaugucaauggcagaacugcucagcaucucuacccaugcagaucagcc

SEQ ID NO: 4109062 - RNA, 66 nt, Human
ggcaauggccacuccucccugcaggcuggccucggcauagcagaggggcaggugguggccauggcu

SEQ ID NO: 4109063 - RNA, 55 nt, Human
ggcaauggggcagagggucaugugaggccucaugggucacuguuucaccauugcu

SEQ ID NO: 4109064 - RNA, 72 nt, Human
ggcacaaaacuucagcaguagagggggcacagucgcagcugcacccuggccccuccacugcuccgcguugcc

SEQ ID NO: 4109065 - RNA, 81 nt, Human
ggcacaaauucgcucugcacuguccggcuuucuucgcuauguauugaaugaaagaacagcugacagaagacaguuuguguc

SEQ ID NO: 4109066 - RNA, 67 nt, Human
ggcacaaggcuaugaaguauuaguuggcuauugugucagcuauuuaaauuuuuuggcucuuucuguu

SEQ ID NO: 4109067 - RNA, 65 nt, Human
ggcacacagacacuccaaagguauuuguuaugauuauuaaagcagugggggaguguuaguuugcu

SEQ ID NO: 4109068 - RNA, 59 nt, Human
ggcacagcgacuaccaucgaaaguugauagggcagacguucgaaugggucguugcugcc

SEQ ID NO: 4109069 - RNA, 71 nt, Human
ggcacagcugcuggggccgcaggcuggagccagcguugugauuggauccagcugcugacccaguagccgcc

SEQ ID NO: 4109070 - RNA, 62 nt, Human
ggcacagcuguugcgucaggcaaggucaccugcauuuauuuauugagcagcagugcuguguc

SEQ ID NO: 4109071 - RNA, 56 nt, Human
ggcacaggagcuagucaaagccccuaaagcaucagguuggugaccuucuccuuguc

SEQ ID NO: 4109072 - RNA, 105 nt, Human
ggcacaggcagcuucacuggagaauucuaugaaauauuuaaaggauaaauaaugucaauauuccaugaacucuuugaggaaacagugaaagaaguaacacuugcc

SEQ ID NO: 4109073 - RNA, 113 nt, Human
ggcacagucccuggaggccaacccacagcacauccacaggcuccagccaccgcggcacucaaacaccaugggccugggagugcacagugagguccugccugcaggagcgugcc

SEQ ID NO: 4109074 - RNA, 87 nt, Human
ggcacaguccuguuauuuuuaccagugaguuccacagcuaagggugcuggcuuucuaccugagguaaggaugaugaggucugaugcc

SEQ ID NO: 4109075 - RNA, 82 nt, Human
ggcacauaccuguaaucccagcuacuugugaggcugaggcaggaggauugcuugagcuaggaaggcugaggcugcaguggcc

SEQ ID NO: 4109076 - RNA, 59 nt, Human
ggcacauggccaacauucucugccccguaugcggggugccagagaccaggccagguguc

SEQ ID NO: 4109077 - RNA, 73 nt, Human
ggcacauuagcaacucuuauguaagcagaagugugaaaaccguuugcacauugggguuugccugguacuugcc

SEQ ID NO: 4109078 - RNA, 70 nt, Human
ggcaccagcugucaccaggagccggaccacagacgguaauguggugaucacagccagguggagcgguguc

SEQ ID NO: 4109079 - RNA, 81 nt, Human
ggcaccaggccaggccaggccucggccacugcuuccacuacaggcagcagggaggcccagggcacuggccgaggcccugcc

SEQ ID NO: 4109080 - RNA, 70 nt, Human
ggcaccaguccguggccagacucaagagggcaaacgcuccacuccuugcgaucaacuaggauucucugcc

SEQ ID NO: 4109081 - RNA, 59 nt, Human
ggcacccaggccggcgacugcagcgggggccucccuacugccaguucccggccgggucc

SEQ ID NO: 4109082 - RNA, 78 nt, Human
ggcaccccaggccaagccccagcuggggagagagcugccacguuuuccuccaagcguggguguuugagagaaggugcu

SEQ ID NO: 4109083 - RNA, 58 nt, Human
ggcaccucuaaugagagcagggacaggcuuucucauccuaacucaauucagggguguc

SEQ ID NO: 4109084 - RNA, 60 nt, Human
ggcaccucugggcucuguuaggugccuguggcagacgaaauaaugguccccaaagauguc

SEQ ID NO: 4109085 - RNA, 55 nt, Human
ggcaccugucugcucacagugaaggcaaucaugcaaucaugacaaaacaggcgcu

SEQ ID NO: 4109086 - RNA, 59 nt, Human
ggcaccuguggggggccuuccggaaccagaacucuggcagggucaggaaccaggguacc

SEQ ID NO: 4109087 - RNA, 71 nt, Human
ggcacuccagggcuucuaugaugguuccagcauuaccagggacccaaguccauccaggccucugcucuguc

SEQ ID NO: 4109088 - RNA, 72 nt, Human
ggcacuccccucgcccagcacuacuccucucugccuggggucgagccacagucugugcuuggugggagggcc

SEQ ID NO: 4109089 - RNA, 62 nt, Human
ggcacucucgcugauuagcguaaaaccucucaugcuuuuuaugagaauuaagugcgagugcc

SEQ ID NO: 4109090 - RNA, 70 nt, Human
ggcacucucugggucacugugggagggcagggaagccaugcuacccucucaguagacccagagcagcucc

SEQ ID NO: 4109091 - RNA, 76 nt, Human
ggcacugagcugccuuggggcagagacuuugcucgaaggguuuaacacucuaucuccaaggcauagacacagugcc

SEQ ID NO: 4109092 - RNA, 70 nt, Human
ggcacugauggacucacuaauuccuccaccacugagaaacacagaguggaagcagugaguucacugugcu

SEQ ID NO: 4109093 - RNA, 67 nt, Human
ggcacugcauggcugugaggcagcuggucagagagcaggcugcucucagagcucaugcugaguagcu

SEQ ID NO: 4109094 - RNA, 61 nt, Human
ggaggcaaagcacuuugcuuggaaauauuuuucacaugacauacaaggugcuucgaccucc

SEQ ID NO: 4109095 - RNA, 66 nt, Human
ggaggcagagccaaaaccguaacagccagagcuagagacuccggccugggguucuggcucuguccc

SEQ ID NO: 4109096 - RNA, 128 nt, Human
ggaggcagcacagacauuaaacacgguauuuucagaaggagcagacauaaccuuacagaagugcuuuauuuucuguaacuagauuuuguuuuacuggaggcagcuuuguauaagguucaggcgucucu

SEQ ID NO: 4109097 - RNA, 75 nt, Human
ggaggcagcagcccacagccgaccccucaugccacgcacugagcaggguuccgcauggacgcuggucuugccucc

SEQ ID NO: 4109098 - RNA, 55 nt, Human
ggaggcagcggcucacagagaaaaagcucuggcuuuucuccgcccgcugcguucc

SEQ ID NO: 4109099 - RNA, 59 nt, Human
ggaggcauuugaauggcauaccaggcucauccccugagccugggagaucagcugccuuc

SEQ ID NO: 4109100 - RNA, 70 nt, Human
ggaggccaggggggaguuuugcucagaggaaugacaugaucugauuguaacaggaucccuguggcugacu

SEQ ID NO: 4109101 - RNA, 58 nt, Human
ggaggccaucuggcuggaggcugcaaagugagacaugaaccucccccaggaggccucc

SEQ ID NO: 4109102 - RNA, 61 nt, Human
ggaggcccaggggagccgccugccagagucaucagcagagccaggcucuaccuggguuucc

SEQ ID NO: 4109103 - RNA, 91 nt, Human
ggaggcccuugccaaugggaaaugagagacaggaacgagcugggcagaugaauuuccucucguucucucucccccaaugugcaguuccucc

SEQ ID NO: 4109104 - RNA, 56 nt, Human
ggaggccgggggaaagucuaagcgagcgucgugcccgggacuguugccaggccucu

SEQ ID NO: 4109105 - RNA, 71 nt, Human
ggaggccuacguagauccaucaccugagcacuugcuuguugacuaggucucaucuuguucaucuacccuuc

SEQ ID NO: 4109106 - RNA, 59 nt, Human
ggaggccucacuuguguugcccaggcuggucuugaacuucugggcucaagugauccucc

SEQ ID NO: 4109107 - RNA, 55 nt, Human
ggaggccucaucuugccccgugcccagguagagcaugagguagcaugaggcaucu

SEQ ID NO: 4109108 - RNA, 122 nt, Human
ggaggccucggguggccgccugcgcgcccgggauguacugcgccuucaccaagcggcccucagccgggcugucggggggugagggggcggcgggcggcgcagcgggcucgggugccgccucc

SEQ ID NO: 4109109 - RNA, 87 nt, Human
ggaggccugaaguccaagaucaaggugucagcaggcuugguuuccucugaggccucucuccuuggcuuguagacggccacugucucc

SEQ ID NO: 4109110 - RNA, 82 nt, Human
gcuuuggagaagcagguuuagcagacaaccucuuggaucuuuucugugguuuguccuucauguuggauuuaucuccuuuagc

SEQ ID NO: 4109111 - RNA, 72 nt, Human
gcuuuggccagaggagcaggcuggcuccacgcuugucugcugggggcgggaugauuccuuuggacucauggc

SEQ ID NO: 4109112 - RNA, 70 nt, Human
gcuuugggcccaucauugcugugggcauguggacacuugacacuggcccugccauugaucggcccagggc

SEQ ID NO: 4109113 - RNA, 58 nt, Human
gcuuuggucagguguccagcccugguucaaucagguguuggggacaggaccccaaggc

SEQ ID NO: 4109114 - RNA, 62 nt, Human
gcuuuguacauguucagggagauccaaguguuuauuggagauuacuugaauguugcagcagu

SEQ ID NO: 4109115 - RNA, 77 nt, Human
gcuuugucuaaaaugaguuuaaugauauuuauaugacaggguuaugauaugcguuaaauuucuaauuuugagaaagc

SEQ ID NO: 4109116 - RNA, 61 nt, Human
gcuuugugcaggugugucagaucguuaagacucguguucaauaugauggccacugcaaagc

SEQ ID NO: 4109117 - RNA, 124 nt, Human
gcuuuguggguguuuguuuuauuaaauaaucugggcagauuucauugagaauauaagauuugaacaaagacuuggaaaaucuaucuggaggaagaguaguccagauagagcagauaauuagagc

SEQ ID NO: 4109118 - RNA, 87 nt, Human
gcuuuuaccuuugccugggauuguguaagugaauaugaaauaaggauuucaagaaaguucaggugcacaugucaagcaugggcaggc

SEQ ID NO: 4109119 - RNA, 55 nt, Human
gcuuuuacucaugacagaaggcaaagcaggagcaggcacuucacauggugaaagc

SEQ ID NO: 4109120 - RNA, 57 nt, Human
gcuuuuaguuacuucuuaaggcuggauuauagccuuuccaguuuguguaagaaaagc

SEQ ID NO: 4109121 - RNA, 59 nt, Human
gcuuuuaugucauaaggacacucaagaagcccuaugagaaggccugugugacagggagc

SEQ ID NO: 4109122 - RNA, 67 nt, Human
gcuuuuauuacccagagggagagcaacuauaguguugugccauagaauagcacugcccugggaaggc

SEQ ID NO: 4109123 - RNA, 103 nt, Human
gcuuuucacuaacaauuucuucucauuccccagagaugccuuaaugagccccucggacauggccaaaggcaaucuuguucucugggccagugaggugaaaagc

SEQ ID NO: 4109124 - RNA, 71 nt, Human
gcuuuucaugcagaggaaggcuaguuuccucaaaucuuggagagcaagcuacuuccacugauaagagaagc

SEQ ID NO: 4109125 - RNA, 84 nt, Human
gcuuuucccauauuggcacugcacaugauugcucagagcggagagacacaagcaaaaaugugcuagugccaaaaucggccaagc

SEQ ID NO: 4109126 - RNA, 110 nt, Human
gcuuuucccuuugcaucggccuggggcccuggggccugauuugcagcaucaacagcuuuuccacugcugugugucagcccaagggccuugucacugugagaggguaacgu

SEQ ID NO: 4109127 - RNA, 63 nt, Human
gcuuuucucuuugacaggaaucagagguguuuccuuuguccccuacucuguagaagaggaugc

SEQ ID NO: 4109128 - RNA, 71 nt, Human
gcuuuugaaaaugugauuuucccaguagaauuccuaauuuuaaaaaauggaaaaguacaauauccaagagc

SEQ ID NO: 4109129 - RNA, 60 nt, Human
gcuuuugaccuucucugucucagaacguucugcauaguucuauccagagaggacagaggc

SEQ ID NO: 4109130 - RNA, 64 nt, Human
gcuuuugaggugaaggcuuguguaaaggaggcaguucuggcuccuucagagccucccuccaagc

SEQ ID NO: 4109131 - RNA, 95 nt, Human
gcuuuugcugcuuaacaaaccauugccaacagccauuuguugagcaugugauuccacuggucagcaauuuggacugggcucaggugggcgccugc

SEQ ID NO: 4109132 - RNA, 56 nt, Human
gcuuuuggaccucugauguuucuccugaaaaucacuguuaugaaggauccaggggc

SEQ ID NO: 4109133 - RNA, 100 nt, Human
gcuuuuggaggcccuggggcucucccgacacccccucugugugucuggcaaugcgcaggugcaccugagggugucaucggaucugagggccacaaacagc

SEQ ID NO: 4109134 - RNA, 72 nt, Human
gcuuuugugccuuugcuuuuacaaguuuggaagggccucauuguacccugugauugagcuagguauuuaagc

SEQ ID NO: 4109135 - RNA, 129 nt, Human
gcuuuuguuuuaauggguguucacuuuuaaugguuucaagcauucaucaaaaauguuccucuuugaaaaagugaagaggacacaaaguggcugagaugcagaccuagugcuucccaguuuucaaagugc

SEQ ID NO: 4109136 - RNA, 60 nt, Human
gcuuuuuauaucaucguguuacauugcgucaugugcagaguaagaugagcuauaagaagu

SEQ ID NO: 4109137 - RNA, 97 nt, Human
gcuuuuuauguuccuauagcauuuguacaaaaugcaguaggaguggaaucauuauucuaaauugcauaaguacaaaugaaauggaagagcacaaagc

SEQ ID NO: 4109138 - RNA, 65 nt, Human
gcuuuuucuaccaggucacuuuuuacuuuuaugugagaaaacucuggcucuggguaggagagugc

SEQ ID NO: 4109139 - RNA, 105 nt, Human
gcuuuuugauguguugcuaauucaguuugccaguauuuuauugaugauuuuugcauugauguucaucagggauauuggccugaaauuauuuugucauuguugugu

SEQ ID NO: 4109140 - RNA, 117 nt, Human
gcuuuuugccaugugucauucaguuuuagaauuucugcucacuuugauuguaccaugaaaccuacacuuagauggagcagaaaacuucaauagggcuaaggcaugugagcaagaagu

SEQ ID NO: 4109141 - RNA, 70 nt, Human
gcuuuuugcgagcugguaacugcacacuucaucuguucucuuaguguaucuuuuaucugcugcaaagggu

SEQ ID NO: 4109142 - RNA, 67 nt, Human
ggaaaaaggugugaaguaaaugcaucgacugauguaccuugcacacauuucacacccuccuuuuucu

SEQ ID NO: 4109143 - RNA, 130 nt, Human
ggaaaaaguaaaccuuucccuuacaguuuuguaugcuucucuagguucuaaauuagguauuuaucuaaauaguauagaauucguguuuguaauucaggagguaaaaaagaguauuaaagggacuugauuu

SEQ ID NO: 4109144 - RNA, 86 nt, Human
ggaaaaaguuggcucuuaugcuuguguaagaauagucguagucacuuuauucauauuuguuacagcuuaaaaaagccaacuuaucc

SEQ ID NO: 4109145 - RNA, 77 nt, Human
ggaaaaauuuggcaaauucuugguaguauuuuuugagcauguagauaaaacuaugaaugaauuuucuaaguuacucc

SEQ ID NO: 4109146 - RNA, 75 nt, Human
ggaaaacagcgauugguaucauaauucucuuuacacagugcucuaagggauaaacuguuggcaauuguuguuucc

SEQ ID NO: 4109147 - RNA, 76 nt, Human
ggaaaacccuaagguagauuaucaauagugguagcuggaacuauuacugucauuagcauuaacuuuaggggauuuu

SEQ ID NO: 4109148 - RNA, 70 nt, Human
ggaaaacguggccaugugagacuaguauagaucuccaacuauugcugccucugcugauauggccaccucc

SEQ ID NO: 4109149 - RNA, 69 nt, Human
ggaaaacuggcaggaaguuagaugguaacuacagauuacuuaccagcuucuuucuugucccagucaucc

SEQ ID NO: 4109150 - RNA, 104 nt, Human
ggaaaagaagaacuggagcuguaagggccugacuacccugagaagcauuucuuucccaucuacagguaagucuguccucacaaguuaaucaguagcuucuuucc

SEQ ID NO: 4109151 - RNA, 72 nt, Human
ggaaaagcaagggacauuucucauaggagaugacaguucauuuggcuccugagggaugcuuaggcuuuugcc

SEQ ID NO: 4109152 - RNA, 75 nt, Human
ggaaaagggaaugcuuggcccgucugaagaaggcuccaaugucucuuuccaggguaccccaggugcuucuuuucc

SEQ ID NO: 4109153 - RNA, 62 nt, Human
ggaaaaguagcaaaugugacauaggcggugaacugaaaaucgcuugguuuugguuacuugcc

SEQ ID NO: 4109154 - RNA, 122 nt, Human
ggaaaauauugccuuaauuauuacucugaguggaucuucaccuaguuucuuacaagauugcuuaagauaaguggguugagauggacagugcugaggagugucauagguuuuuauuguuuucc

SEQ ID NO: 4109155 - RNA, 85 nt, Human
ggaaaaucacuugagcccagaguucaaggcugcagugaguuugaucauaccauugcacuucagccugggugacagagugagaucc

SEQ ID NO: 4109156 - RNA, 86 nt, Human
ggaaaaucagguggggaagugagggacuggaguaaagaggaaagcgucuuucuccaagaaaagaucucagcuauccauguggaucc

SEQ ID NO: 4109157 - RNA, 76 nt, Human
ggaaaauggagagcuggcacuuggcacccaugaaagacccacuuucccugcccuaccagguggcauuucuccuucc

SEQ ID NO: 4109158 - RNA, 69 nt, Human
ggaaaauugagagucuugugcaaguuguaagcuuucugcuuaaucuucuggaaacuuuuccaauuuucc

SEQ ID NO: 4109159 - RNA, 55 nt, Human
ggaaacaugccugcuggacaguggugcaguaugacaauccagcagcauaguuucc

SEQ ID NO: 4109160 - RNA, 59 nt, Human
ggaaacauuccaagaguugaaaaagacaauucauucaacuaaauaaauggaaugguucc

SEQ ID NO: 4109161 - RNA, 93 nt, Human
ggaaacauuuugcaguaguucgucuguguucccuuccucauaucacaccaccuagggaauuaccuuggauuacuacaaaaaucuaauguaucu

SEQ ID NO: 4109162 - RNA, 72 nt, Human
ggaaacucaaucucugggggucagaguccacuuccuggggagcccaaucugugaccccuaggaguggggacc

SEQ ID NO: 4109163 - RNA, 57 nt, Human
ggaaacugagugacacucccucagaaaaaguugugggccuguguaaauugaguuucc

SEQ ID NO: 4109164 - RNA, 64 nt, Human
ggaaacugaucuccucuccccaccugaagguuucuggauaugggagagggagcaucagagagcc

SEQ ID NO: 4109165 - RNA, 97 nt, Human
ggaaacugcccacucuuguaagauguugcucagcguucuugggacccaggaauucacugcuccaaaggcccugaguucacuuucaaggcuugguucu

SEQ ID NO: 4109166 - RNA, 71 nt, Human
ggaaagaaacacuguuucucccauaagugauuuggacuccacugguuacauggaagaaauauaauuuuucc

SEQ ID NO: 4109167 - RNA, 88 nt, Human
ggagucuugcuuuguugccuaggcuggagugcaguggcacaaucuuggcucacugcaaacugugccucccggccucaagcgauucuuc

SEQ ID NO: 4109168 - RNA, 56 nt, Human
ggagucuuggccugcugagaaaaugcuugacagaguacauuucgaggcaagucucc

SEQ ID NO: 4109169 - RNA, 76 nt, Human
ggagucuuucaccccauuugauuugcaggggaugucaagcagaaacuucaaaaugcacaaagggcuagaagacucu

SEQ ID NO: 4109170 - RNA, 68 nt, Human
ggagugaaggcaaagggaauggaauccagcaacuucgugacuugguacaaagccucuuugccuccucu

SEQ ID NO: 4109171 - RNA, 79 nt, Human
ggagugacccaucccccaccagaccacuguguccugcggagcccgggcaaggaggcugguggaggaagggcugagcucu

SEQ ID NO: 4109172 - RNA, 67 nt, Human
ggaaaggaagggcccauucucucagaaaacauguguuuucuguuuacagagggaccuguccaguucc

SEQ ID NO: 4109173 - RNA, 85 nt, Human
ggaaaggaggcugugguugcucugauuucaaggcccacaaaacuucucugacaacucucagaguaacuacaguauagacuuuucc

SEQ ID NO: 4109174 - RNA, 75 nt, Human
ggaaaggagucaggcauggcucuuccucaggugaagugauauuccucuguggauuaaucugucucuuuccuuucu

SEQ ID NO: 4109175 - RNA, 80 nt, Human
ggaaaggcaggccagaguggcugagaggcugggaguaggggagccuguucucucagcgauagugaugggggugccuuucc

SEQ ID NO: 4109176 - RNA, 74 nt, Human
ggaaaggcuuaaauuguaagggcacacucuuuaaaaaacacagugcucauugacagugggagcuuuaaaaaucc

SEQ ID NO: 4109177 - RNA, 66 nt, Human
ggaaaggggccuggaucuuuuguuccauccugagcagagggguuucuuuggcugaccauucuuucc

SEQ ID NO: 4109178 - RNA, 71 nt, Human
ggaaaggggguguguagucaccucggccaaaacccggcuuugggcagaaacaugcgccccagcuucuuucc

SEQ ID NO: 4109179 - RNA, 82 nt, Human
ggaaaggugagcuuuguuguuugguauccuuaaguucacucaaaugauacagguggaacuaaauaaaugauuucauguuuuu

SEQ ID NO: 4109180 - RNA, 61 nt, Human
ggaaagucagaggaggcuaagggaagcuggcugagauucacuuugaauuccuugauuuucc

SEQ ID NO: 4109181 - RNA, 62 nt, Human
ggaaagugaccccauguuaagucgaggagcuccuuaugucuuauuaugagguuagacuuucu

SEQ ID NO: 4109182 - RNA, 67 nt, Human
ggaaagugauggaauaauccaagauuuuaacgguuuugaagccuuggcccuucauuauaauuuuucc

SEQ ID NO: 4109183 - RNA, 57 nt, Human
ggaaagugcucugugaacucugauugcuaaaugcagguggguacaucacagagaccc

SEQ ID NO: 4109184 - RNA, 127 nt, Human
ggaaaguguagcuuacuaacggacagggaaugaagcugagguucucuuugaagccucuucuguagcuacuuaaagcaaccucagcccucuucccauaacaugaccaagcugagcacaucacuguucc

SEQ ID NO: 4109185 - RNA, 78 nt, Human
ggaaaguuauaucaugauuuuaggagacugugaacauaaaaugugugaguggaaaauuaagauuucauauggcuuuuu

SEQ ID NO: 4109186 - RNA, 76 nt, Human
ggaaaguuuccaaguauauguuugcuagguauaaucaacgaaaucggcaugcuuuaaaacguauguguaauuuucu

SEQ ID NO: 4109187 - RNA, 83 nt, Human
ggaaaguuuuaacaacugagguaucugcuguguuuaguaaaucauaaaaguaagcacaaugaacaucuuagaugaaaagcucc

SEQ ID NO: 4109188 - RNA, 84 nt, Human
ggaaaguuuuuguuugugcuauuuaauguaguugaaggguaaacaacauagaaagcacuaagcuuauauaaagaaauacuuucc

SEQ ID NO: 4109189 - RNA, 77 nt, Human
ggaaauaaaacaacucggcaacugcuuuucuacccgaaagucgggagcaaggagugggggcgagaaguuaaguuucc

SEQ ID NO: 4109190 - RNA, 60 nt, Human
ggaaauacugcacacccuguaagccuaauugggucauacauaacuuguacagugauuucc

SEQ ID NO: 4109191 - RNA, 59 nt, Human
ggaaauauacuucacugagccucugcauucaguaccuggcagugaaaaaguauguuucc

SEQ ID NO: 4109192 - RNA, 77 nt, Human
ggaaauaugccuacaaugcauucguugucucggccaguggcucgugacccucugcacuuggaagguauauaauuucc

SEQ ID NO: 4109193 - RNA, 70 nt, Human
ggaaauauuaauguaagacuagguuccaguguguguucauuauacacuguucacuagaucuucaguuucc

SEQ ID NO: 4109194 - RNA, 93 nt, Human
ggaaauauuuuucagaaugcauguuuccucucagcagacacucugaccaccaguuggggaggcaaacuaucaguguauuuugaaaaaguuucc

SEQ ID NO: 4109195 - RNA, 77 nt, Human
ggaaaucagaggcaacaacuacuuccugacaaauucaguucucucucuuucacugaguagauguucuuuugauuacu

SEQ ID NO: 4109196 - RNA, 83 nt, Human
ggaaauguguaaaaugucuuaucucaguuauguuucugaaacucuaugaucuauacacugguuuaugauauugucuuguuucc

SEQ ID NO: 4109197 - RNA, 75 nt, Human
ggaaauguucacagagcacugccaaguacaaguguacucucuugugucccggugguucucugucacgaucuuucc

SEQ ID NO: 4109198 - RNA, 57 nt, Human
ggaaauuacuuuagggucacagcgagauuucugugacagccaguaaaguaagcuuuc

SEQ ID NO: 4109199 - RNA, 75 nt, Human
ggaaauuauugagacgugauacacuuccuaucaaaacaacacaugagguggugauucauucgauuaguauuuucu

SEQ ID NO: 4109200 - RNA, 114 nt, Human
ggaaauucauuaaugucggagacagcauuagaaguaguuggggauuauuuuaucuucuacauauauuuuucucacuugcuguuucauauuuaccacucaaacauagaccuuucu

SEQ ID NO: 4109201 - RNA, 91 nt, Human
ggaaauuccuucaugggaaacaagcagauggccaguguccagcccuccaggaggacagacaggaggccaccugcucacccaugauggaucu

SEQ ID NO: 4109202 - RNA, 77 nt, Human
ggaaauucgagucaccuacugaccaaauuggauaauccagaugauuccagagcagguggucagaagguauaauuucc

SEQ ID NO: 4109203 - RNA, 107 nt, Human
ggaaauugcaugugcauuuugggugcccugauaauguccugcaguaaauuguuuucauauaaauugcaugcuuaauuaaucgcuuucaaaaaugcucauguauuucu

SEQ ID NO: 4109204 - RNA, 67 nt, Human
ggaaauuggcuuauggucagaccaaacuguucuuauccccuguguaagaggccaagucaucauuucc

SEQ ID NO: 4109205 - RNA, 81 nt, Human
ggaaauuuggaacuacuuuaguauuuuuucaugauuuuguucuuuaagauucagaaagcaagugcuggguacuuuccuucc

SEQ ID NO: 4109206 - RNA, 94 nt, Human
ggaacaaaagcacaaguccuggcuuauuuuuauagcagugcgaucagaaugccugaacugacagaaagaaugucuauggaccugguuugguucc

SEQ ID NO: 4109207 - RNA, 71 nt, Human
ggaacaaccagcuguggagggaggaaaugcgauuuguagcacuugccaauuuccacagaugcaaaugcucc

SEQ ID NO: 4109208 - RNA, 73 nt, Human
ggaacaagauuuugucugguaggguugaucuuugaaaggcuacaaaucauccuacuagccaggauuuuucacc

SEQ ID NO: 4109209 - RNA, 61 nt, Human
ggaacaaugaaugugauuaacuucaaggacgggaguccagaaguaaugaugucauuccuuc

SEQ ID NO: 4109210 - RNA, 94 nt, Human
ggaacaauguccccagaauucuuuucuuucugaaagucgcuucucuuagaugccauuuuaaaggaguuuauggggaguaaaauuguaauuaucc

SEQ ID NO: 4109211 - RNA, 56 nt, Human
ggaacacuggcucaauuauaucuuuguggccauuuguuaguuguagccacuguucu

SEQ ID NO: 4109212 - RNA, 79 nt, Human
ggaacagaaugccuaugaguuuguuguaaacaccugaaguaagaggguuuacacugacagcacauaaggaaucuuaacc

SEQ ID NO: 4109213 - RNA, 83 nt, Human
ggaacaggcccaggaagaggcagccguauuucaaaggcucuccugcauggucugggaucgauggggcugccugccugggcucc

SEQ ID NO: 4109214 - RNA, 85 nt, Human
ggaacagggccaucaaaguggcccuaggccaaggggaggucucugcccccuuccccagcccggggcuacccuuggguccugcucc

SEQ ID NO: 4109215 - RNA, 59 nt, Human
ggaacaguaucaguagugccagugguaguauuugcacuggcagaacuggugauugucuc

SEQ ID NO: 4109216 - RNA, 75 nt, Human
ggaacauguuaccuagggcugugucuccaggaccaucaguaggggaugcugggauauagcuucuagggcauagcc

SEQ ID NO: 4109217 - RNA, 59 nt, Human
ggaaccacagcccccagcaggccucgcgcggcgcgcugccuccugggauuuguaguucc

SEQ ID NO: 4109218 - RNA, 57 nt, Human
ggaaccaggugauacccuuuaacaggccccaagggggcaggugugguaucagcuucc

SEQ ID NO: 4109219 - RNA, 60 nt, Human
ggaaccggguuugggcagcccaggcugccugccagaugagcccuccaaacccaggauucc

SEQ ID NO: 4109220 - RNA, 65 nt, Human
ggaaccucaggccugccagagccccaccccuacaccgggagguugggggcaggcgugaggcagcc

SEQ ID NO: 4109221 - RNA, 73 nt, Human
ggaaccuggcaggagguuuucuccaggaaaaucugaaagucagcaaguuuuaguuugccuccuaccagcuucc

SEQ ID NO: 4109222 - RNA, 78 nt, Human
ggaacgaugguugaauguagcauuuaugguugaauguagagaaaauacaguauaaugagucgcuuuguuccagguucc

SEQ ID NO: 4109223 - RNA, 93 nt, Human
ggaacuaaaagaggacagaguacugaguggaacauaggaugauagauuuacaaauaauguagcauacuucuacuucauuguaucuuaaguuuc

SEQ ID NO: 4109224 - RNA, 92 nt, Human
ggaacuaauuuuggaauuuguugauagacacaggauaguguucucuucccacucacugacuguggauggcagcagccagggaauuagauacc

SEQ ID NO: 4109225 - RNA, 79 nt, Human
ggaacuagaccuggaagccaggcccgcuccuaagacagguaucuugugggugggacuggcuuccagccccagaguuacc

SEQ ID NO: 4109226 - RNA, 77 nt, Human
ggaacucauaguuuucuaugcacuguuaucugagcugaauuaaaauucgaugcaguguuuggaagcuuaagauuucc

SEQ ID NO: 4109227 - RNA, 72 nt, Human
ggaacucucuuuaaugugauuguaauuauuuuaccuagaguguuuacagugaacacauuaaguaugaaagcc

SEQ ID NO: 4109228 - RNA, 67 nt, Human
ggaacugaguuguccgggcuucaguaugugcugacuuacccuguggccuuggaccagcaucuuuucc

SEQ ID NO: 4109229 - RNA, 104 nt, Human
ggaacuggacaugggaccaaauuguucccuucaagcugcuauagguugcugggcuggcgcaaacuggccugcacuuuagugcuugguuugccaugucuaauucu

SEQ ID NO: 4109230 - RNA, 58 nt, Human
ggaacuggcagagguaagacuagaacacuggucucccaugucccuguccaguguuucc

SEQ ID NO: 4109231 - RNA, 101 nt, Human
ggaacugguauucaacauccauguguuuuccuguccacaauaaauuguaauaauugugccugaaaagagagaauauauuggcaauuuugauuucauguuuc

SEQ ID NO: 4109232 - RNA, 72 nt, Human
ggaacuuugggucuuguuuaacugucguuaguuggucaaccagcugucuaaguugagcaggaaagugaggcc

SEQ ID NO: 4109233 - RNA, 55 nt, Human
ggaagaaaagcuuccagcgccuccccuccaaccggcccuugaggcuucgcuuacc

SEQ ID NO: 4109234 - RNA, 88 nt, Human
ggaagaaaggcacuuggcuguggccuugaggagauucaugcaugaagguaaaggcaggaguugggagcagcagaccaagagcucuucc

SEQ ID NO: 4109235 - RNA, 80 nt, Human
ggaagaaauauauuaaaaaguugaaaggacuuaucucugugagaugggauuuuucuccuuuucauguuucuguauuuucc

SEQ ID NO: 4109236 - RNA, 61 nt, Human
ggaagaacucacagcugagccagguggaauguguucccugggccacagcugugagcucucc

SEQ ID NO: 4109237 - RNA, 93 nt, Human
ggaagagaaaguauaggcugcggagaguugccguccugguaccugugugcauggugcucuggggaugcuucugccgugaucaugaacucuucc

SEQ ID NO: 4109238 - RNA, 68 nt, Human
ggaagagaaugauggcuaugggaaauuuauggauacaucuaugcacauaaaggcaucuuucucuaucc

SEQ ID NO: 4109239 - RNA, 67 nt, Human
ggaagagaccuggacaauucuugggaugaagugguguucuaauaguuugaauguuucugucucuucu

SEQ ID NO: 4109240 - RNA, 57 nt, Human
ggaagagaguaaaaacagaaaaugggcauuuuuugccauuugcugagcuuuuucucc

SEQ ID NO: 4109241 - RNA, 95 nt, Human
ggaguggggcagggggcggcuuauucacucuggggauucgccauggacacgucucaacagugcaagcugcuccccguguuucccugccccacuuc

SEQ ID NO: 4109242 - RNA, 65 nt, Human
ggagugucaucgugaaaacauagcaaaccagugaaaguuugcauacuguugagauguugagaccu

SEQ ID NO: 4109243 - RNA, 61 nt, Human
ggagugugcaguuguucugggacuggacugccaucucaggguuuguacaaguguagacuuu

SEQ ID NO: 4109244 - RNA, 59 nt, Human
ggaguguuugugaguuuaacuuggcuugaauaccaaguucuugcuauaaaaacaaaucc

SEQ ID NO: 4109245 - RNA, 58 nt, Human
ggaguuacacagaagucaguuugagucccaguucagcugcuuacuagcugugugaccc

SEQ ID NO: 4109246 - RNA, 70 nt, Human
ggaguuacagagcccugcgcuauagaauaaacuggcuuccucuuagguccaggagcucagggcuuauucc

SEQ ID NO: 4109247 - RNA, 71 nt, Human
ggaguuauaaauuauuaagcaucacaugaauaauuuauuaaucauucaugaggugcuagugcugugucucu

SEQ ID NO: 4109248 - RNA, 69 nt, Human
ggaguuauacagugcacaaccugugcagccacacacagcuggccccguacauguaauguacuguccucc

SEQ ID NO: 4109249 - RNA, 67 nt, Human
ggaguuauuauuggauugguacagaguuuggaaugauaaaagaauucugaaaauagauaguggcucc

SEQ ID NO: 4109250 - RNA, 96 nt, Human
ggaguuccuggggaccugagcacagaaauaagauauuuuguaaaggaaguaacucuuauuguugaugcauuauuagacagacucaggagaaucucc

SEQ ID NO: 4109251 - RNA, 55 nt, Human
ggaguucugggaggauauuugcauguaaguuugcaaauucaccuaguaaaacuuc

SEQ ID NO: 4109252 - RNA, 65 nt, Human
ggaguucuuacacucuuaaaaaucauuaaugacccugaagaguuuuuggagugugaguuacaucu

SEQ ID NO: 4109253 - RNA, 66 nt, Human
ggaguugagagggugccuuguuacuguacagucuuacaguaacucauguaaaccucacaacaaucc

SEQ ID NO: 4109254 - RNA, 64 nt, Human
ggaguugaguccgguacaauguccuucaaaaucaggccacagaugagaagcugcauucaauucc

SEQ ID NO: 4109255 - RNA, 84 nt, Human
ggaguugauucaaaggggacaaguggggccuccauucauucugaccugaucuucacucugucccccauugagaucaagugcuuc

SEQ ID NO: 4109256 - RNA, 59 nt, Human
ggaguuggaggcuccagggaacuccagaaaucccagagagauuccgggccaccaacucc

SEQ ID NO: 4109257 - RNA, 76 nt, Human
ggaguuggcaaauuucugauugcugaugaggcccacggugcgguggauccaggccagcagcucagccgccagcucc

SEQ ID NO: 4109258 - RNA, 87 nt, Human
ggaguugggaaagggaagagaugggggguaagccuuggauugugacuguuuacugggcuguuccuuauuucuaccccacgucgcacc

SEQ ID NO: 4109259 - RNA, 56 nt, Human
ggaguuggugccgccgggccagaggcugcgaguccagcuggcucuggacuugcucc

SEQ ID NO: 4109260 - RNA, 88 nt, Human
ggaguuucgcucugucaccgaggcuggagugcaguggcgggaucucuagucacugcaagcucugccuuccggguucaagcgauucucc

SEQ ID NO: 4109261 - RNA, 65 nt, Human
ggaguuugaagcaaaauugaggaauggcugucccucagagguuuauuaaugaugcugagagcuuu

SEQ ID NO: 4109262 - RNA, 83 nt, Human
ggaguuugauuuguaauuaaguguaguagcuauuucuguuugcacaaagcauaaaacguuacaacauguucaaguuuaagucc

SEQ ID NO: 4109263 - RNA, 89 nt, Human
ggaguuuugcucuuguugcccaggcuggaguacaauggugcaaucuuggcucauugcaacuucaaacuccuggguucaagcgauucucc

SEQ ID NO: 4109264 - RNA, 89 nt, Human
ggaguuuugcucuuguugcccaggcuggagugcaauggugcuaucucagcucacugcaaucucugccucccggguucaagagauucucc

SEQ ID NO: 4109265 - RNA, 78 nt, Human
ggaguuuugcucuuguugccuaggcuggagugcaauggcucaccgcaaccucugccucccagguucaagcgauucucc

SEQ ID NO: 4109266 - RNA, 56 nt, Human
ggaguuuugggcacaggcuguccuggauaauuggacauuuuggugaacacagcuuc

SEQ ID NO: 4109267 - RNA, 69 nt, Human
ggauaaaagacacacgaauguguaugugcacacacacacacacgcacacauuuacauguuuacguaucu

SEQ ID NO: 4109268 - RNA, 79 nt, Human
ggauaaaagcauguagcugggaaugggcugcugaguagccucuacucccagcccagacuucuccaguauguuuucauuc

SEQ ID NO: 4109269 - RNA, 76 nt, Human
ggauaaacacagagggacaguaugaugaaagcauguuauuuaauucauaagcuuuuccaaaguccaucuggucucc

SEQ ID NO: 4109270 - RNA, 66 nt, Human
ggauaaagaccaguaucuuauguucucuaacuuaagaacuagaaccugagauacuggucuuuaucc

SEQ ID NO: 4109271 - RNA, 85 nt, Human
ggauaaagucucacauaugucucuguacaacagucucgggcugucauuguuuaggcuugcagaauuuauguaaugaugaagaucc

SEQ ID NO: 4109272 - RNA, 73 nt, Human
ggauaaauaguucuuaucuagaagcauguuuuaaguguucuuauugcaaucucugagaaaguacuguauguuc

SEQ ID NO: 4109273 - RNA, 82 nt, Human
ggauaaauaucaaauaaucucacuuuauguggaaucuaauaaaguugauuucacagaagcagagaguagaauggugguuucc

SEQ ID NO: 4109274 - RNA, 117 nt, Human
ggauaaauuaacuggggaauauggauaaauuagaucuugcaaccugcuguguggcuuauuuaauguuggcccacaguuaguuugcauggcugauuugaaguuucuuuccucaaaucc

SEQ ID NO: 4109275 - RNA, 62 nt, Human
ggauaauaagcacagcaggaugucccucaaggugcuucagacuccggcuguguuuauuaucc

SEQ ID NO: 4109276 - RNA, 60 nt, Human
ggauaccagggaggaggggcugugugaaagucagagcugcgcuuuuuccugguuuuaucc

SEQ ID NO: 4109277 - RNA, 89 nt, Human
ggauaccauuuggagaucacuggaaaagcucaaagcaaaauuuauuuuauuguucuguuguuuuauugugagucccauuagaugguucc

SEQ ID NO: 4109278 - RNA, 89 nt, Human
ggauacugcacacagacaggccucuugucuuccucacaugugcugggccaaugacauguggugagaagaggcuguaaagugagccugcc

SEQ ID NO: 4109279 - RNA, 81 nt, Human
ggauagaguugucgugaaaguuuaaugaaauugcaugcaccccagcauguaacaguaguuacuauucuuacagcuguauuu

SEQ ID NO: 4109280 - RNA, 86 nt, Human
ggauagcagagaccugccacuggcaaugcagggcucucaguggaguguccuggcagacugugagggcagggaggaaucuguuguuu

SEQ ID NO: 4109281 - RNA, 86 nt, Human
ggauaggccagggaugggauggagucaguucugccugggaaacuaauccgaaucauuuaccuuucuguauuaaccuuggccugucc

SEQ ID NO: 4109282 - RNA, 88 nt, Human
ggauaguaaguggaagaugaaaauaugaaggcuuugagagguucuacuauaauuucucaauauuauaugucauaaauauauauuaucc

SEQ ID NO: 4109283 - RNA, 62 nt, Human
ggauagugguuugacuucauggacuuuuacuaccaagggucuccauguuaacaucacuuucc

SEQ ID NO: 4109284 - RNA, 68 nt, Human
ggauaguucugagaguugaaaacaccacugugaugauaaugacaguguuccugcucucaggaagcucc

SEQ ID NO: 4109285 - RNA, 62 nt, Human
ggauaguuuuccauuuugugauuuuuaaguggacauuacuuggaaaauucaaaauggcaucc

SEQ ID NO: 4109286 - RNA, 79 nt, Human
ggauauaauaagcuacugcuuacaaaaggaaagaauacaaauaugugucuugcgugggguaggcauugcuuauuuguuu

SEQ ID NO: 4109287 - RNA, 57 nt, Human
ggauauauggucaccuuaaacauaaucucccuaccuuguguuugagacuauguuucc

SEQ ID NO: 4109288 - RNA, 61 nt, Human
ggauaugagaggguaugcaucucugcugcaugaagagaagacagcagcaccucucguuuuc

SEQ ID NO: 4109289 - RNA, 76 nt, Human
ggaucaaagcaugauuuggcacuucacgagacagcuaucggcaccagugauucuguuuagaggugauguuuugucc

SEQ ID NO: 4109290 - RNA, 84 nt, Human
ggaucaaagucagaaauuaaauugaguuauaggaaauaaguuauguuucuuguacacuggaauuuaugguuguaaaauuugucc

SEQ ID NO: 4109291 - RNA, 117 nt, Human
ggaucacauuuuccugccuucuucauguuaguaauugagugcuagacaucaugaauauuacauuguucagagucuagauuuugcuauguuucugcaaagaagguugaaguuuguucu

SEQ ID NO: 4109292 - RNA, 71 nt, Human
ggaucauuaacacauccaucaccucgcguagcugccauucuuuuugcggguagugagaacuuuuaagaucu

SEQ ID NO: 4109293 - RNA, 68 nt, Human
ggauccagagcucuguuacucagccucuucuucaaucccugaggcagcuaagcagaauucuaggguuc

SEQ ID NO: 4109294 - RNA, 61 nt, Human
ggauccaggaggguuuagacaugaacccaauagguaaucagguccccaacucuucucaccc

SEQ ID NO: 4109295 - RNA, 63 nt, Human
ggaucccuaaaagucagcuucgacacaauaauuuguguguaaauaguuuauuauaggugauuc

SEQ ID NO: 4109296 - RNA, 88 nt, Human
ggaucccuguguccacucucugccgugccuguccccaucaucacuccuggugaagcagggacgauagcagaguucccacuggaggacc

SEQ ID NO: 4109297 - RNA, 57 nt, Human
ggauccguuugugugggaguauuuaagccuauugaugucuccuggaaagacgguucc

SEQ ID NO: 4109298 - RNA, 79 nt, Human
ggauccucuuguuucucugaaggccaugcucacuuguccaaguuccaucaucuauucagggacagacuuagaaagaucc

SEQ ID NO: 4109299 - RNA, 82 nt, Human
ggaucgcuuaagccugagagguggagguugcagugagcugagaucaugccacugcacuccagccuaggugacaaagugagac

SEQ ID NO: 4109300 - RNA, 130 nt, Human
ggaucgggggacccugggggcucaggaucuagcaaggggcggcaggaguaaaggaggaaggaaugacaggugcaaauaccuucccaccaaagcccuuguugcccucuggcuccuccccagaguugucccc

SEQ ID NO: 4109301 - RNA, 68 nt, Human
ggaagagcugguuuuaggcuaugucucugggauugacuuccagaaugucaaccaagaaccagcucacc

SEQ ID NO: 4109302 - RNA, 67 nt, Human
ggaagaggaagccucucuguuagucacugggucacagacccugacccuaucagagggccaccuuucc

SEQ ID NO: 4109303 - RNA, 115 nt, Human
ggaagaggauguccuguagaugcaacaugucaagaaagagauuugaaauaaaauuucaagugugcuuugacuggcuguauuuaaugaauguccuuaaucgaaucaauuaacuucc

SEQ ID NO: 4109304 - RNA, 130 nt, Human
ggaagaggcauccuccgagacuacggcaguggcuccucucuacucccagcugacccccagaacacugucaccgcgccgcggaggagagggggcuuugccucaagucaggaagauccucgccucuccaucc

SEQ ID NO: 4109305 - RNA, 82 nt, Human
ggaagaggcccaagcaggcaucuuggaggucaagugcggcauuugaccuuugauuuaggguguuauauguuggcauacuucu

SEQ ID NO: 4109306 - RNA, 64 nt, Human
ggaagagugcacaggacagggaauucgaaauuccaaauuagaaucuuggcucuguuugucuucc

SEQ ID NO: 4109307 - RNA, 70 nt, Human
ggaagaguucauuguuuugagaacaaccugaauaaguucagaauugauuuucaaaacagccuuuucuucc

SEQ ID NO: 4109308 - RNA, 71 nt, Human
ggaagauagugcccugagcuuaugcauucuuuaacccaaacaauccauauuagggacacauauggccuucc

SEQ ID NO: 4109309 - RNA, 82 nt, Human
ggaagaucauucuaggccuggcuugggcccaguccuugcuggaagcuugaacagggccaggcucuggagagaauguucuucu

SEQ ID NO: 4109310 - RNA, 118 nt, Human
ggaagaucucuguuuuaacauauauuguaagguuuagagcuacggccuuuaaaaaguaauaugauuacucuaaagguacaauagcuaccugcggaaaugaugaaaagaucaguuuucc

SEQ ID NO: 4109311 - RNA, 55 nt, Human
ggaagaugaagagaccugcccaaggucgcacagcuaacaggccucuugaucuucc

SEQ ID NO: 4109312 - RNA, 91 nt, Human
ggaagaugcagaugggcaggaaucccuggauggcuuccucaaggagaagcuacaggaaggaucuugcucaagagaaagagucugauuggcc

SEQ ID NO: 4109313 - RNA, 68 nt, Human
ggaagauuaaguugcuaaaguuuucuguucaaauaauauguucaauaaacauuaguaauuugacuuuu

SEQ ID NO: 4109314 - RNA, 58 nt, Human
ggacgccagauagcucucaagggaaccacccagauggcuucccuuccugucgggcucc

SEQ ID NO: 4109315 - RNA, 92 nt, Human
ggacgggggugugggcagggcacagagcugcucaugguggccagguccccugugcuacaaguaaggcagcuccugccauugccaccucgucc

SEQ ID NO: 4109316 - RNA, 94 nt, Human
ggacggggucacgcagguugccguggaggacaucugucgggggggaugccagacucgacugccaggugagcuccaggccuugagugucuccucu

SEQ ID NO: 4109317 - RNA, 59 nt, Human
ggacggugggggcaggagggaaagccaaggccguggguucuaauccugacucagcugcu

SEQ ID NO: 4109318 - RNA, 60 nt, Human
ggacgguucuggaucaccacuucugccucgcuguggugagaagggugggaaucuaugucc

SEQ ID NO: 4109319 - RNA, 129 nt, Human
ggacuaggcugggcugagcuggacugagcugagcuagacugagcugagcugggugagcuuagguggacugagcugggcugggcugagcugagcuggacugggcugggccgaacugagcuagacugggcu

SEQ ID NO: 4109320 - RNA, 59 nt, Human
ggacucaggucggucucacucuugccccuagggcuuccucgaggaacuggcuugguucc

SEQ ID NO: 4109321 - RNA, 60 nt, Human
ggacucagguuggagucacagugauuggggcagagauggucaugugacccaaccugagcc

SEQ ID NO: 4109322 - RNA, 56 nt, Human
ggauggaggcggguguggaaggugcucugaugcagcagcccagaugccuuccaucc

SEQ ID NO: 4109323 - RNA, 58 nt, Human
ggauggauacuauaggaggcacauuugagaucuuucaaauugcuccagcugaccaucc

SEQ ID NO: 4109324 - RNA, 63 nt, Human
ggauggaugugaucugccuccuacgggaaugcuauuuaaaggggcagccucacaauccucucc

SEQ ID NO: 4109325 - RNA, 96 nt, Human
ggauggccccaggcucgacuccugucucaguguauuugcagucggcauaggcuuauccugcagcagcuggacuggcagagucugggagccuugucc

SEQ ID NO: 4109326 - RNA, 72 nt, Human
ggauggcuuuccggacuuuggccaggauccuccuaguaaccccuuggcccaagcccgggacggccacugucc

SEQ ID NO: 4109327 - RNA, 83 nt, Human
ggaugggaggggcaaugagggaaagagucuggaggaaacaugccccuuacaaauuccaccacucaugggugucccaaucauuc

SEQ ID NO: 4109328 - RNA, 66 nt, Human
ggaugggcguggccgggauggaaaugggacuggauuccagagcaucagaccuggccgccuccaucc

SEQ ID NO: 4109329 - RNA, 90 nt, Human
ggaugggcugcguggguggcuguggcccaggccggauucugucacacuggguccucugucccuggggcacggccagccgggugcucaucu

SEQ ID NO: 4109330 - RNA, 103 nt, Human
ggauggggagguauguugaagcagcaugauuguaauacuauggucuucucuccuaccuccuaguuccacaguuuugucuguauuggaaauaucgucuccaucc

SEQ ID NO: 4109331 - RNA, 78 nt, Human
ggauggggguauagggugcuccuggguguggcugccccuccucugaggugcccaggcucaggggcuacacccccagcc

SEQ ID NO: 4109332 - RNA, 57 nt, Human
ggaugggugugaaaauggucaucuugauuuauacagaaccacauuuacagcccgucc

SEQ ID NO: 4109333 - RNA, 89 nt, Human
ggaugguaagaauguuguguuugauuuuuguuuguuuauuucuuugaaguacaugaacaauaaaauagaucacaggaaaauuauuaucu

SEQ ID NO: 4109334 - RNA, 85 nt, Human
ggaugguaggccucuugaguauguugugcaugggaauuugcugucaucacucauagcaacguguauaaacucaaggaucccaucc

SEQ ID NO: 4109335 - RNA, 110 nt, Human
ggaugguauguugaguucuaauuuaaaggagaugcuacagagauagguuggguuaagauaacuuccugcuaugagcuucugugauuuuuauuugaauuuucuucccaucc

SEQ ID NO: 4109336 - RNA, 65 nt, Human
ggauggucaggcuuuaacaucuguuuggguugccuugaagucaugaguucaaaaugccugccucc

SEQ ID NO: 4109337 - RNA, 76 nt, Human
ggaugguggagguggaggcugaacaucuggcauugcucccaacccuggaguccugauccuuagcucuccaucaucu

SEQ ID NO: 4109338 - RNA, 64 nt, Human
ggaugguggauggaucgauggauggaucugucuucccugaagaucugucuuccaccacacaucc

SEQ ID NO: 4109339 - RNA, 127 nt, Human
ggaugguguauucuuagcuuucauauuuaucuugacccacaagccuguggcuuucugggucacuuuguccaaagcagagccagagcuugucaugagguaucagugauuagaggaggacgcauuaucc

SEQ ID NO: 4109340 - RNA, 64 nt, Human
ggauggugucauggcugaaagugggggcucucaagcuuccguccacauccuggcugugccauuu

SEQ ID NO: 4109341 - RNA, 79 nt, Human
ggaugguguuccugcugagcgucugucauuucuacgggaugauuuccaaagauggagcuccuaggaugaggcacccucc

SEQ ID NO: 4109342 - RNA, 103 nt, Human
ggaugguucuuuaagguaaagauuccugggcucuauccugacccagugaaugagacucucugaggauggagcccaggcauuugcuuuccuuaauaaguugucc

SEQ ID NO: 4109343 - RNA, 130 nt, Human
ggaugguugcaaguuucaggacaugauaucuucuacuuugccaaucaggcugaauguuucuuauuuccuuuccaccugaacuguuugccagauaggagauggcaaauaaugaaacugauaguaacuuucc

SEQ ID NO: 4109344 - RNA, 72 nt, Human
ggauguaagugugggucauucaggauggagcagggaucuuccccauccugaauggucucagccaugucaucc

SEQ ID NO: 4109345 - RNA, 77 nt, Human
ggauguacagucaugcuuucuguuccucaaacuguaauguguuuguaagugaaaaaugaugaguaugauguggaucc

SEQ ID NO: 4109346 - RNA, 89 nt, Human
ggauguagagcugguugacacucugcuuucucaaacccugugcuucccugguauuaaugggguuuagcagacagugagcuucugccccc

SEQ ID NO: 4109347 - RNA, 110 nt, Human
ggauguaugauuucaagcuauuaaggugagcuguauaacagggaaggucaaaaccgugaacugaguccuaaauuauguagccuaccccagugacuuacauuguacuuucc

SEQ ID NO: 4109348 - RNA, 57 nt, Human
ggaugucgaggaugggguagcagcucaguccgccccuaccccaggccccucgaugcc

SEQ ID NO: 4109349 - RNA, 63 nt, Human
ggaugucuuuacuuugggauuuuguuaucuaagaucuaaaucugucccacauguaaggaugcc

SEQ ID NO: 4109350 - RNA, 57 nt, Human
ggaugugaaucugggcugagacagggcaauauagcuuaguuucaccaggguucuacc

SEQ ID NO: 4109351 - RNA, 58 nt, Human
ggaugugaggaggcuguauucuucucccuagagagauuuacacaugccuuuucccacc

SEQ ID NO: 4109352 - RNA, 128 nt, Human
ggaugugcauuuuucuaugaagaacauuccagaggauugaucaaacacugcagagaggcuggguuccuguaaaaguuugucgaucccugcaguauauccuucaugucagaaauucaugcaacuauacc

SEQ ID NO: 4109353 - RNA, 80 nt, Human
ggaugugcuucugccgguggaggcggugguucccauguguuaaaaugaagugcuucucaugcuuccaccugaagcgcacc

SEQ ID NO: 4109354 - RNA, 56 nt, Human
ggaugugcuuggaacaccgucauccaggauaggaauaugagguggcugggccaucu

SEQ ID NO: 4109355 - RNA, 58 nt, Human
ggauguguggcuggcucuuugucucuaggcagggacacagcugcagccacacccaucc

SEQ ID NO: 4109356 - RNA, 64 nt, Human
ggauguuagaacacuuuggaagcucugaauuuuaaaaauuugaaaguguugauaugugacaucc

SEQ ID NO: 4109357 - RNA, 79 nt, Human
ggauguuauuuucccaguuuaucauuuccaagucuuccuugaguggccaggaauggagagguggccucgaauaauguuc

SEQ ID NO: 4109358 - RNA, 56 nt, Human
ggauguuccaaagucucugagcugagaugggcucaccuccuuugcuuuggaacccc

SEQ ID NO: 4109359 - RNA, 67 nt, Human
ggauguugcacugaaggcuaggauuagaugauggaauccucuaauuauuuguuuuuacuaaauaucc

SEQ ID NO: 4109360 - RNA, 55 nt, Human
ggauguuugcccacuuucuugagauuuaaaauucagagagggagaugaaacaucc

SEQ ID NO: 4109361 - RNA, 59 nt, Human
ggauuaagaccugucaguacaccaagacuggggcccagucaccuggcagguuuuuaucu

SEQ ID NO: 4109362 - RNA, 70 nt, Human
ggauuaagugcaauguuuuacuuaaaaguaguuuccuacucuuuucaggaauauuauuggcaauuaaucu

SEQ ID NO: 4109363 - RNA, 65 nt, Human
ggauuaauauugugacacaugccguccugagaaaugucucagacuuuuguucaacgaguuaaucc

SEQ ID NO: 4109364 - RNA, 67 nt, Human
ggauuacaauuuuuuggaagaguaaaaaguucacacuuuugaaauuucacagaaggauuguagggcc

SEQ ID NO: 4109365 - RNA, 95 nt, Human
ggauuacagauagccgcggagucgguggacccccgcuuuuucccgccaucuggucuccucagcugggggucgcgccucugggcagaucuguggcc

SEQ ID NO: 4109366 - RNA, 100 nt, Human
ggauuacucaccagacagauggcagugagguuccuagccugauagcagggaccuaauagcaggcuaggaaccucacugccaucugucuggggaauaaucc

SEQ ID NO: 4109367 - RNA, 81 nt, Human
ggauuacuuguuucaguuuuuuacuuccucugcuaugagacuuugcaguacaguaaagcaagcugaauaugcaucccaucc

SEQ ID NO: 4109368 - RNA, 126 nt, Human
ggauuagcaggugaaggccaaugaaaguccauauaauggaaaacagaaguggcaggaaauuuugauauauucuuauacucuggaauuuuauucuuuuggcuuuauucccuucuuuguaaguaaucu

SEQ ID NO: 4109369 - RNA, 58 nt, Human
ggauuagcuuuccuuguugccugugcucagcacagcaugaagagaggaagcauggucu

SEQ ID NO: 4109370 - RNA, 103 nt, Human
ggauuccagagaugucuugauuuuuauuaauguugguuucaauggauguuccccagguuuguaaugagauuuuaauauugagaaaaucucugucuuuggcucc

SEQ ID NO: 4109371 - RNA, 130 nt, Human
ggauucccucagcauagguagguucugggcagucaaaaaugaggagagauguucucuagagguggcuagcagagcacaucuucauucugcacucugacuccuccuauuaguuggaaauaacagggaaucc

SEQ ID NO: 4109372 - RNA, 62 nt, Human
ggauuccuggaaagaauuaaagagaauuugcuggagauuugaauagggcuuugcagggaacc

SEQ ID NO: 4109373 - RNA, 88 nt, Human
ggauuccuggccaggggcgguggcucacgccuguaauccuagcacuuugggaggccggagcgggucgaucgccugaggucaggaguuc

SEQ ID NO: 4109374 - RNA, 128 nt, Human
ggauucgcgggagggcagggagagcagacagacagacagacagccguggccacccuagagacacacugcagccgugguggcccacaggacucuuuagucucugugcucuaaggcccccugcagagucc

SEQ ID NO: 4109375 - RNA, 83 nt, Human
ggauucggggccucuagcagggccaggcugggaaccgaggacacuuggucucccucccugggccugcaacaggccugaaauuc

SEQ ID NO: 4109376 - RNA, 102 nt, Human
ggauucucccugccuccaaguggcucucccagucaggcucaggauugggcucccaguccugugcucagacauggggguucaaauuuagugcuauaaggaucc

SEQ ID NO: 4109377 - RNA, 56 nt, Human
ggauucuguguccaauggccuuagcaggaagauugcuucggaauuuggcacgaacc

SEQ ID NO: 4109378 - RNA, 78 nt, Human
ggauucuugugccucugggugacgaaaggugaagggauuguacgcuucgcccacgccagccuggggcucgggaucucc

SEQ ID NO: 4109379 - RNA, 73 nt, Human
ggauugaaacccaaggcugcuggcuucugagcucaugcuguacccugggcaggcaaggcagccuggugauucc

SEQ ID NO: 4109380 - RNA, 58 nt, Human
ggauugaaggcccuuaacugaugccaaaacacccaccaguaauagaggcuuugagucu

SEQ ID NO: 4109381 - RNA, 76 nt, Human
ggauugagguauuuuggaaugucaaaagucugcuauuccauaaauguagcauuaauauucuagaauauuucucucc

SEQ ID NO: 4109382 - RNA, 56 nt, Human
ggauugagguuuaaagaguuuuugagcaaguaauuaaauuucugcaagccucaacu

SEQ ID NO: 4109383 - RNA, 124 nt, Human
ggauugcagauacacauagcaggaguugcuuuagauuguuuugggggcgaaaguaauauuuuuuucaguauucaaauaugucuuacguaguuauuucugauaaggaagaaacauuuguuaaucc

SEQ ID NO: 4109384 - RNA, 95 nt, Human
ggauugcauaccuugucugaagucacacagaugcaaaaggaaggacuagaaacugacccugggcaucuuuugugacucaggcgaauguucuuucc

SEQ ID NO: 4109385 - RNA, 60 nt, Human
ggauuggugauagacucuuggugaacaaagauuuccuuucauaaaguuaucaccaaaucc

SEQ ID NO: 4109386 - RNA, 64 nt, Human
ggauuuagggcaaucaucaggagcagcccugugacauggagcuggccuugaggugucuuuauuc

SEQ ID NO: 4109387 - RNA, 73 nt, Human
ggauuugacuuugccugcuggccaugcagaggccaauuccugaauuccugcuggccaagcagaggucaauucc

SEQ ID NO: 4109388 - RNA, 68 nt, Human
ggauuuggcagguggagacagcagagcagguuaugacaccagcuuugucuucccacguguggaucacc

SEQ ID NO: 4109389 - RNA, 71 nt, Human
ggauuugguuugccaguauuuuauugaugauuuuugcauugauauucaucagggauauuggucuaaaauuc

SEQ ID NO: 4109390 - RNA, 93 nt, Human
ggauuuuaaugugggaauuuauuuucuggaauuguccaauguacaaauagauaaaauaauuucagagguagagauucuaaaguaauugaaccc

SEQ ID NO: 4109391 - RNA, 69 nt, Human
ggauuuuacuaggccacgaaggagaugauagaaaccauuccagacucuuugggugugccagaggaaucc

SEQ ID NO: 4109392 - RNA, 98 nt, Human
ggauuuucucugcuccagugucugagcccuuagcugggaugacucacaugacucaggaagcugaaggcuagaacagcugguuuggagaaaccaauucc

SEQ ID NO: 4109393 - RNA, 73 nt, Human
ggauuuugauaagugcuuuggaagaaacguucuucggaacauucauucauucaacaaauauuuauugagcucc

SEQ ID NO: 4109394 - RNA, 66 nt, Human
ggauuuuguuccuagcuuuaaacaaaaccuaugcuuagaguuaaguuagaguagagaacaugaucc

SEQ ID NO: 4109395 - RNA, 69 nt, Human
ggauuuuguugaugguggaguagccuccugauacuguaugguggcuaucuuccucaaugucagcuuucc

SEQ ID NO: 4109396 - RNA, 76 nt, Human
ggcaaaaaugucuacagaauguuaauauuuuuaacuccuugacaaauaugaauagucugugguucauuuaaaugcc

SEQ ID NO: 4109397 - RNA, 76 nt, Human
ggcaaaagcauuucuugguuuuaaaagguacuucaccccuuuacaaccuguguaauugcuauuggaaugcuuugcc

SEQ ID NO: 4109398 - RNA, 82 nt, Human
ggcaaaagugaguuuugaaccuaaggcccuggguaugccgccuacacaggcccccacaccugguuuaaugcucacuguugcu

SEQ ID NO: 4109399 - RNA, 101 nt, Human
ggcaaagaaaugccuuguuuuagauuauuuuguguccuguuucccugucuauaaggaaggacccuauagaaaucaggacaggacugaauccuaacuuugcc

SEQ ID NO: 4109400 - RNA, 73 nt, Human
ggcaaagacccagaaggcaagcacaaacuuggcauguuugagaaguuagaagugugucaucugugucucuguc

SEQ ID NO: 4109401 - RNA, 71 nt, Human
ggcaaagaugcuacccagccauugcuuucuaaggaagaguguagugcuuucaucuggagugucucccugcc

SEQ ID NO: 4109402 - RNA, 78 nt, Human
ggcaaagcucauccaagcauaguucaaagccacuuuuguauaaaggcuuaaacuacuaggaugaauuuuuuagaugcc

SEQ ID NO: 4109403 - RNA, 69 nt, Human
ggcaaaggaggggaaggaaaguuauuagcagagaucucccagaaguccucuguaacugucccuuuugcc

SEQ ID NO: 4109404 - RNA, 57 nt, Human
ggcaaaucaaagggccagcagcucucucccugcuucugccaaaggcuuuguuuugcc

SEQ ID NO: 4109405 - RNA, 86 nt, Human
ggcaacaagaaacagaguucuuaaagcccagaugauaagggccucagucugggugugaaugaacuuggccugacuucuuugcugcc

SEQ ID NO: 4109406 - RNA, 109 nt, Human
ggcaacacagauuuggccuggcuuuugcuuuuuugggaugccugccuugggaucccagaggcauucuauaagaagucuggugcucagaggccaucauguuagaaaagcc

SEQ ID NO: 4109407 - RNA, 59 nt, Human
ggcaacaggagaaaucuggucaaaagccaguuugucuccaguuuucuucugccuuugcc

SEQ ID NO: 4109408 - RNA, 68 nt, Human
ggcaacaucucauuagauucuucuucuuggaguaaacaauagaguccagaagccugaugaggucugcu

SEQ ID NO: 4109409 - RNA, 92 nt, Human
ggcaacauguuaauggguaauagacaagauuucuguggucauguaaugucaauuuaaaagacaucacuaaauguugucuaugacauguuguc

SEQ ID NO: 4109410 - RNA, 98 nt, Human
ggcaacugaauuuguaaucuuuagugaccaucucauucucaccacgaggccuggagaaaaagagaugguguacagggagagaaaagcauucagcagcc

SEQ ID NO: 4109411 - RNA, 70 nt, Human
ggcaagaauauaguuaccaaauucugaugcugacucaaaagcuaacaaaaugaugugauuuuauugugcc

SEQ ID NO: 4109412 - RNA, 81 nt, Human
ggcaagagugucaguuuccaugucugugaacuggagauaagauucgucucuaaauacagaugucaugguggcucucucacc

SEQ ID NO: 4109413 - RNA, 76 nt, Human
ggcaagauccaaggggcuaggagcucacacugagaccaaguucacagugcaucaucauuggccaguggauguuguc

SEQ ID NO: 4109414 - RNA, 59 nt, Human
ggcaagccucuuguucugagagcuguugauggauaggaaaucagagaaagaggugaguc

SEQ ID NO: 4109415 - RNA, 59 nt, Human
ggcaagcugugcugacaagaucagaagguuacuaucagaaccgucagcuccaguuugcu

SEQ ID NO: 4109416 - RNA, 81 nt, Human
ggcaaggaguccgagucuuggcuaugcauagagcucagucccguauccgagucuucgucguugccaggaccgcucuuggcc

SEQ ID NO: 4109417 - RNA, 81 nt, Human
ggcaaggcauuuaguauucugcucacaugucccggacgccuacaaugugccgggcacuguguucagagugcagcugcugcc

SEQ ID NO: 4109418 - RNA, 55 nt, Human
ggcaaggccaggccuccaagaccuuccuccgcgggucuguggucaaggccuuguc

SEQ ID NO: 4109419 - RNA, 56 nt, Human
ggcaaggccuugcccagcauucugcacuacagaggugcuggcuauaaaggcuuucc

SEQ ID NO: 4109420 - RNA, 62 nt, Human
ggcaaggcugcugaggauguugggggagaggacccagccuguccagccagcugguccuugcc

SEQ ID NO: 4109421 - RNA, 55 nt, Human
ggcaagggacggccgugagacaggaugaauggcacacugcuggcugacccaugcc

SEQ ID NO: 4109422 - RNA, 130 nt, Human
ggcaagguggccagguguucguauccauacauuggccaggcuuugguggggggcugccccuugggagagcaaggcaguucucagccaaggcaauccccaugagggacacaccuguaugccuuugacagcc

SEQ ID NO: 4109423 - RNA, 62 nt, Human
ggcaaggugugcaguagcaggaggccugggaagggcccagguccagacuguguacccuagcc

SEQ ID NO: 4109424 - RNA, 79 nt, Human
ggcaagucccuacagcugagggccauucccggcugggaaauaucagcagcuggcagucccaucagcugggaaggguguc

SEQ ID NO: 4109425 - RNA, 79 nt, Human
ggcaaguggcaaggccuuauucuuaggaaacacuacucuggcuauuggguagacaauggaauguggccugccacagguc

SEQ ID NO: 4109426 - RNA, 62 nt, Human
ggcaaguuuuagauugacuccaaugucaugugcuuugacagaaagaguauuaaagaucugcu

SEQ ID NO: 4109427 - RNA, 59 nt, Human
ggcaauaaaaguauccaguuucccagaugagaaaacugaaguggguguaaguuauugcc

SEQ ID NO: 4109428 - RNA, 96 nt, Human
ggcaauaucucauauuacagaaauauggucaaagagacgagaaagacaugaagaccucucuguccuagucuguaguguauauuugagaaaucugcc

SEQ ID NO: 4109429 - RNA, 94 nt, Human
ggcaauccuuuaaauuggugggagugagggcaugccaggcuggacagugcaucuuaacugcugccccauuccauaccuagcacagggaugggcc

SEQ ID NO: 4109430 - RNA, 87 nt, Human
ggcaaucgcaacauuuucugguaugcuucuauugaaugguugacaccggccauugaagacuugguauccguggaaauuugaauugcc

SEQ ID NO: 4109431 - RNA, 116 nt, Human
ggcaaugcccggggauagcucucgggacccagguaauccugugcuucucaucccuuccuguggagacagcucuggguuccacacucuagcuguccugaucuggccuucgcuaugcc

SEQ ID NO: 4109432 - RNA, 61 nt, Human
ggcaauggcauugagaaagauugcaaguaguaaugugcaggugcguuuucaagccuccgcu

SEQ ID NO: 4109433 - RNA, 65 nt, Human
ggcaaugguuugauggacaaaaugaacuguuaguucuauugucuuuucucagaucagucagugcc

SEQ ID NO: 4109434 - RNA, 60 nt, Human
ggcaauguagcuugucccacaucauaugcuaauagaugugagcccaggcugcuuucugcc

SEQ ID NO: 4109435 - RNA, 60 nt, Human
ggcaauuacguauuagucaugugagcggagacagaaccgauuaugacaaguacuaguucu

SEQ ID NO: 4109436 - RNA, 81 nt, Human
ggcaauuauuuauugagcaccuacaguauuaccaagcacacaucuagguucugugucuggugcacaaaacaaauuuuugcc

SEQ ID NO: 4109437 - RNA, 65 nt, Human
ggcaauuugucugcuugcugccuucccucgugucuggggguagcugcagcaggcuggcaaaugcu

SEQ ID NO: 4109438 - RNA, 77 nt, Human
ggcaauuuugccacccaggggacauuuagcaaugacuagagauguuucugguugucacaacugggugggagggugcu

SEQ ID NO: 4109439 - RNA, 74 nt, Human
ggcacacagcaauggcaggcggagagugacacugcagguuucuagucccaauguccaugcugcuaaugacugcc

SEQ ID NO: 4109440 - RNA, 56 nt, Human
ggcacacaggcagauggaguguccuuucccacaucacuucaucauacuaugugacc

SEQ ID NO: 4109441 - RNA, 77 nt, Human
ggcacacucacaaccccucaugccagacagcaugcaaucacgggaugcucuguggggcugagggaagaaagugugcc

SEQ ID NO: 4109442 - RNA, 57 nt, Human
ggcacacucacuucugcccugagggggagcugcucucuggcugaaaggggcugugcc

SEQ ID NO: 4109443 - RNA, 119 nt, Human
ggcacacuugauggggaugcaagggacugaggacaguuugggcucugccuguggccuuccaggugagggccucagcucccagcccaggcuggccaguccagagcgccucuugggugacc

SEQ ID NO: 4109444 - RNA, 81 nt, Human
ggcacagagaggcuguggcacuggucuagugucacacagcauguuggcagaggggccaccugcccagcccuuccugaggcc

SEQ ID NO: 4109445 - RNA, 92 nt, Human
ggcacagagcuuguaagaggggugguuauguggccacaggaacacgaacagaauugcuguccauccaggcccauagacacuucucgugugcc

SEQ ID NO: 4109446 - RNA, 57 nt, Human
ggcacagcaggagcuaugugaaugaaugagucauuuaagcugaaccuugugugugcc

SEQ ID NO: 4109447 - RNA, 63 nt, Human
ggcacaggccuggagaggagaaagggcccagagauucucaugugcccuccucuuaggcuggcc

SEQ ID NO: 4109448 - RNA, 55 nt, Human
ggcacaggggcaaacuguaggggagugcuuggcuguaccuggagagcucuuggcc

SEQ ID NO: 4109449 - RNA, 83 nt, Human
ggcacagggucuugcccauggugggggccuaacaaaugcauugauucuaguaaacucccacugugaauccaaggccugguucc

SEQ ID NO: 4109450 - RNA, 111 nt, Human
ggcacauaauaggcaucccauaagcacuggaugacugaguaaauaaaacacguuguguucaugauuuauucacucauucagccagugcuuaugggaugucuaccaugugcc

SEQ ID NO: 4109451 - RNA, 61 nt, Human
ggcacauguccucaggccgcugguggaggcuucacucuccaggagagguguggggacugcc

SEQ ID NO: 4109452 - RNA, 77 nt, Human
ggcaagggcugggggaggcucugcucagcccccggguggcccugggggacaccagucucucucugggccucaauguc

SEQ ID NO: 4109453 - RNA, 60 nt, Human
ggcaaggguucagauauacucauaugggggcagucucuuugcaguuucagaacccugacc

SEQ ID NO: 4109454 - RNA, 63 nt, Human
ggcaaggguugaagauaaauaagguagcaacgucuacuuuauauuuuuggcccuaacuaugcc

SEQ ID NO: 4109455 - RNA, 63 nt, Human
ggcaaggguugaagauaaauaagguagcaacgucuacuuuauauuuuuggccuuaacuaugcc

SEQ ID NO: 4109456 - RNA, 82 nt, Human
ggcaaggucugaacagcugucagggaaugcaagugaugcuaagaacacuagcuccagcuucaacugcacagucaaccuuucc

SEQ ID NO: 4109457 - RNA, 68 nt, Human
ggcaaguaaggucauuuucugagugcuuacuauuugcugggcacugugcugggugcuuuacacauguu

SEQ ID NO: 4109458 - RNA, 60 nt, Human
ggcaaguaggaauccgaaugaguaguuucacauaaggcuacucauuuauuuuugcagucc

SEQ ID NO: 4109459 - RNA, 71 nt, Human
ggcaaguauggaaagggaguuuaauuuggggcccuaguaauggugcuaucugaauaaaucuuuucagugcc

SEQ ID NO: 4109460 - RNA, 58 nt, Human
ggacuguuuugaggauucaaucaauuaauauagauauaagguccuuagaacagugucc

SEQ ID NO: 4109461 - RNA, 60 nt, Human
ggacuucaugugcaagcgcuuugccuuaaugaguacugcagcaaaugcacagugagggac

SEQ ID NO: 4109462 - RNA, 60 nt, Human
ggacuucuauggauguuugaucuuccuaauggcagaccauuuacucccauuggaaguacc

SEQ ID NO: 4109463 - RNA, 64 nt, Human
ggacuucuugggccugcagggagcuccaaacagaucuccagccucccugagcccaaggggcucc

SEQ ID NO: 4109464 - RNA, 76 nt, Human
ggacuugccucuguuucacuugccuagcccaguucaggagauguuccuguuuuuuauguaaguggcagaucagucu

SEQ ID NO: 4109465 - RNA, 58 nt, Human
ggacuugcuaagguggcugaacuccgaagacgggugaacgcucagccaaggcaggucu

SEQ ID NO: 4109466 - RNA, 99 nt, Human
ggacuugugggaaugauggaacaguggcagccacauggcagccgacaaguccguggcuccagugcucaugccguugaccuggucuguccucgcaaggcc

SEQ ID NO: 4109467 - RNA, 66 nt, Human
ggacuuguggggguuccuggugaaaaucugaguucaaaggccuuagaaccaggaacucuaauaucc

SEQ ID NO: 4109468 - RNA, 71 nt, Human
ggacuuuacgagugugauuaagguaaggaccuugagaugaggagauuauccuggauuauauaugugaguuu

SEQ ID NO: 4109469 - RNA, 65 nt, Human
ggacuuucucaggcacuucuuccccgcacugucugcuugggcggggcaggagccuggguuaaacc

SEQ ID NO: 4109470 - RNA, 117 nt, Human
ggacuuuuguaaauauuguuugucagauucagaaaauucucuguuccucugauuugcaaagauggcuguggaauagagaguagguuucaggagggagagaacagaagcagaaagucc

SEQ ID NO: 4109471 - RNA, 97 nt, Human
ggagaaaaacagcauuacauacuaguacagguuuaagucagugaggccaagagcuggccagagcacaggcugguaguaaaugccugacauguucuuc

SEQ ID NO: 4109472 - RNA, 68 nt, Human
ggagaaaacaggguggugaauagcuauagugguagugagguaacuggccacagccucuucaccccucc

SEQ ID NO: 4109473 - RNA, 104 nt, Human
ggagaaaauucaaacaauuuaguguagcauucagagucaacucugucuuuaucuucuaucucuuacgguggcucuguuuguuaacuagacuggucuuauucucc

SEQ ID NO: 4109474 - RNA, 74 nt, Human
ggagaaagaaauacaugguuuuugagugcauaauaugugccagaugcucagcuaucaguguuccugaaguuucc

SEQ ID NO: 4109475 - RNA, 69 nt, Human
ggagaaagagggggacuugaagagugagauguagacaucugagccuauuucaaauuccucugagccucc

SEQ ID NO: 4109476 - RNA, 58 nt, Human
ggagaaagcagucccuuccgaccgccugaacagggugggaauagaagaugcauucucc

SEQ ID NO: 4109477 - RNA, 56 nt, Human
ggagaaagcuaugugggggaguccagagaaaaccaggcgcuuccaugguccucucc

SEQ ID NO: 4109478 - RNA, 89 nt, Human
ggagaaaggauauuugugguaacggagaaauuugccacccagcgcuguugcuuuggugucauguuucugcggucacaaguuauucaucc

SEQ ID NO: 4109479 - RNA, 66 nt, Human
ggagaaauuauauucacuuguguccaaccacuguuaaagaaaugguugcacauggauggguuuucu

SEQ ID NO: 4109480 - RNA, 55 nt, Human
ggagaaauugauccuucugguuaugggauauucuuagcagagaguuaacuucucc

SEQ ID NO: 4109481 - RNA, 66 nt, Human
ggagaacacgaggaggcccagcgauguggcagccgucugcgcuggccauagccuccuguguugacc

SEQ ID NO: 4109482 - RNA, 91 nt, Human
ggagaacaugaaucaucuuugguaaucugagggcagaguaugguguucaugcuccagcaugacccucaaugauuccucuuucauguuuuuc

SEQ ID NO: 4109483 - RNA, 83 nt, Human
ggagaacucagaguaauguuugagauguuggauuugagaugccuuucagauauccaaaaggagauauucaguuugaguuuacc

SEQ ID NO: 4109484 - RNA, 71 nt, Human
ggagaagagaugacugauggcugauuauuaaugcucuuucacaggugauaugaaucaaucacucuucaucu

SEQ ID NO: 4109485 - RNA, 57 nt, Human
ggagaagccacucucccaggaucuugucagcaagagggaaauccaggagugcuuccc

SEQ ID NO: 4109486 - RNA, 76 nt, Human
ggagaagccgaagcgcaaggugucagcagguuucgucucuucugaggccucucuccuuggcuugcagauggccucc

SEQ ID NO: 4109487 - RNA, 81 nt, Human
ggagaagcugcagggagaagagaacaaagcccucacuguggucaggauggguguaucauuccuuuucucuggggucauucc

SEQ ID NO: 4109488 - RNA, 66 nt, Human
ggagaagcugcugugggcaggguagcuggcuaggcagccagcuucucuguuccagccccuuugucc

SEQ ID NO: 4109489 - RNA, 86 nt, Human
ggagaaggaacaaggugcuguggacuugggagccagaaaaggaccuggcuuggugccagcuaugcaucuuucuacccauugccucc

SEQ ID NO: 4109490 - RNA, 77 nt, Human
ggagaaggacuaggguccaagccuuauaauuacuacaucagcacaguauuauagaauguuggccccgucucuuuucc

SEQ ID NO: 4109491 - RNA, 82 nt, Human
ggagaaggagaggcuggugggaaacccuccugaugacuucauauaaaaacaagagcuucucaacaguuaucucuuuuucucc

SEQ ID NO: 4109492 - RNA, 79 nt, Human
ggagaaggauguccauuucaaaccucauuugcagcugcuuuuuagucuuagugguuuuggaauggaauucaucugcuuc

SEQ ID NO: 4109493 - RNA, 75 nt, Human
ggagaaggccaguggggaguuuccagaugugucacucaaaagacaaaaagcuccauuacuguccucacuuucuuc

SEQ ID NO: 4109494 - RNA, 76 nt, Human
ggagaaggcguggaaagacauucagccgcugggcaaaugcugagaaugucugaggguccuucaggagcccuucucc

SEQ ID NO: 4109495 - RNA, 60 nt, Human
ggagaagggccaauuccauguauucaccagguaaaaggacagcaggggaugcccuucacc

SEQ ID NO: 4109496 - RNA, 86 nt, Human
ggagaaguacggugagccugucauuauucagagaggcuagauccucuguguugagaaggaucaugaugggcuccucgguguucucc

SEQ ID NO: 4109497 - RNA, 77 nt, Human
ggagaaguuuugugucuagcucagggauuguaaacgcaccagucagcacccugucaaaauggaccaaucagcucucu

SEQ ID NO: 4109498 - RNA, 67 nt, Human
ggagaauaggcagguuuugauggcagauggcuacacccaagccacagaucguucugucacuucaucc

SEQ ID NO: 4109499 - RNA, 88 nt, Human
ggagaaucacuugaacccaggagauggagguuguggugagccaagaucacgccaucgcacucuagccugggcaacaaagugagacucc

SEQ ID NO: 4109500 - RNA, 89 nt, Human
ggagaaucacuugaacccaggaggcagaaguugcagugagccgaguuugcgccauugcacuccugccugggcaacaagaggaaaacucc

SEQ ID NO: 4109501 - RNA, 88 nt, Human
ggagaaucgcuggaacccgagagguggagguugcagugagccgagauggcaucacugcaguccagccugggugacagagcgagacucc

SEQ ID NO: 4109502 - RNA, 89 nt, Human
ggagaaucgcuuaaacccaggaggcagcauuugcagugagcuaagaccgcgccauuguacuccagccugggugacaagagcgaaacucu

SEQ ID NO: 4109503 - RNA, 94 nt, Human
ggagaaucgcuugaacccaggaggcggauguuguggugaaccaagaucacaccacugcacuccagccugggugacacagcaagacuuuuucucc

SEQ ID NO: 4109504 - RNA, 85 nt, Human
ggagaaucgcuugaaccuggaagguggagguugcagugagcugagauagcgccguucuccagccugggugacagagcgaggcucc

SEQ ID NO: 4109505 - RNA, 87 nt, Human
ggagaaucgcuugaaucugggaggcggagguuguagugagcugagaucacaccacugcacuccagccugaugacagagcgagacucc

SEQ ID NO: 4109506 - RNA, 89 nt, Human
ggagaaucucuugaacccaggagguggagguugcggugagccaagauugggccauugcacaccagccugggcaacaagagugaaacucc

SEQ ID NO: 4109507 - RNA, 88 nt, Human
ggagaauuacuugaacccaggaggcagagguugcagugagccaagauugugccacugcacucuagccuaggcgacagagugagacucc

SEQ ID NO: 4109508 - RNA, 96 nt, Human
ggagaauugccugaacccgggaggcggagguugcagugagcugagaucgcaccacugcacuccagcacuccagccugggugacagagcaagacucu

SEQ ID NO: 4109509 - RNA, 89 nt, Human
ggagaauugcuugaacccaagagguggagguugcagugagccaagauugcgccacugcacuccagccugggugacaagagccaaacucu

SEQ ID NO: 4109510 - RNA, 87 nt, Human
ggagaauugcuugaacccuggaggcagagguugcagugggccaagauggugccacugcacucuggccuggugacagagugaggcucc

SEQ ID NO: 4109511 - RNA, 64 nt, Human
ggcacauuuauaaguggacauaggaaugagaaagaguaaauucuguguaauuuuuuaaauggcc

SEQ ID NO: 4109512 - RNA, 79 nt, Human
ggcaccagagggaguuucugagguugcagaggugacugggcaauaucuuccaagcucccugguguauucugguuuggcc

SEQ ID NO: 4109513 - RNA, 119 nt, Human
ggcaccaucuuggaagcagagagaacccuuaccagauucugaaucggcugaugccuuaaucuuaggcuucccagcuuuuaggacugugagaaauaaauuucuuuuguuuacaaaguguc

SEQ ID NO: 4109514 - RNA, 75 nt, Human
ggcaccaucuuuuggaggggaauuuagcagcgugcugacacucugacccagcaauuccccuucuaggaaucuguc

SEQ ID NO: 4109515 - RNA, 58 nt, Human
ggcaccauggucugauaaacuaugcucaggagagucaugggauagaaauauggcugcu

SEQ ID NO: 4109516 - RNA, 56 nt, Human
ggcacccuuggggggccacagcagcgugagcagccugggggaccaaggagggugcc

SEQ ID NO: 4109517 - RNA, 76 nt, Human
ggcaccuaacucacuccaaaaaggcauucuggcaaaaauuaccuuugauuugcgaugcacuggaugaguaggaguu

SEQ ID NO: 4109518 - RNA, 95 nt, Human
ggcaccugggaugccauuugucuaaggagcucugacaaggauuuucugcaaaccauuguaguaucaucugcagaccuuggacaacucucagugcc

SEQ ID NO: 4109519 - RNA, 120 nt, Human
ggcaccuggggcuuccugggcuucgauccucagugguggggagggacccugccagcccagguuggggucuguggccagcccucuucccacacuagcugcgggugcaggaaccccuuuguc

SEQ ID NO: 4109520 - RNA, 58 nt, Human
ggcaccuuggcuagugaucaaccgggaugauguucccagauacacagcacagagggcc

SEQ ID NO: 4109521 - RNA, 85 nt, Human
ggcaccuuucuuuucuuucauauuguccagucagcgcuuuuaaaauagaaaagcgggaaguaccaguagaaaaaagauuagggcc

SEQ ID NO: 4109522 - RNA, 96 nt, Human
ggcacgacagcauaacaguaugagacugugagugagaaauaaccacaaagguucauuucucacucacaguccauguccacugugugcucuggagcc

SEQ ID NO: 4109523 - RNA, 78 nt, Human
ggcacgcaauucaaauuuguuccaccugauauucugugaccagaaacuauuaugguaaacaaaauuuuuugguguguc

SEQ ID NO: 4109524 - RNA, 77 nt, Human
ggcacgucugcugagaacagagcucugagcuuuugauaaauggaagaagcuccuggcuuuccucucaccacagaucc

SEQ ID NO: 4109525 - RNA, 76 nt, Human
ggcacuauucauguuguacucuguggaaugaagcuuccaggagcacugcuccauagaaugcaguguaaauugugcc

SEQ ID NO: 4109526 - RNA, 75 nt, Human
ggcacucacugccauguugauagauguguaaagagauuaauuccaggcuugucagucaaggugugcaggcagguc

SEQ ID NO: 4109527 - RNA, 82 nt, Human
ggcacucagcaagguggagaaggaugggugcagagagcaaucggggugaucuaaccuuccucuuuauucuugucugaauguu

SEQ ID NO: 4109528 - RNA, 64 nt, Human
ggcacucuuuuuccucccagcuaggaaaguguuaguggagaccuaguggggagucaggagugcc

SEQ ID NO: 4109529 - RNA, 69 nt, Human
ggcacugacacguggagaauuccgaagccucaccugcuauacgugagguuuaugauucugcacguggcc

SEQ ID NO: 4109530 - RNA, 59 nt, Human
ggcacugcccacccucacaggguaugagucaguagucagcccugugauuggcaaguguc

SEQ ID NO: 4109531 - RNA, 65 nt, Human
ggcacugccggccugggugucccgcggacaggugcccgucggcgggcgcucaggcugcagcugcc

SEQ ID NO: 4109532 - RNA, 74 nt, Human
ggcacugcugugaggggaacugaugcccauugucuccaccugagggcccugcccaucucuccucacauucugcu

SEQ ID NO: 4109533 - RNA, 78 nt, Human
ggccauugucaguuuaauauagucaauguaacugaagaauggguuaccuugacuagaauuauuuaaucgacagugacc

SEQ ID NO: 4109534 - RNA, 60 nt, Human
ggccauuucgugcugaaucaaggaaaaacaccaagauuugggggcacggaaucugagguc

SEQ ID NO: 4109535 - RNA, 60 nt, Human
ggcccacacugacagcugagcugggccccucaauuucccggccacggaggcaguguggcc

SEQ ID NO: 4109536 - RNA, 74 nt, Human
ggcccacuguguggcaagggagccaagaaagcagggcccaguggcucugcugaagccccuugcauguggaggcc

SEQ ID NO: 4109537 - RNA, 80 nt, Human
ggcccacuugaaagugcuuucccacauuuguugcaaugccaaaguauagaaggaagugcagggggaaguacugucaggcc

SEQ ID NO: 4109538 - RNA, 119 nt, Human
ggcccacuuggaggcugguagagaguuaugggaugcgggcccgcuccacugccagggagcauugcugcgguaggggggccggcccccaggagugaugcuuuccugcuccgucuugggcu

SEQ ID NO: 4109539 - RNA, 74 nt, Human
ggcccagacacauaggaccacacugugguauguguaugaacuguuuuucacauugugguccuauaugucugguc

SEQ ID NO: 4109540 - RNA, 82 nt, Human
ggcccagagugggcgugcccggcagucacacacccagggguugucguugagccucagguacugcagggcacgcaggggggcc

SEQ ID NO: 4109541 - RNA, 56 nt, Human
ggcccagccuggcaacaaugacgcugcucgcuacgcuuguccugcgagguagggcu

SEQ ID NO: 4109542 - RNA, 58 nt, Human
ggcccagcugggcggggacacggcggccucgggcuugugcuccagccccagccgggcc

SEQ ID NO: 4109543 - RNA, 68 nt, Human
ggcccaggcucugugcagccugcaucugaggaagaaugcccacagaggccggcacagggccucaggcc

SEQ ID NO: 4109544 - RNA, 103 nt, Human
ggcccaggguucuaggggaggccaugggcagaaucuuugaauaaguuucguggagcuccuuguaaagcugcugucaaugcccuguccuuagacccucugggcc

SEQ ID NO: 4109545 - RNA, 63 nt, Human
ggcccaguguaccccaggcaguugcaucaauaaaaucugcuugaguggguucagcacagggcu

SEQ ID NO: 4109546 - RNA, 70 nt, Human
ggcccauacaauaguaagguauauugucauucauagcugaugacagccaugauccuuacuguuuuaugcc

SEQ ID NO: 4109547 - RNA, 80 nt, Human
ggcccaucccagcaugccccauccccuuccugggugccccaggcagaucacaggagggccugacugcugggcuuugggcu

SEQ ID NO: 4109548 - RNA, 89 nt, Human
ggcccaugcccuccuuggcccgccggaagaagauguccucggcgcucucgcuggcgucuccugcgggcgggacggcguucacccgggcc

SEQ ID NO: 4109549 - RNA, 85 nt, Human
ggcccaugggagugggaagagccaauugggguagcagaggaugcugugcucccuuaggaaagcuuggccagcgcucugaugggcc

SEQ ID NO: 4109550 - RNA, 71 nt, Human
ggccccacuggacagacugucccaccacauggaguggcuccucaauggaggaacagugugaucuggggguc

SEQ ID NO: 4109551 - RNA, 84 nt, Human
ggccccacuuuguaauguguuauguuccagacucuccacacuaauccuuuacugagucuuuagcaaaucauucaugagugaguc

SEQ ID NO: 4109552 - RNA, 75 nt, Human
ggccccaugcugcuuccucccaccagaaaugauuucccauuaucuaguggcugguggguagagggcaucagggcu

SEQ ID NO: 4109553 - RNA, 66 nt, Human
ggccccuccuucucuucuugaccacuagaacugacauccagggcuacucagaaggcaggagaggcc

SEQ ID NO: 4109554 - RNA, 60 nt, Human
ggccccuucccaggugguugggauagccugagcugaacccagcagagaugaggagggguc

SEQ ID NO: 4109555 - RNA, 56 nt, Human
ggcccgguugcccacacuggccgggggccuggaaugugcugggacacagccaggcu

SEQ ID NO: 4109556 - RNA, 63 nt, Human
ggcccuauucgcaugucccccacuauauagcaagcucuguggugggacaucugaggagaggcu

SEQ ID NO: 4109557 - RNA, 55 nt, Human
ggcccucacuaaagcugcagggguacaugacucugaagggcugaguggaggagcc

SEQ ID NO: 4109558 - RNA, 58 nt, Human
ggcccucagcuccccugcgcuggacucugcucuccagccugcagggcccuuguggguc

SEQ ID NO: 4109559 - RNA, 66 nt, Human
ggcccucagcugcagccuggcuggcaagcucaggugugacccaggccccagcagccucugugggcc

SEQ ID NO: 4109560 - RNA, 91 nt, Human
ggcccuccagagaggcauugauuaucccaaggccucuaguugauuaguucagggauugcaacuagauuuugggauaucugccugcugaucc

SEQ ID NO: 4109561 - RNA, 107 nt, Human
ggcccucucauuggcucugcuccccaagugggaaguggggaaguuguuuugucaauucugccacuuuugcuuacugggaauagaagcagaggaccacaggcagggcc

SEQ ID NO: 4109562 - RNA, 67 nt, Human
ggcccucugcucugagaugaagcccuggaccugcagaagcccuuccccucucagagcccuagaggcc

SEQ ID NO: 4109563 - RNA, 63 nt, Human
ggcccugagccacacagagcaggugcaucuggcuuugaugacuggaggugggguucuggggcc

SEQ ID NO: 4109564 - RNA, 59 nt, Human
ggcccugagcugaaguacugugcccaagggucagccaaggacagcacucagacggggcc

SEQ ID NO: 4109565 - RNA, 59 nt, Human
ggcccugaggauuugcauuuccuauaaguucccaggugaugcugauguccucaggaacc

SEQ ID NO: 4109566 - RNA, 71 nt, Human
ggcccugcaaagguuuugguaaggcuuuaaagauuucaaaaaauuuuaagguauuaggaccuuugcaagcu

SEQ ID NO: 4109567 - RNA, 84 nt, Human
ggcccuggggucugguugcuuuacagcuggugacagggggaccacuccacuaccacaugugaauuaauccucaacuccagagcc

SEQ ID NO: 4109568 - RNA, 77 nt, Human
ggcccugguugugaguugaguugagcuuccagcccuguccuggaggagcuggccucagucaugcuacagccaaugcc

SEQ ID NO: 4109569 - RNA, 70 nt, Human
ggcccugugaggcucaagaaagauuuguugauugaacacaggagaacgauuucauugagcucauuugguc

SEQ ID NO: 4109570 - RNA, 65 nt, Human
ggcccugugguuuugcaaagucccuugauguuuuuggguuccauucucaguaaaagcacaggguc

SEQ ID NO: 4109571 - RNA, 58 nt, Human
ggcccuuaccucaguuauuuuuaacccgaagggugaacugaaaacaugggugaggguc

SEQ ID NO: 4109572 - RNA, 119 nt, Human
ggcccuuggguuuuuuguuuguuuguuugcuuguuuuguuucuuuuucugaauuacuagaguuaacuuuugagcacugucaggaagaagacggggcaggaaauuagaagacccagggcu

SEQ ID NO: 4109573 - RNA, 64 nt, Human
ggcccuuuccugucauaauguccgaugucaggccacgaggcuucgaauggcaaggaaagaggcu

SEQ ID NO: 4109574 - RNA, 80 nt, Human
ggccgacaugagagguagaggcucugcuuaaguccggaucuagagggacaguuaggugguccgugcuugucaauccgguc

SEQ ID NO: 4109575 - RNA, 58 nt, Human
ggccgacgcccgugucccuguggguuccuguccuuccucagaacaugagcaucgagcc

SEQ ID NO: 4109576 - RNA, 80 nt, Human
ggccgacuggggguccgggacggcgccgaggccgggccagcucccggcucugcuggcagcccccgggccccggguggguc

SEQ ID NO: 4109577 - RNA, 98 nt, Human
ggccgauggagccuggagacagauggucaguguugaaguucuacuugaggcauauucacaagauuugcuuuagauacucccaauguccuuccauugcc

SEQ ID NO: 4109578 - RNA, 82 nt, Human
ggccgcagccgcccacccccgcccacguggauguuaaccgucguggcauagcugagccgccuggcugggggaggugguggcu

SEQ ID NO: 4109579 - RNA, 91 nt, Human
ggccgcgugcguccccacuccaggcccacgucgaggaggggcacguggucggcccccuuuguugggagcugggcacuggaagggaccggcc

SEQ ID NO: 4109580 - RNA, 95 nt, Human
ggccgcuccuggugcaggcuccacguuguuguccaggcucacuucauaaaaaacuucggagagagggaggcgggggucugagcacagugcgagcc

SEQ ID NO: 4109581 - RNA, 60 nt, Human
ggccgcuguggugugggaguucagaacacuguuucuggagccacaaaccucagcucugcc

SEQ ID NO: 4109582 - RNA, 59 nt, Human
ggccggcuuacuggguaggguguuccugcagcuugugcagcucucuccaguggcuggcu

SEQ ID NO: 4109583 - RNA, 79 nt, Human
ggccgggcacggggcaggaggucacagcagcuaaucaaguccuugcuguguucuccugacucaccgccgagcucuggcc

SEQ ID NO: 4109584 - RNA, 93 nt, Human
ggccgggcgugguggcuuacgccuguaaucccagcacuuugggaggccgagguggguggaucacgaggucaggaguucgagaccagccuggcc

SEQ ID NO: 4109585 - RNA, 68 nt, Human
ggccggggacuggaguagaggccggugcucaccagagucucaccaaagucgcuucugucguccgugcc

SEQ ID NO: 4109586 - RNA, 59 nt, Human
ggccggggagagcacuggcuccuacucugcagagaaccccacugcucuucccuagggcc

SEQ ID NO: 4109587 - RNA, 60 nt, Human
ggccgguucaagggcagucagaugaaucgacccuucuuacaggcugucuacgaaccaguc

SEQ ID NO: 4109588 - RNA, 65 nt, Human
ggccgugaagccuucgguucaguucuccccuuguagaaaguguugcgaugaagagcuucacggcu

SEQ ID NO: 4109589 - RNA, 76 nt, Human
ggccgugaugauuuacucccacuuagagccugaacacaaaacuguggcuuucuugagggacugagaaucacaagcc

SEQ ID NO: 4109590 - RNA, 85 nt, Human
ggccguggagccagagaggcuggggcagcagaccuuucuugggcaaaucagggggcccugcuguccuccugucaccuccagagcc

SEQ ID NO: 4109591 - RNA, 75 nt, Human
ggccguucugacacauuacuacauggaugagccuuaagaacauuaugcaaagugagaugucagucacgaaaagcc

SEQ ID NO: 4109592 - RNA, 60 nt, Human
ggccuaaagagagugauuuauguuuuacugagugaaacagucaacuuucuuucccuggcc

SEQ ID NO: 4109593 - RNA, 86 nt, Human
ggccuaaaguauuagauuaacuuuaaugucuacaagaucaccccugucugggacacacaaguuaucuaaugaauuaauaauaggcc

SEQ ID NO: 4109594 - RNA, 77 nt, Human
ggccuaaccuacaggcagggcugggauuagacuccaagggugggguuuuccaaacagugcuguguucugugguagcc

SEQ ID NO: 4109595 - RNA, 96 nt, Human
ggccuaagcucuguuucgucuuuuucauuucaggugauggaguccagaacuaaacugcacaaugaaagcaagaagacggcccccaggcaggaggcc

SEQ ID NO: 4109596 - RNA, 73 nt, Human
ggccuaauggaagagacagaugcaucaagcuacagaaggcuugauucaagcuacuguuacugguccuaaggcu

SEQ ID NO: 4109597 - RNA, 62 nt, Human
ggccuacccaacaguucucauagcagauuccuacaacauggaguccugaguacuuugggccc

SEQ ID NO: 4109598 - RNA, 80 nt, Human
ggccuacugcagcagggagaaggaaguggaauauuucugguugauguggcacuucucuccuuguaaguaaauggcaggcc

SEQ ID NO: 4109599 - RNA, 81 nt, Human
ggccuagaagaccuggggaaguauuuauguaucaucuaauuggaagauuuacaaagcucucuagugucuuugguagagguc

SEQ ID NO: 4109600 - RNA, 78 nt, Human
ggccuagauggaaagauuuggugauuucaguuuuuugcuuaucagucaacugucuuuauuagaaucuuauucauuguc

SEQ ID NO: 4109601 - RNA, 107 nt, Human
ggccuagggaagagcucugggacagccagguaugggcgugcggguccugggacgaguuucuucccucgcguccagccggggcuuggccccagcagccucccucugcc

SEQ ID NO: 4109602 - RNA, 65 nt, Human
ggcugaugggcaugagcugucaggccacucuuucucccaaaggcagccauguucccgucucagcu

SEQ ID NO: 4109603 - RNA, 78 nt, Human
ggcugauuaaaagcagcuguccuuucccugacugcgucugaagcucccacaaggcuuauaguugcuuuuuguuguguc

SEQ ID NO: 4109604 - RNA, 55 nt, Human
ggcugauucugggguagagcaggucuucaaacccuuguacacccacagaucagcc

SEQ ID NO: 4109605 - RNA, 72 nt, Human
ggcugauugucaucauguuuuccaaaggucuaagaaacucucuuuccuuugggggaccugauacuuaaaguu

SEQ ID NO: 4109606 - RNA, 106 nt, Human
ggcugcagcucccagcgagaucaaugaggaagacaagugauuucugcauuuccaacucagguaccuuguucaucucauugggacugguuggacagggugggcagcc

SEQ ID NO: 4109607 - RNA, 68 nt, Human
ggcugcagggugacguugcccaccucuggcuccacgcagaugcuggugaaguaacgcgcccuguucac

SEQ ID NO: 4109608 - RNA, 66 nt, Human
ggaggagagcuuggagugcgauuuucacacagcaaaaggcgauaugaaaauugcucugcagucccc

SEQ ID NO: 4109609 - RNA, 102 nt, Human
ggaggagagggagaugggguggaggagagggguaggauuaauuugcagcuuagauuuuagggccaaggauugaagccucuuccugcacuccuccccuccucc

SEQ ID NO: 4109610 - RNA, 86 nt, Human
ggaggagcaggcacaguguacagagguugcuggaggcuccaggcagagacugguggccccagggcccugucuggcacccucucucc

SEQ ID NO: 4109611 - RNA, 57 nt, Human
ggaggaggagaggcugccauugauucaaaaauaacaugagcagaugcuccugccucu

SEQ ID NO: 4109612 - RNA, 90 nt, Human
ggaggaggaggaggaggaggcggcagaaguuccugcaccacagaggcccaggcauccucucugccuugagguuccaaaccuaccaccacc

SEQ ID NO: 4109613 - RNA, 55 nt, Human
ggaggaggcaaguaccagaugccucuagucagccaucuugaagacucucucuucc

SEQ ID NO: 4109614 - RNA, 56 nt, Human
ggaggaggcagauguaggagaagaggacuucuggcugcuccuuagcugccccugcc

SEQ ID NO: 4109615 - RNA, 65 nt, Human
ggaggaggccgagggcgaggcgccguggacguggaccggccucugcaucuucgccgcacucuucc

SEQ ID NO: 4109616 - RNA, 86 nt, Human
ggaggaggcugcaaggggauggcuuuguggcugacucuguccagcguuucccauggggcgucccagcucaucuuugcaguuuugcc

SEQ ID NO: 4109617 - RNA, 55 nt, Human
ggaggaggggugcugccucuggacuggcucagcucggcucagugccugcuccuuc

SEQ ID NO: 4109618 - RNA, 103 nt, Human
ggaggaggugguccagaguuuuguccaaucauaggguaggcaguugcagagcaggaagcauguggacuuuggcauuggacuuggccuugaaccccgcuccucc

SEQ ID NO: 4109619 - RNA, 81 nt, Human
ggaggaguucugggagaucuugagcuucugguggcccacgggugucugggaaaucucagaucucccagaucucagaucucc

SEQ ID NO: 4109620 - RNA, 77 nt, Human
ggaggaucuggcaggcgggagccauagaggccacguguccacaugucucuccccagccccggcugccggcagccccc

SEQ ID NO: 4109621 - RNA, 88 nt, Human
ggaggaugucuugagccuaggaguucgaagcugcagugagcugaaauggugccacugcacuucacccugggugacaaagcaagacccc

SEQ ID NO: 4109622 - RNA, 57 nt, Human
ggaggaugugggguggacucagggacccacccccucuguggccagucccacaccucc

SEQ ID NO: 4109623 - RNA, 83 nt, Human
ggaggauguggucucauaggcagaauuguugaaugaagugcuaagguuuuucugacuucuguuucggguuuccauauugcucc

SEQ ID NO: 4109624 - RNA, 88 nt, Human
ggaggauugcuugaccccaggaguuggagguugcagugaacuaugauaauaccauugcacucuagucugggugacagagcaagacucu

SEQ ID NO: 4109625 - RNA, 55 nt, Human
ggaggcaaagcauguggcucaggauagcaguccugaguuuccuguucuugcuucu

SEQ ID NO: 4109626 - RNA, 115 nt, Human
ggaggcaacaugauauagugaaaagagugccagaauaggaguaauaaaaccgggguuuuugcccaaggucugcuauugccuugcuuugugaccuuuggcaaauaucugagccucu

SEQ ID NO: 4109627 - RNA, 78 nt, Human
ggaggcaagaggagggucaaguaccaggaagcaagcuuuaagaguuucccuguccaaagucuuccuaucuaugccucc

SEQ ID NO: 4109628 - RNA, 72 nt, Human
ggaggcaagucuggcuccacucuccaggaguuucuggccaggaagccugcugugcagccaaauguagccucc

SEQ ID NO: 4109629 - RNA, 59 nt, Human
ggaggcacuggacaugcucuggccgugucauucccuugcucagagccuucagugacucc

SEQ ID NO: 4109630 - RNA, 65 nt, Human
ggaggcagagcacacugacgucagucugcagaugugccugggcugcgucgggugcgcaugugucc

SEQ ID NO: 4109631 - RNA, 60 nt, Human
ggaggcaggccgggcaggcagcgagcccagggcuuacggcucccaacucaggccuccucc

SEQ ID NO: 4109632 - RNA, 56 nt, Human
ggaggcagggacauccagggcuuugggggugacuccagguccuguuccuugucucc

SEQ ID NO: 4109633 - RNA, 124 nt, Human
ggaggcaggugggagccagccuggcugcugcuccacuguggcuggaacuguaucacgcaggcagugccaggagcaaggagcuccggcccuggaaccaaacuuucugggucucgacccugucucu

SEQ ID NO: 4109634 - RNA, 61 nt, Human
ggaggcaguccaguggguaagaaaucccccaacuucccauuuccccaccuuacuacccucc

SEQ ID NO: 4109635 - RNA, 56 nt, Human
ggaggcaucucuguggcugucuccacggugaagggggcaucuccagggcugucucc

SEQ ID NO: 4109636 - RNA, 64 nt, Human
ggaggcauugcaggguuucaauacacaggacauguucuaguuacagaagccuugcucugcuguc

SEQ ID NO: 4109637 - RNA, 83 nt, Human
ggaggccaagggaacagcauguaagaagcuacuaacacaaaaaagagcuuggaguagccucucagcguagccccucagccuuc

SEQ ID NO: 4109638 - RNA, 65 nt, Human
ggaggccaucagggagggcauuaugcuuugcaguggcauugcagcugccuuuccuuguggccucc

SEQ ID NO: 4109639 - RNA, 64 nt, Human
ggaggcccuuaggaccccugcguggucgcccuucagguagcgcccguccaucuugauggccucc

SEQ ID NO: 4109640 - RNA, 57 nt, Human
ggaggccgggagguggcugguggaguggggaaguaaaucaguggccuggaggucucu

SEQ ID NO: 4109641 - RNA, 58 nt, Human
ggaggccuccugggggagguucaugucucacuuugcagccuccagccagauggccucc

SEQ ID NO: 4109642 - RNA, 83 nt, Human
ggaggccugcccuggaggugcucagcuccaucucugcuguccaggcugugagcaagaacaccuaaggaaagccagcagccucc

SEQ ID NO: 4109643 - RNA, 75 nt, Human
ggaggccuggccagagguuccucugcccuaagaacccucaaggaguagcaggucaccuguguguccaggcuggcc

SEQ ID NO: 4109644 - RNA, 72 nt, Human
ggaggcggacauccgcagguuauaaagccccagaagaucugggguccugugagcugccgguguuccacaccc

SEQ ID NO: 4109645 - RNA, 57 nt, Human
ggaggcucuacaggcacuucugaaacaugcucggacauggagugucagggcccuucc

SEQ ID NO: 4109646 - RNA, 69 nt, Human
ggaggcugcccagagagggcaugaucaccguuccuggugcccugugccuggucccugagucgagccucc

SEQ ID NO: 4109647 - RNA, 57 nt, Human
ggaggcuggguccugaguuauaaagaaaaucaucuuuuaaucagucucccugucucc

SEQ ID NO: 4109648 - RNA, 70 nt, Human
ggaggcugugaguugucuggggaccucaucaacauuugcacaaaugccccagacucugcucaccucuuuc

SEQ ID NO: 4109649 - RNA, 62 nt, Human
ggaggcugugggaguugagagucuuuguagaauugcaggguacugcagcacccacagcagcc

SEQ ID NO: 4109650 - RNA, 107 nt, Human
ggaggcuucccggccugggggccacgggcccggaggaauuugccuggaaguuuuccaucacggcagagccuucuggagcucgccccgugcucgacaaggggagcccc

SEQ ID NO: 4109651 - RNA, 73 nt, Human
ggagggaacugcagaguggauuaagugguuggaaguaagcagccucacucagacauccagugcaguggucucc

SEQ ID NO: 4109652 - RNA, 105 nt, Human
ggagggacacaaacauucagaucacagcaaaugcugcuucucaaauacaccauacacauuccuguuuuaggaccuuuguguuugcugucucugggucguucuucc

SEQ ID NO: 4109653 - RNA, 91 nt, Human
ggagggacaguauagugguggggagcaaaucccuuacagccgggcugccuggauuugcaauccucgucaugccacugcaagcugacucuuc

SEQ ID NO: 4109654 - RNA, 64 nt, Human
ggagggagauggguacucguuggacugagggcacaucucaccaacucuagcaccuaguaccuuc

SEQ ID NO: 4109655 - RNA, 62 nt, Human
ggagggaggauagagaacuuuuauuucagaagagugcaaauaaacaaauccuuccuuccccc

SEQ ID NO: 4109656 - RNA, 78 nt, Human
ggagggaggccugucgaggguuucuugcacacucagauccaagucucagagugguggucccucugcuggccucucacc

SEQ ID NO: 4109657 - RNA, 65 nt, Human
ggagggagggguggcguuggcauuuaggcacuuggguuccuuaaauccuaugcuccuuucucucc

SEQ ID NO: 4109658 - RNA, 77 nt, Human
ggagggauaaauaaaggaggagugggguccuggaaccuagaacagccgguuccaaugggaucuccucccuucccucc

SEQ ID NO: 4109659 - RNA, 71 nt, Human
ggagggauguuaaagauggugggaaauuaacuggaaccagaauuucucauuuauacuuuugcuaucccuuc

SEQ ID NO: 4109660 - RNA, 77 nt, Human
ggagggcagaaggcaggagaagauugaugccugagcucaagcagucaggcagaguuaauuugcuccuccuccccuuu

SEQ ID NO: 4109661 - RNA, 117 nt, Human
ggaggggacccuggagcccaggugucugggcugugggacccggcacuuucucuucccuggagagagggauggccccguaacucagcauccugcgcuuucccuagcccggugccuucc

SEQ ID NO: 4109662 - RNA, 55 nt, Human
ggaggggaugguuugacccuggaaugcuggaaccagggauuccaccagccucucc

SEQ ID NO: 4109663 - RNA, 57 nt, Human
ggaggggauuuaguagaugcuacuuuauaagcuucuuuaacuguaaaauccuccuuc

SEQ ID NO: 4109664 - RNA, 55 nt, Human
ggaggggcagaggggccgggagggaggugcuucuccuggcuccagcagcucuucc

SEQ ID NO: 4109665 - RNA, 56 nt, Human
ggaggggccggcugccugccaccagccuucacauuuggccccugucggcccccucc

SEQ ID NO: 4109666 - RNA, 58 nt, Human
ggagggggaagaagcuaaagacuugccagccagagguuucaugcggucuuccccuuuc

SEQ ID NO: 4109667 - RNA, 83 nt, Human
ggccagaccugccuggguucaaaucccagcuucuucccacagccacauuggaacccugggcaagugacuuggcaccucugguc

SEQ ID NO: 4109668 - RNA, 74 nt, Human
ggccagagagcagccaggauucugucucccacaaaacauagcugacacuacuccuccagaggcccuccuuggcc

SEQ ID NO: 4109669 - RNA, 57 nt, Human
ggccagagagccgcuguuaggaguccggccgugcaacccuuccuagcggccucggcc

SEQ ID NO: 4109670 - RNA, 62 nt, Human
ggccagaggccacagcugugucuccagcaucagaagagaagcagugugcauggcuuuuggcc

SEQ ID NO: 4109671 - RNA, 92 nt, Human
ggccagaguaugagcacagggacaaucuuacuuuugaaaagugaaaggcaagcuuuuacuuaagauuauuccugaugaaauacccuagggcc

SEQ ID NO: 4109672 - RNA, 56 nt, Human
ggccagcaccuucacaggcucucagggccguccucugaggcugugggggugcagcc

SEQ ID NO: 4109673 - RNA, 73 nt, Human
ggccagcagcgggcggggguucccaggucuacagcuccugugagggccccaagaaccuccuccugcggcggcc

SEQ ID NO: 4109674 - RNA, 62 nt, Human
ggccagcauguuauaaugcauuuugugaggacucacagcuguguaugagagcaugcucaguc

SEQ ID NO: 4109675 - RNA, 93 nt, Human
ggccagccuggccucaaacuccugaccuugugauccaccugcuuuggccucccaaagugcugggauuacaggcuugagccacuacgccuggcc

SEQ ID NO: 4109676 - RNA, 59 nt, Human
ggccagcgauuggaggaccucucccauuuuaggagaggagccccucuucaguccuggcc

SEQ ID NO: 4109677 - RNA, 61 nt, Human
ggccagcgugagagaguuuggcaaggagagggaagccccaugacaaaggaucucaugggcc

SEQ ID NO: 4109678 - RNA, 59 nt, Human
ggccagcuuauuagcucagaggcuaucuucauuuguccuuguguacucaaaggcuggcc

SEQ ID NO: 4109679 - RNA, 69 nt, Human
ggccagcuuucuggaagccccagagucagauguacuccuguccugacuuccagccuuccaguacuggcu

SEQ ID NO: 4109680 - RNA, 62 nt, Human
ggccaggagauggacaccacauuuugaugguuucucaaaccgugugugaccuuuuccugguu

SEQ ID NO: 4109681 - RNA, 73 nt, Human
ggccaggauccuagcacagguucugacgcacagaggugcucagaagauauuugaugcugggugaaucaauguc

SEQ ID NO: 4109682 - RNA, 68 nt, Human
ggccaggcaugcagcugguguuuagucugcaguggacuuaucuucacaugcaucugucauguuuggcc

SEQ ID NO: 4109683 - RNA, 66 nt, Human
ggccaggccccagcugugcaggccccacccucucuuggccaccuccaccccagcugaggcuuagcc

SEQ ID NO: 4109684 - RNA, 98 nt, Human
ggccaggccgggcacggcggcuuaugccuguaaucccaguacuuugggaggccgaggugggcggaucacaaggucaggaguucgagaccagccuggcc

SEQ ID NO: 4109685 - RNA, 81 nt, Human
ggcuuacccaagggaagacuggacuucuauguggcugguuuccacaucacugaaccccaacuuucuacagcugggucggcc

SEQ ID NO: 4109686 - RNA, 79 nt, Human
ggcuuagacuggggcacccugagugggccuguguuaguuugggggcguggcuuagagugggguaccgugggacugggcc

SEQ ID NO: 4109687 - RNA, 56 nt, Human
ggcuuaguguuucugcucagccuucuuucuuggaggccugggcuugauguugaguu

SEQ ID NO: 4109688 - RNA, 67 nt, Human
ggcuucaaguuuuaauguucuggugggagaaaugaaaguaucauuucccaacacauuagaaaaugcc

SEQ ID NO: 4109689 - RNA, 57 nt, Human
ggcuucacuuaucucauccuuccuucauacuggaguuaaggcaugggaagagaaguc

SEQ ID NO: 4109690 - RNA, 59 nt, Human
ggcuucaggggcccagucagcacucuggaaucugguggugagacugggugccuagagcc

SEQ ID NO: 4109691 - RNA, 126 nt, Human
ggcuucauaggcacaugcgccagcccggccgaggcagaaccagcugggacuuuaagccgaugagcuguucgaugagguauauggccugguuuccugugcaggcaggguggaugcaguccagaagcc

SEQ ID NO: 4109692 - RNA, 60 nt, Human
ggcuuccacacuggcuccuugcauggcuggcaggcugaugcuggcuacugauggcaggcc

SEQ ID NO: 4109693 - RNA, 74 nt, Human
ggcuuccccaagcccacaaacgagcuuagaaucaacagauucacugcugggugauuggguuugaauggacagcu

SEQ ID NO: 4109694 - RNA, 60 nt, Human
ggcuuccucccucucucaaagugucccugcaagugcuggcugggccagggagaggaagcc

SEQ ID NO: 4109695 - RNA, 73 nt, Human
ggcuucgauaccugaaacuugugauuugcagguucaaaagcaaucguuuauauacacuguuucaguugaaguu

SEQ ID NO: 4109696 - RNA, 102 nt, Human
ggcuucucugggcugggguacuguccuagaaaagcugccagcucaggcucaagcagcugugggcucccagcuucucucugccgacccccaucccacuuugcc

SEQ ID NO: 4109697 - RNA, 71 nt, Human
ggcuucucuuggcucugauggggaucaggagcaagcuucaagcucagaaccucuaacagagccccagagcc

SEQ ID NO: 4109698 - RNA, 74 nt, Human
ggcuucugccuuucucccuucuggaaggcacugaagguuuggcucaguucagaggcaggagaaggcuuggagcu

SEQ ID NO: 4109699 - RNA, 55 nt, Human
ggcuucugugguugucacgacuaggggagcuccugguguggagugggcggaggcc

SEQ ID NO: 4109700 - RNA, 78 nt, Human
ggcuucuuaauacuuaacuguacaacugguuagucauauuaucugacauuccgcaguaagguuaaaucaaggucagcc

SEQ ID NO: 4109701 - RNA, 64 nt, Human
ggcuucuuucucaagccaaggugagccggaauaaggucauucuugaaacauaugaguaagugcc

SEQ ID NO: 4109702 - RNA, 73 nt, Human
ggcuucuuuuucauguaggucuuuacacgagauguagagaagucuccaggacuauaggaaagacacacaagcc

SEQ ID NO: 4109703 - RNA, 98 nt, Human
ggcuugaaaaaacugccuguguuuuaaaaugugcuuguguuuguuuccuaaugcaguacuuugaagauauuuuagguuuagguaaguugcuuuaaguu

SEQ ID NO: 4109704 - RNA, 123 nt, Human
ggcuugacagaggagggagaauuguauccugaguuaauucgaauauucuagcccaaacuaaguuaaacaaaggcuuagguaugauaguuagccugaugccaaauuuccuuccaguguaauguu

SEQ ID NO: 4109705 - RNA, 63 nt, Human
ggcuugagagacucauuugccaagugguucgcggccuuauggcaaaguaauuggguuucuccc

SEQ ID NO: 4109706 - RNA, 55 nt, Human
ggcuugcagcccuccugccuugccugcccaucuaaggugggagaccauguagguc

SEQ ID NO: 4109707 - RNA, 79 nt, Human
ggcuugccuauuucaaaaggacagaagaccuaaaaccuuuuauaguuuucgguucaaguuuugccuuuccuugcaggcu

SEQ ID NO: 4109708 - RNA, 59 nt, Human
ggcuugcuucaccuacccccagcucaugaaagagggcuuggggccagaugaaggaaguu

SEQ ID NO: 4109709 - RNA, 81 nt, Human
ggcuuggcugucauaacucaaguuguugggggacacaugacuauuuaagcagcaauuauggaguuguugacgggcaggacc

SEQ ID NO: 4109710 - RNA, 82 nt, Human
ggcuugggcagguggaacaaauuuuggggaccuugauucugaaugucaguccaaaucuuguuucauaucucuguuuaaagcc

SEQ ID NO: 4109711 - RNA, 68 nt, Human
ggcuugggggagcuguuauuggcagggaggccuuuguggcucgccaguugccugucuuccccauggcu

SEQ ID NO: 4109712 - RNA, 64 nt, Human
ggcuuguagucagagcaggugaugaccaaaucugaacuuuuggguccuguucuuggcugaggcu

SEQ ID NO: 4109713 - RNA, 65 nt, Human
ggcuugucugcauuguuucuaugggaaauguguucugaauuccuaaaacaaugugcaaacaagcu

SEQ ID NO: 4109714 - RNA, 84 nt, Human
ggcuugucuuauuguuggaauagcugaaucuugugugugagugucgucauaauaaugucugcuauuuuaaaauaaagcauagcu

SEQ ID NO: 4109715 - RNA, 56 nt, Human
ggcuuguggcaaguguuuuaaguucaagcaacuuaaugcagcucuaccacacagcu

SEQ ID NO: 4109716 - RNA, 65 nt, Human
ggcuugugguggcuauucuggucucauugcuaaauccaucugggguccagugccaccccaaggcc

SEQ ID NO: 4109717 - RNA, 62 nt, Human
ggcuuuaacagcagcuuugcuguaugguguccagcucucuaguggucauagcuguuguagcc

SEQ ID NO: 4109718 - RNA, 101 nt, Human
ggcuuuacaucuggcagggagacagcuccuuucugaggaugacagcugcagcuucagcucuaccugggagcugucuccccauggggaagauguucauagcc

SEQ ID NO: 4109719 - RNA, 56 nt, Human
ggcuuuacuauaugguacauuuugccccagugaguagaauucauaccauugaggcc

SEQ ID NO: 4109720 - RNA, 81 nt, Human
ggcuuuagaaugaacagaguuaaguuuacauccugguucuauucucuaugugaucagaggaaauuaacucucucagucucc

SEQ ID NO: 4109721 - RNA, 55 nt, Human
ggcuuuauauuguuugagcagaccucauuugaggcaagaaaacaauaaugaggcu

SEQ ID NO: 4109722 - RNA, 63 nt, Human
ggcuuuauguuuuucaugugguucaguggacugcauauuugagaggcguaacaucgugcagcc

SEQ ID NO: 4109723 - RNA, 83 nt, Human
ggcuuucaauuugaucugaaauagcuacugcagagucccugagggguggucugcucucugcuaucucagacauaguuguugcc

SEQ ID NO: 4109724 - RNA, 73 nt, Human
ggcuuucacccucaggaagccccagcauggccuugggcccagcuuagaggcuuguggggguuuggguguagcc

SEQ ID NO: 4109725 - RNA, 76 nt, Human
ggcuuucagaaauuauauuagaugcccagccuuucucauucagagaugccuguauuauuauguuauuucgauugcc

SEQ ID NO: 4109726 - RNA, 71 nt, Human
ggcuuucaggguugugguggaauucaguuauuuucaguuguaggacagaggucccuauuucuuuguuggcu

SEQ ID NO: 4109727 - RNA, 66 nt, Human
ggcuuuccgggaccagagcucuguugggaacugcugcugcuuggacagguguguucccggaaagcc

SEQ ID NO: 4109728 - RNA, 79 nt, Human
ggcgaggcuucucggggcgcggccagcaggacgggggcgugaagaauuucuccugcaggcuugaguccucagucuuguc

SEQ ID NO: 4109729 - RNA, 67 nt, Human
ggcgaguuguacagcauccagugcagagagaauggcauuuuggucucacuagguggcuuuaccuccc

SEQ ID NO: 4109730 - RNA, 87 nt, Human
ggcgauagagacccagcaggcaggccccaggcagggggaagaggcugcccuuaucuggccccaggcagccugcuggggucuguggcc

SEQ ID NO: 4109731 - RNA, 130 nt, Human
ggcgaugcuugccagccugagaugggccuguaggccugugggccaaggaccugccaucuggagcauuuggcaaaguugaggggcccaugugucuucgagacccgaaucucaggcugaacagggcuccgcc

SEQ ID NO: 4109732 - RNA, 81 nt, Human
ggcgccaagucgccacucagguggccaaaugggagcgcccguagggcggcccugcucuucggcccuuggguggcggguccc

SEQ ID NO: 4109733 - RNA, 62 nt, Human
ggcgccuaggcaaggaaccccugagccaggagagcuggaccaggggcccuugccaggacgcc

SEQ ID NO: 4109734 - RNA, 69 nt, Human
ggcgcgagguuuguuaaaaugagucuucggaagcaaaccucuggugacucuuaaagcaaaucuuggguc

SEQ ID NO: 4109735 - RNA, 69 nt, Human
ggcgcgccugagcccgugcacggcagccucuccggaaggugaagcacgcugccgcacugggggccugcc

SEQ ID NO: 4109736 - RNA, 63 nt, Human
ggcgcucaguguugccccagaguguccuuccagucacuccagauggggcagcagcugaacguc

SEQ ID NO: 4109737 - RNA, 65 nt, Human
ggcgcuccuaggaaggaguauaguaaaugccucauuuaauaacauacuccuuuuugaaaguugcc

SEQ ID NO: 4109738 - RNA, 61 nt, Human
ggcgcucgugccgcaucaggcaggcguaaagacaagugcccagccuggcugggaugagccc

SEQ ID NO: 4109739 - RNA, 58 nt, Human
ggcgcuuggugcagcuccucuucaggguccuccuaccugaaggagaggaccgagugcu

SEQ ID NO: 4109740 - RNA, 79 nt, Human
ggcgcuuugcagaagccaguggcgugggccccggggacaguuccuuggaggagaacucccuggcuacaggucaggcgcc

SEQ ID NO: 4109741 - RNA, 63 nt, Human
ggcggagguggagcaccaagggcgcuuggaagcggccucuuaucuggcuccugcaccucugcc

SEQ ID NO: 4109742 - RNA, 129 nt, Human
ggcggaucacaacauugaacauaacuauugacacaauucauugccagaaucuaugauaauuuuccacacauuuucuugucuauggaguuugaaugagaaaauccaucaauggccuaccaaugcaucgcc

SEQ ID NO: 4109743 - RNA, 60 nt, Human
ggcggcccagugucccggucguggcaggcgccaucugcccgaccagcgccugggucagcc

SEQ ID NO: 4109744 - RNA, 56 nt, Human
ggcggccccucccugcuccgcuguccgccuuggguacagaagcggcgaguggcccc

SEQ ID NO: 4109745 - RNA, 101 nt, Human
ggcggcugacagcggucauuugucaucacugagcugcccaaacuccucagacugcacugcggauggcugcuuagggugacuuauggcccugucgggcugcc

SEQ ID NO: 4109746 - RNA, 72 nt, Human
ggcggcugucggcacugccuggcauucucuggcugauagaagcuccgaguucuggcggcugucggcacugcc

SEQ ID NO: 4109747 - RNA, 55 nt, Human
ggcgggcagcgucuugcuggccucggugcugcucuccccaaggaugcugccggcc

SEQ ID NO: 4109748 - RNA, 90 nt, Human
ggcggggacagucugauugagcuguguaaguuggaagcagcgagacauugcauuccagcucucauacucugggaacgucaccuaccugcc

SEQ ID NO: 4109749 - RNA, 57 nt, Human
ggcggggaggcuggcgagaggcuuaaugaaacugcuaacgcguuagugauuccugcc

SEQ ID NO: 4109750 - RNA, 70 nt, Human
ggcggggcuggcacauggcucagggccuacaguggugggcuccagcuguuugccaugagaucgucuugcc

SEQ ID NO: 4109751 - RNA, 57 nt, Human
ggcgggugcacagacccuuccccaaaggccucaggucugagguccuggcugcccgcc

SEQ ID NO: 4109752 - RNA, 71 nt, Human
ggcggugaagcagcuucaguaggugaagacauggcacgaagcaacugucuggcuuucuggggcucaagguc

SEQ ID NO: 4109753 - RNA, 73 nt, Human
ggcgucauuccaguguagcucuccagccagcaaggcgcggccaaauaccguguggcggggacuuguggcugcc

SEQ ID NO: 4109754 - RNA, 86 nt, Human
ggcgucccauggcaugccacauggacuucaaaccgagugcccuuucucccaugugguuuacucguaguggcgguuuuacagaugcc

SEQ ID NO: 4109755 - RNA, 78 nt, Human
ggcguccugcagggcgcguuugagcgggcucugcagguaucaguagaaguccguuggagagcgcccgggcagggcgcc

SEQ ID NO: 4109756 - RNA, 82 nt, Human
ggcguccuggggagagccaaggcccugacucucuaauaacacaaguggacuccugggagcccuugcuccaccccuggacucc

SEQ ID NO: 4109757 - RNA, 75 nt, Human
ggcgucuucucucccugcuuccuguggcacauccugagcuuugggugcucaacagaggguguggaggaagacgcu

SEQ ID NO: 4109758 - RNA, 55 nt, Human
ggcgugaagcccagggaacgaggcugaaaaaggcucucuucccuggcugucaguc

SEQ ID NO: 4109759 - RNA, 57 nt, Human
ggcgugggaaguggggcuucuggccaggcugacgcgugaagaaccgcacucccagcc

SEQ ID NO: 4109760 - RNA, 86 nt, Human
ggcgugggagccggggcccagggcagcagugcagcucaccccagacccgggcacagcggcggcugcccggccaccuccgcccgccc

SEQ ID NO: 4109761 - RNA, 86 nt, Human
ggaugccaagugacacaggggaaggagucuggacacugucaaguaaugcccaggauucuccucuugugugggcuuggcuggaaacc

SEQ ID NO: 4109762 - RNA, 74 nt, Human
ggaugccacucaucauuuuacggagcagccgguggaugccaggcuguggcuccaauggugagccuggccagucc

SEQ ID NO: 4109763 - RNA, 78 nt, Human
ggaugcuaugauacauguucaguuauucuggaagacuuuauaauguuugcuuagaaucuggacuuguugauaguauuc

SEQ ID NO: 4109764 - RNA, 73 nt, Human
ggaugcugucugaccagggucucucagaaugacugaguccagguggaccuuggccagauuugaaccagcaccc

SEQ ID NO: 4109765 - RNA, 84 nt, Human
ggaugcuuuuaccuaauaggcuucugggauugcuugcucuucugggcccuccgugguucucagaggcugcuaagugcaaggccc

SEQ ID NO: 4109766 - RNA, 85 nt, Human
ggauggagggaggcuggagguggcacaagggaggucugacuuaacagugagcccuuguuuaugucauuucccuugccugaugucu

SEQ ID NO: 4109767 - RNA, 55 nt, Human
ggauggauggauggauggauggacggacugccaguuccaagcccuccuuccauuc

SEQ ID NO: 4109768 - RNA, 64 nt, Human
ggauggauggugaguggauuguaauggucgauggauaauggcaaauaaaugcucacugcugucu

SEQ ID NO: 4109769 - RNA, 80 nt, Human
ggauggauuuggagcugagaguuaauaaggauugaugauucagaguccacuccuucagcuacucaguuuccauaugcacc

SEQ ID NO: 4109770 - RNA, 91 nt, Human
ggauggcaagugccuggaaagccuuggauuggguuucaguuaguaauuauaaaaugcuaaguauaauccaggguauucuaguuucccuucc

SEQ ID NO: 4109771 - RNA, 59 nt, Human
ggauggcgggccauggacaaugcgcugaccuagcuguaagucaccuggcccgauaaucc

SEQ ID NO: 4109772 - RNA, 119 nt, Human
ggauggcuaaugcaaacugcaacccuauagaauauccacuucaauacaggcaucacggcucggguggugucuguauugaggugcauauuauauggggcugcagcuugcauuauuccucc

SEQ ID NO: 4109773 - RNA, 130 nt, Human
ggauggcuggagaggcuccuggggccaaccacucccacuugggcccauggggcuaagcuaaguggaaacaaauguucccuggcuuucccccagcccaguuguggugggcgagcagcagccccuccuuccc

SEQ ID NO: 4109774 - RNA, 93 nt, Human
ggauggggagagagggagggggagccagugccaaguuggcccgccccuugugaaccugggccucugccacgcucccccgcccgccugcccgcc

SEQ ID NO: 4109775 - RNA, 68 nt, Human
ggauggggcugaaacauggaagagagguacaagauccagcccuucuggcuccacucagccccacaacc

SEQ ID NO: 4109776 - RNA, 74 nt, Human
ggaugggguaauucugugugaaucuauuaaggaaaagauaacuucaguggaacacacagagugggucaaaagcc

SEQ ID NO: 4109777 - RNA, 58 nt, Human
ggauggguugccugcugguggaauccccauugaguccagaucaugcagcaaaccaacc

SEQ ID NO: 4109778 - RNA, 68 nt, Human
ggauggguuuaaaccaaucgugauucaucccagggccagggauaaauuaugauuggucuaaaccagcc

SEQ ID NO: 4109779 - RNA, 106 nt, Human
ggaugguggcuacgggugguggccucaagugauagaucccagauagugacccucaggguguggcaccggauggugacccuggguggcuggcccugcuucccugucc

SEQ ID NO: 4109780 - RNA, 91 nt, Human
ggauguaauuauucuuuugucucuucugggaagcccagaguauacguuaauaaucaaguuccagaagauggcagcaaaggauuuacuaucc

SEQ ID NO: 4109781 - RNA, 59 nt, Human
ggauguacccgaaccuguugccuugcccuaccucugugggcugguucaguucugcauuc

SEQ ID NO: 4109782 - RNA, 61 nt, Human
ggauguagauuaguggcaaagcuggguuggugcaccuggcuucccagacaauacugcuucc

SEQ ID NO: 4109783 - RNA, 110 nt, Human
ggauguaucuguugccacugcagggcugcacauccgggguucagaugcugugguaaugagcuagguccugugucagcuaccuccucugcgugguccuuucagacucaucu

SEQ ID NO: 4109784 - RNA, 66 nt, Human
ggauguauuucugguaacugcugcuaucccugugaaaaagaauggaguggaucaagaaguaucucc

SEQ ID NO: 4109785 - RNA, 64 nt, Human
ggaugucacaguacaggacgaguuuuccuggggauaaaauucagguguggcuaugcuguguucc

SEQ ID NO: 4109786 - RNA, 77 nt, Human
ggauguccuaguuuacaugcagaaaaucaauguuccugggcucuugugggacucugagaagccuguaaagggcgucc

SEQ ID NO: 4109787 - RNA, 59 nt, Human
ggaugucuggucuauuucaaguauacuggcccuggccaggacacaugggcugagacucc

SEQ ID NO: 4109788 - RNA, 60 nt, Human
ggaugucuuuagggcaaaauauuuccaccacaagagaaaugugauugucauaaggcuucc

SEQ ID NO: 4109789 - RNA, 80 nt, Human
ggaugugacacauuaaaacgucuacaauguuaucacuacaucuugccaaauauacugaguguguuaaugaugauacaucc

SEQ ID NO: 4109790 - RNA, 62 nt, Human
ggauguggcucuguaaaaugccugcauaauuucuguguuaguaaagacgugggccgcagucc

SEQ ID NO: 4109791 - RNA, 115 nt, Human
ggaugugggcuccagagcaggcccuggcagucagagcacuuggcucauggcaggcgggccucuuauguguagugcauugaacgaaggucccuguucucugccagagcaaacaucc

SEQ ID NO: 4109792 - RNA, 82 nt, Human
ggaugugucagguaggcaguguauugcuagcggcuguuaaugauuuuaacaguugcuaguugcacuccucucuguugcauuc

SEQ ID NO: 4109793 - RNA, 56 nt, Human
ggaugugucuccauacaccacccugcauuacaagggcugugccagagacagcaucc

SEQ ID NO: 4109794 - RNA, 62 nt, Human
ggauguucuuccuugucuauuuuucauggccauaccugaagagguuguugaggaauaugucc

SEQ ID NO: 4109795 - RNA, 61 nt, Human
ggauguuggaggcugguuuucuguucaguuaacaugaaaugcagccuguaaccuuaauucc

SEQ ID NO: 4109796 - RNA, 65 nt, Human
ggauguuucucacuguuucucuauggagcccagggacaggccagugaggaaagagugggacaucu

SEQ ID NO: 4109797 - RNA, 125 nt, Human
ggauuaaaggcaugcaccuaauuguuaaauauuaguuuuuaaaaaacuagucugagucugucuuuaugggcucugagugguuucaccuuuagaagcuuguuuuaggaucuugugccaaccagucc

SEQ ID NO: 4109798 - RNA, 87 nt, Human
ggauuaagugagauaauuaugaaauuaagcucagugcaugacguauuugcuaaauaagugauuaagucuuguucuccaccuugaucc

SEQ ID NO: 4109799 - RNA, 93 nt, Human
ggauuaagugaggugaugcacaagaugguuuccagaugcugggugccaggcucagcacuuugcauccauucuuaauuacauuucauuaaaucu

SEQ ID NO: 4109800 - RNA, 76 nt, Human
ggauuacuaacacuuuguugccuaugaacguacauucuuccuguugcguaugaaggcagaaagucaguuacaaucu

SEQ ID NO: 4109801 - RNA, 130 nt, Human
ggauuagauuagguucagauacugguccaggcugaacaaucuguucgauagaaaauuagagauggccugguuguucuaugaauaauuaguaaaaaguuggaaaucagauuucucaugaccuaaucacccc

SEQ ID NO: 4109802 - RNA, 65 nt, Human
ggauuagauuucucacuuuggagguauccuuaacaguugggcuaauuaaaguugaaaucaagucc

SEQ ID NO: 4109803 - RNA, 75 nt, Human
ggauuaggcacaacagagcacugccuuauuccccauaagcuagaauacgagcagucuaucuugugauuuaacucc

SEQ ID NO: 4109804 - RNA, 125 nt, Human
ggauuauacaauuuugaugacagaaacuuguucuuaaccaccucucugucuucagcauucagccuaauguuggaagaauagaagaugguugauaaauguuugcugaaucagaaauggaaugaucu

SEQ ID NO: 4109805 - RNA, 93 nt, Human
ggauuaugguucauccaacuucaaaguuguuaucauggguaucuaaaauuucuaaaauacuuugccaaguucgaagaaccaacuguauaaucc

SEQ ID NO: 4109806 - RNA, 65 nt, Human
ggauucacauguucuuuuccacucucucauuauggcaccagagaauuuaggaugcaugugaauuu

SEQ ID NO: 4109807 - RNA, 58 nt, Human
ggauucaggguaaaguuucaguuaugucccaguaaucauuuauuuuacccucgaaucu

SEQ ID NO: 4109808 - RNA, 96 nt, Human
ggauucauuagcuguuauuuugcuacccaucaguuucauuaauaggagcuuuacaauuuggaaggggggaaaauagcacuagauaauuaaugaacc

SEQ ID NO: 4109809 - RNA, 74 nt, Human
ggauucggguagagaaaaauauuuucuauuuauuuuauugcagagucugagguaauauuuuucucccugacucc

SEQ ID NO: 4109810 - RNA, 75 nt, Human
ggauucucagaggugaagaccagaagccaugaguggaaaaaccccacacagcagcuggcagcuucuucucuggcc

SEQ ID NO: 4109811 - RNA, 77 nt, Human
ggauucugugaugacucuuuugcuaggugaauauguucuuugauucauauccauaguaaaagucauuaaggaggucu

SEQ ID NO: 4109812 - RNA, 57 nt, Human
ggauugagaaucugagagccuaggacaucucaaaauugaccuugcuuuuucucaacc

SEQ ID NO: 4109813 - RNA, 57 nt, Human
ggauugcaacaagcuaguuuaggaaccgcuggcggacuagaaagaauguugucgucu

SEQ ID NO: 4109814 - RNA, 73 nt, Human
gggagaagggagaaagugcacaccuuccaaagagcucccaaagcucuccgaugugcacaucuccuuguccacc

SEQ ID NO: 4109815 - RNA, 55 nt, Human
gggagaagggauaugccacucucggguucccaguuggcuagcauccccuucuuuc

SEQ ID NO: 4109816 - RNA, 55 nt, Human
gggagaauggguauucaaccugguacagccaguaagaaucuuacuacauucucuc

SEQ ID NO: 4109817 - RNA, 76 nt, Human
gggagaccauggccccccgucccagcacagaggcugcccuuggcagugggcauggggcggaccugguucaaguccc

SEQ ID NO: 4109818 - RNA, 57 nt, Human
gggagacccaccugaggcucagcccuagcccucagcccaccuucaggggaguuuccu

SEQ ID NO: 4109819 - RNA, 82 nt, Human
gggagagaagccagcucccuuucuggcaauaauuguauuucucuaccaaaggccucaguucuugccagguggccccucuccu

SEQ ID NO: 4109820 - RNA, 57 nt, Human
gggagagagcugaggggcucugggcuguggcaguuacaguugcccccagccucgccc

SEQ ID NO: 4109821 - RNA, 103 nt, Human
gggagagagugcuuugaucucuuuuuaaaguauuuucugaaagcaaaagucuaucagaaggaagugccuuuaaaaaaaaucuaagagaagcaaccgaucuucc

SEQ ID NO: 4109822 - RNA, 78 nt, Human
gggagagauuuugagaagcaucugguccacuucuccaccuucagaggagucuggguugauauuucucaauuuucuucu

SEQ ID NO: 4109823 - RNA, 107 nt, Human
gggagaggcaccccucaccucagagggcagcuggagaccuccugugugaggagggcuuggccuccuuccuggggucucugcugcucaggcagggggcucccucuccc

SEQ ID NO: 4109824 - RNA, 70 nt, Human
gggagaggccaggagagaggucuagugaaguuccuuccggagcuacccugggaaucucccucacucugcc

SEQ ID NO: 4109825 - RNA, 68 nt, Human
gggagaggcugagcccacugcccacagggccucccggccuuuauugcaggagggcccgagacucuucc

SEQ ID NO: 4109826 - RNA, 59 nt, Human
gggagaggcuucauggagcuggcagcccuugagggguagagcauugcugaggccucccu

SEQ ID NO: 4109827 - RNA, 97 nt, Human
gggagauaucagugauucagguauugcuauuucugacuuaagagauaaaaugauaguaacacauugaacgaucgcuagauacgaaaugaccccuccc

SEQ ID NO: 4109828 - RNA, 72 nt, Human
gggagaucuuacucacuucagcuggcguugcucauuagugaauguaugacagcaggaugugaggggaugccc

SEQ ID NO: 4109829 - RNA, 59 nt, Human
gggagaugacucagugaccucgaggccaccacuaggcugugggugggugggugucucuc

SEQ ID NO: 4109830 - RNA, 55 nt, Human
gggagaugcacuggacuuagcauagcugcccugguguccuggucacugcucuccc

SEQ ID NO: 4109831 - RNA, 55 nt, Human
gggagauggcucagaggccgcgccacagggugugcccacaugggaccauucucuc

SEQ ID NO: 4109832 - RNA, 78 nt, Human
gggagauguguggaguggcuggacgacaagggugagaggucuucucaaucaccugguccucguccuccacuagcuccc

SEQ ID NO: 4109833 - RNA, 76 nt, Human
gggagcaacagaggauuauuucagaaucuacgcaaauaaaauucuguguguuggugaagucucucugcugccacuc

SEQ ID NO: 4109834 - RNA, 56 nt, Human
gggagcagguggcaauguggcagcaccuugaacugugcaucacugggccugcuccc

SEQ ID NO: 4109835 - RNA, 80 nt, Human
gggagcaugaggcccucugggcugguccugcugcccucacccucaccucaagcaggucccucagaggccucaccgagccc

SEQ ID NO: 4109836 - RNA, 85 nt, Human
gggagcauuaagccucuaaguuugugguaauuugcuacacaguguagaaaacuaauacaugcuugaugaugaaguuucuguuucc

SEQ ID NO: 4109837 - RNA, 69 nt, Human
gggagcauuucccuguguugaaccauugaccuaccucuaaauguacugucagggcagugggagguuccu

SEQ ID NO: 4109838 - RNA, 56 nt, Human
gggagccacugcgguccacugcaauugaugcagcaacaggggcugacaguggccuc

SEQ ID NO: 4109839 - RNA, 91 nt, Human
gggagccacuggcuggagaccagcugccucccagggcccugccagggcuggcacagagggcugguguuucuauucccagggccuggcuccc

SEQ ID NO: 4109840 - RNA, 67 nt, Human
gggagccagaggagagugaguauuagugcaggucggccuaguuaaaaucacaacuccaucauuuccc

SEQ ID NO: 4109841 - RNA, 71 nt, Human
gggagccaggaggugguuuccaggcacagggauaaaggaaaauccuggcuaauggcauuuccugggugccc

SEQ ID NO: 4109842 - RNA, 66 nt, Human
gggagccauggcagaaucaagccgacagccuuagucaggcugcagccuucuugccauuaaacucuc

SEQ ID NO: 4109843 - RNA, 129 nt, Human
gggagcccagacccuguagggaguuuuguuuuccuuucuucucuuggguguggugucuuguguuucugaaugugaacccaaagacccuaccccuggagaggaagcaccuuccucuuuguguuggucucc

SEQ ID NO: 4109844 - RNA, 57 nt, Human
gggagccccucccagcccgaguccucaucguauccucggagcugggcagggcauccc

SEQ ID NO: 4109845 - RNA, 77 nt, Human
gggagcccuggggagaaucagagaaugcugaggguuggaaaagaccuuagacaucagugcuucucagcggggguccc

SEQ ID NO: 4109846 - RNA, 72 nt, Human
gggagcccuuucacuggguggaugagcgucucccacauuucuacucccuugccucugugcuaaagggcuccc

SEQ ID NO: 4109847 - RNA, 73 nt, Human
gggagccggccuugcggaacgcucaggcgcgcuacuucagagcaugcgcagcaagaccgcgcggcccguuccu

SEQ ID NO: 4109848 - RNA, 55 nt, Human
gggagccucccgggaugggggugaagaggcacaaaccccucuggguuuuguuccc

SEQ ID NO: 4109849 - RNA, 77 nt, Human
gggagccuggauugucaccgacuuguccccucggcccccaucucgacucuuagagcggugucggucccggcgguccc

SEQ ID NO: 4109850 - RNA, 73 nt, Human
gggagccuggcuccacaggccaggguguggggggaccuccuggccacaccucagccauguggaggcagcaccc

SEQ ID NO: 4109851 - RNA, 77 nt, Human
gggagcucaauagaaaugcagagucucaggucccucuccggccccacugaaugagagucugcauuucaucaagaccc

SEQ ID NO: 4109852 - RNA, 59 nt, Human
gggagcugaaggagccggcggggccagcucacaguguuccagcuguuccaucagcucuu

SEQ ID NO: 4109853 - RNA, 65 nt, Human
gggagcugagggaccucuguggucaggcugcuucacuggccaaccagggaccuugugccauuccc

SEQ ID NO: 4109854 - RNA, 59 nt, Human
gggagcugaugauguaagucccaggccaagggcaggaaaagaccaaugucucagcucuc

SEQ ID NO: 4109855 - RNA, 71 nt, Human
gggagcugggcccaggcagcaugcuggcguuuccccgagggaauccuggcaugugccuugggaaagguccc

SEQ ID NO: 4109856 - RNA, 61 nt, Human
gggagcugggcugguuuugcugggccauacuguacugccucuguggaacugccaggcuccc

SEQ ID NO: 4109857 - RNA, 87 nt, Human
gggagcuggugagccugguuucacugacaaggucaggcccacucuggggcaugugugugagggaaacauguuuggagccgugcucuc

SEQ ID NO: 4109858 - RNA, 57 nt, Human
gggagcuguaguccagauaccgcggggcacgucggaagcugauaaacuacaacuccc

SEQ ID NO: 4109859 - RNA, 61 nt, Human
gggagcuguugauuguuugaggacuauuuguugcauaaucuccuuucuuuuagcagcuucu

SEQ ID NO: 4109860 - RNA, 82 nt, Human
gggagcuuggcaggccugguuuacaugguagaaaacaggggccccugggccugcuccaagccagcccugcagcagagcuucu

SEQ ID NO: 4109861 - RNA, 90 nt, Human
gggagcuuguuaaagaugcagauuccaucaccaauccagagauucuuauucaguagaugggcuaugagagcugcauuuuaacaaggaccc

SEQ ID NO: 4109862 - RNA, 77 nt, Human
gggagcuuguuggaaaugcagagucucagacagcagauccacugaaucagaacauggcauguuccauccaggcuccc

SEQ ID NO: 4109863 - RNA, 82 nt, Human
gggaggaaguaugguggggcagggauugcaggccagggcccagaacaguggccugagcuguuacucuguccucguuccuccc

SEQ ID NO: 4109864 - RNA, 92 nt, Human
gggaggacacaguagaaacaggcaggcagaugcagguguagugaacacuuauuggauacugugugcugaguguugucugaggugcucuuuuc

SEQ ID NO: 4109865 - RNA, 59 nt, Human
gggaggagacaguaaaaagcacgcaaacacaguguguucagaauuugcugcuuugaccc

SEQ ID NO: 4109866 - RNA, 74 nt, Human
gggaggagcccuguuccccaggccugacagugcaggagcugugggccugcaggcugggcugggcugccccuccc

SEQ ID NO: 4109867 - RNA, 82 nt, Human
gggaggauagagggucuuaccuaagcaggguucauugcuggcagugccugucuugcugugcuugggaagaaucucugcaccc

SEQ ID NO: 4109868 - RNA, 68 nt, Human
gggaggcagaaagauuucaucacuaaguucugaucaacauagcugaugaauaauuauucuucaagccc

SEQ ID NO: 4109869 - RNA, 90 nt, Human
gggaggcagagacguuggcacagagggacccagcagccccgggcuccugcccuggugcuggcugaggucuagcucuuugcucuguuuccc

SEQ ID NO: 4109870 - RNA, 75 nt, Human
gggaggcagaugccuuggccgugacccauggcuaaagcucagggggaaucaggucacaggccugccuguccuccc

SEQ ID NO: 4109871 - RNA, 81 nt, Human
gggaggcauuucuaucacccauugcacaaagagggaaacugaggccagagagggcacuugcuuccucugugcaauccuccc

SEQ ID NO: 4109872 - RNA, 84 nt, Human
gggaggccaccaggucucuuuugucacaccacugaaaaauauaaguaagcagugaugaguuacucaagaaucuuaaggccuucu

SEQ ID NO: 4109873 - RNA, 66 nt, Human
gggaggccgggccaggggcugguggcuuccuccgcgagcucugccaguuucuggccucagguaccc

SEQ ID NO: 4109874 - RNA, 63 nt, Human
gggaggccuauaugguuggauauaauuccucugucuuagaaguuuaaauucaccaugccuccc

SEQ ID NO: 4109875 - RNA, 56 nt, Human
gggaggccugcagccugggaacugggagaccugggucccaguggagaggccucacc

SEQ ID NO: 4109876 - RNA, 67 nt, Human
gggaggccuggcugucgcuggcaguguugugcacacagacaaggcaaggcggccagaucugcugccc

SEQ ID NO: 4109877 - RNA, 66 nt, Human
gggaggcgggggcugagucagugggaagaggggaagguuuucugggugacucacgcucccccaccc

SEQ ID NO: 4109878 - RNA, 75 nt, Human
gggaggcggugcugggauuuaguuuuaaauggaaaaugccucuggcuuuuaauuuucugggcccagcaguuuucu

SEQ ID NO: 4109879 - RNA, 93 nt, Human
gggaggcguuuauaaauaacuuuuccucagggccacggggugagccccggcuucugauuggcucagaggggaagugguuuugaacacuacacc

SEQ ID NO: 4109880 - RNA, 86 nt, Human
gggaggcucucuucucauucucugccauugcgguggaugguaacacuacuuaagagguagggaacuuuaaaagaaagagaguuccc

SEQ ID NO: 4109881 - RNA, 123 nt, Human
gggaggcugagguagggggaucacuugagccugggaggcagagguuguagugagccagguugugccacugcacuccagccuuggugacagagugagacccugucucagaaaaaaaaaaauccc

SEQ ID NO: 4109882 - RNA, 55 nt, Human
gggaggcugagguggauggaugaccugaggucagaaguucaagaccagccugccc

SEQ ID NO: 4109883 - RNA, 57 nt, Human
gggaggcugcucuccugucuggggccagaggucccugcauuugggagagugucuuuc

SEQ ID NO: 4109884 - RNA, 66 nt, Human
gggagggaaggaccuuaugaauaguccauuuagccuaagaaauggcagauuuaguucuucucuucc

SEQ ID NO: 4109885 - RNA, 66 nt, Human
ggcuagcacugaucacacuguguucugauuauuaguuuaaauaacaggcucaucagaugcugagcu

SEQ ID NO: 4109886 - RNA, 55 nt, Human
ggcuagcuccuccgcgcauccacguucaaccgaggcuggugauguuggagcggcc

SEQ ID NO: 4109887 - RNA, 85 nt, Human
ggcuaggaaugacccacugcagagcuuuucaguugagguaguguccucuuuaaccuuagcuaagaccuuggcggcaggcccagcc

SEQ ID NO: 4109888 - RNA, 93 nt, Human
ggcuaggauggucuucaucucuugaccuugugauccacccgcuuuggacugccaaagugcugggauuacaggugugagccaccaugccuggcc

SEQ ID NO: 4109889 - RNA, 71 nt, Human
ggcuaggguuggagagucagcuucagaggauagauaauuaaagccacaagaauagcugaggucacccagcc

SEQ ID NO: 4109890 - RNA, 79 nt, Human
ggcuaguauucaaaucaccauccuuaauuauaauuguuggcugcaaugaauaaucuguggaugguuuugaguugcugcc

SEQ ID NO: 4109891 - RNA, 63 nt, Human
ggcuauaaaucuacccagcauuggaaggccccagaaugaauuggguggaauuaaacauuggcc

SEQ ID NO: 4109892 - RNA, 70 nt, Human
ggcuaucucacucgaaacacagcauccccucccaucccaucacgaggggacccuguggagggugagaguc

SEQ ID NO: 4109893 - RNA, 76 nt, Human
ggcuaugauggaauugagcaucaguuguuugaaauauucaauaacaauuccuuggaugguaguucuaauuuuagcu

SEQ ID NO: 4109894 - RNA, 99 nt, Human
ggcuaugcaggggugauagaauuuuauguuuuauggcuauaucaucaguucauaucgaugauugggaccuugaaauaggauuuaucaucuuauuuaguu

SEQ ID NO: 4109895 - RNA, 86 nt, Human
ggcuaugcugucagaaacauaaggaaccugggcuuaagagaauggcucugccucucccaugucaagguugcuuuuggcugcacgcu

SEQ ID NO: 4109896 - RNA, 66 nt, Human
ggcuaugcuucaggaguaaggguaacccagaaguaaacuagccuucucccuagcucuagccuggcc

SEQ ID NO: 4109897 - RNA, 65 nt, Human
ggcuaugggagggacauuuuggaggcaagccuuccauggaaaccuccaaaucccauucuguaguc

SEQ ID NO: 4109898 - RNA, 67 nt, Human
ggcuauuugaucuaagucccaguguaaucuuauagauaaucgcauugaaggacuuccauuauaagcu

SEQ ID NO: 4109899 - RNA, 84 nt, Human
ggcuauuuucacuucuuuuguggaucuucuguugcuucgggccaucuggauguauacgugcaggucacaggggauaugauggcu

SEQ ID NO: 4109900 - RNA, 111 nt, Human
ggcucaaaacacuacacugaaucuuaugguuagcuaaaacaguuuggacauaggcucuaugcucaugcuucuuguauuuggcugacuuagagaaugugaguguuuacugcu

SEQ ID NO: 4109901 - RNA, 71 nt, Human
ggcucaaccagaggcugagcagucaguuugcuauuauuaccauauggcuucuucagccuccuggauagguu

SEQ ID NO: 4109902 - RNA, 70 nt, Human
ggcucaauacugugauccuucuagggcuggaacuaaaggagacaggcucuugagaggcacagguuuggcu

SEQ ID NO: 4109903 - RNA, 78 nt, Human
ggcucaauaguauuuaauaguuagcucaaaaggacgaauaaaguucuacaugggaagcugcugaacuacagucaggcc

SEQ ID NO: 4109904 - RNA, 62 nt, Human
ggcucaauauuuggccaggguguggugagcagacaagggucucacagacuggucagugaggc

SEQ ID NO: 4109905 - RNA, 109 nt, Human
ggcucacagggugcauuugacaaagagaagggcaugagucuauaaaccugggacaauugcagguuuagaggcaucuugcuuuucugggaacaaaggcauccacagaguc

SEQ ID NO: 4109906 - RNA, 80 nt, Human
ggcucacucacauggcuguuggcaggaggccucaguugcuugucgcauugggccccuccacauggcugcuugaguguacu

SEQ ID NO: 4109907 - RNA, 56 nt, Human
ggcucacuuuggggucagcugggggaccaugcuucugguggcucauguagugggcc

SEQ ID NO: 4109908 - RNA, 55 nt, Human
ggcucagagagacaaugugggacauuugaggucaguggcucauccuuucugcgcc

SEQ ID NO: 4109909 - RNA, 94 nt, Human
ggcaaagugaaaucucaguuaauguccuauacaauagugagugugcauauuguuguauguuuguuggccauuuagauuuguacuaugucuugcc

SEQ ID NO: 4109910 - RNA, 117 nt, Human
ggcaaagugaaggucccuugacagauggucugauagucugaaaaugaugggaggauaggaaccauucauugcuguggcuucaguaccaaauugugaauuggacucuuacaaugugcc

SEQ ID NO: 4109911 - RNA, 73 nt, Human
ggcaaaugacacacuaggaaaagcauuuguaacucauaacaagccuaguuuucuuacuguguaaaguacugcc

SEQ ID NO: 4109912 - RNA, 94 nt, Human
ggcaaauucuaucuuccccugcaagaccugagacacacccacuucuacugagagacacuggguggcaggcuggcauuggcaagaugguucugcc

SEQ ID NO: 4109913 - RNA, 114 nt, Human
ggcaacaacucugguuuauaugcauuggucugcuguuaguugucuaaugcucuuaauuuccauaacagaaacagauaaguguaaguguaugagaccggauucucuucauuugcc

SEQ ID NO: 4109914 - RNA, 124 nt, Human
ggcaacaugaaaaugcacacucguucaauaaauaucagaugaauaaaugaugagguaauuuaccuagaaaguugcauuuauaaaauguucgugguuuauuguguuaauguucaacuugauggcc

SEQ ID NO: 4109915 - RNA, 56 nt, Human
ggcaaccauguacaaagaugcugagguaagaaagagcucaguguauucugggugcu

SEQ ID NO: 4109916 - RNA, 80 nt, Human
ggcaacuagagcagugauugguaaccugguguauggaaucuaccuccaccugccugggaaccaauccuggcuuuagugcu

SEQ ID NO: 4109917 - RNA, 55 nt, Human
ggcaacugaggugucuagggugcaaaaugugaguugucuagacaccaaaguuguc

SEQ ID NO: 4109918 - RNA, 71 nt, Human
ggcaacuugugcuggagccccaggcugugcagacagagcccuucuccacagaagguuccaggccgguggcu

SEQ ID NO: 4109919 - RNA, 57 nt, Human
ggcaagaaugagcuggcaguucucaucccccugguggugaagagugcgcacauugcc

SEQ ID NO: 4109920 - RNA, 76 nt, Human
ggcaagacagcacagucuuucaggucagggagaaccaaguugaaauucugauucugccacguacuggcuguguucc

SEQ ID NO: 4109921 - RNA, 105 nt, Human
ggcaagauugaucugaggacugaacaaaaucauccaugugcaaacuuugguaucaguuaaccaaugugccucauauggaugggcccagaccuuugaugucaugcc

SEQ ID NO: 4109922 - RNA, 65 nt, Human
ggcaaggcugcuugguuuucucauggguauuucacuuagucuauguaaacuucagagucauugcc

SEQ ID NO: 4109923 - RNA, 78 nt, Human
ggcaagggaucugcuagcgguaacagcguuugcccauucccaugguguaaacacccuuacuguggccuguuucgugcu

SEQ ID NO: 4109924 - RNA, 75 nt, Human
ggcaagguuaagagauagugcuggagugaguauguguagucuuagugacaccucaucucacucauagccuuugcc

SEQ ID NO: 4109925 - RNA, 74 nt, Human
ggcaaguaauacaggauuauuuuagaguaguuacuggaaaggucuccuaagugaauucauuguguuauauugcc

SEQ ID NO: 4109926 - RNA, 66 nt, Human
ggcaaguauuugugcaucuacacacaucuaaacauagaaaagguacagcauaaauacacuauuguc

SEQ ID NO: 4109927 - RNA, 103 nt, Human
ggcaagucauuucacuuaaguagggcucagggucaccaucugucuauacagcaaaagucuggaccagauggccuuugaggcccaucuuaacaguaccucugcc

SEQ ID NO: 4109928 - RNA, 88 nt, Human
ggcaagucuguaugcugaggaagguuucuuaucaaucguaauuuauuugcuauaggaaguaaacuuucuucagcuaaucauaauuguc

SEQ ID NO: 4109929 - RNA, 69 nt, Human
ggcaauaugucaucugcuaaaauucaucucugcuucugcaagauacauugcacgaugcagauuuuugcc

SEQ ID NO: 4109930 - RNA, 67 nt, Human
ggcaauggagcugguaaacagugacauccuauauuaauuugaggucacugcuuaucaccaggcagcc

SEQ ID NO: 4109931 - RNA, 79 nt, Human
ggcaauggcaccuagggcaucccugccccagcagcccuuggcgugggagcuggggcaggagugcugggggcacggggcc

SEQ ID NO: 4109932 - RNA, 57 nt, Human
ggcaauggggaugaggcaugcuggugagugacagucguggcucugggcuccuuugcc

SEQ ID NO: 4109933 - RNA, 90 nt, Human
ggcaauguuuuggacauacuugaagcaagugaucaucaauuuauagugauuaucaaucugcuuugugguaucauuuucuccaauauugcu

SEQ ID NO: 4109934 - RNA, 60 nt, Human
ggcaauuacuuuaugcaaaugugggcaucucuggauggcuggcaaggcuggagucaggcc

SEQ ID NO: 4109935 - RNA, 107 nt, Human
ggcaauucacuacuaacuacaguuguuuagaaggcucuuagugauucagaaagcacauuaugcauuuagagcugauaguacacugguaggauugguguagucaugcc

SEQ ID NO: 4109936 - RNA, 85 nt, Human
ggcaauucuucaucaagacauaccuuuuuguugcuucuaauuaccugcuggcaggaacuaaaagugugucucuuguaugcaugcc

SEQ ID NO: 4109937 - RNA, 69 nt, Human
ggcaauuuucaugaauuauugauuuggccaaaaauaauugaaaagguuuauaauuacauagagauugcc

SEQ ID NO: 4109938 - RNA, 88 nt, Human
ggcacaaccuccagggauucccagauggggcaaggccaucugucucaggugugggacucccucaccccgucugggccuggaaccggcc

SEQ ID NO: 4109939 - RNA, 66 nt, Human
ggcacaaggagagggcaggccuaggaaugguuuagcugcauccugaugauauugcucuuucuugcu

SEQ ID NO: 4109940 - RNA, 56 nt, Human
ggcacaagguuuaaauaacaucaaaaugguguuugagcuaaaaguaagcuuuggcc

SEQ ID NO: 4109941 - RNA, 62 nt, Human
ggcacacagaggacaugcauuuguuucuucaagaaacauuuauugagcaccuacugugugcc

SEQ ID NO: 4109942 - RNA, 69 nt, Human
ggcacacagcaggcaugaagaaauguuuuugcaugaaagaauaugccuucugcugugcugcaguuugcc

SEQ ID NO: 4109943 - RNA, 117 nt, Human
ggcacacaggauuucaauagaaauugcaugccuuuuuagaugugcgaauguuucauuaagcguaugaauauuugaagagauguaugacacuuuaaaaacuguuuccucuacuguguu

SEQ ID NO: 4109944 - RNA, 86 nt, Human
ggcuucuugguaagggcauaucuaaaguauuugggguauuagggaaaacuuccuugguaacugauguucccuuacuguagggagcu

SEQ ID NO: 4109945 - RNA, 129 nt, Human
ggcuugaagaaaaagaagaggauaguggcauccagccaguguggaugacuucuaguggaccagaaguaccuucugccaugcuccuugggugaaggccaucauaucuuccuccucucaugcuucucugcc

SEQ ID NO: 4109946 - RNA, 82 nt, Human
ggcuugaguguguuugugagcacaggcacacacgugugcaugugcacaugugcgugucuguguaugcaggccguauuaggcc

SEQ ID NO: 4109947 - RNA, 59 nt, Human
ggcuugcacucauugggcauccgcuggugucggcucagcuggguggccugcgugaagcu

SEQ ID NO: 4109948 - RNA, 59 nt, Human
ggcuugccaugagugcaccugugcuucgguugccagcccagcaggugagccguggcucc

SEQ ID NO: 4109949 - RNA, 64 nt, Human
ggcuuggaauugguaggauguauguuagcuccagcuggcaauaagaaucuuaauaauucuggcc

SEQ ID NO: 4109950 - RNA, 87 nt, Human
ggcuuggaggucccuccugaaugggguuguggugucuuccacuggacaucaugguaacacagcuguauccaggagauccucuggguu

SEQ ID NO: 4109951 - RNA, 60 nt, Human
ggcuuggcuacaagccaugggcaauuccucuguccucugcccaacaggagugaucaggcc

SEQ ID NO: 4109952 - RNA, 88 nt, Human
ggcuugggacaugugugaaucuuuugggaucagaagacaacucugcuaggcagaauaauggucccuaaagaugucuacaucccaaucc

SEQ ID NO: 4109953 - RNA, 78 nt, Human
ggcuuggucucuaacacagcuuucagucauuaucucagugcuuugagacuaguaaagaggauguguuaaaggcaagcc

SEQ ID NO: 4109954 - RNA, 82 nt, Human
ggcuuguagauggcuuccuucucacugugugcuugccugguucuuguuuaguucaugcauggagauagggagacugugagcc

SEQ ID NO: 4109955 - RNA, 121 nt, Human
ggcuugucuuucccucucagagcuugguccacugaccuuccuugucuacaaaagcucuuaagaaguguuugcugaaaggaagcagggcagggcuuacagaggagggagcaugggggaagcu

SEQ ID NO: 4109956 - RNA, 127 nt, Human
ggcuuguggaacucaucugccuggucuauuccuugagagcaacacgcaguaguauacgagcguaacaagaacagcucaguaccuggugcuugaccucagaacaucucagcugaagucccagcaugcc

SEQ ID NO: 4109957 - RNA, 75 nt, Human
ggcuuuacaggguuuguaucuuccuuuaccugcaaagacagaaaagcaaaaggaggcaaacagccuagaugaguc

SEQ ID NO: 4109958 - RNA, 58 nt, Human
ggcuuuagggagcccccucccaagcccaucugcugggacagggcccugcccuauggcc

SEQ ID NO: 4109959 - RNA, 56 nt, Human
ggcuuuaugcagggauagaaauguaaauaugacagauucuugacuuucauaaagcu

SEQ ID NO: 4109960 - RNA, 62 nt, Human
ggcuuuaugcagggcauccugaaaagaagcacuuauuucagacacugaucuugcaucucgcc

SEQ ID NO: 4109961 - RNA, 74 nt, Human
ggcuuuauuccaugugucuaugaccaagguguuuuucucucauuggucauaguccauggcauaauguccuggcc

SEQ ID NO: 4109962 - RNA, 130 nt, Human
ggcuuucaguacuucccagguuuagguacugagcugaguggcaggucucagcuaccgacggguuuguggguucccgucacucucucugggucuuugcucaguucgccuaucuuugcuuuugucuguuguc

SEQ ID NO: 4109963 - RNA, 71 nt, Human
ggcuuuccuggguccucuagggagggggcucuaggagcccuccugauccuuccccuugaggauggaaaguc

SEQ ID NO: 4109964 - RNA, 83 nt, Human
ggcuuuccuucuuggcacagaugagauucuucuugugagaaaugguggaaucuucagccaugccaagauacagggaccgaguc

SEQ ID NO: 4109965 - RNA, 76 nt, Human
ggcuuucugaggcuacuguuggacuuuucaaggucugauuauuaggccauuuaaagggucagcuccugccugagcc

SEQ ID NO: 4109966 - RNA, 55 nt, Human
ggcuuucuugguucugcaggggccuccgggccuuuguucucugaacaagaacgcc

SEQ ID NO: 4109967 - RNA, 104 nt, Human
ggcuuugccauuccaaacuucugcagggcagagggaaacuccuuugcaggaaaauugccaaacagaaauuuccucaugcuccuauggaagguaaugcagaagcc

SEQ ID NO: 4109968 - RNA, 82 nt, Human
ggcuuuggcuuaagagaauguuguggcuagguugaucuuuuauucagacuacucaaacuuucucuauagcaacacuagggcu

SEQ ID NO: 4109969 - RNA, 70 nt, Human
ggcuuugugcuccaugaauuugagcuuuguguuguguauacauugcuccugguucacugguaaugcugcc

SEQ ID NO: 4109970 - RNA, 63 nt, Human
ggcuuuuacuguggaaauggggaggaaggagaaacccuuauaucuccagacuacagaagagcc

SEQ ID NO: 4109971 - RNA, 76 nt, Human
ggcuuuuauaugaacauagauuuugugucucuggaauauaugucaaagaguacaacugaugggucaugugggaguu

SEQ ID NO: 4109972 - RNA, 58 nt, Human
ggcuuuucgcccuuaccuggguccugcuuccagccaggcagagccggggcgagaaggc

SEQ ID NO: 4109973 - RNA, 88 nt, Human
ggcuuuugaaggaaaacuuacaaaggaaacuucuuuucccucaaaggaaauugggggaauugaugucucauuugucuccaucaaaacc

SEQ ID NO: 4109974 - RNA, 69 nt, Human
ggcuuuugagcagaggagugacguagguaacuuguuuugcacaauuaaucuggcugcugugcuuaagcu

SEQ ID NO: 4109975 - RNA, 130 nt, Human
ggcuuuugugauugguccuccuugucgccuuggccccucugguccucaguggcaguucuuucucucuugcugccuccuucaggagggcccggcucagggucuggguguucagggagaagaccucaggcuc

SEQ ID NO: 4109976 - RNA, 74 nt, Human
ggcuuuuguuuucagaauguggauucacaagugcucaaggaauaugacuucagcacuauacauuuugaauagcc

SEQ ID NO: 4109977 - RNA, 60 nt, Human
ggcuuuuuagggagccaacacugggcuuccaagagccagcugugcuuuuccuaaaaggcc

SEQ ID NO: 4109978 - RNA, 56 nt, Human
ggcuuuuugaugagaguccucuuuaaaaggaaagaaaugcagucucgucaaaagcc

SEQ ID NO: 4109979 - RNA, 83 nt, Human
gggaaaaaagguagacccggagcaccugagccaauggggccuggccccaggcagggacgugcucugguccugaaucauuuccc

SEQ ID NO: 4109980 - RNA, 64 nt, Human
gggaccaccuggggcucagaccugccucccccgacaggcaggucagcuggugccccaggugccc

SEQ ID NO: 4109981 - RNA, 78 nt, Human
gggaccagcuagugcccagaugagccagcagcucccuccagaugcaggggugaggcccauuugaggccagcugagccc

SEQ ID NO: 4109982 - RNA, 59 nt, Human
gggaccaggccagccucccugcggagccuaagggcccucucagagacagggccgguccc

SEQ ID NO: 4109983 - RNA, 59 nt, Human
gggaccagguaacuguuagucaugcuuugaguccuuugugauuuccagaaaauuggccc

SEQ ID NO: 4109984 - RNA, 79 nt, Human
gggaccccugccacccccagcagggaaaggaggagaaggugacacuggcccuccuguuguccugcuggggcagaggccc

SEQ ID NO: 4109985 - RNA, 56 nt, Human
gggacccuccuacuacccuggaaaccugggugagccuggagucguggaggggcccc

SEQ ID NO: 4109986 - RNA, 94 nt, Human
gggaccugaaggcuggcuucccaagcguccucgaggccuugugccaggaagaggacccucgggcuuagggaagugaaaaccaggcucagguccc

SEQ ID NO: 4109987 - RNA, 66 nt, Human
gggaccuggucuagcacugagcuccaaacaggcagaggggacuuugugccaaacgccagaacuccc

SEQ ID NO: 4109988 - RNA, 111 nt, Human
gggaccuucuugccuugcucuugcuacucugcucuggguggucauugugaaaagcccgcaccaaccaugccaguggcagccagacgaggacacagccuggcucuggguccc

SEQ ID NO: 4109989 - RNA, 65 nt, Human
gggaccuuggugcucccagaugcagcgcagaaucacuauugccuguguggggucugccgccuccc

SEQ ID NO: 4109990 - RNA, 76 nt, Human
gggaccuuuggaaggaauuaaggucaugaggguggagccuucaugaaugggauuaauguccuuacaaaaggggacc

SEQ ID NO: 4109991 - RNA, 66 nt, Human
gggacgacaaauguggugacugagagugacagcauccucccagauucucagcaccuguccaguccc

SEQ ID NO: 4109992 - RNA, 71 nt, Human
gggacgauguggccugaaucaggcacuguuggaaauucucauuuugugcaauuucaggcauauauugugac

SEQ ID NO: 4109993 - RNA, 74 nt, Human
gggacgcauuuucugcuaaaauggcugugcgaggcugccaccucguggccagcacaaggcagugaguguguccc

SEQ ID NO: 4109994 - RNA, 59 nt, Human
gggacggcaucaugggggugguuucucaugguucagcgccagccccuugguacuguccu

SEQ ID NO: 4109995 - RNA, 99 nt, Human
gggacucaguuugucaccacauggaccucucuguagggcugcuugaguaucuuaugguaguuggcuucccgcagaguaagugaugagacagagagugcc

SEQ ID NO: 4109996 - RNA, 128 nt, Human
gggacucauugcucuuuggaaacucuuuaaccuuuacaacaaaggcacgugcaugggauucaugauuccuaaaggcucguauuguuguguguuaaauuguguucucucaaaagauauguugaauuccc

SEQ ID NO: 4109997 - RNA, 75 nt, Human
gggacucuggccaggugcgguaugugucugguccucggcuaaguucucagugauauucacgccgccagagguccc

SEQ ID NO: 4109998 - RNA, 56 nt, Human
gggacuggauagaugugggugacccaaccauaacuaccuacucucccucagcuccc

SEQ ID NO: 4109999 - RNA, 64 nt, Human
gggacuguccggcagaagguacacacgucguagggugugaggccuucagcucgggaaggcuccc

SEQ ID NO: 4110000 - RNA, 57 nt, Human
gggacugugaggccuaacugggaccccaggcaaugggaaucccaugagcccacuccc

SEQ ID NO: 4110001 - RNA, 98 nt, Human
gggacuuguucacguagacaugauugaccaucugcugggcugaccuuggucaccagcacuuccagaggucagguugauacugugugguucaaaguccc

SEQ ID NO: 4110002 - RNA, 83 nt, Human
ggcacagcccuccgagaagcgggguguuuuggguggccugcccaggcaggcgcauugaggcccuguugcucugagaguuuguu

SEQ ID NO: 4110003 - RNA, 59 nt, Human
ggcacagggagaggcggauuuucccccaagggauguuccucugcacuccugcaugugcc

SEQ ID NO: 4110004 - RNA, 67 nt, Human
ggcacagugaguauuuaguaccuaagguauguuucuuggugcuguaucuauacuuuuccacuuugcu

SEQ ID NO: 4110005 - RNA, 129 nt, Human
ggcacagugugaacccuaaagugauggcaagcaagcugaagagaucaacacaaauaccuaaggagauguuuucggacucuuccguacuugcacauccaccuuagugaucugguuccaacccaacuuguc

SEQ ID NO: 4110006 - RNA, 65 nt, Human
ggcacauaagaaaugaauaugagaacaguaugaaagugaagcaguucucuuuauuccuuugugcc

SEQ ID NO: 4110007 - RNA, 69 nt, Human
ggcacauaccuacuuccuuuucagcuuugaaaaucacaagaaaggcugagucaaguuagggugaaggcu

SEQ ID NO: 4110008 - RNA, 64 nt, Human
ggcacauagucaacacacgguacuugagaaugcuuuucccaagacgaugugcuuggcccuugcc

SEQ ID NO: 4110009 - RNA, 68 nt, Human
ggcacauggauaauuuacgauucccauuguccccucugcagggauuaauucugaauuauuuauguacc

SEQ ID NO: 4110010 - RNA, 63 nt, Human
ggcacauuagaggagcugggacccugucaucugaucuuaguucaguguccagagcccauggcc

SEQ ID NO: 4110011 - RNA, 83 nt, Human
ggcacauuaguauguacaaguguuugcuauuaugaugaugaaaugcuuacaggaagcaaagcacuuugcauacauauuaugcc

SEQ ID NO: 4110012 - RNA, 86 nt, Human
ggcaccaccaagcacuauccuaaaauuguucaauuucuuuccaaggaaagacugaauuuuguuggguuggguuuguuuuguuugcc

SEQ ID NO: 4110013 - RNA, 71 nt, Human
ggcaccagaaguuauugccugugaugaaaacccagaugccacauaugauuucaagguauggcuucuuuguc

SEQ ID NO: 4110014 - RNA, 108 nt, Human
ggcaccagaguauucacgguagguguaaggacaacaggagaaaaauaagccgucuuaguacauuuuuucaaguuucuguuugucuuccaucugcaggcucuuuaagcu

SEQ ID NO: 4110015 - RNA, 59 nt, Human
ggcaccaucagcugugcagggggaauuucuucacuuuauucugugaucagccuggugcc

SEQ ID NO: 4110016 - RNA, 58 nt, Human
ggcaccaugcuguccaugacguacagcgagagucugcggagcgugagcagcaggugcc

SEQ ID NO: 4110017 - RNA, 61 nt, Human
ggcaccauuaaagagauccuggggacugcccagucugugggcuguaauguugauggccgcc

SEQ ID NO: 4110018 - RNA, 99 nt, Human
ggcaccggccuugucauggggagacaccuagggaaagaugggcaaagagacaagaauuuccaaguuuccucugacugcuccccugcaacacggagagcc

SEQ ID NO: 4110019 - RNA, 91 nt, Human
ggcaccuccaagaagugucauuccuggcaucugucuggggcucuggcagugugccaggaacuggcugcugguucugaacucuugccgggcu

SEQ ID NO: 4110020 - RNA, 74 nt, Human
ggcaccugcagauggcuucucgcuggcaccugucaugcucugcagacgugccuggaaaagaagcuuauguugcc

SEQ ID NO: 4110021 - RNA, 86 nt, Human
ggcaccugcagcugacagugaggugggggcuuugcagcaggugcuggggccuccccaaagugcugacagcuacaggaaaaggugcc

SEQ ID NO: 4110022 - RNA, 57 nt, Human
ggcaccugcuccucucucugggcagauuguccucucccuggaggcagguccagggcc

SEQ ID NO: 4110023 - RNA, 65 nt, Human
ggcacggagguggcuuagucucuggacaagaggcccccugacuugucuggcuuucuccaugugcc

SEQ ID NO: 4110024 - RNA, 71 nt, Human
ggcacgucgcggcaaugaccacacacugggcucuuuuggaaagaguuuacaguucucaucgcaacguugcc

SEQ ID NO: 4110025 - RNA, 80 nt, Human
ggcacguuaauucaugugaucacagauuguaauauaauuagcuccuucauuaauaucugcuaucagaugauggacaggcc

SEQ ID NO: 4110026 - RNA, 77 nt, Human
ggcacucaggauucaagcucagcuuucccgcggaccugcugggaagccacggguaagcugcuuuaucucucugugcc

SEQ ID NO: 4110027 - RNA, 66 nt, Human
ggcacucuucugugagaauucaagcaaggaaaacaaaucuuuucucaggguugcagaaggcaggcu

SEQ ID NO: 4110028 - RNA, 95 nt, Human
ggcacugaacacaggcccugugaacaaggaugagggcuccuaugguucccaaccagagugggugaucucuguuguccauagggagaaucagugcc

SEQ ID NO: 4110029 - RNA, 60 nt, Human
ggcacugacacuagcauggcacuggccacgugccaggaaaugaacuguguguuuugugcu

SEQ ID NO: 4110030 - RNA, 83 nt, Human
ggcacugacugaccucagggccccuguucgccugccugaggcacuucaggguggagggagucccugagcacagccuucaggcc

SEQ ID NO: 4110031 - RNA, 71 nt, Human
ggcacugcuccccgaguuagcuggccaguuccccucggggcugccuugacccuggcuccggaggcagcgcc

SEQ ID NO: 4110032 - RNA, 63 nt, Human
ggcacuggaaggaucaugugagggcaguuugagugacagguauucaaugguccuucuaagucc

SEQ ID NO: 4110033 - RNA, 84 nt, Human
ggcacugggcacagucccuguccuuguagcccaucagguggaugaugauaugguggggucacgacagagggaagcccagaugcu

SEQ ID NO: 4110034 - RNA, 58 nt, Human
ggcacugucuauagaaugucaaaguaauuucuuaugaagacaucauguacacauugcc

SEQ ID NO: 4110035 - RNA, 66 nt, Human
ggcacugugaaaguaagucagacuuuacuuaauuauugugaaaguaagucuuacauucacauugcc

SEQ ID NO: 4110036 - RNA, 85 nt, Human
ggcacuugggaauggcaaggaaaccguuaccauuacugaguuuaguaaugguaaugguucucuugcuauacccagaaaacgugcc

SEQ ID NO: 4110037 - RNA, 113 nt, Human
ggcagaaaauaauugaaauaacuuccguucaauuucuaauugaaucucucuucuguggggaaggaaguaaaguacaauuaaagauguaguggaaagcuguuuuuuuuucuucc

SEQ ID NO: 4110038 - RNA, 70 nt, Human
ggcagaacucccacccugggcuacacauccagggugcaggcccuugggugucuccaggagggaaagagcu

SEQ ID NO: 4110039 - RNA, 73 nt, Human
ggcagaaggaucgcuugagcccaggaauucgagacugcacucuacccugggugacagagugagaccuuguguc

SEQ ID NO: 4110040 - RNA, 86 nt, Human
ggcagaagggcugcacugauuacccauugcugcugaacuaaugacccaaaaacuuagcagcuggaacuaauagugguuucucuguu

SEQ ID NO: 4110041 - RNA, 64 nt, Human
ggcagaaguggaacuuggcugcagggagucuggcccuggagccugcaguuuucacuuuuacucc

SEQ ID NO: 4110042 - RNA, 58 nt, Human
ggcagaagugguaccguguggccuuugcaaggcuaaaucaggccuuacagcuucugcc

SEQ ID NO: 4110043 - RNA, 59 nt, Human
ggcagaaugaggcuuaggaaugcauuucacuuaauugauagaccugucuuguuucugcc

SEQ ID NO: 4110044 - RNA, 69 nt, Human
ggcagaauggcugcagccggcccugcgcaugcucccugcgccgcgcaugcucccugcgccaccccugcu

SEQ ID NO: 4110045 - RNA, 70 nt, Human
ggcagacauuuccccacccaggacaggccagaugugcucccugagcuguugccugugcuggguguuugcc

SEQ ID NO: 4110046 - RNA, 62 nt, Human
ggcagacccgugcucuuucugucucugcacccaguguguguugauacaguaagguguuugcc

SEQ ID NO: 4110047 - RNA, 77 nt, Human
ggcagagaacucaguuaugcugcuacccaguuucugaccuacagaaacugugagcuaguaaauagguguuuuaagcc

SEQ ID NO: 4110048 - RNA, 60 nt, Human
ggcagagagagaggccaguauuugaggacugauauuuaaaugaacaacuugauuuuugcc

SEQ ID NO: 4110049 - RNA, 78 nt, Human
ggcagagcacaauauuuugcauucuguuaaaauguauuuuccccccucuggagaaagaaugaaaauguguuucaugcc

SEQ ID NO: 4110050 - RNA, 55 nt, Human
ggcagagccucagcccuccacccagucuuuggugggaauugcaggggguucugcc

SEQ ID NO: 4110051 - RNA, 78 nt, Human
ggcagagcuccugaagcuggagaaugggucuaggccacgccuggccucgugcucacggcuccagcugcauccccugcc

SEQ ID NO: 4110052 - RNA, 55 nt, Human
ggcagagcucuggacugagaacuaaaguccuggauuccagcucaguuuuuuuguc

SEQ ID NO: 4110053 - RNA, 75 nt, Human
ggcagaggaagcuggaagugggagauguagcaacugaaagacacgcugccuucccccacacucagcagcccugcc

SEQ ID NO: 4110054 - RNA, 65 nt, Human
ggcagagggcacucgagacuacggcaccaaguucgcgucuguaggggccggcggagcccuucgcc

SEQ ID NO: 4110055 - RNA, 88 nt, Human
gggaacugugucuuagaggagguccuuuucugauguggguauccuccagaguugguugacauccucccuuucugggaauauacuuccc

SEQ ID NO: 4110056 - RNA, 61 nt, Human
gggaacuguguggugcucugaugaaccccaucuuucuaucuguagucacugcacagcuccc

SEQ ID NO: 4110057 - RNA, 59 nt, Human
gggaacuucagaaagucgcugcauucuugauuucaugccgugacuuucagagcuucacc

SEQ ID NO: 4110058 - RNA, 56 nt, Human
gggaacuugccccagaggaauuuccccugcuggaauguuccuuuaauguaguuccc

SEQ ID NO: 4110059 - RNA, 90 nt, Human
gggaagaaacugauaggagaggugagugauacuggacuuacagauauauaucauaaauuaucuauuuggcuauuauuuauguuucuuccc

SEQ ID NO: 4110060 - RNA, 65 nt, Human
gggaagaagacauggugaaggcagggcagaccucuucugugcuaggcuucauggugcuuauuccc

SEQ ID NO: 4110061 - RNA, 61 nt, Human
gggaagacugcugcaaggcuaaagccagugaagaacugguaaagaagcaccagucauuccu

SEQ ID NO: 4110062 - RNA, 60 nt, Human
gggaagagagaucccauagauguggacgcucuuuaguacgcaucguggcauccuccuccc

SEQ ID NO: 4110063 - RNA, 76 nt, Human
gggaagagaggccaagaugaucuuuacaguguuuucaaacucugacagcagcuuuaagucacugguuacucauccc

SEQ ID NO: 4110064 - RNA, 59 nt, Human
gggaagaggugcauacagacggcaccauaucugauaauagugcuuccucaccaucuccc

SEQ ID NO: 4110065 - RNA, 79 nt, Human
gggaagaguuggauuugaaagggacaaagucacugaauacaaucaauuauccaugagacugccuuuucaaacccuuccc

SEQ ID NO: 4110066 - RNA, 69 nt, Human
gggaagcacauuuggucacuauccuuuuugucaucuuggacucaggauauugggcuggagcaguuucuc

SEQ ID NO: 4110067 - RNA, 64 nt, Human
gggaagcagacggcggggaaaucccacacugcucaguccuggcccauuuccucccucucuucuc

SEQ ID NO: 4110068 - RNA, 65 nt, Human
gggaagcauuccugauggguuuuuuuuggggaucagaacuagcaaaagcucaacaggaagguccu

SEQ ID NO: 4110069 - RNA, 83 nt, Human
gggaagcccucccugcugucagggugagaaacggaggcgauuccccgcguccaggcuccccugcgugcuccacggggcuuccc

SEQ ID NO: 4110070 - RNA, 65 nt, Human
gggaagcugaagcuagagaaaaggcgggggucuagaagucccgugguuucuaguuucagcuuguc

SEQ ID NO: 4110071 - RNA, 63 nt, Human
gggaaggacacagccaugacuggaacccaggcagcccagcucauagaucaggcuuugauuccc

SEQ ID NO: 4110072 - RNA, 84 nt, Human
gggaaggacuacccucucuguggcaagcaugcugcucagcugccccaggggccaggcagcagcuuuguccaggagagugugccc

SEQ ID NO: 4110073 - RNA, 63 nt, Human
gggaaggagguggaccugccccuuuguccuggcugggguggcugggccgggccccuccuuccc

SEQ ID NO: 4110074 - RNA, 95 nt, Human
gggaaggcagcauucuucuggauaguuaguugauaauaccagcagauaauaucagagagagcuggcaguugauaauaccagagagaguuguuccc

SEQ ID NO: 4110075 - RNA, 56 nt, Human
gggaaggcaggauucucuggugggcagagccuguucucagagacaaaugccauccc

SEQ ID NO: 4110076 - RNA, 90 nt, Human
gggaaggcaggcaucucaguucaggcuccacuguccucacccacagacaugggcaggcagccucucugacagcagcucugcccaauuccc

SEQ ID NO: 4110077 - RNA, 123 nt, Human
gggaaggcuuucaggucuggcuugcucaagggacucagcuccuaccccggccccagcuguugcugagccugagggcagguggugcugccaggugccuuguguuggccucccugcaugcguccu

SEQ ID NO: 4110078 - RNA, 67 nt, Human
gggaagggaauggggggaaaccuggagugaagaacaugaauccaucugucuuucccauccacuaccc

SEQ ID NO: 4110079 - RNA, 59 nt, Human
gggaagggcucaucagguggccgcucugccuugaagagugguacccucaggcccuuuuc

SEQ ID NO: 4110080 - RNA, 73 nt, Human
gggaagggcuccuuuuauugcaaggaagccucauguacuucccauuucagccuaauaaaagaagccuucaccc

SEQ ID NO: 4110081 - RNA, 73 nt, Human
gggaagggcucuaggccaagagucccggcaucauucgagucugcucuggcccgcuccugcccuaagcccuccu

SEQ ID NO: 4110082 - RNA, 79 nt, Human
gggaaggggcggggcugugagaucugugguguggugcugaaggagcugcugccucacagccucaugcccagcccguccc

SEQ ID NO: 4110083 - RNA, 61 nt, Human
gggaaggucauugaucugcggcacaauaacucccacccugcaacagucuaauucccuuccc

SEQ ID NO: 4110084 - RNA, 81 nt, Human
gggaaggugaguccuuacucgggggcccagaucuccccacggaggccacagaucuggguccccgaggaaggagagcccccc

SEQ ID NO: 4110085 - RNA, 66 nt, Human
gggaagguggcgagcggauugcugcuugggcauguggcccguuccuagcccuucuccaccucgccc

SEQ ID NO: 4110086 - RNA, 55 nt, Human
gggaaguaaauuaggacagcuuuccuuuccauuuaaguugucucuuuugguuccu

SEQ ID NO: 4110087 - RNA, 74 nt, Human
gggaaguccuccuaucuugcucuuccucauauuacugagaaggaaacaggcugagagaggaaaagggacuugcc

SEQ ID NO: 4110088 - RNA, 55 nt, Human
gggaagugaaguguagcugucuuaacacugacagaaagaccuuguaacacuucuc

SEQ ID NO: 4110089 - RNA, 75 nt, Human
gggaagugcuguugugcuguacucuacaugguuauauaaauuaugcaguuuaaggcacaauuagcaugcauucuc

SEQ ID NO: 4110090 - RNA, 70 nt, Human
gggaaguggcucagagcagggacucuggagcuagacugccugcguuugagauccugcucagccaauuacu

SEQ ID NO: 4110091 - RNA, 76 nt, Human
gggaaguguagucuugagcccccaagauuccuuuucuguucuauggagugggcccgcgcaaaggacuccauuuccc

SEQ ID NO: 4110092 - RNA, 66 nt, Human
gggaagugugcagaguucucuuagaacacccagucacaugguguagagacugcucuuacacuuccu

SEQ ID NO: 4110093 - RNA, 81 nt, Human
gggaauaauuguaaauaucuuuaaugcuuggagguuaagagaaacuugaacuuuguaguaauggagauuaaagcuauucuc

SEQ ID NO: 4110094 - RNA, 55 nt, Human
gggaauaggacaaaugaaggagaguaaaacuucauccuuuauugcuuuuuuuccc

SEQ ID NO: 4110095 - RNA, 118 nt, Human
gggaauauugggaagguuagauauuaguggucaccucuagcauuccugucacuaagauguugacuacucauauuguacagagggaucacccuguuucuggaucuaaccauuuaucacc

SEQ ID NO: 4110096 - RNA, 60 nt, Human
gggaaugaguuuuagggccauuaaaggacaugaccugaaguuuccucugaggccaguccc

SEQ ID NO: 4110097 - RNA, 74 nt, Human
gggaauggagaccaggcccgaguccccaggugaccuaaagaggggugaggugccuugggccugucagcacuccc

SEQ ID NO: 4110098 - RNA, 64 nt, Human
gggaauggcgucguccaaaugccugagcaaugacacggccucagauggaaugaugccacugccc

SEQ ID NO: 4110099 - RNA, 61 nt, Human
gggaauguuugagugccaugugacguccagagugacguucuacaugacacucaacauuuuu

SEQ ID NO: 4110100 - RNA, 77 nt, Human
gggaauugagguagggacuuaaaacuguuuucacuaauggcucuuuagugcaucauagugagguuuuuauucuuccc

SEQ ID NO: 4110101 - RNA, 83 nt, Human
gggaauuguauuauaauuuuaauuuagcugcuguaacaagauccagaauagcaguggcuuaaauaagauuagguuuauuucuc

SEQ ID NO: 4110102 - RNA, 69 nt, Human
gggaauuucugaaaaauaauugcugaauuuuacaaaagugauucagcacuuggauuucagagauuaguc

SEQ ID NO: 4110103 - RNA, 91 nt, Human
gggacaaacagguacuuguuaaaauauuagcuauuauuuggggaguagguauugaaugaugguuaauauuuuaagugauucuuuuguacuc

SEQ ID NO: 4110104 - RNA, 76 nt, Human
gggauguuuuugagaaggaaacaauggcuuuugagacaaaauucaagaagcagcaagcccuucaaagaagcaucuu

SEQ ID NO: 4110105 - RNA, 66 nt, Human
gggauucagggagcagccccuagaaguaagugcuuucacuugcuaggcagugcuucccugacucuu

SEQ ID NO: 4110106 - RNA, 83 nt, Human
gggauuccaauagcaucuaaauaaacgugggagucaaaagacacauaaaggacuucccuugcuuuacgauguugugguuuccc

SEQ ID NO: 4110107 - RNA, 80 nt, Human
gggauugaaauguaagucuuuguuucuuaaaauaacuuuuuaagguuacaaaggacuucauaguaaaucuuccaaauccc

SEQ ID NO: 4110108 - RNA, 113 nt, Human
gggauugagggugagcaaagcccaaaggucccuguccucaggguucccugaccucuccucugggagaucuccugagggcaggacccuccucugggugucuugcccccaacccc

SEQ ID NO: 4110109 - RNA, 92 nt, Human
gggauugauuggcacagauagaucaagugucucccacugacauuguaauggaggagguagaagagaacuugaaaugucuauuguucaaucuc

SEQ ID NO: 4110110 - RNA, 88 nt, Human
gggauuucauugugggaauuagaguguguacuacucauuuauggaugacaguaauacacacucucauuccuaaaagugaaaaugucuc

SEQ ID NO: 4110111 - RNA, 69 nt, Human
gggauuugggcuugcagcagagcaucacccgcacagacaggggcaggcuuggguuggagcccaggaacc

SEQ ID NO: 4110112 - RNA, 75 nt, Human
gggauuugguuuggauugcguuucuuaauaagcaugguggcuguugugcagagugcaauguagacaucagggacc

SEQ ID NO: 4110113 - RNA, 71 nt, Human
gggcaaaaaugggacaguugguugggcucuugugccuccugcaugggccuccuauuauccccaucuugccc

SEQ ID NO: 4110114 - RNA, 124 nt, Human
gggcaacacagugcuccacacagagugugauucuguaaauguuuccugagugcagguagagugcagaggccucuguccagcucucaggagacaaucaccagcacaccugagaagacuguggccc

SEQ ID NO: 4110115 - RNA, 122 nt, Human
gggcaacaccgaggugaguaugaccaucccuguccucaaggagcuucagucuaguaggggaugagacauacuagacugugagcuccucgagggcaggaaaaguguuuuagucaucuuugccc

SEQ ID NO: 4110116 - RNA, 89 nt, Human
gggcaaggcauuuuacagauagaugauaauggcuuucaguguuucucaaauuggcucaaagcccauacuguguaaauugcuaaaagccc

SEQ ID NO: 4110117 - RNA, 91 nt, Human
gggcaaggcuaaaggucugggggugguugggggccugguuccaggcccagcucugccaucuacccacuguguggcuuuaaagggcuugccc

SEQ ID NO: 4110118 - RNA, 76 nt, Human
gggcaaggguuuugucuguauuguuugcugcuguaucuccaggucuaaaacagugccaggcagaugccaggugccc

SEQ ID NO: 4110119 - RNA, 64 nt, Human
gggcaaguccggugcccagagcacaguccagugucuccucaauuucuugggcccggcuugcgcc

SEQ ID NO: 4110120 - RNA, 58 nt, Human
gggcaauggcucugauguuguugugacuucugaugucaccaccugaagagcuauucuc

SEQ ID NO: 4110121 - RNA, 71 nt, Human
gggcaaugguuggggccuggagauugggaggaccucccaaccucagccucuccaggccuuacuccaggccu

SEQ ID NO: 4110122 - RNA, 77 nt, Human
gggcacauucuaagacauuuauguuucucuaggaaaaauuccugguuugaaauacuuguccuggacuuaaugugucu

SEQ ID NO: 4110123 - RNA, 78 nt, Human
gggcaccaauguaaucuguuaauauuuguauccuaauguuaugcagguggauauaaagaauuaacauuuuuagggccc

SEQ ID NO: 4110124 - RNA, 73 nt, Human
gggcaccccaggauugaagggaaccucagaaucaugucacugccauucuagaguuucaauccaaggggucccc

SEQ ID NO: 4110125 - RNA, 75 nt, Human
gggcaccgagucgcugauaaacgucacguucccauagacgugcugcgggaaggccuugucagcggauuggcuccc

SEQ ID NO: 4110126 - RNA, 75 nt, Human
gggcaccuguuucacauguauauaggcauuauuucuuuuuaacauaggaauuauugccagcauguguaacacccc

SEQ ID NO: 4110127 - RNA, 89 nt, Human
gggcacggcgaagggcggggcccgucggcccaaguccuuguagggaaaucgaggagagggcugcgggcccacgugacugacccucgccc

SEQ ID NO: 4110128 - RNA, 58 nt, Human
gggcacugagggcccacaggaugugagcacauuucugauccugugagucucagucccc

SEQ ID NO: 4110129 - RNA, 63 nt, Human
gggcccugcgacucgcggcggaggcgcacagcaggcgcucaaacgaucguggguucagggccc

SEQ ID NO: 4110130 - RNA, 59 nt, Human
gggcccugcguccggaagucugcgcccugcgcggugggcggagaagccacgaggagucc

SEQ ID NO: 4110131 - RNA, 77 nt, Human
gggcccuggaagaggcuggaggauacugcgcugucacugagacaccugccccagguccuccaucucagccacugccc

SEQ ID NO: 4110132 - RNA, 64 nt, Human
gggccgggcccggcggggccugcaaggcggagccucggccuguggccgcgucgggcggcggccc

SEQ ID NO: 4110133 - RNA, 83 nt, Human
gggccgggcuggucgcacccgggcgcugcuggcggccaagcuggaugggucgccagugaguuucggugcggcaccgcuggccc

SEQ ID NO: 4110134 - RNA, 55 nt, Human
gggccgggugcgcguguccgcgccucuucccgccggccgggcgggcgccuggccc

SEQ ID NO: 4110135 - RNA, 91 nt, Human
gggccggugugucuggucaucauccaggagucguggcgcucagcguucauuaccgagagcaagugcugacccuggccgacacucacggcuc

SEQ ID NO: 4110136 - RNA, 73 nt, Human
gggccuagggacucaggacccccuguggaugcagcugagcugcaccugagaggucucugagguggacaggccc

SEQ ID NO: 4110137 - RNA, 79 nt, Human
gggccuaugcccucccuccugcucucugugccagcuaguuuguggcaggcagagggguguguggaaagugcaugggccu

SEQ ID NO: 4110138 - RNA, 64 nt, Human
gggccuccauuuguauuacugccccagggcuguaaauguuagggguaggcccgaaugggagucc

SEQ ID NO: 4110139 - RNA, 72 nt, Human
gggccucugggaucgcugguuuccccaccucuaaagcagagggggcagcggaccagugacccccaaaguccc

SEQ ID NO: 4110140 - RNA, 55 nt, Human
gggccucuguuuggagccaggaugaggaguuucagccgagcucugagcagggccu

SEQ ID NO: 4110141 - RNA, 57 nt, Human
gggccugagaaucugcaugucuaguuaguucccaggagaugcugaugcugcaggucc

SEQ ID NO: 4110142 - RNA, 67 nt, Human
gggccugagcuacuagguagguuagggcaauaaaaggugaucugucugucagcagugggucaggcuu

SEQ ID NO: 4110143 - RNA, 56 nt, Human
gggccugcaggugguguggaggagaggguccccucuacaaagcugugucaggaccc

SEQ ID NO: 4110144 - RNA, 55 nt, Human
gggccugcaugcagaagggcuuccccgguuuuggguggaaggccacggcaggcuu

SEQ ID NO: 4110145 - RNA, 61 nt, Human
gggccugcaugugcccacucuggcuuagagaacucuaaguaguugaauuacaugauggccc

SEQ ID NO: 4110146 - RNA, 55 nt, Human
gggccugcuccccaucgcugcucuuccuccagggcaggguccauggaggcagccc

SEQ ID NO: 4110147 - RNA, 80 nt, Human
gggccugcugggugcggggcgcugggcagaacaaggcagcauggccuggcccuguguccugcugccagugaagcaggccc

SEQ ID NO: 4110148 - RNA, 89 nt, Human
gggccuggcuggaggugagucacugaacccccugcaguugaguccauuccucucggagagcuuagugauguccucacagucaguggccu

SEQ ID NO: 4110149 - RNA, 66 nt, Human
gggccuggcuggcuugucccaggacaaaggaaggccuuggccugggccgcagccacucccaggccc

SEQ ID NO: 4110150 - RNA, 67 nt, Human
gggccugggggcagcuugugucccccgauuggggucuuggcuggaacagaggcugaucuucaagccc

SEQ ID NO: 4110151 - RNA, 56 nt, Human
gggccuggugcuucugacuccugacuuaacagaaacaggauggagguaccgggucc

SEQ ID NO: 4110152 - RNA, 72 nt, Human
gggccugugccugccccacuccucagcacgguggugccccgugcacuggagaggcuggggaggcaggggccc

SEQ ID NO: 4110153 - RNA, 59 nt, Human
gggccugugcugaacgggucuuuccgaucucuuucuagaaacgccuuuagcacaacccc

SEQ ID NO: 4110154 - RNA, 101 nt, Human
gggccuguggaugcccucagccaguacuucucaaguuuccacgggcuugagaauccacuggggacucugugaagaugcaggcuuggugugucuacaagucc

SEQ ID NO: 4110155 - RNA, 62 nt, Human
gggccuguuccggcuuugucugcagacuuccuuugccaaguagauccagugccauaaggccc

SEQ ID NO: 4110156 - RNA, 69 nt, Human
gggccuucaucagugagucaacugcucuugacgccagcaagucagucugauguucgcaggugaaacccc

SEQ ID NO: 4110157 - RNA, 61 nt, Human
gggccuucuaguuagccccaauucaguuggagguaugacgugggacagcuuuaggaggccu

SEQ ID NO: 4110158 - RNA, 126 nt, Human
gggccuugagcauugugccuuucuuuagcacggaugugacaggcaguggcaucaggucccauuuuccugccuugugcagaaccugugccacugcccugccacgccaggcaaaggacucgaaggccc

SEQ ID NO: 4110159 - RNA, 63 nt, Human
gggccuuggcgaagugugguggaaagaauuaugaacgggccaagaccugcuuugaaaaggcuc

SEQ ID NO: 4110160 - RNA, 103 nt, Human
gggccuuggggagagggacccaggcagccaagugugugugugagcacagucaugcaccaugcaucaccgaguugcccaccagggccucccccuccuacccccc

SEQ ID NO: 4110161 - RNA, 57 nt, Human
gggcgagcagaagccaccccugcuggguagacagcagucaggguuguaggcucaccc

SEQ ID NO: 4110162 - RNA, 57 nt, Human
gggcgaggcugggggcaacuguaacugccacagcccagagccccucagcucucuccc

SEQ ID NO: 4110163 - RNA, 72 nt, Human
gggcgagggaaaggggaauacugguuggggcuggaaguacggcugaggcaguccacccuugugcucuugccc

SEQ ID NO: 4110164 - RNA, 61 nt, Human
ggccagggagcuccuaagucuucuccuaucuuugaggcugagacucuggggaucucugucc

SEQ ID NO: 4110165 - RNA, 82 nt, Human
ggccagggauaguucuggauauuuuaagcauguuauuuuauuuaacagucaugcaaaauaugcaaaagagguauagcugacc

SEQ ID NO: 4110166 - RNA, 60 nt, Human
ggccagggcugcugggggaguugaagguaccuuggaccccugcucgggagcccugcugcc

SEQ ID NO: 4110167 - RNA, 56 nt, Human
ggccaggggcucuggauuuguuuccacccagccugcaagucccuaagucucuggcc

SEQ ID NO: 4110168 - RNA, 74 nt, Human
ggccagggucuuggcgccaucacccguggccaugggguagucaauguuggagucggggaggcgcagcccuggcc

SEQ ID NO: 4110169 - RNA, 95 nt, Human
ggccaggucaagaaaagagacacagaggcaugacaguggcuucuuccaucaaaagagcuuuuguacugcuuuugcuuuuccccuugcuucuggcc

SEQ ID NO: 4110170 - RNA, 57 nt, Human
ggccaggugcucuaauucaucuggguauuccacaggauuucuaggagaguaccuacc

SEQ ID NO: 4110171 - RNA, 62 nt, Human
ggccagguggcugccuccccgcgcgggccaugccugcacaguggguggggcgucagguggcc

SEQ ID NO: 4110172 - RNA, 55 nt, Human
ggccaguggaagggcaggggagucaccccagggacagcucugaccgccacuugcu

SEQ ID NO: 4110173 - RNA, 61 nt, Human
ggccaguucucaggaauacaggcggcagcucugcuugcucuugaccuuggagaacucggcc

SEQ ID NO: 4110174 - RNA, 87 nt, Human
ggccaguucuuuaaugucuacaucagcagagaguaacugaugcccucucauucuugcuguguggaugugaagaaucuguagucggcc

SEQ ID NO: 4110175 - RNA, 63 nt, Human
ggccaguuuccaugcacuauuucugaacggccccagcuucucuccuagugaguggaucuggcc

SEQ ID NO: 4110176 - RNA, 66 nt, Human
ggccauaggggcuuacauaguuauuaaaauugcaucauaaauuuggcucugagcuuccugguggcc

SEQ ID NO: 4110177 - RNA, 120 nt, Human
ggccaugcccuucccuugguggagggaaaaaggagguggcagaacuaugugauugcuguugaagacacacucaaaagggcauuuguuacuuuucccauugaccaaaagaagucauaugcc

SEQ ID NO: 4110178 - RNA, 64 nt, Human
ggccaugcgcugggucaucuugcgcucguagcggaagggccuggagauggcccaguagcgggcc

SEQ ID NO: 4110179 - RNA, 55 nt, Human
ggccaugcucguggcuggacugcugcccacacacagacagcuccugcccauggcu

SEQ ID NO: 4110180 - RNA, 72 nt, Human
ggccaugcucugcugagauaucugggagaaaguaauuuauauuucaucauuccuaggugcagagcuccagcu

SEQ ID NO: 4110181 - RNA, 129 nt, Human
ggccauggcuggcgcucugcauggacgugugagccgcccuggccuggcgcguugucagcuagcacugcugagugccgugggccggggagaugucucacagccccgucucguuuauuuuccgccauugcc

SEQ ID NO: 4110182 - RNA, 57 nt, Human
ggccaugguuggggaagacauggguuaacuccacauaucaauccauccacuguggcc

SEQ ID NO: 4110183 - RNA, 55 nt, Human
ggccaugugaaaaagacccagggguuuuagguaaccccaaagcuucauaugagcc

SEQ ID NO: 4110184 - RNA, 59 nt, Human
ggccaugugguagugcuuaaccuucagagaaaaggugguugcaauuaccauaaucggcc

SEQ ID NO: 4110185 - RNA, 69 nt, Human
ggccauucagacuggccacaucugcacugugugaggcgugcaggcagagacgucaguguaggaguggcu

SEQ ID NO: 4110186 - RNA, 55 nt, Human
ggccauugugaauuucaguugggcuuuuaacaaaaaagcucugcuucaugugguc

SEQ ID NO: 4110187 - RNA, 76 nt, Human
ggccauuugucuuuaguguaauucugccuuuuguggcuucuuuacaaaagcaguucuaucugaguuaaaauaggcc

SEQ ID NO: 4110188 - RNA, 58 nt, Human
ggccauuuuuguucuuaucucugguucaaggauuccuuggaaaauaacaaaguuggcu

SEQ ID NO: 4110189 - RNA, 83 nt, Human
ggcccaacuggcagagcuggagggggaagaggagggauggggacugcauccuucuucuucccccuucaggggucauagggguc

SEQ ID NO: 4110190 - RNA, 70 nt, Human
ggcccaaugugugguccuaaagucuagcuggaugccgccuguacacuuuuuacuacagauucuaggugcc

SEQ ID NO: 4110191 - RNA, 69 nt, Human
ggcccacugagcgacaaguagcuuuugauguagacaucacucccccagagagcuauuuguuuggaggcu

SEQ ID NO: 4110192 - RNA, 58 nt, Human
ggcccagaauacuuuguaaaauuuagcucuaacuaauguugacaaaauauuuuaggcc

SEQ ID NO: 4110193 - RNA, 74 nt, Human
ggcccagacccaagagugguggaggugguacaggccuucucccacucccacccccgccaccucuaagcuggguc

SEQ ID NO: 4110194 - RNA, 74 nt, Human
ggcccagagggguugagcaucucagcaauauuauauacccagucugcucgccugcucgccuccuccugcucgcc

SEQ ID NO: 4110195 - RNA, 71 nt, Human
ggcccagcacagaggcucaaagccaggugcagcuggaagagcagcuccccacagucucuguugcugggacc

SEQ ID NO: 4110196 - RNA, 74 nt, Human
ggcccagcagauggagggccaggaggaggaagagucugcagcauuuguucuccuggcucccacccugccagguc

SEQ ID NO: 4110197 - RNA, 56 nt, Human
ggcccagccacuguggaauagcccccccagggagugggagggacagggcuaggguu

SEQ ID NO: 4110198 - RNA, 59 nt, Human
ggcccagccucagacaugcccuggccccuccccaacagggcacagucuaaagucgggcc

SEQ ID NO: 4110199 - RNA, 81 nt, Human
ggcccagccuggagccucagcaaggaggugguuaugugaggcgagcagcccuccagaugcaggggcucucaggccagggcc

SEQ ID NO: 4110200 - RNA, 57 nt, Human
ggcccagccuugggguuucuuuccucaccucuaacaagaaggccccgagucagggcc

SEQ ID NO: 4110201 - RNA, 59 nt, Human
ggcccagcugucugccugagaggagcugcugaugcaaucuuucugcagggagcugggcu

SEQ ID NO: 4110202 - RNA, 87 nt, Human
ggcccagggaagucuuuagcagagagcugagacggagaaaaggguucugaaccacagcugucugcugaaggaagcuguccaaaggcc

SEQ ID NO: 4110203 - RNA, 63 nt, Human
ggcccaggguugcuuuagauucugaagcaacuucaggguuuaaaggcaucccugaaauggguc

SEQ ID NO: 4110204 - RNA, 60 nt, Human
ggcccagguuggagugcagugacaucaucucaguucacugcagccuuugccuccuggguu

SEQ ID NO: 4110205 - RNA, 67 nt, Human
ggcccaguguggguggauguugaacuccugcaguuaccauuacagcuccugccaacacugaugggcu

SEQ ID NO: 4110206 - RNA, 85 nt, Human
ggcccaucacacuguguggucucucucggagcccgugaccuccuuauuuuuuccagugccuuccgaagaucaccacugugacccc

SEQ ID NO: 4110207 - RNA, 67 nt, Human
ggggacuuauaacucuucuuuuagggaagaagugcagacauuuguucucauaaagaaugaaggcucc

SEQ ID NO: 4110208 - RNA, 130 nt, Human
ggggagacucgcuaauauuuuugggguguucucagauucugggcccagcuugucugcgugagucuaggcaccaaugaguuaggagggucaggcuggggcucagaauucaccccuuugaguccuguucugc

SEQ ID NO: 4110209 - RNA, 85 nt, Human
ggggagaggauccuacacgaagccucccuggccucagcaaugccaggcugaggguuuagggucagguggcuucuguccucuccuu

SEQ ID NO: 4110210 - RNA, 130 nt, Human
ggggagagggaagggagccacauccaggcgacggggcugcucguccuccugugcgagaguggggagacucaggccagcccaagugggcggcggccccgguugcuugaucuaagcucugcucacacugccc

SEQ ID NO: 4110211 - RNA, 78 nt, Human
ggggagagggauagguaauaccccaggguccucccagcccaagggccaggaacuggggcuauucacccuccaauuccc

SEQ ID NO: 4110212 - RNA, 58 nt, Human
ggggagaguuucgcaggcagggacaggaaagguccuggagugcugcccaacucucccc

SEQ ID NO: 4110213 - RNA, 75 nt, Human
ggggagauacaguucaauccauaacagcucccuucuuggugccaagggaaaaugaccggaugcugugugcuccuu

SEQ ID NO: 4110214 - RNA, 84 nt, Human
ggggagaucuuguucuucgauaaucaauucccagauguuacagaaaauggcagauuaaaagacucuaagaacaugauucucccu

SEQ ID NO: 4110215 - RNA, 118 nt, Human
ggggagaugucuuuguaccaguccaugaugcccagagaaucuuucagaaaggaaugaguccauucucccuuuucuaucccguugcuuagggcagguagacggugcaggguggcucccu

SEQ ID NO: 4110216 - RNA, 66 nt, Human
ggggagauucauuacagccaggaggaacucagugaaacuguucaaggagaucugguuaauaucccc

SEQ ID NO: 4110217 - RNA, 58 nt, Human
ggggagauuuagagagacuuaaacagcagauuucucuguguggaugcuaacucucccc

SEQ ID NO: 4110218 - RNA, 101 nt, Human
ggggagauuuuuugauuaugaacauccuaggaggcauuuguuaaaaccuuuuuacuaaaaaaugccuuuugauguguugagauugucacauggauuucuuc

SEQ ID NO: 4110219 - RNA, 73 nt, Human
ggggagcaaauaauugagaagaguaauaaaaucuaccacacuuggcucuuuuaguaauaaauauuuguucccc

SEQ ID NO: 4110220 - RNA, 69 nt, Human
ggggagcagcuugcaugcucagggaugccaagaacuguuggaaacucagacaucauccgagcacucccc

SEQ ID NO: 4110221 - RNA, 69 nt, Human
ggggagccugcagggcccccagcugaauguguaugucaggauggaaggcaggaccugccuugggccccc

SEQ ID NO: 4110222 - RNA, 66 nt, Human
ggggagcuaggucaggggucaccaccagguuuuuccuuucuguguggccucugcacugggcucccc

SEQ ID NO: 4110223 - RNA, 110 nt, Human
ggggagcucaagggccuuacucuuagguuucuaauugccccuuguaaacuggguccugcggugaaagggagcaaauggacagacgguaggaaaggcaguuuggaaucccu

SEQ ID NO: 4110224 - RNA, 124 nt, Human
ggggagcugggugaccggguggagguagcgggugggugaugggcccuuuuuggaaucagaaaauguuguuggaaggcacccuccaucacucacccagcuagcggcccuuggagcccaucucccu

SEQ ID NO: 4110225 - RNA, 70 nt, Human
ggggaggcaugcacugcccgaguuugaaguguaacaugggauuucucugcaggggaggcaugcacugccc

SEQ ID NO: 4110226 - RNA, 89 nt, Human
ggggaggcauuccucaccccacacacccugggagcugcagagacugcaauuucacuaaugauguggggaagagaggaaaaggcuagccc

SEQ ID NO: 4110227 - RNA, 58 nt, Human
ggggaggccagugaaauguuauaaagguucaggaggagcuuugcucacucuccuuccc

SEQ ID NO: 4110228 - RNA, 74 nt, Human
ggggaggcuggggugugguggauaagcuaaagggaaacuuggcguuccucccacacaccuuggaaggucgacuu

SEQ ID NO: 4110229 - RNA, 85 nt, Human
gggacaagaugggaggaugcucgggugcucagggauccuccagccucccuuguccaccccuucuccuaaccccaacuucuuuccc

SEQ ID NO: 4110230 - RNA, 85 nt, Human
gggacacuggcaaggcuuagauaaauugcaacuugauugaauccuuuuaaugcaagaaacauuuauuaaaugccuacugugcacc

SEQ ID NO: 4110231 - RNA, 64 nt, Human
gggacagaagaggaggauuagaagugagaaggagaacuacuuucacuggauucucuuuuguucc

SEQ ID NO: 4110232 - RNA, 55 nt, Human
gggacagcuggucuaccugguaacagcaaagccugccaggcaacuauccugucuc

SEQ ID NO: 4110233 - RNA, 75 nt, Human
gggacaggagccgagggccgcgugcaccccuugggcccuuggaggggccggcaugugccucucugucccugugcc

SEQ ID NO: 4110234 - RNA, 89 nt, Human
gggacaggauuaaggugaggggaguaaagccauguuacagagaaaaaaacauacaguaaucaagaugcuucccucacuucaccuggccc

SEQ ID NO: 4110235 - RNA, 63 nt, Human
gggacagggcgugggguagaggaagaagcuagaaugcugaucccugagaugcugcucuguccc

SEQ ID NO: 4110236 - RNA, 61 nt, Human
gggacaguagguauggucugauggauuugaaaccugugucaguaccacagcugcaugaccu

SEQ ID NO: 4110237 - RNA, 88 nt, Human
gggacaguggauccaaggacacuguucauggggaggggauuguuuggaauccccuccucccagaauacguguggauccugcuuuuccc

SEQ ID NO: 4110238 - RNA, 67 nt, Human
gggacaucuuucuagucagggucaaaauacugagaaguuauuucccaguggcuagagcagauauccu

SEQ ID NO: 4110239 - RNA, 89 nt, Human
gggacauggugugugcgcuucuuccugagccagguugagguugggaccacugauccauuggaagccuggugagggguacagccaguucu

SEQ ID NO: 4110240 - RNA, 66 nt, Human
gggacauuagcaugugggaugcaagcacaaucuuaguaaaugcuugcacauuggagcuggucuucu

SEQ ID NO: 4110241 - RNA, 84 nt, Human
gggaccagcccugcauacccaggugugccagcagggacugggaaucgggccagaugcuuggaggacacuugggcggggccuccc

SEQ ID NO: 4110242 - RNA, 73 nt, Human
gggaccaggacagguguagugggcucuguauucagcuaaggccugagcuuggugcaacgcuauugucuuuccc

SEQ ID NO: 4110243 - RNA, 72 nt, Human
gggaccaggucuuuggaacagcaauuuuuggaagguuuauaaucuaaugccgucucuacaagacuccuuccc

SEQ ID NO: 4110244 - RNA, 77 nt, Human
gggaccauccagagacauguggccugcacguugaugagcaaugugaacugaauuacuguuguaucuggaggaauucc

SEQ ID NO: 4110245 - RNA, 75 nt, Human
gggaccaucugagcugggucuugacagcugcguaggaguuugcagcuggagaugagugacgugccccaugguccc

SEQ ID NO: 4110246 - RNA, 69 nt, Human
gggacccaggcugguguugcuuccaccacuaggcccugccuagggacaggccccucgcuagcuucuccc

SEQ ID NO: 4110247 - RNA, 97 nt, Human
gggaccccagaauaacauggggggaucgggcuccuaaugcaauugcaggagcaggcucugcaccgcugggaggaucucucccuguccucugcuuccc

SEQ ID NO: 4110248 - RNA, 86 nt, Human
gggaccccaggauaguuuauuuuucuaaggugccacaggcaacuaauguacuuuggguuuagaauaaacuccuugggaguagaccc

SEQ ID NO: 4110249 - RNA, 80 nt, Human
gggaccccuucccugcuguacccuacucggaguucuaggucccccuuaugcuuucugguuugugcuacagggaagggccc

SEQ ID NO: 4110250 - RNA, 70 nt, Human
gggacccuaccacagucugacagauuuuggcauucugcucggugucugaugguggcuucucacggugccc

SEQ ID NO: 4110251 - RNA, 73 nt, Human
gggacccuggggacacugccccugugcugaguuacugagaugagccagccuugcagcugugcccagccuuccc

SEQ ID NO: 4110252 - RNA, 55 nt, Human
gggacccuguggaggugagaugaugaaaacgaaauggucucugcuccagggucuc

SEQ ID NO: 4110253 - RNA, 87 nt, Human
gggaccguggaccaaagggcagaacaugagcauguuguucaugcucaggucguucugccccuugcucaugaacauguccaugguccc

SEQ ID NO: 4110254 - RNA, 77 nt, Human
gggaccugagaguauaauuugcaauaucugauuauuaaucuugaggaugugugcugcauaguauauuuuaugguguc

SEQ ID NO: 4110255 - RNA, 59 nt, Human
gggaccugaggcccugcuccacuggcccagaagcucuguggaaauagcagccagguccc

SEQ ID NO: 4110256 - RNA, 55 nt, Human
gggaccugccaaggccacccagccacccucccugggcggccccuccagcaggccc

SEQ ID NO: 4110257 - RNA, 89 nt, Human
gggaccugccaauuuccugaucagguucccauguguaacugaaucuucucuaccagcuauggaaaccuaaucaggagagcuaggauccu

SEQ ID NO: 4110258 - RNA, 56 nt, Human
gggaccugccauugcucacaggaugacuguggacaucagaggcacuggcagguccu

SEQ ID NO: 4110259 - RNA, 55 nt, Human
gggaccuggacaugugugugcucuccgagcugagcugugugcgcguccggguucu

SEQ ID NO: 4110260 - RNA, 58 nt, Human
gggaccuggcagggcagggguuugugccuccaaugagcacaagcucccccugcccccc

SEQ ID NO: 4110261 - RNA, 109 nt, Human
gggacggccgaggcagcagaagcagccgcucaugggcccggagcagcccugcccacccaagcggccgcucaugggcccagagcagcccugccagccccugcggccgcuc

SEQ ID NO: 4110262 - RNA, 76 nt, Human
gggacggguagccagcucuguggcaugguaucuggaggcaggccagcaaccugaugugcaugccacggcccguccc

SEQ ID NO: 4110263 - RNA, 102 nt, Human
gggacguaagcuccacugcuuuuucaagaacaacauucauucaggagcaacuuugugagcccuguuucuugguuaaguuggucacggaaauuacauaguccc

SEQ ID NO: 4110264 - RNA, 111 nt, Human
gggacuaaguaacaagaugagugagauuguggacauagaagcauguggaagacucucuguaucucauguuuuaccuguccucauguuuuaccugucugacaacugcauccc

SEQ ID NO: 4110265 - RNA, 80 nt, Human
gggacuagagaccaauguuuauaggauuaaaaauauuaauuacuaaaauaauucagcugaacaacuguguuucuauuccu

SEQ ID NO: 4110266 - RNA, 65 nt, Human
gggacuagcuugugugaaggccuugcagugaaaaacugcugaagagcuccaggcaaugcgguccu

SEQ ID NO: 4110267 - RNA, 83 nt, Human
gggacucagcaagagugcagcuugccagguccucccacugcagccagggccugggaacuugcauuuagugaugcguguguccc

SEQ ID NO: 4110268 - RNA, 80 nt, Human
gggacucagugauuugacaugccuggaacagugacaccaggggaugugguggcaaagaaggcaugaaguuagugggugcc

SEQ ID NO: 4110269 - RNA, 62 nt, Human
gggacuggccggcgcugaggcccgcgggccggcgcagcguggccuucggagccggucggcuc

SEQ ID NO: 4110270 - RNA, 104 nt, Human
gggacugguugaugggaaguggcaguggcgggacucagggcuccccgcagucagcuccacaaucugugcccugaguucuccuugcccagcuuggcguuaguccc

SEQ ID NO: 4110271 - RNA, 63 nt, Human
gggacuguuggguaggagaacugaaaacaccaagcauguuggcaucacauuacucaaaguccu

SEQ ID NO: 4110272 - RNA, 80 nt, Human
gggacuugcucuguuucucauggcccuuggcuuuucaugcauacacaagaaguuucaggagucagaggaggguaagcacc

SEQ ID NO: 4110273 - RNA, 100 nt, Human
gggagaaagaugagcauuugggaaggcacugaagcaagcagagaaauuuuuacaugcugcuacugugaaggagucuuucucaugccaguuccauucuccc

SEQ ID NO: 4110274 - RNA, 62 nt, Human
gggagaagcaacacauuaaaucagcugacgagacuaaauugggauguguugugaucaucacc

SEQ ID NO: 4110275 - RNA, 101 nt, Human
gggagaagcuggccccagcccaguccaggccugccucugaggagcccucccaggugggcugcacaggccucaggcuuggugggggcagggcugagucuucc

SEQ ID NO: 4110276 - RNA, 81 nt, Human
gggagaaggucaguuuuggaugagcccagauuucuccucccuccgagacauuuuaucucacccaacacagccccuucuccc

SEQ ID NO: 4110277 - RNA, 68 nt, Human
gggagacagcaggugcuugggaaaggccgagcucugggcuuuccuuucccaagccuugcuucccuccc

SEQ ID NO: 4110278 - RNA, 86 nt, Human
gggagacguaggccucugcuguacuuaggaagaggaaccaggaagcuguucucuucucuugaggcagcaaggcaaggauguuugcu

SEQ ID NO: 4110279 - RNA, 130 nt, Human
gggcugcagugagguuagagugagcguuaucauaguuuggaaaucuggcauugaauaccugaauuuuacuugcuauucuguuucucagcaacuauaugacuuggcuuagucagugcuccucucacagcuc

SEQ ID NO: 4110280 - RNA, 61 nt, Human
gggcugccagugggugugcagagacuugaugucaccagucuagucuguucuacuggugccc

SEQ ID NO: 4110281 - RNA, 55 nt, Human
gggcugcccaaauuggaguaacuugcugagaauguucucuccauaugcccagccc

SEQ ID NO: 4110282 - RNA, 91 nt, Human
gggcugccucuguggcuugggggugaggccuggcccugggguuugucaaagcugcaggaaccagaaccuucccccggaaucaggagcaccc

SEQ ID NO: 4110283 - RNA, 58 nt, Human
gggcugcgaggagccuugucugcuuuuacaagggcacugaacacccucuucgcugcuc

SEQ ID NO: 4110284 - RNA, 57 nt, Human
gggcugcugcccaggaggcaccaacaauuaaaggcugagaucgugguaagcagaucc

SEQ ID NO: 4110285 - RNA, 72 nt, Human
gggcugcugggcaguucgcuuucguuuucacguuuuuguggggguagggcgauugcugcuuuuuucucaccc

SEQ ID NO: 4110286 - RNA, 118 nt, Human
gggcuggaauauaagcugcacuuaagagaugaagacauagaggcagaacgagcuuaagugauuuauuuauccaagguuauucucuaucucaucccuguguauauuuccuugccagccc

SEQ ID NO: 4110287 - RNA, 67 nt, Human
gggcuggaggagagucugaaugacaguccccaugcuauacucucauuuacuucucucuuccaagcuu

SEQ ID NO: 4110288 - RNA, 57 nt, Human
gggcuggcaucaguugccgagagguggaaggaguaccucucugcaguuuguuagcuc

SEQ ID NO: 4110289 - RNA, 57 nt, Human
gggcuggcaucgguugcugagagguggaaggaguaccucucugcagcguguuagcuc

SEQ ID NO: 4110290 - RNA, 71 nt, Human
gggcuggccagggcugcucgcggaaagggcaagcguggccccgcagugauccacgaggcucugguuagccc

SEQ ID NO: 4110291 - RNA, 61 nt, Human
gggcuggcugauuuuccucucuaagauccgugugaauagggugggccaaauuagguagccu

SEQ ID NO: 4110292 - RNA, 62 nt, Human
ggcccuggggaggaaggggcgggccauggcaugucugacugccccuuccauuccugcuggcc

SEQ ID NO: 4110293 - RNA, 63 nt, Human
ggcccugguccuagggguggaaccauggaggaacacccuggucacccacugggacugcggguc

SEQ ID NO: 4110294 - RNA, 81 nt, Human
ggcccugguggcugcauccucccggugcugcuggcuuuugcaacggggccggcuguugguugggaggaagcagccagggcc

SEQ ID NO: 4110295 - RNA, 59 nt, Human
ggcccuguccccuucaguuuugcagaugaggaaaccgaggcuaaaagaggggcagugcc

SEQ ID NO: 4110296 - RNA, 58 nt, Human
ggcccuguuugauagcuccugauaaaagcgagcugugucuggagccugagcaggugcu

SEQ ID NO: 4110297 - RNA, 61 nt, Human
ggcccuuccucuugugcuggcaccauguucuccaggcgugucagggccugaggacugggcc

SEQ ID NO: 4110298 - RNA, 76 nt, Human
ggcccuucuuggcccuggcacacccccacggaggucucacuguguggggcagcuagccggccuggccaucaagguc

SEQ ID NO: 4110299 - RNA, 64 nt, Human
ggcccuugcagcaggcgcuggcaggguggaagaccuggcagugccugaugcugcaggaauggcc

SEQ ID NO: 4110300 - RNA, 121 nt, Human
ggccgaccccacaaugcugggaaagcccucaggcagauucuccaggggcugcagagggccugcgcagugccucgagccaugagccuggggagucaccagggcaccagcagaaaccacggcu

SEQ ID NO: 4110301 - RNA, 85 nt, Human
ggccgaggcaggaggcuuggcuggcagcccugggggcuccuucaccuccacgggcuccccuggcccugcagccccuccucuggcc

SEQ ID NO: 4110302 - RNA, 129 nt, Human
ggccgaucgggcgcgccgaggucgucagagcagccggccgagcccccaguccccgcggguccguggggcugucccgguuuggcgagcuccggcugccgagaugcgccaaacgcggaacccggguuggcc

SEQ ID NO: 4110303 - RNA, 84 nt, Human
ggccgcaggggucauuauaguggggagguggugacaucagacuccagggagugcuacuuguucacuguaggucgccccgcugcc

SEQ ID NO: 4110304 - RNA, 91 nt, Human
ggccgcaucuccuuugagcuguuugcagacaaguuuccaaagacagcaggaaacuuucaugcucugagcacuggagagaaaggauuuggcu

SEQ ID NO: 4110305 - RNA, 66 nt, Human
ggccgcgagggaggcgaccucggcauccaaacaggcacuugcgccaggugcuaucccugcgcugcc

SEQ ID NO: 4110306 - RNA, 105 nt, Human
ggccgcgggcucugggcguaggugcagcuucuccggccuggugcggggccagacggccgccgccggcuuagcgggggaacuucgccuaguccucgggcugcgguc

SEQ ID NO: 4110307 - RNA, 96 nt, Human
ggccgcguuggcacgucgggcauucccaggaugugcgugccgccggcgggccugccugucgcagcagccugggguuuuggacgccgcacgcgugcc

SEQ ID NO: 4110308 - RNA, 113 nt, Human
ggccgcugcugcagcgcucagcgcccgggcccugcugaagccgggucuagcaugugccgcggcuccccggcggcggcggcggcuccucugcagcagccucagcagcagcggcc

SEQ ID NO: 4110309 - RNA, 75 nt, Human
ggccggcacggggcagcucccgagggcaggagagugccgugcuuuucagucugaucugagcugagaguggcggcc

SEQ ID NO: 4110310 - RNA, 93 nt, Human
ggccggcauggcugcaguagcuguugcaauaaacaguuccagacauugucauucugggacccugggcagcuggcugcugucuccaugccaccc

SEQ ID NO: 4110311 - RNA, 71 nt, Human
ggccggcccagccagcagcuggccccugccacucagcaggaggccagccugaggcugaggggcucccggcc

SEQ ID NO: 4110312 - RNA, 89 nt, Human
ggccggcucuuuugcaugcaggcccgccugaauggggcgccuggaggcugcauugaggccgggcuguguaaacuguagggugccucgcc

SEQ ID NO: 4110313 - RNA, 63 nt, Human
ggccgggagcaggcgccaccgccagcgaccauggggaacauguuggccgccagcucgccgccc

SEQ ID NO: 4110314 - RNA, 93 nt, Human
ggccgggcauggugccuuacgccuguaaucccagcacuuuggaaggccgaggugggcggaucacgagguuaggagauugagaccauccuggcc

SEQ ID NO: 4110315 - RNA, 92 nt, Human
ggccgggcguaguggcucacgccuguaauccaacacuuugggaggccaaggugggcagaucacgaggucaggaguucgagaccagccuggcc

SEQ ID NO: 4110316 - RNA, 64 nt, Human
ggccgggcuggcuccucuguccucacgggacuugggcccugaucuuggaggggucagccaggcc

SEQ ID NO: 4110317 - RNA, 60 nt, Human
ggccggggaggcugucccggggccgagugcuuggcagcagggcugucucccuacaaggcc

SEQ ID NO: 4110318 - RNA, 59 nt, Human
ggccggggcaggggcagagacuguccagaccagguugaacuccagccccugcccugguc

SEQ ID NO: 4110319 - RNA, 95 nt, Human
ggccggggccgcugaggaggcuuccgggaggcacggccgccgcagagaugaagagguuguggccauucuugaggucgaccucgcggucccgggcc

SEQ ID NO: 4110320 - RNA, 76 nt, Human
ggccgggggcggcgcggcccgggcgucggggggcggcggcuuccugugggaggggccuggcgcggcgguuccggcc

SEQ ID NO: 4110321 - RNA, 69 nt, Human
ggccgggguggggaagcagguuccugggcucacgggcaggcaucugccuccucuaccccugcacagguc

SEQ ID NO: 4110322 - RNA, 79 nt, Human
ggccgucugccacagugcagcaugcuggggaggcugccaagugcgggaguccucagcugcucagugucacagcaccgcc

SEQ ID NO: 4110323 - RNA, 72 nt, Human
ggccuaaaagggaaaauauuuagacauaugggucacaaaagccauuuaugcuuaaaauauuuccuuaaagcc

SEQ ID NO: 4110324 - RNA, 89 nt, Human
ggccuaaagcugaccacuauuuucucuucagauggccagguggacagaacccuggacugggaggagauggaggacucaguuugcaggcu

SEQ ID NO: 4110325 - RNA, 78 nt, Human
ggccuaaggcccagauuuuguucuguuuguacccuccugggugguggcacaagggagagaaucugaggucuuucaguc

SEQ ID NO: 4110326 - RNA, 63 nt, Human
ggccuacacuucaaagggugacuugauagaaaaagauauggaaaauuaguuuggaguguggcu

SEQ ID NO: 4110327 - RNA, 95 nt, Human
ggccuacccuuacugagugugaccucaucuuaacuggaacccaucugcaaagauccuauuuccaaagaaguucacauuuacgauuacuggggguu

SEQ ID NO: 4110328 - RNA, 85 nt, Human
ggccuaccuccaggagcagggcuggcgugcaggcugaggccagaggaaggccaagguuagccagcccagcuccaggggaaagguu

SEQ ID NO: 4110329 - RNA, 87 nt, Human
ggccuacgguggggugggguguaucggauccuagcaggggaagagcugggauguggccucuccacccuccuguccgcuuuaaaggcc

SEQ ID NO: 4110330 - RNA, 56 nt, Human
ggccuagccucuccugagagaggcagaaaauguaaggcucagagaggggcagugcc

SEQ ID NO: 4110331 - RNA, 72 nt, Human
ggccuagcugaggcaggcucaaugcccagucugagcuguagaggaguagcugagcucugcacuuugccagcc

SEQ ID NO: 4110332 - RNA, 74 nt, Human
ggccucaaaacuucacacagcaaauuuaucuagcaguggcaugcaggguagguugaggguugagcaaggagguc

SEQ ID NO: 4110333 - RNA, 115 nt, Human
ggccucaaagguuccgcucucaugucggcaagugugauuugaauuuuaaaacacugagcuuugccgguggaagaguucccaaguuuauuccgaccuacggaagcccaggaggacc

SEQ ID NO: 4110334 - RNA, 67 nt, Human
ggccucagaggaggugugagucugcuagccauugugcacuccccugacucaccucugaguuccggcc

SEQ ID NO: 4110335 - RNA, 80 nt, Human
ggccucagcuucccuaucugaccauaaaaauugcuaucucauuggcuugcuguggagauuaaauaggggagcuaagugcu

SEQ ID NO: 4110336 - RNA, 55 nt, Human
ggccucagggucacucuguagauaucaacugacucugccuguugagccuaaggcc

SEQ ID NO: 4110337 - RNA, 61 nt, Human
ggccucagguccagaaaccaaaggauuuagacaaagucccaaguuuggacuugaugaugcc

SEQ ID NO: 4110338 - RNA, 77 nt, Human
ggccucauuagaaccagguucccggcaaguaaccaguuccagacacuggccuuggaagggagcccgugcugcuggcc

SEQ ID NO: 4110339 - RNA, 87 nt, Human
ggccucauuuacgugccgaugucuagagcaagagaugcuggaaaagaaguaucuagaauuuucugcuuugauaguaggagaggggcu

SEQ ID NO: 4110340 - RNA, 76 nt, Human
ggccuccaauacccacccagauuucaaacaucuuuccuuguuuggcagaguaguuuggaguguggucuuugagguc

SEQ ID NO: 4110341 - RNA, 61 nt, Human
ggccuccagggcuccccaggacucccugcagccucugcaccacccugcagcccaggaggcc

SEQ ID NO: 4110342 - RNA, 65 nt, Human
ggccucccaaagugcugggguuacaggcaugagccaucgcgccuggccccuacauuuuuaaugcc

SEQ ID NO: 4110343 - RNA, 74 nt, Human
ggccucccaaaguguugggaggucagaugugagccacugcaucuggccccgcaugcacuuuauagaggagggcu

SEQ ID NO: 4110344 - RNA, 89 nt, Human
ggccucccacacugacccucuggccccacagccacaacaagcagagugugagccaggcccaguggggucaucugugggucauaaagguc

SEQ ID NO: 4110345 - RNA, 84 nt, Human
ggccucgcucugucacccaggcuggagugcaguggcacgaucucggcucacuacaaucuccaccucccggguucaagugauucu

SEQ ID NO: 4110346 - RNA, 82 nt, Human
ggccucugaacugugucuguucaauucuguggaaauuuauuuaacaacacuauaauccaggcauuggagagauaaugaggcc

SEQ ID NO: 4110347 - RNA, 74 nt, Human
ggccucugggcugcugacaauuuuauagcuacagaugguaaagaaaugucagggcaguccucuuuauggaggcc

SEQ ID NO: 4110348 - RNA, 74 nt, Human
ggccucuggguuuugucagcugaggagauugaaauacuucaaacuaugccuugagcugcucagaaacagauacc

SEQ ID NO: 4110349 - RNA, 80 nt, Human
ggccugaaccacagcaagccagcuugucacugagccugucacguggggcagaagcaaaugccuugcugaggccucagguc

SEQ ID NO: 4110350 - RNA, 107 nt, Human
ggccugaaggucuugagagcaagcucaucagugcgggugguggggacaccucucuguuuucaccaggaccccacgguggguugccugguuggaaaggacugcagguc

SEQ ID NO: 4110351 - RNA, 55 nt, Human
gggguggcuuuaaauaugccacaagagauucuugcuuuauuuggcaugccacuuc

SEQ ID NO: 4110352 - RNA, 67 nt, Human
ggggugggacagguaggaguggcucuuccccuagaugaccuagcuagcccuucaaccugccuacucc

SEQ ID NO: 4110353 - RNA, 86 nt, Human
ggggugggcagguguugucaaucuaaucagguuauguguucuuaaccauuguauuggccauaucaugcugaguaacagauuacccc

SEQ ID NO: 4110354 - RNA, 89 nt, Human
ggggugggggagagugauggcuaguuuuaauguuaaaauuuuucuuuagucuguuauuguggcaguaaaauugggcaacaaaccacccc

SEQ ID NO: 4110355 - RNA, 123 nt, Human
gggguggugggguccccccugcuggccgcaggugcucugacgagguugcacuacugugcucugagaagcagugcaaugauauugucaaagcaucugggaccagccuuggggaucucccucccu

SEQ ID NO: 4110356 - RNA, 55 nt, Human
gggguguggaaucuggcagugacugguggagcucagggugcugcagacccacccc

SEQ ID NO: 4110357 - RNA, 66 nt, Human
gggguguggaucaucugaggucaggaguucaagaccagccuggccaacauggugaaaccccaucuc

SEQ ID NO: 4110358 - RNA, 91 nt, Human
ggggugugggggaccguaagccauccucaggggccugaccuggguuuccguuugcagcagccuggagggggccacguucuuccugcgcccc

SEQ ID NO: 4110359 - RNA, 72 nt, Human
gggguguuuccaggcaggguuaaggguccuggggguggaaucucagggggugucucugauuggguuagcucu

SEQ ID NO: 4110360 - RNA, 99 nt, Human
gggguguuuggaagaugacccugugagaguugagauauuuugccaugaucccacugguggcagcacaucagaauucugcaggucgcuuugagguucuuu

SEQ ID NO: 4110361 - RNA, 56 nt, Human
gggguuaccaugagugggugggugagcucagggcucugccugccagucugguccuc

SEQ ID NO: 4110362 - RNA, 106 nt, Human
gggguuccaggaggucagcggacacagccagggucucaggaggcgcgcucugcgcgcuguuuccuuucuucccugggugaucuccugcguggccaagguuugcccc

SEQ ID NO: 4110363 - RNA, 68 nt, Human
gggguuccagggaaugauauuuuugccuuuuauguccccaaguguagaaagugcaucucuguugcccc

SEQ ID NO: 4110364 - RNA, 55 nt, Human
gggguuccucgaaggaccugaggccaggcuggggccaggaaccaaagaggacucc

SEQ ID NO: 4110365 - RNA, 55 nt, Human
gggguugaucacagaggggucucuguauccgcaggaaucuccuuucuucaagcuu

SEQ ID NO: 4110366 - RNA, 85 nt, Human
gggguuggccuauuuauugagagggaggggaauugcacuuacaagguucuccuuaucaaugaagacagaaugauuggccgagccc

SEQ ID NO: 4110367 - RNA, 88 nt, Human
gggguuggugucuuaauaaacugcuucucucagucugucacauuuaguuacggagcugugcaguuuagggggaaaaaaggcuaauucu

SEQ ID NO: 4110368 - RNA, 56 nt, Human
gggguugguuuaaaugcuugagcagauaccaacuguccacagccacagccaaccuc

SEQ ID NO: 4110369 - RNA, 130 nt, Human
gggguugugaauugcuccagaagugcaguagucugggguugccucccgcccuggaaggaacugaccauucaucacccugcaagcuccuucucaggcagcccacuugugauucuggaagauuauuugcccu

SEQ ID NO: 4110370 - RNA, 77 nt, Human
gggguugugggcagcugggggccccaguaccagcaaccuugaccccccaccugguacugggcagcugcucugacacc

SEQ ID NO: 4110371 - RNA, 67 nt, Human
gggguuuaggggauaguaaguaacacccuagccaccugcugaauguagaaacugucuuuuacacccu

SEQ ID NO: 4110372 - RNA, 56 nt, Human
gggguuucaucauguuggcagauugguuuugaacuacugaccucagaugauccgcc

SEQ ID NO: 4110373 - RNA, 104 nt, Human
gggguuucuuuugcacucaauuucucaaguaaaugagucaugcuguucuccaggacaucuuuuacuagugagcuuuuuauuugggcugaaguaacagugacccc

SEQ ID NO: 4110374 - RNA, 80 nt, Human
gggguuugcaucuuugguugcacauuagaauccucagacacacagguacuguacugaguucuuugcaaauaacaagcccc

SEQ ID NO: 4110375 - RNA, 55 nt, Human
gggguuugcuauguugcccaggcuagucucgaacuccugggcucaaagcauccuc

SEQ ID NO: 4110376 - RNA, 56 nt, Human
gggguuugggagaguuucccacucaauaauacucaguaagcuuucccauuaacccc

SEQ ID NO: 4110377 - RNA, 115 nt, Human
gggguuuggggaaagguagaggagacagccaggggccugagugugcccguaaauaucagcguucagcaggagccuccugauuccaauugcuugucuaauuuccaccucccacccc

SEQ ID NO: 4110378 - RNA, 92 nt, Human
ggggggaaaacacguuuguguaauuuuucaggcugugagaaagcaauuauuuucuuuggucagaaagauuacacucgauaguuuuucacucc

SEQ ID NO: 4110379 - RNA, 61 nt, Human
ggggggaaggggcaccuucaggucaccuagacaauuggauaaauggugcuaucacccaccc

SEQ ID NO: 4110380 - RNA, 80 nt, Human
ggggggaauuccugcugggccugagcaaugagccauugcuucugguggcucauugcucagccucagcagaaauaccccuu

SEQ ID NO: 4110381 - RNA, 59 nt, Human
ggggggcagggggugugugugagaggcuagguccacccuugccaguaccuccuccucuc

SEQ ID NO: 4110382 - RNA, 72 nt, Human
ggggggugaggacccuggugaggacaggcaaacucagccaucaccccccuggccaggguacuacacccaccc

SEQ ID NO: 4110383 - RNA, 65 nt, Human
gggggguuauucuuauuaaaauguuuagagaggacuuucuguucauuucugcagaauugcucuuc

SEQ ID NO: 4110384 - RNA, 71 nt, Human
gggggguuuaccucagucucaggagccauccuucagaucaggaaauauggcccugaccuugaugaccuucc

SEQ ID NO: 4110385 - RNA, 113 nt, Human
ggggguaaguuaucaucaguaauuguaaaguaguaguacagguacucuguuacuaacucaaaauauguaaacuaccacugauauucuauuuugcuugcuguccucugucuucc

SEQ ID NO: 4110386 - RNA, 66 nt, Human
ggggguauuauuaccuagagcagacagcuuagugucuguuucaaaacagugauaauuuuuauuccc

SEQ ID NO: 4110387 - RNA, 85 nt, Human
gggggucccaggggcuggaggccugccugguuagccucuguuucccagacauugacucgaggcgccuccaguccucucaaccccc

SEQ ID NO: 4110388 - RNA, 105 nt, Human
ggggguccucccaccccauccuccccucagacagagacuggguguuguguggguuucuacuggguccucugagagggcagcgcuuggggugaagaaguagccccc

SEQ ID NO: 4110389 - RNA, 61 nt, Human
gggggucucauccaacagccuacaaaacccuuauuugacucuguccccagugagcaccccc

SEQ ID NO: 4110390 - RNA, 78 nt, Human
gggggugacaguccaugguucugacucaucuagcaguagcugcuagaguuuucucuaccacugggaugcugagcucuu

SEQ ID NO: 4110391 - RNA, 69 nt, Human
gggggugagccugccaggcccagagcugcaaacaccccucccucccuaagggcucccaggcucaccucc

SEQ ID NO: 4110392 - RNA, 72 nt, Human
gggggugcaggcaggugggcgggcaggugccaccccucccuggcacuuuccucuggcacugucuggucucuu

SEQ ID NO: 4110393 - RNA, 65 nt, Human
gggggugcugaagaugucauggugcgauguugggauuucugcaguguuuauguucagugacccuc

SEQ ID NO: 4110394 - RNA, 83 nt, Human
ggggguggaggcugguccagggccucugugggcacuugcgagcaaugcuggcuuccucagaugcucuuggacgccccaccucc

SEQ ID NO: 4110395 - RNA, 60 nt, Human
gggggugucucaguucgcucuggaagcuuacugcccucugcagagaacugagggacagcc

SEQ ID NO: 4110396 - RNA, 60 nt, Human
ggggguuaggcugcgggcugcugagacgccgagcuguuucucagaagugcagcugccccu

SEQ ID NO: 4110397 - RNA, 74 nt, Human
ggggguuggaggggaagguuccuuugaggcuuuugacagcaccagcuaagugguuuucuucuccuccuauuccu

SEQ ID NO: 4110398 - RNA, 128 nt, Human
ggggguugggagguggugagcccuagagguagagugcuaggagaggugguuguagggucagucagggacaaaugaugcagggccuucuagaccaugggccuuccuggggaucuucucuuucagcccuc

SEQ ID NO: 4110399 - RNA, 57 nt, Human
ggggguuuuuguuugggguggcauuccuccugaccacacccaucacuaagagcuccu

SEQ ID NO: 4110400 - RNA, 78 nt, Human
gggguaaaugauagucuuuuuaauaaauaaugcuagaacaauaguagauauauaugagggaagaugaaauuugacccc

SEQ ID NO: 4110401 - RNA, 58 nt, Human
gggguaagaagaugaauccaggcuguccugcaauggaauggauuuauuuucuugagcu

SEQ ID NO: 4110402 - RNA, 62 nt, Human
gggguaaggagcucggcagggccuucagggauaagcugcuggcuuugaugcugccuugcucc

SEQ ID NO: 4110403 - RNA, 128 nt, Human
gggguaaggauucuugccugcagaacaaggaagcacuuuuaaagcuagaaggugcuguacagaaaagacucuuaccuuugcgucuagcucuugaagcaggcucuccucucaugccagguacccucccc

SEQ ID NO: 4110404 - RNA, 63 nt, Human
gggguaaugugagggaagucauaauguucuaguuggagaaacggagcacuucuuucguacccc

SEQ ID NO: 4110405 - RNA, 79 nt, Human
gggguacugauaaauuucuggaagugucagaguaugcccagcaacacugaaugcuguuuagaaauuauuuuaguauuuu

SEQ ID NO: 4110406 - RNA, 91 nt, Human
gggguagagcaugucccaggaucuuuuaaugucuccagauucaagcacaauauuugguauauaauaggucuucaaaugcuguuguugcccu

SEQ ID NO: 4110407 - RNA, 84 nt, Human
gggguagauuccuuggccucuuuccccaaggccuguguucuauuacaacaucaugcugugaaaaagaaggcugacauuuacucc

SEQ ID NO: 4110408 - RNA, 55 nt, Human
gggguagcagugauagaaaggacaagaggacagggucccucagcacuucuaccuc

SEQ ID NO: 4110409 - RNA, 77 nt, Human
gggguagcccauguggcugaggcuucuagacacauuucaccucucaugggucagagacagacacaucgggcugcucu

SEQ ID NO: 4110410 - RNA, 69 nt, Human
gggguaggaugcgugcugacuuucugcuuucacagggagagggucaguagugaugcgugaacuuaccuc

SEQ ID NO: 4110411 - RNA, 65 nt, Human
gggguaguccuggugauggcugagcuggacuuuccuuccaagcaggcaggaugaggacuacacuc

SEQ ID NO: 4110412 - RNA, 82 nt, Human
gggguauguguggcaggaacagaauugggguucuuggggagguuuuuuuccacuuaaaacucuuuuugucgccuacgucucc

SEQ ID NO: 4110413 - RNA, 76 nt, Human
ggggucaccucucuggccgucuaccuuccacacugacaagggccguggggacguagcuggccagacaggugacccc

SEQ ID NO: 4110414 - RNA, 61 nt, Human
ggggucagcaaaauuuggucugugggugaaauccagccuacugccuguuuggcauggcccc

SEQ ID NO: 4110415 - RNA, 76 nt, Human
ggggucaggaauuaucugaugugauguucaggaaguagcuuuggcacugucaagcagaagauaauuuaaaaccacc

SEQ ID NO: 4110416 - RNA, 82 nt, Human
ggggucaggcugggccagagcagcagcacucuccagcaguuauaaugcuagcccugggcucuggcccccgcccucugauccu

SEQ ID NO: 4110417 - RNA, 77 nt, Human
ggggucaguaggaaccuagggucaaaaaaugggauacagucucccccuuuaugcaguugaucuuuucuugcugcccc

SEQ ID NO: 4110418 - RNA, 79 nt, Human
gggguccaggcuggugagcugccuacauugccaagaggggacccuuggagggcuuauaggcggcugagccagggacucu

SEQ ID NO: 4110419 - RNA, 77 nt, Human
gggguccaguuaugaauaaaucagguuuucguuaaucaagauuaugaaccuugauuuguucaucugcucuugauccc

SEQ ID NO: 4110420 - RNA, 112 nt, Human
gggguccauccaucugggcugugguggaggggauuuucauuuugcauggauucaaaggaacauuccagcaguaaggaaaguacauucaccaccacuccagguucaauccccc

SEQ ID NO: 4110421 - RNA, 60 nt, Human
gggguccucggagccugggucuuucccucccuguccagcgaccccaggccccaguaucuc

SEQ ID NO: 4110422 - RNA, 60 nt, Human
gggguccuggugccaccugcgggaugggagugcccagccugagucugcacauagaacccc

SEQ ID NO: 4110423 - RNA, 60 nt, Human
ggggucgccgggagccugagugacaucucuucccaacacugccaggcccugucuggccuc

SEQ ID NO: 4110424 - RNA, 57 nt, Human
ggggucucacuuuguugcccagauuggucucuaacuaagugacucaagugauccucc

SEQ ID NO: 4110425 - RNA, 124 nt, Human
ggggucucccaagggcuggugcuuacccuguccugcuguguuccuccugcaucuccaaaagggcucagggcuugggugaucgggggaugggguagggguguggacacaacccgcaggagaaacu

SEQ ID NO: 4110426 - RNA, 75 nt, Human
ggggucugagagccuguguucaaaugccagcucuguccuuucccgcugagucaccuugaacaggcuacucacccu

SEQ ID NO: 4110427 - RNA, 85 nt, Human
ggggucugauaugccaggggagucaaacagugccuugagagacccccacuaguuucuccucuguuggccuucccugccugacccu

SEQ ID NO: 4110428 - RNA, 57 nt, Human
ggggucuuagaacacuauuuugcacacugagguguuauagaauuguuuugagacccc

SEQ ID NO: 4110429 - RNA, 82 nt, Human
ggggucuucuuggggcagcccaggcugagccucucccccugcgaccugcuccuggccgggcugcuccuggaugagguacucc

SEQ ID NO: 4110430 - RNA, 85 nt, Human
ggggucuuucuugucaccgaggcuggagugcaguggcacaaucuuggcucacugcaaccuccaccucccagguucaagcgauccu

SEQ ID NO: 4110431 - RNA, 70 nt, Human
ggggucuuuguaguuaagggugagccugggugcaauuccuggcucccacauucaccagcugcacgacucu

SEQ ID NO: 4110432 - RNA, 92 nt, Human
ggggucuuugugaggagguguagaguagccuugggaaggagacuugaggcaaacugggcccugcgucuccagggcugcuggcgccuggcccu

SEQ ID NO: 4110433 - RNA, 62 nt, Human
ggggugacagcagcuaaugacagcugccuuuacuguacccaggcccugugcuguguuacccu

SEQ ID NO: 4110434 - RNA, 90 nt, Human
ggggugacucuggggaguuuuuugcuuucucuguuccucacugagaucuacauggaagggaagggaaaaacacucgucucuaaaaaccuc

SEQ ID NO: 4110435 - RNA, 77 nt, Human
ggggugacuuuguuuucacagcagaauuucugaggcucaguuauauggcaucagggucugugaguggcugucacccc

SEQ ID NO: 4110436 - RNA, 60 nt, Human
ggggugaggguguggcugggugagaggcggaggccacccuagccagccacuuccugcucc

SEQ ID NO: 4110437 - RNA, 78 nt, Human
ggggugagguuggccucagggaggcucugagccaggaucuucagcaguccugagaccuccaucugugccucucauucu

SEQ ID NO: 4110438 - RNA, 70 nt, Human
ggggugaguguaccaucuucucucugggucagcuacaaagacccagagagcauuuggacaaagguagccu

SEQ ID NO: 4110439 - RNA, 69 nt, Human
ggggugaguuacugcacgccagguucucagaacggugguguggagagacugcgugucagcgcuggcccu

SEQ ID NO: 4110440 - RNA, 64 nt, Human
ggggugaugggggccugaacaggcaaaaggcccacuaugcacuccacacggccuccauaacccc

SEQ ID NO: 4110441 - RNA, 88 nt, Human
ggggugcaggagcacugugggggaggcugagacauggucgcccugacacaggugggcacauucagucucugucacaccuagcuaccuc

SEQ ID NO: 4110442 - RNA, 98 nt, Human
ggggugccaggaauggggaggcgcugcgcuggggccagaagcgcaaugggucgugccaguuucuggaggcgggcgaccucgccucugaccgcaacccc

SEQ ID NO: 4110443 - RNA, 87 nt, Human
ggggugcccccacgcuggccagcaugagggucuccaugcagcgugcacaugcccgcacccugugucccccucagccaggugcacccu

SEQ ID NO: 4110444 - RNA, 61 nt, Human
ggggugcuuuacauauguuauuucguguaaauguuacaagagaacuaauguaagucauucc

SEQ ID NO: 4110445 - RNA, 59 nt, Human
gggguggaucaggcaggcccaggcacgucagaagcacgggacccugccgccuccacccu

SEQ ID NO: 4110446 - RNA, 76 nt, Human
gggguggcccuacccucuggaauauacaaaaccuuacacagacacaauguguacaccggggaacgggggccacccc

SEQ ID NO: 4110447 - RNA, 69 nt, Human
gggcaggcccucguggugagcugggaucacagacauuuguugaguuccugccauagcgaggaacuguuc

SEQ ID NO: 4110448 - RNA, 80 nt, Human
gggcaggcuggcuggagcuguuguaggcugucccucaucuccuggaucagccccugugaugucucuugcuuucuccuccu

SEQ ID NO: 4110449 - RNA, 59 nt, Human
gggcagggacagaguguuguggccaggaaggucugaugagcagcuacucugucucgcuc

SEQ ID NO: 4110450 - RNA, 62 nt, Human
gggcaggggcagcucgguggcuccugugucccugccucgggccugccugcugucaucugccu

SEQ ID NO: 4110451 - RNA, 65 nt, Human
gggcagggggguuaccuaauucaacuuguaauaugcccugacagguucucuuaucaucucugccc

SEQ ID NO: 4110452 - RNA, 70 nt, Human
gggcaggggucaguggccccaaccagguccuaaaucaaacguccuagcuaggugcccuuccccccugccc

SEQ ID NO: 4110453 - RNA, 114 nt, Human
gggcagggucuucgaaugguucugucacuaugguauuucugugcccagcucagucugucugucccauucugggccacacacagaagaaucaaagggagccuagaagcucagccc

SEQ ID NO: 4110454 - RNA, 62 nt, Human
gggcagggugaccccucgcaaauagcagacuccuguuauuuugccacaggugaccuucuccc

SEQ ID NO: 4110455 - RNA, 58 nt, Human
gggcagggugcagagcuaggguagugggugaauguucacacaagcugugcacuuuccu

SEQ ID NO: 4110456 - RNA, 85 nt, Human
gggcaggguuugagcccacaggaccugcacacaaacuuccccaccucuuggacuuggggacaggaucugugccucaacccagacc

SEQ ID NO: 4110457 - RNA, 79 nt, Human
gggcaggucccaugggaggcauccuugugcguggugguuacaggcugugagagguggcucccaagcaggaggcuuuccc

SEQ ID NO: 4110458 - RNA, 58 nt, Human
gggcagguggggcagcugugggagcuggugccagucucugaccugcgucccuccuccc

SEQ ID NO: 4110459 - RNA, 65 nt, Human
gggcaguaaguucucagaagauuuuguaggucuuuuagucuauaaauucuucucugaauuagccu

SEQ ID NO: 4110460 - RNA, 57 nt, Human
gggcagucacagugcuggagcaagaaaaggucgugcucacagccuuccuggcugccc

SEQ ID NO: 4110461 - RNA, 128 nt, Human
gggcagucagaaguggcauuuucagccugagcuccuguggagcccccaggagugggguccagcaccagcccccagcccuagggccuccuagaccugagcucuccuagaacccacaccucccuuugccc

SEQ ID NO: 4110462 - RNA, 81 nt, Human
gggcaguggcuggcgugcccuccagacuuggcuggagccucugcucccugcgguccuaggggguuaugcuggucauugccu

SEQ ID NO: 4110463 - RNA, 55 nt, Human
gggcagugggaccaggcaccagacaagcugcccagugcccuguucccacaugccc

SEQ ID NO: 4110464 - RNA, 82 nt, Human
gggcagugggcuuucucauucuuucacagucuguggcucccaauuuaaagcugaggaauuggaaagauggaaugucuuguuc

SEQ ID NO: 4110465 - RNA, 58 nt, Human
gggcaguguagcauuuugggcuguucugaguaacagaauaaccaguguuucacaguuc

SEQ ID NO: 4110466 - RNA, 57 nt, Human
gggcaguguugcucucaaagucccaucugacaggacagaggcucuuccucacugccc

SEQ ID NO: 4110467 - RNA, 77 nt, Human
gggcaguucaaggcuuccacuuuguugggucagaaugaaagcugaugaugcucuaguggaguuuugggauuuugcuu

SEQ ID NO: 4110468 - RNA, 55 nt, Human
gggcaguugggugacaccaucagcuucuugaggcugcuucucacucauuugcacc

SEQ ID NO: 4110469 - RNA, 56 nt, Human
gggcaucagagauuggagauugguucauccaacuucuuccucuagaucugaggccc

SEQ ID NO: 4110470 - RNA, 99 nt, Human
gggcaucagggaauuccuggcuucccggcugggggaaggggaccucaagagaggaggcuguaagguccucugugccugcuggcgccaggcccugauccc

SEQ ID NO: 4110471 - RNA, 58 nt, Human
gggcauccacagggauuuggcacgggaaaugcuaugcucuuuguucauguggaugccu

SEQ ID NO: 4110472 - RNA, 66 nt, Human
gggcauccugucauucugucaaauuucccuuaugaauagauuaggaguggaaagaaacaggugucc

SEQ ID NO: 4110473 - RNA, 86 nt, Human
gggcaucuauuggguacuccuguauguugggcuucacacuaagugcagcaguuggagccaugaagacaggcugucccauggagcuu

SEQ ID NO: 4110474 - RNA, 65 nt, Human
gggcaugagauuucaccccucuuaaccuuccgauccucgugaaggaggaguggguaagacugccc

SEQ ID NO: 4110475 - RNA, 129 nt, Human
gggcaugcauacagagaguucugcgugugcauggagggucugugugcacaggaguguuugaauguccauguguuuuguucaggccaugugcacaggaccccgugugagugcaucagugagugugugucu

SEQ ID NO: 4110476 - RNA, 83 nt, Human
gggcaugccgaugggccuggggcugugaaccagggcaacucgcuuuggcucucacuugcacucaggggacccauuuagugccc

SEQ ID NO: 4110477 - RNA, 76 nt, Human
gggcaugggggcucaggccuguaauccuagcacuuugagaggcugaggugggaggauugcuugaguccaagagccc

SEQ ID NO: 4110478 - RNA, 66 nt, Human
gggcauggguggccacgggggcauggacuggcugaccccugugcauugaccacacucuccaucccc

SEQ ID NO: 4110479 - RNA, 56 nt, Human
gggcauggugagggauaugaaguauacaagacauaauuucugcucucaaaaugcuc

SEQ ID NO: 4110480 - RNA, 56 nt, Human
gggcauggugcugguguucaugggauacagaacuguugaagauacacacccugccu

SEQ ID NO: 4110481 - RNA, 71 nt, Human
gggcauuaucccagaaacuauguaagaaagugacaucuuucacgaucuuuucauccuuucuacuugagccc

SEQ ID NO: 4110482 - RNA, 108 nt, Human
gggcauuccagguaaaggacuagucuguacaaaggcuauuuggaggcuaaagggaauauguggccuuugggagaguguacaugguucaauauggcuggaauuuggcuu

SEQ ID NO: 4110483 - RNA, 63 nt, Human
gggcauuuacuuuugaaaauauagacccuacuuauaaaagucaauauuucagguagugugccc

SEQ ID NO: 4110484 - RNA, 128 nt, Human
gggccaaggagagaaauucacuggcuuaaugcagcugcccaagccccagaugucagucaguugaugcacugggaaugagggcagcuuuaccuggagccagucacaguguugccaaucuccugggaccu

SEQ ID NO: 4110485 - RNA, 68 nt, Human
gggccacacagcagaaggcccgugucugcucaaugacugaagauacgcggcucuuuucuugauucucc

SEQ ID NO: 4110486 - RNA, 81 nt, Human
gggccacgccagaggccucaggcccagcccugccagcucagcugcagggccaccagggagucucaggccuccugugggccu

SEQ ID NO: 4110487 - RNA, 62 nt, Human
gggccagacccuuggcgaucugagaaagaaagacugaguccggaugucaagaggccugggcc

SEQ ID NO: 4110488 - RNA, 58 nt, Human
gggccagcacuuuguuucaacaagcccuccaggagacucugaggcacuagucuggucc

SEQ ID NO: 4110489 - RNA, 58 nt, Human
gggccagcaguaucggaggcaucacagcugucaugaucauccagagccugcugagccc

SEQ ID NO: 4110490 - RNA, 61 nt, Human
gggccagcuguaagcugcugaauuuuuccaaauugaauuauucgauauucucagcugaucc

SEQ ID NO: 4110491 - RNA, 56 nt, Human
gggccaggcacugugugagauauggggauacaaccaugaggacagugccuuggccu

SEQ ID NO: 4110492 - RNA, 59 nt, Human
gggccagucugacucugcuggucaguguccaguguguuucccagcagacacagcugccc

SEQ ID NO: 4110493 - RNA, 59 nt, Human
gggccaugaguaaacuggaaagccaggaaaggcacucggcaggcaggucuucauggccc

SEQ ID NO: 4110494 - RNA, 86 nt, Human
gggccauuuucacuucuuuugucauuuuucaguuacuucaggccaucuggauguauacgugcaggucacaggagauaugauggcuu

SEQ ID NO: 4110495 - RNA, 56 nt, Human
gggcccaucacaaccaagggcagccagcugcuguuccucuggcuugugcugugccc

SEQ ID NO: 4110496 - RNA, 78 nt, Human
gggcccccauaaucacuaugcuuauguggcacagcucuuccuaugucacauuguaacaguguguguaugugggugucu

SEQ ID NO: 4110497 - RNA, 81 nt, Human
gggccccgggccggaggcgggcacuggagggccgggguuguccugggccugaaggagcugcgccccgggggucugggguuc

SEQ ID NO: 4110498 - RNA, 87 nt, Human
gggccccggucucagguccaagauggccauccagacccagcagucgaaguuugugaacuggcagguggacggggaguaucggggcuc

SEQ ID NO: 4110499 - RNA, 56 nt, Human
gggcuccucacuucacgucucucgaugucuaaagggucagcugugugugaggaccc

SEQ ID NO: 4110500 - RNA, 70 nt, Human
gggcuccucaguugucccauggagacacagcucugucucucagggggaaggcugaaggucaaaggagccc

SEQ ID NO: 4110501 - RNA, 72 nt, Human
gggcuccugguaaguaauaagugcucaauaaacacucucuuuauucucugauguucacuuuuccaggagucc

SEQ ID NO: 4110502 - RNA, 55 nt, Human
gggcuccuguuugagaaaaagccccaagaaugguucauuuccaagaagagagcuc

SEQ ID NO: 4110503 - RNA, 55 nt, Human
gggcuccuguuugcgaaaaagccccaagaaugguucauuuccaagaagagagcuc

SEQ ID NO: 4110504 - RNA, 61 nt, Human
gggcuccuuggauuccgugaacuuaaccaucucauaggaaggcuacaggaauccagcgccc

SEQ ID NO: 4110505 - RNA, 57 nt, Human
gggcuccuuuccagcaucuuccaucaauucaaaagggggauggccggaccagagccu

SEQ ID NO: 4110506 - RNA, 84 nt, Human
gggcucggcuccacgcaggcaccacggcucaggucuccuguccccagaggcugugggaauggcugcuugcuugguuaugaguuc

SEQ ID NO: 4110507 - RNA, 78 nt, Human
gggcucgucuugcaugugacagcagcacauauguccgaggaagcuggacucugucacauacacuuuucaggggagccc

SEQ ID NO: 4110508 - RNA, 80 nt, Human
ggcugacuuuguggcauuugaacaaucacauaggcaccugaacuuggacucugugauugauuuaaugcucuucuguugcc

SEQ ID NO: 4110509 - RNA, 80 nt, Human
ggcugagaaguccagagguccaggaucaaggcaucaccacauuugaugucuggugagggccugccuucugguucauaguc

SEQ ID NO: 4110510 - RNA, 99 nt, Human
ggcugagaaugucccuucuucuucugaucaggagucagagcuaaggcacaugucacagcagcucucucccaagaggcaggggagcuggaaggguaagcc

SEQ ID NO: 4110511 - RNA, 76 nt, Human
ggcugagacagguggaucacuugaggucaggaguuugagaccaaccugaccaacauggugaaaccuugucucuacu

SEQ ID NO: 4110512 - RNA, 56 nt, Human
ggcugagacuuccacugccaucuuucccuccagaagcgaggcaaugcaguccagcc

SEQ ID NO: 4110513 - RNA, 65 nt, Human
ggcugagauagaugccaguccauaagagucuuuaccaaguuaucucuuuuguaacuauuucagcc

SEQ ID NO: 4110514 - RNA, 61 nt, Human
ggcugagcaauaugaggggaaauaaauuucucagaaauguauccccugcagguugcuaucc

SEQ ID NO: 4110515 - RNA, 87 nt, Human
ggcugagcagagcaggcauucuaguggcugaaggagauuucucuuucuguuucccuuucuacucucuaugccugccucugccuagcc

SEQ ID NO: 4110516 - RNA, 56 nt, Human
ggcugagcccgggugcucuaccccgcuuccuggggacucugcuucugggaucagcc

SEQ ID NO: 4110517 - RNA, 55 nt, Human
ggcugagcguggcugccguggggacacaccugccaacacagccacguuccuggcu

SEQ ID NO: 4110518 - RNA, 57 nt, Human
ggcugaggcggcgaugcccuugucuucuccggaggcuacggcggcgacgcucucgcc

SEQ ID NO: 4110519 - RNA, 67 nt, Human
ggcugaggcuagccuccuaagugcaauugggaaaaaaaauuuuguaaauaguuagcuugccucugcu

SEQ ID NO: 4110520 - RNA, 73 nt, Human
ggcugaggggacaaggcauggcucggagucagaacagucucugucugaacccuggcccugccuccugacagcu

SEQ ID NO: 4110521 - RNA, 66 nt, Human
ggcugagguggguggaucaccugaggucaggaccagcuuggccaacaucgugauaacccccucucc

SEQ ID NO: 4110522 - RNA, 60 nt, Human
ggcugagugcugcuccagaagucaucaaccccuugacaguaguucuggcucacucaugcu

SEQ ID NO: 4110523 - RNA, 61 nt, Human
ggcugagugcugcuguucacgaguccuguggacucgcguggacacuggcagcagcucagcu

SEQ ID NO: 4110524 - RNA, 56 nt, Human
ggcugaguucucuugcugaaucuaagacuacgguucuauugugagaaccucagacc

SEQ ID NO: 4110525 - RNA, 93 nt, Human
ggcugaguuuaaaggcuuuucuguuugucuugguagcaugugucaucuugugauauuuacaugacucaauagaagggcaugaguaagcuggcc

SEQ ID NO: 4110526 - RNA, 82 nt, Human
ggcugauaaggaagaaacugaaagggguuggugucacggguuaugcugcgggaccccccauuuguguuuucaagaaucagcc

SEQ ID NO: 4110527 - RNA, 64 nt, Human
ggcugaugaaccaucuggcuccagaagagguuuuugcuuuuccuguuaguaugguucuugagcu

SEQ ID NO: 4110528 - RNA, 97 nt, Human
ggcugauuguauuagcacguacuuccucuuuccucccaccaucauuaagacgagguccaggaaggguggauaguaacgugacuuucuauggucuccc

SEQ ID NO: 4110529 - RNA, 80 nt, Human
ggcugauuugaagacccugggggaagagaggggaaaguaacucaaugguuuccucuuccaucuucccagggacaccagcu

SEQ ID NO: 4110530 - RNA, 67 nt, Human
ggcugcaagcacagacucccucugagugugaauguuaucucucaccagaugagggaugugcucagcc

SEQ ID NO: 4110531 - RNA, 110 nt, Human
ggcugcaaggagccuuuccagcugcugcccuuggcugcagguggguggaugugccucccaccuguccguuggcuuggcucucucuggcagcagcggguaggcucguagcc

SEQ ID NO: 4110532 - RNA, 61 nt, Human
ggcugcagaggcgaucugaggugccaucaucaauguucuucacaaugacggcuuugcaucc

SEQ ID NO: 4110533 - RNA, 66 nt, Human
ggcugcagccuuugggaaggacagggacacccaugcaacacccaugcccaccccuuagagcucacc

SEQ ID NO: 4110534 - RNA, 57 nt, Human
ggcugcagcgggaggggcccggcucagccacucagccagccuugcucuccugcagcc

SEQ ID NO: 4110535 - RNA, 75 nt, Human
ggcugcagcucuggcuggguuccaggauuccauuagccagacaauggguggccccagcugagccaacaggcagcc

SEQ ID NO: 4110536 - RNA, 67 nt, Human
ggcugcaggagucccagaagguuuuguuuugaaaacuggggccuggcugggaccccugaggguggcc

SEQ ID NO: 4110537 - RNA, 66 nt, Human
ggcugcaggcauuuuccugggcagggugcagucaccaugugucacuggcagaugccugcagaagcc

SEQ ID NO: 4110538 - RNA, 74 nt, Human
ggcugcagggcagucugacucacucaugcccugguugacaagccagcucaggacagacagaaugccuaacagcc

SEQ ID NO: 4110539 - RNA, 68 nt, Human
ggcugcagucuggggauggcuggaggguccuggaagugcgcagcucacagccucccccggccugagcc

SEQ ID NO: 4110540 - RNA, 92 nt, Human
ggcugcauggaccagggcuggagcacaggggcuggaugaacuugcaucugucugcuguuagcugcauugcuucugggugugaugcuuaggcc

SEQ ID NO: 4110541 - RNA, 57 nt, Human
ggcugcauguucagaugacacuuguccccaaguguuuuucauuuugaacugucagcu

SEQ ID NO: 4110542 - RNA, 121 nt, Human
ggcugcauuagggguggcugcugguuuguaacgugcguuguugggggcuggggaggauuuacggcucuaaagccuuccauauaacgcuuuaacggugggcagagcgguuucuguugcgucc

SEQ ID NO: 4110543 - RNA, 61 nt, Human
ggcugccaaagucagaccuaacuccuucccaggaaauucuuggcucugcuugugagcagcc

SEQ ID NO: 4110544 - RNA, 90 nt, Human
ggcugccacuccuacuuuaguacuguguggugagcugucuccuccuggguuucagagggcacagcugcuacccagugccauggaggcgcu

SEQ ID NO: 4110545 - RNA, 64 nt, Human
ggcugccagugagugcagaccggagacuagacagaaaggucucaaagagcaguccuggccaguc

SEQ ID NO: 4110546 - RNA, 62 nt, Human
ggcugccccaugggcugggcuggauggaaggagcgguugagggucaagucccuggggcagcu

SEQ ID NO: 4110547 - RNA, 55 nt, Human
ggcugcccucugcugacugcaaaggcaaaccacaugcagauggccugggccugcc

SEQ ID NO: 4110548 - RNA, 61 nt, Human
ggcugccgagugggucaugaggcacuugggccccuacaagugcagcugacacugguaugcc

SEQ ID NO: 4110549 - RNA, 65 nt, Human
ggcugccucaaagcucaagcuccaguagcagcauucccacuggggcuuggaaagcagaggcaguu

SEQ ID NO: 4110550 - RNA, 60 nt, Human
ggcugccucagauuugcugacucugggaagcuaggucagcuugugcgcaucugagccucc

SEQ ID NO: 4110551 - RNA, 77 nt, Human
ggcugccugcaccaggcuuagagccccaggcacauugucucucagcuuugagaccugcucugugcuagacaacagcu

SEQ ID NO: 4110552 - RNA, 57 nt, Human
ggcugccugccgcccacuuggcgucucccaagugaugugccuggcagggccacagcc

SEQ ID NO: 4110553 - RNA, 127 nt, Human
ggcugccugcugagacccagggcuggagcauggcucugugcgggccauggucaggaaccuggggcuuccacgaccuugcucaggccuaagccagaaugccagcuccacaucuucucugccggcaguc

SEQ ID NO: 4110554 - RNA, 59 nt, Human
ggcugccuucauagaccaugggagaggugaccaugguuugaaguaggaugggggcaguc

SEQ ID NO: 4110555 - RNA, 64 nt, Human
ggcugccuuccaaagaguuuuauaaguaggaauuaugaaacuugagggagggugauugaaagcc

SEQ ID NO: 4110556 - RNA, 126 nt, Human
ggcugccuuuuaauucaugacucccuguuaaugcauuuggggcagacuagcaguaugugacugcauucugcuacacgauucugauuccagaauaguugauaaccuauaaagaagaaaaagauagcc

SEQ ID NO: 4110557 - RNA, 56 nt, Human
ggcugcuauauugguucaggcuugggcacaugacccaagccagaccaauagcagcc

SEQ ID NO: 4110558 - RNA, 114 nt, Human
ggcugcuauguguauguaugcauguuauugaugccugaggcuuguggaacucaucugccuggucuauuccuugagagcaacacgcaguaguauacgagcguaacaagaacagcu

SEQ ID NO: 4110559 - RNA, 94 nt, Human
ggcugcuccagggcccuuauucuugccagauccuggaggccauuucuucuucaccaggaaaugaacaggaaugaaccccaagagcuucuaagcc

SEQ ID NO: 4110560 - RNA, 60 nt, Human
ggcugcuccuguccagcagggccaccccacaggcagugugcugagcugagaggagcggcu

SEQ ID NO: 4110561 - RNA, 67 nt, Human
ggcugcuggauuguguaucugugagacuuuuuagggauuuauuaacaugauacacaauuagcaaacc

SEQ ID NO: 4110562 - RNA, 66 nt, Human
ggcugcuggcuguguaccaucucaagcuugcugaaacuuggggguuccuaaacaagcacaccagcc

SEQ ID NO: 4110563 - RNA, 68 nt, Human
ggcugcugguuucuuguuuuagaagauuggguuuagacuugcccuuaaaaccuagagaucagacaguc

SEQ ID NO: 4110564 - RNA, 72 nt, Human
ggcugcugugccaaccccggcugcccuccugucaucagaaugcaggcagcuggguuggccagaaacauugcc

SEQ ID NO: 4110565 - RNA, 65 nt, Human
ggcugcuguuucagagacuguuuauuugacuuagaacaaagcucaccauucucaacagcacugcc

SEQ ID NO: 4110566 - RNA, 71 nt, Human
ggcuggaaaacacauuugggcuccuacauaaaggcauggacagcuuuuguggggccccaauguugcuggcc

SEQ ID NO: 4110567 - RNA, 56 nt, Human
ggcuggaggaaaauuacuggggucugaaggagugcaggcccagcuuuccucuugcu

SEQ ID NO: 4110568 - RNA, 63 nt, Human
ggcuggaggucugcagacuacgcuucccaggcugccgugccugggcugccggcaggcucugcc

SEQ ID NO: 4110569 - RNA, 57 nt, Human
ggcuggagucuacauucaagaaucauaaaccaagauuucuggcuuuggacauuagcc

SEQ ID NO: 4110570 - RNA, 67 nt, Human
ggcuggauggggcugggcugggcaaggcugagcaaagccagcccauuaaccccuguccucuccugcc

SEQ ID NO: 4110571 - RNA, 71 nt, Human
ggcuggauuuggggggauucaggagauggagccaaggguaacaacucaguuuguuccuugggaaucuugcc

SEQ ID NO: 4110572 - RNA, 60 nt, Human
ggcuggcaaguagguuuuggcugucugaugggauaccagcugaagcucuugucaaagguc

SEQ ID NO: 4110573 - RNA, 71 nt, Human
ggcuggcaggacucacacuuggccgggcuucuauagacaugauaggccagacuguggaguuccuggugguc

SEQ ID NO: 4110574 - RNA, 63 nt, Human
ggcuggcauuuacacaaugcauuuaccucuuaaauuccaugugcgugguguuucucaucagcc

SEQ ID NO: 4110575 - RNA, 62 nt, Human
ggcuggccaugguguuugcaauaaauacacuguguuuauuguuguuagucauaagucaagcc

SEQ ID NO: 4110576 - RNA, 86 nt, Human
gguaucgaaaucguuuucucaugucccucgaggggcccuaagucacucucaccaaagagcugcaugcggaaaccuguucugauucc

SEQ ID NO: 4110577 - RNA, 80 nt, Human
gguaucuaccauauugaauauuugguuuucuugaacucacccaagaaagcugaauauucuguguggaaacagguuacacc

SEQ ID NO: 4110578 - RNA, 90 nt, Human
gguaugaagagauucagugcucuuaaauaacaucauugcuuuguaaggacugaacauuauacaagaguuuccugcaaucugauucuuacc

SEQ ID NO: 4110579 - RNA, 77 nt, Human
gguaugaauaaauguaaauggugcuugcuggccuuaggugugugagagucagaagcauccauuucaccacucaggcc

SEQ ID NO: 4110580 - RNA, 77 nt, Human
gguaugacuaaagggauagauuuaugucuuugaguuaaguuggcuaggaaggcauuuuaugccuuauaguucuugcc

SEQ ID NO: 4110581 - RNA, 79 nt, Human
gguaugagugucccccagcucugagugaaucaguaggaggugcuggaccugggcugauucucacagugggaccucaacu

SEQ ID NO: 4110582 - RNA, 72 nt, Human
gguauggaucagaugggcucaacccugccaccucaccccucauccacagguaugaguucaguauccagauuc

SEQ ID NO: 4110583 - RNA, 88 nt, Human
gguauguuucugaguuguuguccauguugcaugcaauguuuuaugaaauaauugguagcugguauaaugccucauugaaauaacugcc

SEQ ID NO: 4110584 - RNA, 77 nt, Human
gguauuaacagucaacaguuuuugauguaaagguccugacuuugccacuaacuagcugugagacauuaguuaacccc

SEQ ID NO: 4110585 - RNA, 77 nt, Human
gguauuaccaagaucuaguuuucuagguuuucuugagaaauuagaaaaucuggcaacacuaaguuuguaauaauacc

SEQ ID NO: 4110586 - RNA, 77 nt, Human
gguauucagcaguuacccaggaaagaaaugguaugucccuagcaauggcauuuaaucuggguaauuuguaggucucc

SEQ ID NO: 4110587 - RNA, 61 nt, Human
gguauucuuauuaaauagccagaaguauauuuucagagcuucuagcuuggauuagaguccc

SEQ ID NO: 4110588 - RNA, 73 nt, Human
gguauuguauauuugcaaauacauuggguuagaaaucaucuuuaacauuuuguguuaguguaauaacaauauu

SEQ ID NO: 4110589 - RNA, 69 nt, Human
gguauugugccaguaauuucuuaaaaaguaaaaugaaaauuggcugcuuaaaauugcugcaacaagacc

SEQ ID NO: 4110590 - RNA, 87 nt, Human
gguauuuggucagguaaaggucauuuaacaauuuaugacuacaguuggauggugcaaaugaucucguaucaaaauauaccaaaugcc

SEQ ID NO: 4110591 - RNA, 79 nt, Human
gguauuugucagcucaaaugagugacucacacaggauuuguccuuuugugaccagcucauuucacucagcacaaagucc

SEQ ID NO: 4110592 - RNA, 80 nt, Human
gguauuugugaggaaugaaaggucacaguaucuuuccuuggcccacagacuguggcuaauucauuuggucaacaaauauu

SEQ ID NO: 4110593 - RNA, 76 nt, Human
ggucaaaggguauaaauauuuuugaggugauucauauauuuuaugaaacauuauagaauauuuauacucuuugauc

SEQ ID NO: 4110594 - RNA, 63 nt, Human
ggucaaaucauccuuuguagaaacuucucuggggacuugucccuuuuacagggaauggagacc

SEQ ID NO: 4110595 - RNA, 75 nt, Human
ggucaacacaauacaacucuccuaauuaaaugcucuuauguaccacacaaaagcaugugauugggagaguugacc

SEQ ID NO: 4110596 - RNA, 67 nt, Human
ggucaacauaguuuuagguagaaacuggcucuuugaagccauucaaaccugagccuauugguugacu

SEQ ID NO: 4110597 - RNA, 79 nt, Human
ggucaaccccuaugccugugcacaagacuuuagucucacaaaccugagacugaaggaagcgggcagggguagggggacc

SEQ ID NO: 4110598 - RNA, 62 nt, Human
ggucaaggcccaggcugcccugggcacacgccccugugcaggggcuugucugggccugggcc

SEQ ID NO: 4110599 - RNA, 67 nt, Human
ggggcagggacgucagggcccacagcagaugccaggcagugccacauggcuuugcccugcuugcccc

SEQ ID NO: 4110600 - RNA, 78 nt, Human
ggggcagggcuugaugucaggcugaaaauaggagaauuaaggaaaagucuguacucagcucagaucucaggaugccuc

SEQ ID NO: 4110601 - RNA, 103 nt, Human
ggggcaggggacgcuccagcuggucugggguuggccagggcccuaguggcccgcccuggggccccagcucggccccucgccucgcugagcucuagugugcccc

SEQ ID NO: 4110602 - RNA, 62 nt, Human
ggggcaggggcucuggugauuggcaugagagaccaccgaugucaccccagaggccuggccuc

SEQ ID NO: 4110603 - RNA, 78 nt, Human
ggggcaguagguggcacucaaccuuuuauuagcagaaaauuguuaguuucaaauuagaguguucaacacugcuucccu

SEQ ID NO: 4110604 - RNA, 83 nt, Human
ggggcagugacuucuccguggcaggauaauuggacccuggaguccccacaucugugcacaacggggaaggaacacacagcccc

SEQ ID NO: 4110605 - RNA, 56 nt, Human
ggggcaugcauguguuucauacagcaggcauuuguugagcaccagcugcaugcccc

SEQ ID NO: 4110606 - RNA, 74 nt, Human
ggggcauggaggugccaggugugagggaagaagccauuuucacagucccacccguggagccuccagauagcucc

SEQ ID NO: 4110607 - RNA, 100 nt, Human
ggggcauguggaagggucuuaguuucuguuuaggggugaugugauggugcugguuucaugguuaaguccagaaaggaagccagguucccuuucuacuccc

SEQ ID NO: 4110608 - RNA, 80 nt, Human
ggggcauugcagcuguugugauccauuuacgaggaacaucugaugagagugaaaugucacaugucacacugcugugccuc

SEQ ID NO: 4110609 - RNA, 60 nt, Human
ggggcauuuguauucuaacuuagugaaagaaguuuguaauaguggaauuucagauacccc

SEQ ID NO: 4110610 - RNA, 57 nt, Human
ggggcauuuuauaaccgguuauuagucucggcuagacuaaaggcugugagguggccc

SEQ ID NO: 4110611 - RNA, 92 nt, Human
ggggccaggucccaagacaccagcuggggcugcagagaacaggcuccucaaaggccuuccagaaagcacuuaguuagugucagccuggcccc

SEQ ID NO: 4110612 - RNA, 85 nt, Human
ggggccaguguccuagagacuggggacuuccuuuggggccaaccccaucugggcucgaauccuagcucugcugccaacuggccuc

SEQ ID NO: 4110613 - RNA, 68 nt, Human
ggggcccagcaccccuccucgccccauccccguccggguacgggggcgcggcagggguccccggcccc

SEQ ID NO: 4110614 - RNA, 81 nt, Human
ggggccccugcuggccugcugguuucucugugagcugcugcuaugaggccaguagugggcagcgaucagggcuggggcucu

SEQ ID NO: 4110615 - RNA, 70 nt, Human
ggggcccgagccugcagugcccacgugaccacgggaaacucacucugggccagcgcagguaaggagcucc

SEQ ID NO: 4110616 - RNA, 57 nt, Human
ggggcccgucgcuguaccaggcugagggccuuacauucagcccugugaccuggcccu

SEQ ID NO: 4110617 - RNA, 86 nt, Human
ggggcccuaaaucaaggugagcuucccccaccuccgugcacuugcauucugugugggcaggaggcccugcccugaaagggggcucc

SEQ ID NO: 4110618 - RNA, 73 nt, Human
ggggcccuucuuggcaaaagauggagaagcccuacuucaguacagucugaagcuucaucugaugccgaacucc

SEQ ID NO: 4110619 - RNA, 83 nt, Human
ggggccgugggcuguccaugaccuuguacaaccaggagauuccccuuggcugcagccccuaucgcggacagguccacguuccu

SEQ ID NO: 4110620 - RNA, 60 nt, Human
ggggccuacaggcgggugggcaggaggcggcccaggcccgccccagucuguaggugcccc

SEQ ID NO: 4110621 - RNA, 69 nt, Human
ggggccuauuuguucaacuucccucaaggugaccucaucacagauaagggaugaauaaugaagggccuc

SEQ ID NO: 4110622 - RNA, 58 nt, Human
ggggccucacuaugugguccaggcuggucuugaacuccugggcucaagugaugguccc

SEQ ID NO: 4110623 - RNA, 82 nt, Human
ggggccuggaggagcaauaugguuagguuuguguugcacaugguuguugugugguccuagcuagguuagcccucaggguacu

SEQ ID NO: 4110624 - RNA, 62 nt, Human
ggggccugguggugccucugugggccccaagggggcuggguggcugggcuaccacuggcccu

SEQ ID NO: 4110625 - RNA, 82 nt, Human
ggggcgcuggguagcucauuugaagguugcaugagacuaaauuuauuccucccucaugcuuaauuggagcauucauuucccc

SEQ ID NO: 4110626 - RNA, 77 nt, Human
ggggcgggucagagggagccagaguugggagcucugaagcagaggacccugugacuggcuaccuuggacagagcuuc

SEQ ID NO: 4110627 - RNA, 76 nt, Human
ggggcggguuuucugcacugugucauuuggggaacagcugggcacagcuguguccugaagacacugccccagcccc

SEQ ID NO: 4110628 - RNA, 63 nt, Human
ggggcgugguaggggcagcagugccagccagagcccuggggaggcagggcugccccucccucu

SEQ ID NO: 4110629 - RNA, 58 nt, Human
ggggcgugguugcugguggccuggagugagcugccugcuguggccuccagcacucccc

SEQ ID NO: 4110630 - RNA, 74 nt, Human
ggggcuaauacuccagcagcugacaccagucccagcucugcugcugggaugcgggguggcugcaggccaguccc

SEQ ID NO: 4110631 - RNA, 55 nt, Human
ggggcuagaguguuggcugggagaacuaucccaggcugggaacgauucuaggccc

SEQ ID NO: 4110632 - RNA, 58 nt, Human
ggggcuaggcuuggccagcacugugacauugcugcacgugggcaaaauggccuucccc

SEQ ID NO: 4110633 - RNA, 70 nt, Human
ggggcuaucaauuucuacaguugguggaggucuuacaagaaaaaaguaagcaauaccaggugugggcccu

SEQ ID NO: 4110634 - RNA, 58 nt, Human
ggggcucagugaagcuaaguguauggcccacaaguggucauauuggcuccacuuccuc

SEQ ID NO: 4110635 - RNA, 56 nt, Human
ggggcucaguucggacagccugucugccuaacguagcccugagacgacugagcucc

SEQ ID NO: 4110636 - RNA, 63 nt, Human
ggggcuccagucuucacauuuucuaaauguccuuaaggaggagaaauggugagugagagcccc

SEQ ID NO: 4110637 - RNA, 77 nt, Human
ggggcuccggauagccacaggugguccaacuggccacucaucgccuggccacccccaaguagguggucugggucccc

SEQ ID NO: 4110638 - RNA, 71 nt, Human
ggggcugagagcuggaaucugagggauggggaugucuugggauccagccucugauuccauucuaggcaccc

SEQ ID NO: 4110639 - RNA, 128 nt, Human
ggggcugagccaggcgggucucacuccuccuggcugggucaccuccugugucacccuggcucuauuuucuggagucagggguuggacggggccacagucaaggugaugugcagccugccagcagcccc

SEQ ID NO: 4110640 - RNA, 56 nt, Human
ggggcugccuuucuucugggagccucgucccugcugccucccacuugggcagcccc

SEQ ID NO: 4110641 - RNA, 56 nt, Human
ggggcugcugggcaagaaacauuucuuacgugauaaugugaagcgucagagguccc

SEQ ID NO: 4110642 - RNA, 72 nt, Human
ggggcugcuggggggcuacugacagaggagacaucuucauccaucucucugugagaugccuuccugagccuu

SEQ ID NO: 4110643 - RNA, 69 nt, Human
ggggcuggcuugccaagcucagggagucgaggucugagugcuugagcucugggcgggcaggucagccuc

SEQ ID NO: 4110644 - RNA, 98 nt, Human
ggggcuggguuugacuacaugguaggcauguguuuggugggucauuauguauuaucauacagauaaaggcuuacuaguagugugaagacauaagccuc

SEQ ID NO: 4110645 - RNA, 74 nt, Human
ggggcuguccugugcuuuacaggaucauuagcaacauucccagauucuacucacaagacaccaguggcagcccc

SEQ ID NO: 4110646 - RNA, 111 nt, Human
ggggcuguuuuagacagaggaggcggcaggugcgcguauguagguuugagguagauuuugcuacccaggaaaugggcucuugccucuuccaccugccugugaacuggcccu

SEQ ID NO: 4110647 - RNA, 72 nt, Human
ggggcuugagcuggcuaagauccaagaaaggcauccauguaaggugggcuguuuuucuucuuuucaggcucc

SEQ ID NO: 4110648 - RNA, 74 nt, Human
ggggcuugaggcagagaggggcacagcagcuguugcacaggcuggugcaagauucccugcuucuucucagcucc

SEQ ID NO: 4110649 - RNA, 69 nt, Human
ggggcuuggaaggcugaauggccucucuuaagacccacaggcagagaacauuggucuuccuauggcucc

SEQ ID NO: 4110650 - RNA, 64 nt, Human
ggggcuuuggcagguccugcuuaugauaaaaugcaaaggcucuuaacccucugccacaagccuc

SEQ ID NO: 4110651 - RNA, 61 nt, Human
gggggaaaaacaccugggacucugggacacaggaccuaggcaaauccagauuuuuccaccc

SEQ ID NO: 4110652 - RNA, 75 nt, Human
gggggaaaauaauuuucaacaaaucagcaaaaaaagcaggaagaaugaguuguuaacggaaaacuguuuuccuuc

SEQ ID NO: 4110653 - RNA, 75 nt, Human
gggggaaaaucaucuuuuaucacuauuguguaccgugccgguccagauggaggauaaaacaugcaugaguugccc

SEQ ID NO: 4110654 - RNA, 67 nt, Human
gggggaagacugggcuagugaucugagaaacugucaagcgauuauuaaagcuuaggucuuauccucc

SEQ ID NO: 4110655 - RNA, 87 nt, Human
gggggaaugaagauaaugugucugucuuugccaguucaguguguacacuuaagagguaugggauguggugcauuaucagauuccgcc

SEQ ID NO: 4110656 - RNA, 71 nt, Human
gggggacagcagugggggaugggcagaagggggcgacucgggcugcccaggcuccucgcagccuuccugcc

SEQ ID NO: 4110657 - RNA, 59 nt, Human
gggggacaggaugaauaucugucugauaagcucacugagauauguuaggcuuguucccu

SEQ ID NO: 4110658 - RNA, 63 nt, Human
gggggacaggcugagacuugagcuuguaucuccugggccagcugcaacaucugcuugucccuc

SEQ ID NO: 4110659 - RNA, 65 nt, Human
gggggagagagcuccgugacagcuucagcugcccuagcucuagccuggcuuagcucucucacuuu

SEQ ID NO: 4110660 - RNA, 68 nt, Human
gggggagccuggggaggucccgccaccccugugggcugagcuggcgauuucuuccucaucgcucuccc

SEQ ID NO: 4110661 - RNA, 55 nt, Human
gggggagcucucucgaggauaucugggcugcuuguucuccagggggagcucucuc

SEQ ID NO: 4110662 - RNA, 127 nt, Human
gggggaggaggcugcagcugggguugggggcaccgggagauguggcuuccucugcccuggaugcuuccuggggagaggcacagaggcaguccccuaggugacccccuccccacuggcccacuuuccc

SEQ ID NO: 4110663 - RNA, 89 nt, Human
gggggagucuccccugggaccagcagcugcaaagccugggugcucucuuggaccaacacccuagcagcugcugccccuggggcuccucc

SEQ ID NO: 4110664 - RNA, 56 nt, Human
gggggauaagcggggagaggaaaaccacucacucucacaugcccugucaguccccc

SEQ ID NO: 4110665 - RNA, 96 nt, Human
gggggaucaauuccuuccacuguccaggcacuuuaggaucagguugaaacccccuccuuucagaaucugaaaagcgcuuggucggggagaucgccc

SEQ ID NO: 4110666 - RNA, 61 nt, Human
gggggaugaagcuauuugguuggcacuacauaaagagcccaccuuugguuuuauggcuccc

SEQ ID NO: 4110667 - RNA, 61 nt, Human
gggggcagcagguguccugcgaugccccggggaugugcgcgcagacugcccugcugucccc

SEQ ID NO: 4110668 - RNA, 65 nt, Human
gggggcagcauucaggucccggggugcccgagccaggucagacccagggacacgaugacaccucc

SEQ ID NO: 4110669 - RNA, 55 nt, Human
gggggcaggaccuggcuucggauuccacacugggcucagaaaaaguccuggccuc

SEQ ID NO: 4110670 - RNA, 76 nt, Human
gggaccucucuguuccuggccucuugcccccgcccugccaucugccggccccaagagggcagcacaggugggucuu

SEQ ID NO: 4110671 - RNA, 55 nt, Human
gggaccugaggagggguuucagccuggaggcuaggguggcauccugcccaggccc

SEQ ID NO: 4110672 - RNA, 68 nt, Human
gggacgcggcucggcgggugcgccccgggggcauguccgcgcgcuaccgccagggcugcagugguccc

SEQ ID NO: 4110673 - RNA, 112 nt, Human
gggacgugaagccagacaugugaggugccugugaguaucaucugccugcccaucagacagggaagcaguugagucugcuagcuaggaccccagauuuucugccuuuccuccu

SEQ ID NO: 4110674 - RNA, 129 nt, Human
gggacguggagcgaggaguggggcuccaggcugcugaggcuccggaccaagugcccccugcacuuucaacgccguaggucucccggcagcccuggaaggacagucuuacccggacgccacgguggucuc

SEQ ID NO: 4110675 - RNA, 85 nt, Human
gggacuaaguacugacuacuugguaccugaagaucgggauucuuuucuacucccucagaccuugcuaguagucuaggcuuauccc

SEQ ID NO: 4110676 - RNA, 129 nt, Human
gggacuacuagacuguauacuucuguauacaauuuaggcuguauauacuguauacaguuugugacuacuagacuguauacuucuguauacaauuuagacuguguauacuguauacaauuugugacuacu

SEQ ID NO: 4110677 - RNA, 55 nt, Human
gggacuauuagaaacuaugccagaacaauaggcauaaauuaggaucugggguucc

SEQ ID NO: 4110678 - RNA, 120 nt, Human
gggacucaaggcauuggcucaauggggcaccuuguucuguuuacucuuguuuuggucagcaccgauugcccuagggcuaagcaggacugccaccacagacucaguugccaagaguauccc

SEQ ID NO: 4110679 - RNA, 63 nt, Human
gggacucagcaaacaagggauucuucaaaaguuguccucccaaaucccucuuccuagaguccc

SEQ ID NO: 4110680 - RNA, 60 nt, Human
gggacucaguuucugugucaaacucuguuagaacugauaggagacacaggagagaguccc

SEQ ID NO: 4110681 - RNA, 87 nt, Human
gggacucaugugacuucagcuaccuuguuuguacugaccaucaucacuaacuacagaaauacuacaaggccgaagcucucaagcccc

SEQ ID NO: 4110682 - RNA, 60 nt, Human
gggacucuccuguguggacccagcccugacgaggaagggaaaggccagagggaggguccc

SEQ ID NO: 4110683 - RNA, 101 nt, Human
gggacucugacuaucaccccugcucugcaguggauuuggcucucagcacucccaggcugggagcuggaugcccugcccuggcagcaugacucagacugccc

SEQ ID NO: 4110684 - RNA, 61 nt, Human
gggacugaguggcuggagcuuccccacugaccuggcugggcugaccccaccccucacuccc

SEQ ID NO: 4110685 - RNA, 94 nt, Human
gggacugcggguguccccgagucuggccugccagcucugguggccagggcaccucugcgcgcgggccagggccccggggcucucccgcaguccc

SEQ ID NO: 4110686 - RNA, 85 nt, Human
gggacuggacaagaaauggauaagcagcuuuugagcaguaacauggcuaaucaggaaaauacugcuuauccaugagcuagggccc

SEQ ID NO: 4110687 - RNA, 67 nt, Human
gggacuggggaaggacccgagacccucucggaggacuugggcagguuucgacuucuuuuucauuccc

SEQ ID NO: 4110688 - RNA, 60 nt, Human
gggacugggucacuaagauaguagaaauggucgcauaaauacuauugccugacaggucuc

SEQ ID NO: 4110689 - RNA, 61 nt, Human
gggacugucugugugguucucugccuaaggaaggaagaaucuaaguacacagacagaucuu

SEQ ID NO: 4110690 - RNA, 104 nt, Human
gggacuugaaacaugcuuuucacaucugcugcugacuggaguuucucaaaugccauauuuagcauucagcucugugaagccagcaguuccuagagcuaagcacc

SEQ ID NO: 4110691 - RNA, 66 nt, Human
gggagaaaaggggugacacauaucagugcaguggcuguggugaucugugugcccccagcagcuccc

SEQ ID NO: 4110692 - RNA, 91 nt, Human
gggagaaagaauaaaggaaaacuuuuggggagucaguagaagacccugaucaaucugacccuugccaaguuccuuuuauucaacaucugcc

SEQ ID NO: 4110693 - RNA, 58 nt, Human
gggagaaagacguaggcugggaggcuaggccagucucgccuuuucacguuuuucugcc

SEQ ID NO: 4110694 - RNA, 69 nt, Human
gggagaaagauucuuaagacauuauguauuuuuagugauucaaguacgugaaucaaggaucuauuuccc

SEQ ID NO: 4110695 - RNA, 82 nt, Human
gggagaacaacucaaaggagaaaugguagaugugcagcaugggagcucauaucuuuucuuauuucuuucuuuccuuucucuc

SEQ ID NO: 4110696 - RNA, 56 nt, Human
gggagaaccagccagugcaagggccccucauguccugccuggccuuugcuuuuccu

SEQ ID NO: 4110697 - RNA, 71 nt, Human
gggagaagauugugucagaacguuuguaaggacacuucaaaggcaagcuucauauggcauuuucugcuccu

SEQ ID NO: 4110698 - RNA, 79 nt, Human
gggagaagauuuucacaaagcuggagcauuuccuccacugccugcacugaggaguugccaaggcuugaaaaucucuucu

SEQ ID NO: 4110699 - RNA, 128 nt, Human
gggagaagcagauguuuucagaugagaugugugugaaaaaugauuuguuaacuguaaaccacaguacaguugucucuugaggucauuuaucuaauuucugucugaauuagaaaaucugugguguuucc

SEQ ID NO: 4110700 - RNA, 106 nt, Human
gggagaagccaguagguucagagaaguuccaggucacaggccaaguaaggggugaaguaggcuuucaacuccagguguguuggacucuaaaccuucugcuucuuuc

SEQ ID NO: 4110701 - RNA, 70 nt, Human
gggagaaggaggacugugcugugccauauuugaugcuauuaaaagcagcucgcauaguuuccaucauucc

SEQ ID NO: 4110702 - RNA, 62 nt, Human
gggagaagggugagaggcagugcuguggaaggggccuggccccugcugccugcgauucuccc

SEQ ID NO: 4110703 - RNA, 126 nt, Human
gggagaagucacuucuaaaaccggggagauggaggaaagcaguuagaaugucuguuacuaauuuuuguuaacgugcugcuguuuccuacaucucauucaggcauuaguuucaaguuccauuuuccc

SEQ ID NO: 4110704 - RNA, 55 nt, Human
gggagaagucaucucuagguuggcagucccugucagccucuuaggacuucucacc

SEQ ID NO: 4110705 - RNA, 101 nt, Human
gggagaaguuuccuggcagggcugagaggcagaauggugccugcaccuccuggagugcacggcaauggucuggcucugcugccuucuauggguaagggccc

SEQ ID NO: 4110706 - RNA, 85 nt, Human
gggagacaaagccccauccacccgcagugcauucauucauggaggaauaaauguguguuggcuggagagggcuuuuauauuacuc

SEQ ID NO: 4110707 - RNA, 78 nt, Human
gggagacagcauguaugucugaugcacaugcaugugcgaauguguguguguguuagaggugcaggugguguacagccc

SEQ ID NO: 4110708 - RNA, 96 nt, Human
gggagacauugcuauucuugcugaucauguagcuuuggcaucacaagauagauguggaaguaaagcaguaugauggaaggauccuaaugugcuucc

SEQ ID NO: 4110709 - RNA, 81 nt, Human
gggagacccacugucacuugcaacugugaggaacggcagagcagccccuugccccagcucagugcagggacaugguuuucc

SEQ ID NO: 4110710 - RNA, 55 nt, Human
gggagacucuccucugcucucuugggaaaagccuaggagagccacauagucuccc

SEQ ID NO: 4110711 - RNA, 68 nt, Human
gggagacugaggaaaugcuggcuuuaggccaaaaaacccuggcucaaaacagcuuccuccaguggcuc

SEQ ID NO: 4110712 - RNA, 76 nt, Human
gggagagaaagcaugaaaugagcgaauauaauggcagccagaggccaugguauuaauuaucuuuuuauucucuucu

SEQ ID NO: 4110713 - RNA, 130 nt, Human
gggagagagcacagugauaaacugcccagaugguggggcagcugaucugaagccuccagugaugcuuccucaagggcugagaauucagcuuuccugaucccuguuggucgguaauccuuuccucuguacc

SEQ ID NO: 4110714 - RNA, 113 nt, Human
gggagagaugaauguagaaaagcuggccuggggcccaggccugccugcugugcaucccuggguggaugccagcccucucugggccccaaggcucugccugacuugggucuccc

SEQ ID NO: 4110715 - RNA, 56 nt, Human
gggagagaugcugauugccaaugucuuauuuccuuuggcaagguagcauuucuucu

SEQ ID NO: 4110716 - RNA, 82 nt, Human
gggagaggcuccaggcugaggagacagaagccaaauacccugcucuggguguuucuccaucguggccugcucugccccuccc

SEQ ID NO: 4110717 - RNA, 65 nt, Human
gggagaggcuccaugaccccggcaggcucuggccaaaccuugcugcguuucauggagccccuccc

SEQ ID NO: 4110718 - RNA, 95 nt, Human
gggagagggagucagagcuggagauucuggggacagugcaugcugcaaugcucauacugucccagcaaauuucaaguucugggacucuuuuuccc

SEQ ID NO: 4110719 - RNA, 68 nt, Human
gggagaggggugggaaauaaugucauugaaauagucaugaccaaggcaugaacuccaagcuuccuucc

SEQ ID NO: 4110720 - RNA, 80 nt, Human
gggagaguacaucugaggagaccagccucugcugcagcccaccccuuggccagaggacggucaccuuaaugauaguuccc

SEQ ID NO: 4110721 - RNA, 116 nt, Human
gggagaguagcuggagaugaagccaaaaagcuugauaguggcuaucaagccagagagacaaggaaugauggugacuucgagugucuguuuguuguauuucuuacagcagcucuuuc

SEQ ID NO: 4110722 - RNA, 70 nt, Human
gguagccguacuuccuggaaguggggcagauauggccuacauugugauaggaagucaccuccaggcuacc

SEQ ID NO: 4110723 - RNA, 74 nt, Human
gguagcuggauaaaaugacauuaccugauuguguuuaauuuuguaguugucgaugucauuuuauucuuuguacc

SEQ ID NO: 4110724 - RNA, 78 nt, Human
gguagcuuucuucucuggacagugaagagaggagcauugggaccuuucucucuuucuguucagaggcugagaguuucc

SEQ ID NO: 4110725 - RNA, 103 nt, Human
gggagcccaacauaguaaguuccuggggcccaaggccuccagcccagcaugccaguuucauccuggguugcccugggccugugagguagcugagaggacuccc

SEQ ID NO: 4110726 - RNA, 61 nt, Human
gggagccugcacugcuguuugcuguuugguauucugugcaggcagcagcuugcugguugcc

SEQ ID NO: 4110727 - RNA, 84 nt, Human
gggagccugccaggcgcugccuggauucccuuuguccaugauacagccggaaauacacuccaggcaguaggcugggcgguugcc

SEQ ID NO: 4110728 - RNA, 69 nt, Human
gggagccugguaauauuuacaaagcaucuaguauugcuagguucuuuguauauaucacuuuaccucacc

SEQ ID NO: 4110729 - RNA, 105 nt, Human
gggagcucaggcucaaguccucccaccucuuuauugcuacugguuugucaccauucugcuggcgagaaugguagugagcagcagggaggaagccacaggguuucc

SEQ ID NO: 4110730 - RNA, 67 nt, Human
gggagcugaauggcaauggagaaugugaagaggaucaaagucaucacagguucauucaugugcuccu

SEQ ID NO: 4110731 - RNA, 62 nt, Human
gggagcugagguaacagugagugugccugagugggaauuacccaccuugacuucuagcuucu

SEQ ID NO: 4110732 - RNA, 61 nt, Human
gggagcugcuagggcauuaugauaaagggguggcucuuuaucuguccuuugccagugaccc

SEQ ID NO: 4110733 - RNA, 56 nt, Human
gggagcuggaguuguguugccuuaagugaaggaagaccaaguauggcgcagccccc

SEQ ID NO: 4110734 - RNA, 59 nt, Human
gggagcuggccuacuauuagauagauuugaaauugguauucacgaguagacuaguuucc

SEQ ID NO: 4110735 - RNA, 63 nt, Human
gggagcuguaagggacagguagcuaaaaauaaugacagagaugcacgguuucauuacaguccc

SEQ ID NO: 4110736 - RNA, 97 nt, Human
gggagcuguugcauauguaagcaggugguucaccuaaaaguuggauguaacguaguuaacgccagcucuuggugcacuuacauauugcauugcuucc

SEQ ID NO: 4110737 - RNA, 64 nt, Human
gggagcuuacaggaaucacugcuagaugaggacaccaucaucuguuuccuaaucuguagcuccu

SEQ ID NO: 4110738 - RNA, 75 nt, Human
gggagcuuauuaaccaugcaugucucuaguuucacagaccuguuagauuggaagcugcauuuuaacaagcaucuc

SEQ ID NO: 4110739 - RNA, 66 nt, Human
gggagcuuccggguucaagccagcugcuucaaaggccaaagcuucccuggcuucuucgguguuccc

SEQ ID NO: 4110740 - RNA, 101 nt, Human
gggagcuugauaaaaaugcagcuacuugaauccuacuccaggagauucugaucaaaucagucaggggugggaucaaggcauucacauuuuuaacaccuccc

SEQ ID NO: 4110741 - RNA, 87 nt, Human
gggaggaagggaggaagggagggguguagagggggccagaaugaugucucccagcucugcagaccugcccuacaccaucccccuccu

SEQ ID NO: 4110742 - RNA, 76 nt, Human
gggaggacaacagagaagacuuacagccacagugucacaauggaaugguaucugcaguuaagguccucucccuccc

SEQ ID NO: 4110743 - RNA, 119 nt, Human
gggaggacucagggucuucuuuuuacucucuugguggguggccuguugauuugggcuuauaccgcucagcguguacucauuaggcuaagcuguaauuagaccaagacuguggcauuccu

SEQ ID NO: 4110744 - RNA, 58 nt, Human
gggaggagacaguaaaaagcacgcaaacacaguguguucagaauuugcugcuuugacc

SEQ ID NO: 4110745 - RNA, 76 nt, Human
gggaggagaguggagauuugauaaaaguagcaguuucccucaaguggagcugcucugauaaaccuacuuuccuccc

SEQ ID NO: 4110746 - RNA, 88 nt, Human
gggaggaggggcuuccccuucauuuagucaaggacacguggccuguggucccccgauguccuccugaagggaagauccccccacuccc

SEQ ID NO: 4110747 - RNA, 66 nt, Human
gggaggaggguucucuggacagaggugugaauugugucucuaguucccaggggaccacaucuuucc

SEQ ID NO: 4110748 - RNA, 64 nt, Human
gggaggagugaagauucaccugcuuauucacaccgucacaaucagaaguccuuucacucuuccc

SEQ ID NO: 4110749 - RNA, 81 nt, Human
gggaggaucacuugagcccaggaggcugcagugagcugugauuaugccacugcacuccagcugggugacagagauccuguc

SEQ ID NO: 4110750 - RNA, 107 nt, Human
gggaggauuccccaaaagaauaacugucuucugacacuguuaggagggcaaagccuugccaguguugcagaagcucagucguguuuugcuggcacaggaacccaccc

SEQ ID NO: 4110751 - RNA, 69 nt, Human
gggaggauugaaauauaaauauguguuguccuaacugcugacauaaccaucacuguuucacaucuuucc

SEQ ID NO: 4110752 - RNA, 80 nt, Human
gggaggcaaacugaggcaggacuugcauaaaguccucugaaaugugacuagacuugcuggcuccuugcuucuagccuucc

SEQ ID NO: 4110753 - RNA, 89 nt, Human
gggaggcagaggugggaggaucauuuaaggccaggagcucacucaaggucagccuggccaacauagugggacccccaccucucucucuc

SEQ ID NO: 4110754 - RNA, 61 nt, Human
gggaggcagccagcacauggaagagggaaggacccaagaacugcagagcuggcuggcuccu

SEQ ID NO: 4110755 - RNA, 68 nt, Human
gggaggcagggagguaggagcuucuagcuguucacagauuuccaucagcuauaaccccuuccucuccc

SEQ ID NO: 4110756 - RNA, 58 nt, Human
gggaggcagugcuggaggcuggcucaaccccaagaccagcaggccaagcugccauccc

SEQ ID NO: 4110757 - RNA, 63 nt, Human
gggaggcaugcucuggggguccuccgagggacaucuuucagccccugcugagccugccauccc

SEQ ID NO: 4110758 - RNA, 68 nt, Human
gggaggccaaggaaggggaugccugaggaucuguacacacugcaccauacccauuccccucugccccc

SEQ ID NO: 4110759 - RNA, 93 nt, Human
gggaggccugagaggagcugcuucaagaucaucucccacuugccuccuuaugucccuuggcaaguuucaugagacagauuuucauagccuccc

SEQ ID NO: 4110760 - RNA, 90 nt, Human
gggaggcuaacuuuugucuucuugacuuuccuaugcaagcuacucaauuuuggagaggaagugucagggauaacgauaagauaacuuccc

SEQ ID NO: 4110761 - RNA, 71 nt, Human
gggagggaaauaaccucaugcaccaugagggagggaaauaaccucaugcaccaugagguuauuucuuuccc

SEQ ID NO: 4110762 - RNA, 57 nt, Human
gggagggaaggaggcgccgugucagagaggaccacccagcccaucccuucugcuccc

SEQ ID NO: 4110763 - RNA, 59 nt, Human
gggagggaagguaccugugugaccaugcauugugcuuuagccacagugcuuugcuuucc

SEQ ID NO: 4110764 - RNA, 68 nt, Human
gggagggaugggggucguuggcagcagcgcacgugaagucacugccacugccuggccuuucucugccc

SEQ ID NO: 4110765 - RNA, 58 nt, Human
gggagggauggugugagaggcucagugaaggcacugagugcugcaugccuuuccuccu

SEQ ID NO: 4110766 - RNA, 113 nt, Human
gggagggcacaugagcuggcaggaggucucuugugagccguuuccuuucuucucuaauaauaggaaugcuggcuuacaggcaguuuuacccccugggauggcaaagcccucuc

SEQ ID NO: 4110767 - RNA, 73 nt, Human
gggagggcauuuucuggguuaucagggguuaaaggguugccagucuugacagcugaggcccagaguacccccc

SEQ ID NO: 4110768 - RNA, 59 nt, Human
gggagggccaauggauuucaacugauguaucaauuccagcuggucgccaauggcucccu

SEQ ID NO: 4110769 - RNA, 82 nt, Human
gggagggcccugggagcccgcguccugguggcggcacccccugugcucccacccagcgggggcucaccaccggccccuucuc

SEQ ID NO: 4110770 - RNA, 55 nt, Human
gggagggccugaggccaggugcaauuccccagggcugguccucacagguccuccc

SEQ ID NO: 4110771 - RNA, 90 nt, Human
gggaggggagcugugcacacggcggaggcgcacggcgugggcacccagcacccgguacacuguguccucccgcugcacccagccccuucc

SEQ ID NO: 4110772 - RNA, 62 nt, Human
gggagggggcgccgagagggagcugggagucucuccuccucuuuccuuuucgccucucuccc

SEQ ID NO: 4110773 - RNA, 83 nt, Human
gggagggguagguggaggaggugcugcaaggggucccaggccaagccagcuccccugcagcugcuugauucaucuugucucuc

SEQ ID NO: 4110774 - RNA, 80 nt, Human
gggagggguggggagugaggccgaggggagugugagggccuaaucuuggaugcagucccuggcccacuuuaaucucucuu

SEQ ID NO: 4110775 - RNA, 65 nt, Human
gggagggucugccaugcucccuggccucagcucaaccagggagaaagugaggaggacccuaucuc

SEQ ID NO: 4110776 - RNA, 104 nt, Human
gggagggugcuucccacucggggucuuugggaggccaguacuucugggaauccauagaggaggacaagagcaggccucucgaagcuucaguccagaacccaccc

SEQ ID NO: 4110777 - RNA, 66 nt, Human
gggaggguggugagcaguagcacuuuguacauuugaaauguucauuagcauuguugacauuuuccc

SEQ ID NO: 4110778 - RNA, 109 nt, Human
gggaggguucaguccguccuugagucugugcccuaugcuguccaaucucagguugacaccggcagcucaaggguuagauuccagcucaauacggaaacuuaaaacuccc

SEQ ID NO: 4110779 - RNA, 57 nt, Human
gggaggucauaauugguuuguaguaauuguuuuuacuuucccauagcauggcuuccu

SEQ ID NO: 4110780 - RNA, 82 nt, Human
gggaggucggcuguccauuccauaugagcuaagaggccucccugggguccuuggccuggguggggucucagccgcaucuccc

SEQ ID NO: 4110781 - RNA, 75 nt, Human
gggaggucuaagcaggcuuggcugcacgccucgcuccaguagaggagucagaugaagccaaaccuaagauuuccc

SEQ ID NO: 4110782 - RNA, 59 nt, Human
gggaggugaaaggucaugugugaguaagaauugaucaauaccugaaccaaucaccuccu

SEQ ID NO: 4110783 - RNA, 76 nt, Human
gggaggugccaccuggccagggucugggcugcuccaggaagacgguggcaggagaggacccggccaggggccuccc

SEQ ID NO: 4110784 - RNA, 65 nt, Human
gggagguggggaugggccgcagccccguccagagggggacugaggagcaaccccgugcccugccc

SEQ ID NO: 4110785 - RNA, 55 nt, Human
gggaggugugcaugugugucauucuccuagaguuuucaugagcugcucacuuccc

SEQ ID NO: 4110786 - RNA, 75 nt, Human
gggagguuagaaggaugagaacacucauugcagacugugaggagauagacaacuguucauuauucuucaucugcc

SEQ ID NO: 4110787 - RNA, 130 nt, Human
gggagguugcagcugacugcauggggugccaggacacuuggguccaugggcagcccccagugggcuggucaggggugcuagaguggggccacuuuccuggauccucuccaggucauaagcugacuucacc

SEQ ID NO: 4110788 - RNA, 86 nt, Human
gggagguugggagagagggggcgggcgacuccucgccgcgcggguuccuggcuggagcgcccuccucugcguccucccaaccuucc

SEQ ID NO: 4110789 - RNA, 64 nt, Human
gggaguaaacuauggugaggaugcgcccguuuuaucugcuuggacaucccaucugguuuuuccc

SEQ ID NO: 4110790 - RNA, 73 nt, Human
gggaguaguuucucaugcuguuucagugcuaucagcucacaaggaaucugcaaacaccacagagacaauuccc

SEQ ID NO: 4110791 - RNA, 97 nt, Human
gggagucaaaggcagccaagaaaguggcaccccuagggaaugagcagauggaucccugggccugccaccaucuuaggaaaucaggucucugaucccc

SEQ ID NO: 4110792 - RNA, 59 nt, Human
gggagucagagagguaaugggaacucacucauugguucucggccuacuaguugauuccu

SEQ ID NO: 4110793 - RNA, 74 nt, Human
gggagucaggagagaccuguucuccugggcccacugauuccuucccagggaaacaggaaguuuuucucguuccc

SEQ ID NO: 4110794 - RNA, 58 nt, Human
gguaggcagaucacugucuauggaaauccagaauacauggacaggaagacaaccuacc

SEQ ID NO: 4110795 - RNA, 102 nt, Human
gguaggcauuuacacaucagaugacacuaguucaacuuaauuucuauuuuuaaauuuuguaggaaacaaaguaaugcaacucagguucugugaaagcugacc

SEQ ID NO: 4110796 - RNA, 56 nt, Human
gggccucugccugaaagaacagauuuaccgaaugucuggucuggccaauaaggucc

SEQ ID NO: 4110797 - RNA, 61 nt, Human
gggccucuggccuaggccgggagagcccugauucucgccugucccugggccggagcugccu

SEQ ID NO: 4110798 - RNA, 76 nt, Human
gggccugaccuucucaguuucacugauaacagaguaacuaacacuugcugugauuuaugagauagagaaaaggucc

SEQ ID NO: 4110799 - RNA, 107 nt, Human
gggccugagguuccuucuagcuuuaacuuucuuugcaucuaaguuucguagcucaagcaucuggaauuccaggugagagaagguaugguagauugaacuguuggccc

SEQ ID NO: 4110800 - RNA, 83 nt, Human
gggccugcagcugcugccgggaggccuucaugcuggcugcaaagcgcaggagccgcguggcacccuccuggaggagcugcccc

SEQ ID NO: 4110801 - RNA, 59 nt, Human
gggccugccaggcuuucagcauuucuugugauuugucacaacuugagggcuuggugucc

SEQ ID NO: 4110802 - RNA, 71 nt, Human
gggccugccugcugccacccuggcuccgucccagcugugagccgugcgggaguuaggauggcuaggaaccc

SEQ ID NO: 4110803 - RNA, 79 nt, Human
gggccugccuguggcugccccgcuguuggcauccuacccagagccacaaugcuagugggccacagguacagauggacuc

SEQ ID NO: 4110804 - RNA, 62 nt, Human
gggccugcucuguuuagagggggugccaggguccugggucccucccucuguuagagcugucu

SEQ ID NO: 4110805 - RNA, 93 nt, Human
gggccuggaggaaauaagugguugcuuguuuucauucuuugagacucuaaagaaacagcauguuggaccauuuaacuuuuuacugucaggcuu

SEQ ID NO: 4110806 - RNA, 81 nt, Human
gggccuggggcuaacuugucuucaacaccuugucuagugaauaaaucuaguucaggaagagaaacaacagcccgcaggccu

SEQ ID NO: 4110807 - RNA, 89 nt, Human
gggccugggggcuguaggcggaguucacaguaucuagcgauggagcugguagguccugaggguucgucugcagcuuggaagacaggccc

SEQ ID NO: 4110808 - RNA, 61 nt, Human
gggccugucucacucccugguuugauccaagacccaggacucuuuccagggugggcggccc

SEQ ID NO: 4110809 - RNA, 56 nt, Human
gggccuuagagaucuuuuguuuacccucuuuuacacaaauggagaaacugaggccc

SEQ ID NO: 4110810 - RNA, 88 nt, Human
gggccuucugauggcacagccuguucucuucccaguuugcuuauggcaagacgagggcccccaggacagcaaugccgauggauggucc

SEQ ID NO: 4110811 - RNA, 61 nt, Human
gggcgaaggccagggucccacacucgcagcgcugcgacggcgcucgggaccucccucgucc

SEQ ID NO: 4110812 - RNA, 86 nt, Human
gggcgccgugcguccugggcgcguccccugaggcggaggacggucguccggcgggaggacgcguccagggggagcgccgcaggucc

SEQ ID NO: 4110813 - RNA, 76 nt, Human
ggugccaccagaugcuguugcuacuaccacuggcaaaguuuaaggguaaaauagcauaaaguuucugugugguucu

SEQ ID NO: 4110814 - RNA, 81 nt, Human
ggugccagaauucauacucuauauugcuuuugcaccauuagugcaaaugucaacacaagagaaaugcaaauuauugguauu

SEQ ID NO: 4110815 - RNA, 66 nt, Human
ggugccagagaaagguuugauucauuuggaaaacaguucuuagucucagugaccuuuucugccgcc

SEQ ID NO: 4110816 - RNA, 83 nt, Human
ggugccagcagaguguacaggaggccacauuggaagacgauggucuuugcugucuucuuaccuuucuguaugcucccugggcc

SEQ ID NO: 4110817 - RNA, 61 nt, Human
ggugccagcugcugugaggaccacagggauuuucuuuuccuguguuugaugagaagccacc

SEQ ID NO: 4110818 - RNA, 64 nt, Human
ggugccauccugagaggucucucuaccaugaguggucuguagguagugaguucaggagggcagc

SEQ ID NO: 4110819 - RNA, 55 nt, Human
ggugcccagagccaggaaugagccgccuguggugauuccugugugucuggagucc

SEQ ID NO: 4110820 - RNA, 56 nt, Human
ggugccccaucgcggguggcuggcucaaggagguggacgccgacuuuggaggcgcu

SEQ ID NO: 4110821 - RNA, 72 nt, Human
ggugccccgccuucuguccaaccccacgauggaugccagugcuggaaagggacggaggaaugcaugggcacc

SEQ ID NO: 4110822 - RNA, 70 nt, Human
ggugcccugagaaagugaggguuaaacauugauucaggugucagugauaacucucaguuucucaugaacc

SEQ ID NO: 4110823 - RNA, 109 nt, Human
ggugccuaaggcagcaaggugaaucugggccccaaaguucucggcucaaguccuggucuaccacugacuugccugggacuucagguacaucacuuucugucuuggcauu

SEQ ID NO: 4110824 - RNA, 62 nt, Human
ggugccuccuaccacacccucagucugugauauuccagccaggggaaaugggggaaggggcc

SEQ ID NO: 4110825 - RNA, 89 nt, Human
ggugccuguugugcgucuguugcugggccuuuaccuccagggauucuaccucccuggguucuggcugggcugcacgcugauggggaacc

SEQ ID NO: 4110826 - RNA, 80 nt, Human
ggugccuugcuacauguauacauaugaaugucagccaucaaagaaaaugguagcuuaggaugaaugcuguagaauggccc

SEQ ID NO: 4110827 - RNA, 71 nt, Human
ggugcggggccuccccaggggugucaugagggaaugaagagaccccacggagccuggggaggcugcgcucc

SEQ ID NO: 4110828 - RNA, 126 nt, Human
ggugcuaggcugggagcugcccugagagcugggaugcccaccaaggcccacagaacugucuccaggcccuuguagacagugggaucucugggcugauuucugguuggggucugcuccuaccccacc

SEQ ID NO: 4110829 - RNA, 70 nt, Human
ggugcuccucucagcuuuguagucuucucuaacucauccagcagccacagggccaggugagaggugcucc

SEQ ID NO: 4110830 - RNA, 81 nt, Human
ggugcugaaccauuucugaauaguuuguuccuuggcuuuuaaauugguaucuggacagaaauuagcagugaguuuaguguc

SEQ ID NO: 4110831 - RNA, 76 nt, Human
ggugcugagauuguaguggaacacucaucaguggggucagggcuccugcugagauggccacugggucucaugcucu

SEQ ID NO: 4110832 - RNA, 97 nt, Human
ggugcugagauuuugauugacugggaggggaggcauggaagcucuuguaccacaggcugcuugcucaacccccgucucucuucagagcuuucaagcc

SEQ ID NO: 4110833 - RNA, 118 nt, Human
ggugcugagcccccaccacaccuuuccagcuuuugcacuggacugggaaugaguuuucaccugcucauucccaguccagugcaagagcugaaaaguuaaauucaccacagccagcacc

SEQ ID NO: 4110834 - RNA, 61 nt, Human
ggugcugaugaguuaggagaggucaucaaaggugauauuuggccaaacccauuauaguacu

SEQ ID NO: 4110835 - RNA, 110 nt, Human
ggugcugcuuaucugguguuggugucucugagcuuagagaaaggaaccuauuugccuauggcuagggaaccucuucugaggaagagcuacuagcaacugguaaaagcauu

SEQ ID NO: 4110836 - RNA, 63 nt, Human
ggugcuggaggggguuguuggugccaucguugcagaccuacucacaucugccuccauagcacc

SEQ ID NO: 4110837 - RNA, 79 nt, Human
ggugcugggagaggagaaggaggccccucacacucucgaucaaggguguuuguucauccucucuucucuccccgccacc

SEQ ID NO: 4110838 - RNA, 59 nt, Human
ggugcuggggaccuaaaggcuuuggccccugagcagguuggagguggguccccgcagcc

SEQ ID NO: 4110839 - RNA, 72 nt, Human
ggugcuggugaauucggugauggcacauagcuaagcaauuggcauguuucauggcugcaaaccaccugugcc

SEQ ID NO: 4110840 - RNA, 101 nt, Human
ggugcugucugggaaccgucagugcuagguuguguccaggagccaucaguauccuguuguauuuggaaaccaccagugccaggcuguuuccuggcugcuuc

SEQ ID NO: 4110841 - RNA, 102 nt, Human
ggugcugugguucacaccuguaaucccagcauuucaggaggcugaggugggaggaucacuugagcccaggagucugaggcuacagugaaccaugauggcacc

SEQ ID NO: 4110842 - RNA, 69 nt, Human
ggugcuuccaggccuccaugaaggguucauuggcagcagaggacgggcuucauggggccucucagcauc

SEQ ID NO: 4110843 - RNA, 97 nt, Human
ggugcuuggcuugcaagggguuaacaguauugcucaugaacuuggccugucugucuggcucgugaugaauggugagacccgcugacaaguucagccu

SEQ ID NO: 4110844 - RNA, 80 nt, Human
gguggaaacuucucugugggggagaggcagcugcucugcauugccagggcugugcuucgcaacuccaaggugaggccacc

SEQ ID NO: 4110845 - RNA, 70 nt, Human
gguggaacaauuauauuuagaaugauacagugaaaaaauuaauguauuuucugaagauaaucaagucacu

SEQ ID NO: 4110846 - RNA, 79 nt, Human
gguggaagguggggcuuugcaggcggcacccuggccagugggcucagugguguggcuggcagaguuuacuucuugaacc

SEQ ID NO: 4110847 - RNA, 76 nt, Human
gguggaauaaauggguggauggauagauguauggaugaauaaauccauacaucuggauguaugcauuuaaugaacc

SEQ ID NO: 4110848 - RNA, 102 nt, Human
gguggaauugagguggagcaaguccgugagucugugggugggaacugccuccuccacuaugccccucucagccaugggcuccuauugucaccagaaaucacc

SEQ ID NO: 4110849 - RNA, 73 nt, Human
gguggacaaggagaugugcacaucggagagcuuugggagcucuuuggaaggugugcacuuucucccuucuccc

SEQ ID NO: 4110850 - RNA, 87 nt, Human
gguggaccugacaugggccuugcugcacuuuggauuuagacaaaccaaauccacagugcagcaagggcccaugucagcuuugaaacc

SEQ ID NO: 4110851 - RNA, 126 nt, Human
gguggagagaagaaggcauauguuugacuggcuccugauuacgauguuuuggauguugccaaaaaauugguaucaucuaaauugaguccagcuggcuaguucuaaauauacguguaucuuuucacc

SEQ ID NO: 4110852 - RNA, 61 nt, Human
gguggagaggugaauggcugcucuagauagaauguuuacacgucauucuccucucuuugcc

SEQ ID NO: 4110853 - RNA, 107 nt, Human
gguggaggggcaucugagccaggccucagagaguggcgggggaaguuggguggggaagugugcccuucucauuccucugaggcucauccucuuggugccucucuuuc

SEQ ID NO: 4110854 - RNA, 65 nt, Human
gguggauagccuuggcuuugggcaguuagcuggagcaccagccggcaagcugagggcuguccacc

SEQ ID NO: 4110855 - RNA, 67 nt, Human
gguggaucagucauauccaaauuagcagcuuucuauuauccugcagggaaucuguggcuggacuacc

SEQ ID NO: 4110856 - RNA, 70 nt, Human
gguggauggcaagcacaugagcuauucaugcucauuucuggguguuauggauggaauguguguguccacc

SEQ ID NO: 4110857 - RNA, 75 nt, Human
gguggauuaaaaguuuaggcuuugaaaccagccuaucuagguuuauuuucuaguauaagcuucaguuuucucauc

SEQ ID NO: 4110858 - RNA, 60 nt, Human
gguggcagaguugagauuugaacccaggcaaaccuggcucuagaguccaggcucuucacc

SEQ ID NO: 4110859 - RNA, 92 nt, Human
gguggcaucauauaggagagcuuggaaagcuauggcugucuagcaucaagucucagauuuccaucuuuuucaugugcuuggagaaugucacc

SEQ ID NO: 4110860 - RNA, 81 nt, Human
gguggcauccuguccauggauagagcugcucgugccccuuguggccugugaacgcaguuccauggcaguggugguguugcc

SEQ ID NO: 4110861 - RNA, 60 nt, Human
gguggccuggcugggguagaagugagggucauccucuucucaacuccagccagagcagcu

SEQ ID NO: 4110862 - RNA, 80 nt, Human
gguggcgccgggugacgccaggugaugccggggcugcgcggguacugcagccuuccguggaccuggacacgcgugcaacc

SEQ ID NO: 4110863 - RNA, 95 nt, Human
gguggcgggcgccgucccuaccuggcagcugcgcuccagguggcugucccacgccggucuccgcgccugcccggugcgcggguggcguccgcucc

SEQ ID NO: 4110864 - RNA, 69 nt, Human
gguggcgguuugcaaacuuuuucuauauagggccagauaguaaauauuucagguuuugcaggccgcccc

SEQ ID NO: 4110865 - RNA, 66 nt, Human
gguggcuaaggugucccucuugcuggagaggguuuucuccaagggcucauggacacuuuucucacc

SEQ ID NO: 4110866 - RNA, 55 nt, Human
gguggcucacaccuguaaucccaggccuuugggaggccaaggcggguggaucacu

SEQ ID NO: 4110867 - RNA, 55 nt, Human
gguggcucacgccuguaaucccagcauuuuuggaggccaaggcaggcggaucacc

SEQ ID NO: 4110868 - RNA, 92 nt, Human
gguggcucuuugcccugucucacuauguuaagugaccaccaauuacugucugcacuuaacacaggaggcaagguaaccuggagagcaccacc

SEQ ID NO: 4110869 - RNA, 79 nt, Human
gguggcuggggugaggcagguggcugcugaggagcaagagggaucuacaguuguccccugcccuaugagaagggccacc

SEQ ID NO: 4110870 - RNA, 67 nt, Human
gguggcuguguucuaggagcaaagagucuacuagaacaaggcagaaagcuaccagaacaaggccauu

SEQ ID NO: 4110871 - RNA, 103 nt, Human
gguggcuuuaauuuuccugccuaacguuggucucuggucucuguacaaggauaagcaccuggugaagucagcggagcccggggagcagcagguaagugccacc

SEQ ID NO: 4110872 - RNA, 62 nt, Human
ggugggaaccgggucuccccagggugccgugaagucucugagggccgggacccaguuucucc

SEQ ID NO: 4110873 - RNA, 71 nt, Human
ggugggaacugugucagcaccgggguagacagaagucaaggaacuucuguggggagcugaucagaucagcc

SEQ ID NO: 4110874 - RNA, 110 nt, Human
ggugggaagacagggugcagccauugcccaguugggccccagagguccaggcccuccccaggguuagccuuggccugggguccaggcuugauggggucccuguccccacc

SEQ ID NO: 4110875 - RNA, 90 nt, Human
ggugggacccaaauguugagauuacuaugaacuaguggaaagaaaauuuuaccaggaguagaauaucugugaccaggguuuggucccauc

SEQ ID NO: 4110876 - RNA, 57 nt, Human
ggugggagaagaaccaucauggcuaaguagauggagucaggaagagcuucucccacu

SEQ ID NO: 4110877 - RNA, 58 nt, Human
ggugggagaagcccuguucguaguauuuguugaugcccauaguguaaauucucccauc

SEQ ID NO: 4110878 - RNA, 56 nt, Human
ggugggagaugggggagaggugguuuucaaugguuaauucuucuaccucuaccacu

SEQ ID NO: 4110879 - RNA, 100 nt, Human
ggugggagccaacacccuucugauggaaggugggagccaacacccuucugauggaaggugggagccaacacccuucugauggaaggugggagccaacacc

SEQ ID NO: 4110880 - RNA, 65 nt, Human
ggugacugggaggugaacagaaaaacuaagaaagacuuaguuuuuccuuauauauccuuugcacc

SEQ ID NO: 4110881 - RNA, 70 nt, Human
ggugacuggggcccgagccuugggccagcugcaggcggggugguagguggggucgguguuaccagugguc

SEQ ID NO: 4110882 - RNA, 95 nt, Human
ggugagagcugguggguagacucuuggagaagagcuauauauucucauacccggaaauauagccggcccuuccaagagcaccccaucacucaacc

SEQ ID NO: 4110883 - RNA, 129 nt, Human
ggugagagcuguaaguagaguguggugauggaguccagcaggggaacugugggccagcuugacucaggccgguuucaggaacuccugcagcauguuuuguuccacagccuccaugaagagcucaaagcc

SEQ ID NO: 4110884 - RNA, 69 nt, Human
ggugagcagaggcagaggaagguggucucucggggacagugucugaggacuccguucugucugcuuguc

SEQ ID NO: 4110885 - RNA, 70 nt, Human
ggugagcauggagggaggacccccaacaccucagagaccugugcugcagggccuucccugcaugagcagc

SEQ ID NO: 4110886 - RNA, 90 nt, Human
ggugagcucuuugauuuuuguuucugauccgaguuaaucauuuauucaugagcauuugaaaauuagacacaggcuaauugaaagcucauc

SEQ ID NO: 4110887 - RNA, 70 nt, Human
ggugagcuuaauugagcugaguuuaaaagcugcucugaacauguccagaaagccagcucugagcugcacc

SEQ ID NO: 4110888 - RNA, 65 nt, Human
ggugaggaaggaaggaggaaugagugacuauaaggaugguuaccauagaaacuuccuuuuuuacc

SEQ ID NO: 4110889 - RNA, 84 nt, Human
ggugaggaauaagccaggugggaaggcagcaccugagaucugccucccucagccugcaggccucacaccuggcaccuucucucc

SEQ ID NO: 4110890 - RNA, 68 nt, Human
ggugaggcagagggaguaaccuuuggcgucaacagaaaagccacuagguuuccucuucuuuucuuccc

SEQ ID NO: 4110891 - RNA, 105 nt, Human
ggugaggcaggugcccuggggcaggcgcacagucaccugcucagguguccgggacacuagugugaagcuguaggcaugggcagcgugcaccagggcggccucauc

SEQ ID NO: 4110892 - RNA, 56 nt, Human
ggugaggggcuccucugcccggccgccccuacugggaagugaggagccccucugcc

SEQ ID NO: 4110893 - RNA, 59 nt, Human
ggugaggguggaagcagaggugguucaaugacuuuccacaaagguuccauucucucacc

SEQ ID NO: 4110894 - RNA, 73 nt, Human
ggugagguuuacaaacuuguuuuaaguaaguguucauuaauucugaugcacucaauguuugagaaccacugcc

SEQ ID NO: 4110895 - RNA, 59 nt, Human
ggugaguagcaggcccugaaauuauucuggcauccuuggauaauuuacccugcaccacu

SEQ ID NO: 4110896 - RNA, 75 nt, Human
ggugagucuagguagagaaaugcaagcucagaagugugcugcaaguaguuugccuuccuccgcgccugacucacc

SEQ ID NO: 4110897 - RNA, 61 nt, Human
ggugaguuucaugguuguuuacagucaccaagaagugaauauacaaucauagaaacucucu

SEQ ID NO: 4110898 - RNA, 92 nt, Human
ggugaguuuccugggccuuguuuuggaccagcagccccagugccuccuuucagagccuagaaggcugggucugcagagccugggaaaguacc

SEQ ID NO: 4110899 - RNA, 65 nt, Human
ggugaguuuucugcuaaaccagcuaaagggagauuugcaccucuucuugccagcagaaacacgcc

SEQ ID NO: 4110900 - RNA, 60 nt, Human
ggugauagaaaaugcugucaagcugauucaugaaauaauauuagcauacagcucuauccc

SEQ ID NO: 4110901 - RNA, 61 nt, Human
ggugaucaggcuaacuguauucuacagauccuaucucuuuaaacuucaguuucugaucauc

SEQ ID NO: 4110902 - RNA, 96 nt, Human
ggugaucauauauaauuuauuauccacacugggauguuuugagauuaaauauauguucuuaauaauuacacugggauaacagacuuaagugaugcc

SEQ ID NO: 4110903 - RNA, 94 nt, Human
ggugauccaagggccugggagcuggccucaggcacaggagggcugcuccaacccagccucaggucaggccagcuccuugaggcccugguacacc

SEQ ID NO: 4110904 - RNA, 88 nt, Human
ggugaucggguucccagaccugucuauaaaagugaauacacugugggcuggauucacuuuuauagauaggucugggaacccaaucacc

SEQ ID NO: 4110905 - RNA, 71 nt, Human
ggugaugaauguauuuaauacauugauuguggugaugauaucacagguguaugaauauguuccaaauuauc

SEQ ID NO: 4110906 - RNA, 88 nt, Human
ggugaugcaucaggacacuuagcugagggugcagaugugcugagagccacagcuggagcuucaagcagguaaacccugaaagcucacu

SEQ ID NO: 4110907 - RNA, 83 nt, Human
ggugauguaauacauauggaauuccauguugguucaguacaagugggaaaggaaagaacauuauuccaucuguagcaucuucc

SEQ ID NO: 4110908 - RNA, 57 nt, Human
ggugaugugacccagacccucaugucugagagggcugagcuccuggucacaauuauc

SEQ ID NO: 4110909 - RNA, 84 nt, Human
ggugauuaauauauuucaggauuaguuuaagcagggcucuaccuccugcccagucaaguauguucugguuaauauccaauuauc

SEQ ID NO: 4110910 - RNA, 71 nt, Human
ggugauugagggacuuucucuauuauucggcuuugaagugccacaguucagggggaaauguccuucccgcu

SEQ ID NO: 4110911 - RNA, 81 nt, Human
ggugauugggcuagggaaugaaugauucguaaucaaagcuccguuugaauaagaacaguguuucaucucuaaacuaucacc

SEQ ID NO: 4110912 - RNA, 86 nt, Human
ggugauugucccacugucugucaucagggauauccugacuaaaagaagggacaggauugugucuuggucacagagggaucaucacc

SEQ ID NO: 4110913 - RNA, 75 nt, Human
ggugauuucaaauauagagugagauuugauaacuugugaugaaggacuuuuuauugcuaugucuugauugucacc

SEQ ID NO: 4110914 - RNA, 75 nt, Human
ggugauuucuaaggugauccuuucuuagucuguuccaaggggacuuaagaaaaucuggaucuucugggaaauccc

SEQ ID NO: 4110915 - RNA, 103 nt, Human
ggugcaaauacauuucuuugaaucaaaguucuauaucauaauaauuuuucucuauuacagauagagguguuguugauauagaaguuugggaugaauguguacc

SEQ ID NO: 4110916 - RNA, 58 nt, Human
ggugcaaucugguuaauacgacucaggagagggacugaucuuugaucugauugucauc

SEQ ID NO: 4110917 - RNA, 77 nt, Human
ggugcacagauugauguauuaugaagacaauaaaggacugucucauaaugaacaauauaucaauagccugugacauc

SEQ ID NO: 4110918 - RNA, 72 nt, Human
ggugcacugguacacugaauggcguucaaaguuggugaauuugcuggaaaugccauaaagguaccacuggcc

SEQ ID NO: 4110919 - RNA, 57 nt, Human
ggugcagaucuuucucuucaggggcccagcagugacuucauugaggaagaucuggcc

SEQ ID NO: 4110920 - RNA, 55 nt, Human
ggugcagcugcagccugggagcucauaucagagucuaucguaaagcagcuuuauu

SEQ ID NO: 4110921 - RNA, 63 nt, Human
ggugcaucccuggugauccaagguaaguguuuuacugcuucauauagggauguaauaauuacc

SEQ ID NO: 4110922 - RNA, 63 nt, Human
ggugcaugauguuaaacaucagguacauuugcgaugaccgaugucuaauuuuauguuucaacc

SEQ ID NO: 4110923 - RNA, 92 nt, Human
ggugcauugguugagggaagauagaugucaucagcauauauuugcaaaugaacuaugugccggugaccucuaccuucccucaaccucugccc

SEQ ID NO: 4110924 - RNA, 57 nt, Human
ggugccacucauucagcagguccugcuaaugccggaguguuggaccgagguggagcc

SEQ ID NO: 4110925 - RNA, 56 nt, Human
ggugccagaaaacuugaagaguggcucuggccagcucucugggcccaguuggcacc

SEQ ID NO: 4110926 - RNA, 72 nt, Human
ggugccagacagacaggagcucacaggcagcuggugccccgcugucaaggaaaaagccuguuuaucuucacc

SEQ ID NO: 4110927 - RNA, 72 nt, Human
ggugcccagcugcugucuuugaauggauggaaacccaaccccauugugcagggauaaugcagcugcgacacu

SEQ ID NO: 4110928 - RNA, 78 nt, Human
ggugcccaucugcuauuaugucuccagugcccagcacacuccagugcccagcacagaaccagacaugaggcaggcauu

SEQ ID NO: 4110929 - RNA, 59 nt, Human
ggugccccgagcgcgugccggacgcugguguuggcucuggcggccaugcucguggugcc

SEQ ID NO: 4110930 - RNA, 121 nt, Human
ggugcccuuauagcaugagacuccagagagcugccccauccaccaugugagggcacagccgacagacggccgccuguggaccaggaggcagcccucuccggacgccaaaucugccggcacc

SEQ ID NO: 4110931 - RNA, 92 nt, Human
ggugcccuugauccucagugagccucaucagguggggaugaguauucgcucuucuugccugaugaggcagcugagccuucgacagggggacc

SEQ ID NO: 4110932 - RNA, 59 nt, Human
ggugcccuuuguagaauucaguuggcuucugggcacagcaggcacuauacagggcagcc

SEQ ID NO: 4110933 - RNA, 88 nt, Human
ggugccguguuauucuggucaugaugaguucuuuucaaacagugauucaggacaagaaaugcucuuccugaccagaacccacauuacc

SEQ ID NO: 4110934 - RNA, 69 nt, Human
ggugccguugaggaaguaacugccuuaucuuuccaugaccugcaauugccaugcuccugagauggcgcu

SEQ ID NO: 4110935 - RNA, 55 nt, Human
ggugccucagccagggcaucugaugacuacacuugcagaagauggucugagcacc

SEQ ID NO: 4110936 - RNA, 90 nt, Human
ggugccuccccauccauggcugucacgccacugugagguggauggagaaugcccacuguggcagcacaguccacaggacggggagguguc

SEQ ID NO: 4110937 - RNA, 66 nt, Human
ggugccucccuguugacuaggguuaaggcaacaguaggaacccuccuggccaagagggcugguauc

SEQ ID NO: 4110938 - RNA, 73 nt, Human
ggugccugccugggcucacuugccagcauccugcaauuagagagggaccuggccagccucccagguacccgcu

SEQ ID NO: 4110939 - RNA, 60 nt, Human
ggugccuggggaucagcagaaugggacucuguucuggcucucucaucacccaauggcauc

SEQ ID NO: 4110940 - RNA, 79 nt, Human
ggugccuguaaucccagcuacucgggaggcugagccaggagaaucgcuugaccucgggagguggagguugcagugagcc

SEQ ID NO: 4110941 - RNA, 86 nt, Human
ggugccuucccacccggccucucccagccugugcucccuccugugagcagcugguaggaguggccacuggguggcgugugggcacc

SEQ ID NO: 4110942 - RNA, 63 nt, Human
ggugcgaggcacugcgcccggcaguaaucagacuuuuaauacaccaaugcaguaucucguucc

SEQ ID NO: 4110943 - RNA, 78 nt, Human
ggugcucuuuuaguuauugcacagaauuaguaccaaaaaacccucaauauauuaauuuuccaacagcugaauuguacc

SEQ ID NO: 4110944 - RNA, 69 nt, Human
ggugcugacuucacagucuuacuaugucagacauaacgauggcauugggcguuguagaggguuagcacc

SEQ ID NO: 4110945 - RNA, 71 nt, Human
ggugcugacuuugcucauaggucaaauuugccuucaauauuucaagauggugaccagcagcagucagggcc

SEQ ID NO: 4110946 - RNA, 93 nt, Human
ggugcugaggcuacauccaggguugguauucaccuggaaaacacccgcauggcuggcguccuggucagugccaaacugguguccuuauguacc

SEQ ID NO: 4110947 - RNA, 72 nt, Human
ggugcugauuuuuccucuuuauucugagauagcaaguggcaugcaacagaauaugaucggaauacagauacc

SEQ ID NO: 4110948 - RNA, 86 nt, Human
ggugcugcugguuuuuagugcuuaggaguuggccauguuaaauuucccacaccacaaguaacucuuuuccagaagccaguggcauu

SEQ ID NO: 4110949 - RNA, 61 nt, Human
ggugcugugugagcauuacuggcugaccgacucuaccccggucacccaugaucacaucacc

SEQ ID NO: 4110950 - RNA, 82 nt, Human
ggugcuuggcuauggcagggacuguggcccuugggaccacugcucucaccagguggccaccucuaugcugccaagacucacc

SEQ ID NO: 4110951 - RNA, 78 nt, Human
ggugcuugggguaucauuaaauauaagcuucacaauuaguucugauugaugcuacaucuuaauggguuccacaguacu

SEQ ID NO: 4110952 - RNA, 60 nt, Human
ggugcuuuucuucaugguuuuuguagcuuuguguugugagguuaucaucaguugagcacu

SEQ ID NO: 4110953 - RNA, 103 nt, Human
gguggaagaggggacaggaaggaaauuuagcuucuuuauuuucauuacauccaaugugauucucaaagguagacugggucugauucuucccccaucuucugcu

SEQ ID NO: 4110954 - RNA, 94 nt, Human
gguggaagcaccauucuccauuuccaaaacuaucggguacuuugcuaaacaauggaaaauguaccuugauaguuuggucucugaagcucccacu

SEQ ID NO: 4110955 - RNA, 107 nt, Human
gguggaauagagguacaauugggagauccugaaguaucuauggauauaagauuagaauauacuuauauuguacuuugauugucucagugaauucaucaacacacacc

SEQ ID NO: 4110956 - RNA, 67 nt, Human
gguggaauuucucauguacaaaaacacuguaacacaagaguguacuucuacaaugagaaguaucagc

SEQ ID NO: 4110957 - RNA, 61 nt, Human
gguggacagggcugugugggacccagagcugagaagggagucaccagcagcagcugccacc

SEQ ID NO: 4110958 - RNA, 70 nt, Human
gguggacaguggaaaucagagugagaguauauggcuguagauucuauaauucuuuuuccauuguaccacc

SEQ ID NO: 4110959 - RNA, 57 nt, Human
gguggacaguguuagcucuggguuccaguuccacaccagguuaaacaaauuucuacc

SEQ ID NO: 4110960 - RNA, 63 nt, Human
gguggacuuugggggauaaugaggugucaguguugcuucaucaacucuaacaaauguaccacc

SEQ ID NO: 4110961 - RNA, 83 nt, Human
gguggagaccgcaagccucucuuuauucccagcuaccgaauucaugguggcuuuuccagaggagaguaucuaaagguuccacc

SEQ ID NO: 4110962 - RNA, 70 nt, Human
gguggagagcuggaugagaggugcgacgaacucacaggugauguucacagccaucaccaagcucuucccc

SEQ ID NO: 4110963 - RNA, 61 nt, Human
gguggagaggccauccuaccaccacggaccucuccaguggccggugggugaccuccccacc

SEQ ID NO: 4110964 - RNA, 76 nt, Human
gguggagcuggggauccugagcugcacugguuccaauuuggggcugugcagagcacagggucccugcagcaccccc

SEQ ID NO: 4110965 - RNA, 75 nt, Human
gguggagcuucccagggccaguucagaggacaugggacagcaccguggucuaaagcccagguccuggacuccacc

SEQ ID NO: 4110966 - RNA, 57 nt, Human
gguggaggaaauagagcucucagcaccacccugcugagcccaguuuucccucuugcc

SEQ ID NO: 4110967 - RNA, 55 nt, Human
gguggaggggccacacucggggccgacuggccgccugguuuguauuuuuaacacc

SEQ ID NO: 4110968 - RNA, 80 nt, Human
gguggaggggcugacaccacccaggcgcagaggcagggcucagggccugcucugcagggagguuuuagcccagcccagcc

SEQ ID NO: 4110969 - RNA, 111 nt, Human
gguggagucucgcccugucacccaggcuggagugcuggagugcaguggcgugaucucagcucacugcaaccucggccuccugaguaacugggauuacaggcgugcaccacc

SEQ ID NO: 4110970 - RNA, 64 nt, Human
gguggaucucagagagcuguguuuuccuccaaucuuggaaggaaggcacccucugaaugucacu

SEQ ID NO: 4110971 - RNA, 72 nt, Human
gguggaugggagaugggcagauaaucuucacucagaucuaaacauggauuauuugugcauaucccauccacc

SEQ ID NO: 4110972 - RNA, 55 nt, Human
gguggauugcccaugacagauuauuugucuaaacuggcuucauuugcaacccacu

SEQ ID NO: 4110973 - RNA, 71 nt, Human
gguggcacagcccagagcucuugacguuuauuuucucaggcuucagugaaccuucuguggcagguguuucc

SEQ ID NO: 4110974 - RNA, 57 nt, Human
gguggcagaggaucaggcucuggaaaucuguggucuuccuccuggucuuuuggcauc

SEQ ID NO: 4110975 - RNA, 61 nt, Human
gguggcaucaccugguaucaagccgcagggggacacuucccaggcucagggcgcugccgcc

SEQ ID NO: 4110976 - RNA, 64 nt, Human
gguggccagugugcaggucagagauuaaacugguuugaucuucaguuccuccauugagacuacc

SEQ ID NO: 4110977 - RNA, 66 nt, Human
gguggccucugcaggccucgacaaggcccagccuccugccucccgaaggccugcacaggcccagcc

SEQ ID NO: 4110978 - RNA, 65 nt, Human
gguggcggccuccccgggacugugcacucuugcaggcggccguauuuccuggggauguggucacc

SEQ ID NO: 4110979 - RNA, 55 nt, Human
gguggcucacgucuguaaucccagcacuuugggaguccaaggcaggcggaucacc

SEQ ID NO: 4110980 - RNA, 55 nt, Human
gguggcucaugccuguaaucccagcaguuugggaggccaaggcaggcagaucacc

SEQ ID NO: 4110981 - RNA, 55 nt, Human
gguggcucaugccuguaaucuuagcacuuugggaggcugaggcgggcugagcccc

SEQ ID NO: 4110982 - RNA, 69 nt, Human
gguggcugcaggaguuauucaaaccuagccugggcagaucuggcugaaauucagaguaaauuccccacc

SEQ ID NO: 4110983 - RNA, 60 nt, Human
gguggcugggagcaacuugggaagggggaaauccccucuggccuuaucuguccaagcccu

SEQ ID NO: 4110984 - RNA, 67 nt, Human
gguggcugguuuuauaagagguuaacugcuucucaguuugagcaagacucauguggcaccaggcacu

SEQ ID NO: 4110985 - RNA, 122 nt, Human
gguggcuguuggaacuggccuaggucaaacacacuugggauuaggggcuaggucacacacacaaaugaugaagcccagcuccauucuuggugagcuuugugaccugggcagauugcuucacc

SEQ ID NO: 4110986 - RNA, 77 nt, Human
gguggcuuaggguugguggcguuggaccugggcagagaucucccuccaggcaggcagcugucaccacucggugcccc

SEQ ID NO: 4110987 - RNA, 76 nt, Human
gguggcuugcucuguggcucccgugccuggccucugcugucaugucaggaggccugggagcuguggaaaggcuguc

SEQ ID NO: 4110988 - RNA, 59 nt, Human
gguggcuuucuaaaccaaaugucuguccugaccccuguuuuggugcuggaaaugccauu

SEQ ID NO: 4110989 - RNA, 58 nt, Human
gguggcuuugcucuguaggacccuccagggcaggguuugugcagaagacaaaguggcc

SEQ ID NO: 4110990 - RNA, 59 nt, Human
gguggcuuuuauguuacuguuaguaucacacuguguacagaggggacauggaagacacu

SEQ ID NO: 4110991 - RNA, 60 nt, Human
ggugggaaggccacugaagguuagugcauucucauacaaaacucccagugccuucccagc

SEQ ID NO: 4110992 - RNA, 88 nt, Human
ggugggaaguggcaguggggagggaggugggucccagggaacguggguuaacuuuggggacacuucucuuuccccgucucuccccuuc

SEQ ID NO: 4110993 - RNA, 127 nt, Human
ggugggacaggagcccagcguguaggggaggaauaaaagcuguggucaggcuuggaccgcgaccuccauggcagccuggccuggcuuugucacgguccuuuaaguuauccugcauuccguucccacc

SEQ ID NO: 4110994 - RNA, 68 nt, Human
ggugggagagaaaaaagcagaggaagacauuuauagaucacucuuuaacucugucauucucuuuaacu

SEQ ID NO: 4110995 - RNA, 58 nt, Human
ggugggagcagcuuaugucaagccagaagggauucucugaaggggagcuguuuaagcc

SEQ ID NO: 4110996 - RNA, 57 nt, Human
ggugggagggucuaugauggguaguggggguagaggccuguagauccuugagcuacc

SEQ ID NO: 4110997 - RNA, 56 nt, Human
ggugggcacccgagacuggaucgagggggagaccuaccagugcagggugacccacc

SEQ ID NO: 4110998 - RNA, 68 nt, Human
ggugggcuggacuucaugcauuccugucauuacuguaggauggaaaugcuccaggaguccaacccauc

SEQ ID NO: 4110999 - RNA, 70 nt, Human
ggugggcuucuugggcaauuucucuagaggucauccaaggugaaacccucugugucuccaagaggccucc

SEQ ID NO: 4111000 - RNA, 93 nt, Human
gguggggacaauaagaaaagaggaggcagaggacugaggaggucagacaacucuugagagagaugccugcucuuuauuuuaugaucccauucc

SEQ ID NO: 4111001 - RNA, 76 nt, Human
gguggggagggaggggagcuccacccucgcgcaccguccgcagaggcugaaucaggaggccccuuccccaaccacc

SEQ ID NO: 4111002 - RNA, 78 nt, Human
gguggggaguggcuggcauggccagugcugggagugauguccacccuguuccuggcccugcugacuccucuccugacc

SEQ ID NO: 4111003 - RNA, 55 nt, Human
gguggggccguggguccauucuguguggacaggggcaagggcucacggcccagcc

SEQ ID NO: 4111004 - RNA, 55 nt, Human
gguggggcugcaagcaguucggaguagucagggcccuggcgcuggaagccucacu

SEQ ID NO: 4111005 - RNA, 88 nt, Human
ggugggggaauggaggccagugaaaguagauucaguuucuaaagaaauccaucagucaacauuuauucaagccucuuaaaucuucacc

SEQ ID NO: 4111006 - RNA, 65 nt, Human
ggugggggcagguacugggaugccucuguggcugguccagaggugacccauaguaccucuucacc

SEQ ID NO: 4111007 - RNA, 56 nt, Human
ggugggggcauauccuauccucccuggcagcaggauaggguggggacguucugacu

SEQ ID NO: 4111008 - RNA, 59 nt, Human
ggugggggccuguaaucccagcuacucaggaggcugaggcagggagaauagcuugaacc

SEQ ID NO: 4111009 - RNA, 101 nt, Human
ggugggguauagaggggucagucaucuucaguacucagguuaaaaggaagcccuuccucucugaaagcuagaaaaugcucuccuaucccuuucacuucacc

SEQ ID NO: 4111010 - RNA, 68 nt, Human
gguggguagaggccagggugcugugacacucuuuuacaaugcauauuacaagcucugccucucccacc

SEQ ID NO: 4111011 - RNA, 58 nt, Human
ggguuucuggucugugugauggagggcagcgugaacccaucacuggagaaggaaaccu

SEQ ID NO: 4111012 - RNA, 61 nt, Human
ggguuuggauguguagugaggggagggccagccuccuccugugcacugggaucacagcccc

SEQ ID NO: 4111013 - RNA, 93 nt, Human
ggguuuggcacaccugguuagggcucugagugggaaagaggguccugaaaccaggcugagcccccagccagagccagagccaaugcuggagcc

SEQ ID NO: 4111014 - RNA, 61 nt, Human
ggguuugggggcagcuggucugguccaggaaccuggcuggaggcaugcaagcucccuuccc

SEQ ID NO: 4111015 - RNA, 125 nt, Human
ggguuuggguuuuucugacaacaacgcuccccucucuaggguccacagggucagccggguccucgaggugccacugggaacucuggagcuaaggucaguggucucugcagggcucccccugaccc

SEQ ID NO: 4111016 - RNA, 108 nt, Human
ggguuuuaauuuagaguuuuuauucccugagguguaagaaauuaaaauuuuauuuucuggggagagugaaccauacuagcucugaauuucaaacacaacuauuaaccc

SEQ ID NO: 4111017 - RNA, 64 nt, Human
ggguuuuagccuagacaacuuuuaaggaagguaaguaccuuagaagucaucuagucuaaaaccc

SEQ ID NO: 4111018 - RNA, 64 nt, Human
ggguuuuccagugaauaaagauaaaguacacaagaauagguacugcauagacacugggauaucu

SEQ ID NO: 4111019 - RNA, 62 nt, Human
ggugguugguucuccuggcaaccagcccccauccugaggcuauccaggaaccccuagcuacc

SEQ ID NO: 4111020 - RNA, 128 nt, Human
ggugguuuuccuguuaucuauguagaggacauauuauuagcuauguuguuccuuggggucuuauuguauuucuuugaagugcuuggcuaaugguuaugucaccucagcuacucuguggaaguccuacc

SEQ ID NO: 4111021 - RNA, 61 nt, Human
gguguaagggacccccugcccccaguggccacaggucgggcagcagaggaucccuuaaucc

SEQ ID NO: 4111022 - RNA, 60 nt, Human
gguguagagguguuugucguuggcuucguguuacccagugcugagacagaccucugcauc

SEQ ID NO: 4111023 - RNA, 79 nt, Human
gguguauagaucugugcccgaguguguggagcuuugaguauagauggucacaaagcucugggguacacaucugcauacc

SEQ ID NO: 4111024 - RNA, 59 nt, Human
gguguauggauaugucaugguggccagaacucuugggcaucaucaccugcuauacgauc

SEQ ID NO: 4111025 - RNA, 89 nt, Human
gguguaugugacucucagugcagcuugacagagaaagugauucaguguuccugguuucuguuugaggcugucacaagucacaacaaacc

SEQ ID NO: 4111026 - RNA, 64 nt, Human
gguguauuagggacugggaacuugguuucacuagcauaagccagcaguccaguccuuagugacc

SEQ ID NO: 4111027 - RNA, 72 nt, Human
ggugucagacuuugcauauccucuugcuggcauaauccagaauauggcugaggaaugacagauguccgcacc

SEQ ID NO: 4111028 - RNA, 61 nt, Human
ggugucaguuuaguugaagaaagacuaagucuaggucauauucugucauugaacugaggcu

SEQ ID NO: 4111029 - RNA, 76 nt, Human
gguguccaauccaccucccuacacccaugggggcugcuccagugucucccccaggaaugggaaggaggaauggccc

SEQ ID NO: 4111030 - RNA, 61 nt, Human
gguguccaucaggcugugcuucuacgagcugugugauggagcauuuucugauguugacacc

SEQ ID NO: 4111031 - RNA, 78 nt, Human
ggugucccucgaggucagaggucccagaagaagcaggcaccuauguucgcugcucuccaagccuccuugagugacacc

SEQ ID NO: 4111032 - RNA, 98 nt, Human
gguguccuggagcaaaugggcaauaacagcaggguuacaggcauugccuuguccugggguugaugucuuugcuguuauccacugaguuccuagacucu

SEQ ID NO: 4111033 - RNA, 70 nt, Human
gguguccuggggcccgggcuuggcccuuguugcagaaggguugaggagccgggccugggcccugcgcacc

SEQ ID NO: 4111034 - RNA, 66 nt, Human
ggugucugcuucccuccagcuguccaggguuuucagcugggucucagaaacgaaguucaggacacc

SEQ ID NO: 4111035 - RNA, 68 nt, Human
ggugucuuuaaguuguaacagauucuaacauaauuugacuuguggguagaaguuacgauggguaugcc

SEQ ID NO: 4111036 - RNA, 75 nt, Human
ggugugaagcagcagcuggggacaguucagcccggcuuaggcaugaccucuguuuucaucugccugcgaggcacc

SEQ ID NO: 4111037 - RNA, 130 nt, Human
ggugugagccaggcagccacaguggucagcaaagagaagugggcagugcgcucggaugcggcucagggcaaggggcccggcgcuggcacagcccgcucccacugccccgcacaggcacgcggcucacacc

SEQ ID NO: 4111038 - RNA, 73 nt, Human
ggugugaggcaagggcauacuaggcagagggaacagaaacuccagaggccuaaggauaugcuuugcuuggccu

SEQ ID NO: 4111039 - RNA, 59 nt, Human
ggugugcacgaaggaccagcagcagaguggcacugccugaaggugucuuugugaacauc

SEQ ID NO: 4111040 - RNA, 68 nt, Human
ggugugcugaggcuagaccuggaaguguagcacaucacuuccacuuacauucuaguuaucaggccacc

SEQ ID NO: 4111041 - RNA, 82 nt, Human
ggugugcugggagucaccaggagcaagguggugaaggugaguuuucuccugagccccuccugggacucauuagcaccucacc

SEQ ID NO: 4111042 - RNA, 58 nt, Human
gguguggacccgcgucuggagaacgagcugcaucgccaaggcugcugcgggucgcacc

SEQ ID NO: 4111043 - RNA, 62 nt, Human
gguguggccuccugucccaggcugaggagucuggacucugagcuccaugcaggaggcuaacc

SEQ ID NO: 4111044 - RNA, 87 nt, Human
gguguggggacaggagcccucaccgccugaccaggugcccagcgccauccaggcugugggugagcucccaggccucugccccaccuc

SEQ ID NO: 4111045 - RNA, 78 nt, Human
gguguggggcuggccuaggcaggcugagggcuauuucuccuacuguggcccaggggcucuugguguugguccugcaac

SEQ ID NO: 4111046 - RNA, 102 nt, Human
ggugugguggugggcgccuguagucccagcuacuugggagucuaaggcaugaaaaucacuugaaucuaggaggcggagauugcagugagcugagaucacacc

SEQ ID NO: 4111047 - RNA, 96 nt, Human
gguguguaguuguugaaaggauuagaaucauaccucuaggaacaacagggcucuguguucaacugugaugguuuaaucuucacauacucauagacu

SEQ ID NO: 4111048 - RNA, 69 nt, Human
ggugugucagagcucagagaaguaaggcugggaggcggggaggccacauuaggcuggacuuuguaggcc

SEQ ID NO: 4111049 - RNA, 76 nt, Human
gguguguccugccugcaaaaugggacaagcugcgcgucaacgcugcugucccuugaguaggaacggaggccucgcc

SEQ ID NO: 4111050 - RNA, 58 nt, Human
ggugugugaggagucacuuaguugauauacauuaaguuucugugacucuuggcauacu

SEQ ID NO: 4111051 - RNA, 59 nt, Human
ggugugugguuuugauacagucuguggcaucagacagcaaaaauacaaagccauaaacc

SEQ ID NO: 4111052 - RNA, 125 nt, Human
gguguguguuuuauuuugcaguguuaguuuugaccucauuaugcucauuaugcuguuguaaggcuaaguaugucaugggucaaaaugaaggcaaaauagaccuuucucagcauuaaagcacaacc

SEQ ID NO: 4111053 - RNA, 91 nt, Human
gguguuccagugccugagacacagcagauauucaaucagcccugcugcguuaaaucagaucugcugccaugcuucguagcauuggaguccc

SEQ ID NO: 4111054 - RNA, 55 nt, Human
gguguuccuggacagcaagugagugacuugcucacaggcgguaauucagggaccc

SEQ ID NO: 4111055 - RNA, 58 nt, Human
gguguucuucugcauggugacugagaaugugagccucagaaugaaauguaagaacacc

SEQ ID NO: 4111056 - RNA, 82 nt, Human
gguguugcuucuguguguuuaugucuggguguuuacaugugucuguaugugagugucuggucauggcaggcagcuguagccc

SEQ ID NO: 4111057 - RNA, 57 nt, Human
gguguugggcucacugguccuuucuguauaagcacaguagggccugcagcucaagcu

SEQ ID NO: 4111058 - RNA, 96 nt, Human
gguguuguaaggauuaacuaguguguauaaugcuuugaagauuaaaagugcugagcauuauuagugaguauuacauaacuaauugucuauaauacu

SEQ ID NO: 4111059 - RNA, 59 nt, Human
gguguuuaugagugaccuugucuuguccucugaauuauggacaggcagcucagaacauc

SEQ ID NO: 4111060 - RNA, 63 nt, Human
gguguuucccaacagucucucucaaaggaacugcccuuugagaagcugucuugggcucgagcc

SEQ ID NO: 4111061 - RNA, 58 nt, Human
gguguuucuugauaaagcagaaaaucagcaggugcuucuuuucugugccaagaaaacu

SEQ ID NO: 4111062 - RNA, 79 nt, Human
gguguuugcaguuuauguuccugcaguacuguguacacacaacugaaaaucaauaggaaguuaauggaaagcaaauacc

SEQ ID NO: 4111063 - RNA, 129 nt, Human
gguguuugccaggcuuuggcaugugauuuuggggugcagcuaggaagguucaaaagaguuuugaggugagcagaaucuaagucagcacuccugaggaucacgggccuuggagaguccagggcaaacucc

SEQ ID NO: 4111064 - RNA, 60 nt, Human
gguguuuucauucuuggcugcuggaaaauagccaggagaccaagaaaggaugaggaucuc

SEQ ID NO: 4111065 - RNA, 94 nt, Human
gguuaaaagcacagccuuugaagucgagcugucuggauuuggauccucccuucacaauucaccagauggguuacuucaagcaagcuguuuaacc

SEQ ID NO: 4111066 - RNA, 88 nt, Human
gguuaaacauggccgggugcuuuggcucacgccuguaaucccagcacuuugggaggacaaggcaggcggaucacgaggucaggagauc

SEQ ID NO: 4111067 - RNA, 68 nt, Human
gguuaaagcugugaauuuuaugcuaguguaaaauagaaauuacauaauaaaaugcauagcugcauacc

SEQ ID NO: 4111068 - RNA, 62 nt, Human
gguuaaaguuaggagagagagagagagagcaacuguuacuuuuccagucccuggauuuaacc

SEQ ID NO: 4111069 - RNA, 72 nt, Human
gguguggcucuaguucuccugaaauguuuggucuugaacuagaagcaauguaggggagacuuggccuuagcc

SEQ ID NO: 4111070 - RNA, 88 nt, Human
ggugugggcacuagguaaguggguggcaaccggcucuuugggaccauuggugcugaccuuugccuggucaccugccugugccuaggcc

SEQ ID NO: 4111071 - RNA, 74 nt, Human
ggugugguaaucuuuuaugagcguucugacagcauccuucugucauauguugaugaaagagacaaagaaacacc

SEQ ID NO: 4111072 - RNA, 102 nt, Human
ggugugguggcacacgccuguaaucccagcuacucgggaggcugagacaugagaacugcuugaaccugggagguggagguugcagugagucaagaccacgcc

SEQ ID NO: 4111073 - RNA, 102 nt, Human
ggugugguggcagacagcuguaaucucagcugcucgggaggcugaggcacaagaaucgcuugagccagggagguggagguugcagugagcugagaucacauc

SEQ ID NO: 4111074 - RNA, 89 nt, Human
gguguggugguaggcacuuguaguucuagguacuccagagcacuauuugaguccaggaguuugagacugcagugagcuaugaucacgcu

SEQ ID NO: 4111075 - RNA, 90 nt, Human
gguguguaauuugggcaauuguagcagggaucagaauacaccauuaggcagguuguucuuguugauuuuguuaugccuauguuaugcauc

SEQ ID NO: 4111076 - RNA, 59 nt, Human
gguguguguggauuagcaugcccugacuacucugggucugcuggugacacggucacauu

SEQ ID NO: 4111077 - RNA, 69 nt, Human
ggugugugugugugcgugugcucaugcaugcacaagugaauuugcauacacaagcauacauguaccacc

SEQ ID NO: 4111078 - RNA, 79 nt, Human
gguguuaauggcugaagacauccuaauauguauggcccuuugauaacauauuuuacaggagccuuuuaugccuuaaccc

SEQ ID NO: 4111079 - RNA, 61 nt, Human
gguguuacucagcacugcucugcucgguggauggagcaggguucucaguuggugcuucacc

SEQ ID NO: 4111080 - RNA, 83 nt, Human
gguguuagcauuugcucugccucacauuggcugugugacccugaguacggugcauggccucucugggcuguaaugauaauacc

SEQ ID NO: 4111081 - RNA, 64 nt, Human
gguguucaaaugaacacaugcauuuacuaaauugccaccugugucuuuguuccauuugaccacc

SEQ ID NO: 4111082 - RNA, 64 nt, Human
gguguuccccuuaccucuuggccccccaaaacagggacagacauagauggugggcuggaacacc

SEQ ID NO: 4111083 - RNA, 80 nt, Human
gguguucugggaugauggacaaagcauuggugaguauaaacuuuccagggucccuguacaucacugagaaaaaucauacc

SEQ ID NO: 4111084 - RNA, 59 nt, Human
gguguugaauggugucuguuggauugaauugaguuccuaaucagaaguccuucaaggcc

SEQ ID NO: 4111085 - RNA, 81 nt, Human
gguguugagggugagguuugugugugauuucgugagaccucucacccauaccucuaccacacaugacccacuuuuaccgcc

SEQ ID NO: 4111086 - RNA, 109 nt, Human
gguguugcgauauuucucuuuagaagaaaauaaccuguuucagacauuuguuucuaauuguuugagcugcaaaugaaaacuagguuacuagugagaaauaugggacauu

SEQ ID NO: 4111087 - RNA, 126 nt, Human
gguguuggaauugcaggaguuaccaaauagguaggcagccagguccccucauggcuccuuggcaauucaaacccaggugcucacaggcuggccugaacugccuugcuugccugcuucuaucucacc

SEQ ID NO: 4111088 - RNA, 58 nt, Human
gguguuggauucugagcauuuaaagcauucguuuugaaaggccuguuuauccagcauc

SEQ ID NO: 4111089 - RNA, 61 nt, Human
gguguuguuuuccauaguuugguucauuuuuauugcugagucaaauucuguugaauacacc

SEQ ID NO: 4111090 - RNA, 110 nt, Human
gguguuucaaaauuguuccuugagaaagacagacauuccuaauuagaagaaucggcucuaagugacuuaguuauuuuuguccuccaagaagcaucuuuauuugaauuucc

SEQ ID NO: 4111091 - RNA, 60 nt, Human
gguguuugccaccugacggguccuccaguuuguccuuuugguuucugucugugguccacu

SEQ ID NO: 4111092 - RNA, 59 nt, Human
ggugaagggugucauggcauuuugggaauuggaguccugugaccagacugcccuuagcc

SEQ ID NO: 4111093 - RNA, 100 nt, Human
ggugaaguggagaaguugcauguuucauuggcuuucuuuugugaaaauugauuuucauuuuauuuugacagaagaggcccuaaaaaucuucuuuuucccc

SEQ ID NO: 4111094 - RNA, 91 nt, Human
ggugaaguuuucaggucugaugguauuuuaugucaaaauaacaagucaugagaauugaugaaaauucuaugcaggccaggaauccagaacc

SEQ ID NO: 4111095 - RNA, 82 nt, Human
ggugaaucuauaccauuguuucuaccagcugucucuggagugaguauugggauuggaagcggugguggucaaaggcuuuauc

SEQ ID NO: 4111096 - RNA, 91 nt, Human
gguuugguauucugucacuagcuucucugauuuauacuucugccuauaagagcuaagagucuagaaaggcuuccagagaguaaccuaaauc

SEQ ID NO: 4111097 - RNA, 93 nt, Human
gguuuguagaggaccaaaaaugucaggagagugaggggagaggcucuuacucugagucuagauuccuccugcauccuguggucccuaaaaauc

SEQ ID NO: 4111098 - RNA, 57 nt, Human
gguuuguggaugcaaggcgcugcgugaguacucagugcuacgguuaccauauaugcc

SEQ ID NO: 4111099 - RNA, 77 nt, Human
gguuuuacuaccccaggcacacugucuacacugaguaacuagaacuaagcugaggaaguguugcugagcggagaacc

SEQ ID NO: 4111100 - RNA, 71 nt, Human
gguuuuauuugccugcagcucugguuaaaaagaauuaaaggggccccuucagggcuuagggaaauagugcu

SEQ ID NO: 4111101 - RNA, 70 nt, Human
gguuuucacagcuggguggcagagucucacuuccuuuucaagguggauuacuccagcagcugugaagauu

SEQ ID NO: 4111102 - RNA, 57 nt, Human
gguuuucaguuugugagcucugaauccacacaaaaacaggacugcauucugaaaacc

SEQ ID NO: 4111103 - RNA, 61 nt, Human
gguuuucauuauuagugcuuuguuuuagaaaaaguccaaaacaagcccuaaugaagagucc

SEQ ID NO: 4111104 - RNA, 116 nt, Human
gguuuucauuuuauucuucaugugacuuuaguauaaaauguauaacuuuauuauuuaacauaaaaugugcaguuuuuaagcugcuagguuaaaugaguuuccaaaauaugaauucc

SEQ ID NO: 4111105 - RNA, 80 nt, Human
gguuuucccuugggcuuuaugagauugagaucuaguggcuuaugaaacuauacuuaaucagauaagucucacacuaaacu

SEQ ID NO: 4111106 - RNA, 64 nt, Human
gguuuucucugagaugccuuucugcccugauauuuugugguucuagaagcauucaaagaaaacu

SEQ ID NO: 4111107 - RNA, 81 nt, Human
gguuuucugaagcucuccaguuuguuucuccugauguguagguuuuuagagugaaauauuguacuggagauguugaaaacc

SEQ ID NO: 4111108 - RNA, 86 nt, Human
gguuuucugacucuuacuagaauuuuugagauuugaagcaaaauauagauuuagaugcuuaaguuuucaguguaccuaggaacacc

SEQ ID NO: 4111109 - RNA, 88 nt, Human
gguuuuggggguuaggacagggacaucuuuuugaggccaccauccaacucaauacacaugccgcuguucuccucuucccccaacagcc

SEQ ID NO: 4111110 - RNA, 69 nt, Human
gguuuuguugagguucacaggcuaucacaguuccgcaaagggcucagguguguguggaccagaacuucc

SEQ ID NO: 4111111 - RNA, 79 nt, Human
gguuuuguuuccuagaguuuuaaguacuugaaaaauauacuucuauugcauuaaggccauugaaauuuggaacguugcc

SEQ ID NO: 4111112 - RNA, 57 nt, Human
gguuuuucaucagaguggccacggaugccuugaacugugagccugcuguaggaggcc

SEQ ID NO: 4111113 - RNA, 81 nt, Human
gguuuuuggugugaaugagaaaguuaaucaucaugagagaauucagcucagagagcagaacuuuuuuacauaccagaugcu

SEQ ID NO: 4111114 - RNA, 90 nt, Human
guaaaagaauauaauaugcuuuuuuugccuaauggaacuuuagaacuucguuuuccaccagagggcaaaaugaagcuuauauaaguuuac

SEQ ID NO: 4111115 - RNA, 77 nt, Human
guaaaagagcugggccagccugaagccuuguuacugaaagacauuucaucuggcaguguauagguggcuccuuguac

SEQ ID NO: 4111116 - RNA, 71 nt, Human
guaaaagccagcuucuuuacgguggcauccaaggccuuuaugauguugccucccugaacugugcuuucuac

SEQ ID NO: 4111117 - RNA, 88 nt, Human
guaaaauaagcgaagaucaaugguugaacccugucaugagugggguauucgaucaugcagguuuccagccagauuuuuagaaauuugc

SEQ ID NO: 4111118 - RNA, 56 nt, Human
guaaaauagaauaacguggcuauccuuaaagaugucacguugcuuuucuguuguac

SEQ ID NO: 4111119 - RNA, 92 nt, Human
guaaacaccauuguccaggcuuucauuccagagggagaugucuacuuugcuguuuuucuuugugugaagacaaugacagugguugaaauuac

SEQ ID NO: 4111120 - RNA, 67 nt, Human
guaaacagccaucaguaaagacagcuuguauacaauucugaaaaggcggucauugaugguuguuaac

SEQ ID NO: 4111121 - RNA, 60 nt, Human
guaaacaggaauguggucauggccuuuauuccucaacccugacuauaaauuuucuguuac

SEQ ID NO: 4111122 - RNA, 109 nt, Human
guaaacugaaaagcauucuguggggacgggcuuuuggaagacuucuaugcucuugaugaaagcacaaguucuaacaggaggucucuugcagagcuggacuucaggaagc

SEQ ID NO: 4111123 - RNA, 85 nt, Human
guaaacuuucuacauugauguaaacuuugauuucauguaaacuuucuacauugauccaaaauuugaaucugugaggaagguuggc

SEQ ID NO: 4111124 - RNA, 65 nt, Human
guaaaggguucccucuccccggucgcaggaagacgccugagggggcgcucggagggauccccugc

SEQ ID NO: 4111125 - RNA, 82 nt, Human
guaaaguaacaaagagaacaauaauucuucucaggucccugauaucucagaggaugcuguucuuuaauacuuguguuuuugc

SEQ ID NO: 4111126 - RNA, 85 nt, Human
guaaagucaacaaagccagcaggugcagaauuccacaguucccuuaauuguggaauucugcaccuggugauuuuguugauuuuac

SEQ ID NO: 4111127 - RNA, 55 nt, Human
guaaagugcuuccuaacccagagcugaauguauuugacucuggaaagcauuuuau

SEQ ID NO: 4111128 - RNA, 62 nt, Human
guaaaguucuguggcuguuaucccacauuguuguggccacaauuagcugauagcuacuuuau

SEQ ID NO: 4111129 - RNA, 61 nt, Human
guaaaguuugucuuucucagggcaaguacauuccuucaugccagagaagugcauacauuau

SEQ ID NO: 4111130 - RNA, 74 nt, Human
guaaaguuuucuuagauauguugaugaagaguuaguccuucuuugauuuuacaugucauaucuauuaguuuuac

SEQ ID NO: 4111131 - RNA, 101 nt, Human
guaaauagacacaaaucuuuucaguggguuuauuucaugugguuuugccuauucauucaauuagcauuuaauagcucaucaagaagaucuguguuauuuac

SEQ ID NO: 4111132 - RNA, 59 nt, Human
guaaaucagugucauuuuagaaugagauacucagcuugcuucuaaagucacugaauuac

SEQ ID NO: 4111133 - RNA, 83 nt, Human
guaaauccauaguguuuuacaacagaauuacaugguaagcuucucuguacuuuaaaucaauguagauucacaauggguuucac

SEQ ID NO: 4111134 - RNA, 68 nt, Human
guaaauccuuuggaggacaugaugcuuuggaaaagaagggaaaaaggagguauccccaaaggauuuau

SEQ ID NO: 4111135 - RNA, 71 nt, Human
guaaaugccaaggagagacuguuacuaccaggcuuauuuacuagcaaucuagcauuuuucuaggcaucugc

SEQ ID NO: 4111136 - RNA, 59 nt, Human
guaaauguguggccugggagaauguguuggauaauucucaucuuagguuguacauauau

SEQ ID NO: 4111137 - RNA, 91 nt, Human
guaaauuccaugaaggcagugauuuuguuuggcuuauuuacaucuauuucucuaauaccuacaauacugccugucacagaauggaguuuau

SEQ ID NO: 4111138 - RNA, 56 nt, Human
guaacagaagagcaggcagcccucaguuuccgaaaggguuguauucucaauguuac

SEQ ID NO: 4111139 - RNA, 94 nt, Human
guaacagacaaaaggccugaggagcaggguggcuuacucggcugugaaacgacaccugggcugucacgccccugcaccucuggccagucagugc

SEQ ID NO: 4111140 - RNA, 59 nt, Human
guaacaguuuacuggccuugccguucucuuaagaggcacuaaugguaguggacuggugc

SEQ ID NO: 4111141 - RNA, 83 nt, Human
guaacauuaagauggcggaacagugaaggauuuuucagcuuugucaaucacuuguuuuaucugucaauagauuuccauguuac

SEQ ID NO: 4111142 - RNA, 91 nt, Human
guaacauuuguauuucguuuuuaguauaguaugugcucaaaguguaguacucuguaguaugguacuuauuuaaacgaaucacucauguuac

SEQ ID NO: 4111143 - RNA, 78 nt, Human
guaaccuacuucuuuccagaauggcauuauacuaaagcguguaaaaccauaaggcuggaaggaaauuugagugguuau

SEQ ID NO: 4111144 - RNA, 81 nt, Human
guaaccucaaagacuuccuccuuuacauaucuggugguuaaugcugggaccagauaaagggaggucccucuguuguuuugc

SEQ ID NO: 4111145 - RNA, 77 nt, Human
guaacggaucuugagguggugacauuauccuugauuaucuuaauaagcuugauguaacuaaccacaaggguccuuau

SEQ ID NO: 4111146 - RNA, 105 nt, Human
guaacguggagaaggugcccaguaauucucaguuggaaauagaaggaaacaggucaggaucugucuuguauuccccuaucucuaaauacagguaucccucguuac

SEQ ID NO: 4111147 - RNA, 80 nt, Human
guaacugguccccaugggguucagauuugugaucuuggccucauuaucacacuuuuguaaccaucagaccuaauagauac

SEQ ID NO: 4111148 - RNA, 82 nt, Human
guaacuucagaugaccuggguuggaguucugauccuagaacuuauuagucagaauucugaccuugggucaucauagagucac

SEQ ID NO: 4111149 - RNA, 71 nt, Human
guaacuucagucagacgucagccugcaucguaucgcgugugcacagguggccuguguuuugucugaaguac

SEQ ID NO: 4111150 - RNA, 59 nt, Human
guaacuucuggaaaugcaucugccauuuucaugguggucaggcacacauccagggcagc

SEQ ID NO: 4111151 - RNA, 57 nt, Human
guaacuuggucauuucugagacuuccugaaguagguuuuccagacuguccaggcuau

SEQ ID NO: 4111152 - RNA, 83 nt, Human
guaacuugguuguccagaagagaucacaguucuuggcaaacauguuuacguuacucuaggauguggcuuuggacagauguuau

SEQ ID NO: 4111153 - RNA, 104 nt, Human
guaacuuucauucucacauuugcuguuucaugguuguuugauggcagcugcaccuuuaggcaugcuguuggccagaaagaggagaaagaggcaaugacuguuac

SEQ ID NO: 4111154 - RNA, 94 nt, Human
guaagaaagguuauuagcuuuugguuauaaggugccccaaacuagucuguuuucauacaaguuuucuucauuuuguggccaugauccaucuugc

SEQ ID NO: 4111155 - RNA, 130 nt, Human
guaagaauguuucccuuggaagaagcccugggguuccagucugaaacuacaguugaaagaaggagaggaccagcugaaccuaccuggggccccauggaugcuucuucagcccaaggaaacaauuucaugc

SEQ ID NO: 4111156 - RNA, 130 nt, Human
guaagacacaauuuuagaguguguaucuagguuguagaagauuuacugaguuccaacugcuuugggcaagcacuggauugggaaaguacuucacauauauuacuccauaucacuuucaaaacaacuuuac

SEQ ID NO: 4111157 - RNA, 83 nt, Human
guaagagaucauggacugaguugggaagacuggcuuugauaguucuuagcugggcaaacuaggcucagucucuggucuguuac

SEQ ID NO: 4111158 - RNA, 67 nt, Human
guaagaggaguaaguguuaagacuagagccagacugccuggguucggaucuuuacuuuccuacuuac

SEQ ID NO: 4111159 - RNA, 112 nt, Human
guaagcaaagaugguggaaguauuuauuauuauaaagugcaugaccuuagagguuaucuguugccaauguuaucuacacuuuauauaagacuacugggccuaauuuguggac

SEQ ID NO: 4111160 - RNA, 55 nt, Human
guaagcauaagauacaugagacaguccucaucuauugucuuauuccaguguuuac

SEQ ID NO: 4111161 - RNA, 59 nt, Human
guaagcuggacagggcugaauacaauuguaugauuccuaauuagagcucuuucagcuac

SEQ ID NO: 4111162 - RNA, 86 nt, Human
guaaggacguuggcuuuucaucugaaauagagauccaguagaggguuuugagcagagaaaggacaugaccugacuuauguuuuugc

SEQ ID NO: 4111163 - RNA, 71 nt, Human
gguuguacuagagcaguguuuuccaauagaauguuuagugaugauggaaauguucuguaucugcuauagcc

SEQ ID NO: 4111164 - RNA, 65 nt, Human
ggugacuucagucucugccagcuggagcccugucucccaguagccaguggcaggggcaguacgcc

SEQ ID NO: 4111165 - RNA, 83 nt, Human
ggugagaaacugaauaucccgcuaugcaaaguacaaacaagcucucugugaaaaugcuuuguuauauggggauucuucucacu

SEQ ID NO: 4111166 - RNA, 80 nt, Human
ggugagaaguuugucaucugauguggucagaucagagcuuugucgaguccaggccacauggauggcgauacuuacaagcc

SEQ ID NO: 4111167 - RNA, 102 nt, Human
ggugagagaggcgccuagagcacaaauuuuaaggaggcaagaccacgaccccgaccgugagcgccugcuuaacauuugcuccccaggcgcuucccacucccc

SEQ ID NO: 4111168 - RNA, 60 nt, Human
ggugagagauugauuguagcggcagaagaugaauuugcccauagucucuuucuuucuucc

SEQ ID NO: 4111169 - RNA, 56 nt, Human
ggugagaggccaccccgcccgcccucuguggccgccgggcuggccgggcccucacc

SEQ ID NO: 4111170 - RNA, 74 nt, Human
ggugagcaggacuuuaaagagacgcggcaugcccaggguuucauagaugcugccuuuguggggucacuguuccc

SEQ ID NO: 4111171 - RNA, 56 nt, Human
ggugagccuggagucuugcugguuaucaaauguuaggagucacucagggcuucauc

SEQ ID NO: 4111172 - RNA, 60 nt, Human
ggugagccugggugugcucagcugcaggauggcagcuggccagcaccuccaggucauacc

SEQ ID NO: 4111173 - RNA, 56 nt, Human
ggugaggggcgccucugcccagccgccccuacugggaagugaggagccccucugcc

SEQ ID NO: 4111174 - RNA, 56 nt, Human
ggugaggggcgccucugccuggccgccccuacugggaagugaggagccccucugcc

SEQ ID NO: 4111175 - RNA, 56 nt, Human
ggugaggggcuccucugcccggccgccccuacugguaagugaggagccccucugcc

SEQ ID NO: 4111176 - RNA, 67 nt, Human
ggugagggguggggugauggugauugggggcugagguuuaccacuucaucagugcuccauuuucacu

SEQ ID NO: 4111177 - RNA, 56 nt, Human
ggugaggugucuagaucuaccaguagaucccgauuugcagguuugagacuccuacc

SEQ ID NO: 4111178 - RNA, 73 nt, Human
ggugagugccuggccuggccacuccccagaaccccuugaccaguggccagcugucagcacccuuguacccacc

SEQ ID NO: 4111179 - RNA, 122 nt, Human
ggugauagcuuuuggguagaauuuugaguucuuacuggaauaaacgaucuucagcacuucucugugaaaugaagggcuuguucugggaccugaaaugcuucaaacccugugcaguuguugcc

SEQ ID NO: 4111180 - RNA, 96 nt, Human
ggugaucaccuuagcuguuuguucauauuuaacuaagauaggggccuuaaaauuggcuguccuguaagcauggguagaacguguugagugguugcc

SEQ ID NO: 4111181 - RNA, 55 nt, Human
ggugauccaccugccuuggccucccaaagugcugagauuacaggugugauccacc

SEQ ID NO: 4111182 - RNA, 79 nt, Human
ggugaucugcguucagcuguggggcagccggccauggcucauggagguggcaucugacagcugacugagccagggagcc

SEQ ID NO: 4111183 - RNA, 67 nt, Human
ggugaugaguuuguauuuuuggugucuauauuugccaauagccuuucaugcaaacucacaaaauacc

SEQ ID NO: 4111184 - RNA, 124 nt, Human
ggugaugcaagcacaccuuccuucuucaagaguucaucuugaguuccuaaccagcagagaaacaauauuauauuucuuuccucugacugccuaggagagacaguacucuucaguuugcauuccc

SEQ ID NO: 4111185 - RNA, 85 nt, Human
ggugaugcauccccgcugcaccacagccugaggcagccacaugggugggggugugugugugcacgcguggguguguguuuguacc

SEQ ID NO: 4111186 - RNA, 107 nt, Human
ggugauggagcugcacuuggccaguggaaagaggaggaacucucaagccugugucuggauuuucaggcuccuccucuuccucuccauacacgguuccuguuuucacu

SEQ ID NO: 4111187 - RNA, 66 nt, Human
ggugauggcucccaugggcauaugucaucauuugaucuaugguucucauuggagucauaaaucacc

SEQ ID NO: 4111188 - RNA, 57 nt, Human
ggugauuaauacccuguuaacaggaugacagaauugucuugugcaauauuaaccacc

SEQ ID NO: 4111189 - RNA, 129 nt, Human
ggugauugaaucauggggguggguuuuuuuguuuguuuguuuugagauggagucuugcucugucgcccaggcuggagugcaguggcgcgaucuccgcucacugcaagcuccgccuccuggguucacacc

SEQ ID NO: 4111190 - RNA, 84 nt, Human
ggugauuuacauuucaugcccuuucaggaaggaguaaccauucuaauacauccuucucaaagagugcauguuuaguggaacauc

SEQ ID NO: 4111191 - RNA, 99 nt, Human
ggugcaaaauguaagggggcacucacuuugagggucgugcagguucaggaucaguacugacacaacccugagaaugagugucuccuaaaauugugugcc

SEQ ID NO: 4111192 - RNA, 77 nt, Human
ggugcaagggcacaggccacaguggagucucugggucuuccccgggugacuuugcuguuggcucugggccccacacu

SEQ ID NO: 4111193 - RNA, 99 nt, Human
ggugcacggcucucuggcccugcaggcucagacuggagugcccgugagcauccugggagcacucucugaagcccugaggggagcagcaggcucuucacc

SEQ ID NO: 4111194 - RNA, 83 nt, Human
ggugcagaggcuuacacuuaaaaacagauccagcaggaggggugggagcguuccuguuacuguuugugaguuucuuuugcacu

SEQ ID NO: 4111195 - RNA, 56 nt, Human
ggugcagcucaggugugccaucacucuucuaguugagggcacccccgcugccuacc

SEQ ID NO: 4111196 - RNA, 69 nt, Human
ggugcaggaacgccaguagacugaaccuuucacgacgugaauaucagaauccagcuguugcuccacacu

SEQ ID NO: 4111197 - RNA, 112 nt, Human
ggugcaggagcauuguaugcgaggcacuuagacuuucccauggcucauauuuuaaaucuagaaaagcucuaaggccucucccagcagcaagggcugagauuccaccuguacc

SEQ ID NO: 4111198 - RNA, 66 nt, Human
ggugcagggagaggcaggcccccaaacacagggggcuauugugccccucccaggaacacaggcacc

SEQ ID NO: 4111199 - RNA, 73 nt, Human
ggugcagucuuuaucccaugaguauguuagucuucauauaucacuaaguccuuugggaaaaaugacuacuacc

SEQ ID NO: 4111200 - RNA, 66 nt, Human
ggugcagugggccggaggccaggggagcccguguaggggaaccgccuggccucuguucagugugcc

SEQ ID NO: 4111201 - RNA, 96 nt, Human
ggugcauccugggaauauccaggugaaagugugagauuuaccuagaauagcuucugggccucugggguuuucacgcugucucuggugaaggugucc

SEQ ID NO: 4111202 - RNA, 60 nt, Human
ggugcauggcaggguuggagcccaggucccucuggguccagaguuuucccgcccugcauc

SEQ ID NO: 4111203 - RNA, 72 nt, Human
ggugcauggcuauucuaacucacauguuauuaacccauagauuuauuagugugauuugaaauaccauccacu

SEQ ID NO: 4111204 - RNA, 63 nt, Human
ggugccacacuagagauuguucuguguauacccaauacagauuuuaaauuuguaguugacacc

SEQ ID NO: 4111205 - RNA, 87 nt, Human
ggugccagcacaaaacaagguacacaguaaugguuagaaaugauuauuauuguuauuaucuacugucuauuauuaucuguugguacc

SEQ ID NO: 4111206 - RNA, 82 nt, Human
ggugccauauuuagcagcugucagaaguuggaaucuggcaagaucaacaacuuuugaauagcucaaaauucgcuaaaguccc

SEQ ID NO: 4111207 - RNA, 69 nt, Human
ggugcccacaacccucagccugagcaucugugugguagcugcagcagcucaguucugggagggggcauc

SEQ ID NO: 4111208 - RNA, 56 nt, Human
ggugcccaccugucuuccuggauuuuguaugugaccucccuaggcaggagggcacu

SEQ ID NO: 4111209 - RNA, 61 nt, Human
ggugcccagcuaccauucagugacuuccauuaguaaaaguaagaaggggaagguggguacc

SEQ ID NO: 4111210 - RNA, 62 nt, Human
ggugccgcugcagagcauacugcucaugaagaugaguggcauggccuugcuguagugguacu

SEQ ID NO: 4111211 - RNA, 68 nt, Human
ggugccuggacacagggggauguguggacggcuugggcagaccagccuccggccucuggugcaggccc

SEQ ID NO: 4111212 - RNA, 128 nt, Human
ggugccuggccugaugggaggugggcacaucacacagagcauuaggggccauguguaaggcucgguucaaauucaaugcucugugugauguccagcacaucucucuaccucucagggccuuggucacc

SEQ ID NO: 4111213 - RNA, 73 nt, Human
ggugccuggggcaugcaaaugugggugaccuucgucucagguagggacccucagcuuggaugucauggguacc

SEQ ID NO: 4111214 - RNA, 59 nt, Human
ggugccuugaggucccaaacccacugaggccacccacagugagcaaggcccagggcacc

SEQ ID NO: 4111215 - RNA, 75 nt, Human
ggugccuuguacagagaggcauucggugaucccaccgugaucccaccguucuucugauugccuucugcaaggucc

SEQ ID NO: 4111216 - RNA, 109 nt, Human
ggugcgcuacguuaggguucucuggugguuaguuccuuuggauaucuuguguugaaaugagggauuaaucagguguuuugucuaugagugccauaagacuuggugcauu

SEQ ID NO: 4111217 - RNA, 66 nt, Human
ggugcguauggaugcuggaagaucauuuucuccuggagagacaucucccaugcauuuuuaugagcc

SEQ ID NO: 4111218 - RNA, 55 nt, Human
ggugcuaguuggcuguguugcuuagcuacccaugaccacacaggcugacagcacc

SEQ ID NO: 4111219 - RNA, 103 nt, Human
ggugcuauguguauuugauuuuuguugugaaaguugcauucacugugucccuuuauuugacaucagcaagauguaauuucuauaaaccaauuaaugaugcacc

SEQ ID NO: 4111220 - RNA, 91 nt, Human
ggugcucaccccagguguuuccucacaagcuuuuccucagacgucuugucucuucccuuugcggaguaaggcucagaggaaaugccucacc

SEQ ID NO: 4111221 - RNA, 59 nt, Human
guaaaaggauuagcaggaugggcucagugggaaaggaggccccugugggauccuguuac

SEQ ID NO: 4111222 - RNA, 100 nt, Human
guaaaaguccuaaguagugcagacggaguaucuuguacauaaggagugcuuccuucagcaaaaauguauugauguccagucugagccagggacugugugc

SEQ ID NO: 4111223 - RNA, 66 nt, Human
guaaaaucuagcugcaugcuucuauuugcauauuauauacagacaaagagcaugcgguaauauugc

SEQ ID NO: 4111224 - RNA, 65 nt, Human
guaaacaaaggacuggauauuaaagagugaaauaagucacaaauuuaguaacuaguaccugguac

SEQ ID NO: 4111225 - RNA, 68 nt, Human
guaaacaguagucacuucuauuaauggcucagaugacugggccuguaauuucauguguuauugauuac

SEQ ID NO: 4111226 - RNA, 72 nt, Human
guaaacccaggguuuugucuuccccauuuccaucccacaaggccuugggggaagguuuguccugagguuugc

SEQ ID NO: 4111227 - RNA, 99 nt, Human
guaaacgccuugagccuugccugaauuuaucugaaugguggaacagaaaucauuuagggcucuauucuaauggauucugggaaguguuuuuagcuuugc

SEQ ID NO: 4111228 - RNA, 64 nt, Human
guaaacugcacaagggugcauagcuggcaaacaagaguugggcugugaacccuggcagugugac

SEQ ID NO: 4111229 - RNA, 82 nt, Human
guaaagaaagcauuucauuccuuugaaaguggaucaauucaguuguuuagggaauagaagugccaugauuauuuuucuuuac

SEQ ID NO: 4111230 - RNA, 90 nt, Human
guaaagaaugcuggguuccauguagccaagaguacuuuggggacucugcagcgugaauucauauucuucuccuccuccucucccuccugc

SEQ ID NO: 4111231 - RNA, 79 nt, Human
guaaagaucaguccuuggccuucuuguaggcaaaaggguucuguucuguaugccuaugauuaggggugccaggcuucgc

SEQ ID NO: 4111232 - RNA, 91 nt, Human
guaaagauugauuugaauaacaguggguuuuccuugcgguaaaguagaaauacaauuagaggaggaagcucauaauuuaucucagcuuuau

SEQ ID NO: 4111233 - RNA, 79 nt, Human
guaaagcuguaugugaaaaugucaagugcuuuuuaagaauggauuuuacacuugccauuuucaagugcaguagauuuac

SEQ ID NO: 4111234 - RNA, 83 nt, Human
guaaaguagcucaggucugugguucugagcaggacaccaugaugugugucuucaucucagacacaguuucaaguggacuuugc

SEQ ID NO: 4111235 - RNA, 83 nt, Human
guaaaguuugaucucaaguaguugacauuuauggaguauuuaccauaugccaaucuuugugauaauugcuagacauauuuuau

SEQ ID NO: 4111236 - RNA, 102 nt, Human
guaaauaaaaaauaaaacccauucucacucuaacccaugcuguaucugauuuuuuuccugagguaggcuugagaugggaggguuguuauuuuuuguaaaugc

SEQ ID NO: 4111237 - RNA, 86 nt, Human
guaaauaauucaaaugguaaggauuguagaaacgaagaaaaugaaaauuuaaguuuguuucguaguccauuauuuggauuuuuuau

SEQ ID NO: 4111238 - RNA, 82 nt, Human
guaaauacacauuucacuguaugagagggcuugauaauuuggugaggagaauuuuuuaggcuuuacucaauggcgaauuuac

SEQ ID NO: 4111239 - RNA, 70 nt, Human
guaaauagaauccugcagcaagccuuguguuucaacuguauaacagaagcuugaacuggggauuuuuaac

SEQ ID NO: 4111240 - RNA, 57 nt, Human
guaaauauaaaugcuagcugcccucccacucaacaugggcuguuaguagauauuuac

SEQ ID NO: 4111241 - RNA, 110 nt, Human
guaaauaucauagccaucacuacaaaagguuauacagucaauauauauauaugcaauauauuuauugcauuuuugacuguacaaccuuuuguagugauggcgauauuuau

SEQ ID NO: 4111242 - RNA, 85 nt, Human
guaaauccugcggaaucggagcccaacguguguaaugccggggcugugcuuacaagaucgugcuccaguccgcauggaaaauuac

SEQ ID NO: 4111243 - RNA, 76 nt, Human
guaaauuauccaaaaauaauugcuugcagggagacuuugcuccaauaaauagguaguuauuuucucuguaauuugc

SEQ ID NO: 4111244 - RNA, 68 nt, Human
guaaauuguuggccuuuaaacuggacuuucugaaucagaaccuccugagauggaguccugcaguuuau

SEQ ID NO: 4111245 - RNA, 79 nt, Human
guaaauuuaguuauuaacauuucugcccugaacugcauuacaauggauuaguuaagaaauguuagcaaguagcuaaugc

SEQ ID NO: 4111246 - RNA, 93 nt, Human
guaacaaaccaccuccaaauuuaguggcuuaaaauaauauaaacauucauuaaguuuaugauugugaaggcugguaguuugggcugggguuac

SEQ ID NO: 4111247 - RNA, 67 nt, Human
guaacagagcuaagaaacagaauugcugggauauuaacccagguaguuuugacuucauggcuugugc

SEQ ID NO: 4111248 - RNA, 82 nt, Human
guaacaguauuaagaggcagggccuucaagagcuggucaggccaugagggcccuguccuccugacugagugaaugcuguuau

SEQ ID NO: 4111249 - RNA, 66 nt, Human
guaacauagcaauggcaacaacuaagcgaagaggacuugcccuaguggacauuguuauggaguuac

SEQ ID NO: 4111250 - RNA, 62 nt, Human
guaacauuauucaugagauacaugagaucagugguuauuguugucuuugugaauaguguugc

SEQ ID NO: 4111251 - RNA, 101 nt, Human
guaaccucugugggguagaaacuguaucuguuugcucacagguguuauuccagaggaaaugcuugggcaagcagaacuuugucuaaaauaccacaguguac

SEQ ID NO: 4111252 - RNA, 71 nt, Human
guaaccuuuaagggugguguguuuauuuuucccauguuaaaacuaagaaaauagaagcaugcuaagguuac

SEQ ID NO: 4111253 - RNA, 64 nt, Human
guaacuaauauuugucucaaaauauguuuccaaaagcauguguggagaaauauuuuucaguuac

SEQ ID NO: 4111254 - RNA, 92 nt, Human
guaacuaguagcaagcagauuagaagauccaugagaucaaguaucauguaucuucccccuuaaucgcuguauuaccaaugcaaccuaguggc

SEQ ID NO: 4111255 - RNA, 60 nt, Human
guaacugcuuaaaauaguucauuuuugcauaaaagcagagcuaaguuuuugagcacuuac

SEQ ID NO: 4111256 - RNA, 65 nt, Human
guaacuugcuaagggucccaucaccaaugucaccuccaagguacaugagggcacucugcaucugc

SEQ ID NO: 4111257 - RNA, 90 nt, Human
guaacuuuggagaaaguauuuucucaauuagaaauguuauuauaaucuucaguaacauucaauugaggaaguuaacaguuucaaauuuau

SEQ ID NO: 4111258 - RNA, 62 nt, Human
guaagaaaaagcaagugcauguuugggaaacugucuaggaaaugucaaaugcuuuauuuuau

SEQ ID NO: 4111259 - RNA, 108 nt, Human
guaagaagucagaugaaaaauugcauuauucaaaccauuuuuauggagugucuuguacacagcaggcacugaagugguaaauguaaauacguuuucuuauugucuuau

SEQ ID NO: 4111260 - RNA, 56 nt, Human
guaagacaagcggacugccguucacaccuacuugagggacuggaaguuugucuuac

SEQ ID NO: 4111261 - RNA, 58 nt, Human
guaagacacagcgaaauguuccugcgucaguggauucagggaauccuguguguuuugc

SEQ ID NO: 4111262 - RNA, 59 nt, Human
guaagagagaccaggaauaacaguggcauaaacaccacagauguuuauuuuucucuuac

SEQ ID NO: 4111263 - RNA, 76 nt, Human
guaagauuauggguauuuuuugccucgauguuacauuuuuaugaacuuucaggcaaugaauauuuguuacuuuuau

SEQ ID NO: 4111264 - RNA, 71 nt, Human
guaagauuuaaaauagcaauuggagauucagcaacaauucucaccucucauuugucuuuaguaaaucuugc

SEQ ID NO: 4111265 - RNA, 74 nt, Human
guaagcauuacaacuuuagcaaaggugcauugcuuugcuuuguuuccuuuguauacaguucuugugauacuuac

SEQ ID NO: 4111266 - RNA, 98 nt, Human
guaagcauuuauuguuguaauagcaguaauugucaucguaguaaacauuuuuugaaugcuuacuaugugauagacacuauacuaaauauuuugcuggc

SEQ ID NO: 4111267 - RNA, 61 nt, Human
guaagccacuggagaugucagacagguuccuuucccaauagaacuuccauuccagugguac

SEQ ID NO: 4111268 - RNA, 82 nt, Human
guaagccuuccagaaacccuuuauguuuuucuuguaauuauauauugcauucauugacauaugaguguuaaauaaggcuugc

SEQ ID NO: 4111269 - RNA, 130 nt, Human
guaagcuacuggugaguugugagacaauuuagggauugcuuuuagugaaauuauauagaauagaaaauaugagaguucauuuaauuugguaagaguuuuguaaauguauaugcauacacagucauauuac

SEQ ID NO: 4111270 - RNA, 84 nt, Human
guaaggagaugaugguuaauuaugagaaagggaaaagguaggcagaugccuggcuuccugcugauaauccccucuucuucucac

SEQ ID NO: 4111271 - RNA, 110 nt, Human
guaaggcauagauuaauucaccccacuauuaauguguagccaacuuaaucccaggcucuggauuaagugguccauauguaacaguauuggugacaucuagaagaccuugc

SEQ ID NO: 4111272 - RNA, 105 nt, Human
guaaggccaaugcucagcuuucccuggugggugagaaccuggcuucugcuacuugugagaauuuauagaagcuuaaccaccugggacagaugaucauuguuuuau

SEQ ID NO: 4111273 - RNA, 66 nt, Human
guaagggaagaggaccagagucucugccucguaauccagagaauucuucuggaucuuguccaagac

SEQ ID NO: 4111274 - RNA, 59 nt, Human
guaagggccgaggguacaggaguggacuuuauuguucacauuaacucaccggugcuuac

SEQ ID NO: 4111275 - RNA, 75 nt, Human
guaaguccucagaucaucuuuaaauggcagcaggcauuuccaccuacaugcuggccuugugucugaggaaguuau

SEQ ID NO: 4111276 - RNA, 81 nt, Human
guaagugacacuggaggauacuguguuaaacauguuuuacuugaucuaccugcuaaacugguaucucuucaguguaauuac

SEQ ID NO: 4111277 - RNA, 74 nt, Human
guaagugccugugauuaggucccauuauacguaaugaaccuauuacgacacaucugaucucaaaauggauuuac

SEQ ID NO: 4111278 - RNA, 116 nt, Human
guaaguggcacugggcaaggcccccagagcagggcaaggucucuagagcgggucucccacaugacuggcuucacacaggcacuuccgcucggguugcaugcucugugucaucuuac

SEQ ID NO: 4111279 - RNA, 64 nt, Human
guaaguuucucuuugguggguugagaguuggaccaucaauucuaaucuacaaaaggaaauucau

SEQ ID NO: 4111280 - RNA, 56 nt, Human
guaaguuuuucccuagauguagaaagcacuaugcuucagcaucuagugagauuugc

SEQ ID NO: 4111281 - RNA, 129 nt, Human
guaauacaaggaaggugaugacuugcuccauugucuguggcuuucuuauguuguaaugggagcuuaucagugugcaccaugaucagguuacagcaucaggaggagcucuacaaccuauuuuagauucac

SEQ ID NO: 4111282 - RNA, 63 nt, Human
guaauacaguguuucccccaggauagcaucuaauugcuauuugaacgaacccacugucuuuac

SEQ ID NO: 4111283 - RNA, 63 nt, Human
guaauacuugaagaauucagagggcuccagcuuauugaggacucuggaagaaaaaaguauuau

SEQ ID NO: 4111284 - RNA, 67 nt, Human
guaauaucagguagauuuaauauucuguaguccaggcuuuggaaaacacugcucuacuugauauuau

SEQ ID NO: 4111285 - RNA, 101 nt, Human
guaauaucauuucauuaaugaacauaugacaaagugauuuugguagagauaugcuugccauugucauuccagucauuguuaaugccagaaaaugauguugc

SEQ ID NO: 4111286 - RNA, 71 nt, Human
guaaucagcaaacauugauuggacuuaggauugccaagaauauccugccaauuuaggguuuauugauuuac

SEQ ID NO: 4111287 - RNA, 69 nt, Human
guaaucaggaaagauauuuauuggcaacagcugcacugaaguugguggcauuguauuuucccugaaugc

SEQ ID NO: 4111288 - RNA, 55 nt, Human
guaaucccagcugcucaggaggcugaggcaagagaaccugggaggcggagguugc

SEQ ID NO: 4111289 - RNA, 94 nt, Human
guaauccuagcacuuugagaggcugaggcugguggaucauuugagcccaggaggucaagaccagccuggcaacaugucgaagugcugucuuuac

SEQ ID NO: 4111290 - RNA, 58 nt, Human
guaaugcuacaggagucuacauuccuacucccgauguagauuuuacuucugucauuac

SEQ ID NO: 4111291 - RNA, 61 nt, Human
guaaugcuagaggauuuugaguuuacaugccuuacauguaaacucacauuuucuucauuac

SEQ ID NO: 4111292 - RNA, 72 nt, Human
guaauguggaaguaauagaguacugggguugaaaauaacaaaucucccagucucuuuucagcuccauccuau

SEQ ID NO: 4111293 - RNA, 60 nt, Human
guaauguguguauugagcaucugcuuugugacaguguguuagaugcuuugcuuacguuau

SEQ ID NO: 4111294 - RNA, 95 nt, Human
guaauuccccucugacacauauuaugcuucugaagaagaaaagaccuuaaacagagucauuucuuuaaacagagcugcugaguaugucaaauuau

SEQ ID NO: 4111295 - RNA, 62 nt, Human
guaauucuaaucaccagcacaaagucuuaucauuccucacaguggcugcugaagagaauuac

SEQ ID NO: 4111296 - RNA, 78 nt, Human
guaauucuguuucuugcuuugcuuucaaggaauuugcaaauucuccuucagaggauaaggaagaauccauggaaauac

SEQ ID NO: 4111297 - RNA, 79 nt, Human
guaauugugguuuugccauuacaaguaauaacaaauuaaaaaauaauggcauuaaaaguaaugguaaaaccacaauuac

SEQ ID NO: 4111298 - RNA, 87 nt, Human
guaauuguuaacacuauuauuuucacaguaaauaauuguuacagccauuugcuggugaaauagugacauguuuuguugacuucuuac

SEQ ID NO: 4111299 - RNA, 64 nt, Human
guaauuucccagcagaugagcugaccuaggggaugcuucuaguaccucucagcugggauccugc

SEQ ID NO: 4111300 - RNA, 95 nt, Human
guaauuucuuccaccugcugccugcuaccugaaaugccaucauggagcaucugugauguugguaggggguagagggcagguguggaggguguugc

SEQ ID NO: 4111301 - RNA, 64 nt, Human
guaauuuuccuuuguggcucucauucuuuuucccccauugaaggcuaugaauguagaaaauuau

SEQ ID NO: 4111302 - RNA, 63 nt, Human
guacaaauuaggaagcuuugugaaagucauaggcccagcuaaucacaaagcugggauuuguac

SEQ ID NO: 4111303 - RNA, 59 nt, Human
guacaaccagauccucuaagucaucauguuauucaucugaccccagggcuggucugugc

SEQ ID NO: 4111304 - RNA, 113 nt, Human
guacaagcuagauuuggcaacauccagggucaugcaugggaaccugggagccccaugccccacugccuauuugcagggcccugggucuuggguggcccuaguucagugugugc

SEQ ID NO: 4111305 - RNA, 61 nt, Human
guacaaggcauuuaucuguucaacaaaggguucugauuccucauauagaaaguguuuuggc

SEQ ID NO: 4111306 - RNA, 117 nt, Human
guacaagugauuucaaacgaucucuaauguuggauuuuugcugcugcuguuacugcuauuagcgguaguagcagugacagcugagguaccauuagcaucuuagucaaagucacauac

SEQ ID NO: 4111307 - RNA, 70 nt, Human
guacaaguucuacucuauaaauucuggaaaccaaaaaggccaaguaguuguaguguagcuauuugcauac

SEQ ID NO: 4111308 - RNA, 66 nt, Human
guacacuugacucauaggaaauuugguacaauaggaguuccauugcuaugagccucaagugucugc

SEQ ID NO: 4111309 - RNA, 95 nt, Human
guacagacugugcacugcacaaguccaaggucaccauucacauagucugcaaugugauuggcaucccuuggaguugugcagugcacaaccugugc

SEQ ID NO: 4111310 - RNA, 74 nt, Human
guaauucagaguccugaguuauugucaagaagccagagacuucccuggcuuccagaaugacuaggauguuuuac

SEQ ID NO: 4111311 - RNA, 64 nt, Human
guaauuccagcuaccugggaggcugaggcagaagaaucgcuugaacccaggaagcggagguugc

SEQ ID NO: 4111312 - RNA, 76 nt, Human
guaauucucuaaccuaauguggagggagccgaggucuuuacauacuaauucccuagagucauugguugagggcugc

SEQ ID NO: 4111313 - RNA, 63 nt, Human
guaauuggagcagaacuacucacauaucggaaaauuugagguggguggcuucuguuauauuau

SEQ ID NO: 4111314 - RNA, 129 nt, Human
guaauuuuuaugaggucaguugaguuuagaguuggagauuagguagccaccagggggcuccagugaggaguuguaaagguuuuguugguucucuuccuggugaauccucugaauacuguguaauguuau

SEQ ID NO: 4111315 - RNA, 84 nt, Human
guacaagaaauuaaaggucuagcaccagguaaauucauaucucaggauuuuaaacuauagcuggaugcuuuaacuuagcuguac

SEQ ID NO: 4111316 - RNA, 67 nt, Human
guacaagcaaaagguuacacuucuggaauagcagacuaucuaauucagaccaaccucuugcuggaac

SEQ ID NO: 4111317 - RNA, 73 nt, Human
guacaauggcuggucacaugguaggucuguguauaacauugcaagaaauuaccgaaaugaucacacaauguac

SEQ ID NO: 4111318 - RNA, 56 nt, Human
guacacauguauuuauguguacaugugugugagcauguauaugugugcauguguau

SEQ ID NO: 4111319 - RNA, 82 nt, Human
guacaccucagggacuuuugagaauguaauuuacaacauuuaauauagaugaaaugugaaugcuuuucauacccaguugugc

SEQ ID NO: 4111320 - RNA, 108 nt, Human
guacacgcucgccuugggggcucuggggugcccuggcaugcugacccacccuucaccagucaucacguuugcccccagaugccuucugaaguccuagcauauguguac

SEQ ID NO: 4111321 - RNA, 65 nt, Human
guacagagggucacguggugaauauacccgcacccacucaccaccccaaaugaaccucuguucgc

SEQ ID NO: 4111322 - RNA, 66 nt, Human
guacagaucuauugaguuggaacaaaaugucaugcaggucauucuuaacaacucaguagguccuac

SEQ ID NO: 4111323 - RNA, 71 nt, Human
guacagcaggggcugugaaauccccaucaucagugaaugugcauguggaucauauguccuauuuccuguac

SEQ ID NO: 4111324 - RNA, 60 nt, Human
guacagccuuccuggaagggcauuuuggcuaagaauuaagucuuuaaaaaaggcugauac

SEQ ID NO: 4111325 - RNA, 91 nt, Human
guacagcuggccuucggugucacugggucuuuaucagcagcugguugaauccaugcaugcaaaaccgguagauacagagggccaacuguac

SEQ ID NO: 4111326 - RNA, 64 nt, Human
guacaggcauauuucucaaaguacaggcauauuuaugcuuguauuuauauugaauagcuuaugc

SEQ ID NO: 4111327 - RNA, 76 nt, Human
guacauauuaggagacagagauguucaaagugcauuuccaaggugacuguacacacuucucugucuucccauguac

SEQ ID NO: 4111328 - RNA, 62 nt, Human
guacauccuugauuauguaaggauuccauagagaaucuuuuacuacaaaucaggugaucuac

SEQ ID NO: 4111329 - RNA, 94 nt, Human
guacauuccugugugugugugcauguggcaggugugugugcaugggugagcauguaagcacaugugugugcauggauagguguguggggguugc

SEQ ID NO: 4111330 - RNA, 75 nt, Human
guacauugugcucagaaucugucgugugaacaaaugccuuugcuauauaugaaagaaucucagagcacaauauac

SEQ ID NO: 4111331 - RNA, 55 nt, Human
guaccagggaaugaagggggugaggcuuccccucagcuguucuuuucccugggac

SEQ ID NO: 4111332 - RNA, 94 nt, Human
guaccauuaaauuuuaguuauugagaauaauguugcuaugagcauuuguauauuagcugcugaauaaagauauauuuucaguucucuuggguau

SEQ ID NO: 4111333 - RNA, 80 nt, Human
guacccaaaaacauacaucuauuuuuuucuguccaucuguguugagcaaaugugagacuaaaaagaugugcaugugguac

SEQ ID NO: 4111334 - RNA, 80 nt, Human
guacccacuaaauaaaggcuuggaaacuagagugugcagcaaguccuaaagcucuggguuucuagaucccuagugggugc

SEQ ID NO: 4111335 - RNA, 64 nt, Human
guacccaugcuggagugcagaggcaugaucauagcucauacagccucgaacuccugcauuuugc

SEQ ID NO: 4111336 - RNA, 113 nt, Human
guacccucuuuucuagucucauguugaagaucuuuauguagaaggacuuccugaaggaauuccuuuuagaaggccaucuacuuacggaauuccucgccuggagaggauauuac

SEQ ID NO: 4111337 - RNA, 111 nt, Human
guaccuacuguaucuuuucucuaauuagagauggcguauagacuggcucauuacuucugccuaaugagccaggcuccaugccaccucucuaaucagaaaagagauagguac

SEQ ID NO: 4111338 - RNA, 86 nt, Human
guaccucagacucaucuuccuucuuugaugacaagggcucuaaagugagucaccuaaacugcagucugaggaggagucaaggguac

SEQ ID NO: 4111339 - RNA, 58 nt, Human
guaccugagaaguuccaggggagcaggcuggagaggcaccccuggggguuucugguac

SEQ ID NO: 4111340 - RNA, 90 nt, Human
guaccugguuggcuaaaaucaaagagcuugacaauccuagcugcaaggaaggcugggauauauaguucuuuauuccaggcagcaaugugc

SEQ ID NO: 4111341 - RNA, 84 nt, Human
guaccuucugcuaagacaagucaucuggggccugugucuagccuuccagaccaugcuaagaagacauguccauuuagaaccugc

SEQ ID NO: 4111342 - RNA, 64 nt, Human
guaccuugauuuccuggggauaacacuuacguguucuucauuacaagggaaccaaggaaauuac

SEQ ID NO: 4111343 - RNA, 58 nt, Human
guacgcacauuugauugugauugauuggacaaucaguuacaucuguuauguguguuac

SEQ ID NO: 4111344 - RNA, 61 nt, Human
guacggccaagugcauccugguauuucagaaaugugaauuuccugguugcauuggcuuugc

SEQ ID NO: 4111345 - RNA, 63 nt, Human
guacuaagucaggagaagaauugcccccugaaggggaagaagucuguaacuugaucuugguau

SEQ ID NO: 4111346 - RNA, 62 nt, Human
guagagacgggguuucaccgaguuagccaggauggucucgaucuccugaccuugugaucugc

SEQ ID NO: 4111347 - RNA, 72 nt, Human
guagagacgggguuuuaccauguuggucacgcuggucucaaacuccugaccucaugauccgcccaccucggc

SEQ ID NO: 4111348 - RNA, 63 nt, Human
guagagaugaguuucaccauguuggucaggcuggucucaaacuccugaccucaggugaucugc

SEQ ID NO: 4111349 - RNA, 73 nt, Human
guagagaugggugucaccauguugcucaggcugaucucgaauuccugagcucaagugaucugcccaccuuggc

SEQ ID NO: 4111350 - RNA, 89 nt, Human
guagagcauauacaguuacaucacuuacugacaucuguaacuaagcuaaggcacugucaggaaaagaguguuaacuguaaauguaguac

SEQ ID NO: 4111351 - RNA, 83 nt, Human
guagaggacaacaacacgcuuguguuugcugucguuguuaaacccaacaagcagcagaucaaacaggcuugaagaaacucuac

SEQ ID NO: 4111352 - RNA, 113 nt, Human
guagagugugccugacuggugguggaggaccugucuuuauaccuccugaggaucuggagaggaggugucucugaggugagggucagcacuccucccagcacaaacacaccugc

SEQ ID NO: 4111353 - RNA, 86 nt, Human
guagaguuugaguugugaucacugaaagcaucacaacuuauuacuaacaaugugugcuucagugugucauuauuuacagccuuuac

SEQ ID NO: 4111354 - RNA, 78 nt, Human
guagauaaugauaccuaugugacaguauuauugugguaauuaaauuauaaauguugccacauaggugucauuugaugc

SEQ ID NO: 4111355 - RNA, 76 nt, Human
guagauauugucacuuuuauguuacagaugaguauguugaugaaaucaaaagguaacauaauguggccaaagucac

SEQ ID NO: 4111356 - RNA, 70 nt, Human
guagauggagguggcaauuuaaugcagucuuagcuguuuaggauuuagaacuauguuacuuuuaauuuac

SEQ ID NO: 4111357 - RNA, 59 nt, Human
guagauguagccacugcuaaaagagagguccagguucuucccuucaguggcugcucugc

SEQ ID NO: 4111358 - RNA, 81 nt, Human
guagauugugcugcaguuuguaaacauuuuaaguugcauaaacugcuccuugauuuucaaauguaguauaauacugucuac

SEQ ID NO: 4111359 - RNA, 69 nt, Human
guagcaauacaguaagaguacuguaacuuugcauaugugcuuuauauacuguauauuacuguguuauac

SEQ ID NO: 4111360 - RNA, 125 nt, Human
guagcaauguacuucagaaauuagucaguaauuaaaaugcagugguuuggacuaaagugagauuaaaaaagcucaacuggcuuuaguuugucacuggcauugacuuugaguauuuuucauacuac

SEQ ID NO: 4111361 - RNA, 57 nt, Human
guagcacagcuaggagcagagccaggacuuaaaggcaggucuucugaauguggcugc

SEQ ID NO: 4111362 - RNA, 79 nt, Human
guagcagaaucucaaggcuugugaggauaagaagguggcuaaauuagcuuauucucacaggucuugagaucuugacuac

SEQ ID NO: 4111363 - RNA, 64 nt, Human
guagcagagcugggacuagauuagaauguuggucuucucaaucguggcucuaugcucuuucuac

SEQ ID NO: 4111364 - RNA, 74 nt, Human
guagcagagguaagggaaauacaauucacucuuuguauggagaggagguggugaugcuuuaaccuuccugggac

SEQ ID NO: 4111365 - RNA, 72 nt, Human
guagcagcgguggugucggcagcggcuguagcaaagaguuuggcgcgaugucucacaccauuuugcugauac

SEQ ID NO: 4111366 - RNA, 88 nt, Human
guagcuaggaaaaaguuugugcaaacacucagaggcauaaaaaauuaugcaguagcuggaaguuucacacaacuacauuguagaguac

SEQ ID NO: 4111367 - RNA, 78 nt, Human
guagcuuacaaagaaucacucaucuuuagcaguagaaagcacacacagcugaacagacugaaguucugauagaguuac

SEQ ID NO: 4111368 - RNA, 58 nt, Human
guagcuucaaguacucucccuggaaagucuagauaccuucagagcugcugaaagcuau

SEQ ID NO: 4111369 - RNA, 66 nt, Human
guaggaaauucaagaacuaaguaguccuggaaauuuuucagaaagcuuagugucuugcauuucugc

SEQ ID NO: 4111370 - RNA, 101 nt, Human
guaggaagaaugagggggaaaaagacaggaacauagcaaauccaugucuugucuaacaggaugcugagccuucuguucuauuuccaacucucauuucuugc

SEQ ID NO: 4111371 - RNA, 103 nt, Human
guaggaagccugucagccagcagcaugaauucgagccacaugugcauacaauauggugaaugccgcagucuguugcuagguagguugaauucaagcuuucugc

SEQ ID NO: 4111372 - RNA, 85 nt, Human
guaggaaguaggacuuuggcgucagaacugguuuugaagaacuuagucaauugcugaugcuaaguggaugaaccugaacucuugc

SEQ ID NO: 4111373 - RNA, 92 nt, Human
guaggacuguuugucaaaacuaggagugaguuugagauucaggauuaagguucaaguagggaaucuccauuuacccugcaucucagucuuac

SEQ ID NO: 4111374 - RNA, 75 nt, Human
guaggagaaaagugaagaccgucaguagaagcagaaagaacauaaaagcuccucuguugagcauuuuuccccuac

SEQ ID NO: 4111375 - RNA, 94 nt, Human
guaggagccaacaugauuaaaagauuuuaaagcaauuuacucgauagaaggguugggcuuaaucaggacuugugaucauggcaaugguuccugc

SEQ ID NO: 4111376 - RNA, 68 nt, Human
guaggaggcauucuugucaguggggucaggguacaggccacuggcccugucagcacagaauccacuac

SEQ ID NO: 4111377 - RNA, 66 nt, Human
guaggaggguuagagggaaauauucuuuugcuauuuugaagaaaguaucuuggaaaacucuucuau

SEQ ID NO: 4111378 - RNA, 101 nt, Human
guaggaucauugauuggaccuaugaugaaaugauagguuuguuauagguggagaagaacaaauaggcugagccauuucaaguagaccagcuaagauuuuac

SEQ ID NO: 4111379 - RNA, 66 nt, Human
guaggcaaaucucaguuggccucugguugcuuuugccugagaggugugcugagaucaucugccuau

SEQ ID NO: 4111380 - RNA, 56 nt, Human
guaggcacccagagccugaggggacugcagaacucucccucagacagggugccuau

SEQ ID NO: 4111381 - RNA, 92 nt, Human
guaggccagcagagggcugaaggaguuuggguagucauacaccuguuuccacgggucacugaggcauucaugcucugguccucuuggcuugc

SEQ ID NO: 4111382 - RNA, 72 nt, Human
guaggccauggugguugucucuggcaucagucugaaaugccagcuacauccaagcaacucucaccuggcugc

SEQ ID NO: 4111383 - RNA, 130 nt, Human
guauggcaauuccaagcuaagcuguauauugaaugaugcauuuguuucccaucaaggugccuggcacagcacuaucggaaguuagaguguguuauucccucauacaucaaagucugcuugccaguguuuu

SEQ ID NO: 4111384 - RNA, 64 nt, Human
guauggcagcaguccauugccucauccaggacacgcugcgugagagccaggaucugcucuauac

SEQ ID NO: 4111385 - RNA, 69 nt, Human
guaugguuuuaggccuauaauuauuuacucuauuuaagcccagguaugguucuaggccuauaauuauau

SEQ ID NO: 4111386 - RNA, 63 nt, Human
guauguaucuuucuaagggugagagaucccuaauuuguuaguuacaugcuuagagaugcaugc

SEQ ID NO: 4111387 - RNA, 60 nt, Human
guauguaugugugcauacacuuuauacaauacauaaaguguguauauacauaugguauac

SEQ ID NO: 4111388 - RNA, 71 nt, Human
guauguauuuaguauaauggggcaaaaguauuuuagggggcuaaaguccuauuagcauauugaauacacac

SEQ ID NO: 4111389 - RNA, 59 nt, Human
guauguccuggacauuucccaagagcaaaaaugcagcaugagagaguagcaggacauau

SEQ ID NO: 4111390 - RNA, 56 nt, Human
guaugucuuaggguucaguaacaguaacugacuggcccacugagcccaggacacac

SEQ ID NO: 4111391 - RNA, 68 nt, Human
guaugugaccuucugaaugaguaucggaguuaaucuaaaguacauccuacucaccugaaggaauauau

SEQ ID NO: 4111392 - RNA, 75 nt, Human
guaugugcucaguaaguacaugaagaacaaauacauaaauaaauggaugaacuggaaugucucuguagcacauac

SEQ ID NO: 4111393 - RNA, 64 nt, Human
guauguguguguguauguguauguauuuuuuccaauguauguguauacaugugcacacacaugc

SEQ ID NO: 4111394 - RNA, 59 nt, Human
guauguguguguuucugcauauuuuuaaggaaacuagaagacaggaaauacaaaccuac

SEQ ID NO: 4111395 - RNA, 69 nt, Human
guauguguugcagggcuggaacauggaauuguguucuacacgaauuuauagaagcgcuugcagccagac

SEQ ID NO: 4111396 - RNA, 70 nt, Human
guauguuaagagaagcucucucugaugaaaauaacucugcacuuagggagaaaugcuucccucaagauac

SEQ ID NO: 4111397 - RNA, 85 nt, Human
guauguucacaucuacugaaugagcaguguugaugggcagacuugagcuuuguuacauuccucauuucagugaauguguauuuau

SEQ ID NO: 4111398 - RNA, 81 nt, Human
guauguuccugccguaguucuuagagcaaaauuucaggaugugagucuccacacacugcucuguauaugagcaggaacuac

SEQ ID NO: 4111399 - RNA, 61 nt, Human
guauguuucugcccaucucuggaaaaacccagguaggcacuggugggaagagagaacaugc

SEQ ID NO: 4111400 - RNA, 75 nt, Human
guauguuugaagcaaagugguugucaucguuucugugauguuaauauuuauaggccacuuugugucaguaugugc

SEQ ID NO: 4111401 - RNA, 97 nt, Human
guauuaauuuccuuccuuagauccuucaaucacggacaaggggauagucaauaaauucugugauuuggaggaaugcagugaaaggaauuguuaaugc

SEQ ID NO: 4111402 - RNA, 78 nt, Human
guauuacagauuucuaggggagaggaagaagugaugaugaauuuuauccuguucuacugccuuuagaaguaaaaguac

SEQ ID NO: 4111403 - RNA, 84 nt, Human
guauuagguuggugcaaaaguaauugcaguuuuugccauuaaaguaggaccaaaauagcaauuacauuugcaccaaccuaauac

SEQ ID NO: 4111404 - RNA, 63 nt, Human
guauuaugaaugccgaggcggcaacaaaaauuuugacagaauugcgccgccuugcucgugaac

SEQ ID NO: 4111405 - RNA, 85 nt, Human
guauuaugagcucuuugaugggaguguuucugcaguggcuucacauucauuaguacaguuccaucaaagcaggccacauaaucac

SEQ ID NO: 4111406 - RNA, 64 nt, Human
guauuauucucagcuuugggauauggaacagcagucacguuuucacccaaaggagggugaucac

SEQ ID NO: 4111407 - RNA, 56 nt, Human
guauucaaggauuuuguucuacagaugcaauggugucacuggaaaaucuugaaugc

SEQ ID NO: 4111408 - RNA, 87 nt, Human
guauucaauuauaacuaucuucaucaugaaauguuagaauuagacagagcucagcacuuugauuuuauuggugaggaaauugaauac

SEQ ID NO: 4111409 - RNA, 98 nt, Human
guauucacuaauccuggaaauuucaagcaaaguagcuaucucucuguguggagaaaagauguuaaguuauuugagguuuucagcaugcugaaguuuac

SEQ ID NO: 4111410 - RNA, 72 nt, Human
guauucaugucagaaucuacauucuacuuugcaaaauuaguuaagagauuguauuucugaguuaaugagaac

SEQ ID NO: 4111411 - RNA, 56 nt, Human
guauucucaggugguuccucgaggccuuugggcuccuggguucuggaugaggaugc

SEQ ID NO: 4111412 - RNA, 55 nt, Human
guauucuguuuacagugagcaaugaaaaagaugccacuguguccaccaggaaugc

SEQ ID NO: 4111413 - RNA, 72 nt, Human
guauugagcuccaaguacauuucucccaacacuaaauuuccauuagaaauaaaauguuuuggggcugggcac

SEQ ID NO: 4111414 - RNA, 98 nt, Human
guauuggaauuauuuuacaugcaacauugguauuaguguggcugaucaaagaauugauuguacuuaaauaugcaaauaguauuaggauaauacaauac

SEQ ID NO: 4111415 - RNA, 55 nt, Human
guauugguauuauuuugucaugcagccaauuagcuguaggcauaugaccaauuac

SEQ ID NO: 4111416 - RNA, 110 nt, Human
guauuguguaggguacucagaaaagaccugugguagcucuaaauccucauuacccaacaggauggcaaagauaguuucauggguucucucugauuucuuacuuccaguac

SEQ ID NO: 4111417 - RNA, 90 nt, Human
guauuuaauacauguaugguauuuuauacauguauguaugguauuuuauacaugcaugggguaaugguauuuuauacauguauuuuauac

SEQ ID NO: 4111418 - RNA, 55 nt, Human
guauuuaauuccauuaaguuaguauuaauuuuaacuuaauacugggauaagaugc

SEQ ID NO: 4111419 - RNA, 58 nt, Human
guauuuaguuaaguguuguuauaaauguaaguauuucugcaugcauuuaauuaaaugc

SEQ ID NO: 4111420 - RNA, 76 nt, Human
guauuuauuuucacagaauaucaccaaauaagcaugaagcaaacagucuggaugaaauuuaggugcagauaaauau

SEQ ID NO: 4111421 - RNA, 66 nt, Human
guauuucuaguucuagaucccugaggaaucgccacacugacuuccacagugguugaacuaguuuac

SEQ ID NO: 4111422 - RNA, 86 nt, Human
guauuucucauucuccaacaugucuccagugccugacacagaaugaucugugugaucaggugaucaugugaguggaugagaaauac

SEQ ID NO: 4111423 - RNA, 87 nt, Human
guauuugagaaacacaaggaguagagcauuuagggcugaauuuuccaguaaaauugcuauuuaacuuuuauguguaguuucagguau

SEQ ID NO: 4111424 - RNA, 82 nt, Human
guauuugugaagaucugagcccucagguccugaaugguaauggccccagucucugacuuagggucucuucuucuccaggugc

SEQ ID NO: 4111425 - RNA, 81 nt, Human
guauuuuaaaguagguggcugcaguaguguagggucugggcaaucagacaccucacuggcagcuucacuguauuagaaugc

SEQ ID NO: 4111426 - RNA, 55 nt, Human
guauuuuaagugacuacuagguuuuaaucuacugccucauaguccuugaggucac

SEQ ID NO: 4111427 - RNA, 100 nt, Human
guauuuuaauaaggacuugaaugauguauaauauugagagcccaagcagcaggaaaggcauuucagaccauaugugauuaucugaguccugauuaaguac

SEQ ID NO: 4111428 - RNA, 92 nt, Human
guauuuuacauuuaauagcuugccuaauccucaugauccugaaaaauuagcaguauuaucaccccguguuggucaaguucaguguaagaaac

SEQ ID NO: 4111429 - RNA, 59 nt, Human
guauuuucuauucauugucuaugguggucuagcuacuuuagaaaaggaacagaggauau

SEQ ID NO: 4111430 - RNA, 95 nt, Human
guauuuuuaguagagaugggguuucaccauguuggccaggcuggucucaaauuccugaccucaggugauccaccccucuuggccucccaaagugc

SEQ ID NO: 4111431 - RNA, 79 nt, Human
gucaaaauucccaaaugcagucuuagaauccuggcaggcacacagacaaauggggcuuggcaggucugggauuguugac

SEQ ID NO: 4111432 - RNA, 77 nt, Human
gucaaacgugaggauuuuagauaagacagcaaggguuuuuuuccccuaguuuguagaaaucuagaaauuuaagugau

SEQ ID NO: 4111433 - RNA, 82 nt, Human
gguuuuggagacugaguugcccugcccugugcuugcagauccacucagugugaagggcaggacagcuuccccuuuccacacc

SEQ ID NO: 4111434 - RNA, 73 nt, Human
gguuuugggaaaaauaaugcacagauauuguguguaaaaugcuaauauuuuguaucuauuguuuccauaaacc

SEQ ID NO: 4111435 - RNA, 88 nt, Human
gguuuugggacuuauugucuguccgggucaaagcaccccauuucuaugaugggagcucugacccagacacacaauaaggcccaaaacu

SEQ ID NO: 4111436 - RNA, 92 nt, Human
gguuuuggguugguggacuucauuuucuuucacgcugcugcuugcccaguggguguagacagcaagaaaaugaagaaaaucaguccaaggcc

SEQ ID NO: 4111437 - RNA, 60 nt, Human
gguuuuucuguggaaagcuguuaggaaguuauugauaaacagcuacucugcagauaaauc

SEQ ID NO: 4111438 - RNA, 79 nt, Human
gguuuuugguucuguucaguugauuagacagagugauguaauuauuguauucguagauugaacaguaccuuaaaaaacu

SEQ ID NO: 4111439 - RNA, 62 nt, Human
gguuuuugucgaguuccuugaccugguuccugauaacuuggcagcggacccuggcccgaacc

SEQ ID NO: 4111440 - RNA, 101 nt, Human
guaaaaaaaaaaguggaaccaaguaggauacaaggagaaaauaauguuauucuuuuuauuacuguuccuuaaauccucucaugggcuaguucuuuuccugc

SEQ ID NO: 4111441 - RNA, 82 nt, Human
guaaaaccacugugugggccaaacuaaacauguuuacuagacucaacuccugggcaguuugccccgucacccuggugugugc

SEQ ID NO: 4111442 - RNA, 93 nt, Human
guaaaagcaacaguaccuaaccuguaaguugauaauuaaguggcaugacacguuaaacauuuagcauaguaccuguaacauguuagcuuuuau

SEQ ID NO: 4111443 - RNA, 62 nt, Human
guaaaaggucaaggccaagucuggggucugaauauuuuccuuucacgugcugugccuuuugc

SEQ ID NO: 4111444 - RNA, 56 nt, Human
guaaaauaagaggggacuugauuuagauuggcuuucacaguccuucuugguuuuac

SEQ ID NO: 4111445 - RNA, 114 nt, Human
guaaaccaaagguaucgaauuuguggcuuuugcuagcuuugcagaaaagauuuuuuuaaaauacauuucuugauagugcaaaacuagcaaaagccacaaauggaauggguuugc

SEQ ID NO: 4111446 - RNA, 83 nt, Human
guaaacuacgcguugucuguaacacacucuucagugucgucugauucugaacuguguacauuguagauaacugauagcaaugc

SEQ ID NO: 4111447 - RNA, 98 nt, Human
guaaagaauaagaagaggguuuuuaauugcauuuaaagauggacauagcaguacgucuauucauuuuguaguuaaaauacauuauuuuauaucucagc

SEQ ID NO: 4111448 - RNA, 75 nt, Human
guaaagucuucaguuaugauaauuacuguuacaucgauuauagaugagcaaggcugggucuaauggggaaauuac

SEQ ID NO: 4111449 - RNA, 86 nt, Human
guaaaugagaggaaugagguuaaggacuuuccaccaucaaccagaggaaauucacuaucucauaacguccuuccuucuaauuuuac

SEQ ID NO: 4111450 - RNA, 73 nt, Human
guaaauggcuuugaaguucagcuuuuggaauaaaauaaaccaagagcaauagcacagagcaaucaauauuuac

SEQ ID NO: 4111451 - RNA, 126 nt, Human
guaaaugggagggugcuggugucaggcauggcuggcccugggagugcagacaggcccaccaggccucugccagcucugugggucucgcuuagccucauucugugugccggcucucuuuccacuugc

SEQ ID NO: 4111452 - RNA, 118 nt, Human
guaaaugguguuugcaggcaaguaaugauuuuuccucccucucuauaaaugauauuacuuugguagagagagaaaugaaaugugcugauguuauuuguucuuugugaaaccauuuugc

SEQ ID NO: 4111453 - RNA, 119 nt, Human
guaaaugguucaagucuacaccaggaauaagagcuacagccaguucuguuugacucuaaaauucagaauuauaguugcuuuuuaaaguuaccuaggacaaauguaacaggauuauuuac

SEQ ID NO: 4111454 - RNA, 62 nt, Human
guaaauuauuucaagaucaucucuuucuuauauuaauagagaugauggaagggauaguuaac

SEQ ID NO: 4111455 - RNA, 88 nt, Human
guaaauuucuuucaaucgcuauuuguuuuaaagucacugcuuauauuuguggcagauaaaauaauagggaaaaggaggaauaauuuau

SEQ ID NO: 4111456 - RNA, 77 nt, Human
guaaauuuucagagcacuagagaagaaugagucucuccagcucauacugccuccuuuucuucugucuuuguguuugc

SEQ ID NO: 4111457 - RNA, 60 nt, Human
guaacacugugcaguguaaugcuggucuuugaauagcucagcagucuuuauagauguuac

SEQ ID NO: 4111458 - RNA, 77 nt, Human
guaacaucugaccauuacaagacauuuuaaaauauagaaaagucugaagaguaaugucagaucaccccuaauguuac

SEQ ID NO: 4111459 - RNA, 62 nt, Human
guaaccagcuggcuauuuacaaaaauuguaaaggcaacacugauuauggcugagcuggguau

SEQ ID NO: 4111460 - RNA, 57 nt, Human
guaacccggccagugucuagacucuucauucaggaaucacacguuuggccaggaugc

SEQ ID NO: 4111461 - RNA, 59 nt, Human
guaacucgaugcaauucacuuuguggaaccaagccacaaagugaaaagcaucgaauugc

SEQ ID NO: 4111462 - RNA, 71 nt, Human
guaacugagaguguggcuuccaggcccgcacugggagggaacagugggugguuuggaugccauaccuuuau

SEQ ID NO: 4111463 - RNA, 63 nt, Human
guaacuuuaaaugauguugguuuaauuugaguagcuuuuuaauuaaaguaaaccaacauuugc

SEQ ID NO: 4111464 - RNA, 79 nt, Human
guaagaaaaauaaauguccagaguaaagcacauucuuauuucaguaaaggguugugugaagcuauggcauuuuucuuac

SEQ ID NO: 4111465 - RNA, 58 nt, Human
guaagaaagguaggcuuucugagguuuaaggcagcagaaaaguucauaccuuuuuaac

SEQ ID NO: 4111466 - RNA, 70 nt, Human
guaagaagcccagggcuaauaggaaccagagaauauuuaguucuggguguucugggugaucuuuucuugc

SEQ ID NO: 4111467 - RNA, 68 nt, Human
guaagacacauugagaaacacaagaaacccauuguucucuggauguuugugcauuucagugguuuugc

SEQ ID NO: 4111468 - RNA, 55 nt, Human
guaagacgggagucaggugagcucgugcacgggccguaacugccucucgucuggc

SEQ ID NO: 4111469 - RNA, 71 nt, Human
guaagagcaggaaagaaaaaucuguguguucuagauuggacaucaaugguuuaucuuccaaaugguuuugc

SEQ ID NO: 4111470 - RNA, 64 nt, Human
guaagaggaggcggacacagguaguguugaacacucucaaucucugccacaugccucuauuugc

SEQ ID NO: 4111471 - RNA, 61 nt, Human
guaagauggcuagaaaagugaauggcacauaguuacuauucaaaguacuagcuauuuuuac

SEQ ID NO: 4111472 - RNA, 74 nt, Human
guaagcaauagaagcgcugccuuaacuaaaugucucugggggucauuaggacagugagcgguagugauugcugc

SEQ ID NO: 4111473 - RNA, 68 nt, Human
guaagcacgcuguaauaauuguguucucuacaaaaauggagaaauacuuaaucuuugcagguuuuuau

SEQ ID NO: 4111474 - RNA, 61 nt, Human
guaagcaugauuaauaugcuuacugugcugggcauauuaugcaaauuaaauuacugcuugc

SEQ ID NO: 4111475 - RNA, 86 nt, Human
guaagcugucacacugaggaagacagcagcuguguuauuccaugauuuauagaacagauuugcauuuccuugccuuugaagcuugc

SEQ ID NO: 4111476 - RNA, 63 nt, Human
guaagcuuggagcaaugauugcaccuaaacauguugacugcauucaaaucuccaggcucaaac

SEQ ID NO: 4111477 - RNA, 67 nt, Human
guaaggaaugcuugaauguuccugacaauguuuuuguauaauugcaggagcauuugauauuuauuac

SEQ ID NO: 4111478 - RNA, 57 nt, Human
guaaggcccuugcucaaggccacacggccaauaagauguauugagcagagccugugc

SEQ ID NO: 4111479 - RNA, 62 nt, Human
guaaggcuaaugucuuugugguugguagugagugcaaguuucucaaaguacaucagcccuac

SEQ ID NO: 4111480 - RNA, 80 nt, Human
guaagggcaccuguuuuagcuuggucaccuccuuugaaccuaaaacagaggccagccauaucuacagcaaguguccccac

SEQ ID NO: 4111481 - RNA, 58 nt, Human
guaagucugaguguaauucacaaugguuccuauuucugugaacugcauuacaggauac

SEQ ID NO: 4111482 - RNA, 70 nt, Human
guaagugacuuucaaggaucauuuugccaguuggauuuguaaucucaggggcagugauccuaaguacugc

SEQ ID NO: 4111483 - RNA, 64 nt, Human
guaagugcuguauaugcaagaggaagagauaguagucaguucuucucucuuuauuagccacuuc

SEQ ID NO: 4111484 - RNA, 65 nt, Human
guaaguggagaggccaggcccuaggcuccgggaagaggguugagggccugauggcucccgcuggc

SEQ ID NO: 4111485 - RNA, 114 nt, Human
guaaguuaaauggaaugagaucuucuucagugcaccugaugucuugggaagggugaguugaggcgugguggaugugaaacaugaucucauuauaaauguucccauuuguuuuau

SEQ ID NO: 4111486 - RNA, 71 nt, Human
guaaguuaguguguuauauaccaagcuucuuauagaagaggcuauagaguguuuguauaauauacccuuau

SEQ ID NO: 4111487 - RNA, 63 nt, Human
guaauacauauaugguacuuccuggcauuauugugucaagauaccaccauuauaugucaugac

SEQ ID NO: 4111488 - RNA, 63 nt, Human
guaauagcagcugaaagggaucucuacagauuauuacugucaucuuuucgcagcugcaguugc

SEQ ID NO: 4111489 - RNA, 55 nt, Human
guaauaggagucugugugauuuugucaguaauagaaaucacaugacagcuguugc

SEQ ID NO: 4111490 - RNA, 93 nt, Human
guaauaggcucaacauaucuggagacuccuggucuauaccacaauaauuaagcuaaaggaauucuagguagaaaguaugcagccacuuauuau

SEQ ID NO: 4111491 - RNA, 78 nt, Human
guaauagguuauucaguguguuauucuacuuucauaaucuuugugauccugagaugucauguuaaugcacuuuauugc

SEQ ID NO: 4111492 - RNA, 72 nt, Human
guaauauggcagaaaagauucuggauuuagaaucagaacacuuaaaucuacauuucaguuuugccccuuugc

SEQ ID NO: 4111493 - RNA, 86 nt, Human
guaaucaaacugccuuuacuagccaugugugagaagagcuauuucuuauucucuuuuaagccucuggcauagggaggaaugaauau

SEQ ID NO: 4111494 - RNA, 66 nt, Human
guaaucagguacagggaugcugagugauggggaaucaaaggccucuguccuagugccuaaguuuac

SEQ ID NO: 4111495 - RNA, 64 nt, Human
guaaucucagcuacuugggaggcugaggcaggagaauugcuugaacccaggaagcggagguugc

SEQ ID NO: 4111496 - RNA, 55 nt, Human
guaaucucauggagauuaggcaaaucuguauggcucuaauuuccauaugaauugc

SEQ ID NO: 4111497 - RNA, 75 nt, Human
guaaucuccaaggguuguggguggucacaugccagcauuacaaguagcuacucucaaggccuauauggagguugc

SEQ ID NO: 4111498 - RNA, 91 nt, Human
guaauggaucagauuuuggaggaauucaaugcaugguaauuaguccauggcagcuuugaauuucuugaaauuaggaacauugauucuuuac

SEQ ID NO: 4111499 - RNA, 105 nt, Human
guaaugggcauagccaagauuguggcagaccuucccuucuccuuccaugucuugaaggucgggagcaagccggagguacuguucauaauagggggcagccuggac

SEQ ID NO: 4111500 - RNA, 81 nt, Human
guaauguaauuuaguaaauuaugauuugauggcugggcaucagccccaguguugaacaguauuuggacuaugauuacuugc

SEQ ID NO: 4111501 - RNA, 60 nt, Human
guaauguacugcagccagaugugcugugaaugaagagccuuuuggcuucaagugcauugc

SEQ ID NO: 4111502 - RNA, 65 nt, Human
gucaaacuuguaugccgggacuagcucaugacaagcuuuguaugaucugcaaacaaguuuuagac

SEQ ID NO: 4111503 - RNA, 122 nt, Human
gucaaagaaaggaaugggucaggccugaguaggcugagcaguucuccuugguaggggcugcccugugagcuccacacugaggggaacugauuggaauauggggacugguucugccuagugac

SEQ ID NO: 4111504 - RNA, 66 nt, Human
gucaaagaugaugcugaaguuauuagcuugggugacugaggaaaugauaaugccauuaacuuugau

SEQ ID NO: 4111505 - RNA, 104 nt, Human
gucaaaggagaggggcgcauggcugugugugagaagcagguugagggaacuccuucaugcauugcagcacauucagcagcguugccagccaaucucuacuugau

SEQ ID NO: 4111506 - RNA, 127 nt, Human
gucaaauaauucaucuguccuucuugccuuuggagaauuaagagagaaggggugucugcuuggcagagggcaucagagacaaaccuuguuuuaugauggagggggacggauagacgaagagaaaggc

SEQ ID NO: 4111507 - RNA, 56 nt, Human
gucaaauauuaugcagcuuggauacccaauuuaguaugagcugcuuuguauuuggc

SEQ ID NO: 4111508 - RNA, 76 nt, Human
gucaaauugucuagaauugcuuggcagaugcacugagaauaauuucccuaucuuucaacuagccugaugauuugac

SEQ ID NO: 4111509 - RNA, 66 nt, Human
gucaacaaguaguuuucuuccacaguguuccuagcugggugugcagaaagaaagagacuuggggac

SEQ ID NO: 4111510 - RNA, 55 nt, Human
gucaacaauuccaguuuuuacugugauaaucacaaagggagacuaaacuguugac

SEQ ID NO: 4111511 - RNA, 107 nt, Human
gucaaccccauuucuccagagcaggauguacuauuccuuuauaaauugcuuugaaacgucuuuauaaagguuugugcauauuugucugcuuggggagcuucagugac

SEQ ID NO: 4111512 - RNA, 62 nt, Human
gucaacuacauguuuucccucagauggaaaauuccagaggaauugggaaacauguacaugau

SEQ ID NO: 4111513 - RNA, 58 nt, Human
gucaaguacaaggcaguuucuacuucuacauuccuguagcugcagccauguacauggc

SEQ ID NO: 4111514 - RNA, 84 nt, Human
gucaaguacugugguaacacuucauugcuaagaacaagguauuuccuucaccuuucagaguuaaugagucuaucagugcuagau

SEQ ID NO: 4111515 - RNA, 130 nt, Human
gucaagugauggggcgggggauggggaaagagaagucugccgcuccucuaggcuaccgcaccgccuuaaguggguggcucggccagugcaggccucacuuuccuccccuguaaggucuggggggcuugac

SEQ ID NO: 4111516 - RNA, 59 nt, Human
gucaauaaguuuguaacuggauuucucucuggagccaguggaugaggacuuaacuuggc

SEQ ID NO: 4111517 - RNA, 87 nt, Human
gucaauauuaauggggaggauucuggguccugugucuugcuaggauuuccagggacggcaauuccagaaguuuuccgauuaguuggc

SEQ ID NO: 4111518 - RNA, 102 nt, Human
gucaaucaccugaggacuuauuaaaaugcggauuuggcuacaguaggucuggagugguaccugagcaucugcauuucuaacaagcucccagaagguguggac

SEQ ID NO: 4111519 - RNA, 84 nt, Human
gucaaugaauguguguuguuacaagcugccagguuaaagauaauuuuuaaugcaacgugagauaauuaacacaaaucuauugac

SEQ ID NO: 4111520 - RNA, 66 nt, Human
gucaauguucacugucuccuagggggacuuccuggaggaggccaacuuuggagaacaggcauugac

SEQ ID NO: 4111521 - RNA, 75 nt, Human
gucaauguuuugccagaaaaucaaagucagaagccaccuaggugcgcucagaaaagauuuucuucaaauauugac

SEQ ID NO: 4111522 - RNA, 80 nt, Human
gucacaaaugauugaagcuagaacaaccauuaagggaaaaccaagaaaaucccaaaugauuuagccuuagucuuugagac

SEQ ID NO: 4111523 - RNA, 72 nt, Human
gucacaacuauucagcucuggaguuguauagcgucaggggccauauacaaugagugagugaauggguguggc

SEQ ID NO: 4111524 - RNA, 55 nt, Human
gucacaaugcaaguguucaguggccacaaguggcuagugacaacuguauuggaac

SEQ ID NO: 4111525 - RNA, 75 nt, Human
gucacacauaacuguaguuauaaagcuaucccuuaagaauuggguagauuuaaaacauuacagcguugucaugac

SEQ ID NO: 4111526 - RNA, 63 nt, Human
gucacacugaaauucuuugauguuaccuaaggucauaggaauguuuagaaugucagaaugugc

SEQ ID NO: 4111527 - RNA, 65 nt, Human
gucacauccaggaugccacguuauauuuagucauuaugucuucuuuggcuccucuuggcuguggc

SEQ ID NO: 4111528 - RNA, 73 nt, Human
gucacaugauucagcccaauuuuucuaccccuuccccuggcaacggugguugaacuugggcuggucauaugac

SEQ ID NO: 4111529 - RNA, 73 nt, Human
gucacaugugacaguuuugcuaaaagguugagauuagucguaaagugucuuuaucaagucuguucuuugugac

SEQ ID NO: 4111530 - RNA, 81 nt, Human
gucacauuauguugcacaaaguccauccauucuaccuagggagaaagauggaagagacuucauggggcgaguauuuuuggc

SEQ ID NO: 4111531 - RNA, 61 nt, Human
gucaugggccacauuccaaaccagcugccuugggcagcugcugggagaagugagccaaggc

SEQ ID NO: 4111532 - RNA, 66 nt, Human
gucauggguauaauuuuagauguuuucuggcucugaagccuugcauuuaaauuugaacuucagaac

SEQ ID NO: 4111533 - RNA, 57 nt, Human
gucaugucuuccuugcacacacacacuagaugguguugucagcucaggaaacaugac

SEQ ID NO: 4111534 - RNA, 83 nt, Human
gucaugugagguauaauuuucaguguaaauguuuuauuacaauauaacauacauacagaaaagugcauaaaccuuauguguac

SEQ ID NO: 4111535 - RNA, 63 nt, Human
gucaugugcuaagcaggccucuggcucuuguuuaccucuaugaggccucuucauggccaugau

SEQ ID NO: 4111536 - RNA, 102 nt, Human
gucauuaaauauuuaugcuccuuagcugauguuucugggagaauauuuaauuauaaaagaaguguuauuguccagcacaguuggggauagauucggugagac

SEQ ID NO: 4111537 - RNA, 73 nt, Human
gucauuacauaugaacuuuauaacuuggagacacaggcccaguaacagaaauuaagguucauauguucuuggc

SEQ ID NO: 4111538 - RNA, 73 nt, Human
gucauuacucucuaauugaugccugggguagcucucuucccugaagcaaggcccagagcaucagcagaaugac

SEQ ID NO: 4111539 - RNA, 65 nt, Human
gucauuacuuaaacccagauuauuauagacuguucucuaauuuuucugucugguuuuagaguggc

SEQ ID NO: 4111540 - RNA, 68 nt, Human
gucauuccuauccauuugauacuguuugccaccacaagaugacagggucaggguucaaaggaacugau

SEQ ID NO: 4111541 - RNA, 77 nt, Human
gucauuccugguugcuggcucugaagggcagguaaauuagaucaauguggccuggaggggaccaggaccaggaugac

SEQ ID NO: 4111542 - RNA, 70 nt, Human
gucauucuucucuuuugaaacuucacagaucucucuccuucuggaaaguuuuacugaggacacauguggc

SEQ ID NO: 4111543 - RNA, 70 nt, Human
gucauugagaugagucagcucugcucugaauauucccuuauuuuagcaaggugacaucaugcugaguggc

SEQ ID NO: 4111544 - RNA, 96 nt, Human
gucauuguaggucauagggagaagcccuuuuuccugguaguuuuguguaccauaauaaacaguagagaaaggugguugucuguguucuguaaugau

SEQ ID NO: 4111545 - RNA, 58 nt, Human
gucauuguuucaaaucuuucucucccuguagcagugagagccuggucugagauaggac

SEQ ID NO: 4111546 - RNA, 75 nt, Human
gucauuuagaaauguggcagaaucauugugugguaauuugcacauaaauggugccauguuuuauuuagccaugac

SEQ ID NO: 4111547 - RNA, 81 nt, Human
gucauuucuuuauuucuucauuccguagauauuuauugagcaacuuagaugaaucagaagagugugagaaggaggagagac

SEQ ID NO: 4111548 - RNA, 76 nt, Human
gucauuuggaaauguaagaaugcaauuaagccuguaaaaauaacuaggauuuugcucauucucauauuuccuuugc

SEQ ID NO: 4111549 - RNA, 84 nt, Human
gucauuuuuagauuaccuucaaacuuucauuaaccagaaauaaggauuugaguagagagaguugaagagcauaauagaauugac

SEQ ID NO: 4111550 - RNA, 61 nt, Human
guccaaaaguuuucccccagugguuuuaaguaaucuucuggaucugagggggaagauggau

SEQ ID NO: 4111551 - RNA, 98 nt, Human
guccaaagucaagugucagcaugguuggguucuggggagggcucucuuccugguccccagauggccagcuacauguuguguccucacauggcugggac

SEQ ID NO: 4111552 - RNA, 83 nt, Human
guccaagauacaagugcuagcagauauugugucuacuggggacccacuccugguucacagccuucucuucacugugucuucac

SEQ ID NO: 4111553 - RNA, 73 nt, Human
guccaaggguucacagacucuugauugucuaagcauuguuaagauccaggcuucugugcaauagcucuugaac

SEQ ID NO: 4111554 - RNA, 83 nt, Human
guccaaucucugccuuacucauuuuuauaaagaauacaguuguuucuacaguuucuuagaugauuaaugaugggggauuggac

SEQ ID NO: 4111555 - RNA, 87 nt, Human
guccacagagaucagcaguguugugauccaggucuucuauuuuaagggacauauauaagacagaugcaaccugcuagcuauggagac

SEQ ID NO: 4111556 - RNA, 77 nt, Human
guccacagagcccugcaggaggugggagaguagcuagcaagcuuuuccuccucucccucccugccuggcccuggggc

SEQ ID NO: 4111557 - RNA, 104 nt, Human
guccacauuuuuagauauuuguuauagcaacaccccaauuuucuaguacuaguuucuguuuuaguccauuuguccugcuauauaaaagugccugagacuggguc

SEQ ID NO: 4111558 - RNA, 84 nt, Human
guccacccuccacugcagccuagggaccacaguauuguacuguucuguacacacggggcucagggucuguaggugaaaauggau

SEQ ID NO: 4111559 - RNA, 63 nt, Human
guccacugaaggucaacauagagcaaagcuuugcuauggcuccagauaugucaccuucaagac

SEQ ID NO: 4111560 - RNA, 126 nt, Human
guaauguauucuugcuguuacaauuguauguuaaauuuguuaaaagugagugacaguugacuaauacuguccugcaauuaaggaagacauacaaaaaaaucagguauuggcuaauggauacaugac

SEQ ID NO: 4111561 - RNA, 59 nt, Human
guaaugugauuauuuaaaucaauaaaaauuaugugguugguauaaguaaucauaauugc

SEQ ID NO: 4111562 - RNA, 62 nt, Human
guaaugugccagagacaugacuagcugccucuuuggcccuggggaagugugucuggcccugc

SEQ ID NO: 4111563 - RNA, 59 nt, Human
guaauucagacaguuauuuacuuaccuguuagugaaaagucuuauauugucugaauugc

SEQ ID NO: 4111564 - RNA, 60 nt, Human
guaauugggagcuaauaccagauacacuuugugucuacuccugugcuagcucccauuuau

SEQ ID NO: 4111565 - RNA, 60 nt, Human
guaauugugguuuguugauaaauauuucaggucucuagaccuggaacaaacugcaaugac

SEQ ID NO: 4111566 - RNA, 69 nt, Human
guaauuugagcaaucuaauaguuuagcguguuucuguaccaggcugucuguuguauuauucaauauuau

SEQ ID NO: 4111567 - RNA, 75 nt, Human
guaauuugauguggccccacuuagcugugcuugcuuuuguugaguacaguuuuggugucauauccaugaaauuau

SEQ ID NO: 4111568 - RNA, 88 nt, Human
guaauuuuauuuguauuucaugcaguaaaauuggaccagugauuguguuugaccuggccuauuuauuguguugaaacugaauuauuac

SEQ ID NO: 4111569 - RNA, 97 nt, Human
guaauuuuucuuugugagcuaauuuucaaugagguuuuaacuugggaaacauuuuguaaacuuguuugaagguauggcccaucaaauggauuugugc

SEQ ID NO: 4111570 - RNA, 62 nt, Human
guaauuuuugcuagaagaucagcagcuaagagugcuguucauuuacuguaggcaaaaauugc

SEQ ID NO: 4111571 - RNA, 95 nt, Human
guacaaaacacauuuauagguauauucacugaaugaaaacugguuucuuugccacuccucagugagcauacaguauagaauguguauuaaugugc

SEQ ID NO: 4111572 - RNA, 77 nt, Human
guacaaauuaauaauuauuugagagcagaccagaaaucuguguuugaauaaguucuccaagugauucugaugccugc

SEQ ID NO: 4111573 - RNA, 93 nt, Human
guacaagcuuuuguguggauguacguuuucauuucucuuggguagacagauaccuaggagagggaaaaucuaggcacuuugagucuacuguac

SEQ ID NO: 4111574 - RNA, 77 nt, Human
guacacacaugacagugcuuagcaaacugugucauacaacacaguuuuuauuauuuguuuuagaaagguguguguau

SEQ ID NO: 4111575 - RNA, 90 nt, Human
guacacacuauuaucgcaguuggaguagaauaaaggagcgacauggucuauaauccuauuucaacugcuuccuagauuuuggcuuuguau

SEQ ID NO: 4111576 - RNA, 55 nt, Human
guacacauagacaaaaccuggcuuuaguuccuaaagcuauugcuguuuauuguac

SEQ ID NO: 4111577 - RNA, 71 nt, Human
guacacauauuuccaaggguaaauaaacaccagccugaauguuuggugagauuagcuuuggcaauagugac

SEQ ID NO: 4111578 - RNA, 95 nt, Human
guacagacugugcacugcacaacuccagggucaccauucacauagucugcaaugugauuggcaucccuuggaauugugcggugcacaaccugugc

SEQ ID NO: 4111579 - RNA, 61 nt, Human
guacagagaagcgaagcaggcccagaacccaagcucuggcuccuaaucggcuucuuucuac

SEQ ID NO: 4111580 - RNA, 83 nt, Human
guacagaugaaccauauauuuacaguugacauugggucugcuugggcaauuaucugcugugauuguuaguuccuauacuguac

SEQ ID NO: 4111581 - RNA, 99 nt, Human
guacagccucagagucucagguuucccaggugcccuauagauucucccagagucccaagggcagugggaaagccugcuccucucucccaggggccuugc

SEQ ID NO: 4111582 - RNA, 59 nt, Human
guacagccugauuuggagccacuguuacagugugugcauuggcuccuagucagcugagc

SEQ ID NO: 4111583 - RNA, 97 nt, Human
guacagcucagaguuggccccucauuaguggcaagggagcugggguauuuauauacuggcucccaucagucauugguugaggguugcucugaggugc

SEQ ID NO: 4111584 - RNA, 103 nt, Human
guacaggcuucuggguucacuucucuguauuagcugccuuggagcuaagaaguuuuccucuuaauaauaaacaguugaagaugguugaacacagaagccuugc

SEQ ID NO: 4111585 - RNA, 88 nt, Human
guacagucuuagguaauuucaugggcauauucucuaccucaugacuucucaauuuuaagaaagugugcuuaaguuuaucaggauuuac

SEQ ID NO: 4111586 - RNA, 65 nt, Human
guacaucccagcugcccagacauugaaucaggaaauuuuucugagaaaggcagguggguaugggc

SEQ ID NO: 4111587 - RNA, 79 nt, Human
guacauggguguguccaggcgggagucaaggauggucaccaggaugaggaccccauugcccaguaggaucaccagguac

SEQ ID NO: 4111588 - RNA, 56 nt, Human
guacauguaaagcauccuucuagggugaacgaucauccaggaaauuuuuacauuac

SEQ ID NO: 4111589 - RNA, 63 nt, Human
guacauugagcacguacuaugugccacacagugacuggcacauaguauacacucaauaaauac

SEQ ID NO: 4111590 - RNA, 62 nt, Human
guacauuggcaacucucuuagauauugcaauauucagcucuaaagugguggugcuaauguau

SEQ ID NO: 4111591 - RNA, 71 nt, Human
guacauuucuaugcuagucaggauagcuagguuguuggcuggguccuaugcugguagagaagccauuguau

SEQ ID NO: 4111592 - RNA, 62 nt, Human
guaccacagaggacaacuaggcgcucagcccacuuaugcagcugagucuuucccuugcguac

SEQ ID NO: 4111593 - RNA, 99 nt, Human
guaccacaggccugagcacuuagcagggcucuuaaaguuugauuuuguaauugguacagcaggcaguguagagccuucauaggugcuagcuuuagguau

SEQ ID NO: 4111594 - RNA, 69 nt, Human
guaccagcucacagaaauccugcaggaggcuguagcuucagcuucucuagcucugucuguugggcuuac

SEQ ID NO: 4111595 - RNA, 68 nt, Human
guaccaggcauggggccgcuccuggucccuuuuccggaccauaaaagggcagccucggugccugcugc

SEQ ID NO: 4111596 - RNA, 67 nt, Human
guaccaguugcuuaaacaagacagucauuucuuuacuacacaaaugaugucuggaggcaugcuguac

SEQ ID NO: 4111597 - RNA, 61 nt, Human
guaccaugggaucuagggcccaccuagguaggcaucucuaguggggccauucaccugguau

SEQ ID NO: 4111598 - RNA, 78 nt, Human
guacccaggaccuugccagauaaacaguggagacuacaugcaucugcugaaaucugcaugcaaaguccuauaagguau

SEQ ID NO: 4111599 - RNA, 61 nt, Human
guacccuggaucacuggggagcuuuaaaaaauccucuuucgggcugcccacuccagaguac

SEQ ID NO: 4111600 - RNA, 71 nt, Human
guaccgaacccuguauacgcuacauuuuuuccuauacauuggugaguggguaguguauacaguguggauac

SEQ ID NO: 4111601 - RNA, 68 nt, Human
guaccuuaagcuaagugaaauaagucagucacgaaagaauacugugugauuccacuuguuugagguac

SEQ ID NO: 4111602 - RNA, 130 nt, Human
guaccuugaaagaaggguuuauuuccugacugucagucaacuguggccugauuagagggagcaggaucugaggaggucagagucuggcuguggagucauuucugaugaguuuuucuuuuaccuauaauac

SEQ ID NO: 4111603 - RNA, 83 nt, Human
guacgaguuucacaugcauggauguguguguguguguguguguguguguuucacauggaccaugcaggagugaagcuguguau

SEQ ID NO: 4111604 - RNA, 62 nt, Human
guacgcugagaacagaacaaaaagguuucucagccaaaugaaccuucaguguucucagcugc

SEQ ID NO: 4111605 - RNA, 129 nt, Human
guacguaauauuugauauaauggauuucucuuaaugggaaggauacguuacaagauaaagacagaauucauugccuuuggcuuauuuuuuccuacagggaaauagccucuaccuuauuuaguauguuuc

SEQ ID NO: 4111606 - RNA, 68 nt, Human
guacgugacaaucucugcgcugagaauuccacaugccucacuucagcucaucugagugucagcgcuac

SEQ ID NO: 4111607 - RNA, 56 nt, Human
guacuagguuccauacucaaagauugugauuccacuagucugugugggaccagggc

SEQ ID NO: 4111608 - RNA, 65 nt, Human
guacucaagagucugcaguagucugagcaaaggauuaacauggucagaaagcugauucuugauac

SEQ ID NO: 4111609 - RNA, 115 nt, Human
guacucagagaagugcucccagcagaguaggugcuacuucugccagucucuccaucuuacccuuccaugaggcuuauguacagaaugccuauuuacugcugaccuucuccaguau

SEQ ID NO: 4111610 - RNA, 65 nt, Human
guacucaggcuucaggcacagcuguguccaggugcugaauguagcuaguguuuggagauggaugc

SEQ ID NO: 4111611 - RNA, 87 nt, Human
guacucaggguugggacuuuggaacagccuugcuacucuggggugcuugcagcagggccuguacaagucccaccccagcccugguau

SEQ ID NO: 4111612 - RNA, 72 nt, Human
guacugagaggaacaucuuaugcuucuaccuguguuugcaaagugaagucucuaagacugugccaucauuac

SEQ ID NO: 4111613 - RNA, 77 nt, Human
guacugcuuugagauccagauuuccauuccuuuggauaaauacccaaaaguaggauugcugaaucauacggcaguac

SEQ ID NO: 4111614 - RNA, 77 nt, Human
guacuggugauacaucugugaucaagacagacaguguugcauacauuuuugugagggaaacaggaaaguuaucaggc

SEQ ID NO: 4111615 - RNA, 71 nt, Human
guacuguacauaugucuccagagugugggagcuucauaaacaacacauuuugaucugagcagauguacugc

SEQ ID NO: 4111616 - RNA, 56 nt, Human
guacugucuggaguugccaaaggcuauaacauaugccuuuuugcuuauggacagac

SEQ ID NO: 4111617 - RNA, 82 nt, Human
guacugugagaaccaacuuuguguguuuaauauggcuguaugcucagcuaaauuaaaacacagagguaaagcucuaccugac

SEQ ID NO: 4111618 - RNA, 74 nt, Human
guacuuaugcaaagccacccagggacgaggcccucuucagaguggcuguguguuggcuuagcauuccagagugc

SEQ ID NO: 4111619 - RNA, 67 nt, Human
guacuuauuuuaauguuuaguugucaucaguucaugccuaagaggacaaagcacuugaaauguguac

SEQ ID NO: 4111620 - RNA, 67 nt, Human
guacuucagcucugaggaacacuccuuuacuuucuuaaacuuuugguccucauggguugcucuguac

SEQ ID NO: 4111621 - RNA, 109 nt, Human
guacuucguagaaggauauagaaacuguuaauugaaaugauguguuuggauagccuaugaguuacuagucacgucuuucaguuaccucuggcuccuguuaaugaaauac

SEQ ID NO: 4111622 - RNA, 73 nt, Human
guacuuguaaagugucugugucugucauuuucuguuauuagauagucaaaaugaagcaaaggcauucagguau

SEQ ID NO: 4111623 - RNA, 56 nt, Human
guacuuucaggcuuucccuuaacuccaucgagaaggaagagggaguaugugaguac

SEQ ID NO: 4111624 - RNA, 88 nt, Human
guacuuucucaaauauuggggauguagaaaugaacaacaggcaaaaauuacugcuguuguaaaucuuacacucuaguggggaaagaac

SEQ ID NO: 4111625 - RNA, 93 nt, Human
guagaaagagcaaugcacuugagcuugaaagguaugcucuccucaccuacccaggagcaugucuaacucuucagggugugcuccuuucuucac

SEQ ID NO: 4111626 - RNA, 64 nt, Human
guagaaaugagauuucaccauguuggucaggcugguuucgaacuccugaccucaggugaucugc

SEQ ID NO: 4111627 - RNA, 95 nt, Human
guagaacuuuacugagauugcaugucuagcuccuacuccaaagcugaaagcucuuuaggggcucagaacauguccuuggucucuguacaguuuac

SEQ ID NO: 4111628 - RNA, 85 nt, Human
ggguguucauuaaguuucaagagguucuuugaauuucaccagagguucaauuucgucgucucucuagaugaaauuguugaauccc

SEQ ID NO: 4111629 - RNA, 56 nt, Human
ggguguucccauuuuacagaugaggacucugagucaugugagaggguggcuugccc

SEQ ID NO: 4111630 - RNA, 55 nt, Human
ggguguuggggcccugauucgcccaugggccaccgucagagaugcccaacugccu

SEQ ID NO: 4111631 - RNA, 88 nt, Human
ggguguugucagcugccucccgccuuggcuucaguagcucacccagcuuacaggggagcugcccugggcuggagaugggcaugcaccc

SEQ ID NO: 4111632 - RNA, 55 nt, Human
ggguuaaagagcccaauguaugcuggauuuaguaagauuugggcccucccaaccc

SEQ ID NO: 4111633 - RNA, 90 nt, Human
ggguuaaaguagauaacagaugugaagugcuaauaguacauaaugaaacaaguacauauuagguauuauuauuauuauuugcuaggauuc

SEQ ID NO: 4111634 - RNA, 56 nt, Human
ggguuagcagcauccaccaggugaucugacagugacaccagguggcugaugacacc

SEQ ID NO: 4111635 - RNA, 69 nt, Human
ggguuaggucccucccuucuggagucuucacuacuacacuuucaaagaaaacacagauggaucuaacuc

SEQ ID NO: 4111636 - RNA, 70 nt, Human
ggguuauugcgacccuagcccccucacuucucccuccgaggcuaagugugggacuagggcuccagggccc

SEQ ID NO: 4111637 - RNA, 88 nt, Human
ggguucaagagagaugucuuugaggcucacugcugccuaguccacuaccugcaaaguguggcacaagucacaucuguuauugaaaccc

SEQ ID NO: 4111638 - RNA, 91 nt, Human
ggguuccagagaaugggguagugggcagccuggcaggcagggugccaggcacagaggccgaaacccaggcagccugcuccauucugagcuc

SEQ ID NO: 4111639 - RNA, 90 nt, Human
ggguucccagggaaccuggcuccacaggccagggugugggaggaccgccuggccacaccucagccauguggaggcggcaccugcacaccc

SEQ ID NO: 4111640 - RNA, 72 nt, Human
ggguucccucugugguggagugggcaugagcaguacugagacguucaucuugguccuggcacaugaguuccc

SEQ ID NO: 4111641 - RNA, 100 nt, Human
ggguuccuccuguaggggggcauggacuuuucuucccuuuguggcugcugugcaaaggggacagaguccacuggugcccauccuguacgggugggagcuc

SEQ ID NO: 4111642 - RNA, 93 nt, Human
ggguucugucuacagcccuggcucccagcagcgcuguccucucacaggcauaguugcccccagcugggcugugcuccacugugacaguagccc

SEQ ID NO: 4111643 - RNA, 82 nt, Human
ggguucuuaucaagcuuacggucauacagcuaggggaucgaagaacagggaucccagcccagauuugugugacuguaaaccc

SEQ ID NO: 4111644 - RNA, 58 nt, Human
ggguucuuugugcugaagaagcccuaaggugguccagggagaugccacaaagaugccc

SEQ ID NO: 4111645 - RNA, 67 nt, Human
ggguugagaaauaggugcugucagggccaaaacaagcuuggucucuguguucccuguuuucucuccc

SEQ ID NO: 4111646 - RNA, 58 nt, Human
ggguugcuaauaggaguuucuguuguaugccuuaggacagaacuucaguaguauuccc

SEQ ID NO: 4111647 - RNA, 92 nt, Human
ggguuggcuacauggcggggcggagguaucuuuagugggggaacagcguugugccaccaggaggggucucugucucccagguagaggaauuc

SEQ ID NO: 4111648 - RNA, 103 nt, Human
ggguugggaagaauggggaaaucaucugggaucucugauuggucacucgaauucaguagguguggcagguagaguucugagauggcccccacgauuccuaccc

SEQ ID NO: 4111649 - RNA, 55 nt, Human
ggguugggcuugucugggaaacugcuucaaucugaggccuaguuaggcucggcuc

SEQ ID NO: 4111650 - RNA, 88 nt, Human
ggguugguuccaagucuuugcuacugugaauagugccacaauaaucauaugugugcaugugucuuuauaguagcaugauuuauaaucc

SEQ ID NO: 4111651 - RNA, 58 nt, Human
ggguugugggauagagaaggagacagguuguuuucauuccugagcccauauuuaaccc

SEQ ID NO: 4111652 - RNA, 66 nt, Human
ggguuguucuggguuugcugauguucagguugucucugaauuacauggugugcugagaaugacacc

SEQ ID NO: 4111653 - RNA, 89 nt, Human
ggguuuaauuugcauuucccauugaguaaugauauugagcauuuuucucauguuuauuggccaguuggauuuguauuuugguuaagccu

SEQ ID NO: 4111654 - RNA, 117 nt, Human
ggguuuauaggcacgagacccugcacccaaccuagaguugccuuuuuuaagcaaagcaguuucuaguuaauguagcaucuuggacuuuggggcgucauucuuaagcuuguugugccc

SEQ ID NO: 4111655 - RNA, 58 nt, Human
ggguuuauaucacagcuuuggcacuuacugggugucugugagcaacauauguaaacuc

SEQ ID NO: 4111656 - RNA, 130 nt, Human
ggguuucaccguguucgccaggauggccucgaucuccugaccuugugauccgcccaccuuggccucccaaagugcugggauuacaggccucagccaccacgucaggcccuucuagaggauauuuaaaccc

SEQ ID NO: 4111657 - RNA, 116 nt, Human
ggguuucaccuuuuaaaaguuggcugacugaagcacuucuccuuuauuuccugcaauagaaaugucaaagacguguuuuuguuaugugcccugucugcuuuuguuuuuuuuaaccc

SEQ ID NO: 4111658 - RNA, 57 nt, Human
ggguuucuaaauguucugaguuuuuauucuaagggccauugaugcauuuagaaacuu

SEQ ID NO: 4111659 - RNA, 58 nt, Human
ggguuucuacaaccacacucucagcccgacugacuugcugcgagugcugguggagcuc

SEQ ID NO: 4111660 - RNA, 98 nt, Human
ggguuucuauauuucuucuuaaagcugcaguaucuuaaaauuuguagccuguagucccagcuacuugggaggcugaggcaggagaauagcuugaaccc

SEQ ID NO: 4111661 - RNA, 80 nt, Human
ggguuugacucugagcaguuucugugcagccacaaagauucuuaugugagacacacugcugcuucagagugcuccaaccc

SEQ ID NO: 4111662 - RNA, 70 nt, Human
ggguuuggaaggagucaaccagcugaaggugccaauaugacugucaguaauguugccuucuuuagggcuu

SEQ ID NO: 4111663 - RNA, 58 nt, Human
ggguuuguggagcuggaaacacugaaugaaugucagugcagcuggaucucagagagcc

SEQ ID NO: 4111664 - RNA, 57 nt, Human
ggguuuguuuuuguuccuguaaaacuggauugguucugcagaggcacaaacaagccc

SEQ ID NO: 4111665 - RNA, 83 nt, Human
ggguuuuccugaaccuccaagcugguccucugugucguugcuguccaggaacaaaggacaggagcugagggacaggaaacccc

SEQ ID NO: 4111666 - RNA, 99 nt, Human
ggguuuucuagguggugcuccuggcuucagguugggcuuagguccgguccacaugucauucuagggucuaggcugaaggggaagugcuacugaaggcuu

SEQ ID NO: 4111667 - RNA, 56 nt, Human
ggguuuucuucugcagaaaagauuaaaggaaaauuguuuuagcagaaagaaagcuc

SEQ ID NO: 4111668 - RNA, 106 nt, Human
ggguuuuuauuauugguccagguuuaaaacauuuuaucuauuuaaaacauauguuguguguuuuaagaaguuauguuauaaauaacagcauugugguuaagagccc

SEQ ID NO: 4111669 - RNA, 68 nt, Human
ggguuuuuuucauaagguaagagagaugaauaaguuaucacuuuuucauugaugggugauagaaacuc

SEQ ID NO: 4111670 - RNA, 82 nt, Human
gguaaaaaggucaagaaacugaacaacugaauaaccaaauaaguaggcgaaaccauuugguuacucaguugucugaccaacc

SEQ ID NO: 4111671 - RNA, 102 nt, Human
gguaaaaaguaacauguuuaugggcuggcucauauaguaugaaugaaagaauuaugugucuucuaagccaagccuguuuuggcauauaaaauaauuuuuacc

SEQ ID NO: 4111672 - RNA, 90 nt, Human
gguaaaaaugauuuucuggucacauguuauuaaccauaauaaacuaaauagaaaaaugguaaguggggaaagggcuagguuauucauacc

SEQ ID NO: 4111673 - RNA, 55 nt, Human
gguaaaacugcagaacuuggagguccugaugagagguuucugucuguguuuugcc

SEQ ID NO: 4111674 - RNA, 125 nt, Human
gguaaaguuucaguuuuucuuuagauguaaauuuucuuagcaauccuaggcuggaucagccuuuugguauguuuaugauuuucuaugauugcucagaaacuacucauaguggcugagaugauacc

SEQ ID NO: 4111675 - RNA, 60 nt, Human
gguaaauaugugucauggugguuuguugcacagaucagcccaucacucacguauuaagcc

SEQ ID NO: 4111676 - RNA, 59 nt, Human
gucugcccucacgccagcugggcucugccugccuugggggcucuugugagggagcagau

SEQ ID NO: 4111677 - RNA, 83 nt, Human
gucugcccucuaacagggcuuugaacaggcaucaagggccucuugcccuuguugauuggacacagcccacaaagagaccagac

SEQ ID NO: 4111678 - RNA, 61 nt, Human
gucugcccuuggccugggacuuugggcuuugguucuaaguuccuaaagucaggggucaagc

SEQ ID NO: 4111679 - RNA, 71 nt, Human
gucugccucaugggaguuuggccacagccaaggugcuccucuuggauugcagcagcuccugugggcagcac

SEQ ID NO: 4111680 - RNA, 73 nt, Human
gucugcuacugacaggcaugucaguuguuuuaguguuuugcugacaaugcugaaugcugcaugccguauagac

SEQ ID NO: 4111681 - RNA, 73 nt, Human
gucugcucuaccucccccauuuucccauuccuucacucuccagaguaggaaagauggaaggaggauaagcagc

SEQ ID NO: 4111682 - RNA, 60 nt, Human
gucugcucuguaggugcucuggugcagggcugagaccccaggcaucuaaagagaguagac

SEQ ID NO: 4111683 - RNA, 96 nt, Human
gucugcuggauaauuacguuuucuaaguaagauuaacuucuuaauuacuugugaaggagaagcuguaauauugaacugugauugcuuuuggcaggc

SEQ ID NO: 4111684 - RNA, 70 nt, Human
gucugcuggccuagacagacccugaucuccacccccaacccggauccugggcccuucugggucaccaggc

SEQ ID NO: 4111685 - RNA, 74 nt, Human
gucugcugugggugugguucguuuaagacagggucucacuuugucacccaaugaaugccaccccuuaaguaggc

SEQ ID NO: 4111686 - RNA, 55 nt, Human
gucugcuuccuaucuaaagugugccauggccucuuuucaaagacuggaggcugau

SEQ ID NO: 4111687 - RNA, 63 nt, Human
gucuggaaaguuuggcuuuuauuuuggucauugaaguuaaggcacaugcuuuggaaaccagau

SEQ ID NO: 4111688 - RNA, 63 nt, Human
gucuggaagacuugcugcauccuugcuggagugauugagaagggaacaagcaagcugcuaguc

SEQ ID NO: 4111689 - RNA, 57 nt, Human
gucuggaggagcgaggaagacggaagcaugugcuggcccuucucuugcuuccuggac

SEQ ID NO: 4111690 - RNA, 62 nt, Human
gucuggaguucuuauauggaggcuggcuuucccccagagugagcaucacaggagaaccaggc

SEQ ID NO: 4111691 - RNA, 75 nt, Human
gucuggcaaauaaugucuucuuuuaauuuggcauuuggagugccaggcuggugcaaggauauucucaugucagac

SEQ ID NO: 4111692 - RNA, 58 nt, Human
gucuggcuuuugcccuguguuucuuuaaaguugacucuaugcagaggcugagccauac

SEQ ID NO: 4111693 - RNA, 83 nt, Human
gucuggggauuggugacaauggcaacagcaucucaaucuuuuccuaagagauaucugagccuuauucaccagcccucauagac

SEQ ID NO: 4111694 - RNA, 86 nt, Human
gucuggguaaggggaguuugccuauugcuuuuggggugcccaaaguggggucauaccagcagcccaagcacacaccccuuccaggc

SEQ ID NO: 4111695 - RNA, 105 nt, Human
gucugguaagucuggaacuuaggacacuaaugagaaaggaauuaauuuauuuuuguauucaacguuauuaagcucuuuuuacauguuagguucuacacgcuaggc

SEQ ID NO: 4111696 - RNA, 95 nt, Human
gucuggucaaaauucugucauuaaauuguggccaacucaauugaucucuuugagccucaagguccucaacuuugacaugggaggguuggaccgac

SEQ ID NO: 4111697 - RNA, 55 nt, Human
gucugguccccauuccaggugggaggguuucccagaguuggucaggggacccggc

SEQ ID NO: 4111698 - RNA, 121 nt, Human
gucuggucccuauucaacacccucuucaagaauuccugcugcccggacuucauagcauucaucuacucugugaagucuaggacaggaagucuauggacaggaagaugguuggugaccugac

SEQ ID NO: 4111699 - RNA, 64 nt, Human
gucugguuggggcugcagucgcagcuucaggcgccucugcugcaggcugcagucucaggugggc

SEQ ID NO: 4111700 - RNA, 65 nt, Human
gucugguuuguguaggccacuagaauccucuuugggaaugaucuacugccuugcacaggcuagau

SEQ ID NO: 4111701 - RNA, 67 nt, Human
gucugucacucaggggcuggaggcuggagcugaggaugcagggagagccaaagccccgaaggcagau

SEQ ID NO: 4111702 - RNA, 58 nt, Human
gucugucauacggcuuauguaaccgugccuuuaggcgauucucauagccugugaagau

SEQ ID NO: 4111703 - RNA, 55 nt, Human
gucuguccaucagcaaaggcuugggaaaagcacccagguaugucccaggauagau

SEQ ID NO: 4111704 - RNA, 59 nt, Human
gucugucucccugugacugagaccaccgcuagugauucuccaaguacagaggggcauac

SEQ ID NO: 4111705 - RNA, 78 nt, Human
gucugucuggguggcuguccagccagccaucaggcugucauuuuucugcugucuggcuguccagcuuaucuaucuggc

SEQ ID NO: 4111706 - RNA, 117 nt, Human
gucugucuguugcuuuuucaggacugcuuaguggugugcaaagggguguucccaggccuuaacaucuacccuguggauaucacuauuuuggaagccuauuaguagcagcaguuagac

SEQ ID NO: 4111707 - RNA, 61 nt, Human
gucugugcuuuccuagggucuugccuuugugcaggucccucugcucuagagagccacagau

SEQ ID NO: 4111708 - RNA, 56 nt, Human
gucugugucuguuuucggucacugaaaacagugacugaaaggauccuagcagagac

SEQ ID NO: 4111709 - RNA, 62 nt, Human
gucugugugaguuacucuucucauuuauaaaagaaggauaauaauagugcucacucacagac

SEQ ID NO: 4111710 - RNA, 63 nt, Human
gucuguguguauguagugaaaacuguagaaaaucagcaguuuauuguugcguucacauaugac

SEQ ID NO: 4111711 - RNA, 82 nt, Human
gucuguugauuucuguacacccacuauucauuguguucaagcuuugaugaaaauacugugguugauaggaagaaauuauggc

SEQ ID NO: 4111712 - RNA, 78 nt, Human
gucuguuguguggugaagcagagaugcuaauccugguccuucgugagcaucgucuucaucucacaaaaacauccagac

SEQ ID NO: 4111713 - RNA, 59 nt, Human
gucuguuuuggucaccuuuauauccccagccuggcagauauuaggugcucaauacaugc

SEQ ID NO: 4111714 - RNA, 73 nt, Human
gucuuaagaaugaaugcugagauuuagcucuagcuuacuagaaugccuacucucuccauuaugucuuacagac

SEQ ID NO: 4111715 - RNA, 81 nt, Human
gucuuacaaaggcuucaaguucugaaauagaagugucuuucuggguuaagcuucccagaggcacucuuguuuugccuagac

SEQ ID NO: 4111716 - RNA, 60 nt, Human
gucacaucaguccaccacugcaguugcuuuuagcugccacauggugucacuguugaagac

SEQ ID NO: 4111717 - RNA, 57 nt, Human
gucacaugguuuucauggcauuaguucagcuccaagugucagaaauaagcaugugau

SEQ ID NO: 4111718 - RNA, 96 nt, Human
gucaccagauggggccucaccauucucagggcagauauugguaaagcaaagggagugugagcccuggaguggugcgguuuggguucuagucuugac

SEQ ID NO: 4111719 - RNA, 72 nt, Human
gucaccagccugccuucccagcuuggcuuuuucauuaccuuggagaaagaagccgggaggcaggccaguugc

SEQ ID NO: 4111720 - RNA, 55 nt, Human
gucaccagucccagcuccugaaugcccacauggccaucccagcugccacugggac

SEQ ID NO: 4111721 - RNA, 78 nt, Human
gucaccauggcuugggagaggcuuccucuuuaacaaaagcuguuaggaaagaaguacauucucaugccccggcuugac

SEQ ID NO: 4111722 - RNA, 80 nt, Human
gucaccauuaauuacuuuaugcuaaacuuuacucuuuagguauaucuuggaguauggggcagggugggguggugguggac

SEQ ID NO: 4111723 - RNA, 78 nt, Human
gucacccaggcuggaguucaguggugugaucuuggcucacuacaaccuuacaaccucugccucccaaguucaagugau

SEQ ID NO: 4111724 - RNA, 58 nt, Human
gucaccccgcccgccaucuguuuacaggcugaaagacagcuggcugcggugaggggac

SEQ ID NO: 4111725 - RNA, 57 nt, Human
gucacccugcuggcuguucagcugauguuuauugcugguguuucagccaguggugac

SEQ ID NO: 4111726 - RNA, 62 nt, Human
gucaccgagugacaguagccaucauggcucacaacagccuugacuuccugcacucaggugau

SEQ ID NO: 4111727 - RNA, 62 nt, Human
gucaccuaaccuuacugugucuuaguguccuuuucauaagaggagaaguaaggcuagaugau

SEQ ID NO: 4111728 - RNA, 65 nt, Human
gucacgcagcccuguugcgcuuccggcgccugcugguggcugagcugcagcguggcuucuuugac

SEQ ID NO: 4111729 - RNA, 63 nt, Human
gucacgccugcuuaccaaauuuguggauuacucuaaucugacagaggugguagauacagugac

SEQ ID NO: 4111730 - RNA, 62 nt, Human
gucacgugguggagcccgucuccaucuccacagugcagggaggagauggguaucgccugggc

SEQ ID NO: 4111731 - RNA, 67 nt, Human
gucacguuaacagcuaacagaugaaguuacagauuaacucuucacugccauuaguugguuaauguac

SEQ ID NO: 4111732 - RNA, 59 nt, Human
gucacuggcuuggcaggaggaagaucccuggggguccagaccaacugaccaggcagggc

SEQ ID NO: 4111733 - RNA, 68 nt, Human
gucacugggggaauggaaaggcuucguugaagagugacauuuaaugucuuucaaauucugccuagaac

SEQ ID NO: 4111734 - RNA, 55 nt, Human
gucacugggugcugcgccugucacuuugaauuguugagaggcaagggcucaugac

SEQ ID NO: 4111735 - RNA, 69 nt, Human
gucacugucccggcccccagcccugccccaggccccgggggcuugggcucagacuugaggacagaggac

SEQ ID NO: 4111736 - RNA, 75 nt, Human
gucacuuucaaacauaaacacuuaguagaaugguuguuagguuccauaucugugaaauguguuuguauaagugac

SEQ ID NO: 4111737 - RNA, 55 nt, Human
gucacuuugaagcuguuuuuagcaggauaagaacaaacaauguuuccaaaguggc

SEQ ID NO: 4111738 - RNA, 66 nt, Human
gucacuuuguuagcuuccaauugcuucuguaacaaauuaccacgaaucaguggcuaacaaggaaac

SEQ ID NO: 4111739 - RNA, 66 nt, Human
gucagaagaggacuggguagcucauugugugucuuuuacaaugguaacgacuuuuccuuuucucac

SEQ ID NO: 4111740 - RNA, 129 nt, Human
gucagaauuaccuaggagcuugugaaacaugcacauuuccaggccucacuccagaauuagugaaccugaaucuuugaaaguaggcauugugaaacugcauuuucagaggcugcccaggugacccuguac

SEQ ID NO: 4111741 - RNA, 64 nt, Human
gucagagaaccaucuuauuccuaaaauacuaggcuaagagggaauuagagaucaguucuuugac

SEQ ID NO: 4111742 - RNA, 96 nt, Human
gucagagagaugagcugaaagauucagugagggugagaagaaggcucguaaaaagauuuuuaugccuacgcugaaaaguucagccaucuuuaacac

SEQ ID NO: 4111743 - RNA, 112 nt, Human
gucagagcaaguuauuucugaauguugugggugauguuuuacugauuaauuuucugaaggaauuacaguaauguauuauuuaacuauaggucuaaaauagcuuuguucugau

SEQ ID NO: 4111744 - RNA, 97 nt, Human
gucagagcaccgacaugcagcagggucccuuccucaucgugacugucagccagagaaggcagugacauaccuggagggcaccuguugcaucucugcc

SEQ ID NO: 4111745 - RNA, 67 nt, Human
gucagaggaauggaugagugauuugugaggucuuaacuagauaccccaguuucguccuuguuuuggc

SEQ ID NO: 4111746 - RNA, 63 nt, Human
gucagaggcugcugaggccaccacgcugccagaggugauagugucauggccugagcaggugac

SEQ ID NO: 4111747 - RNA, 83 nt, Human
gucagaggcugggcuagggagacagagggcaugggcacaaguccuggcucugccccucgcucaccagcucugaggccuuagac

SEQ ID NO: 4111748 - RNA, 61 nt, Human
gucagagucuaucaaguggggaacuugaguagcaaaaucauuuucacuaguagucucuggc

SEQ ID NO: 4111749 - RNA, 83 nt, Human
gucagaucugaccacaucaggggcuccugggcccuccagaugcugcugccucauguccaaggccccuguggucuagcccugac

SEQ ID NO: 4111750 - RNA, 65 nt, Human
gucagaugccuccuacauacuggucugguuuuugcuuuuuggagcauaugaaagaaguaucugac

SEQ ID NO: 4111751 - RNA, 72 nt, Human
gucagauggagggacgccgugcgggaccgugcgcucgcgccuggcuuuuguucccggcgucugacuucugac

SEQ ID NO: 4111752 - RNA, 81 nt, Human
gucagauuggggaggaagucagauuucaggguguacagaaugacacuccucaaauccccguuccucauucccuccuuuggc

SEQ ID NO: 4111753 - RNA, 85 nt, Human
ggucucucagcaguucagcuugggaaauugagcaaggaaguuuccuucuuccuaaauuuccuaaucuaaauaaugcugagauguc

SEQ ID NO: 4111754 - RNA, 60 nt, Human
ggucucucucaucaacucugacuugacagaacaaggcaggcaagauuagagaugagcacc

SEQ ID NO: 4111755 - RNA, 69 nt, Human
ggucucucuugauuaccuagcaguuaguguacugaucagcacuugcaugucaggaaauuaacaaagacc

SEQ ID NO: 4111756 - RNA, 72 nt, Human
ggucucugcugaauauagagcaagaaguuauggagcuuaugagagugcuuauacucugugucuagcaaggcc

SEQ ID NO: 4111757 - RNA, 59 nt, Human
ggucucuggcuuuccuugucugcauccucuuccagaguguaggcuuuauggaagcuacc

SEQ ID NO: 4111758 - RNA, 81 nt, Human
ggucucugucauuugcacguuugucgagcaccaucugcugcacaggguggugucaggcacuagcaugcacuuuacgauucc

SEQ ID NO: 4111759 - RNA, 62 nt, Human
ggucucuuguccaaggucacacacagcuagggagcuacagggccagaaguuggaaaagagcc

SEQ ID NO: 4111760 - RNA, 76 nt, Human
ggucugacaaaggguccuucuuaaucauacaugaauuugugugcaugacaaguuuaaauguacccagugucaaucc

SEQ ID NO: 4111761 - RNA, 66 nt, Human
ggucugagccugcaauaagcacagcccuaaauuacacuugaggcugcuuaacguccaggcccagcc

SEQ ID NO: 4111762 - RNA, 70 nt, Human
ggucugauagggcccccgugggugcucagggagcaccgacugagcccguaggggccaaggcugacaggcc

SEQ ID NO: 4111763 - RNA, 75 nt, Human
ggucugcaucuggccuuugcuggcuaguggccucugagggauggauuugguuuaaggacagagagccagguggcc

SEQ ID NO: 4111764 - RNA, 76 nt, Human
ggucugccaugacaaaguaccacaaacuggguggcuccaaacaguagaaguguauuuuaucacaauucuggaggcu

SEQ ID NO: 4111765 - RNA, 66 nt, Human
ggucugcccagaagacauccccuagguccaguuuagaggucaaggucagcccucucugggcaggcc

SEQ ID NO: 4111766 - RNA, 62 nt, Human
ggucugcgugucugguaccauugugagcaggcacuggagcauggugggccaggcagaaggcu

SEQ ID NO: 4111767 - RNA, 73 nt, Human
ggucugcuaguguuugcuggagguccacuccagacccuguuugccuggguaucaccagcggaagcugcagacc

SEQ ID NO: 4111768 - RNA, 64 nt, Human
ggucuggaccauggacgccgggcaagucauccaagcaaagcccagugaaguuccaggaugggcu

SEQ ID NO: 4111769 - RNA, 69 nt, Human
ggucuggaccucacuguguuuauacucagcaucacgaagcccgugagcuuguguauacaggaggccacc

SEQ ID NO: 4111770 - RNA, 58 nt, Human
ggucuggagcuaaucuuguuggugaagccugaaugacuggaggaggagcugcagaacc

SEQ ID NO: 4111771 - RNA, 119 nt, Human
ggucuggcagaaaagcugucccaauguccuuccaucucucuaggccaacagcuuccuguuaauauuauuaagcuguggcuuggaggaaacaggcuggcagcaguuguuuuagccugucc

SEQ ID NO: 4111772 - RNA, 80 nt, Human
ggucuggcuuggcaguguuucaaaucaaaggcauugggauauuuuauuugacugagguuugauauauaccagcguagacu

SEQ ID NO: 4111773 - RNA, 69 nt, Human
ggucugggacccacacucugagaaaugcugaggcauagccauuugcacucaaaaguauggaccuagacc

SEQ ID NO: 4111774 - RNA, 69 nt, Human
ggucugggagaacuagguccucaguagaugcucucugagcucugggugagacagaccugguucccagcc

SEQ ID NO: 4111775 - RNA, 83 nt, Human
ggucuggggacagacagagucuucccaucagucuuccagaacagggaggagauggcugggagcucuguuugguaccaacaacc

SEQ ID NO: 4111776 - RNA, 111 nt, Human
ggucugggugacgcgguguccagaggcucuuggcccaguugccaaggaaagggacggccugucaguuguguuuugggccugucggguccuucagcaccuggagccacagcc

SEQ ID NO: 4111777 - RNA, 69 nt, Human
gucuucacaacuucucacagauaaauuucuuauuaauguacuagguuuuagagugagaguucugaagac

SEQ ID NO: 4111778 - RNA, 58 nt, Human
gucuucagacuccaaauguuuuauguucccugucaugagaugggaugucugugagugc

SEQ ID NO: 4111779 - RNA, 97 nt, Human
gucuucauucuucaagggccacuuuacagggacauggaacaggcuccacuaaagugguguccucuuauugcucuuggcccugaggacauaugaagau

SEQ ID NO: 4111780 - RNA, 84 nt, Human
gucuucccaggaggcucugagucuggugucugcuguugaagacauuggcagaucccuuggggcccagagcacuccugggccugc

SEQ ID NO: 4111781 - RNA, 90 nt, Human
gucuucucaaaaauauuugucguaacacaugucugggaugugaauuguggccaauuuuuccugaagcaguaguuaugauuuuguagaggc

SEQ ID NO: 4111782 - RNA, 79 nt, Human
gucuucuguaaugacugucuuuccauuguauauuguguguguguaugcaugugugcauguuagagagaguucagguaac

SEQ ID NO: 4111783 - RNA, 105 nt, Human
gucuugaauaauaaaaugccuuuuguucagcucucauugauuagucaucuucuuacccacauugaucaaauucaggagucuggacaaagugucuauuacagagau

SEQ ID NO: 4111784 - RNA, 73 nt, Human
gucuugauaugagaaauuauaccuagguuugcacuucuuucgcaaggcuaauuauugguuucucaaacaaaac

SEQ ID NO: 4111785 - RNA, 75 nt, Human
gucuugaucuccucaccuugugauccucuugccuuggccucccaaagugcugggauuacaggccugagucaagau

SEQ ID NO: 4111786 - RNA, 63 nt, Human
gucuugcaauuugcuuccauggaguugauccuugaaccuccaugaggaccaaauucguaggac

SEQ ID NO: 4111787 - RNA, 116 nt, Human
gucuugccuguguugagcgggggucauuugggcugcugguggaaugguaggccugaauacagaagcccaccacugguuauuagcuccuuuuagacuugcagacaaccaggcauggc

SEQ ID NO: 4111788 - RNA, 57 nt, Human
gucuugcuuauggcuaaagauaugaauuuaugggauaucuguagucuguggcaagac

SEQ ID NO: 4111789 - RNA, 55 nt, Human
gucuuggcaugcauauaucccaaagccugggaugccaagaaucauaugccaggau

SEQ ID NO: 4111790 - RNA, 62 nt, Human
gucuuggcaugugcagcugggauggaaaugcuccuccaguggacaguuacagcagcuaagac

SEQ ID NO: 4111791 - RNA, 95 nt, Human
gucuuggugauacacuuuaggaagaaacuuucccugcagcccucgaggguggcaugucaggaucaggaguuugugucuucuuuguaucccaagac

SEQ ID NO: 4111792 - RNA, 58 nt, Human
gucuugguuguucagguccuagggguuccaaguccccagucaccuugaggacucagac

SEQ ID NO: 4111793 - RNA, 79 nt, Human
gucuuguaauuuacauagguaucuuuaaugaacagcucguuuauaguuccacugaguuuuuccuguguguguugcaggc

SEQ ID NO: 4111794 - RNA, 85 nt, Human
gucuugucuuggccuggaucauauccagucaccacuaugcaacaaaugaugugcacugggcaaggauaugauggguuaugaaagc

SEQ ID NO: 4111795 - RNA, 82 nt, Human
gucuuuaaaagugggcuggccugggguuguccuugguuaaaccccaaggacacuugagaguccagucaucuuuuauccugau

SEQ ID NO: 4111796 - RNA, 76 nt, Human
gucuuuaaugugugaauugagcaucagaguuuauuucagauucguguauguguccuaauucaagcaguuugaagau

SEQ ID NO: 4111797 - RNA, 107 nt, Human
gucuuuauagcauugcugcuggucugggaugagggauguauauuuuuaaaaccaucuaaauuccuacauccuaucccuggauaguucaguagugucucugaugagac

SEQ ID NO: 4111798 - RNA, 57 nt, Human
gucuuucuaugaugaacuguugcuuuaguacuggugacauuuucauauuggaaagac

SEQ ID NO: 4111799 - RNA, 63 nt, Human
gucuuucuaugcauagagcagagcuuaccacgaaaggaauucauccucuaugcuagcagagac

SEQ ID NO: 4111800 - RNA, 80 nt, Human
gucuuucucuacugcugaauaaaaccuccugcagguccagaagauccugcaggggguuuuauucagcaguagagaaagau

SEQ ID NO: 4111801 - RNA, 55 nt, Human
gucuuucucuucucucugauggagcaaauagagucaucugcugagaaugaaaggc

SEQ ID NO: 4111802 - RNA, 70 nt, Human
gucuuucuucaaucugucuccauguguauagagucacaucuugcagaaggggacaguuaaagaccaagac

SEQ ID NO: 4111803 - RNA, 88 nt, Human
gucuuucuuugcacagaucugguggcaaggaauacuuuuuguccuuccuuauugauagugccaccuagugacucugcugcauaaagac

SEQ ID NO: 4111804 - RNA, 98 nt, Human
gucuuugagaaaacuauggaagacaggcuguauuuuaaaugauugauaaucuuaauguucuuuugaaacauuaccuguauuuccauaaaggucaagac

SEQ ID NO: 4111805 - RNA, 67 nt, Human
gucuuugagaucuaucuugucucucaacuaucuguagauaguuugagaauugaaauagaauuaagau

SEQ ID NO: 4111806 - RNA, 100 nt, Human
gucuuugcaagaguugcauuuucgguuauugagauuauggcaugcuaaaauauuugaguuugcuuaaauuucagcagcuuaauuuuguagcagcagggac

SEQ ID NO: 4111807 - RNA, 104 nt, Human
gucuuugccucauggagcuaacauucuaagaggagaaacaugcaguaaacaaguaaagaaauguaugcucuauucagggaguaguuugugcuaugaggaaaagc

SEQ ID NO: 4111808 - RNA, 69 nt, Human
gucuuugcuguucuucagacuccauuuauagagaaugagggcugauaacaggaauacaguggcaaagac

SEQ ID NO: 4111809 - RNA, 86 nt, Human
gucuuuggacuuucucuuuuguguaauucuuuguauauacaagauccuuggccaagaucccauuauacaaaagaaaagguggggau

SEQ ID NO: 4111810 - RNA, 70 nt, Human
gucuuuggcaacacaugugggacagagcuauagacuaaagaguguucugucccauucucuuguggaggac

SEQ ID NO: 4111811 - RNA, 56 nt, Human
gucuuugucaaugcaaagcugugugaacccagacgcaguuacagccaggacaaggc

SEQ ID NO: 4111812 - RNA, 59 nt, Human
gucuuugugguaguccucagccuagauuugaugaccaucuucuuggauuauccagagac

SEQ ID NO: 4111813 - RNA, 66 nt, Human
gucuuuguuacacucuccaggcacuugggagucagaacuuuuuccagggccuagaggugaccugac

SEQ ID NO: 4111814 - RNA, 59 nt, Human
gucuuuguucuuuaucugacugugagcuggugaaaagagaacagucagggaauaaagac

SEQ ID NO: 4111815 - RNA, 55 nt, Human
gucuuuuaggcacuggcaugcccggagaaucuccccacacacuaggccugaugac

SEQ ID NO: 4111816 - RNA, 69 nt, Human
gucuuuucaggagugucaggagugccuaaaaccuuuuucuucuuaaguaaaaccuggccuuuuguagac

SEQ ID NO: 4111817 - RNA, 70 nt, Human
gucuuuucuuuccccuucucaagaguagaugcagcuguucucaguuuaauaucagaagagaaagaaugau

SEQ ID NO: 4111818 - RNA, 55 nt, Human
gucuuuuggacuggacuuggaggaugaauagaaguucccaggacaggcaaaaggu

SEQ ID NO: 4111819 - RNA, 55 nt, Human
gucuuuuucuacgauagcgccuggcugccccuccaccaggugggagaaagggcac

SEQ ID NO: 4111820 - RNA, 65 nt, Human
gucuuuuuggggcgggugguguggggagaacggaaaaccuuuuuguguauccugcuccaugaagc

SEQ ID NO: 4111821 - RNA, 78 nt, Human
gugaaaaacugcagaaucagugucuccuuaaaagcugugcggguuuucuggcagcuccaaaaggaaacacuuuuucac

SEQ ID NO: 4111822 - RNA, 58 nt, Human
gugaaaaaguucuagaguugcaagagaccucaagggguccuucaaauagggcuauuac

SEQ ID NO: 4111823 - RNA, 73 nt, Human
gugaaaacauaccacugucagacaugaggauguuuuggacuuugauugucuguaagguguuuauguuaguuac

SEQ ID NO: 4111824 - RNA, 123 nt, Human
gugaaaaugucuauguuaaaaguaaaaaguaggaaagcacagagagcucuagguaaaauauuuuguuauugcuuauaauuuguugcaauuugaacuuauuuauuugacacaaauacuuuucac

SEQ ID NO: 4111825 - RNA, 63 nt, Human
gugaaaggcaggcaggguguccaucgguggauacauauggagaucaagaugccugacuuccau

SEQ ID NO: 4111826 - RNA, 66 nt, Human
gugaaaggcuuguccaguaaggggaaaggauuuaaugccugauugcuauguggauaaccuuuauac

SEQ ID NO: 4111827 - RNA, 70 nt, Human
gugaaauaauucagaauugugggcaguacauuauauaguguacugcugucauuucugcuaauucguuugc

SEQ ID NO: 4111828 - RNA, 97 nt, Human
gugaaauauauuuuuaaaagugucacagaaggagggaagcuaguuugcaggcucacacauugggcuuccauauuucuggugucacaaauaaagucac

SEQ ID NO: 4111829 - RNA, 74 nt, Human
gugaaauaugggaugcugucgcagagauggguuucuucuccagugucugaugcacaguugucccuugguugaac

SEQ ID NO: 4111830 - RNA, 55 nt, Human
gugaaaugcuguagaucagugaguugguaaaccaacuauggaaacaguguguuac

SEQ ID NO: 4111831 - RNA, 60 nt, Human
gugaaauucuacugacuuuauugagcaucuuacuucuuuaauggaggaaguauauuucau

SEQ ID NO: 4111832 - RNA, 68 nt, Human
gugaaauucuauccguacaguuaggacauuuauccuuuacugucaaauuuauggaaagagaauuuuac

SEQ ID NO: 4111833 - RNA, 90 nt, Human
gugaaauuguuuagcagaguugcaacgccaagcuugagcuuuugguguagcugaagugauugaguguuagcagucuguaacccgguucac

SEQ ID NO: 4111834 - RNA, 75 nt, Human
gugaacaaauaguaauguggauaccaauaaagcaagagaauaucugcauugguaaaauacauacacacuguauac

SEQ ID NO: 4111835 - RNA, 60 nt, Human
gugaacaacugcaaaaaucuccaugccccaguuuggcauagagggaguagaguuguucac

SEQ ID NO: 4111836 - RNA, 58 nt, Human
gugaacacacaccuauguacaaacaauuuuucaacauguuugauguuuugugugucau

SEQ ID NO: 4111837 - RNA, 85 nt, Human
gugaacacagagucucuuuugguuccaaaaauaauaaaaaauaccauuauuauuuuuagaaccaaaagagauucuguguguucac

SEQ ID NO: 4111838 - RNA, 64 nt, Human
gugaacauuugugggggaacaggauacuuacacagucucaaaguagcucccacagauuauuuau

SEQ ID NO: 4111839 - RNA, 108 nt, Human
gugaaccacgguguccaggugauucuacuuucugucucccaugaguuugacuacucuaaguacucauguaagcggaauguaguauuugucugucugcaucugguuuau

SEQ ID NO: 4111840 - RNA, 128 nt, Human
gugaaccauauggucucugucacaucucugucacaacuauucaauuuugcuauuguagugcgagagcagccgcagacauacugaagugaaugaguguggcuggauuugaucugugggcuguggaucgc

SEQ ID NO: 4111841 - RNA, 67 nt, Human
gugaaccugggaggcagagcuugcagugagccgagaucgcgccacugcacuucagccugggugacac

SEQ ID NO: 4111842 - RNA, 60 nt, Human
gugaacuguggcgucucuggcugagccuggagggcaggaggcuaggaugcugggguuucc

SEQ ID NO: 4111843 - RNA, 57 nt, Human
gugaacuguucugguaacucuacaucauaccuauguaacauaucagaauguguuuac

SEQ ID NO: 4111844 - RNA, 102 nt, Human
gugaagaaguaaagcccaaagcccugggcguuacugggaugcuuuuguugguaauaauaaugucccugugugcucccagggacugagaggugcuuuucucac

SEQ ID NO: 4111845 - RNA, 56 nt, Human
gugaagaggacccagaucuggcuucuuucccaagaagaggguggugugcucuucgc

SEQ ID NO: 4111846 - RNA, 86 nt, Human
ggucugguuuaagagcaggucugucugggaccagauucugcgaauacaaaucuguuucuuccuagccaugcucucacuucagaacc

SEQ ID NO: 4111847 - RNA, 59 nt, Human
ggucuguagucuagaccuguuagauagcugagccuaacagggcuggcagcugcaagacc

SEQ ID NO: 4111848 - RNA, 83 nt, Human
ggucugugaucuguccucaccuuuacagacugaaaaaaauacauuugucagugcuccuaaagugaaugcacaucacauggacc

SEQ ID NO: 4111849 - RNA, 65 nt, Human
ggucugugccucccuggaacaaagcugagaaggaaggagcuuugucccagagggagggauaggcu

SEQ ID NO: 4111850 - RNA, 72 nt, Human
ggucugugcgaaaugucucuauugccucugguuaaggaccaggcaccuguauugaggcauuagcaccaggcu

SEQ ID NO: 4111851 - RNA, 68 nt, Human
ggucuguucuguuuuguuuucucagacaugagauuugcugaaugagaaaacucaaagacagaucagcu

SEQ ID NO: 4111852 - RNA, 97 nt, Human
ggucuguuuugcugcccaguguauuuuugggaccugcagcugugucuuggauggaguagggcucaguaaauacuuuggaguuaaaauguauaagacc

SEQ ID NO: 4111853 - RNA, 85 nt, Human
ggucuuagguaugguauagaggguaaagcaucacaauuccaaacaaaauuaaagauauugcaccucuaauacauuaccagaggcu

SEQ ID NO: 4111854 - RNA, 64 nt, Human
ggucuucaggaggggagggcaugggcaaaggaaaaggcuguaccauguccugcuucuccucacc

SEQ ID NO: 4111855 - RNA, 102 nt, Human
ggucuucgguucaagguacauauacuaccuagaugauggcucccauucuugugguaagauaucaccucuaggcugguguuucaguugugccuuuggcaggcc

SEQ ID NO: 4111856 - RNA, 112 nt, Human
ggucuucucacucugucacgcccuggcuggagugcaggugagugaucagcaaugagcugugaccacacaugugcacuccagccugggugugaaacugugacacauggagauc

SEQ ID NO: 4111857 - RNA, 68 nt, Human
ggucuucugauuggacuuggacagagauucuugcuuuucucuuuaauccagggacaguauagaggauc

SEQ ID NO: 4111858 - RNA, 67 nt, Human
ggucuugaauuccugcccuuaagugacccacccaccucggccuccuaaagugcugggauuauaggcc

SEQ ID NO: 4111859 - RNA, 82 nt, Human
ggucuugcuugguuagaugaggcugguuucaccuggauuacaggacacugagucauuaguuucauuugucccuucaaaugcc

SEQ ID NO: 4111860 - RNA, 77 nt, Human
ggucuuucccaggcucacauagcuggaaaggggaaggggccuucuccuuccagaggcgugacacccuggagaaggcu

SEQ ID NO: 4111861 - RNA, 63 nt, Human
ggucuuucucucagguacagauaacagcuaaacagaauguuuuagcuccuuggagaagaggcc

SEQ ID NO: 4111862 - RNA, 61 nt, Human
ggucuuuucacagugguuugagguugguggcagagcuaauaauugaugugugggugggacc

SEQ ID NO: 4111863 - RNA, 81 nt, Human
ggucuuuucccaagagcagcugcauucagcaccugaccagacucuaggguuuuaagggugcagcugcccaaggacuggucc

SEQ ID NO: 4111864 - RNA, 67 nt, Human
ggugaaaaggacaagcuuuggaguuagacaaccugaguucaaauuuuggcucugccauuuuucagcc

SEQ ID NO: 4111865 - RNA, 94 nt, Human
ggugaaaggcagcgagcauggcuggaggccgggcuuccuuagagauggucggcugagcaggcuugguccccagccuccccuuccugaaauagcu

SEQ ID NO: 4111866 - RNA, 58 nt, Human
ggugaaguaugaggaaauggagaaggcauuguccaaggagcagucuucaaccuucacc

SEQ ID NO: 4111867 - RNA, 87 nt, Human
ggugaauaguaagagaauauuugcuugagcaaugauauccaauaaacuuucugugaugaugcaaauguucuauauuugcuguguccc

SEQ ID NO: 4111868 - RNA, 64 nt, Human
ggugaauaucaagcccuagguggauaccgagccccagguggauaccuggauccugguagacauc

SEQ ID NO: 4111869 - RNA, 62 nt, Human
ggugaauuguaccccauaggaucaucaauaagccacuuagauccacaauagggaaauucacc

SEQ ID NO: 4111870 - RNA, 92 nt, Human
ggugacaagccauucaagguauuuaaaacauaagcacuaaaauuuuauccaugcauuuaugugugugcuuuugaaaaaaaaggccugucacu

SEQ ID NO: 4111871 - RNA, 96 nt, Human
ggugacaaggaaagauguuuuauaauagaaucuucuucauaucagcaauuuugaugcagauguuccuacuguguuacguagacuuucugaugaucc

SEQ ID NO: 4111872 - RNA, 56 nt, Human
ggugacagccgcuugcccuguaacuuucuguuucggggcaagucgcgcuuucagcc

SEQ ID NO: 4111873 - RNA, 78 nt, Human
ggugacagguuccacaggcgcugacccugggguucuggcaagcuguuggcucaguguuuguggaacauagucgaagcc

SEQ ID NO: 4111874 - RNA, 66 nt, Human
ggugacaucacugaaugcaaagcugggaagagaggcuccccguugauuuagugauucugcaaggcc

SEQ ID NO: 4111875 - RNA, 60 nt, Human
ggugaccucagcugcccggcuggccccaacuccaccgcacaacgcagacugcgggucccc

SEQ ID NO: 4111876 - RNA, 68 nt, Human
ggugaccucugacccuggugguggccacugcuggcucugcccaaugcccacaccugggggaggcugcu

SEQ ID NO: 4111877 - RNA, 68 nt, Human
ggugaccuggaggugcaggaggaggaagagaauucccaggacucggcacucuccuuggaggggucacu

SEQ ID NO: 4111878 - RNA, 130 nt, Human
ggugaccuggcugucaauugguacaggucuguccaguuccuguccuggaucugcccaguuaguugggaaagacucaggacaggagcccuagaccuucaaaucuuagguauugaucucuucccagggcagc

SEQ ID NO: 4111879 - RNA, 79 nt, Human
ggugaccuuuugccuuuccaggguuaauuuauauggucauuaaagauuuuaugaaauugagccuggugcuucaaauccc

SEQ ID NO: 4111880 - RNA, 65 nt, Human
ggugacucagcccugagcacgcaggaggcagccugccugugcccggcccagggcccuggguuucc

SEQ ID NO: 4111881 - RNA, 75 nt, Human
ggugacuccuuucaagagaaaacuaaccuaugaugccacaagucgucauaguggccauucuugaggggagcuucc

SEQ ID NO: 4111882 - RNA, 80 nt, Human
ggugacuggacucuugaggaguggguuggaauuugcgcucccuucgugaccugugcagcugacccacuccagucccuccc

SEQ ID NO: 4111883 - RNA, 67 nt, Human
ggugagaaagcacacaccucacugccugcuucuguugaagguuguguaaaugucugucuuucuuccc

SEQ ID NO: 4111884 - RNA, 76 nt, Human
ggugagaaguguuuuuuguauauuuuuuugggaaaaagccaauuaagauauagauauacagagaauuauucacacc

SEQ ID NO: 4111885 - RNA, 97 nt, Human
ggugagacagucccaaagucuuaguaugguuuuagguuacuuaaaguauuuaaagcuugacgcuguacaaagacuucugggauauccuauguuaacc

SEQ ID NO: 4111886 - RNA, 75 nt, Human
ggugagacgcaggcgucaaagcuugaagagcaauugcauuaccugugcggcugagguuuucugccugcucaaucc

SEQ ID NO: 4111887 - RNA, 65 nt, Human
ggugagacuggacgcacaggauuggggcauuauuuaacacuucuguccuguaguucacguuggcc

SEQ ID NO: 4111888 - RNA, 81 nt, Human
ggugagagauugcucaguagaacuuuuaaccaauuucagaaugagaccuguuggguucauuggcuccauccaucucucacc

SEQ ID NO: 4111889 - RNA, 58 nt, Human
ggugagagcugcuccagaucucucugucacacagaagagacacggaacauucucagcc

SEQ ID NO: 4111890 - RNA, 84 nt, Human
ggugagcaauuucagccaggcucagaggcuaggaugggugaauggcagccucuccagagccuggcagaaugagggugccccacu

SEQ ID NO: 4111891 - RNA, 129 nt, Human
ggugagcauaguuaguaacaguguauuguacauuucaaaauugcuaagagagcaaauuucaaauguucucaccacaaaaaauaguaaguuuuugaagugauaacuauauuaacuugauuuaaguuuucc

SEQ ID NO: 4111892 - RNA, 62 nt, Human
ggugagccuuuaguaaggccuugacagaaauagcuuauuuccaaaaaggccauauucucauc

SEQ ID NO: 4111893 - RNA, 85 nt, Human
ggugagcuguagcacugccagaggugguggugucuagaacaaaguucuaagcagaccauuccuguggcccagucuuggcuguacc

SEQ ID NO: 4111894 - RNA, 55 nt, Human
ggugagcuuggacaccuuggcagguucagacaaugaacagacuucaaagcucacc

SEQ ID NO: 4111895 - RNA, 57 nt, Human
ggugaggaauuggggacugaccacaaugaaggcaaggaggcccagguuuccaucacc

SEQ ID NO: 4111896 - RNA, 61 nt, Human
ggugaggagauugagcuugguagguaaacuacuaacacaauguaccauaucuccaaacacc

SEQ ID NO: 4111897 - RNA, 74 nt, Human
ggugagggaguggcaggagggcuuggaggucaacucuuuagacccuucccacaguucucuugucacuuccuccc

SEQ ID NO: 4111898 - RNA, 98 nt, Human
ggugagggcacaguuggaggugggguccauguauucauaguggcaccagcaccagucugugugaaugugggcuuuuuccucuguuugcagcugucacc

SEQ ID NO: 4111899 - RNA, 56 nt, Human
ggugaggggcaccucugcccggccaccccuacugggaagugaggagccccucagcc

SEQ ID NO: 4111900 - RNA, 56 nt, Human
ggugaggggcgccucugcccggccgccccuacugggaagugaggagccccucugcc

SEQ ID NO: 4111901 - RNA, 55 nt, Human
ggugaggggcuccucugcccggccgccccuacugggaagugaggaccccucugcc

SEQ ID NO: 4111902 - RNA, 86 nt, Human
gugcaagguaguuuagugauuacagauauauaaauaguaaaauauauuuguuuaccaagcuuuaauuacauaagcaacuuuuguau

SEQ ID NO: 4111903 - RNA, 114 nt, Human
gugcaauaauuuuuaaggacguaugaauauggaguuuacuuaguguaauauuuguguuacacccacaaaaaauuccaaauugcagauguuuuauaccuuaaagcucuuugucac

SEQ ID NO: 4111904 - RNA, 122 nt, Human
gugcaauacugggcuuugucaauagaggaugugagagaaaugugggaagguguagaaagaacaaagcgcuugucaucuuuguuccuguauuuuccuuccucuuguggcucucaguggugugc

SEQ ID NO: 4111905 - RNA, 68 nt, Human
gugcaauauuuuauauccaacaaacacucaacaaacacuugguaauuguugauuauugaguauggcac

SEQ ID NO: 4111906 - RNA, 64 nt, Human
gugcacacuuaauacucacugugcugugggugaccacagaguggcccaagauugaaguguggac

SEQ ID NO: 4111907 - RNA, 123 nt, Human
gugcacaugaacgugaguugaaaauagccuucguuauuguuguuguaagccaccuaaacuugggggucauuuguuacugcaacauaauguagucuaagcuagcugauacacacacacaugcac

SEQ ID NO: 4111908 - RNA, 67 nt, Human
gugcacuucugcccucuugggagcuugcaauuuaguugaggagaaaaauacagaggcagacauguau

SEQ ID NO: 4111909 - RNA, 89 nt, Human
gugcagaaaauauaauuacaacuuuauuggauauuuacaagauacacaagguaucuuguaauaaugaaagauuucucuauuuucuauau

SEQ ID NO: 4111910 - RNA, 66 nt, Human
gugcagaauauuaguaucaguuauaccucaauaaaaggggucaguguauguauugauaagcuguau

SEQ ID NO: 4111911 - RNA, 64 nt, Human
gugcagagaaaugagaagucgagaauucauccugcuccaccggcuuccucaccuucucuugcau

SEQ ID NO: 4111912 - RNA, 80 nt, Human
gugcagagcucuccugcccugugcuacgcaaccgcucuccacacagggcucagcagagaccagggaggaagggcucgcac

SEQ ID NO: 4111913 - RNA, 69 nt, Human
gugcagaggucacaaaagugaacacuuuuuuaccucuccuuccugugcccacuguuaagacuuuugcau

SEQ ID NO: 4111914 - RNA, 62 nt, Human
gugcagcauggaguuguggaaugauguaugguauuguuccacacagcucaugacuccuguac

SEQ ID NO: 4111915 - RNA, 57 nt, Human
gugcagccauuugcaugcuuccccacaaaguugugacacaguugaugcuggcuguau

SEQ ID NO: 4111916 - RNA, 62 nt, Human
gugcagcugggacacugaggccagagagaagcuucuuggcucaaaacuuagauuccaggcau

SEQ ID NO: 4111917 - RNA, 94 nt, Human
gugcaggaggcuggagcucccaggcagggcugcccacuccgcucaacgggagucagauggggguggccccucagggcauuuuaccauccugugc

SEQ ID NO: 4111918 - RNA, 115 nt, Human
gugcaggcugcuucauguccuuuaggcucuucuguggcagccaaggggguuuccuuuuuucuucccucuauuucugggccacagagaggaaagaacaaagaugcuuucccugcac

SEQ ID NO: 4111919 - RNA, 73 nt, Human
gugcaggggcagagcauagcuccaauuauuuuuacauagucuuauaucacuaugcucugugcagguccugcac

SEQ ID NO: 4111920 - RNA, 57 nt, Human
gugcaggguacauugggaugggauggugagaauggucauuucaaaacuacccuccau

SEQ ID NO: 4111921 - RNA, 75 nt, Human
gugcaggguuugaggucuuauagcaccuacauaaauucuaccagggaucuaagggaacagcuucaaacucagcac

SEQ ID NO: 4111922 - RNA, 55 nt, Human
gugcagucaguacucuguagcgguuaaaagcauagacccuagaguaagacugcau

SEQ ID NO: 4111923 - RNA, 113 nt, Human
gugcagugggggccaaguggacucaguccaugauucugugacacccugcggaaggugcggccggcaggggcuggaucaggaguugggucccuagaagaggcccucagcugcac

SEQ ID NO: 4111924 - RNA, 74 nt, Human
gugcaguuacacagcuggugucaggcacugcaguguagguacacggcuggugucgggcacagcaaugcagguac

SEQ ID NO: 4111925 - RNA, 85 nt, Human
gugcaguucucagaagccagggucaggggccuccugccagugucacaugucaggugggacccggauucuccccuacuggcugcau

SEQ ID NO: 4111926 - RNA, 57 nt, Human
gugcaguucuuguaacaugcugcagaagggagcugugagcaugugaaagaccuggac

SEQ ID NO: 4111927 - RNA, 69 nt, Human
gugcaucuauuugguaagauauguuacacaaucauugaaaacaaugcuugccaagugugauaaaaacac

SEQ ID NO: 4111928 - RNA, 66 nt, Human
gugcaugaagacucagaaagucaggaucauuuggagucaauccagaaagucucagcuucacugcac

SEQ ID NO: 4111929 - RNA, 66 nt, Human
gugcaugauauuuuuaucaaacugcuuaagaaaauauuuuaugaguuuguaaagaaauauuugcac

SEQ ID NO: 4111930 - RNA, 57 nt, Human
gugcaugcacgugcuauguaugaguauccacauucauauaccugcaugugcaugugu

SEQ ID NO: 4111931 - RNA, 77 nt, Human
gugcaugguaaccaggaugucuaugcauucaugcauuccuucacugcauguaacuagcacuuucuugugccaugcau

SEQ ID NO: 4111932 - RNA, 62 nt, Human
gugcaugugugucugggcaugggugugugugcauaugugugugucugaggauauaugugcau

SEQ ID NO: 4111933 - RNA, 109 nt, Human
gugauguguuccauacaugcaaaugccaugcguggagcuuugcacuguggcaauaaaguaaaagggcugaguuccaugucuggguuugugagaugcagaacacagcagc

SEQ ID NO: 4111934 - RNA, 82 nt, Human
gugauguuacuaaugucauugguaaagauuagguugaaggcaucuucuuuccuuccaggguuuuugccaaucaaauauacac

SEQ ID NO: 4111935 - RNA, 129 nt, Human
gugauuaaauaaucucaaguacccaaaguucaaguguagaguuugguuucaaagcuaauucauuuugauuggcuacaugaacucuuaagucacaaugauacuugguuuacuacuuauuauucuaaucuc

SEQ ID NO: 4111936 - RNA, 103 nt, Human
gugauuacuuugggaacauaauuuuuaugcagcaaaauauuugauaugauuugagagguaccaaguagacuuuugcaucaaggaaaaaugucccaauugucac

SEQ ID NO: 4111937 - RNA, 83 nt, Human
gugauuagcuuuuuuaguuguuguuaugucauuacuacuuacgguaucagacaaaguaagggcuaaugagcaaaaauagucac

SEQ ID NO: 4111938 - RNA, 63 nt, Human
gugauuccuucgugagcagauguuagaggucucccuuugacagcuuguuacaaaguugaucac

SEQ ID NO: 4111939 - RNA, 55 nt, Human
gugauucugcacgucauuccuggcucaacagccugaaugaguccugcuggaucac

SEQ ID NO: 4111940 - RNA, 56 nt, Human
gugauuguccacaggccaaacuccagggggcaggacccuggagcugagggcaaugc

SEQ ID NO: 4111941 - RNA, 68 nt, Human
gugauuuaaaaguuuuucaauuuuugacaaugaaaacucauggucaaaaaggccuagacacaagucac

SEQ ID NO: 4111942 - RNA, 81 nt, Human
gugauuuagagauucagaaaugaggagggccuggugucuggcccauuuggguggugcccuuuggucuggagugucugucac

SEQ ID NO: 4111943 - RNA, 77 nt, Human
gugauuuagauguugaaagugacuaauugccauuucauauacaugcauagcuaucauuucuaaacgucuguaaucac

SEQ ID NO: 4111944 - RNA, 65 nt, Human
gugauuuaugggcugacuaaugguaaacugauuugugcaugugccagaagucagcucaggaauac

SEQ ID NO: 4111945 - RNA, 75 nt, Human
gugauuuccugugguguuucccagacagccaccuccaggagguuagcagugugcugggaaauggcaggauaucac

SEQ ID NO: 4111946 - RNA, 70 nt, Human
gugauuugcucaaauagaacugaucuauaauauaguuaaguguuguaucaguuagcuauugcugcauaac

SEQ ID NO: 4111947 - RNA, 77 nt, Human
gugauuuggauguuggggugcaugggccacgcuuggagaaaaacuggcccugcaccccaauggcaugacccguucac

SEQ ID NO: 4111948 - RNA, 72 nt, Human
gugauuuguuauucuguaauuacuguguaaaguacugugcuagguacugugaauacaaaauaaauuggucac

SEQ ID NO: 4111949 - RNA, 55 nt, Human
gugauuuucuccuccuagaaguucuuaaaugacgcgaaaagguggagaaguucac

SEQ ID NO: 4111950 - RNA, 61 nt, Human
gugcaaaaugcucaucagcgauggcugggagaacuaccagagcuggcagaguaucaagcac

SEQ ID NO: 4111951 - RNA, 56 nt, Human
gugcaaagggcuuugcauacagaaucucacuuguucuuugcaggagcccuuugaac

SEQ ID NO: 4111952 - RNA, 61 nt, Human
gugcaaauuuauauggugacugcugaaggccuucguaggcagugugugugugaguuuguau

SEQ ID NO: 4111953 - RNA, 68 nt, Human
gugcaagucagcagccuggccaggagagggcucuaccucaucccagaagguugcugcucgaaguguac

SEQ ID NO: 4111954 - RNA, 66 nt, Human
gugcaauacauguugagaaaauaucuggcacuagaacuuaugccaaguauuuggguaacauugggc

SEQ ID NO: 4111955 - RNA, 94 nt, Human
gugcaauguacuuugcugaagcguaaaaauuauaggguuucaaucuacagaaagaaacugaagagcuuuuugacacuagguaaguacauugugu

SEQ ID NO: 4111956 - RNA, 65 nt, Human
gugcaaugucugugauaugaaaugcagucuuacaugcacacuauguuacucacauguucuugcac

SEQ ID NO: 4111957 - RNA, 63 nt, Human
gugcaauuuugcaucuguaugcugcauauacuuugcguucucuguaugacaugcgaaaugcau

SEQ ID NO: 4111958 - RNA, 87 nt, Human
gugcaauuuuuaaaaaggcucuucuuuuauuaacugauguacuacucugcucagaguuuagaaaugaaagauuuugaaagccugcac

SEQ ID NO: 4111959 - RNA, 66 nt, Human
gugcaccacccaggcacagcagccacucacagucuccagagcuggcaccuggugcaggguggccac

SEQ ID NO: 4111960 - RNA, 57 nt, Human
gugcaccccagucuaaaaccagccucuagaugaaggaggcagagauuuggggugggc

SEQ ID NO: 4111961 - RNA, 94 nt, Human
gugcaccucauagaagcuuuuaauagucuuuauauuuacuaaagaauaggacuaacuauggaacuaugaagaugagcuggaaaugacaggugac

SEQ ID NO: 4111962 - RNA, 74 nt, Human
gugcacgugaaugugagugugcaugcgugcguauuucuguaugcauacacaugugcacauacgcauacguguac

SEQ ID NO: 4111963 - RNA, 74 nt, Human
gugcacgugggugcacagaugcaugucugugugcgugcguacauccaugcaugucugugcacguguacgugcau

SEQ ID NO: 4111964 - RNA, 72 nt, Human
gugcacuuuuaugagauacuacagauugugaauaauaaauuaguuacucguauguguuuuagaauaguguac

SEQ ID NO: 4111965 - RNA, 74 nt, Human
gugcagagagcacaugagaggaaaucaaaaccuguucuucuuagauuuuauuuaccuuauguccuccacugcac

SEQ ID NO: 4111966 - RNA, 64 nt, Human
gugcagauacagccugccagguucuucuacccugguguugaagaaccggucuggcuuugugcgc

SEQ ID NO: 4111967 - RNA, 67 nt, Human
gugcagcaucucugcauuuggaucuugagcugcuuugauaaguuccucugauuaaaugcaguugcac

SEQ ID NO: 4111968 - RNA, 80 nt, Human
gugcagccauuugaaaagcaguucagcauuaucuucuuuggauaccuguugacacaaugcuucucauccaaggccugcac

SEQ ID NO: 4111969 - RNA, 62 nt, Human
gugcagcugccaggggcagcugucucauggccacguguggcucugcccccugguaagagcac

SEQ ID NO: 4111970 - RNA, 69 nt, Human
gugcagcugggcgcugaccuuccagguagagcacagauggcacaaccccgaggcagccccaacuugcau

SEQ ID NO: 4111971 - RNA, 115 nt, Human
gugcagcuggugcagucuggggaugagaugaagaaggcuggggcaucagugaaagucuccugcaagacuuguggauacaccuaccuucaccaguuacucuaugcacuaggugcgc

SEQ ID NO: 4111972 - RNA, 56 nt, Human
gugcaggacacagggauugucugcgugggcauguuuuacaguccagcuguuuguac

SEQ ID NO: 4111973 - RNA, 72 nt, Human
gugcaggaguuagagguuuaaucugaacacaagagaugacugagugagaagauuguuuugauuuuacugcgc

SEQ ID NO: 4111974 - RNA, 58 nt, Human
gugcaggaucucagaacaagugccccagguagcaaaguguuuuauaaggagaccugac

SEQ ID NO: 4111975 - RNA, 58 nt, Human
gugcaggcuagauccuuccuacaccugggcuugugggugcaggaauuggggcugucac

SEQ ID NO: 4111976 - RNA, 67 nt, Human
gugcagguggcuucuagcuucuuuggcagggaaaagaggcaugaagaaaagaagcuaaauucugugc

SEQ ID NO: 4111977 - RNA, 98 nt, Human
gugcucuuucgaggggccuacaagagucuguuacuuguccccuaacgaacuguuugguauacaguagcaggcucugagcuggguaggugguggagaac

SEQ ID NO: 4111978 - RNA, 66 nt, Human
gugcucuuucuugcucccugcuguauccauggcaccaggaaacagugccuggcauggaggaggcac

SEQ ID NO: 4111979 - RNA, 66 nt, Human
gugcugaagucagugaaaaggcaucauccaaacacaauccaaggaaaaugcaagcugauacagcac

SEQ ID NO: 4111980 - RNA, 61 nt, Human
gugcugaggaaggaagacuuaucuauuugauaaguccuucuuguuuuuucugacucugcau

SEQ ID NO: 4111981 - RNA, 55 nt, Human
gugcugaggugggugggcagccuggagaagacuugccugcccuccccuucaccac

SEQ ID NO: 4111982 - RNA, 56 nt, Human
gugcugauugggagcugggauucauguuuaauuggauauuugugccccaucagcau

SEQ ID NO: 4111983 - RNA, 71 nt, Human
gugcugauuuugguuuugaaaagguuuaggagcugcuaaacucuucuguagaaucagauuauggucagugc

SEQ ID NO: 4111984 - RNA, 77 nt, Human
gugcugccaggauccccaggucgccguccugaccccuggcugggcuucuuggaugaguugccugggguccugcggcc

SEQ ID NO: 4111985 - RNA, 116 nt, Human
gugcugggagguuuaucuugaggccacugcugcucugguggagugauugggaacuauguauauauauuuucucuccagggaagcaguguacuuuugaagggcuuaauaacagacac

SEQ ID NO: 4111986 - RNA, 63 nt, Human
gugcugggauuacaggugugagccaccaagcccggcgaacccugcccuuuuacuccacagcau

SEQ ID NO: 4111987 - RNA, 65 nt, Human
gugcuggggcauaaugggaccaggaccgggcucugugcccgaugguccuccugcugccucuccac

SEQ ID NO: 4111988 - RNA, 60 nt, Human
gugcuggugcacgcugccuaccuggugcucauccagaaggccagcgcagacaccgagcac

SEQ ID NO: 4111989 - RNA, 80 nt, Human
gugcugguggaaucaagguaaagaaguggagcaggagcuaaacuuucccucucccuauugccuggagcugccugaggcac

SEQ ID NO: 4111990 - RNA, 69 nt, Human
gugcugguggucccguugugccgcagugugcugagccacccugagaugccacagcggggccgcuagagc

SEQ ID NO: 4111991 - RNA, 58 nt, Human
gugcugucggcggcugacuugccgguuugggaucccccaggccagugcccuggcucac

SEQ ID NO: 4111992 - RNA, 57 nt, Human
gugcugugcgcuuuuucuguauguguuuuaaaagcauauggggcaugcugucagcac

SEQ ID NO: 4111993 - RNA, 58 nt, Human
gugcuguuuuuggugaacgaagcaccccaugggcuugguggggucuuggagacagcac

SEQ ID NO: 4111994 - RNA, 66 nt, Human
gugcuuauagauuuuuuguuagcagcccucauguaguuguugguuguuuauaaaaauaucuagcau

SEQ ID NO: 4111995 - RNA, 80 nt, Human
gugcaugugugugcacacaugcguguauaugggugugugugcacaccugcauguauaugggugugugugcacacaugcau

SEQ ID NO: 4111996 - RNA, 66 nt, Human
gugcauuaauauccugcuggcuaaauauucugcuuauguguuuauacagugcaugguguuaggcau

SEQ ID NO: 4111997 - RNA, 77 nt, Human
gugcauuuauggaagaaaacuuggaaggcauuaaaggcuacauuuugagccuugcaugauuucauucauuuaugcau

SEQ ID NO: 4111998 - RNA, 79 nt, Human
gugcauuuguuccaugaguaaggcuauaaucgguacuuagaaucagaaaauuaguuuuuagucaugguaucaguggcau

SEQ ID NO: 4111999 - RNA, 96 nt, Human
gugcauuuuagaucauauuuuuuaguugaucauucaacaugggugaacugaacuuccuaguaucccauugaugcaacugaauguaguccugugcac

SEQ ID NO: 4112000 - RNA, 77 nt, Human
gugcauuuucucaagagagcacccgucggugguaggaaggggcauugcuaguacgucgggugcuggaggaaaccagc

SEQ ID NO: 4112001 - RNA, 60 nt, Human
gugccacaguugccaggaaccacauguguaaagguguggaggcaucagagugcuuggcau

SEQ ID NO: 4112002 - RNA, 85 nt, Human
gugccaccaagcacacagggcagaaauguugcaucugagauagguuaugagaagacuguagcuucugucuugagucuuggaucac

SEQ ID NO: 4112003 - RNA, 75 nt, Human
gugccacccaguugccaggaaaccugcgccauccagacucacuugugcugaggacagcuccuggcacgguggcac

SEQ ID NO: 4112004 - RNA, 58 nt, Human
gugccaccuucaaaucacauuggggcuuagggcuucggcaaaugaauuuaggggguac

SEQ ID NO: 4112005 - RNA, 97 nt, Human
gugccacuuuuagcucugugacccugggcaagucacuuagccucugugccucagauuccucagggcuagugcaaggauugcugcagagcugugguac

SEQ ID NO: 4112006 - RNA, 69 nt, Human
gugccagagaugacaggccugccugcuacccacucacacccuaccagugagguuugucaccucuuccac

SEQ ID NO: 4112007 - RNA, 55 nt, Human
gugccagaggccccaaacaaguccauacuugggcuucgggcuuggauuuuggcau

SEQ ID NO: 4112008 - RNA, 100 nt, Human
gugccaggcacugggcucugccaggcacugggcucugcagcagugguaacaggcuauaaagugcuucucugugccuggagaccuauacagugcuuugcac

SEQ ID NO: 4112009 - RNA, 72 nt, Human
gugccauggcuugguugguuaaagcaccugucuaguaaaauagaagucuggagccacccuaagcauuggcau

SEQ ID NO: 4112010 - RNA, 98 nt, Human
gugccaugguccuggagcagccagcuguggcuauggcuccucauucagcaggcagcuuccugagccagcagcuccuuggcggcccaguucuguagcau

SEQ ID NO: 4112011 - RNA, 83 nt, Human
gugcccaaaggacaaagcagagcuggaugcaucuguggcuaggagacagggauuuguuuuguuuuguuuuguuuuauaagcac

SEQ ID NO: 4112012 - RNA, 86 nt, Human
gugcccagcaggagcugagacccaguggcugaaauagacagaacauucucugguuaucaggcaucuggcuacacuccaggcugcac

SEQ ID NO: 4112013 - RNA, 63 nt, Human
gugcccaggcccaaggcaccacuuuaucacauuccccuggccauagcaaugggccuuggacac

SEQ ID NO: 4112014 - RNA, 81 nt, Human
gugcccauccaaggccggcccaugguggccagcuugcacagcaggguggauggcagggccagucauggggaaggagggcac

SEQ ID NO: 4112015 - RNA, 66 nt, Human
gugcccaugugcaggaagcucucaguuuguuuauaagugaaaaaggcuaagcaucuugugcuguac

SEQ ID NO: 4112016 - RNA, 127 nt, Human
gugccccuagcugacuguugaggguaagcagagccacagccuccagauuuuauucaaggugaaauggacauugggugagcucucuuguucucagaugaucugcuuuauaguacaggacuagggccau

SEQ ID NO: 4112017 - RNA, 93 nt, Human
gugccccucccuguccauucuccucaauuccacugucugaaggauggacugggguaaggugaggaggugccauuguuaacagguugguggcac

SEQ ID NO: 4112018 - RNA, 65 nt, Human
gugcccggaaagcuucucucagcucacccggcaggcuuuucuugcccagagccuagggagggcac

SEQ ID NO: 4112019 - RNA, 64 nt, Human
gugcccgugcuaagcuccaucacuuguuuccucccacgaugggugucgugcuugccauggguac

SEQ ID NO: 4112020 - RNA, 62 nt, Human
gugcccucguguaguuccagguacacugauagugacgugugcccagugggugcaggggguau

SEQ ID NO: 4112021 - RNA, 101 nt, Human
gugcccucucugugccccaguaguccuggauugguggaggcagagccaugggcuuauucccugucucuccacacagccagugccuaacacagugacagcac

SEQ ID NO: 4112022 - RNA, 68 nt, Human
gugcccugaggucuucacuuugcgauacaaagcccagaggaguucacagggagaggggccuggggcac

SEQ ID NO: 4112023 - RNA, 61 nt, Human
gugcccugaguggguaggagagggaguuauuauaaccucauuccugcuuccaccagagcac

SEQ ID NO: 4112024 - RNA, 89 nt, Human
gugcccugguucucgacucaucagccucuaggaaagaagcagcuugcugguccaucccaggcugcugggaggcccgagaaacaggucac

SEQ ID NO: 4112025 - RNA, 63 nt, Human
gugcccuguggguaucugauggcugcuaauuaucucaguggaccuuacaguaccuauagauac

SEQ ID NO: 4112026 - RNA, 58 nt, Human
gugcccuuauggaagaaaccucagagagcuaccugcuccuucuguuauaugagggcau

SEQ ID NO: 4112027 - RNA, 85 nt, Human
gugccgcacuugggguauuugacaaacugacacucuaccacauggaguguccaacucagcuugucaaauacacggagcguggcac

SEQ ID NO: 4112028 - RNA, 62 nt, Human
gugccgugggccuuagugaucugccuaccaucagccaaggcgccuuauuguggucacagcac

SEQ ID NO: 4112029 - RNA, 59 nt, Human
gugccuagacauuuugguuugcccaggacaggucggguuuacgccaguugucuuggcau

SEQ ID NO: 4112030 - RNA, 97 nt, Human
gugccuccuacacagugccuggcacagagcagguggccugugaucaugucaugagcuaacccaaacugugucuggcacaguugcaggauauggacac

SEQ ID NO: 4112031 - RNA, 65 nt, Human
gugccucucauuggcugagcccggcugaaagccagagagcaggggcacagcugaugcagacacac

SEQ ID NO: 4112032 - RNA, 66 nt, Human
gugccucuccucaucccuaccgacuugcagccgugauagggaugcuuaguaggacccaggaggcac

SEQ ID NO: 4112033 - RNA, 89 nt, Human
gugccucugcgaugguccugccaagguccuuuaccugacggccuggugaaggugaaggucagagcaggaaaaacgcaagaguggugcgc

SEQ ID NO: 4112034 - RNA, 88 nt, Human
gugccucuuugaugauggcaagugguaugcuggcagagguccccagaucaccucugcccaggacaccugccacuccccagggggggac

SEQ ID NO: 4112035 - RNA, 103 nt, Human
gugccugacucaucccuguuccugguccccagugcggcacgugugcguggcaggugucaccaccgaaacgucugcggauccuggagcaaaugcucacaagcac

SEQ ID NO: 4112036 - RNA, 69 nt, Human
gugccuggcaguugacaguuugcuaaaggugcaccuuuaauuaaugaguaagagucccuguccauccac

SEQ ID NO: 4112037 - RNA, 97 nt, Human
gugccuggccucuaggcuugaaauucuaaugaaaguggaccaugggcaggcuuauaacucagaguuccucauagauccaguccugaggcacagucau

SEQ ID NO: 4112038 - RNA, 66 nt, Human
gugccugggguuggcaaacugcucagagaaguauguuugugaccugagcaaccauccccagggcau

SEQ ID NO: 4112039 - RNA, 71 nt, Human
gugccuuggaggaaugaugagagccaugaaaggagaaaagcuuugguuccaccaauucuccuccaaggaac

SEQ ID NO: 4112040 - RNA, 80 nt, Human
gugccuuuguuaguauucuuauuauuugugucuauauuauuaaguaacauggaagauaaaaauacucauagcuagagcau

SEQ ID NO: 4112041 - RNA, 84 nt, Human
gugccuuuuaguuccuuuaguguuugucuuaauugauuuuuuuaaaguaguuuuauguucacagaaggauuaagcugacgguac

SEQ ID NO: 4112042 - RNA, 65 nt, Human
gugcgaaagugucuagagcauuauuauguaucuguuaugguaacacuagcucugucacuuucaac

SEQ ID NO: 4112043 - RNA, 67 nt, Human
gugcggccuggccuucaaguggucgucccacuaccaguaccacuuaaggcagcacacaggcgagcgc

SEQ ID NO: 4112044 - RNA, 58 nt, Human
gugcggucacgcccggcccgcguugagagagcgcuuggcagccagcggguggacgcgc

SEQ ID NO: 4112045 - RNA, 75 nt, Human
gugcgucuaucuccugguacccuuccuagcaucaauucuguauuuguaggaguccaaucaggagacacaaaccac

SEQ ID NO: 4112046 - RNA, 83 nt, Human
gugcgugaggaagacugcauggcauagugauuaagaaccaggguacggcuggguguggucacucaugccuguaaucucagcac

SEQ ID NO: 4112047 - RNA, 74 nt, Human
gugcguggggcuggcaggagcagucaacaggaauaguuagagucagaccugggcuuacaagccagcuguaccac

SEQ ID NO: 4112048 - RNA, 85 nt, Human
gugcgugucugggagggaccuggagccugccccgcaccugucccgcagggcuucugguucuucaggccauccucccagcaaaagc

SEQ ID NO: 4112049 - RNA, 92 nt, Human
gugcguuacagccuggaggggcgcugucgggucaccuugaccccagguggccuggaacagccccccaccuuacacaucuugcccugccgcac

SEQ ID NO: 4112050 - RNA, 125 nt, Human
gugcuaacaagugguucacauccaggaucucauuuaaucccccaacaaaccuguggggaaaugucauccucacuccacagguggggaggcugagguucaggauggcuaacagaccaugaggacac

SEQ ID NO: 4112051 - RNA, 65 nt, Human
gugcuacagacugaguacacuuaggauucaaaacuauuuucaggguacuauuagucauguggcac

SEQ ID NO: 4112052 - RNA, 124 nt, Human
gugcuacuuaaucuuaaaagcaaaauuaaacauuggacugguuuacauuucaagcuacaauauggaaccauuguauuuggaggaaugaguuuaauaugcauuguaaaauaaaauuaggggguac

SEQ ID NO: 4112053 - RNA, 55 nt, Human
gugcuaggaauuuuccuuguugauuuuauagggccaggagauuuuuccauagcac

SEQ ID NO: 4112054 - RNA, 73 nt, Human
gugcuauuuggcugugagguuguuugugaauuaaccucaaaauauuuacaauuacuugaucucagcucugcac

SEQ ID NO: 4112055 - RNA, 70 nt, Human
gugcucacacugacacagguuuaucucagucugugauccuugggaggagacccugugucaguuuaagcac

SEQ ID NO: 4112056 - RNA, 67 nt, Human
gugcucaccaugggaacuugggcaagccaagggacuuuucugggccucaguugaucugugugagcac

SEQ ID NO: 4112057 - RNA, 55 nt, Human
gugcucacugugagacguccugccacaccccacaggagacggaggcagugggcau

SEQ ID NO: 4112058 - RNA, 88 nt, Human
gugcucagagaugggaggcugcuuuccuccuauccuggaucucuggaggaugucagcaaggcaccccccauuucuuacacuggagcac

SEQ ID NO: 4112059 - RNA, 71 nt, Human
gugcuccauaacuguuagcuauuauuuuuccuauaacauuuuauaggaaugauaauaguaaagaguagcau

SEQ ID NO: 4112060 - RNA, 80 nt, Human
gugcuccuccuggugucgccuggucaguuagcuucaucuacaauugcauauguaacuucuaggcugcacacggcaugcac

SEQ ID NO: 4112061 - RNA, 56 nt, Human
gugcuccuggccacaugaagcuggaagaaggccagcuuuaacccuuucaggagcau

SEQ ID NO: 4112062 - RNA, 97 nt, Human
gugcuccuuugcugugaccccacaucgcuguccugaggugcagcugucggaggcugcugagucacgacagugaaugggcagagacagaggagucagc

SEQ ID NO: 4112063 - RNA, 65 nt, Human
gugcucucucacguguuaccuccuaagggauaucaaaucugggaagcaaauauguaagaaggcac

SEQ ID NO: 4112064 - RNA, 73 nt, Human
gugcucugaugugacuuuuucaucaagucaguauuccugggaucucuuguacaugauaaucucacucuugcac

SEQ ID NO: 4112065 - RNA, 61 nt, Human
gugcucuggagggaggcgucuucugcaggagggacgggagagccagcucacuccagggccc

SEQ ID NO: 4112066 - RNA, 64 nt, Human
gugcucuugcuuucuaaccuaaagugucuaaugagaacuuuagaaaggaaggaaguguuagcau

SEQ ID NO: 4112067 - RNA, 59 nt, Human
gugcucuuuauaaaagucauuaugucuauuuuuagacauuucaguguuuaugaagacau

SEQ ID NO: 4112068 - RNA, 55 nt, Human
gugcugagcacaaggcccagagucacuacugcagacuucugggcaaucucaguau

SEQ ID NO: 4112069 - RNA, 85 nt, Human
gugcugagcuggaaagggacugauuguagcaggaaugaaagaauaggauucacauuauaaucaguucugcugagcagcugagcac

SEQ ID NO: 4112070 - RNA, 65 nt, Human
gugcugagugagaacccagagagagugcaggucagcgugagggucucuguggguuucaccagcgc

SEQ ID NO: 4112071 - RNA, 58 nt, Human
gugcugauguugcuucccuugggcucauuauuggcauuagagaaagcaggcacagcac

SEQ ID NO: 4112072 - RNA, 80 nt, Human
gugcugcacucugccacaucucguuugccgccauaucacagaauuggcacacugcggugaugugagucaguguguggcac

SEQ ID NO: 4112073 - RNA, 66 nt, Human
gugcugcccuggcauuggguuggauaagugaguuauugcugucauuucccguguuaggagucacac

SEQ ID NO: 4112074 - RNA, 112 nt, Human
gugcugccuguggcuuccguggggccuguggcuuccguggggccuguggcuuccgugcugccuguggcuuccguggggccuguggcuuccguggggccuguggcuucugugc

SEQ ID NO: 4112075 - RNA, 84 nt, Human
gugcugcuccacagguacagacaaguaguucagacaagauccucucacuacccaaacucuugccuacuugucaaccagcaguau

SEQ ID NO: 4112076 - RNA, 68 nt, Human
gugcuggaggcccuccagcugucagcugggguccgugcaccccccagacugccuggagggcuucgcac

SEQ ID NO: 4112077 - RNA, 76 nt, Human
gugcuggagggcugagugggagagaguugcaaauaaaaauguuauauuaauucuaaaaaccuauggcccccuucac

SEQ ID NO: 4112078 - RNA, 55 nt, Human
gugcuggcccuguccucgagcugcuuccagugcagcggggagggcaggaccaggc

SEQ ID NO: 4112079 - RNA, 56 nt, Human
gugcuggcugccaggaggcugcuguggaaauaacuguaggccugagaagucagcau

SEQ ID NO: 4112080 - RNA, 97 nt, Human
gugcuggcugggcccagaacaccaaaggcagagcugaacacuuccacugggaaguggggguuuuggccucuugggcugggaaauuccuggccggcac

SEQ ID NO: 4112081 - RNA, 94 nt, Human
gugcugggagccaugacugaaauacugcucuuggauucugagcucaggagcuccauuagagaguauuacuaaagccaguuguggugcccagcgc

SEQ ID NO: 4112082 - RNA, 90 nt, Human
gugcugggcagauccuucugggccaacuuccaggagcuucuagaugaggguccugaagucacaggcucugagcgugggucugggcagcgc

SEQ ID NO: 4112083 - RNA, 63 nt, Human
gugcugggcguugugcuuaguaauuucauucauaugcaaagagcacccucaaugucugagcac

SEQ ID NO: 4112084 - RNA, 81 nt, Human
gugcuggguguugggcugcugcggugcucuuggaaagugcaaaagaauucccaagggagcacgcacagcagcauccagaac

SEQ ID NO: 4112085 - RNA, 65 nt, Human
gugcuggguucccugccuggccacucugaggucaguaaugcaggugggcagguggcagccuggcc

SEQ ID NO: 4112086 - RNA, 68 nt, Human
gugcugucaucugauguuccuggucuaacaccuaggcaguagguggaggcaggggauacaggucacac

SEQ ID NO: 4112087 - RNA, 63 nt, Human
gugcugucgccaaccccugcccaccuuugguuucaucucuccagugcccaguuggugacagac

SEQ ID NO: 4112088 - RNA, 62 nt, Human
gugcugugaguaaugaccugucuugcucugauccaaugaguaguacaguuuacuuucagcgc

SEQ ID NO: 4112089 - RNA, 60 nt, Human
gugcuguucauuagaaauagaaugcaagaaguauacuuuuacauuuucuggugaauauac

SEQ ID NO: 4112090 - RNA, 62 nt, Human
gugcuguuugaagccacuucaucugugguaauuucuuacacagcaguggaaaacaaauacac

SEQ ID NO: 4112091 - RNA, 79 nt, Human
gugcuguuuggcccuuuaugggaugggcacaaagacccugugucuaccuucccagugggcugcauaagagaccgggcac

SEQ ID NO: 4112092 - RNA, 73 nt, Human
gugcuuagauucuacuucagccugaacuccuuuugaaaggaaagggagaaagcuguaguggaaugugauucac

SEQ ID NO: 4112093 - RNA, 78 nt, Human
gugcuuaugacuaauuagguauucacuuuagaguuuuaaguaauuggucagaggcuuauaccugauuaggauauguac

SEQ ID NO: 4112094 - RNA, 64 nt, Human
gugcuucaacuauacauauuuacauagacguaaacaugaccuauguuguuugugugggcugcac

SEQ ID NO: 4112095 - RNA, 62 nt, Human
gugcuucaggcaaagggacccccaugugcaaaggcauggaggcaugacagugucuggagcac

SEQ ID NO: 4112096 - RNA, 63 nt, Human
gugcuuccagcccagccugcagucuaaggcugcccaaacacccaggagcaggcugggcagugc

SEQ ID NO: 4112097 - RNA, 100 nt, Human
gugcuucccacucuuuagcauggaucagaaucccgggagggcugugaaacagccaccacaccucacccucauuucugauucaguggguaggggugagcac

SEQ ID NO: 4112098 - RNA, 56 nt, Human
gugcuuccuagguaaguagguagcguuguccucagugaaccacaccaggggagcac

SEQ ID NO: 4112099 - RNA, 58 nt, Human
gugcuuccucagagguucccauccuucagcccugugccuuugaggaucuggggagcac

SEQ ID NO: 4112100 - RNA, 61 nt, Human
gugcuuccucaguguuuaaggacgaccagaacugucacauuugaguccacauugggaacac

SEQ ID NO: 4112101 - RNA, 72 nt, Human
gugcuucuaaaacaaguuuccaugcuugaagcguugagugucaaguaucugggagauuugcuuuuguaggac

SEQ ID NO: 4112102 - RNA, 67 nt, Human
gugcuuguuacucucugaaaugccuggggcugcagcagucacaggaaugaacagggaaagaggauac

SEQ ID NO: 4112103 - RNA, 69 nt, Human
gugcuuugcauuuuguuacaucuuauguaaguggugauauuagcauuacuacauuguaacacaguacac

SEQ ID NO: 4112104 - RNA, 72 nt, Human
gugcuuugcuccuuucccuguggugcuggucuuuaaaacaaacaaaccaaccacaaagaaugggggaagcau

SEQ ID NO: 4112105 - RNA, 61 nt, Human
gugcuuuuguuucuucugggaccugcaaacccauccagugcccucaggaaacagaaugcac

SEQ ID NO: 4112106 - RNA, 89 nt, Human
guggaaacuggaggcuuuuguuggucuuugguguuuucuuaacaagagaacagccuccuagagaaacagcgaaagagccagguuucugc

SEQ ID NO: 4112107 - RNA, 106 nt, Human
guggaaaguccucauuugauacaugaaaaaacugaggccuggugagguggugauaaaguccaggucaccccggguacuuauuucuaaucaguaguaggcuuaccac

SEQ ID NO: 4112108 - RNA, 78 nt, Human
guggaaccagcucguucguuccugacagugauaaaggcggcaguuggauuucaucugugaauaaugaacugguuucac

SEQ ID NO: 4112109 - RNA, 65 nt, Human
guggaacuggugagaguucacgggaggaggucagaagcucuccaggugaugaucugaccggccgc

SEQ ID NO: 4112110 - RNA, 57 nt, Human
guggaagaacaaagaagaaugguucuuucuggaaccucuaguuuguucuuugagcac

SEQ ID NO: 4112111 - RNA, 77 nt, Human
guggaagauggacauguaaauggcaauuauggugcagagugauaaaccauuauuagccauaauaguaagcuuugcac

SEQ ID NO: 4112112 - RNA, 106 nt, Human
guggaagauugggauucuaguggcuuaaaaugauguggagugaaauuguuuucaaugaaaauauuuaucaaaguuauaucaugaguauaucuaacccuauguuuac

SEQ ID NO: 4112113 - RNA, 71 nt, Human
guggaagccuuccugagugcaaggccugacacuuguugcggagccaugacuggggaugcauuugaccccac

SEQ ID NO: 4112114 - RNA, 61 nt, Human
guggaaggccaggccuagcacggaggcugugagggcgcccugcccugggcccggccugcgc

SEQ ID NO: 4112115 - RNA, 125 nt, Human
guggaaguguagcuauccucauucccuugggagagguaugugucagugcuuauauauauucaaaaugcaagugucuuuccaucuacucauucuaauucuaugaauucacacagcuguacuuuuac

SEQ ID NO: 4112116 - RNA, 69 nt, Human
guggaaucguauuaccuuugggauuaggacauuucauugucauuauucaccaguguaaaacacuuuuac

SEQ ID NO: 4112117 - RNA, 102 nt, Human
guggaaugaaaugcaacauuugcaugcuuuauuagaaagaucaaaagucuuaaaagaaagaucgacagucuuaauaaaaaugucaagcuugcagugggccac

SEQ ID NO: 4112118 - RNA, 107 nt, Human
guggaaugcuaaguaaaaaaugugauguaguguaguugcaaaggcguuagcuguauucuaauuccagauuugccacuuacucguugaauugacuuugggcaauccac

SEQ ID NO: 4112119 - RNA, 87 nt, Human
guggaauucaggcaguauuucagauucagaaauguaggucacaauuucuuaucugcaguucggaagccugaaaagcacugaaaacac

SEQ ID NO: 4112120 - RNA, 62 nt, Human
guggacaggggcagggaggauuguccucaaagacaacagcauuuccugcccuuugucaucac

SEQ ID NO: 4112121 - RNA, 79 nt, Human
guggacaucuacgaaggcuguuugagcaaaaaaccuguacuuaugcaucuuucugaaacauggucuuuguaguggacac

SEQ ID NO: 4112122 - RNA, 71 nt, Human
guggaccaggccuggcccaggagcuugucggcaaggcagagccgcauccaggcucccggaccaggauccgc

SEQ ID NO: 4112123 - RNA, 70 nt, Human
guggacccugaagcaacagggagcuggggcacuuauacaccaacuccaucagcuguugguugagggcugc

SEQ ID NO: 4112124 - RNA, 71 nt, Human
guggacuucaccucauccacuuuggccaccauguuuuuguugugugucagcaggggagggaacuuacccac

SEQ ID NO: 4112125 - RNA, 91 nt, Human
guggagaagcgggggaagcagaaggaugaggauaggugggguuggggcucagcucugcgcccacagaccuuggcuuccaccuggucucuac

SEQ ID NO: 4112126 - RNA, 55 nt, Human
gugaucuuuucucucuugcuuuuuguguguccuagagcacugaagaguuggucac

SEQ ID NO: 4112127 - RNA, 81 nt, Human
gugaugagaggaugccuuauuguaaucuuuccauuggguagucuaacauggcacaaagaguauagugagguucuuccucac

SEQ ID NO: 4112128 - RNA, 80 nt, Human
gugaugagcucuacaggucaagcaguagcucugcuccacacagucauucagggagcuaagcugaccuguuccuuugucau

SEQ ID NO: 4112129 - RNA, 83 nt, Human
gugaugagggcuuggccauuuagggaggcaaggugauuugcucaaagucacacagcuaguaagggccgaggcggaacucaugc

SEQ ID NO: 4112130 - RNA, 82 nt, Human
gugaugaguucauacuuucaguaccauccaaaagugccuauuaaauuggaguucaggguaccuagagucuugacuugaucau

SEQ ID NO: 4112131 - RNA, 57 nt, Human
gugauggagggaguuuuuguugacuugguaguuccugucugcagaccccuucauugc

SEQ ID NO: 4112132 - RNA, 69 nt, Human
gugauggaugucacuucuaagauaauguuauaaaaagauugucuucugucuuaggugaucucucauuau

SEQ ID NO: 4112133 - RNA, 65 nt, Human
gugauggcaccuggcccugggaccuuaagaaaaucacuuuaccucucagggcuugguguccucau

SEQ ID NO: 4112134 - RNA, 60 nt, Human
gugaugggggcaggauuugaauuucaauauauccaacuucagaauccagucucuuauuac

SEQ ID NO: 4112135 - RNA, 103 nt, Human
gugaugguagagguuuuagaucuaaugucuuacuguggaaccuuuuuuguuaugcuaggggucagaggagaaguugggaaaauugcagaccuacucacaucau

SEQ ID NO: 4112136 - RNA, 130 nt, Human
gugaugugugcaaagcuagugagagaggcaguguaugagagcuuagggauuugaaaugucacaacauauggcaggcccagguguucauuauaaguuacaaacucucguccugcuuggaccauucguaugc

SEQ ID NO: 4112137 - RNA, 75 nt, Human
gugauuacauaggauuaucuuuuagugcaauauuuguuuuuguauucuauugaaugauaaucuauauaugguuac

SEQ ID NO: 4112138 - RNA, 66 nt, Human
gugauucaagaggaacaaugaagauccuuggaaaguaacagcaaucuuuaacccucuugaauugac

SEQ ID NO: 4112139 - RNA, 76 nt, Human
gugauucaucagaauaggaguuuugcaaaaucccacgcauaugcuguugagcaaaacuugcuauggcugaaaucau

SEQ ID NO: 4112140 - RNA, 74 nt, Human
gugauucucugccugggccggccacccucuguccugaggacgcuggagccuggcccggcccuuggcagccccac

SEQ ID NO: 4112141 - RNA, 55 nt, Human
gugauucugccuggaagguccuggagucacaggacuuaaaaccagacagcgucau

SEQ ID NO: 4112142 - RNA, 95 nt, Human
gugauucuuuucuucccuaaggaagcugaugcaaaggguuccucagaaguaguuaauugaacccucugcaucagcuucuuuagggaaggaaucac

SEQ ID NO: 4112143 - RNA, 78 nt, Human
gugauugccugaaaaagucuuugacagaaaucuuguuuacuugagauaacuauucugucaacucuugcaguaauucac

SEQ ID NO: 4112144 - RNA, 68 nt, Human
gugauugcuaugugcuaggcacuggacaacgugcuguucaggaaucaaccaagucauuuaguucucac

SEQ ID NO: 4112145 - RNA, 68 nt, Human
gugauugguagccaggcgaggauggguuuuggaauuaacucuuccuacagucugcuaugcauuaucac

SEQ ID NO: 4112146 - RNA, 120 nt, Human
gugauuguaacuugugguuguaaccugucgugauuguaacuugugauuauaaucuguugugauagcaacauguuaugaugguaaauugugguaacccugguuguaaccuguugcaauggc

SEQ ID NO: 4112147 - RNA, 69 nt, Human
gugauugucauagcuucauggguagcaugucuguauugggaaggcuauuuccaaagcugcuguucucac

SEQ ID NO: 4112148 - RNA, 101 nt, Human
gugauuguuaaacacgauacguguguuggagguccccgagauccuccccaugguggauuugcuagggagacucgcaggacucaacauguaguuguugucac

SEQ ID NO: 4112149 - RNA, 55 nt, Human
guaagcauucauugucuguauagucaggcugacuguacagguuuucagugcuugc

SEQ ID NO: 4112150 - RNA, 57 nt, Human
guaaggaccacacaaucugccauguaaguuauuggccugagugauggaucuccuugc

SEQ ID NO: 4112151 - RNA, 77 nt, Human
guaaggaguucuguuaaguauuacgcugcaucugacagggcauccaggcagcaagauuauuuaauccaacaucuuac

SEQ ID NO: 4112152 - RNA, 68 nt, Human
guaaggauauauuucagagcuucuagggcuauauccauuuccuacuuuccucuuaaauugucucuugc

SEQ ID NO: 4112153 - RNA, 95 nt, Human
guaaggcacugagcuagccaaugagggaaaaagacaugugauagacaucgguuugcacuuuauuuccucucacacgucugucgucagugccuuau

SEQ ID NO: 4112154 - RNA, 80 nt, Human
guaaggcauucuauggaaguacagucaggcacgcaauucaaccaaagugggcaaaggaaggcuuccaggagggcugauau

SEQ ID NO: 4112155 - RNA, 93 nt, Human
guaagggaaggaagguggacgggaggauugugaggguuauaaggguuguaauaaucgcuaauucacaauucaaacuguucagaacuccuuuac

SEQ ID NO: 4112156 - RNA, 88 nt, Human
guaagggcaucuucuguagccaucucauaaaauuggauuguauaacuguuuacucaaggugaaggagaggcugagaagugauucuuac

SEQ ID NO: 4112157 - RNA, 66 nt, Human
guaaguauaugcuugugcaugucuuugugugcauguuguaugcaaaggcaugugaguauauguggc

SEQ ID NO: 4112158 - RNA, 80 nt, Human
guaagugaaaucagaagugcaauuuaaauuaggguggucaagucaggacucccuacgaaguugacuuuugagcagagugc

SEQ ID NO: 4112159 - RNA, 57 nt, Human
guaaguuccuccugcuaaaugaauuuguuuugcuucaugcagagaaggacugcuuac

SEQ ID NO: 4112160 - RNA, 73 nt, Human
guaauaaaugcuguuacuguuggcccagggugagguagggacucaccugugcccagguaauaugauccauugc

SEQ ID NO: 4112161 - RNA, 130 nt, Human
guaauaaauuauuauuuacauuagucagcagcccuguuuaugccacaucaugagccuuuccucauguaauaauauagugaguauaaugauuaguggcugcauaauacugcaguaaguagauacaucauac

SEQ ID NO: 4112162 - RNA, 64 nt, Human
guaauaggagggagucugcuuugaguaauccagugccuucugaaaguuucucccuaauuguugc

SEQ ID NO: 4112163 - RNA, 64 nt, Human
guaaucccagcuacuugggaggcugaggcaugagaaucgcuugaacccaggaagcggagguugc

SEQ ID NO: 4112164 - RNA, 76 nt, Human
guaaucccauugagaauucuuucuuuguaguccugaacaaugacguguucuuugacuccaagaaaguagggguugc

SEQ ID NO: 4112165 - RNA, 110 nt, Human
guaaucugcauagagcaaggcaaacaaauaaugaucuuuauuuuaauuugcaguuucauuacuuuagcaauuauuaaggguugaugucuuugcuuucugaugcuaguaac

SEQ ID NO: 4112166 - RNA, 56 nt, Human
guaaugaaugaaagaaacugggugaaggguggguacgcaggaucuuucuguauuau

SEQ ID NO: 4112167 - RNA, 79 nt, Human
guaauggucaccagaacaagacaggagaauaucaagauaagagaaauguucuaugucuugaacuuuggauuaugguuac

SEQ ID NO: 4112168 - RNA, 68 nt, Human
guaauguauaaaccuucaugauggucauuauuauuuauuuguuuuggugaaccuuggagggacauuau

SEQ ID NO: 4112169 - RNA, 66 nt, Human
guaauguccauuagggauaaagguggugcuagcaaaagacaaaucuggaauccuuguggacaauau

SEQ ID NO: 4112170 - RNA, 111 nt, Human
guaauuaaaucuugucagaccugccuucugaugaugauguuuggcaugcaugcauugaguucugaugcaguuuuaaaucauuucagaaagccagaggugcaagugaauugc

SEQ ID NO: 4112171 - RNA, 59 nt, Human
guaauuacauuaggguaaauaagguguccgucaccucuagcauuuauccuuuguauuac

SEQ ID NO: 4112172 - RNA, 65 nt, Human
guaauuagguagaaaucuauuuuaaccaagcugcaguaugcaguugaguauauuucuuccuuugc

SEQ ID NO: 4112173 - RNA, 64 nt, Human
guaauuccagcuacuugggaggcugaggcaggugaaucgcuugaacccaggaagcggagguugc

SEQ ID NO: 4112174 - RNA, 65 nt, Human
guaauugaacauuaaguugaaggaccagacccagaaaaaauucuuucagcuuaugugucacuugc

SEQ ID NO: 4112175 - RNA, 57 nt, Human
guaauugcagaacuuugggaggccgagauggguggaucaccugaaguuuuggaguuc

SEQ ID NO: 4112176 - RNA, 112 nt, Human
guaauuggaaagcuuuuaucauuuuuuguaggggagagggaaaugagaauaggcuuaaaauugcuucuuuacuauaggcaauuaacaaacauaaaggcugucauuauguuac

SEQ ID NO: 4112177 - RNA, 89 nt, Human
guaauuggguggaguguuguacaaaauaucagugaggcuaaguugguauuagguuucuauauccuuugucuacuuauuucuucaauuac

SEQ ID NO: 4112178 - RNA, 64 nt, Human
guaauuucucagggaucuagucccaucucuuuauuccuuuacucguucccugggauauaauuac

SEQ ID NO: 4112179 - RNA, 94 nt, Human
guaauuugagugagauguguaaucaggggugaaguccaauuuuuguuuaccuauuuuaaauugcaacucuauacaaauuuuauuuucaaguugc

SEQ ID NO: 4112180 - RNA, 75 nt, Human
guaauuugggaguauaucguguaucauaugcauacucacauguaucauauacauacaguaugauucguaaauugc

SEQ ID NO: 4112181 - RNA, 61 nt, Human
guaauuuugauguaucuuuguagcugcgguuguuuccuuaguuauuuuacguuaauguuau

SEQ ID NO: 4112182 - RNA, 106 nt, Human
guaauuuuguuccagcccuugccuggacuccccuuccagaccacaacuuccccggugauaugggacccuggaggaggaagucuacaaugugggagagaugaguuac

SEQ ID NO: 4112183 - RNA, 79 nt, Human
guacaaaaggcagaagaauggugucugagcucaaaaugcaggcagagagugaguucagccuuccuccaucucuuugugc

SEQ ID NO: 4112184 - RNA, 71 nt, Human
guacaaccauuucuuucaaagcccuagggaggcacaggagcauccaggagguuuggaggaagcaaaaguau

SEQ ID NO: 4112185 - RNA, 93 nt, Human
guacaagcugcuuuccugggguggcuuguccuuuugcaguuaaccgagaugccuggggagaagagcuucccccaacaggauggcaggcgaugc

SEQ ID NO: 4112186 - RNA, 95 nt, Human
guacaaguuugaacuacauagaugaauuagcaauuaucuuucuaauauuggaaaagaucuuuuucauucguauguguagcuucugauuaugauac

SEQ ID NO: 4112187 - RNA, 64 nt, Human
guacaauagcaguuuucccuuuaucugccuaaggaaucuacaaguuggaagauuggcuaugugc

SEQ ID NO: 4112188 - RNA, 74 nt, Human
guacacaggcagagcugaagauagauggauauacauauuccaauugcaagguuucagcuccgccugcaugguac

SEQ ID NO: 4112189 - RNA, 102 nt, Human
guacagaacuguacuuucugaauaucauuuaucauuggcgaugauguaaggcauuggagcaaaucaaaugaauaaguauuuauugagugcuuaguucucuac

SEQ ID NO: 4112190 - RNA, 72 nt, Human
guacagaggucagguaggagcucaggaaugcaagcgacagucucacucccuccaaaucugcacagucuguac

SEQ ID NO: 4112191 - RNA, 61 nt, Human
guacagcuggacugguagcugugggagucccgagaaucccacagcccucccgucccuguac

SEQ ID NO: 4112192 - RNA, 55 nt, Human
guacaggacauagacagaguagagcuucuaauauuuacuuugcuauaaauuguau

SEQ ID NO: 4112193 - RNA, 72 nt, Human
guacagggcugugauccuugagagaagguaaaucaguaaugugggcccuaaaaugaucucagcuuucuguac

SEQ ID NO: 4112194 - RNA, 76 nt, Human
guacagugucuccugguacccaguucuccugccuggauauaucaggucccaugcucuguggcaggaggucuugugc

SEQ ID NO: 4112195 - RNA, 63 nt, Human
guacauaauuuucagccaguuuuugauuauucaaagaccuucugaucuuuggauuuuguguac

SEQ ID NO: 4112196 - RNA, 98 nt, Human
guacauagucaguagaaaaugaguccccccagggcaucuaguaaaauaaaccauuccuacccaaagauccccaggaccauccuucugugccugugaac

SEQ ID NO: 4112197 - RNA, 56 nt, Human
guacauaucauuauguuaugagcacauacauguauguguuaugcguauguguguau

SEQ ID NO: 4112198 - RNA, 75 nt, Human
guacauauuuauuuggagagauuuaggucucagucauuuucugauuuaagcuuaaaauucccaguuuaaguguac

SEQ ID NO: 4112199 - RNA, 57 nt, Human
guacaucucagaacugaguaaccggccaagcauccgcugcugggcucugagaugcgc

SEQ ID NO: 4112200 - RNA, 57 nt, Human
guacaucucuaauuccuaaaccuucacuaagagggaggugaagggagucaggugugc

SEQ ID NO: 4112201 - RNA, 86 nt, Human
guacaucuguaaacaccauguuagagugacccucugagaauaauuaguugaaauuuuauuacuguguguuuauuagguuguuuugc

SEQ ID NO: 4112202 - RNA, 87 nt, Human
guacauguaguuaggcugggaauuggcuaggauacacugcucuaacuguaccgcuuguugccauugucagcccugauuggacuguac

SEQ ID NO: 4112203 - RNA, 95 nt, Human
guaccagguauaggaguuuuggacugacagaacuuuacacuaaacaagauguaaaaguuuuaguuguacauaaauuuaaaaugaaccugccuuac

SEQ ID NO: 4112204 - RNA, 55 nt, Human
guacccacugucauauucaggguaucuaguacccugggucauauacaguguguac

SEQ ID NO: 4112205 - RNA, 75 nt, Human
guaccuugugcaccuacucuauccuuucuuugucuaagccccuuccuagaaaaaauacagaagguggcaaaguac

SEQ ID NO: 4112206 - RNA, 97 nt, Human
guaccuuuaucuguacuuauggcaaguuugugagguuaaucccuuuguugaaauuaaagugaaauagacacagacugcccguucaugauaagaguac

SEQ ID NO: 4112207 - RNA, 63 nt, Human
guaccuuucucugugugugugacagcauuuauaauagugugacuacauuacaagaguuggaac

SEQ ID NO: 4112208 - RNA, 81 nt, Human
guacggcauacacacuucugcugccgccucggcacagacccucugugcagccccaggggcgguagauccuaguguccgugc

SEQ ID NO: 4112209 - RNA, 61 nt, Human
guacggccaugggauggggcagucacucaacugacccagugacucgucucuguggccgugc

SEQ ID NO: 4112210 - RNA, 84 nt, Human
guacggcuaugagauuccuguggacauucuguguggaauugcugauacuacucagaaugcuacaaugaggucucuugguuguau

SEQ ID NO: 4112211 - RNA, 120 nt, Human
guacuaccuagaucacagcuauggggcugugagacuacaggaucuccugagaaggaagaguccaaagaauuguaguccagaucauucagccauuuacuagcagagaucuuagguagucac

SEQ ID NO: 4112212 - RNA, 60 nt, Human
guacuaguugagcucugaauaaacugggugaaauuuucuaguaucaugcccaacuauuac

SEQ ID NO: 4112213 - RNA, 88 nt, Human
guacuauuacuuuaucacagaagaaucaugcuguguuaguccauucucacaaugcuguaaagaugcuaucugagacugaguaauuuac

SEQ ID NO: 4112214 - RNA, 90 nt, Human
guacucaguauccaacucaguuaucauguguccacaaacaguguucuagcugccuguguuaacacugcaugauaauggaaagcugagugc

SEQ ID NO: 4112215 - RNA, 61 nt, Human
guacucaguuguaaaacaacgguuuacaagugucagagacagguguuuuacaacuucguac

SEQ ID NO: 4112216 - RNA, 83 nt, Human
guacucauuaaagcuagaauuguuccagcaaguucaaauuacauauuuguucaauguaaauaauuccuaggcuuuuugagugc

SEQ ID NO: 4112217 - RNA, 65 nt, Human
guggcuagaaaaauaugggugcccauguagccuccuggaagcaccuguaugacuuuucuagaagc

SEQ ID NO: 4112218 - RNA, 81 nt, Human
guggcuaggucggggagaguggacagucaauguggaguuucucucccacaucucgguccccucuuugcuugaccuggaaac

SEQ ID NO: 4112219 - RNA, 88 nt, Human
guggcucaggcuuggaauccuggagcuuuugugggggccaaggugagaggaucacuugagccugggaguugagaccagccugggcaac

SEQ ID NO: 4112220 - RNA, 57 nt, Human
guggcuccagauuuccugcugcaaugaaauuauauuggggcuaucgcuggagcacac

SEQ ID NO: 4112221 - RNA, 65 nt, Human
guggcucccaacacagaacccagcacuccagguguugagugcacagcgugauguauuggggccau

SEQ ID NO: 4112222 - RNA, 83 nt, Human
guggcuccucccugggcagcuguggguuccaagucuaacacuuugguuaguacccuuggaaaugcagugcccuggaaacccac

SEQ ID NO: 4112223 - RNA, 67 nt, Human
guggcuccuuuauaaaguaauaagaacacaaacuaaauuuguguuccuaaauaugaauggagaaagc

SEQ ID NO: 4112224 - RNA, 79 nt, Human
guggcugaaaccaggauaguaugaguagggauagcgagaaguugucagcucuugcauauauuuugaaguuagaauccac

SEQ ID NO: 4112225 - RNA, 66 nt, Human
guggcugcagagccagcaagcuccuuggaguugcaugagaaggacagguuugcaugguugcagaac

SEQ ID NO: 4112226 - RNA, 129 nt, Human
guggcugccaggcugucccccacagcgccucccucaaggcuagaggagcggcgagcugagcuggccguacuaccggcugcguccuguguuccucgaggucccaggaggccggggaccgcauucacccac

SEQ ID NO: 4112227 - RNA, 81 nt, Human
guggcuguaggauaagcauuguuucugaggauggucauuauaugaauguuaugucaucugcacucauuguccucucgccac

SEQ ID NO: 4112228 - RNA, 55 nt, Human
guggcuuacuugucauuucuuuaggucuugccuucccaaguagaucaugagccac

SEQ ID NO: 4112229 - RNA, 79 nt, Human
guggcuuagucuugugccacccacuagaccuugcauuucacuuuuaauugaucucuuguguaugguagaaauuagccau

SEQ ID NO: 4112230 - RNA, 66 nt, Human
guggcuuaugagaauugaguguggguagcugcuaaguuccuuuggacacauuuuuuauaagccuac

SEQ ID NO: 4112231 - RNA, 56 nt, Human
guggcuucacauggcauuuggcccuugcccuucugccuucugccaugugagggcau

SEQ ID NO: 4112232 - RNA, 64 nt, Human
guggcuuccaagacuaagucacaaaagauaauacaguucgugaccuacuuaugucuuggaucau

SEQ ID NO: 4112233 - RNA, 65 nt, Human
guggcuucuggcugggccucagccaacugcuggauggcugccugcaaggcccugcgggaggcugc

SEQ ID NO: 4112234 - RNA, 57 nt, Human
guggcuuggugggugcuuguggaagucaugaaaacgcaauaaacucucucaagccac

SEQ ID NO: 4112235 - RNA, 84 nt, Human
guggcuuuucugugagaucacagucccugcacucgguugggggcacagacgaugacagcagcuguggcucacggagacaaccac

SEQ ID NO: 4112236 - RNA, 130 nt, Human
gugggaaauagagguggcacaagccucagcuggcauucuucuuuccacuucugggccaaauucugccccaggcugcagagguguacagagggaggccagcucagggagugugucaucugucagggcccau

SEQ ID NO: 4112237 - RNA, 114 nt, Human
gugggaaauugugacggagaauauucaagagugggugugggucuguuugauuucagguguagcuguguaaauaguuagcccugcauauauuuuugucuacucacaacugccugc

SEQ ID NO: 4112238 - RNA, 83 nt, Human
gugggaacuccagcaggaaggugagaaaccuggguuccagcccuugauuuuuacuuuccuguuccgggcuucaguuuucccac

SEQ ID NO: 4112239 - RNA, 64 nt, Human
gugggaagacauguguacauaucgcagcggcagcgggcuucagcgauauuauucaugagcuggc

SEQ ID NO: 4112240 - RNA, 115 nt, Human
gugggaaggagaaaguauaccguaaguuuauagauucuuuuugcuuuuacuguauuuuauuguacaugacaaaaugcacaggauuaaaaugguuuugcuucagacuccuuuccuc

SEQ ID NO: 4112241 - RNA, 82 nt, Human
gugggaagugaguuauccugcaaguuggauauuuaguuuuaggauuaaacuaaauagccucugguaguugugcacuuccuac

SEQ ID NO: 4112242 - RNA, 70 nt, Human
gugggacuggcucaguucuugguuuucagcuuggaugcccugauugacccagaacuggucaaaguuccac

SEQ ID NO: 4112243 - RNA, 66 nt, Human
gugggaggaugcguaaguguuuggagacgcuuucugcucuggcuuugcucaugcauccauuucugc

SEQ ID NO: 4112244 - RNA, 62 nt, Human
gugggaguaggaggggucugaguuugaauccuuuuaaucuagcaggcuuucuuuucucucac

SEQ ID NO: 4112245 - RNA, 68 nt, Human
gugggagucgcgggaaggauagaacugcccuuucuuuuucugguggcuuuuaaaccugugacugccgc

SEQ ID NO: 4112246 - RNA, 64 nt, Human
gugggauggaacuuggggagauuaugauauauguguuauguacucugcaauguuugaauuuuau

SEQ ID NO: 4112247 - RNA, 60 nt, Human
gugggauuaaugugcaguaauuagccuguuuuggucuaggaugacugauagugauuccau

SEQ ID NO: 4112248 - RNA, 85 nt, Human
gugggauuccaaggucaggguucuuucaguuaaguugucauuguuguaguaauugugcaaucuguaagucccuggccuauccugc

SEQ ID NO: 4112249 - RNA, 64 nt, Human
gugggauuggggacuccaaacucagggucauccugccugcccugagccgcugcuccaaccucac

SEQ ID NO: 4112250 - RNA, 80 nt, Human
gugggauugguuuucuuuguccagacagcucuccuaaccagaaaggcuagaccuguuuguuaagaaagcuucuauccugc

SEQ ID NO: 4112251 - RNA, 82 nt, Human
gugggcacuagcagagaaagugguugccucugugcagaaugcauuuaugaguagaggcuccaccuucucuguccauguaaac

SEQ ID NO: 4112252 - RNA, 55 nt, Human
gugggcaggagugagcaacaggcauuucugagccguucuccuuguuucuugccac

SEQ ID NO: 4112253 - RNA, 55 nt, Human
gugggcaggccccaaagcagggcugaggauggcccuggccgagggaccugcugac

SEQ ID NO: 4112254 - RNA, 78 nt, Human
gugggcagggcccugggcagcacagcucugacccagagucaggucucugggccagcaauugcugcucaguugacccac

SEQ ID NO: 4112255 - RNA, 81 nt, Human
gugggcagugccuuacucagaaaggugccagucacuuacacuacaugucacuguguccuuucugcguagaguaaggcucac

SEQ ID NO: 4112256 - RNA, 74 nt, Human
gugggcauagcugugcccgccacccaacguucugaaccaugggcuugacauaaacugggcauagcugugccugu

SEQ ID NO: 4112257 - RNA, 64 nt, Human
gugggccaguuccucacagguauaggauuuuuuaauuuccucucuuggagacucuuggccacau

SEQ ID NO: 4112258 - RNA, 130 nt, Human
gugggccuuagggcaaugggcugaggaggccacucagccuuuauuuaguuuuggcuuaggccagaggugcugggagaggucuguaguucaagugggcuccugggcagcucaccugggccaggggguccac

SEQ ID NO: 4112259 - RNA, 57 nt, Human
gugggccuuguagaucgaguguuuaugauuuuagacauucuugauucaggccuuagc

SEQ ID NO: 4112260 - RNA, 59 nt, Human
gugggcucuccugcuuauaacacagaacaaugaacuugggagugagcagagagcaucac

SEQ ID NO: 4112261 - RNA, 127 nt, Human
guggggacagaggaugguggcgcacgaguugaggcggcucagggcuaaggcugaggggcucuccuguccgaggucccucaccagcccugggcccaccccgcggggccccaccuguccuuggccccac

SEQ ID NO: 4112262 - RNA, 63 nt, Human
guggggagggagaugcugaagugaccaaacuugcacagacauuauucauuucccuaucccuac

SEQ ID NO: 4112263 - RNA, 103 nt, Human
guggggcaaggugggccaguagagcugugauuggugucucacuuugauguguaggagagagaacaaaucacaagucauucucuggaaaggagccaugguccac

SEQ ID NO: 4112264 - RNA, 82 nt, Human
guggggcagcacaguguagcaugguagcaaugagagcagcuucugcagccagacuaccuugauugucacccagcuccuccac

SEQ ID NO: 4112265 - RNA, 94 nt, Human
guggggcagcucggccagcucccgguuccccugcccugcacgggugcccgugcuggaggggccugaccaggaggccuggcugagguugugccac

SEQ ID NO: 4112266 - RNA, 83 nt, Human
guggggccugugacuauuuuuaucuaacuggguuagaguuggacuccccauagacccaaaaguauaggaaucuagaucaucau

SEQ ID NO: 4112267 - RNA, 81 nt, Human
guggggcggguagggguucagcccacagagggggccggcgggaagcugcaccugcuggucgggcugcaucuuccggcccac

SEQ ID NO: 4112268 - RNA, 123 nt, Human
guggggcuuucuuuccccagaucucaggugaaacuucuagguugacagcaaaauccuccuuucauuuauaaauggacuauguuugcucuggaagcaucugagaggauaaauaugggaucccac

SEQ ID NO: 4112269 - RNA, 58 nt, Human
gugggggacgguggcaggggcccuguguugccagcugcggcugcugcuccucccucgc

SEQ ID NO: 4112270 - RNA, 71 nt, Human
gugggggcagugggcuucgagcguagccagaaggagcuacucugaucucaaggacccaccugacuccccac

SEQ ID NO: 4112271 - RNA, 66 nt, Human
guguauguguuuauagggagguggaaaguuuuccuuuguaaaaucuccuuguaaaauauagaacau

SEQ ID NO: 4112272 - RNA, 55 nt, Human
gugucaaauccacuccucuuuugaaauauaucaagggagaaugguauuauggcau

SEQ ID NO: 4112273 - RNA, 69 nt, Human
gugucacacuaugcacuaagaauuuuagaaaauaaggacauugugacauuucgguguaugugaugaugc

SEQ ID NO: 4112274 - RNA, 68 nt, Human
gugucacagguuugauuaagaagcccuuacaauuuuguaauagcaccuuagccugaauuuguguacac

SEQ ID NO: 4112275 - RNA, 78 nt, Human
guggguugugucucucauuccuccaucagcaguggcagccacaguugcuggagcggaggugagccaggcacuuccugc

SEQ ID NO: 4112276 - RNA, 124 nt, Human
guggguuuuagcaaaggcuuguaaaucagaugggcugcgugcagugacugaagaagucuccugccuggauucggauccugccuucauuacuugcucguagcacaggcuuuccacugaagagcau

SEQ ID NO: 4112277 - RNA, 101 nt, Human
gugguaaaauaugcauaacauggaguuugucauuuaaccauuuuuaaguauacaguucaauggcauuaaguacguuugcauuguugugcaaccaacaccac

SEQ ID NO: 4112278 - RNA, 85 nt, Human
gugguaaagaugauaacagguugaauccgaauguucucgauaacaugucuucuuguucaaccugacuuuauuuuccucugaccac

SEQ ID NO: 4112279 - RNA, 82 nt, Human
gugguaccuguauacuucaggggacugccuaacccauuguuuauuucaaaaggagaggcaggccccugagaauagacaucgc

SEQ ID NO: 4112280 - RNA, 66 nt, Human
gugguacuuugguugcagcacuagauaccuaauaucccuauauagugcuuaacacaaagugauugc

SEQ ID NO: 4112281 - RNA, 64 nt, Human
gugguagagucaggcuugggaugcaggucuauguaguuccaaagccuguauucuuauccaucac

SEQ ID NO: 4112282 - RNA, 93 nt, Human
gugguaguauuagguuggugcaaaaguaauggcaguuuuugcaaauaauggcaaaaaccacaauuacuuuugcaccaaccuaauagcugccau

SEQ ID NO: 4112283 - RNA, 85 nt, Human
gugguauguggagggggugggagcagugaggugaaagggaagauccaggagcccagcucccauguucuccaauuuuccauuccac

SEQ ID NO: 4112284 - RNA, 71 nt, Human
gugguauucuuguggaauuuucucacuugucugcccuuucaagacagugauuaguuacuauaaaucuucac

SEQ ID NO: 4112285 - RNA, 57 nt, Human
gugguauugaagucuaaagaagguaguuaccaaccgaucuucuagaccuuauaccac

SEQ ID NO: 4112286 - RNA, 90 nt, Human
guggucaauaaugcaauaugggacgugagaaugagauuggaauguauaggaaggugauuuugagguuucaggucuuguguuuguaaccac

SEQ ID NO: 4112287 - RNA, 57 nt, Human
guggucauuugucugagcuccagcuagugaaguaugaguagaacggacaugcaccac

SEQ ID NO: 4112288 - RNA, 65 nt, Human
gugguccagaaaggccaaucccuaaagacuuccuaaacuuuuggauggagccacuuugaaaccac

SEQ ID NO: 4112289 - RNA, 60 nt, Human
gugguccucuucuucuguuuggucacuccuaggucaccgcaucggaaacaggaggaucac

SEQ ID NO: 4112290 - RNA, 67 nt, Human
gugguccuguccugacggcuucuuaccugaugauugucagagggaugaaguacaccaggaaggccac

SEQ ID NO: 4112291 - RNA, 88 nt, Human
guggucgggaccuccagggggcggauccggggccucccccguggccgggguggcccaucacguuucgccuucgugggcuugcggccac

SEQ ID NO: 4112292 - RNA, 79 nt, Human
guggucucuuaugggcaggagcacagacuucagccaaaauaaaacuaugaauaccauugugucucugucccaagaucau

SEQ ID NO: 4112293 - RNA, 71 nt, Human
guggucuuuccuucauuguccagucccacgaugaugaccgugugcucuggaagcgucggaggaagggcagc

SEQ ID NO: 4112294 - RNA, 64 nt, Human
guggugaacacaucacauuuuacagugggaaaggcccuguggucaguggacagugucgcaucac

SEQ ID NO: 4112295 - RNA, 61 nt, Human
guggugagaguagguguccucuuuuucuugaucuuaagaggaaagcauucauuuuuaccau

SEQ ID NO: 4112296 - RNA, 77 nt, Human
guggugauacuagcaaugguggugguagucuccugauggagcagccaggcccagaucaugcugugcugguucaccac

SEQ ID NO: 4112297 - RNA, 107 nt, Human
guggugaugguggcacaacguugugaauauacuuaaugccacugaacuguauacuuaagaacaguuaaaguggcuuauauuauguauauuuugucauacacacacac

SEQ ID NO: 4112298 - RNA, 59 nt, Human
guggugcauccuugaguaagcuucauaauucaugugcaaagcuugguuuggaugaucac

SEQ ID NO: 4112299 - RNA, 111 nt, Human
guggugccacacacguguuauagccccaucggcaggaagagucuuuugcuuggcaucugggcugaggaugccuucauugcauggccugugacaucucuuauauggcaccau

SEQ ID NO: 4112300 - RNA, 90 nt, Human
guggugccaggauucaaguuggggcagaaugacccuggaguuuuuggccucaagucaauucugucucgcaaauuggauuucuugaauuau

SEQ ID NO: 4112301 - RNA, 59 nt, Human
guggugccauuuauguuaaugaacauuaaaggauuaaugaaacaucacaaugguaccau

SEQ ID NO: 4112302 - RNA, 69 nt, Human
guggugcccgugggugggguacgggcuggccucuguggccaggcccugcuccucacaccacaggacugc

SEQ ID NO: 4112303 - RNA, 92 nt, Human
guggugcugucagcuuucaucagugacacucauuuccaugacauucuagcuuaacagauauggugcaccagaaagcugccuagcaauuucac

SEQ ID NO: 4112304 - RNA, 65 nt, Human
gugguggaaaauauuucuuguccaucuucgugccucccauaaugugacuuugugucuuccaucac

SEQ ID NO: 4112305 - RNA, 65 nt, Human
gugguggaugaggagcucuggccuugggcucugcacaccugggcuccggcugcuccucucccuac

SEQ ID NO: 4112306 - RNA, 56 nt, Human
gugguggcucacgucuguaaucucaguacuuugggaggccgaggugggccgaucac

SEQ ID NO: 4112307 - RNA, 56 nt, Human
gugguggcucaugccuguaaucccagcacuuugggagucugaggcgggucgaucac

SEQ ID NO: 4112308 - RNA, 57 nt, Human
guggugggcgugguguaugccuucaccuucugaggacggcacacccugcaccaccau

SEQ ID NO: 4112309 - RNA, 92 nt, Human
gugguggguuuuagguaauuugaauaagaauuuagaauuagaaaaaaauuauuugaaauuucugcauucaaauuaugugagaaauccaucau

SEQ ID NO: 4112310 - RNA, 67 nt, Human
gugguguccagcuugcuccucugcaauggacugaggguucaagcaaaguuuagcugguuaacaccau

SEQ ID NO: 4112311 - RNA, 61 nt, Human
guggugucuuuguaauugugagccagcuauucuccugccuagcaggcuuuagggacaccac

SEQ ID NO: 4112312 - RNA, 62 nt, Human
gugguguguaaagugagacccacgaauggcuggguuuccagagaucauuuacauaacaucac

SEQ ID NO: 4112313 - RNA, 64 nt, Human
gugguuacccagucgcuggaguucugcucgaugccugagccuggcguguguggguuguagccac

SEQ ID NO: 4112314 - RNA, 113 nt, Human
gugguuaggguauuguaaccuaauaggacucauucuggaugacuuucuagagacaagcucugguuuucauauccugaaugcuccuguucuguuaggauaauacacucaauugc

SEQ ID NO: 4112315 - RNA, 66 nt, Human
gugguuaucagagcuauuuugggaaguggcuugucuccagccuccuggccuugcuccugaugccac

SEQ ID NO: 4112316 - RNA, 69 nt, Human
gugguuaugguaauuuuaaaaugucuauugguuuguaccuaacagauaauaggauguacccuguuccac

SEQ ID NO: 4112317 - RNA, 76 nt, Human
gugguucauucucaugaaacucgcuuccucucacuggauuucugcccugggggaugugggguucaagugaaaacac

SEQ ID NO: 4112318 - RNA, 55 nt, Human
gugguuccucaagcgcuggcggcagggcaagguuuugcccagcgaaggggaugac

SEQ ID NO: 4112319 - RNA, 83 nt, Human
gugguuggucauugauucugcucagucauguuggauuguuaacaacaacauccuaaguacuggguaguuuuagagaucaucau

SEQ ID NO: 4112320 - RNA, 79 nt, Human
gugguuguggggcugaguggagccagaagggcuggaucuuguaccucucuuccauguuucagccccauccuucaaucau

SEQ ID NO: 4112321 - RNA, 75 nt, Human
gugguuucugggaaauauaauaaagugguuacccagauuguggaaagccacugugggguguuugccagcaacugu

SEQ ID NO: 4112322 - RNA, 97 nt, Human
guguaaacagagaguccauuggagggaaaagcaucugcaauugcuuuaaauuccaacgcaaugagauggaauucccgccuagggucuuugccagcac

SEQ ID NO: 4112323 - RNA, 79 nt, Human
guguaaauagacacaugcguucauaugugugcuugucugugcacaugauuaugugugugcguguguguuuucccggcac

SEQ ID NO: 4112324 - RNA, 101 nt, Human
guguaaauauuugucuuuuggucuuuugcuagccagagagcucuugucagagauauuagcucugcuuucuaagcagaaguuucuguaggcagagacugcac

SEQ ID NO: 4112325 - RNA, 68 nt, Human
guguaacauuuaguuuuaagaugguaucuuuaaauagauaccuuagcuguuaaaacuaagugauauau

SEQ ID NO: 4112326 - RNA, 55 nt, Human
guguaaguguaggaaacagagccagaaugcagggguucaaauccugacacuacac

SEQ ID NO: 4112327 - RNA, 128 nt, Human
guguaauacugugaauucuguaguaucuauauacaagguagguuuagguaauauauugcuuaauuuuucuaaauuguuuuuaucaccugaaaccaacuuguguacugguaucacacucauguuaacac

SEQ ID NO: 4112328 - RNA, 64 nt, Human
guguaccucuguggccugccuccucauuuuguucacacagaaaagaaaggacauagaguagcau

SEQ ID NO: 4112329 - RNA, 62 nt, Human
guguacgucuuucaagguggcauuaguauuucugaccagccaccaccaggagaucguugaac

SEQ ID NO: 4112330 - RNA, 79 nt, Human
guguagaaagaucggugugaaggggcugguccccgcgcuugagcccaggccagcugcccucugcuggucccuccuacau

SEQ ID NO: 4112331 - RNA, 59 nt, Human
guguagaaguuuagaagugacagguuuaaauuaaaaccucuuccuuuuagauuuuaaac

SEQ ID NO: 4112332 - RNA, 74 nt, Human
guguagagcuuguguguacugguuaugggcacaccugucugugugcguccugugcgcacacugcugcccuacgc

SEQ ID NO: 4112333 - RNA, 108 nt, Human
guguagauuucagauggucaaggugccaugagggagggguggugccgcacaacagugcugucauucauccuuuccuuucagcaucuuaugacgguuugcaguuuauau

SEQ ID NO: 4112334 - RNA, 79 nt, Human
guguaggucugugagccaguucgacuguuucuagcacauuuauagaagcaaggagagcuggccuggugggacagagcau

SEQ ID NO: 4112335 - RNA, 60 nt, Human
guguauaugcauauaaagcuuuuagucauguugggugacagagagugacaugcauugcac

SEQ ID NO: 4112336 - RNA, 128 nt, Human
guguauauguagcauguuuucuuuauccauuuguuuacugauggacacuggguugcuuccaagccuuggcuauugugaauagugcuguaguaaacaugggaaugaagauaucucuuugauauauucau

SEQ ID NO: 4112337 - RNA, 77 nt, Human
guguaucagaggcuguguuauaaucuugcaacgcuuguucaauuguauuuugcuugaauuggcaugcuuugauacau

SEQ ID NO: 4112338 - RNA, 78 nt, Human
guguauggcaauucuaacucucuccaccuucacugccuacucacagccgugugcuggggaccagauuagaccauggac

SEQ ID NO: 4112339 - RNA, 92 nt, Human
guguauguguguguguagugagggagcccagucugggucuccuggacaucugaccaccacugggcuucacuuggcacaucuggcacaugcau

SEQ ID NO: 4112340 - RNA, 73 nt, Human
guguauuugagauuuuucacacauguggcuugaucacuugugaucuuucacuuuuuguggaugaucaaugcac

SEQ ID NO: 4112341 - RNA, 72 nt, Human
guguauuuguuuacaguccuuuuugcuuuuaaccugaggguagaaagucaaaacacuguguuuaagagacgc

SEQ ID NO: 4112342 - RNA, 97 nt, Human
guguauuuuuucaugaucuuagggcuaagauaaggagagugcuaguaaaauuuacugaugcaaauuuauuucaguaauaaagauuauggaggaacac

SEQ ID NO: 4112343 - RNA, 62 nt, Human
gugauuuagagaguguaaaaauauauccuuacugggaaguauuuaggagcuguuuaauucau

SEQ ID NO: 4112344 - RNA, 84 nt, Human
guguguaagcauauguguguguauaaacaagagucuguguuugccuuuaguaccuacauguuuaauagacacaaguauacacac

SEQ ID NO: 4112345 - RNA, 101 nt, Human
guguguacacgugugugugugcacguguauguacccaugaaagauguacaugaguaggugggugcaugugagcacgugcaugugcaggcgaaugaacgcau

SEQ ID NO: 4112346 - RNA, 57 nt, Human
guguguauacauacauauauuuacaugaacuauauguauauguguguguauuuacau

SEQ ID NO: 4112347 - RNA, 56 nt, Human
guguguauauguguguguguguguguguauguauguacaugcacguguguauauau

SEQ ID NO: 4112348 - RNA, 128 nt, Human
guguguauguacauauacacguguguguauguacauauacacguguguguauguacauauacacguguguguauguacauauacacguguguguguacauauacacguguguguguguguguguguau

SEQ ID NO: 4112349 - RNA, 72 nt, Human
gugugucauuugaaugagggaaccacaguuggucuccugagaaacuguucuacccuucauuucaugauacac

SEQ ID NO: 4112350 - RNA, 68 nt, Human
gugugucugugccaccucuccaguguccagaaugaagccuggaucucagucccuggcauggaaugcac

SEQ ID NO: 4112351 - RNA, 74 nt, Human
gugugugagugauugcuugcuuaaggacaccuccccucuccaucuuguaugucucugugggcaauccugcaggc

SEQ ID NO: 4112352 - RNA, 62 nt, Human
gugugugcacugaugauaacaggaucuuggaugauaggcuccaucaacucuugugcucacac

SEQ ID NO: 4112353 - RNA, 55 nt, Human
gugugugcagggcugcgagcgcuggcaggggcaucuggcugcccgaggcacacac

SEQ ID NO: 4112354 - RNA, 59 nt, Human
gugugugccaucaagagcuuucacacacugauggugggaguuugguuugguacaaccac

SEQ ID NO: 4112355 - RNA, 120 nt, Human
gugugugcccccggccggccggccggggcucuccgugcggggccugacccggaggggucacauguguuuccuggcagcccgcaggugcugcgcugggcggggcggguggugggcgcaggc

SEQ ID NO: 4112356 - RNA, 66 nt, Human
gugugugcuguugggcugguacaaaaaagaaucauccauguacucagcccacuucccagcaccuac

SEQ ID NO: 4112357 - RNA, 68 nt, Human
guguguggcauugugaaaauaugagccagguaaaugaguauuugaaaucaugagauagugucacagau

SEQ ID NO: 4112358 - RNA, 75 nt, Human
guguguguacuuuguggaggggagguuuugccucuccaugguaccuagcccagcuccuccacagaauagacucac

SEQ ID NO: 4112359 - RNA, 126 nt, Human
gugugugucuaauuaaugaggguagagguuaaaaaauauuuguugaauaaauuaguauuaacauuuuuauugcuaauaugcuucaggcaaaacuauaggcccugaugauacaauaacaaaauacac

SEQ ID NO: 4112360 - RNA, 72 nt, Human
gugugugucuccucuguccugucaggaauaauaauuacuccccacacagauacagaguagcgcaguucacac

SEQ ID NO: 4112361 - RNA, 122 nt, Human
gugugugucucguguuaggagaaagguccgugguugccgucucagcugguuugcuuacucucugcccccaggagaaguuugcucacuugggacaccagcgacccuccucaccuccaccucac

SEQ ID NO: 4112362 - RNA, 56 nt, Human
gugugugugccugcacacacacacaugcacaugcgugugugcgcacacacacacac

SEQ ID NO: 4112363 - RNA, 59 nt, Human
guguguguguccucaguaguggcaugguucuuaagcugugaaucuaugacauauagaac

SEQ ID NO: 4112364 - RNA, 84 nt, Human
gugugugugugugcacaugugugugucugguuguguguagaagagugcaggugacugagcauaaauauguguccacauagauac

SEQ ID NO: 4112365 - RNA, 60 nt, Human
gugugugugugugcgcgcacgcauaugagugugugugugugugugugcacguaugugugc

SEQ ID NO: 4112366 - RNA, 67 nt, Human
guguguguguguguaugugugcgugugugugcgccugcacacauauguaugcaucaugugcacgugc

SEQ ID NO: 4112367 - RNA, 66 nt, Human
gugugugugugugugaucauugcuauucaccugugguggggggaagucuugaaacacaaacuagac

SEQ ID NO: 4112368 - RNA, 83 nt, Human
guguguguguguguguauguguuuguguugcagcucuuguguuuaagggcuucaauagcagaggcgugaaucaaauucaucau

SEQ ID NO: 4112369 - RNA, 68 nt, Human
gugugugugugugugugugugugaauucuuuuuaauucuaagacuuucauacagaaacaucacuucau

SEQ ID NO: 4112370 - RNA, 58 nt, Human
gugugugugugugugugugugugugcacgugugcacauguaugugugcaaacacaugc

SEQ ID NO: 4112371 - RNA, 74 nt, Human
gugugugugugugugugugugugugcuuaaaauaaaauccaaugguaaagcauauuugcauuaaaauauuacgc

SEQ ID NO: 4112372 - RNA, 81 nt, Human
guguguguguguguguguguguguguguauaaugccuauauauauggggauagacagauacaaauauacaaauacaaacau

SEQ ID NO: 4112373 - RNA, 56 nt, Human
guguguguguguguguguguguguguguaugcacauguguucacgugcacaugugc

SEQ ID NO: 4112374 - RNA, 64 nt, Human
guguguguguguguguguguguguguguguguaagccacauucagggcagaccacucauuucau

SEQ ID NO: 4112375 - RNA, 62 nt, Human
guguguguguguguguguguguguguguuacuauacauauacauacauguacacauaaauac

SEQ ID NO: 4112376 - RNA, 105 nt, Human
guguguguguguguguuuaauauagagacacucuaucacccuccugucuccaccacaucucagaugggaagggagaguguccuggauuagccgcaggccaagcau

SEQ ID NO: 4112377 - RNA, 60 nt, Human
guguguguguguuugcguguguguuccuguaucucaucauaucugcaaacaaucacauau

SEQ ID NO: 4112378 - RNA, 55 nt, Human
guguguguuggggugucaguauucaagcacaugugcuggaugcuaaaacacacac

SEQ ID NO: 4112379 - RNA, 60 nt, Human
guguguguuugcgugcaugugugugugcccguacaugcacaaagcauucuagacgcaaac

SEQ ID NO: 4112380 - RNA, 85 nt, Human
guguguuuaugugucagccuccucucuuagaacacagccagcuaguuaucaacugucguuccggagccuggcauaugagacgcau

SEQ ID NO: 4112381 - RNA, 88 nt, Human
guguguuuccucuuuacaaguauguuugcauuucaguccugcaaugauagcacaggaacugggcucagcaaacaucgccugugcacac

SEQ ID NO: 4112382 - RNA, 75 nt, Human
guguguuucugagcacuuuuauugcauucacacaucuacuaguuuuuguacgaagagugccucagaucauuacac

SEQ ID NO: 4112383 - RNA, 74 nt, Human
guguuaaaugagauguuuugguuuguuuugauggguacuuauaaaggcaauacacagcauuucacacuuagcau

SEQ ID NO: 4112384 - RNA, 60 nt, Human
guguuaagacaacauaugaggagcaaguucccuuguucacaagcagauguugcuuuccac

SEQ ID NO: 4112385 - RNA, 84 nt, Human
guguuaaggagccauuauacugggccaagugugucuuucaagaggauagacuugaggauauaaugaaugauuucuccauaacac

SEQ ID NO: 4112386 - RNA, 58 nt, Human
guguuacauauauacccacaccuggaugaugacuggggagaagguauuguguauauac

SEQ ID NO: 4112387 - RNA, 59 nt, Human
guguuacugcuuuuaucuaccaagagcucucauccugaggcucaugaaagcuguggcau

SEQ ID NO: 4112388 - RNA, 68 nt, Human
guguuagagucuugugcucauuugcugacaugcuuagauuugguaaugagauggaggacucuuaauau

SEQ ID NO: 4112389 - RNA, 56 nt, Human
guguuagcuauuugcccuaaaugagaaaauccauucuaggaguaaugagcuagcac

SEQ ID NO: 4112390 - RNA, 89 nt, Human
guguuaggaagugcuaagagaacaucauuugcaaaggggaugagaaaccccuuuuaucuuggccuguuucuuuuaagcaguucuuccac

SEQ ID NO: 4112391 - RNA, 57 nt, Human
guguuaguuugcuaaggauaauggccuccagugcauccaugucccugcaaauaacau

SEQ ID NO: 4112392 - RNA, 89 nt, Human
guguuaucaaugcuuauucaagauguugugaacucucagcaaaaucauuccauucuuaggagggugcagcuuugaaagcauguaaacac

SEQ ID NO: 4112393 - RNA, 60 nt, Human
guguuaucucucugccuggauuaacugcaaguuuucuccgcaguuaauagcagagcacac

SEQ ID NO: 4112394 - RNA, 56 nt, Human
guguuauuugagugggagcgugucgucuuuccguagcccucgccucuuaggaacgc

SEQ ID NO: 4112395 - RNA, 83 nt, Human
guguucaaaauggauaacugagagcaaucuuucuuuccuaaagaaagaaagauauguuuuauaguuauuaaaaccaagagcac

SEQ ID NO: 4112396 - RNA, 109 nt, Human
guguucaaagugucuuugaagucuaaaauauacggucccuaacaguccagccucaggcucaggaugauuguauuuguguauuuagaaugggagggucacuuauggacau

SEQ ID NO: 4112397 - RNA, 57 nt, Human
guguucaagguuaagugcuugccuaagaucacuuagacagagcugggauuugaacac

SEQ ID NO: 4112398 - RNA, 64 nt, Human
guguucauuuucauuuguucaguuucuuuugucacucagaaaacaugauauugaggcugggcac

SEQ ID NO: 4112399 - RNA, 90 nt, Human
guguuccaguucucugugacagcugcucuauaucucagccuucaaagugcugggucugagagcagcugaacagagagaagucuguggugc

SEQ ID NO: 4112400 - RNA, 61 nt, Human
guguucccauacaguaucagugcuccaaaggcgggaccgugauaccuaauguauggaaggc

SEQ ID NO: 4112401 - RNA, 93 nt, Human
guguucccccagcaagggcaggcaguggagguuugagugagacuuuugcacucucugcgcugccuugauccuuggcuucacucuagggaaugc

SEQ ID NO: 4112402 - RNA, 56 nt, Human
guguucggcuucuuuucgggggggaaaacaacugcccucccuuccaaguugaggac

SEQ ID NO: 4112403 - RNA, 91 nt, Human
gugucagaacuuuugggcauucauuagaauagauauguacucaguuucucuggguauuugugguagucagugcuaauaaaagggcucuuac

SEQ ID NO: 4112404 - RNA, 57 nt, Human
gugucagauccaggcaacaguggagcaacugaacacaccaggccaggaggcuggcac

SEQ ID NO: 4112405 - RNA, 62 nt, Human
gugucaggcagaguuagugauuuaggcagugguucugccugaggcuuaaucugucccaacac

SEQ ID NO: 4112406 - RNA, 71 nt, Human
gugucaggccaacugcauggugaccaaguuacccugguugauggucgugaugagccaguaguugccaauau

SEQ ID NO: 4112407 - RNA, 68 nt, Human
gugucagggaggccuggcaaccacaguguucuuucuccuguuuauuuguucuuggaucuuccugaagc

SEQ ID NO: 4112408 - RNA, 70 nt, Human
gugucaggugggguuguugaggaagagaaauuccuaaauuucuaugccauguucagcuacuaucugaaac

SEQ ID NO: 4112409 - RNA, 61 nt, Human
gugucagugguucagggccgggggucuccccaaccacggccccggcaccuccgcugcacac

SEQ ID NO: 4112410 - RNA, 88 nt, Human
gugucauauagcuaaugaaugauagagcugccuucggauccuagguugccuggcuccagagccuauauguucaacuuucauaugauac

SEQ ID NO: 4112411 - RNA, 68 nt, Human
gugucauuaaccaccaugcaaauuaauuaauauuacauauuauggacuuuguaggugacuugaugaau

SEQ ID NO: 4112412 - RNA, 70 nt, Human
gugucauucacuuauuguccugacucauggccuggucuuaggucacagucaaggagaaugucacugauac

SEQ ID NO: 4112413 - RNA, 69 nt, Human
gugucauuucugucucaaaaguccuguauuuugucuugcaguucagagacuggagaugggcagugucac

SEQ ID NO: 4112414 - RNA, 66 nt, Human
guguccaucagcagccacuguggaaccuauuaugaaccuagcacagugcuuggcucugaggggcau

SEQ ID NO: 4112415 - RNA, 91 nt, Human
guguccaucugaaagaagggcagucuuuuuugaauaugcacaaggcuucaagucaugggcccagggggcugcaucugucuacagaggacac

SEQ ID NO: 4112416 - RNA, 72 nt, Human
gugucccacucuggaggugaagauccaagagcagggcggcucugcagggcguggccucugagggcaggacac

SEQ ID NO: 4112417 - RNA, 65 nt, Human
gugucccagcagcacauuggcuccaggagaaguugcucuugucugcucugccugcugcugggugc

SEQ ID NO: 4112418 - RNA, 55 nt, Human
guguccccacccaaaucucaucuugaauuguaaugccagauguugguggggagac

SEQ ID NO: 4112419 - RNA, 69 nt, Human
gugucccuacucaaaucucaucuugaauuguaaucugaauuguaauccccagguuugggggagggacau

SEQ ID NO: 4112420 - RNA, 70 nt, Human
guuauguugaucucuggguccuguuggccucccuucugaggcuacaagcuccaugagagcagccuuugac

SEQ ID NO: 4112421 - RNA, 59 nt, Human
guuauguuuccuuguguccauuugcccagcgcuggaaucuguggagcaggaagccuggc

SEQ ID NO: 4112422 - RNA, 55 nt, Human
guuauuaacaugcauuuagcauuugggaauucugugcuuaauacaugucaauaac

SEQ ID NO: 4112423 - RNA, 124 nt, Human
guuauuaggcugacgugcaggauauucucaggacuugguuaguguuuuguaccuguguugcagucacuggcuggaguuuucauuacaugucuuucagagucaccauauaaaaauguuuaaugau

SEQ ID NO: 4112424 - RNA, 77 nt, Human
guuauuaguugacuuuuacuaaaacaugcaccuuuacgaugguguuuuuguagaaacauaaguagucaaauaguaac

SEQ ID NO: 4112425 - RNA, 120 nt, Human
guuauuauauugugaaaaaccuggccuuggucacaaugcaaacaaaaguacagaugaaagugcuuuuuggacaguuugcaaauuguguuaaagcuacggauuuuuuuuaaaguguucagc

SEQ ID NO: 4112426 - RNA, 73 nt, Human
guuauucaaggcuguuuuguauaaacuggauugaugcauaaucuuaaguuaugcuggaauagcuuuuuuuaac

SEQ ID NO: 4112427 - RNA, 66 nt, Human
guuauucuuuagcaacuuggauuuagccacuuaaagaaguagcgagaucuaugccugaagacaaac

SEQ ID NO: 4112428 - RNA, 67 nt, Human
guuauugagauuauggcaugcuaaaauauuugaguuugcuuaaauuucagcagcuuaauuuuguagc

SEQ ID NO: 4112429 - RNA, 89 nt, Human
guuauuggccuguaacucugccaagaaggcucagaaagucauaaaucugaugugaauuuauaguggcagacuuaaguguagucaaugac

SEQ ID NO: 4112430 - RNA, 79 nt, Human
guuauuguaauccagccacuugcacaguuaaauuuuguauuugauuuucagcaauaguggcucugugguuacaagaaac

SEQ ID NO: 4112431 - RNA, 62 nt, Human
guuauuucagaguguauucugcaguugcagaagucucguggcugucaugaacucugggaaac

SEQ ID NO: 4112432 - RNA, 83 nt, Human
guuauuugccuuuuucacugugauggugcagaggcagugauggguaaaacugccagcaccuuagcaugaaucaaagcaguggc

SEQ ID NO: 4112433 - RNA, 90 nt, Human
guuauuuggcuaaaaauauuuguguugggugaugucccuacccuguccuugcacccaggaacuuuacucaacaaauauuuauuaaaugau

SEQ ID NO: 4112434 - RNA, 111 nt, Human
guuaauucagcggguaacaagcacauggucugggcccagaguccccugagcauuccaccaaguagacugugucuagcaccacgugucuuggacuugcuauaagaagagagc

SEQ ID NO: 4112435 - RNA, 70 nt, Human
guuaauucagucaacauaaauccaaggucuuaagguuauuaaggacuuuggaaauuaugugugaaauaac

SEQ ID NO: 4112436 - RNA, 69 nt, Human
guuaauuggcaguuagugacgaggcugcaggucuuuguuacccagccuuucagcuaacugaucauuaac

SEQ ID NO: 4112437 - RNA, 100 nt, Human
guuaauuuuguuagaugugauaauggcaugacaguuauauauaaaacaaauaugucauuggggugcauauugaagaauuucauaauccugcaaaaauaau

SEQ ID NO: 4112438 - RNA, 105 nt, Human
guuacagaaauuuuuaaauggaaucgaaacugucauuggaugcauuugguucaucagauccagauucaguucgaugugcaguucugguuccuuaucagauguaac

SEQ ID NO: 4112439 - RNA, 56 nt, Human
guuacagagcugcuaugugugcgugcccacggccccaacacaccagugccugugac

SEQ ID NO: 4112440 - RNA, 124 nt, Human
guuacagcguauccaggugagauuaugacucaacuauuuagcaccuccaucucaacauguacuuccccaacggucauggcagaggaagagagggcuggaaaauugagcacuggcaaugacauau

SEQ ID NO: 4112441 - RNA, 59 nt, Human
guuacagcucuuuggugcauucaccuuaacucuaggacauuuaccaaaggaguuaugau

SEQ ID NO: 4112442 - RNA, 77 nt, Human
guuacaggcgaccugcagcugagaaaaugacuggcccauccauucacuucuccaagcuagcagaaucaugccaugac

SEQ ID NO: 4112443 - RNA, 67 nt, Human
guuacaucaacgaagauggaaaaggaaagagacaaagucucuuugccuaacuguuuucaauuguuau

SEQ ID NO: 4112444 - RNA, 130 nt, Human
guuacauucaauauauucuauuuaagaacauaaggaucauguauauguuuaagaagacuucuacuuaaucuagcuaauacauuaugguuccaguguuugaccuuuacuuauauggaaauuuaaaccaccc

SEQ ID NO: 4112445 - RNA, 59 nt, Human
guuacauuuauuagaggucucuggcuucuugaaagauggagacuuuauaaaugucaagc

SEQ ID NO: 4112446 - RNA, 77 nt, Human
guuaccaaugcgguuuacauguacucauuauacuagauguaagaauaacaaguugcuauggguauauguaauguaac

SEQ ID NO: 4112447 - RNA, 60 nt, Human
guuacccagagaccaggauggcacugugcaggagacaguacuguccuuuuguuggaagac

SEQ ID NO: 4112448 - RNA, 81 nt, Human
guuacccagucuuggguaaugucuuuauuagcagcaugagaacagacuaauacagacaacuugccaaauuagacgggcaac

SEQ ID NO: 4112449 - RNA, 110 nt, Human
guuaccuggcuuguaauaggccuuaaguugucugcuccuauaaaggaaucuccagaauauuccucacagaguggcaggcaauguuaaaaccucauuaguaccaguguaau

SEQ ID NO: 4112450 - RNA, 60 nt, Human
guuaccuguggggucugagcgcugaugguuuguuuauccaauucuggaaacccagguaau

SEQ ID NO: 4112451 - RNA, 62 nt, Human
guuacuacauuucauggucuuguucaaagaauugcagagcaaaauugucgaacaguaguaac

SEQ ID NO: 4112452 - RNA, 92 nt, Human
guuacuggauggcaggaggccaggggucagcaauuggcuaugugaaucagggcaaguuacuuuauucucuggucuucuguuuucucuucuac

SEQ ID NO: 4112453 - RNA, 76 nt, Human
guuagagguaaacacugucucugguauugaagaggugaauauguuuacaaaccaaggaacagugauccacuuuaac

SEQ ID NO: 4112454 - RNA, 61 nt, Human
guuagaugaagaccaagggcaaauucacaccucuggggcuugcucugguguuuuauuuaac

SEQ ID NO: 4112455 - RNA, 59 nt, Human
guuagauuucuuguuucugcccugaauuggaggaaggggagcuacaaugcgaagcuggc

SEQ ID NO: 4112456 - RNA, 59 nt, Human
guuagcaauugcuuaagacuaggcuaagaaauuacuuccucuugagaacaauuucuggc

SEQ ID NO: 4112457 - RNA, 90 nt, Human
guuagcauauuaauacauaucuuagcaugcauguauaaauauaugcuuguguguauacguguguggcugugccugcauagauaugcuaau

SEQ ID NO: 4112458 - RNA, 85 nt, Human
guuagcaugcaucagaaccaguggggacauuuguaaaaaugcagacugcuacuuuccaccacuagaguuucugauucaugaagac

SEQ ID NO: 4112459 - RNA, 62 nt, Human
guuagccaaccucuucaccgagucccucugcaccucgagggacccugggaggcuggcgcagc

SEQ ID NO: 4112460 - RNA, 57 nt, Human
guuagcuacugccaccaagucugcauuaagcagcagcugucuguggugucagcugac

SEQ ID NO: 4112461 - RNA, 55 nt, Human
guuagcuagugaugaggucaggguccaugguugggauuugaauccagcugguaac

SEQ ID NO: 4112462 - RNA, 71 nt, Human
guuaggaaucauccuuagcacccaccaaggacuuccuaagugcuggacccugugcuaagccuguuuccugc

SEQ ID NO: 4112463 - RNA, 91 nt, Human
guuaggaauuacugggaagugagaaaugacaaaugugucgaugcccugaagucuugaccacauugauuucucauccauucaguuucuuggc

SEQ ID NO: 4112464 - RNA, 91 nt, Human
guuaggaggcuauuacagucacccaugcaagauguauagaagacuugaauugcaacuauguacugauuguggucacugcugaggcccuggc

SEQ ID NO: 4112465 - RNA, 68 nt, Human
guuaggagucuuguuaguaagugacaaaaauccaacucaaauuggcuuacacuaaacaaguuuccugc

SEQ ID NO: 4112466 - RNA, 87 nt, Human
guuaggauucaucaggaagacacaagaauaaugaugaagguuggaaaaauaauuuuccagauuguuuuugucuuuucauuuccugac

SEQ ID NO: 4112467 - RNA, 78 nt, Human
guuaggguucuguuagaauuuugaaaauagcaaaugucuugcugugucaguguccauuuuugcauauuuuacccuaac

SEQ ID NO: 4112468 - RNA, 65 nt, Human
guuagguuguuugcugaacugacuguaaagugucauagucaauauucaaguguaaauagcagggc

SEQ ID NO: 4112469 - RNA, 69 nt, Human
guuaguaagcaugcuacagcccaacugugaaguuugagcucacagagcacguaucaugccugugcuggc

SEQ ID NO: 4112470 - RNA, 129 nt, Human
guuaguggucccucaucugggcaaagcagacccaagguggugcugagugcagagugcagagcauucuugugcucuccucucauggcuggaacuaucugggcuuugcgcccugguccagugcuacguauc

SEQ ID NO: 4112471 - RNA, 84 nt, Human
guuaguguacaaaaugauagauaaauauuugcuguugcuaaaagcaucuuagugauaaccuuuguacuaugguuuuucacuaac

SEQ ID NO: 4112472 - RNA, 67 nt, Human
guuaguuaaaauucugcugacauaauucugcagcuacuucagacagaaugauagucagaaaacuagc

SEQ ID NO: 4112473 - RNA, 73 nt, Human
guuaguucccucugagugcuuugagggagaaucuguuucaugucucucuccuaguuuuuagugguuugcugac

SEQ ID NO: 4112474 - RNA, 127 nt, Human
guuaguuggcucugcugcuauuauaaaagggauuuccuuuucuuucccuggagauugggugcccaucuuuuucccuacauuucugauaguaaaggucuuuuuauucucacagcaugaguuucuggac

SEQ ID NO: 4112475 - RNA, 58 nt, Human
guuaguuguauggcaccaacagccugcuggcaaacaguaugugcaaauacuugcugac

SEQ ID NO: 4112476 - RNA, 58 nt, Human
guuaguuuacuuuucauggagcauauuaagggaucauguuccagaaacagugaugaac

SEQ ID NO: 4112477 - RNA, 83 nt, Human
guuauaaacucaguuacauauuagaauaaugcaaaaauugaaagugcuauucugugugauauguaaaugaagcauuuuauaac

SEQ ID NO: 4112478 - RNA, 60 nt, Human
guuauacguaacaucacagggacaggcagcccccuauaaccugggagaauuggguguggc

SEQ ID NO: 4112479 - RNA, 68 nt, Human
guuauagcagcgacuaaugaauaaguaccuacugugugucaggcacuggucugagugcuuguuguagc

SEQ ID NO: 4112480 - RNA, 78 nt, Human
guuauaguaauacaguagcuuuuacacaggaacucaaacuuucuguugugaauuuaguuaccaauguauuacuguggc

SEQ ID NO: 4112481 - RNA, 87 nt, Human
guuauaguuuauucagccuuaagaagccaccuuuuuggcuacaaaaauacccagaaagacuuuuuagguacguagggaaacuguaac

SEQ ID NO: 4112482 - RNA, 130 nt, Human
guuauauagccuugggaggaaauaaauauauacaaggcaagcaaugugaauguuuaccaaccugaaauauguauaacagucaaaguuugguuccuuguguguugaugugauggaaggcuauguuuucaac

SEQ ID NO: 4112483 - RNA, 79 nt, Human
guuauauaggaagaucagaguaagcuuuuuagaaaagacugaccugccucuugaaaguuaucuagauucugaauauagc

SEQ ID NO: 4112484 - RNA, 73 nt, Human
guuauauuacuauauuuaauuaguugcuggaugggauaucuaaauuuauaacugguuaaauuuauguugugac

SEQ ID NO: 4112485 - RNA, 58 nt, Human
guuauauuccuuggcuaaggacaauuucacucuuguucauaacucaaggugauauaau

SEQ ID NO: 4112486 - RNA, 100 nt, Human
guuaucaaacuaaaagcauguaauccauucuaugcuuacauuuauauuaaaagccucacaauaugaagacuaaugugaaugggauauguaauuugaugau

SEQ ID NO: 4112487 - RNA, 69 nt, Human
guuaucaaggcuggaagaauuuauguuaaagagaaagaauuucuuuguaagaaauucuuccguuuuuac

SEQ ID NO: 4112488 - RNA, 64 nt, Human
guuaucuuugacugccauucuugaccacguaaugugucagucaucacugguagcaaagauuuac

SEQ ID NO: 4112489 - RNA, 90 nt, Human
guuaugaagagagacauauuggcuugcuuuaauuuacuuauuuaugaaauuaaagcaugaauaauauguauaauuugaauuuuuugugac

SEQ ID NO: 4112490 - RNA, 68 nt, Human
guuaugagauggcaauaugugagguucaugauggcauauauuaagaacugguuauguuaucuugcaac

SEQ ID NO: 4112491 - RNA, 81 nt, Human
guuaugaggagcugccugugugccaugauguagaaauaaugggaaguaugcaucacauguaggcagcaucaccauuuuaac

SEQ ID NO: 4112492 - RNA, 63 nt, Human
guggcagucaucaaggacagauuccacauucccccauuucuuugugauuugaugaucugucau

SEQ ID NO: 4112493 - RNA, 84 nt, Human
guggcauaagaccauaaauguucauuucucacucacaucaauguucaucacagauuggugagaaaguggugaucuaugggccau

SEQ ID NO: 4112494 - RNA, 82 nt, Human
guggcaucagaauuuucuggaauggagcaauguuuaugugaaauuaaguuuuaaaaacuucaugagugauucugaugcacau

SEQ ID NO: 4112495 - RNA, 93 nt, Human
guggcaucuuugggacucgaauaaaaucuugcuguuuucaagccuguacucuuggcugcgaagccacaacuuuuucuuagcagucucagccac

SEQ ID NO: 4112496 - RNA, 61 nt, Human
guggcaugaaagcaucugugauuguuagugguguuauaaucacagguacagcuaaugcuac

SEQ ID NO: 4112497 - RNA, 75 nt, Human
guggcauguaggaguacuucauucuauuuuauuaccaaacaauauuuuacugaaugcaguacugauacaugccac

SEQ ID NO: 4112498 - RNA, 58 nt, Human
guggcaugugguuaggaacagcucuucagacucagacugagagccuccaaccggcuac

SEQ ID NO: 4112499 - RNA, 121 nt, Human
guggcauugccuggggucuuccuuuuuucagaugugauucuucccucagcuauuccuggaggggcugcugagagauagaacuauauaagaggaagagagaaacaccaaaggccauggccgc

SEQ ID NO: 4112500 - RNA, 79 nt, Human
guggccaagcuuguuucuccugggggugcucuuccgaggauaucugggcugccuccggagucgcagugucuugggccgc

SEQ ID NO: 4112501 - RNA, 55 nt, Human
guggccaagggacucuaaggcagggguguccaaucuuuuggcuucccugggccac

SEQ ID NO: 4112502 - RNA, 66 nt, Human
guggccaagucaagggguaccagggacauuauaccuuagaaccucccauagcucuuguugguccau

SEQ ID NO: 4112503 - RNA, 129 nt, Human
guggccagguggggacacagugcucagggucuggguccccaggcagccugcggucugcacagaugaggcugugccugcuagaugguugucggccgcugagcccuggggauugcagcccugucugugccc

SEQ ID NO: 4112504 - RNA, 68 nt, Human
guggccaucugcuggggcugcagagcuguucuacucuagagugccauguaguccagcagaacagacac

SEQ ID NO: 4112505 - RNA, 64 nt, Human
guggccaugcaggucugguaggucccauucccauugggcaggacaccccuagacugcugggcau

SEQ ID NO: 4112506 - RNA, 65 nt, Human
guggcccagcagcugguggagaagggcgccaacccugaccaccucagcgugcuggagaagaccgc

SEQ ID NO: 4112507 - RNA, 71 nt, Human
guggcccagggucucugcugccugagacuuggccauugaggacuugcaucugggguguagacuugggccau

SEQ ID NO: 4112508 - RNA, 56 nt, Human
guggcccccuugugugugcugggcucugaaguccuggaggcacucgcuggggcugc

SEQ ID NO: 4112509 - RNA, 70 nt, Human
guggcccuccacugagcaguagcugcgucgucuucuagaugcuugcagccucugucucacguuuggcugc

SEQ ID NO: 4112510 - RNA, 91 nt, Human
guggcccugcaugacacagcuugccucccccucuuaggaacugugaguaauaaacuguucuuucaaaggcagcuguuucugugucugucac

SEQ ID NO: 4112511 - RNA, 58 nt, Human
guggcccuggaguugugacacugcaaaauggcagugucaggagccuuccaugggcugc

SEQ ID NO: 4112512 - RNA, 82 nt, Human
guggcccuggcuuuacacauccacugccugugagcagcuucaugccccuggaagccaggcagggaguagacccauguuccac

SEQ ID NO: 4112513 - RNA, 69 nt, Human
guggcccugggcgaggagccggcccgaggugagugucugcugcccacuccccuuccuccccagggccau

SEQ ID NO: 4112514 - RNA, 101 nt, Human
guggccgcgaaguggaggcacacgggaggucugagagccgcuuucccccagagacugggcggggcggcuccgggccacggaagcagccucgaaccagccgc

SEQ ID NO: 4112515 - RNA, 76 nt, Human
guggccggucugcguucugucugccuugucucuggaaagaacgagagaacacaagacagaggcugaggcuggccgc

SEQ ID NO: 4112516 - RNA, 56 nt, Human
guggccguagcugcuugaccaggcaguggguaggcccgugcucggcuauggaccac

SEQ ID NO: 4112517 - RNA, 59 nt, Human
guggccguguaacuugaguacaaauuucugguuccuuuuguucauaguuauccggccac

SEQ ID NO: 4112518 - RNA, 78 nt, Human
guggccuaaauguaagugcagucaagagauuuccuccaggaguaggagaauuagaggccauguacuuguuggguuuac

SEQ ID NO: 4112519 - RNA, 73 nt, Human
guggccuauaccauuuuugaaugaaugaaugaaaaauagaaagucaugauagucaguuccuaagggaggccgc

SEQ ID NO: 4112520 - RNA, 61 nt, Human
guggccuccuccguccgccucucagagcuuugcuguggccuuggggaccgaggcuugucac

SEQ ID NO: 4112521 - RNA, 58 nt, Human
guggccugaugccagcccuguguacacaccaacaccagguggcaggccuuaugcacac

SEQ ID NO: 4112522 - RNA, 72 nt, Human
guggccuggauagacuccaucuacccaaaggacccauucuguccaucucauugauaguuuauccagugccac

SEQ ID NO: 4112523 - RNA, 60 nt, Human
guggccugggguuuuugaggcugucagagagaaacugaauucuuaaauccccagggccau

SEQ ID NO: 4112524 - RNA, 97 nt, Human
guggccugguauggcccuucuauugcuugcacccugcucugugggcuauaucaccaugagucagugggcuuggcacagaaaggcacauuccagcuac

SEQ ID NO: 4112525 - RNA, 56 nt, Human
guggccuuuguauuccugacugaucccugacaaagcagaauaauagaaaggcacac

SEQ ID NO: 4112526 - RNA, 72 nt, Human
guggccuuuucaaguaggguaucauguaguauucugcagguuuacagucaguauccugcaaggaaaggugac

SEQ ID NO: 4112527 - RNA, 61 nt, Human
guggcggagcuggcgucuguguggacacacggugcccggggcgcacggcuccccuggccgc

SEQ ID NO: 4112528 - RNA, 61 nt, Human
guggcggcauggaggcagcagcuggaggcugcugcuuuaguucaacaugccaaagugccau

SEQ ID NO: 4112529 - RNA, 66 nt, Human
guggcguuuauucccuuaguauguaggugacccaggguggcuuugcuuuggcaagggagaagucac

SEQ ID NO: 4112530 - RNA, 87 nt, Human
guggcuaggauauguggcuuuuccuggguuccuaaauguuuuaaaucaccagcagcaggaguaggauaagcacugcucucagcacac

SEQ ID NO: 4112531 - RNA, 76 nt, Human
guggcucagauuuggacacaggaacuuuaacucagcaugggggggucucugagcuuccaagauaucacugaggcac

SEQ ID NO: 4112532 - RNA, 77 nt, Human
guggcuccuguaggcugaagagaaaagacagcuccuacaaaguacaucuuucagcucuucaggacccaggagacugu

SEQ ID NO: 4112533 - RNA, 58 nt, Human
guggcucugugcuuugccaaggaugcagucuggcgccccagcagggacacagggucac

SEQ ID NO: 4112534 - RNA, 56 nt, Human
guggcugcagcucugaacggacucaaagugagugucuguaaauccugcucagcaac

SEQ ID NO: 4112535 - RNA, 77 nt, Human
guggcugcauugaaaaucauuauguauucugagugaaacacccagaauuuaaguggauuauucuugagugcagucau

SEQ ID NO: 4112536 - RNA, 66 nt, Human
guggcugccuggggaaugugaggauugucccaaagcacaaucacuggcuccucacggcaaggccau

SEQ ID NO: 4112537 - RNA, 65 nt, Human
guggcugcuacagagcuggaggggguaaagcaacaguguuuucucaguugugcgagcagcauuac

SEQ ID NO: 4112538 - RNA, 111 nt, Human
guggcugggcaugguggcucaugccuguaaucccugcaacucuggaggcugaggcaggaggaucgcuugagccccggaguuucaggcugcagugagcuaugaucacgccac

SEQ ID NO: 4112539 - RNA, 77 nt, Human
guggcuggggagggaugugggaacugcagguuaaagccaucgcuugagcccucacggucugggucccacccaguuac

SEQ ID NO: 4112540 - RNA, 68 nt, Human
guggcuggguagacauggggcugguguugaacacaacugaagagcgccaggcuccggucuguggccac

SEQ ID NO: 4112541 - RNA, 74 nt, Human
guggcuguauuggaauaggauaaaaugggaccaaagauggucugagcauugaauuuucuuccacacucagcuau

SEQ ID NO: 4112542 - RNA, 62 nt, Human
guggcugugguggcacagcgggcugggggaagccccucuggcacugccggccccgcagcugc

SEQ ID NO: 4112543 - RNA, 98 nt, Human
guggcuguucucagugacccuagucccuggacauugguaacaccaucuccuccaaugguuccuucaguccaggauugggagugacuuccugcugucac

SEQ ID NO: 4112544 - RNA, 61 nt, Human
guggcuguuuuuauaaauagugccuauuuuuguaaauaguguuuuauuagaacacagccac

SEQ ID NO: 4112545 - RNA, 116 nt, Human
guggcuuaaacaacagaaauuuauugucucagaguuuuagaggccagaagucugaaaucgagauauugacaggguugccucugagugcuccgaagagaaacucuguuccaggcuac

SEQ ID NO: 4112546 - RNA, 62 nt, Human
guggcuuagcuggguugcuugggcuccgauucucacauggagcugcagucaagcugggccac

SEQ ID NO: 4112547 - RNA, 69 nt, Human
guggcuucaugaacacugaugaaccaaacacuccccuuaccauggugugauggguguugauggagacgc

SEQ ID NO: 4112548 - RNA, 56 nt, Human
guggcuuccuggacagaugcggugcuaggagacuucaccuggcucucaggagcaac

SEQ ID NO: 4112549 - RNA, 57 nt, Human
guggcuucugaacuuguugggaauucugcauuuccaaacugccaauucagaaguagc

SEQ ID NO: 4112550 - RNA, 56 nt, Human
guggcuugaccaucccugcuacuggaaguccauccagcagacagaugcacgcacac

SEQ ID NO: 4112551 - RNA, 72 nt, Human
guggcuugcuggaaggguaguauuaacuauuuaacauguaaugguguacuucacucuuaccuagcacgcugu

SEQ ID NO: 4112552 - RNA, 77 nt, Human
guggcuuggucaggugguggugcuuguuguaggugagaaguuaguuauaccugcaguggccacuccuaaucucccac

SEQ ID NO: 4112553 - RNA, 55 nt, Human
guggcuuuauaggaagaggaacagagaucacucuuucuccaccaugugaggacac

SEQ ID NO: 4112554 - RNA, 75 nt, Human
guggcuuuggcuuucauggcgcuguucucucccugugucucucaauauggaaucucaguuucaugggccaucuac

SEQ ID NO: 4112555 - RNA, 88 nt, Human
guggcuuuuaauuuucucaggauucuuggggcugacaggaccuuuucccaguccagguccacacagucaguuuccaagaauuagucac

SEQ ID NO: 4112556 - RNA, 59 nt, Human
guggcuuuugauuggacugggcugucucugagcuggagcagaaguuaaucgaaggccau

SEQ ID NO: 4112557 - RNA, 130 nt, Human
gugggaaaaaacuuuaucagcaagaucauuaauaacuugggacucagcuuuucaaguuacaauuagcugcucaacagcugugaccuucaagagcuacucauuauuguugguccugauuguucacucccac

SEQ ID NO: 4112558 - RNA, 118 nt, Human
gugggaacuggcacagguggggaguggguaaaggaguccagcaggcugaaugccuucaacaaucauuuuaccacaugguccucauuuacucucagcugccucauaugugucaccucac

SEQ ID NO: 4112559 - RNA, 106 nt, Human
gugggaagccggucccccugguggguuacucauguccaucccccguuugcaagcacugauggggaugagaagugagcagagaacagggugggccacgaaguccagc

SEQ ID NO: 4112560 - RNA, 100 nt, Human
guuauuuucuuauauucuucuuuaugaccuguauuuuuccaaagauugggaagcaaaaaugucaaggugauagaugcauauagauagguaaaaagaugac

SEQ ID NO: 4112561 - RNA, 84 nt, Human
guuauuuugcuucucuucgccuagguccuuaucuguaaaaaggagauaaggaugcuuaccuugaagggauauccuaaaaaugac

SEQ ID NO: 4112562 - RNA, 78 nt, Human
guucaaaaucauucgauguggugacaagguacguuauuauugcuagaucaugugcuguaauccauugaaggagauaac

SEQ ID NO: 4112563 - RNA, 69 nt, Human
guucaaacucaaagucagaucagagaugaaaccccagcuccaucucuuucuauaugugagucuuugggc

SEQ ID NO: 4112564 - RNA, 60 nt, Human
guucaaacuuucccacagugacuccagagaaaacuuuucucugcaauuugugggaugggc

SEQ ID NO: 4112565 - RNA, 62 nt, Human
guucaaagggaaaagcaggcuggccaacccacgugauggcucuugaagcuucucuuuugaau

SEQ ID NO: 4112566 - RNA, 57 nt, Human
guucaagauccagcacaacagugauaggacuuccaucaguugauagagaucuugagc

SEQ ID NO: 4112567 - RNA, 112 nt, Human
guucaagcaauccucccaccucagccuccaaaguagcugggacuacuggcccugcucauacuauuuuuuguagagacaggcuuccacuauguugcccaggcuggucuugaac

SEQ ID NO: 4112568 - RNA, 73 nt, Human
guucaaugauuaacuagaggaggccaucucuggaggacagaaagagucuucugaucugguuagccaugcagac

SEQ ID NO: 4112569 - RNA, 59 nt, Human
guucacagguucucuuucuaagaaauuuuagaaaaggaguuagaggguugccuguaaac

SEQ ID NO: 4112570 - RNA, 84 nt, Human
guucacugaaguccucaagaauuuccagacaaccuggcauaacagcagaaaccaggaggucuguguuuucaggccuuuguggac

SEQ ID NO: 4112571 - RNA, 77 nt, Human
guucacuuccuggagugggaauuccuacacugcagaucaugagaaugcugaggagucaguuccacucaggugugagc

SEQ ID NO: 4112572 - RNA, 55 nt, Human
guucagacacauaccaagaucuauucuaugaagguucuggguuguuaaucugaac

SEQ ID NO: 4112573 - RNA, 60 nt, Human
guucagcagcagugauuuuguggcuaacacauucuucuauuuucaucauugcugcugggc

SEQ ID NO: 4112574 - RNA, 56 nt, Human
guucagcuuccucucucccugcagugcuucuccuggaaugagcugggaagcugagc

SEQ ID NO: 4112575 - RNA, 62 nt, Human
guucaggagcucauguggcugccuguggagccuauccauagauugccuaagacuccaugaac

SEQ ID NO: 4112576 - RNA, 64 nt, Human
guucagguauaugugcauccauagacgugcuugguuucauaauugucuuacuauaaaccugaac

SEQ ID NO: 4112577 - RNA, 62 nt, Human
guucagguuaaaucacagauugcuuucacuuaaauaagguaguuggugggugugagcuggac

SEQ ID NO: 4112578 - RNA, 77 nt, Human
guucaguaaugcuaugcucagucucaaaugaaauaaaguuguucauaacaucagaaagagauggcuaagugcugaac

SEQ ID NO: 4112579 - RNA, 55 nt, Human
guucaguagacaaaggacacguuuugccuugggagaggucacuguguuucugagc

SEQ ID NO: 4112580 - RNA, 74 nt, Human
guucagugaaauaauacauagaacauguuuaaugucaugacugacauacagcauggucuaugaaaguauuggau

SEQ ID NO: 4112581 - RNA, 129 nt, Human
guucauaaucgagucuuuguuuuaguggcugugguuggcauggcugcaguugggcccucagaucuugcagauuaugaccaggcagcaggcucgccaagccgugggcacuaacucaagcuccccuggagc

SEQ ID NO: 4112582 - RNA, 95 nt, Human
guucauaccacuguugagcucccugaggcaucuaacagagaucuuuacugguaggguagggguucuuggaagcuugagguuaacaauuugggaac

SEQ ID NO: 4112583 - RNA, 55 nt, Human
guucauccccgcgucucaaguccccagcacagggcuuggcacagggaagaugcac

SEQ ID NO: 4112584 - RNA, 71 nt, Human
guucaucucuggcuccacuucauccuccaauuggcugcucacugggagagucagaacuggugcagaugaau

SEQ ID NO: 4112585 - RNA, 92 nt, Human
guucaucuuccaaagcuguagaggcaguacauuuucugggaaaaagccucaguacagaacaugccagcacugcuuuucagagaaagauaggc

SEQ ID NO: 4112586 - RNA, 75 nt, Human
guucaugaguagauugaaccuuuugaauaaggaccaaagauuuccuuuggucuugggugaggugcuugcaugaau

SEQ ID NO: 4112587 - RNA, 63 nt, Human
guucauggcccaguagugugcuagaggagcaguagaauucuagaaggcaggcugggccagagc

SEQ ID NO: 4112588 - RNA, 76 nt, Human
guucauguccuauuuuccgcagcaggaaguaugucuguuaacaagauugcauccugaauguggcaaguaaucaagc

SEQ ID NO: 4112589 - RNA, 90 nt, Human
guucauuaaagacuguuccuucucuacaaauccaggcacuuaaaacaaucuucuugguuuguguuugauuuggaaaacagcuuugagaau

SEQ ID NO: 4112590 - RNA, 96 nt, Human
guucauuagaugcguguacauauuacagacaaagcuugaaaccccaauugaguuuaaagaaauuguacuuaauaugugacuugugaaagaaugagc

SEQ ID NO: 4112591 - RNA, 63 nt, Human
guucauuaggagagcugaguuuguucacaccaacaaaucucaacuaagccuaacuuuuugaac

SEQ ID NO: 4112592 - RNA, 59 nt, Human
guucauucuggauguagguuugaguuucuguugggggcuaauuuacucacagaaugaau

SEQ ID NO: 4112593 - RNA, 72 nt, Human
guucauucuuuuguggaugaagaaauggagccuucgaaagcccgucccuuucucccacagguugauaugagc

SEQ ID NO: 4112594 - RNA, 97 nt, Human
guucauuucuguaucuccagcacucaauacaaugguuggcacauauaacaguagugcucaauaacuauucauugaaugaaugaaugaaugaaugaau

SEQ ID NO: 4112595 - RNA, 60 nt, Human
guuccagaaccugagagcacaauccugugugaucucacugcagggccaggauucuggaac

SEQ ID NO: 4112596 - RNA, 59 nt, Human
guuccagggaagggaaggcagaguugaucaaaagagacccuguuccugucccaugaagc

SEQ ID NO: 4112597 - RNA, 56 nt, Human
guuccaugggcagcugagcggcgugcucucuugugcuagccagugccuguggcaac

SEQ ID NO: 4112598 - RNA, 61 nt, Human
guuccauucuuuugcuucaguguucagguuuucucuggauuauggagaagaacaaugaaac

SEQ ID NO: 4112599 - RNA, 60 nt, Human
guucccaagcucugccucuuggcauggcaccagaccaguccugccaggaagcauggggac

SEQ ID NO: 4112600 - RNA, 117 nt, Human
guucccaagggcugguggagccagagaauuccugagggccccagaggaggcuucucgggggggucaguggggccccagggggugaugguuuagagaucgcuguccaagcuugggagc

SEQ ID NO: 4112601 - RNA, 91 nt, Human
guucccagauuugucuuaauccagugguuucugaacagugugccaaggcacccuggcaugcugcagcaaacucacaggagggcugugggac

SEQ ID NO: 4112602 - RNA, 57 nt, Human
guucccaguugcaaucccagucccgucaaacccacggggagcuggaaacugggugac

SEQ ID NO: 4112603 - RNA, 108 nt, Human
guucccauucccccuguuuaguuuacuguugucaggcugcuuuggaucuugaaaccagaaagauaaccaagcguauuacaauucuggauaaagucagaagaaaugagc

SEQ ID NO: 4112604 - RNA, 75 nt, Human
guuccccucagccuggcugcucagccacucacacucgagggugugcaauugcagggucagcagccgggagugaac

SEQ ID NO: 4112605 - RNA, 68 nt, Human
guucccucguccaaggaugcaggaugcuguuucuuucacagcgcauuauucauuucuuggcagggaac

SEQ ID NO: 4112606 - RNA, 60 nt, Human
guucccugaagaaccuaauugucgaugcuagugcaucuaaacagguguucuuuagauuac

SEQ ID NO: 4112607 - RNA, 64 nt, Human
guuccgggagcgccaaccccuccagguuaggaaucugagaguacgggcugcgcgcaccuggggc

SEQ ID NO: 4112608 - RNA, 102 nt, Human
guuccuaaaagugucuuuguagcaauuuugcuuuuucuguuggcuucuguaaugaaacugaagcuuagguacagaaguuaagcuauaagacacaguagaaac

SEQ ID NO: 4112609 - RNA, 76 nt, Human
guuccuagcagcugccugggcuuguacaccucauacucuacguggaagguccucgacgcccagcaguuaugagaau

SEQ ID NO: 4112610 - RNA, 55 nt, Human
guuccuaucuuauuggcaaaggcagguauguacauaauguagaaaagauaggaau

SEQ ID NO: 4112611 - RNA, 69 nt, Human
guuccugcacauuuaugggcugggaggcauccguguggaauugcgugcagccugugugugugcuggcac

SEQ ID NO: 4112612 - RNA, 87 nt, Human
guuccugccaagaucaagauacauauucuggguuucugcaguugaaggaggaauuccugcagccaucgcagagucuguaguaggagc

SEQ ID NO: 4112613 - RNA, 127 nt, Human
guuccugggccaaagcugaacaaaaguuuccaaguuacaccauuaacuuuucucaagucagagccuguacauagugaagugacacugcugagauuuaaguucaggacuauaugcuucaucccaaugc

SEQ ID NO: 4112614 - RNA, 79 nt, Human
guuccuggugcuguggcagauacagaagaucaaaaggaaacuguugcugaguugacauucuuucugucauaaccucaac

SEQ ID NO: 4112615 - RNA, 75 nt, Human
guuccuguuggaaaggccaggcuguggcggggcaucuagacagcuuaccguagcagcucuuuacuaaccaguaac

SEQ ID NO: 4112616 - RNA, 67 nt, Human
guuccuuagagugguugugcuauggguguuugaccaaggauagcaugguuugaugacuggaaggagc

SEQ ID NO: 4112617 - RNA, 65 nt, Human
guuccuucauccauucauucucuaagucgauugaguaccgacuguguggcaggcagugaaggagc

SEQ ID NO: 4112618 - RNA, 61 nt, Human
guuccuuccuaucccgagagccugugacucugggcuucuuaauuugagggagaggaggaau

SEQ ID NO: 4112619 - RNA, 67 nt, Human
guuccuucucuuguuccuguauuuggcaaauuuguauguuaggaugugcauauauaugggagggagc

SEQ ID NO: 4112620 - RNA, 67 nt, Human
guuccuuggaagacagccgucuuuauuucuuagugcugggaaauucaggacaaauguuuucaagaau

SEQ ID NO: 4112621 - RNA, 65 nt, Human
guucggcaccgcacgucucagccuguaucacucuagaaagcagggccugagaccguggcuugaau

SEQ ID NO: 4112622 - RNA, 59 nt, Human
guucgggcuguuccccugauuaauaaagucguaaacacagucaggagcagcuucugaac

SEQ ID NO: 4112623 - RNA, 124 nt, Human
guucuaaaguagguuaaccuagaggagcaaaagcugucaauguaucuagucuaaaugguauucacucccuguaggguagcuuuuacugaauggcucuuuguuucgugaugccugccaucuguac

SEQ ID NO: 4112624 - RNA, 61 nt, Human
guucuaagggcuggaggauacaucagagagcaagauagccuucccucugccuuuguagagc

SEQ ID NO: 4112625 - RNA, 71 nt, Human
guucuaauuaggagaaaacuguugucuugaaacuggacaaauugaggauaaauaccuucuccgauuagggc

SEQ ID NO: 4112626 - RNA, 79 nt, Human
guucuacaauauuugggggcaguuuguuuuuccuuauugccaggauuucauggacuacagacuguauucaaaguaggac

SEQ ID NO: 4112627 - RNA, 66 nt, Human
guucuacacagaagccagaaggccugggucugaaucccagaucuaucuagcugugugaccuugagc

SEQ ID NO: 4112628 - RNA, 90 nt, Human
guucuaccuugaggguccugcagcugcagaccuggggaggagcuaauguucuaguuugagugucaugcagcugcagacccggggaggagc

SEQ ID NO: 4112629 - RNA, 108 nt, Human
guucuagucccaccagguggcgcccgcguucggcauucugagaacguuuggugucuucuggacuccagaaucuggacgguccgaccgccucgugcuugguggguuuac

SEQ ID NO: 4112630 - RNA, 59 nt, Human
gugggaagggaaaauucauucggcuuccacccugggaacugggcacagucuguucccac

SEQ ID NO: 4112631 - RNA, 60 nt, Human
gugggaagucucucggaggaagugccaggucauaaauuucacccaacaagaggcucccau

SEQ ID NO: 4112632 - RNA, 105 nt, Human
gugggagcagccaggcaggccgaucguccugaaccggcagaugcagucagugccacugccucuccagggccauccugcgccuguccaguugcugguuucucccau

SEQ ID NO: 4112633 - RNA, 55 nt, Human
gugggagcuuuggcaucaggcucauaucuaaagaugaguuuauaggaguucucau

SEQ ID NO: 4112634 - RNA, 103 nt, Human
gugggagggguugggaccagccuucugcugcccugggugcuggggaucccggggcuuuccaggugcucggccuccaaggugcgcgguccucagcuccacccgc

SEQ ID NO: 4112635 - RNA, 57 nt, Human
gugggaggguaaguggauggaaggaacacucucuacuccugcagaaugccuuccuac

SEQ ID NO: 4112636 - RNA, 77 nt, Human
gugggaguuaggaaagaagcagcuaggaguucuccugggauucuuacccgaugucuuucuugaaacuguuuuuccac

SEQ ID NO: 4112637 - RNA, 125 nt, Human
gugggaugaccuccauacucccauggggcagugcugagcacaccuuggagcaggagccuguucugcacacccaauagugugugcagaaaugccagcugggagccuauuuaacggagccauuucau

SEQ ID NO: 4112638 - RNA, 97 nt, Human
gugggauggguuggggguguuuuuugagggauugcaccagaagagacacaaaaguuccucuuugcuuucucuuauaagccccucuuccuuuucuuau

SEQ ID NO: 4112639 - RNA, 64 nt, Human
gugggauuggguacuccaaacucagggucauccugccugcccugagccgcugcuccaaccucac

SEQ ID NO: 4112640 - RNA, 66 nt, Human
gugggauuguggugagaaacugguagauugguaacucccagaucccucaguuucucauccuuccac

SEQ ID NO: 4112641 - RNA, 100 nt, Human
guucuguuguaggagguccuggaaccacaccuugauaaauguggcuuugaagaauaugaagaagugugguuuaggcaucuuuuauguuaaggaacagaac

SEQ ID NO: 4112642 - RNA, 92 nt, Human
guucuguuuuugcagcugcuuuaucugacuuggcgcugggcuuaauggcuuugaggcaguguugaucagauaggguggugcuauggugggac

SEQ ID NO: 4112643 - RNA, 108 nt, Human
guucuuagagggaagagugcccaggcaagacugagaaccccugcauuaaauggugaugcagagccugacgggauuuuucucugugccuuugccuuuccguuuguaaac

SEQ ID NO: 4112644 - RNA, 65 nt, Human
guucuuauuacagaaucaggcauaacuguuuaauaaauaugccuugauuuuguaaagaagagagc

SEQ ID NO: 4112645 - RNA, 65 nt, Human
guucuuccagagauagggccucaagugaggaguuuagcguggcccuuuacauuuacugggugaac

SEQ ID NO: 4112646 - RNA, 62 nt, Human
guucuucuaucugagugguuauucuuugucauuuuggcaaagaaucucagaauuagaaauac

SEQ ID NO: 4112647 - RNA, 55 nt, Human
guucuugaauaugcuuugcaauccuaagccccuggcuguugccaaauuugaggac

SEQ ID NO: 4112648 - RNA, 72 nt, Human
guucuuguuugaacuggaaggguggccugucugagcuaucaacauccacauuuauucagucauauagguaac

SEQ ID NO: 4112649 - RNA, 78 nt, Human
guucuuuaagcauuuauuuccuugucaguguuacuaugucagcaaauaugugugggugguaaggaaggcccugggaau

SEQ ID NO: 4112650 - RNA, 105 nt, Human
guucuuuagaggguggcuuaugaccugacuuuaauauuuauuuuaauuuccuuuguauuacagcuagccaauuauuuagcuauauccucaucucaguugaaggac

SEQ ID NO: 4112651 - RNA, 79 nt, Human
guucuuucugccuuucuauaucauggaguguuucauuucauuucauucuguuuggaaagguggguggauaggaaagaac

SEQ ID NO: 4112652 - RNA, 77 nt, Human
guucuuuuaagauugacaugagaagcauugaugggcaguaaguaaacaucagugcugcuuuaugacaguuucugaac

SEQ ID NO: 4112653 - RNA, 70 nt, Human
guucuuuucugugagucacacuggcaaaugugacauauuaucagcugguuuugaggcacaugauaagaac

SEQ ID NO: 4112654 - RNA, 60 nt, Human
guucuuuuuccuucauauagaugccauauauauauggcaguagaaugggggaaaaagaac

SEQ ID NO: 4112655 - RNA, 70 nt, Human
guugaaagucuguauaaggagccaugagaaccccagauuaccuccugaagauccauuauagacacucaau

SEQ ID NO: 4112656 - RNA, 69 nt, Human
guugaaauaaggugccgaugaugguuuuaugugucaaacuaucuaaacuauaguaccuagucauucaau

SEQ ID NO: 4112657 - RNA, 74 nt, Human
guugaaauucucauuuauggaauuaguuuaggaugugaauuuaugcauucagaauuggaacgugaagauucagc

SEQ ID NO: 4112658 - RNA, 80 nt, Human
guugaaccauuuuuaaucuuggaacuuauuauuguagaaaaaaauuuuuccugcauauuugcaagguuaggaauguuaau

SEQ ID NO: 4112659 - RNA, 58 nt, Human
guugaagauguuaagccgacccauuuucucauaagauguauguuucugcaucuucaac

SEQ ID NO: 4112660 - RNA, 86 nt, Human
guugaagugaauguccugaaaugugcacaugacauuggguauacaucaaaguuuguuguacauguuaguaucauuuauguugcagc

SEQ ID NO: 4112661 - RNA, 60 nt, Human
guugaauacauguaugaugugacucucccauuuggagcucuuauaucauaaugugccaau

SEQ ID NO: 4112662 - RNA, 71 nt, Human
guugaaugccagccccugggggcaggguaagagccaagucggcuucagcucugcaccaggugguuuucagc

SEQ ID NO: 4112663 - RNA, 76 nt, Human
guugaccauauacugaagaucaacagcaguaguuuucaaugaguacugucugcuucuuauagcuuuauggaacagc

SEQ ID NO: 4112664 - RNA, 79 nt, Human
guugacucuaagagccuucccuccacaccucaaagaccuuaguuagggucccaugaaagagggaggccuugauuucaau

SEQ ID NO: 4112665 - RNA, 60 nt, Human
guugagacguguauuggaaucucugacuagucagaauacguucuuaguuauauucucaau

SEQ ID NO: 4112666 - RNA, 55 nt, Human
guugagacucccccugcaugggccccaacaaacccccugcuuggggcagaacaac

SEQ ID NO: 4112667 - RNA, 89 nt, Human
guugagagguggcaagaauaucaccauuuauguaccugagauuuuuacagauggguacacagauuuuacauguuaugcuuaaucucaac

SEQ ID NO: 4112668 - RNA, 105 nt, Human
guugagauggagucuugcucugucacccaggcuggagugcaguggcacgaucucggcucacugcaaccuucgccucccggguucaagugauucuccugccucagc

SEQ ID NO: 4112669 - RNA, 72 nt, Human
guugagcccuaggaaauugucacuacuggacuuguuugaucuacauaaaacagcaguuuccuaugguucagc

SEQ ID NO: 4112670 - RNA, 83 nt, Human
guugagcugcauggugagccgugggcuucccuggugucagguuugagcucugccauggcucccaccucgcaaaugcagccaac

SEQ ID NO: 4112671 - RNA, 63 nt, Human
guugaggcucuuagauuauaaauuuucaaagaucccugauauuuuaucaucacgagcuugagc

SEQ ID NO: 4112672 - RNA, 85 nt, Human
guugagguguucuauuuuagcccuuugauccuggaaugucacucgagugagcaccaggaaagaaggggccaguggauucuucaac

SEQ ID NO: 4112673 - RNA, 81 nt, Human
guugagugaugugcauuguacugcucgcauuggguugaguuucccuuaaagugucuucaguaaaauacacuaugauucagc

SEQ ID NO: 4112674 - RNA, 79 nt, Human
guugauaaacacaauguuucuuuguucuuuguuuucuuuguguauguaaagaauuagaagccauuugugucaagguaac

SEQ ID NO: 4112675 - RNA, 63 nt, Human
guugauacaccucaugguuacuguugccauagcaacuaccucccuguaaccauguguaccagc

SEQ ID NO: 4112676 - RNA, 58 nt, Human
guugauauauuauggaaaugcuuucugucauuaugcacuuuuccauaauguauguaac

SEQ ID NO: 4112677 - RNA, 90 nt, Human
guugauauuucacuguguuugcuccauugcccacucucuaggcuuuuucuggauauuuggagagcaagucgcagacaugauaauaugaau

SEQ ID NO: 4112678 - RNA, 58 nt, Human
guugaugcagguccaaacgcuaguguuuacaagacucacguagugguuuugcuucaau

SEQ ID NO: 4112679 - RNA, 75 nt, Human
guugauggcaguguuugugaugaacagacaaagguuuguacagaccaaucuguccauuuacagauaugcagcaac

SEQ ID NO: 4112680 - RNA, 83 nt, Human
guugauggcuugccuucuguuccuauagaaagaggaaaacagagcucuugcuagguggaggcagagauggcacagcaagagac

SEQ ID NO: 4112681 - RNA, 70 nt, Human
guugauuaguugauuaagagucagacugccuggguuugauccugacucugacacuuauuagcugugugac

SEQ ID NO: 4112682 - RNA, 62 nt, Human
guugauuuguaggaguuuguuuagacacauaagugcuuuuggauaaaauacuuacauucaac

SEQ ID NO: 4112683 - RNA, 55 nt, Human
guugcacaauuccaugggacagcccugugaacagggucccccggaguugggcaac

SEQ ID NO: 4112684 - RNA, 63 nt, Human
guugcagacggggugcacugaaacuccuuacaaaagagucacuuacgaaacccaguuugcaac

SEQ ID NO: 4112685 - RNA, 95 nt, Human
guugcagagcugcagagagggaaugucuagcuuugccaggccccacagaaggcucacauuggcucagcaagacauugaccuccacugccuccaac

SEQ ID NO: 4112686 - RNA, 63 nt, Human
guugcccacgugcgaggaccgggcaggggcucagccccuaggccgcccggugcguggggcggc

SEQ ID NO: 4112687 - RNA, 129 nt, Human
guugcccaggcuauaauaaagcagaguuuuggccaggcacggugaaucaugccuguaaucccagcacuuuugggaggcugaggcaggcagaucacuugaagucaggaguucaagacuagccuggccaac

SEQ ID NO: 4112688 - RNA, 66 nt, Human
guugccucagcaguagaaaauggcuuagcaggcuacauacuugcagauucaacaugcugaggcagc

SEQ ID NO: 4112689 - RNA, 70 nt, Human
guuccucaucuguguggcccauucucaaaguguuccuucugacacucaucugagccaaacgaugaagagc

SEQ ID NO: 4112690 - RNA, 84 nt, Human
guuccucuguuuggaagcuuuucucuguauuaccuguuauaaacaaaugggucaucuggagaacgguccuuugcagcguggaac

SEQ ID NO: 4112691 - RNA, 67 nt, Human
guuccugacuuccagcaacuuggugcuaugguauuuguaugauaaaucaagaggcuuggaaaggaau

SEQ ID NO: 4112692 - RNA, 64 nt, Human
guuccugagguucaaaugcaagagaugcugccccuacaccggucucaggcauuuggaccggaau

SEQ ID NO: 4112693 - RNA, 58 nt, Human
guuccuggaucaucccaagcccuuucccaccucagggccuuuggauauauucagggau

SEQ ID NO: 4112694 - RNA, 61 nt, Human
guuccuggccaacccccucagcuucccaccagaguuugccaaggcuuggcuuggcaggaac

SEQ ID NO: 4112695 - RNA, 75 nt, Human
guuccuguagccaguguuuccccagaagagagcauguuaaaugcuuacgggaaacaguuuggucaguugaggagc

SEQ ID NO: 4112696 - RNA, 64 nt, Human
guucgaaggagccaccuucaacucaggaauugauaaaauucucccaguggaaguggcuuagaau

SEQ ID NO: 4112697 - RNA, 76 nt, Human
guucgcauuuagucuggugggauuccaaguggccaugagccacugauuauucagcagacacuaaagacgugugagc

SEQ ID NO: 4112698 - RNA, 60 nt, Human
guucggugggcuuuuaaguggcauuuguuaacugacaugcaacuaaagggugccacgagc

SEQ ID NO: 4112699 - RNA, 108 nt, Human
guucguguggcugugguggcuaacaaguucaaacucuauaagaacuugccaauaggcugaaaguucacauaagaguugauguagucuugagucccagauucacagagc

SEQ ID NO: 4112700 - RNA, 83 nt, Human
guucuaagaguaaaggcccuagacuggggcuaaggaauaaaucauauuaaaaggccuggagcuccagggucuccucuuggcac

SEQ ID NO: 4112701 - RNA, 95 nt, Human
guucuaaugguucaagcaggguccugaggugagucaguggcaggccuuggaaccgggacgucuggcugaccugaggaguccuguggauuagcagc

SEQ ID NO: 4112702 - RNA, 67 nt, Human
guucuaccacuaauuuuuccaugcagagcuauagaaguuaacagcauaugaaauuacuggcaagaac

SEQ ID NO: 4112703 - RNA, 99 nt, Human
guucuacccaccuggaagauucaccacuaccacuauuuuuuagggccaccccgaguaggucuguagguaguggccaguacuucugguugguuccagaac

SEQ ID NO: 4112704 - RNA, 87 nt, Human
guucuauguacacuucuagugaauuauugaaacugaguguguuugggggaacuccccaaacuugcauuugguuucagaagugagaau

SEQ ID NO: 4112705 - RNA, 66 nt, Human
guucuauucuccaguuacauauuuugaagcgugguuacuguauguuuacgcugguagaauuagaac

SEQ ID NO: 4112706 - RNA, 85 nt, Human
guucucacuugcuuggagggcagcuguauuugcaacugguagaacucagcuuugcuuuuaggugucuaacaauaaguguaauaac

SEQ ID NO: 4112707 - RNA, 68 nt, Human
guucucaggacuccugccugcuuaggacaaguaaaagcuuccaucucaagaggcaggacuucaggagc

SEQ ID NO: 4112708 - RNA, 66 nt, Human
guucuccgugccccaugcugggcccuggaaauaccacccauggguuaacaugguccauggaagagc

SEQ ID NO: 4112709 - RNA, 56 nt, Human
guucucugaguccuggcaaaauucuuuaccuguggauacuugugaggaaagagaac

SEQ ID NO: 4112710 - RNA, 72 nt, Human
guucugaauucagucugugagauguccuuuggagauuaaauuaucuuugaaauucuucagcugaagcagcac

SEQ ID NO: 4112711 - RNA, 55 nt, Human
guucugaguggcccaagcccugaugugucgcacacaagggcuaggcacauagggc

SEQ ID NO: 4112712 - RNA, 108 nt, Human
guucugauuuuucuuuuuagucaaacuagguucugauuuccaagauaaggcgaaauccagagcaguuugggaaaugaaggaaucugacugaacaauaagagucagaac

SEQ ID NO: 4112713 - RNA, 85 nt, Human
guucugccaaccccucccaaagauaauagauuuuugauagcuuuacuucccaagacaauaauuuuugggcagggcacagcagaac

SEQ ID NO: 4112714 - RNA, 94 nt, Human
guucugccaaguaaaacagcugcaauaguuuagaauaauuguaggaugaaaauaguuaagaaauaaauuaaugcacuuaguuauauugaagaac

SEQ ID NO: 4112715 - RNA, 81 nt, Human
guuuaacuucaaauauccaguagagggcaugaaaggaauugguuuuguuugggcucacuaugcugaagauagaauuugaac

SEQ ID NO: 4112716 - RNA, 99 nt, Human
guuuaagauuuaguaagacagucauugcauguuaauuaaacagcaauggaucauuuaccaaccuguuuaaugagguguaacaacuauugaauauaaaac

SEQ ID NO: 4112717 - RNA, 74 nt, Human
guuuaagugauaccuaggaaaucaagguuuaauauuguaggaaaagcuuuguauuucauagguacacagaagac

SEQ ID NO: 4112718 - RNA, 88 nt, Human
guuuaauaaguugccuguugaaucauaaguuauaugggagaauaaaagcaaaaauauagagagaaugguguuaauaugcaacuuuugc

SEQ ID NO: 4112719 - RNA, 106 nt, Human
guuuaauauuauuuacagccauuugaaaagcuggcuaaugaucuuagaguaaguuucugaacugcuauuuuagcagcuuuuaaaugguucuuuugaguaguaaagc

SEQ ID NO: 4112720 - RNA, 94 nt, Human
guuuaauggggaucauagucacugccuuccauuugugaaaaucaauugugauaaugucuaugacaaauggaagguguucucuuccccugaugac

SEQ ID NO: 4112721 - RNA, 77 nt, Human
guuuaaugugggcucaucuuuaaauuuaugacguuaacuacguacaucauuuuggagaugagcauugcuauagaaac

SEQ ID NO: 4112722 - RNA, 68 nt, Human
guuuaauguucauuuaguucuuucauguccacuuacuguggaaaagaaugacugagaugaauggugac

SEQ ID NO: 4112723 - RNA, 112 nt, Human
guuuaauugcaaacacaaucuuugacuuuuaucaugggaccugaauuuuaugcuguguucaaaugaaucagaaaaccuagguagaguucuugacgguguucuguuuuuaagc

SEQ ID NO: 4112724 - RNA, 88 nt, Human
guuuacaauugccaucagaaagcacugugagaucuuguugcaguaguaagguuuuguauuguuuggacacauggcuggcaaauggugc

SEQ ID NO: 4112725 - RNA, 80 nt, Human
guuuacacuuuguuauucucauguucauucguuucaggagagccuggcagccacaucucguggauuuaacagagguaaau

SEQ ID NO: 4112726 - RNA, 120 nt, Human
guuuacagguucccgcuguggugaaugagugggugacagugaacacguacccacuguggugagugagugggugacagugaacagguuaccacugugaugcaugagguggggacagugaac

SEQ ID NO: 4112727 - RNA, 87 nt, Human
guuuacauauauacagugcaugugagggugugcguguguguguguacacgcgcaaccaggcaugcacauguaucuguaugugucugc

SEQ ID NO: 4112728 - RNA, 64 nt, Human
guuuacaugaacugacuuuuaggggaauuagcuccagguuccagagucaggagcucaugugaau

SEQ ID NO: 4112729 - RNA, 80 nt, Human
guuuacuggcuucugugugugagucaucuguugcccaccggcuuuaaugaagucacgcaaagcaauaagucacccaaaac

SEQ ID NO: 4112730 - RNA, 75 nt, Human
guuuacuuuccucauuguggauuuuucauuacaguauagaguuuugcagaagugagucaugaggaauagguaaau

SEQ ID NO: 4112731 - RNA, 72 nt, Human
guuuagaauggcaaaauuaagucaugaacaaaaaccaguccauaaugacuaccgaucuuugccaauuuaagc

SEQ ID NO: 4112732 - RNA, 62 nt, Human
guuuagaugaaaguuuguuucaacuauuuuugacaauuagagugggacugacccaucugagc

SEQ ID NO: 4112733 - RNA, 100 nt, Human
guuuagcaaauauccacucuuacuaccagcccuccuccaucagaggaguuuacuugcucacuccauugauggugggcuuggucaugugaguugcuuugac

SEQ ID NO: 4112734 - RNA, 93 nt, Human
guuuagccagaaagggauguauucagcuguuucuuccagauguagagaaaagagccuuggacucaggaagaaagcagcugguucuggugcuac

SEQ ID NO: 4112735 - RNA, 56 nt, Human
guuuaggagauaaauuucaggcauaggggaucuuuucuaugcuccuaucucugagc

SEQ ID NO: 4112736 - RNA, 61 nt, Human
guuuagggugauguaugugcagcaaucauuauugacagcuggagaagugcaucacuuaaau

SEQ ID NO: 4112737 - RNA, 66 nt, Human
guuuagugugucccuggggaguguuggggcgacgguuacaggcuguuuauggugacaccacuagac

SEQ ID NO: 4112738 - RNA, 65 nt, Human
guuuauaagccugguucauaauuugcugaucugucguaggaaguaaauggcccaggguuaucagc

SEQ ID NO: 4112739 - RNA, 56 nt, Human
guuuauaagguaaaggagagagagcaaaaucucucccucccuuugucuuuaugaac

SEQ ID NO: 4112740 - RNA, 62 nt, Human
guuuauccuaguaagucuucuauguuuauucagagguauggaagauaagagauugggaaggc

SEQ ID NO: 4112741 - RNA, 99 nt, Human
guuuaugaaugauaguguuugaccuaccuugaagcaaggguauccuguuagauguuaacaugcagguuuuaggguugccagagaaacuaucaaauaagc

SEQ ID NO: 4112742 - RNA, 107 nt, Human
guuuaugaauuuuuuaaugucuauuuaaaaagauaaagaaauugagaaugucaauaccauguuucaggaccuaucuuuuagaaaagcaauggagaggaggaauggac

SEQ ID NO: 4112743 - RNA, 130 nt, Human
guuuauggaauguuaauauaaaucaaauguggugcaugaaacaaaaauuaggauaguaaugaugguaucaauaaaaagaauaauaaccaacaugcuggguguuuuugauguaucagauauauuucuaaau

SEQ ID NO: 4112744 - RNA, 81 nt, Human
guuuauguaccuucagauucuuaaaacugucucauauacaguaugaguaaaauaggugagaaucaaaugaaggauaagaac

SEQ ID NO: 4112745 - RNA, 83 nt, Human
guuuauguuuucugaaagcauuauaagaaaggaaauugcuaaucaguuaacucauuuuauaaugcccaucauaaagcaggaau

SEQ ID NO: 4112746 - RNA, 58 nt, Human
guuuauuaacugucaagugauuucauuaaaaaaggaacaaauuuggcagaugaugaac

SEQ ID NO: 4112747 - RNA, 78 nt, Human
guuuauucugugaucacugcccauuuuggaggucacaagcucuggagcuuacaggaacugggcaggacauuaaaaagc

SEQ ID NO: 4112748 - RNA, 61 nt, Human
guuuauugaguaucuacuaugugucagacacuguguuaggcacuggagaugcauagugagc

SEQ ID NO: 4112749 - RNA, 76 nt, Human
guuuauuuguguguuuagcauuagcagggggaacagaaaacugucucuccuuuaggcugagcacuugggaauagac

SEQ ID NO: 4112750 - RNA, 59 nt, Human
guuucaaaggugucaggcaguuuuuauucccacucugauuaccacacaccauuugaaac

SEQ ID NO: 4112751 - RNA, 64 nt, Human
guuucaagcaguuaagcagucuccaugcagcagcaugguggaggcuccuaagcugacuugacac

SEQ ID NO: 4112752 - RNA, 62 nt, Human
guuucaauauugagaaccagcauguuuucagagaucaaugaaaauaauuucaguguugaaau

SEQ ID NO: 4112753 - RNA, 75 nt, Human
guuucacagauggggagacacgguuuauuuuuauugucacgggaaccuuuugucuccucauucuucagugucuac

SEQ ID NO: 4112754 - RNA, 71 nt, Human
guuucacagucugcagaauuuuauuuccacacagccuuacugguuccaacagaauuuuuggauuguguaac

SEQ ID NO: 4112755 - RNA, 82 nt, Human
guuucacaguucuauuacucccugcuucuucaugugaguugccucaugaagacgaacuaguagggugguaaagagaaagaac

SEQ ID NO: 4112756 - RNA, 118 nt, Human
guuucaccaagaccauguguuuucacccuuucucguuugucuguuuaagcagggagacugaucuccaaauuaaaucauacagacaggcucccaaagaugaaagcgaucaaggugaagc

SEQ ID NO: 4112757 - RNA, 65 nt, Human
guuucacccagcagcacuuaagacuauucuuuuaauaguuucaaagacagugugcuguuggaaac

SEQ ID NO: 4112758 - RNA, 71 nt, Human
guuucacuuaaaagucuuggggaaggccagguauuguggcucaugccuguaaucccagcacuuuuagaggc

SEQ ID NO: 4112759 - RNA, 66 nt, Human
guuucagacuauucuguuucuguagcugccauuuaaagguagaucagaagagagguagacggagac

SEQ ID NO: 4112760 - RNA, 65 nt, Human
guuucagaguagaaccucaaggagcuuuugcagaauuccacaucguucucuuuucucucugaaac

SEQ ID NO: 4112761 - RNA, 106 nt, Human
guuucagaucagcugaauagaaauuagcagguggugaccacauuuuauaauaugauuuuugaagaaguauaacuauuugcuuucuucaauuuaguuuuuuaaaaac

SEQ ID NO: 4112762 - RNA, 81 nt, Human
guuucagauuaauacagaggcacaugcaauuuuccaucagcaacugaggagaaacacacguguccugaggaauuggggaau

SEQ ID NO: 4112763 - RNA, 67 nt, Human
guuucagucaugguuucuguuacaggcagcugaaaacauccagcuguacagcagccuugcuagaaac

SEQ ID NO: 4112764 - RNA, 66 nt, Human
guuucauaugcaguuaacagcauguaaauuuccuaaacgugauuaacaguuucaugcaugugaaac

SEQ ID NO: 4112765 - RNA, 65 nt, Human
guuucauauguucuguagucagaggauuugagaacacuuugacaauaauugcauuuauaugaaac

SEQ ID NO: 4112766 - RNA, 58 nt, Human
guuucaucuaugugccuuuguauagaaaucuuuucuauccaaugggacauggaggaac

SEQ ID NO: 4112767 - RNA, 77 nt, Human
guuucauugacuuuguuuugguaauccucugggagugaaggaggguuuagaaguaaaggcaugcaggugaauguagc

SEQ ID NO: 4112768 - RNA, 69 nt, Human
guuuccaaaggaguaccacgcauuccccuuugcgauuguaauaaaaugcuuggaugcugccaugggaau

SEQ ID NO: 4112769 - RNA, 59 nt, Human
guuuccaagaugcugccaucagcggauccaaucuucacugccuguggcagaguggaaac

SEQ ID NO: 4112770 - RNA, 75 nt, Human
guuuccaagccuguucuccuccaucauuugcucagagaauaauauuacagguguugggagagcugguuuuguaac

SEQ ID NO: 4112771 - RNA, 64 nt, Human
guuuccacaacuggcuuuuuagcuuguuguuuccacaacuggcuuuuuagcuuguuguugaaau

SEQ ID NO: 4112772 - RNA, 73 nt, Human
guuuccacucuccugcuuuauuuuaggaaauaaugauguuucuggaaccacaaaaguaugaaagcaugggaac

SEQ ID NO: 4112773 - RNA, 61 nt, Human
guuuccacuugagaggacuccucccuuuuuuggggguauguccucccucaggaggguuaac

SEQ ID NO: 4112774 - RNA, 58 nt, Human
guuuccagagcaggugucuacacaguuggucauggugaccucuguuuguucugggagc

SEQ ID NO: 4112775 - RNA, 68 nt, Human
gucuggagaagaaacuugcucugggaagugaugagaagccauccagaucaagguguuucauccgagac

SEQ ID NO: 4112776 - RNA, 59 nt, Human
gucuggaggaggaagaaggcacucgcuggcuuuuguuugcuuucugcucuuguccacac

SEQ ID NO: 4112777 - RNA, 81 nt, Human
gucuggcauacaggaagcacucaagaaaugcuggcucugacuguaaucgcccuggcuauuuucugcuugcuguugccugac

SEQ ID NO: 4112778 - RNA, 59 nt, Human
gucuggcauaugcaaagugcauaaaaauccuuagcaauuuguuaaauaaugugucagau

SEQ ID NO: 4112779 - RNA, 91 nt, Human
gucuggccagaccucaguuuuaagacuacucuuuucuuagcuuugcagauaugcucuggagaugccagcuuacacugggaacugguuaggc

SEQ ID NO: 4112780 - RNA, 68 nt, Human
gucuggcuccccagacagugauuuacuuaaugcuuugcauuuuaagugacaucaucuguuuuccagac

SEQ ID NO: 4112781 - RNA, 55 nt, Human
gucuggcuuugaaacuugcugcagaugagccaccugcagauaauugaaagcugac

SEQ ID NO: 4112782 - RNA, 66 nt, Human
gucugggagguacugggaggugucucagcaggagauaagcagcggggacuugccgucuuccuagau

SEQ ID NO: 4112783 - RNA, 64 nt, Human
gucugggcagaccucuccagccccacaaggcugccaguggggguugugggaggcugcagagggc

SEQ ID NO: 4112784 - RNA, 78 nt, Human
gucugggcugaauucugagaccacagaauccuggaauauuagagccagaaggaauuuuacaucucagagagcuugagc

SEQ ID NO: 4112785 - RNA, 69 nt, Human
gucugggcugguacaaauccuaaggcgauuguaagaaaugaauaguuuucaguuuggaccagccccgac

SEQ ID NO: 4112786 - RNA, 70 nt, Human
gucuggggaggggugcguugugaaugaaggucuaucuaagacagcauuauccaacagcacuuuccaugau

SEQ ID NO: 4112787 - RNA, 70 nt, Human
gucugguacagcuaagaauuucaucuuugucaugcguaagcugaaagauuaaauucauacuguacuggau

SEQ ID NO: 4112788 - RNA, 62 nt, Human
gucuggucccugcucacuucuuguucagaaucccuguccugaggaccucucaggggccaggc

SEQ ID NO: 4112789 - RNA, 94 nt, Human
gucuggugaggauucauugcuagagagguagugugauccuuuggagguauugaaucacucuggcuuuuuauacaguuugaguucuugcauagau

SEQ ID NO: 4112790 - RNA, 87 nt, Human
gucuguacuauuuuccacaguggcuguaguucuguaaauaauuaaugaaugaguccuuccccagccccuuggagacuggcugcugac

SEQ ID NO: 4112791 - RNA, 68 nt, Human
gucuguauaguuuaauggucaacuaaugacggcucaagcuucguucaaacaccuugaaccuauuagac

SEQ ID NO: 4112792 - RNA, 57 nt, Human
gucuguccagcaacacaggaguagggugaagcccauuucuguggccacaggacagau

SEQ ID NO: 4112793 - RNA, 82 nt, Human
gucuguccucaggacacuuuacucuucauaugugacacaaaauguucugucauauagacgaagugauaaugucaggauagac

SEQ ID NO: 4112794 - RNA, 84 nt, Human
gucugucuggucuagggggacucaacugggacagcuugucuuuguucgucuuggucuuucauccuucaacagacuagcacaggc

SEQ ID NO: 4112795 - RNA, 64 nt, Human
gucugugaaauguguguauaauuaauuucuuuuaaaauuacauuguuaaugcauuagcacagac

SEQ ID NO: 4112796 - RNA, 74 nt, Human
gucugugagcugggugaaugguagggcaggguagcaccaacagauuucccagcccuugggccccagcucagggc

SEQ ID NO: 4112797 - RNA, 91 nt, Human
gucuguggaaaaccuuguugcugaauucaggauucuuucuuccagagaagauuugggcuuguguuugcaacagccuuggacagcuacagac

SEQ ID NO: 4112798 - RNA, 68 nt, Human
gucugugguagacaggaaggcaugauuuauuuaccugccagccuccuccacuccuguuuaucauugau

SEQ ID NO: 4112799 - RNA, 67 nt, Human
gucugugugggauaguuugaggaauguaaggaagauuucccucucuccugaauuucccagcaugaac

SEQ ID NO: 4112800 - RNA, 78 nt, Human
gucuguguguugaaggccaggcagggagcugugaacuguaggauguuuagcagcaucccuggccuguacccauuagau

SEQ ID NO: 4112801 - RNA, 77 nt, Human
gucuguuacuguuuuuuagacucaugguuugauuauuaaaccccugauaggagucauagucaaggcaggaaacagau

SEQ ID NO: 4112802 - RNA, 69 nt, Human
gucuguucaguaagucagucauuuuugagccaucaugauuuucauuccuuuucugauuuauuagcagac

SEQ ID NO: 4112803 - RNA, 76 nt, Human
gucuguugaguguauggaagugaaggauuggccaggcacaguggcucaccccuguaauuccagcacuuagcgagac

SEQ ID NO: 4112804 - RNA, 70 nt, Human
gucuguugcauuaaucugcucaggcugccaugacaaaaaucucacagacuggguggcuuaaacaagagac

SEQ ID NO: 4112805 - RNA, 126 nt, Human
gucuguuggauuuugcucagagcugccuuaugcacuugggauuucagaugcugugcaauaaaacuuugccaguuucccaggaaugcauuauaggagagccagccuacuuaagggcgaagucuggau

SEQ ID NO: 4112806 - RNA, 61 nt, Human
gucuguugguuauacaucaacucaguaaauacuuacagaacaacaagguggaccagcggau

SEQ ID NO: 4112807 - RNA, 70 nt, Human
gucuguuucagaacaccccauuugggguauauaaaauguaugcugccagcaggaguuucugagacaagau

SEQ ID NO: 4112808 - RNA, 71 nt, Human
gucuguuugacuuuguaagucuuucuccaagauauggcauauauuuuggagcacugcaagguugaguagac

SEQ ID NO: 4112809 - RNA, 74 nt, Human
gucuuaagugagccaguggaagauggcaguuuauucaugaauuguugguuaucugcugcuuaacuacuuaacac

SEQ ID NO: 4112810 - RNA, 93 nt, Human
gucuuaauaacugaccuccauggaggucugugauuagcacugggggacauaaucuucuugggccaaggcagaucuccaaagggcaaaggagac

SEQ ID NO: 4112811 - RNA, 60 nt, Human
gucuuaccucugcuccaugaugucuggggccucaacuggagcacaugagggcugagggac

SEQ ID NO: 4112812 - RNA, 67 nt, Human
gucuuagcaugucagcaccggguuuauaacaccuugaugguguaauccacacaucuggcaugugagc

SEQ ID NO: 4112813 - RNA, 117 nt, Human
gucuuauccauaaugacuauucaaaugaaaaguacaacaacagcugcuaaagaguugguaagaaguggugauucaagauugguuagcuguuaguuuacauagucauuaaaauaagau

SEQ ID NO: 4112814 - RNA, 86 nt, Human
gucuucauaaugacugugcuauuguuuauuuugaaucuacuaaacacaguugauauguaauaugcaaugccacaggggauggggac

SEQ ID NO: 4112815 - RNA, 80 nt, Human
gucuuccacuuagauucaguaauuguuaacauauuagcauauuugugucagcaugugacaauauuuggucuuauggagac

SEQ ID NO: 4112816 - RNA, 79 nt, Human
gucuucccagagagugcucagcuauuggugaagcaggcaucgucuauucuucaagaagacagcagagcaucaggaaaac

SEQ ID NO: 4112817 - RNA, 62 nt, Human
gucuucccuuggugaacagagcaugacucaugucuaugcagucuaagcauguaaggguugau

SEQ ID NO: 4112818 - RNA, 71 nt, Human
gucuucuuaaauguuggcauuggaggccgggcacaguggcucacgccuguaaucccagcacuuugggaggc

SEQ ID NO: 4112819 - RNA, 59 nt, Human
gucuucuuccuguguucuggugaaggcacaauguauuaaugaggaagcaggaggaaggc

SEQ ID NO: 4112820 - RNA, 58 nt, Human
gucuugaauaaguuucaugagcugccuuaugcauuagcucuuguuuuuguuuaaugac

SEQ ID NO: 4112821 - RNA, 77 nt, Human
gucuugacaucauuucuaguuccugucaucaaccugggcacuguucaaacuuggaagaacaagaaaugagucagggc

SEQ ID NO: 4112822 - RNA, 59 nt, Human
gucuugacuugaaaauucuucagggucauagaggccuaaguauuuucaguguuaacgac

SEQ ID NO: 4112823 - RNA, 67 nt, Human
gucuugcagagggcccuucugcugcagacccagagccuugcaguagcuuccugaccucuugcaaguc

SEQ ID NO: 4112824 - RNA, 58 nt, Human
gucuuggagacuaccugaacuuguaguugaugucacaaaugaggguggucuuggagac

SEQ ID NO: 4112825 - RNA, 62 nt, Human
gucuuggaggguuguuguuuugaagcugcugacacccucaugcaacgauccuccaaauggac

SEQ ID NO: 4112826 - RNA, 128 nt, Human
gucuuggcugugugaaguuugagaggcuuaauagacaucuugguggagcuuuaaagcaggcaguuugauacauaaggcuaaaguucuggggguguuucugggcuggaugauguuuacagccaaaagau

SEQ ID NO: 4112827 - RNA, 58 nt, Human
gucuugggaucaccuccuggcuuguccaucaucaucaaguacuuugggauucuaggac

SEQ ID NO: 4112828 - RNA, 83 nt, Human
gucuugugucagaacuuuuacaguacagaaaauaacagaauagccuucuguaaugaggcguuuguuagaguuuugcaugagau

SEQ ID NO: 4112829 - RNA, 89 nt, Human
gucuuguuagaacccaggcgugguugaggcgagcauagcacagagcuggcugaguuucaugcaucaugcacugaagggguuucagagac

SEQ ID NO: 4112830 - RNA, 70 nt, Human
gucuuuauauguuucuuacaaaauauuacguacauacauggugcagaguugaggaacauguuugggaggc

SEQ ID NO: 4112831 - RNA, 85 nt, Human
gucuuuaucuucuguuagcuaaaaugcaauguagugugcuguguacaaggacaugcaauuuggauuucuaaaagaguauuuggau

SEQ ID NO: 4112832 - RNA, 67 nt, Human
gucuuucaggaucaaaugaaaucgucuucugugucagcugaauacgagcucccuugaccugaagccc

SEQ ID NO: 4112833 - RNA, 88 nt, Human
gucuuucgggggccagauggucaggguaagucugugugcucaaguuagagauguggauuugggagugaucagggcucaauagaaaugc

SEQ ID NO: 4112834 - RNA, 80 nt, Human
gucuuucuccacauccucuccaacacuuauuuuuugaaauguucucaggagaaaccuguaaggaaggaagugagggaagc

SEQ ID NO: 4112835 - RNA, 60 nt, Human
gucuuucuucaugucggcggcucucgggggccagccuccgcccgcacguauggaguggac

SEQ ID NO: 4112836 - RNA, 65 nt, Human
gucuuucuucauucugguuccucagaggcauuuuaguaucauggaaacucagagaugaaaaagac

SEQ ID NO: 4112837 - RNA, 86 nt, Human
gucuuugaaggugaugauuuaugaagugaccacauugaaucuucucuuggaauaaguguuuauggaaucuuaguuaucucaaagau

SEQ ID NO: 4112838 - RNA, 68 nt, Human
gucuuugaugucaguucucacuuacauaaaaauauuuuuagguaggccagaacuagaggucuaaugac

SEQ ID NO: 4112839 - RNA, 82 nt, Human
gucuuugcuauugugaauagugcugcaauaaacauacaugugcaugugucuuuguagcagcaugauuuauaaucguuugggc

SEQ ID NO: 4112840 - RNA, 56 nt, Human
gucuuugcugauccagaaacccagagcugagcuuugggguuggcaagagcagagac

SEQ ID NO: 4112841 - RNA, 78 nt, Human
gucuuuggcugcucuuuugguuccccgcuaucagcuugaauuuuuugagagcaggguuccaggaguugcagaaaaggc

SEQ ID NO: 4112842 - RNA, 62 nt, Human
gucuuuggcuuagcuaauaucucauccccugggaaaagugauuggucuaaaguuaagaagau

SEQ ID NO: 4112843 - RNA, 56 nt, Human
gucuuuguucugucacuaaaaaugucuuuacugcauauaugugacagacaauaggc

SEQ ID NO: 4112844 - RNA, 72 nt, Human
gucuuuuacauuuguuauagaaaugaagccguauaucuaaugcaucacuggcugcugacagaugauaaaggc

SEQ ID NO: 4112845 - RNA, 99 nt, Human
guuuccagcucuaguaguaguaguaguagcaguaguagcaguagcaguagcagcaacagcaacuccugcuucugaguauuuacuacaggcaugugaagc

SEQ ID NO: 4112846 - RNA, 64 nt, Human
guuuccagcucuuagcaaaggcagaacaauaaaacaucaaggaugucuuucuaaggcugcaaac

SEQ ID NO: 4112847 - RNA, 64 nt, Human
guuuccaggagaaagagagccuugaagugagucuucaaggaaacuagaaguuuuccugguaaau

SEQ ID NO: 4112848 - RNA, 101 nt, Human
guuuccuaagccucaauauucugauuuauucauuguucacuaaauuguccauuguauacuaggcacuguggauaagucagagauguaugaggauugcuaac

SEQ ID NO: 4112849 - RNA, 70 nt, Human
guuuccuacacuguaguauuaucuaguccaaaaugugaauaugcugagguuaaagcugaaguuaggaaac

SEQ ID NO: 4112850 - RNA, 79 nt, Human
guuuccucauuccugguggcaucuugagaugguuugguaacauccaagcugugcagauguuaccacggagcauggaggc

SEQ ID NO: 4112851 - RNA, 72 nt, Human
guuuccucuccuuaaagcuguuagaguaguaagagugccccuuuuaguagacagcuuugaugaagauuaaau

SEQ ID NO: 4112852 - RNA, 59 nt, Human
guuuccucucuugcaguccaggaggaccuucgaggccccuggcuguuugagcggggaau

SEQ ID NO: 4112853 - RNA, 57 nt, Human
guuuccucuuauaagcuguucuagggagggacguccuucaguuucagggcaggaaac

SEQ ID NO: 4112854 - RNA, 57 nt, Human
guuuccuggaaacugcuccacuccucccuuuggaggcagcauuuuaugguaggaaac

SEQ ID NO: 4112855 - RNA, 114 nt, Human
guuuccuuugcuagaaaagcccaggugucuggacagugagccagguguacucccauuguuagguucagcugccaguuccugcucuuggugcuacuacuugaacccagaggaagc

SEQ ID NO: 4112856 - RNA, 75 nt, Human
guuucuaauuggaaaagcacagucagaauauaaagagaaucuugcuuuucacugaaguuucuuccauguagauau

SEQ ID NO: 4112857 - RNA, 69 nt, Human
guuucuacucucagaagaaucagcagcuauugccaauguccauuuagcugccagucuucugaaagaaac

SEQ ID NO: 4112858 - RNA, 72 nt, Human
guuucuagaaugugaaaauaguaaccuggcuaguuaauuuaauuaaguccuugguaauuuucuuuuagaaac

SEQ ID NO: 4112859 - RNA, 68 nt, Human
guuucuaucugucaugccacaggacuuggaaaauaauuucauacuguaacauguaugggcuaagaaac

SEQ ID NO: 4112860 - RNA, 68 nt, Human
guuucuaugguauuacagcauuccauauuucugcaaguguuaauaggaauuuguaaugcuuggauaac

SEQ ID NO: 4112861 - RNA, 79 nt, Human
guuucuauuuuaaaaauaaaccuguccuacucauucuuggagucaggugugggaacuacagguuuuuaauggaagaaac

SEQ ID NO: 4112862 - RNA, 82 nt, Human
guuucuauuuuugcuuucaucuguguucuauuucgauauagucauuagagauaacuugaacauggagaguaaguagccuagc

SEQ ID NO: 4112863 - RNA, 83 nt, Human
guuucucagcuguugaaaguagaugcuauuuggugggaaacauucuaaauacucaaauguucacuugcauggcacugaggaac

SEQ ID NO: 4112864 - RNA, 113 nt, Human
guuugaaguguauuuuuaggaauguagauuauuuuuaggaauguagagguaaggaggcagcauccacauuucauccauuaagaguacucuccauuuuuaaagauguuucaagc

SEQ ID NO: 4112865 - RNA, 72 nt, Human
guuugacauuaguacuuuuacagcaggugacuccucuugucaaauugcucuuuaaaaguacuguauucaaau

SEQ ID NO: 4112866 - RNA, 61 nt, Human
guuugagaaccauugaagggagaggcuuuuauucuuuuacuucucccugcccaucucagau

SEQ ID NO: 4112867 - RNA, 75 nt, Human
guuugaggagguauaguaagauuugggcauuuugaacuuacagugcuggagcaacauuauugugccuuguccaac

SEQ ID NO: 4112868 - RNA, 79 nt, Human
guuugaggggcuuucuguuguauuuuuucccuuccauauuugagagaaacacagguacugcagaagugguucagcagac

SEQ ID NO: 4112869 - RNA, 85 nt, Human
guuugcaaccuugacuauaaaaaaugugcauuucuaguacgcaccuucagagguucacauuuaauugguuuaggguggagcaggc

SEQ ID NO: 4112870 - RNA, 65 nt, Human
guuugcaccauuucacuuccauuaaauauguaagcaggguuaaaggacuguggguguguggaaac

SEQ ID NO: 4112871 - RNA, 56 nt, Human
guuugcaccccuugauugagccuucuuauggaaagugaggcccagagaggugaagc

SEQ ID NO: 4112872 - RNA, 66 nt, Human
guuugcagaugaucaagaauuuuguauuccagcaggaguucaaaucuuuuggaucuucucgccaac

SEQ ID NO: 4112873 - RNA, 62 nt, Human
guuugcagcaagaugugagcauuagaagaaaaauguuagacucacaucuauguuaagcaaac

SEQ ID NO: 4112874 - RNA, 64 nt, Human
guuugcauauuugcacaggaauauaagcauuuguuaauugguuucuguguugauauauacaaau

SEQ ID NO: 4112875 - RNA, 55 nt, Human
guuugcauugaaugcacauuuuuauaaaguacugugaaaaugaaauagugcaaac

SEQ ID NO: 4112876 - RNA, 64 nt, Human
guuugccugucuaaauugccaagcuuuuugauaaagcuggcagugugaaugacaagccgcaaac

SEQ ID NO: 4112877 - RNA, 64 nt, Human
guuugccugugauguacauuucucaugaaguuaccugggauaugcuacaccaacacaggggaau

SEQ ID NO: 4112878 - RNA, 68 nt, Human
guuugccuuucuggugaagauaccaugcaugauaacauuucaacuuauuagggccaggacuggcaaau

SEQ ID NO: 4112879 - RNA, 84 nt, Human
guuugcgcaugggcaguggggggacguuggucacuuugugguaucguugcagauggccaggguccccugcaccacggcgucugc

SEQ ID NO: 4112880 - RNA, 81 nt, Human
guuugcugacugaauacgcgaagaaggaccugaugggcucauaugcaccacugccaucacaguccccaucgugaugcaagc

SEQ ID NO: 4112881 - RNA, 67 nt, Human
guuuggaacagaaagcaauuuaacacagcaacuaauagcaugggcucuagauucugucuguccaaac

SEQ ID NO: 4112882 - RNA, 88 nt, Human
guuuggaaugcgggcuugucagccaauuguggauuuccuucuaaugcuggagagaaaggcucagaugaggcccuggauucuuccagac

SEQ ID NO: 4112883 - RNA, 61 nt, Human
guuuggacagaaauacaucuucacuugaguaaaagguucaagaguuuaauuuugucuagac

SEQ ID NO: 4112884 - RNA, 57 nt, Human
guuuggaguagaaaaaauacuccaaaacacaggaggaauuuguuucuacucucugac

SEQ ID NO: 4112885 - RNA, 84 nt, Human
guuuggauggugcuggguagaauuggagccauuuuggaccuggagccagguccccuggcaccuaguccuacuccacugccaagc

SEQ ID NO: 4112886 - RNA, 62 nt, Human
guuuggcucauucuacucucccugggucuuauugacuuucagggagccuagaagagcuggac

SEQ ID NO: 4112887 - RNA, 62 nt, Human
guuugggaaggaauuccaagacuaaagugaaugacacuuaagcaaaauauucuuucacaaau

SEQ ID NO: 4112888 - RNA, 86 nt, Human
guuugggaccaguaaguaggaauuaugaugcuaucaagguucucguccauggcaaugacaucauuucuaguuguaugaucacagac

SEQ ID NO: 4112889 - RNA, 77 nt, Human
guuuggggaauauuguggggugauuugccacggggguugugccucugucugccuguguccccaccucuuccccaaac

SEQ ID NO: 4112890 - RNA, 63 nt, Human
guuugggggcugguaagauagcaaagauuucccuuguugauguucucuuguccaggccuuaac

SEQ ID NO: 4112891 - RNA, 58 nt, Human
guuugguagcagcaaagcccaggagcacauuuccaaagaggcugcugguuacagaggc

SEQ ID NO: 4112892 - RNA, 93 nt, Human
guuuggucaguaaggaaguagguuauagggugaucacagaauauuauuuucaucguuuuuguacauucugaaucuguccuugccggcacgaac

SEQ ID NO: 4112893 - RNA, 113 nt, Human
guuugguggaauacacacguuucccaaggcagggauuuucugcugcuuuguuuacuacucuuaucugcagcagcuagaauagugccugguacagaggagguguucuguggaau

SEQ ID NO: 4112894 - RNA, 99 nt, Human
guuuggugugugacaaagaguuggcaguugaaacuuuuuuuauguauuaacaugcaaaaauguuaucuacuguccgaacuauuccacaacauaccaaau

SEQ ID NO: 4112895 - RNA, 97 nt, Human
guuuguaauuuauuguucaguccacaacgcuaaucaugcugcccuagacacaacagaugaucaauaaaaggcuggcuggaugaauggauuaauuaac

SEQ ID NO: 4112896 - RNA, 55 nt, Human
guuuguaguuuuguguaguuugguacaauuaaacuuugcauaacuaacuacaggc

SEQ ID NO: 4112897 - RNA, 73 nt, Human
guuuguauucccaggcuccacccaaaucucccaaggcugugagagugagauuuguugugagcaggaauagaac

SEQ ID NO: 4112898 - RNA, 66 nt, Human
guuugucacaucuuggauuacaauuuuacuuggucaaguaaaauuguaagccaagaugugaccaau

SEQ ID NO: 4112899 - RNA, 106 nt, Human
guuugucacugcaacuuuucucuucccacuuucuguauuuuuuuaagaagcuaggagccccucagguggaaaucgggaaggacgaggaagguaugcugugcugagc

SEQ ID NO: 4112900 - RNA, 62 nt, Human
guuugucaugcuuuccuuauggacuucugguuaugccuccuuaaggaugugggcugagggau

SEQ ID NO: 4112901 - RNA, 66 nt, Human
guuugucccacuucuggcagaacugugcccaccugacucagagauuccccggcaguguggacagac

SEQ ID NO: 4112902 - RNA, 87 nt, Human
guuuguggaugagauaacuguagaagaauaacacaaagauuaaaauccagaauaauugugcaaguuucuaagguuuuuaucugcuac

SEQ ID NO: 4112903 - RNA, 93 nt, Human
guuuguguuuguuguuuuuugaaauguaucaguauaggugucaggcauuuuacugucuauucacucacauuucuuuauuugacaaauauuuac

SEQ ID NO: 4112904 - RNA, 87 nt, Human
guuuguucugugaccuucuccucuugcauucuaucccuccaggcacugaccugcugggucuaugcaaguggagcacuuagaauaagc

SEQ ID NO: 4112905 - RNA, 70 nt, Human
gucuuuucccucuuucccagguaacucauaugccucccagauguuuauauuuggaaagagggaagaagac

SEQ ID NO: 4112906 - RNA, 65 nt, Human
gucuuuugucagggaucagaucgguaucgggaccuccugcugccuuugcauuuccugcaacugac

SEQ ID NO: 4112907 - RNA, 62 nt, Human
gucuuuuuauuauagaguggaggaaaucccaguggucuucuugacucauuaaaugagaagac

SEQ ID NO: 4112908 - RNA, 57 nt, Human
gucuuuuugugccauuccuuuuggggcccaggaccuaagcaggaacuucaaagggac

SEQ ID NO: 4112909 - RNA, 61 nt, Human
gucuuuuuuacaccuuacaucagaagcaccaugguaugguggauuuuggugucagagagac

SEQ ID NO: 4112910 - RNA, 86 nt, Human
gugaaaagguuagaguagugggagauguuacaugucucugagagucagaggcccaguuauccuacuuguuccccgaucuuuugcac

SEQ ID NO: 4112911 - RNA, 64 nt, Human
gugaaagagaaaaugaucuguacaugcagauauggauguagcagaagauguuuuccuaaaucgc

SEQ ID NO: 4112912 - RNA, 62 nt, Human
gugaaagagaaaaugucagacuuggucgcaaaagugaaaaggggugauauuuuugaucucac

SEQ ID NO: 4112913 - RNA, 66 nt, Human
gugaaagcacugaacaaaguaacaaaagugcugagaaguugugcuuugugacagauuaguuuucau

SEQ ID NO: 4112914 - RNA, 76 nt, Human
gugaaaguuccuagagccugccucuagucucuagagggaaaacugagggaaaucuauagggagguacgagcuguac

SEQ ID NO: 4112915 - RNA, 93 nt, Human
gugaaauccaaggaaacucuguagaguauaccaaugucaauuuccggguuuuaauauuguaucuacuucuauaagauguuaccuggggaaaac

SEQ ID NO: 4112916 - RNA, 112 nt, Human
gugaaauccccuaaauugcuauucuucaguauguguggauuguuccagguccuugccuaucaauuuguugacaucuagaaaauagcuugcugaauuuugauugggauuucau

SEQ ID NO: 4112917 - RNA, 60 nt, Human
gugaaaugauggauaugugaauuugcuugacuguggugaucauuucucuauguauuucac

SEQ ID NO: 4112918 - RNA, 67 nt, Human
gugaaauggaacugcuaauaauaguugcuucauaaggugauagcuauuguugguaguuacccauuac

SEQ ID NO: 4112919 - RNA, 85 nt, Human
gugaaauguguaucuucucucuuacugccaugcugucagguagaaagccagugguaugagagaaaaggcaguuacacaguguuac

SEQ ID NO: 4112920 - RNA, 67 nt, Human
gugaacaggagguggagauaugcaggaaaaagcccccauaaacuguuucuaugucuugugccuucau

SEQ ID NO: 4112921 - RNA, 61 nt, Human
gugaacauugaggcagaaaggaaacuggccucaccagacucuuuuucauccucaauucuac

SEQ ID NO: 4112922 - RNA, 72 nt, Human
gugaaccagaaggaaucugagcugagggccugccaagccauucuccagcaucagauuucuuccucggcucgc

SEQ ID NO: 4112923 - RNA, 56 nt, Human
gugaacuaaggauucaaacuucagauuucaaaguccaaagugaaugcuuuguucac

SEQ ID NO: 4112924 - RNA, 62 nt, Human
gugaacuauuggguaucauaaaagcacuuagugugcaccagucuguguucuaaauaguucac

SEQ ID NO: 4112925 - RNA, 99 nt, Human
gugaacugagacagaaucagggaacaagaugagaauggaguuuguggacagagaauucagccugcggucuugucacccauguccuugugcucagauuac

SEQ ID NO: 4112926 - RNA, 76 nt, Human
gugaacugcaggaccuauaaauauauuuuaaacauguuuuuaaaauguagcuucuaggcugggugcaguggcucac

SEQ ID NO: 4112927 - RNA, 115 nt, Human
gugaacuugaacuagaaggaaaggauuuucaauagcauaagaugucaaauagaagaggcuuuuuaauuucuuuaugcuggguacaugauaguucuuuacucucagccauucucac

SEQ ID NO: 4112928 - RNA, 78 nt, Human
gugaacuugcugugugccaucagggcuguauuugaaauaaaauucuggccugagaauggaacaguuagcauuguucac

SEQ ID NO: 4112929 - RNA, 77 nt, Human
gugaacuuggacuuggugaccauagaguagaguuuccuucuuguccaaggaauagcuuuggucaccaucuggagcac

SEQ ID NO: 4112930 - RNA, 63 nt, Human
gugaagaaagugaacguguucaguuuacauuuguaagguagaccgugcguucccuuuuuacac

SEQ ID NO: 4112931 - RNA, 61 nt, Human
gugaagacagugugucaggcagguguuguuguacaucuggcuagcuaucauugugauucau

SEQ ID NO: 4112932 - RNA, 57 nt, Human
gugaagaccagggaacgcuggcuuuggugaagccaguccugccacccugucuaucau

SEQ ID NO: 4112933 - RNA, 80 nt, Human
gugaagauucaauuauauagaagagacaugugcauagcaguuacacguggcuguucauuccuucuguaccuugccuucac

SEQ ID NO: 4112934 - RNA, 61 nt, Human
gugaagcacaugggcguuggguuugcucaucacaagcugccugcugcugaugcuguuucac

SEQ ID NO: 4112935 - RNA, 81 nt, Human
gugaaggacagggcagccucucagccuaggugacagagggacagugucgcuggggaccacacugagcugcgcugcuggcac

SEQ ID NO: 4112936 - RNA, 55 nt, Human
gugaaggagcuacugcucugggugcuaacagcagacaccagagcuggcuccucgc

SEQ ID NO: 4112937 - RNA, 82 nt, Human
gugaaggauguccucuggggugagugggccacuuuagggcccuggugggaguggcuugcucugccucagccuccaccuucac

SEQ ID NO: 4112938 - RNA, 58 nt, Human
gugaaggcagugaaugaaacagaggcuuccaaggccucgguguguucucugccaccac

SEQ ID NO: 4112939 - RNA, 114 nt, Human
gugcacugggcggugaggacucgaacgagcucgucccggggcuggcgcacucacuucggagaaaccccugcucccgggacgcguucacuccggccgcgcaggcagcccgggcac

SEQ ID NO: 4112940 - RNA, 81 nt, Human
gugcacugggguggacagagcccugggccgggagacauuugucgugggcucuggucccagcucugccaccaauucuuguau

SEQ ID NO: 4112941 - RNA, 55 nt, Human
gugcacugucuggucaagagcaguguccaugugcguuucuguggcagcagugcac

SEQ ID NO: 4112942 - RNA, 121 nt, Human
gugcagaagugacuuagaugugauagcggcuugguccugcucuggcccagguuuguaccagcuauagaaaugagccaugguagagccuaaaguagcaugaucacuggagaaaauucugcgc

SEQ ID NO: 4112943 - RNA, 114 nt, Human
gugcagacaguacccugggcuguggcagcauccgcccggcacccuccagcgugcuuuagcugaaggagcuggggucgggaaggucccugcaguacuugggucuuaugucuguac

SEQ ID NO: 4112944 - RNA, 76 nt, Human
gugcagagagagggagucugugcaaagaauucuccgcacuugagagcuuccaagcauuucccucgugucuuuguac

SEQ ID NO: 4112945 - RNA, 59 nt, Human
gugcagagaggaccuuggggaggacccacgaagcuguccuuccccaggcuggucuguau

SEQ ID NO: 4112946 - RNA, 68 nt, Human
gugcagagcucaggcagaauccaguugcccaaaacagucaggcacuuucuguuccucuagcuuugcau

SEQ ID NO: 4112947 - RNA, 58 nt, Human
gugcagaggcugagaaacccucuucugugggauaaaggcaggagaucagucugggcgc

SEQ ID NO: 4112948 - RNA, 83 nt, Human
gugcagaguguugcuagaugcccucgcugcuguuuucuuuugcccaggucuggugggggaggcugucuagcagggcuucgcau

SEQ ID NO: 4112949 - RNA, 80 nt, Human
gugcagauucugauuuuacaccucuuguuucuccuuugcagaggcauguaagaaucagucuuuaaugucaacaucugcac

SEQ ID NO: 4112950 - RNA, 62 nt, Human
gugcagcaaacuagugcgagggucaugucagcucccuauuuucuaucucuaguccgcugcac

SEQ ID NO: 4112951 - RNA, 77 nt, Human
gugcagcaauuugcaguaauuuaugguuguuacguaagaucuuuaagccuugagucugugcuguaauuugucugggc

SEQ ID NO: 4112952 - RNA, 69 nt, Human
gugcagccaccauggguucucaccuuuaucuuuacagcaaagcagaaaguggcccugguguggcugcac

SEQ ID NO: 4112953 - RNA, 59 nt, Human
gugcagcuuuaaacauuggaaauauggucauauggcccuauuucuauuauuauggccac

SEQ ID NO: 4112954 - RNA, 55 nt, Human
gugcaggagccagggguaggaacauuuacuaacaugagccacccaggacuuggac

SEQ ID NO: 4112955 - RNA, 68 nt, Human
gugcaggcaggagaggaggauuucuggaauuucuaaaguuggcaggagucugccuguucuaccugugu

SEQ ID NO: 4112956 - RNA, 62 nt, Human
gugcaggcucucuccuaguccuugccucauaccugaaguuacuagggacugagaguaaacac

SEQ ID NO: 4112957 - RNA, 55 nt, Human
gugcaggcugggaagagggacaacuuccaaguccucccuaaauccuagacugugc

SEQ ID NO: 4112958 - RNA, 57 nt, Human
gugcaguaggauuuaucagaggacaaauguuuguuccucugugacuucuaccuucac

SEQ ID NO: 4112959 - RNA, 58 nt, Human
gugcaguggggggaccuccagaaugccuuggcuucuuggaagucguccuuccacacac

SEQ ID NO: 4112960 - RNA, 62 nt, Human
gugcagugugcaaccuccuguguuuggaauuagcaggcccagggguaaggcgcagcgugcau

SEQ ID NO: 4112961 - RNA, 89 nt, Human
gugcaguuagaggguuuccuaugaagaguaggauuagauaguacugcuucauuauuccaguucaccuuuucaucauucccuucacucac

SEQ ID NO: 4112962 - RNA, 69 nt, Human
gugcaguuuaaacuuggcaacuugaugcccugguguucccugggggaguuagggaguuuauauuugcac

SEQ ID NO: 4112963 - RNA, 58 nt, Human
gugcauagcaagcguucccaagccacuggcagugugaccuugcuacguugcugugaac

SEQ ID NO: 4112964 - RNA, 56 nt, Human
gugcauauuuugcacacagauguguugcacauuugugcaugugcaaacgugugcac

SEQ ID NO: 4112965 - RNA, 55 nt, Human
gugcaucagaguguccuagacaaggggguagcuuggccuauugcucucugggcac

SEQ ID NO: 4112966 - RNA, 118 nt, Human
gugcaugaucauggauagaucaaagugugguugcaagugaaaugggauaaaugacaaaaugacaguuuuauaaaguuaagccugaaucacauuaauucuguaucuucuagacaugcac

SEQ ID NO: 4112967 - RNA, 67 nt, Human
gugcaugccauaaugcuuaauucaauacuguguccauggacgcugguucuaaguguuuggugggcac

SEQ ID NO: 4112968 - RNA, 65 nt, Human
gugcauuaggcuggaauguugauaugcgaaggauuuguaaagaaauauauuucuaguuagugcau

SEQ ID NO: 4112969 - RNA, 86 nt, Human
gugcauugcccaccucacuccaguccugguccugcccuagagaaacccagcuccuggaucugggguagagcagugggccaaggcau

SEQ ID NO: 4112970 - RNA, 74 nt, Human
gugcauuuccuucucuaucuuuggcacaucaggucaaacuccuguguucccagagaaugaggaaugaagugcau

SEQ ID NO: 4112971 - RNA, 57 nt, Human
gugccaacaaugagaagucacucucuccagccaggauuucccucauuguguuggcac

SEQ ID NO: 4112972 - RNA, 84 nt, Human
gugccaauaauauuuuuaaaauugcuauacauguggaagaaaaauucuuucaagucaauuuuugaaugacuguuuguuagguac

SEQ ID NO: 4112973 - RNA, 76 nt, Human
gugccacaauuucugggcaguggcucagguaugaaaguucucaugucaaaugcaucuguccaguaauuccuggcac

SEQ ID NO: 4112974 - RNA, 56 nt, Human
gugccaccaguagaucugcaaguugagaaaagcagcucaggugacacacguggcac

SEQ ID NO: 4112975 - RNA, 60 nt, Human
gugccaccauagcuucuggauuguauuuauaauccacucuaagaucuguggugcuagcac

SEQ ID NO: 4112976 - RNA, 72 nt, Human
gugccacguugcuuuccccgggucugccaggaccgcucaaaggccuguguccucagggaagcagagaaucac

SEQ ID NO: 4112977 - RNA, 64 nt, Human
gugccagaguuugaggacaauuuuguaugacuuacugguuccauucuguuguucuugucugcac

SEQ ID NO: 4112978 - RNA, 66 nt, Human
gugccagauauugucuguugguauagagaccauucugaccuuucugugcucuucucaguaucacac

SEQ ID NO: 4112979 - RNA, 82 nt, Human
gugccagccauggcugauuugagagaggguguuuauaucccagugguguagaaagcucuucugaaauccagaggccgggcac

SEQ ID NO: 4112980 - RNA, 59 nt, Human
gugccaggagaggcccuggccugggaaggccccuuucucccagggcuggcuccugggau

SEQ ID NO: 4112981 - RNA, 75 nt, Human
gugccaggcaucuuuauaagacuguagugaguauuagcauaauuaauccucgcaauaauccuauuaguuaggcac

SEQ ID NO: 4112982 - RNA, 67 nt, Human
gugccagggccuguccgcucccgcccgccugcacgagggcccgggcagccgggucagccgcuggugc

SEQ ID NO: 4112983 - RNA, 73 nt, Human
gugccaguucucauaaaugacagagaagcuuucaggauagaaauccugggaguaauugagucaugauuggcac

SEQ ID NO: 4112984 - RNA, 80 nt, Human
gugccaguugcuauuugguaccacacucuacaaaagcuuaauuacuuuacuugaugcugguugcuaagcagcgauuguac

SEQ ID NO: 4112985 - RNA, 73 nt, Human
gugcccaccaguuucuuaggaaauuuuacuggucugggcgaagcccaggacuugggaauuuucauggaggcac

SEQ ID NO: 4112986 - RNA, 66 nt, Human
gugcccagcagguccauguuucuaucccggagacccuuggguuaggaaauauugauugcucuguau

SEQ ID NO: 4112987 - RNA, 71 nt, Human
gugcccauucccaccagguaugugccaugugccugcaugcacaggggcacauguaugugggagugugccac

SEQ ID NO: 4112988 - RNA, 80 nt, Human
gugcccauuuaaaauguagguuucugacccacccaguggcgucugagucaggguccuggaaucugcauuuuaacaagcac

SEQ ID NO: 4112989 - RNA, 56 nt, Human
gugccccuuugccugauuuaaauaucuacucaauauuuuccuggcaacaggggaac

SEQ ID NO: 4112990 - RNA, 84 nt, Human
gugcccgagcaagucagcaggacucagauuugcuugcaguuguuagccaagcugaucuccugcugacacguuuagcucggggac

SEQ ID NO: 4112991 - RNA, 73 nt, Human
gugcccuaguucacaggguuaggaaucacuauauuauuuaguugguaauuuuccuuucuguggcuucuggcau

SEQ ID NO: 4112992 - RNA, 97 nt, Human
gugcccugucuagggcagggguauuuuuagagcuggcugcacacuguuuacaaggaagccagucccuugagcgugcccucgcccuacagggaaacac

SEQ ID NO: 4112993 - RNA, 57 nt, Human
gugcccuuauaaacaaggcuucagagagcuuuugccccuucugccaugugagggcac

SEQ ID NO: 4112994 - RNA, 67 nt, Human
gugcccuugaggacagcucccagggaagccaguuccccacugccagcuuuguccuccccagggguac

SEQ ID NO: 4112995 - RNA, 57 nt, Human
guucugagggagguucucugggaacauauuagguucugagggaaguucuuugggaac

SEQ ID NO: 4112996 - RNA, 89 nt, Human
guucugccaaauagacugaaaccaugcuagcaucaaaauguuagugauucugugcauuuugaucauggucucuguauuugcugaggaac

SEQ ID NO: 4112997 - RNA, 67 nt, Human
guucugccuuugauuguuuaaauguggggccuggaaacucagaauuuguucacaaucagggcagggc

SEQ ID NO: 4112998 - RNA, 68 nt, Human
guucugcuaugugaggauguaaccagaagucagcagucugugaccuggaagaugguccucaccagaac

SEQ ID NO: 4112999 - RNA, 72 nt, Human
guucugcuucuccacugugaggagacguggccccacggugggguugccaccucagcauggcaggagcccagc

SEQ ID NO: 4113000 - RNA, 64 nt, Human
guucugcuugauuuccccucgucuguuuuucuccaggaaguagaccagguugaccagguaggac

SEQ ID NO: 4113001 - RNA, 77 nt, Human
guucuggauguuucuagggaugguagguacaaacauaauguuuuagcacacuuucuuuagcgacaacaucauagaau

SEQ ID NO: 4113002 - RNA, 76 nt, Human
guucugggaagauucagacaugguccuugccccccagaguaaaggggggcaaggacucccugggucauucuaggau

SEQ ID NO: 4113003 - RNA, 93 nt, Human
guucugggaggcugaggguuagagagucaaagagcgagagagagcaacagccuauugagcaaugacuuucuggacuuucacuuguuaagguac

SEQ ID NO: 4113004 - RNA, 89 nt, Human
guucuggggauauaauucagaccuucgcuuuuaauuuccugaaaccaauuucagaauagcaaagcaagcuagauuauuuucugccaaac

SEQ ID NO: 4113005 - RNA, 90 nt, Human
guucugguggcacaccucugucugcccucacaugcacucuucccaacagaaguuaguagcagagagggcagccauguaagucaacagagc

SEQ ID NO: 4113006 - RNA, 66 nt, Human
guucuguagagagugcaacuuugcuguuagucaaacugcaaauguggcuuccuuucuagcagcugc

SEQ ID NO: 4113007 - RNA, 59 nt, Human
guucuguagugggaaauaguaaaaggauucuucacucccuuuucuuuuccccucagcac

SEQ ID NO: 4113008 - RNA, 76 nt, Human
guucugucacugaaccugaaccaauacucagauuggcaaaucuauuagagaaaugaugguuggguucuggcaagac

SEQ ID NO: 4113009 - RNA, 70 nt, Human
guucugucccucuagagaaccauaacuauuacagacuuugguaccaggagugguucuagagaaacagaau

SEQ ID NO: 4113010 - RNA, 76 nt, Human
guucugugcauagaguauauaggccuuuguguacacagaguacacagacauuuguauagcucugugcagaguagac

SEQ ID NO: 4113011 - RNA, 75 nt, Human
guucuuaaacugguagcaauuuaagggugguugauguauaaccuuuaaacaaauugaugcaagcuuuuuaagaac

SEQ ID NO: 4113012 - RNA, 72 nt, Human
guucuucaaagugcauaauaacucccaaguugcaguuuaagcagugggaaauuagaaugaauuacggagaau

SEQ ID NO: 4113013 - RNA, 56 nt, Human
guucuucaggcugagcagagaggcuccuguacccucucucucggaaucugaagagc

SEQ ID NO: 4113014 - RNA, 125 nt, Human
guucuucauccaguuuagggguggaccugaugucccugaguguauguggugaaccugaauuugccuuggguuuccucauauucauucaggagugucaguugccccuucacgcgacguuggagagc

SEQ ID NO: 4113015 - RNA, 74 nt, Human
uacaaauauucugggcuuuuauagguuuauuacacuguacuguugacugcuggaaacccagaaugguuucugua

SEQ ID NO: 4113016 - RNA, 59 nt, Human
uacaacaggaauuucaacuuugucuucaauuuauggcaggguuuagaaucucuuuugua

SEQ ID NO: 4113017 - RNA, 74 nt, Human
uacaacaugggccagaacuuugggccaggcuuagguggagccucugcucaguguguucaagggcucaucaugug

SEQ ID NO: 4113018 - RNA, 129 nt, Human
uacaagaagucaugauggaaagaaggagguuuggagaggggcugaguugggucggucuuuggcccuugccacaguccacucacucuuagucacucaaccuccauuuccaagcugcauucccuucuuaaa

SEQ ID NO: 4113019 - RNA, 77 nt, Human
uacaagcgcuuguugucuuucccauggauuguaguacucauggcagagaacaaagcaacaaguauuaaggcaaugua

SEQ ID NO: 4113020 - RNA, 130 nt, Human
uacaagcuuugggaguaauuauuaauuuuucauuuaacuaaaucaaggauauauagaggcauaagaauaauucuuggagacucuuguauauuuguuaaauagggaaauuaccuauccuaaauaguuugua

SEQ ID NO: 4113021 - RNA, 66 nt, Human
uacaagguugauucuggcaucuggauaaccaagaaagcugcuuuuaggugucuggacaacuuugua

SEQ ID NO: 4113022 - RNA, 71 nt, Human
uacaauaugugaacuuugguguguagcuuauuucacuuagcauaauguuuuuaagguucauccauguugua

SEQ ID NO: 4113023 - RNA, 71 nt, Human
uacaauauguggccuuuugugacuggcuuuuuucucuuagcauaaugucugcaaggcucauucuuguugua

SEQ ID NO: 4113024 - RNA, 57 nt, Human
uacaaucacccaaaaguggcucuggcuugggcagagagaaagguuugggugguugug

SEQ ID NO: 4113025 - RNA, 59 nt, Human
uacaaucuauuucuuggucuaacacugacaggcgguacaaugccaggaagaggaaugug

SEQ ID NO: 4113026 - RNA, 64 nt, Human
uacaauuggcauagguuaaacagcgguugcacaaaauuguuuacuaagaaccuggucaucugua

SEQ ID NO: 4113027 - RNA, 66 nt, Human
uacacaacacucacauacuaaauauuaucuacaaaacagguagcguuaucaauuugagugugugug

SEQ ID NO: 4113028 - RNA, 59 nt, Human
uacacaacugacaaccauucugauuagucagaauuagugccuguguugaucgguuggug

SEQ ID NO: 4113029 - RNA, 56 nt, Human
uacacaccugccugcagacucuggaacaugccaucauuuugccuugcagcugugug

SEQ ID NO: 4113030 - RNA, 86 nt, Human
uacacacuucuaaacacauagacguuugauaucagugauugaauuuuucacuuuugauccagauguuuuuguguuaauuaguugua

SEQ ID NO: 4113031 - RNA, 104 nt, Human
uacacauacacacugugauaaugaagcauaucagggauuauauccuucaaaauguguaggaucucuaguuuuauggaugcaucauauuccaagguguauaugua

SEQ ID NO: 4113032 - RNA, 62 nt, Human
uacacauuacauaauacuaucuaguaaauaugcccuagagauugugugugugugugugugug

SEQ ID NO: 4113033 - RNA, 72 nt, Human
uacacauuccugggcuuaaccccagacuuacugaugcagaaucucuggggauaagacccagguauuugugua

SEQ ID NO: 4113034 - RNA, 74 nt, Human
uacaccuaugacaaacccaggauguaacacuccuucuagauggguuuaaugguguuggcuuggguuuuauugua

SEQ ID NO: 4113035 - RNA, 64 nt, Human
uacacuggauuagcuguccuacagcuuauuguuggugaagcaaaggaaaacugauuauagugua

SEQ ID NO: 4113036 - RNA, 60 nt, Human
uacacuggccaaaugccuuuggcaccccaugcuugcugaagaucauaaaagggucaggua

SEQ ID NO: 4113037 - RNA, 66 nt, Human
uacacuucagggcccucacuugcauaggccccacucaugguccugagagggggcccuagaaaugug

SEQ ID NO: 4113038 - RNA, 60 nt, Human
uacagacauuuacuccacuccuucuagggcacagugcugcaggcaguguagagaugagua

SEQ ID NO: 4113039 - RNA, 78 nt, Human
uacagaguauuuuuaauaugguuaucugauuuauucacauggggauugauaugucugcuagguugaaaauaaguugua

SEQ ID NO: 4113040 - RNA, 69 nt, Human
uacagcaaagccaguuagcacaucauugcaaugcaugguuguuacagcaggaagcuacugugcucugua

SEQ ID NO: 4113041 - RNA, 61 nt, Human
uacagcagagaccuggcagccaccuggaacaaaucuuaccagcugccuguuucuguaagua

SEQ ID NO: 4113042 - RNA, 78 nt, Human
uacagcguccaguuugcuuucauuuuauauuuucuguuucuggaaaaugaugauuaaaaugagguagaaaggacugua

SEQ ID NO: 4113043 - RNA, 57 nt, Human
uacagcugcaaggguuucugggagaaaauauuuuugacugagcacauugcugcugug

SEQ ID NO: 4113044 - RNA, 58 nt, Human
uacagcuuagauuccccagagccaaauccaggccugacaagaggcagaaucagcugug

SEQ ID NO: 4113045 - RNA, 56 nt, Human
uacagcuuauccagcuugauaggcagcuagccugaaucuuggcuagaugggcugua

SEQ ID NO: 4113046 - RNA, 59 nt, Human
uacaggcuagggagagugacugcuuggguuuaaccucagagucgguuuacuuaucugua

SEQ ID NO: 4113047 - RNA, 80 nt, Human
uacaggcucacuuucucagucacacaaaauauauuucaagugcucaauauccacauguggcuagagaguagaguauugua

SEQ ID NO: 4113048 - RNA, 57 nt, Human
uacagggucacagaggaccugugcucaaggcccugcccacuuucucuguuccuugug

SEQ ID NO: 4113049 - RNA, 130 nt, Human
uacaggugagaaaaccaagguguagggaguuuuaacaacuuacucaagguugcauggcuaguaacugauagagauggaauuaaaagucaaguaauguaauucuaucacccugguuauuaaucaaaaugua

SEQ ID NO: 4113050 - RNA, 67 nt, Human
uacagguuacacuuuuaaaaguuauggagcaaaugaacguacaucugauacuugaguguacccugua

SEQ ID NO: 4113051 - RNA, 106 nt, Human
uacagguugggagcuuagagaauagucuaggcucagaguaucuaguuggggcucaucaucuucuggaagacguuugaagccaugggucuaguugaguuuaccugua

SEQ ID NO: 4113052 - RNA, 56 nt, Human
uacaguagaaucuuauagcccagagcauguuuugggaaauaugccucucugcugug

SEQ ID NO: 4113053 - RNA, 80 nt, Human
uacaguauauugaaaagaauuagagauauagcaugagaaauauuuuauuugaauccugguucuucaguuuaauaucugug

SEQ ID NO: 4113054 - RNA, 55 nt, Human
uacagucuuaagucucccuuuuucauguguaagacaagggagaauaaugauugua

SEQ ID NO: 4113055 - RNA, 108 nt, Human
uacagugcaauuuguucucguuuaugugggguuuacaugguuuugagacugaaagucacacauucuuaaagccugacuguggacuacaaacgaaucuuuugcucugua

SEQ ID NO: 4113056 - RNA, 61 nt, Human
uacagugcuuuuugguggagaaggggcaugugaucagugucucuguagagacagcacugug

SEQ ID NO: 4113057 - RNA, 55 nt, Human
uacaguggggagcucaggagagugggaaaaggaccaaucauagcagcucacugua

SEQ ID NO: 4113058 - RNA, 55 nt, Human
uacaguuagccugucuacucccuagaccaugagcuaguaaaggguagagacugua

SEQ ID NO: 4113059 - RNA, 68 nt, Human
uacaguuuauaggacaucugauaggaaaaauaacagcuuuuauuccuguacauuagcugugaauugug

SEQ ID NO: 4113060 - RNA, 116 nt, Human
uaaauucauagucuaaaugagcauuuuuggucuaauacaggcacuagucuugggcauuagacaugccuuuaauaguucuguguagcucaagaguuguucuuuagcuuaggacuuua

SEQ ID NO: 4113061 - RNA, 62 nt, Human
uaacaagucauuuuaucagcaggccugagcuucagccagcugucauuaagagugucuuguua

SEQ ID NO: 4113062 - RNA, 84 nt, Human
uaacaauuauaguguauguucagcuuauauggaacaguccaguuucaccucaucauaaagcugaauguagagggauaauuguug

SEQ ID NO: 4113063 - RNA, 81 nt, Human
uaacacagcaaucgggugauaugcaauuugccacuuguacuuucaauuuacagaccuauugcaugccacuuguguugguua

SEQ ID NO: 4113064 - RNA, 73 nt, Human
uaacacagugguugucagcaacaauaugagcuagcgcuuauaucauguucucugugugucaggcauuguuuua

SEQ ID NO: 4113065 - RNA, 94 nt, Human
uaacacuccauuuagucacccuugauaauguucuucuuuccagagguguagugagagaagcagcuuucaaggugauuucucugcauggagguua

SEQ ID NO: 4113066 - RNA, 57 nt, Human
uaacacugugucugccauauccuaaucuuuccaauagauggcagauaauuuguguua

SEQ ID NO: 4113067 - RNA, 123 nt, Human
uaacagagaagacaucacugaugauaccaacagagagaccagaaacaggccaucuggaagauggagauaguguguuuguuuguuuguuuguuuguuuguuugugguagagucucacucuguug

SEQ ID NO: 4113068 - RNA, 82 nt, Human
uaacagagucucacuauuuauggcaguuuugucucauaaagucacugugaacacugaaguagugaauacugaaacauuguua

SEQ ID NO: 4113069 - RNA, 69 nt, Human
uaacagauacuuucaucacucaccaggugauugucaugauuaacugcucagaggaaggaaugucuguug

SEQ ID NO: 4113070 - RNA, 78 nt, Human
uaacaguaaugaacaaaaacaaggccuguucucacagggauuagagagaauggggcuuguuuuuguucguuaccguua

SEQ ID NO: 4113071 - RNA, 66 nt, Human
uaacaguaaugugguguuggguuagaauauuggcacaguaucuggaauccagcaucaguucuguua

SEQ ID NO: 4113072 - RNA, 74 nt, Human
uaacagucacuuggaaauggagccccauguuugcuuagaaagacaauggagugggccaauuuuagugaagguug

SEQ ID NO: 4113073 - RNA, 113 nt, Human
uaacaguguuugggaaaauuugaaagauaagauguaaucagaaaaacacacuucaguaaaguuuauuugaacaucucuuguuuucuugugaauuuugaccucaaguuacuuua

SEQ ID NO: 4113074 - RNA, 67 nt, Human
uaacaucaaaguugguauauuugcaucucuguauaaagagaguuugcaaauaggaauuuagguguua

SEQ ID NO: 4113075 - RNA, 55 nt, Human
uaacaucugggcugcguccugacgucagggcuguggugaugaaguccagauguua

SEQ ID NO: 4113076 - RNA, 61 nt, Human
uaacaucuuaacuggauacuucugacucagagucucccaggagguugcagucaagauguug

SEQ ID NO: 4113077 - RNA, 58 nt, Human
uaacauguucaaugcaugucuguaucauuuucaagauuuacaugcauauggacaguug

SEQ ID NO: 4113078 - RNA, 56 nt, Human
uaacauguuugagugguacuuaaagacccaaucuuuggccaauuuagaacguguug

SEQ ID NO: 4113079 - RNA, 68 nt, Human
uaaccagacagaaacagcuagagagaaaggaagaaauaacucuguauuagcuggacuguucaagguug

SEQ ID NO: 4113080 - RNA, 129 nt, Human
uaaccagucgugaagauucuuguuaguggggcacuuaugaugugccacaugcuuuacgugaauuaucuccuuuaacuuucacaguggcccaacaauacagugccuauuaucauccuugcuucaugaaga

SEQ ID NO: 4113081 - RNA, 58 nt, Human
uaaccauagccaucaauugucugauuuuauaaucuauuuacugucauggcuaugguug

SEQ ID NO: 4113082 - RNA, 73 nt, Human
uaaccuacaaggguaacucguuuugaugucuuucgaaagaaaggugucuggccauuugcccauugugauguug

SEQ ID NO: 4113083 - RNA, 78 nt, Human
uaacgaugauauaucuacacauuauauggcuggcuaucuuuaguuuguuuuuauauccuguggagugugacaucugug

SEQ ID NO: 4113084 - RNA, 78 nt, Human
uaacgguaacgaacaaaaacaagccccauucucucuaaucccugugagaacaggccuuguuuuuguucauuacuguua

SEQ ID NO: 4113085 - RNA, 92 nt, Human
uaacuaaauugccuaaaguuacauagcuaguagauggggaagcugagauuuaauuucagaaaaccugacucuagaacugguaguuguaguua

SEQ ID NO: 4113086 - RNA, 73 nt, Human
uaacuauaguugcagcuauuuucucauuaaggauccccguaaaggaaauuguuggugaaaaaugggugaguua

SEQ ID NO: 4113087 - RNA, 71 nt, Human
uaacuauaguuuguauuuggcuuugaauguuguguuuauaacuccaggccugacuauaaauguaucaguua

SEQ ID NO: 4113088 - RNA, 97 nt, Human
uaacucagccuuucaauuucucagcaggcagaaaucugcagaacuuuucugaagguuacuucugcucagaaggcuuuaaaauugaaaagcagaauug

SEQ ID NO: 4113089 - RNA, 57 nt, Human
uaacuccacaccccucuuggugcuggucaugauuaguuuaggagaggagugggguug

SEQ ID NO: 4113090 - RNA, 86 nt, Human
guuguacccacaugcaagucuuaauaguuuaggguuaauaaaauguuucuaaaaaaaugaguugagauucugauacaugcuacaac

SEQ ID NO: 4113091 - RNA, 65 nt, Human
guuguagaaauacuuguaauuagcuaaauaaaucucaaauguuuucuacaggcaguuucuacaau

SEQ ID NO: 4113092 - RNA, 69 nt, Human
guuguaguugaagcacauuagaugugucuucguguucugcacucugaagacaucguguggacuaacagc

SEQ ID NO: 4113093 - RNA, 57 nt, Human
guuguauauguagagaauggucuuuuuaaagauuauauuuuaaaaugcauaugcagc

SEQ ID NO: 4113094 - RNA, 99 nt, Human
guuguauuuacuugcuagucacagcuuccauuagaaugagauagacaguguuaucacacaaagcugauggaaguucagugcaaagcauacagaugugac

SEQ ID NO: 4113095 - RNA, 62 nt, Human
guuguccagccacccuggaggcacgcggcgucaggccugaacugcacaguggcuggauuuac

SEQ ID NO: 4113096 - RNA, 67 nt, Human
guuguccuccacauggccucuccacgagcccaaccuagccacacggagaagccaugugguggagaac

SEQ ID NO: 4113097 - RNA, 74 nt, Human
guugucuaacuggugaguugguugaguggaagcugguugagaacuuuuacugcaaaccauuuacaguagaccac

SEQ ID NO: 4113098 - RNA, 60 nt, Human
guugucuucccuccaccaccuguaccagagauguuggauauguuggaggugaaggugugc

SEQ ID NO: 4113099 - RNA, 62 nt, Human
guugugaauagugccgcaauaaacacaugugcaugugucuuuauagcagcaugauuuauaau

SEQ ID NO: 4113100 - RNA, 64 nt, Human
guugugaauagugccgcaauaaacauacgugugcgugugucauuauagcagcaugauuuauaau

SEQ ID NO: 4113101 - RNA, 64 nt, Human
guugugaauagugccgcaauaaacauaugugugcaugugucuuuauaguagcaugauuuauaau

SEQ ID NO: 4113102 - RNA, 83 nt, Human
guugugaaucagggcuggguccugcucucccuaagaucacagucuaaugagggugaaggcccagaacuaccugaugacacagc

SEQ ID NO: 4113103 - RNA, 68 nt, Human
guugugaauuaugaaagacauuucuguuggguuacugaaugucccuugggguuuuuuucauuuauaac

SEQ ID NO: 4113104 - RNA, 65 nt, Human
guugugcaccacuguugauugacugggcccuuugcuuguguacagcacucuacaguguguacaac

SEQ ID NO: 4113105 - RNA, 95 nt, Human
guugugcaugcucagaagacagagcacuucucuugucagucacaauggcuuggguaggacuaagugcuguucuguguguucuuggagugugcagc

SEQ ID NO: 4113106 - RNA, 60 nt, Human
guuguggaaugauuaauggucguuggugaaguaaccaucagcuucauugucuucuauggc

SEQ ID NO: 4113107 - RNA, 77 nt, Human
guuguggcaaugacuaguuaauaagugcucgguaaaugcucauugaaaugagacuaauugauugauaggugccuaau

SEQ ID NO: 4113108 - RNA, 62 nt, Human
guuguggugucaaagcaaggauuaaauguauucauacaucuucaaagugcuuugcaagcggc

SEQ ID NO: 4113109 - RNA, 120 nt, Human
guugugguuauuguuauuauaguugauauauuuaugguugauuuuccacaaauauuuagauauucugguuaucuguucuuagcuauagaugugaauccuagccugaaugaaaaucacugc

SEQ ID NO: 4113110 - RNA, 72 nt, Human
guuguguaaaaccugugaucuuuucuucuauagcauuucaugagaauuaaaggucuuaagguuaagcaggac

SEQ ID NO: 4113111 - RNA, 76 nt, Human
guugugugcacagcaucugcauaaugccuucccaauacaagcauugggcugggccucugggauguguguccaggac

SEQ ID NO: 4113112 - RNA, 68 nt, Human
guugugugugugugugugaaacucuaaagccccuggaauuuaggaaacagugcauauauagucauaac

SEQ ID NO: 4113113 - RNA, 64 nt, Human
guuguguugccaggaagaugacacugccauuugacaucccaauaauuuccuugguaacauaugc

SEQ ID NO: 4113114 - RNA, 72 nt, Human
guuguguuuaucuuugagagggaaaauuaucucuggucucuaccuggauaauuugauaccucaaucagcaau

SEQ ID NO: 4113115 - RNA, 80 nt, Human
guuguuaaaacugaaauguuccggguaaggagaaaugacaaaugucuuucugaacacagcucuggacacacuuuaauaac

SEQ ID NO: 4113116 - RNA, 80 nt, Human
guuguugauguuaaugugucuuguuucguaaaggaagacuuggccuuuauuuaccaaaugagacuauuguuaugaacaau

SEQ ID NO: 4113117 - RNA, 59 nt, Human
guuguuggccaagacucauguccuaugucaaaagcaugaacauuugguuuggcagcagc

SEQ ID NO: 4113118 - RNA, 74 nt, Human
guuguugguagaauucaguuccuugaggguauaggacugagguucuguuuccuuacuagcugucagccaagggc

SEQ ID NO: 4113119 - RNA, 114 nt, Human
guuguuguauaaccuuuugcuucuuuuuccucaucugucaaaugggcauaaggauagugucuaccucaugaaguugcaaugaggaugaaaagugugaaaaguauuuauaauagc

SEQ ID NO: 4113120 - RNA, 65 nt, Human
guuguuuauauuuuaaaaaaucuuacauagacacacaccaguaagacaaauggaguaugagcaac

SEQ ID NO: 4113121 - RNA, 58 nt, Human
guuguuugcucacucccuuuguuuaacuagauagcuuaaaaggaggcaggugaacagc

SEQ ID NO: 4113122 - RNA, 70 nt, Human
guuguuuucagggugucauucacaggcauuaacuuauguugugauauuuucugcaccuugaccucacaac

SEQ ID NO: 4113123 - RNA, 66 nt, Human
guuguuuuuguuuaaaauccuggauggcaggauaaauuucugucauuuucacacauaaauagcaac

SEQ ID NO: 4113124 - RNA, 57 nt, Human
uaagccuaaugcccaggacacagaugcccaggagacagaugcugggcauuaggcuua

SEQ ID NO: 4113125 - RNA, 63 nt, Human
uaagcuccuccuccugagggccguaacgauucacuaaaugcccaucauggaucagguaguuua

SEQ ID NO: 4113126 - RNA, 58 nt, Human
uaagcuuaaauaggcuauauauauuuuguuaggaagaguguuuccuguuuauggcuug

SEQ ID NO: 4113127 - RNA, 76 nt, Human
uaagcuugcccugcuaaccuugguuccaccucuggucaugcuauuucuugcugugggaccuuuggcaggucacuua

SEQ ID NO: 4113128 - RNA, 71 nt, Human
uaagcuuguuggggaauuuagugcugcuuuuagaugaacaaaguggauucugaaauucucguauuaguuua

SEQ ID NO: 4113129 - RNA, 79 nt, Human
uaaggaaagaggaggcaggaagucuaugggaagauccuggaaaaucucuugaaauggaugucacugucucuggguuuug

SEQ ID NO: 4113130 - RNA, 61 nt, Human
uaaggaacucaagagaggagcguuuccucagaaugcuuucuuuagcuccugagucuccuua

SEQ ID NO: 4113131 - RNA, 111 nt, Human
uaaggaauuuucaaagacaaggauguauucagaauguacugauagaacaguaauaacuaauauguauaguguucuuacuaaguaccugaaauauuuuuguaaaacuucuua

SEQ ID NO: 4113132 - RNA, 80 nt, Human
uaaggauaacaaaacccauuucagucucaauuuaaguuuaauucccagguggaacuugaaaugaggcuguaaugaacuug

SEQ ID NO: 4113133 - RNA, 86 nt, Human
uaaggaucauguagugcauucuccaucaucuagggccauucugaggacuguaaugauacugaagggugacaugacaugcaucuuua

SEQ ID NO: 4113134 - RNA, 89 nt, Human
uaaggaugaguccauugucaacugaaaaccaagacacgccaccuuuagucugucaguucaucaguuggcuaaaauguauuuauuacuug

SEQ ID NO: 4113135 - RNA, 57 nt, Human
uaaggcaagagcagggucuuugggaaugaaugcacuuuaggcaccucucuugccuua

SEQ ID NO: 4113136 - RNA, 62 nt, Human
uaaggcagcugagcuucuaacagcucauauggagucuagaaagcccuguguucacugccuug

SEQ ID NO: 4113137 - RNA, 66 nt, Human
uaaggcauaaggccagaggcuaguuuaggcaagaaggaauaaacuagccucuggccuuauaccuua

SEQ ID NO: 4113138 - RNA, 56 nt, Human
uaaggcaugaguuuauuucauauacuuuccaaguggugaauuaauuauaugccuua

SEQ ID NO: 4113139 - RNA, 56 nt, Human
uaagggcaugagaagcuugaaaggacacuguccaggcacgguggcucaugccugua

SEQ ID NO: 4113140 - RNA, 81 nt, Human
uaagggcguuccuguuguucgccugcgauggauggcaucuugagcucacaucuagcguuaggccgagaaauggggcccuua

SEQ ID NO: 4113141 - RNA, 73 nt, Human
uaaggugcacuuuggcugggcaucucucuccaugugguaacucauuauagagcagucuagaccaggcuccuua

SEQ ID NO: 4113142 - RNA, 77 nt, Human
uaagguguaucuagcauuguguaguuauguaaugaguuauauucaguauucugcugcauaauacuuuuaaugucuua

SEQ ID NO: 4113143 - RNA, 77 nt, Human
uaaggugucuggcacacagagaagacacuugaaaauuuucugugucugaauaacucuguguuugcuaagaucuuuua

SEQ ID NO: 4113144 - RNA, 62 nt, Human
uaaguacccugcugauuccaagggcagcauuucagcagcagcccuggcaggcggguuacuua

SEQ ID NO: 4113145 - RNA, 103 nt, Human
uaaguaccuacugagugaaugagcggccuugaaauuguuuucugaggcuggggaacucuugccaggaauuucaagagccacugcuuuuacacuuggccacuua

SEQ ID NO: 4113146 - RNA, 68 nt, Human
uaaguagaaauuaucauccuuggagauguaccacaaggaauauugacaagaaagauauuuuuaacuug

SEQ ID NO: 4113147 - RNA, 56 nt, Human
uaaguagaauaaaacagcacaguauucguuuuucugugacuggcuuauuucacuua

SEQ ID NO: 4113148 - RNA, 59 nt, Human
uaaguaguagggccagaauuugaaacuaggccugucugacuuuugugcccaugcucuua

SEQ ID NO: 4113149 - RNA, 73 nt, Human
uaaguauaccugcuuugauagguuguggagaagauucaaugaguaacucuagaaugaauuagcgcagggcuug

SEQ ID NO: 4113150 - RNA, 66 nt, Human
uaaguauuuauuaucucuccuguacuuccaguucucuaaccuggacuaaaggagggaaauagcuug

SEQ ID NO: 4113151 - RNA, 114 nt, Human
uaagucacaaaauauuaguuaaauauuuuugcucaagguucaguugcagagacuggaaugcucuugaaugaauuugagcagagauagauuuauuacagcauauuuaaagacuua

SEQ ID NO: 4113152 - RNA, 130 nt, Human
uaaguccugcucucaucuggcccuaaagaagccaucagcaggaggugacagcgaccguaauucuguuuuuaugauuacugagcaacggucauuucaggcugaguggugcugagugauggguggugauuua

SEQ ID NO: 4113153 - RNA, 60 nt, Human
uaagugaaggaaguguguuuacaaaugucauuuuugucugauuucacuuaccuucauuua

SEQ ID NO: 4113154 - RNA, 57 nt, Human
uaagugaauccuugagaagaaagcaaagguuaccuucuuuguucuuguggguacuua

SEQ ID NO: 4113155 - RNA, 63 nt, Human
uaagugaauuguccgaggacacacagcaaauaagacagcuugauuccucugaagguucuuuua

SEQ ID NO: 4113156 - RNA, 56 nt, Human
uaagugagaaagacauuaacugcuuaacugauagcagcugguauuuccuucacuua

SEQ ID NO: 4113157 - RNA, 86 nt, Human
uaagugauuuccauggguagcccugguugagaaucccugcucuacucuucugccacaggccuccacuggggcuucccagguccuug

SEQ ID NO: 4113158 - RNA, 75 nt, Human
uaagugauuugaagcagugccugauauucaugcaagaagcuagaaaugucaguugcugcuugagguaaacauuug

SEQ ID NO: 4113159 - RNA, 93 nt, Human
uaaguggaccagauauaguucuuagggucuguaauuuuaaugcuuaaaagaggaugggaaucagagucccaagaucuguauauggcacaguua

SEQ ID NO: 4113160 - RNA, 85 nt, Human
uaaguggauuaguauaaagggagaaaaaguuccacuuuuaaagaaaaguggaaaacaaagcucucauuauuaccaaaugcauuug

SEQ ID NO: 4113161 - RNA, 76 nt, Human
uaaguguauugauggcuuuuuggcagagcuuuauuauugugaaucucucacuugaaaagcguauuuccgacauuug

SEQ ID NO: 4113162 - RNA, 88 nt, Human
uaagugugaugugguagauguuaacuuuuggaaaaccgugguuuugaaaaggucaaauaguugacauuaacuugacucagaacauuua

SEQ ID NO: 4113163 - RNA, 60 nt, Human
uaaguguuugagggaggauauuaguuucauuucugacuuuuauucaacuuuaaaaacuua

SEQ ID NO: 4113164 - RNA, 85 nt, Human
uaaguuaaaacauguaauucugcuuaagaucaggucucaaauagcuaagaccaaguucuggaguuaguuauaaugguuuaucuua

SEQ ID NO: 4113165 - RNA, 76 nt, Human
gugcucuguagcaaguuauucaauaaaugugaguuaaguuggugaaacauuuaauggaaaacauggugcuaaguau

SEQ ID NO: 4113166 - RNA, 84 nt, Human
gugcugaauauucuagaugaaaguguuuaaguuuauguugcaugacagcagaggcucuuuaaugcuuagcaucuagugcagugc

SEQ ID NO: 4113167 - RNA, 108 nt, Human
gugcugaggcucaggcuguggggucguggaagggaugcaggaaagaagguucuagaccagggcuugacacuucacucucuggggccacaugggcugaggccugggcau

SEQ ID NO: 4113168 - RNA, 57 nt, Human
gugcugagucuccuacuauacguuucacgggcucccugugauuuagggauccggcac

SEQ ID NO: 4113169 - RNA, 65 nt, Human
gugcugaugucaggacagaguccacaagaaugaaguggccuggcucuggcagcuugugucagcac

SEQ ID NO: 4113170 - RNA, 65 nt, Human
gugcugccucagacuugauaauuggguucaucaacagagccuugaaaaguuuggguagagaccac

SEQ ID NO: 4113171 - RNA, 59 nt, Human
gugcugcucugcuggagggaaagagaauucugggcugaauuuaacagucauggcgguau

SEQ ID NO: 4113172 - RNA, 66 nt, Human
gugcugcugccgcggccgcccugcucguggaagggaggaggaggaauguggaagguggcggcgcgc

SEQ ID NO: 4113173 - RNA, 59 nt, Human
gugcuggaagagaauacugguggauauaaucuuuucauggggaauaauuuucuaagcau

SEQ ID NO: 4113174 - RNA, 78 nt, Human
gugcuggagaaguuagaaauaagggcucuccagaccagccugaccaaccuggagaaaccuugucucuacuaaauacac

SEQ ID NO: 4113175 - RNA, 55 nt, Human
gugcuggcccggcugccuggucauuggggaaugacauagaggccaaggcuaaugc

SEQ ID NO: 4113176 - RNA, 56 nt, Human
gugcuggcuggggcaucaggcagcccuggagaggagguggccauccggcccagcac

SEQ ID NO: 4113177 - RNA, 81 nt, Human
gugcuggggaggggcuguugccuagcaguaggccgcggggucccugcaggcucccuaagucagcagcccccucacccacac

SEQ ID NO: 4113178 - RNA, 62 nt, Human
gugcugggucaggcaucugcagaacugguuccuauucuccuuucugauggucugcuuagcuc

SEQ ID NO: 4113179 - RNA, 86 nt, Human
gugcugggugaacacauaggagucuggccccauacagagggucugcagauguagacugugggauggcugacuucacgcuuaugcac

SEQ ID NO: 4113180 - RNA, 61 nt, Human
gugcugguggagaaaguggaggugccuagcagaaauuuaggguagcagcacccaccagggc

SEQ ID NO: 4113181 - RNA, 63 nt, Human
gugcugguguuggagcaaaugcaggaggccuuuuuucacugcuugguugcaacauugcagggc

SEQ ID NO: 4113182 - RNA, 64 nt, Human
gugcuguaucagaaucugcucuggucccugagagaaaccagagagauuuucugagagauggcau

SEQ ID NO: 4113183 - RNA, 98 nt, Human
gugcugucucacuuccggaggcggcccagggaggcuggccgcccugcggggccucgccugcucccaguuggcgccuccagacccuaaggggacagggc

SEQ ID NO: 4113184 - RNA, 65 nt, Human
gugcugugaugagauguacauggacucuauaaaccugagugauucccguauaucugcacauauac

SEQ ID NO: 4113185 - RNA, 72 nt, Human
gugcuuaaaaacuaagugcucuaacagucaaaaaagguuagcuauuacuuugggcauuaguaaguuaagcau

SEQ ID NO: 4113186 - RNA, 79 nt, Human
gugcuuaaugugcuucugcuuuucucugucugagugguccuuugacagcuuugauggucaaggcagaggcagaagguac

SEQ ID NO: 4113187 - RNA, 124 nt, Human
gugcuuaggaucugugcaggggauguggagccagacugccuggguucaaguccuguugcuaccauguauuagcugugcagccuuggguaacugacuucaccucucuguaccucaaguuccucac

SEQ ID NO: 4113188 - RNA, 107 nt, Human
gugcuucauuuucccaguugauacacaucaaccuggcuuuggccauaaauauggaauaugcugauuggccaggccuaggucaugugccuucccuuggaacugaggac

SEQ ID NO: 4113189 - RNA, 70 nt, Human
guuguuuuuugucuuucaaguuuugcuccagggcagaguucccaaaaguagagcucaaggcaaaaauaau

SEQ ID NO: 4113190 - RNA, 75 nt, Human
guuuaaaaugccugccauuuagaagucuugcaacaagaaacucuuacaagcugcuaaugguagagucaccagaac

SEQ ID NO: 4113191 - RNA, 91 nt, Human
guuuaacugcuuugcugagucuugccugugcugucucccagccaccuaucauagugccugacauaugguaagagcucaacaaauguuaaau

SEQ ID NO: 4113192 - RNA, 58 nt, Human
guuuaacuuugggcaagugagcaaaucuccuuaaugcucacauuucucauggguaaau

SEQ ID NO: 4113193 - RNA, 68 nt, Human
guuuaauacuuuucaagcugguuuuuggacagucuacauuuggacagaagcuagcaggaaaguuuugc

SEQ ID NO: 4113194 - RNA, 77 nt, Human
guuuaaugggugaaauuuaaaaacauaauguauaggcaaaaagcuaaaacacugguugguugaauuuacuauuaaac

SEQ ID NO: 4113195 - RNA, 58 nt, Human
guuuaauuuccugaugggggugcugguuacauguguucucucuacaggaauuuauuac

SEQ ID NO: 4113196 - RNA, 72 nt, Human
guuuaauuuuagguugucaagccagccuuaugcaucacaacuuuuaggccucuugucuugcuuagaauagac

SEQ ID NO: 4113197 - RNA, 63 nt, Human
guuuacaaaaugaccaccgcucaugugauccaagcuggucuacagauggagguuauuaugaac

SEQ ID NO: 4113198 - RNA, 130 nt, Human
guuuacagaaacauuacacagacucugaugucagucaugauguuucagccucugcccuuuuccuguaucaacccugauggauaauagggcguggguucugucuguuaucagggugugguccccugugaau

SEQ ID NO: 4113199 - RNA, 86 nt, Human
guuuacagaugaggaaagcaaggcuuggagagaaugccauacaguuauuaguguggcggagccggccuuugcaccuggcuguugac

SEQ ID NO: 4113200 - RNA, 63 nt, Human
guuuacgcagguccuuagcaaucaucauugaagcauugaugagugcaacagaucagcaugggc

SEQ ID NO: 4113201 - RNA, 62 nt, Human
guuuacuacaauuacucagcucugcuguuuauacugcagacaaagagugugguuguguguuc

SEQ ID NO: 4113202 - RNA, 85 nt, Human
guuuacucaccagaugauacauaguugugugugcauguuguguguagacauguguucauguauguauacauauguguuaguaaau

SEQ ID NO: 4113203 - RNA, 75 nt, Human
guuuagaaggcgagccgcuaagccgggugggagacauugguggcuggcaguaggcuaguggcagcugacuugaau

SEQ ID NO: 4113204 - RNA, 68 nt, Human
guuuagacagucugggcacacaugaaaaguauaauuacauuuuuacccugaggccuagcuguaaagau

SEQ ID NO: 4113205 - RNA, 59 nt, Human
guuuagccgccugcguccccuuucccggacugggguagggugacuuaggcuggcaaagc

SEQ ID NO: 4113206 - RNA, 77 nt, Human
guuuagguuguuaaggaggccaauaagaauacuuaagugcacacugaaguuguccuuggcucuuugauaaauacaac

SEQ ID NO: 4113207 - RNA, 75 nt, Human
guuuaguacuaccauuucacagaugagaaaauugaggcuuugaaagccugaauaauuugugaaaagauacaaagc

SEQ ID NO: 4113208 - RNA, 82 nt, Human
guuuagucuuggucuugugugaaaucauaugcuguauguguguuuauacauauauuuucacacaugguuuuuccuuuugaac

SEQ ID NO: 4113209 - RNA, 96 nt, Human
guuuaguuggagauauugcgagaguacaguucuaccuaacggacacagcuccgggugggugugccauauuccauuucguacgagucucuuagaaac

SEQ ID NO: 4113210 - RNA, 99 nt, Human
guuuauaguuuucagaauuuuugcucaguuuuggaauaguaccgauuaccaaagguaaaccugacccuuaaugagcaaguaaauuuguaggcuguauac

SEQ ID NO: 4113211 - RNA, 124 nt, Human
guuuauaugcugauaucaacucugcccugguugauuuuuauucuaggguauuugcagaguucccacuuucaaaugcacguagagaaaauaauccccaucaggacaucuggcauuguuuuuaaac

SEQ ID NO: 4113212 - RNA, 77 nt, Human
guuuaucaaacccuagcguagugcuggcacauggcaauucucagugugagcacuggcugggaaagugacugaugaac

SEQ ID NO: 4113213 - RNA, 78 nt, Human
guuuaucaguaaccuuuagcacaguugaauguuuauuuugcuaauuuagcuucaggugcuaugguuaucauuauaaac

SEQ ID NO: 4113214 - RNA, 91 nt, Human
guuuaugaaaagaggccugguucuggguguagauggaaguuuggccugauuaauugguccuuaccggcagcccagagguuucuucaucaac

SEQ ID NO: 4113215 - RNA, 76 nt, Human
guuuaugaaggucugagaacuaccuauaggcuuuguuacauucuucacauuuguaggauuucucagcaguaugaau

SEQ ID NO: 4113216 - RNA, 55 nt, Human
guuuaugcacuugguuugugucaauuuuccaugacacacaucacguugcaaaaac

SEQ ID NO: 4113217 - RNA, 99 nt, Human
guuuauugaccauauuuucuugaaagagcccugguugaaaauaacuguccccaguacaacaguuguuaucagaaaggucucccuuugaauaugauaaac

SEQ ID NO: 4113218 - RNA, 105 nt, Human
guuuauugcugugaucgcuuuuuugaagaaauuacugcucuugaagaaacaaacacgcacugguuuauuuaagaacaagcagcgcagaguuacagaauuauugac

SEQ ID NO: 4113219 - RNA, 84 nt, Human
guuucaaaaagaacaauugccccaaagcuuggauauagccacagaacuuauuccgagucacaggggcaauuuuuuauugcuuac

SEQ ID NO: 4113220 - RNA, 92 nt, Human
guuucaaucaauguuauauaauguucagugaccuggaacccugaggcuaaguuuugucccagauacuggacauagauauauuguuuaaagac

SEQ ID NO: 4113221 - RNA, 67 nt, Human
guuucacacauccugcacauagcugaaaaaauuagcagcuauguaacccauggggauguauugaaac

SEQ ID NO: 4113222 - RNA, 62 nt, Human
guuucacacugucccggguggaaaaugcaaacccuguggauuuucacccucucaguguugac

SEQ ID NO: 4113223 - RNA, 79 nt, Human
guuucacaggcucauuucucacuccagcaacuuucuaacacuuccuaacgagaaagcuggagccugaggacuguggggc

SEQ ID NO: 4113224 - RNA, 57 nt, Human
guuucaccauccuuggcuuuccuguuacuccacugaggaaagaucugggauugagac

SEQ ID NO: 4113225 - RNA, 70 nt, Human
guuucacuuuacuuguccuguuagccaugacuuuuggucuugaaagucacauauaacaagggcaugaaac

SEQ ID NO: 4113226 - RNA, 58 nt, Human
guuucagaaauguucuccugcucagugaugugcugggugaaugaguauuuuuugaaau

SEQ ID NO: 4113227 - RNA, 57 nt, Human
guuucagauucuuccucaggaacaaauguuaauuuuaugggagaagaacacuggaac

SEQ ID NO: 4113228 - RNA, 59 nt, Human
guuucagcaucuggcaagcaaucccucucagagcccugagcuggcagaugucuugagau

SEQ ID NO: 4113229 - RNA, 126 nt, Human
guuucagcuucuccuuccaacuugucugaaauuuaaacuguugauuuuaugaaguugguguguuuauuuuacuucuucacccugcauuaauaguuugauagaaugaccaacuggggaagcagagac

SEQ ID NO: 4113230 - RNA, 56 nt, Human
guuucaggcccaugggguguggggagagguggucccagaggagcagggcgugagau

SEQ ID NO: 4113231 - RNA, 119 nt, Human
guuucaguuagauuacuuuguggcauagacaacuugguaacuuuuuaauugcuuaucucaccaaaagaaguuuaaaagggguauuaaguccauuuauugccauuacaucuauagcaaac

SEQ ID NO: 4113232 - RNA, 88 nt, Human
guuucauacuugaggagaaauuauccuugguguguucgcuuuauuuaugaugaaucauacaaggacaauuucuuuuugaguaucaaau

SEQ ID NO: 4113233 - RNA, 55 nt, Human
guuucauuagcugugcaacaguuagggccuuuauguuuacuccagcugauggaac

SEQ ID NO: 4113234 - RNA, 70 nt, Human
guuuccaacccugggcucccgacuuacgcccuaugugagugugaggaguaggcugagggugugguugaac

SEQ ID NO: 4113235 - RNA, 76 nt, Human
guuuccaagcuccugaguagcuuuacucaucaaguagaggcauuuugguacaagcagacucagcagagguggaagc

SEQ ID NO: 4113236 - RNA, 57 nt, Human
guuuccagagugagggcacuugcuccucagcacaggcaaagcccuuucaauggaaau

SEQ ID NO: 4113237 - RNA, 57 nt, Human
guuuccagccuccuggguaaaggagcagucuccucccuugcuugggacucuggacgc

SEQ ID NO: 4113238 - RNA, 59 nt, Human
guuuccaggcugggcagcgagcagccccuuuagaaaggaccucuuguucuuagugaaac

SEQ ID NO: 4113239 - RNA, 58 nt, Human
guggguuggguuuuugaagggaagccagucauggaagcuuuucuagucccagccccgc

SEQ ID NO: 4113240 - RNA, 56 nt, Human
guggguuuuuuuuccaucucugauaggugaagucagagaagggggaaagaucucac

SEQ ID NO: 4113241 - RNA, 91 nt, Human
gugguaaaaauuuacagaauguugaauuugggugguguuuauaaucuauaacucuaacaagucccaaucuaauauuuuauaagaagacuac

SEQ ID NO: 4113242 - RNA, 64 nt, Human
gugguaaggaggcagaugcuuggcuguagggagaauccucagaguaagcacuugccuuuaucac

SEQ ID NO: 4113243 - RNA, 85 nt, Human
gugguaaggccaggcucucacuauccuccuagcuguucuucccuccuagcccaggaggagggagagguuaauugguuuuacucac

SEQ ID NO: 4113244 - RNA, 75 nt, Human
gugguacacguaaacacucugugaggcauguaauggagccagcauguuauguggagugccguguaaccaacccac

SEQ ID NO: 4113245 - RNA, 71 nt, Human
gugguaccagcugcaugcagauguagccagcaagauaaggcaguucaaugucugcggcuagcuggaaacau

SEQ ID NO: 4113246 - RNA, 69 nt, Human
gugguaccaggguuggcaagcaaggcuucagcgaauagcucaaaggcuggcgauguguagcccugccac

SEQ ID NO: 4113247 - RNA, 67 nt, Human
gugguacucuaagagccaagacugucacucagguuuccugacucccaucuugcagcuccuguaccau

SEQ ID NO: 4113248 - RNA, 66 nt, Human
gugguagagucccagcuggugacuguuuuucaggcauuuacgguagccaccucaaucuucuagcgc

SEQ ID NO: 4113249 - RNA, 81 nt, Human
gugguagcaaaauaguuuauauagcuuaaaauacugaaaauaauguauauguagaugucauauaaauuguagugcugacac

SEQ ID NO: 4113250 - RNA, 65 nt, Human
gugguaugaaggaggccggcagccagguuugcacuuucacuuguugccuuugcaucuucauccau

SEQ ID NO: 4113251 - RNA, 90 nt, Human
gugguaugcaaaugacugguauguuuuauaauaaaugguauccuggauuuagugaaauuaggcaaauuaguuauaaggcauagaauucac

SEQ ID NO: 4113252 - RNA, 65 nt, Human
gugguauuauuuuacagagaugcuuagaauaccguuucuuuaucugugguaaauaacauugccau

SEQ ID NO: 4113253 - RNA, 65 nt, Human
gugguauuuaugacagugcccgucucugggcagcugggcuuugggggcgugucauggagggccac

SEQ ID NO: 4113254 - RNA, 55 nt, Human
guggucacuugaaauauuuggcagcuugagcucucaaauaaggagucaugaccau

SEQ ID NO: 4113255 - RNA, 58 nt, Human
guggucagugacauggcuccuugaacccccuuccaguccagaggccucucuuggccac

SEQ ID NO: 4113256 - RNA, 116 nt, Human
guggucagugugggagcuuggaggggccaugcacuuccggagaagaccaccgacucguggcuuugguggaggggugcaggcagauuuaguuaggcucucccccaucccugacacac

SEQ ID NO: 4113257 - RNA, 60 nt, Human
guggucaugugcucuuucauagugaccaugccaccgugaacucuccaggcaaaugaucac

SEQ ID NO: 4113258 - RNA, 56 nt, Human
guggucccugguguuuugaugcagagaucguucauaguaaacaggcaagggaccac

SEQ ID NO: 4113259 - RNA, 57 nt, Human
guggucccuguguggagaagcuguggggucaagaugcccgggcuaggcaaggaccac

SEQ ID NO: 4113260 - RNA, 66 nt, Human
gugguccgugagacaggaaggcacgggucagaggcugacagauggucuuucugcugcacggacugc

SEQ ID NO: 4113261 - RNA, 76 nt, Human
gugguccucugagcacgccaggcacgagugugcagggagcugcugcaaaugccucggugugcgggugagcuuccgc

SEQ ID NO: 4113262 - RNA, 68 nt, Human
gugguccugaugucuucuauaaugacucgauguuuuuaggaaucagaguccuggacacagagacacau

SEQ ID NO: 4113263 - RNA, 65 nt, Human
gugguccuuucuugcuaagaguuuauguuuuguaccucauucaugcgcaugaguaagaaaaucac

SEQ ID NO: 4113264 - RNA, 75 nt, Human
guggucugaauuacuggacccuguuucccuaggucccagccccugggaggucagggaagguccggcugcagccau

SEQ ID NO: 4113265 - RNA, 87 nt, Human
guggucuguuauuggaggaggcauuggaggauucuccugagugaaaacagccagguuauaaucuucauguccucucuaauucaccau

SEQ ID NO: 4113266 - RNA, 59 nt, Human
guggugaagccccaucucugcuaaaaauacaaaaauuagccaggugcaguggcacacac

SEQ ID NO: 4113267 - RNA, 56 nt, Human
guggugacgcauggaaugugccuuaaacugcuuuggcaccagucaugagucaauac

SEQ ID NO: 4113268 - RNA, 64 nt, Human
guggugacucacagaaucucugauaagucuggaaauccaggcuuggagguucuguagccagcac

SEQ ID NO: 4113269 - RNA, 65 nt, Human
guggugagauggaguuggugucuuuugguuuuauuaaccuagggacuauuuacccaucucacuau

SEQ ID NO: 4113270 - RNA, 57 nt, Human
guggugaggaggugacuggaaggguggagugcacuugaccagcccauaguccaucac

SEQ ID NO: 4113271 - RNA, 55 nt, Human
guggugaguucaggcuggggugucauauuguaaccccugguuccacugucaccgc

SEQ ID NO: 4113272 - RNA, 108 nt, Human
guggugauaguuugugggcaguuaacagugguggagggcuguccugugcauuguagcaaguuuagcaggaucccuggccuccgcccacuuagaugccauuagcaccac

SEQ ID NO: 4113273 - RNA, 68 nt, Human
guggugaucaguguugguucuaucuacacauuuugcugggaauagaaaagagcuaauauuauuucuau

SEQ ID NO: 4113274 - RNA, 65 nt, Human
guggugcaugcaugcauauguauauaucugcgucuauguuuguauauaugcauauauguauacac

SEQ ID NO: 4113275 - RNA, 106 nt, Human
guggugcgggggaagcugggggcagggcagggaggacagggcaccgcucccuucuggaucucccaggcugcccuguggaccccacuggcuacccucccuccaccac

SEQ ID NO: 4113276 - RNA, 130 nt, Human
guggugcugggaggugaagguguugugucacuugagcuuggccagcucuggaaagugguagauucuuccugaaggccagugcuuguggagcuggcaggggucaguguuguguguagcgagccagugcugc

SEQ ID NO: 4113277 - RNA, 78 nt, Human
uacucuugucacuguuuccuauuauauuugggugauucaguauaacagaagaauguaauaggaaacguguggagggug

SEQ ID NO: 4113278 - RNA, 71 nt, Human
uacugaaauauuuucugucacuaauguucuucauaaaaaauugaaggaggggcauagaaauguaaucagug

SEQ ID NO: 4113279 - RNA, 72 nt, Human
uacugaagggccuacccaguucaguguuuaaaaacuaacauagguuucagugauuuuggggagguuucagug

SEQ ID NO: 4113280 - RNA, 57 nt, Human
uacugacacaaagccaaucccuuggcacuucccaugggauacacugaugugauagug

SEQ ID NO: 4113281 - RNA, 67 nt, Human
uacugaugauuuaagggaaaaaaugaaucaagacucuauugauuaaauguuccuuaaauuauaugug

SEQ ID NO: 4113282 - RNA, 77 nt, Human
uacugcaaaauguuggaggaaauauuauacacuaucuaaaugugaaauuaauguuuuucucaacauugcuguaagua

SEQ ID NO: 4113283 - RNA, 71 nt, Human
uacugcagaaauucagaaagcauaaggcauaaagaugagugcuaauuaucugaccugaauuugcuguggug

SEQ ID NO: 4113284 - RNA, 98 nt, Human
uacugcauuaaccuggaaaaucaagcaagaaggcuuccugagggagucuuggcaggcaaggugcucuugcucuauuguucauuguuuuugucauagua

SEQ ID NO: 4113285 - RNA, 85 nt, Human
uacuggaaauggagacuugggugaggcuucuucuugccuccaggaggggugaaauggcccaaacacccagugucuuugugcagua

SEQ ID NO: 4113286 - RNA, 66 nt, Human
uacuggcuugugcauuucauuccucagguuguuugggcuugauaaguguaaauuacguagccagug

SEQ ID NO: 4113287 - RNA, 58 nt, Human
uacuguagauagugcuguguaaacuuaauauuaagguacaaaguauuauuuaaaagug

SEQ ID NO: 4113288 - RNA, 70 nt, Human
uacuguaugauuucauguauaugcacuuugaaaacagacaaaccaauauauaacagaagucagaauagug

SEQ ID NO: 4113289 - RNA, 67 nt, Human
uacuguuuauugagcaaucugccagaccccuaggguuggagucugguggauugaucaauaaauagua

SEQ ID NO: 4113290 - RNA, 56 nt, Human
uacuuagagcgauaauuuauacauauauauauguauggcuuacagugcuuuaggua

SEQ ID NO: 4113291 - RNA, 74 nt, Human
uacuuagcuguuagagagcuuuaggauuuggaaacuuccagugcauauuuuagcaguucucuaauuucaaggua

SEQ ID NO: 4113292 - RNA, 93 nt, Human
uacuuauaugggauuuuacuauaggauugguucccauuuuacuugcagaaaagcuaaaguguggacaguaucuauaccaagucaguaaaggua

SEQ ID NO: 4113293 - RNA, 69 nt, Human
uacuuauugguucagaaguuuagauuuuauaggugagcugggugcuagacuaguggugccauuuaagua

SEQ ID NO: 4113294 - RNA, 130 nt, Human
uacuucacgggauuucugagauauaugccuucuagacuuucauguuggugaaggguucauaaaguugguccugaauuuauccuaccaugaaaggcuucuggagugugguucuuggaaauuccuugaauua

SEQ ID NO: 4113295 - RNA, 56 nt, Human
uacuucaugaguuaauaugcagcuacuaaaauaguguauauugacagauugaagua

SEQ ID NO: 4113296 - RNA, 68 nt, Human
uacuuccuguuuuugauuucagaagugcaaccaugcagugcuucuaugaaaaacugaauaguugagua

SEQ ID NO: 4113297 - RNA, 91 nt, Human
uacuucuuccuugcaaagcaaaacauucugugaacucucaauuuuugagaaaauaguucgaauguucuugcuggagugagucagcaaagug

SEQ ID NO: 4113298 - RNA, 55 nt, Human
uacuucuucucccuucaacugguuacuaaaucuggccaaauguggagaaaaagua

SEQ ID NO: 4113299 - RNA, 68 nt, Human
uacuucuuugagacucgauauucucauauguauaaaaaggagaugaugaugguagccucauagaagua

SEQ ID NO: 4113300 - RNA, 55 nt, Human
uacuugcuguuaguauuuuacagcuauacuugcuguaaguauuuuacagcaagug

SEQ ID NO: 4113301 - RNA, 55 nt, Human
uacuuggguuuuaaucagaguugauuuuuuuaaacauuugaaauaaacucaagug

SEQ ID NO: 4113302 - RNA, 56 nt, Human
uacuuguugcuuuugugauccaggaguuguagggacuccaaaagcaauuccaagua

SEQ ID NO: 4113303 - RNA, 80 nt, Human
uacuuuaaccuuuugacuucagcagauucaaaaguuuguuuuauucuuuccaggucuagaugaaauuaaauguuagggua

SEQ ID NO: 4113304 - RNA, 73 nt, Human
uacuuuaaucuuuuuucaguuuuccagguagccggucacuaugagccaccaaggaaauugagaccauaaagug

SEQ ID NO: 4113305 - RNA, 56 nt, Human
uacuuucagaagauguguaguaauuuucucaccaacuccacaucuuuugagaugug

SEQ ID NO: 4113306 - RNA, 55 nt, Human
uacuuuccaccagcuuuuugaaagauccucauaauuaaagcagccguggagggua

SEQ ID NO: 4113307 - RNA, 65 nt, Human
uacuuuguauaagacaauaaagaaauccaagcuaugcuaagaccgucuugugucugugcagagug

SEQ ID NO: 4113308 - RNA, 91 nt, Human
uacuuugugcaauuugguauaaacauggagugcauucuuuaccuuggcaaugucugcccugagauugggcucuauggugccacaggaggua

SEQ ID NO: 4113309 - RNA, 65 nt, Human
uacuuuuuauuccuauuuucaaugccaaaggagguauguauaucugaaaguuggagucaaaugua

SEQ ID NO: 4113310 - RNA, 128 nt, Human
uagaaaaauuagccggacaugguggcgcaugucuguagucccagcuacucaggagacuaaggugaaaagaucaucugagccugggaaguuguggcugcagugaguugugaucaugccucuguacucua

SEQ ID NO: 4113311 - RNA, 118 nt, Human
uagaaacacuaaggcuucaaacacuacaagugacuauuugaguacaucaaaaaggaaaguucucuuaacauggugauuugaauaccacaugugaugacaauuuuaugccccguuucua

SEQ ID NO: 4113312 - RNA, 56 nt, Human
uagaaacauauaggauggcaggucuccaaggccuggccugaaucacuguguaucug

SEQ ID NO: 4113313 - RNA, 82 nt, Human
uagaaaccuuucaacagucucaaugcagucaggcucauuugauacgaguuuuaugauuacaaaagauuguuugaagacucug

SEQ ID NO: 4113314 - RNA, 62 nt, Human
uagaaacucaggauacucuuccauggaaagagauggcagagaaaguuuuguccucaguucua

SEQ ID NO: 4113315 - RNA, 81 nt, Human
uagcagagcagcaguguggcuuagggaauaggccugugcuuuaaagucagacaggccugaguuugaacucuagcucugcua

SEQ ID NO: 4113316 - RNA, 75 nt, Human
uagcagauuuucauauuuugagguuguaucuaguuuuuuaaaagaacuagaaauuacucagaauaaaauauguug

SEQ ID NO: 4113317 - RNA, 82 nt, Human
uagcaggaagcauaauggaacaacucuuaguuaucauuauuuuguugauguuucaagaguuucuuuauuaaccuuuguguua

SEQ ID NO: 4113318 - RNA, 70 nt, Human
uagcaggugguggggcuaugaucuaaacacaggcauucuggguccagguccaugcucugaaccucugcug

SEQ ID NO: 4113319 - RNA, 63 nt, Human
uagcaguacugggcauguguuuguuguuguuguuuuucuuagccucagauucccaguuugcug

SEQ ID NO: 4113320 - RNA, 60 nt, Human
uagcaucuugauuucagaccagcauaucagccugucagaauuguuugaaucauaaugcua

SEQ ID NO: 4113321 - RNA, 56 nt, Human
uagcauggaaucguuuaugcucuggguuuugauggcucagacuugauucuaugcua

SEQ ID NO: 4113322 - RNA, 61 nt, Human
uagcauucacccacauacccagggccuauggagaaccagguugggaugagugggugagcua

SEQ ID NO: 4113323 - RNA, 59 nt, Human
uagcauuugaucuccugaauaaacagauagccuuuguuugugacuccagaucaaagcua

SEQ ID NO: 4113324 - RNA, 118 nt, Human
uagccacacucaacuacaagggaggcugggaaauguauuccagcucuugaugaccaggagaaaauugaaagagucugguagacaccuagccaaucccuacuccagugaauguggucua

SEQ ID NO: 4113325 - RNA, 86 nt, Human
uagccagccagcagugguagcuuugcacuucccugggauggagcuccccaggaaagggaugggcugccaccuuugcuguuuggcug

SEQ ID NO: 4113326 - RNA, 57 nt, Human
uagcccagagagccaggggcuugcuauaaucaaggaagccaguggccagcuggguua

SEQ ID NO: 4113327 - RNA, 93 nt, Human
uagcccauccuuggagugacuuuuggaccucacuguccacuugagggaaggccaguccacaggaaggaggccccagagcacccaguguggcua

SEQ ID NO: 4113328 - RNA, 76 nt, Human
uagccucacaucuacuugacguuuggcagaaugaagucccagagugcccagcugucaaaguagauaagucuugcua

SEQ ID NO: 4113329 - RNA, 121 nt, Human
uagccucacuugggaagauucuucaaacacagaugaccaggcuccacccagaggaaucaaaucagaaucacugagguggggccugggcaucaguguuuuuuaaguuccucagaugaggcua

SEQ ID NO: 4113330 - RNA, 66 nt, Human
uagccugcuaggcuccaagagcgaacucagaucugccuugagaaagcagggagccugaagacgcug

SEQ ID NO: 4113331 - RNA, 57 nt, Human
uagccuuucauucuauuauuuuggagcuaaaggcuucagcaugaagagugaaggcug

SEQ ID NO: 4113332 - RNA, 58 nt, Human
uagcuacacuagaguugcaauggaaauuccuuuguuucuauaaagcuuuaguuaguug

SEQ ID NO: 4113333 - RNA, 88 nt, Human
uagcuacagccuuagcugauuugucaaaauguauuauagcaacucuguuuuaauaucucaccaugacaaagcaguaaagcucugguua

SEQ ID NO: 4113334 - RNA, 77 nt, Human
uagcuacccuggaaaugugagacugaguuuuccuguuuguacauggauuugucuuucauuuucuggggaaauaguua

SEQ ID NO: 4113335 - RNA, 63 nt, Human
uagcuagcugaaccaaccccugcaacuaaauaguaauuagcauggggcagguuuuuauggcua

SEQ ID NO: 4113336 - RNA, 78 nt, Human
uagcuaguuauucauagagcuguggcuggaauuagguuucuugacugauucuguaaacaugucuuuagugcuaugcua

SEQ ID NO: 4113337 - RNA, 63 nt, Human
uaaauugccaggaggguugagaauacguagauuguguauguuuuugagacuuuuuggaguuua

SEQ ID NO: 4113338 - RNA, 83 nt, Human
uaaauuguacaaggggaagggaguccaaguguuacuacaaguaauuaaugugcgucuucucucccuggucacccuuugauuug

SEQ ID NO: 4113339 - RNA, 81 nt, Human
uaaauuucauugaaaccuaacauaggcuggauuagcaaauauagaaagacaauguagccugucguggucucaaggaaucug

SEQ ID NO: 4113340 - RNA, 66 nt, Human
uaacaagccuacacaguuuugcucccaugaugggguauguuuaucaaggguaagcuguguuuguua

SEQ ID NO: 4113341 - RNA, 57 nt, Human
uaacacuuucuauuauuaugguuuguuuauugggagccaagagggaugagaguguua

SEQ ID NO: 4113342 - RNA, 76 nt, Human
uaacagcuccagagggagaguuucaacauggcccugcagggcuaagugaagauugcuccauuuucuuuauuuguua

SEQ ID NO: 4113343 - RNA, 84 nt, Human
uaacaggagaauaguucuggaacucuacagcaaccacaaugccuuugucaaguucuuuugaagaguccagaguacagccuguua

SEQ ID NO: 4113344 - RNA, 57 nt, Human
uaacagggccuggcuccaaaagaugacaggccgcccaucaucugccggccucuguug

SEQ ID NO: 4113345 - RNA, 59 nt, Human
uaacauagucauauacuugcuugaguuuucacauagggcacaggaaaugacucauguua

SEQ ID NO: 4113346 - RNA, 77 nt, Human
uaacaucuacaccucaggguggcacucagcgcaucuuuaugaacaugcuuugauguauuuugcagguauauuuguua

SEQ ID NO: 4113347 - RNA, 74 nt, Human
uaacaugcuauuuuccaauaauguaauauuuacuugggcagcacaaauccuauaguauuggaaaaaguucguug

SEQ ID NO: 4113348 - RNA, 62 nt, Human
uaacaugguacugagugaggaaauuucaugccucuaagucucccccuccaauugccauguua

SEQ ID NO: 4113349 - RNA, 57 nt, Human
uaacauucccuuugugccaagggaccaagauuucccuugugcagagcaggaguguua

SEQ ID NO: 4113350 - RNA, 56 nt, Human
uaacauuucauuggaagcuauguucugcaaacagcacaugcuuucuuggaguuuug

SEQ ID NO: 4113351 - RNA, 81 nt, Human
uaaccagcccaucaaaucuaucgauuuuucaaaauuaguauaucauuaaaguuuguagcaauugauauagugggaugguua

SEQ ID NO: 4113352 - RNA, 56 nt, Human
uaaccuauugucaggcagaggcaggagaaucgcuugagcccaggaggcagagguug

SEQ ID NO: 4113353 - RNA, 59 nt, Human
uaaccuuuggugaaauauuaacuuacuguaccaugcauugauaauguccccagagguua

SEQ ID NO: 4113354 - RNA, 118 nt, Human
uaacuaaagcauuaguuucugaauuugugcuucuuuaugauguaugauuauauauuugugcuuauacauuuuaauaaagaguguguuuugauguaaacagugcugauguauuugguua

SEQ ID NO: 4113355 - RNA, 110 nt, Human
uaacuaagaacuugcuucugcaaagucuggcaugcuaauacagccugucagccagggaacccagugaagcugugcuuagcaaccagucccuuugcuaucuauuuugguua

SEQ ID NO: 4113356 - RNA, 66 nt, Human
uaacuaagacauuugaaaugugaucccaucuugggagcacugaugucaugaugucucccacaguua

SEQ ID NO: 4113357 - RNA, 59 nt, Human
uaacuacaaacuguccagcccagagguuuccaaucugugggucuagauuuuugauguug

SEQ ID NO: 4113358 - RNA, 78 nt, Human
uaacucuaguaucacaguuacucaaauaaugacuagcugguuugcuuucaaucuguuaaaacugcgagcuguggguua

SEQ ID NO: 4113359 - RNA, 92 nt, Human
uaacucugccuuuuccaggcgggcuagggcccugcuggagaggacccuaugacuugccuucucuguucuuuagccugcuugaggcaaaguug

SEQ ID NO: 4113360 - RNA, 69 nt, Human
uaacugguaggugaguuuggggaagauagacaaaguacgguuuguucuucuuuagaauucauucaguug

SEQ ID NO: 4113361 - RNA, 82 nt, Human
uaacuuauucugaaggacuaaugguauuuuacuuuuugaauagagauguagggacccacagucuauauuuuggggcaaguua

SEQ ID NO: 4113362 - RNA, 68 nt, Human
uaacuuauuucucaguacauuauacaugcauaauauuguacaccaguuaugugcugggcaauauguua

SEQ ID NO: 4113363 - RNA, 73 nt, Human
uaacuugacaccuggcucugggcuaagcucccacccugaucuugugggaucuucccaagagcccugcagguug

SEQ ID NO: 4113364 - RNA, 75 nt, Human
uaacuuucccacgcugagcccauggaggacuaauauccacaaaucuuuaauuguacucccugugggaaaauguua

SEQ ID NO: 4113365 - RNA, 115 nt, Human
uaacuuugaaaaacuaagucuguggcaguguuuguauagaauaugcagcuuugaauaaucaaaaggacugcauucauuuuuuauaauauuccauccagcuuuuuguugaagguug

SEQ ID NO: 4113366 - RNA, 64 nt, Human
uaacuuuggagaacuggcauuuuuaaugcuguugagucauuaaauauguguuaguuuccuguua

SEQ ID NO: 4113367 - RNA, 76 nt, Human
uaacuuuguuaaugucacuuuauguggcuucuucccauauagggaagucaguagugacauuacaaaacuuuaguua

SEQ ID NO: 4113368 - RNA, 98 nt, Human
uaacuuuguucugaggucuuaacuuaguuuagguaaacccagcagcaguuagggcucugguguuuucaugugcauaaacugcaccucagaggaaguua

SEQ ID NO: 4113369 - RNA, 77 nt, Human
uaacuuuuuuguucauuuugagcucaucaucaucucauuaaugcgugaauguagcuucacgaugacaguccauguug

SEQ ID NO: 4113370 - RNA, 63 nt, Human
uaagaaaagucaucacuccucugaacuugcaacagcaagcucugcucaugaugacguuucuug

SEQ ID NO: 4113371 - RNA, 69 nt, Human
uaagaaacucugaugcuuauugggaaucuauagacuuaguucuccuugauauuuuguuagaguuacuua

SEQ ID NO: 4113372 - RNA, 95 nt, Human
uaagaacaacucuacaagagguauauagaaacagcucugggcauggaggucaugcaacauuccugccuuuauagccucuuggagguuaguucuua

SEQ ID NO: 4113373 - RNA, 73 nt, Human
uaagaacaagggcucugagcuggaccaccuggguacaaauccaagugcucucguucacggcugugugaucuua

SEQ ID NO: 4113374 - RNA, 57 nt, Human
uaagaacuuggcagcaagaaauugccuuuaaagggaaaaccuuguggccaguuuuua

SEQ ID NO: 4113375 - RNA, 56 nt, Human
uaagaaucagaauaauuagauuucagaucacuagaucugagcuuuucugaguuuug

SEQ ID NO: 4113376 - RNA, 99 nt, Human
uaagaaugauccuuccuacccuggguuccucagcccuuacuuagcccuagucaagggcuaaguaaucggggcggggcggggcgggaagcguaacucuug

SEQ ID NO: 4113377 - RNA, 76 nt, Human
uaagacagccagaguggcccguuggccugaacccuugcauaggguucugauuggcaggcggcaucuggcauucuug

SEQ ID NO: 4113378 - RNA, 62 nt, Human
uaagaccucauggaauuaaagcagaagugaaacaccuuuuauucuguagucuaugaggcuua

SEQ ID NO: 4113379 - RNA, 83 nt, Human
uaagacucacauucccagggauaaaccccagcagaugggaugcuaauccaucacaaaggguuuucucugagaaggagauuuua

SEQ ID NO: 4113380 - RNA, 69 nt, Human
uaagacucauauucacacuguuuaguuacagaaacccucuacuuguggcaguuugaauuuaaggucuua

SEQ ID NO: 4113381 - RNA, 56 nt, Human
uaagagaacuggauagauaggauagauaaaaggauucuuguuaaacagggcucuug

SEQ ID NO: 4113382 - RNA, 113 nt, Human
uaagagaucagagagggguauaaaaaaugcuuugacuauaucuauaauauuugauuuauuaaucuggguuuuggguauagagguguucauuauauuuuucuguacaucuuuua

SEQ ID NO: 4113383 - RNA, 77 nt, Human
uaagagcauguuugaaagcuguacaugugguacaauguucacauaugugccuuguacagcauucaaacguguucuua

SEQ ID NO: 4113384 - RNA, 56 nt, Human
uaagagguaguuaaguuucagucacaguugagugauuuacccguaacuauuucuua

SEQ ID NO: 4113385 - RNA, 56 nt, Human
uaagauaaggaacauucugugauguguucuaucacaccaugaugauccuuaacuug

SEQ ID NO: 4113386 - RNA, 56 nt, Human
uaagaugaaggcucaccuagaacucaagugaccauucagagguuagcaucaucuua

SEQ ID NO: 4113387 - RNA, 96 nt, Human
uaagaugagcuccugcuaggugggcacugggagguggacagaagguaggaccaagagccugacugugccacugccccaggccucaggggcuccuug

SEQ ID NO: 4113388 - RNA, 68 nt, Human
uaagauggcagguaguggucucaucaggcagaccccuauagagguggguacuacaucugucacucuua

SEQ ID NO: 4113389 - RNA, 74 nt, Human
uaagauuuucaguccagcacauacagucccagugcccagcacaccggaaguuuguauacuggccucuuaucuug

SEQ ID NO: 4113390 - RNA, 119 nt, Human
uaggucuuacuucaauugaauguuccuagugcaacuggagggcuucugcagguuacaggagacugacaaucuggacccagucuucauccaggugccuaauagucaaugcucauuuccug

SEQ ID NO: 4113391 - RNA, 118 nt, Human
uaggugauggggaaagucugcccaugacuucggaagucugaguuuaguagaugaugcuacccaucagaauuuagagacaggcuucccaaggagugguagcuaucacuccaucucccua

SEQ ID NO: 4113392 - RNA, 62 nt, Human
uagguggaggucauucagcuuaacuucuauaaaauggacagcagauaagaccucaucauuua

SEQ ID NO: 4113393 - RNA, 85 nt, Human
uaggugggagacugguucuucaguaaaauuaaauguauguuguuaauauauuucuuaugauugaaguaauaaaacuuccaauuua

SEQ ID NO: 4113394 - RNA, 70 nt, Human
uaggugucuguggcugccucugugcuaccaugauagaggugagcagagaccauauagcccagaaagccua

SEQ ID NO: 4113395 - RNA, 129 nt, Human
uagguguguuaggacauuuuuucccucuucuugccacuuauuuggauucuuauuuagcacuguguauuaaucaguguucuccagagaaaccgaaccaguaagaggagaaagagagagacagacacagaa

SEQ ID NO: 4113396 - RNA, 68 nt, Human
uagguguuuaaugauuucagcaaguaaacauuuaugacuguugauuugccuugugaauuggauauuua

SEQ ID NO: 4113397 - RNA, 58 nt, Human
uagguuccaugagggaggcaaacaugaauaagacauuguccccacagagaggggcuua

SEQ ID NO: 4113398 - RNA, 64 nt, Human
uagguucugccagguaaacugcaggaauugaguaugucagauuuugguauacguggagauccua

SEQ ID NO: 4113399 - RNA, 78 nt, Human
uagguugaaccauaugaaaugacugguauuuggccauuuuugaccaaugaacacagcaauuucauagaguucuaccua

SEQ ID NO: 4113400 - RNA, 77 nt, Human
uagguuggugcaaaaguaauugcaguuuugucauuacuuuuagugacagaaaccacaauuacuuuugcaccaaccua

SEQ ID NO: 4113401 - RNA, 78 nt, Human
uagguuggugcaaaaguaauugcgguuuucacaauuaagagugauggcaaaaaucacaauuacuuuugcaccaaccua

SEQ ID NO: 4113402 - RNA, 76 nt, Human
uagguuggugcaaaaguaauugugguuuucaccauuaaaagaauggcaaaaucacgauuacuuuugcaccaaccua

SEQ ID NO: 4113403 - RNA, 81 nt, Human
uagguuuguguuauuuuaacuucucaguaauucccaaguauguaugaugauugcagagaaauuagagcuaaucauaacuua

SEQ ID NO: 4113404 - RNA, 129 nt, Human
uagguuuucaagaaauuaagugugguauuacguauuauuaugaaauuuuaagcuauugcuguuuaucagguuaauggcauugauuacaugaaaguaacacguucgauucuacauacuauuuguugaccg

SEQ ID NO: 4113405 - RNA, 127 nt, Human
uagguuuuuacauggacagagcuggguugaaaaguggguuugacuguugcuagcuuugucaucuugggcaggcucuuuaacuugucuaaauucuugauuccucaucucuguaaaauggaaagaccua

SEQ ID NO: 4113406 - RNA, 63 nt, Human
uaguaaaaccugcuuuucaacaccauugaucaaauacuggcucggugacaguagguuuuauua

SEQ ID NO: 4113407 - RNA, 84 nt, Human
uaguaaugaugacagugauaauagcauuuauagaacaccauacgugaagagccuuacaugcauauugucauuuaguccuuacug

SEQ ID NO: 4113408 - RNA, 58 nt, Human
uaguacagaauuaauaauugugucuguuugcuggcacaguuuuaugguuauuguacua

SEQ ID NO: 4113409 - RNA, 76 nt, Human
uaguacaguggagagcaaagaauacaggccuuggauuuacacauccaggaucauaucuuggcucugccacuuauua

SEQ ID NO: 4113410 - RNA, 64 nt, Human
uaguacccugguguuaucauaggucaugccaucccuuuggcaucacuuuauauauuagguacua

SEQ ID NO: 4113411 - RNA, 102 nt, Human
uaguacugauuuauuuacaucuuuacuggauuuagaggcuaacaccaauugguaaaguucuauuugaauuuagguauuuuggaguaaguauuauuauuauua

SEQ ID NO: 4113412 - RNA, 83 nt, Human
uaguacuuaaaccucuacuguaauagaugaauuugaugccugagaugagagucaauuguuuacagucauggagugggugacua

SEQ ID NO: 4113413 - RNA, 71 nt, Human
uauaauuccauuuauauaaaauguccagaacaggcaagccuguagagacagaaaguagaaugguaguagua

SEQ ID NO: 4113414 - RNA, 82 nt, Human
uauaauucggcuauggacucguucauaguuccaauuugcuaggcagaauaguaaggaugaagugaguccaugggcauuuaug

SEQ ID NO: 4113415 - RNA, 59 nt, Human
uauaccaaaaccaagccauuaucuucaaucugaggagaagggaacugaguuuuugugug

SEQ ID NO: 4113416 - RNA, 65 nt, Human
uauacuaucagacuccuggacacauagcuagauggagaaagguggacagugaaucuggagguaua

SEQ ID NO: 4113417 - RNA, 76 nt, Human
uauacugaggaauuuuucaugacucaggaauaaauuuccaugaaacaucagagauuucucuagcuaauagggugug

SEQ ID NO: 4113418 - RNA, 69 nt, Human
uauacuguuucuccuguaguguaaggaccuuacaauguaagucaucacauugcagagauuaucaauaug

SEQ ID NO: 4113419 - RNA, 67 nt, Human
uauacuuguucuuagcaggagcaucuauucuauucuugaauggauaaaaugaagaggaaagagugua

SEQ ID NO: 4113420 - RNA, 60 nt, Human
uauagaaguugcucaauaaauguuugugaggguuaauaauacuuguggguaaguucugua

SEQ ID NO: 4113421 - RNA, 72 nt, Human
uauagagaauuugcuggcuucauugugaguucauaaacaugaccagcuuugccccaguagguuuaucaugua

SEQ ID NO: 4113422 - RNA, 59 nt, Human
uauagguugaacaauuuguagauuauggauuuucuauaauuuauagugaucaauuuaua

SEQ ID NO: 4113423 - RNA, 75 nt, Human
uauagguuuggaccacuuuucaugagucuguuauggguuggaucuugaggggcucaugaaagaccagcauuuaug

SEQ ID NO: 4113424 - RNA, 64 nt, Human
uauaguacauggaaucuucauagcagaaacugagguugugauaugaaaucauuccaauacugug

SEQ ID NO: 4113425 - RNA, 59 nt, Human
uauaguccuucuaaagguccuuucuccauagagaaaggugccccauaggcaggaacaua

SEQ ID NO: 4113426 - RNA, 74 nt, Human
uauaguuaacauaggcuuagggguuuggaaaaucuugaggaagaccagagcagaagccuaggcugugaacuaug

SEQ ID NO: 4113427 - RNA, 78 nt, Human
uauauaauuguucugaaguguuuagaauuaaaggggcaugauuucugcaacacucaaaugguucauaacaauuaugua

SEQ ID NO: 4113428 - RNA, 62 nt, Human
uauauaauuuucugccauaucccuaauaucuagauuagcaucuggcauguggaaauugugua

SEQ ID NO: 4113429 - RNA, 84 nt, Human
uauauacaagauacuugaaucagagguauaacucuguuauuguuaugagcuggagauuagguaugguuuaaguagauguguaug

SEQ ID NO: 4113430 - RNA, 66 nt, Human
uauauacacauguguauacauuuacauaauguauaaauuauaaaggugugugugcaugugugugug

SEQ ID NO: 4113431 - RNA, 56 nt, Human
uauauacuaugcgauuccugccuuaaaaacugcaggaauggcaccauuagcauaua

SEQ ID NO: 4113432 - RNA, 61 nt, Human
uauauagcacuuguuuugcaugucugauugucagcucuugacaaggcagaacugcugugug

SEQ ID NO: 4113433 - RNA, 58 nt, Human
uauauauaugcacacacaccuagacccacguauguccauguguguaugcauaugugug

SEQ ID NO: 4113434 - RNA, 59 nt, Human
uauauaugcgcaggcacccagcugugagggggagcacuggguggggcuguggguaugug

SEQ ID NO: 4113435 - RNA, 108 nt, Human
uauauauguguguauaugugugugcaugugugugugccugcuugugaauguguguaaauauguguauagaugcaugcauauaugcauauguagguggauguguauaua

SEQ ID NO: 4113436 - RNA, 86 nt, Human
uauauauguugugugugugugugugugugugugugugugcaauuuuauguuaaaaaucucauaaacacacauauaugauaugugua

SEQ ID NO: 4113437 - RNA, 78 nt, Human
uauaucucuuuugcuauaaaagggucacacgaucugagaaaauuauguguguaauccaguuguagcaaaucagaaaug

SEQ ID NO: 4113438 - RNA, 86 nt, Human
uauaucuguguugcuagugaauuucugccacugaaacuucaacagcucuacuaguuucaggccuaauuucuagccccagggauaua

SEQ ID NO: 4113439 - RNA, 62 nt, Human
uauaugcaugcacauguagguaugguauuuggggguguccauuugaaaugugcaugcagaua

SEQ ID NO: 4113440 - RNA, 62 nt, Human
uauaugcuuguguguauguuaauguguguauauuauacacacagaguuuauacaggcauaua

SEQ ID NO: 4113441 - RNA, 57 nt, Human
uauauggcugaauaauauucuguuguguggguauaccacauuuuacucagccauuua

SEQ ID NO: 4113442 - RNA, 69 nt, Human
uauaugggcuccugggagauagaggucauaaauauauaauuuauugcaaugggaucagggguagguaua

SEQ ID NO: 4113443 - RNA, 62 nt, Human
uauaugguuguuucacuagcucuaaucuuauguacaguuuuuagucaguugacagccauaua

SEQ ID NO: 4113444 - RNA, 59 nt, Human
uauauguguguuguuuuaagccacuaugucuguggaaauuuguuaagcagcaauauaua

SEQ ID NO: 4113445 - RNA, 71 nt, Human
uauauuacauccauuugacauaauuucagccaaacauauauuuugcuggaaaugauuaaauggugagugug

SEQ ID NO: 4113446 - RNA, 71 nt, Human
uauauuaugaaagacuggccuggcauuuuuguuguuguuuugugcuauuugugucaucuuuuaauaaugug

SEQ ID NO: 4113447 - RNA, 107 nt, Human
uauauuccauaugucaaagaugcugugcuaugucuacagaguucugagcuuaauaauacauaguucuugucuguggacauguauauuguugguacagugggaauaua

SEQ ID NO: 4113448 - RNA, 60 nt, Human
uauauucuuaccaguguauguaaguguauguauugugugcauguauuguguaaguguaug

SEQ ID NO: 4113449 - RNA, 87 nt, Human
uauauuguguggucuuuuagcauuuauuuguauauaguaaauaugcuguaaauaugaagaauauaugcuuuucuccucauugaugug

SEQ ID NO: 4113450 - RNA, 65 nt, Human
uauauuugacaacucuuaccuaaaacagagccagagggucucuacagggucagaguuucauggua

SEQ ID NO: 4113451 - RNA, 75 nt, Human
uauauuugcuuuugugauuuuuagccagaaacacagaaaccacucuaaaugcuguuaucaucaggaggggauaua

SEQ ID NO: 4113452 - RNA, 92 nt, Human
uauauuuucugucaggugcuuucagauucauuuuagaucaaguaacugaaucagagcugcauuuuagagcccuauuugagucagauuauaua

SEQ ID NO: 4113453 - RNA, 57 nt, Human
uauauuuugucagguuaguaaucugaaaucaucaaauugcuaaugugcgaaugugua

SEQ ID NO: 4113454 - RNA, 123 nt, Human
uaucaacccugauccccuggcagcauguccccugcaguccuuucuuggcucuagguuugguggccaggacauugccaggcacuucaggacauaagacaaagccaggagccaugggggaagaua

SEQ ID NO: 4113455 - RNA, 65 nt, Human
uaucaagaguuucuuuagggauguguuaaguucaauuuaagaugucuaagaggagaugcugggua

SEQ ID NO: 4113456 - RNA, 81 nt, Human
uaucaaguggagguaguaguuucuaacauauagcauugguuaugaggaucaagugagaaaaugcaugccaaccacuuaaua

SEQ ID NO: 4113457 - RNA, 70 nt, Human
uaucaaguuuucuuaguugacuguuuggcugguugucuccgcugguuguaguuggguagaggacguggug

SEQ ID NO: 4113458 - RNA, 70 nt, Human
uaucaauguccgggccccauuccagucaaacagggugagaauuucuuggaaggaggcccaggcauccaua

SEQ ID NO: 4113459 - RNA, 75 nt, Human
uaucacuucuuuugugauucuucaguuacuucaggccaucuggauguauacgugcaggucacaggggauaugaug

SEQ ID NO: 4113460 - RNA, 74 nt, Human
uaucagcagagaaauagaugcaaagagacaagccuuuauuuggcuacuuauuugcccauguuucuuuauuauua

SEQ ID NO: 4113461 - RNA, 57 nt, Human
uaucagcaggccaaagcugcaaggucacagacagauuguguuuugggccuguggaua

SEQ ID NO: 4113462 - RNA, 101 nt, Human
uaucaguaucacggccagaaaucucagaaacugguggauuucauauuugcuuauauaaauacauuuuugcuucuaguucuggaaauacugugaucaagaua

SEQ ID NO: 4113463 - RNA, 101 nt, Human
uaucaguccugauagaacaaauucuuucugccuauuggagucuagauaaaauugacagauuggaugaaggcagaaggaggugagcuagaaugacgaugaua

SEQ ID NO: 4113464 - RNA, 62 nt, Human
uauggcugaggccuccguggccacgaacaggaguagggcugcgcaaaggaggccaggcugug

SEQ ID NO: 4113465 - RNA, 59 nt, Human
uauggcuucuuuugcaacuacuuaaccauuuuugccaugguaguacaaaagcagccaua

SEQ ID NO: 4113466 - RNA, 70 nt, Human
uaugggauaauaaacacagccggagucugaagcaccuugagggacauccugcugugcuuauuauccugua

SEQ ID NO: 4113467 - RNA, 70 nt, Human
uaugggcagcacagacagugaaggccaggaucauuuuccuugucaauuacaaacuguggcugugaccaug

SEQ ID NO: 4113468 - RNA, 65 nt, Human
uaugggcuucgugggacugucaguugggggacccugcccucucuuggccaagauacgagcacaua

SEQ ID NO: 4113469 - RNA, 88 nt, Human
uauggguuguuugcacauucguuucaauagaauucuacuuuuauugcuuuuuaaaaauagugugcacagcaugaaaauaaccaucaug

SEQ ID NO: 4113470 - RNA, 55 nt, Human
uaugguagccacuagcaauauauagcugcuauauccuugagacguggcuacugug

SEQ ID NO: 4113471 - RNA, 113 nt, Human
uaugguagcccauuuaaaaggcagagagccuggaauuaaggaaaugcaguguugaauaguuauugcacuauuuucaggcuuugugaccugggcauuuuaaaaaggagaucaua

SEQ ID NO: 4113472 - RNA, 73 nt, Human
uaguagagagaaauagguggcaacaaaauaucucauuuggcuuuuucucacagcauuuguuagcuuucuacug

SEQ ID NO: 4113473 - RNA, 116 nt, Human
uaguaggccagaaaauaauguuuuacuaagcaggcugcccuagcuuggacauuuaaagggaagccguauguugaaggaugaagggcaguugaaguuuugugaagaauggccggcua

SEQ ID NO: 4113474 - RNA, 61 nt, Human
uaguaggugcugaauaaauacuaguuaguauccuggcugguccaauacucaguaaaaacug

SEQ ID NO: 4113475 - RNA, 71 nt, Human
uaguaguaaaaggucuuccuuuguuugaguaaacacucuuugucuaagcagaagaggucuuguugcugcug

SEQ ID NO: 4113476 - RNA, 95 nt, Human
uaguaguaaugcugcgagguagaaggcauaaaaccaauuuuguucuucagaacuuaaaauucaguguuucuuucacuuguguguagcaccugcug

SEQ ID NO: 4113477 - RNA, 64 nt, Human
uaguaugaagaagccauugauaguuguaauaacuuugcauuguuaauugguaucuuacaaauua

SEQ ID NO: 4113478 - RNA, 57 nt, Human
uaguaugguugaguguaaaacacacuggguguccagugcucauucaaguccuuauug

SEQ ID NO: 4113479 - RNA, 59 nt, Human
uagucaagauuggaauaauguacuguacuuaggcuguacuuaggguuuagaucugacug

SEQ ID NO: 4113480 - RNA, 55 nt, Human
uagucaaucaguauguauuggacacuuuuuacaaucugguacauucugaucacug

SEQ ID NO: 4113481 - RNA, 95 nt, Human
uagucacuguuucucacuugcacuuuuccaucucucacagggaaagccucuagaucugggguugcagagguggaugcaauuggggaaagugagua

SEQ ID NO: 4113482 - RNA, 56 nt, Human
uagucaguugggucuaguggcauuaggccugcccagcuccagaacccaaacugcua

SEQ ID NO: 4113483 - RNA, 58 nt, Human
uagucccugcccuuaaagggugcagcccacauucugcaaccugagacccacgggacua

SEQ ID NO: 4113484 - RNA, 68 nt, Human
uaguccugggagaacugcuggguuggagcacugguuggcuuaaccguauccaaagauuuuccaggcug

SEQ ID NO: 4113485 - RNA, 63 nt, Human
uaguccuuacuuacuagaauaauacuauagagggaaagaauauucuagaaaaguaugggacug

SEQ ID NO: 4113486 - RNA, 60 nt, Human
uaguccuugguaaaauucuauggaucaccuguuguauauagagauuuaacccaaggccug

SEQ ID NO: 4113487 - RNA, 63 nt, Human
uagucucucuggacuugaguaucagccauguucuuauguugaugccaagcuccugggugauua

SEQ ID NO: 4113488 - RNA, 58 nt, Human
uagucugauucuagaaucuggggucuuaaaaaaaugacgccuggguccacucagacua

SEQ ID NO: 4113489 - RNA, 69 nt, Human
uagucugguuuuaagcugucagagagcaaagcacucaggcgcagcucuuuggggcuggaagccuagcug

SEQ ID NO: 4113490 - RNA, 58 nt, Human
uagucugguuuuauugaggacauucucaagcuaaagaauuucaaaaggaagccagcua

SEQ ID NO: 4113491 - RNA, 60 nt, Human
uagucuucaugaggauguuuaccauuucugaaguuuugcguaaauuagccuugaagauua

SEQ ID NO: 4113492 - RNA, 60 nt, Human
uagugaaggucaugaugcaaaagcaaugcuaggcuuuugcaauaguccuggccuguacua

SEQ ID NO: 4113493 - RNA, 56 nt, Human
uagugacagaacagaaagaacucaaguguacucugaaaucuaaugcucuguggcua

SEQ ID NO: 4113494 - RNA, 78 nt, Human
uagugacgucaaucaauuggaaguaggaguuuaucaaugaauugcuugacauccaucauuuccuguugacaugagcua

SEQ ID NO: 4113495 - RNA, 75 nt, Human
uagugacuaauaaugcugagcucuuuuucaugugcuuuucuuugugaagugucuguucaaguauuuuuuucgcug

SEQ ID NO: 4113496 - RNA, 84 nt, Human
uagugagagggguuaugcuugacauuuggaaaguucuuaagugagccaugccggagugagaagcugaauaacauccuuacgcua

SEQ ID NO: 4113497 - RNA, 83 nt, Human
uagugaucauccuggugugaggcgggaguguaguuaagugauuugacuaaaagagaacguucgcacgacucagaugaugacug

SEQ ID NO: 4113498 - RNA, 97 nt, Human
uagugauucugugcauuuguuggaguguucggauuuaucaaacuuucugauuuuuguaacaucccaacaaauuuccugucugcacuaguaauuacug

SEQ ID NO: 4113499 - RNA, 81 nt, Human
uagugauucuugaaugugacugaauauuuacucuacaugagacuugagaguguaauuaccagauuauaaugcaaaucacua

SEQ ID NO: 4113500 - RNA, 73 nt, Human
uagugcagucuaaguccauaauggcaguaaauaauugauuuauuuuugucauauuauggauaaacaugcauua

SEQ ID NO: 4113501 - RNA, 130 nt, Human
uagugcccuccaaggcucugcauucauggauccaauuacguuuuuugucaugguaaaagccacaguggauauauuaaaugagagugugguuuaagaaugaaggcccaggagucuggagaucugguuucua

SEQ ID NO: 4113502 - RNA, 91 nt, Human
uagugccuauuucauugggcuauuguaaggauuaaaugugugaguacauguaaagcacuucauaacagcacccagcaugaauuaagcacug

SEQ ID NO: 4113503 - RNA, 64 nt, Human
uaguggacacagcacuguacaaggaauagaggacaccuggguuucaguguagucugugcuauua

SEQ ID NO: 4113504 - RNA, 59 nt, Human
uaguggacagagcuagaaaauguguaucucucauacacuccucucucucugucuugcug

SEQ ID NO: 4113505 - RNA, 61 nt, Human
uaguggagaguuguuuugugcauuguggaauauuuagcacaucacugagcucuguucacua

SEQ ID NO: 4113506 - RNA, 70 nt, Human
uaguggauaauggauaacauugucaacaaauguugauuuaaaagaaacauugucuguauauugucuacua

SEQ ID NO: 4113507 - RNA, 68 nt, Human
uaguggcaggggcgggcuguuccggguaucauaggaugcuucgcagcauauccgaccucugcccacua

SEQ ID NO: 4113508 - RNA, 74 nt, Human
uaguggcuuggucuauacauaagaugaauaagagauuggaaauauuauuguauuauaauuaggccaaagcccug

SEQ ID NO: 4113509 - RNA, 58 nt, Human
uagugggaagaucagaacuaacgucugucugacaccaaagccucugcccuucccacug

SEQ ID NO: 4113510 - RNA, 96 nt, Human
uagugggauauuuuuaaauacaaaguuauucuuucagaggagaucaggaacaugauuccuggggacuugacauuguauuuaauaggaaguucacua

SEQ ID NO: 4113511 - RNA, 71 nt, Human
uagugguaugcugaagccagcucgcauagaacagugauagcugauugcagccucuuguuucagccccacua

SEQ ID NO: 4113512 - RNA, 75 nt, Human
uagugguuccggaagugacugauccgcacauguucauccauguagguguggucgaaguucucccggagccagcug

SEQ ID NO: 4113513 - RNA, 76 nt, Human
uaguguacuaguccaguaguguuugcauguggaugucuguggaugacaguuauuguagcacuuuggcagugcacua

SEQ ID NO: 4113514 - RNA, 59 nt, Human
uaguguagcagggaagaugaucagaauaucagagaagguguuuuucucucuugccacua

SEQ ID NO: 4113515 - RNA, 65 nt, Human
uaguguauuaauauugguucauuagcuguaacacauguacauagcaauguaagauguuaacacua

SEQ ID NO: 4113516 - RNA, 62 nt, Human
uaguguccagcuauauguguauguguguguguacacgugcauguacacacagcuguacagug

SEQ ID NO: 4113517 - RNA, 87 nt, Human
uagugucuuauucaccuuuguugugauaauggucugcacugaauagaugaucaguagaugcuugcagacagaaugaauaaaccacua

SEQ ID NO: 4113518 - RNA, 81 nt, Human
uagugugcagccacaggacuggcuggacagugggcaguggacagggguccauugcacccuccucgccccuggcagccacua

SEQ ID NO: 4113519 - RNA, 61 nt, Human
uaguguuaauucaguuuauaauuggcaaaggaaauugcugaguaaauaggaauuaauauua

SEQ ID NO: 4113520 - RNA, 82 nt, Human
uaguguuguauuuaugcaacaggugagcagacagcuuuugccaggauguuggcugcccguguugcacgaauuugauuagcua

SEQ ID NO: 4113521 - RNA, 67 nt, Human
uaguguuugggaauuguagagaguucauucauuuguuuuaauaacugcaaauuccauuuaaacacua

SEQ ID NO: 4113522 - RNA, 83 nt, Human
uaguuaaaguauaaaucagggagucaucugcgaggaaaaugaaugucacucacaguaguuguucucuguuucugcugucauua

SEQ ID NO: 4113523 - RNA, 64 nt, Human
uaguuaagcaguuuuucaacuguuuagguuguagaaaucugaacucuuuaugacagcuuggcug

SEQ ID NO: 4113524 - RNA, 55 nt, Human
uaguuacuguaaggugaugcagcuguggugaagcuguaaaacacuguaguaucug

SEQ ID NO: 4113525 - RNA, 87 nt, Human
uaguuagccugacucacugguagacuauaguggagggaggcuucccuggcuuuacugaggguguaucuuagugcauucagguugcua

SEQ ID NO: 4113526 - RNA, 65 nt, Human
uaguuagcugccagccaggccagguaggcagcucugcuucuguggauuggcuggcuuguuggcug

SEQ ID NO: 4113527 - RNA, 79 nt, Human
uaguuaguacaccugggacccauccaagaccaacugaguuggguuucuagguguggggcccuggcaucugugcucucug

SEQ ID NO: 4113528 - RNA, 87 nt, Human
uaguuaucacauaaauaaacaagcaauuugcucagaaauaaaugugucauuguaaacaaauugcuugucuguaguggacuuuggcug

SEQ ID NO: 4113529 - RNA, 66 nt, Human
uaguucaaagucugucaaaggaauuaagcaucucuggauugcucuuaugaaaagcacuuagaacua

SEQ ID NO: 4113530 - RNA, 81 nt, Human
uaguucauggaacauacaaaaacaggcagcagacugaaucuggcucauagccuggaguuugccaaugccugccgugcacua

SEQ ID NO: 4113531 - RNA, 85 nt, Human
uaguuccgaaaugaauccaaaucuuuagaggaggauauuuacuccacauauucuccucuaaagauuuggauucauuugggaacua

SEQ ID NO: 4113532 - RNA, 60 nt, Human
uaguugaaagggauuauugugggagaaauuauccuuccagguaguuuuccuuuguaacug

SEQ ID NO: 4113533 - RNA, 59 nt, Human
uaguugacgcaagauuguguauguuaagcucuggugaucaugcagucuuguggcaacua

SEQ ID NO: 4113534 - RNA, 75 nt, Human
uaguugagagguccauacagcuauucuacauuccugcugaagggccugaagaaaauugguagggauuuuucacug

SEQ ID NO: 4113535 - RNA, 76 nt, Human
uaguugauuuuucuuuauucugacuaauguauaacucugaaguuauugaguccacauuaguugaugaugucgacua

SEQ ID NO: 4113536 - RNA, 58 nt, Human
uaguugcaggcugugucccugauuucacaugcagaccaggagccagccugucagucua

SEQ ID NO: 4113537 - RNA, 61 nt, Human
uaguuuacuguucacuuugcccccuagacacuaggcauagacaacaugagcaagugaacug

SEQ ID NO: 4113538 - RNA, 64 nt, Human
uaguuucaguaccaugagcaucauguuuuucccucuagagauccgugcaguaugguagcuacua

SEQ ID NO: 4113539 - RNA, 96 nt, Human
uaguuugguauaaaaaauguucauuaagggccuguuggcugcagucuccuuucaaaauagcaaaccggccaaaacugaauguuaguguccauccua

SEQ ID NO: 4113540 - RNA, 82 nt, Human
uaguuuuaaauggucuuggucuaaccccuaguggauacuugaguauauuacaaaauuuuggaacaggauucaauuaaaggug

SEQ ID NO: 4113541 - RNA, 95 nt, Human
uauuuccugaaauucucucuuuggaguuauaacaguuacuagauuaaacugguaauuuaauucucugacuugaagaagugguauuucuggaaaug

SEQ ID NO: 4113542 - RNA, 68 nt, Human
uauuuccuuugagacugagcucuuuuagaaucuuuuauagauucagugcacaguacugagacuaaaua

SEQ ID NO: 4113543 - RNA, 63 nt, Human
uauuucuaaaggaagcuaugucugguauaaaaggcaaaagagaaaacuggcuucccagagaua

SEQ ID NO: 4113544 - RNA, 62 nt, Human
uauuucuaccaccugacuucaucuauaaacuccguggaugugucuuucaagguauagaaaua

SEQ ID NO: 4113545 - RNA, 97 nt, Human
uauuucuguuuucaucaaguacuuuccauuucaaguaacagauugcuucauucccccuuuaagcaagaagggagaguauuuuaaggguacagagaua

SEQ ID NO: 4113546 - RNA, 87 nt, Human
uauuugaaaagccacuuucauucauauacuuuaguucacauauuuaugagaagcaauguguuaaugaaugaguuaaaguuuuaagua

SEQ ID NO: 4113547 - RNA, 84 nt, Human
uauuugauaaacugaauacucagaaagaaagcagaaaugguuugggacuucauauccuguuuucccuggaguucagcauaaaua

SEQ ID NO: 4113548 - RNA, 55 nt, Human
uauuugcaucaguugcuaaauccuguugguuagcaaagcccuugcuguguaagug

SEQ ID NO: 4113549 - RNA, 86 nt, Human
uauuugcuagaguuuagagcagcaaagggaggguaaaucaaagaccacugauuuggacucagccuucuugcucugcucugcauuug

SEQ ID NO: 4113550 - RNA, 66 nt, Human
uauuugcuuagcauuguauuuccagcauuuagacaaugcuggaauguauuaaguauugaguaaaug

SEQ ID NO: 4113551 - RNA, 77 nt, Human
uauuugcuuuaaaauggcuaagucuggaguuuuuacguauugaucuuucuaaacuuggaucacuuuuaaagcuagua

SEQ ID NO: 4113552 - RNA, 81 nt, Human
uauuuggaaaaugugcucauuuauaaaaguuacagugucuuuuuaaaguuugcugaaguaaaugaagcauaucgucaagua

SEQ ID NO: 4113553 - RNA, 75 nt, Human
uauuuggacuuccucuuucaaugaguaugagaggacaaacuccauuacugaaauaaagagaauaaaguccuaaug

SEQ ID NO: 4113554 - RNA, 70 nt, Human
uauuuggggagacagcacaggccacugggagcacuaauggucuaagguggcauguguugcacuccaaaua

SEQ ID NO: 4113555 - RNA, 100 nt, Human
uauuuuagccucaugcuucuauucaguucaccucuguaugaugaauucuugauguguaacucuccuauagauacuggguauggagaugaaaaagaaaaua

SEQ ID NO: 4113556 - RNA, 103 nt, Human
uauuuuauugugguaagaacacaacaugagaucuacccucaggaaacuuuuaaguguacaagaccuuauuguugccuguauguucuauauuguaaugcagaua

SEQ ID NO: 4113557 - RNA, 76 nt, Human
uauuuucagauacuccuggucucaggaggaggaguguuucuggucuuucucucugaggaaggagcaucugugaaug

SEQ ID NO: 4113558 - RNA, 96 nt, Human
uauuuucauccaucaucagaacuuagacuuguuucuugguaccuucuaccaugucuucaauaagucuaggauuagcauuuggguugggugaaagug

SEQ ID NO: 4113559 - RNA, 72 nt, Human
uauuuuccuuuuauacucgucugaaugauucuuugaaagagaauguuuucaugagaaugaauaggggaaaua

SEQ ID NO: 4113560 - RNA, 64 nt, Human
uauuuucuguugcuauugauagucauuguauuacuagaaaugaacuguugaugaauagaauaua

SEQ ID NO: 4113561 - RNA, 87 nt, Human
uauuuucuuagucuauaaauauuuaccaaaagcaaucuauuuacugaagcgguaccagacauuuuggaaaguauuacuuugaggaug

SEQ ID NO: 4113562 - RNA, 103 nt, Human
uauuuugagauacagguuugucguauucucugauugaaaguaacuuguacauguuugguuuucauuuacauuagggaagauggcagcaaguauuccuagagug

SEQ ID NO: 4113563 - RNA, 72 nt, Human
uauuuugccuaagaaucucucugauuauccgacacuuggagguauucucgagagauucauagcagcaaugua

SEQ ID NO: 4113564 - RNA, 57 nt, Human
uaggccaacguggaaggguccagaagaaccauggaggacccccuuuccucuggcuug

SEQ ID NO: 4113565 - RNA, 69 nt, Human
uaggccuucggugugugcuugguagguugaucaaugugaagccuuuuuccgaguacacuugagggcuug

SEQ ID NO: 4113566 - RNA, 56 nt, Human
uaggcgcuguggcucuguuuucagucccugaugggagaaaccagaacgcagcccug

SEQ ID NO: 4113567 - RNA, 77 nt, Human
uaggcgguccuuauuguuacuccuccgccuuuauaguuguggaaacugaggcucagaagugccaagugaccugccua

SEQ ID NO: 4113568 - RNA, 64 nt, Human
uaggcuacagaacugcaggaggaaaagcaauacuagcuugcuaccuagaacauucuguccccug

SEQ ID NO: 4113569 - RNA, 74 nt, Human
uaggcuauagaaguaagcauugugaugggggaagagccacucguuuuguaacaaaugccuuguuccauugucua

SEQ ID NO: 4113570 - RNA, 69 nt, Human
uaggcucuuucuaguucuuacaugaugugagucuauauaaugcacauuugaaggaauuagcauugccua

SEQ ID NO: 4113571 - RNA, 55 nt, Human
uaggcuggagcuucggugugugcuuuugcuauacagcuuacaguucuaaugccug

SEQ ID NO: 4113572 - RNA, 94 nt, Human
uaggcuggugaauucuuuaggugaauuucuacaagcaacaccuggagcuucugacaucuuagaaauucaaugcucugaguaguuggcuagccug

SEQ ID NO: 4113573 - RNA, 65 nt, Human
uaggcugguuuuauaggugaaauauuacucuuggaaaagacugguuuuucucaugaaaaugcuua

SEQ ID NO: 4113574 - RNA, 83 nt, Human
uaggcugugcgaggucucagagucucugacaagucccucauuagcucauccuuguuugcaugcucugugaccuguacaguuug

SEQ ID NO: 4113575 - RNA, 80 nt, Human
uaggcuuacuacaucuugcauaucuauaaccacucuggaggaauuuggaggaguaaggaguguguggauguauaugucug

SEQ ID NO: 4113576 - RNA, 126 nt, Human
uaggcuugagagaaugguuauuguuuuuucaauaauugcuuuguaucuucaguuugucuuuccauaaaaugggaauguaaucauggaaugcuagcaauacaaaauuugaaggcuucuacaggucua

SEQ ID NO: 4113577 - RNA, 68 nt, Human
uagggaaaauccuuccuucauuugacaggugaagaggggacucaagcccagaaaggggaggauccuug

SEQ ID NO: 4113578 - RNA, 56 nt, Human
uagggaaauuguggaacuuuuaaaauacagagggguuccagagauuguuucaccug

SEQ ID NO: 4113579 - RNA, 106 nt, Human
uagggagaagguaaaacuuuacugcagaugucucaauuuuauucagauguuucuuuugaguauaggcccuuuuugcaaggauaaguauugcuuuuuuuucccccua

SEQ ID NO: 4113580 - RNA, 76 nt, Human
uagggagaaugcaauauagggaagauagauuauuaacuuucuaaaaaugugguucaucuuuguauugcuuccccua

SEQ ID NO: 4113581 - RNA, 68 nt, Human
uagggagcaugccaggaacaaacaguggugcccacucacugggcccauuucuugaguucagcucuuug

SEQ ID NO: 4113582 - RNA, 87 nt, Human
uagggagcuuuaggaaaaucaugagagaugaaagaauuugaaaaaagugaaguuacauuuuuacagauuguucugaggucucagcua

SEQ ID NO: 4113583 - RNA, 55 nt, Human
uagggauagaagugacuggagcaaagaaauuugcugucaguuguuuuugucucua

SEQ ID NO: 4113584 - RNA, 56 nt, Human
uagggauggaaacccguuuucuagacacucuaacacacauaagguuuccauuuuua

SEQ ID NO: 4113585 - RNA, 56 nt, Human
uagggauugauuaccaugguugauauguauaauggagaacuguaauuaauacccua

SEQ ID NO: 4113586 - RNA, 62 nt, Human
uagggccaugucugucuuguucacuuguauaugcccagggcccagcacagagcuuggcucua

SEQ ID NO: 4113587 - RNA, 66 nt, Human
uagggcucgggcacaggacaggcgauuugacaucagaaaauccugcaggggcuggccuggccucua

SEQ ID NO: 4113588 - RNA, 115 nt, Human
uagggcugacugaguuggggaguggguggaguguaaaauggcagcuugaccaggcugggccauagccacucaucugaccacuuuaucucucaccucuucccccacuuuggccuug

SEQ ID NO: 4113589 - RNA, 56 nt, Human
uagggcuguggucaguccucuaccuugucauauagcacaguguaccacagucccua

SEQ ID NO: 4113590 - RNA, 85 nt, Human
uagggcuuuaccccauagggccugcuggugcuuccauugagacauccacucucacaacaggaaggaccagcuggccucagcucug

SEQ ID NO: 4113591 - RNA, 69 nt, Human
uagggcuuugauggcauucucauauugcuucacagugguaagaguauaaaugauggaaucauagcuuua

SEQ ID NO: 4113592 - RNA, 61 nt, Human
uagggcuuugcgauggcuauucccucucucuggaauacuuuucuaucacagaucugcccug

SEQ ID NO: 4113593 - RNA, 78 nt, Human
uaggggaccgugauuucuggcuuucuauauuugagagcuuccagaugaagagagaacagugaguucuggacaucccua

SEQ ID NO: 4113594 - RNA, 62 nt, Human
uaggggaggguguccauuugugauuugacuaauggagauucacaaagucacccuuacaccug

SEQ ID NO: 4113595 - RNA, 108 nt, Human
uaggggcuugcuguaaugcagucacuuggugaacacauuaugugcuucugggagauaauaagcuacaucgauggucagccgaggagaucugcuccacagagaccccua

SEQ ID NO: 4113596 - RNA, 79 nt, Human
uagggggagggcuacuggcaucuacaguggaucuacaguauauaggccaagaucuuaugaugcacagggcagcccccua

SEQ ID NO: 4113597 - RNA, 58 nt, Human
uagggggcuuugcugcuugacacaggcgcucccuaccauggcacccagagucccccug

SEQ ID NO: 4113598 - RNA, 97 nt, Human
uaggggucacaucaccaaauaugagaauauuguuuuaggccccgcaaugcuuucucagcuguguggugucugacagcucacccagguugcgccccua

SEQ ID NO: 4113599 - RNA, 62 nt, Human
uagggugacccuguuucuacaaauaauuuuuaaaauuagcugggcauagcggugcacaccua

SEQ ID NO: 4113600 - RNA, 58 nt, Human
uagggugacugcuccuuucuugacuuuguaguggaaagguauaaggaaugucauucug

SEQ ID NO: 4113601 - RNA, 66 nt, Human
uagggugcaguuaagugguccucucuucagaggagcuucagagaccacuuaacuuugaccacuuua

SEQ ID NO: 4113602 - RNA, 74 nt, Human
uagguaggcagucacuaguaaauacaggugccagagaacauggcagccuggagacuuugugaaauggcugcuua

SEQ ID NO: 4113603 - RNA, 62 nt, Human
uagguagggaaaugguuccugucugaaaagcaaagggaggaaagccaaucucucuugaccua

SEQ ID NO: 4113604 - RNA, 78 nt, Human
uagguaucuguucacuuaagcuuauugugacaaauaauuuauaaccaauuucacaauuguaucagaaaauaguaccug

SEQ ID NO: 4113605 - RNA, 57 nt, Human
uagguauuaaauauuaggauauucagagaccugaguuauaaugaauauuugaaccug

SEQ ID NO: 4113606 - RNA, 101 nt, Human
uagguccuggcaggccccauggucacuccugagcccuggggucagugugggaggccacacaguaccccaaggcugggcuccugggagucagccccgaccua

SEQ ID NO: 4113607 - RNA, 65 nt, Human
uaggugagaggaaccauguuuagacgagcaacccaaguuuccuaacaauggacuccucuuagcua

SEQ ID NO: 4113608 - RNA, 69 nt, Human
uaggugucuuguguaugguacaaguuugaaaguguuuaugugcacuaccuguuccauucaucauaucua

SEQ ID NO: 4113609 - RNA, 61 nt, Human
uagguuaccaccuaaccccuaauugugugucuuaccacauaaugcaaguggugguaaucug

SEQ ID NO: 4113610 - RNA, 67 nt, Human
uagguuaguguauuuucaaauguagagcauuccaaguucuacauguucacaugaauguacuuucuua

SEQ ID NO: 4113611 - RNA, 74 nt, Human
uagguucacacaucuuccagaucuacugauccuuaagaacaagggcaggccaaguugaaagaugucagagccua

SEQ ID NO: 4113612 - RNA, 107 nt, Human
uagguuccgauuuaguaggucuggaugagacucagaauugcuaacaaacucucagaugcuggcaguucuacuuauccauagacaucguuuugaacaccaaugaccua

SEQ ID NO: 4113613 - RNA, 79 nt, Human
uagguugaugcaaaaguaguugcaguuuuugccauuuaaaaguaauuccaaaagcagcaaauacuuuugcaccaaccua

SEQ ID NO: 4113614 - RNA, 82 nt, Human
uagguuggcuucauguuauugacucauaauaucauggccaacugaaauauuuugaaguuaauaauguguaccucuaacacua

SEQ ID NO: 4113615 - RNA, 61 nt, Human
ucaagacaggguuuaagguugagaguuuggaacuacucacuucaaccuggcucugccuuga

SEQ ID NO: 4113616 - RNA, 61 nt, Human
ucaagagauauaugcugguuuaagauacacaaaaacuugaacaguacuugagaucuuuuga

SEQ ID NO: 4113617 - RNA, 56 nt, Human
ucaagagcauguaucucccuaaauuggauuguaauuuggggauucccuguuuuugg

SEQ ID NO: 4113618 - RNA, 78 nt, Human
ucaagagcuuaaugcccuggagucagaggucugaauuccaucagggcuuuugaauuccaaggcauuaggacuauguga

SEQ ID NO: 4113619 - RNA, 73 nt, Human
ucaagaggcuagccggcucacuaauuagaccuugcaacacugguucuuuuuagcuuagcauggcugcuuagga

SEQ ID NO: 4113620 - RNA, 124 nt, Human
uauuuuuucccuucuauaauugaaauguacaagacugugcucuaagagugguguuuauuuaaauuuccauuuuaaaauagucuauguuuauaaucagcauuuccaauuaugaagauuuaaaaua

SEQ ID NO: 4113621 - RNA, 71 nt, Human
uauuuuuuggaccauuuauuaguucuuaagaugguaaugccaggcuuaauuuuuguaguagauggaaaaua

SEQ ID NO: 4113622 - RNA, 129 nt, Human
uauuuuuuuauugcuggcuggaucuuaggcaaaauaagccucuccuguuuccccaguugaggacaauugagaaaggcuuauguuugccaaagaauaucucaugcuagcaacaaaacuuuuaaggaaaua

SEQ ID NO: 4113623 - RNA, 70 nt, Human
ucaaaaauaaugaggucaugagggcuguuucaaaauuaauacaauucucucauaucuuauuacuaaguga

SEQ ID NO: 4113624 - RNA, 63 nt, Human
ucaaaacucauuuuggaaguaagcaguguaucccagggcugagguuccaaaaucaggauuuga

SEQ ID NO: 4113625 - RNA, 87 nt, Human
ucaaaagagacaaacuuaagguuguuugugaugcaaaauauuuaguuuugaccuaugaaacaaaccaguaauuuuguuggccuuuga

SEQ ID NO: 4113626 - RNA, 79 nt, Human
ucaaaauaauucuccaauuuuuguuguugcugaucacacugacauugcaaacuuuagaaguaaggaugaguugaguuga

SEQ ID NO: 4113627 - RNA, 62 nt, Human
ucaaaaucaaugauugaaguggugaacucuuaacuuuuucaucacauaugucaugauuuggg

SEQ ID NO: 4113628 - RNA, 65 nt, Human
ucaaaaugugcuucuuacucucaaugcaaauuauuuccagagcugggggcacaucauucuuuuga

SEQ ID NO: 4113629 - RNA, 57 nt, Human
ucaaaauuauuuagagcagacaguucuauauggagucuaaugcucaaauacuuuuga

SEQ ID NO: 4113630 - RNA, 57 nt, Human
ucaaacaccaucugaccuuaugucaaucaucugcuucauuagguuuaugguauuuga

SEQ ID NO: 4113631 - RNA, 62 nt, Human
ucaaacuaccucugugagccccauucaggcaauaggaguuuggagcagcugaacagaguuga

SEQ ID NO: 4113632 - RNA, 68 nt, Human
ucaaacuauguggcaacaaaagagccuaguguaccucagaauacacuuuggaugccacuggucuauga

SEQ ID NO: 4113633 - RNA, 68 nt, Human
ucaaagauuugaaagacuucuccugugaaaacauuagaaccuaauaaugcuuuggagaagcucuuuga

SEQ ID NO: 4113634 - RNA, 64 nt, Human
ucaaaguaccauuaucaguggacacccacuccacguggcacuacugugagaauggaaaccuuga

SEQ ID NO: 4113635 - RNA, 74 nt, Human
ucaaauacaagguuuuugguuuguguaucugaaagugcuuaguauauaugaggaaccacaaaccaaguguauga

SEQ ID NO: 4113636 - RNA, 130 nt, Human
ucaaauaccuuuuacuucuuugaaaaauguaguacuuauugugauaccaugcaguaguccugaaaaugcuucaaaaggauuccaaguacuuuauguuacuguaaacugcaccaugaauguggaaaguuga

SEQ ID NO: 4113637 - RNA, 69 nt, Human
ucaaauacucuggauguguuugugaaucugugugaaucuauaucacuacauaaccauccugauauuuga

SEQ ID NO: 4113638 - RNA, 76 nt, Human
ucaaauauguucaaaauagaucacuaguacagaugcagcaaaggcaaaaacaguaggaucuguugaauaaauuuga

SEQ ID NO: 4113639 - RNA, 76 nt, Human
ucaaaucagagauaccaugucacuuuaacaaauuaguguuacugcauuugguuuuaauagugacauccugauuuga

SEQ ID NO: 4113640 - RNA, 79 nt, Human
ucaaaucugcuccagcgggccagucuagccccaaagggauaaaggaguugaggguaggcugcuccuggggcccuccuga

SEQ ID NO: 4113641 - RNA, 56 nt, Human
ucaaauguguugguauggcuuuugaauaaaagaguugucccauacugacauauuga

SEQ ID NO: 4113642 - RNA, 64 nt, Human
ucaaauguuuguuuauguauauauacgugugguguuauguaugaaugcugggacaaauauauga

SEQ ID NO: 4113643 - RNA, 98 nt, Human
ucaaauuucauuuugcccaggaaaugaacuucugauuuuugcaguuaguaauuuacaacuaaucaagguucuucuuggggaauuugccaucaauuuga

SEQ ID NO: 4113644 - RNA, 100 nt, Human
ucaaauuuuguaucaaaauuuaaagucuaguguagcaugaccuuuaauaaucauugcaguucuucauguaugcuuugauuuuagauguuugauaauuuga

SEQ ID NO: 4113645 - RNA, 126 nt, Human
ucaacaaaacagaaaugcacuaguucaaauuuugaagguuaucuuuuucuaauggaagguauggaaacuuuguucuauuuuagagaugaaagcuuagagucuagaguauuaugauuauggugcuga

SEQ ID NO: 4113646 - RNA, 66 nt, Human
ucaacaauaauguauugccaaaagucagccauauuguuguguguagcugcaguucguuaguguuga

SEQ ID NO: 4113647 - RNA, 56 nt, Human
ucaacacucuuuggcacaguuacacggccaaagugauuaggugcuaagagugugga

SEQ ID NO: 4113648 - RNA, 78 nt, Human
ucaacacuuuuauagcuauuuauugagcuccauuguguacaagguacuuuaauaagcguagaagguauaucagguuga

SEQ ID NO: 4113649 - RNA, 129 nt, Human
ucaaccaccacccucuuaagcugagcuaguagaacaagugaggaucugccuguaauuacugcuuaauucauuugcauguggauguucucauuauaaugucauuagcauggggagggagucugguugcca

SEQ ID NO: 4113650 - RNA, 96 nt, Human
ucaaccaccuuuggugcaggaagaaaacuaauuagaugggcaaugcuguaagccauaucuauuuguuuuagauuuucuucagucuaaaagaguuga

SEQ ID NO: 4113651 - RNA, 63 nt, Human
ucaaccaucgccucccugcaccccggcccaggccccuaccugggaguggagagcaauggauga

SEQ ID NO: 4113652 - RNA, 62 nt, Human
ucaacccaaagacaugaggcauguaaccaggacaagaauuucagacuguacuuugggguuga

SEQ ID NO: 4113653 - RNA, 67 nt, Human
ucaacuacauagaaauuaguauuugccauaaaagguacagauacuauggaauuuuaugagagguuga

SEQ ID NO: 4113654 - RNA, 59 nt, Human
ucaacugauaaaguugccuuagauguuccuuuugucugagggacaauuuugaugguaga

SEQ ID NO: 4113655 - RNA, 69 nt, Human
ucaacugguuauaggaugauuucuucuguguaguuauuugaaugcuauauucauuuuaaagccaucugg

SEQ ID NO: 4113656 - RNA, 85 nt, Human
ucaacuucagccucauuuguuggccuagagugguugcuugauagcguuucacaucuauacccaauaauuugaaggcaggagauga

SEQ ID NO: 4113657 - RNA, 60 nt, Human
ucaacuuggcuuuuuaaaguccuguuuacauuuuuaacaacuuuauugaggcauaguuga

SEQ ID NO: 4113658 - RNA, 61 nt, Human
ucaacuuucuaucucuauccuguuuguuuguuuaaagaggcuggauugagcauagacauga

SEQ ID NO: 4113659 - RNA, 55 nt, Human
ucaacuuugaaaccauagugaaaucuguauucuagacuaaugguuucaaaguuga

SEQ ID NO: 4113660 - RNA, 62 nt, Human
ucaacuuuggauggcuguguguuuauuucaaaaugauaucacaguugcccaaauauuuuuga

SEQ ID NO: 4113661 - RNA, 88 nt, Human
ucaagaauuuuccaguuucauagcuacgauuuugggugaucuugucaagagcuuccaguuucauagcuaaggaacuguuuauucguga

SEQ ID NO: 4113662 - RNA, 55 nt, Human
ucaagacucugggaguugaauccuauguuggaaaccauucucccuagaauuuuga

SEQ ID NO: 4113663 - RNA, 108 nt, Human
ucaagaggggcuuggagauguagauguuuggguauugcuucaggauauagcucuauuauuuuuguuuguuuguuuuagccagagauccaucccuaggaccuuucuuga

SEQ ID NO: 4113664 - RNA, 70 nt, Human
ucaagauauauaucaaagaaucaagauagugagguucacagcuucuugauagguuuuauguauaguuuga

SEQ ID NO: 4113665 - RNA, 130 nt, Human
ucaagauauugguaauacugucauauuuuuggaauggugcuguacagauuauucagugaaaauaauuauucucuguucaggaauuuacaguuuagcauuucaaguugacaguuuagcauauaauccugua

SEQ ID NO: 4113666 - RNA, 103 nt, Human
ucaagaucugugacuaaagccaggguucagucugugacugggauuugguauuugaugcucugcuagaaacagcauauauuagcccuccuuagucugguguuga

SEQ ID NO: 4113667 - RNA, 59 nt, Human
ucaagauguccagugccuauaaaaugaacuguaaugaccuuggguaaauggcauuuuga

SEQ ID NO: 4113668 - RNA, 61 nt, Human
ucaagauuucauuucaguggcacagaagaugaagcacauccuuuguguccuaguguuuuga

SEQ ID NO: 4113669 - RNA, 59 nt, Human
ucaagcaguuuuuauaacacuggaauaugaaaacgauauauucauuagagacuguuuga

SEQ ID NO: 4113670 - RNA, 79 nt, Human
ucaagccaguauucaagccaaauucaagccaguauuaauaauauaauggcuuuaaaaugguuugguauuccuggcaugg

SEQ ID NO: 4113671 - RNA, 80 nt, Human
ucaagccguugaaauguguucaguuaaagccaguggccauaaacgugacccaugagcuucaacugacacagaaacuuuga

SEQ ID NO: 4113672 - RNA, 86 nt, Human
ucaagcuuagcaacuuuucuuucucugugcugccaaaggacaggaggagauacagagaugugaaaagcucuaauucuuuagcauga

SEQ ID NO: 4113673 - RNA, 70 nt, Human
ucaagcuuguuucuccugggggugcucuuccaaggauauuugggcugccuccggaguugcagugucuugg

SEQ ID NO: 4113674 - RNA, 98 nt, Human
ucaagcuuuuguucuuuugaggccugguuuccagcauccuugcugcuaaauuuggagaggaucagguugccaggacucgggggccaggagagucuuga

SEQ ID NO: 4113675 - RNA, 60 nt, Human
ucaaggaagggauauucuugaaacaaccuguuuucccagcuguucuuucccauuccuuga

SEQ ID NO: 4113676 - RNA, 78 nt, Human
ucaaggacaauuuuguugggagaaacauuauuuuauuucauugaaaaugaguguaucugcgacaauguuuguuuuuga

SEQ ID NO: 4113677 - RNA, 80 nt, Human
ucaaggcagcaugaaggagggaaagcagugcuucucugcuaccuugcuuagaaaugcugcugacccugcugcugccuugg

SEQ ID NO: 4113678 - RNA, 91 nt, Human
ucaaggccaagaaugacuuucuuuaaaauauuuuugugaaaaaggaagaaacaaguaaauguccuuagagaaaagucagugcaugguguga

SEQ ID NO: 4113679 - RNA, 85 nt, Human
ucaaggcuuuuagaaucuuauuucuaauaauauaucccccaaaaccccuaggauaauguuuagaaaauuaggaaaagaguuuuga

SEQ ID NO: 4113680 - RNA, 65 nt, Human
ucaagggcuuuaaugauuauuuucucuaacaaccagauuuuagagacucauaagaagccacuuga

SEQ ID NO: 4113681 - RNA, 88 nt, Human
ucaagguacacaaugugaugauuugauaaacguauugggaaaugauuaccacaaugaaauuaaucaacacauacaucaguacacuugg

SEQ ID NO: 4113682 - RNA, 71 nt, Human
ucaaggugccagauagauuuggugucugguugauaugguuuggcuguguccccacccaaaucucaucuuga

SEQ ID NO: 4113683 - RNA, 55 nt, Human
ucaaggugccagcaaguuagagccuggucucugugcuuccaagauggcaccuuga

SEQ ID NO: 4113684 - RNA, 125 nt, Human
ucaaguaaacagauagauuugggccagguaaguugauuuuggagagaugaaguucuguguagggauuucccuuuauuaagcucaugucuuuagugccacuuuuguguccugauuuucuaacuuga

SEQ ID NO: 4113685 - RNA, 106 nt, Human
ucaagucucugaaucugugucuccaugacugaaagcuuuguaaauaaacagguguccacuuaucccaaugugaauuaaaguuucauggagccagagggagaguuga

SEQ ID NO: 4113686 - RNA, 60 nt, Human
ucaagugagauggcuggugagguuuggugguugagaagucaucaguccuuuucauuauga

SEQ ID NO: 4113687 - RNA, 57 nt, Human
uaguauucagcuucucaggcaaaggauguauaaacuaggcaggauaggcugagacua

SEQ ID NO: 4113688 - RNA, 118 nt, Human
guugguccaaguucaguaugugaauggccuguggagaagcuggcaccugcaccaagcagguaaacccacaccugaggggcugcaggccagcucaggccccaugccuacaggagccggc

SEQ ID NO: 4113689 - RNA, 73 nt, Human
guuggucuuugguuucugagugucaccuggcuuagcucuuucauuaccaggcauuuagagaguaaaaauuagc

SEQ ID NO: 4113690 - RNA, 71 nt, Human
guuggugcaaaaguaauugugguuuuggccauuacuuucaauggccaaacugcaauuauuuuugcaucaau

SEQ ID NO: 4113691 - RNA, 129 nt, Human
guuggugcuaacaaaacugccguuuuugccauuauggcaaagauaauggagacugacacaaagauacuuuccaaaguaucuuuguaucaaucuccauuauggcaaaacccgcaauuaguucgcaccaac

SEQ ID NO: 4113692 - RNA, 82 nt, Human
guugguggggauuggggagagcuaauauuuuauagucuuucuguagaauaugauuaauuuucuuaaaaaaaaccccaaaaac

SEQ ID NO: 4113693 - RNA, 69 nt, Human
guuggugguggcagggcaaugcucccucuggaggcuuugaggaggaaucuauucccugccucuccuaac

SEQ ID NO: 4113694 - RNA, 60 nt, Human
guuggugugccaguggguagucuugcuucuggucugagaaaucccaaggcaucaaccagc

SEQ ID NO: 4113695 - RNA, 80 nt, Human
guugguuaucguuucuguauucugguucccugguacaauaucugagccauaagaguacaggagauauuucuuaaauuaac

SEQ ID NO: 4113696 - RNA, 68 nt, Human
guugguuccccagcauccauucugcuacagcccuguugaguagcagcagugugguuuggggaauugac

SEQ ID NO: 4113697 - RNA, 77 nt, Human
guugguugcucauguaguccguagaaagccaucuuugaauaggugacaaaguuugaaaugucugcaagggaaccagc

SEQ ID NO: 4113698 - RNA, 74 nt, Human
guuguaauagaauaguggaaacauugacuacagcacguuuuauugcugaaugcaauuuucagcuauuuugcaac

SEQ ID NO: 4113699 - RNA, 87 nt, Human
guuguaauaucauuuuuucagaaaggcuuaucaugcuauaagaagacuuauggaagggagcuggaauuuggaggauaauuuugcaau

SEQ ID NO: 4113700 - RNA, 119 nt, Human
guuguagacuaguuaauugugcugugucaaucaauuucuugguuugauaauacgcuuuaguuaugcauguuaccauugaggggaagcugggugacaggcacaagggacuucucugcaac

SEQ ID NO: 4113701 - RNA, 60 nt, Human
guuguagcauguaauuucauuuacuuuucaucaagguaaauguaaauggcgucuugcggc

SEQ ID NO: 4113702 - RNA, 77 nt, Human
guuguagucugcguuagucuuggcugaucuugguuggauuuacucguguuucaguuagcugacaaguaggcuagagc

SEQ ID NO: 4113703 - RNA, 78 nt, Human
guuguaguuucugugacucagggaucugggccuggcuuagcuaggugcucugcucacaggucucucccaagcuacaau

SEQ ID NO: 4113704 - RNA, 83 nt, Human
guuguaugaaagcagagucugugugcacuuuaguuuauccuuuuauuuucaaagccuaacauagacucugcaacaucauagac

SEQ ID NO: 4113705 - RNA, 58 nt, Human
guuguaugggggagucaugcagacuuggauuuaaaucuggaugccaccacauacuaac

SEQ ID NO: 4113706 - RNA, 57 nt, Human
guugucaagaaggggacugucacaccugcuaagcagguuaagcuuguuuuugaaagc

SEQ ID NO: 4113707 - RNA, 94 nt, Human
guugucaauauguaguuagaagggcauacuaacauaauuuaugcaacucuuugcauuguauuaaaauguguuucuguuuuagcuuguugaugac

SEQ ID NO: 4113708 - RNA, 71 nt, Human
guugucagcaaacagaugucuccuuuagccuaaggcacacucagagcuacuagggcagcuguugcuaugac

SEQ ID NO: 4113709 - RNA, 74 nt, Human
guugucagggagagccugucugacgugaggccuggaaagccccgcuccaggucagcaugcuccucucuguugau

SEQ ID NO: 4113710 - RNA, 79 nt, Human
guugucaucucuaggggaauugcaguguguccauccacccuugaggcauggcaaggugaacaucccuuggacugaagac

SEQ ID NO: 4113711 - RNA, 73 nt, Human
guugucauuacuucucaugcuucaugcccaucacagacaugggggugucagcagaaggggcagagaugaugac

SEQ ID NO: 4113712 - RNA, 75 nt, Human
guuguccaguuugcagauggcagguaguagaacuucucagccuccauaaucauguaaguaaauucucuggagaac

SEQ ID NO: 4113713 - RNA, 83 nt, Human
guugucuaaguggagggcuaagcugagggauaggugccuucuugccuccuccugagcucuggccuuuccagagcuaagacagc

SEQ ID NO: 4113714 - RNA, 77 nt, Human
guugucuucugcagucuagauguuuccuguuggauuggcccaagugggauagguaggcagggagcagagaggauagc

SEQ ID NO: 4113715 - RNA, 64 nt, Human
guugugaauagugccgcaauaaacauaugugugcaugugucuuuauaguagcacaauuuauaau

SEQ ID NO: 4113716 - RNA, 64 nt, Human
guugugaauagugccgcaauaaacaugcgugugcaugugucuuuauagcagcacgauuuauaau

SEQ ID NO: 4113717 - RNA, 77 nt, Human
guugugacuaaauuuaucacuugcaggaguuucaauucucaaacaugagcuccuguaguugcuaaguuuguuucuac

SEQ ID NO: 4113718 - RNA, 58 nt, Human
guugugauuccaugauguuuucucuaaaacacugaggaaagggcaugggcaugacaac

SEQ ID NO: 4113719 - RNA, 62 nt, Human
guugugccagccucuggcugugucuuugugccuggaguacuucuggccaggcuggccacugc

SEQ ID NO: 4113720 - RNA, 57 nt, Human
guuguggagcgggcagguaggacuauuguucccguugcgucuuggcugcugugcgau

SEQ ID NO: 4113721 - RNA, 74 nt, Human
guugugugguaaccacacuuacaguuuuauaagaaaucaccaaauuguuuuucauugugacugugccacauaac

SEQ ID NO: 4113722 - RNA, 67 nt, Human
guuguuaucguuuuguccagagagugguuuaagaagcagugcuggucucugagcccaauguagcaau

SEQ ID NO: 4113723 - RNA, 69 nt, Human
guuguucagccuagagugcaguggcaugaucauagcucacugcagccuugaacucugggcugaagcuac

SEQ ID NO: 4113724 - RNA, 81 nt, Human
guuguucuccaugggaggcaguggagaagguuugugacagacccugugagccuucauuuauggcugccacggauuacacac

SEQ ID NO: 4113725 - RNA, 66 nt, Human
guuguugaagcagauggucuggucauugccuggacucuccaaacaguaggccuucugcuuuaaaac

SEQ ID NO: 4113726 - RNA, 79 nt, Human
guuguuuagcauuggcauuucuccagcggaauacuagccagugguccagucauguguggaggaggucaugcugauuaac

SEQ ID NO: 4113727 - RNA, 77 nt, Human
guuguuuauuauuucuuccagugcuuccuaaacuuuuccacugaaguacugacagagaagaaugaaagcuacacaac

SEQ ID NO: 4113728 - RNA, 66 nt, Human
guuguuuguaaugacaggagacaaagaauggcugcugagagugaucucuuguuuuacaagcucggc

SEQ ID NO: 4113729 - RNA, 78 nt, Human
guuguuugucauaauaucauuacagauguuuucacucguaauccauuuauuugguaaugauccaguaugauuuauaau

SEQ ID NO: 4113730 - RNA, 108 nt, Human
guuguuuguuucauaggucagauucaagcaaugcccugguauauuaauagacuuaugaaugcuaauauuuucaagggcauuauuugaagacauauuuuuucagauuac

SEQ ID NO: 4113731 - RNA, 80 nt, Human
guuuaaaacugagucucccagcguuaaaccuaaugagcaccugcuaagagagagcugcgggaagacugagacauuuagau

SEQ ID NO: 4113732 - RNA, 81 nt, Human
guuuaaaagcagcagcuauauagaagcaggggaaaggguacucauucuguuuucuccucuacauagacugugccucuaagc

SEQ ID NO: 4113733 - RNA, 99 nt, Human
guuuaaagggcccugugugaagaaaauggcugagguuuucccaaaauaaaagauguuuggaaauggcuguaguuaugaaguuucgcucaccuaaugaau

SEQ ID NO: 4113734 - RNA, 75 nt, Human
guuuaaaugcauauuccugggaccccuuucucacaucaagaagcaggguagaucccaggaaucugcauuuuuaac

SEQ ID NO: 4113735 - RNA, 84 nt, Human
guuuaacaauaagacugguuuacugagguuaggcucaauaaaacuguuugggccugcuauuggugggcagacuaauugcacaac

SEQ ID NO: 4113736 - RNA, 90 nt, Human
guuuaacuauuguauagugaagaauauagauuuuuugaagucuuuauuaaacauauuagggucucuaaauucuagcuaacaugguaaagc

SEQ ID NO: 4113737 - RNA, 111 nt, Human
guuuaacucuaagaaacucacucauacuuaagcagugcuaguugagagaagcuauggagaaagugacaaccaguauguuuaggaggugaguuaguuuuuggcaguucuaac

SEQ ID NO: 4113738 - RNA, 74 nt, Human
guuuaagaaggcuguuugcuagaccuuugccacucaaaaugugguucaauguuuuagagcagugcuuuucaaac

SEQ ID NO: 4113739 - RNA, 64 nt, Human
guuuaagagcaacauauggugacauuuccuuuaaaaaaguguuaucacaauauugcuuuuagau

SEQ ID NO: 4113740 - RNA, 129 nt, Human
guuuaauaagugucaggcacuguucuaaguccuuauaaaauuucugugaauuguauagugggauaauaauaauacccacuucacagaaauuuuaugaggacuuagaacagugccugacacuuauuaaac

SEQ ID NO: 4113741 - RNA, 69 nt, Human
guuuaauauuccaagugggggaagcugagucuuugcagucggaccuggcuuccaaucuaggagcuaaac

SEQ ID NO: 4113742 - RNA, 56 nt, Human
guuuaauauucuuaaaaacccugucuuggaaaggacaguuaguuaggaaguuuuac

SEQ ID NO: 4113743 - RNA, 58 nt, Human
guuuaauucccacaccugcccuagaaggcacuuccuagggucgguauagggauuaaau

SEQ ID NO: 4113744 - RNA, 70 nt, Human
guuuacagugacucacauuaacaacugagguuugaaucacaaauuguuaauaagaguuugcgcuguccac

SEQ ID NO: 4113745 - RNA, 98 nt, Human
ucaagugugguuuacuaucuugcagaggccagcaaccacaguaaauuggaagauccuggguauuucuggugcucagagcaagaaugguucauauuugg

SEQ ID NO: 4113746 - RNA, 60 nt, Human
ucaaguuuagucauggugguagugguggugaugugauacugcugucuuugaagugcuuga

SEQ ID NO: 4113747 - RNA, 58 nt, Human
ucaaguuucaugauguaauuauugcuuggcaaaguaaaagaugggucuggaaucuuga

SEQ ID NO: 4113748 - RNA, 56 nt, Human
ucaauaaaucccucugacccuggaugucauccccaggguuuuuccaguuuguguga

SEQ ID NO: 4113749 - RNA, 73 nt, Human
ucaauaagcgauuggcuguuguuggccaucagcuguaggaauagucagcaauaguuaguuuacaacuuuuuga

SEQ ID NO: 4113750 - RNA, 80 nt, Human
ucaauaccagugauuugcccaacaccuucagugaagccucugcucucugagggucuaaggagucacucgcugguauuuga

SEQ ID NO: 4113751 - RNA, 86 nt, Human
ucaauacgaaugguaccaacaccaaagucuuuaucuaggauuccuucaaagaguugggugucugggcaacacucauuuguguuaga

SEQ ID NO: 4113752 - RNA, 66 nt, Human
ucaauagcaaucaagccuuccaagcauggguguuuuaaugcuggcuggaggcugaaugcagucuga

SEQ ID NO: 4113753 - RNA, 130 nt, Human
ucaauaugcaccuguuugaaguaauuucuuuaguaagugaaucugugccacaauaguuacguguucauaacauuauuuucugaagauaucaaaguguuauaucaaaacugcauguuuagcugucaccuga

SEQ ID NO: 4113754 - RNA, 68 nt, Human
ucaaucacagagauugcuuuuaaaaacaaaccucgguuuugaaagguagauucucugcuacugauugg

SEQ ID NO: 4113755 - RNA, 73 nt, Human
ucaauccucucaggcccuucucccaggacucccucuugagucugaguucuggucagcagggcagccggguuga

SEQ ID NO: 4113756 - RNA, 59 nt, Human
ucaaucuguguaugcugggaguaguaaaaucacaaugcagcucuaaagccacagauuga

SEQ ID NO: 4113757 - RNA, 61 nt, Human
ucaaugaagagauuuaaaucauuugguaguacccaaaugauguugggaucacuuuaauuga

SEQ ID NO: 4113758 - RNA, 82 nt, Human
ucaaugaauguuuguugagugaagaaaugagaacuugagaaaugaaggaauucagcuccuucacucauucagcauucacuga

SEQ ID NO: 4113759 - RNA, 57 nt, Human
ucaaugagcuggggacguguacucuuucuguucuguuuccgcccgucagcucgguga

SEQ ID NO: 4113760 - RNA, 57 nt, Human
ucaaugagguaaucagucacccacaaagcauggagucaaugaaaaggccucauuuga

SEQ ID NO: 4113761 - RNA, 79 nt, Human
ucaauuuguccuuuaaauggauguucaacugauuaagagaagcuaaucaucaguuacgaaauccauaaggcacagauga

SEQ ID NO: 4113762 - RNA, 74 nt, Human
ucacacagauugguagagcugagaucugauauggcccaccugaguccaaagcucacgcucuuuuaacuauguga

SEQ ID NO: 4113763 - RNA, 73 nt, Human
ucacacaggcucucuauugagugcaguuuggaagcggauuuuggcuggaggacuagaaagaggcuuguugugg

SEQ ID NO: 4113764 - RNA, 78 nt, Human
ucacacccagauauaugucuuuaauagccaccauggccacaauguggagauggguuaauggagagaaucuuggugugg

SEQ ID NO: 4113765 - RNA, 93 nt, Human
ucacacuaucacacccaggcuagagugcagguguaugguuacagcucacuguugauugcacaccugcacucaagccaugaugugacagaguga

SEQ ID NO: 4113766 - RNA, 62 nt, Human
ucacagaaacagaauggcacagcugugccuauaugcccagaaaagccaucgaguuuugguga

SEQ ID NO: 4113767 - RNA, 62 nt, Human
ucacagaagcaucauacccggaagaugcacauuugaaaugcuauauggugguguuucuguga

SEQ ID NO: 4113768 - RNA, 59 nt, Human
ucacagagagguuaagcaguugcaaacaugaaggcaacuaguuccuguucuccugcuga

SEQ ID NO: 4113769 - RNA, 68 nt, Human
ucacagcagaggcuguguaggcagacugccugggauugagccccagcugugccacugccucacuguga

SEQ ID NO: 4113770 - RNA, 63 nt, Human
ucacagcuccagacugcaacuccuggugugaucuagccuacagaggcacucgggagucugugg

SEQ ID NO: 4113771 - RNA, 65 nt, Human
ucacagcugggguuuuggcagccuguccucggguuguucagccuggugacccuagccgccuguga

SEQ ID NO: 4113772 - RNA, 71 nt, Human
ucacaggaaggguaaauauuuaacauuuauuauguauuuuuauuuguucaaauguugcccuuuauuguaga

SEQ ID NO: 4113773 - RNA, 55 nt, Human
ucacaggagaauguacuuaccaauuacaacauuuugauaaggcauucuuauguga

SEQ ID NO: 4113774 - RNA, 55 nt, Human
ucacaggccuggggcagagggccuggccccugcccucgccccuggggcccuguga

SEQ ID NO: 4113775 - RNA, 59 nt, Human
ucacaguuauagucuguagaaugucaagauagccaagaucucugcagacuauauuguga

SEQ ID NO: 4113776 - RNA, 68 nt, Human
ucacaguuaugaggccuacguucuuugucucgaaaauagggacaauuacccuggcuugauaaaaguga

SEQ ID NO: 4113777 - RNA, 71 nt, Human
ucacauagcaaaauauuuuguuuucuugcuguaaaguguaugcaguaaagccugagauauaugcuaucuga

SEQ ID NO: 4113778 - RNA, 74 nt, Human
ucacauaggcaagaugagguuuuuauucagcucuaaaaaucaaaugauaaaaguuuccaaucaugccuguguga

SEQ ID NO: 4113779 - RNA, 79 nt, Human
ucacaucaaugucauauauuuuggcagugaucacuuauuaaugguguuugauuaaguucaaaauauagaaacugagugg

SEQ ID NO: 4113780 - RNA, 57 nt, Human
ucacauccuaucagucacgguuucagauaugaaacuagagcaugugagugggaguga

SEQ ID NO: 4113781 - RNA, 99 nt, Human
ucacaucucaguuagcuauuuuuaggaucaaaugaaauauuuugauuugcugaaaucaagcuuaauguuuaugaucugugaggcacuaacuaaauguga

SEQ ID NO: 4113782 - RNA, 94 nt, Human
ucacaugcacauacuuccugugugggcauggagaccacacgcccaugugcccgugacuccaugugcauaccugugagugaguaugugcuugcga

SEQ ID NO: 4113783 - RNA, 80 nt, Human
ucacaugguauacuagauagacaguaucaaggaccaacuuacuggaugauacuuaacaaugucugaaugcugugauguga

SEQ ID NO: 4113784 - RNA, 84 nt, Human
ucacauucucauuuccaugccuaagagccugaagcuugaacaaagggcuucaguuaguuucaugugagccaaaauggaauguga

SEQ ID NO: 4113785 - RNA, 63 nt, Human
ucacauuucuagacuuagaacucuuaggaaaaugauccauaaaaggucuaguuuggaaauuga

SEQ ID NO: 4113786 - RNA, 62 nt, Human
ucacauuugauaaugcccauuggccaaagcaagucccauggccaagggcacagucaguguga

SEQ ID NO: 4113787 - RNA, 61 nt, Human
ucaccacccccagacaggaaaaugcaggcaaaaaugagacuggauucccugggaguggugg

SEQ ID NO: 4113788 - RNA, 66 nt, Human
ucaccacugaaaaauauguuuuggagaagacuucaucuaguuauucuggcuguuuuacaggggugg

SEQ ID NO: 4113789 - RNA, 57 nt, Human
ucaccacuggaggucuuggcuuuuuuucaucauaaaggaacccccucggguggcuga

SEQ ID NO: 4113790 - RNA, 64 nt, Human
ucaccaggagccauagagucaggcugggcaagaagcacaaccggguccugaccaucuucuguga

SEQ ID NO: 4113791 - RNA, 55 nt, Human
ucaccaggcuccuguuaagaugcuauugcagaauauuucccagagccaugaguga

SEQ ID NO: 4113792 - RNA, 62 nt, Human
ucaccaucuguaucugacaaauucuugcugcuuugcaacggaagcauuucgauaagauggga

SEQ ID NO: 4113793 - RNA, 73 nt, Human
ucaccaucuuuauuagcuuuaauggggagcauuuuauugaguuagguccagaaaaguugauuuagauugguga

SEQ ID NO: 4113794 - RNA, 76 nt, Human
ucacccaucuaugaagccuucccaacuuuugacagagcuggcucuugaaaggagauuggaggcacaguggauguga

SEQ ID NO: 4113795 - RNA, 55 nt, Human
ucacccccugcccuacuccagggcccaggccaggccuuagggcucuagggaguga

SEQ ID NO: 4113796 - RNA, 82 nt, Human
ucacccucagcucccuccacccagaccagacaaacuucagguuaguuuguaggagggugcuggagguaagggagcagggaga

SEQ ID NO: 4113797 - RNA, 75 nt, Human
ucaccugacaggcuugcuaagacauagauaucugggucccacaaccagagugcugauccaggaggucugucguga

SEQ ID NO: 4113798 - RNA, 69 nt, Human
ucaccugaggugucuuagcugauaaaugcccaagcuagucugucugaugcugagacgcaaccucaguga

SEQ ID NO: 4113799 - RNA, 106 nt, Human
ucaccuggagagcuuuuccagcucacacaggcaggaucccuuccccucucaguaaggcugguggguggggcugggcguguguacugggcuacagcuccccagguga

SEQ ID NO: 4113800 - RNA, 111 nt, Human
ucaccuggagggcuugucaaaacacagauuucuuggcccacucucagauucugcuucaguaguucuguggugaggccugagaaauuguguuuccaauaaguucccagguga

SEQ ID NO: 4113801 - RNA, 58 nt, Human
ucaccuggcccagcuccagugcuuccucccccgggaagcccucccugagcgccgguga

SEQ ID NO: 4113802 - RNA, 101 nt, Human
ucaccuggcucuuuuugcuggauguaaagggugaagaaagagaaagaguuucuauuccguaucccauacuccuaccccauuagacagaaaaguagaggaga

SEQ ID NO: 4113803 - RNA, 89 nt, Human
ucaccugggaacuugcuaaaauacagacucuuguagcguaaauuugagaugaacucugagucugguauuucuaacaggcuuccauguga

SEQ ID NO: 4113804 - RNA, 89 nt, Human
ucaccugggagcuuuuagaaaugcagucucucagacuccaccaaauuuacugaaucaaaaucugcauuuuaagaaaauccuccagguga

SEQ ID NO: 4113805 - RNA, 55 nt, Human
ucaccuugugauccacccgccuuggccucccaaagugcugggauuacaagcguga

SEQ ID NO: 4113806 - RNA, 63 nt, Human
ucaccuuuauuuuccaugugaagcagauggcaaagccaccuucccacagcgaagacaaggugg

SEQ ID NO: 4113807 - RNA, 73 nt, Human
ucaccuuuuuaccagaauugccaccagaaaacuauuaauucuuuucugggaggcagugguaugagggaacuga

SEQ ID NO: 4113808 - RNA, 71 nt, Human
ucacgacacuggggauugguuuuuccuuccugcuaagacugggcuggcacugagggccacuuccaucguga

SEQ ID NO: 4113809 - RNA, 62 nt, Human
ucacgggcagauugggaagguucaucacucuaaauagguaugagcauuuuuaauuucugugg

SEQ ID NO: 4113810 - RNA, 62 nt, Human
ucacggggguauccagaggauuaaaaaauagauuuuuauaaagcucuuuggagauccuugga

SEQ ID NO: 4113811 - RNA, 117 nt, Human
ucacguauuuuggccaguggaaugugaguagacgugaucuaguaacauccaaggagaauuuuguggugcuugauuugucugcuugcacucuuacugucauccaugagaaauguauga

SEQ ID NO: 4113812 - RNA, 84 nt, Human
ucacgucaucuucuagcacugugauuaugcucaucauagcaugugauuaugcacccuuaugaauaugaucucauggaaauguga

SEQ ID NO: 4113813 - RNA, 64 nt, Human
ucacguucucucaugaucuucccgaaauguuauccuuaagcuucggggagaggugagcaacgga

SEQ ID NO: 4113814 - RNA, 69 nt, Human
ucacuaaaaauguaccuucaaucauggagaugauuucgauugccgguugacagauauacauuguaguga

SEQ ID NO: 4113815 - RNA, 63 nt, Human
ucacuauauucauuuuugguagauggaggauccagagugugacagaaauaugaaugaugguga

SEQ ID NO: 4113816 - RNA, 63 nt, Human
ucacuaugaugagguccuguaucaaguacaauuaaucuuuguacuuuacaauuuacauaguga

SEQ ID NO: 4113817 - RNA, 91 nt, Human
ucacuauggaauacugaacuuaguuaagauuaagucuccuaaaguauugggggaauugagguaugcugggcuuaccuuguucucauuuuga

SEQ ID NO: 4113818 - RNA, 77 nt, Human
ucacuauuagcaguaugauugccaguucuaucuuggugcugagaugaccaaauggcagucaucauuuuuauguuuga

SEQ ID NO: 4113819 - RNA, 68 nt, Human
ucacuauuuauggauuccuuuuuggguauaguuauuuucuacaugcucagaacaucccagauaguaga

SEQ ID NO: 4113820 - RNA, 70 nt, Human
ucacucacagaugugguuaacauguacauagccuacuggucuauguuacacuguuucacguuccagcuga

SEQ ID NO: 4113821 - RNA, 65 nt, Human
ucacuccccugccccgugucccuucaugcagaaacacgcaucagggcaugaagcagaggacgugg

SEQ ID NO: 4113822 - RNA, 71 nt, Human
ucacuccucaggcuagcaucaucugggggccgcauacacaucugguaaauugauguugaccuaaguaguga

SEQ ID NO: 4113823 - RNA, 92 nt, Human
ucacucucuacaaagcugcuucacaacugaaucaaaccaaacaaacagggcagcuggacugguuuucuggugguggcaguggguggggguga

SEQ ID NO: 4113824 - RNA, 91 nt, Human
ucacucugacuucucuguagcagacagacccuagguaagcagcaauagaacugugaaaccuguuaaaaugcuguuacagggauccagguga

SEQ ID NO: 4113825 - RNA, 61 nt, Human
ucacucugugauugcagcauuccacuguccagggaaaucaagccuugcugucagagaagga

SEQ ID NO: 4113826 - RNA, 76 nt, Human
ucacucuguugcccaggcuggaguguaguggcaugaucuugacucacugcaaucuccaucuccuggguucaaguga

SEQ ID NO: 4113827 - RNA, 76 nt, Human
ucacucuguugccuaggcuggaaugcaguggcaugaucucggcucacugcaaccuccgccucccagguucaaguga

SEQ ID NO: 4113828 - RNA, 76 nt, Human
ucacucuguugucuaggcuggagcauagcagugcaaccauggcucacugcugccuccaacuccugggcucagguga

SEQ ID NO: 4113829 - RNA, 57 nt, Human
ucacugaccugaccacuuaaccuauugauaagcuggcaaggauggagcaggcgguga

SEQ ID NO: 4113830 - RNA, 94 nt, Human
ucacugacguagcuugccucauauucuaagggcugacaaugguuauuuccugaaggcccugcugaguggaguggaggcguggguuaggucagga

SEQ ID NO: 4113831 - RNA, 68 nt, Human
guuuuaaacacaacuuugugugaauaaaaugaugugucugcaucucuccaggaagcaguguuuggagc

SEQ ID NO: 4113832 - RNA, 58 nt, Human
guuuuaaaggcuagagcaguuggggcaauauuuauucaucuguaacagccuaugaaau

SEQ ID NO: 4113833 - RNA, 61 nt, Human
guuuuaagugaugagcacaguaauuagcuugcugcugagugcaggaguucacauugagaau

SEQ ID NO: 4113834 - RNA, 57 nt, Human
guuuuacacagaaacgcaggcuuggccagacauaagacugucuuuucugagugacgc

SEQ ID NO: 4113835 - RNA, 78 nt, Human
guuuuacagugguuuuauaucuaagcuugccuuuggcaucuuaccucgcuagauguuaaaaaaaacuauauguaacac

SEQ ID NO: 4113836 - RNA, 84 nt, Human
guuuuaccuggggguggcugagcuagcuaucucagucugugaucaccuaucauaaacucuagggcgcccacuccugggugaggc

SEQ ID NO: 4113837 - RNA, 66 nt, Human
ucagcagcagcucagcauguuuacugcuuaaucacuucaugcccaagaacacgugggcuguacuga

SEQ ID NO: 4113838 - RNA, 93 nt, Human
ucagcaggcagauuuggggaagagggagcuggaaugauguacaugugaaucaucucaguugcuuucuuuuccugucugcucuucuucugcuga

SEQ ID NO: 4113839 - RNA, 80 nt, Human
ucagcaggcuuucucccucauugauuacacucauucaucucagauggagggguggucgcgaagagcaaggaagggacuga

SEQ ID NO: 4113840 - RNA, 59 nt, Human
ucagcagggccuccuugugcagaaaguaauuuguaccagcgucccugaggcccugcuga

SEQ ID NO: 4113841 - RNA, 87 nt, Human
ucagcaggguuguugguuuagcaacuuccugugucuccagacaagaguauguggagagugugccuagcccagccaagcuuugcucga

SEQ ID NO: 4113842 - RNA, 106 nt, Human
ucagcauacuuuuggucuauaaaauaaaauacuccucugaaaaucuuuuccuagguauugauauaguuuucaagagaguguucuauguuguauuaguuuuggcuga

SEQ ID NO: 4113843 - RNA, 84 nt, Human
ucagcaucucaaacaucuuugaccauagaaacuucauucgucuuggaggacuaauguuguacagauauauuuggguaaugcuga

SEQ ID NO: 4113844 - RNA, 92 nt, Human
ucagcauuuuucuucuuucuaaauguaaauaguaugaugcaguguccuguaaaugaugcuguuuaucauauacugucagaagaugcugcuga

SEQ ID NO: 4113845 - RNA, 56 nt, Human
ucagccacuuugcucugcuguggaacagugccacagcagcaggcuguguggacuga

SEQ ID NO: 4113846 - RNA, 75 nt, Human
ucagccacuuuugcuggggugugaaaucugaugauaguucaucuaacuuauguuuuaccaaauuagcauggcuga

SEQ ID NO: 4113847 - RNA, 68 nt, Human
ucagccauuuagagaagauuacaaggacaugaagcucagucacuguaggaaucucuaaauuggguuga

SEQ ID NO: 4113848 - RNA, 57 nt, Human
ucagcccggguucgcaaacacucggccccgcacaaagauggcguggagccgggcugg

SEQ ID NO: 4113849 - RNA, 63 nt, Human
ucagcccucacugggaagggaggggagcagagccccguggcucccaccccggucaagggcuga

SEQ ID NO: 4113850 - RNA, 76 nt, Human
ucagccugcccgcugcuagagaggccgaggugguccggccagccgugcgcugcugcuggugucucugugggcauga

SEQ ID NO: 4113851 - RNA, 59 nt, Human
ucagcgccuaaguuuuaagccagugggaauacucugcugccuggcuucacaggcacuga

SEQ ID NO: 4113852 - RNA, 103 nt, Human
ucagcgcucuuucuaggcuggaggguucagccuguccuuguaucucccacauacucuagaacagugcugagccuuuggcaggaguucauuacauauuuguuga

SEQ ID NO: 4113853 - RNA, 62 nt, Human
ucagcgcuggcuggcgcuccuuccugggaggcugacugccggaagaggcccagcccugcuga

SEQ ID NO: 4113854 - RNA, 80 nt, Human
ucagcgugccaggaaguggcugggcuggguugguggucuaucuuacgcccaggcucgcuccgucacuuccacaucgcuga

SEQ ID NO: 4113855 - RNA, 62 nt, Human
ucagcguuaguuuuucaucuaaaccuggggugccuggcccagcacuuagagcuacauguuga

SEQ ID NO: 4113856 - RNA, 77 nt, Human
ucagcuaccgugcuugcacagggcuggaauguccuugguauaacaagacaugcaauaaugugcacucauguaguuga

SEQ ID NO: 4113857 - RNA, 72 nt, Human
ucagcuauauggucaguaacauucuagaugugaaguuucuaucugggucucagagugaccauguguagcuga

SEQ ID NO: 4113858 - RNA, 62 nt, Human
ucagcuauguuuuggaacagggagcugcuaaaaagacuuugcuuccuuugaauaucaguuga

SEQ ID NO: 4113859 - RNA, 69 nt, Human
ucagcuccuccguggacacagugcagugcaaauaucaugagcuuuggagucacacaggccuggagcuga

SEQ ID NO: 4113860 - RNA, 80 nt, Human
ucagcuccuuuuauucaaauaguucacacucuugauguaaccccaggaguugcaacucacugaacaaaaugauuggcuga

SEQ ID NO: 4113861 - RNA, 129 nt, Human
ucagcucgaugacguccuggcuugccucccgcaugccgccggugaacauggcccugaagggcagaaacacaacguguggcuggcaguggcugagggguguuuuggccagccaggaaugaucuggccugg

SEQ ID NO: 4113862 - RNA, 65 nt, Human
ucagcugaggacauacacauugugcaacuccaauuuuuugccauucuguguaugucuacaaauga

SEQ ID NO: 4113863 - RNA, 81 nt, Human
ucagcugccacuugacgacuucuccccgucucucugaggcccggaaaccacggcuggagguggggaggggauggcggcuga

SEQ ID NO: 4113864 - RNA, 60 nt, Human
ucagcugccuuucccaugcuagcuucucugaaacaccaggccagaggaagggagagcuga

SEQ ID NO: 4113865 - RNA, 60 nt, Human
ucagcugcuuguacaugaccacaucccuauuucuauugguguagguaagcaugcagcuga

SEQ ID NO: 4113866 - RNA, 75 nt, Human
ucagcuggaugauagcuacuuaucuuccaagacuuacauuuucuccaggaagauuucaguuaaguaucuaucuga

SEQ ID NO: 4113867 - RNA, 62 nt, Human
ucagcuggcaucggcucacccacacaccccacccugguaccaggaggagccaggugccuuga

SEQ ID NO: 4113868 - RNA, 63 nt, Human
ucagcugggaggucuuggagaauuuugcagagagagaggauguggcugagacuucugggcuga

SEQ ID NO: 4113869 - RNA, 92 nt, Human
ucagcuucauggggaaaauggacuguuuagaacacggaaauacugagccaaaugcuacagcaaugguucuaagagucaagucucagagcugg

SEQ ID NO: 4113870 - RNA, 87 nt, Human
ucagcuugagguauuaugaggaauaacuaucugauccaaaucugugguggacaauuagaucauuccuuugauaauauccauaucuga

SEQ ID NO: 4113871 - RNA, 57 nt, Human
ucagcuuguuuaugauaagcaguccaaaaugaccucaaaaaucguggacaagccuga

SEQ ID NO: 4113872 - RNA, 65 nt, Human
ucaggaaagguuuguugaauggggaacuaagaagugaauucguucguucgacaaacguuuccuga

SEQ ID NO: 4113873 - RNA, 58 nt, Human
ucaggaagcugcucugggugguagcuuuaggaucuacacccucagcaaggcuuccuga

SEQ ID NO: 4113874 - RNA, 85 nt, Human
ucaggaccagcagaggggcggagugcagaagcucugugucccugagcucugagcugcucucuccacccccuugcugcuuagcuga

SEQ ID NO: 4113875 - RNA, 63 nt, Human
ucaggacccugcagccacccgacaugugaggccugggcaugguggggcagggcaggggccugg

SEQ ID NO: 4113876 - RNA, 58 nt, Human
ucaggagauggucuuuauaggcuuaauuuuuaggaagguccagagagccggcuccuga

SEQ ID NO: 4113877 - RNA, 74 nt, Human
ucaggagcaguaugcauugacauuuugaguaaauauuucaguuuuaugucgaauguauacucaguugcuucuga

SEQ ID NO: 4113878 - RNA, 59 nt, Human
ucaggaggaugucggcaaauuuaaagggacaggauuuauuuugucgccaucuuccuuga

SEQ ID NO: 4113879 - RNA, 59 nt, Human
ucaggaggcgugcugggguacaccaggugaaugucugcccugccccaguccgcucuuga

SEQ ID NO: 4113880 - RNA, 57 nt, Human
ucaggaggcugagguugcagugagccgagauugugccacugcauuccagccugguga

SEQ ID NO: 4113881 - RNA, 66 nt, Human
ucaggagugcggaggcuggugguucuuaggugacaagagccaccuggggaccugccucagcccuga

SEQ ID NO: 4113882 - RNA, 64 nt, Human
ucaggaguuggcagguauauaauucuggaugauagcaugugcuguguguacucuccaguccuga

SEQ ID NO: 4113883 - RNA, 61 nt, Human
ucaggauaccucaguuuuagcugugugcuuuuguguagugaaaugcagugaggucuuguga

SEQ ID NO: 4113884 - RNA, 86 nt, Human
ucaggaucuccuggaggguuuauuaaaacagacuucuggguuccaccucagaguuucugauuuaguaggucugcagaugggacuga

SEQ ID NO: 4113885 - RNA, 65 nt, Human
ucaggauugaagaucagggaaagauucucuucuccugaggaacuguccgaggucuuccauuguga

SEQ ID NO: 4113886 - RNA, 56 nt, Human
ucaggcacguugaugccuagcuugugaauugugaagcaacauauaucaaugccuga

SEQ ID NO: 4113887 - RNA, 58 nt, Human
ucaggcauguugggggagggugcaguggcaagcucugaauggacacuccaguguuuga

SEQ ID NO: 4113888 - RNA, 71 nt, Human
ucaggccacuucacaggugauugaaaccgccucaaucuauagccuagccaaucacuuaugaauugcccugg

SEQ ID NO: 4113889 - RNA, 62 nt, Human
ucaggcuaacccuaggcagaaguauuaauagucgcuaacguucgcucuggguuaagcacugg

SEQ ID NO: 4113890 - RNA, 60 nt, Human
ucaggcuagauuggggccaguagggucuagugguuuuagggcccacauaucuagauuugg

SEQ ID NO: 4113891 - RNA, 78 nt, Human
ucaggcucaguauagcuggcaagucaauauuaucaacaguaaucaaaacugccagcaaugugaaagaaaucagucuga

SEQ ID NO: 4113892 - RNA, 76 nt, Human
ucaggcugggcaauucaggaucaaguugccaguagauuuggugucugcugauggcuguuuucugcuuccagaaugg

SEQ ID NO: 4113893 - RNA, 55 nt, Human
ucaguuauuguuauucuuauggaaacaacccaugggaaauguagccuuggcauga

SEQ ID NO: 4113894 - RNA, 55 nt, Human
ucaguuccucugcccaaggcagccuccucccuggggugccuguguggaggacuga

SEQ ID NO: 4113895 - RNA, 85 nt, Human
ucaguucucagaggucaagagcagagcuuuccaagucagcuaaauggacuuccaccuauggcacugcuccuggcgucugaccuga

SEQ ID NO: 4113896 - RNA, 56 nt, Human
ucaguucuuauuuucaugaauagugacuguccaccagcagcgaguuuaagggcuga

SEQ ID NO: 4113897 - RNA, 63 nt, Human
ucaguucuuuucuagauucuggaucuaaaucucaucuuagaaggaauuuaaagaggaauuaga

SEQ ID NO: 4113898 - RNA, 60 nt, Human
ucaguugcaugggaaguucagacaaauuugccaacugaaacucacccccaaaguagcuga

SEQ ID NO: 4113899 - RNA, 66 nt, Human
ucaguugcucaauguggcuguggagcugcagaagcaaucacgcugcuuucacagugagcucacuga

SEQ ID NO: 4113900 - RNA, 80 nt, Human
ucaguuguacuucuacuuucaugacccugacacuuucaaagacugcaggcaguuauuuaguagaaucucucucaauuuga

SEQ ID NO: 4113901 - RNA, 130 nt, Human
ucaguuuaccuucccuauuuuuuaccauuuguaaaacuaaggcucagugauguaaaauauaacacauucugugcuguggcauaacugcagcuuagguuuuuauauucaagacaagcagagguauagcuga

SEQ ID NO: 4113902 - RNA, 60 nt, Human
ucaguuuccugguuuuaauauuacuaugauuauguaaaauauaaccuuugggggaacuga

SEQ ID NO: 4113903 - RNA, 65 nt, Human
ucaguuuucacacucaccaaaaggggcuaucacuaccugucuccuacgguuaaugugagaacugg

SEQ ID NO: 4113904 - RNA, 90 nt, Human
ucaguuuucacucugucaauauguaauaacugaaucugucuuuguggugaggauucagugaguuaacauauuugaagugcuuaaaaauga

SEQ ID NO: 4113905 - RNA, 79 nt, Human
ucaguuuucaggagcacaucugucaucauuauguauauaauuaacacagugucuuagguagugucaucugaauuacuga

SEQ ID NO: 4113906 - RNA, 95 nt, Human
ucaguuuugaucauuuauauaucugcaguacugaagaacuugccugguauuaaguguccaguaaauaucuguagaacgaaugaauaaaugcauga

SEQ ID NO: 4113907 - RNA, 55 nt, Human
ucaguuuuuaagaguuaugcgacuugaauagugauuugcaaauucuaaaaacuga

SEQ ID NO: 4113908 - RNA, 82 nt, Human
ucauaaaaauugacugccacagaaacccaccaagucaucaucucaucauauguugauucaguugguuuuguucaguucuuga

SEQ ID NO: 4113909 - RNA, 96 nt, Human
ucauaaaaguuaaaaugccauaagaguguguuccccaagaaagaaauaauuuucuuuucauugagaacacacuggaggacauaauauacuucuuga

SEQ ID NO: 4113910 - RNA, 78 nt, Human
ucauaaacaauccaggaaccuguuuauccaucugauauuccagcuuggcaaguaaauaaguucuucauuguuuguaga

SEQ ID NO: 4113911 - RNA, 95 nt, Human
ucauaagcuuuggaagcccuggcuccugugcaggucucgguugcuguuccagccacuggcugucagcaggacucagaggcucccauggcuaguga

SEQ ID NO: 4113912 - RNA, 102 nt, Human
ucauaaucaaugcaccuguagcuuccagaaagugucuuuguuuuacugaaaagccaaccagagaaaaaacauuuaucugcugagauguguaugugauuuuga

SEQ ID NO: 4113913 - RNA, 78 nt, Human
uacaaaugggauguggcauuuuggaaaaacuugacaacuuauccuucauuuuacagaaaguuucccaugccguuugug

SEQ ID NO: 4113914 - RNA, 70 nt, Human
uacaacaccugauauuaucucuuucaagacaaaaugucuuucuagaaauagagauagaguuggccuugug

SEQ ID NO: 4113915 - RNA, 91 nt, Human
uacaacuauuagacuuugaaaagaugaggaacuugaacaguuaacagaaacugagaagauucucacucuuaguuauaagcagauaaaugua

SEQ ID NO: 4113916 - RNA, 61 nt, Human
uacaagauaagaauuggcaaggaccauuggguaugaccuucccauccucuuauuuucugua

SEQ ID NO: 4113917 - RNA, 62 nt, Human
uacaagcugaauggugcuggggggggucaauccgcccuucugagcuucaauuucagucugua

SEQ ID NO: 4113918 - RNA, 71 nt, Human
uacaaggauucacuguuggguggaagauuugcugggaacaaggguuauuuuugcagccacagugccuugua

SEQ ID NO: 4113919 - RNA, 65 nt, Human
uacaaguggaaagaaggcgguaucacucucugcaauagaggucacuccaccuucuucucuuugua

SEQ ID NO: 4113920 - RNA, 66 nt, Human
uacaauacucuguugggacaugaacauuuuuagaagagaguggacaaccaugcugagauuauugua

SEQ ID NO: 4113921 - RNA, 73 nt, Human
uacaauguuaauggauuggagguuucaauauuguuaagauguugauuucucaaaaaaucucaauaaaauugua

SEQ ID NO: 4113922 - RNA, 57 nt, Human
uacaauuacuacagcuaauaaagugcaacugaagagcacauagcagcaguaauugug

SEQ ID NO: 4113923 - RNA, 67 nt, Human
uacacaauuucugaguaaugaugcacgagaaugcucagguauucauagaauucagagagggggugug

SEQ ID NO: 4113924 - RNA, 64 nt, Human
uacacagauaugugaucaaucacauuauuucuuugucuuucagugauuggucacugcaugugug

SEQ ID NO: 4113925 - RNA, 125 nt, Human
uacacaguaggugcuuuauaauguuuuguugaauaauggaaugccucacauguauuuucuuagcuaagaaugauaaacacaaggugauuucauguauucccaacaugugaguuuuucucugugua

SEQ ID NO: 4113926 - RNA, 58 nt, Human
uacacauguccaaggugucaccuaggugcaugaaaccagguuuugcauugacugugug

SEQ ID NO: 4113927 - RNA, 69 nt, Human
uacacauuauauuaagagauguaugaagagaaaacuguuuauuuucaccuucucuggauauuuugugug

SEQ ID NO: 4113928 - RNA, 129 nt, Human
uacaccuaucugcucauuuuguuguguuagcuuuucugguuuauuucauaguuuguucuugcuauuuauuaagaacagaauaucaaaagauuaugaauagccucagcucuagaaugcuuaccacuguua

SEQ ID NO: 4113929 - RNA, 73 nt, Human
uacacuacagauaagcaaugaacaauuuuguuuccugggggaaaugcagaauuuucuguuuucuagagaugug

SEQ ID NO: 4113930 - RNA, 61 nt, Human
uacacucuuaggaauugguuauaucacaauuuaaauguugguaaucuagcuucagagugua

SEQ ID NO: 4113931 - RNA, 64 nt, Human
uacacuuauaacucugugugugugugagagugugugugcgcacacgcgugggggugugugugug

SEQ ID NO: 4113932 - RNA, 84 nt, Human
uacacuucuucaaauagcagggagucaaccaaguaaaguaauuaaaauauguaaaugaaucauuuugcuguuugaacaagugua

SEQ ID NO: 4113933 - RNA, 84 nt, Human
uacacuuguucaaacagcaaaaugauucauuuacauauuuuaauuacuuuacuugguugacucccugcuauuugaagaagugua

SEQ ID NO: 4113934 - RNA, 84 nt, Human
uacagaaauauugacagugacuauugguagcauacauuuuucuugaauguccuaccauagcacugucugguaaaaauuucugug

SEQ ID NO: 4113935 - RNA, 70 nt, Human
uacagaaauauuuggagauggagagagggcauuaaacuagaagcauucugcauuuucaaagaaguuugug

SEQ ID NO: 4113936 - RNA, 59 nt, Human
uacagaaguugguuuuaguuuacuaauuuguuuagcuggcuaauauacccagcucugua

SEQ ID NO: 4113937 - RNA, 64 nt, Human
uacagaauguuaugaagcauagcauguaaaaauuauugucuuuccccuucauggauauucugua

SEQ ID NO: 4113938 - RNA, 79 nt, Human
uacagagaauugugagcauaacagacugauuuuuaaaugcaauuguauuuuagggcaguuuguuacacagcaacaugua

SEQ ID NO: 4113939 - RNA, 129 nt, Human
uacagagggaaguuacuuuauugcuuccaugcaaaggcauucucuggaagaagauaaaaacuccaagcuaagcaguuauuaacuucuucccagagacacugcuaagugguaagaaacacugccucugua

SEQ ID NO: 4113940 - RNA, 67 nt, Human
uacagcacagcaaagaggacggcuuccuuucucccaaccaucuagccgaguccugagcucugcugua

SEQ ID NO: 4113941 - RNA, 58 nt, Human
uacagccucguucugguagggcagaucccacaugaugucgcccugagaugaugcugug

SEQ ID NO: 4113942 - RNA, 76 nt, Human
uacagcuagcccagcaggagagaacauuucccucugguucagggauguuccuuuguuuccugcucugucagcugua

SEQ ID NO: 4113943 - RNA, 98 nt, Human
uacagcuuucugaacuuaguauuauugacauuuacuuggugcaguuaacuuuuuuguuaaaggucuguugucaagcauuuaaguaauuuguaguugua

SEQ ID NO: 4113944 - RNA, 57 nt, Human
uacagcuuugucaguaggugugcugacuuccccggcccauuauuguaaucagcugua

SEQ ID NO: 4113945 - RNA, 55 nt, Human
uacaggaagucucaguacaguaagccuggacauggccuaccuggugcuuccuuua

SEQ ID NO: 4113946 - RNA, 62 nt, Human
uacaggacauggcuucugugacgcugaugcauuuagaggaauguggcaaagccgugccugug

SEQ ID NO: 4113947 - RNA, 90 nt, Human
uacaggagggaagucaguaggagaaagguugaaucaaaguuuuccccccuuuggggaaacagcugcacugcugaugucccuugccuugua

SEQ ID NO: 4113948 - RNA, 80 nt, Human
uacaggcuccucuguguuacugacugggggcuuuguaaagaucacaaggaacugacucagcagugacaagagaguaugug

SEQ ID NO: 4113949 - RNA, 62 nt, Human
uacaggcucuugucagacguauccguggccucuugaggauaucaaggaacugagagcccgug

SEQ ID NO: 4113950 - RNA, 66 nt, Human
uacaggcuguuggaggauuuuuugagugcauaaaucucaaagucuguuuucaugauagagucugua

SEQ ID NO: 4113951 - RNA, 61 nt, Human
uacaggucugcugauucaugguucaaacaucaccaaaccaccuguggaucagauucuugua

SEQ ID NO: 4113952 - RNA, 74 nt, Human
uacagguguaacacagggggcugcacauguuuacuaaaguggguuugaaaugcuuucaccuguuugcacccaug

SEQ ID NO: 4113953 - RNA, 67 nt, Human
uacaggugucugggcuuuggagucaaguauaguugauacuacugagucacagucuagucacuuagua

SEQ ID NO: 4113954 - RNA, 63 nt, Human
uacagguuuacgcacuuccugucugucuccucuaugagaauggagucugcggcagacacugua

SEQ ID NO: 4113955 - RNA, 108 nt, Human
uacaguaacauguuguacaagcuuauagccugggagcauuaggcuaugccauauagccuaggugcacaguaggcuauacaaucuaggcuuguguaaguauacucugug

SEQ ID NO: 4113956 - RNA, 62 nt, Human
uacaguaagaugaaauagcaaugcugugccuaaaacagcucaaguuuaaucacuugucugug

SEQ ID NO: 4113957 - RNA, 78 nt, Human
uacaguaguaagaaugccuuauuuuuuacaucuuuguucuuuaaauuacucagauugcuauggggcauuuuuguugua

SEQ ID NO: 4113958 - RNA, 57 nt, Human
uacaguaugugaugcaacggaauacacugaguguauuaguuuccuaucgcugcugua

SEQ ID NO: 4113959 - RNA, 77 nt, Human
uacagucagcuugucucuaggguuguuaaaucuuuauuguucggacauaauuaaccuugaagacugagcugaccgug

SEQ ID NO: 4113960 - RNA, 130 nt, Human
uacagucugugaggcuuugagcacuuccuuggacuccaguucucuuguuuauaaaaugggauaauauuugguaugagaaugacaggagacaaugcuguggagcucuggguacagugcuuggcacagagua

SEQ ID NO: 4113961 - RNA, 66 nt, Human
uacagugacccuauuuccaaauauaagauuacauucugagguacugagguuuagggcuucauugua

SEQ ID NO: 4113962 - RNA, 74 nt, Human
uacaguggccuucugucaguccugugcagaacucauagggguucucugugcagaacucacagaaggccacugua

SEQ ID NO: 4113963 - RNA, 55 nt, Human
uacagugucugcaacugcacaccuaggauacaagguggagacagagggcacugug

SEQ ID NO: 4113964 - RNA, 77 nt, Human
uacaguuuaguuucuguuacauuuucugaaucacuacuugacugaaauaucagagaaaauggaaacuuuuaucugug

SEQ ID NO: 4113965 - RNA, 56 nt, Human
uacauaauugucuuuguccucaaacugcccagaagucuguaggacagaauuaugua

SEQ ID NO: 4113966 - RNA, 67 nt, Human
uacauaucuuaugguuuucuaaguuuaggcaucugucccugcuuagaaguuccuauaaaaugaugua

SEQ ID NO: 4113967 - RNA, 76 nt, Human
uacaugaaccuuuaugugugauaaaauugcacuuaguccuggugcagguacacacucacacaaaagagugcaagua

SEQ ID NO: 4113968 - RNA, 74 nt, Human
uacaugaaucaaagaggccaaagaaucuacaagauuuuuacaauagugagauucauggccuuuaaaaauaugua

SEQ ID NO: 4113969 - RNA, 93 nt, Human
uacaugagcuuagcuaguugcucagaggaggccuuuaccuaccugcaggcuauguuagguacccucuucuguguuauuguaagacucuaugua

SEQ ID NO: 4113970 - RNA, 75 nt, Human
uacaugauuuagagcacaggcucuggagucuaauuagcugaguuagaauccagauucuaugcuaacaaacgugug

SEQ ID NO: 4113971 - RNA, 57 nt, Human
uacaugccuguguugucuccauggcuaaauacuaagcccccugaggccaggcaugug

SEQ ID NO: 4113972 - RNA, 63 nt, Human
uacauggauguuauccuuacugcuaugaauaucaaacuauugcuugaggauugagguccagua

SEQ ID NO: 4113973 - RNA, 110 nt, Human
uacauggcccagagcauugcuucugccacuuccaaggcaacagccuaggcuggggaccccucaauacccagcccugugggccuuguggcacgggcacucugugccgugua

SEQ ID NO: 4113974 - RNA, 60 nt, Human
uacaugguuggcccauucuucugagaugaugagacgggcagaaaauaggccagccaggua

SEQ ID NO: 4113975 - RNA, 68 nt, Human
ucaugguuugguuaagauuccugccacuuccaaccuggaaggcagaccaugaaucaugaccuuccuga

SEQ ID NO: 4113976 - RNA, 123 nt, Human
ucaugugaaacagugcuaagugcucacgugaaacaguacuaagugcucacaugaaacgaugcuaagugcucacgugaaaugaugcuaagugcucacgugaaacaguacuaagugcucacauga

SEQ ID NO: 4113977 - RNA, 61 nt, Human
ucaugugaaauugcugacacuugaccauuuuugacuuacaaaaaauggcaguuucauauga

SEQ ID NO: 4113978 - RNA, 66 nt, Human
ucaugugucugccaguguuuaugcaaaauauuacuuugaccugugugccuuggcaaaugaccauga

SEQ ID NO: 4113979 - RNA, 101 nt, Human
ucaugugugcuuuacccccaugauguuaucuaaaucuggucucaucccaaggcaaccacccucugauagcaucacauuggggauagggcuucaacguuuga

SEQ ID NO: 4113980 - RNA, 62 nt, Human
ucauguguuuggagccaggcccuggcagggagugaccagugcccggggugccagacacaugg

SEQ ID NO: 4113981 - RNA, 72 nt, Human
ucauguucugcuggcuccagugacaagucgaugaaauucuaucacucguccgacaggagaccucagaaguga

SEQ ID NO: 4113982 - RNA, 77 nt, Human
ucauguuggcugcuagguggcagcacuccgagguaucuaaaggguagaccuggaccugccaccuaugaguuguguga

SEQ ID NO: 4113983 - RNA, 80 nt, Human
ucauguuuacauugaggucauauauauuuggcaggaacaccucacccugccaaggauacaugaccuaaaucuuaacaaga

SEQ ID NO: 4113984 - RNA, 128 nt, Human
ucauuaaaaugggaacagcaguuuaugcaguuugaagaagauucuagaguaacuggaugauuaguaucagaaguauugggucugagagucuuucuucaagugaugaacauugcuguuaauaucaauga

SEQ ID NO: 4113985 - RNA, 96 nt, Human
ucauuaaccucugucaguugucucaaugccaaaauaaugacaauaucaaucaagucaacuuuacagggguguggaggcaaucacagacauuuaugg

SEQ ID NO: 4113986 - RNA, 59 nt, Human
ucauuaacugguuaauaacuauuuaugaccccaggauguaguuucuacccaguuaaugg

SEQ ID NO: 4113987 - RNA, 67 nt, Human
ucauagaguuaagugaaauguaauaaugaaacuaaucucacaguuugguuacacuucugcuuuguga

SEQ ID NO: 4113988 - RNA, 74 nt, Human
ucauagaguuuacaacaucuuguccuucaauugcagucagucucugucuugaacuggauuugugagcuccuuga

SEQ ID NO: 4113989 - RNA, 58 nt, Human
ucauagaugugcugugcacaaacgagagaugcuugguauaaagcacacacaucaauga

SEQ ID NO: 4113990 - RNA, 63 nt, Human
ucauagcuaagguucuucuuugauuucauaaguuaauaauaucgaagaagcaauaagcuguga

SEQ ID NO: 4113991 - RNA, 80 nt, Human
ucauagugugaugguuuaaaagccuggauacuaucauuaaauugauuaaauuugauucuagcuuugccauuuaauuguga

SEQ ID NO: 4113992 - RNA, 89 nt, Human
ucauauaacucuguuuuuuucaugcauuuaauaauuguucuugcugcugugucuuuaucuucuuguaugaaaaggaauagauugaauga

SEQ ID NO: 4113993 - RNA, 115 nt, Human
ucauauaguucaucugcuucugcuuuuugcuuuauguuuuaucauguucauuuucccgugucaacaaauguguauaugaaacaugauguguaagggcugaauagucacuauguga

SEQ ID NO: 4113994 - RNA, 61 nt, Human
ucauauaugggauuaucacuuauaggggcuucucuuaaaagucugaugauuuacaugaugg

SEQ ID NO: 4113995 - RNA, 76 nt, Human
ucauaucacauuauaguugcuacagaguaucuugaaacagacucacuacucucuggaaauuauagugaugaguaga

SEQ ID NO: 4113996 - RNA, 87 nt, Human
ucauaucuacgcacuccuuguaccaccugcugccuuauggaauuuacuuaucuccacugcaguggugggacaguggaaaagguauga

SEQ ID NO: 4113997 - RNA, 68 nt, Human
ucauaucuuucacagagaauauugccuugaaaugguagucaaagcuauaagcucuuugagauuaguga

SEQ ID NO: 4113998 - RNA, 67 nt, Human
ucauaucuuugucuaccaggaaauauaaucauuaaaaugaacguccuggaacauggauaaagaauga

SEQ ID NO: 4113999 - RNA, 64 nt, Human
ucauauguguguaauauauuaguguuuugacuuaaaaugagagauacaauacacaugcauauga

SEQ ID NO: 4114000 - RNA, 90 nt, Human
ucauauuguagucucucaaagugcucuagaaauagucagugguuuacaagaaguggccacgggugucuggagcacccugaaacuguauga

SEQ ID NO: 4114001 - RNA, 109 nt, Human
ucaucaacauugcccaacagaugcagcacugaucuuuagccagagaacucucuggaaucauuaaagagaucgugaggacugccuagucugugggcuguaguguugaugg

SEQ ID NO: 4114002 - RNA, 68 nt, Human
ucaucaauacaucaggucaaaaugugacacaucaacaaugacaucacaggagauugaucuauuggugg

SEQ ID NO: 4114003 - RNA, 57 nt, Human
ucaucaauguggccuacaaagagaauugucaugcuaugguccaggcuggauugauga

SEQ ID NO: 4114004 - RNA, 65 nt, Human
ucaucacaaauguaauaaugucuaccaggaagaaagugggaaaugguagcagcaauuugggauga

SEQ ID NO: 4114005 - RNA, 68 nt, Human
ucaucaccgacgcuuggcaugguccuagcuguguuuuggucuccuucgccugccuguguuugugauga

SEQ ID NO: 4114006 - RNA, 65 nt, Human
ucaucauuguguuaggguguucaauaagccuaaauuugaagggaggacauuguaauuaaugauga

SEQ ID NO: 4114007 - RNA, 70 nt, Human
ucaucauuuccuccggaagcuuuauaucaaccuuugacccaaagcagaaaaguucuggagaaaauaauga

SEQ ID NO: 4114008 - RNA, 95 nt, Human
ucaucauuuuucuauaaagguuugguuuuuuaggaaacaaguuuugauuauuaaggcacuuuucuaaagaccuuguuuugaugggcgagugauga

SEQ ID NO: 4114009 - RNA, 77 nt, Human
ucauccaauaaugggcacccuagaguaacuguggaagaaaugaacacagugcuuccugccuggugccuuuauggaga

SEQ ID NO: 4114010 - RNA, 57 nt, Human
ucauccaucuuugauuucauaguaagacuugcuuaaugugugagucaucauggguga

SEQ ID NO: 4114011 - RNA, 66 nt, Human
ucauccugacuggguaaagcuuauccaaacuguacugucugcugcucuaagcugacccagggauga

SEQ ID NO: 4114012 - RNA, 59 nt, Human
ucauccugccgcugguacaaacacggcagaggccucuuuguaaagaagugguagguaga

SEQ ID NO: 4114013 - RNA, 76 nt, Human
ucauccuuaagccaggccagcuucuacccucuguuguggugaccauggaacacagggcagcugcugggaaggauga

SEQ ID NO: 4114014 - RNA, 56 nt, Human
ucauccuuuugcaugggaaggcuucuauacaagcagaaaacaugcauaaacgaugg

SEQ ID NO: 4114015 - RNA, 80 nt, Human
ucaucgcaugugaauuccaaagcuagguuauaaagcucauugcagcuuccaucuggcucccuuggaauccguggcucuga

SEQ ID NO: 4114016 - RNA, 96 nt, Human
ucaucgccucucuccuccccucuaccuuucucccugguuuccauagagcagaaaucugggucaagguggagugcauuggaucaagaguugcuauga

SEQ ID NO: 4114017 - RNA, 105 nt, Human
ucaucguagguguauaacuaauuuugcauuaccauuuaugagugauauaguuguguucuuuuuaaaguguguaugcaauuaguagugguuauauucauuucguga

SEQ ID NO: 4114018 - RNA, 99 nt, Human
ucaucguuggguagcagcggggaggcgugggaggaucugaggccugcggugggccuuggucccuucucuccccgccccgaagccgccugcucaaccuga

SEQ ID NO: 4114019 - RNA, 90 nt, Human
ucaucuaggcccugggaauguaagugggcagaagacagacagagugcugguugucauggagcuuauauuccagguggagaaaauagauga

SEQ ID NO: 4114020 - RNA, 60 nt, Human
ucaucuauugaaaauuuguauguggcuaugugugccuauguauuuaaauuucagugauga

SEQ ID NO: 4114021 - RNA, 70 nt, Human
ucaucuauugguguguuuuguuaggcaguugaauucaaaccugaagagaaacagaauaugcugguugugg

SEQ ID NO: 4114022 - RNA, 60 nt, Human
ucaucucauuuauuccaacucagggagauuguucccaguuggauaucucaaguguuguga

SEQ ID NO: 4114023 - RNA, 70 nt, Human
ucaucuccagcgcagcagccccgugguaggugaagugcuauucuucacugccuugcaugugggaguuuga

SEQ ID NO: 4114024 - RNA, 88 nt, Human
ucaucucuaguuucucaucagcuguugaguuugggggaaaguauuucccuggagcuguaacagcucuccauguggggaaagggagugg

SEQ ID NO: 4114025 - RNA, 63 nt, Human
ucaucucucaggauaccagcagugucucugaccaugggcaguguugggaauugugaguaaugg

SEQ ID NO: 4114026 - RNA, 95 nt, Human
ucaucucucccuuaggccagcccuuaguccugucuucuauacaaagcacuaacuggaaggaaucacuuagcuuggccuccagaggggacagauga

SEQ ID NO: 4114027 - RNA, 58 nt, Human
ucaucugaaauuguauauguagugcuaacuuuggugcuaauguaucuuuuucauauga

SEQ ID NO: 4114028 - RNA, 100 nt, Human
ucaucugugacuagugaucuaacagaagaccagagagcuaacuugugaccaguguuagugaaucuguggccuaacuugugaccaguggucuaacguguga

SEQ ID NO: 4114029 - RNA, 78 nt, Human
ucaucuucagagcuuguuaaaacugugcuuuccgauguauuuccucaaggacagucacuagcaguuguucugaaauga

SEQ ID NO: 4114030 - RNA, 58 nt, Human
ucaucuuuaaaaugggaacaacaguaccuugcaugguuguuguaaaguuuagagguga

SEQ ID NO: 4114031 - RNA, 62 nt, Human
ucaucuuuaccccuugcuucaaguugaagaacuugucuaacuugacucaaggcuagaaaugg

SEQ ID NO: 4114032 - RNA, 86 nt, Human
ucaucuuugcaauggucccuuaaaacauuuuuggugaucuguauucuuacuagaaucuggaaggggcuauucuguaagcggaguga

SEQ ID NO: 4114033 - RNA, 86 nt, Human
ucaucuuuugcucccuuaggacuuuuucacuuaaaaacuugaugguguuugggguaaaaugucguaagagacauucuagcacauga

SEQ ID NO: 4114034 - RNA, 71 nt, Human
uccaaaauuccaacagacaaaguuagacagguuaagaaagucuuuauuuaagucuguuguaauggguagga

SEQ ID NO: 4114035 - RNA, 59 nt, Human
uccaaagaaccuggcuacuguccuuucuggggcgugugauggagagguuagaauuugga

SEQ ID NO: 4114036 - RNA, 77 nt, Human
uccaaagaagaauagucucugaugucaaggaguuuccaucuagcugggaauucucagggaguauuuucuauccagga

SEQ ID NO: 4114037 - RNA, 66 nt, Human
uccaaagaaucuugcuuucauggaagucuugggaaaugccaauacuucuuuaagaguaagucugga

SEQ ID NO: 4114038 - RNA, 61 nt, Human
uccaaaggccugagaacugaggggauuguugguauaaaucccugaguacaaaggccugaga

SEQ ID NO: 4114039 - RNA, 91 nt, Human
uccaaagguaagcugcaauuggcucuugcucuaaugcuggacugacuggcugucggcugcaugccucaguguaagaugcuaagccucugga

SEQ ID NO: 4114040 - RNA, 56 nt, Human
uccaaauaguucuggaagacuguguacaggagcugggauuucaugagcuauuugga

SEQ ID NO: 4114041 - RNA, 61 nt, Human
uccaaaucaguucacguucugagguccuggccauuaggacuucaacauaugaauuuuugga

SEQ ID NO: 4114042 - RNA, 67 nt, Human
uccaaaugcaucagcucauaagagauuccaccuaaggaucuaaacugcuagcugacugagaucugga

SEQ ID NO: 4114043 - RNA, 69 nt, Human
uccaaaugggcuuucuuggacaggaguuuuaucuugaauaccaaaaugcuucugucccagaaaccagga

SEQ ID NO: 4114044 - RNA, 76 nt, Human
uccaacagugaguugaugacugaauuaaaaaccgaguguagauuugacugauuuaaucaucacugcucaacuggga

SEQ ID NO: 4114045 - RNA, 125 nt, Human
uccaacucauuuacuaagugccuacaacaccaggcccugggacacaacaccgaacaagauagacacaaucuccgccuuuuggugcuuauguucuaggacggugugcaugugacagaugauaugga

SEQ ID NO: 4114046 - RNA, 60 nt, Human
uccaagaaguuuauguuguuucagcuaaucaagugagaugacauuauuuucuuuugugga

SEQ ID NO: 4114047 - RNA, 95 nt, Human
uccaagacuggcugacuucauuugaaaugguugaaucugcuguguaauaaagugguucaaccaugauuaggaacugaaauuuaguagaagaggga

SEQ ID NO: 4114048 - RNA, 70 nt, Human
uccaagacuuuaguuguaaacacaucuauugagaaaucauuggaaaugcuacaaguuagacuucuuguga

SEQ ID NO: 4114049 - RNA, 74 nt, Human
uccaagagacaggauguauuggcaagaggaacuauuaagaccauuguuacuucuguuuaagcaucuguccugga

SEQ ID NO: 4114050 - RNA, 61 nt, Human
uccaagcccacagaauguacagcaucaagagugagcccagauaugaacuguggacuuugga

SEQ ID NO: 4114051 - RNA, 64 nt, Human
uccaagccugccccuuccugggcagggugcuggaagcuagcccugcccaucggggcggccugga

SEQ ID NO: 4114052 - RNA, 60 nt, Human
uccaaggaagucauuuaaacugaccauuuagcucaguagauagcaaauaacuuccuggga

SEQ ID NO: 4114053 - RNA, 64 nt, Human
uccaagugggacuuuguugcugcauccucuggaggggacagacacuguguccucacuuaaugga

SEQ ID NO: 4114054 - RNA, 107 nt, Human
uccaaguucagaucuuugaucagaguuuauaacaucaaucagaguuaauagucugaugauuuuugucacucuauaauguuuucagcuuucgaggcaugaauuaugga

SEQ ID NO: 4114055 - RNA, 77 nt, Human
uccaauaauaaaauccauuuuugcaaaguuguucaacuuuuucuuugggauacauuucuagaaguggaauuguuggg

SEQ ID NO: 4114056 - RNA, 112 nt, Human
uccaauauggucuguccucaaucuuccuucacuuucucccacuucugcuucauauuccuuuaaguucugcccugugggaggugggaaggggugugaggaaacagacauugga

SEQ ID NO: 4114057 - RNA, 96 nt, Human
uccaauauucauaccacagaggaaaugacuuucuuagguuugucccaaauugagagaguuugcguuuucucuucuugccuuuuaugacugaaugga

SEQ ID NO: 4114058 - RNA, 61 nt, Human
uccaaugacaggugaaaggauuggucuuaauagaagagacacuucacccauugugauagga

SEQ ID NO: 4114059 - RNA, 68 nt, Human
uccaaugcuuccuccucaccucaggucaggugacaggaacccuucugagggcuugaggggaaguagga

SEQ ID NO: 4114060 - RNA, 80 nt, Human
uccaauguuagucaucacuguaucauugauagaaggugauuucuucuauuuuagaaucaauaggguugcugcaguaugga

SEQ ID NO: 4114061 - RNA, 63 nt, Human
uccagcagggcucauucuaguacaauuaaauaacgguugugcaaacacuggggucugucuggg

SEQ ID NO: 4114062 - RNA, 55 nt, Human
uccagcauggcaccugagaugagacagggagucaacauagaggagccauucuuga

SEQ ID NO: 4114063 - RNA, 59 nt, Human
uccagccagcuggcacugugaguagagaagcucugacucuccaagugcuguagguagga

SEQ ID NO: 4114064 - RNA, 56 nt, Human
uccagccaucuugcugugagaggacagggcauggacucuggaguuugaaggcuggg

SEQ ID NO: 4114065 - RNA, 56 nt, Human
uccagcccucagccaaguggaauggauggugcuugcucauguugggugagggugga

SEQ ID NO: 4114066 - RNA, 77 nt, Human
uccagcggccuauggaugugcacagaucaauaaggccuggggaaucucagguagugcacacgcauguagcaguuggg

SEQ ID NO: 4114067 - RNA, 94 nt, Human
uccagcucagcaaaagucccucugcacuucaccuuagcuccucaggacaagggaguggaggcugaggcugcagagaucccagaccugagaagga

SEQ ID NO: 4114068 - RNA, 94 nt, Human
uccagcucucccugccggcugcucccagggacucuggcuggagucaaagcuuuuggccagaggcuuccuggagggcuccggcuggggggcuggg

SEQ ID NO: 4114069 - RNA, 58 nt, Human
uccagcugccaaccgggccccgggacccucagacucugccgccugggggcagcuugga

SEQ ID NO: 4114070 - RNA, 57 nt, Human
uccagcuggcccggccaugaaucuauuuccccaugggauuggcuucugcuagcugga

SEQ ID NO: 4114071 - RNA, 64 nt, Human
uccagcuugccuggucuuuugggacuccugaaggaagggagcaccaaaacuauagguguuagga

SEQ ID NO: 4114072 - RNA, 63 nt, Human
uccaggaacucuugauggugauucagcaguguguucugucauggcuaggaaagaguucuggga

SEQ ID NO: 4114073 - RNA, 89 nt, Human
uccaggaagucagccuggcuaaauucucccaugggcugauagagcugccagggguuuggcucagacuggaacucaagaugcuuccuggg

SEQ ID NO: 4114074 - RNA, 58 nt, Human
uccaggagcaggagcugcagcugcuguccaugcaguagcuugagcccugguccugaga

SEQ ID NO: 4114075 - RNA, 56 nt, Human
uccaggagucuagccucaggccugaucccacggggagcucuggagcagacacugga

SEQ ID NO: 4114076 - RNA, 81 nt, Human
uccaggaucuaaaguguuuauuuagaguaggccaugggcucuuuccccaggccagccuuguaaaugccucuggcucuugga

SEQ ID NO: 4114077 - RNA, 84 nt, Human
uccaggcagguacagcaagaggacaaaggacaacaggcaaagaauacugggauccuguuugucccugccccugcuugcuuguga

SEQ ID NO: 4114078 - RNA, 56 nt, Human
uccaggccccacugaagccccuugcaaacuucuggggcaguugauggaggucugga

SEQ ID NO: 4114079 - RNA, 61 nt, Human
uccaggccuggcuccauucagucaaaacagcguacggcugucuccagggccaggugcugga

SEQ ID NO: 4114080 - RNA, 60 nt, Human
uccaggccuugacaggucaguuugcuagaagaggagaauggccccuucucugggccugga

SEQ ID NO: 4114081 - RNA, 56 nt, Human
uccaggcuagagugcaguggcccgaucucggugcacugcaaccucugcuucccggg

SEQ ID NO: 4114082 - RNA, 66 nt, Human
uccaggcuagguuuacaggacaaaacugcauucaggcaggugugcacuggaaccugacgugcugga

SEQ ID NO: 4114083 - RNA, 64 nt, Human
uccaggcuggucugaauuucuagugccuguaucuggcuucucuucuauuuucacuagccuguga

SEQ ID NO: 4114084 - RNA, 65 nt, Human
uccaggcuuuccugucacucaugcugauauuagccugaugagcaagggagagcaagagagcugga

SEQ ID NO: 4114085 - RNA, 77 nt, Human
uccagggcacucuugcccuaggcuggcauuugcaugauccauuaguauucgugcccacagcucagggcugcucugga

SEQ ID NO: 4114086 - RNA, 62 nt, Human
uccagggcacugaguggaugaugcaggcugugcacagccgcugcacacccuggugccacgga

SEQ ID NO: 4114087 - RNA, 130 nt, Human
uccagggccccacaccugcagcauagccugggacgacucuguacccuuuccaggacgaggaggagcacggcgucgagggcuuggagagcgucccggaggagggcguccaggaggcauggggcugcugcgg

SEQ ID NO: 4114088 - RNA, 59 nt, Human
uccagggccugagguugaaguguuaauuuucaacacagaugugcuucuaggcuccugga

SEQ ID NO: 4114089 - RNA, 58 nt, Human
uccagggcugagacuguauuggguuuggugguuaauucuucagccuuauagcccuggg

SEQ ID NO: 4114090 - RNA, 79 nt, Human
uccaguaccccaaauguguagaggggagagccgcaccagggcuggcauggcuucagacuucugcuacguggcuacuggg

SEQ ID NO: 4114091 - RNA, 55 nt, Human
uccagugaccucucuuuauccagaauguugugacugagccauaagggaggcuggg

SEQ ID NO: 4114092 - RNA, 55 nt, Human
uccaguggagguauuugcuaaaaucacacagguugucagaaauaccaguauugga

SEQ ID NO: 4114093 - RNA, 56 nt, Human
uccaguggcaucugugcuaugauaggaaauauaaggggcacuggaagcacacagga

SEQ ID NO: 4114094 - RNA, 55 nt, Human
uccaguguggaccccugcagucauaucauauuccugagccagggccacacaugga

SEQ ID NO: 4114095 - RNA, 58 nt, Human
uccaguguggagacuccaagcacagucaucauugccugcuacggucuucacuggugga

SEQ ID NO: 4114096 - RNA, 59 nt, Human
uccaguucacagguuaugcaguacacaguggcacuugcugagguagccagugagaugga

SEQ ID NO: 4114097 - RNA, 118 nt, Human
uccaguuccuccccacacaagcucuggcacuuagauuccugguaccuccgcugcuucaucuguaaaauggaguaacaauaggaauacuuuauagaguuguaaggauugaguggcugga

SEQ ID NO: 4114098 - RNA, 78 nt, Human
uccaguucucucucugugggucuggggcagaccagcaucagccugauuuacccguccaggcccuaguggagaaauggg

SEQ ID NO: 4114099 - RNA, 93 nt, Human
uccaguuguacauuuuccuucauucuccuuaugaaauggugaguucaauacucuucuauuuugaagggaauugaaguucauggaacaaaaggg

SEQ ID NO: 4114100 - RNA, 65 nt, Human
uccaguuuauuaugcauuuacaacuccuuuggacauggggucaugugguugccuagugugcugga

SEQ ID NO: 4114101 - RNA, 63 nt, Human
uccaguuuauuuuuggcagggucuauaaacccaaauuucauuucuuugcuaaacuggacugga

SEQ ID NO: 4114102 - RNA, 56 nt, Human
uccaguuucucuucuuguaaaaugcaaauaaauugaggucaagagagaugacugga

SEQ ID NO: 4114103 - RNA, 58 nt, Human
uccaguuuuggagguagagagugugugauuucucuuccccuuuccuuuaacagcuggg

SEQ ID NO: 4114104 - RNA, 61 nt, Human
uccauacauugaaauaccauucaccuguuaaaagagggugguguggcuuuauguguaugga

SEQ ID NO: 4114105 - RNA, 57 nt, Human
uccauacccagcauuuccugagcuucuacccugugccaggcucugcugggugcuggg

SEQ ID NO: 4114106 - RNA, 77 nt, Human
uccauacucccucaagucacuuuaguuuaguuaauauuauuugugugacaaaaguguuuugaacaaggaaaaaugga

SEQ ID NO: 4114107 - RNA, 68 nt, Human
uccauaggaaauccauagaauaaaauugcaggaaaaguuauccagcaacaaucuauggcuccuacgga

SEQ ID NO: 4114108 - RNA, 68 nt, Human
uccauauaccugcagccugguuuuuccaagagagcaaaaaggacuaagcuaguugcuuguguaauggg

SEQ ID NO: 4114109 - RNA, 129 nt, Human
uccauauauuccagucucuuguugcugaccagcugauaaggcauauaauugcucuuaacaauugggcauaauuuauuccugccuuagguggcuguuaccugcagcaauuaaagcauagugacugauggg

SEQ ID NO: 4114110 - RNA, 94 nt, Human
uccauaugaauuuuagaaucagacuguuaauuucaauuaaaaauccugcugggauuuugguugggauugcauugaauuuauagaucaauuugga

SEQ ID NO: 4114111 - RNA, 68 nt, Human
uccaucaccugucaaagacuaagguucuuaagaucuguuuaagcacuagagucuugacaagaagugga

SEQ ID NO: 4114112 - RNA, 60 nt, Human
uccaucaucuggguucucagauggauaugguucccauguccauugccaaucagaagugga

SEQ ID NO: 4114113 - RNA, 59 nt, Human
uccauccaggccagcaguaaucacggcaacugggcuggcagcugcuggcucuggcugga

SEQ ID NO: 4114114 - RNA, 76 nt, Human
uccauccauucauuagagauuauaaaaugaugacauucugugucuaucauuucuucuucucuuacugguuggagga

SEQ ID NO: 4114115 - RNA, 60 nt, Human
uccauccauuuuccuuggcagcaggacaugccgaugccuaugaacaggaaauggaacgga

SEQ ID NO: 4114116 - RNA, 129 nt, Human
uccauccccauuccgcugugugaccuuggacaagucucucucccucucugagccucaacggccucagcugugaaacggagucagggaaggucugcugagaguucgcacagaccgagguuuggggaagga

SEQ ID NO: 4114117 - RNA, 105 nt, Human
uccaucccuucuccauuuccacugguccugcaguaauagacaucucaccauuuuucaaguggauuacuaugcuauaggacucugugucuguggacuuaaaaugga

SEQ ID NO: 4114118 - RNA, 58 nt, Human
uagggcaguuauaacauuaguggaauuauaaaucccaugaauguuuuccucuguucua

SEQ ID NO: 4114119 - RNA, 60 nt, Human
uagggcgucucgcuuguugcccaggcuggucuugaacuccugggcaaagugaucguccug

SEQ ID NO: 4114120 - RNA, 68 nt, Human
uagggcuggcgugcucagggaagguagaugaaauguucugaggguccuauggaugcacuccaccucua

SEQ ID NO: 4114121 - RNA, 83 nt, Human
uagggcuguuuugaagacuaauuuagauaauguaacuaggguaggcaguuccaugucugagucaugguacuucugaaccccua

SEQ ID NO: 4114122 - RNA, 60 nt, Human
uagggcuuugcucauccuagguauaaccaauguguguucagcauaggagguaaaguccug

SEQ ID NO: 4114123 - RNA, 60 nt, Human
uaggggcagguggcaaggccuggcugggccuuccuuccuggccucagccaccuggcucug

SEQ ID NO: 4114124 - RNA, 113 nt, Human
uagggggauaguguccaggcaguggggauguagugggauaagccaugggaaggcucauugugguuccugguaacaaucucaaaguaugccucagcuuccuauaauccaccuua

SEQ ID NO: 4114125 - RNA, 61 nt, Human
uaggggggcccaggcaccaccugugagcaagacaccauucaggguauaugggccucacuug

SEQ ID NO: 4114126 - RNA, 72 nt, Human
uaggguaguacagagaguguccuaaagggccaagcacacaggugagauuaugacacuccugugcgcacccug

SEQ ID NO: 4114127 - RNA, 84 nt, Human
uagggugaccaaguguccugauuugccugggacuuuucugggaauugcucgguccugggcaaagaggggcaguggaucacccua

SEQ ID NO: 4114128 - RNA, 65 nt, Human
uagggugaucugauaaauagggauuucugcauagagcucugaaucaaucagauaagguaccucua

SEQ ID NO: 4114129 - RNA, 81 nt, Human
uaggguggucaggcugggguggaggagcuccccuggaauguuccagagcuucccccacuccugccguucugagucacccug

SEQ ID NO: 4114130 - RNA, 66 nt, Human
uaggguuuauuucauuuucuuaguaucucaugcuauuggugacucugagcuguggaauaaacacug

SEQ ID NO: 4114131 - RNA, 82 nt, Human
uagguaaccucaagcagugacguuauaucugaaaaaagugacugagguucacuuuuaaguaggcagcgugcuuugaggccug

SEQ ID NO: 4114132 - RNA, 81 nt, Human
uagguauauuucuguuuguaguagagagggguggcuuucaaacugagccaugauaacauuucaacaggcagagaagacuua

SEQ ID NO: 4114133 - RNA, 62 nt, Human
uagguauccaggaaggauggcauugagcugacacaguggagaugcagaucuugguuuaccug

SEQ ID NO: 4114134 - RNA, 93 nt, Human
uaggucaaugauauagcacagacaguaaauaguguggcugucuaagggggcagaaugaacaaggcacugugacuguuaaauguuauugaugua

SEQ ID NO: 4114135 - RNA, 98 nt, Human
uaggucggaaacuggaugcaguuuuucugcuaacuggaaaauccccuggcaaggauuccaggcaaagcagagaagaguauguugauguuucaggcgua

SEQ ID NO: 4114136 - RNA, 128 nt, Human
uaggucuccuccaagauauucuuauguaacuacucuacuugucaccuggacaucaggacuuuggaaaacuucccaaguguuuccauugugcaggcugucaugagaauauccucucucgggaagacuua

SEQ ID NO: 4114137 - RNA, 61 nt, Human
uccuauaagaacaucuguccccagauuuagggcucucucuaaauccagaaugaucuuggga

SEQ ID NO: 4114138 - RNA, 62 nt, Human
uccuauaauaugaaaagaagucaccauuggggaacuagagaccccagaccuuuucauaugga

SEQ ID NO: 4114139 - RNA, 67 nt, Human
uccuauauugugaguucagacuaaaaacuggugugaaucugguuuauaguuaggaauucucaaagga

SEQ ID NO: 4114140 - RNA, 108 nt, Human
uccuauauuuuaacaucuuuuugguauauuuguuagcuguuuauagggaauaauuuuucuuaauagaauagcagcuggugcaacucuaagaacaugucaaaucuagga

SEQ ID NO: 4114141 - RNA, 70 nt, Human
uccuaucauauaguaaauaaugucuguggagccuuuuacuauuuuccagaacauucacucauauguggga

SEQ ID NO: 4114142 - RNA, 87 nt, Human
uccuauccaaauuaaauguauauuucuuauugagauggcauauauugugugucauauuaguauugagaguucauuauaaucggggga

SEQ ID NO: 4114143 - RNA, 65 nt, Human
uccuauugaacuauaauuaugauuugauuuuagauggucaacuugucgcauuuuggucaauagga

SEQ ID NO: 4114144 - RNA, 61 nt, Human
uccuauuuaggagcccucucugcuuaguuuuguagaggcucucauggcuccagaauagcga

SEQ ID NO: 4114145 - RNA, 73 nt, Human
uccuauuugugaaaguguccccuacagaggcauucugcauuuaccagauguccaggggcaucacaaguagaga

SEQ ID NO: 4114146 - RNA, 82 nt, Human
uccuauuuuauagacaaacugauacuuggcgaguuaaugugauuuguccaaggucccacaguuaguaauuauaaaagcaggg

SEQ ID NO: 4114147 - RNA, 122 nt, Human
uccuauuuugaaaaagaaaaaagucuauuacuauuaaauauaucuguuaguugaauaucaaucacuuuuucuaaaggguagauuuggccaaugagugauuuuuuuuuuuuuuuuuuuuugga

SEQ ID NO: 4114148 - RNA, 71 nt, Human
uccuauuuuguauauuauuuucccuggaguuguauuugaaagaauauaaaauauggaagguauauaaugga

SEQ ID NO: 4114149 - RNA, 79 nt, Human
uccucaaaaccacccaggcccaguuauuuccucaguuuacagauaggaaacagagugaagcuugggaagguuaagaaga

SEQ ID NO: 4114150 - RNA, 96 nt, Human
uccucaagaaucgcugguccagccacucaccuuccagcagguaaguuaacagaccuguugggccagaaggugguuggagggcagcaucguugauga

SEQ ID NO: 4114151 - RNA, 65 nt, Human
uccucaaggagacagaaagcaauggaccuuagauucugcgccagcugcucucuucuccgccaggg

SEQ ID NO: 4114152 - RNA, 58 nt, Human
uccucaauuugaaaaacagcuagcuuguagaagagaguccuuuuuauaaaauugagga

SEQ ID NO: 4114153 - RNA, 64 nt, Human
uccucacaagcauccugucucaggcacaauccauagacuggcugugacaagaaugcagguagga

SEQ ID NO: 4114154 - RNA, 125 nt, Human
uccucacaccuucaaggcuguaaaaggauuuugaggugaccugugcauuuuuuugagaucagccucaguuauugcuuaagaagccacacaccucuuucaaugccucaguuauagacuuaaaggga

SEQ ID NO: 4114155 - RNA, 67 nt, Human
uccucacagaacucauggcugucauuuguguucacaauggcuauacaacaugaguaugcugucagga

SEQ ID NO: 4114156 - RNA, 93 nt, Human
uccucacccacccucucuaagccuguguccucugcagagugggagggaaucuguccuggagagccgcaugcagaguauuaagugggauguuga

SEQ ID NO: 4114157 - RNA, 84 nt, Human
uccucacucauuuuuaggaagcuuuggaggccaggcacagugccucaugccuguaaucccagcacuuugugaggucgaggaggg

SEQ ID NO: 4114158 - RNA, 57 nt, Human
uccucagaaaccccugugagguggaaauuauuauuaccuccaauugguagaugggga

SEQ ID NO: 4114159 - RNA, 56 nt, Human
uccucaggaugugggguagaaucugguugugguuuugguuucuaccucccugauga

SEQ ID NO: 4114160 - RNA, 68 nt, Human
uccucaggcugugccaccugugugacauccaugccagcccucugucccauguaggcacaugccuggga

SEQ ID NO: 4114161 - RNA, 57 nt, Human
uccucagggaagaugagccucacugaggaaggugacauuuggcuaaguccugaagga

SEQ ID NO: 4114162 - RNA, 60 nt, Human
uccucagggcggccuccgucuuagguuagaagauaaaaagaucugaugccacccugaggg

SEQ ID NO: 4114163 - RNA, 55 nt, Human
uccucaggugacuagguaucuugaggccccaggguauauaaaagcaccuugagga

SEQ ID NO: 4114164 - RNA, 80 nt, Human
uccucagucacgguagcacauuuaagggcucaacagucacacguagcuaguggcuaccauauuguuugaugacugagaga

SEQ ID NO: 4114165 - RNA, 78 nt, Human
uccucaucgaggugguggggguggaaagacauucacaggcagcagacauucucauccauccucgccuuugcuugagga

SEQ ID NO: 4114166 - RNA, 60 nt, Human
uccucauguuccuuacugacuucacaggugagcauuguguuuuggaaggaacaugcaggg

SEQ ID NO: 4114167 - RNA, 69 nt, Human
uccucauucuggaguaugugugaacggugagcucccugucucugccccacuuugcuccuagagggggga

SEQ ID NO: 4114168 - RNA, 59 nt, Human
uccuccaggcaccucacuggcuccgugucccagaggaggcaagugacuugcuuggaggg

SEQ ID NO: 4114169 - RNA, 94 nt, Human
uccuccaugaacuaauuagaguaaugacuauuugcagacauuuccacacagguaauuauuuguaagcaaguuaacauuuuuuuagaggggaggg

SEQ ID NO: 4114170 - RNA, 118 nt, Human
uccuccauuaauuuucuucucuugcaucccgcuuucuucaaauuuauccugcaugcaaguaucucaggaaauaggauuugaguuggggcuugaugugagagacugagaagauguggga

SEQ ID NO: 4114171 - RNA, 84 nt, Human
uccucccuccacuguggaucugaagagcaaugaaauaugagauauauauucaauuaucaggauguaaggggaauuaagggagga

SEQ ID NO: 4114172 - RNA, 74 nt, Human
uccucccuuuuggugucugcauaggccuagggaaggaucuacaagaaaaaugcuaggcuuugaaggagggagga

SEQ ID NO: 4114173 - RNA, 78 nt, Human
uccuccucagagucagggccacauuuagcugguucuguaagaagggccugauggcugucugggccugaaacaggagga

SEQ ID NO: 4114174 - RNA, 55 nt, Human
uccuccucagucuggucagggcucucaaaagagugaccaacaaugcugagaagga

SEQ ID NO: 4114175 - RNA, 73 nt, Human
uccuccucauucuucguguugaauuucacccuuuucugaggauaucugagucucugcacuaaggagaggugga

SEQ ID NO: 4114176 - RNA, 70 nt, Human
uccuccuguccaucuccaccaucugggaggacagguccuccugggagcagggauggauggucuaggagga

SEQ ID NO: 4114177 - RNA, 129 nt, Human
uccuccugugugggcauaugaggaggguugguaaugaugagaugcuuuguguauagacaagauuuuugguuuugguuuuaauggcagagguuuuauuaaugcuuuuacuugauuuaaaguguaggagga

SEQ ID NO: 4114178 - RNA, 85 nt, Human
uccuccuguuucucugugccuacuacgaggcucauccucacaccugaggacugucuccuugcugguaggcucaccgcguggagga

SEQ ID NO: 4114179 - RNA, 83 nt, Human
uccuccuuuucagccaaugguuuguaccuguccuuggccacaagaugucacccaaggaacagcaaagccggggccugggagga

SEQ ID NO: 4114180 - RNA, 68 nt, Human
uccucgaaguguuugugggccacauuuaggaagccacacugaguuuggcuccaugaaaauuacgagga

SEQ ID NO: 4114181 - RNA, 63 nt, Human
uccucuagcuuugagaucaguagccagggccuuucgguaaucagcagcuuacaguuaagggga

SEQ ID NO: 4114182 - RNA, 70 nt, Human
uccucuaguuuaagaucuguuagucuguuauucuguuacuuauaguugaaaauauuccugaacuagugga

SEQ ID NO: 4114183 - RNA, 106 nt, Human
uccucuauucacauccaucagggagaggaguaggcugauggugccagcuaaggaccucggcacuccuagaccuauuccugaaccauuaauggcucugaauuuggga

SEQ ID NO: 4114184 - RNA, 107 nt, Human
uccucucaguucguuagcugaauugcuaggcugcauguguccagaggcauuauucuagagaccugacagauacagugcaguggcagagaggcugaaauuugagugga

SEQ ID NO: 4114185 - RNA, 99 nt, Human
uccucucuguagcucccaaggccacccuggaggugcauggacuagcggauguggcaggcuggcucaggguggucugggucugccaagcuacguagagga

SEQ ID NO: 4114186 - RNA, 64 nt, Human
uccucucuuuccugucccacugggguccuaccauucugggauccugugcauggggugaugggga

SEQ ID NO: 4114187 - RNA, 59 nt, Human
uccucugaaaucuagauugugaugcaauguauacguucucuaaaucagauuucugagga

SEQ ID NO: 4114188 - RNA, 57 nt, Human
uccucugaggucuaggaccauggcuuauuugccauucuauuccccaggcccagaaga

SEQ ID NO: 4114189 - RNA, 65 nt, Human
uccucugauauggaugccucauuguccucuacaugagggcagucagggaccuccacauaugagga

SEQ ID NO: 4114190 - RNA, 59 nt, Human
uccucuggaaagaucauuaaauccaaauucugaauagggaaauggagacuuuccaagga

SEQ ID NO: 4114191 - RNA, 111 nt, Human
uccucugguucuguagagcugacaauucauuaaugugagguagucaauaacaaauauauuuuaugucaaguggugauggguucuaugaagaaaaaugacucaauaagagga

SEQ ID NO: 4114192 - RNA, 65 nt, Human
uccucuguggggccagguggcuugcucagggggaaucugagggaguuccugagcccaccugagga

SEQ ID NO: 4114193 - RNA, 83 nt, Human
uccucuuaccucuccaggcucguccaagaucgacauccaucccuucuugaaguugagcagaucgggcuguggggagaugagga

SEQ ID NO: 4114194 - RNA, 59 nt, Human
uccucuucaaacccagauuaaaugcauguagauacaggcuacaugcaugguuuacagga

SEQ ID NO: 4114195 - RNA, 77 nt, Human
uccucuuccacaugccuuuucggguacuucucugcuuuuuugcagaagcacuagaggguauggaagcuggaagggga

SEQ ID NO: 4114196 - RNA, 67 nt, Human
uccucuuccacuuaucuuacuuccccuucauguugaaccaacguuaauaggugcaagguaaggagga

SEQ ID NO: 4114197 - RNA, 61 nt, Human
uccucuucccaccuucuccucuguuaacuuauuuucuuuacagcaggccuuggggagagga

SEQ ID NO: 4114198 - RNA, 77 nt, Human
uccucuucuauuuuauuaugcuugcacuaaaugaggcagaaacaccuuagcagagugauuggccaugagggagggga

SEQ ID NO: 4114199 - RNA, 57 nt, Human
uccucuucuuuccuuccuccaguggcucaggggccugcuguugagggaagagcugga

SEQ ID NO: 4114200 - RNA, 72 nt, Human
uccucuugaauagcaaguagugcagauguacauagaaccuguugccugccacgcuugcuaccacaaaaagga

SEQ ID NO: 4114201 - RNA, 56 nt, Human
uccucuuucucaacauuaguuagcaugggaaaguuaacaugaugugcuucagaggg

SEQ ID NO: 4114202 - RNA, 86 nt, Human
uccugaaaauucuguuucucuggagccacucucaguacaaaaaucuauuuuagucaguguucuccggagaggcacaaacaauagga

SEQ ID NO: 4114203 - RNA, 102 nt, Human
uccugaagcagcaaccucucgaaguggggaagcaacaggagaacaucuugcucucuugagcgucucccacaaagugagcugguuacggcgcugacucuagga

SEQ ID NO: 4114204 - RNA, 62 nt, Human
uccugaagcaguuagcaugagcaaaaaaggaguguggaugcuuuuccacugcuuuucuugga

SEQ ID NO: 4114205 - RNA, 80 nt, Human
uccugacacuccauugaguaggauuccugcaaugaagaccauacaguacagcacaggaaugaucugcugagugaucagga

SEQ ID NO: 4114206 - RNA, 95 nt, Human
uccugacccugaggcagugugagauaauaaauguuugcuauuuuaagcuaugagauaauaaauguuugcuauuuuaaagcuccuaauuuguggga

SEQ ID NO: 4114207 - RNA, 75 nt, Human
uccugaccucuugaaugaauaguugcuagaaggggccuaagagcuucgagaggagaaaaauucauucaaucagga

SEQ ID NO: 4114208 - RNA, 58 nt, Human
uccugaccuugugauccagccaccuuggccucccaaagugcugggauuacaggcauga

SEQ ID NO: 4114209 - RNA, 72 nt, Human
uccugacuguggcucaucaggcuggugcuaccaucugugguuguaaagguccaaagagggcuacggaaagga

SEQ ID NO: 4114210 - RNA, 60 nt, Human
uccugagaaggcacagcuugcacgugaccuccugggccuggcggcugugucuucacagga

SEQ ID NO: 4114211 - RNA, 90 nt, Human
uauuaaaagauugagaggacaagauuaaccauaguuaagucuuuuuaccucugauuuaggaaauggaagauuuugcuuaauuuuuuaaua

SEQ ID NO: 4114212 - RNA, 102 nt, Human
uauuaacaugcacauuagcaucaucucauugguucuuccugcugcuccaccuuaggggcagcaguaggagcuaaucuuauugcucccaugcgcauaauaaug

SEQ ID NO: 4114213 - RNA, 84 nt, Human
uauuaacuugugucauaugaaauugccauuuuugagggucaaagauggucaaauauuggcuauuucacauggcucauccuaaua

SEQ ID NO: 4114214 - RNA, 82 nt, Human
uauuaagagacuaaugaaguaagauauucaacuaaagugaauuagcauugauucaugcaaguuaaauaccugucucuuaaug

SEQ ID NO: 4114215 - RNA, 88 nt, Human
uauuaagcaccuuugaucuaggauuuugaaaugugccacauuguaaaauuuauucagugcauauauuaaaaaucaaaggugaaaaaua

SEQ ID NO: 4114216 - RNA, 83 nt, Human
uauuaaggcaguuaaacagguuuuugaauggccccuuuuaacuuuugggucaggcugucacuucuuauuucucugcucuaaua

SEQ ID NO: 4114217 - RNA, 61 nt, Human
uauuaaguccuaauggcagaagucuuugaaaaggcauuucuggacuugggaucauuuaaua

SEQ ID NO: 4114218 - RNA, 84 nt, Human
uauuaaguugaaccauuugaaaugaauguuuuuauagguuaaagauggugaaagauugacaauuucauaugguuccacauaaua

SEQ ID NO: 4114219 - RNA, 91 nt, Human
uauuaaguugcaagccacugcugugcagacagacucucuuugugaagaugagaguuagccugcauaguucaauggcugacauccucagaua

SEQ ID NO: 4114220 - RNA, 60 nt, Human
uauuacaaaggcggaguuaaaaugauugauuuuaagcaagcaugaucugcccuuguaaua

SEQ ID NO: 4114221 - RNA, 80 nt, Human
uauuacacaaguagcuaaucaccccaaagugaugauuuugaauggucagcacucuucugugauaguuguauguuguuuua

SEQ ID NO: 4114222 - RNA, 68 nt, Human
uauuagaaacacuugcaaaaugguuccuuacugcugacauaagugaacaagucgcgauguuuuagaua

SEQ ID NO: 4114223 - RNA, 62 nt, Human
uauuagaauuuugguuugagagcuggccuccaagaguuugcauuuaagcuaagauacuagua

SEQ ID NO: 4114224 - RNA, 55 nt, Human
uauuagcgucaggaggugaguauuaguuuaaauauugaccucuguuauguuaaua

SEQ ID NO: 4114225 - RNA, 56 nt, Human
uauuagcuauaugcuaugugccaggcacaauccuagguacuagaaauauagcaaua

SEQ ID NO: 4114226 - RNA, 83 nt, Human
uauuagcuugcugcaaaugugagugcaguucuugccauuaaaaguaaugcaaaaacugcacuuacgcuuacaccaaccugaua

SEQ ID NO: 4114227 - RNA, 92 nt, Human
uauuaggaugucauagguuauguacuuuuuaaaucuuguaauagauugccagauugaacuaaagguuauaucauuuuauguaucuccuagua

SEQ ID NO: 4114228 - RNA, 79 nt, Human
uauuaggcuagugcaaaaguaauugcggguuuugccauuauuggcaaauugcugcaauuacuuaugcaccaaacuauua

SEQ ID NO: 4114229 - RNA, 74 nt, Human
uauuagguuagugcaaaaguaauugccguuuuugccauugaaaguaaugcaauuauuuuugcaccaauguaaug

SEQ ID NO: 4114230 - RNA, 84 nt, Human
uauuagguugaccauaagaaauugcuuucuuugauaaaaccaaaauugugaaauauuggcaauuucauauggugcaaucuaaua

SEQ ID NO: 4114231 - RNA, 83 nt, Human
uauuagguugaugcaaaaguaauugcaguuuuugccauugaaaauaauggcauaaccugcauuacuuuugcaccuacuuaaua

SEQ ID NO: 4114232 - RNA, 71 nt, Human
uauuagguuggugcaaaaaguaauugugguuuuugccauuaaaagcaauuauuuuuugcgccaacuuaaua

SEQ ID NO: 4114233 - RNA, 59 nt, Human
uauuagguuggugcaaaaguaauggcaaaaaccacaauuauuuuugcaccaaccuaaua

SEQ ID NO: 4114234 - RNA, 83 nt, Human
uauuagguuggugcaaaaguaauugcaguuuugccauuacuuuuaaauggcaaaacugcaauuacuuuugcaccaaccuaaua

SEQ ID NO: 4114235 - RNA, 83 nt, Human
uauuagguuggugcaaaaguaauugcaguuuugccauuuaaaaguaauggcaaaacugcaauuacuuuugcaccaaccuaaua

SEQ ID NO: 4114236 - RNA, 101 nt, Human
uauuagguuggugcaaaaguaauugcaguuuuggccauugaaggcaacggucaauugaaagcaauggccaaaacugcaauuacuuuugcagcaaccuaaua

SEQ ID NO: 4114237 - RNA, 84 nt, Human
uauuagguuggugcaaaaguaauugcgguuuuugccauuacuuuuagugccaaaaaucgcaauuacuuuuguaccaacuuagua

SEQ ID NO: 4114238 - RNA, 65 nt, Human
uauuaguguggaagauucuaauugggcuuccuauguagccgaagaucaaauacuuccaacuagug

SEQ ID NO: 4114239 - RNA, 75 nt, Human
uauuaguuuggugcaaaaguaauugugguucuugucguuccuuuuaauggcaauuacuguugcaccaaccuaaua

SEQ ID NO: 4114240 - RNA, 75 nt, Human
uauuaugcugggaacugcagguguuacauaaauaagguagacaguuuguguccucaugagguuugcaggguaaua

SEQ ID NO: 4114241 - RNA, 79 nt, Human
uauuauguugauagcuacaagucaucagcuaucagucggaagacugauccacauauuuguagcugaagguaacguagua

SEQ ID NO: 4114242 - RNA, 55 nt, Human
uauuauucacaauagccaagguauggaaacaaccugugucuguugcugaauaaug

SEQ ID NO: 4114243 - RNA, 88 nt, Human
uauuauugacaccacuuuuauggaucauuucuuacuguguuucccuuagggaaacacguauaaugugacagagagguugguaaugaug

SEQ ID NO: 4114244 - RNA, 68 nt, Human
uauuauuggaauguuuuuaggaauguuaugaauaagguaauguaugagauccuggagacacaaugaug

SEQ ID NO: 4114245 - RNA, 56 nt, Human
uauucagaaagcacuugcucuuuaaaaaagaacugaggacaggaacuggcugaaua

SEQ ID NO: 4114246 - RNA, 66 nt, Human
uauucaugagauaggcaguuuuaugggguuuguguaugagccugaagagugaguauuuccugauua

SEQ ID NO: 4114247 - RNA, 93 nt, Human
uauuccaaauaugaaccgaucuguaaaugagaauauaaauuuuauaguggaauuuaauuuacauuugacagaggguaucuguaucagugaaua

SEQ ID NO: 4114248 - RNA, 73 nt, Human
uauuccacuuaaaauucagagguaguagcagaguugagaauuaucuagauucuguuuccucugguuuggauua

SEQ ID NO: 4114249 - RNA, 59 nt, Human
uauuccaugccagaguuuauugcuccuuuauacugcaagaaacuugauggcauagaaua

SEQ ID NO: 4114250 - RNA, 77 nt, Human
uauuccgucuuucauaugcuguuuggguccaguugccuaauaauuaccacuuaaucaacauauguauuuaugggaua

SEQ ID NO: 4114251 - RNA, 103 nt, Human
uauuccuucaauuuuuaauucuuuucugcuugagagaauugcuguuggugucucaauuggugcucagcauuuucuuaauguaggugaguuauuuggaagaaua

SEQ ID NO: 4114252 - RNA, 93 nt, Human
uauucuaagcagccuucucugaucacuccacagggacugcuucugucuucuagagcaucucugggagucauccgucacuuggcacuuagcaua

SEQ ID NO: 4114253 - RNA, 71 nt, Human
uauucucacaccuccagguauuacuguuuucccaucauacagauggcaaaaccaaggcuuggagaggagua

SEQ ID NO: 4114254 - RNA, 69 nt, Human
uauucugagccaacaugucaauuuuguauuguaaauguauaaugcacaugccacaugugguacauggua

SEQ ID NO: 4114255 - RNA, 94 nt, Human
uauucuuacuaaauucagaaguuugcaauuguuuauuucagugugaaaccauuuguguagugauuaauuguaaaaauucugaaaucagagaaua

SEQ ID NO: 4114256 - RNA, 92 nt, Human
uauucuuauaagcccaguuuuuagauuaguugguggaaaacuggcaauauuucacugaauuaaaaucaaagcugcuggguucuauaaugaua

SEQ ID NO: 4114257 - RNA, 66 nt, Human
uauucuucauccauaugcagagagcuuccuuuauacagugaacuuugcugaauggaguggagaaua

SEQ ID NO: 4114258 - RNA, 64 nt, Human
uauucuuggaauugacaguguuguacccugcuagcacuuacaugauguguuaauuccaaugaua

SEQ ID NO: 4114259 - RNA, 56 nt, Human
ucuauuucuggguuugugugguuaaguauaaucacauauaugcaccaagacauaga

SEQ ID NO: 4114260 - RNA, 57 nt, Human
ucuauuuggccauagugcaguuacauguccauauuuagcugcaagaggguccaagga

SEQ ID NO: 4114261 - RNA, 65 nt, Human
ucuauuuugggauuugacauguugguccccugcaauaacugugagaugcaaaucccaaaaucagg

SEQ ID NO: 4114262 - RNA, 72 nt, Human
ucuauuuuguauacccauaacuuucucucugggauggauacauauuagagaaaagauggaugugagacugga

SEQ ID NO: 4114263 - RNA, 71 nt, Human
ucuauuuuuauaagagcagcagaguugucuucucaaaacggcugccaagcucugcuucuugggaagaugga

SEQ ID NO: 4114264 - RNA, 79 nt, Human
ucuauuuuuugcuuugguuucuaugcuuuuggggucuuaaucucccccaaaaagucauuuuccagaccaguauuauaga

SEQ ID NO: 4114265 - RNA, 84 nt, Human
ucucaaaugggagguaauauauugaagcauuuacucauggacagucagaugguaaaggcucugauaaguacugcuauaauggga

SEQ ID NO: 4114266 - RNA, 70 nt, Human
ucucaagcuucagcuuucucugauuucccuuuuugucacccguuggaggaagcucucugcuuuuaagaga

SEQ ID NO: 4114267 - RNA, 68 nt, Human
ucucaagguaacaucauccucguuuuaggguugguccuaaauccaacgacagguguacuuauaagaga

SEQ ID NO: 4114268 - RNA, 130 nt, Human
ucucaagguuaaaugaaaucuuucauguaguccuccagucauagucugucuuguucuccucggaaaugaguggauacacaagacgugacauauaaaacuugaaaaugugaauuugcauucaaucuauaaa

SEQ ID NO: 4114269 - RNA, 69 nt, Human
ucucacaccuuuuagaauuacuauuaucaaaaagaugaaagauaauaacugucggcaagggugugguga

SEQ ID NO: 4114270 - RNA, 74 nt, Human
ucucacagacugugagucucauuuucuacauauacaaaaugaagaagauaauuccuacuuauaacguugugaga

SEQ ID NO: 4114271 - RNA, 55 nt, Human
ucucacagaucagcagggggcucuaaaggcugcuccucccacccuggucuggaga

SEQ ID NO: 4114272 - RNA, 67 nt, Human
ucucacagcucuccgcuccuucucagacacgcaguaaucugagucucaagcaccgaaagcugucagg

SEQ ID NO: 4114273 - RNA, 60 nt, Human
ucucacaggugguuaugaggaaggugacuguguggucaucuagagguggccaccugugga

SEQ ID NO: 4114274 - RNA, 75 nt, Human
ucucacaguuucccccuagggcagcacaucucuucagaaaugccaacccaguggagggaaagcagcccugugagg

SEQ ID NO: 4114275 - RNA, 88 nt, Human
ucucacauugggccuacaucuggucuccuggaaauaugcccauauccuuugucuggacaauccugagacagacccagcccaaugcaga

SEQ ID NO: 4114276 - RNA, 106 nt, Human
ucucaccaacaucacauucuuuuuuccauguauugucucuuccauggauggcuauuuggaaugauguuaagaagaggcaguacuuauggggugguggagggugggg

SEQ ID NO: 4114277 - RNA, 56 nt, Human
ucucacuccccaggcugggauggcugcaauggugguagacccucuggggagggagg

SEQ ID NO: 4114278 - RNA, 65 nt, Human
ucucacuuaacauuuaguguaccccuguuuggaccaggcaaagggaauauguguuaauuagggga

SEQ ID NO: 4114279 - RNA, 57 nt, Human
ucucacuuugcacagccagaauuccaguggcacagggcugggcugugccaggugaga

SEQ ID NO: 4114280 - RNA, 63 nt, Human
ucucagaauaaucuugggccugcuuuucuuccuuuccugcaaguagauaacacuguucugaga

SEQ ID NO: 4114281 - RNA, 130 nt, Human
ucucagaggguccaaagucacagucacagcagugagugggaggaccauggaucaaaacccacaguucagaguuucaggccugguuccacuuccgcucuugcugcugaccucccguauggccuuccgaaga

SEQ ID NO: 4114282 - RNA, 55 nt, Human
ucucagaguaauucuuuaagguaagcacauguuuaguuugaugcaauuucugaga

SEQ ID NO: 4114283 - RNA, 69 nt, Human
ucucagaguuucuguggccaggagucugggcauggcuuagcugaguucuccacugcagagucucucagg

SEQ ID NO: 4114284 - RNA, 129 nt, Human
ucucagauauaagccagaugcucuccuguggauugcauauuaauauucacagauagaagguucuguuuagacagaagcguuccauuugauggguuauauaugcaguaagcagagaaacuggcuuagggg

SEQ ID NO: 4114285 - RNA, 62 nt, Human
ucggggaggaaauuggcuugacuugucuacuuaccaagucagggaaacagguuuucccuuga

SEQ ID NO: 4114286 - RNA, 61 nt, Human
ucgggggagugauauaaaacagauucuuauauucauugccucuguuucuuccuccaucuga

SEQ ID NO: 4114287 - RNA, 92 nt, Human
ucgggugggcugcagggcgccggacugcugcagcugcuagcggcugcggcggcgguggcagcggcggcccggcgacugccugccacgcccga

SEQ ID NO: 4114288 - RNA, 60 nt, Human
ucggugauggucuggguacuugcuccucauacaggagauauccucagggcaucagucugg

SEQ ID NO: 4114289 - RNA, 92 nt, Human
ucggugccacugcauuuauggagcaaggcaguggaauaugacccuuaucacacuccugaucaucuccuuagccuccuguagugguccacuga

SEQ ID NO: 4114290 - RNA, 70 nt, Human
ucggugcgugaggccccugagcgaaucauaaaaggggcacuaagucuguucgugcaggggcccagaugga

SEQ ID NO: 4114291 - RNA, 74 nt, Human
ucguagcaaaauggagauuucccugugcugaagcagacaggugacuucagacuuaaaagaucccagcgcuaaga

SEQ ID NO: 4114292 - RNA, 102 nt, Human
ucguaggguccaggagggaacaggggcaggcaggacccuuuggcccagguccaaagacuucuguuuccacuuccaauuauagcuuccuuugugacccuagga

SEQ ID NO: 4114293 - RNA, 67 nt, Human
ucguccugggcugcaggcucugcaggaauugcugaaacccagccaguuugggcugcucccgggauga

SEQ ID NO: 4114294 - RNA, 58 nt, Human
ucgugcagcugggccggcucgggcccuguagacucggccauucuggucuugcugccga

SEQ ID NO: 4114295 - RNA, 72 nt, Human
ucguguaagauugccugaaaauagagaauuucaagcaguagauuuuauucuguauuucagguauguauuugg

SEQ ID NO: 4114296 - RNA, 130 nt, Human
ucgugucucauuuccgcuugcuaugguccuuauggccgugauaucuaaauccuuucauuucuuucaguaaggagcuggugcugcugccagcaggauccuggucacaaagcuggaguggagagaagcagga

SEQ ID NO: 4114297 - RNA, 79 nt, Human
ucguguugucgaaagcagguuuuaaccacaacuacggcgucuccguguaugaagguuuaccugcuguacuacaaaacga

SEQ ID NO: 4114298 - RNA, 73 nt, Human
ucguucugucacccaggcuggagugcagugacgugaucgcagcucacugcaaccuccucccggguucaagcga

SEQ ID NO: 4114299 - RNA, 71 nt, Human
ucguugcccaggcuggaguacaauugugugaucuugacucacugcaaccucugccuccuggguucaaauga

SEQ ID NO: 4114300 - RNA, 76 nt, Human
ucguuugaacccgggaggcagagguugcagugagccgagaucuugucacugcacuccagccugcgcaacagaauga

SEQ ID NO: 4114301 - RNA, 87 nt, Human
ucuaaaaauuggaaaucccuguuuuaaguugauauugaaaaacagaacuguuucagggacuugaauauagggaguuuuaaaacuaga

SEQ ID NO: 4114302 - RNA, 85 nt, Human
ucuaaacauuuaguaugagucucuguaaccuuaacaauaaaauuaggguuuuggauacagugauuucuacugguguuuucaaaga

SEQ ID NO: 4114303 - RNA, 94 nt, Human
ucuaaagcaguucuauuaucuaguacaauuuuagcaagaugauuuaaagaaguuuguuguguagcuguagcuuugcaguagaaucugcuauaga

SEQ ID NO: 4114304 - RNA, 122 nt, Human
ucuaaauaauguguuguauucauaaaaaucuugcccuuccaaauuucugaaagcauuuacgaacauuaauuaagcuucaggauaguggugaguggcauuuguuauuacucucaucuuucaga

SEQ ID NO: 4114305 - RNA, 92 nt, Human
ucuaaauuacugggcuugcauaucacaaacaagucuguacuuguccuccuacucuacaaauauaaauauaguaugugauguaggccuuugga

SEQ ID NO: 4114306 - RNA, 89 nt, Human
ucuaaauuuuucuaagaaaacuuagcuaggcaaguuuuaguacuaaguggguaagaaaauguaaagcuugaguguagcaaagagaugga

SEQ ID NO: 4114307 - RNA, 81 nt, Human
ucuaacucaaaauccauaaaaucagguuggcgccccaaaucugccacuaguuaccucuuucuauggauuuuuugggccagg

SEQ ID NO: 4114308 - RNA, 76 nt, Human
ucuaacuucucuacuccgagcaagaagaggccuugggcucaaagguucauucccaaauuuggagagggaaguggga

SEQ ID NO: 4114309 - RNA, 65 nt, Human
ucuaacuuguaaacaucuguugcuuagacuucuuagucuuugcaguugauguuuugcauuuuaga

SEQ ID NO: 4114310 - RNA, 59 nt, Human
ucuaagaaugcccuuccaggaauccaggcacugcaucccaggacccaggcauucacaga

SEQ ID NO: 4114311 - RNA, 57 nt, Human
ucuaagaauugaaguggcucuuugggggaaugggaugaggagcuaaggauuccugga

SEQ ID NO: 4114312 - RNA, 57 nt, Human
ucuaagccuaggaaaugaguuuagggaacuuuccaagccaucucccugagguaggga

SEQ ID NO: 4114313 - RNA, 71 nt, Human
ucuaaggagccccaaauuagaaccagaagccauauugucaaagcaaguucaaggcucuagaguuccuuaga

SEQ ID NO: 4114314 - RNA, 72 nt, Human
ucuaagucauggccagagaaggcagggucacauggcauacaguggccgccagagccuguggcuaugaaggga

SEQ ID NO: 4114315 - RNA, 97 nt, Human
ucuaagucauugacuagagaaaacuguguaucuuggagugggcaaacacguuaucaccugucuaggauuaugguuaucuuucaagucuagaacaaga

SEQ ID NO: 4114316 - RNA, 128 nt, Human
uauugaaaguuucuugggaagucaucuagccucuuggugcucaaagucuguggauccauagcacugguaucaccugagagcuugcuagaaauguagacuuuuaggccucucccaaaaucuauugaaua

SEQ ID NO: 4114317 - RNA, 74 nt, Human
uauugaaauuuuagaucuuccauacugcucuguggcaagguauguaugggagugaauggaagcugggaucaaug

SEQ ID NO: 4114318 - RNA, 82 nt, Human
uauugacaaaaccucagccguaaugcagauagcucucacguuuuuauuguguucauguugauucauagcgguuuugucaaua

SEQ ID NO: 4114319 - RNA, 111 nt, Human
uauugacgaaagaagagaaacagagacacggaagcuaaagaguugggaauccuaaaggucaaaggauguuucucaguuacucugauguccuguguuuucuuucaguuggua

SEQ ID NO: 4114320 - RNA, 67 nt, Human
uauugacugucuccugucaugagggauaucauccugcuuaguauccuucaaugaggagaaguuucua

SEQ ID NO: 4114321 - RNA, 130 nt, Human
uauugaggcuauaauuauacugagugugagucucuugcacauuguauuaaaaagaagcagacucacaauuauuuuuaaaaacauugaauuaggaugcaguuuacacuauguauacauauggacauugaua

SEQ ID NO: 4114322 - RNA, 61 nt, Human
uauugagucccauuugagcuauucuuuuuccugaaaaauggcacuaagagggagcuggaug

SEQ ID NO: 4114323 - RNA, 69 nt, Human
uauugauauuugcaucaugauggugucugagccaaaguucuuauagaaauaaucugaugcaauucaaua

SEQ ID NO: 4114324 - RNA, 56 nt, Human
uauugaugagaugaugccuuggcagcccauguaugugccaggcacuguucucaaua

SEQ ID NO: 4114325 - RNA, 62 nt, Human
uauugauugagcaucaauuaagugaguuucuaaaaugugagaaauuagauguuuaaucaaua

SEQ ID NO: 4114326 - RNA, 73 nt, Human
uauugcaaaaaguuccaguuuuugcauuuucucaguuuuuuaaagaggaagaugugcaaaguuggaagcagua

SEQ ID NO: 4114327 - RNA, 64 nt, Human
uauugcaguguuucagugcuuuuucucuccccuggagauaaaacugagccugaacauucuggua

SEQ ID NO: 4114328 - RNA, 79 nt, Human
uauuggaaagauaaaguuugauugaauauagggaccacugacagagucuguacuuccuuuaaacuuuagauuacuaaua

SEQ ID NO: 4114329 - RNA, 91 nt, Human
uauuggguaacuauauaaucugaaagugaaaaauucucuguuugacagugcagauggugguucuauuucauauuaauaguugaaucuaaug

SEQ ID NO: 4114330 - RNA, 65 nt, Human
uauugguaugguaagaauugaagagggcaaugaaacaugcccuaaguucuucucccauauccaua

SEQ ID NO: 4114331 - RNA, 67 nt, Human
uauugguuaugugcaggcucuggaguaggacuaucuggcuuuaauccuggcucugcacuugcuaaug

SEQ ID NO: 4114332 - RNA, 71 nt, Human
uauuguaaaacuuuuuuccauucacugucauguuauauuauuuuuaauauuugccagugugugguacagug

SEQ ID NO: 4114333 - RNA, 69 nt, Human
uauuguaucuuaccacauguauagaggaccuaacacuugguuuuuucccugugugcuaggacuacagug

SEQ ID NO: 4114334 - RNA, 62 nt, Human
uauugucaugucuguaaauacaccaucgaaccauaaaaauuggcacuacagacaagacaaug

SEQ ID NO: 4114335 - RNA, 56 nt, Human
uauugucauguucugucucuuggaacuugagcaagauacagaucuacgugucaaug

SEQ ID NO: 4114336 - RNA, 130 nt, Human
uauugugcccacuuacaaauaugggauccuaaggcucagacaggaaaaguaacguccacaaaaccauacaauguucacagauccuugaagccaggauaacacaauucacuauaacaaaaucagugcaaug

SEQ ID NO: 4114337 - RNA, 63 nt, Human
uauugugcucaccauuacauccccaugacaaacauguggccuguacaugguagacgcucaaug

SEQ ID NO: 4114338 - RNA, 57 nt, Human
uauuuaagaugugucauaaagaauacuuagggaucuuuauggcagcauguuuaagua

SEQ ID NO: 4114339 - RNA, 56 nt, Human
uauuuacccuggcagcuguagcauuuuagccuuccauuagcugacagaggugaaua

SEQ ID NO: 4114340 - RNA, 83 nt, Human
uauuuagcugaugguagcuguccacaucaggaaugauuagaccacgugauuuucccauggggccagccgccaucaguuaaaua

SEQ ID NO: 4114341 - RNA, 64 nt, Human
uauuuaucgagugucuacuaugugcaaaauauuuuucuaggcacugaggauacauugaugaaua

SEQ ID NO: 4114342 - RNA, 63 nt, Human
uauuuauguuuaggaaagugcuggccagcuggaaauaagagcucuuucucuaauuuauaagua

SEQ ID NO: 4114343 - RNA, 56 nt, Human
uauuucacaguuuucagacgcuggaaagucagugucuagggcgagaauguguagua

SEQ ID NO: 4114344 - RNA, 56 nt, Human
uauuuccuguggauacuuuuagcuuucuucugccaacguaucuauaaguggaaaua

SEQ ID NO: 4114345 - RNA, 59 nt, Human
uauuucuaagcuguaagucugaagucgggaagaauggcgggcuaacaguuguggaggua

SEQ ID NO: 4114346 - RNA, 60 nt, Human
uauuucuauuccccaggcaaguaaauugagcuuccaagaauuuagugggggauagagaua

SEQ ID NO: 4114347 - RNA, 90 nt, Human
uauuugaaauaauguguuucccuuugaagucaggaagagggaaaaguuaucuugucuuaacauaaaaggaaaucacguuugauauaaaug

SEQ ID NO: 4114348 - RNA, 61 nt, Human
uauuugaagauucuucugaugugaucacuuuucuagauacagucucaggacucuucagaug

SEQ ID NO: 4114349 - RNA, 110 nt, Human
uauuugauagaagaggggauuauauugcuaauuuguauaaugaaaauugcaaggaccaauuuuucaugagguuacacagcugguauuacuuucccuuuaacuaucaaaua

SEQ ID NO: 4114350 - RNA, 58 nt, Human
uauuugaugcugugcggucauccugauucuggaggaugauguuuuugguagucaaaug

SEQ ID NO: 4114351 - RNA, 57 nt, Human
uauuugcaacauaaaacucugaaauauuucuucuuuugagaguuaugguuguaaaug

SEQ ID NO: 4114352 - RNA, 65 nt, Human
uauuugcaagagacagacaugacucaguuggucuaaaugacucuagaggaacugcucuugagaua

SEQ ID NO: 4114353 - RNA, 93 nt, Human
uauuugcauacauuugcauugcauuaaguauucuaaguaaucuagagacgauuuaaaguauacgggaggauguguguagguuguaugcaaaua

SEQ ID NO: 4114354 - RNA, 127 nt, Human
uauuugcugagcaaggacuuuccagcuaggauuggauaaagcaguagcuagguucgagaguaagaguuuuauugcuaucauuuagaguauuucuucauucguucaugcaugccuuugcucauaaaua

SEQ ID NO: 4114355 - RNA, 62 nt, Human
uauuuggagugauggaaauguucuauaucuugauucuagugauaauuccaugacucuaugug

SEQ ID NO: 4114356 - RNA, 73 nt, Human
uauuuggugcaagaaugcaaaugcucccugagagaaaagcaucccaggcagaauuaguguuucaugcuagaua

SEQ ID NO: 4114357 - RNA, 82 nt, Human
uauuuguauucuaguagaaucaaccuaugagagagucuguuaagacccuauaacacuuuccguagguuuaguaauaaaaaua

SEQ ID NO: 4114358 - RNA, 65 nt, Human
ucuaucccaaggugaacuugcuguacagcuugacugauggcaugcacaguuuuucaccucauaga

SEQ ID NO: 4114359 - RNA, 89 nt, Human
ucuauccuccugcacacuuggauguguggccuugaccuguggagugggcugccuaaagggagaagguccaugccugucaggacugugga

SEQ ID NO: 4114360 - RNA, 79 nt, Human
ucuaucuaucuaugaugaaugcuacugaaucauuuuuuaaugaugguaaacaaagacauuuauuugugaaagugauaga

SEQ ID NO: 4114361 - RNA, 94 nt, Human
ucuaucucugacauggauauuauauuacuaauugacacugacacauaaaacaccagagaugaguaauagcuaaugguucucagauagagauaga

SEQ ID NO: 4114362 - RNA, 56 nt, Human
ucuaugaggaaggugcaaggaagccacaaaauacuuccagggcuaauuccugugga

SEQ ID NO: 4114363 - RNA, 89 nt, Human
ucuaugagugauugcaguggaagcuggcugugaagaacuauacaauuucuagcucuacaaguuuaauuccacuuaaauuacaucaugga

SEQ ID NO: 4114364 - RNA, 75 nt, Human
ucuaugcauuaugguagggcuguacaaauuagguuuuuucaacauauauuuauugagcaccucccauaugcuaga

SEQ ID NO: 4114365 - RNA, 127 nt, Human
ucuauggaggaggcggggcugcugugaccuguuucucgggccucccagcagccugggauggaccagcaagcugcuucuuuccuagaggcugaugagucgagaaccagggcaccuucucgucuauaga

SEQ ID NO: 4114366 - RNA, 80 nt, Human
ucuauggaugaguugagugguucugccaauuugggccauguguggcugauccuggcagggccugcucaucauccagcagg

SEQ ID NO: 4114367 - RNA, 81 nt, Human
ucuauguaagugguuggcgaacucuagacuguggaccaaaucuagcccaacaucuguuuuugucaauuacauuuuacugga

SEQ ID NO: 4114368 - RNA, 57 nt, Human
ucuaugugcccuuugugugaugugcaaauugcucauaucauauauagagcauguagg

SEQ ID NO: 4114369 - RNA, 62 nt, Human
ucuauguguucaauaugguuugggggaguguccucucugggaucguuuugggcucccauaga

SEQ ID NO: 4114370 - RNA, 73 nt, Human
ucuauuguucuuggaaacugggaguuaaauguagagauaugguuacauucaggcucaguuuuuuugacaaaga

SEQ ID NO: 4114371 - RNA, 81 nt, Human
uauuuuuuagagcugcauacuaaaguauuuagggaugaaaugucaugucuguaguuuacaguauuucagcauaaaaaaaua

SEQ ID NO: 4114372 - RNA, 69 nt, Human
uauuuuuucacuguuaggaguaugcuacauucucauuagaaguagcagcuccuaaacagugguguagug

SEQ ID NO: 4114373 - RNA, 70 nt, Human
uauuuuuuucuccuuuccuuuggcuuaucuuuccuugcacuggaaugcuaggaaaggaagaacuuugaua

SEQ ID NO: 4114374 - RNA, 77 nt, Human
ucaaaaacagaaagggagauggaauagauucugacuuucuucagggaagcagaucaccacuuuguuacuguauuuga

SEQ ID NO: 4114375 - RNA, 62 nt, Human
ucaaaaagcuggagaauaggaauuaguguagcuccccuauacuaauuaucauccaguuauga

SEQ ID NO: 4114376 - RNA, 111 nt, Human
ucaaaaauaugggggggaaauggucuacuuuagcaagauaacaguaauuuuguucauuguuuaucaagaaauuuguguuauuugugguguuccauaacugcuucauuuuga

SEQ ID NO: 4114377 - RNA, 62 nt, Human
ucaaaacuuacagaggccggaugucuuuuuucucauacaucuggcuuugcuggaaguuuuga

SEQ ID NO: 4114378 - RNA, 94 nt, Human
ucaaaauguaauuuuaucuggaaaaggcaggcaguggugcucuguuuaauuaugaauuacaagccuuccuuugcaggucaggucaacaugauga

SEQ ID NO: 4114379 - RNA, 63 nt, Human
ucaaaaugucuacgucuaaauuuggagguagaauugucucuagauuuagugguggaauuuugg

SEQ ID NO: 4114380 - RNA, 55 nt, Human
ucaaaauucuagggagaaugguuuccaacauaggauucaacucccagagucuuga

SEQ ID NO: 4114381 - RNA, 96 nt, Human
ucaaacaggauaacuaaagcuuauuaucuuaucaagcuuguucccuugcagacaagauugaucaauuaucauaggcuuucuggguguucuuucuga

SEQ ID NO: 4114382 - RNA, 99 nt, Human
ucaaacuaaacaaagauaauuuccugagguagugauuguagaagugacaaauuaucucaccacccaagcacuggucucaagauugucuuuuggggauga

SEQ ID NO: 4114383 - RNA, 59 nt, Human
ucaaacugaacuaagauccaacuguccaaugaacucaugagcuggguuuuaggguuugg

SEQ ID NO: 4114384 - RNA, 89 nt, Human
ucaaacuggaugauuucaacagaucugucuucagguuugcucauucuuucuucugccagcuugaaacuacuguugagacccucuaauga

SEQ ID NO: 4114385 - RNA, 77 nt, Human
ucaaacuuuugaggaguucaggaauagcuauuucuuuuagcaagcucuccaugaaacacuuagauauuaaaguuuga

SEQ ID NO: 4114386 - RNA, 97 nt, Human
ucaaagaaggugaaugaguaagaccauaauuuuuguaacauuaaacauaagaaguccuagaucuauuaugucuugcuuauguaucaauuaucuuuga

SEQ ID NO: 4114387 - RNA, 56 nt, Human
ucaaagaagugcaaaccucaucagaugccagauuggguuguucccacauucuuugg

SEQ ID NO: 4114388 - RNA, 120 nt, Human
ucaaagacauauucagaaaaaaauuccaugauguacauguuuaagugaaggauaacuguauguccuuacauagugcugaaauauguagaacauuauagagcucauggauauaaaauuuga

SEQ ID NO: 4114389 - RNA, 65 nt, Human
ucaaagagaaguuuuucuuauuacauguaauacauaguucaugacggacaaagacuucucuguga

SEQ ID NO: 4114390 - RNA, 84 nt, Human
ucaaagaggaaggauuuaguuugaggguaaauucuccugugccucauuacaguccucaccaaggcugcgauccuucccuguuga

SEQ ID NO: 4114391 - RNA, 65 nt, Human
ucaaagauugaaacuaaggagaaacaacaauuccacgcaacuugagauccugguuucaauccuga

SEQ ID NO: 4114392 - RNA, 55 nt, Human
ucaaagcaucagucaauuuaggaggguuguuuuaucuggacuugagcugcuuuga

SEQ ID NO: 4114393 - RNA, 55 nt, Human
ucaaaggauaacugagggcagucaaguaaggcuccauguaggugguauccuuuga

SEQ ID NO: 4114394 - RNA, 58 nt, Human
ucaaaggcgguccaggaauaaagggagcccuucccagggauucuaggauggccugugg

SEQ ID NO: 4114395 - RNA, 56 nt, Human
ucaaaggcugcuugucuucugggucacguuguuucuuugacaggccaugcuuuuga

SEQ ID NO: 4114396 - RNA, 68 nt, Human
ucaaagguccccuguaagaacuggcugauggggcagauaauuuacugguuacagugggaccuuccuga

SEQ ID NO: 4114397 - RNA, 61 nt, Human
ucaaaggugguuuuugagcaaugcagugaugugggcaaagcauuguuucaagauuaacugg

SEQ ID NO: 4114398 - RNA, 59 nt, Human
ucaaagguuuuuauuuauccuggagcccacugggcauccaagaucaauugaaccuuuga

SEQ ID NO: 4114399 - RNA, 76 nt, Human
ucaaagugaauucugcacuacugaagggggagggaggauuuccugugccuucaguuaguuuagaaucuaauuggga

SEQ ID NO: 4114400 - RNA, 55 nt, Human
ucaaagugaguuauaaacaucuucaacauuggaggauaaacuaaacucauuuugg

SEQ ID NO: 4114401 - RNA, 65 nt, Human
ucaaagugcucuagaaauugucagugguuuacaugaaguggccaugggugucuggagcacccuga

SEQ ID NO: 4114402 - RNA, 57 nt, Human
ucaaaguuggaaaagcuggcccuuuucuaggaaaucuucagauuuuucuaacuuuga

SEQ ID NO: 4114403 - RNA, 94 nt, Human
ucaaauaauuugugugcauauagucuuacaucugcauuaauuaauuaaaaaguugguggcagagacauaggacauaauauaacaaauaauuuga

SEQ ID NO: 4114404 - RNA, 95 nt, Human
ucaaauaucuuuccacugugcuuacuauggaggauguguccucccagcaggagagacauuuguuccucuaagugacauuuuaaaaaaguauuuga

SEQ ID NO: 4114405 - RNA, 82 nt, Human
ucaaaugugaauggcagagcugaauuugggugguggauauaagaguguucacuauaaaguuucaacuuuucuguauauuuga

SEQ ID NO: 4114406 - RNA, 76 nt, Human
ucaaauuaagaugaggucauccuggauuaggguagauccuaacccaauaauugguggccuuagaagagaaauuugg

SEQ ID NO: 4114407 - RNA, 69 nt, Human
ucaaauucauagucuaucuuuaguauaucaauuuaugaacaguaugagauuuggauucagugaauuuga

SEQ ID NO: 4114408 - RNA, 84 nt, Human
ucaacaacggauaguuuuuuucauguaagaauguuccaguauugcaugggaccaacgcaugcaaaaaauguauuuguuguuuga

SEQ ID NO: 4114409 - RNA, 60 nt, Human
ucaacaagaagggugauuaggggcagaggccugcaagaggcuucauggcccacccguuga

SEQ ID NO: 4114410 - RNA, 127 nt, Human
ucaacaggucccucggagagaaccuuccagagcucugccuguggauacaugcucugaucacacagcucaucaagcacuggggccacagacacggacugggagguggguccccauggcacuuguguga

SEQ ID NO: 4114411 - RNA, 65 nt, Human
ucaacaguggcaucuacuuaaucuggacucuuuugguuguaguggguaaguggagucauuuggga

SEQ ID NO: 4114412 - RNA, 61 nt, Human
ucaacaugaagguggguugcauguuagccacaggccuggcacaacuccaccucagcguugg

SEQ ID NO: 4114413 - RNA, 58 nt, Human
ucaacauugagucccugggucuccacaucugggaaaaucaggcaaaacucagucuuga

SEQ ID NO: 4114414 - RNA, 62 nt, Human
ucaacauuggaggcaacauucacugcaaugugugaaugccaguacuugcauccagaugcuga

SEQ ID NO: 4114415 - RNA, 58 nt, Human
ucaacauuuuggcuuuguuuggacagcuuuugugcaagugcaaacacagaguguauga

SEQ ID NO: 4114416 - RNA, 58 nt, Human
ucaaccucugaaggcaggauggaucuggagggauaaacauaaccugcccagaggauga

SEQ ID NO: 4114417 - RNA, 70 nt, Human
ucaaccugcagcuguauggccaauucuugccuggccagaaugggccuugguguuggcauauggugguuga

SEQ ID NO: 4114418 - RNA, 70 nt, Human
ucaacuaaggcacaaucucuaauucuguaucugcauugaugacucagugauuuuagagguugugaguuga

SEQ ID NO: 4114419 - RNA, 57 nt, Human
ucaacuacucagcaaguggacaucuuuuacaugaagauuucugcuccugagagaaga

SEQ ID NO: 4114420 - RNA, 96 nt, Human
ucaacucacagaguaagaacguuaugccuuacacucaauuucuaaaacauagaagcuugcagugguuggcaugaccaagaauuugucgauauuuga

SEQ ID NO: 4114421 - RNA, 74 nt, Human
ucaacucaguccauagcacaggggaagagaguuuaugcaagguuucuguagugugguauguaggcaagagauga

SEQ ID NO: 4114422 - RNA, 70 nt, Human
ucaacuccuacccuaguaauguguagucccaggccugggagccaggucauggauuaaauuauuaaguuga

SEQ ID NO: 4114423 - RNA, 57 nt, Human
ucaacugguggucaaccuucuguacaugcuguacaagguuuaaauagccaucaguga

SEQ ID NO: 4114424 - RNA, 56 nt, Human
ucaagacagugugauacuggccuaggauagacauagggucaauggcacugacuuga

SEQ ID NO: 4114425 - RNA, 80 nt, Human
ucaagaggugucugcuuuuuccccuucuggcgagcucuauaaaucagcaauucagugaaguggaaaagcauagccucuga

SEQ ID NO: 4114426 - RNA, 56 nt, Human
ucaagcagcagaucaagagcuagauaccagagccuggucuuggucugacagccugg

SEQ ID NO: 4114427 - RNA, 73 nt, Human
ucaagcagggaagucugucuuagaauaaggggugagggauaaccucaaaugagagaggggacugccugcuuga

SEQ ID NO: 4114428 - RNA, 65 nt, Human
ucaagcaggguuuaugcauggagcccucauacagagggcugaccuucagauacucugacacuuga

SEQ ID NO: 4114429 - RNA, 96 nt, Human
ucaagccaggcuucacccccggccccugccaccucacccuccgucaucagacacagaggacuguagcggggaguguuugggagguguccuggcuga

SEQ ID NO: 4114430 - RNA, 104 nt, Human
ucaaggaagagaaugagcacccuuuucugaaccacuuaaauaaaucugaaugcagacuguguuugaaaagagcugcuucaaggggcucaucugugauuccuuga

SEQ ID NO: 4114431 - RNA, 73 nt, Human
ucaaggaaguccucaaaggaauguaaauucaaaggaaaagugagugaugccaucccuugggaaacuuucuuga

SEQ ID NO: 4114432 - RNA, 58 nt, Human
ucaaggaagucuuauugcacaggaguauccuggaacccagugcaauugauuuuuuaga

SEQ ID NO: 4114433 - RNA, 79 nt, Human
ucuaucuauccuguuuaucuaucuagagaugucacaacaggguggcaucucaggacaggaaaaaagggacuagaauaga

SEQ ID NO: 4114434 - RNA, 77 nt, Human
ucuaucuuauuguuucugaauuuuccacagauuuggauguccauuucuacauucugggaaaucagaugguagguaga

SEQ ID NO: 4114435 - RNA, 77 nt, Human
ucuaugaauggggauuuguuucuucauuuagaagcuucuaacugaugcuuuuccaggagaaauauaugccauguaga

SEQ ID NO: 4114436 - RNA, 109 nt, Human
ucuaugacacauugaauuuggcugcacauuuaugaauguuauguaaagggaaagagugaccauuuccuugcaaauagcuuucugaguugccacaagaucaauaucgaga

SEQ ID NO: 4114437 - RNA, 73 nt, Human
ucuauggaggucagugguuccugugagcaucauaaugacuaauguucacaguaaugauucugagucucuagga

SEQ ID NO: 4114438 - RNA, 61 nt, Human
ucuauggcaucagcauccgagaccugagcuucuagggcacagaacguggcugagccauaga

SEQ ID NO: 4114439 - RNA, 62 nt, Human
ucuauguaaagccauauugauaaaguggguuuuuuuacauucaauauucuggcuuuaaugga

SEQ ID NO: 4114440 - RNA, 108 nt, Human
ucuauguacauguuguuuuuauuuccaguuugugguauuuuauuauaaggaauuauuuuaacuugaaaauagguacggauuagaauguaagaaucaauuugucauaga

SEQ ID NO: 4114441 - RNA, 89 nt, Human
ucuauuaaacuccagugaauacuagaauuucuuauauuaaaauuauuaggaucucauguguucuggugauuucuacuguguauaucaga

SEQ ID NO: 4114442 - RNA, 77 nt, Human
ucuauuauugucuuuaugauuaugauuuugucuugucuuauagaugaggggagaguuaaugugaaugugaugaugga

SEQ ID NO: 4114443 - RNA, 68 nt, Human
ucuauuccaaaccccuuccccucucugugucuccuuucucacuguugaaagaagggcuuugaaguaga

SEQ ID NO: 4114444 - RNA, 59 nt, Human
ucuauuccuugaggcuugcucaguggcaaaugcucaccauuggaggccucaggaaaaga

SEQ ID NO: 4114445 - RNA, 59 nt, Human
ucuauugcaugcaccuaacaaauuauuuuauuagaauaauuuguguguguauguuuaga

SEQ ID NO: 4114446 - RNA, 73 nt, Human
ucuauuguugaccuacuuucuuuuugucuuaagggauuuuuuugcagaaugggaagguaguuguaaauguaga

SEQ ID NO: 4114447 - RNA, 69 nt, Human
ucuauuucuguaguccacauucuuucuauuggaucacccuggagggaaaggaacucauggaaaccuagg

SEQ ID NO: 4114448 - RNA, 60 nt, Human
ucuauuuuaguaauguguaguucucucagacagacagaaauacaaaguacuaagauacga

SEQ ID NO: 4114449 - RNA, 101 nt, Human
ucucaaaaacuuguucacuaaacaccacaugcauagccagcauuguauguguuacacacguguguucugugugugugcagugugaacaggcucacaugaga

SEQ ID NO: 4114450 - RNA, 70 nt, Human
ucucaaacaggccuugguccugaccuaaccuauccuguucaguuaggucaggaccaaggccuauuugaga

SEQ ID NO: 4114451 - RNA, 87 nt, Human
ucucaaacaguaacacucuaaagggaugcacgaucuuuucuuuuauacaacagacagugcuuccaucuagagggucacugccugaga

SEQ ID NO: 4114452 - RNA, 62 nt, Human
ucucaaauguaaagcaugauuugaaagagaucaguaacaacaguuaugcauuacauuugagg

SEQ ID NO: 4114453 - RNA, 90 nt, Human
ucucaaauuagcuauuguuaacauguuuucuuugucuuucuuucuugggaaaauaaacaaugaagauaauguugcagugcccuuuagaga

SEQ ID NO: 4114454 - RNA, 103 nt, Human
ucucaagaaugacugccagggcuucaguucugaccaucuucauuccagagagcaggaaagaagcagaauagaggcccuucccagcucugucagcucuuuaaga

SEQ ID NO: 4114455 - RNA, 85 nt, Human
ucucaagcugugacugcaaagggaagcccuuucuguugucuaaaagaaaagaaagugcuucccuuuggugaauuacgguuugaga

SEQ ID NO: 4114456 - RNA, 85 nt, Human
ucucaagcugugacugcaaagggaagcccuuucuguugucugaaagaagagaaagcgcuucccuuugcuggauuacgguuugaga

SEQ ID NO: 4114457 - RNA, 87 nt, Human
ucucaagcugugagucuacaaagggaagcccuuucuguugucuaaaagaaaagaaagugcuucucuuugguggguuacgguuugaga

SEQ ID NO: 4114458 - RNA, 77 nt, Human
ucucaaucgugagcaccaggcaaaaccacaggagcaguaccauuguucuggagaguuuagucuggggccuacuggga

SEQ ID NO: 4114459 - RNA, 71 nt, Human
ucucaauucaguuuagcaaauuuguaucaaguauccccuaugugcaaaaugcuagacuagguacagugaga

SEQ ID NO: 4114460 - RNA, 104 nt, Human
ucacuuucucuuagguuuguagaggauuucuucauuuguggugaaugagauguguuuuuauugcauuacaugaugaaggagcaugaggacaugggaggcaguga

SEQ ID NO: 4114461 - RNA, 72 nt, Human
ucacuuuuccuucacguuguguucucuguuuccuuuuccuuguggaagucacaggguacacaaggauuguga

SEQ ID NO: 4114462 - RNA, 129 nt, Human
ucacuuuugguuccuugguuugcgauuauuuucccccuuuuugugcggacugugcccucgcugcucucacugcccucaccuugagggggaaaauaauccggaguuggguaaaaaagaaaaagaaagaga

SEQ ID NO: 4114463 - RNA, 94 nt, Human
ucagaaaaauuacuagagacuuucucuucacugugugccucacaagcucuuaauauugcuguagcacauuugaagagaagcacuuucuuucuga

SEQ ID NO: 4114464 - RNA, 71 nt, Human
ucagaaaaucuuuguauuuuaaaauuuucucaucucaaaagaggaaaugucauagaaauauaaggcucuga

SEQ ID NO: 4114465 - RNA, 64 nt, Human
ucagaaagguucuauguuuuacucaauacaguggguagauaucagaaauagaauuuagaucugg

SEQ ID NO: 4114466 - RNA, 81 nt, Human
ucagaaauucgcuucagcacugucuauuagugagaacuggaagugguuuucacuaaauaugcugauaacuaugcuuuuuga

SEQ ID NO: 4114467 - RNA, 89 nt, Human
ucagaacaucugcaccaguaacaugaagagacauggauuggugcggaaaaugugccucuaugucaauuccaugccuggcaguggacugg

SEQ ID NO: 4114468 - RNA, 59 nt, Human
ucagaagcugguguccuuugaaaaauaucaccuagaaacuucagaguucacugcuauga

SEQ ID NO: 4114469 - RNA, 130 nt, Human
ucagaagcuucauacucaggcugcuuaccaaaccccaccauguagaaacugagaaagcuuacuaauuuuuuuaaguuguguguguguguguguguguguguguguguguguguguguguuauuauucuga

SEQ ID NO: 4114470 - RNA, 79 nt, Human
ucagaagugugcaguaggacauuucauuuguuccuguuuugucucuuugugauugauaguguuuuacuuagacuucugg

SEQ ID NO: 4114471 - RNA, 67 nt, Human
ucagaauaccugggcagugcuggaguugaagaguuuccuuuuuaagaagcuguccaggugcagcuga

SEQ ID NO: 4114472 - RNA, 95 nt, Human
ucagaauauguuuagauauaaugucuuuguugaaaucugguaaaauguucagaugacuaacauaguauugcugucuucaaggaaauaauguuugg

SEQ ID NO: 4114473 - RNA, 75 nt, Human
ucagaaucacaguagacuucucaagagcaucaugagaugcuaaaugauguuagagucacaacuguaauacucuga

SEQ ID NO: 4114474 - RNA, 65 nt, Human
ucagaaugagagacuguguguugggaguugggggacugcuugugugaaacacuucucucuucugg

SEQ ID NO: 4114475 - RNA, 65 nt, Human
ucagaaugauauauuagcagauuuuagauacagcuuuacaaaugcugacugauuuaucagacuga

SEQ ID NO: 4114476 - RNA, 77 nt, Human
ucagaaugcucagccuugcuucuggacugguggucauucacugagccagggauaaaaggaguaauacugaguucugg

SEQ ID NO: 4114477 - RNA, 79 nt, Human
ucagaauucuugcuuucuuucucuuuuugcaaauguuuuuugcuuucaaagagcucggaaaguguugaagaaaagcuga

SEQ ID NO: 4114478 - RNA, 71 nt, Human
ucagaauuuagaaaugauuuugaugcuucauaggccauauggucucuguugcaucuagucaauucuuauga

SEQ ID NO: 4114479 - RNA, 101 nt, Human
ucagacagauacuagguuggugcaaagguaacugggguuuugccauugcuuucaguggcaaaaacugcagcugccuguguacaaaucuaaugcaugaguga

SEQ ID NO: 4114480 - RNA, 87 nt, Human
ucagacagugaugcaucugccugagucuagguuuucuuaacucuaagacagcacucccaucucagggaaguugugaagcugucauga

SEQ ID NO: 4114481 - RNA, 90 nt, Human
ucagacauccugcugcaaaauggcuguggucuggcaaggcugggaacagcuuuuguggguuugcagugauauuugaaguuugaugaauga

SEQ ID NO: 4114482 - RNA, 59 nt, Human
ucagacauggggagagagaccuggccuaggccuguagaguuuuuaagcuucaugacugg

SEQ ID NO: 4114483 - RNA, 75 nt, Human
ucagacauguguaagaugugauauauguagaauuacuuuuauggaaauaguauacagauacuuagacgugccugg

SEQ ID NO: 4114484 - RNA, 89 nt, Human
ucagaccucuaaaccaccagcaccagcucugugccuguuauauggcaggcuuucgaugaacgcuugcugaacuggaucuggggguuuga

SEQ ID NO: 4114485 - RNA, 55 nt, Human
ucagacuggauuuucacguuuucaaauuugaaacucauggaaaaugccagacuga

SEQ ID NO: 4114486 - RNA, 63 nt, Human
ucagacuguucucuuccacggcgcucggagguuuucauccuuugggacaagagauagcucuga

SEQ ID NO: 4114487 - RNA, 88 nt, Human
ucagacuucagagcaccaggcgcuggaugcugacaguggccagaucccacuguccaagcaugccuggcuuucuuuggaaaaugucuga

SEQ ID NO: 4114488 - RNA, 58 nt, Human
ucagagaaguaggcuaaugguggggaagcauuucccugcugauguucgugcuuccugg

SEQ ID NO: 4114489 - RNA, 87 nt, Human
ucagagacaccucucauuucuccucaaugccacugcacugaugucaacugacuuagggcaggcaugagagaacugagguuuacaugg

SEQ ID NO: 4114490 - RNA, 85 nt, Human
ucagagagagcaagccaguccucuacugggcaccagaagacaaugcaacugggaguccaaggagaggaugaggggcucgauuuga

SEQ ID NO: 4114491 - RNA, 63 nt, Human
ucagagcacuggugcuaccuugugacugacggugaugagcauuucuguagcgcguguuauuga

SEQ ID NO: 4114492 - RNA, 74 nt, Human
ucagagcaucguguccaggagccccugggaaaaggcaacuucuuccugaggaggaccaggaccacagauccuga

SEQ ID NO: 4114493 - RNA, 59 nt, Human
ucagagcaugugggcugcaguuccccucgaccaccaaagcuagccuggccuugcucugg

SEQ ID NO: 4114494 - RNA, 66 nt, Human
ucagagccagaaauggaaguucugguuuaauaaguuugaguuagaaguuccguuucuuuucuuugg

SEQ ID NO: 4114495 - RNA, 79 nt, Human
ucagagcccaggaugaugaggccaugaggcaggggacgccaguacuuugccucacaauucauccauaacagggcuuugg

SEQ ID NO: 4114496 - RNA, 78 nt, Human
ucagagcuaaaggauuuuaauuuuauagaggaugggaauacucgcauauuguaaaagguugaaucccuagcagcauga

SEQ ID NO: 4114497 - RNA, 63 nt, Human
ucagaggagaugguuaccagggccccuucuaacacaccauucuggaugugccuuccuuccuga

SEQ ID NO: 4114498 - RNA, 64 nt, Human
ucagaggauuggacuuuuauguuuaaaaauaaauuuaauguaagaugaaauuccuguuuucuga

SEQ ID NO: 4114499 - RNA, 87 nt, Human
ucagaggggacauacccagcugucacagagaguucuagguugcucuaaucucacauuucauugacagcuggggcauuuuaccucuga

SEQ ID NO: 4114500 - RNA, 62 nt, Human
ucagaggguagaagacaggguugcucgucuuaaccgggcagugucuacauuuauuacuuuga

SEQ ID NO: 4114501 - RNA, 129 nt, Human
ucagagguggaugcauguugcuuucucuggagucaucucagcugagaggcagcuucuccauccuugccuggucuaguuuuagguggcuuauucuagagacaggcauucauguugucaugauccacuaga

SEQ ID NO: 4114502 - RNA, 60 nt, Human
ucagaguaucccagggccagcaagauggggcugucaggaggcccacccuggcuagucuga

SEQ ID NO: 4114503 - RNA, 84 nt, Human
ucagaguggggcccugcaggccaggcaagggcuucaaaguuugugcugagagagcccaggagcaggggcaggguuuugugcugg

SEQ ID NO: 4114504 - RNA, 55 nt, Human
ucagaguuacccaaaacauucucuguuuaacccaagucuguuaggaugacucuga

SEQ ID NO: 4114505 - RNA, 59 nt, Human
ucugccuagguuuccaaugugcuuauuaauuaaugaucacauuucuguacuuagguaga

SEQ ID NO: 4114506 - RNA, 89 nt, Human
ucugccucucaccugugugcugguccucuccagcaggcauucucuuugagaaugcuugaaugggauuagagacaaccgagaagagcaga

SEQ ID NO: 4114507 - RNA, 57 nt, Human
ucugccugagcagagggaggccagucaaguccagccucuccugcuccuguaggcaga

SEQ ID NO: 4114508 - RNA, 106 nt, Human
ucugccuuaauuuccuuccaggccaggguaagaggagagcgaguguaugauguuaugguuaucuguuuucccuugccucugucccugguuccaaguguacugcaga

SEQ ID NO: 4114509 - RNA, 80 nt, Human
ucugccuucacaguuugcugggacaggaaaucugaauagggggcagagcaaaguccaguccuagaaacuggagagaaaga

SEQ ID NO: 4114510 - RNA, 129 nt, Human
ucugccuucccacaccugauccauggacugugucuuuccaggccagaccuuucaaucuuucucucugggaagaugggcucuaugucuaggagaugccaauggagccgugugagcgagugugaauggagg

SEQ ID NO: 4114511 - RNA, 76 nt, Human
ucugccuugggaggaaggugagcagggcacuggugucccagaaaaugccccuggcuggccagcuccuccucguaga

SEQ ID NO: 4114512 - RNA, 66 nt, Human
ucugccuuuguugaagaauccacagguggcaggaaucaccugacaaagaggaacagcaggggcaga

SEQ ID NO: 4114513 - RNA, 78 nt, Human
ucugcgggauacagugggaagggcagaggcuuuggugucagacagacguuaguucugaucuucccacuaaugcguaga

SEQ ID NO: 4114514 - RNA, 83 nt, Human
ucugcuauucucugggcugugggaauucaacagugagcaagaugcgaacuguacccuuuagaagcucauaguccaaugggagg

SEQ ID NO: 4114515 - RNA, 56 nt, Human
ucugcuauugcccaagucuuggaaagugcaggcuccaggaaaaggguggugguaga

SEQ ID NO: 4114516 - RNA, 63 nt, Human
ucugcucaguccuccugcagugccacagggguguggcaugggugguguggaggugcugagaga

SEQ ID NO: 4114517 - RNA, 78 nt, Human
ucucaauucugccucuaaauauuucuggagaagaauggaggaaaaggaauccagagauauuuaugaguagaauugaga

SEQ ID NO: 4114518 - RNA, 92 nt, Human
ucucacagaaacauccagcucucuuucuuguugcuguugugaccagagaaacaucauggcuccaagauggagagccagcuguuucugggaga

SEQ ID NO: 4114519 - RNA, 129 nt, Human
ucucacauaugcaguaaggguuaggggagaaggucccagcuccucuugucucuagcagaguguaaacuggcucugcugaggagguggcugugcuuuuauuccuucuccugagaacuguuuauauauuaa

SEQ ID NO: 4114520 - RNA, 72 nt, Human
ucucaccguugacagcauccaagagggagggagcuucgggacuccagucugcaggguugucgagaugggaga

SEQ ID NO: 4114521 - RNA, 60 nt, Human
ucucaccucccaguuccaauccagaaugaauuuguccugagugagagcugggaggugagg

SEQ ID NO: 4114522 - RNA, 78 nt, Human
ucucaccuuccuagaaugcuauuuccuuguguuuugcuuuuuagcagaagagaugaaauaguauuaaagacuguaaga

SEQ ID NO: 4114523 - RNA, 69 nt, Human
ucucacuccaaaccccaggcuuguacaaacagaucaucaucauauaaguucucaggguuuggagucaga

SEQ ID NO: 4114524 - RNA, 73 nt, Human
ucucacuccugcaaaauaucuuguccagggcaguuuagaaguaaagcacugcuaggauagcaugcaagugaga

SEQ ID NO: 4114525 - RNA, 63 nt, Human
ucucacugauuugagaccaagguuaagcaagccugacaaagugguucaucaaaucagagaaga

SEQ ID NO: 4114526 - RNA, 71 nt, Human
ucucacugggucacagcagaggaucccccagccccaggcccaaggagugucugugugaccacacagugagg

SEQ ID NO: 4114527 - RNA, 65 nt, Human
ucucacuguccugggucccugcuagaaggcggucugcuuuccagcacacgcuccggauagagagg

SEQ ID NO: 4114528 - RNA, 65 nt, Human
ucucagaacagagccaggacucaagcuaggucugagcaacagaccugggucccuggccuguggga

SEQ ID NO: 4114529 - RNA, 64 nt, Human
ucucagaagaacccagggucccauggcuggccugucagguuguagagccuuuguucuucugagg

SEQ ID NO: 4114530 - RNA, 91 nt, Human
ucucagaaggaauuuuauucuaauguucuuucaaauaauaaaaccuuuuguuugaaaggaauuaggaugacaaaaaccuaagauuaugaga

SEQ ID NO: 4114531 - RNA, 65 nt, Human
ucucagaaucaggaccuacuucacgaugcagagugguuuagcagggagagaggccuuggaugaga

SEQ ID NO: 4114532 - RNA, 91 nt, Human
ucucagacuccuuuggaauugaaagagaauguagcucuuuagggacagcugaagauaaacucuugauuucugauuuccagagcaguuugga

SEQ ID NO: 4114533 - RNA, 81 nt, Human
ucucagagacaucauguugagugaaagaagccagauucaacagaacuguacucugucauuucauucauaugaaguuugaga

SEQ ID NO: 4114534 - RNA, 83 nt, Human
ucucagauaaucauguaacuggaaucacauggcauauaagcuuuugugucuggcuuucuucaguuagcaugauguuuuugaga

SEQ ID NO: 4114535 - RNA, 88 nt, Human
ucucagauacugccccagaccuacugaaugggaaucugcauuuucacaagauuccccaggagauuugggagcacacugaaguuuggga

SEQ ID NO: 4114536 - RNA, 55 nt, Human
ucucagauggcaucagcuagagucaguuuugcucgcuguaguugaugguuuguga

SEQ ID NO: 4114537 - RNA, 78 nt, Human
ucucagauggccagagaggccagccugguaaaguaauugagugaagcaugccaaguuggagcuauggccagcuugaga

SEQ ID NO: 4114538 - RNA, 84 nt, Human
ucucagcaccucacucugugcucauucagucauucaacaaacauugaguauccuugcuggauggguccuagaccagugcugaga

SEQ ID NO: 4114539 - RNA, 66 nt, Human
ucucagcacuucaaugagcauuucaccuguggcaacaaugacagugcacacuuggggagcuaaaga

SEQ ID NO: 4114540 - RNA, 68 nt, Human
ucucagcagaaguccgacuccagucauugugauuuacucacaggcaggggauggggguuuuggugaga

SEQ ID NO: 4114541 - RNA, 72 nt, Human
ucucagccauccuugaaguuuuuugcauggucuuagugagucugugugagcaucacuucagauguggugaga

SEQ ID NO: 4114542 - RNA, 56 nt, Human
ucucagcucuuugggaggccaaggcgagcagauugcuugagcccaggaguucgaga

SEQ ID NO: 4114543 - RNA, 63 nt, Human
ucucagcugacagcaaaggccaguggcucaucagugagaacaucauaccucugucagagggga

SEQ ID NO: 4114544 - RNA, 64 nt, Human
ucucaggacuccucuggccauaggcuccaggaaagcugguggaaaccuuggggcucacugaaga

SEQ ID NO: 4114545 - RNA, 129 nt, Human
ucucaggcugcucaagccagcacacugggcuuuccgcacugggcagcagcucgagccgccguacgggggguguggacggcugugccaguggaagcggugacggcaccuguguggcaucgagugccuggg

SEQ ID NO: 4114546 - RNA, 87 nt, Human
ucucaggcugugucccucuacagggaagcgcuuucuguugucugaaagaaaggaaagugcauccuuuuagaguguuacuguuugaga

SEQ ID NO: 4114547 - RNA, 60 nt, Human
ucucagggaguugaggcugccugaaaacgccuugcagguggccucagccaacccaugggg

SEQ ID NO: 4114548 - RNA, 58 nt, Human
ucucagggcagcaaggaagcauaguccaaggagagaccuguuccuugcugcucuugga

SEQ ID NO: 4114549 - RNA, 58 nt, Human
ucucagguaagcuucuuugauguagagacaauaauauuucacaacugcuuauuugaga

SEQ ID NO: 4114550 - RNA, 59 nt, Human
ucucaggugcagcauuuguaagcagcucccuggcugguucugauuuugcugcauugaga

SEQ ID NO: 4114551 - RNA, 58 nt, Human
ucucagugacugcuggguccccacccuguucaggacuggauuucagcagacacagaga

SEQ ID NO: 4114552 - RNA, 60 nt, Human
ucucagugcaaccaaagugaucuguaaaaaauacagaucagaucuccuuuugcauuagga

SEQ ID NO: 4114553 - RNA, 68 nt, Human
ucucaguuccacaaaauguacccaguuccuacuauguuggacucugagcacuguguuggacucugaga

SEQ ID NO: 4114554 - RNA, 113 nt, Human
ucucauaaaaaugauacugggcacuucugauaccagcuuuucaaaccucuaauugguucacagacaaagcuuugaaagcaggugugggagggucacgaucagagacagugaga

SEQ ID NO: 4114555 - RNA, 72 nt, Human
ucucauaacuuauuguggcuuggccaguuuuaccuuuuaauucuauugaucucugcuuuguaaguugugagg

SEQ ID NO: 4114556 - RNA, 81 nt, Human
ucucauaaucaaacugccaaugguuuuuauaacugguuguuucuagucuauauaaaagauauugagcaguguuucuggaga

SEQ ID NO: 4114557 - RNA, 69 nt, Human
ucucauagggcuguugugaggauugagcacagugguaugcuggucaguguuuaacaaccagcucugagg

SEQ ID NO: 4114558 - RNA, 67 nt, Human
ucucauauuuaguaggugagagacuuuaggaaaguuauuaaaucgguuucuuaucuguaaaguggga

SEQ ID NO: 4114559 - RNA, 122 nt, Human
ucucauccauggaucuuagccucuuuugguggcagaaugucuccugaaacuuaaguauuuccuugaacuucaguguuagacaaguuuggaagaccacgagucuaaauuuauggaaacugggg

SEQ ID NO: 4114560 - RNA, 125 nt, Human
ucucaucugcaggugguuuaagugugaagguuuacugaagauuuaaagaguguuaucacaguugggaugauuuaaacuaacaguacacguugcauuuuaagaaaauaauuaauccucagaggaga

SEQ ID NO: 4114561 - RNA, 56 nt, Human
ucucaucugcgagcucugccaguguauccagcgcucagaggauauggagaaugaga

SEQ ID NO: 4114562 - RNA, 56 nt, Human
ucucaugaaaggucucuccugggagguaacauuugggaugagacccaugcaugaga

SEQ ID NO: 4114563 - RNA, 71 nt, Human
ucucauguaguuuacagaagaggagcaacaauuacuggcauguuguuacuugcauguagacuaacugugga

SEQ ID NO: 4114564 - RNA, 78 nt, Human
ucucauucagcagcacgggcuguuuccaugcaaaaggggcuccuuagcugggucaggggccugggccugcuggauaga

SEQ ID NO: 4114565 - RNA, 106 nt, Human
ucucauucuguaauacuuuuugauaagccaaaggcauuaccuaaguuugggacauuuugugcuguccuguaauuguaaaugguuacuaggaauuauuagaaugaga

SEQ ID NO: 4114566 - RNA, 65 nt, Human
ucucauugagagaaucacauagaagugaccaagucaccuguuuaucauuuuccucaaacaugaga

SEQ ID NO: 4114567 - RNA, 66 nt, Human
ucucauuuacacuucacaaauggaagucaaaaaauaccaccucuauuauggagaugugaaaagaga

SEQ ID NO: 4114568 - RNA, 61 nt, Human
ucucauuuauuaacugagacuugccuggagaaggaggcaagucagagccaagucaaugaga

SEQ ID NO: 4114569 - RNA, 67 nt, Human
ucucauuuuaggucuccuuaggguuuguuucuucuaagaauuuacucugaaauagaggcugguggga

SEQ ID NO: 4114570 - RNA, 55 nt, Human
ucuccaaagcuggacugauguggggaaaacaccuuucccuucugguuuugagaga

SEQ ID NO: 4114571 - RNA, 61 nt, Human
ucuccaaauaguuauauuuagagccccugaaggcugggacuucaacaugugaauuuggggg

SEQ ID NO: 4114572 - RNA, 79 nt, Human
ucuccaagcccuggaacuuuccuagccacccacagccacucuggaacgguucagggcucagagcuuccggguaugggga

SEQ ID NO: 4114573 - RNA, 61 nt, Human
ucuccaauaaccacaaucagauagacaaccugcuucuguuugaaacuuuugguuauuggga

SEQ ID NO: 4114574 - RNA, 77 nt, Human
ucuccaaucuaucuggccacugcugaucaguaagaaacucccuuaucugagaaagaagcaccagagaaguugguagg

SEQ ID NO: 4114575 - RNA, 76 nt, Human
ucuccaauuauacucuuacugcagggccuauaaauguuagauacaggccuggaaaggaaggaguggaaugaggagg

SEQ ID NO: 4114576 - RNA, 79 nt, Human
ucuccacaacacccuguguggccgccacuuggggcaggcccugugggccccacccagccuggcugaggggcgguggaga

SEQ ID NO: 4114577 - RNA, 64 nt, Human
ucuccacugcucagcauauccaaaaaccuaccuaauugucauggucagugccuugcauguggga

SEQ ID NO: 4114578 - RNA, 122 nt, Human
ucuccacugucacacgggcccacgggaggacaacugagccccugcacuugugagaacacuucaggcucacuggggucgccugcagugguuuagggaccugcuucccacuguacagauggaga

SEQ ID NO: 4114579 - RNA, 73 nt, Human
ucuuaucagguaugugagcuugggcaggagauuuguugcuaagagccucaguuuauacaccuguaaaauagga

SEQ ID NO: 4114580 - RNA, 70 nt, Human
ucuuaucuugguggcgcuagugaguaauucaauuggcauccagucuccacaguuuugccacuagcugaga

SEQ ID NO: 4114581 - RNA, 79 nt, Human
ucuuaugaaaauacugaacauguuugcagucaauuccaugacuccuuggugauuuagauauuuuaguuaaagcagaaga

SEQ ID NO: 4114582 - RNA, 94 nt, Human
ucuuaugaagcaggugcagaaguaacaauuaaagaagcuaugauuuauguuaccuaauuauuuuuuacuuuugcuucuuaccucuauauggaga

SEQ ID NO: 4114583 - RNA, 58 nt, Human
ucuuaugacaagguggaguaugaguggaagcauuuaaauacccuugacugucauugga

SEQ ID NO: 4114584 - RNA, 80 nt, Human
ucuuaugaucuugaaaugacaaagguuuuucuuagcaugucacaaaugcaggagaccaaguaugucacaaauccaggaga

SEQ ID NO: 4114585 - RNA, 68 nt, Human
ucuuaugggaugugacagaggcaucucggaauuuuaucugaaggaaaucuuuguaacaucuuuucaga

SEQ ID NO: 4114586 - RNA, 93 nt, Human
ucuuauguguggacauucaggaaaaaugccaggagucagcuacuuugacagcagcaugacccauuuuucuugcugugucuaccaaaccuaaga

SEQ ID NO: 4114587 - RNA, 76 nt, Human
ucuuauucaauuuguauacaauaugauucugucacauagauaccuucauuuauauuguguaauaagugaaguggga

SEQ ID NO: 4114588 - RNA, 75 nt, Human
ucuuauuuccccaaaggcggaacugagucucuagggagacacccagaagagaucacaccugcccugggcauaaga

SEQ ID NO: 4114589 - RNA, 86 nt, Human
ucuuauuuggcagcuuuaccuuuaggaguaaccuugacaauugcaagccgugacuaccaauggagguaacagaaaagcuagaaaga

SEQ ID NO: 4114590 - RNA, 60 nt, Human
ucuuauuuggugagcuuuaaugaaacacuugcacuggaauucagaguacaccagauagga

SEQ ID NO: 4114591 - RNA, 73 nt, Human
ucuuauuuguuugguuaaaaucaaauuaaucagggcaaguucccugaaagaugacuuugaaagagaaaugagg

SEQ ID NO: 4114592 - RNA, 60 nt, Human
ucuucaaaauugauuggagaagaaaauugccuuuucucuccugccuuuucauuuugagga

SEQ ID NO: 4114593 - RNA, 55 nt, Human
ucuucaaagcauaugcaggcauuuaauuauaugaugguauacggugcuuuggggg

SEQ ID NO: 4114594 - RNA, 72 nt, Human
ucuucaaaucgucagcuccuugagggugggguguguaucuccacccagaccagggaucuggggauuccuaga

SEQ ID NO: 4114595 - RNA, 56 nt, Human
ucuucacaggagccugccugccuuugguggguacugagucaguguucuuuugaaga

SEQ ID NO: 4114596 - RNA, 58 nt, Human
ucuucacauggaacaugaagcuaaugaccucugcuucuauuucuuagggaugugaaga

SEQ ID NO: 4114597 - RNA, 59 nt, Human
ucuucaccuguacgcuggagcuaauaaugacgguggcugccugaucgagcaggugauga

SEQ ID NO: 4114598 - RNA, 69 nt, Human
ucuucagaggcugccagccaugugcaaccagagaugauguauuccacuguguagcuggagcucugacga

SEQ ID NO: 4114599 - RNA, 58 nt, Human
ucuucagaguaggauacuagcuuaguuaagauuguugggugcuaaucugcucugugga

SEQ ID NO: 4114600 - RNA, 64 nt, Human
ucuucaggugcgagagaggcuggggucagcgaccuggggcuuucuuuguaucauuuuaugaaga

SEQ ID NO: 4114601 - RNA, 86 nt, Human
ucuucaguagagcuaaggcuccuuuguaguucuuuugggaauccucaaaccaccaugugaagaagcuugggcuagccuguuggaga

SEQ ID NO: 4114602 - RNA, 62 nt, Human
ucuucagucaauccagauguuuggcaucuuguagacaaaacauccagaugauuaacugaaga

SEQ ID NO: 4114603 - RNA, 112 nt, Human
ucauucagcuccucucugucaaugucucuuauagacacucuucuauauagaaccaggagcacaaugguuauagacugucuguaagaaacauugacagagaggagcugaauga

SEQ ID NO: 4114604 - RNA, 114 nt, Human
ucauucagguguucaucaucaucgacaaaggaugauuguuggcucucuugaugaaagauagaaacaucugggauaguaaucaucguuagugauaucaggaauuauuuagaauga

SEQ ID NO: 4114605 - RNA, 114 nt, Human
ucauuccaacaaugacauuacuuaugcagaaagcggcaaacaggugacauugagaucgaaggcuuuccaucugcaggugcugcuacuguguugugggcuuguccuugggaauga

SEQ ID NO: 4114606 - RNA, 129 nt, Human
ucauucccaagaguugguagucaugggguugucucccaugaaaccuauuaagaaacuuaagaaaccuaugcaagauacauaauagguuucaugggagacaacucaaugacuaccaacucuugggaauga

SEQ ID NO: 4114607 - RNA, 59 nt, Human
ucauucccucaugcacucaaugcuuacuuauugagcaccugcuaugugucagggaucga

SEQ ID NO: 4114608 - RNA, 62 nt, Human
ucauucggcaauaguguguuagauagugaaauaccauggaaagacacugcaauugccaauga

SEQ ID NO: 4114609 - RNA, 70 nt, Human
ucauucuccaucuguguuccagcacccugcucugcacagaggaggggcucaagcaguguggucugaauga

SEQ ID NO: 4114610 - RNA, 55 nt, Human
ucauucucuacccacucagaagaguugcucuaauagccucugugggagucaguga

SEQ ID NO: 4114611 - RNA, 57 nt, Human
ucauucucugggaugcaguuuguccaugugugaacugaagucguuccagaguaguga

SEQ ID NO: 4114612 - RNA, 76 nt, Human
ucauucuugcagaugacaauggcuuaaugauaccuuaucaaaaugguaauguguucauuagucauucucaagaaga

SEQ ID NO: 4114613 - RNA, 72 nt, Human
ucauugaaauguuuccuuuuguaugcuguauuauuaauaauugcaaauaccuaaaugggaacauuuaaauga

SEQ ID NO: 4114614 - RNA, 83 nt, Human
ucauugacacucuacuuggggaguuuucuuuauugcuuuauuuuggugaguacagaaaguacccauagaagagaaauuaaugg

SEQ ID NO: 4114615 - RNA, 78 nt, Human
ucauugagguccuguuauccucagcucaccucuagaugcgaaacuagaggccgaaugcugagcugggagggccugugg

SEQ ID NO: 4114616 - RNA, 66 nt, Human
ucauugauggugaagggcagaaugcccagacacaguugcugguauuuaagacuucacuccuaguga

SEQ ID NO: 4114617 - RNA, 62 nt, Human
ucauugauuuggaugauauuucaucucugaaggaguugacuggguuauucagacgcauauga

SEQ ID NO: 4114618 - RNA, 95 nt, Human
ucauugccccugcugacagccagucaacccguaaaaguagagcugccuagcugacuauuucacagcgugguugacugcaaacacagaagcaaaga

SEQ ID NO: 4114619 - RNA, 60 nt, Human
ucauugcuacucuugcucacaaacugcuaugcacacaggacugggcagguucaguaaugg

SEQ ID NO: 4114620 - RNA, 65 nt, Human
ucauugcugccacuggauauuucauuccuuggauaaucucauuuugaaacauuggcagcaacuga

SEQ ID NO: 4114621 - RNA, 58 nt, Human
ucauuguauucagaacugaagagaccucauccaagagguggcuguucaauacaauaga

SEQ ID NO: 4114622 - RNA, 66 nt, Human
ucauugucugagccccuagaacugagcgugggcagcccugcuacagagcgggggcucaguagauga

SEQ ID NO: 4114623 - RNA, 79 nt, Human
ucauugugaacaugcuuugauaaauaaaagaccuauagaaaagaguuuuguauuauugucaaagaugggaccagaauga

SEQ ID NO: 4114624 - RNA, 71 nt, Human
ucauugugcagcugccgaucagauagggucaguaggucucuagucuauaauuggcacucguaaauuaguga

SEQ ID NO: 4114625 - RNA, 63 nt, Human
ucauuuaaaauguaccaggauuaaaggucauuuaaaugacucaucucuggaaacauaaaguga

SEQ ID NO: 4114626 - RNA, 65 nt, Human
ucauuuacacaguuccauuuaagccaguuucauugaucaagaagccaggggaacugaugaaguga

SEQ ID NO: 4114627 - RNA, 114 nt, Human
ucauuuaccuucugaagucuuuaaugaaagcucugucaucauuccuguuuuauugaugaggaaacuaugcugucagaguugaguauuuauaaguagagcugcugaaaauuguga

SEQ ID NO: 4114628 - RNA, 69 nt, Human
ucauuucaaaagaauugccagaauugaaaaccuaacaaucgggugcauuucugggaaugcuuaaaauga

SEQ ID NO: 4114629 - RNA, 81 nt, Human
ucauuucaauguaguuuccuccuauaguuaaaucaccauuucaaaauuuaacauugaguuagggagcguauagauaaauga

SEQ ID NO: 4114630 - RNA, 62 nt, Human
ucauuucagaauguccuaauuuagccugauguaaacguccugagguaaaauauucugaagga

SEQ ID NO: 4114631 - RNA, 69 nt, Human
ucauuucccugguuccaagaaucuugauaggaaaacaacgcuccuuuuauuuggauuuuaguggaaaga

SEQ ID NO: 4114632 - RNA, 82 nt, Human
ucauuucuuccugugcuuucaggccgcuguguauuugcagagccugcaccagcagccuagagcguucuuaggaacuugguga

SEQ ID NO: 4114633 - RNA, 62 nt, Human
ucauuucuucuaggacuaauaagagagcuucauugcugauaccucuggucucagaaggauga

SEQ ID NO: 4114634 - RNA, 98 nt, Human
ucauuugauuuagaaaauuuaguaacccugugaguagcuguuauuauccucaauacacagaugagggcacagaggauuccagagcuagagucaagugg

SEQ ID NO: 4114635 - RNA, 64 nt, Human
ucauuugcuggaaccagacccacuuaacauuuuaauaagugcuugucagugucuucaguaguga

SEQ ID NO: 4114636 - RNA, 69 nt, Human
ucauuugcuuuuagacccacauuuugaaucagacaauauuagauacaaugguggugucagaagagaugg

SEQ ID NO: 4114637 - RNA, 63 nt, Human
ucauuuggaggggaacuaaucccgugacuucuagguuaucucuuaguuucuucucuggaauga

SEQ ID NO: 4114638 - RNA, 71 nt, Human
ucauuugguauuaauuuucagaaccuguuguucuaaaaccuuaauacaguuugaagauuaugccagaguga

SEQ ID NO: 4114639 - RNA, 77 nt, Human
ucauuuguuuacauacucucugugacugcuuuccacacugcucuaggcaaguugaaacagaguaguugaaacagaga

SEQ ID NO: 4114640 - RNA, 58 nt, Human
ucauuuuuaaccagcuagggacccaauauguguugaguucuauuaugguuagaagugg

SEQ ID NO: 4114641 - RNA, 65 nt, Human
ucauuuuuauacauuccugcacugcugaugaagcuugaacggcugcagggaauguauggauuuga

SEQ ID NO: 4114642 - RNA, 74 nt, Human
ucauuuuucauugaagacuuacuggcuucaguucucaagucagagugugcaauguaugucucaaugauuauuga

SEQ ID NO: 4114643 - RNA, 63 nt, Human
ucauuuuuuauguggggaacaacaggcuuugugacaagucaaauguuccaagcuaaugaauga

SEQ ID NO: 4114644 - RNA, 55 nt, Human
uccaaaaagaaaugcugguuuagcggggagugaagacaaugcagucuuuuuugga

SEQ ID NO: 4114645 - RNA, 74 nt, Human
uccaaaacuaaggaugcauauguuuuguuuguaagcuauuuucaacaagauagauaucacuuaggucacuuggg

SEQ ID NO: 4114646 - RNA, 77 nt, Human
uccaaaauugagaaaaguacacagcccaaacauccguggcagcagaaguuuuaagaguguuuuuauucaauugggga

SEQ ID NO: 4114647 - RNA, 106 nt, Human
uccaaaauuguaaaaauaugaaaggagauagucaagagacuuaaaauauuucagcugcugaaaugauuaugaucuugaguaagcaucucuuauuaacaauuuagga

SEQ ID NO: 4114648 - RNA, 73 nt, Human
uccaaacagcuuguaagguguaauuaggauuuacuucaauuuaacaaaugacaccuugccaaguacuaaggga

SEQ ID NO: 4114649 - RNA, 68 nt, Human
uccaaacuaguaucuuccgugccaugcaauaagagcuacauugcaaggcugcagagggugcuacugga

SEQ ID NO: 4114650 - RNA, 58 nt, Human
uccaaagaagucacaaacgaagcacuuaguaaauguuaguuguuuguucugcuuugga

SEQ ID NO: 4114651 - RNA, 69 nt, Human
uccaaagagcaagaguguuggacuuugaauaaucugaguucaaaucuuugaccacuuaugugacuugga

SEQ ID NO: 4114652 - RNA, 84 nt, Human
uccaaagaggagccuuugaagcccucagagaucuucagagcaaagugcugggugaggucagggcauucaagaggccuggaugga

SEQ ID NO: 4114653 - RNA, 57 nt, Human
uccaaaggcaauguucuugucaucauacuuugaugcacaaagucagcauccucuggg

SEQ ID NO: 4114654 - RNA, 94 nt, Human
uccaaauagaagcaguuuggcuuaacuuacaugauauucauucacaucaaggagaaaugcaugagaauuguagcuaaucugaauucccuuugga

SEQ ID NO: 4114655 - RNA, 56 nt, Human
ucuugggaaagugucuuaacuuuggaagcaguaaagguugaacacuuucuucaagg

SEQ ID NO: 4114656 - RNA, 60 nt, Human
ucuugggagcuggaggugacaacugucugaguugacagcaucuccuggcagcuguuagga

SEQ ID NO: 4114657 - RNA, 81 nt, Human
ucuugggcucagccucauuuucugcucuguccugcacuagaagauucacuuagcaaaugagggcugaucaagagcccagga

SEQ ID NO: 4114658 - RNA, 130 nt, Human
ucuuggguaccaggaaagcccaugucugaagugcuggcaggaauaugagcugcugcaguguuuuucucucuauugaugccucagaguugcuauucucagcauuugggaucugcuuuucggaauacucagg

SEQ ID NO: 4114659 - RNA, 72 nt, Human
ucuugguauacgcauggcauugguuccaggaucguccauauaugcucaaauccaauccaugcauacucaaga

SEQ ID NO: 4114660 - RNA, 75 nt, Human
ucuugguuaucucuuuucauguguaaaugagguucuagguugaacaguauugguaucugagacagaguuucaaga

SEQ ID NO: 4114661 - RNA, 70 nt, Human
ucuuguaguugcagaauauucuggugacaaugccauuuacagggcaguuauuaagaaaauuuugccagga

SEQ ID NO: 4114662 - RNA, 55 nt, Human
ucuuguccugcugagcgguucuuucuguagagcauccaucggccaggacccagga

SEQ ID NO: 4114663 - RNA, 63 nt, Human
ucugucauuuguaccuaaaagaguucugaugaaaacaagaucucauggccagcaaguggcaga

SEQ ID NO: 4114664 - RNA, 87 nt, Human
ucuguccaugcuauaaaucaggguggggaaccucuggcccacagcccagaucuggcccucagcuugauucaucuggcauguggggga

SEQ ID NO: 4114665 - RNA, 67 nt, Human
ucuguccauucagccauccaucugaauauauuaagaguuuuacagaauguaggcugaccuggacaga

SEQ ID NO: 4114666 - RNA, 60 nt, Human
ucuguccuguuggggccacuguaacaaaauaccauaaagcagugguuuauaaacaacaga

SEQ ID NO: 4114667 - RNA, 95 nt, Human
ucugucucagcucaaaauugcuccuguuuucuuccagaaaugccauucauccagaaugccauucugugagagaagaagggagagugaggggcaga

SEQ ID NO: 4114668 - RNA, 86 nt, Human
ucugucucauguuucuagaauaagagcuccgugaagaaagagacuuguucuguuuuguucaugccuauauucucagcaugagaaga

SEQ ID NO: 4114669 - RNA, 81 nt, Human
ucugucucucccuagguggggcuggaagugugcccuccugucugccccugacauccagcaccaccacagggaagaugcaga

SEQ ID NO: 4114670 - RNA, 71 nt, Human
ucugucucucuuagucugcuuuuuuuccaccgauguaacagaccuggagccagcaggacucagaggaaagg

SEQ ID NO: 4114671 - RNA, 63 nt, Human
ucugucugcaagcuaaggaagcaucugacccuaauauugucagggaccucuucuugcagcuga

SEQ ID NO: 4114672 - RNA, 58 nt, Human
ucugucuguaguuuuacaugauuuugaucauauaauacauguaaaauuauaaggcuga

SEQ ID NO: 4114673 - RNA, 72 nt, Human
ucugugaagauaaggaugcugcagucuuggucuuaaaugcucugagaacugcgugccuuguuuucuuauaga

SEQ ID NO: 4114674 - RNA, 66 nt, Human
ucugugaauguuauaucucaauggaaagcugacugucagucacauaaaggaaguaacguacacuga

SEQ ID NO: 4114675 - RNA, 66 nt, Human
ucugugaccugugcaguugguccagcaggacaguuucagggugcugaccaauuucagaggugcaga

SEQ ID NO: 4114676 - RNA, 64 nt, Human
ucugugacuugcgggaggagaaugugugggauuuuugacauugguuccuucuucagaugacaga

SEQ ID NO: 4114677 - RNA, 72 nt, Human
ucugugcaagcccaagauaaaacccaaaacaacuuguuuuuuaaugguuugguuuugccaggcuugaacuga

SEQ ID NO: 4114678 - RNA, 73 nt, Human
ucugugcgggagggcaacgcggcauuuucccgcuuucuacgaaaaucuguugaugcaaaccucccgcuucaga

SEQ ID NO: 4114679 - RNA, 56 nt, Human
ucugugcuagaggaguuggccacugaccaagaagugggcucuccuaauuucacaga

SEQ ID NO: 4114680 - RNA, 74 nt, Human
ucugugcucuacaauguuacgaucaacaacacauacuccuguaugauugaaaaugacauugccaaagcaacagg

SEQ ID NO: 4114681 - RNA, 87 nt, Human
ucugugcugaacugggugauggugaggcaaaguucaagcugaaaccaugguuuggggcugcauuugcccacuaaauuagcagucaga

SEQ ID NO: 4114682 - RNA, 62 nt, Human
ucuguggacacaggagagagaacugcugggaacggauccccagccaguccuguuucuacagg

SEQ ID NO: 4114683 - RNA, 58 nt, Human
ucuguggacugugugagaggugggagacagagaagcccuccuaggcauuguccaaggg

SEQ ID NO: 4114684 - RNA, 79 nt, Human
ucuguggaucuuauguacagccuggugacuauaguuaacaauacucuauuguuuacuugaaaugugauaagagagcaga

SEQ ID NO: 4114685 - RNA, 60 nt, Human
ucuguggcagaguugcugacuagaaugugcuacguauuuaaguuuuccuuugcucauggg

SEQ ID NO: 4114686 - RNA, 70 nt, Human
ucuguggcauuuugcaucgucuuauuaauaggaacugacucuuugacaaacccugcaaauagcucacaga

SEQ ID NO: 4114687 - RNA, 84 nt, Human
ucuguggccaggcagacacacuguccagaggacccugugaccaagggaacagggcuccuagguggugugcuuucugguaccaga

SEQ ID NO: 4114688 - RNA, 55 nt, Human
ucuguggcuuucguguaagauggcgguauagggccauggacaccaaugccaaaga

SEQ ID NO: 4114689 - RNA, 79 nt, Human
ucuguguaagucccagcggggcauuuccuggccaugugagccaucugagugucagugcuuggggcuacaucugcgcaga

SEQ ID NO: 4114690 - RNA, 55 nt, Human
ucuguguccugcuagcugucuucacacagacaagcagcucccaucagggcacaga

SEQ ID NO: 4114691 - RNA, 70 nt, Human
ucugugucucaaucccaugcugcaaccggggguguccuggagcaaaucagaugugaggaugaaucauaga

SEQ ID NO: 4114692 - RNA, 67 nt, Human
ucugugucucuaaagauagcugccucgagauccuguacucagggaggugucugccagagaauucaga

SEQ ID NO: 4114693 - RNA, 96 nt, Human
ucugugugccuugguuuccccaucuguaaaaugggagugaauaauagagcuucucucccagauuguugauggcuuaaggaaaacaaugcauauaga

SEQ ID NO: 4114694 - RNA, 69 nt, Human
ucuguguguggcagauaggguauuaggaguaaugacaaaauuauucugauuguaucuguaacauaugga

SEQ ID NO: 4114695 - RNA, 56 nt, Human
ucuguguuacccgccagggccucuuuguugaaaggggagguuacaggugucacaga

SEQ ID NO: 4114696 - RNA, 61 nt, Human
ucuguuacuaggaacauauuaaguaauaugaauuauuauuugucuuuggaccugugagagg

SEQ ID NO: 4114697 - RNA, 80 nt, Human
ucuguuaggacuuguaaacauaccagagccaaguccucugaacuucgcgaacugauuugguguguuugcugguacccaga

SEQ ID NO: 4114698 - RNA, 81 nt, Human
ucuguuauaauguuugcucugaaaauguugacuuuguuucaauacaauugauauguuagggaacaauuugagcauaacaga

SEQ ID NO: 4114699 - RNA, 64 nt, Human
ucuguucacugagcaauggcaaagcuauuaacaugcuugauauuaaccugcuaagugagucaga

SEQ ID NO: 4114700 - RNA, 115 nt, Human
ucuguucauauuuaauuauaagaacugucuuaauaacaaaagcugcuguuuuuauuucaucuuucagaggcuaaaugcuacuugagauuguucuuuaugaaaugaaaugaacaga

SEQ ID NO: 4114701 - RNA, 75 nt, Human
ucuguucauuugggaugagucagaagucaacacgccacaauaaagacgacuuuaugcuauuucucaguggaaaga

SEQ ID NO: 4114702 - RNA, 77 nt, Human
ucuguucccucaggcagagcuguggagcucuucaucauuaaggccuucuuugcagccugccucucagccugggcaga

SEQ ID NO: 4114703 - RNA, 70 nt, Human
ucuguucuugucacuguaauuugcuggcuuuaggguaagcagcaacugcuagaguggcacaagauacgga

SEQ ID NO: 4114704 - RNA, 68 nt, Human
ucuguugaauggaugcugcuucuauuaucucuucccagagaaaagaggcaaaaaucuauggcaacaga

SEQ ID NO: 4114705 - RNA, 70 nt, Human
ucuguugcaguuucuggaugccuucuuuuuccauuaaagaaagcauuuauguccagagaagugcuuuaga

SEQ ID NO: 4114706 - RNA, 73 nt, Human
ucuguugcuccagggaacacagauggccaauagcuagagauaaggucagcucuguguccuccuggaccacaga

SEQ ID NO: 4114707 - RNA, 70 nt, Human
ucuguugcuuugauucuuggcuuaucagaauuucucuguaucugagcugaagucaggagucagcuucaga

SEQ ID NO: 4114708 - RNA, 122 nt, Human
ucuguuguaggccccucugcuguuggugaugaagggccuguugggcauugagacuccugagaacacaggcaacuucaaaucucacuuaggcauugguuuuccucacaauggcuucaaucaga

SEQ ID NO: 4114709 - RNA, 80 nt, Human
ucuguuuagaugcuuuaucuguuaggauuguaugcauuaaaaauaaauuguaugcauuaagaaaaguauuugaaucaaga

SEQ ID NO: 4114710 - RNA, 69 nt, Human
ucuguuucacguccugaaucucacuucagcccgcauacagcugcuuuaggagacagagacugaaauaga

SEQ ID NO: 4114711 - RNA, 61 nt, Human
ucuguuucuuggcuagccucuuagcauugaacaugaaagaggcugaaugagaaaguacaga

SEQ ID NO: 4114712 - RNA, 55 nt, Human
ucuguuuguacuccuaaaggugucucaugagacaacuuuggagaaagcuaacaga

SEQ ID NO: 4114713 - RNA, 57 nt, Human
ucuguuuguccaacuugucccgaagacaucagguccucgggguugggacaaugcuga

SEQ ID NO: 4114714 - RNA, 65 nt, Human
ucuguuuguucucaugggaguuagaaucuacagcgagauguuaacugccagcagcgaugaacaga

SEQ ID NO: 4114715 - RNA, 76 nt, Human
ucuguuuuagcauuuggugugccuauuauacauccucaugaugauguugaauagguagccagauauauaaaucuga

SEQ ID NO: 4114716 - RNA, 120 nt, Human
ucuguuuuccaugucagccauacugauuuggugagaaagcacagaaauugucaugucagcuguguccaucauucuguucuuuauuuaccauauuauguuaauguugauuaagagaaaaga

SEQ ID NO: 4114717 - RNA, 95 nt, Human
ucuguuuugaacauaugaaaaccaucugagucaagauguauuacauggugauuacagucugacagauguuuugaaguuguaauguguucaucaga

SEQ ID NO: 4114718 - RNA, 55 nt, Human
ucuguuuugugaauuguuucuuuggauuuuuccgauuagcucuuuauaaaacuga

SEQ ID NO: 4114719 - RNA, 64 nt, Human
ucuuaaacugacuauuacggccacgaauuuuauuaagaacuuuugcuguagugguuucuuaagg

SEQ ID NO: 4114720 - RNA, 72 nt, Human
ucuuaacaauuugcuuaacugguagaaugcgguggagaugacauugcuugacuuaugagguagacuguaaga

SEQ ID NO: 4114721 - RNA, 78 nt, Human
ucuuaagcaaaauagggcgugucuagacucacaauucuuaccuugcuuaauugaagugagucuugccuuugcugugga

SEQ ID NO: 4114722 - RNA, 70 nt, Human
ucuuaagcucuuuuguuugcaagauugucaauucuaacucaaguuauugcaaauaacaaggaguuuaagg

SEQ ID NO: 4114723 - RNA, 67 nt, Human
ucuuaagggcaaauggauccauguuuugguucacaccauuauguccagagaacauuugcuuuaugga

SEQ ID NO: 4114724 - RNA, 110 nt, Human
ucuuaaucaaaaguccccaguaagagccaggcuucucucaggagcaucagccucagcgacagucccugggcuggaguugcugagaagguguguuugccuuuuggcugaga

SEQ ID NO: 4114725 - RNA, 86 nt, Human
ucuuacaaaccauuuguuucuucuuuaaaauguuaaagguuuguaaggaaugccuuuggccgcuuuauggaggacuggagugggga

SEQ ID NO: 4114726 - RNA, 102 nt, Human
ucuuacauauaaaugauaucagugugaauaaguaaugcuuuuguagauaacuuauguuuuguauugcaaauagccuauauuuauagugauuauguaucaaga

SEQ ID NO: 4114727 - RNA, 130 nt, Human
ucuuaccuuguuccuuguguuuuucggauucagcugcuggaugcuugauuuugagguguuaccaugcuacugccuccaucuguaucugucugggagaaaagcaauagugaagaugagaaagaagggagga

SEQ ID NO: 4114728 - RNA, 63 nt, Human
ucuuacucacaagaggcuagguggcaggcaaugcauuugaugccacaagaucugugaauaaga

SEQ ID NO: 4114729 - RNA, 72 nt, Human
ucuuacuugugccuuucauagccucacuauauagaaaucuauggcucagaagaaaagguaaacagguccaga

SEQ ID NO: 4114730 - RNA, 67 nt, Human
ugaaaauguauuuuugauuuguuagaaagaaaaauaacuggcaaaguuuaucaggaauauauuagca

SEQ ID NO: 4114731 - RNA, 67 nt, Human
ugaaaaugucacaaggccaugaaaagaaauugauagaaaauuucagaguuccuuguugauauuuuga

SEQ ID NO: 4114732 - RNA, 62 nt, Human
ugaaacaggcaaaacugcagaugcugugcaaaaucacaccucuagucuguuugcuugauuca

SEQ ID NO: 4114733 - RNA, 80 nt, Human
ugaaacugcugccuugaguagccagugagacccagaaauacacuuaacuaucucuuagucucuggcuuaggaaaguuuca

SEQ ID NO: 4114734 - RNA, 62 nt, Human
ugaaacuuuuucuuagguaugucuguauucauauggacauaacacuuugaaagagaauuucg

SEQ ID NO: 4114735 - RNA, 79 nt, Human
ugaaagagaugucaaggaagugugaucugaauaaucugaaggaagacugaagagcuuuuugacaucucucuauuuuuca

SEQ ID NO: 4114736 - RNA, 80 nt, Human
ugaaagaguacauaacaagaauaccagauuuuuaaaaagagauugaauuucuuguucugguucuguuagcaauuguuuca

SEQ ID NO: 4114737 - RNA, 86 nt, Human
ugaaagagucaaaaguucucguacccugaguuuuucuccccauuaaccacaggaaaucucuggucacagaacuuaaaugaaaguca

SEQ ID NO: 4114738 - RNA, 85 nt, Human
ugaaagcagaaggaaagguugcagcaguguugaugacugauucauuuuauucauacaccucucagcccuucucuugcugucuuca

SEQ ID NO: 4114739 - RNA, 67 nt, Human
ugaaagcaggacauugcugcugugucaagaacaaacuguguucuuauacagaagauguuuaauuuca

SEQ ID NO: 4114740 - RNA, 68 nt, Human
ugaaaguaggucuguuaguuuauaaaaugauagucaucuuggggucuuaauuagcagacuuccuuuca

SEQ ID NO: 4114741 - RNA, 101 nt, Human
ugaaagugaauauauaugcuauguugaauaauuugaguaauuugcaugguucagggccuuuaguuugcaaauaguuuuucauguauuauauaucucuuuua

SEQ ID NO: 4114742 - RNA, 56 nt, Human
ugaaagugcugggauuacaggcgugagccaccacgcccagacucccauacuuugua

SEQ ID NO: 4114743 - RNA, 114 nt, Human
ugaaauagaaugaauuccaggcucauucucccuucuaucccugugaugacaucccaaccaaaaaugcaucacuuuuaaaggugaucgaaguggaaguggguucaucuacaguca

SEQ ID NO: 4114744 - RNA, 58 nt, Human
ugaaauagcacuuuguauccuuguugcccagaugccucacaggaugccugccauuuca

SEQ ID NO: 4114745 - RNA, 70 nt, Human
ugaaauagucaaguauuugaacuaugggcaagcaguucugccauguccccuucugugcuugucuauuuua

SEQ ID NO: 4114746 - RNA, 64 nt, Human
ugaaauauacaugaagucggcugaaugcagacaaaauugcaccauuuacugcaugaauauuuca

SEQ ID NO: 4114747 - RNA, 129 nt, Human
ugaaauauaucaaaauacuaagagaacaaucuguucucauucagcauuuccuaagaaccuacuaagggccagagauuagggaauguugacugagagcaggcugcucucuuuggcuuuucauaugguuca

SEQ ID NO: 4114748 - RNA, 57 nt, Human
ugaaauauccagcccagcaggacagaagauuugagauuuggcugguuggaaguuuua

SEQ ID NO: 4114749 - RNA, 75 nt, Human
ugaaaucaccuuugacuccuuugugaaaagaguaaugauaaaaguuuugacuucuucuuaucaaggaggauuuca

SEQ ID NO: 4114750 - RNA, 73 nt, Human
ugaaauccaugaaaaugucaaguucugcugaauuagguaauaaugguaauaccugaaauuuguauggcuuuca

SEQ ID NO: 4114751 - RNA, 76 nt, Human
ugaaaugaagguggacagauuuuuuuggcuuuccaucaaauugaguaaagaaaagguaaccgcuuaucuaauuuca

SEQ ID NO: 4114752 - RNA, 106 nt, Human
ugaaaugagagaugguaccugacugauucagugucaaagcuaaguauuuauuuguacccauuugccuguuuuccuacuguaucaucaaauacacaugauuaauuca

SEQ ID NO: 4114753 - RNA, 82 nt, Human
ugaaauggguugugcagaaggcagaaaguccagguaucuuggcuagauccagaggcacugcccuuugugcaccuagaccuca

SEQ ID NO: 4114754 - RNA, 67 nt, Human
ugaaaugugggucaugacccauuagugagcuuugaaaucacuuuaguggguugugaccugaauuuua

SEQ ID NO: 4114755 - RNA, 68 nt, Human
ugaaauuagugaaguuacaguuguguuucaaaugaauugagggacaugguuuggcagcauuaauauca

SEQ ID NO: 4114756 - RNA, 77 nt, Human
ugaaauugcaaaauugauuguggugaugguugcacaacuuugugacuauacuaaaaacaaucgauuuguauauuuua

SEQ ID NO: 4114757 - RNA, 76 nt, Human
ugaaauugcugggucggaggguaagcagauuuugcauuuugucacauauuguaaacugcuucucaccaagguuuua

SEQ ID NO: 4114758 - RNA, 59 nt, Human
ugaaauuucugcacgcaguagguagguaggcacuugauuacuauguguugaaagcugca

SEQ ID NO: 4114759 - RNA, 76 nt, Human
ugaacaaaauaguccugggaauaguacugucuucagaagucugauacauggugggcuauuguaggucuauugauca

SEQ ID NO: 4114760 - RNA, 67 nt, Human
ugaacaagcaucaggaaaaauugugaaaggguuugaaauaggccuaaaacauuccugggugucuuca

SEQ ID NO: 4114761 - RNA, 98 nt, Human
ugaacaaggugauaggagagccuguuuuagaugcauugaugauagggaggaauaauggcucaucaguuaugaaauaguuccaaauuaccuugcuuuca

SEQ ID NO: 4114762 - RNA, 66 nt, Human
ugaacaaugaacaagaugagauauguagaaagcaugucacauauauaauguucaauaaaauguuca

SEQ ID NO: 4114763 - RNA, 68 nt, Human
ugaacaauuugggaucuuaaagaguuuuagucauguguucucuuuuuaaaaagcucuuaaaugguuca

SEQ ID NO: 4114764 - RNA, 58 nt, Human
ugaacacagcauauuuuguuaccucaucaagaagcagaggaagauuauguugugauca

SEQ ID NO: 4114765 - RNA, 70 nt, Human
ugaacaccauggaugugagcauuaugauaaaauaacaaggugcuuucacauguaugcacaaagauguuca

SEQ ID NO: 4114766 - RNA, 126 nt, Human
ugaacagauaacuuucaucaauuaggauggcuggcuaguggcagggacuucauauaaagaaaucuuucccagaauuguuuuuccacauugccuucuaauuugaucacucccuauaacagauguuca

SEQ ID NO: 4114767 - RNA, 62 nt, Human
ugaacagcaugcaugcaagacuaaaugcuagcguaauagcauagauuuuugccugcuguuua

SEQ ID NO: 4114768 - RNA, 84 nt, Human
ugaacaguguuuguugucaugauuuuacuuuguucuugaccacauuggucccagagaaagucaaggucuucagccacggauuca

SEQ ID NO: 4114769 - RNA, 61 nt, Human
ugaacauaacaggugcccaggaaggagauaaaaccugcuucacuggaaucuguaauagucg

SEQ ID NO: 4114770 - RNA, 126 nt, Human
ugaacauagagagaauugaauuuuaauuaauggucauaaguaccauuuugggggcaaauguugcaugugugucauuuaggguggagcugaccauaaagacauuuuauucauuuuuauuuauguuua

SEQ ID NO: 4114771 - RNA, 75 nt, Human
ugaacauauggauacauuucuguuagauuuaugucuacaaguggaauuggugagucagaggaguacauauguuca

SEQ ID NO: 4114772 - RNA, 68 nt, Human
ugaacaucuuuaggaaccuaaccuauuaauaaacaaaugaauuaacaggauccuagagaaagaguuca

SEQ ID NO: 4114773 - RNA, 72 nt, Human
ugaacaugcaggaugagcaggugugagugugucaguggugugcacauaccuguguauccacaagcgugucca

SEQ ID NO: 4114774 - RNA, 81 nt, Human
ugaacauuacaucagacaaugauuauuccaugauauuuuaauuaauuaagggaaagccaggugcucuggugucucaguuua

SEQ ID NO: 4114775 - RNA, 65 nt, Human
ugaacccaccaggcucuguccgagcggcauugaaauggccagagugggacaggcuggugcccuca

SEQ ID NO: 4114776 - RNA, 73 nt, Human
ugaacccuuguagaggauggagaugcuuuguguagaaugaagccaccuucauuccucucccacagaggguaca

SEQ ID NO: 4114777 - RNA, 84 nt, Human
ugaacgguccugugcugugaaagcugccacacuguucuagaucacacggaauauucaguggguuaguuuuuaaagggacacuca

SEQ ID NO: 4114778 - RNA, 59 nt, Human
ugaacgugcccaguccccaucugauguaauuggucuggagaggggugugggcaucuuua

SEQ ID NO: 4114779 - RNA, 80 nt, Human
ugaacuauuagagacuauguuuuaaacaagcagagaauuauuuaaauuuguagcuauguuagacauucucauuuugguca

SEQ ID NO: 4114780 - RNA, 121 nt, Human
ugaacuccugaagcauuugccuugcucauuccuuguucacacaccugacauuucugaagcaccuucugaguggcaggcacugugacggaaauagacaaagucuuugcccucauggagcuca

SEQ ID NO: 4114781 - RNA, 59 nt, Human
ugaacugggacgugcaguaagugauguaaaauacaugcuaauugcaaagucuugguuca

SEQ ID NO: 4114782 - RNA, 66 nt, Human
ugaacuguaaggacuucacagcuaauauaugccccuggguaauguuacauaguccuuauuuguuua

SEQ ID NO: 4114783 - RNA, 76 nt, Human
ugaacuuacaaaggagauaaauuggaggcugaugauuagcaucacaaaaugauuauucccuuuguaaaaggcuuca

SEQ ID NO: 4114784 - RNA, 78 nt, Human
ugaacuuagaaucuagccugggcuaauccucaguggugucacacuagagaaacgcccaggcucagacuuugacauuua

SEQ ID NO: 4114785 - RNA, 77 nt, Human
ugaacuuccuguauuuacaucuuagucuacccagugauucccacuggaauguaaacucugugaggguggggagcuca

SEQ ID NO: 4114786 - RNA, 93 nt, Human
ugaacuugcccaaagcuaaugagccauuguuucuccaaggugacagagaacagcuagaaauucuaagcaucaauagcauugagguuagguuua

SEQ ID NO: 4114787 - RNA, 71 nt, Human
ugaagaaauggacagaaaugccauauuuguaaauaagaagauauaucugguaaauauguccauucucuuca

SEQ ID NO: 4114788 - RNA, 57 nt, Human
ugaagaauuccauggcuuccaugucucagcagcucaaggccaaguuggauuucuuca

SEQ ID NO: 4114789 - RNA, 124 nt, Human
ugaagacaagcaaaguaugagaaagaccucuugguucacauuagauuuccuucuucccugaagggcaaucugauagaaccuuuagaauugaaggggaagcauuucauucauaaauugugcuuca

SEQ ID NO: 4114790 - RNA, 59 nt, Human
uccaggcugccacagugcaacgacagguaaaaggugggacuguuucgggcacgucugga

SEQ ID NO: 4114791 - RNA, 64 nt, Human
uccaggcuuucaaggaauuugguauuuucuugaugagaacaugcagaauucuuagagagcagga

SEQ ID NO: 4114792 - RNA, 69 nt, Human
uccagggaagaggcaggcggcucccucacuuccccuuggaaggcagcaugaaucccuguacuuccugga

SEQ ID NO: 4114793 - RNA, 77 nt, Human
uccagggccuagggugcugagugagcuagaggcugcugggaggacagcagcuagcuauucagaccgugggcuaugga

SEQ ID NO: 4114794 - RNA, 55 nt, Human
uccaggucccuggaauuuaugaguagguuacuauauauggcaaaagggacuuuga

SEQ ID NO: 4114795 - RNA, 64 nt, Human
uccaggucgccagcaggaacgucacaggagagccccggucgcucgucaggcgggcggcccugga

SEQ ID NO: 4114796 - RNA, 94 nt, Human
uccaggugcaagaggacacuccagcuuuuggcucaagcagaaaauuaugauugaaagaagaagcugcgauguuuaaauucacccgcaaucugga

SEQ ID NO: 4114797 - RNA, 62 nt, Human
uccaggugggcugcacccaggcuggacguuauuccgaccucggugaagggaguccggcuggg

SEQ ID NO: 4114798 - RNA, 80 nt, Human
uccagucacaucagaaaguugagugcugaucugauuauuucacuuaauugcauaaaauucaacucugugacaucccugga

SEQ ID NO: 4114799 - RNA, 75 nt, Human
uccagucaugcuguuugugguaucugcugccucuugcuccugguagcuugaguguuucauaaauauagauugcga

SEQ ID NO: 4114800 - RNA, 75 nt, Human
uccagucggggcugccugcucaggugcggcgccuccaggguugcuuguauaagaaggugcagcagaccggcugga

SEQ ID NO: 4114801 - RNA, 83 nt, Human
uccagucuauaguaaagcaugaauuggagagagagacuugaggucuaaacuucacuuuaagugcuugaucuauaaugauggga

SEQ ID NO: 4114802 - RNA, 65 nt, Human
uccagucuauugccuaacagagaggugacuucaucagaguuuaccugucuuagggaaagacugga

SEQ ID NO: 4114803 - RNA, 64 nt, Human
uccagugaggcugaauggccacucauccugcauuaaucucagccagggcucuggccucaguggg

SEQ ID NO: 4114804 - RNA, 56 nt, Human
ugacuguuuguaaagagauugcuaagcaauguuaaagugcucuuuauaaagaguua

SEQ ID NO: 4114805 - RNA, 80 nt, Human
ugaaauggcuccaguugacuuuuuagagaaauacauagcugcauuugugaaaaacaggaaguuaacugcagagccucuca

SEQ ID NO: 4114806 - RNA, 67 nt, Human
ugaaaugguuuugcuuuaguauucuacucuaauuagaaagaauacaccacaggccgaaauaguuuca

SEQ ID NO: 4114807 - RNA, 63 nt, Human
ugaaauguagugaagcauggaagacacugcauucaacuauuuccauagcaauacugcauagca

SEQ ID NO: 4114808 - RNA, 102 nt, Human
ugaaauguauucuaugggcucauguauucagcaggcucuuccugagccuguuaggaggcagcccugugcuggaugcugggcccaaaaacaguuggcaaguca

SEQ ID NO: 4114809 - RNA, 57 nt, Human
ugaaauguccugagauucaacuuagaugccaucuggggcugagcuuuggacauuaca

SEQ ID NO: 4114810 - RNA, 63 nt, Human
ugaaauuaucagaaauucaaagggugaccuguuaauggcacugguugaaguucuguaugguca

SEQ ID NO: 4114811 - RNA, 66 nt, Human
ugaaauucuaggcuaaugcugcuacccaugcaaaguccuggaggcagcaugagccuggugaauuca

SEQ ID NO: 4114812 - RNA, 88 nt, Human
ugaacaaugccaaagcccaaguucaucaguuaaaccaguuaaucuccauuggcccuuggugucaacuuguucuuuggacaaaguguca

SEQ ID NO: 4114813 - RNA, 84 nt, Human
ugaacaccuugacuuucacuuuucucaaagucagugccuccaccauuaagucaacauucugaaagagugcaagucaaggaguca

SEQ ID NO: 4114814 - RNA, 62 nt, Human
ugaacacugccauauuuaagaagguagagaaacacauaccaccucuugauaggggaguguca

SEQ ID NO: 4114815 - RNA, 69 nt, Human
ugaacagacugaccucugaccuugccuuccaugacaugguugcuggcuucuuagagaucaucugcuuca

SEQ ID NO: 4114816 - RNA, 77 nt, Human
ugaacaucuggcuuugugaaauugagcccugugucugaaugacacaacagaagagcaauugcaaaguccuguguuca

SEQ ID NO: 4114817 - RNA, 73 nt, Human
ugaacaugaacagucuggcugggggcuuugaagcaguaaauauuggaaaccccagcagauuguaaagugucca

SEQ ID NO: 4114818 - RNA, 58 nt, Human
ugaacauuaguugaguaaaguccacagaauggugcuaucuuugcuccauuaaugauca

SEQ ID NO: 4114819 - RNA, 74 nt, Human
ugaacauuuaggaauguucugcacaaaugcauguaaauagauuuguuuugugauuccuauuucuaagucauuca

SEQ ID NO: 4114820 - RNA, 70 nt, Human
ugaaccagaagucaucagagcugaggcauggccuugaacaugucacucagucucuggggcuucuguuuca

SEQ ID NO: 4114821 - RNA, 65 nt, Human
ugaacccaucaacugauaguaacgcuugauuuuugguucacagauguaccuuagugauggguaca

SEQ ID NO: 4114822 - RNA, 61 nt, Human
ugaaccccagggcuugagucauccauguguucauguuugguuaacaggcucugugguugca

SEQ ID NO: 4114823 - RNA, 83 nt, Human
ugaaccucuugcuauugguuucagcgggggagggagcucacugggguuuccucugucaugacagcugacaagcaaacucauca

SEQ ID NO: 4114824 - RNA, 62 nt, Human
ugaaccugggauuugggggcucuuccggauuacauccacucagccugaaucccaccaguuca

SEQ ID NO: 4114825 - RNA, 68 nt, Human
ugaacuauguuuggcucugugagugauggcugagauuuaccauacaaauagagauucaaauaaaguca

SEQ ID NO: 4114826 - RNA, 86 nt, Human
ugaacuauguuuugcuuccuuuuaaugguacuguuuccccucaucuuuuaacagugaucuuuuaaaaagaagugugauucuguuca

SEQ ID NO: 4114827 - RNA, 59 nt, Human
ugaacucaguccaaaguuuuauguaagucaugaggcucuuucuuuggacuucagaguca

SEQ ID NO: 4114828 - RNA, 77 nt, Human
ugaacuccaaauacugcugauucacagugucucuuucacuuaugacccugaccuaucuaugcagaauuugggguuca

SEQ ID NO: 4114829 - RNA, 85 nt, Human
ugaacuccucuccuuaaaaaucuauguugaacugaugcacuguaucuuguuucugcaacuaguuuuaagcuccuugagguauuua

SEQ ID NO: 4114830 - RNA, 100 nt, Human
ugaacugaauaccagaugugcagggaccaaucaccgacaggcuuucagagaagugacaugauuggucauuggucgugauacacaucuguuauucacauca

SEQ ID NO: 4114831 - RNA, 81 nt, Human
ugaacugaccaguugcuuuuguacuuuccagcauccuacaauucagccuacauugucauaaaaucaacuggcuccaguuua

SEQ ID NO: 4114832 - RNA, 89 nt, Human
ugaacugaggucacugguagaugcuuaagguguacauaugugugugugacucaguacaguuuucaguguucacugaacacuucaguuua

SEQ ID NO: 4114833 - RNA, 78 nt, Human
ugaacugcagaauauucugauuuucugugaauuaacaugaaguuaauucacauuuagacaucagguagcaagccuuca

SEQ ID NO: 4114834 - RNA, 57 nt, Human
ugaacugugccagccacagggcucaggggacuggcucuguugugcugagccagggca

SEQ ID NO: 4114835 - RNA, 55 nt, Human
ugaacuucagugauuugcugcagcucugcauuaacagaaaaucacugucaguuca

SEQ ID NO: 4114836 - RNA, 81 nt, Human
ugaacuugcagaaggccuugguucugagcaauaagagugacuaugucugcuaagacccaggugcuaaaucaggugaguuca

SEQ ID NO: 4114837 - RNA, 100 nt, Human
ugaacuugcagcuugguucucagcuuccaguaacucuugaaaggcaauuccaugaccuugggacccugcuggagguuacaaaucccaaguucaagauuca

SEQ ID NO: 4114838 - RNA, 130 nt, Human
ugaacuuuuuaguguaaauuuaaagauuugcuggcccacaaacauugguauaaauagaaauggguuaacuugcuaguuuccauguuauacaguuuuuuggguuugucaaguuauuuauauaguuaguaca

SEQ ID NO: 4114839 - RNA, 71 nt, Human
ugaagaaacgcagagagguaggcuguuugaccaugggagagccacuucacccuucugaaucaguuuuuuca

SEQ ID NO: 4114840 - RNA, 129 nt, Human
ugaagaauguagucuuauaaucauuuuugucaacaugguuuugaagggaggucaaauuccugcuaauaauauguugguuuugaaucuuuauaaagacaugacagcaugauuuucaagaacuuuuuuuua

SEQ ID NO: 4114841 - RNA, 70 nt, Human
ugaagaaugucuagacauguuaaugcaccuuaauguaguacuguagcaugaauuagaccacaauucuuua

SEQ ID NO: 4114842 - RNA, 92 nt, Human
ugaagaauuggucucgagagaaaaugcuucacugaaauaauucaggaaacugcccuuauggcaaguggggcagauucucuuccuguccuuca

SEQ ID NO: 4114843 - RNA, 78 nt, Human
ugaagaauuguggguuuguagguuaauuuucuuugaacagcuacaaaguucuuuuucuauaaaucccaauuaguuuca

SEQ ID NO: 4114844 - RNA, 62 nt, Human
ugaagacaagugugcugguguuugccauccacccaacuuuguaauuugccaguauugcuuca

SEQ ID NO: 4114845 - RNA, 59 nt, Human
ugaagagauagaaguacaugcuguagguuguacagcagaacagucuucuaguucuuuca

SEQ ID NO: 4114846 - RNA, 62 nt, Human
ugaagaggcuccagucugaaccuuggggccugauagcgcccucggugcuggcagccucgacg

SEQ ID NO: 4114847 - RNA, 69 nt, Human
ugaagagugaggacuuuagcaaguuuagagaaugaauugucuuacuguuuugguaccucauugcuuaca

SEQ ID NO: 4114848 - RNA, 65 nt, Human
ugaagauaugaguaugagaggagagagagauauauauauaccucucaggacacacaugucuauca

SEQ ID NO: 4114849 - RNA, 118 nt, Human
ugaagcaacauuuuaggucuucauugauuugcuuugcaauuuccuucauagaugacuggaacauaaaucuucaguuagggccaguucaaaguuuuccugacucaaaauauugcauuca

SEQ ID NO: 4114850 - RNA, 70 nt, Human
ugaagcacuuacuaaguguaaggcagugugguugagcccacuguucauauucuuagaaauuguaaauuca

SEQ ID NO: 4114851 - RNA, 61 nt, Human
ugaagcagagaauuugacagucaugacauuauauugugaaccuuuaaguuuuacugcuuua

SEQ ID NO: 4114852 - RNA, 109 nt, Human
ugaagccacuguagcuuuugugaguccaggaguugggugacauuauuaaacccucguggcagugucgcugaaguucaugaguuuccaaaaugaagguuccaggugcuca

SEQ ID NO: 4114853 - RNA, 61 nt, Human
ugaagcggcaguauuugaacucagacaguggcucuuaacuguucuucuagauugccuuuua

SEQ ID NO: 4114854 - RNA, 62 nt, Human
ugaagcuauauaaguuacagcauguguugagauucagacuugcuaguagguuguguaguuca

SEQ ID NO: 4114855 - RNA, 84 nt, Human
ugaagcucuagaugaaaucuguuuuaaaguuugugccuguaauacaguccgugauauacuggaaggcagaacaauuaguguuca

SEQ ID NO: 4114856 - RNA, 62 nt, Human
ugaagcucucaaacucuccccuucauccgucccagauagaaguggaggggcuuggagacuca

SEQ ID NO: 4114857 - RNA, 108 nt, Human
ugaaggaaaagagcuucuacucuugguguuaacuugaaugaaaccaacugaugacuaaaaacuagcucuuaguguugaguucaaacauuguaaaguuuuaaaacuuca

SEQ ID NO: 4114858 - RNA, 100 nt, Human
ugaaggacuugcagcuucagagcacaugacuucugggucacccuucugcucagggucaucccugaugacccaagguguccucuggaggcuuguuaacuca

SEQ ID NO: 4114859 - RNA, 57 nt, Human
ugaaggaggaauguggccuccagcuugucauagauugguggaacugcaucuccuuua

SEQ ID NO: 4114860 - RNA, 78 nt, Human
ugaaggaucagaauaaguuaugaaaugaaggucaggaaccuuuuguacauaguuucuuauuuggaaugauguucuuua

SEQ ID NO: 4114861 - RNA, 77 nt, Human
ugaaggaucuaaaugguuacaaugcuuugcuuuugaaaacauugagugcaucguggccauuuuaaaagauugcuuca

SEQ ID NO: 4114862 - RNA, 67 nt, Human
ugaaggcaaccucugugguccuguucuacccccaccugcgguuuugcggccaaggaguuugacuuua

SEQ ID NO: 4114863 - RNA, 66 nt, Human
ugaaggcauugaugaaggaauccuuagggccccuucuaguuccaaauuuccacgucuaugccuuua

SEQ ID NO: 4114864 - RNA, 73 nt, Human
ugaaggcuuagcugguuucucagcuucauguuuaacaggcccaaaaucaagcuguuggcuggcugagcucuua

SEQ ID NO: 4114865 - RNA, 67 nt, Human
ugaagggaagagccuguagggacaccagccuaagccuugguucuuuugcccuggggcucuucccuca

SEQ ID NO: 4114866 - RNA, 126 nt, Human
ugaagggagaaaaaauuugggcaagagacagagaugguuuaugagauuuuggaggggaauuuugcuccauaaaugaaauagaacgcucucauugaagccccacaaaacuuucaacaaaaaucuuca

SEQ ID NO: 4114867 - RNA, 64 nt, Human
ugaagggugcaaagcacucuagcugcugaccaguggcaguucagagaccauucugcucccuuca

SEQ ID NO: 4114868 - RNA, 62 nt, Human
ugaagguauuccuuaccaaauagaaaacacuauuaccaagccuauuuguuggguugccuuua

SEQ ID NO: 4114869 - RNA, 62 nt, Human
ugaagguccagcguggccaagucuuccugaucuuucaggggcaaaggaaaucuggauuuuua

SEQ ID NO: 4114870 - RNA, 66 nt, Human
ugaaggucuauggagaagacugaggaugggaauuguacuauacauccuuagccaaaugugccuuca

SEQ ID NO: 4114871 - RNA, 65 nt, Human
ugaagguugucuaaguuccucugcaugugaacuaacaccugcagaguugcuuugauagucccuca

SEQ ID NO: 4114872 - RNA, 94 nt, Human
ugaaguauacaucagugagauguuuugggauuuucacacugcugauaucaauuuuuguggaagugccaaugacaaauuuuugguguguucuuca

SEQ ID NO: 4114873 - RNA, 65 nt, Human
ugaagucacaggguaucugggauggaucugcucaugggguucacgugagauagcccuaguguuca

SEQ ID NO: 4114874 - RNA, 78 nt, Human
ugacuuaauuuucuggcaguggaugagggcagccuggucacaacaucugcuacccuuuugauugccaggguugauuca

SEQ ID NO: 4114875 - RNA, 58 nt, Human
ugacuuccagcaccucaagcggaacuauguacuugugguuaccugaauugcugaagca

SEQ ID NO: 4114876 - RNA, 72 nt, Human
ugacuucuaaugauuuucugauaaagaacugguuuuucacguuguggaaauuuagugaucagaaagagguca

SEQ ID NO: 4114877 - RNA, 60 nt, Human
ugacuugauuuaaucuucuugauguucauguuuggacaguaagagaagauguagauguca

SEQ ID NO: 4114878 - RNA, 81 nt, Human
ugaauauuguuuuaucuuucuacagacucucauaucagcagccagaucacuuagggucuugaaggaguuuagauuuauuua

SEQ ID NO: 4114879 - RNA, 64 nt, Human
ugaaucaccauguccgaguuuguuccauuauguaugauggcucauguuuggggaugaugaauca

SEQ ID NO: 4114880 - RNA, 57 nt, Human
ugaaugagaacacugaaagaggauuauugcauuggacuuuuagugucuucuuauuca

SEQ ID NO: 4114881 - RNA, 62 nt, Human
ugaaugagucaaucauuuagcugucaaaugauucaagaaugcagcaauugugaacuuauuca

SEQ ID NO: 4114882 - RNA, 129 nt, Human
ugaaugaucagccaagccgcgauuggaucuuuucaguggcaguuccagaauuucaguacaugccgugucugauuggaagaaugggaacuggacuugaagaguacuuucucgacaugguguuuucauuug

SEQ ID NO: 4114883 - RNA, 69 nt, Human
ugaaugaugaggggagaauaauagaugucuuucaugccuuucuccaaucucuucuuuccucauuaauca

SEQ ID NO: 4114884 - RNA, 68 nt, Human
ugaauggauuuuucacucaugcaugauuuuguaacaucuugcauuggucauuugaaaauaucaguuca

SEQ ID NO: 4114885 - RNA, 66 nt, Human
ugaaugguucugacaagcugggaugguuuauccugagccuucccaucuguggacaccuugcauuca

SEQ ID NO: 4114886 - RNA, 57 nt, Human
ugaauguuauguauccagucacauguaccuuggcacauguaaggauuagagcauuca

SEQ ID NO: 4114887 - RNA, 86 nt, Human
ugaauguuguggccuccaucugucuguucaccauaucuuagugccagaacuguauuuccaacagacaaaugagacagaaugauuua

SEQ ID NO: 4114888 - RNA, 125 nt, Human
ugaauguuucuuaguauaaaacuccauuuucucacuaaauaccggauuaaugcuguuuaaauugcauugcuggaaugagucggggaggggagaauuaaugaacuucuacuaagcaaaaauguuca

SEQ ID NO: 4114889 - RNA, 72 nt, Human
ugaauuaaagacauguuuuaagaauauuugugguuuauaaaauacagaguuauuugacguguuuuuaauuua

SEQ ID NO: 4114890 - RNA, 118 nt, Human
ugaauuaaugcuucccuaggucuaugagagcuguuauuuagaacauggaaucuuggugcuccuggguuccaucuuuaauaacacacucucucucucccuuucaauagcaauaaugaca

SEQ ID NO: 4114891 - RNA, 67 nt, Human
ugaauucaccugaaagucuggaguccagcugacugcugcugaauccaggcccacucagcugaaauca

SEQ ID NO: 4114892 - RNA, 63 nt, Human
ugaauucaucgucuuagcugccauuuguucuguauuuacauccuggggcuaagugugaauuca

SEQ ID NO: 4114893 - RNA, 65 nt, Human
ugaauucuagcuguugcuguuuauagcaagaaauagcaucccagcugaggcagcacagcuaguca

SEQ ID NO: 4114894 - RNA, 72 nt, Human
ugaauucuuagguccuuucuuaaauuccugcuuugacaaggaaaaggcagaauguuggaaaggaaggacuca

SEQ ID NO: 4114895 - RNA, 127 nt, Human
ugaauugauuaucuuuuagagaucaauagaacauuuugaaaauuuuuucucuacuaaauuacacuuuuccuuagguuuccaggagaagagauuuguguuuuauugcaauaaaagugacagcauuuca

SEQ ID NO: 4114896 - RNA, 63 nt, Human
ugaauuggugucuuuugcccuguugccacagaguggaguccagaggcaucggauucaacauca

SEQ ID NO: 4114897 - RNA, 60 nt, Human
ugaauuguagggauugcugguauacugaauauuaguucuuugcuuguaauaccugcuuca

SEQ ID NO: 4114898 - RNA, 67 nt, Human
ugaauugucuaaugagcuccacuucagaccccuggggcuugacuggauugucauuacgacguuguca

SEQ ID NO: 4114899 - RNA, 67 nt, Human
ugaauuguuugugugguugaacaaaccaaacaugaugagugcauuuuuccacacagugugcaauuua

SEQ ID NO: 4114900 - RNA, 75 nt, Human
ugaauuucaugcucacaaaagauggcaaacugauugucuaagagaaauuugcccucuauuuguggaacagguuua

SEQ ID NO: 4114901 - RNA, 103 nt, Human
ugaauuuggugugcguaaguauuuucauucugugugacugugcauauuguuggcugucuuugcagacgugcaugagugaggaaggguaugaacaugaaaauca

SEQ ID NO: 4114902 - RNA, 102 nt, Human
ugaauuuuaauuggcacguaggcuucaccuuaguuucaauauuugcaacaaaguaguguuaaacucguagguuaggcuuguaguucuuuagguuagaauuua

SEQ ID NO: 4114903 - RNA, 76 nt, Human
ugaauuuucucuacagcacccgcaugcuacacgggaccuacuccggugcccaugucuuugcuaguagagccucuca

SEQ ID NO: 4114904 - RNA, 60 nt, Human
ugaauuuuguguguacaaagguguguguuugugugugcguguguguaugcauaaaauuua

SEQ ID NO: 4114905 - RNA, 70 nt, Human
ugaauuuuuuauccauauuaagaugccucuggggaauccaguagacacauuaauauggaacugaaucuca

SEQ ID NO: 4114906 - RNA, 104 nt, Human
ugacaaauuaacgacuugaucguccucgucugugaaauugggauaagaacgccuaguucuuaaggcuguugcagaaggaaugacaugucguguuauuucccuca

SEQ ID NO: 4114907 - RNA, 64 nt, Human
ugacaacacaggucuaacucuccucagauacccugauugauggaauguuuaccugugaauguca

SEQ ID NO: 4114908 - RNA, 58 nt, Human
ugacaacaucauuuuuguguggagcuccuuauugcaaauagucaaaugauguugguca

SEQ ID NO: 4114909 - RNA, 92 nt, Human
ugacaagauaagauauucuggaaucuuuggagaaugugggagcaugaagucuucauaugacuugaaaguucuugaguaacuuauuucuguca

SEQ ID NO: 4114910 - RNA, 71 nt, Human
ugacaaguauuucuuuaucuggucagaaaauggaaauucuguuuucugagccagccaagauaccagguaca

SEQ ID NO: 4114911 - RNA, 70 nt, Human
ugacaauaagauugucauaguauggacauggaauagaauauauucaacuggccaguggaauuuuauguca

SEQ ID NO: 4114912 - RNA, 129 nt, Human
ugacaaucugaguuacacuaauuucacuuaccucugauacugaaaauccugccuguccucacuugacucccaugaugaaugauuugucagucacaggaaugguaauaauuaauaaaauuuaugauguca

SEQ ID NO: 4114913 - RNA, 61 nt, Human
ugacaaugcaugauggaauugccuucacuauguuaugaagguauaauugucauuauuguua

SEQ ID NO: 4114914 - RNA, 55 nt, Human
ugacacaguaucaaacaugauuucagaugaaaugggugguguuaauauuguguua

SEQ ID NO: 4114915 - RNA, 60 nt, Human
ugacacauuugcauaauaccucauauaauguugaugugaggauuaaguaaaugauguaca

SEQ ID NO: 4114916 - RNA, 57 nt, Human
ugacacccucuccuggagagaggcucacagcguagcuguucccaggaaaggggugca

SEQ ID NO: 4114917 - RNA, 83 nt, Human
ugacacguguucugggggagccuggcuggggaccugaccggguguggugggggcagccaggcugucaaggcagggcuguguca

SEQ ID NO: 4114918 - RNA, 84 nt, Human
ugacacucgcagaggcacgagugcagaaaugauccgaagccccguccaagucaugauuucuuauuaugugcucugugaauguua

SEQ ID NO: 4114919 - RNA, 64 nt, Human
ugacacugaccuaaagaccuggaacuaaaaauaauacccacgguaaucuuaaggugagugccca

SEQ ID NO: 4114920 - RNA, 64 nt, Human
ugacagaaagagccaagauccuuguccuguggaaagcaauacagguccuggacugcucuuguua

SEQ ID NO: 4114921 - RNA, 69 nt, Human
ugacagagcuggagaauaauuuuaggaaaacuaaaucucccuguugcuauguuugugccagcuuuguca

SEQ ID NO: 4114922 - RNA, 128 nt, Human
ugacagauggaauucagaauauagauaggaaugaagacauugagauccagaaguauguugaaaccugauaugguuuggcucugugucuccacucaaauaucaucuugaauugcaauucccauguguca

SEQ ID NO: 4114923 - RNA, 92 nt, Human
ugacagauuuguugugcuugucaucacaaaggcugcuucaugauuuuauaagaaaauaaagcaagccuuuguuccugcaaacaauucaguca

SEQ ID NO: 4114924 - RNA, 56 nt, Human
ugacagcaauaauuuuaucuucccuccaaagguaggauugaauccauuguuuguca

SEQ ID NO: 4114925 - RNA, 58 nt, Human
ugacagcauaacacuggucuuguuggauacccaacaagaagagugaauaugcauguca

SEQ ID NO: 4114926 - RNA, 66 nt, Human
ugacagcugcucaccugugagcccagccggcuacugggcugauggccagugaagucaaggcuguca

SEQ ID NO: 4114927 - RNA, 62 nt, Human
ugacagcuuugucauuugauuugggacaugccgauggcuccacaucaagggcagagagguca

SEQ ID NO: 4114928 - RNA, 84 nt, Human
ugacaggaagcugugaaggagacggagaaaccugaacacuauaugccaacauuugggcuagcugcuuuuacacauuuccucuca

SEQ ID NO: 4114929 - RNA, 60 nt, Human
ugacagugcggguacaucauaggacacuggaggaaaguccuuugaauguaaagcauguca

SEQ ID NO: 4114930 - RNA, 58 nt, Human
ugacaguuugacugcaaccuuugagaguccuuagccagaggcacccaguuaagcugca

SEQ ID NO: 4114931 - RNA, 84 nt, Human
ugacauagaguaaacacagauauuuaagagcuuuuguguucaugagcacagauaguuacuuaaggauccuacucaaacauguua

SEQ ID NO: 4114932 - RNA, 75 nt, Human
ugacauaggauaaacuguauuugggauuguguaauaaacacacaguaugaaaagucuaguuaauccuuuauguca

SEQ ID NO: 4114933 - RNA, 58 nt, Human
ugacaucugggcccucagcuaaaagauggaguccucuaccgguuggugcccacuguca

SEQ ID NO: 4114934 - RNA, 125 nt, Human
ugacaugaaacaaagacaagcacacugaggcauuuggcccaggcugcaugaguccauggaaguuaauuguuuggugauuuccuguaccugaggcacaaaugcuuccuuuuccaauuauagacuca

SEQ ID NO: 4114935 - RNA, 68 nt, Human
ugacaugagugcugggaccuccagcagcauccacaaggcucuguggaaggacuuagcgauacauguca

SEQ ID NO: 4114936 - RNA, 67 nt, Human
ugacaugucugggagcuagugagcuggagcuacaacccaggauuugacagaccuucccagacaguca

SEQ ID NO: 4114937 - RNA, 60 nt, Human
ugaccaaugagaugugugaggaagucugcagggaccuucaagaaacauuuccuuggcuca

SEQ ID NO: 4114938 - RNA, 60 nt, Human
ugaccacagaaucuaaauacaugaccugguaggagcauuucuguguaaagucugugguca

SEQ ID NO: 4114939 - RNA, 78 nt, Human
ugacccacaugcaagcagccgugcagaucauccagcgcuuccucauggguacauaucugcuuguugcaugucuguuca

SEQ ID NO: 4114940 - RNA, 119 nt, Human
ugaccuaaaucuccauuuugaauacuuggcauauuacuuccagcaaucugcauauuuagaaugggaugaauuuguguguguguuggaggugguagugguguuggaggagguggugguua

SEQ ID NO: 4114941 - RNA, 82 nt, Human
ugaccucacugcuucaugaggcugagagaagggaggaagggaucuucuugaaguccuccagaaguugcaccgagugggguua

SEQ ID NO: 4114942 - RNA, 79 nt, Human
ugaccucuccucuguuuuuagaacaucauuaaggaagaucauuucuuucacuaaugauuuugaaagaagucguggguua

SEQ ID NO: 4114943 - RNA, 112 nt, Human
ugaccucugagagcagcuguccaggcaggcacagcucuccaugagggaugccuguggcaagcucucuaacaguggcugcugccugucguggacagcuagcuuccagaucuca

SEQ ID NO: 4114944 - RNA, 85 nt, Human
ugaccugggggaggcagugaucaugccgucuuaccucaucacagcugcccacgagcagaugcauguuuaugucuuuccuaauuca

SEQ ID NO: 4114945 - RNA, 60 nt, Human
ugaccuucucaagcccauuguaaacugcccacugccuucacagggcuucagggaggguua

SEQ ID NO: 4114946 - RNA, 82 nt, Human
ugaccuuuaaauccucgugcaguucuaaaauuccacugcugaauucacaauagcagcuugcaugguggagggagagagguca

SEQ ID NO: 4114947 - RNA, 63 nt, Human
ugaccuuuucauagcuggauauuuuauuugauguuggaauguaaucagaauaugaaaauguca

SEQ ID NO: 4114948 - RNA, 98 nt, Human
ugaccuuuucuuuuuaucuuuauucucuucucuguugccucuguuguuccagugacuucagagacaaccugguagagaaaugcaaggauuaggccuca

SEQ ID NO: 4114949 - RNA, 79 nt, Human
ugacgagacucucaacguuuguuaaaugaguauauauauauuuuuaauggucaaucagacaagguuuagaguuuguuca

SEQ ID NO: 4114950 - RNA, 74 nt, Human
ugacguugcuuuauucagucucugccaucccaugagaggagagcuggggcccguaaagccagguuccaacguca

SEQ ID NO: 4114951 - RNA, 71 nt, Human
ugauauaggcagaaaggaaggcaaguuuuuauaacuuugucuaaaugaacuuucuaaaugccugaguauua

SEQ ID NO: 4114952 - RNA, 71 nt, Human
ugauauccuuguuuuaaacuguuguggcuugcugaaucaaagccgcugaauuugaaacaagcucaauguca

SEQ ID NO: 4114953 - RNA, 64 nt, Human
ugauaucugccuguacuauaacguagcauuugaggagugcuguguuaaauacaagcaugaauca

SEQ ID NO: 4114954 - RNA, 70 nt, Human
ugauauggcuuauguaggacacugugcauggagaaggggagaaccugcuuugcugccuacuaagcccuca

SEQ ID NO: 4114955 - RNA, 56 nt, Human
ugauauguuagaaucuugcaagauguuacuaucuugccauauuauugagcauauua

SEQ ID NO: 4114956 - RNA, 81 nt, Human
ugauauugcacuggaagagcaucugagccagcgugcuccuuguugcuccauuugacucaugcucucuccaguuaucuauca

SEQ ID NO: 4114957 - RNA, 61 nt, Human
ugauauuuaagcaaaaauaugggacauccuuccucaccaaauauuuuuguuuggacuguca

SEQ ID NO: 4114958 - RNA, 98 nt, Human
ugauauuuuugagauggcacuuaugauccuaaauugcaggugaucuaaacaucuuguuauaagagauaaugggcuucauguaauuucaguacauauca

SEQ ID NO: 4114959 - RNA, 67 nt, Human
ugaucacuguuagccuuaauuucccuuuuugaugaggauuuaauaaggucucaaucucaggugguca

SEQ ID NO: 4114960 - RNA, 71 nt, Human
ugaucagggugucaauaaauagcggugugguauucaguauuccacaaguuuguugauugaaaccuuuuaca

SEQ ID NO: 4114961 - RNA, 123 nt, Human
ugaucagugagugaaaagauguugggagggaagcugaggcagggcuugcaugucuggcuagacuugcuggcuccuugcuucuagcacucccacuaugcuaauguuucucauucacuugauaca

SEQ ID NO: 4114962 - RNA, 65 nt, Human
ugaucauaccaguuuccaucaggauuuaucagaucugaaacauccugcagauaagcugguugaca

SEQ ID NO: 4114963 - RNA, 63 nt, Human
ugaucuacgacuucaugaauuuauuuggcuccuccucggggccagggugagugucauggguua

SEQ ID NO: 4114964 - RNA, 59 nt, Human
ugaucuaugaaaggauuuggaguuguuccacagagcauucagaagcuuuuuauuaauca

SEQ ID NO: 4114965 - RNA, 71 nt, Human
ugaucucagcucacucugcuuccugggugcgggcgauucuccugccucagccucccgaguagcugggauua

SEQ ID NO: 4114966 - RNA, 88 nt, Human
ugaucucuaaaccucucugugcccugacuuuucuaucuuuaaaauggacguaacaacagagguuuaauaauaagagguuuggagguua

SEQ ID NO: 4114967 - RNA, 85 nt, Human
ugaucuguggcagguguuuagguuucauggaugguaaagaguaagucugagcuauccaugaucaauuuauuacuaauacacauca

SEQ ID NO: 4114968 - RNA, 65 nt, Human
ugaucuguggucaagcugcugugacuuaacuuucucuguuuagaucaguggcugauaacaaauua

SEQ ID NO: 4114969 - RNA, 98 nt, Human
ugaucuuguccacaguuuucaaguacauguugcucaacagccacauguucucaucuaugagguugacagcagcaugaacuacgaacucguucagauca

SEQ ID NO: 4114970 - RNA, 72 nt, Human
ugaucuuuucaaagggaaguuaugaaguaacccugcaagguuccccagcuuccaagccccuuuucaaaggca

SEQ ID NO: 4114971 - RNA, 70 nt, Human
ugaugacaauguugcugcaauaaaugcaauaauaucucucugcacuguuauugcaguaccauagucauua

SEQ ID NO: 4114972 - RNA, 89 nt, Human
ugaugacuugaagacuggaagccuguguugcucuggcgauagacaguugaguuuauuggaagugaacaccaggcuuucaauucacauca

SEQ ID NO: 4114973 - RNA, 84 nt, Human
ugaugauauuuuagcaaguucucugagagaaaaguuuuuuaaaaucucuuuuuucccccaacauggaaaaugcugacauccuca

SEQ ID NO: 4114974 - RNA, 57 nt, Human
ugaugauggaggcuugugcaagccaugauaaggaaagcagaauagucucugucuuca

SEQ ID NO: 4114975 - RNA, 95 nt, Human
ugaugauugugagaauggaaugagaugguucacagagaaggcuugagggcagugccuggcucacgcauuucaaguguuuguucucaccguuauua

SEQ ID NO: 4114976 - RNA, 57 nt, Human
ugaugccacaaacauucacugagcacguucuaugugccaggguuuguuugugguuca

SEQ ID NO: 4114977 - RNA, 70 nt, Human
ugaugcuauuaauauccagucugauuuuacucgucacugaaauuguauucagaauauauugauggaauca

SEQ ID NO: 4114978 - RNA, 61 nt, Human
ugaugcugagccugggacugacacgggcccaugcuggggccaguuaccauggccagccuua

SEQ ID NO: 4114979 - RNA, 55 nt, Human
ugaugcuguguaccucaugggauuuggugagaacugaaugaguuacacuguguca

SEQ ID NO: 4114980 - RNA, 62 nt, Human
ugauggacaauaguguuuuaagaaccagacacaaacucugccuuauucacuguuauuuauca

SEQ ID NO: 4114981 - RNA, 57 nt, Human
ugauggagggcagccccacuaaagcaucgugugcaguggguccugcgucugccagca

SEQ ID NO: 4114982 - RNA, 59 nt, Human
ugauggauucuaacugaacagaauaugaaagauucacugauacgguuuuagaguccaca

SEQ ID NO: 4114983 - RNA, 72 nt, Human
ugauggcauuuguuggcauggccccuaccacucauuuuuguaugugagcugcaagucugccaacaacuauca

SEQ ID NO: 4114984 - RNA, 58 nt, Human
ugaugggaaaaugaggccuggggauggccaggaacuugccugagguuuuuuccaauua

SEQ ID NO: 4114985 - RNA, 102 nt, Human
ugauggggaaggaggcgcgcggugcccagggcuuuuuauuagcugccucgacuucucgagccucagcccgaacgucugcaccugugcacccccuuucucucg

SEQ ID NO: 4114986 - RNA, 83 nt, Human
ugauggggacaaguaggugcacuucaauagaaucaggucacgacuuugcuauaagaauugugcaccuacaaaccaccccuuca

SEQ ID NO: 4114987 - RNA, 129 nt, Human
ugauggggcaggauuugggcagaugugggggcggagcuguucugagaugcccggcuuuggccuguggggcagcuggcugaagcugggcucuccucugccuuucuguccucccuuccugcgcaacuccca

SEQ ID NO: 4114988 - RNA, 55 nt, Human
ugauggugaugguugcacaaugguguguauguacuuagcgcgaccaagcuauaca

SEQ ID NO: 4114989 - RNA, 83 nt, Human
ugauggugcugucucuagagaaacagugcucugaacagaaggaauaaaugcuuaagguuguuucuuuggaagacggauugaca

SEQ ID NO: 4114990 - RNA, 79 nt, Human
ugauguagcagauacauggugguggcacuugacuuucaaaagcaaagucaguggauuuaccaugcgugcuucuaaguca

SEQ ID NO: 4114991 - RNA, 71 nt, Human
ugauguguggaagcugauauuaauuuaguacuuugagugucaaugugcaauguauaagauuucacacauua

SEQ ID NO: 4114992 - RNA, 60 nt, Human
ugaugugugguaucaguauuggggagaaacuuguaauaacuucaaaauugccacauguua

SEQ ID NO: 4114993 - RNA, 71 nt, Human
ugauguuggagucguaaggcauggagcugcagaccaugauguagaggaucaugcccaggcuccagauguca

SEQ ID NO: 4114994 - RNA, 68 nt, Human
ugauuaaagagauuaagauuugauacagugcacauaaagccuguaucaaaccaaauuaauucuaguca

SEQ ID NO: 4114995 - RNA, 65 nt, Human
ugauuagguuucuauugggaacuuugccaacaugcagcucccccucucuuugggaacauuaauca

SEQ ID NO: 4114996 - RNA, 60 nt, Human
ugauuauauucuaacuucauaacccuuuaacugggguuugugaagauaggauguauauca

SEQ ID NO: 4114997 - RNA, 66 nt, Human
ugauuaugcuaguauaguccuuagagucauuuacucauuucuuuagacucuucgggagcaaaauca

SEQ ID NO: 4114998 - RNA, 61 nt, Human
ugauucaauaggaauugaguagacucuguaagggagaguugucuugaaaucuuuugaauua

SEQ ID NO: 4114999 - RNA, 80 nt, Human
ugauucaauggggucaagaugaaccaggacauucauguucuaagcugcaugggauguccuguaccuacuuuauugaaaca

SEQ ID NO: 4115000 - RNA, 61 nt, Human
ugauucaauugaugguuucagaaaagcauucuggcugcugaauggaaaauggauugaauca

SEQ ID NO: 4115001 - RNA, 70 nt, Human
ugauucacuucagaauuccucagccucagcacuguugacauuugggguuggauaauucuuuguugaaugg

SEQ ID NO: 4115002 - RNA, 59 nt, Human
ugauucaguuaguagauuuggucaauuuaugcuaauuggcaaguaauacaauagaauca

SEQ ID NO: 4115003 - RNA, 68 nt, Human
ugauucucuuccuuuuuuccucugggcgguuaguacugcaugcaggaggagggaauaagaaagaguca

SEQ ID NO: 4115004 - RNA, 59 nt, Human
ugauucuucucuccuuauacccauccccagauggccucuuguaagaaguaggaggguua

SEQ ID NO: 4115005 - RNA, 70 nt, Human
ugauugcagauguguccugaucaauugagcugguuuuauuggccagaucugaggauacugagcagaguca

SEQ ID NO: 4115006 - RNA, 74 nt, Human
ugauugcuucuggcacuugagggggucugguaauggccauguguacuacuccgugagaaccagaaggcagauca

SEQ ID NO: 4115007 - RNA, 68 nt, Human
ugauuguauuuugucuuauagauugcggugaagacuggauuucauuaucuuuagacaggaagcaauca

SEQ ID NO: 4115008 - RNA, 107 nt, Human
ugauuguuuugauuguuugauaaauugguauauguguuagcacaaguguauuuauuauugcaaggcacaauaccuaaaaagccuuauugagauaauuaaaauacuca

SEQ ID NO: 4115009 - RNA, 60 nt, Human
ugauuuagcgggagcuuaauggugucacauguaagaaacacugcaguccccucugaauca

SEQ ID NO: 4115010 - RNA, 69 nt, Human
ugauuucaaggaguuuucacaguggaaauguacagacagcaaguauacuuugcagagccccuugaaaca

SEQ ID NO: 4115011 - RNA, 60 nt, Human
ugauuuccuuugcaaagacugugccuccaaauaaggucacauucuaagcaaugggguuua

SEQ ID NO: 4115012 - RNA, 59 nt, Human
ugauuucugaggcucugcccagacagcagugauugugccugggcuuucucucaaagaca

SEQ ID NO: 4115013 - RNA, 56 nt, Human
ugauuucugcaggauggacccugcucacucgacagaaucuacacccucagaaauua

SEQ ID NO: 4115014 - RNA, 78 nt, Human
ugauuugaggugguuuucaaggggauuuaacugaauucaggugucugauuuacguucccgaugaaagacuuaaaauca

SEQ ID NO: 4115015 - RNA, 55 nt, Human
ugauuuuaauugcucuauauaggaauuaagauuugugaagagaguaauaaaguca

SEQ ID NO: 4115016 - RNA, 98 nt, Human
ugauuuucccuucagagguguagauugcguaccuugcgugcagagauucaacguagucacucugcaagaugcaauauuaggcucugaaccacauuuca

SEQ ID NO: 4115017 - RNA, 60 nt, Human
ugcaaaacaaguguggcaaacucaugcaaauauccaucagaagccaccuuuuguugggca

SEQ ID NO: 4115018 - RNA, 109 nt, Human
ugcaaaaguauuuucuuugucaaaauguuuguauauuuacugagugcauuuucaaaugaccccugacacuuccgguaaaaaaugcuucuauuuugagaggguuuuugca

SEQ ID NO: 4115019 - RNA, 57 nt, Human
ugcaaacaggcauuucacaaacgguugguuucguguguuugugugggugcgugugca

SEQ ID NO: 4115020 - RNA, 102 nt, Human
ugcaaacuccuuuccaguugcaacuugaucagcauaugaguaagaagcaaguuaauugcuuuccgucaugugcuaaugaugcaucuuguaaaggacucagca

SEQ ID NO: 4115021 - RNA, 61 nt, Human
ugcaaagcacacccucagaguuucaagagaaacuuaccagacucugagagugugcuuugca

SEQ ID NO: 4115022 - RNA, 60 nt, Human
ugcaguguuccuguggguuuauauaucauuuuauauggacacacauaaauaccucuugca

SEQ ID NO: 4115023 - RNA, 90 nt, Human
ugcaguugggcagaaacauuggucagaguaaauuuauuucagggcugcuaguagccaaaugucuuucuuuuucagucucugcacacugca

SEQ ID NO: 4115024 - RNA, 75 nt, Human
ugcauaaaacagaguauuccucagucauuuuguaaaccuuuguucaacaaaagaaugaauacauuguguugugua

SEQ ID NO: 4115025 - RNA, 62 nt, Human
ugcauaauacguuuccuauaacuggggcugaaagagcuuaaauuagaguuagcuguuaugca

SEQ ID NO: 4115026 - RNA, 56 nt, Human
ugcauacugaaucugccaucacaucauuaaaugacaccaguggcaauuagaaugca

SEQ ID NO: 4115027 - RNA, 83 nt, Human
ugcauacugugcgaugauauugcauuuaggugaauuacucauaauuuaguaguuuagaauguugcaauacagcauauuacaca

SEQ ID NO: 4115028 - RNA, 69 nt, Human
ugcccuugaagacacuaaggcccagggaggggacaggccucccccaggucacucagcgucaagagggca

SEQ ID NO: 4115029 - RNA, 74 nt, Human
ugcccuuuggcugucccaaucauauuuguaggucaaaaaaagaccccauguguggagggcaugcauggagggca

SEQ ID NO: 4115030 - RNA, 67 nt, Human
ugccgcaagaccuaucuaguugcugugaauuaugccagggcgacaauggagagcguuuuuaauggua

SEQ ID NO: 4115031 - RNA, 76 nt, Human
ugccgcccaucccugagguuccuccugagcucugggcccagggcuuuagguccugcuaggguauguggccuuggca

SEQ ID NO: 4115032 - RNA, 105 nt, Human
ugccgggcauaaugggagauagcaaugacaaauauggaagccugauaauggaacaucuggucgggauugcagauguuauggaauggcaucccuauggugauggua

SEQ ID NO: 4115033 - RNA, 56 nt, Human
ugccgugucccauugugcucuggcugugaguuggagcuaguuuuagagcauaggca

SEQ ID NO: 4115034 - RNA, 86 nt, Human
ugccuaauaugggauuagugagaaagaaaucccuagcacucugaacccucagugacuacuggauuuguuucuccugcccucaggua

SEQ ID NO: 4115035 - RNA, 57 nt, Human
ugccuacauuccuugcuuaugggcucuuccuccaucuucuaagcuagcaguguagca

SEQ ID NO: 4115036 - RNA, 72 nt, Human
ugccuagcauaguauuugucacauaguaaucacucaauaaaucacauguugaauaaauaaaugugcuuggua

SEQ ID NO: 4115037 - RNA, 63 nt, Human
ugccucaggcaagucacuuaacaucucuugcucccccaggauguugggagaauuugugaggua

SEQ ID NO: 4115038 - RNA, 55 nt, Human
ugccucccuuuugcucuucuuaucucccuucugagaagccauagucugggaggca

SEQ ID NO: 4115039 - RNA, 78 nt, Human
ugccuccuuguuauugcaaaugguuuggucaucuucauucuuugcagaucacagucaauugcaaguuccaugggggua

SEQ ID NO: 4115040 - RNA, 67 nt, Human
ugccucucuucugcuguauguggaaggaaaccuauuucacauaccacagagugugcccugagaauca

SEQ ID NO: 4115041 - RNA, 71 nt, Human
ugccucuucucccaucuccaggcagguguaugccucacacugccuaggaaaagaauggaaacagaaaugca

SEQ ID NO: 4115042 - RNA, 55 nt, Human
ugccucuuggagccuuuccucuagucacuuccuaagaaaggauauaugggaggua

SEQ ID NO: 4115043 - RNA, 56 nt, Human
ugccugacucccaaagaggacgcguggcagaagagcugaucuuaagggagaaggua

SEQ ID NO: 4115044 - RNA, 69 nt, Human
ugccugaggauggugaaaguaauuuguauguguguauacauaauccugcuuuuucacuauuuccaguca

SEQ ID NO: 4115045 - RNA, 65 nt, Human
ugccugauauugccuguggaaaauaauuggacaaacauugauuuuuuauguugcuauaauaggua

SEQ ID NO: 4115046 - RNA, 57 nt, Human
ugccugccaggugcuucuucauuaucccuuccaugcaaugagcaacuuuagcaggcg

SEQ ID NO: 4115047 - RNA, 78 nt, Human
ugccugcucaauacacacucuucuugaacuuggaguacgcaaguagcaacagaaaauaggagugcagguagcagagca

SEQ ID NO: 4115048 - RNA, 58 nt, Human
ugccugcucuuaccacucuccccucuguguugcuggggcugggauggugggggaggua

SEQ ID NO: 4115049 - RNA, 86 nt, Human
ugccugcugcccccuuacugauaacugccagaggacaacauuauguuucaagucaguagcuaaucaugagaggcugguaguuggua

SEQ ID NO: 4115050 - RNA, 83 nt, Human
ugccugcuggggagugggcuaggaggagggcagcauguaggcuugggagcugccaucucucuucaacccuuaacuagcgacca

SEQ ID NO: 4115051 - RNA, 91 nt, Human
ugccuggaugcagcacuuuauaguagaaagagcauugaacugaaaagccauguccugaugcuuccacuaaugagcuguguuauccuaggca

SEQ ID NO: 4115052 - RNA, 66 nt, Human
ugccuggccuccugauucccuccuguccccuucucauuccccaggggcuuaucugaggccugggca

SEQ ID NO: 4115053 - RNA, 60 nt, Human
ugccugggaagcauggugaugguauuuugaaaaaggguaacauuuacaguuccuagagca

SEQ ID NO: 4115054 - RNA, 60 nt, Human
ugccugggacuguacuaaauuuggaaauaucgagacauacaagacuaguauccugaggca

SEQ ID NO: 4115055 - RNA, 64 nt, Human
ugccugggaucugugcccuuugcucuggaaacucuccaaauuaaaguggcuagaauuuuaggua

SEQ ID NO: 4115056 - RNA, 55 nt, Human
ugccugggugcccaaugaugagaccuccugcccgucucaugauggugcccaguca

SEQ ID NO: 4115057 - RNA, 60 nt, Human
ugccuggguguaaagggccaacaguuuacuaguuuacugggccccuaaaaauuuagagca

SEQ ID NO: 4115058 - RNA, 56 nt, Human
ugccugucacuugagaguucuguggcugugggccaaggacguacaggagauaauca

SEQ ID NO: 4115059 - RNA, 94 nt, Human
ugccuguggccaaauggaagaggugccacccagcuuuugugaugcagaaacguuuaaaggcuucggagugcacacuuuuuacaaaguuaaggca

SEQ ID NO: 4115060 - RNA, 95 nt, Human
ugccuguggggccaccuagauucucugcuggcugacauggacacauuuccaauggacagugugaagcagauagagcagaguguggauuacaggca

SEQ ID NO: 4115061 - RNA, 60 nt, Human
ugccuguguugauuacuuugucuaaaaagugauuugaaugaucuaggauuuauacaggca

SEQ ID NO: 4115062 - RNA, 73 nt, Human
ugccuguuuuguucacugcuaugaugaugauauuuauaaaagugccuggcacauaguaaguacuuaauaggua

SEQ ID NO: 4115063 - RNA, 91 nt, Human
ugccuuagagugcuaagaacagucuacccuccuuacgagacugaguguuuccugaaggcaggagcuguaucuuauugaacucuccagcgca

SEQ ID NO: 4115064 - RNA, 58 nt, Human
ugccuuagcuaccagguccuccaggaaacguucacacuggggaccugacuaauuggca

SEQ ID NO: 4115065 - RNA, 55 nt, Human
ugccuuaggaagcgggguguguccuugggcaaggcagcucuuuuuagcuaaggua

SEQ ID NO: 4115066 - RNA, 129 nt, Human
ugccuuccugagcaugugauuguacucuaguuggcucaugauacccaaguaccuagaaauauuuuugaagcuaugugucuguaugugugucuggguauguguuaggguuaagaaauguuaaggaauaca

SEQ ID NO: 4115067 - RNA, 77 nt, Human
ugccuucucccuggcuucugcacacggacgggucucuuuuggagcugaaagugugugaaaguuauuggagaauggua

SEQ ID NO: 4115068 - RNA, 55 nt, Human
ugccuucuuaauugagccuuucugggagcugcacaggcuggcuggaggagggaca

SEQ ID NO: 4115069 - RNA, 122 nt, Human
ugccuucuuccuggcuccggcugucaucacaguugagcagccuccgcucguggcccugccuguggcugcucuaauaacugugauucaaacagaaaugcugagaaagaucaggauucuaggca

SEQ ID NO: 4115070 - RNA, 94 nt, Human
ugccuugagaagagaagauggugaggcccgugaauaaucccuaaaggaaacuggauuuccuggcauuuacaaacccacccucuuugaaaaggca

SEQ ID NO: 4115071 - RNA, 74 nt, Human
ugccuugcagguuuuaaauacaucucugacaugcaaaauaaaucaaugucauaucauuuuagagcuugaaggua

SEQ ID NO: 4115072 - RNA, 77 nt, Human
ugccuuucuaaucgacugccauguuuagcgauuacuaugcgccaagcgcuuuacaggcacucucauuaaaauaggca

SEQ ID NO: 4115073 - RNA, 83 nt, Human
ugccuuugaagcaggagcucuuaaggaugugauuaacuuuucuuaacacagcuuuguguugcuccacuuguuauaaagaggua

SEQ ID NO: 4115074 - RNA, 61 nt, Human
ugccuuugcugauucucugcccuagggcccucccuuggggaucugaguugucaggaaggca

SEQ ID NO: 4115075 - RNA, 80 nt, Human
ugccuuugggagcuggaugcccuaaacugggguggcagagccaggucugucugcccuggggcaucaguuucccaucugca

SEQ ID NO: 4115076 - RNA, 67 nt, Human
ugccuuugguauuuuacaaugucagugagcuuuaaagagcuuuuaaacaaauaggauugccuaggca

SEQ ID NO: 4115077 - RNA, 104 nt, Human
ucgcuaagcagaugcauguaaaugagcuauuuucuaugcauggcuuccaaaagugcuaauuaaauaguugguauucaaggcuaugcucgcucauuguuuaguga

SEQ ID NO: 4115078 - RNA, 55 nt, Human
ucgcuacacucuugagucaauaugcuuaaugcguaagacacauuggaguagauga

SEQ ID NO: 4115079 - RNA, 63 nt, Human
ucgcuaggcccaguuccgccucccggaagccuuuccuccuucugagacgcuggggccugguga

SEQ ID NO: 4115080 - RNA, 116 nt, Human
ucgcuauuaaccagcauuuacaagggugugcugcuugggggugucugggcucccagggucuucucugaggugugcagucugcuaggcagggcauuuuuaugugguguauguacuga

SEQ ID NO: 4115081 - RNA, 76 nt, Human
ucgcucagucgcccaggcuggagugcaguggggcaaucuuggcucacugcaaccucugccuuccggguucaagcga

SEQ ID NO: 4115082 - RNA, 75 nt, Human
ucgcucuaucgcccaggcuggagugcagugaugagaucucagcucacugcaaccuccgccugcugguucaaguga

SEQ ID NO: 4115083 - RNA, 76 nt, Human
ucgcucuguugcccaggcuggagugcaguggcgcaaucuugggucacugcaaccuccaccucccggguucaagcga

SEQ ID NO: 4115084 - RNA, 76 nt, Human
ucgcucuguugcccaggcuggagugcaguggcgggacuucagcucacugcuaccucugccucccggguucaagcga

SEQ ID NO: 4115085 - RNA, 76 nt, Human
ucgcucuguugcccaggcuggagugcaguggugcaaucucggcucacugcaaugucuaccuccuggguucaagcga

SEQ ID NO: 4115086 - RNA, 121 nt, Human
ucgcugccgaaacgaucacccagucgcagucacuuugcucugauacacauuuuaaaaauguuauuggugucagugguaagguugggaguguguguauaucguguguuuaggaggguagaga

SEQ ID NO: 4115087 - RNA, 128 nt, Human
ucgcugcuugccaaaaauaagccgugaaacguauuucagaguagaucguuauuuacaugcuggcgaggagccacagaauaccauuuacauuugaaaauagagugcugcgaaguuuuuauaaguaguga

SEQ ID NO: 4115088 - RNA, 128 nt, Human
ucgcugcuugccaaaaauaagccgugaaacguauuucagaguagaucguuauuuacuugcuggcgaggagccacagaauaccauuuacauuugaaaauagagcgcugcaaaguuuuuauaaguaguga

SEQ ID NO: 4115089 - RNA, 95 nt, Human
ucgcuguagcaucugaaguugcucagagaguuucacaaguuuccguuuuaaugggucuugauuucucuaaggacugggggugguaggaacaguga

SEQ ID NO: 4115090 - RNA, 74 nt, Human
ucgcuucuguaguauucuuuuggucacagaggucagcuugauucagugugggaggaaacuacagaaauguguga

SEQ ID NO: 4115091 - RNA, 76 nt, Human
ucgcuugaacccaggaggcagagguugcagugagcugagaucaugccacugcacuccagccuaggugacagagcga

SEQ ID NO: 4115092 - RNA, 76 nt, Human
ucgcuugaaccuggaagguggaggcugcagugaggugagaucacaccacugcacuccagccugggugacagagcga

SEQ ID NO: 4115093 - RNA, 68 nt, Human
ucgcuugaaccugggaggcagagguugcaguuagccaaaauugcaccacugcaccccagucuggguga

SEQ ID NO: 4115094 - RNA, 68 nt, Human
ucgcuugaaccugggaggcggaaguugcagugagccgagaucgugcuacugcacuccugccugggcga

SEQ ID NO: 4115095 - RNA, 76 nt, Human
ucgcuugaagccgggaggcgaagguugcagugagccgagaucgcgccacugcacuccagccucggugacagaguga

SEQ ID NO: 4115096 - RNA, 76 nt, Human
ucgcuugagcccaggagguugaggcugcagugagcuacgaugaugccauugcacuccggccugggugacagagcga

SEQ ID NO: 4115097 - RNA, 73 nt, Human
ucggaaaugucagaaacgccgcagucugcgccacuuugaaaaaggggccucacagaugggcuuuucugccuga

SEQ ID NO: 4115098 - RNA, 129 nt, Human
ucggaaucaacuugggagcauuagaaaaguacugaugcuuggguccuaaccgagauauuuugauuuucuugguccuggggugcaggcugaccaaugggauuuuauuuaaaguguccuggguuauucuga

SEQ ID NO: 4115099 - RNA, 83 nt, Human
ucggaaugagcuagacuggaccugacccaagccuggccacggaauauguauggcaggguggagaggcuaaguccagugacuga

SEQ ID NO: 4115100 - RNA, 84 nt, Human
ucggacagcagagcuugaguuuaggcagcagugcuaugauucuucuuugaagaucaucaaucuacuuugccucucaguuuccga

SEQ ID NO: 4115101 - RNA, 79 nt, Human
ugcuuaagauaagcccauuaauuuuaccuuuguaaacauguuucagcaugacugugugauuaaggcuucauucugugca

SEQ ID NO: 4115102 - RNA, 66 nt, Human
ugcuuaaucaagaagccuauuuaauaauuucugagcacuugaguaggagauugauugauuaaugcg

SEQ ID NO: 4115103 - RNA, 76 nt, Human
ugcuuauagaucuuccauucauuuaagagaacuucuuauuacuagaaaguuggauggauuggaaugaaguauagca

SEQ ID NO: 4115104 - RNA, 96 nt, Human
ugcuuaucugcccugccuaauuucuuuuacagguuaccaaguuucaaaugaaggcacaggcagccuuguagaagaaaggggcaggaauaggaagca

SEQ ID NO: 4115105 - RNA, 66 nt, Human
ugcuuaucuuuucucucacuaggcuggagcuuaaguccacuuaugaggagaaaauauauaaaagca

SEQ ID NO: 4115106 - RNA, 77 nt, Human
ugcuucagcuauugacacugucccacagaauucgagggaccucaccuccucguuuuuggacgacagaggcugaaaca

SEQ ID NO: 4115107 - RNA, 78 nt, Human
ugcuucaggaagaaacgccagguacccagaagcaaguagaaaaguaaugaauauuaaugguguauuuaucuuggggcg

SEQ ID NO: 4115108 - RNA, 66 nt, Human
ugcuuccuagcaaucuucagccgcccagccagcaaagagggcugagcgcaugguugcuggggagca

SEQ ID NO: 4115109 - RNA, 129 nt, Human
ugcuuccuaucaagcagagugugccaaguucuccuuaaacuuuaucuugugagaauggagauugauaaacagagaaauaccuguuucaaaagaugaauaagguugauugcccgccagcaugaccaagca

SEQ ID NO: 4115110 - RNA, 56 nt, Human
ugcuucuaggacagcacaacuguaaaacuuuccagauugaggcaugucuagaagua

SEQ ID NO: 4115111 - RNA, 75 nt, Human
ugcuucuccauugaugcuaaguaugaagugucauuuauauugaaucugcacuaguauuuuucuuggaguaaagua

SEQ ID NO: 4115112 - RNA, 83 nt, Human
ugcuucugcuuuggucuagagucuaguguauacaaaguggcccacagagugggagaucaugaggacucagacuaacugaagca

SEQ ID NO: 4115113 - RNA, 60 nt, Human
ugcuucuggaaacaguggcuguuaggaaggcugccacccuacuguguuuccagaaaagca

SEQ ID NO: 4115114 - RNA, 67 nt, Human
ugcuucuuuguguaaauagcuuucauuuucuccaucuggaagugauuucugccugcauguuggagca

SEQ ID NO: 4115115 - RNA, 61 nt, Human
ugcuugaguucucuccccugcuguucaguuaauaagcuuaaaaguaggcugagauugagua

SEQ ID NO: 4115116 - RNA, 56 nt, Human
ugcuugauacucauugcaaggcuaaucauauuuggcuuguuucuauuuaucaagua

SEQ ID NO: 4115117 - RNA, 61 nt, Human
ugcuugauuagggaagucacaucuucaguuuuacuagauagugacuuuucaagucuuugua

SEQ ID NO: 4115118 - RNA, 59 nt, Human
ugcuuggcuucauuuaaguuuuagcuaauacuuauuaagcacagacacugagccaagua

SEQ ID NO: 4115119 - RNA, 97 nt, Human
ugcuugggaaaauagcugaaccaccuaaagcauauuuuaauuagccacaguggagcaaacacuaaauuaugcuuugggcucagcacaccuugaagca

SEQ ID NO: 4115120 - RNA, 58 nt, Human
ugcuugguugacaucugcaugcucacaggaucuuggaaagguaggucaguaccaagca

SEQ ID NO: 4115121 - RNA, 79 nt, Human
ugcuugugugggaugcuuaggaucuugcccuuaugguauaggcacaagaagggcaggcuccaagcauccuaugaaccca

SEQ ID NO: 4115122 - RNA, 87 nt, Human
ugcuuuaaaaaucucuuuucggauagacuggauauuuguagucuccaugucacagaugaggaauuuauuugguguagagauuuagua

SEQ ID NO: 4115123 - RNA, 70 nt, Human
ugcuuuaacauaagauaucuuuuaaauacuguauauguguuacugauagaaggguguuuuauguaaggua

SEQ ID NO: 4115124 - RNA, 90 nt, Human
ugcuuuaaucaggguuccugcaauuagcguauuaguuuauugguaaauaagcacugguuuguuaauucccucuagaaaucuuguuuagua

SEQ ID NO: 4115125 - RNA, 61 nt, Human
ugcuuuaccuuccauuuaaggaggaccagggaguuaggaacuucuugaggaaaguaaggca

SEQ ID NO: 4115126 - RNA, 79 nt, Human
ugcuuucaaacugcaacauguugcuuuaauaauauuuaacagaauauuuacgggacagcaguucuaguuguggaaugca

SEQ ID NO: 4115127 - RNA, 78 nt, Human
ugcuuucccugggugcugauuucacaggucuugguaacaccaugaaaugaaauagcaccaagguuuaacuuggaggca

SEQ ID NO: 4115128 - RNA, 71 nt, Human
ugcuuucuauccauugcccugcauuucuagugggugucuaaccuugauuccuacucaggcaaugagaaaca

SEQ ID NO: 4115129 - RNA, 62 nt, Human
ugcuuucugcucuggaaacaggacugggcaugcucuguguucuguaucuuagcagacaagua

SEQ ID NO: 4115130 - RNA, 79 nt, Human
ugcuuucugcuuugggaagaggaaucucuggaaagcuucauccaauucacaagaauucuagcucugcccaaggcaggca

SEQ ID NO: 4115131 - RNA, 55 nt, Human
ugcuuucuucaaccucauucugcagaaacaauugcugcagguguuggagaaggua

SEQ ID NO: 4115132 - RNA, 70 nt, Human
ugcuuugaaauagauuucucuggguuuguccuauauaggguuugcaaaccuucuugaaucugucucugca

SEQ ID NO: 4115133 - RNA, 56 nt, Human
ugcuuugaauaucacaaacuuucaauaaacuugagcccauaguggaguucaaagua

SEQ ID NO: 4115134 - RNA, 75 nt, Human
ugcuuugcacugugcuagaagccaggggcauagaacccuguccugugaguuuacauucuggccagagacaaagca

SEQ ID NO: 4115135 - RNA, 69 nt, Human
ugcuuugccugcuuugacucauuugauauuuacaaauaacuuaugauguaaagguaggauucaaaugca

SEQ ID NO: 4115136 - RNA, 80 nt, Human
ugcuuugccuuucuguaacaugggaggauugaggggcgugcccccagaaacaccuggauucuguuaauuaagguaaagca

SEQ ID NO: 4115137 - RNA, 61 nt, Human
ugcuuugcuuuauggucgcuuccuggauuacaaaaucagauagcguuugagagcauaagua

SEQ ID NO: 4115138 - RNA, 75 nt, Human
ugcuuuuaauaaucuaagagcuacgugucuuuaauauuuuaguggaccaagggagacucugggauuuugaaagca

SEQ ID NO: 4115139 - RNA, 89 nt, Human
ugcuuuuuagggcgaucuauaccauuucuuaggcauguuguagaugggaaucauacauguaacuaaguaaaagaucguauuaacuagca

SEQ ID NO: 4115140 - RNA, 55 nt, Human
uggaaaaacugagacuuagacacagguaagcugguccagagucuacuuuuuuuua

SEQ ID NO: 4115141 - RNA, 71 nt, Human
uggaaaaagaguucuaugaucuuuccagccacacaugugggaagggguggagggaguggaaauucgagcca

SEQ ID NO: 4115142 - RNA, 68 nt, Human
uggaaaacaggucucucagacccacccugccaagacccaggguggcucagugucaggcccugcgucca

SEQ ID NO: 4115143 - RNA, 68 nt, Human
uggaaaacuuuucuguguuguccgggauccaacauaggacauaucagcauucuggacagcagaaacca

SEQ ID NO: 4115144 - RNA, 72 nt, Human
uggaaaagcucauugauaaaaaguccugugugagcagagacuuuaaguaagucaaggagccagauuuaucca

SEQ ID NO: 4115145 - RNA, 105 nt, Human
uggaaaaggagacagauacccucuagucuuucucccuggcuuuggagaugaggaccccaaggcccagagagccaguuaguggcagauccccugccucccagucca

SEQ ID NO: 4115146 - RNA, 81 nt, Human
uggaaaauagguaguuuucugaaaauuacuuugguucucuaaaguacuaaugaauauuuugcagaaaaugaacaccuucca

SEQ ID NO: 4115147 - RNA, 72 nt, Human
uggaaaauuuuugugacuucuauagagucuguaaccaagaacaguauaccuaagaaauccagagauuuccca

SEQ ID NO: 4115148 - RNA, 65 nt, Human
uggaaacacucaagcuuauauuguaaauuaaauuaaagcaaugcagucuuuaugagguguuucca

SEQ ID NO: 4115149 - RNA, 55 nt, Human
uggaaacucagggccagaaggagauuucaaucauccucuugccuuugagugucua

SEQ ID NO: 4115150 - RNA, 58 nt, Human
uggaaacugugguauuucuuuaucucuucagaaugacauaaggauaccugaguuuuca

SEQ ID NO: 4115151 - RNA, 65 nt, Human
uggaaagaacucagccagaagcuucagagucacucucauggcuugucauguugauguucuuucua

SEQ ID NO: 4115152 - RNA, 90 nt, Human
uggaaagguaggaacuaagcaggcaggguggagaguuuucuguaagacaaaaacugucuggacacugcugcgguucuguuacaaagacca

SEQ ID NO: 4115153 - RNA, 61 nt, Human
uggaaauaaaugugccaagaucaagguuagggaaugaucucaggcaugguuuguucaucua

SEQ ID NO: 4115154 - RNA, 60 nt, Human
uggaaaucaugggagaguuggaaguacuguuggagcauuccaucuccuccuggcuuucua

SEQ ID NO: 4115155 - RNA, 77 nt, Human
uggaaaucauuucuuuaagugaaaggggauuaaaugguaccuauguaaauucuauacacuuaaaagauuaauuucca

SEQ ID NO: 4115156 - RNA, 68 nt, Human
uggaaaucuacuuuggguuagacacugugauaaaugucagugucugaaaagccuggaguugauuucca

SEQ ID NO: 4115157 - RNA, 65 nt, Human
uggaaaugccaucccucugucaccaauccacaguggguuuggggaggaggcauggccaacaucca

SEQ ID NO: 4115158 - RNA, 68 nt, Human
uggaaauuaaaauuccucuuaaaauagauccuuaguuuuuugaguuccuuaggagguuuuaauuugua

SEQ ID NO: 4115159 - RNA, 100 nt, Human
uggaaauuucuaaugcccuacugacauuuuucccuaagcauuuauacucccucuauaaauggagagaccauguccugugaugggauauaggagucagcca

SEQ ID NO: 4115160 - RNA, 59 nt, Human
uggaacacuuuguugaaaugcaaauagucucuggagaucacuuuuuaacaaagucuccg

SEQ ID NO: 4115161 - RNA, 55 nt, Human
uggaacagaggauguuugaaauucagaauucacuucugaauuaugccuuguucua

SEQ ID NO: 4115162 - RNA, 125 nt, Human
uggaacaugcaguguucuuuuuuccuuggcuuggguucuagagaauguuguuuccucauuugguaauuggagaguuaauaggguucuuugugaugcuaccguggaagagagacuguuuuauucca

SEQ ID NO: 4115163 - RNA, 59 nt, Human
uggaacauucaugcaccuuccuauccaccccacuggguaaagugcaugguuaugugcua

SEQ ID NO: 4115164 - RNA, 130 nt, Human
uggaaccgcauggggggcagcaggcaucagguggggagacccaggagcucugggguccucugcccccagggugcagucauuccacccuccugccccaugggauugugugcacccaaccccgcugugccca

SEQ ID NO: 4115165 - RNA, 80 nt, Human
uggaaccuuauuaaaaugaugauguagacauauauucaauuauauggaagcaaaauacauuaauuuuuaaaagguugcua

SEQ ID NO: 4115166 - RNA, 61 nt, Human
uggaaccuuccugccauuaaggugaggugacuuuucucuccugucuggugaggggguugca

SEQ ID NO: 4115167 - RNA, 57 nt, Human
ucucuuugucugcucuuaguugagcuucccuguaaagacugagucuagaccaagagg

SEQ ID NO: 4115168 - RNA, 75 nt, Human
ucucuuuuuagcuuuuauugaacagaauguaaauucauacuuuuaaauauuuuguucauaauggcaaagagaaga

SEQ ID NO: 4115169 - RNA, 74 nt, Human
ucugaaaacuucacauaaauagaucacaucaucccugaugauggugguauuuuuauaugugugguguuucuaga

SEQ ID NO: 4115170 - RNA, 95 nt, Human
ucugaaaauuuauuaaaaaucauugaguugcacuuuuacuaggggugaauuuuaugguauguaaauuguaacucaaaaaguguuaaaaaugaaga

SEQ ID NO: 4115171 - RNA, 129 nt, Human
ucugaaaucaacccugucuucuggggacucuuuaaaguguucauuuauucauucacucagucaauauuuauugaauagcugcuaugagaaaggcacugugauggcuguuagaggcaugagguuaaaaga

SEQ ID NO: 4115172 - RNA, 111 nt, Human
ucugaaauggaaagugucugauugguacauuacaguuugauugccaguauuuucuuguucuuagugguacaucaaaucaauguuccaguuuacaaucaaagucaucuuaga

SEQ ID NO: 4115173 - RNA, 58 nt, Human
ucugaaauuccuuccagacuuucaguucagaugaccuuugggacuuuggagauucaga

SEQ ID NO: 4115174 - RNA, 91 nt, Human
ucugaaauucuguaagucuaugguuguuuuguuccuggacccaguaaaaacaugcagaacagaauuaccgaagaucugacaaauuaucaga

SEQ ID NO: 4115175 - RNA, 55 nt, Human
ucugaacacugagugucaucacuugauuuucagcaucaagcacacuguguuuaga

SEQ ID NO: 4115176 - RNA, 57 nt, Human
ucugcucaauacugcucaugaacaccugucucuuguucauguugcaauuugagcgga

SEQ ID NO: 4115177 - RNA, 89 nt, Human
ucugcucaccagagcgccuugccacuagcaugcugucugggugugccuggcagucagagugugcaggccggcuuugacaaagugacaga

SEQ ID NO: 4115178 - RNA, 130 nt, Human
ucugcuccuguauuuucuacucagauguuaggcaguuuucuucauucugcugagcuucagaaucucagcugugaaauggggaugacacaaacuuccuaagguuuugguaaagacuugaugaaaugacgga

SEQ ID NO: 4115179 - RNA, 74 nt, Human
ucugcucuacuagauccaguuuguuuauuuucuugaaauaguugaugcaaauaaacagucuaguugaaaacagg

SEQ ID NO: 4115180 - RNA, 120 nt, Human
ucugcugagugauucuucugaaccuuguaauguuaacugaagccauucucggguauucaccuggccgacagacuaaagccucacuuagcuauauggcucagaagauuugacuuagccaga

SEQ ID NO: 4115181 - RNA, 57 nt, Human
ucugcugcaaaaggguugacugaugcucuacacaucagcaugacagucugcagcaga

SEQ ID NO: 4115182 - RNA, 77 nt, Human
ucugcugcuggcaugaauaccugaaaauccugggacugugggaugugguccaggcucucaggugucagcaucgcagg

SEQ ID NO: 4115183 - RNA, 56 nt, Human
ucugcuggcaauauugagaaaagaagcucucuuuuuccucaggaaugcuaagcuga

SEQ ID NO: 4115184 - RNA, 68 nt, Human
ucugcuuacucuuuugaugagcucaggggcugagaauuaugcacccagcugguaaaggggaaagcaga

SEQ ID NO: 4115185 - RNA, 58 nt, Human
ucugcuucuccuacuucaugggccaauguuucugagacacacagugggaggagaaaga

SEQ ID NO: 4115186 - RNA, 62 nt, Human
ucugcuugugucuguccagccucuggcuccacugcuuggcugagauccuggcccauaguaga

SEQ ID NO: 4115187 - RNA, 67 nt, Human
ucugcuuuauuacacuagccaaccuaggugccaccuggaguaauaggaaucuacugagugaaggaga

SEQ ID NO: 4115188 - RNA, 111 nt, Human
ucugcuuugggucaccucaccugaggacuacaucucaccuuccaggacacgcaggcaauggcuagugucuuggugagguguggggcucccugaacuggccucugcugcagg

SEQ ID NO: 4115189 - RNA, 93 nt, Human
ucuggaaaugaagcccugugauagguccagauuccuaugauaucaaagacacuacuaggcuuggaagaucuaacagaggcaucauagacugga

SEQ ID NO: 4115190 - RNA, 90 nt, Human
ucuggaagcaggcuggucccagagcauugccuaguacgcccauccuggaaaagcacuugagccuugggccgaccuggagguucuuccaga

SEQ ID NO: 4115191 - RNA, 55 nt, Human
ucuggaaguuagaggaggaaagauuagcauuuucaauuucugcugacuuaucaga

SEQ ID NO: 4115192 - RNA, 64 nt, Human
ucuggacaaagcagacaagauaauucaccuggaugugguggaaaaggucacugcuuugugagga

SEQ ID NO: 4115193 - RNA, 69 nt, Human
ucuggacuauaggcugccaagugcugcauaaauaaaucaucaagucauuuuggcauccugugggccaga

SEQ ID NO: 4115194 - RNA, 129 nt, Human
ucuggacuugccugggacaaauguaguagagggagggggcucgggccccacugagcucagggcuauucuuggagccugagucagcggaggcaaaggauuccugcccugcuuguccaggcagcaguuaga

SEQ ID NO: 4115195 - RNA, 60 nt, Human
ucuggagagucacagugccagaggaagcggagcagagggacuggcaguguggcuuccaga

SEQ ID NO: 4115196 - RNA, 59 nt, Human
ucuggagcauuuucugcuucugcuagaacaggcuagggaaggcaccaugguguuccaga

SEQ ID NO: 4115197 - RNA, 84 nt, Human
ucuggaggccuuuuacagaccauuaauugguagggcuauuacuaugcucucaguuaauggauucugucagauucaagcuccaga

SEQ ID NO: 4115198 - RNA, 76 nt, Human
ucuggaggcuggaagucugagagcaaggcauuagcagggcugguuucuccugaggccucucuucuuggcuuguaga

SEQ ID NO: 4115199 - RNA, 55 nt, Human
ucuggagggggaugccucaucccugacagaugugggucauggcugucccuccagg

SEQ ID NO: 4115200 - RNA, 59 nt, Human
ucuggaguaauuacagugacugccauucaugccuguucaguugcccugauuauuccaga

SEQ ID NO: 4115201 - RNA, 70 nt, Human
ucuggagucucugcucaggcaccagcccuggcaggcaucugacacaggguugggcucuggcauuuucaga

SEQ ID NO: 4115202 - RNA, 62 nt, Human
ucuggaguugagagugugcgagugaaaaccagcuucaucgcauuucccucuguagcuucaga

SEQ ID NO: 4115203 - RNA, 70 nt, Human
ucuggaguugcauguuuuggcuaacucaugccggcauguauacugcaaacaaaaccugcuuaacuucgga

SEQ ID NO: 4115204 - RNA, 101 nt, Human
ucuggauccuuucuacaggugaucugugugguaguuucagugaacagcaccagcacuguucaaugaagcuaccacacaaauuaccuguagaauccucuaga

SEQ ID NO: 4115205 - RNA, 60 nt, Human
ucuggaugcucugagcccaaggaauaaguaacucauuuccugggcucaugguguuacaga

SEQ ID NO: 4115206 - RNA, 58 nt, Human
ucuggauguuaagacaggggaacaaccgcaaguuccccauuuucauguuaacuccugg

SEQ ID NO: 4115207 - RNA, 86 nt, Human
ucuggauuacggugagugucaguuugcuaugugcuaaguaccacaaccuggguaucuucaacaacaaauugccucaaaguucugga

SEQ ID NO: 4115208 - RNA, 79 nt, Human
ucuggauuuguugauugacuuuagaauagcacugcugucacuccugcagugcugugggaggagucagagauuaugcaga

SEQ ID NO: 4115209 - RNA, 62 nt, Human
ucuggcaaauguggauguuuucauuguuuuauucauuaggaaacaguucucauuuguuuaga

SEQ ID NO: 4115210 - RNA, 79 nt, Human
ucuggcauauagucaaccuuguaauuagccaugugauucuaguuuaaaugucuaauuuagugguugauuuuagacuaga

SEQ ID NO: 4115211 - RNA, 74 nt, Human
ucuggccaacugcuugcagaagauugugagggccaaacacuacaaauauuugucugaggcgguuguuauccaga

SEQ ID NO: 4115212 - RNA, 68 nt, Human
ucuggccaugauuagcugaucucaguugagcuuauucauauaucugaggucaauuaaucaacaacaga

SEQ ID NO: 4115213 - RNA, 55 nt, Human
ucuggcccagccccugaggucagguggaugaucuaugcugguugguuggacuagg

SEQ ID NO: 4115214 - RNA, 81 nt, Human
ucuggccccaaaugucaauaguacugagguuaagaaauccugcuacagucugauuguccauuuggcuacuuuuggcccaga

SEQ ID NO: 4115215 - RNA, 80 nt, Human
ucuggcggcaccaucuuggcauuuacacucuacagaaaagguaccugaggagaaagaugguccaaguuacuugccacaga

SEQ ID NO: 4115216 - RNA, 86 nt, Human
ucuggcuaaggcuauugggaagaaaaauguuugcuauuuguuuucguuuaacuggcccaucauucuccuaaauagcuuuagagaga

SEQ ID NO: 4115217 - RNA, 71 nt, Human
ucuggcuccaggcauagaaggcacgcacugggcuaagaaaccugggugugaauauaugaccuggggcaaga

SEQ ID NO: 4115218 - RNA, 80 nt, Human
ucuggcucucugucuguuauugguguauaagaaugcuugugauuuuuacacauugauuuuggauccugagacuuugcuga

SEQ ID NO: 4115219 - RNA, 56 nt, Human
ucuggcugauuaucagaaucugagacccaacccugagaaauuuugauucaguagga

SEQ ID NO: 4115220 - RNA, 95 nt, Human
ucuggcugcacugggguagaggguguuuggcagagcauggggaugacauugucaucagagcucccccaaacgucacucccugccucccagcuagg

SEQ ID NO: 4115221 - RNA, 63 nt, Human
ucuggcugccauuugccccagcacugucuccauggaggucaauguacuguaauggcuaucaga

SEQ ID NO: 4115222 - RNA, 59 nt, Human
ucuggcugcugcgugagugcuuuauugauuacagagcaccgaucaaauuagcugucaga

SEQ ID NO: 4115223 - RNA, 56 nt, Human
ucuggcugucauuggaggccccccuauuuugaggaccuggcuuuggaacagccgga

SEQ ID NO: 4115224 - RNA, 105 nt, Human
ucuggcuugguuucuaagagcuuuuuggcuuuuaugcagcuuagguggucuauuucaucuagauuagguauaagagcuucaaaagcuaauggcagggcugccagg

SEQ ID NO: 4115225 - RNA, 69 nt, Human
ucugggaacagcuuagcuccagcgcaggaccuccaugaggcagcggucaaggggcaggcugaguccaga

SEQ ID NO: 4115226 - RNA, 62 nt, Human
uggaacugguuugcuucagacuucaaaaccacuugugacaucuguggcaaacacagugacca

SEQ ID NO: 4115227 - RNA, 130 nt, Human
uggaacuuugaaagugugagaaaaaucucaaaucacuuugacagcauuuuaauuauaguugauuuguuugccgcuaauagugaaaaugcugucagcaugauuugagauguuucuuccacucaaaauguua

SEQ ID NO: 4115228 - RNA, 59 nt, Human
uggaagaauguucauuaaacuguugaagacaguuauuucaggaguguagcauuuuuuca

SEQ ID NO: 4115229 - RNA, 98 nt, Human
uggaagaccaguuccaggaauucagcucucagucacgaccuggggcccgucucagccuggagaugcugagaugcuguuuccuggaaaacaggguccca

SEQ ID NO: 4115230 - RNA, 57 nt, Human
uggaagagaaaauccacccuuacuccaucaggguauuggccuucuguuuucucucca

SEQ ID NO: 4115231 - RNA, 61 nt, Human
uggaagagaccucaugaguugugccguccaucaccuuggcauaacaucauggcucuuucca

SEQ ID NO: 4115232 - RNA, 69 nt, Human
uggaagagugucacugaauuuaugcauguucuaaagacaggauuuucauaugaaaguagacacuuucca

SEQ ID NO: 4115233 - RNA, 56 nt, Human
uggaagaugcuugagaacuguuugaauugaauuucauucaaggcugguaucuuuca

SEQ ID NO: 4115234 - RNA, 63 nt, Human
uggaagcaaguaaaauuuuacuagguggccuuagagggaacccgugguuuuauacuacuucca

SEQ ID NO: 4115235 - RNA, 55 nt, Human
uggaagcaucuguagauauuaggcccccugggauuauguaugcaaaugucuucca

SEQ ID NO: 4115236 - RNA, 71 nt, Human
uggaagcauguugauuuucgcugggguccucccuaauucccccuggcccuguuaaugucaaccugccucua

SEQ ID NO: 4115237 - RNA, 75 nt, Human
uggaagcuguccugugaccuggcaccacagcaggcugugugcugccuccucgugugcgcaucacaagaagcuccg

SEQ ID NO: 4115238 - RNA, 83 nt, Human
uggaaggagaauaauagugucuguccaucaguaacuaggucucaugcuuuacaaaguucacuggauggaagauuuuccuuuua

SEQ ID NO: 4115239 - RNA, 94 nt, Human
uggaagguggcagugaaugagagacuguucugcuccugguuguggccaauugugcuuugucuguagcuguggagcagaggucucccgcucucca

SEQ ID NO: 4115240 - RNA, 83 nt, Human
uggaagguuacugucuugcuaggagcuauggaagacagaagagaaaucuaaguuuucucugcuucugagaaaguuacagucca

SEQ ID NO: 4115241 - RNA, 91 nt, Human
uggaaucuccuggauauauauuauaauuaaaauuuuggaggcagaugaguuccuccagagagaauauguaguauggaaauagaagaauuua

SEQ ID NO: 4115242 - RNA, 63 nt, Human
uggaaucucuuugucccugaguuucagaagcaaauagugaagcuuugggcagaagaggauuca

SEQ ID NO: 4115243 - RNA, 67 nt, Human
uggaaucugcuguugugaagauucucacuaccaaggaugaggagccacucuagcagucagaucucca

SEQ ID NO: 4115244 - RNA, 85 nt, Human
uggaaugugccuaugccuguuaaugucuuaugcuauuuauagcuuguucuugcauaauacauguaacugcauuguaaucauuuua

SEQ ID NO: 4115245 - RNA, 126 nt, Human
uggaauuaaauugaaugcaaugaauugagugaagagggaugauaaagugugaggaacccugcucaacaccuuccuuuuaguauccuaucucauuuaauccauuuaaucauuuaauaauuuaaucua

SEQ ID NO: 4115246 - RNA, 87 nt, Human
uggaauuaggagcaucuucugaaacuagugggaaagagcugaaucuaucagaacuucucaguugcaagugucagaaaccuaacucua

SEQ ID NO: 4115247 - RNA, 70 nt, Human
uggaauuauaaaugccaggacuuuagaucccauaagcaauggggucagguggagggcauauaugguuuca

SEQ ID NO: 4115248 - RNA, 59 nt, Human
uggaauuaucugaagugauuugaugacuuuucacauuaguuuucauuucaguaaaucca

SEQ ID NO: 4115249 - RNA, 60 nt, Human
uggaauucaguggccagacaugaugcuuguuggcaucacauaguggggcauuggaaucca

SEQ ID NO: 4115250 - RNA, 74 nt, Human
ugcaaaaaguuaccucuguaauauaagauuuuguauaaauuuuauaaauuugugucauaggguaauuuugucca

SEQ ID NO: 4115251 - RNA, 76 nt, Human
ugcaaaagcaggacguauuucuauccuagcaacaggguguuuucacaggauagucaauauguucucagucuaugua

SEQ ID NO: 4115252 - RNA, 77 nt, Human
ugcaaagaaagcacgauaguagcaaaagugacuguuaauaauuugugacuacauuguucuuuucuuuuccuuuugca

SEQ ID NO: 4115253 - RNA, 99 nt, Human
ugcaaagaagaguuguagauugaaugaucacugcaguugaugaggcauuucucauugccuacugcagaaaugauuuuccuaucuaccauuguccaugua

SEQ ID NO: 4115254 - RNA, 80 nt, Human
ugcaaagauuauuuugacuauuaaaccaacagaaucuuaucagagacccauguggcaaauggucaggaagaaagucugca

SEQ ID NO: 4115255 - RNA, 63 nt, Human
ugcaaagcugugcaggaacugcuugcuuggaacuugcuuccaaggcagaugcagagcuaugca

SEQ ID NO: 4115256 - RNA, 97 nt, Human
ugcaaaggagaaugagaagagugugguucuugcccgcauggagcugugucaggcaucaugcuaaaugcuggggguacauccucauuuuacucuugca

SEQ ID NO: 4115257 - RNA, 77 nt, Human
ugcaaaugaucuaucaguuuugggggacauacugacucaaugaagauccaguguugucuuucaaaauuucauuuaca

SEQ ID NO: 4115258 - RNA, 89 nt, Human
ugcaaauggagggcagacugagagugcaucacccucucacaucucagagucuaaaaggcggccuuucagugccuucuguucaaauugca

SEQ ID NO: 4115259 - RNA, 94 nt, Human
ugcaaaugguauuuugcuauuuguuucuaaaaguugaaaaugaccuugcacguuaaaaaucaucaguuuagaaaaaauaugaagucuguuugca

SEQ ID NO: 4115260 - RNA, 68 nt, Human
ugcaacaccaguucagaagaaucuguuuccccaguaacucagaauucuguaauugaacuguguugaca

SEQ ID NO: 4115261 - RNA, 88 nt, Human
ugcaacaguaucuaccauuguuugaacacaacucagaaugcugguaaaaggauuacugauucugaaguguuugugauauugaauugca

SEQ ID NO: 4115262 - RNA, 123 nt, Human
ugcaacauuuguuucauaagugcuuuguguuuagcaacacuguauucacgaccuuguuggcuugcauuugcauguuuuauaccaaagcuuauacuguacuaugugaagccaucagaagucgca

SEQ ID NO: 4115263 - RNA, 71 nt, Human
ugcaacuccuaagauguggggacagagcccagaacaaaguaggguagacuguuauauucuagggagcugca

SEQ ID NO: 4115264 - RNA, 73 nt, Human
ugcaagacacauugcuuccugucugguuuauacucucuacagugagucaggcauagguaggauguuucuagua

SEQ ID NO: 4115265 - RNA, 63 nt, Human
ugcaagaccauccuaaagauagacaucugggucaucagcugugugugcuugggauuaugugcg

SEQ ID NO: 4115266 - RNA, 64 nt, Human
ugcaagaggauuguaucaauaagggacuucagaucuugccccugagaaauauacucuuuuugua

SEQ ID NO: 4115267 - RNA, 83 nt, Human
ugcaaggcuguaugaguaauuuauccagugaaguaaugcccuuagcaucucuuacugucuggcaauuaagaaucacccuugca

SEQ ID NO: 4115268 - RNA, 61 nt, Human
ugcaagggugugaaccaaugagauucuacugugugucaugcagguuuguuauagacuugca

SEQ ID NO: 4115269 - RNA, 92 nt, Human
ugcaaguacuuuuugagugucggcccauauuuuauuugucaugucccacgggucaaggcaagucauaugggcaagcagggugggaaguugca

SEQ ID NO: 4115270 - RNA, 56 nt, Human
ugcaaguagaguucacuugucuuugucuugaaagcaaagauuucuuuucucuugca

SEQ ID NO: 4115271 - RNA, 55 nt, Human
ugcaaguccucaaagggcucugcuuuucauaggaagcaaaauccaagcacuugca

SEQ ID NO: 4115272 - RNA, 63 nt, Human
ugcaagucugucugcuccugugugucugcccagaggacaccucuagagaaugagagauuugca

SEQ ID NO: 4115273 - RNA, 71 nt, Human
ugcaaguuuuccuggacacucauagaaauuguugagcagcaaauacuuucuagguguucacagagcaugca

SEQ ID NO: 4115274 - RNA, 58 nt, Human
ugcaauagaagauuucuggcuuauugaaauaccaauuggcuuccauuuucuguuugua

SEQ ID NO: 4115275 - RNA, 65 nt, Human
ugcaauagaguaguaucuagaucauucauaacagaaauagcugaaugauuugggugcauucagca

SEQ ID NO: 4115276 - RNA, 121 nt, Human
ugcaaugacuuaaaauuguauuaccugaauagucuccauggugaagugucagaaaaggugaaauaauaaauauuuuccacagcaccauaagauuuuauaaaauacuauuucaguuaaugua

SEQ ID NO: 4115277 - RNA, 64 nt, Human
ugcaaugcaaugcaaugcaaugcaaugcaaugcaaugcaaugcaaugcaaugcaaugcaaugca

SEQ ID NO: 4115278 - RNA, 78 nt, Human
ugcaauuaucguucucuuugucuuuaugguuuuuaugcucaggauaagaagcuauacagcaggagaauggaaagagca

SEQ ID NO: 4115279 - RNA, 86 nt, Human
ugcacaaguggaagagaguuuaacacaagaaaaguuaggaaaaucugauuuggcuuggaugauuaaacacuuuggacaacuuugca

SEQ ID NO: 4115280 - RNA, 58 nt, Human
ugcacaauuuaaauaaauacuugaggccagugguuuucagaguguggugagaugugca

SEQ ID NO: 4115281 - RNA, 86 nt, Human
ugcacacacgcucgagucuauuuauagacagauccuaaugauauguauugcauucugaacguaaaugugaaaugugugugugugca

SEQ ID NO: 4115282 - RNA, 106 nt, Human
ugcacaccuaagauuuggacaagcuggucuccaggugauauuuugacauucuucagcugaagaguguguucuuuaugcugugaucagaaugucccucaugugagca

SEQ ID NO: 4115283 - RNA, 66 nt, Human
ugcacaccucuccaccacucuccacuauaucuccagugcuuguugggugggggugggaggggugca

SEQ ID NO: 4115284 - RNA, 98 nt, Human
ugcuguaagaauggcaguuccagagugucaccuggaucacgaaagaagcacuuguguguuaaggcacugauaucugagaguuguuuuuuauugcagca

SEQ ID NO: 4115285 - RNA, 68 nt, Human
ugcugucuccauagaagagacugcaguuggcuuccagaaacgggugcagccugacuaggagaagagca

SEQ ID NO: 4115286 - RNA, 58 nt, Human
ugcugucuguguuaaaguguuuuuuaaugaauuauagacauuauaacacagagcugua

SEQ ID NO: 4115287 - RNA, 59 nt, Human
ugcuguggcuuaggaggauggcagggcgcuccguguccuggcauccgugggucugugca

SEQ ID NO: 4115288 - RNA, 56 nt, Human
ugcuguguaccacuagaaugcaagcucagugaggcaggaacucaggguaggcagca

SEQ ID NO: 4115289 - RNA, 56 nt, Human
ugcugugucuuucugugaaaagagaaacauuaucucuuuuuacucguucauaugca

SEQ ID NO: 4115290 - RNA, 61 nt, Human
ugcuguuagguuccuggucucaugcuaccuacuucucaaaaggcucagagaucaaacagua

SEQ ID NO: 4115291 - RNA, 71 nt, Human
ugcuguucagaagagccucugugggagaacccagggugggugcggaggggauacauuuucugaacaaagca

SEQ ID NO: 4115292 - RNA, 71 nt, Human
ugcuguucugauucuguccugcucuugauggaaaugaguuauucaagaggcaagauuaucagggcauagca

SEQ ID NO: 4115293 - RNA, 78 nt, Human
ugcuguugugaauagugccgcaauaaacauaugugugcaugugucuuuauagcagcaugauuuacaauccuuugggca

SEQ ID NO: 4115294 - RNA, 66 nt, Human
ugcuguuuccagccuagagauggugaggggacuuuuccuuggcucuuuccuggccugcuagcagca

SEQ ID NO: 4115295 - RNA, 73 nt, Human
ugcuuaaaaugaugauuauuuuagguauucauagaaaauaucuacauggaaaaagugaugauuauuuuaggca

SEQ ID NO: 4115296 - RNA, 60 nt, Human
ugcuuaaagcugcucaguuguaggguuaaauuaguuccuucagucugaguacuuaaagua

SEQ ID NO: 4115297 - RNA, 68 nt, Human
ugcuuaacagagugccuggcauguagcgccacgcugcggacugucggccacugcuguuccuacccgca

SEQ ID NO: 4115298 - RNA, 77 nt, Human
ugcuuaagacugucuuuaagggacugaauuuggcaauacacagaugaaaugucaaauugggauccucagacaaagca

SEQ ID NO: 4115299 - RNA, 74 nt, Human
ugcuuaagagaaugucaggaguggauugucccugugacuuuaaugguaauucaucuuugagacacuuucaagua

SEQ ID NO: 4115300 - RNA, 57 nt, Human
ugcuuaauauugugauguaauauuuggcuaauguauguguauauugcaauguuagca

SEQ ID NO: 4115301 - RNA, 56 nt, Human
ugcuuagccauugucagcacauggcuuucgccuuguguuuuaagauggcugcugca

SEQ ID NO: 4115302 - RNA, 90 nt, Human
ugcuuaucacuauuauugugcuuaaaucuaaaugucauauacuuagcaaaaggagauacugcuaaguuagagguuaggcacuuaaaagca

SEQ ID NO: 4115303 - RNA, 71 nt, Human
ugcuuaugucaugcauuucagagacucaaucugagcaaaaauuucucagugaagaguauaacaaauaagca

SEQ ID NO: 4115304 - RNA, 66 nt, Human
ugcuuaugugaaugcauguaugcguauguguauauauacauaugcaugcauuguuuaucaugggua

SEQ ID NO: 4115305 - RNA, 63 nt, Human
ugcuuauugauuaauacuuuugacguuuauuuucaucguuaagguguuuguuuucagaaagca

SEQ ID NO: 4115306 - RNA, 68 nt, Human
ugcuucaaccuugaaagcauggaguucucugcuuucagggaacuccagaugacucaggaacagaagua

SEQ ID NO: 4115307 - RNA, 69 nt, Human
ugcuucagacugcagauuuugaugaauguggaaaaauuuucuuggagcucuuagggucguuuuggagca

SEQ ID NO: 4115308 - RNA, 80 nt, Human
ugcuucagcccaucccaguacaucgcauggugaccaaaagauguagucguccuggcacaguggguguggggcaggaagca

SEQ ID NO: 4115309 - RNA, 89 nt, Human
ugcuucaggaaccauuuaaggguauaaagcccauuuuaaagucuuugcugccaaaaugggcuuuauaccgucagcugauuccugaagua

SEQ ID NO: 4115310 - RNA, 76 nt, Human
ugcuucaguuucuguggucucuuuucauccugcuugaagauucggaguguggaaggaggcuaggaagucuggugca

SEQ ID NO: 4115311 - RNA, 70 nt, Human
ugcuucauuuccuuauauuguaaaaaugucaacuguagugagacaccaaaugcugugaggaaugacagca

SEQ ID NO: 4115312 - RNA, 68 nt, Human
ugcuucauuuuuuuguaugucauuauuguuuuuacuuaagcaaagcucaugacauuacaggaggagca

SEQ ID NO: 4115313 - RNA, 72 nt, Human
ugcuuccagaccuuuagugucauguuauauuugaccugggauauucauaugauguugagggacauggaaaca

SEQ ID NO: 4115314 - RNA, 80 nt, Human
ugcuucccaucucccucccaccuccacucaagguacuuggaagagggcuuuuucgaggugugaggaaugaauggggagca

SEQ ID NO: 4115315 - RNA, 108 nt, Human
ugcuucccugaguuaauuuuaugccaggugaggucuuuuauagugugucaguuuguuugcuggacccuaagaagaccuucuggcauguaauaccguuaacucacagua

SEQ ID NO: 4115316 - RNA, 64 nt, Human
ugcuuccugggauccagucaaaguaucuuaaauaacaauuccacuuagacuuuuccagcaggca

SEQ ID NO: 4115317 - RNA, 71 nt, Human
ugcuuccuuguagauauaaucuaaaauuguucagcagagcaaauggguuuauauuugacaacuagggagca

SEQ ID NO: 4115318 - RNA, 81 nt, Human
ugcuucgcggccugauccugucuccgcaccguguugcuaggugauucucaacaccgcgggguuuagggaaacaugggggca

SEQ ID NO: 4115319 - RNA, 92 nt, Human
ugcuucuccuaaauucuggggcugguuauuuugauuaauauugagaagcugugggaaugacuucccuagaaaucuugacuagguuagaagca

SEQ ID NO: 4115320 - RNA, 83 nt, Human
ugcuucucucauauuccuucuuugagaauaagcacauaaugauauauuugcuugaaagugggaaggaacaaaugagggaagua

SEQ ID NO: 4115321 - RNA, 66 nt, Human
ugcuucugacugggucaguugaacuagcaauucucuagcugacacaauacuuccuuguuagaggca

SEQ ID NO: 4115322 - RNA, 71 nt, Human
ugcuucugugcucgagccaaccacacguauacuugaacacgaaggaaugugcuugagcauuaaggaaugua

SEQ ID NO: 4115323 - RNA, 69 nt, Human
ugcuucuguuaacuuauguucccagcuucauuuuauuauugggaaugaccuuaauaaguaggcaggaca

SEQ ID NO: 4115324 - RNA, 71 nt, Human
ugcuugagcccagguugaggcugcagugagcuguaagcaugccacugcacucuagccuaggugacagagca

SEQ ID NO: 4115325 - RNA, 76 nt, Human
ugcguggccugcuggccaggcauccccugauccuagcaugguugcuggagggaugcucuguggugccugucaugca

SEQ ID NO: 4115326 - RNA, 76 nt, Human
ugcguggugucuuuguggaagccuguggaagaaauuucugcucuuaguagaaaauggguuucuucaaccucaugca

SEQ ID NO: 4115327 - RNA, 75 nt, Human
ugcguguauugacugcaccugcagggguauagcuggagaacacccagugagcaucuucaggagccaagucacgca

SEQ ID NO: 4115328 - RNA, 70 nt, Human
ugcguuacguaccugcagggucaugggccaccugugagggugcugccucaacugucaggaacaggacgua

SEQ ID NO: 4115329 - RNA, 67 nt, Human
ugcuaaaagucuugauccagaugaaaacuccgaauuguucuggcauugcauuaaggcuuugauagua

SEQ ID NO: 4115330 - RNA, 91 nt, Human
ugcuaaaauauaaauuugacacagugaagcucagcauaaauuuauucaauagauuugucagcucagucuuuauugucagguucuuguagca

SEQ ID NO: 4115331 - RNA, 65 nt, Human
ugcuaaguacuuugaaggguuaauauggaaauuccuauaggaaacuugcuguaaaguucuaggca

SEQ ID NO: 4115332 - RNA, 74 nt, Human
ugcuaagucuuucaaaguuugcuuuggauuaaaagaacaaaaagaguuguccaggagcaaaugaugagacagca

SEQ ID NO: 4115333 - RNA, 99 nt, Human
ugcuaauacaugccuuuggagaauccaacaugcaaacaagaaaauauacacuucuggcaauguggucuucuucaguuuggcagauaaauagacuuagca

SEQ ID NO: 4115334 - RNA, 59 nt, Human
ugcuaaucagauuaaaauaugugcaaggaaauuauacuuaugcauuuuaaucugaggca

SEQ ID NO: 4115335 - RNA, 75 nt, Human
ugcuaauguuucauuuuuagauuuacaaaugaggggaaccuguaaaaggaggauugaaaauggaaaacauaagua

SEQ ID NO: 4115336 - RNA, 92 nt, Human
ugcuacagauaccacacagauuugugaacuagaaaaaucaugaacacuaguugcuuuaagacacuaaguuugaggugguuugucuuguagca

SEQ ID NO: 4115337 - RNA, 82 nt, Human
ugcuacaucaaguggccaucccucagguaggcagguucccuuagccgccagccagagaggcaugguuagguucugauaagca

SEQ ID NO: 4115338 - RNA, 69 nt, Human
ugcuaccgaacagauucaucuaguggcuacaucagcaccuugugcuuucagauaucuguuucaauggca

SEQ ID NO: 4115339 - RNA, 72 nt, Human
ugcuaccuuacucagcuaaugagauauucaaauauauaguuuugugaauauguuucaaguuguaagguauca

SEQ ID NO: 4115340 - RNA, 63 nt, Human
ugcuacuacuugucaacggucacaauacaccaaauuuaggacuuuaaguggcaagugcuagua

SEQ ID NO: 4115341 - RNA, 119 nt, Human
ugcuaggauggcuuacagaacacaggaagacacucauuaucacugguuuauuauaaaggauuuaaaugaauagccagaugaagagguccuuaagcugaaguccaggaggguuccuagca

SEQ ID NO: 4115342 - RNA, 95 nt, Human
ugcuaguaaauuauagaaguggaagccaaagucuugacagugaccuucaauguccuucccgacuggcucacuccacuccuaugacuuuucugaca

SEQ ID NO: 4115343 - RNA, 77 nt, Human
ugcuauauuugacaaaggaaaaaugcacauaccuaaaauucaaaggcauugcauuugcucauuugauaugcuuagca

SEQ ID NO: 4115344 - RNA, 58 nt, Human
ugcuaugaggcuuuuuugaugaaguuuaaaaagcuucuucaauaaauucccauaagca

SEQ ID NO: 4115345 - RNA, 92 nt, Human
ugcuauggaguguuaauaggcuucuaacauagcugucauuucaaguaauaggugccaagcuuucagcagcuuauuaacacauuauaacagca

SEQ ID NO: 4115346 - RNA, 84 nt, Human
ugcuauggcucaauucauagaguugacacaguuuaacagguggacaguaucauguaucuaagauuagucauuguuguuauagca

SEQ ID NO: 4115347 - RNA, 57 nt, Human
ugcuauuaucagaccuuuaaauuuuugcuuuaaauuuuuuagggguaugaaguggua

SEQ ID NO: 4115348 - RNA, 77 nt, Human
ugcuauugugaauagugccgcaguaaacauaugugugcaugugucuuuauagcagcaugauuuauaauccuuuggua

SEQ ID NO: 4115349 - RNA, 78 nt, Human
ugcuauugugaauagugcugcaauaaacauacgugugcaugugucuuuauagcagcaugauuuauaauccuuugggua

SEQ ID NO: 4115350 - RNA, 78 nt, Human
ugcuauugugaauagugcugcaauaaacauacgugugcaugugucuuuguagcagcaugauuuauaauccuuucggca

SEQ ID NO: 4115351 - RNA, 102 nt, Human
ugcuauuuaauaauuugcaaauguuauacugccaguugauauuuuauaacuaccaaauuuaagugcaguaaaugggcauuaugcuuguuuaaaugucuggca

SEQ ID NO: 4115352 - RNA, 92 nt, Human
ugcuauuucuaauugguuuuguuaucuccauucuuuguguuguauuucccugagguguggagaaguuaaggccagaguuaacguuuauagca

SEQ ID NO: 4115353 - RNA, 65 nt, Human
ugcuauuucucugcuguaaaauugaccauuuaacauggaaaaauuauucuugcuggcagggagca

SEQ ID NO: 4115354 - RNA, 78 nt, Human
ugcucaagagauauaaaaaugugggccauauguagccccaagaaaugcauuuuaucacauuuucauauucucugagca

SEQ ID NO: 4115355 - RNA, 76 nt, Human
ugcucaagcuuguaauagauaggaucaaaugaguaauuaaucauuaauuuggcuucucuaauacuauagcuugaca

SEQ ID NO: 4115356 - RNA, 63 nt, Human
ugcucaauacuuaagcuuaauucuacuuuuacuugcuaagguggaauguagcaaguguuguca

SEQ ID NO: 4115357 - RNA, 59 nt, Human
ugcucacagcccagaacauaauaacuuuucuuuuauucugguacuauugcuguugagca

SEQ ID NO: 4115358 - RNA, 57 nt, Human
ugcucagacuagcuccagggaaggucugugucucuucccucagaugagcuccuagca

SEQ ID NO: 4115359 - RNA, 63 nt, Human
ugcucagcagucaaggucauagagccuggagucguccuagaaaauagacuuacugcuggggca

SEQ ID NO: 4115360 - RNA, 66 nt, Human
ugcucaggugccuuggcugcuguguucaaagcuagccuggacaaggacagcuccugcacuugagua

SEQ ID NO: 4115361 - RNA, 61 nt, Human
ugcuccaggagcacuuuccauucauacucuaggcccugguaaaauggaugcaccuagagca

SEQ ID NO: 4115362 - RNA, 75 nt, Human
ugcuccauaugagagaggaaagauuuuaaaauaugucuacauuuuaacuguuguauuauuuucuuuaugguugca

SEQ ID NO: 4115363 - RNA, 58 nt, Human
ugcucccgccccgacccugcagccagcgccuccccugugccaggcccgggugggugug

SEQ ID NO: 4115364 - RNA, 66 nt, Human
ugcuccuacucacuucuucccuugcacauaugggaugccauccugaugaaagggaaaaguggagca

SEQ ID NO: 4115365 - RNA, 65 nt, Human
ugcuccugccucuagaccuagguuggguuguucaggagcugggucuggaagcagaucagaaagca

SEQ ID NO: 4115366 - RNA, 95 nt, Human
ugcucuaugguaauaugcauguauacauguguaaacuagacagugaugucaaggauauaauagccuguacauaugcaaaguauaauucuagagua

SEQ ID NO: 4115367 - RNA, 130 nt, Human
ugcucuauuaguaaaaucauuuugaacaugcaccacagauaucugcguauuuauucacugaugauguuuaugcaauaguguguguguguguauuguuuacuguauuuauagugaaauuucuaauagaagg

SEQ ID NO: 4115368 - RNA, 127 nt, Human
uggcauuuauuuagcucacauuucugugagucaguuaguguuuaucuaaucuagacuagucuaggcuauuuuacuuugugaauauugacugggauuucuuaaauauuuguggguugacuaagaguca

SEQ ID NO: 4115369 - RNA, 72 nt, Human
uggcauuuggcuuacuuauguuuucuuacagucaauguaguaagcuggcugaaagcauggaagcuggugcca

SEQ ID NO: 4115370 - RNA, 59 nt, Human
uggccaaauuggccugauguauuuuaagcuuuuaucaugcaacauugccaguaugggca

SEQ ID NO: 4115371 - RNA, 64 nt, Human
uggccaaugaaguaggacugaacuugggggaauuuuccuucaacagacccuucuuucuuuccca

SEQ ID NO: 4115372 - RNA, 60 nt, Human
uggccaauggcuccggccucaugguuccucaaggaggccaggguaccaucaacauggccg

SEQ ID NO: 4115373 - RNA, 63 nt, Human
uggccacacugcccccacuggggucguuugcugaauucccaugaccuggcgggcacugggcca

SEQ ID NO: 4115374 - RNA, 91 nt, Human
uggccagaaaaggggccuuaaaagcccaccuaaccugcucaccuuauagauaaggccagagagggaggguggggaugcccagguucaguca

SEQ ID NO: 4115375 - RNA, 97 nt, Human
uggccagaaugaugcagucacuacucugcuuaauuaaaaccaggccuguguacgugguuuuaauuaagcagaguagugacugcaucacuagaggcca

SEQ ID NO: 4115376 - RNA, 77 nt, Human
uggccagacugucacaagacauugaguggcuuuugaaaaugagccauguuaaauggacuugauggggguuacaacca

SEQ ID NO: 4115377 - RNA, 66 nt, Human
uggccagaggcacagcuucuuuuaauauucagguuguuaguauuuggcgaagccugccucuuucca

SEQ ID NO: 4115378 - RNA, 59 nt, Human
uggccagcagaguucacucucuaccugauccuuuagagaaaagcugucccuguuggcca

SEQ ID NO: 4115379 - RNA, 64 nt, Human
uggccagcucuuguccacggaggggauuccuguguaaccucugugucagggaagagacuggcca

SEQ ID NO: 4115380 - RNA, 57 nt, Human
uggccagcuuugacuguaaaccuucuucuuccucugguucaaccugcagguuggcca

SEQ ID NO: 4115381 - RNA, 59 nt, Human
uggccagcuuuuuguagugcuccuucuggcucugggagaugugcugccagcggcugcca

SEQ ID NO: 4115382 - RNA, 64 nt, Human
uggccaggaucggacugggccugguccagucuuggcuccaggccacaaguuggguucaaggcca

SEQ ID NO: 4115383 - RNA, 80 nt, Human
uggccaggcacaucuggguggacagagggguuccagccacucacagagcccucucagucagagccagauaagccugggca

SEQ ID NO: 4115384 - RNA, 84 nt, Human
uggccaggcuuuaaccugcuuacugggagagcgaccagauucuuaaaacuaaggauccuacauccggugcacugaagcaagcca

SEQ ID NO: 4115385 - RNA, 66 nt, Human
uggccagggcacugccaggccacaacagcagccuuccccucccucugcuggcaaaugcuuuggcca

SEQ ID NO: 4115386 - RNA, 62 nt, Human
uggccaguguuuuuccugggcuggcauagccuuggucagcuagagcugagaagcacuugcca

SEQ ID NO: 4115387 - RNA, 79 nt, Human
uggccauagaccucagagucagcuagucuugggauuuggaucuuagaucuccugcucacugagcucaugaccuuggcua

SEQ ID NO: 4115388 - RNA, 55 nt, Human
uggccauaugaccaccuuugaucaaugaaaugugagcagaggugauauaugccca

SEQ ID NO: 4115389 - RNA, 79 nt, Human
uggccauuuucauuuuucccuggacagccuugccugggguacugccugcugccggugaggguugcuaggaaaccggcca

SEQ ID NO: 4115390 - RNA, 92 nt, Human
uggccauuuuggcaaauuuaaguuagaaagcaauaugcucuaguuaaauuucuaaaucuguugccugaccuggaccuuuagccaagggguua

SEQ ID NO: 4115391 - RNA, 65 nt, Human
uggcccagaagaaaaagcugguauuagaaccgaagaugucuaaugaaguauauuuuucuuagcca

SEQ ID NO: 4115392 - RNA, 77 nt, Human
uggcccagccagcccagcccucgaggcucgaugccugugccaaggccaggggcagccagagggcagcuggauggcca

SEQ ID NO: 4115393 - RNA, 56 nt, Human
uggcccgaccucugcucaugcaguauucaucugcacaccaggagccgucugggcca

SEQ ID NO: 4115394 - RNA, 88 nt, Human
uggcccucuggucucagagucucccccaguuugggcagcagauuccaagggcccaggagagacucuggagagcccagccaaagggcca

SEQ ID NO: 4115395 - RNA, 65 nt, Human
uggcccugguggcacagccugcuacacgccgaggcugugugucacagccugcugcuccagggcca

SEQ ID NO: 4115396 - RNA, 55 nt, Human
uggcccugugacugaguucuagugcaagaaauguaagcagaagugacaugggcca

SEQ ID NO: 4115397 - RNA, 65 nt, Human
uggcccuguggaggucagugagcuccugaagcaacccuucccuccuguccuuucacagugggcua

SEQ ID NO: 4115398 - RNA, 66 nt, Human
uggccgcccgggacgagcucggccucggcggggauucucuugaggccaugcccgugccggccgcca

SEQ ID NO: 4115399 - RNA, 73 nt, Human
uggccuaugcuuugcccucaggaguugugaucuguuuuaguaaagaccucaauucaauggcaaaguauuguca

SEQ ID NO: 4115400 - RNA, 109 nt, Human
uggcuuuuugugaaacugugccuuuuguuuucuguaggccuuuccugugcuucagcucccuggaaacuggcacugcagaaggaggcaaggguguuaaaacgaggaggca

SEQ ID NO: 4115401 - RNA, 70 nt, Human
ugggaaaaucagagaccggucaagucaugccuccaagaagggcuugaccagggugggcuuugugguccca

SEQ ID NO: 4115402 - RNA, 89 nt, Human
ugggaaacucaaaccuucugcuucacagccaaggccuggcaguccauucugccagcagcagugacagccgaaagcccuugaccauccca

SEQ ID NO: 4115403 - RNA, 78 nt, Human
ugggaaagauaaauuaugaccuguuucuagucgaggaaaaaauucaggcuaagaaaaauucauguauauuugaacuca

SEQ ID NO: 4115404 - RNA, 62 nt, Human
ugggaaagcaauuuguguaaucugugcucgugugcagaggacagaaccagauggcuuucgca

SEQ ID NO: 4115405 - RNA, 77 nt, Human
ugggaaaucugcuuccuagggcuguuagaaggaaauuggucuccuuaaauuacgucagcaucugaggcaguuuccua

SEQ ID NO: 4115406 - RNA, 63 nt, Human
ugggaaaugcugcauugggcaaaacagguuccuuaaacacaguacugcuuggagcauuuacca

SEQ ID NO: 4115407 - RNA, 67 nt, Human
ugggaaauguaaguauauguucugugugcauagaguaaaagaucuaugagucaucugcuacaaccca

SEQ ID NO: 4115408 - RNA, 71 nt, Human
ugggaaauucugggauauauuuagauucucugcucuuaacuggacaagaacaucuaaauaucugagaccca

SEQ ID NO: 4115409 - RNA, 101 nt, Human
ugggaacacuaacccagaccuguuugacuaccauccccaagggagacucaguuucuccaggugagggugguuagagaggcacuacugggugggggugccca

SEQ ID NO: 4115410 - RNA, 71 nt, Human
ugggaagcaguuucccagaagaauucaguggauggaugguauggauuccuuuggugaacugccgaggucca

SEQ ID NO: 4115411 - RNA, 71 nt, Human
ugggaaguagugggguagaguggaaaaagcaaggcugaucugaggacaaauucuagcucaucuacuuucca

SEQ ID NO: 4115412 - RNA, 107 nt, Human
ugggaagugucugggagccaugccuuggagugccucacugaucacaaagccauccaguguggccuuugauuccugggccccugguguccugcucacuuuacccccca

SEQ ID NO: 4115413 - RNA, 64 nt, Human
ugggaaguuagugaaccaguacaugcucauaccuuaggaaagcaaauacuuuucacugagccca

SEQ ID NO: 4115414 - RNA, 130 nt, Human
ugggaaucugggguauauaaauuguucucaagagggacuucuauuagagugaggaauguggaguuaaguccuggcucuucagagguuccuauggucuugagcaaguugucuaauucaguguuaauucuua

SEQ ID NO: 4115415 - RNA, 80 nt, Human
ugggaaugaaacagagauuuaauucaguuuauuccuuuuaagcaauugagugaaaccucuuuauuaguuuuccuuuccca

SEQ ID NO: 4115416 - RNA, 55 nt, Human
ugggaaugcaaggaaagcuguuucagaaaugaucuacagauuugaugcaauccca

SEQ ID NO: 4115417 - RNA, 65 nt, Human
ugggaaugcccugcuccaggagaauacccugcagaucugcggguggcuacgagacagggagccca

SEQ ID NO: 4115418 - RNA, 74 nt, Human
ugggaauggggccagcuggggaaucuccacucggagccccacccacaaccagcuggcugugcccauggcuccca

SEQ ID NO: 4115419 - RNA, 63 nt, Human
ugggaaugugauuagccucuacuggagcaaacccaaauuccuguucacauagucaaauucuca

SEQ ID NO: 4115420 - RNA, 60 nt, Human
ugggaauuauucauugguaggcaagcuaaauaggcgugccauucgaugugauaaggacua

SEQ ID NO: 4115421 - RNA, 96 nt, Human
ugggaauuuucagcauaagugccaagaauaguuuuacuuuucuauguggucaaagggacccaugcaacugugauuauucucuuuugcuuggaccua

SEQ ID NO: 4115422 - RNA, 56 nt, Human
ugggacacagaaaaggcagguuauaauacugcuuggaaccuugccguuugugcuua

SEQ ID NO: 4115423 - RNA, 68 nt, Human
ugggacagacaacuggacuaagaucacccagggccugagugaccuugggcaguuaucuaaccuuccca

SEQ ID NO: 4115424 - RNA, 64 nt, Human
ugggacaguuaccauaucuucacugucaacuauaacaugacaugaagaaaauaugauuacccca

SEQ ID NO: 4115425 - RNA, 99 nt, Human
ugggacauucaguccuuggucuacuagagaaaaagacuuagaaaucuaggcucuuaaagucugagugaagcuaagggcaaguacagaggggaugaccca

SEQ ID NO: 4115426 - RNA, 76 nt, Human
ugggacauuuugguaagagucacaaauuuagcuuguugcagaaggcaggacugaaaaugaguucuucuaaauccca

SEQ ID NO: 4115427 - RNA, 95 nt, Human
ugaacaagcuacugacaaaugugauuuuauugaaucccaacccucucuucuguagguuguccuggagguuaauagaguuacuucuagccaguuca

SEQ ID NO: 4115428 - RNA, 73 nt, Human
ugaacacaaauauuuugggguucuugauaauguaucugcaaguaaaauccacucacuccagaaguuguguuca

SEQ ID NO: 4115429 - RNA, 76 nt, Human
ugaacagagccuccugaauucuauaagcuuuaggccccacauaaccuucagcuauggagucuuaguuacucuguca

SEQ ID NO: 4115430 - RNA, 58 nt, Human
ugaacagcacaaugauaaggaaugacaauauguuuuacccuuucuggagugcuguuca

SEQ ID NO: 4115431 - RNA, 62 nt, Human
ugaacagugugagggugugaccaaggccuucagaagcaaggcucuccauccucugcucuuca

SEQ ID NO: 4115432 - RNA, 74 nt, Human
ugaacauacuugggcuuuauacuuagggacuuugauucaguagguccaggaugaagcccagugauuuuguuuca

SEQ ID NO: 4115433 - RNA, 57 nt, Human
ugaacauuuaugaugcaauaccuacugguuagcagguuuugcugaauggaugcuuca

SEQ ID NO: 4115434 - RNA, 57 nt, Human
ugaacccugaccucuggaaggagacuguauucaccaagucucccuaucaggaauuca

SEQ ID NO: 4115435 - RNA, 130 nt, Human
ugaacguuuccaaugacucgcugggccugucuacuuagaugucuuaacaaaguaaagucauaauccuuuuguucuggagauugagaaggcauugcugagagaugguuaaggagacaaaacugaggcuuca

SEQ ID NO: 4115436 - RNA, 57 nt, Human
ugaacguuuuuauggcuuuugguacauauuaccagauugcuuuccaaaagcguugca

SEQ ID NO: 4115437 - RNA, 65 nt, Human
ugaacuaauuccugcuuugggggaaguauacagcagcugugcucccagcuguaggaauguuuuca

SEQ ID NO: 4115438 - RNA, 86 nt, Human
ugaacuaggccgggcacaguggcucacaccuguaaucccagcacuuugggaggccaaggcagguggaucacgaagucaggaguucg

SEQ ID NO: 4115439 - RNA, 58 nt, Human
ugaacuauguaaugcauggguaguuauauggcgugcauuauauguauaacauaguuca

SEQ ID NO: 4115440 - RNA, 70 nt, Human
ugaacuguacaucccuaaccuaaaucagcuggagacaggggaagaaaguguuagauucuuacucaguuua

SEQ ID NO: 4115441 - RNA, 76 nt, Human
ugaacuuaucuggaccucaguauccuccauuguaaaagaugaauuacaagguuguucugaggauuuaagauaugca

SEQ ID NO: 4115442 - RNA, 93 nt, Human
ugaacuuccuacuauaaacauagcaagaucacauucuguauuguuuuauuuauaauuuuacauuuuaugauuuugcaguguagagggagcuua

SEQ ID NO: 4115443 - RNA, 129 nt, Human
ugaacuugggagcucaaaugauuugcccuccucagccuccaaagugcugugauuacaggcaugagucaccacacucggucugugccuuagacuuuagagucggaaagcuggauuugaauccuggcuuca

SEQ ID NO: 4115444 - RNA, 83 nt, Human
ugaacuuuuuuaaagauuaugaauuuuuguuaguguuuuauaaggucacagauaagaacucgugaucauuugaaaauuuguca

SEQ ID NO: 4115445 - RNA, 119 nt, Human
ugaagaaacaguucaaagaaacuauugcuuagacuauagcucacagugcuucaggugaaugcaacuaguaauuggaaguagugagacuauggacuaacgcuuucauuguaagcccuucg

SEQ ID NO: 4115446 - RNA, 69 nt, Human
ugaagaaagcgaguccauggaaaacugauaaucaagaagcuuuauuacuuccaggauugcuuauuuuua

SEQ ID NO: 4115447 - RNA, 62 nt, Human
ugaagaaucagauuggccugcgauaggucuccccauucugccugagcaggcacugauuuuca

SEQ ID NO: 4115448 - RNA, 81 nt, Human
ugaagacaugcacacauucccagagucuagaguuuaaauguucaagacaguuucuggauucugggcuguuugcauuuauca

SEQ ID NO: 4115449 - RNA, 86 nt, Human
ugaagacuguuggucaaggcagaauggaugccaagggacauuccaguucuucuucuggcauuuucuccuuugaguuuuugucuuca

SEQ ID NO: 4115450 - RNA, 57 nt, Human
ugaagaggccaaacuaucauugaagugggugucaaugagugauaguuuggccuuuca

SEQ ID NO: 4115451 - RNA, 78 nt, Human
ugaagagguaggcaugcuuaguauagacuggauauuuucuuggauauuaauuauuuacacaugagugucuguccuuca

SEQ ID NO: 4115452 - RNA, 59 nt, Human
ugaagagugcuugagauuuuaauguuggaaaacaagaugaaaauuuugcagucuuuuca

SEQ ID NO: 4115453 - RNA, 90 nt, Human
ugaagaguucugaaauaggugcugucugcccauaagucauccuucaaaccuuuguauuuacaggacagcuuggcauuuuucuucucuuca

SEQ ID NO: 4115454 - RNA, 99 nt, Human
ugaagauauaccaaauguagcaguuuauccucauaauggaauuauagacuuaaaauauuucccauauuauggggaaaaacugcaugugggguaucuaca

SEQ ID NO: 4115455 - RNA, 120 nt, Human
ugaagauauuuaaaguuacucuuuuaaaaaauaacaucauguggcuuaugugggccgaaaacaagauccuauucaagcuagaugacguuauuuuuucaggggcaauuuuuaauuucuuua

SEQ ID NO: 4115456 - RNA, 76 nt, Human
ugaagaugaagacaaagcagugcugugagaacacuuccaaaagugacuuaaaggaacuuacugcugccaucauuca

SEQ ID NO: 4115457 - RNA, 129 nt, Human
ugaagauuaauguuccuuacauguuaaguuuaggaaggauggcuuuuuccugcugacuacuuuuaugagauggcaugaauuuagcuuuccauuuugaacuuacuguuuauguacagugcauuuuguuca

SEQ ID NO: 4115458 - RNA, 56 nt, Human
ugaagauuuagaccucuuugcccuuuucuuggggccuuugagaguugggauuuuua

SEQ ID NO: 4115459 - RNA, 62 nt, Human
ugaagauuuggguccagguugcugaguuuaaugugaauucucagcaaaaugcaagauuuuca

SEQ ID NO: 4115460 - RNA, 62 nt, Human
ugaagcaccugcuugugacuagggauuuguuggggucccagcuaacaguggggggugauuca

SEQ ID NO: 4115461 - RNA, 73 nt, Human
ugaagcacuuucaagaucuuccaaaggauacauauuuuuuguuguuguucuuauauugacuugggagguuuua

SEQ ID NO: 4115462 - RNA, 57 nt, Human
ugaagcagcuuagaaaaaugaaauugggguugccuucuucauuuucagaguugagca

SEQ ID NO: 4115463 - RNA, 95 nt, Human
ugaagcaggauaaucgcuugaacucaggagguugcagugagccaagauggugucacugcacuccagccugggugacacagugagacuccgucuca

SEQ ID NO: 4115464 - RNA, 59 nt, Human
ugaagcagggaccuaugacgauggaaauuucugacaauuucaccccaauccuugcuuua

SEQ ID NO: 4115465 - RNA, 61 nt, Human
ugaagccaggaucacgauucuguuccuagcaccuggaacaaugucugcuauuuggcucuca

SEQ ID NO: 4115466 - RNA, 80 nt, Human
ugaagccgaggcagcccucucagacguacccuguguccaacucuccugugacauucuugagaagcggcugucucagcuca

SEQ ID NO: 4115467 - RNA, 92 nt, Human
ugaagcuauuauuucugaugaaguucacuuuguuuggauuuagaaaauccacucggagggaauguuuaccuuuccuuuaauaauaugcuuua

SEQ ID NO: 4115468 - RNA, 66 nt, Human
ugaaggacacauuuucuaacagggaucacuguguaaaaaaacuggugguagaaaaugugugcuuua

SEQ ID NO: 4115469 - RNA, 55 nt, Human
ugaaggagauuuuuagggaggccugguggcugugggacuucccauaucuucuuca

SEQ ID NO: 4115470 - RNA, 93 nt, Human
ugaaggaugccaguacuaaauugcaauagauaugcuugucgugcagacccagugaucugauaacaaccaugucuggcauguaguuaucuuuca

SEQ ID NO: 4115471 - RNA, 68 nt, Human
ugaaggcagaaagggaugugaguggggaaaugaggaguuuauucucacagucauuuacuuugccauca

SEQ ID NO: 4115472 - RNA, 69 nt, Human
ugaaggcauaaaucuugggaacaacccggcaccuaggcagcuguaacauuucccaagauuucuguauca

SEQ ID NO: 4115473 - RNA, 73 nt, Human
ugggaccuggagccagggaggcaaggccagcagagugucugcuggaggaguuuacuguggccccaagagcccg

SEQ ID NO: 4115474 - RNA, 59 nt, Human
ugggaccuuccugagagcagcucucaguagcagcuucuaccaucaggaaauugguucca

SEQ ID NO: 4115475 - RNA, 74 nt, Human
ugggacugagcccugccucuugucacugcuguguaucugauagcagcaaguguugugccugcaggcuugucuca

SEQ ID NO: 4115476 - RNA, 63 nt, Human
ugggacuuugcuucuccaaccugcucaucacacagaugaaggaauggaggaucagagcguuca

SEQ ID NO: 4115477 - RNA, 87 nt, Human
ugggagaacuacauauaggguagaacaggaaauuggcauaucaguugagucuggacucgauuuuccucuacccuguuguuuucacca

SEQ ID NO: 4115478 - RNA, 57 nt, Human
ugggagaagagaaauuacugcccuaacuccagggagagauuacacauuguucucccg

SEQ ID NO: 4115479 - RNA, 87 nt, Human
ugggagaaggaagcugccugggaugggaaaucuguccaguucugaggguggcuuuccuacuaccaguguacuuccagucuaacucca

SEQ ID NO: 4115480 - RNA, 58 nt, Human
ugggagagauaggcuucuggaccuuacuuugcuaccucuaaugcuuccucucauccca

SEQ ID NO: 4115481 - RNA, 63 nt, Human
ugggagaggcuuggaaguggcagaacugggauuugaauccagggcugucuccaaaggccccca

SEQ ID NO: 4115482 - RNA, 75 nt, Human
ugggagauagagagaaauggaggaggaugggauuugcugcagccaaucucuuguauuuccuuugacauucuccca

SEQ ID NO: 4115483 - RNA, 73 nt, Human
ugggagaugcaaagauaaaacagacgcaggcugcccuccaggagcucgugcucugaucugucugacaucccca

SEQ ID NO: 4115484 - RNA, 79 nt, Human
ugggagaugguguggaaguggcccugagcuuuccuuacugaaaggccagaaagcuggggcauuuauccacuaacuccca

SEQ ID NO: 4115485 - RNA, 59 nt, Human
ugggagccacguagugggaugaguugcugcacaaacuuuucacagcuagugagcuucua

SEQ ID NO: 4115486 - RNA, 65 nt, Human
ugggagccuggcaggccagagggacauucacauaucacaccugucuggcuauaugcuggcuucca

SEQ ID NO: 4115487 - RNA, 71 nt, Human
ugggagcuaauaaauuguagucauuaagagagggaccucuggagucaaugucuagaguuuuaagcuuacca

SEQ ID NO: 4115488 - RNA, 69 nt, Human
ugggagcucaucuguucccuugacuucucuuuuuccaguucuuuggcaaggccacaggugcaguucuua

SEQ ID NO: 4115489 - RNA, 60 nt, Human
ugggagcuccuucaagaccccaacaggcaggccuugccuguggaucuagagggggcccua

SEQ ID NO: 4115490 - RNA, 95 nt, Human
ugggagcugggggaugccaggugggaggaaagcagagauggaacaagaugcaaaaccaauaauucuccccguuccucucccugccccugcuguua

SEQ ID NO: 4115491 - RNA, 85 nt, Human
ugggaggagguguagaaauagugauuuguggcuaacaguuaagaggacauguuagaaguuaaucacuaauuuguuaccuuuccua

SEQ ID NO: 4115492 - RNA, 80 nt, Human
ugggaccccuaaaaaguggagggugauugccggcugucgugcacacggcuucucaauucucacccuccaaggaaagcccg

SEQ ID NO: 4115493 - RNA, 69 nt, Human
ugggacucucaggcuuugaauccagccaugaugcucugaggaagucaaguagccacauggagagaccca

SEQ ID NO: 4115494 - RNA, 68 nt, Human
ugggacugaaguuucuuaacaagggucuacuuuaucagucucccuccuuucuaggcuuccagcuccua

SEQ ID NO: 4115495 - RNA, 60 nt, Human
ugggacugcuuuagagagcucagagggucuucagauuucugggcccacuguagcauccca

SEQ ID NO: 4115496 - RNA, 76 nt, Human
ugggacuuuugguuagaauuguauuacauuuccaaauaccggaagaauuauugcaauacuagauauccucagccca

SEQ ID NO: 4115497 - RNA, 78 nt, Human
ugggagaacaagauugacggcuuugagugcuuuaccaagaagauagacaacagggcacucagcucaauuucucagcca

SEQ ID NO: 4115498 - RNA, 62 nt, Human
ugggagagaagggggcucgaguguccugggugccuucuauggaccaagcacuuucucgacca

SEQ ID NO: 4115499 - RNA, 61 nt, Human
ugggagagagaaaacguggcgcagcaccaauugacgucugucugucccuccaccucuccca

SEQ ID NO: 4115500 - RNA, 57 nt, Human
ugggagagcugauagaugagcuacuuuggacagagugguucacacugcauucugccg

SEQ ID NO: 4115501 - RNA, 88 nt, Human
ugggagaugaggguagcuggaucacggaggaacuugucaacaacauacugaggcauuuggacuugagcuagcaugccaucauuucuca

SEQ ID NO: 4115502 - RNA, 75 nt, Human
ugggagaugaucaacauguauuuaagaguuuacuaagugcuagggccugagaauacaauguugaaaacaguccua

SEQ ID NO: 4115503 - RNA, 83 nt, Human
ugggagcagcaucaacccucccgugucuacagacucagggguucugaacgcacagacgcagggagguggaagguggugcccca

SEQ ID NO: 4115504 - RNA, 67 nt, Human
ugggagcucagaaagggagguccccaacucagaaccgagcuaaccccuauuuucugagcaccuccca

SEQ ID NO: 4115505 - RNA, 92 nt, Human
ugggagcucugaagccagggugacccuucagcauuguccccaaauggagggaaguaggcugggcuugguuucccugcuucagccagucacca

SEQ ID NO: 4115506 - RNA, 60 nt, Human
ugggaggaucuggcucaggccuucuagucacaaaaggccucaaauguagccuuuuuccca

SEQ ID NO: 4115507 - RNA, 66 nt, Human
ugggaggcacugcucaguaauaguccuaucugucccacaacagacaggagugcugggcugcaccua

SEQ ID NO: 4115508 - RNA, 66 nt, Human
ugggaggccuaggaaggggauguaacuuuggauaaggcagcuuuccuuauccuagggcaaagccca

SEQ ID NO: 4115509 - RNA, 56 nt, Human
ugggaggugcacacaaggucuuguuggcugccccugcaggucccugucaccucuca

SEQ ID NO: 4115510 - RNA, 86 nt, Human
ugggagucagaggcaagagaagccagcuuuccuccucccaaaggaggaagauauggaagcugugcucucaggccucuggaaaccca

SEQ ID NO: 4115511 - RNA, 72 nt, Human
ugggaguccgugccuuuaguuucuucuguagcaugagccacaggacaaaaaucuggauggcaaguguuccca

SEQ ID NO: 4115512 - RNA, 118 nt, Human
ugggagucuauuacugagcaagucuauagaucacugggcaauaaauucagagaacguuccuuagcauucaucuaauuuggccauaguuuuaauuaaguguuucagcuaaugauuucca

SEQ ID NO: 4115513 - RNA, 63 nt, Human
ugggaguguuucacucacaggauugugcuuucuucuaagagccaggucuggugaacacucuca

SEQ ID NO: 4115514 - RNA, 75 nt, Human
ugggauaaagugccucagguccuggguggucacuacucaggaggcaggggcacuuuccuucaguacuccauccca

SEQ ID NO: 4115515 - RNA, 86 nt, Human
ugggauacaaggacugacagugauuggcacugauucagccuggccgaggugcucugaagaagccacucauuaguuccugccuccca

SEQ ID NO: 4115516 - RNA, 55 nt, Human
ugggaucaaagagugccaucaggacucucaaugaugagguauucuuugccuucca

SEQ ID NO: 4115517 - RNA, 72 nt, Human
ugggaucucaaucuuggcagcucauuaaaacagccugggaugauuuuauaggguagcuaggauugagaacca

SEQ ID NO: 4115518 - RNA, 77 nt, Human
ugggaugagaagaucuugguguauuuaacacauaagcuuuguuagaaaucaccucugaagaucauuucauuuucuca

SEQ ID NO: 4115519 - RNA, 63 nt, Human
ugggaugagcugcaucugggaaggguuuucuauggaagccaaaggugcaggccucaagcccca

SEQ ID NO: 4115520 - RNA, 72 nt, Human
ugggaugcuagcuuuuagucaacuguuuaaaaaauuauuaucuuuaacagcucuugaaagauuagcuuucua

SEQ ID NO: 4115521 - RNA, 65 nt, Human
ugggaugcuugaugggagcggguaggcauuugugccuucauucuguacuuuuauuuuggcacuca

SEQ ID NO: 4115522 - RNA, 57 nt, Human
ugggauggguagggaggaacucugaggagacuccagguucuucucuaguuaucuuca

SEQ ID NO: 4115523 - RNA, 70 nt, Human
ugggaugguuguugagggagaugaaaaucuuagacucugacugcaagucauaucuucuucaaaccacuca

SEQ ID NO: 4115524 - RNA, 82 nt, Human
ugggauguccuguggcuguauuuggccagagcuggaugcuccuggugaaaugccagccaaagcaggcgugugauuugcccca

SEQ ID NO: 4115525 - RNA, 77 nt, Human
ugggauguuuguucucaauagguguacuuaucccugcaauuuucaguucaccugucaaguccagcgcaacaguccca

SEQ ID NO: 4115526 - RNA, 78 nt, Human
ugggauuuuuggagaauccaucaaaaggcugguaucuucaaucacuccuccaccuuauugcuggcaccuucaauucca

SEQ ID NO: 4115527 - RNA, 60 nt, Human
ugggcaauggcucugauguuguugugacuucugaugucaccaccagaagagcuauucuca

SEQ ID NO: 4115528 - RNA, 58 nt, Human
ugggcacauguaaagcuggagaaaguguguaaauuuuuaacauuugaacauguggcca

SEQ ID NO: 4115529 - RNA, 77 nt, Human
ugggcaccuuggguuugugccaugguccaggggcagucuggacuuuccuggccagaggacaaagcuggauuggccua

SEQ ID NO: 4115530 - RNA, 62 nt, Human
ugggcacuauggcucugugcacacagguguugcaguauggagcagggccucccgagugccca

SEQ ID NO: 4115531 - RNA, 68 nt, Human
ugggcagccauggggcucagcugcacuaacaaacucugucuaguacagaaaaccucagggucucccca

SEQ ID NO: 4115532 - RNA, 80 nt, Human
ugggcagcucauucuagaguucauuucuugcguguuagaacuccuuacauucuugaagugaaguuuauuuugacuguuua

SEQ ID NO: 4115533 - RNA, 58 nt, Human
ugggcaggauaauaucucauguuuacaacuaacaaguuagauaucccuguccugccca

SEQ ID NO: 4115534 - RNA, 58 nt, Human
ugggcaugaguggacagagaaggcuauugugucauuuuuggaaacugcacugcuacca

SEQ ID NO: 4115535 - RNA, 61 nt, Human
ugggccaggaugugguucauuuuaaaauaccaguguuuuaggaagccuggaguccugccca

SEQ ID NO: 4115536 - RNA, 74 nt, Human
ugggccagguguaguggccacaccuauaaucccagcacuuugggaggccgaggcaggcuagucgcuugagccca

SEQ ID NO: 4115537 - RNA, 85 nt, Human
ugggcccacuguaucuuccuugaauuuacaaauucugcuucuaugaaaaagcagacaaaucguggaagacaccagugggcuacca

SEQ ID NO: 4115538 - RNA, 84 nt, Human
ugggcccccagugaauaucuuuguaugguucagcagguuguacaaaacuaguuagaugccaucaagggcuugcaguggggcuca

SEQ ID NO: 4115539 - RNA, 80 nt, Human
ugggccucccuagucucucucucuguaugucuuaaucuccucuucuuauaaggacacucaucagauuagauuagggccca

SEQ ID NO: 4115540 - RNA, 73 nt, Human
ugggccugcuggaaggaggccuggcagaugaagaugggcuucccauguugcacggccuucacagagcgcaccg

SEQ ID NO: 4115541 - RNA, 69 nt, Human
ugggccuggaucagugggagaugcugguuuuguaguuuaccacagcuggaggccccauuguccagccca

SEQ ID NO: 4115542 - RNA, 84 nt, Human
ugggcgggugucaguggggacaugggauaucagauccuagggcucccaugcugaccccuguguccuuggcagauaucccgccca

SEQ ID NO: 4115543 - RNA, 83 nt, Human
ugggcuacuugacgguuagggcauucuuucaugggaaugugaaaauagcuucucagaagaguccuguauccuugaguagguua

SEQ ID NO: 4115544 - RNA, 62 nt, Human
ugggcuagagaggggaaggaugugaugugagcagaugguucucacucauucuccucugucca

SEQ ID NO: 4115545 - RNA, 58 nt, Human
ugggcuagcagggaagagagacuuguuuuucucuuuuuuccugaccaguugcugccca

SEQ ID NO: 4115546 - RNA, 77 nt, Human
ugggcuaugauaaauagugcugccaugaguaucuguacacuaguuguacuaguggacucauuuuuuuucauggccca

SEQ ID NO: 4115547 - RNA, 67 nt, Human
ugggcucagccaagcccugaaggcaacaagauaccaucccuccugcccaaguguuuggcugagucca

SEQ ID NO: 4115548 - RNA, 61 nt, Human
ugggcucagccuucauguggccaaugaaaauugacauuuuccauaucccaagguuagccua

SEQ ID NO: 4115549 - RNA, 55 nt, Human
ugggcucagggucgaggacuuugcccaaagccaggucugccugauucagagccca

SEQ ID NO: 4115550 - RNA, 73 nt, Human
ugguagucacaacugggggcauuacuggcaucuaguggaugcugcuaauauucugcagugcacaggacaacca

SEQ ID NO: 4115551 - RNA, 85 nt, Human
ugguaguguccucauucuggguuuuugucuucuguguuuacugugacaugaagucauuuuuagaugaagguuaaacauuuugcca

SEQ ID NO: 4115552 - RNA, 63 nt, Human
ugguauaaaacuuuuuauugaaacuaccugugucguaaaacagggagagaaguuuugcuaccg

SEQ ID NO: 4115553 - RNA, 63 nt, Human
ugguauccuccagcuccugcuucugcgucuucgcgucggccacgcaggugcgguagguggcca

SEQ ID NO: 4115554 - RNA, 56 nt, Human
ugguauggguagcucugaaccucaaccaugaauuauuucagaguuuacucaaacug

SEQ ID NO: 4115555 - RNA, 74 nt, Human
ugguauuaguacuaaacagagaaccaauauauuaugccguagaguuuggcacucuguuuaguaagucauuacca

SEQ ID NO: 4115556 - RNA, 79 nt, Human
ugguauuaugagguguguucauugccugcuuaauaacacauuauuaggcagggcaugguggcucacuccuguaauccca

SEQ ID NO: 4115557 - RNA, 71 nt, Human
ugguauucugucauagcagcccagaauaacauauaugauuauauacuuguaaaggcuguuauugacuucca

SEQ ID NO: 4115558 - RNA, 66 nt, Human
ugguauuuguaucuggaccugacugacuccaagguaguguuaguuagaauaauacaaguaaaacca

SEQ ID NO: 4115559 - RNA, 77 nt, Human
uggucaaaguguaagagggacuagaaaugaguuucuggaacaucuacaguaauuccucuaucuuucuucaagagcca

SEQ ID NO: 4115560 - RNA, 76 nt, Human
uggucaagauggguguugugaugguuaauuuuaugugucaacuugacugagccacacaugcccagauuuuugguua

SEQ ID NO: 4115561 - RNA, 92 nt, Human
uggucaccaucucuuacgcagagaauuacuauggcagcuuuggcuuaugauccacaguuauucauuugugacaagagaaaaaccuggggcca

SEQ ID NO: 4115562 - RNA, 69 nt, Human
uggucagaaugugcuucuggcuguggucauagacgggugugagucagccccaggagacauacuuugcca

SEQ ID NO: 4115563 - RNA, 59 nt, Human
uggucagagcugugcaaggcugagggugugauuaaacuuucagcagagaggccuggcca

SEQ ID NO: 4115564 - RNA, 129 nt, Human
uggucagcuacaguccaucuguuaucaagaggccuggcugugugucuucauucaguuuauuaggcauuuacugagcacagccuacaugccagguucuucauuuuuugacacagggucuuguguugccca

SEQ ID NO: 4115565 - RNA, 65 nt, Human
uggucagcuguaucagaaauacaauguucauuucuacuguuguuuuuguucucuauagcuuccca

SEQ ID NO: 4115566 - RNA, 79 nt, Human
uggucaggcauggugcauguuuugcugggaauguuuaugcaaagaagccauuguuucagcaucaguacuaaucuggcca

SEQ ID NO: 4115567 - RNA, 71 nt, Human
uggucaguaggcaguuugaggacagggacagugucuccaucuugguauccucagugcuagccaacugccca

SEQ ID NO: 4115568 - RNA, 58 nt, Human
uggucaucuugaauuuccauucuauggagcugacaauaggauaggaaagagaagauca

SEQ ID NO: 4115569 - RNA, 70 nt, Human
ugguccaaauuugagagaaaggugauuuuuaagccuaaccccagcuuggauuuuccucguguuuguucua

SEQ ID NO: 4115570 - RNA, 75 nt, Human
ugguccagacacaauggcccagucagcaggagagggugauuuugacaucuucccuuaggugggccucugaggcca

SEQ ID NO: 4115571 - RNA, 95 nt, Human
ugguccaggccugguuacaaagugacaagcucugcugacagaguuugaacugguuagcagaaccagcagucaauuugcuaccaugcccacagcca

SEQ ID NO: 4115572 - RNA, 61 nt, Human
ugguccauggcauuuccgucacaucuuaauuggauguggacuuugaaauugucauggagca

SEQ ID NO: 4115573 - RNA, 82 nt, Human
uggucuaagcacuucgccaaugaaggcauucaaaagucuauagcuaccuuucaaagaccuuacuuggcaaagcuguagacca

SEQ ID NO: 4115574 - RNA, 69 nt, Human
uggucuaauggcuaaaccugaacuggucuauugaauaagaaaaggguauguucagguuugcuuuaucca

SEQ ID NO: 4115575 - RNA, 60 nt, Human
uggucucuuugcccaagcugcccaagccacuauaagcccucagcucugggaaagaggcca

SEQ ID NO: 4115576 - RNA, 61 nt, Human
uggucuuacuuagcauuauauuuccagugccagccacugggccggugcagaguaguugcca

SEQ ID NO: 4115577 - RNA, 71 nt, Human
uggucuucaugaauuuauauuauuagugacugagagaucaucauuaauauuaagguggauuuauaagaaca

SEQ ID NO: 4115578 - RNA, 93 nt, Human
uggucuugacacccuggccucaaucuguccuccagccucguccucccaaagugcugggaugacagacuugagccacugagacuguugagacca

SEQ ID NO: 4115579 - RNA, 67 nt, Human
uggucuuucauggauauucaguuuaaucaacuuauuaaagaaagcagagacacuacaugaaagacca

SEQ ID NO: 4115580 - RNA, 59 nt, Human
uggucuuuucuugugauauccuugccaggcuuuaguauuaggaugucucgaggagacua

SEQ ID NO: 4115581 - RNA, 58 nt, Human
uggugaacgagauggacaaaaccugucuguuaaccacuuuguccaccuguguucacca

SEQ ID NO: 4115582 - RNA, 58 nt, Human
uggugaauaguagcuucagacucaccuguugagagucugcuuuaucaagcauucacca

SEQ ID NO: 4115583 - RNA, 66 nt, Human
ugagacaguaauuguauaguuucuagguguuccccaucucaagauuuuguauguuaccuugccuca

SEQ ID NO: 4115584 - RNA, 63 nt, Human
ugagacauugccugacauuuuaauuuauauuuuucugauuacuaagaguugggcacuguuuca

SEQ ID NO: 4115585 - RNA, 62 nt, Human
ugagacccaguaagaagcuggcaccaggaaaagaguucugaaugcuguuucuggcugacuca

SEQ ID NO: 4115586 - RNA, 117 nt, Human
ugagacgcaagggguggggcacaguaaccuccugagggggcccaacagggaccccuggccaccaggggcugaaauguugggguugccucagaggugacaguggcuccccugaguccg

SEQ ID NO: 4115587 - RNA, 101 nt, Human
ugagacggagucucacacggucaccgaggcuggagugcaguggcgcgaucucggcucacugcaagcuccaccucccggguucacgcgauucucccaccuca

SEQ ID NO: 4115588 - RNA, 106 nt, Human
ugagacggagucuggcucugucgcccaggcuggagugcaguggugcagcgcaaucugggcucacugcaagcucagccucccggguucaugccauucuccugccuca

SEQ ID NO: 4115589 - RNA, 101 nt, Human
ugagacggagucuugccuugucacccaggcuggagugcaguggcgcgaucucggcucacugcaaucuccgccucccggguucaugccacucuccugccuca

SEQ ID NO: 4115590 - RNA, 63 nt, Human
ugagacugggcagcuuaaaccacagacauuuguuuucucacaguucuggaggcugcaagucca

SEQ ID NO: 4115591 - RNA, 67 nt, Human
ugagacugucacuugggaccugucaccucuagaccuggguucuugcaauggucccagguggcuuuca

SEQ ID NO: 4115592 - RNA, 80 nt, Human
ugagacuuaagacuuuacucuuuuucccccuuuggcagaggggaugagacuagagcuaaagcagcuaucuuguaaucuua

SEQ ID NO: 4115593 - RNA, 88 nt, Human
ugagagagacaaagcuggaggcauggauuaggccagagguccacaaaccguggccaccagguuagauccagccugcugucuauuuuua

SEQ ID NO: 4115594 - RNA, 81 nt, Human
ugagagagaguaaccagagcucuucagcacaggaucagacagcugguccuuacuagggugcuuugggcugcuguuucacca

SEQ ID NO: 4115595 - RNA, 103 nt, Human
ugagaggaggaccuggcuuuaaaaugcuccuggacuuuacuucuguuuaccugaggcgagcaugauuuuccacagcuuuuaaaugucuaguuccuccgcauca

SEQ ID NO: 4115596 - RNA, 67 nt, Human
ugagaggcagcagaacauggaagagaaacagaaugagagucccuaguucuaaaucuguuguccauua

SEQ ID NO: 4115597 - RNA, 72 nt, Human
ugagaggccauggcugugcaguggugaacuacuuagccaaccaucucuccgcugguuugccguggccuuuca

SEQ ID NO: 4115598 - RNA, 102 nt, Human
ugagagggagucucgcucugucaccaggcuggagugcagugguguguuaucugggcucacugcaaacuccgccucccagguucaagcaauucuccugccuca

SEQ ID NO: 4115599 - RNA, 57 nt, Human
ugagaguauauuauaugcagaguaguaagucaaaugcuuugcaucuauauguucuca

SEQ ID NO: 4115600 - RNA, 70 nt, Human
ugagaguuuaaaacgcuuguauuuaagguuuaauucuuaaucuuuuaaauuuagguguuuugauaccuca

SEQ ID NO: 4115601 - RNA, 58 nt, Human
ugagauaaggauguuauacucgugccacauguaauggcaugucugacacugugucuca

SEQ ID NO: 4115602 - RNA, 68 nt, Human
ugagauacacagagguaaagaugagggcaaguuugugggcucuggucucugguuccuuuuguauucca

SEQ ID NO: 4115603 - RNA, 89 nt, Human
ugagauaucacuucacacccacuaucauggcugaaaucaaaagacaguaaauacauguuggugaggauguggagaaacugaaacccuca

SEQ ID NO: 4115604 - RNA, 82 nt, Human
ugagauauucaauccagaaaguucugugaguuguucagcuuuuuugagcagaagauuggaacuuacugaauauagucucuca

SEQ ID NO: 4115605 - RNA, 69 nt, Human
ugagauccacuuaauuuuuuugcucuguaaauggauacaauuuaaaaauguauugaguucaguggcuca

SEQ ID NO: 4115606 - RNA, 96 nt, Human
ugagaucugcucaaggcugggugcaggagcucccgcagugguggggacaguaauucaccaucauuagcuccugcucaggucuaaggugacuucuca

SEQ ID NO: 4115607 - RNA, 56 nt, Human
ugagaugagauuucacuguccuccaggcuggaaugcaguggggcaaucauagcuca

SEQ ID NO: 4115608 - RNA, 81 nt, Human
ugagaugcacauugugcuguuauucauucuuuuuguuaacucaaaugacuuugaaaacuuaaauaacagcauguucgcuca

SEQ ID NO: 4115609 - RNA, 102 nt, Human
ugagauggaggcucacucuguugcccuggcuggagugcaguggccgcaaccucggcucacugcaaccuccgccuccuggguucaagugauucuccugccuca

SEQ ID NO: 4115610 - RNA, 103 nt, Human
ugagauggagucaggcucugucgcccaggcuggagagugcaguggcgugaucucagcucacugcaaccuccgccucccggguucaagcaauucuccugucuca

SEQ ID NO: 4115611 - RNA, 101 nt, Human
ugagauggagucucgcucuguugccuaggcuggaaugcaguggugccaucucggcucacuguaaacuccaccucccagguucaaacgauucuccugccuca

SEQ ID NO: 4115612 - RNA, 101 nt, Human
ugagauggagucucguccuguugcccaggcuggagugcaguggcacgaucucagcucacugcaauaucugcauccuggguucaagcgauucuccugccuca

SEQ ID NO: 4115613 - RNA, 59 nt, Human
ugagauggaguucugcucuuguugcccagacuggagugcaauggcacaaucuccacuca

SEQ ID NO: 4115614 - RNA, 100 nt, Human
ugagauggaguuucacucauugccuaggcuggaguguaguggccugaacuuggcucaccacaaccuccgccucccggguuuaagcgauucuccugccuca

SEQ ID NO: 4115615 - RNA, 58 nt, Human
ugagauggggucaugcuuugucacccagacuggaguauaguggcaugauccuagcuca

SEQ ID NO: 4115616 - RNA, 60 nt, Human
ugagaugggucaucagguuugguuggcauuuaaaacuuccuuccuccaugucccauuuca

SEQ ID NO: 4115617 - RNA, 78 nt, Human
ugagauucaguuuccucaucuguaaaaugagaauagucacaucuaccucacagaauaaauugagaagacuggagauca

SEQ ID NO: 4115618 - RNA, 76 nt, Human
ugagauugcaaguccuuugcaugcagggacaggguaucaugcucucugcauccccagggcucuccuuguaguguca

SEQ ID NO: 4115619 - RNA, 58 nt, Human
ugagauuucuaaacuuagccuagguuccaagaaucuacuugguuuugauagaaaucca

SEQ ID NO: 4115620 - RNA, 92 nt, Human
ugagauuuuggaggcguggcagucuuuggcaaugacaacuuuuggguuaucaccuugcaguggaugcuauaauguauugccccagacuuuca

SEQ ID NO: 4115621 - RNA, 75 nt, Human
ugagcaaggcucugcaaaaccuccaagucacccaaccucguuuggcuugucaagguucaggcagggcccuugcca

SEQ ID NO: 4115622 - RNA, 77 nt, Human
ugagcaauagucuuucaaaacgcucuguaugcaaauaauugcuuugucacagaucguuuuugagcuacuuauuguca

SEQ ID NO: 4115623 - RNA, 76 nt, Human
uggaugaugggacugagguauuaagauggcuugaagcuuuguuuaggcaacacuugcauuuuuuagucucagucca

SEQ ID NO: 4115624 - RNA, 89 nt, Human
uggaugcuccucaaaggcaagagcugcaucuaagccaugagagagucaaaauccucaggaacccaggcagguuuucuuuaggacaucua

SEQ ID NO: 4115625 - RNA, 125 nt, Human
uggauggauuucacucauaaaguuucuuuuauggaauucuaagggauuugcuggaagagauuucuaugugaaggucaaaaggaguaaauuauuuagcuuccagaagaggcagugguuacuauuca

SEQ ID NO: 4115626 - RNA, 118 nt, Human
uggauggggucccucagucgagacuuaugacccugguuguuaacuggccuuaagaauuucugucuuaaggccaauuaacaaccagggucauaagucucgacugagggacacuuauuua

SEQ ID NO: 4115627 - RNA, 64 nt, Human
uggauguagaccuuucuuugugauuaacagcuuuucuagucacucaaugaaaagucacugucca

SEQ ID NO: 4115628 - RNA, 62 nt, Human
uggauguggaugcagaugcagacguagaugcagauacagauguagauguagacacaggucua

SEQ ID NO: 4115629 - RNA, 78 nt, Human
uggaugugugugcugggagauagagggagguggcaacaggauucuccuugcuacccaguaugucacugcucacaucca

SEQ ID NO: 4115630 - RNA, 63 nt, Human
uggauuagagcuguuagugaagugcguauuauguguuaaguacuucauaaugacagccuuaca

SEQ ID NO: 4115631 - RNA, 90 nt, Human
uggauucaaacccaacauucuuuguacuuuuucucaccaccucucaaacaggaagguaggaagauagagcaaaguuuguggugauggcca

SEQ ID NO: 4115632 - RNA, 56 nt, Human
uggauucugcuccacacugauucauuucauuggaaugaaaguuggauuaggagcua

SEQ ID NO: 4115633 - RNA, 66 nt, Human
uggauucugggagagaguugauaaagggcacuauuaaaugaccaucacacaucucuucuaguacca

SEQ ID NO: 4115634 - RNA, 69 nt, Human
uggauugaaagcuugugguccccaauuuuccugagcugagcauucuggaagcaagcuuuuaaacaucua

SEQ ID NO: 4115635 - RNA, 67 nt, Human
uggcaaagcuccaaauggguggaaguggccagaaaugggcccagcuuccuccaucuggggcuugcua

SEQ ID NO: 4115636 - RNA, 59 nt, Human
uggcaaagugacucuugagcaugggugggggaagcccccacaugucugagucagugcca

SEQ ID NO: 4115637 - RNA, 130 nt, Human
uggcaaccuuuucccugaaacaaguuauuugaugagaagaaugaaaaccuuggcucaaaugguuguggaaacgucuaucaguugaccacgguuugauuuuggaaucuuuagucggcuugggaaugguaaa

SEQ ID NO: 4115638 - RNA, 79 nt, Human
uggcaacuauagcuuggcuacugcugauguuuauucaaggcccaaggggucuuuauucagcagguggugaguucugcca

SEQ ID NO: 4115639 - RNA, 79 nt, Human
uggugacauggcacuuugugugggaucaggggucagaagaguccauggcucuugucccauuugcagagauuuguuacua

SEQ ID NO: 4115640 - RNA, 99 nt, Human
uggugagagagaggggcagggagaccuacccaggacagauuugugcaaacccacaugcuggucucauuggguuagggagagcuggccuucucuuagcca

SEQ ID NO: 4115641 - RNA, 88 nt, Human
uggugagggaguccaggcccagggugcggcccuggcugggggaaaguucccgugcagcuccugcccugaggaugggcugcccucguug

SEQ ID NO: 4115642 - RNA, 59 nt, Human
uggugaggucauagagaacugucaggagauggucaucuggugucacugugucuucauca

SEQ ID NO: 4115643 - RNA, 64 nt, Human
uggugaguguuuggggggagugacuuuuaagcaccaaagagagcauucucuccaacauuuaaca

SEQ ID NO: 4115644 - RNA, 129 nt, Human
uggugaucaaaaguacgugcugcuggggaaaauagugggaaaguuaacaaagacagguuacauaacagcuaacagucacauuguucaacuuuuuuuuccugcuccaauuucucuuuugccauugcauua

SEQ ID NO: 4115645 - RNA, 65 nt, Human
uggugauggcuguuggguuuggagccagaaacgagggggcuagaacccagcucugccacuugcca

SEQ ID NO: 4115646 - RNA, 60 nt, Human
uggugauuuaugccaaacaccugauuuccuucuggggaucuggaauuuugguaugugcca

SEQ ID NO: 4115647 - RNA, 68 nt, Human
uggugcaaaacuaauugcgguuuuuggauuuaccuuuaauggcaagaccagcaauucuuuuugcacca

SEQ ID NO: 4115648 - RNA, 60 nt, Human
uggugcagagcagugucagagcaacgugguuugcucugcucuggaguggcuugugcacca

SEQ ID NO: 4115649 - RNA, 72 nt, Human
uggugcagugccugagggaguaagaguccuguuguuguaagauagugucuuacucccucaggcacaucucca

SEQ ID NO: 4115650 - RNA, 76 nt, Human
uggugccagcauuugcuucuggugggggcuucagggagcuuccacucaugacggaaggcaaagggcagcagcauca

SEQ ID NO: 4115651 - RNA, 79 nt, Human
uggugcucaauuguuuuacaguuccaugcaaagcgucuuuccccagauguugguacaaauugugaaaugcuauucacca

SEQ ID NO: 4115652 - RNA, 77 nt, Human
uggugcugagccuagcugucuccuguuugggaaaauaccaaaggugcaggacauucagugaaugggcagacagcuca

SEQ ID NO: 4115653 - RNA, 60 nt, Human
uggugcugccaggcuccugccaggcacucgggccaggcugcaggagcacugccagcacca

SEQ ID NO: 4115654 - RNA, 74 nt, Human
ugguggaaauauaacucugguaagacugauuugggauuuuauuuaauuugaagaaaguuuucuagauuuuacua

SEQ ID NO: 4115655 - RNA, 74 nt, Human
ugguggaauguucagucucaagagugauauaugaaaugcaagaauagauaugcuauagucugaaugugucccca

SEQ ID NO: 4115656 - RNA, 70 nt, Human
ugguggacacguucccaggcccucgcggggaucuguugaacccagggagcuuggagaacgggcagcauca

SEQ ID NO: 4115657 - RNA, 81 nt, Human
ugguggagaauagaaucaagacauugucauuuuauaauuagaaguaauauguaauagaagauguauuguauguuccuacua

SEQ ID NO: 4115658 - RNA, 73 nt, Human
ugguggagacagugauagagcccauuuugugccuagaauuuguaccaguguccuuguuauuacugcuccagca

SEQ ID NO: 4115659 - RNA, 58 nt, Human
ugguggaggcagugacacaguagcuuccaugugcucugggaacugacugccuucucca

SEQ ID NO: 4115660 - RNA, 57 nt, Human
ugguggaggcgcugcuggccaggcucaggcugcugcgaggucggcucuccuccauca

SEQ ID NO: 4115661 - RNA, 59 nt, Human
ugguggcagcaggagggccccucagaaaagggaugggcuugugguccccucugcccuca

SEQ ID NO: 4115662 - RNA, 86 nt, Human
ugguggcccuaccaguggacaugggugaggaagcaugcauuuuucagaagcuucuggcagcuauccucuggccauaagggaagcca

SEQ ID NO: 4115663 - RNA, 65 nt, Human
ugguggcugccaaaagcacugaaguauuagaccacaccucaaagcuuucugugcagugaacacua

SEQ ID NO: 4115664 - RNA, 64 nt, Human
uggugggaaauacggccagcugcagagugaauguccacuaagggggaaggcuguuuuuccacca

SEQ ID NO: 4115665 - RNA, 129 nt, Human
uggugggagaguaaaaagcucgguggauugccuuuggagaguuuguuaggggagacucuccccauaugggaaacacuccaagccagcaggccaguuucacacuguccaggcugcaguuaacucccauca

SEQ ID NO: 4115666 - RNA, 77 nt, Human
uggugggaggugguaccuggagugcaagucauuuugacuuauuuauaucucugcaguuuaagaaaucauccccauua

SEQ ID NO: 4115667 - RNA, 68 nt, Human
uggugggcagagcaagggaacucaagacagccauuguccacugcaagaucuugucucugccacaucca

SEQ ID NO: 4115668 - RNA, 60 nt, Human
ugguggggauucccucccuggccugaccucaaucccgccagcugcagucuauucccaccg

SEQ ID NO: 4115669 - RNA, 63 nt, Human
ugguggggcgaucggaaucgcaucgucaaaauacuaauuauuguugcauccaaagccccacca

SEQ ID NO: 4115670 - RNA, 57 nt, Human
ugguggguagagcucacuguagugggucuaucccaggcccagcugccucucccacca

SEQ ID NO: 4115671 - RNA, 55 nt, Human
ugguggugggaguggggagggugucuuguuuuugcaucuccaaaaccaaucacua

SEQ ID NO: 4115672 - RNA, 65 nt, Human
ugguguaaagucauaugcacagagcuauucaaaacauaaaaaagcuucaguauauaauuacacca

SEQ ID NO: 4115673 - RNA, 59 nt, Human
ugguguacucuguugacuaacacaugugagugugcuuguguucucacacagaugcagua

SEQ ID NO: 4115674 - RNA, 75 nt, Human
ugguguauaggaagcacuuaaagaauuuguugacucauucaccacuuugagccuagcuuccuuaucuguaaacca

SEQ ID NO: 4115675 - RNA, 63 nt, Human
uggugucugcacucccuggcguggucugcaggagacagaagcacccugggucugcugaugcca

SEQ ID NO: 4115676 - RNA, 85 nt, Human
uggugugacuucacuggugcagagaaccauugcaagacuuugccugaagaaaauuuucagugguaucuuuguaaaagucacccca

SEQ ID NO: 4115677 - RNA, 71 nt, Human
ugguguggugggcagugugucaguaucuucuuuuuguagaauggugaagaaauaugugcuugauuacagca

SEQ ID NO: 4115678 - RNA, 88 nt, Human
uggugugguuucccagccuggguacaggacuuggcagccucauuucucaauguccucuucugccucaggcccuggggaucuaaaacca

SEQ ID NO: 4115679 - RNA, 76 nt, Human
uggugugugcuguuugcaaccaaauauuagaaauauuauuuuucuucaguuugguaaauguaagaauaauacccca

SEQ ID NO: 4115680 - RNA, 89 nt, Human
ugguguuauuuuugucauguuuuguaaugucuaacuucuccaagggcacuggcaaaggagauguacagaagacaaaaggcagcuagcca

SEQ ID NO: 4115681 - RNA, 67 nt, Human
ugguguugacgccugucuccucccaacuuauggcauugaucaucuuuugguaggagccgggcuacca

SEQ ID NO: 4115682 - RNA, 71 nt, Human
ugguguugcuguuuucaaggcauucugggagaaacaccuucacaguugauugaaacacagcugccacacca

SEQ ID NO: 4115683 - RNA, 78 nt, Human
ugguguuuucaaaagcucucagaggauucugauggccugccaagguggagacuucuacuagagaccuugcagacacca

SEQ ID NO: 4115684 - RNA, 122 nt, Human
ugguuaguaucuauucccuauauaguaaacaaaauaauaauuuaauuuucacaguggucagaggccaucuuaggaacuauaugugaagguagaauuugugaacagggaaggaguaguagcua

SEQ ID NO: 4115685 - RNA, 55 nt, Human
ugguuaucagccagcgaagcucauugugaagaugagaucgcccagcugguaggca

SEQ ID NO: 4115686 - RNA, 67 nt, Human
ugguucaggcaggguguugcuggaaaccgaaaagaaaagucucuuccauaaaaugaugccugaacca

SEQ ID NO: 4115687 - RNA, 130 nt, Human
ugguucuagaacccauccuaggagcagguuuggauguuauggagucaggcaaugcuugcuugguauuccugucucauaaagcuuguagaguuugacuuccuccagauaguuucucacucuugguucauca

SEQ ID NO: 4115688 - RNA, 57 nt, Human
ugguucuccauucagcuuccugugggcugcugucuccaccggaaggggagggaacca

SEQ ID NO: 4115689 - RNA, 106 nt, Human
ugguucucuuuugaaaugcuugauuguacuuauugagcuaaacaagucuuggugacuguuguugauuugccucaaaaguuuuaaguccuggguuuucagacuacug

SEQ ID NO: 4115690 - RNA, 69 nt, Human
ugguucugcaggcuauacaagaagcaugaugccaacaucugcuucuggugaggccucaggaagcuucca

SEQ ID NO: 4115691 - RNA, 85 nt, Human
ugguucuuucuuuccacaaguguuuagagagggccuucuggaggccagcugcuguccuaggcacuguaaugaaaagaggaaacca

SEQ ID NO: 4115692 - RNA, 62 nt, Human
ugguucuuuuuuguaguaggugguguuucacaaggcgcuuaauuuucuauagaaaaguauca

SEQ ID NO: 4115693 - RNA, 109 nt, Human
ugguugagacagaguuucacucuuguugccuaggcuggagugcagugaugccaucuuggcuuacugcaaccucugccucccagguucaagugauucucugccucagcca

SEQ ID NO: 4115694 - RNA, 81 nt, Human
ugguugauuucuuuccccaucuccuaccauugaguuaggguucugguuuaggcuucuggugggagcaugacugaaaugcca

SEQ ID NO: 4115695 - RNA, 66 nt, Human
ugguugcuguggcuaaauauuuauugcuuuaagagguucugcuuuaauuagagucacaaguaacca

SEQ ID NO: 4115696 - RNA, 79 nt, Human
ugugaaucagaggcugcauuuuuauccagggcuucuggugacaguuuuaagcuggaugaacaaagcagacccugacaug

SEQ ID NO: 4115697 - RNA, 72 nt, Human
ugugaauucuuaaagauuaaauuuuauuuuaucucuauguagagguaggaaaccaaucuuuugggaggcaca

SEQ ID NO: 4115698 - RNA, 95 nt, Human
ugugacaaagcaaauugauggcagugauaggcuagugaugucauugugaugucaguccuccugcuuauccugcacaugcuugcuaauuuggaaca

SEQ ID NO: 4115699 - RNA, 71 nt, Human
ugugacagaacuauugacauuuuuauagcuugacaaaaauuaagcauaauuaaagugaaauauuuguugca

SEQ ID NO: 4115700 - RNA, 66 nt, Human
ugugacaggugcugggggcaguguguuauuuauagacacagagcccuuccuugcaccauggaagca

SEQ ID NO: 4115701 - RNA, 68 nt, Human
ugugacauuuuuacugaugagaguucuaguaacaguuaacucaaguuuucuccuacagaagagucaca

SEQ ID NO: 4115702 - RNA, 74 nt, Human
ugugaccaaacuguucucugugggauucugauuuaauucauggcauaucugaaagagaaaaguuauuaaucaca

SEQ ID NO: 4115703 - RNA, 55 nt, Human
ugugaccccugaaaauggcugcugccauuagguaauggccauggcgggggucaca

SEQ ID NO: 4115704 - RNA, 60 nt, Human
ugugaccuuuuguuuucagggauaaggauguuccuuucuuccuggcauagagagggcaca

SEQ ID NO: 4115705 - RNA, 60 nt, Human
ugugacuaucauucuaaacaucugaugaaaucaaauuucaguguuuggaaugguaguaca

SEQ ID NO: 4115706 - RNA, 69 nt, Human
ugugacuauuaggaggugcucaaaguguuauuuccagaaaacacacuucucccaucuccuguugucuca

SEQ ID NO: 4115707 - RNA, 113 nt, Human
ugugacucucaggcacuuagcaagugagucaacccaaaugaugacuccccauguacgccaccuggaugggccacacacgauugggugacucauaagugcuucugagagcaaca

SEQ ID NO: 4115708 - RNA, 73 nt, Human
ugugacuguauuacauauuuuugaaaacuacuccguggcauauuguuaggaaguuucagaaaaugcaggaaua

SEQ ID NO: 4115709 - RNA, 56 nt, Human
ugugacuugauguuugcaccagaaugaggccagaaugguguugacaucaaguuaua

SEQ ID NO: 4115710 - RNA, 71 nt, Human
ugugagaagggugaggcuuuuacaaguaaucaauauccuuaagcuugacuugaaaagucuauucaauuaca

SEQ ID NO: 4115711 - RNA, 94 nt, Human
ugugagacaaggguggccgggugcucuggaggugcuggggugguccccucacggccccucugagcuuacucugucuuccacacuuuguugagca

SEQ ID NO: 4115712 - RNA, 62 nt, Human
ugugagacaauuccucaguagacuucgugguucuaaaauacguuguuuugaauugucuuaca

SEQ ID NO: 4115713 - RNA, 58 nt, Human
ugugagagagugugauggagcacagucaugucaggcugaguaacauuuccucuccaca

SEQ ID NO: 4115714 - RNA, 70 nt, Human
ugugagagaugaggaggccaguaagagccugaugcuauccaggacucuuccuuccuuccuccaacucacg

SEQ ID NO: 4115715 - RNA, 76 nt, Human
ugugagagaugcacucccaggggagucaucugcuuucuccaggaauuagguaccccugggaggaguagucucucca

SEQ ID NO: 4115716 - RNA, 56 nt, Human
ugugagaguauaaucucucuguuucacaaaaugacagacagaacaacugcucucca

SEQ ID NO: 4115717 - RNA, 57 nt, Human
ugugagaucagugcaucagucaaagcaacucaguggcuuccuaaacugauuuccaca

SEQ ID NO: 4115718 - RNA, 56 nt, Human
ugugagaugcuaucuucaaagugcccagcaaaauacacuaugaaguuagcccucca

SEQ ID NO: 4115719 - RNA, 108 nt, Human
ugugagcuugcauugcaguaguuuaccaccaaggcaagaacugcaugcuaucuaaguuuaauugccuuuaaguauaacugcugcaagccuuaguaauuauaguucaca

SEQ ID NO: 4115720 - RNA, 55 nt, Human
ugugaggcaaagacaaagcagcaucuagaaggggcagcuuguuccuuugcuucca

SEQ ID NO: 4115721 - RNA, 82 nt, Human
ugugcauggcaggauguuugcuagcauuccuggccucuacccacuagaugccaguaacaccucgcagacuccaauuaugaca

SEQ ID NO: 4115722 - RNA, 93 nt, Human
ugugcauucaccuacuuggacauugggauuaaauacauggaauuccaggauccaugacuaggaaaccaguuuccaaguucuggagagugugua

SEQ ID NO: 4115723 - RNA, 79 nt, Human
ugugcauuucaugcagcuugaaguaagagaaaaauugaauagacccucuugccguauuuguacugcauuaugagacaca

SEQ ID NO: 4115724 - RNA, 82 nt, Human
ugugcauuuugugauccuggcugagguaacuaugaauaacucuguaaguaucuaguuauguaccucaccaagacacugcuca

SEQ ID NO: 4115725 - RNA, 79 nt, Human
ugugccaccacaauuagcugugugucuaucuccauuguuaacauccaaucaagcaacaggaaauagcugauuagguaca

SEQ ID NO: 4115726 - RNA, 129 nt, Human
ugugccagggacugggccaggcagaggcugggguauccguuaguaagaugggcacggucccucgcugccugcucugauuuuugccccagcucugagagcagauuaaugguauuguaaguccucauugua

SEQ ID NO: 4115727 - RNA, 55 nt, Human
ugugcccuucugaugcuuuccucuugguauuagcuacaaguaacagaagagcaca

SEQ ID NO: 4115728 - RNA, 79 nt, Human
ugugccgccugcgggaggggcugugcgaggggucacgggugagcuuguccuucuugucuugcccaaaucagcggggcca

SEQ ID NO: 4115729 - RNA, 56 nt, Human
ugugccuacugauagagccaagggcugauauccuaucuggcucugucgaaggcaca

SEQ ID NO: 4115730 - RNA, 62 nt, Human
ugugccugaagcugcauuccuaguugucuguugaccacuuguucaugagugucuuuggcaca

SEQ ID NO: 4115731 - RNA, 63 nt, Human
ugugccuggcauguagaaguuacuuaagauaaaagcucuagaguaaugaagauuuguugcaca

SEQ ID NO: 4115732 - RNA, 71 nt, Human
ugugccuucuucuuugaggaagaaagaacuuccuguucugauguauagguuucuucaaagaagaaggcaca

SEQ ID NO: 4115733 - RNA, 90 nt, Human
ugugcguaguuauguuacaauccaacaaaauuaccaugagagccuugcuucacagauaauuuaguuggauuugugaauuaaguagguaua

SEQ ID NO: 4115734 - RNA, 70 nt, Human
ugugcgucuaucuccugguacccuuccuagcaucaauucuguauuugcaggaguccaaucaggagacaca

SEQ ID NO: 4115735 - RNA, 91 nt, Human
ugugcuaagggaccauagcuaaagcaugacucaagaauuacucaguuuggagucugugagguuaugcuuucucuacuguuuccuaaguacg

SEQ ID NO: 4115736 - RNA, 110 nt, Human
ugugcuaagguuauucuauuucacaugccuuuuacucugcacucuggggcuuucucuugcugguguagaguguaggccuaaagugucaggaauuauugacuuuaggaaca

SEQ ID NO: 4115737 - RNA, 130 nt, Human
ugugcuaggugcugcauugguggccuuacauaguuuuuggcuuucacaguauccauuugagagaugaggaagugaagacuuggagaaguuaaguuacucuugaagguuguuacauagcuaggaagcagca

SEQ ID NO: 4115738 - RNA, 69 nt, Human
ugugcuccacacucccaguccuccaagucugaaaauaaaggucuccacugggaaguuuggagagacgca

SEQ ID NO: 4115739 - RNA, 94 nt, Human
ugugcucgggcagauggcccugccuggagcucccugucucccauuucuccaccuagaagggaagcugcuggguccaccuucccaaaagagcaca

SEQ ID NO: 4115740 - RNA, 63 nt, Human
ugugcucugaaagcccccaguagauaccuguucucccaggacuggggacucauucagagcaua

SEQ ID NO: 4115741 - RNA, 55 nt, Human
ugugcucuucuguuacuuguagcuaauaccaagaggaaagcaucagaagggcaca

SEQ ID NO: 4115742 - RNA, 64 nt, Human
ugugcugcucucagugacagccucuauaguuugggaagccuuguguccugggagccacagcaca

SEQ ID NO: 4115743 - RNA, 63 nt, Human
ugugcugcugucagagcaaugagguucagcaguuguggugacaaauuaguuuugacaagcuua

SEQ ID NO: 4115744 - RNA, 67 nt, Human
ugugcuuauuuuuguggcucuggaggaucuuucuaaugagauuuuccuccuggauacaaagggaaca

SEQ ID NO: 4115745 - RNA, 92 nt, Human
ugugcuuuagguaaagaaauuuccagacuuuuuccaggaaaccuauuuuucauuggcuaaagaccugggaucaaauucaugcuugaaauaca

SEQ ID NO: 4115746 - RNA, 73 nt, Human
ugugcuuuucuccaggaagguaugcugaccacgcuuaugaacagcaaccuggaucauggugaaaaauagcaua

SEQ ID NO: 4115747 - RNA, 101 nt, Human
uguggaacauugacuucauauugcuuuggugacagauuauagggagcguuuaucuagaagguguuuuguggucugucuacaaugauguaaacuguucugca

SEQ ID NO: 4115748 - RNA, 66 nt, Human
uguggaaggggccccaugaccagcccacugugagcucacacgugaugacugaggcuucuucacaca

SEQ ID NO: 4115749 - RNA, 80 nt, Human
uguggacaugagagaauguacaaagaguauagcuuugaguucuuuucauuuuaaggauuacuuuguguacccauguccca

SEQ ID NO: 4115750 - RNA, 77 nt, Human
uguggacuucucuuaagcauucgggacugcagcauuuuugagagcaugcagcauugaaauagcuaggcuugucuuca

SEQ ID NO: 4115751 - RNA, 74 nt, Human
uguggacuuuugagaaacugcugcuccaacacccccaccacguucagagcagcugguucccgagggcgucugca

SEQ ID NO: 4115752 - RNA, 118 nt, Human
uguggaguauguaaagaagguagguggugacagagcugaaaggcaguggguagugugaaguugcaucccucaccaaguugcuuuuugcuucucuuaucaggcuuucucauacuucuca

SEQ ID NO: 4115753 - RNA, 62 nt, Human
uguggagucgcuggcgaugcucuuuccuuccaaaccccaguauggcuucauugugcuccgca

SEQ ID NO: 4115754 - RNA, 60 nt, Human
uguggaugguuugagauaugcaaugugaauguuggauuccagacucuaaagcccuccaca

SEQ ID NO: 4115755 - RNA, 72 nt, Human
uguggcagaaggggcccaaggaugucagaccugagacucggguaccuggcagcucugagucccuucuucaug

SEQ ID NO: 4115756 - RNA, 65 nt, Human
uguggcaucauuuuggauaaacauugaaaauaucuaaaguguaaucuauucaggaugauggcaca

SEQ ID NO: 4115757 - RNA, 80 nt, Human
uguggcaucccagggagcggcccaucugugguccccccaaaaaaggggucuccacagcccagcugccaccuaugcucaca

SEQ ID NO: 4115758 - RNA, 70 nt, Human
uguggcaucuagggugacucugguauagcccuaugcccagcagaucucagugucucccuggauugccaua

SEQ ID NO: 4115759 - RNA, 63 nt, Human
uguggccagccacaggcaugguguucggucauccggaagaaagguccuguggcucagcccaca

SEQ ID NO: 4115760 - RNA, 61 nt, Human
uguggccauucuaugaucugcaggccagaguugcuucucuacugcaggguuagaggcucca

SEQ ID NO: 4115761 - RNA, 65 nt, Human
uguggcccagguuggagugcagugaugagaucauaacucacugcaaccuccagcuccugggcuca

SEQ ID NO: 4115762 - RNA, 77 nt, Human
uguggccccaugugguaccuucuguggauccaugugggauccugcaggggcugaggaaccacggagaaggggcugca

SEQ ID NO: 4115763 - RNA, 59 nt, Human
uguggccuggaguuugauguaggccaguggugucuggcuccuugcaccucuaggccaca

SEQ ID NO: 4115764 - RNA, 59 nt, Human
uguggccuggaguuugauguaggccaguggugucugguuccuugcaccucuaggccaca

SEQ ID NO: 4115765 - RNA, 73 nt, Human
uguggcucagcggagcucugcugugcuuuuaggauuacuguggcucagcggagcucugcacaaaggguccgcg

SEQ ID NO: 4115766 - RNA, 85 nt, Human
uguggcucagugcccaguagaaaacuugcucgagccuguuguucugugacaacggguguggguuuuuaacugccugcaagucaca

SEQ ID NO: 4115767 - RNA, 58 nt, Human
uguggcugugguuuucauaaaucaauaaaacuugauuuaugaaaacaaucaguaggca

SEQ ID NO: 4115768 - RNA, 60 nt, Human
uguggcuuccacgauggucaccugagacaaucuuuauuggugacaaugguaggaaucaua

SEQ ID NO: 4115769 - RNA, 70 nt, Human
uguggcuucccuguuugcugugccugucagcaaaacuggcuugaggaccgggaagcauagggaagaaaca

SEQ ID NO: 4115770 - RNA, 66 nt, Human
uguggcuuguuuggccugcagagugcuggaaaccuuucagagcucagagcugccaggcaggguacg

SEQ ID NO: 4115771 - RNA, 60 nt, Human
uggguauuauugcauguaucuucauaauaaaugaaugaggucaucaccaauauaugccca

SEQ ID NO: 4115772 - RNA, 81 nt, Human
uggguauuuuuaggaaauccagaugagcaaucauacuuuuuaucagaguaccuuaucuugggucuuauaaaaaaauacuca

SEQ ID NO: 4115773 - RNA, 65 nt, Human
ugggucacaggguggguugggcugggccaggaucaaugucccaggcuccugacucauucuacuua

SEQ ID NO: 4115774 - RNA, 59 nt, Human
ugggucagaucuggccaaugguucaccaguuaguggccuaaaggcuaggucugaacuca

SEQ ID NO: 4115775 - RNA, 71 nt, Human
ugggucaguuugggggccagccaaagaaagcuuucccacugcuugcugccuggaagaccccccaggacuca

SEQ ID NO: 4115776 - RNA, 56 nt, Human
ugggucauggucuaagggcgauguaccuggguggugcagagcucugcugaggccca

SEQ ID NO: 4115777 - RNA, 65 nt, Human
uggguccuugccaucuuggagugaccaaacugacaccaugggggcucuugugugcaaagggccca

SEQ ID NO: 4115778 - RNA, 107 nt, Human
ugggucuagagguaaaaugggauucauggggggcaggggucaaaggugaagcagaggucaggggugaaagagggcccucaaaguuaaaggugugguuuccagaguca

SEQ ID NO: 4115779 - RNA, 72 nt, Human
ugggucuggcaugcugagauggaggagcuuuguuaggugagcuaccuuuccagagggccugccuagaaccca

SEQ ID NO: 4115780 - RNA, 83 nt, Human
ugggucuucuaugucaugcuacagaguuugaauauguuagagacuugacauaaucacguuuguguauuacaaagaucauucca

SEQ ID NO: 4115781 - RNA, 118 nt, Human
uguggguguauuuauguaagugugagagugugaagaaagcaguaaaaucuccgugcgaggcuuuaaaaugacauauguagacaggcugcuuuuccuccgcacuacagauaugucuucg

SEQ ID NO: 4115782 - RNA, 116 nt, Human
uguggguuccauuucuuuaacuuguuaguacaguauacagagugccuugaaagaucucaucuuauacaaaauuaucuuuauuagugcuuguaucacuguguucauaagugcucaca

SEQ ID NO: 4115783 - RNA, 70 nt, Human
ugugguaugacagaaaauucagagcuaagaauaaaaaccugaaucuaugcacugagucugucaugcugca

SEQ ID NO: 4115784 - RNA, 62 nt, Human
uguggucauaaaacaaaguaaagcuaacaaagccacucagaagcuaaacuuaugugaccaca

SEQ ID NO: 4115785 - RNA, 71 nt, Human
ugugguguauuuuacauugggaaaugccucuauaauuauuuuccaauagauguguuuaaugugacauugca

SEQ ID NO: 4115786 - RNA, 59 nt, Human
ugugguuaaacaucaggaaugaaaaccucuaggaggauuugcacugguguuugagcaca

SEQ ID NO: 4115787 - RNA, 66 nt, Human
ugugguuaguacugaaugugcagguuguuccaaacaaaaagugccucaaaucauguacugaccaca

SEQ ID NO: 4115788 - RNA, 79 nt, Human
ugugguuauuuaguucaguaguccuucauuguaccucaagguugugaugaaauuuuaaugaauuaaguugaauagcuca

SEQ ID NO: 4115789 - RNA, 59 nt, Human
ugugguuuguaagcaaagcaaacauuuuuggaaauguuugcaaauuggacacaaccaca

SEQ ID NO: 4115790 - RNA, 69 nt, Human
uguguacaugagaaaucaacuuuugcuguguuauaucaugaaaaaguugauguuuuucauuaaugcaua

SEQ ID NO: 4115791 - RNA, 74 nt, Human
uguguagcaagaagggagaugggguucuauacacaauguuuugaaccuucacuugcuucauuugacaauacaca

SEQ ID NO: 4115792 - RNA, 57 nt, Human
uguguauacugggugccagacaucauucuaggugcagaggaggcaccagugaacaca

SEQ ID NO: 4115793 - RNA, 94 nt, Human
uguguauauaugugauguguauaugugugugucuauguaggcaugugcagguaugugcgugggcacacacauaugcacaucacauguaaacaua

SEQ ID NO: 4115794 - RNA, 64 nt, Human
uguguaugugcacauguguuugcguggguuuuuuuuccccaaaauacacaaugacacauauaua

SEQ ID NO: 4115795 - RNA, 61 nt, Human
uguguauuaccauuuuacagcugaggaaacugaggcuuagggaaguugaaugacaugcaca

SEQ ID NO: 4115796 - RNA, 57 nt, Human
ugugucaagacauuuagucauuuaauaaauaaauaugacuacuguguacuaggcaca

SEQ ID NO: 4115797 - RNA, 85 nt, Human
ugugucaaucccagaucuaccucuaugcaugaagguauuaagcaugcaugaugacuaagguggugaugguucagcgauugacgca

SEQ ID NO: 4115798 - RNA, 92 nt, Human
ugugucaugccaaauuauauuucccuuuuuguuugugucuagggagacuagacuggugaauuagggggaagucguagaccugugugaugaca

SEQ ID NO: 4115799 - RNA, 85 nt, Human
ugugucauuuaucaucagaagucaugggaugcacaauuauaggacccaggauugaguuaaucuuugagggauaaauuguggcaca

SEQ ID NO: 4115800 - RNA, 71 nt, Human
uguguccacucaggaaugcagaccaguccaaggugagguguuccagagccugucugugcuggguggacaca

SEQ ID NO: 4115801 - RNA, 63 nt, Human
ugugucccuuggaaccucagcucugacucgccacaggucacaugcugaggggucuauggcaua

SEQ ID NO: 4115802 - RNA, 57 nt, Human
uguguccugcaggugcugccugcauuuauugcugccugcauuuauugccaggacaca

SEQ ID NO: 4115803 - RNA, 66 nt, Human
uguguccuggugccacuagagaaugucugcuucaagcaggcaggacucuucugugggccgaacaca

SEQ ID NO: 4115804 - RNA, 68 nt, Human
uguguccuuucuuaagagugagaaacucuuucucauaaguucuccucacucuccagaacugggucaua

SEQ ID NO: 4115805 - RNA, 83 nt, Human
ugugucuaaaguuuagguuuggggguuagggagauguaaaaguguucacacuccagacacagacacuaugacuucaggacaua

SEQ ID NO: 4115806 - RNA, 93 nt, Human
ugugucucuugcaucugcugugggucuauauuuuacuggacacuccagaugcuauaucuuuggauccacaacugcaugcccacuaagaucaua

SEQ ID NO: 4115807 - RNA, 70 nt, Human
ugugucugagcuggggcagacagauuggugcaggguuucuuaaaaacaauuuuuugcuccaucagacaca

SEQ ID NO: 4115808 - RNA, 116 nt, Human
ugugucugcauguuccagagugugguuuuggaguucagacugccuagauuugaauccuggcucaagccccuguuagcucugugagucuaggcaaacucaugccauugcggaccuca

SEQ ID NO: 4115809 - RNA, 61 nt, Human
ugugucuguacaggugcauguucuuuuuauuucuuaaggccaacauuuguagucaggcaca

SEQ ID NO: 4115810 - RNA, 86 nt, Human
ugugucuugggugaagcguauguuuuuuaaaauccucauuucacaaaauaggaaguuaguaaauuaugugcaaaauugaggaaaca

SEQ ID NO: 4115811 - RNA, 80 nt, Human
ugugugacugauuuucaaaauguguuaaaugaaauauacuuucaagguccauuuauucaagaugagguucaugucauaua

SEQ ID NO: 4115812 - RNA, 123 nt, Human
ugugugagacuggaucugcauggauccuggguggcagauguuugcaccagcuaccaggggugggaggugcaguguguaauccaggaacuuuauaaaagggggauauccagugauccucaugua

SEQ ID NO: 4115813 - RNA, 80 nt, Human
ugugugauaaugggcacauaugcucauuaacaugcugucauaaacagcuguguuaaauguauuauguguucugugacaua

SEQ ID NO: 4115814 - RNA, 79 nt, Human
ugugugauguccuucggacaaaauucuuuuaaguugacaugcaggacaggaauuugagugcuguaggaaaaucaccaca

SEQ ID NO: 4115815 - RNA, 58 nt, Human
ugugugcacauacacauauauguauguacguacauauacaggugguauguguaaagca

SEQ ID NO: 4115816 - RNA, 56 nt, Human
ugugugcacaugauuugaaauggagauugcauacuaaauuuaacuauguguacaca

SEQ ID NO: 4115817 - RNA, 120 nt, Human
ugugugcaugcgagcugugcagcucaugugcacguccugugugagugcaccaccugugacauuaacugggugugcagagacacagcgcacaugagggccugcacaggccaugaccacaca

SEQ ID NO: 4115818 - RNA, 60 nt, Human
ugugugcuuuuucuggauucucauuaucuuuaauuuucuuguuccugggaaaggcauaca

SEQ ID NO: 4115819 - RNA, 78 nt, Human
uguguggacauggccucaaugcagcugcugccugggugucuuggaggcgcccaucggugcagagggcacaucuauaua

SEQ ID NO: 4115820 - RNA, 81 nt, Human
uguguggagcugcagagugaagaaaacaaacauuguauucuuuauauuguuuacacuaacuucauaaaagcauuucacaca

SEQ ID NO: 4115821 - RNA, 107 nt, Human
uguguggccuggugauucaguguccugugcggugcagcaugcaaguguggcugucucucuuucucagggcacugcagcaucaccuuaugacguuaaagguacgcaca

SEQ ID NO: 4115822 - RNA, 61 nt, Human
uguguggguaacaauccacaucaaaagugagcuuuacauugacuuggauuguuagacauca

SEQ ID NO: 4115823 - RNA, 77 nt, Human
uguguguaauggacagcuugcagagccacccuccuggugugccuugaagggaggcauucucagucuccauccaugca

SEQ ID NO: 4115824 - RNA, 75 nt, Human
ugugugugaaccauugagggcugaagggugaaaugacagaaggaagucuggaaagcuaagcuggugucauaugca

SEQ ID NO: 4115825 - RNA, 88 nt, Human
ugugugugaugagcuggcaguguauuguuagcugguugaauaugugaauggcaucggcuaacaugcaacugcugucuuauugcauaua

SEQ ID NO: 4115826 - RNA, 58 nt, Human
uguguguguagauaaguauaugaugucuuucugggacuauaugcuuaaucucacuaca

SEQ ID NO: 4115827 - RNA, 85 nt, Human
ugugugugugagggagacgguggagaugcugccguggccauacucagauuuggaaaggucaguuccacuuccaucaugccacaca

SEQ ID NO: 4115828 - RNA, 67 nt, Human
uguguguguguaaaaauccagagcccaucaaaagacaucugguuugcuuugguauuucacucacaua

SEQ ID NO: 4115829 - RNA, 60 nt, Human
uguguguguguguguauguguguguguauguuuguguguguauauguguacauacacaca

SEQ ID NO: 4115830 - RNA, 80 nt, Human
ugugugugugugugugugugugugguuuuacauugugaugcugucuuaguccauuagggccaccauaacaaaaugccaca

SEQ ID NO: 4115831 - RNA, 76 nt, Human
ugugugugugugugugugugugugugugcucagugucuuucuauuguguaugcagaaacaugcaaagaacucuaca

SEQ ID NO: 4115832 - RNA, 60 nt, Human
uguguguguuuccgaaugcaagcguguguauaagaguguguguguuaggaagggcacaca

SEQ ID NO: 4115833 - RNA, 58 nt, Human
uguguguucauccccucaacauuaauaaauuaauaaauguugaguggaugaacaaaca

SEQ ID NO: 4115834 - RNA, 69 nt, Human
uguguguucuaugguucagggugggaugugggaaggggaaggccaugcaccacccuccaggaacacaua

SEQ ID NO: 4115835 - RNA, 74 nt, Human
uguguuaccaacccugaagaaacuucuaagugggagaacuccccaggaggaugauuuuaagaggccggaacaca

SEQ ID NO: 4115836 - RNA, 79 nt, Human
uguguuacugacagccucuuugccuccagaguucaacuggagacagagaaaccagcuagaggcagagggagguaacacg

SEQ ID NO: 4115837 - RNA, 118 nt, Human
uguguuauuccuuggguguucugauuucauaugacagcuuuuucuaggauucaaaccauaaacauuuccucuagagacuguaaugagagguacaauuaucaacccaggggacuguaca

SEQ ID NO: 4115838 - RNA, 62 nt, Human
uguguucauucugugacaugcauguagcaugauaugcauacagcauauacagaaugaacaca

SEQ ID NO: 4115839 - RNA, 56 nt, Human
uguguucuuaaaagcagugauauuaacaugcuuguaaucagacuuuuaggaacaua

SEQ ID NO: 4115840 - RNA, 58 nt, Human
uguguucuugcccaggaguuugguuucuucucucugagcuccuggcacaguggaacca

SEQ ID NO: 4115841 - RNA, 96 nt, Human
uguguugauaugagugccaaugacagaaaaguguauaguuugugagaagucauuaagauuugugcauuucucugagugugugucauauuuaauaca

SEQ ID NO: 4115842 - RNA, 83 nt, Human
uguguugauuaugguugcaggacagagaggccucaacuacuuuugcuuuuaggagugcuuuaguucuugcaacuggaagcaca

SEQ ID NO: 4115843 - RNA, 74 nt, Human
uguguugggugcugaguuucaggaagaauaugggcccacccaguauuuggaaucugccuuaggaccuguccaca

SEQ ID NO: 4115844 - RNA, 63 nt, Human
uguguuguuuuaagcugcugcauuuguaguacuuuguuguagcagccauagggaagcaauaca

SEQ ID NO: 4115845 - RNA, 61 nt, Human
ugggugggaagguacacgggaaagaggauuuaagaaaaacuucacccaucuuacccacuca

SEQ ID NO: 4115846 - RNA, 59 nt, Human
ugggugguuuaugaguggguuuauggguggcccuccccagccucagacugagccaccca

SEQ ID NO: 4115847 - RNA, 55 nt, Human
ugggugugacugacuguguuucuggaugagauuaacauugaacuuggcacaccca

SEQ ID NO: 4115848 - RNA, 59 nt, Human
uggguguuuuacuuuagcuaaugcugcagagauaaugcagacagagaaaugaggcccca

SEQ ID NO: 4115849 - RNA, 122 nt, Human
uggguuaaaucuuguguagaaugcaugugcuagucagguuuuauggacuuucucugcauuuguauuguuauucagagcugaaaaagcugacccgggacugcagacuacuaaguuguggccca

SEQ ID NO: 4115850 - RNA, 55 nt, Human
uggguuacuuuauuucagggguuacagaaauucuccugaaauucucacuagcuua

SEQ ID NO: 4115851 - RNA, 65 nt, Human
uggguuagaagcaaggcaaaagaguuauccccauaaaagagaugacacugcaaguauuuaaccca

SEQ ID NO: 4115852 - RNA, 68 nt, Human
uggguuccuaacugcccugggcaagguucuaccaauagacacucauguuuccaggcaguggcuaccca

SEQ ID NO: 4115853 - RNA, 68 nt, Human
uggguucuagcaccacauuaaauagcaacaaccuagugguaaugcuauaaaguagaugggugaaccca

SEQ ID NO: 4115854 - RNA, 71 nt, Human
uggguugaauguuagcugugcuuuaaguucuuugagaaaucuccaaacugcuuuccacaguggcuaaccua

SEQ ID NO: 4115855 - RNA, 78 nt, Human
uggguugggacaaaaguaauugcaguuuuugccauugaaaguaaugguaaaaaccgcaauuacauuugcaccaaccua

SEQ ID NO: 4115856 - RNA, 59 nt, Human
uggguuggggccguccugggcccugcagggugcugagcagaguccauggccuccaccca

SEQ ID NO: 4115857 - RNA, 71 nt, Human
uggguuuagcccaccacccugcuccccaucaggaaauccaugggcagcaaagacugugugcucuaaaucca

SEQ ID NO: 4115858 - RNA, 83 nt, Human
uggguuugguggaaucuggggacuccucagagcaaagcaggggccuuugcucugucagggccucagucuccuccccaucccca

SEQ ID NO: 4115859 - RNA, 56 nt, Human
uggguuuuagucauaucucuauuuaccagugccuggcacagaguggcuaaggcuca

SEQ ID NO: 4115860 - RNA, 69 nt, Human
ugguaaaagcaggucccagaaaguuaauucuuuauaauugaggaaguaacuaagggacuugcaauucca

SEQ ID NO: 4115861 - RNA, 58 nt, Human
ugguaaaagugggacuuguguuuaucauuucucaaugagcacaguccuauguuuauca

SEQ ID NO: 4115862 - RNA, 83 nt, Human
ugguaaaauauauaugaagaagucuugauuacgugaagaucacuugacucagaauacuucaauguauuuuguucacauuacca

SEQ ID NO: 4115863 - RNA, 57 nt, Human
ugguaaaaugacacuaaacauagccccucagggcagguguggaguguuauuuuagca

SEQ ID NO: 4115864 - RNA, 112 nt, Human
ugguaaaugacaguaccucuucuucauucagcaaggcaugugcaggaggcgaugucugagcagugcuccaagccccauagcuaaaguggaugaggagagguucaauuugcca

SEQ ID NO: 4115865 - RNA, 63 nt, Human
ugguaaaugcuccaagcaguacuguguuuaaggaaccuguuuugcccaaugcagcauuuccca

SEQ ID NO: 4115866 - RNA, 125 nt, Human
ugguaaccagagcuccacuaaucaaacuucuggcucugcccuuaggaaggcucaccaagugcuugugggcagucuuauugggccuguagucgauuucuuugaucagucuggacuuguaaagacca

SEQ ID NO: 4115867 - RNA, 102 nt, Human
ugguaagggacaaaacaaacccugggacucggaugcuggaaaaaucauuugcuuuuaauagaguugauccuuuucauagguuuacccauuuggucuuugcua

SEQ ID NO: 4115868 - RNA, 68 nt, Human
ugguaagucaggcauguguacucuuugaugauguugguacgaaauccagaagcauguguaauuugcca

SEQ ID NO: 4115869 - RNA, 98 nt, Human
ugguaauauauuugagagaggacuuugugguacauuagugcuacuuggggacagcuagguguaugaacuacagugcauuuucuuaagcuguaugucca

SEQ ID NO: 4115870 - RNA, 56 nt, Human
ugguaauuacaaggagucggguaauuccuuugaaauccaucuugauguaauagcca

SEQ ID NO: 4115871 - RNA, 77 nt, Human
ugguacaacugaacauaauuaaauguccugggugguuccugaucuuucagggcucaagguuaucuuuagugacauca

SEQ ID NO: 4115872 - RNA, 94 nt, Human
ugguaccacccuaccucugcugccaccagaaccacuuuuaucuguuucuuauuuggagucucuguaguggagaagaguauaggcuguggagcca

SEQ ID NO: 4115873 - RNA, 91 nt, Human
ugguaccuggcucagugugaaugcucaguaaauguuaucuccuacuaaaucuugcauaaaugaguuuuuugcuggauacgacagaguacca

SEQ ID NO: 4115874 - RNA, 61 nt, Human
ugguagagucaggacggcaauucugggauuccugaugccagacuuacuguuuugucugcca

SEQ ID NO: 4115875 - RNA, 91 nt, Human
ugguagcaaaaguaaaagaacagcauaaguauuuauuucagccaucagcacugauuugcaaugauuugugcuuuugguauucuugcuucca

SEQ ID NO: 4115876 - RNA, 65 nt, Human
ugguaggagcagggguaggaugagccagagaaagcuggagccuggcuucugccccauucucucca

SEQ ID NO: 4115877 - RNA, 109 nt, Human
ugguaggcuugauaaaguacagauuccuuggacccacucccagaauugcugauuuaguaagucuggugugggauccaauaauuuguauuauauuuuuaguaaguuucca

SEQ ID NO: 4115878 - RNA, 64 nt, Human
ugguagguaaaugagacuggaggggaacaagugacaaaucuuacaagguccugaaugccugcua

SEQ ID NO: 4115879 - RNA, 63 nt, Human
ugguaguggauguucagagauuugaacccaggugucuggcuucagagucugugcauucugcua

SEQ ID NO: 4115880 - RNA, 127 nt, Human
ugguaguucucaacagcaccgaagaugcuccauugaccugauuguuccuggaauucauuauaaaagaaagauaaggauaauuuuccugggauuauugucaagcaucugauuguguaagcaacuacca

SEQ ID NO: 4115881 - RNA, 80 nt, Human
ugguauauguuaagcaaaggaaagcugacuuuuccugauagggaugagucaguuuccuucugcaucaagauguuuauaca

SEQ ID NO: 4115882 - RNA, 84 nt, Human
ugguaucugugacaagaaacauggguacagucuaugcauuugagaaucucaguguuuauggaacccugguggucacacgugcca

SEQ ID NO: 4115883 - RNA, 79 nt, Human
ugguaugaaaagggcucuguugccauuucagguugauaaacacugagggaagggguacauggcuccuugacauguucca

SEQ ID NO: 4115884 - RNA, 82 nt, Human
uggucaaggucacccaguaagucaguggcaaagcugggaauacaacccagacuuucugacucccuugcccauccccugacca

SEQ ID NO: 4115885 - RNA, 84 nt, Human
uggucacuuucaaauagguuuacuuuggacuggcgagauuuuuaaaaaauucucagcuuucaaauagacacgugaaugaugcca

SEQ ID NO: 4115886 - RNA, 57 nt, Human
uggucagcauucuuccuauaaacgggcgauuguacgcuguacaagaaugacugagca

SEQ ID NO: 4115887 - RNA, 89 nt, Human
uggucagccuuccaggaccugucuggaaugaaaagggaggaauaaaaacuuauuuucguuuauuugacauguaaggaaaagaaugauua

SEQ ID NO: 4115888 - RNA, 65 nt, Human
uggucagguaccucuggcugucccucucaccuucuuguggguuaccaggcagaggaugcugacca

SEQ ID NO: 4115889 - RNA, 61 nt, Human
uggucagucccaucucccagguggcucuccacugaguaccugggcuuugcuggaugaucca

SEQ ID NO: 4115890 - RNA, 63 nt, Human
uggucauauuaccccacuucucgcaaucuguucuugcaucuguaaaaugggguaguguuacca

SEQ ID NO: 4115891 - RNA, 56 nt, Human
uggucauucaaauuaagauuuuguuagauuucuggcaucuuggauuuggaagacca

SEQ ID NO: 4115892 - RNA, 88 nt, Human
uggucauuugcaagagauaaauguuuccuuuaccucauuaauucacaucuuucggcauagaaaauacgcauuauccuugcaguuacca

SEQ ID NO: 4115893 - RNA, 67 nt, Human
uggucccuccuggauggauuugguggagccuccuucauggguuccuauagaauccuccagaggguca

SEQ ID NO: 4115894 - RNA, 73 nt, Human
uggucccugauagauagucaccucccuuaacuuuuuggaaaaauacaguuauagucagggcuaauguggacca

SEQ ID NO: 4115895 - RNA, 63 nt, Human
ugguccugaucaccgcugggcacagaggcaauggauccugagccuagcugagcaucagaacca

SEQ ID NO: 4115896 - RNA, 57 nt, Human
ugguccuggccuugaccccaggccuggaggcuugcaauggcacuggggccaggacca

SEQ ID NO: 4115897 - RNA, 84 nt, Human
ugguccugguggcauuggcaguugacauauauuauugguauuaauugcagcagauguagcggcagcuguuuuuccaucaggcua

SEQ ID NO: 4115898 - RNA, 94 nt, Human
ugguccugucaguuuucacuagguugggagucagaagucucaggcuuuugagcaggcacugacaauucuggacugcuggaucuugacuaggcca

SEQ ID NO: 4115899 - RNA, 60 nt, Human
ugguccuuguaggcauuugagcugacaaccccugguucaaagcacauccuaacgaggcca

SEQ ID NO: 4115900 - RNA, 89 nt, Human
uggucuaauuccagcugaggauuuaaugggacucauucugacaagauauaggauauugucccaauagaugcucauuuggaaaugggcca

SEQ ID NO: 4115901 - RNA, 56 nt, Human
uggucuacagcaguuacacacaggcagugguaucugugagcagcucuguggacuca

SEQ ID NO: 4115902 - RNA, 71 nt, Human
uggucucggacaggguuugcaaggacuucggagcuaaccaguuuggagccauaacccuuucguacuugcca

SEQ ID NO: 4115903 - RNA, 61 nt, Human
uggucucucuccugcaacaacucacuuucaaucuauuaccagucuguugccagagcgauca

SEQ ID NO: 4115904 - RNA, 60 nt, Human
uggucucugcugcagcuucucaacccuguccuugcagcauagaaguggcugcagacacua

SEQ ID NO: 4115905 - RNA, 64 nt, Human
uggucugccauuuccuacucugauaucuuauaaauauaagauauccuuuucggaagagcagcca

SEQ ID NO: 4115906 - RNA, 64 nt, Human
uggucugcuggcagaauuucuucuugcucaggguagagcgagguuuguucuauucaguacuuca

SEQ ID NO: 4115907 - RNA, 65 nt, Human
uggucuuagcuacaaucacuguccuuugcucuuuucuccaagcaugacugauuccuguagcacca

SEQ ID NO: 4115908 - RNA, 77 nt, Human
uggucuuaguccugagcugucuuaaugguuggagaagccaccucucaccagcugaacugcagcccagggaugaucca

SEQ ID NO: 4115909 - RNA, 60 nt, Human
uggucuucugacuccugccgggcucccauuggccaagcccagcuggaaguuagaggacca

SEQ ID NO: 4115910 - RNA, 59 nt, Human
uggucuuuaagguagcugucauggaaauaaacaccaucaugccugcuuuuaaaggcuca

SEQ ID NO: 4115911 - RNA, 90 nt, Human
ugauuuuguaucuugagacuuugcuguauuugcuuaucaacuuaagaagcuuuugggcugagacgauggggucuucuagauauaggauca

SEQ ID NO: 4115912 - RNA, 88 nt, Human
ugcaaaaaucugucuauggagaauaaauauagggacauuuuguuuuaaaugcucucugucguuaugcuucauuagcauauauguugua

SEQ ID NO: 4115913 - RNA, 56 nt, Human
ugcaaaaggcucuucaaaauggaagccacugugguuucuguuguauggcuucugca

SEQ ID NO: 4115914 - RNA, 60 nt, Human
ugcaaaaugacuucugaaaagagucaacaucuaugaugcuguaacagauaucauuuagca

SEQ ID NO: 4115915 - RNA, 55 nt, Human
ugcaaacaucaauggccugagcauuguguauuauuaaccucagagcauguuugca

SEQ ID NO: 4115916 - RNA, 81 nt, Human
ugcaaacggggucccucucugugucaguuucuaauggagagcgagcugacagugcauggagggacucugccaagauuugca

SEQ ID NO: 4115917 - RNA, 90 nt, Human
ugcaaacucccaacaguguguuuuguuauuaagagagaaauuuggugguuuuggcuuugaugaggaagcaacugggagggagagaaugca

SEQ ID NO: 4115918 - RNA, 89 nt, Human
ugcaaagagagcuugccuaggcccagcuucagcacacaauuggagauuagaacuaggugccuggaacuggguaggcuggcacucaggca

SEQ ID NO: 4115919 - RNA, 64 nt, Human
ugcaaagcagcacccagagccaugucugcagccgcugcagcgugggagagggggcuguugagca

SEQ ID NO: 4115920 - RNA, 62 nt, Human
uguccagcauuuaggcuugcugauauguccuugaccuucucauugauucugaauccuggaca

SEQ ID NO: 4115921 - RNA, 56 nt, Human
uguccagccggcccacgcccaucuucucgaagagcacgguggguuuggcuggcacg

SEQ ID NO: 4115922 - RNA, 57 nt, Human
uguccaggcggccuugccuguugaacauaucgcuugaccagcacugcuuccuggaua

SEQ ID NO: 4115923 - RNA, 75 nt, Human
uguccagggcaggaagagguaucaccgagcagggagagagucacccuggcccggaagccucgccugcacagggca

SEQ ID NO: 4115924 - RNA, 65 nt, Human
uguccaguccuuggggugcuguccucuggaaggcgucugcagccaagaccccaagaacuggcaca

SEQ ID NO: 4115925 - RNA, 62 nt, Human
ugcuaugcuuucuccugucugaaagauuacaccaagauuguucagaaauggggaaaggagca

SEQ ID NO: 4115926 - RNA, 59 nt, Human
ugcuauguaacacagaaaugaaauuccacaagaucuugugguucucuguguuacauuca

SEQ ID NO: 4115927 - RNA, 55 nt, Human
ugcuaugucucacucccuagucagauuauagauuucuagaggggagauacuagua

SEQ ID NO: 4115928 - RNA, 60 nt, Human
ugcuaugugacugcuucagauugccaugcgguuuuaaaucuggacacaguucucaugcca

SEQ ID NO: 4115929 - RNA, 66 nt, Human
ugcuauguugccuaguguaauaucgcuugauauaguguucauaguaguuacucuggcauuauagua

SEQ ID NO: 4115930 - RNA, 56 nt, Human
ugcuauucugauuccuuugguugggugacaguuuccaggagggaccuggauuggcg

SEQ ID NO: 4115931 - RNA, 57 nt, Human
ugcuauugacacuuuuuguguagccuugagagaagaguaugaauuguguuaguagca

SEQ ID NO: 4115932 - RNA, 57 nt, Human
ugcuauugugaacagugccacaauaaacauaugugugcaugugucuuuauaguagca

SEQ ID NO: 4115933 - RNA, 78 nt, Human
ugcuauugugaauaaugcugcaauaaacauaugugugcaugugucuuuauagcagcaugauuuauaguccuuugggua

SEQ ID NO: 4115934 - RNA, 57 nt, Human
ugcuauugugaauagugccacaauaaacacaugugugcaugugucuuuacaguagca

SEQ ID NO: 4115935 - RNA, 57 nt, Human
ugcuauugugaauagugccgcaauaagcauacgugugcaugugucuuuacaguagca

SEQ ID NO: 4115936 - RNA, 76 nt, Human
ugcuauuuuaagauucuuauuagguaauuuucuugugguaaaaaggcuuugcuugacuuaagaauccacugaagca

SEQ ID NO: 4115937 - RNA, 101 nt, Human
ugcucacguacauagcuauauauuguuuaaaauaaacagggaccuuauguuauguccauugugauuauauacaaaagcguugcugugugcucgggugagca

SEQ ID NO: 4115938 - RNA, 59 nt, Human
ugcucaggacaguggaaccuaauucccagaaccucugguuguggaggcugaccugggca

SEQ ID NO: 4115939 - RNA, 56 nt, Human
ugcucaguagaguuuuuggaauaaguauuucauauuuuggaaucauuuacagagca

SEQ ID NO: 4115940 - RNA, 58 nt, Human
ugcucaguagcagugugcugcucauggcuauuguauucagcagcauuguucuagagca

SEQ ID NO: 4115941 - RNA, 58 nt, Human
ugcucagugcagugaaagguuuacugagcuacaaauuaguaaacugucugcuugagca

SEQ ID NO: 4115942 - RNA, 78 nt, Human
ugcucaguuuccuggauaagaugagaaaaaacauugggccucuugggcaguguuccacacaucuggggaagcugagua

SEQ ID NO: 4115943 - RNA, 129 nt, Human
ugcucaguuuggggucccagaggcuagccgacauauuguaugcaggacacauggaacauagucuagcuccuaacuccaucugcauuugguuucugucugguaagcucauguguaauuacagacucagga

SEQ ID NO: 4115944 - RNA, 60 nt, Human
ugcucaugacaggugaguuuuuaggaccucuggucuuucaacuuucucuuuucaucagca

SEQ ID NO: 4115945 - RNA, 73 nt, Human
ugcuccaauauuagguuccauucuucuaucucaccucuucaauggguagguccuggagcugugguaaggagca

SEQ ID NO: 4115946 - RNA, 128 nt, Human
ugcuccacugucuaggauucuauuuuucccccucugccuuuuccuaucccagcaucccaagucagcugcuggaauuauagaaaaauagagggcaauaguagaaaguccuaaaggcauugugcagagua

SEQ ID NO: 4115947 - RNA, 103 nt, Human
ugcuccagcaaggacucagggaggagcuucugggccaaauaccucuggauuuagggagggcaaaggucgcaguggcuucucucugccgguaacccuggaagcg

SEQ ID NO: 4115948 - RNA, 55 nt, Human
ugcuccaggagcaaccuuugagaacugccauccuagaugcugugcuccaggagca

SEQ ID NO: 4115949 - RNA, 57 nt, Human
ugcuccaggcaagcugagaguugcuggggacagagacuuagcugguggccuggggua

SEQ ID NO: 4115950 - RNA, 58 nt, Human
ugcucccagcuccugcagcaacccaaguaaccgggggaagugccggagguggugagca

SEQ ID NO: 4115951 - RNA, 130 nt, Human
ugcucgcccuuucuuuguccuuuuccaaggccaggauacuuacuguaaagaccuucgacaggcuuccuugugggagaguuuguuuagagugaguuuggaggagcuuaggaugaaggagggguuggaggca

SEQ ID NO: 4115952 - RNA, 82 nt, Human
ugcucuagagcuauuggcuuccacaaaaguuugugauauaguucguaucuguuaagacgagggagcuaaguucucuauggua

SEQ ID NO: 4115953 - RNA, 60 nt, Human
ugcucucagggugauggcauacugugggugauuaauaauauaugcuagcauuuuggggca

SEQ ID NO: 4115954 - RNA, 92 nt, Human
ugcucuccagcccaaaugggaggccucugucccgccagggagcuuuagguuccccgggugcuucucggaggcugacaagggcguggagagca

SEQ ID NO: 4115955 - RNA, 77 nt, Human
ugcucuccaggcuggcccagugacccacaguggcauggugcauugucucuacuguggggcuggccaccaagagggua

SEQ ID NO: 4115956 - RNA, 56 nt, Human
ugcucuccguuucugcaacagucuuucagcuguugauucagaaaaagauggagaca

SEQ ID NO: 4115957 - RNA, 74 nt, Human
ugcucuccuggaggccacaugaacgcugcgccacuuuucuggcucacaugcagucgagugguuuccuagaagca

SEQ ID NO: 4115958 - RNA, 55 nt, Human
ugcucucuggcuuccagcuggcccaguggagguaccagcuggagauuggagggca

SEQ ID NO: 4115959 - RNA, 58 nt, Human
ugcucugcacaucccucacaaacugaauguuauuucuuugguuuguugugcagaugca

SEQ ID NO: 4115960 - RNA, 57 nt, Human
ugcucuggagggugaagcuuuuacugccaacgaaugugucugggccccucuagggca

SEQ ID NO: 4115961 - RNA, 59 nt, Human
ugcucugguaacucacuuccaucugaugccugacuagaauggaauugggaguuagagca

SEQ ID NO: 4115962 - RNA, 81 nt, Human
ugcucugugaguuuccuucuugccuaggcaucugacucaggaauuugaucagaaguuaauacgaggagaaauuacaaugua

SEQ ID NO: 4115963 - RNA, 78 nt, Human
ugcucuguggauggaagcuguguugauggcauggagcuuccucccuugaaggcacaucuucccccaaguccauuugca

SEQ ID NO: 4115964 - RNA, 59 nt, Human
ugcucuguugccuugauacaguugaaggcacuuuucaagaguggcaguaaaauagagca

SEQ ID NO: 4115965 - RNA, 57 nt, Human
ugcucuuacauuaauucagcaucuauuuacuuauuggguauugguaugugugaggca

SEQ ID NO: 4115966 - RNA, 64 nt, Human
ugcucuucaguucaccccuaagcagccaggcucaguacuaggugcucagacaagcugaacagua

SEQ ID NO: 4115967 - RNA, 68 nt, Human
ugcucuucucuccuuuccucuacugcaugaggaggcaacugguguagagugacaaggugggaagaaca

SEQ ID NO: 4115968 - RNA, 69 nt, Human
ugcucuuuguccuuuuccccaaauucacuuuccaaucuuagauuuuuaaaguaggggaaugcaagagca

SEQ ID NO: 4115969 - RNA, 72 nt, Human
ugcugaauuuguaugguuuauaguuguuagaguuugagguguuaauucuaauuaucuauuucaaauuuagca

SEQ ID NO: 4115970 - RNA, 83 nt, Human
ugcugacauaaauuuucauaaacaaauuaaggccugguccaaaaaauucaaauuucauuuuuucaggcugauuuguguuagua

SEQ ID NO: 4115971 - RNA, 60 nt, Human
ugcugacccugagaguggugcaaccaucugccugccccuggccaccaccucucaccagca

SEQ ID NO: 4115972 - RNA, 67 nt, Human
ugcugacuccgccacuuccuaaacuuuggugccacaaaacaggaagcaaaaggcagggucuaaagca

SEQ ID NO: 4115973 - RNA, 63 nt, Human
ugcugagcccagaacggccuggcucuggcagauuugcccccaggcugcaagugggcggcagca

SEQ ID NO: 4115974 - RNA, 79 nt, Human
ugcugagccugcucugagggugacuguguggccuaaaggauagagggcacagaguucccacuccagaagcgacacagca

SEQ ID NO: 4115975 - RNA, 88 nt, Human
ugcugagcuuuuaccaguaugaugaguuaaugguuuauuuuuaggcagccaguggauuuccuugcauauugguaauuagacaaaagca

SEQ ID NO: 4115976 - RNA, 60 nt, Human
ugcugaguuucuucauggugcagaggcccuucuugucuccacaccagaaggagcugagca

SEQ ID NO: 4115977 - RNA, 86 nt, Human
ugcugauagauuagucaggaaaaagaguugcugccuucaucuccccuugugggcuuuggccucuuucucccaauuguccuuuggca

SEQ ID NO: 4115978 - RNA, 89 nt, Human
ugcugauugauugauuauagacucacuaaucuccuagauucaaagauaccugaagaaaaugugaacuugugaauuccggucaaacagua

SEQ ID NO: 4115979 - RNA, 66 nt, Human
ugcugcacucaccaacagauaaaacaggaguuccaggucuuuaucugccuggucuuugaugcagca

SEQ ID NO: 4115980 - RNA, 77 nt, Human
ugcugccaugcagagcaacagacacccuccaccaauuacccaugcagaggagcccucugcugccaugcagagcagua

SEQ ID NO: 4115981 - RNA, 60 nt, Human
ugcugccuguguggccacucacucugggguguaauccccaaguuggacuggacagcagca

SEQ ID NO: 4115982 - RNA, 70 nt, Human
ugcugccuuagcagccaggcaauucagcuucugcugcuuccccaucugucuggauugcugagccccagua

SEQ ID NO: 4115983 - RNA, 62 nt, Human
ugcugccuucuaggcgugcccugugauuaguuucucauaggacggagagucagggggcagca

SEQ ID NO: 4115984 - RNA, 60 nt, Human
ugcugcgguggcuggcgaugggaguguuuccugaggcugccaccaagccccuccucagca

SEQ ID NO: 4115985 - RNA, 82 nt, Human
ugcugcuccacagguacagacaaguaguucagacaagauccucucacuacccaaacucuugccuacuugucaaccagcagua

SEQ ID NO: 4115986 - RNA, 57 nt, Human
ugcugcugacuguccagaauuccuagguggauacaguccccuugguagacagcugca

SEQ ID NO: 4115987 - RNA, 75 nt, Human
ugcugcugugugggagacaggcgcugucccagggcaggcucuccugggccuaugcuuuucuccaggccagcuuca

SEQ ID NO: 4115988 - RNA, 61 nt, Human
ugcuggaagaaaauucuuuaacauccugaaaaagaaaggguccaagaaggaucuuucagua

SEQ ID NO: 4115989 - RNA, 63 nt, Human
ugcuggaagcuccugcaugucugagaccugagcacagggauauaacacaagggguuuucggca

SEQ ID NO: 4115990 - RNA, 87 nt, Human
ugcuggaauauuuuggaccugcuugagccaguaugagauuugugcacauaucugacuuucaauccagguuugaauugauauucagca

SEQ ID NO: 4115991 - RNA, 60 nt, Human
ugcuggagaugaaagggcccugugauaaccuugaauguugcugccuccgucauuuccaca

SEQ ID NO: 4115992 - RNA, 100 nt, Human
ugcuggaugaaucugagugucuggaauuuuaaguguucgccucuugcuucucaguagguggcugccucuugaggucuggcauucacccaagucuugagca

SEQ ID NO: 4115993 - RNA, 93 nt, Human
ugcuggcacuuagaacauucugccugggaauuuccuuagccaaauucacaaguucauuagguccauguucuaucuucuauguuccugcuagua

SEQ ID NO: 4115994 - RNA, 102 nt, Human
ugcuggcucagaauugccuugauucuucucauguguuaugggagcuauaaauccaacagcgaauaguagccacaagaagugacaagugcaauucagcuucca

SEQ ID NO: 4115995 - RNA, 67 nt, Human
ugcugggcaccggagagaccccagcagcaacaugauugggccggugggggauuccgguuccccagua

SEQ ID NO: 4115996 - RNA, 68 nt, Human
ugcugggcucauguuucuuugaggacaagaauaaggagugauuuuuuuggagagucaugugcccagua

SEQ ID NO: 4115997 - RNA, 85 nt, Human
uguuuggaggcauuuuagguugucacuacuuggggaggcacauuaccagccucuacuguguauaacccaaauaugcugcuaaaca

SEQ ID NO: 4115998 - RNA, 64 nt, Human
uguuuggcucauugcauccauguggauucccacaccccugguggaagcaguuccagcacaaaua

SEQ ID NO: 4115999 - RNA, 76 nt, Human
uguuuggcuuauaauaauacuggccaaaaacaugauucuccacuaaaaaugucaguguugguugggaagccaagca

SEQ ID NO: 4116000 - RNA, 60 nt, Human
uguuugggaacauggaacccgaagacuuaaacuguagacuuucuccaggugccccaaaca

SEQ ID NO: 4116001 - RNA, 125 nt, Human
uguuugggcaggauugagagugaacaucuaucuggucagggucagauuccagagccuguguuagaagauuaaggacuggugugugaucagcauuaguagauggauacucuuucauacuacaugca

SEQ ID NO: 4116002 - RNA, 62 nt, Human
uguuuguuaaaauauuggagaaaggauauagaauuccguccucucucccuguuuggcaaaua

SEQ ID NO: 4116003 - RNA, 66 nt, Human
uguuuguucacugagcaaugauuagcuauuugucugcaucauuuauaaugucuuugugaauaaaca

SEQ ID NO: 4116004 - RNA, 76 nt, Human
uguuuguuguuuuuauuuaugacccuguguguauacugcaauaugcacauauauuacuaguaaagacagagaaaua

SEQ ID NO: 4116005 - RNA, 75 nt, Human
uguuuguuugaaaacucacgauuuguucuuuuuggcuagaguugcuuuaagcaaagcugugaauuccuacaaaca

SEQ ID NO: 4116006 - RNA, 104 nt, Human
uguuuguuuugaagcauuugcuuaaaagcggagcaagagucuuaacccaacuugccauaacacugcuuuucucgcuuuugauguaaaucuucaaaauucagaca

SEQ ID NO: 4116007 - RNA, 73 nt, Human
uguuuguuuuuguuguuguuuugcuugacauacuugccuggauuugcuuaacacugacgacgugaacuaaaca

SEQ ID NO: 4116008 - RNA, 63 nt, Human
uguuuuaaagccauugccuuucugcaccuuauaauugcuuguucuugggggaggcuuggaaca

SEQ ID NO: 4116009 - RNA, 99 nt, Human
uguuuuacaaacucacugcccuuuucuuuuccaauaucccuacuauuuguuuugcuggugguuauggugaugggaaaggauguaauugagaauggaaca

SEQ ID NO: 4116010 - RNA, 76 nt, Human
uguuuuccaaauuagaagcuguuagcaaaauaugucacuauaucauucugcugccuaguuuaugaauuggaagaca

SEQ ID NO: 4116011 - RNA, 83 nt, Human
uguuuucccuauguccaguacuucuaaauggucaauagacuaugguuggccauuuggcaaaacugacuucucaagaggaaaca

SEQ ID NO: 4116012 - RNA, 58 nt, Human
uguuuucgugcagacuucucacucaguucuuguuuugguggggaguugagcacgagca

SEQ ID NO: 4116013 - RNA, 84 nt, Human
uguuuucucugaaacccucuguucuuuaacgcugaaguccuggaugccugcuaggagcagcucgagaaggaagcagggacagca

SEQ ID NO: 4116014 - RNA, 85 nt, Human
uguuuucucuuguauguguauuuugcuguuuuuuacuuuguacauucuauaauggacacaaaucuauaugaugcaagaaaaggca

SEQ ID NO: 4116015 - RNA, 88 nt, Human
uguuuucugagauguaaaaucaguuguaugugugcauguaaauauauauguacuaugcagucaacuguuuuuacauuaucuuuuagca

SEQ ID NO: 4116016 - RNA, 66 nt, Human
uguuuucuguguggaaaggggagcguugaauauaucucugaugcuucuguuacauaccagaacaua

SEQ ID NO: 4116017 - RNA, 92 nt, Human
uguuuucuuacuagggaagaaaggcauggaacucuggggccaacuaguagugucccauggcuuuucugguggcuuccuauggugaggggaca

SEQ ID NO: 4116018 - RNA, 75 nt, Human
uguuuucuucugaggcauuaacauauaaagaaguuucuuugaugaaauuuaauuuauagauguggauagagaaca

SEQ ID NO: 4116019 - RNA, 69 nt, Human
uguuuugaggagugugaagcguucucaugagucacuagagauguuaaaugcuuuacaguuuuccaaaca

SEQ ID NO: 4116020 - RNA, 83 nt, Human
uguuuugauuuauuuuuaaucagcagggguuuguaauuucagcuuuuaguuacuccugcuauuaaguauugaauggacaaaca

SEQ ID NO: 4116021 - RNA, 103 nt, Human
uguuuugcucaaugauaagugcucagugccgggaacacaguagauaaccaauaaauuauuugcuaaaauguauugggauuggcagacauuaaaauccaaaaca

SEQ ID NO: 4116022 - RNA, 55 nt, Human
uguuuugggucacuuuccuuggggcauuuguuuccuuuuggugaauuccagaaua

SEQ ID NO: 4116023 - RNA, 108 nt, Human
uguuuuggugaauaacaguuuauggccccacuuggagagaaaggccugagucccuguagguggauuuccucuugacucuaaaggucacagcuguugccaucauaaaca

SEQ ID NO: 4116024 - RNA, 115 nt, Human
uguuuuguaauaguuuauuuuuuaaagagguauguaauauuugcauuucuuuuauauacuuuggagaaaaagaaaugacaaggacauuccuguagggaaaaaauuaugcacaaua

SEQ ID NO: 4116025 - RNA, 56 nt, Human
uguuuuguagcuaauagcuauuuguacuaauauuuguagcuaauagcuacgaaaca

SEQ ID NO: 4116026 - RNA, 59 nt, Human
uguuuuguuagcacucugggaacuguuagucuuucacuacccagaagcuuaacagagca

SEQ ID NO: 4116027 - RNA, 63 nt, Human
uguuuuuagcauaugaucacagugucuauucaauuuuuaagggcugcaucaugguuaagaaca

SEQ ID NO: 4116028 - RNA, 67 nt, Human
uguuuuuagcauaugucaaaucagacucuaaggauucuagaaagcugaaauucagaugcuaaagaua

SEQ ID NO: 4116029 - RNA, 78 nt, Human
uguuuuuagguauuaacauguguauugguuuccuauuguuggcauagcaaacuagcacauguuagguagauuaaaaca

SEQ ID NO: 4116030 - RNA, 69 nt, Human
uguuuuucuguuucuuucugucucuugguuccuuaagggcuuugaugaucagggcagaagcagaaggca

SEQ ID NO: 4116031 - RNA, 81 nt, Human
uguuuuuggcagcuguugauccaaauuauuuuuuagaggauuauauugucuacuuugugguuuggaaagaagucaaaaaua

SEQ ID NO: 4116032 - RNA, 56 nt, Human
uguuuuuguucaaugcuagguccucagcaccuaggacugugccaggcacaaaaaca

SEQ ID NO: 4116033 - RNA, 88 nt, Human
uguuuuuucacauaaacuucaaaguuguagccaaccaaguauuuacacuauaccaggaagggcucuuuaaagacugugggaaaaaaca

SEQ ID NO: 4116034 - RNA, 65 nt, Human
uguuuuuuguaugagaagugcuuuaccaaugcaguuguguaguaaugcaaauuauacaaagagca

SEQ ID NO: 4116035 - RNA, 118 nt, Human
uuaaaaaauauuauugagcugcuaugugcguuuucaugccagcaagaauagacaguaaaaaagacauucacuguuccucuucucuggagcuuauauacuagcuuggugaguccuuuaa

SEQ ID NO: 4116036 - RNA, 111 nt, Human
uuaaaaauagucugauuugagggcacagauuucagguaggaaugauuauucucaaguaguagagaguuaaugaacaucuuaaucugaaaagcagugucagaaaauuuuuaa

SEQ ID NO: 4116037 - RNA, 71 nt, Human
uuaaaaaugccuccgcaugugccuuugauucuguagaauggaagugucuacauguggaguaaugucuuuga

SEQ ID NO: 4116038 - RNA, 68 nt, Human
uuaaaacagcugcaaaagguugccuggccacagagaaugcgugcugcagcauuauguagcuguuuuag

SEQ ID NO: 4116039 - RNA, 118 nt, Human
uuaaaacuguagaucuggccaugagagaugguaugggacagcuguuuugcagugggguaaacauguaagguuuuagggcuucauuuuaucuuaucaugcaguuuuacagucccauuaa

SEQ ID NO: 4116040 - RNA, 59 nt, Human
uuaaaaggugucuguaguuucuuuuagggaccaguaaaggagcauuaggcaaauuuuga

SEQ ID NO: 4116041 - RNA, 79 nt, Human
uuaaaauaggggaccaggaaaggagccuauuuccaagagggguauggagaccuccuuucuuuauggaguucugugguag

SEQ ID NO: 4116042 - RNA, 89 nt, Human
uuaaaauauauuucucucgguacaguuuagucaugguucagagcacccacagaagaaccuuuccuggcugaccgaggagacauuuuuaa

SEQ ID NO: 4116043 - RNA, 86 nt, Human
uuaaaaugaauucagagaaguuguucaagguggugagugccaugucacauaucauaggucuuggauaauuuagggugauuuuuuaa

SEQ ID NO: 4116044 - RNA, 82 nt, Human
uuaaaauuaguugcauucaggauaugacgaucgaauauaauaguuuauagauuaugcguccauauucaugagcugaguuuaa

SEQ ID NO: 4116045 - RNA, 72 nt, Human
uuaaacuaugauucauccuucaggacgccugcuaaggcaggcugccuggcugugagugaaaacauauuuuag

SEQ ID NO: 4116046 - RNA, 118 nt, Human
uuaaagaaugagucauugaguuuacaaaacacaagaagcaggguacaguuauuccaaaacaacauugugccugugcuuuuguuugaagagaaguaaaauguuuccacucaaguuuuaa

SEQ ID NO: 4116047 - RNA, 128 nt, Human
uuaaagaaugagugaaugaguuuacaaaacacaagaggcaggguacaguuauuccaaaaugauaggaaacaacauugugccuuugcuuuuguuugaagagaaauaaacuguuuccauucaaguuuuaa

SEQ ID NO: 4116048 - RNA, 73 nt, Human
uuaaagcuauuacaaucugcuacuaugaauaaaugaguauuuuagcucucaaaggguaauguaauagucuuga

SEQ ID NO: 4116049 - RNA, 79 nt, Human
uuaaagguucuaggcaccuuaauuaagaaauugcccugaauaauggagugcuuuuggaauuugguguccauuccuuuaa

SEQ ID NO: 4116050 - RNA, 121 nt, Human
uuaaaguagacugugcaacauuuaauuccauagcaggucaaaaaguuuaagacucauucuagcucuagaaauauagguuacuaugguuuuagccuuugucccuucuggucagucucuuuga

SEQ ID NO: 4116051 - RNA, 70 nt, Human
uuaaauacuuguuuggaguuguuaugguuauauuagugaaaaauaauuauagcgagucuaucguauauga

SEQ ID NO: 4116052 - RNA, 71 nt, Human
uuacuuuuuugaagggggagauauaugugugauauauguguagguacauauguauguucuuaccuaaguaa

SEQ ID NO: 4116053 - RNA, 56 nt, Human
uuagaaaggagcuuauuucuuuguuaugaauauaaagaauggaguucucuuccuag

SEQ ID NO: 4116054 - RNA, 111 nt, Human
uuagaaauaaccacaauaaagaaccuugaaaccacaucuuagaaagucagucaggcccccuggauguuuucuagguguguuuucaaaguucuuuauuauggcuauuucuaa

SEQ ID NO: 4116055 - RNA, 85 nt, Human
uuagaaaucagcaccaaacuccugcgaugacuuagucuuugcagacugagcucuugacugggaguuaagaugaccugaguucuga

SEQ ID NO: 4116056 - RNA, 67 nt, Human
uuagaacaguguuugccucgcucucacucacucucauaaaugcuagugauggucaugcacugucuga

SEQ ID NO: 4116057 - RNA, 69 nt, Human
uuagaagcagaucucaagcacucacgauggccaucagggaugaggugguccagcuugauucucuucugg

SEQ ID NO: 4116058 - RNA, 87 nt, Human
uuagaagcucuaagucuuuaaguaaugauaggcauacuugcguaauacauagcacauugccuuuauuuuaggauuuuaaucuucuag

SEQ ID NO: 4116059 - RNA, 60 nt, Human
uuagaagguuuccagucaugcucuuucauuuuucugagcauuugcucugguuccuucugg

SEQ ID NO: 4116060 - RNA, 74 nt, Human
uuagaaguuaguuuugggcauuagaauauucuuucucaaagaaagaagggcaggaucccaggacagcuaacuaa

SEQ ID NO: 4116061 - RNA, 78 nt, Human
uuagaauguaucuucauguugcuuauucuggguuaauauccuuagguauuuagcaugaauuuucaauauauacucuga

SEQ ID NO: 4116062 - RNA, 69 nt, Human
uuagaauucuguaauucuguuaguuucaaguauggugagcuugaguauacgcagaauaacagugacuga

SEQ ID NO: 4116063 - RNA, 75 nt, Human
uuagacaaauuucacagugaacuuugaggacucuagauacgaguguuucauguuuuucugugaggcauugauuga

SEQ ID NO: 4116064 - RNA, 69 nt, Human
uuagacaucagcuugugugcagggggaagccaucaaagcugucuuuuguuugccuguugauuuguguga

SEQ ID NO: 4116065 - RNA, 61 nt, Human
uuagacucguaguaacuggaugucugcccauuuccccuuggcauuuauugcuauaagcuga

SEQ ID NO: 4116066 - RNA, 80 nt, Human
uuagagaauugcaaacaaugggcucacaagaccugaaugaauuccaaaucaucuagugggcuuauugagccauuuucuga

SEQ ID NO: 4116067 - RNA, 58 nt, Human
uuagagcaaggauggcagcagagguuauaacagauaugcugagacuccugugcuuuaa

SEQ ID NO: 4116068 - RNA, 57 nt, Human
uuaucugugguuaacccacacacgcaggcacuuugguugcugaagaaucacagaugg

SEQ ID NO: 4116069 - RNA, 91 nt, Human
uuaucuuauuaugcaaagcauguugggucccucuuucuuugaccucacacuucaaaaagagguucucccacagccuuguaucccaagauga

SEQ ID NO: 4116070 - RNA, 72 nt, Human
uuaucuuggcaauucuaagguacauuuccccucucagaucauuaaugugccuuuugaaaaaguuaagcauga

SEQ ID NO: 4116071 - RNA, 63 nt, Human
uuaucuuuaguucagaugauuaaaugaggucuuccuacaauaagacaugugaacuaaagguga

SEQ ID NO: 4116072 - RNA, 68 nt, Human
uuaucuuuugguaucagcucaaucuuaccuuacacauuucuuaagacacgggcugaucuaaagaauag

SEQ ID NO: 4116073 - RNA, 111 nt, Human
uuaugaauaauaucacaggguguacaucaccuaugacauuaaaaauaacaccccccuaggauauuaugaauaauaucauggaguguacacacccugugucauuaggaguaa

SEQ ID NO: 4116074 - RNA, 89 nt, Human
uuaugacaaacauggcagcaaguaggauucuuauuuuuaacaauaugaacaaaauuaaaagucgauaccuuguguacaguuuggaguaa

SEQ ID NO: 4116075 - RNA, 61 nt, Human
uuaugacacauucuggcaacguuuagaugcaauuucaaugagccagaauguaguacuguaa

SEQ ID NO: 4116076 - RNA, 64 nt, Human
uuaugacaguagguaaaugauagcugugauaauuuuaaaggcucuucucuaucuacuaucauga

SEQ ID NO: 4116077 - RNA, 91 nt, Human
uuaugagguuggugcaaaaguaauugcaguuuuugccauuacuuucaaugguaaaaaucacaaauacuuuagcgccaaccuaaaaacauaa

SEQ ID NO: 4116078 - RNA, 63 nt, Human
uuaugcauuuauuuucauguguaagaagaaaaacguaacuagcacgugaacaugacugcaugg

SEQ ID NO: 4116079 - RNA, 88 nt, Human
uuaugcauuuugcagugugugguugaacuauguuuuaucugaccauucuuguguacauuuagguaguuuccaacauucauuaucauaa

SEQ ID NO: 4116080 - RNA, 61 nt, Human
uuaugcuaguugaaauaacacaagugcaaaagauggcauaugugugauuguauuuguauga

SEQ ID NO: 4116081 - RNA, 63 nt, Human
uuaugcugauuugguuuuguguucucugaaacaucaagggccaggcucccaugucaggaauaa

SEQ ID NO: 4116082 - RNA, 65 nt, Human
uuaugcugcagcauauuguacuggccugcugcuggcccgcaggcuuuucaauauguuuggcaugg

SEQ ID NO: 4116083 - RNA, 95 nt, Human
uuauggguugguucccucacuuuguaauaacuccugaguuugcaugagaaagcacagccaauagcauuauacagugaaggaauuacuacucauag

SEQ ID NO: 4116084 - RNA, 88 nt, Human
uuaugguaagcagcagcucacugaauaaugacuuccauugaguaaacauuuggcucugguuaucuucagggaugcuguuggcucauga

SEQ ID NO: 4116085 - RNA, 87 nt, Human
uuaugguaccugucagaaaugcauggcuguuuuaaagcaaauguaauugcuuucagaaauccgcugcauucugagucaauugcauga

SEQ ID NO: 4116086 - RNA, 55 nt, Human
uuaugguucaggugaggguguacaagucagguaaauaggaguaucuggaucauga

SEQ ID NO: 4116087 - RNA, 82 nt, Human
uuauguacaggcaaaguuuuaguaaacauauaugaaguaagugauauuaaauguguauuuauuuggggcuuaacguacauaa

SEQ ID NO: 4116088 - RNA, 68 nt, Human
uuauguacaugagcauaaacacacauaaauacagauauauauguguguggugguguguguguauauaa

SEQ ID NO: 4116089 - RNA, 72 nt, Human
uuauguaggauaaugaauugccuuuuaaugcagguaccaaacaggcucccugggauaauucauuccauauaa

SEQ ID NO: 4116090 - RNA, 63 nt, Human
uuauguauuggcuguauguacaucuguuaccuuuuaguggcagagagagugcagucgacauaa

SEQ ID NO: 4116091 - RNA, 74 nt, Human
uuauguccuuuaacuucaucacaagcacaagaaagauuaguacauuuugcaggugaggagucugaagcacauaa

SEQ ID NO: 4116092 - RNA, 97 nt, Human
uuauguucagaacucaucuuugucccugacuuucuauauguagcacccguuuuguguccaacccagggacaaguaugacacugucucuggaacauga

SEQ ID NO: 4116093 - RNA, 65 nt, Human
uuauguucuaaucauauggguaauccaauggagggccuuggauuacccauaugauuagaacauaa

SEQ ID NO: 4116094 - RNA, 118 nt, Human
uuauuaaaaaaaguacagguaaugagggaagguaugaucuuacauguaugaguuugaaaauaucuguaaagauguuuauaccuuuacaaacaugacugaaugaaguugguuuugauga

SEQ ID NO: 4116095 - RNA, 64 nt, Human
uuauuaacauguucuguugguuuuugaggaauagucuccgaaaaagucauuggaauauuaauga

SEQ ID NO: 4116096 - RNA, 64 nt, Human
uuauuaccccugugggcucagagccuguuuugaaauaaagcaaauaagaaccacaggggaguga

SEQ ID NO: 4116097 - RNA, 102 nt, Human
uuauuacuuccaaauauaaaaagggucuuagagguucauuuuuuucagacacuaaaauugaaaaugaugggaaucuaauuuugguauggaugguuguuauaa

SEQ ID NO: 4116098 - RNA, 79 nt, Human
uuauuauauacucaagggugauuucaugaaaaaguuagaacauuucauguagugguaaaccuuuggguguuuauaauag

SEQ ID NO: 4116099 - RNA, 68 nt, Human
uuauuaucucauuuaaaaauauucuaggucgcuucaguguucucaggcagugguaaaugaguuaauga

SEQ ID NO: 4116100 - RNA, 78 nt, Human
uuauuaucuccauuuuacagauuaaacagcgaggcauacuugugccucaguguuuaaucuauaaaauggagauaguaa

SEQ ID NO: 4116101 - RNA, 127 nt, Human
uuauuauuuauuuugagacggagucucgccuuguaacccaggcuggagugcaguggcgcgaucuccgcucacugcaagcuccgccuuccggguucacgccauucuccugccucagccucccgaguag

SEQ ID NO: 4116102 - RNA, 55 nt, Human
uuauucagugccuuugaaagaaacacuauaguguguuauuuucuuaacuggauaa

SEQ ID NO: 4116103 - RNA, 76 nt, Human
uuauucaucucugucucauguuagccagcacauaucuaauuauaugugcuggcuaacuggaugggcagauggguga

SEQ ID NO: 4116104 - RNA, 67 nt, Human
uuauuccagugggugguuucucccuguguugcagaguucacaggcuguaccuagcucaguggaguag

SEQ ID NO: 4116105 - RNA, 130 nt, Human
uuauucuaguuuuuggugcucagagaugccaaguggcucaucuuggggacugucucuuguagcaggcaucucuccaggggagugucucccaaacuuugagaugguuaucuguuaaucgaaggaaaaauaa

SEQ ID NO: 4116106 - RNA, 66 nt, Human
uuauucuguagaaccuaguacagugcuuuauacauaguaggugccuaguaagugucuacugaauga

SEQ ID NO: 4116107 - RNA, 83 nt, Human
uuauucuuucucccuuggccaugagagcagugcaacucaaacaggagcugcuccuucagccaaguccuucaguaaagauauaa

SEQ ID NO: 4116108 - RNA, 59 nt, Human
uuauugagaccguaagucagguacuuuaccuauugccucugauuuaaucuucucaguga

SEQ ID NO: 4116109 - RNA, 97 nt, Human
uuauugauuucuuaggagcauuaguaauuuauaauccugagcaaacuagcagaauuaaggaaaaaaauuauuucaaugcucuuggaagaaucgauga

SEQ ID NO: 4116110 - RNA, 75 nt, Human
uuauuggcaucaugcuuggauuauguuugggaauaaaaagugugcuagacucuaaguuauggaaguagccauuaa

SEQ ID NO: 4116111 - RNA, 60 nt, Human
uuauugggcuucucagaauagaggggcauugguuuccucucuggaauuaaagcccaauaa

SEQ ID NO: 4116112 - RNA, 70 nt, Human
uuauuggggagagggcugugagggccaggaaccaggcaggucacugcauaguccaucuugaauucaguga

SEQ ID NO: 4116113 - RNA, 55 nt, Human
uuauugggucccaacaaguugccacaguaucagacaccuaguugggacccaauaa

SEQ ID NO: 4116114 - RNA, 100 nt, Human
uuauuguaauuuuaaaccauuuucaguuucagaugcuuuagaaauagaccaguuguuuuugugguauauugcaacaacgggaagauuauauuaccaauaa

SEQ ID NO: 4116115 - RNA, 59 nt, Human
uuauuguaggccuauuguagaaaugcuauugauaagcauugcuuuuauaccuauaauga

SEQ ID NO: 4116116 - RNA, 63 nt, Human
uuauuguaucaucauuaucagucugcagauuucucuauagcuagaaagugaagaucacagugg

SEQ ID NO: 4116117 - RNA, 69 nt, Human
uuauuuagagagaaucuggagugcuucgugcugucucugaagguaaccagaaucuacucauuggaauga

SEQ ID NO: 4116118 - RNA, 78 nt, Human
uuauuuaggcucucugcaacuaaguauuuucacgacugaguucuugcuucaaaaaguuguuagaggaaaguuaaauaa

SEQ ID NO: 4116119 - RNA, 58 nt, Human
uuauuuaucacuuggugaguugcagaaaacugcccaaggucacacagcugguaaauag

SEQ ID NO: 4116120 - RNA, 101 nt, Human
uuauuuauugauaaauugucaagacagaaucagcugugcuuauuuuuacugaaacuggaaaguugauuauguccaacaagcuugacaauuuauguggauaa

SEQ ID NO: 4116121 - RNA, 103 nt, Human
uuauuucauuugguucuuaaguaaucuugugauguaugcaaauuggauaauuuuauuucuauguaaaaauauacacagagcuuauggugauuguaugaaguga

SEQ ID NO: 4116122 - RNA, 56 nt, Human
uuauuuccacaaugugguagggugauggaaaaacacccuaucauaauguaaaauaa

SEQ ID NO: 4116123 - RNA, 56 nt, Human
uuauuugcagagugcagaagcaucuucaguuggagagccauugccucuugcuguga

SEQ ID NO: 4116124 - RNA, 69 nt, Human
uuauuuguccauguagauuguguaucugugaauuaaacuaguauuuaaaucuacauagagaucaaauga

SEQ ID NO: 4116125 - RNA, 85 nt, Human
uuauuuuaaaggaggacauaguggacuaggguucaucuugacaauaaguucuaguuaacaguccucuugccuaccuucggaauaa

SEQ ID NO: 4116126 - RNA, 85 nt, Human
uuauuuuuaguagugggcuuguauugcuguuuugcaucugcauuuguaaguagcuuuaaaaauccaauauccaugccaagaauga

SEQ ID NO: 4116127 - RNA, 76 nt, Human
uuauuuuuauucuuuuaugagauugccuuucaggggcacccccaagaggugacauaggagaggcucaggaaaauga

SEQ ID NO: 4116128 - RNA, 91 nt, Human
uuauuuuugcccuucuuaguauaugcauuggauaagaaccccauuggcccuuuuuuagcuaguaaugucuaaugcaggaagacaggaauaa

SEQ ID NO: 4116129 - RNA, 130 nt, Human
uucaaaaauaacugcuucccuuccauaccaggcaccauguucuuaggaccuuccuugagcaaggagucuauuuucguaccugaagacaucgggcuugguuuuaugacauggcuuggcaaugaaaugugaa

SEQ ID NO: 4116130 - RNA, 69 nt, Human
uucaaaccaaccucuucuuuuuccaaagcgcauagcuuucugggaugugaaugguuuaaaagguuugag

SEQ ID NO: 4116131 - RNA, 67 nt, Human
uucaaagagaacucagucuacacuggaagaucaagauugguaaccacuggagacuggucucugugaa

SEQ ID NO: 4116132 - RNA, 68 nt, Human
uucaaagauuagcauacgcaaugugacuauucaaauagcgagucaguuuggagucuauaaucuuugaa

SEQ ID NO: 4116133 - RNA, 64 nt, Human
uucaaagcaaaaagccaagguccucuucagaugguggaaacucugagguggcucuugcuuugaa

SEQ ID NO: 4116134 - RNA, 79 nt, Human
uucaaagcaucagagagaaguuaacuaggcccuaaucaguagccaguguggucuaguccaacuaauuuugauaguugaa

SEQ ID NO: 4116135 - RNA, 76 nt, Human
uucaaagguauuuucuaauguauacuucagaugcaaacaguguuacuuucuaguauacauagagauggcuguugaa

SEQ ID NO: 4116136 - RNA, 71 nt, Human
uucaaaucagcaaugaccuaagcaaauaacccccagugcccgggauauuuagcuggagucagugcuuugaa

SEQ ID NO: 4116137 - RNA, 67 nt, Human
uucaaaugcaugaaccaucacuccuuggccuuuuggccaagaucaaguguaguaucaaaugcaugaa

SEQ ID NO: 4116138 - RNA, 84 nt, Human
uucaaauuucaguccucucacucaggccuuuaaagcaaauacaugcagaaaaucugagaaugagagcacuagcuggaagcugaa

SEQ ID NO: 4116139 - RNA, 103 nt, Human
uucaaauuuccaaucccaccaaaauguaaaacauguuuuaacuaggagggcucauuguuucuccuuucaacauguuugcuuuggaguuugggauggguuugag

SEQ ID NO: 4116140 - RNA, 130 nt, Human
uggagacuugcacacaguugcuaguuuaucuuuaaaauuuccaccaucuuuguguuccccauggaagacaaaggauuaaugaugaugaaauguaguauaaggccagugcaacaguggccaaguuuggcca

SEQ ID NO: 4116141 - RNA, 111 nt, Human
uguucaguugauggaugugaugaagacaacacauguaugccacucuucugggccaacacccagguagauggcguuuaugcuguuggcuuuagcagccaauaccuguaaaca

SEQ ID NO: 4116142 - RNA, 65 nt, Human
uguucauauuccuguccgcugauccugaggcugaggaaaggggaaguggguguggggaaugaaca

SEQ ID NO: 4116143 - RNA, 74 nt, Human
uguucauuguugugucucagcagguagcauauaguagauacucucuaaauguuugugggauaaacaaaugaaua

SEQ ID NO: 4116144 - RNA, 68 nt, Human
uguuccaacucccagaacaugcucuucuuacuacaccacggaagaaugggguggugggaggcggaaca

SEQ ID NO: 4116145 - RNA, 76 nt, Human
uguuccaagugauuucuaaguuuauuagucagagacauuuuaagugacagaguaaaacagagaaaucacucagaca

SEQ ID NO: 4116146 - RNA, 129 nt, Human
uguuccacuaacaaacacagauuuaaaacgcuccuggaauguuugacuuauucagugacuucaucauuaaaaggacacuggggagggaggcaagaaaggaguuuuccaauauccauuaccaugugcaca

SEQ ID NO: 4116147 - RNA, 92 nt, Human
uguuccauccgugcaaguguuuuaugaaaauuuagcugaagcauuuuaaaaaaauguuuuggccagauucuuuuuagaauaaaguugggaca

SEQ ID NO: 4116148 - RNA, 60 nt, Human
uguuccauuggagcacuccacgacuccccuuuuaaaaguggagccuuuuguucugggaca

SEQ ID NO: 4116149 - RNA, 74 nt, Human
uguuccccggcagagugugugcgugcaugcgugugccugugugagcagugugcgcgggcugcuggccgggggca

SEQ ID NO: 4116150 - RNA, 129 nt, Human
uguuccccucuuugucacagcccugaaacgcacuggccugcugggugagguccugaaagggucagagcuccaaggauuacuaaguaggguagugucagucccaagccaugcuguggaucuaggguuaca

SEQ ID NO: 4116151 - RNA, 97 nt, Human
uguuccuauuuggaggaagcccaagccagcaguuuaaugacucagcaucaaccugaguuuugacuguuggucuuaccuugucccucagauccaaaca

SEQ ID NO: 4116152 - RNA, 89 nt, Human
uguuccucuugacaucucucuaaagagacauguguagaaacuuguacuacacagggaaaggucucagagcugucaguacugaaggaaca

SEQ ID NO: 4116153 - RNA, 61 nt, Human
uguuccugcaaggaacuggugcucaacuaaacauacugucacaugguuccuugaaggggca

SEQ ID NO: 4116154 - RNA, 78 nt, Human
uguuccuguuaacugucuccucaucaugccugguugcuagcccucuagugcccaggguguggugggacagguggaaua

SEQ ID NO: 4116155 - RNA, 104 nt, Human
uguuccuuuaauccauaucacuugaccaggaaagagugugacuaauaaugauauacauacaugacuuauucacuucuuggucccucagugcuauuuuggguuca

SEQ ID NO: 4116156 - RNA, 129 nt, Human
uguucgcauuuccucgagacucuuacugaauuaauaugucucuggcuagacauuacagauuuuuguaggaauaaaaugaucuggcucaggauaucauugggaaaugaguucagcaagugccagauuaca

SEQ ID NO: 4116157 - RNA, 109 nt, Human
uguucuaaaaagcgggaugcagggcccagugagcugcagagugaugaagugggggaaguuccccagugucgcugcugggacacaaugccugacucccguaaguaaagca

SEQ ID NO: 4116158 - RNA, 58 nt, Human
uguucuaugcucuuuaaggugauggccacaguuuuuccauagcuuagaguguaggaca

SEQ ID NO: 4116159 - RNA, 60 nt, Human
uguucucacuggaugcuucacaggcacguugguugccuagucauguugccuaggagagca

SEQ ID NO: 4116160 - RNA, 63 nt, Human
uguucuccacugucagcacucuacuacagauaccccaucuggugcggucugauauggauaaua

SEQ ID NO: 4116161 - RNA, 83 nt, Human
uguucucucucugcuccauagcuuccauauugacaccaguuucuuucuaguggagaaguggagucugugaagccagggaaaca

SEQ ID NO: 4116162 - RNA, 60 nt, Human
uguucucuugccaguauuuuauaugaaguuguaugacuugguuaaaugggaagagcaaca

SEQ ID NO: 4116163 - RNA, 110 nt, Human
uguucugaccaggacuacugaauaacauaacuucuggagaccuagcccuguuguugccuagguaaauaacacucccuggaguuguacaauucacagcaugguuaguuaca

SEQ ID NO: 4116164 - RNA, 129 nt, Human
uguucugugguugaauguguuuuugcuuaaauaaagcuuuugguauuuguuuaaauuacacuucuugagaaguggaaauuuuaggaucaucuuugcuuuguuucaguuuugugauuuuugaaaugaaug

SEQ ID NO: 4116165 - RNA, 63 nt, Human
uguucuucaggagcuccgggggcugagcaucacuuuaggccaggacagagcuuccagaagaca

SEQ ID NO: 4116166 - RNA, 76 nt, Human
uguucuuucugucaugguguacugcucccaaggucucacuccacccaacuggcuggugcacaugaaagagaaggca

SEQ ID NO: 4116167 - RNA, 62 nt, Human
uguucuuuuucaucugcccggggaagccagaucuuccucugccccagaugaaauuuagagca

SEQ ID NO: 4116168 - RNA, 58 nt, Human
uguugaaagacuaaaugaaugagcucacauuugagacucccuuuuuauucuuccagca

SEQ ID NO: 4116169 - RNA, 64 nt, Human
uguugaaagccgggacucaaaaagacauguguacacacauguucauagcaucgguauucacaca

SEQ ID NO: 4116170 - RNA, 60 nt, Human
uguugaacugcuucagcaaagcuauuugcaauacagcagacagaagcuaaguagacagca

SEQ ID NO: 4116171 - RNA, 88 nt, Human
uguugaaugaauguuugaaugaauaaaagaguaaggcagcuuggaagaguguuuucuucugccuguucauuuauuugcccauuggaca

SEQ ID NO: 4116172 - RNA, 62 nt, Human
uguugacagacacuugaguugauucugguuuuggacuauugugaauaaagcugcugucgaua

SEQ ID NO: 4116173 - RNA, 62 nt, Human
uguugacucaacacugugggcauguagauaaaauagcuguuggcaguacagagaguuaguca

SEQ ID NO: 4116174 - RNA, 91 nt, Human
uguugagauuuuuaaaaaucuuuaguuuaagaacaugaugagaaacgacuuccuuugugucacucuguguuugaacucaagaggcuugaca

SEQ ID NO: 4116175 - RNA, 77 nt, Human
uguugagugagaugaagaggcccuuggagucauuccaggagucuauaggugacuccagucucuucucacuucugaca

SEQ ID NO: 4116176 - RNA, 69 nt, Human
uguugauuaccucauuuaagucacuauuacacucauaguguccagaguggaggugagugugguacagca

SEQ ID NO: 4116177 - RNA, 58 nt, Human
uguugauucagaaguuucagggauuaauugaccaccaggaacuuucaugaaucuagca

SEQ ID NO: 4116178 - RNA, 114 nt, Human
uguugcaugcaucuucaugucucccuuucaugaggcaggagcucagaugacaucucaggugugacgucaugugaugucauguguguucugugagagggacaugaaaagccaaca

SEQ ID NO: 4116179 - RNA, 68 nt, Human
uguugcauuuauauucuguucggauauaugauuuuguuucuuuaucuggaugaguugaauucucaaca

SEQ ID NO: 4116180 - RNA, 68 nt, Human
uguugcccaggguggagugcaguggcauaauuucgucucacugcaaccuccgccuccggguucaagca

SEQ ID NO: 4116181 - RNA, 99 nt, Human
uguugcuguuguucaguaagcuaguuucucuccuuacucucuggauaccauuacagucucaggaugagguagaggcagauaccauuucaauaagcaaua

SEQ ID NO: 4116182 - RNA, 77 nt, Human
uguugcuugcuugacucacauucuauuuggucacucagcagauauuuacugaggaccugcuaaugugccaaguaaca

SEQ ID NO: 4116183 - RNA, 89 nt, Human
uguuggcuugaaaagcuggucagauuggucuacucaacagcagagacaucucugugcagauguagaccaguuucagaauggggcccaua

SEQ ID NO: 4116184 - RNA, 61 nt, Human
uguugggagcuuggacuuaguguggacaccugaucucccgccuccuccauagcucccugca

SEQ ID NO: 4116185 - RNA, 115 nt, Human
uguugggggagacucacacugacagugauguucucuggguguguagacugaguucaucucuuccugcccugcuucugagggaagcuguuaaaagguaugaauucucuccccagca

SEQ ID NO: 4116186 - RNA, 55 nt, Human
uguugggggcucagagucuuuaaccugugagaaaagagccugagaucuuccagca

SEQ ID NO: 4116187 - RNA, 64 nt, Human
uguugggugcuuuuggaguugugaacuguaggcaccgccuucucagagcuuccagaaaacagca

SEQ ID NO: 4116188 - RNA, 71 nt, Human
uguugguaagcagcguaaaagccagggagugucugcugcaagaaucccugggcaucacguugcuuccgaca

SEQ ID NO: 4116189 - RNA, 87 nt, Human
uguuggucauauuuauuauuuuaucugcuuacuuucaggguuucgugcaccugaaguugccagaggaaaugucauuuauaaccaaca

SEQ ID NO: 4116190 - RNA, 83 nt, Human
uguugguuagauuuaguaccaaguuguaacauuuuaauuggaagcuaagcuuauuuuacacuuggguguggauuuuaccaaca

SEQ ID NO: 4116191 - RNA, 101 nt, Human
uguuguaaguuaagacuuguuuugugugccuuucuucccaaguagauguacagccaugcaucacuuagauggggaucaucacgugaguuuuuguugcagca

SEQ ID NO: 4116192 - RNA, 57 nt, Human
uguuguccacccaugacaccugccugugucccacaggagucccaggggugggccaca

SEQ ID NO: 4116193 - RNA, 70 nt, Human
uguuguggguauuucuagaaccaaaagccauccuggagauuggguggagguucugggugauaccgaggca

SEQ ID NO: 4116194 - RNA, 65 nt, Human
uguuguguucacuauugcaacccugguucccagaacagggucugaccaccaguagggauucaaua

SEQ ID NO: 4116195 - RNA, 83 nt, Human
uguuguucuugcuuauuauggacuuugggaagaagucaauuagagaaguucuuuagccaguaucauaaugaguaaugggaaca

SEQ ID NO: 4116196 - RNA, 62 nt, Human
uucagaggguuuuagggucagaacauuaucucaacacaggacugacuagaaaaaaaucugaa

SEQ ID NO: 4116197 - RNA, 57 nt, Human
uucagagguagagaggaucuugaagauaaucuacauaauccuuucacuuuuuaagaa

SEQ ID NO: 4116198 - RNA, 76 nt, Human
uucagcacccucugaggcauccuucucccaguggggcuuguuuauuuccucgcuuuccaugucacagagggcugaa

SEQ ID NO: 4116199 - RNA, 69 nt, Human
uucagcaguuucugagaagcaaagguaacauauccuuccaaaguccccaucuuuccaggagaugcugag

SEQ ID NO: 4116200 - RNA, 79 nt, Human
uucagcucuuaaaaaggcaaguuuuaguuuucuggaaagcuaacauuuuuagaauaccucuuuccuugaugaugcugga

SEQ ID NO: 4116201 - RNA, 93 nt, Human
uucagcuuguuauuucuucauuagcaagguuuccccugcugcucagcagaauaugugaggaacuuugcaaaugucagaagcacucaaguugaa

SEQ ID NO: 4116202 - RNA, 106 nt, Human
uucagcuuugccaaaaaggguggcuugcuuuuguuggggguuaggggcaauuaaaacauugccacuauuugcuuugggcuagaguugcauucuuaaggcagcugaa

SEQ ID NO: 4116203 - RNA, 72 nt, Human
uucagcuuuggucacauugaguuugagguguccuauauuuagauguaauaaaucagggugccaaagccugag

SEQ ID NO: 4116204 - RNA, 56 nt, Human
uucaggaaauuggaguccuucugccccacggugugaagguacuuuaaguuccagag

SEQ ID NO: 4116205 - RNA, 83 nt, Human
uucaggaagcagcuguaucacuuuuaaacauuuugccugucugguggcuguaaggugauaucgcauuauugcuuuaauuugaa

SEQ ID NO: 4116206 - RNA, 57 nt, Human
uucaggaauauaggcauugacaagauuuucuugucugcaaagaaaugccuucuugaa

SEQ ID NO: 4116207 - RNA, 78 nt, Human
uucaggagauuagaaaaauguucaguaguuucugcuuuaauauagagaaugucuauuaacauuuuuuguucuuaagaa

SEQ ID NO: 4116208 - RNA, 55 nt, Human
uucaggagcuagggaugugaaaguagaaagcugaguaucuuuuuuaacuccugag

SEQ ID NO: 4116209 - RNA, 62 nt, Human
uucaggcccaucccauucugaaagauaguugaaauuuauuagaaaggcuuauggugccuuag

SEQ ID NO: 4116210 - RNA, 95 nt, Human
uucaggcuccaaaguccagcuguuuccaugaugccaggcugcuuccuaauuaguauauuuaggagauaacuguauuuuagagauaaagaccugag

SEQ ID NO: 4116211 - RNA, 57 nt, Human
uucagggagcaagggcuaggaaggaggcagcuccugggacuggcauucuucccugga

SEQ ID NO: 4116212 - RNA, 71 nt, Human
uucaggucaguagggaaaucauuagugagauaguguagcucuuuaaagauuucuuacuuauugaugcugaa

SEQ ID NO: 4116213 - RNA, 60 nt, Human
uuacacaauuuuauugaccuaaacucaggaaaucccucacuggucauggagguuguguga

SEQ ID NO: 4116214 - RNA, 64 nt, Human
uuacacuuccagugcauagguagaucauuucuauaugcuaucuagaaauacuggguuuugguaa

SEQ ID NO: 4116215 - RNA, 56 nt, Human
uuacagaaaggaaggacugacuccuaaauuccaggaugucuccuuuaagucuguaa

SEQ ID NO: 4116216 - RNA, 55 nt, Human
uuacagaggcuuccagggcccacuacagccaggggccugccugggacuucuguaa

SEQ ID NO: 4116217 - RNA, 61 nt, Human
uuacagcauuuaaugagaucuggcauuuuauaccccagaucaaagcuacagaaugcuguaa

SEQ ID NO: 4116218 - RNA, 58 nt, Human
uuacagcuucgacagaggcaguugcuugagaaggcaggugcugggugggcagcuguaa

SEQ ID NO: 4116219 - RNA, 59 nt, Human
uuacaggcaugaaugaaaucuguuuuauuagaugaacaggggauuauuuauaccuguaa

SEQ ID NO: 4116220 - RNA, 61 nt, Human
uuacaguagauuuugaauguggcuguaauaaaacggccuuuaaauuuuagaauuuguguga

SEQ ID NO: 4116221 - RNA, 60 nt, Human
uuacagugaaguaccauuaaaauuaacuccacaguucuuuagugguauacuuuucugugg

SEQ ID NO: 4116222 - RNA, 126 nt, Human
uuacauuaaaaaauaucuuaacagacugugcauggucaguguuauaaguuuagccauuuuaauggcuuauuaauauuacuuccccauuggcuagauuuauugcugagcaaucagucuuuaauguga

SEQ ID NO: 4116223 - RNA, 77 nt, Human
uuacauucacucaacuuucuauagacuucucugagggggaagugucuccagggccaagucauggaaccaaaauguaa

SEQ ID NO: 4116224 - RNA, 119 nt, Human
uuacauuucuaugauuauucauuuccccuauucuaacaguuugcagagagcuggcaauugguaggcauugcacaaaaaauuguugaauaaaugaacugagagaucguaccuauauguaa

SEQ ID NO: 4116225 - RNA, 70 nt, Human
uuacauuuuuaucaguagcaaaguuuuaaagguaaaaaccucuuaauaucuaaugcuggcaaagauguga

SEQ ID NO: 4116226 - RNA, 66 nt, Human
uuaccaauuuugcagcuucugguggccucugauaugaauuagaggcaacugauuucugccagguaa

SEQ ID NO: 4116227 - RNA, 67 nt, Human
uuaccagccucaguugugagccccccugggcuguaacaggaccugggcuggcucuguggugugguga

SEQ ID NO: 4116228 - RNA, 76 nt, Human
uuaccaguauccuuugcggaaauuucuaagauuugcucauccaauagagacccgagaaaggaagaaaucugaguaa

SEQ ID NO: 4116229 - RNA, 130 nt, Human
uuacccaugggaaagggcauaauuagcuguuuucuaaugcauuugacgugaagaugcuugaaucagcacauaauugaauguauuaauagaaguagcaaauucuaauuaugagacuuaguuguugggguag

SEQ ID NO: 4116230 - RNA, 69 nt, Human
uuaccucacugggccucaguuuucucaccaugagauggagaaaauggagacuuugcccguguaagguaa

SEQ ID NO: 4116231 - RNA, 111 nt, Human
uuaccucucuugaucuggucugauacuguugguuuaaaaugcugauuugggauuauucuuagccaaaguagccaaagcacagcauuguguugacuguauuuugggagguaa

SEQ ID NO: 4116232 - RNA, 65 nt, Human
uuaccugugucaguauaugagaaaaaugaauuuaaaaacccucagaaugucacugacgcagguaa

SEQ ID NO: 4116233 - RNA, 83 nt, Human
uuaccuuaacuuuucuaggugugauaauggucgguuaauuacuuuuuuaaaaaaaauuacucaucagaggaaguuaaugguga

SEQ ID NO: 4116234 - RNA, 63 nt, Human
uuaccuuuuaggcaagcaucuuucuuauuuccccaccuaugaaaaaguaugccuauuagguga

SEQ ID NO: 4116235 - RNA, 55 nt, Human
uuacgauuauggcuaagcauugugcugaaaggaacauagcucagcauaaucgugg

SEQ ID NO: 4116236 - RNA, 74 nt, Human
uuacgucuuuaaaguuccuauauccaaauacaguuccauucugagguacugaggauuaggacuucaagauauga

SEQ ID NO: 4116237 - RNA, 81 nt, Human
uuacuaaauaaggcacuagcagaauuagugagguagauaggcuuauuucuuuuuacuuguggcagugacuuuucuuaguaa

SEQ ID NO: 4116238 - RNA, 74 nt, Human
uuacuaaguagucaguggaccaggucaauuuuccuucaaaggaaauguauuugacaguccuugcuaaaaaguga

SEQ ID NO: 4116239 - RNA, 68 nt, Human
uuacuaccacgccacccucagccccacaugccuccuccugucccuggggcugggggugugcugaguga

SEQ ID NO: 4116240 - RNA, 70 nt, Human
uuacuagauuuuuugagacagauguaaauggagauuuuccagcuccagcagcaggcuuaaggaaaaguaa

SEQ ID NO: 4116241 - RNA, 57 nt, Human
uuacuccuguaguaugaggcagguauuacauuuucugcuuuauagacaaggaaguag

SEQ ID NO: 4116242 - RNA, 69 nt, Human
uuacucucaguucccaggaggaagggguacauaggaccacacagggccuccugggaagcacuggggugg

SEQ ID NO: 4116243 - RNA, 81 nt, Human
uuacucuuaugaagaauguugcagugagcauccuaggcaauucgccuuaugcacauguaugucaauauuucccuagaguaa

SEQ ID NO: 4116244 - RNA, 61 nt, Human
uuacugagagaugguguguuuauaaacaaucguguuuacaaaagcacauauuucugaguga

SEQ ID NO: 4116245 - RNA, 75 nt, Human
uuacugagggcauaaaaguacuguguugucacacuucauuuaccaauuugcaguauuuuuuuguguccccaguaa

SEQ ID NO: 4116246 - RNA, 74 nt, Human
uuacugaugugccuuugagucugguccucacugcuguuuucagccgucaggccugcccugaaagcacauaguaa

SEQ ID NO: 4116247 - RNA, 93 nt, Human
uuacugcugcugcuugguuuacuaggauucaaauuagaacaguauccuuuugcuguaauuugugucugguggugcucaauucaguuuagguag

SEQ ID NO: 4116248 - RNA, 83 nt, Human
uuacugcuugccaaagauaauauucauuaacuagaguucacaucucaugcucuggauuaaagaaauuauuugcaagcaaguaa

SEQ ID NO: 4116249 - RNA, 102 nt, Human
uuacuguugaaugggagcgaacuacuuguugaucaguuguuaaacuuuccuuccccagaaagaugucaauucugcagcccaacaguaguuugcuugugguga

SEQ ID NO: 4116250 - RNA, 99 nt, Human
uuacuugagcugagauuuuaaaagcuuuguuaauagguuuggaagaggguauucuaaguuaacccuguuaauagauuuggaagauagcauucuaagugg

SEQ ID NO: 4116251 - RNA, 66 nt, Human
uuacuuucuucacauuuaaaugugguggcuugggggagaaaccauacuugaaauggauaggaguaa

SEQ ID NO: 4116252 - RNA, 62 nt, Human
uuacuuugcuuucucauuacaggcggccuuccccucugcuccacuggagagagucagaguaa

SEQ ID NO: 4116253 - RNA, 57 nt, Human
uuacuuuucugucaaauaugccauagcuacugcagugguguccugagggauagguag

SEQ ID NO: 4116254 - RNA, 69 nt, Human
uuagaaaacauaagugguaaagcauuaccucuauuaauaauauuuguaugcugcuuaugcauuuucuga

SEQ ID NO: 4116255 - RNA, 111 nt, Human
uuagaaauagccauaauaaagaacuuugaaaacacaccuagaaaacauccagggggccugacugacuuucuaagaugugguuucaagguucuuuauugugguuauuucuaa

SEQ ID NO: 4116256 - RNA, 67 nt, Human
uuagaaccaaaaaguccagcucuaaauaucugacuggcuuggucagagcugagcugugagguuuuaa

SEQ ID NO: 4116257 - RNA, 111 nt, Human
uuagaaguuagugcaaguauugaauuggcagaccaucuuauuaacaaguuauaaauaguuuguaucaaauaaguggucagaugagaaguucauaauuugcaaagccucuga

SEQ ID NO: 4116258 - RNA, 75 nt, Human
uuagaauaagagugggcaauagaucaagaccaaggguuauuuaaaguugugauuucuuugcaagcuguguucuaa

SEQ ID NO: 4116259 - RNA, 86 nt, Human
uuagaauauuugaagaugagguaguacuuuccuguaucuuuacacugugaguaucaacuaucucuuuugucugcagcuuagucuga

SEQ ID NO: 4116260 - RNA, 130 nt, Human
uuagaaucaccuggagagcuuuuuagaaaugucaaugcuggggccuccccaugcccagggacucacuuucaauuggucuggaauagguccugaguauuaaaugcuuuuaauagcuucuaagugauucuaa

SEQ ID NO: 4116261 - RNA, 125 nt, Human
uuagaaugccuuuuaaaguaauguacuccaguguuaucauaaguaauugaaauaagccuacacauaguuuacucaauuauuuugauguucauugagaugaguuuuguuuccaguaaauauucuga

SEQ ID NO: 4116262 - RNA, 91 nt, Human
uuagacaacgaguaauagauguaguuucuaaaagccuugaugugucugcagugacaagugcagaggaauaaccucauugcuuuuugucuga

SEQ ID NO: 4116263 - RNA, 65 nt, Human
uuagacuagacauuuuuuaaggucaaaggcuacaucuuauuggcugcucuguguuuaguaucuga

SEQ ID NO: 4116264 - RNA, 85 nt, Human
uuagagaaacagcaggugguaggcagucagcagcucugccacuagcuuguugugugacuuccagcugguucccugcccucucuga

SEQ ID NO: 4116265 - RNA, 83 nt, Human
uuagagaucccuugguggucaggauagucaaaugcuaaguuauuaacaugcucuuccuggcuagucauuuguuuugucucuaa

SEQ ID NO: 4116266 - RNA, 77 nt, Human
uuagagaugcuaaagggguaggccuccugcaccuugucagagccaaaggcagaaggccuaccucuugcaagagcuaa

SEQ ID NO: 4116267 - RNA, 85 nt, Human
uuagagcuaaagacauggaucucaguggggugucaaccuugcuugaaguaaucagcuguugucaccucacauccaaguguuuuga

SEQ ID NO: 4116268 - RNA, 62 nt, Human
uuagagcugucagcguuuuggccauugugccaagaucaguggaaagacauugcagauuuuaa

SEQ ID NO: 4116269 - RNA, 73 nt, Human
uuagagcuuucugggaaguguuaaucuugaacugaaccuuaagguuaaauagguauuuuccagacagugcuaa

SEQ ID NO: 4116270 - RNA, 81 nt, Human
uuagaggagcacuuuaaaacaggucaaguguaaccaagacuaaauugaaaaugcauuauucuuuuuugguaggcccucuaa

SEQ ID NO: 4116271 - RNA, 84 nt, Human
uuagaggugcuaauucuugggcuccaccccagacuuacugaaucagaaauucugaggacagagucuagcaaucuguauuucuag

SEQ ID NO: 4116272 - RNA, 55 nt, Human
uuagaguuaggauuugucuuuaggucuuuccucaaagccauaagccuaauacuaa

SEQ ID NO: 4116273 - RNA, 65 nt, Human
uuagaguuagguuuugcugaacaaguugaagauauuauucaugaauucuacaaaacugauucuga

SEQ ID NO: 4116274 - RNA, 75 nt, Human
uuagauauggcaggggaaaaggggugggagggggagacugagucuaucucauaauuguuucccagcuauauuuga

SEQ ID NO: 4116275 - RNA, 75 nt, Human
uuagaucuacaggacuauacugguaaaucugacccuguuaggaagcucagagaagucuuuugaauggagaucuga

SEQ ID NO: 4116276 - RNA, 103 nt, Human
uuagaugggaauauugcucaagcccuggagguugaggcugcaguuaacugugauugcaccacugcaguccagccuaggugauagagcaagacccuuucucuaa

SEQ ID NO: 4116277 - RNA, 87 nt, Human
uuagauucacugggguuugggaauaugguagcuuauuaggaggguuggaguagguucauauucuagaaucauagccauagaauuuga

SEQ ID NO: 4116278 - RNA, 106 nt, Human
uuagauuugacugccuuuuaguuuacaggugaaugcucacauucuaaucagagaagaugauugggauauaaagcauucucagaaaccaggaaguaugcauuucuga

SEQ ID NO: 4116279 - RNA, 55 nt, Human
uggcuuggugagcagaguguaggccggauuucagcccccguuugccgcccagcca

SEQ ID NO: 4116280 - RNA, 74 nt, Human
uggcuuguucuuuggauucugguuucuucaucuguaaaaugaguugaauuagcugaccucuaaggagccuucca

SEQ ID NO: 4116281 - RNA, 70 nt, Human
uggcuuuaagaugucuauaaaaccaagaauugacccaaguucuccuggcucuaaaaggcugucugggcca

SEQ ID NO: 4116282 - RNA, 59 nt, Human
uggcuuuaggagcuauauaccucaaaacuuuggcuuuaggagguauauaccuaaaacca

SEQ ID NO: 4116283 - RNA, 87 nt, Human
uggcuuugggggcagugguuucccuccucauguuuuauuuucaacucuuggggaaggaucaccacaaucuuuugugcuacaaaguua

SEQ ID NO: 4116284 - RNA, 129 nt, Human
uggcuuuggguccuggcuguaucccuuaccagcugugccuaggagcagggcucgugguggccucuuggugcaugguuaggacuuuaguagggcucuuagugcaugguuaggaccuccacccagaagcca

SEQ ID NO: 4116285 - RNA, 79 nt, Human
uucucaugccagcaacuaggagcugaauucuagaaauuauagcaaguucaaauucaauuuucuuaguguuggucuagaa

SEQ ID NO: 4116286 - RNA, 57 nt, Human
uucucauuuaugucuuugccauccauaaacucuagugggugauuuugaaagugagaa

SEQ ID NO: 4116287 - RNA, 100 nt, Human
uucucauuuuccauaagcaucgagaacacugugacaauuccugucaaacguuagaaucuucaggaaguccaguuucauuugaggucaguaaagaugggaa

SEQ ID NO: 4116288 - RNA, 123 nt, Human
uucuccaaaaucuucagaaacucucauuuuuguaucagaaaucaacacacaguggugagugagcaccaacuaugcaaucguucuaggugcaggagaugggaaaauauucuugaagugagagaa

SEQ ID NO: 4116289 - RNA, 55 nt, Human
uucuccaacacaagcaugaugucuuggugacauccggcuuucaauguugguagaa

SEQ ID NO: 4116290 - RNA, 82 nt, Human
uucuccauaacacaguguccucagaaacacagcaaaaauuauaccugcugaauugaauuugcaggauaguugugauugagaa

SEQ ID NO: 4116291 - RNA, 95 nt, Human
uucuccaucugcuaaauggagaguauuguaauagcaccugccucaucaaauuguuaugaugauuacauguguuaauauacauuaagcauggagaa

SEQ ID NO: 4116292 - RNA, 68 nt, Human
uucuccuacuccauaagagccaagcagcaguuccucuugagcugugugcacugccuuuuguggaagaa

SEQ ID NO: 4116293 - RNA, 73 nt, Human
uucuccuaucauuuuugcuuucccaauuuauuaguauaaagacagauggcaaggaugaugagaaccaggggaa

SEQ ID NO: 4116294 - RNA, 80 nt, Human
uucuccugacaaaccugcuucuggcuucaucugacaagccccucuggggaggucggccccagccagcuggguuuagggaa

SEQ ID NO: 4116295 - RNA, 91 nt, Human
uucuccugaucucaugcccuguauacuugguacuauauuucauuuuccuauaauuuuguaaugcuuuugauacagggacauuucagaggaa

SEQ ID NO: 4116296 - RNA, 76 nt, Human
uucuccugguuuaaaauuacugguuaagguuauuuugcauucacaaauguuaaacaguauaucugagcaaggugaa

SEQ ID NO: 4116297 - RNA, 63 nt, Human
uucucuaaaauuaagugagguaagcuagaaaagucaagccaauuguuccuugauuagagagaa

SEQ ID NO: 4116298 - RNA, 87 nt, Human
uucucuaagcaaucuguagaagauacucugagauugugugacuauccuuuuucucaguguguuuucucucagaggaugcugccugaa

SEQ ID NO: 4116299 - RNA, 63 nt, Human
uucucuaagccuuaguuucuucagcuguaaauacaggauaacaaggagcuaugcuucagagga

SEQ ID NO: 4116300 - RNA, 61 nt, Human
uucucuaaggcuuggcuucccuuugcugcugcagccccguagggaggccagccucagagaa

SEQ ID NO: 4116301 - RNA, 75 nt, Human
uucucuaagucugcauauuguuaauggaaugaagacuauuuugcuccuaguuucauguauguauauuuaggugaa

SEQ ID NO: 4116302 - RNA, 76 nt, Human
uucucuagcuggaagggcauuuuaaggccuccagaagauacggccagacaaauaaaugucuucuagcucuugagaa

SEQ ID NO: 4116303 - RNA, 59 nt, Human
uucucuaucucauggaaaggcagugguccguggcauuggcuacuuuaugagguugagga

SEQ ID NO: 4116304 - RNA, 73 nt, Human
uucucuauugaccaaaaaauucccugugagacacagaucuaauguguuuauauaauuucuuggugguagagga

SEQ ID NO: 4116305 - RNA, 66 nt, Human
uucucuccuacccaguauccauuguaaguacaccauuuuuucuugcuggguccugugggagaagaa

SEQ ID NO: 4116306 - RNA, 59 nt, Human
uucucucucucugugugugugcgcugcccgugcaugcuugcaugcuuggagagagagaa

SEQ ID NO: 4116307 - RNA, 55 nt, Human
uucucucucuugaaguauuagcuagagacauuugugcagaaaaagagagagagga

SEQ ID NO: 4116308 - RNA, 114 nt, Human
uucucugaaaacaaagaauauagucaaauggcagggauauuuuggaggccauugauaccguucugaaauucucucuccauagggcugcuguuuuugcuacuuccuccaggagaa

SEQ ID NO: 4116309 - RNA, 58 nt, Human
uucucugauguucuucauugucauccacauggaguagagcaaauggacacucagggaa

SEQ ID NO: 4116310 - RNA, 64 nt, Human
uucucugccucuagcuauauucuguagaccgguuggggagggaguacagaggagagggagggaa

SEQ ID NO: 4116311 - RNA, 64 nt, Human
uucucuggagaaaauaguuucuucucuagaagguguauaaggagaagaaaacgucuucagggga

SEQ ID NO: 4116312 - RNA, 83 nt, Human
uucucuggccauagcuggcuagaauagggauagaccuugaccuaagucaagccuaucaaauucugccuccuaugaguuuagaa

SEQ ID NO: 4116313 - RNA, 119 nt, Human
uucucuggcccaggcugaggccaagccacaagcugggaggacaacuuggagcucaggcguccaaccagggcugcaaauugccccugcagggcccggccgagucugaaggagccagagga

SEQ ID NO: 4116314 - RNA, 80 nt, Human
uucucugggguucaguaucucucucugauguacauacacaaucccaauaauauuuaugagaguuaugagcgccagcagga

SEQ ID NO: 4116315 - RNA, 62 nt, Human
uucucugguuugcuguuucugaaaggaguucccucaacagaguacaacaguuaaugggggaa

SEQ ID NO: 4116316 - RNA, 106 nt, Human
uucucugucauugauaccacucugucauuugucugcucccucuggccacaaccucccugagagcagagagcagaauagaaggcagggucuuuauucuggcuaugaa

SEQ ID NO: 4116317 - RNA, 57 nt, Human
uucucuguggauugggugagaggcaggagaucagccucagagaaccuaagcggagga

SEQ ID NO: 4116318 - RNA, 81 nt, Human
uucucuguguucugcagagguaauuuacagauuucuagagagcugucuuucugccuccugaugaauaggauacuagaugaa

SEQ ID NO: 4116319 - RNA, 109 nt, Human
uucucuguugagccuuauaagcucuucuguuucaagacugcuacuuucaaaaauagguaugagcugcucugggaaacagaaguuguuuguuguuugucacuucagagaa

SEQ ID NO: 4116320 - RNA, 60 nt, Human
uucucuucagcccagcuaaguguaauuaucuucacuuucuuaggcugagguugacuagaa

SEQ ID NO: 4116321 - RNA, 77 nt, Human
uucucuucccucucaucugcuggauugaauguugaugugauggagucuuggauccagaggugaagaugggaggagag

SEQ ID NO: 4116322 - RNA, 114 nt, Human
uucucuucuuggagaccuuuggcaacacuuggacaaggcacagccuggguaaugaggaagucccugcaacacagcucagugccuccaagauuuccagauacacagagaagagga

SEQ ID NO: 4116323 - RNA, 55 nt, Human
uucucuugguuagccuggcaaaaggcuuaucacuuuuguugagcucuucaaagaa

SEQ ID NO: 4116324 - RNA, 59 nt, Human
uucucuuuauguauuuaguggguuugaaauuuacagucccaacuuggucauaaagagga

SEQ ID NO: 4116325 - RNA, 59 nt, Human
uucucuuuccacagcauguccaugcuacccuuuagugugcaauuuugugggaggcagaa

SEQ ID NO: 4116326 - RNA, 61 nt, Human
uucucuuuuguuuugaacuagcucagaauggaaauaucugauuuguucuaggcacugagga

SEQ ID NO: 4116327 - RNA, 73 nt, Human
uucugaaaaguuuggauuagcaguuagagccuaagaggcuuuugcugugaauaauucugacugauacucagaa

SEQ ID NO: 4116328 - RNA, 56 nt, Human
uucugaaagaggcaggagauggguauuugcucucaccaggcuccucuccuucagga

SEQ ID NO: 4116329 - RNA, 85 nt, Human
uucugaaucacaggugaaguccuuuagaauacugcuucauguaggggagaagaagugucuuuauagacugacaauugauuaagga

SEQ ID NO: 4116330 - RNA, 86 nt, Human
uucugacacaucauaccauucccaauuugcuaauauguuccuuuugaauaugcuuuagugucaaguuuggggugggguggacagaa

SEQ ID NO: 4116331 - RNA, 64 nt, Human
uucugacacuccaucccuucucacucugcaggggaaucuugcuggaagguggcuggaaucagga

SEQ ID NO: 4116332 - RNA, 67 nt, Human
uucugacaucauuaguaacauagcuuguuucuacacacaugggcuuggcuaugauuaaugacuagga

SEQ ID NO: 4116333 - RNA, 63 nt, Human
uucugagaaguaaaauggcguuuccuuggccugugagagggaacuagucagugauucucagaa

SEQ ID NO: 4116334 - RNA, 88 nt, Human
uucugagagauuaaauugcugaggcaaaccaagaauguauuucaauacauuaauugcuuugcuuuugucuaaaugauaguuucuagaa

SEQ ID NO: 4116335 - RNA, 74 nt, Human
uucugagcaauuaauggaaaguaaggaagguuccauuuaaccuugaccauuuacugucuaauagagucuuggag

SEQ ID NO: 4116336 - RNA, 57 nt, Human
uucugagggugcuauucuugccuugucugggaaaggucucuacagcaucuuucagaa

SEQ ID NO: 4116337 - RNA, 59 nt, Human
uucugaugaggaggucucuaagcaaaccaccgaucugcuuaaagccucccucauaagga

SEQ ID NO: 4116338 - RNA, 56 nt, Human
uucugaugcagggauuuuaagugcuuugugcccugucauauccccagcaucuagaa

SEQ ID NO: 4116339 - RNA, 78 nt, Human
uucucugacccuguaaauguccugcuacagagugcauacgaaaggauguacuuaggugagauauuuucuugcagagaa

SEQ ID NO: 4116340 - RNA, 85 nt, Human
uucucugcagaauauggagaccuucaagggcaaacgggagguucucauaguuguccuuuaauguuuaguauuuuuaugcggagaa

SEQ ID NO: 4116341 - RNA, 76 nt, Human
uucucugcagcccucagaucagcuuguuggcacaggacaauuaauguguucugggcuguccagagggugaggagaa

SEQ ID NO: 4116342 - RNA, 83 nt, Human
uucucugcauauuucauuugccugacuuugguggacaggauaauuaauauuaauauccaggcuucaugaauuaugcaccugaa

SEQ ID NO: 4116343 - RNA, 108 nt, Human
uucucugggguugcaggugacuggcaggcgguauuccugaugugauggggcagugcauggcaccagcuucacaguauaggucccugaguagucacguaccuuugagga

SEQ ID NO: 4116344 - RNA, 65 nt, Human
uucucugugagggugcuggauuugaguccuacccaccagcuucgcccagcacccucucagcugaa

SEQ ID NO: 4116345 - RNA, 66 nt, Human
uucucuuggcagauggauucaacauuauuaucuucauugagaaugauucugacacugccuagagag

SEQ ID NO: 4116346 - RNA, 55 nt, Human
uucucuugugccaaguuguugccuccucccucccagcccuuaggacauaagagag

SEQ ID NO: 4116347 - RNA, 98 nt, Human
uucugaaaaacauuuugccuauuguagcuucuauacaacuucagcacugcaauaaagccaguucucgggugaguauggcagccaguugcaaaacagga

SEQ ID NO: 4116348 - RNA, 56 nt, Human
uucugaaaccacugaccaacuaagcugcaagugaaaaguugaggugguugucaggg

SEQ ID NO: 4116349 - RNA, 70 nt, Human
uucugaaaggcaugucagguaguuagacaagguuuuaucaguaugaauugccuuucaugccuucccagag

SEQ ID NO: 4116350 - RNA, 94 nt, Human
uucugaaagguaauuguauguuccaagcagccgauauuaacaacuuccaucacgacucuaggaauaauucgcaguucugaaccauguuuuagaa

SEQ ID NO: 4116351 - RNA, 60 nt, Human
uucugaaagucuuuuuaaguuaauugaauuauuccaauugccuuagagaaauauuuagag

SEQ ID NO: 4116352 - RNA, 61 nt, Human
uucugaaguauuuacagggacaauaauauguuaggugggguuguuuuaaaauacuccagaa

SEQ ID NO: 4116353 - RNA, 65 nt, Human
uucugaagucaucagauggcaguuuccaugcccaugguuuuuuucugcccuagauggcucuggaa

SEQ ID NO: 4116354 - RNA, 80 nt, Human
uucugaauuuagcaguccuccucacaaugauuagauuaguacauuuugcauuuggggaugauuauuuaaauuuaacagaa

SEQ ID NO: 4116355 - RNA, 70 nt, Human
uucugacuuugcagugugggacacccgggggaauccucuaguucauucucaugcaugcauaagucuagaa

SEQ ID NO: 4116356 - RNA, 60 nt, Human
uucugagaaacugcuuugugaggugugcauucaucucacagaguuaaaaguuucuuugga

SEQ ID NO: 4116357 - RNA, 55 nt, Human
uucugagagagccucucauguuuccauagaaacccacacagagaaucucuaagaa

SEQ ID NO: 4116358 - RNA, 70 nt, Human
uucugagaggguggcauuugagcagaugucuagaagacaugcuaaagcaaacugugcuacuauuugagaa

SEQ ID NO: 4116359 - RNA, 63 nt, Human
uucugagagugccagaaguucucauaaaauaguuaaucugcuguaagcucuggcauacuugaa

SEQ ID NO: 4116360 - RNA, 78 nt, Human
ugggcuuccagugguggcucccggaccugccuugggggcagcaggagagguugggagaggucacccugaugaagaaca

SEQ ID NO: 4116361 - RNA, 109 nt, Human
ugggcuuuucucgcacuccaccucugaagguuucuguuacugucuuuucaagagaaucuaguuucagacuuugaguucuguggcugugggcaaaaaccaaaaagaccca

SEQ ID NO: 4116362 - RNA, 75 nt, Human
uggggaagaaaaaacuagguuuguggccaaaaguaaucauauaauaggccugauaagccuuuucuuucugcccca

SEQ ID NO: 4116363 - RNA, 74 nt, Human
uggggaagaagagcuugucaaaauuccagauuucugucucugacaccaaucuucuacuugacaguucucucaca

SEQ ID NO: 4116364 - RNA, 70 nt, Human
uggggaagauuuacuaucuaccacauaugcuucaucuuuauuguguauuuggcuauugaauuauuccuca

SEQ ID NO: 4116365 - RNA, 57 nt, Human
uggggaaggcggagcuugcagcaccugggaugcaccgguucagcccugccguuccca

SEQ ID NO: 4116366 - RNA, 85 nt, Human
uggggaauugucuggaauguuuaauaccauccagaugacaucaucauaaccugguaguauuaaaugugacucuggcacuuuccca

SEQ ID NO: 4116367 - RNA, 60 nt, Human
uggggacaggccaugugcagcaagcugggaagagauaaauugcacacacccuguccucca

SEQ ID NO: 4116368 - RNA, 129 nt, Human
uggggaccgaggaaggagccaggcagauuuuguuagccauguugaagauuuagaacucaagcaaacuuauccaaaacuuagaaauauggcagaaaggaagacugcaguuucuuuccacgucggcuuaga

SEQ ID NO: 4116369 - RNA, 55 nt, Human
uggggagauuguuaaauuuagauucugauucaguaagucuguaacaagcucccua

SEQ ID NO: 4116370 - RNA, 100 nt, Human
uggggagcgaaugaggcuucugggcuggcuuuaugcugacaagggccuucugcacugucagcccggccccagcucccagcaagucuccuuucgcucccca

SEQ ID NO: 4116371 - RNA, 60 nt, Human
uggggagguaugauagcuguguccuugaggacacuggaggagguagaagauacuucccua

SEQ ID NO: 4116372 - RNA, 82 nt, Human
uggggaggugcugcuggcauccaggaugcagaggccagggaugcugcauaacauccuacaaugcacagaauagcccucacca

SEQ ID NO: 4116373 - RNA, 84 nt, Human
uggggaguuccaucuugcccuuauguguagucuggggggauuaucccauuuacagaagccaaaggggccagauaugccuucuua

SEQ ID NO: 4116374 - RNA, 61 nt, Human
uggggaugcagucagagccccugugcggcuuuaccagcauacgaccuccuauugcccccca

SEQ ID NO: 4116375 - RNA, 101 nt, Human
uggggaugcuggucucucccucagcugccagccaucgucguugcuuuucccucggagcucugaggaugcauuggugggggagagagcaccacguguuccca

SEQ ID NO: 4116376 - RNA, 61 nt, Human
uggggauggaagagaagccacguugguuuucaggaccagaaauggaauuuuccaucacccg

SEQ ID NO: 4116377 - RNA, 62 nt, Human
uggggauguaaaugaggugauaggaggggccucaaguccuuggucuccucuuugcauuccua

SEQ ID NO: 4116378 - RNA, 70 nt, Human
uggggcaaccuagagggagcggaaccuggucauguuuacaggaaagggcucagucccuggguguguccca

SEQ ID NO: 4116379 - RNA, 62 nt, Human
uggggcaggcccggggaaaugggccaacuuccccucaagaccccaggccugggccugcucua

SEQ ID NO: 4116380 - RNA, 88 nt, Human
uggggcagugcaaaagccugaccaugcugaucuccauuggguggguccaauggaagaacgcucaggguuacgucaggaaggugcccua

SEQ ID NO: 4116381 - RNA, 130 nt, Human
uggggcaucuccccaugcccaccacacucacaaagcuccauggguacucagacauccgcagcagcaugcuggggucuggaguugcccaugagagugcaaggagucuuguggagucaugggguuccuccca

SEQ ID NO: 4116382 - RNA, 73 nt, Human
uggggccagcuucucugcugccugugauucagggaauagggacagggacugggagaggggcugcggugcccca

SEQ ID NO: 4116383 - RNA, 68 nt, Human
uggggccugcaguagagguugguagggggagcuguaguuucuauauuaaagugcuuugcagugucuca

SEQ ID NO: 4116384 - RNA, 63 nt, Human
uggggccuggagcucuccacuuggggcugccugcagcuuguguuucugcuucaguuuauccca

SEQ ID NO: 4116385 - RNA, 57 nt, Human
uggggcgaggcccagggggcugcagcaggaccuucaggcgcucuggguuucguguca

SEQ ID NO: 4116386 - RNA, 129 nt, Human
uggggcucauuggugauuauugcaccaaauuucugagccucauucaugaggccccugaauucuuuucuucucaggagcuucugaggaaggcucagccuuggguaaagucagaguauuccguaucuucca

SEQ ID NO: 4116387 - RNA, 118 nt, Human
uggggcucccaccaacaggaugaaggucaaugcccuuaaggucccuagaaauccuacugcuugauugaggaggaacugugaggcaacccuucaucucuguagagugacuagagucuca

SEQ ID NO: 4116388 - RNA, 62 nt, Human
uggggcugagagcaaaccaagaaugaugcaaguucacugcaguuugcccuuugcucacucca

SEQ ID NO: 4116389 - RNA, 62 nt, Human
uggggcugcuccuccauggggacuguguccaucuugggaaggcccaggagugagcagcuuua

SEQ ID NO: 4116390 - RNA, 58 nt, Human
uggggcuguggauucucacgaaggggcagggccugcucuugaggggcucacagucuca

SEQ ID NO: 4116391 - RNA, 110 nt, Human
ugggggaaagggacuagagaugguuggaauccuggguaaacacugaccuuuuaguauucuagaggugagauuuaauucacugcuaauuaguguugguuuuggcuccccua

SEQ ID NO: 4116392 - RNA, 55 nt, Human
ugggggagaguuuagaugauuuuggccacuugguuucccuugauuuuuuccccca

SEQ ID NO: 4116393 - RNA, 60 nt, Human
ugggggagccuucacaguagcugccaagcagagguccuggcacuggggaggguucucaca

SEQ ID NO: 4116394 - RNA, 59 nt, Human
ugggggagcucaguccagcccagcucccaauugcugcagcgugugugugggcuucucca

SEQ ID NO: 4116395 - RNA, 65 nt, Human
ugggggauauuuugcugugguacauuaggaggauaauaauccuucuauaagcaaaauguuugcca

SEQ ID NO: 4116396 - RNA, 66 nt, Human
ugggggccacagaccugagugaagucucaugcagcggcaaaaugaucuucuucaggcuuaacccca

SEQ ID NO: 4116397 - RNA, 55 nt, Human
ugggggccagcuccauugugaauaacaccaccgucuucaagauggauggcuccca

SEQ ID NO: 4116398 - RNA, 130 nt, Human
uuaucaugcucauggcaucaccugggaccugauuucuucaccagugucuuauugaccaucuuucuaaaggagggucuaagggagaacugaugaaauaagucauaaauuccaaguguguuauacaugcuaa

SEQ ID NO: 4116399 - RNA, 123 nt, Human
uuaucauuucccauccaauucagucugcuuugcuuucgugaacuguaggucaaauuguguauggaugaauuggcagaacuuuauauauucaugaacacagauugaaagucagaagaaugguga

SEQ ID NO: 4116400 - RNA, 57 nt, Human
uuauccaggaaaauagucuggaacuaugaguuuguguuuguuuuaaauccuggauga

SEQ ID NO: 4116401 - RNA, 63 nt, Human
uuaucuacguauuuaaacucuugaaggaaagacaacugacugaagaguugaauagguaaguga

SEQ ID NO: 4116402 - RNA, 60 nt, Human
uuaucuccaucuucuguuagacuccuuaaaaacagcagcccacagcagguguggggauaa

SEQ ID NO: 4116403 - RNA, 97 nt, Human
uuaucucccuccccuguauagccuggaccaggggccucagaaguugcagacucuuacccaaauaccucuucccuuuguccaggcaucacagagauga

SEQ ID NO: 4116404 - RNA, 63 nt, Human
uuaucugaaauguuuggguccagaagucuugugaauuuuggauuuuugaauauuugcacauaa

SEQ ID NO: 4116405 - RNA, 129 nt, Human
uuaucugcguauuagagcaccuggagaaauuuaaaggcuauggcugccuggguccugcuuccagauauucugaguuaauuguuccagggaguuuuuaacguuucuccagugauucuaaaguacagccaa

SEQ ID NO: 4116406 - RNA, 55 nt, Human
uuaucugucaucaggcagacagaucuucugaaccuaaugucuaagugauagauag

SEQ ID NO: 4116407 - RNA, 64 nt, Human
uuaucugucuaucaagacuagcaacuugugcaacagcauuaagaaagaguggauggauaggugg

SEQ ID NO: 4116408 - RNA, 79 nt, Human
uuaucuguugcuuaaugcgcauuaggaaaggacaauguuauuguagucugcaggaugcuauuaauaaaguuauggauaa

SEQ ID NO: 4116409 - RNA, 78 nt, Human
uuaucuuccucgccuugagacagugggguguugccggacguuuucuugcgguguggguguguuucgugggggagauaa

SEQ ID NO: 4116410 - RNA, 81 nt, Human
uuaugaagcaacauccauuugucagcucuugagucauuacuuuugacaucaagcaaagauacaaauggaaggcgaacauaa

SEQ ID NO: 4116411 - RNA, 72 nt, Human
uuaugaauccguuuuuaugaaauguccaaaauaggcaaaucuauggacagaaaguagaaagcagauucgugg

SEQ ID NO: 4116412 - RNA, 85 nt, Human
uuaugaauuucccugaaguuuguaugaauguuuuaugcuaaccaaauuuacaagagauuaucuacagaugagggucaguuuauaa

SEQ ID NO: 4116413 - RNA, 77 nt, Human
uuaugagaguuaaggaccuacucaguuauucccuaauuaaaucuugggguuccugagcaguuucuuagggcucauaa

SEQ ID NO: 4116414 - RNA, 58 nt, Human
uuaugcacuuagcuccaagcuacaauagaugaggguacaguggagcagguaggcauga

SEQ ID NO: 4116415 - RNA, 61 nt, Human
uuaugcauagcaucugcaaauguuaggauagcuguaugcccaagaugcuaugguagcauga

SEQ ID NO: 4116416 - RNA, 64 nt, Human
uuaugccuguuaggcagcaucuuacgcccaguguucucccagauauucugccuaacagguuuaa

SEQ ID NO: 4116417 - RNA, 75 nt, Human
uuaugccuuugacagcuauuuugcuuugauauuuuuguagugaaaaucauagaacugugguuguuagugcuauaa

SEQ ID NO: 4116418 - RNA, 57 nt, Human
uuaugcuuucaccuccuugacuacugagcucaagggucacaaaggugagggacauga

SEQ ID NO: 4116419 - RNA, 97 nt, Human
uuauggaauuuggaauaaggcaaggauguacugcaauaggaugucguaucuggacuuuuuuaaaaaagugucuuugauuauaagacaaauuccauag

SEQ ID NO: 4116420 - RNA, 80 nt, Human
uuauggacauuaaagcgauguagaaaauguuaauaaacccgagaaauaaagcauaaucuacauuuucuuuauguacauga

SEQ ID NO: 4116421 - RNA, 71 nt, Human
uuauggaucuuggauuauguuuauucuucaugacaaccugcugucauuuaauagauaugaugggucuuuaa

SEQ ID NO: 4116422 - RNA, 57 nt, Human
uuauggcauucauuggggcuuuuucauuuaagaggcagcauucaaaagaugccauaa

SEQ ID NO: 4116423 - RNA, 91 nt, Human
uuauggucugauaaugaugaaucagaguuguuagggcaccuaacacucauauucuuaacaacugcuaagguguguccuuauuagacuguaa

SEQ ID NO: 4116424 - RNA, 124 nt, Human
uuauguaucuuauuucuguagcuagacugaaaccuuguggaguaaggugggcauaugaaugaauuaacaaaaugugcuuucuuuguuucauaauuugcucuaucucaaaucuucagauaucuaa

SEQ ID NO: 4116425 - RNA, 63 nt, Human
uuaugucuguauuagucagcauucuccagagaaggagaagcaauaggacauauauagacauag

SEQ ID NO: 4116426 - RNA, 67 nt, Human
uuauguuacaaaguuuuucuaaaauggguucaauauugauaauauuuugagagaagcuaugacauaa

SEQ ID NO: 4116427 - RNA, 79 nt, Human
uuauguuuauuccuaaaguaauacacuagaauuuuggauugcuggccaaucuccugugauuuuggugaauaugacauag

SEQ ID NO: 4116428 - RNA, 116 nt, Human
uuauuacaaaucauuaugcacauuuucuguucaagacugaggugacacuggugucaaaugaaaucaugucacuguuggucuuauggagauuaaguuacuaaguaaagauuaaauaa

SEQ ID NO: 4116429 - RNA, 75 nt, Human
uuauuacuuccauguccuuagaguccaaaaacuucaauaagucaaacugcacauaaagggcaugggaggugcuaa

SEQ ID NO: 4116430 - RNA, 130 nt, Human
uuauuaucuugacuaccugaauugcgagggauuuuuauauauucauauguuccaaagucagcaacucuccuguugguucauuauugaaugugcuguaaaugaagucuuuugcaacuaaaaugagauuuga

SEQ ID NO: 4116431 - RNA, 56 nt, Human
uuauuauuccccaagucauuauuugaacaccuagaauggugcuuggcaaauaguag

SEQ ID NO: 4116432 - RNA, 128 nt, Human
ugucacuuugcuucucuaaacuaggaaaacugauaggacuuuugaauaagguaggauauaagauuuaaaaauauaaauaggucauccccuccaaaaaagccguuuguauguuuaacuggugagugaca

SEQ ID NO: 4116433 - RNA, 63 nt, Human
ugucagaaauucuuuccaaagaaaauacuuccacugcuuucuggggaauguucauuucugaca

SEQ ID NO: 4116434 - RNA, 72 nt, Human
ugucagaauaagccauuuggacuucugguaggcuguggggagucacugaagucuucaaguaggagaaugaca

SEQ ID NO: 4116435 - RNA, 84 nt, Human
ugucagacuuuagaaucaugugaacagccuauuucuuuuugugacagauguggaguuugcaugauaaaggauuagggucucaca

SEQ ID NO: 4116436 - RNA, 62 nt, Human
ugucagagcuggaggcaaguucugaaaccaccagagccagccuucucagcuuacaaaugaca

SEQ ID NO: 4116437 - RNA, 65 nt, Human
ugucagagggacaugaggaugaucuagaagggguauguaccacuuccacucguauucuguuggca

SEQ ID NO: 4116438 - RNA, 92 nt, Human
ugucagaugccacauaguuguugaacucaaugucugcacaaugcacaguguacaaugucuggcagauauuaggagcucaauaauguuugaua

SEQ ID NO: 4116439 - RNA, 70 nt, Human
ugucagcaaagccauuuagggauuagagcagcucccucaguaaaagcugcuuauucaaaaggugcuuuca

SEQ ID NO: 4116440 - RNA, 61 nt, Human
ugucagcagaaaucuggucugcuuucugaaaugggauguagguuuccaaauucucuagaca

SEQ ID NO: 4116441 - RNA, 59 nt, Human
ugucagcagcugaggccuuagaugagucauagucacugcaggagacacagcugcugcca

SEQ ID NO: 4116442 - RNA, 56 nt, Human
ugucagcuccuccugagugcggcuuccagaauggcugggccuagaggaagcugaca

SEQ ID NO: 4116443 - RNA, 71 nt, Human
ugucaggaggcccugaagacagcuggggugagagcuagccaucuugccucggucuaucagggugccaggca

SEQ ID NO: 4116444 - RNA, 76 nt, Human
ugucaggcaugacugaggucuuagagucacccaaauaaaacuuaucuaugugcucugaccucuccuccuucugaca

SEQ ID NO: 4116445 - RNA, 67 nt, Human
ugucagucugagucuaauugaacguaccaucugauucugagaugaacaugugacucagaccuggaua

SEQ ID NO: 4116446 - RNA, 61 nt, Human
ugucagugguccucagccucggcucauguucaaaucacauggaaggcuuggaauacuucca

SEQ ID NO: 4116447 - RNA, 57 nt, Human
ugucaguuuccugugcccugcugucccacagcugaagcaacaacaggauggcagaca

SEQ ID NO: 4116448 - RNA, 101 nt, Human
ugucauauuacagaugaagaaauugugguucaaagaguuaaguguccgcuaaguuuaaguauggacacauuuauggaucgcagaaacucgucugaaugaua

SEQ ID NO: 4116449 - RNA, 76 nt, Human
ugucaucaucagagugcagggaguagcagcaaguugggauucagccagcucuaaacuccuugcucucuuucggaca

SEQ ID NO: 4116450 - RNA, 66 nt, Human
ugucaucuugacugggauaagggauacccagauagguauuuauuauuuacccagauaggcauggua

SEQ ID NO: 4116451 - RNA, 66 nt, Human
ugucaucuuucuuacuaugaguuaugaauuuuguaaucacucaucuuucauggaagaaaugugaua

SEQ ID NO: 4116452 - RNA, 56 nt, Human
ugucauggacuggauuucugcugugagcuuccauuaggacuuguccauccaggaca

SEQ ID NO: 4116453 - RNA, 71 nt, Human
uguccaacuccagcucacacagugacccccaccaaaaugugcccaggucugugcuaagcuugagagggaca

SEQ ID NO: 4116454 - RNA, 65 nt, Human
uguccacaucugagggauuugucccuuaucugaaaaguagauagguggugaguucuucagggaca

SEQ ID NO: 4116455 - RNA, 57 nt, Human
uguccaccgguccugugaugggcccuguagggaacucuggauucacaggcuggggca

SEQ ID NO: 4116456 - RNA, 84 nt, Human
uguccaccgucuccacauagcacaggcugcugggcuccgugcuggccagcaagagcaugucggccugguguggaguggggggca

SEQ ID NO: 4116457 - RNA, 58 nt, Human
uguccagagucacagagcucaaagaaauuacagaaucuuucuccugugaauucuggca

SEQ ID NO: 4116458 - RNA, 66 nt, Human
uguccagauucuaguauagggagacaucaauacacaggugaaaaaacuaauuacagauuuuggaca

SEQ ID NO: 4116459 - RNA, 62 nt, Human
uguccaggugugucuaaagagauggcuuacagaagcaagugagcuuaaggcacacacuggca

SEQ ID NO: 4116460 - RNA, 65 nt, Human
uguccauggaaugugaacaugauggcauucugugagugaguuaugccagcgcauccaaaugaaca

SEQ ID NO: 4116461 - RNA, 65 nt, Human
ugucccaggaagcccagaauucuggaauggagacagucaaauucuaaagggguucucugcuggca

SEQ ID NO: 4116462 - RNA, 81 nt, Human
ugucccaguuuaucugggacuguccugguuuuaaaauggaaaacuccugggaacucccuuagucuggggcaaauugggaua

SEQ ID NO: 4116463 - RNA, 72 nt, Human
ugucccaugguacugccacagaagagucucagcucucuccaggauucaguucuaaggucagugccuaagaua

SEQ ID NO: 4116464 - RNA, 62 nt, Human
ugucccccacuccuggccccauccagcugcaaugccuggaagaggccagaaagugggagaca

SEQ ID NO: 4116465 - RNA, 88 nt, Human
uguccccccugcagacgucuugaugccucuucucucucaaguccaaaaauggaagcaaaggcagcaaaugucuggaacagcuuuaaca

SEQ ID NO: 4116466 - RNA, 62 nt, Human
uguccccuagaaugcucacaugcacuuaccuguugguggcugucacaagcaucuggggcaua

SEQ ID NO: 4116467 - RNA, 68 nt, Human
uguccccuuggccugcagucuccucaucccgcgaugguguggggagugacgcagggccauagggagca

SEQ ID NO: 4116468 - RNA, 70 nt, Human
ugucccgacaugauggcaagcugcagcacaucaugcagauuaaaguucagccugccucagacucaggaua

SEQ ID NO: 4116469 - RNA, 65 nt, Human
ugucccucaggcuggagugcaguggcgcgaucuccgcucacugcaagcucugccucccggguuca

SEQ ID NO: 4116470 - RNA, 79 nt, Human
ugucccuuauaacagucaacuuuuucauagcucugcauuaucuguacucaccucugaaaugguugcuuauuuaagggca

SEQ ID NO: 4116471 - RNA, 77 nt, Human
uguccgcaaagagcccuccaucagugaaggagacagauucaugaggauuacaauucagguugauaagggcugggaca

SEQ ID NO: 4116472 - RNA, 65 nt, Human
uguccgcugucuuccuugcuccaagggaacucuugcgugaacccugcaaaggagcccagcccaca

SEQ ID NO: 4116473 - RNA, 111 nt, Human
uguccgguaacauucuuuuagcauuuguaauguuuauuuuaaaauuggaaagaaauuaugaggccuuuaauguuaaauuuguagauguuuuugagaauguuaaccugggca

SEQ ID NO: 4116474 - RNA, 62 nt, Human
uguccuaacacucuucaucgcacuggauaguuaagguugauguuaagaagguaguuaggaua

SEQ ID NO: 4116475 - RNA, 59 nt, Human
uguccuacacaguucagccaggcuugugucuacacugggccuuggauuuguggaguuca

SEQ ID NO: 4116476 - RNA, 96 nt, Human
uguccucuucccuguugaguaacuaugcuugagaaucaguuuuacuaauggaagacugcuuaauuuaauaguugcaaaagauaucuuaggagagca

SEQ ID NO: 4116477 - RNA, 64 nt, Human
uguccugacgugcacaggaggccaacacuaacaggcagaaacuuuuaaccggcaugggagggca

SEQ ID NO: 4116478 - RNA, 58 nt, Human
uguccugcaagcccuaaugaauccugcccuaggcaguuuuagcaaguguuugagggca

SEQ ID NO: 4116479 - RNA, 62 nt, Human
uguccugcuguuauuggccucuguuuuugugaaaacagaugaguuauaauagcccaaugaca

SEQ ID NO: 4116480 - RNA, 55 nt, Human
uguccugucucuuuccuaauugaaugccaguuuuagcgggagaggggcagucaca

SEQ ID NO: 4116481 - RNA, 102 nt, Human
uguccuucaaauugcacucaccaagccugagccaugcuuuacugcugaaacauccuagcagagagaaguaaguggcucaggguggcccucuugugguggaca

SEQ ID NO: 4116482 - RNA, 87 nt, Human
uguccuuguuuaccccuuccuggaugaacaguagaaaaagaaagacucguuucaaucugcauucaggagauaggaggccugagggca

SEQ ID NO: 4116483 - RNA, 62 nt, Human
uguccuuuccacucauucacagugaagaguuugguuccacaguauaauguauggauggggca

SEQ ID NO: 4116484 - RNA, 60 nt, Human
uguccuuugagcugcccugugucuaugcuaaagacacauaagggucugcuggguaggaca

SEQ ID NO: 4116485 - RNA, 65 nt, Human
uguccuuuucuuuagugcagcugcuggcugauaaaccugcuccugcucucucuaaggcaaggcca

SEQ ID NO: 4116486 - RNA, 65 nt, Human
ugucgcccaggcuggagugcaguggcgccaucuuggcucacugcaagcuccgccucccggauuca

SEQ ID NO: 4116487 - RNA, 73 nt, Human
uugagagcaacaggugauggggcugugagcauugaagacuuugcuggcaggcccuggcccugcugucucucag

SEQ ID NO: 4116488 - RNA, 59 nt, Human
uugagaggucauuaggccaugaggaugcagaccucaugaauuagauuagugccuuacag

SEQ ID NO: 4116489 - RNA, 77 nt, Human
uugagauaaugguagauguccacgcaguuguaagaaauaauacagauucuguguuucauuuacccaguuucccucaa

SEQ ID NO: 4116490 - RNA, 79 nt, Human
uugagauaauuacugaagguggauagugaguacaugacaguuucauuauacuaugcugucuacuuuuguauaugcuuga

SEQ ID NO: 4116491 - RNA, 88 nt, Human
uugagauaucuucuguucaaauugauuuugguaaagcugucaaucauagaauucugaaugcaguguauagaguuggaagaugacucag

SEQ ID NO: 4116492 - RNA, 69 nt, Human
uugagauauucaguuccauugaacugggagacuuuguuucuuuuggcugucaaugacugaguugcuuag

SEQ ID NO: 4116493 - RNA, 70 nt, Human
uugagaugauaugggaagaagcaguguuauuuauuuaaguacagcauugcauuuuccuuuguccuuucaa

SEQ ID NO: 4116494 - RNA, 68 nt, Human
uugagauggaaaauagaacaggaagaguaauuucaacuaaauugagauaauguucugauccauuucag

SEQ ID NO: 4116495 - RNA, 56 nt, Human
uugagauggagccucagucuuguggcccaggcuggacugcaauggcgccgucucag

SEQ ID NO: 4116496 - RNA, 55 nt, Human
uugagauggagucucgcucuguugcccaggcuggcauguaauggcuccaucucag

SEQ ID NO: 4116497 - RNA, 103 nt, Human
uugagauggagucuugaucugucacccaggcuggagugcaguggcucagucuuggcucacugcaaccuccgccucccggguucaaccaauucuccugccucag

SEQ ID NO: 4116498 - RNA, 103 nt, Human
uugagauggaguuuugcucucuugccgaggcuggagugcaguggugcagucuuggcucacugaaaccuccaccucucggguucaagcgauucuccuaccucag

SEQ ID NO: 4116499 - RNA, 76 nt, Human
uugagcacaccgcgucuaaacgaauuggcuugaauauguuuccaaaguaccaaguuuguuugacgcuucagcuuaa

SEQ ID NO: 4116500 - RNA, 69 nt, Human
uugagccagauucagugcugggaguccagugugaucugccuggaucuugcugcauugagaacaggccag

SEQ ID NO: 4116501 - RNA, 67 nt, Human
uugagcccgggagguugaggcugcagugagcugugaucaugccacugcacuucagccugggugacaa

SEQ ID NO: 4116502 - RNA, 58 nt, Human
uugagcuugucacugccugggaaggagcagcugcauuuguccucagugacaaccucag

SEQ ID NO: 4116503 - RNA, 61 nt, Human
uugaggaauuagguuuuucaaaugugcauaagugcacuguugaaauauggauugaccuuga

SEQ ID NO: 4116504 - RNA, 69 nt, Human
uugaggcacacacagguugcauugugaugccaaccacauccuuuauguuguaacacugguguuucucga

SEQ ID NO: 4116505 - RNA, 101 nt, Human
uugaggcagaauugcuugaacccaugaggcggagguugcagugagccaagaccgcuccauugcacuccugccugggcaacaagagugaaacucugucucaa

SEQ ID NO: 4116506 - RNA, 103 nt, Human
uugaggcagagucuugcucuguuguccaggcuggagugcaguggcgcgaucucugcucacugcaagcuccgccucccggguucaugccauucuccugccucag

SEQ ID NO: 4116507 - RNA, 61 nt, Human
uugaggcccagagagguugcaugaccuucccaaggucaaugagagccacucugggguucaa

SEQ ID NO: 4116508 - RNA, 75 nt, Human
uugaggcugucaguggcuguggcauuaggugaggccccuuggaggggguggcccuaaccgcagccuccgucuuaa

SEQ ID NO: 4116509 - RNA, 104 nt, Human
uugagacagaguuucacucuuguugcccaggcuggagugcaauggcgugaucuugguucacugcaaccuccaccuccuggguucaagcgauucuccugccucag

SEQ ID NO: 4116510 - RNA, 117 nt, Human
uugagacaggagaaagggaaauaauccaagggugcauguugaauuggccaucacuauggagggcugaugcaccauguagccaggaauuucucaggaaucucauggaacaugucucag

SEQ ID NO: 4116511 - RNA, 104 nt, Human
uugagacagggucucacucugucgcucaggcuggagugcaguggugugaucucagcucacugcaaccuccaccucccgggcuuaagugauucuccuugccucag

SEQ ID NO: 4116512 - RNA, 101 nt, Human
uugagacagucucacucuguccccuaggcuggagugcaguggcaugaucucggcucagugcaaccucugccucccggguucaagcgauucgccugucucag

SEQ ID NO: 4116513 - RNA, 101 nt, Human
uugagaccgagucucgcugucacccaggcuggagugcaguagcucgaucucagcucacugcaagcuccgccucccggguucacgccauucuccugccucag

SEQ ID NO: 4116514 - RNA, 102 nt, Human
uugagacggagccuugcucugucaccaggcuggagugcaguggggugaucucagcucacugcaaccucugccucuuggguucaagcgauucuccugccucag

SEQ ID NO: 4116515 - RNA, 103 nt, Human
uugagacggagucucgcucugccgcccaggcuggagugcaguggcgcgaucucggcucacugcaagcuccgccucccggguucacgccauucuccugccucag

SEQ ID NO: 4116516 - RNA, 103 nt, Human
uugagacggagucucgcucugucgcccaggcuggagugcaguggcgggaucucggcucacugcaagcuccgccucugggguucaggccauucuccugccucag

SEQ ID NO: 4116517 - RNA, 101 nt, Human
uugagacggagucuugcccugucgcaggcuggaguacaguggcacgaucucggcucacugcaacuuccgccucccaggaucaagcgauucuccugccucag

SEQ ID NO: 4116518 - RNA, 103 nt, Human
uugagacggagucuugcucugccacccaggcuggauugcaguggcacgaucucggcucacugcaagcuccgccucccggguucacgccauucuccugacucag

SEQ ID NO: 4116519 - RNA, 58 nt, Human
uugagacugccuugucgucugcuguagcagugcccuuuauuucuggggcagaucucaa

SEQ ID NO: 4116520 - RNA, 80 nt, Human
uugagagaaccuugaacauugcuuuauuucuucuacacucuugaauguggaggaaauaaaaagaugguugguugucccaa

SEQ ID NO: 4116521 - RNA, 71 nt, Human
uugagagcacucgauacuaaacucaaaugggaugcucugugccuacaugcuuuuaguguuucacuucucaa

SEQ ID NO: 4116522 - RNA, 76 nt, Human
uugagagccacagcagggcuggacaggaucuccucgcaggggauucuacugaucagcaccacguuuagguauucaa

SEQ ID NO: 4116523 - RNA, 66 nt, Human
uugagagguaauuuuguguuaaugauuugcuacucaauucagucgccaaaauaccuuaauucucaa

SEQ ID NO: 4116524 - RNA, 60 nt, Human
uugagaguuaccagcagaggaaacgaagguauugugcuuucuuuguaaauagcuucucaa

SEQ ID NO: 4116525 - RNA, 56 nt, Human
uugagauggagcuucacucuuguugcccaagcuggagugcaauggcgccaucucgg

SEQ ID NO: 4116526 - RNA, 107 nt, Human
uugagauggagucucacucugucgcccaggcuggagagcaguggcucaaucgaucucagcucacugcaaacuccgcuucccagguucaagcgauucuccugucucag

SEQ ID NO: 4116527 - RNA, 103 nt, Human
uugagauggagucucacuuugucacccaggcuggagugcaguggcucaaucucggcucacuacaaccuccgccucccggguucaagcgauucuccugccucag

SEQ ID NO: 4116528 - RNA, 103 nt, Human
uugagauggagucucgcucugucgcccaggcuggagugcaauggugugaucucggcucacugcaaccuccgccugcuggauucaagugauucuccugccucag

SEQ ID NO: 4116529 - RNA, 104 nt, Human
uugagauggaguuucacucuugucacucaggcuggagugcaguggugcaaucucagcucacuucaaccucugaguccuggguucaagugauucuccugccucag

SEQ ID NO: 4116530 - RNA, 60 nt, Human
uugagauucauguguuucaagguccuccacagguaaggcaguugaaaauauggaucugag

SEQ ID NO: 4116531 - RNA, 100 nt, Human
uugagcagcaccgugccugcuagcccaagugcucuaggauccugagucaucucacgaugacacaggaagucagcacugauggcuggaggcgugcuuucga

SEQ ID NO: 4116532 - RNA, 60 nt, Human
uugagcccuaccucagacuuucugaauaagaaucccuagagaauguccaguggggcucaa

SEQ ID NO: 4116533 - RNA, 76 nt, Human
uugagccuaaauuagugaacuaaaaauaaauuugguuucuuagccauagaauuugguuuauuaaauuguaggccag

SEQ ID NO: 4116534 - RNA, 58 nt, Human
uugagcugauuuuugaaggaggcugaggaggaggcuuuaauucuuuaauucaguuuga

SEQ ID NO: 4116535 - RNA, 55 nt, Human
uugagcuguuuucauguuagaguguuuuaaaaagccuaguguuaaaacaguuuaa

SEQ ID NO: 4116536 - RNA, 58 nt, Human
uugaggaaaugucucuugauuuuuggaucccuggaaagggguagagaacaucacucag

SEQ ID NO: 4116537 - RNA, 91 nt, Human
uugaggaggugaguucucaguuucauagcugagcaaacuaaggugagaaacacuaaggcugcucauugcuauggcugaguuucuaucccag

SEQ ID NO: 4116538 - RNA, 56 nt, Human
uugaggaguagaagcuuugaauggguuucccauccauaagucuuuuuguuccucaa

SEQ ID NO: 4116539 - RNA, 56 nt, Human
uugaggcacagauuuuaguggcuuuguggcaauaaauagggcauggugugccuuag

SEQ ID NO: 4116540 - RNA, 110 nt, Human
uugaggcagagucucacucugucccccaggcuggagugcaguggcgugaucucaguucucagcucacugcaaucuccaucuccuggguucaagugauuauccugccucag

SEQ ID NO: 4116541 - RNA, 103 nt, Human
uugaggcagagucucgcuuuaucacccaggcuggauugcaguggugugaucucggcucacugcagccuccgccuuguggcuucaagugauuuucccgccucag

SEQ ID NO: 4116542 - RNA, 103 nt, Human
uugaggcaggaagaucccuuaaacccaguaggucgagacugcagugagccauguucaugccacuguacuccagccugggggacagagggagaaguugucucaa

SEQ ID NO: 4116543 - RNA, 59 nt, Human
uugcacagaugcacaugguugccuggagucuaucguacaaucaugugcacugcugacag

SEQ ID NO: 4116544 - RNA, 95 nt, Human
uugcacagcuccaaggggaccacugccacugugcuccaugucaaugacaaccccuagagcacagaugugaguggaggcucccuggaugugugcaa

SEQ ID NO: 4116545 - RNA, 68 nt, Human
uugcacgcuugcgguuccugccccuuccgugugcaaaguaaggaagucagcaggcggcgagcaagcaa

SEQ ID NO: 4116546 - RNA, 75 nt, Human
uugcacuaaugaagcuccuauaaauccuggccugagauuuacucuuaguuuaggaauuaugagggugguggguag

SEQ ID NO: 4116547 - RNA, 116 nt, Human
uugcacuuuccaguugaggugaugccccgccuugcuucagcucacccuccaugggcugcacccacuguccaaccagucccagugagaugaaccagguaccucaguuggaaaugcag

SEQ ID NO: 4116548 - RNA, 68 nt, Human
uugcagaacacuucccauacccucccaccuccagccccaaggaggauuaggaugcagggagucugcag

SEQ ID NO: 4116549 - RNA, 86 nt, Human
uugcagagagacaauuuaguucagaauuaugugccacccugacucuaccuggcaggugccuucugugcuagcucuucuaucugcaa

SEQ ID NO: 4116550 - RNA, 62 nt, Human
uugcagagccaugaggcuggcucagcaacacaaaagccaggggcaagccucagcucuagcag

SEQ ID NO: 4116551 - RNA, 60 nt, Human
uugcagauguccacaucacacuucaugauggaguugaagguggucuuguggaugcugcaa

SEQ ID NO: 4116552 - RNA, 76 nt, Human
uugcagccaggggaaggagccuugaaacucuccagccccgacgccccagucucauuggcucccucccccgcugcag

SEQ ID NO: 4116553 - RNA, 63 nt, Human
uugcaggauugcagauuugauuagauguucaauacuaaucucagucucauuccuuugaagcaa

SEQ ID NO: 4116554 - RNA, 58 nt, Human
uugcaggguugacacugccugccugaaaacgaaggagcgccgguucucaacccggcaa

SEQ ID NO: 4116555 - RNA, 91 nt, Human
uugcaguaguccagugguucaguuuuggucuggcuuccuuuuuucuguggugacugucuagcccacaagcugaguuauggagaugcugcag

SEQ ID NO: 4116556 - RNA, 59 nt, Human
uugcaguugcuguauuuaaggaauaaauuugaccuugaguuuccugacagcgaagguaa

SEQ ID NO: 4116557 - RNA, 86 nt, Human
uugcaguuggugcugaucuaaauuuaggacaucuugauauguggccuacaaaaaguuuagauuaaaucauuuccaauauuuugcag

SEQ ID NO: 4116558 - RNA, 77 nt, Human
uugcauagcaaugcugacagaugcuuuuagaacacauguuuuuuaaaauguucaaaaggcacagcauugucuagcag

SEQ ID NO: 4116559 - RNA, 66 nt, Human
uugcauaucuagaggagggcugcuggauuacauuagugauucuauuagcauuuuauggaaaugcaa

SEQ ID NO: 4116560 - RNA, 91 nt, Human
uugcauccucaccucacuaaugagcuaaggaaaaguuacgauuguauaauuuuaucuuuuucucauuggaugggagugacauuuuuugcaa

SEQ ID NO: 4116561 - RNA, 85 nt, Human
uugcaugauuugcauuuccuguacuguuugagcuucaaugagcucuaagcgccacguaugaggaaaccacugccaaguaaugcaa

SEQ ID NO: 4116562 - RNA, 64 nt, Human
uugcauguuauuuaaucuguauacuucaguuuuccuaucugaaaaaugcagagaauggcaguag

SEQ ID NO: 4116563 - RNA, 58 nt, Human
uugcauuagaaucagacagaacugcauuggaaucucagcucuguuauuuucuaugcag

SEQ ID NO: 4116564 - RNA, 61 nt, Human
uugcauucccagccaaguuagugcuggccagcaacaggcacuaacuuggcugggaaugcaa

SEQ ID NO: 4116565 - RNA, 58 nt, Human
uugcauuuacugcaccgugaguuacugaaauauuuagacuuauugcuaguaaaugcaa

SEQ ID NO: 4116566 - RNA, 67 nt, Human
uugcauuuucucaggugcuuaucuaagucauguuaaccaguggcauagagaaccugugaaaaagcag

SEQ ID NO: 4116567 - RNA, 63 nt, Human
uugccaaggccagagccagcgauaaguggccucgcgggcgcugccagcucugugcuaaggcag

SEQ ID NO: 4116568 - RNA, 73 nt, Human
uugccacugaggggcauguguuuacacauggcucuaagcagaugaauaaacaggugccucuucacauggauag

SEQ ID NO: 4116569 - RNA, 67 nt, Human
uugccagcugcuuuuugucacauggguugccaaggaauaacugugaugcaaaggacaguuaaggcaa

SEQ ID NO: 4116570 - RNA, 55 nt, Human
uugccaggagagccacuugcagcucaguggaucacaaguuggcuccuccuagcaa

SEQ ID NO: 4116571 - RNA, 58 nt, Human
uugccagggcuuugguggcauccugaaguucgggaugguauagucagggacuuggcag

SEQ ID NO: 4116572 - RNA, 55 nt, Human
uugccagugccagcccaggcagaguuuagagcuuguucugagguggaacuggggg

SEQ ID NO: 4116573 - RNA, 66 nt, Human
uugccaucuggcuguuucaaauguauagaguuugugcuucuauauauaaaugacagcauauggaaa

SEQ ID NO: 4116574 - RNA, 63 nt, Human
uugcccaacaggaaaucucuauacugaguagcauugaaccaucuagauuucucucuuggguag

SEQ ID NO: 4116575 - RNA, 57 nt, Human
uugcccagagucacccagcucagaagcugcagagcuggggcuuucaaaucugggcag

SEQ ID NO: 4116576 - RNA, 66 nt, Human
uugcccagaguccacagcguacauuaggguucacucugcuguugaacaugcuguggguuuggacaa

SEQ ID NO: 4116577 - RNA, 64 nt, Human
uugcccauccuaguagcagugucaagguuuacuacauauuuuccagcugcagugggauggggaa

SEQ ID NO: 4116578 - RNA, 99 nt, Human
uugcccauucaaaauuagggagugagcuggacuugucuugcagaccaucguuugaugacuucuuuucuagcuauuaccauuaaugcuuguuuuggucaa

SEQ ID NO: 4116579 - RNA, 59 nt, Human
uugcccuagggucuuauccuccacauuccaccacacugggugcuggugagaccgggcag

SEQ ID NO: 4116580 - RNA, 58 nt, Human
uugccucccccagagaggauaucuaagagaauggcugaggcucucugggugaggacaa

SEQ ID NO: 4116581 - RNA, 63 nt, Human
uugccucuagagaaucuuuuaagaaguggccuuuuguucuuugugucuguucucuaaagguaa

SEQ ID NO: 4116582 - RNA, 62 nt, Human
uugauucuuugagaccgugauacucuuuucaugucauagaaauuggaggcucagagaaucag

SEQ ID NO: 4116583 - RNA, 64 nt, Human
uugauugaguucuugucugccggucacuguucuaggcacuggggauuagggacucagugaucaa

SEQ ID NO: 4116584 - RNA, 80 nt, Human
uugauuuagcuauuuauucccacugugaaaugaggguaaugguaccuguuucauagaguugugaauuuuaaauaaauuaa

SEQ ID NO: 4116585 - RNA, 69 nt, Human
uugauuucuacagaauaaauguuuacagaucauagaaggagacuaugugaacaguauuuguggaagcaa

SEQ ID NO: 4116586 - RNA, 62 nt, Human
uugauuucuuuuggccauuugaguugacaggcugugcaaauuuacagguuaaaugaaaucag

SEQ ID NO: 4116587 - RNA, 63 nt, Human
uugauuugguaucuuacauuugaaguacaugguucucucugugcuugaaagaugcagaauuaa

SEQ ID NO: 4116588 - RNA, 71 nt, Human
uugauuuuauucccacccuaaguaguaggucuuauagaucuuauuuuauaguggagggaacugaagaucag

SEQ ID NO: 4116589 - RNA, 79 nt, Human
uugauuuucuucccacuucaccucccucugagcucuccaaaagggaaaugcagagggugugaaggggaugaaaagucaa

SEQ ID NO: 4116590 - RNA, 91 nt, Human
uugauuuugauacaugauguauauucacugagcaaggggguugauccauuauguggaccccuucugggaauauguggacugugucuaucaa

SEQ ID NO: 4116591 - RNA, 114 nt, Human
uugauuuuucucugagaagauagcauuuagaauccauguuagaagauucaugaacuaauucaguaaaucucuaauuggcauacaugguaagcuguucacuuaguggauaauugg

SEQ ID NO: 4116592 - RNA, 74 nt, Human
uugauuuuugcccucucaaguugagucagauuggaggucaccaucugaagcacagcaggaagggucagaaugga

SEQ ID NO: 4116593 - RNA, 73 nt, Human
uugcaaaagccagccagugccagucuuaucaaagcagaguuucuaagaaauauuaguugguuuuaaaaugcaa

SEQ ID NO: 4116594 - RNA, 89 nt, Human
uugcaaaggugcuugaaaugacugaggccugauaacaguuguagagauuccuagagguuaaaaaggauucaguuaauagaccagugcgg

SEQ ID NO: 4116595 - RNA, 79 nt, Human
uugcaagcaguugcuuagaaaguaaacacgaagucuccagaccucuggaauuugguccugcuucuugccugcugugcaa

SEQ ID NO: 4116596 - RNA, 130 nt, Human
uugcaauaauucagaugaggaauaauagugacuugauccagaguaauacagaaugcagugaaaagugaugcaauucagaguauauuuugacagugaagcuaguauuauaaucugccaucuuuacaugcca

SEQ ID NO: 4116597 - RNA, 110 nt, Human
uugcaaugugggccggugccacaggaaucgucacuuagcgcauugauuaaaaugauccagcgccucaccagagacauucuugaggccccagaggcacccaacaaaugcaa

SEQ ID NO: 4116598 - RNA, 83 nt, Human
uugcacagauguccagggccggguagcuuauguaauuucagguggaauagacaagcacccugguaaaauggacaucuuggcaa

SEQ ID NO: 4116599 - RNA, 58 nt, Human
uugcacagcacagcaacauguuuuggaaaauaaaaccuuuaaugcauggcugugacag

SEQ ID NO: 4116600 - RNA, 84 nt, Human
uugcacccuaaaauaacuuucuguguauagucaggcagcugaugccuagaauuugugcucaggaagauuagaggaauguagcaa

SEQ ID NO: 4116601 - RNA, 88 nt, Human
uugcacucaucuuauguuagugauuuucauauuacauuagcaaauuuaaucucugcucaugugauaggaaguuacuaacacaaugcga

SEQ ID NO: 4116602 - RNA, 71 nt, Human
uugcacuguaagcaucugugucacacuaaaauuguuuaaagaaguguuuaugcaggcuguuuaagaggcaa

SEQ ID NO: 4116603 - RNA, 74 nt, Human
uugcacugugugacccuggccuugccagugcauuccuaaaauggaagaacagcaagugaggcgucagcagucaa

SEQ ID NO: 4116604 - RNA, 89 nt, Human
uugcagagccaagagguggagagaaaccgaguccagaugguaccauuugaaccccugguucagguuucucugaacuuuuuauucuguga

SEQ ID NO: 4116605 - RNA, 82 nt, Human
uugcagaguuucauucuggaauucucaaguccuggaguccacucuaggacuccaugaauucuagaauuccaggacuuugcga

SEQ ID NO: 4116606 - RNA, 60 nt, Human
uugcaggggaaggagcagagcucagaagaaucacccuagguucaaguuccugcucuguga

SEQ ID NO: 4116607 - RNA, 56 nt, Human
uugcaggguccuguggcucuccuugcgaugggggaauccacgugggggcccuggag

SEQ ID NO: 4116608 - RNA, 58 nt, Human
uugcaggugagggaaaugacugagaaucccguuucuuaucaacucccccaaccuguga

SEQ ID NO: 4116609 - RNA, 60 nt, Human
uuccuacaugggggcugcugccagcgagcacggcuuugcugguaaagucuuuaucgggaa

SEQ ID NO: 4116610 - RNA, 70 nt, Human
uuccuaccagcuuuugagccugccuacuuucaaugaagccagcagggcccaaaugcuggcucucuaggaa

SEQ ID NO: 4116611 - RNA, 86 nt, Human
uuccuacuuaaaucagggcagguuaacuugggugacauaugcaaggacauguaaccaguacccugaccuuccuucuuaaggaggaa

SEQ ID NO: 4116612 - RNA, 57 nt, Human
uuccuagugucuucaguggccuccaacucagggccaggucacaugaagccuagagaa

SEQ ID NO: 4116613 - RNA, 56 nt, Human
uuccuauggccagagucaaagagaaagucuauuguauucauuuggccauacuggaa

SEQ ID NO: 4116614 - RNA, 74 nt, Human
uuccuauuguaaguucauuagacuacagauauccagaauuggaugcuacacuguagcaguggaguuuuggggaa

SEQ ID NO: 4116615 - RNA, 81 nt, Human
uuccuauugugguuuagcuagcaaguaugucaaggcuauuuuaguuugucauuuguacuucuagcaucaccagaauuugag

SEQ ID NO: 4116616 - RNA, 61 nt, Human
uuccucaagucagggaggcaggaugaugaccaaauuuuccccucucugcugcauagaggaa

SEQ ID NO: 4116617 - RNA, 77 nt, Human
uuccucaagugauuuuccuacuugcuaaagucuaaaaaucacuguaaggacauuucaaguagagggaucgcuaggaa

SEQ ID NO: 4116618 - RNA, 66 nt, Human
uuccucaccuauccugagguuuguaauauagucccugcccccaaggacuauacagccucugaggaa

SEQ ID NO: 4116619 - RNA, 68 nt, Human
uuccucagaagcgagcgagccucuuccacaauuuggggacacuguggaagaacuucuugcuuggggag

SEQ ID NO: 4116620 - RNA, 78 nt, Human
uuccucagaauaaaccucuuuaaaagggauauugauggaaauguacaauuaccaguaauugagguuuuaucugagggg

SEQ ID NO: 4116621 - RNA, 64 nt, Human
uuccucagugcccccauacgguaggugacauuauccuugugugauagcuuaggacacagaggag

SEQ ID NO: 4116622 - RNA, 130 nt, Human
uuccuccaauucacaaacuaguaaaugaaagaaggggagcaggugaugagagaggucauugaaaugugaguguuccacagugcuuuucugguuguuuuccuagaaauugauaguggguaauuugggggua

SEQ ID NO: 4116623 - RNA, 96 nt, Human
uuccuccugccuaccuaagagauuggucuaguuucagucugcuagugcagcuguucagcuggccagauuccuuaguuuacagaugggcauuuggaa

SEQ ID NO: 4116624 - RNA, 80 nt, Human
uuccucgcuuucaggaaagaguuagaugauuagaaggaaucacaugcuuuuauguuucauucuuuucugguauuugggaa

SEQ ID NO: 4116625 - RNA, 72 nt, Human
uuccucucccuuuuacugugaaaagaaacuggagcuucuacuccugcuacaguuuaaaggggaaguaaggaa

SEQ ID NO: 4116626 - RNA, 102 nt, Human
uuccucuggucccagacuguucaccuggagcuguagccaccacccugcccuuagguuaacugccucgagugguaguuuagcucuuugugcugugccgaggga

SEQ ID NO: 4116627 - RNA, 62 nt, Human
uuccucuguaguugcugaugaauagaggcugcuguuuguggugcucaguacugcagagagaa

SEQ ID NO: 4116628 - RNA, 83 nt, Human
uuccucuguguaaaacacuucaaggacuucugucucacuuaagguaguagccaagguucuugaagugguuugcccguagugaa

SEQ ID NO: 4116629 - RNA, 73 nt, Human
uuccucuuucucugugcuauguaagguuuaaaaauaguaaauagccaagagauagcagggagaagugggggaa

SEQ ID NO: 4116630 - RNA, 66 nt, Human
uuccucuuucuuauauucugucauuguuugcuuuggcaacagcuacuauccuagggccaggaggaa

SEQ ID NO: 4116631 - RNA, 56 nt, Human
uuccugaaccccacccaaauuaccugaaauuaaaauaguuggggugaggccaggaa

SEQ ID NO: 4116632 - RNA, 60 nt, Human
uuccugaagcugaaaacuuccagcaugucaagauauuucugggacaaacagcuuuuggag

SEQ ID NO: 4116633 - RNA, 86 nt, Human
uuccugaccuuuugaauucaguugaaguuguuuucuuucucaaccuugcaacaacccucagcuguuugaggagagcuuacuaggaa

SEQ ID NO: 4116634 - RNA, 62 nt, Human
uuccugagagcuuugaugcacuguuuccuguuguaggaugggcaggcacuggcucucaggga

SEQ ID NO: 4116635 - RNA, 84 nt, Human
uuccugaggccuugauguucuugggagauucaugcauaucugaauucuauauuauucugccaaaaaucuuaagguuuuguggaa

SEQ ID NO: 4116636 - RNA, 57 nt, Human
uuccugaucucuggaggaucagggagaaaugagacuuauucuccagggacuuaggga

SEQ ID NO: 4116637 - RNA, 68 nt, Human
uuccugcauucaugcccuggauucuuaagaacaacgaaugggagaaacacacagaaaugaaugaggaa

SEQ ID NO: 4116638 - RNA, 58 nt, Human
uuccugccccugagagcucccagaccaagacgggagagugaggcaucaggggcagggg

SEQ ID NO: 4116639 - RNA, 64 nt, Human
uuccugcuugguuuauaagucagauugcacugugcuuguggucgugcuugcugcuagguaggga

SEQ ID NO: 4116640 - RNA, 71 nt, Human
uuccuggaagaauuaucugaaagcuguguguggggccuacacacaacuggugguauuuuucccucaaggaa

SEQ ID NO: 4116641 - RNA, 77 nt, Human
uuccuggaauguagaguaucuguuuuauaguagauguuuguuacuuuuccucuguuuaggacuuuacaauuuaggaa

SEQ ID NO: 4116642 - RNA, 61 nt, Human
uuccuggcugaacugaacuccuaguuugacaugauggauccuuuugagucuagccauggaa

SEQ ID NO: 4116643 - RNA, 55 nt, Human
uuccuggcugaucuaccaaaguuggccugcccaguaaaugguagucuaccaggga

SEQ ID NO: 4116644 - RNA, 57 nt, Human
uuccugggccuuaaaucuuuuggguuuggggugcccuuuuagaucaggcccuaggga

SEQ ID NO: 4116645 - RNA, 56 nt, Human
uuccugggcucuggcuggccuaagccugcaggugccgccauccagccucccaggag

SEQ ID NO: 4116646 - RNA, 55 nt, Human
uuccuggggcgacuguaucugacuaaaauuggucauuuuguagauccuuuagggg

SEQ ID NO: 4116647 - RNA, 82 nt, Human
uuccuggucauuuuccccagcuucugagggggccuugccuauuaagacccauucucagaauugaauggaagggaccaaggaa

SEQ ID NO: 4116648 - RNA, 56 nt, Human
uuccugguccuauuauauacacuuaaagagaaguggguguuuauguaaucuaggaa

SEQ ID NO: 4116649 - RNA, 67 nt, Human
uuccugguguuacuaaauugaaaugagcccuaaacuauagaaaauuuuaagaaauaguaaccaggag

SEQ ID NO: 4116650 - RNA, 97 nt, Human
uuccuguggcgugccguuuuacaguaguaucuucauuuguugauucauucacucagucaacauuuaguaaauauuaugugacaggcagccaugggaa

SEQ ID NO: 4116651 - RNA, 78 nt, Human
uuccuguggguccucaacucuagggccccauaggcccuggacaggcagggccucugggguccugagcccaagcaggaa

SEQ ID NO: 4116652 - RNA, 67 nt, Human
uuccuguuuccagcugaaauuagauacgauagaguucaauagauaaagccacgcuggaaaucaggaa

SEQ ID NO: 4116653 - RNA, 63 nt, Human
uuccuguuucugaauaaagggguuuguuuuauugacaagaguccugagcacagagacaaggaa

SEQ ID NO: 4116654 - RNA, 62 nt, Human
uuccuucagcuguuuugaguuuaauuggggucuucuguauaaaccauggacagcuuugggaa

SEQ ID NO: 4116655 - RNA, 60 nt, Human
uuccuuccagaggugauguugguucuuaucuucauaaguugguuuucacucuggaaggga

SEQ ID NO: 4116656 - RNA, 55 nt, Human
uuccuuccgggcaccaggcacucuuccaaccuagugcucugccaucauuaaggaa

SEQ ID NO: 4116657 - RNA, 61 nt, Human
uuccuugagcucaaucuggucaguaggaaaggaaauuugaccaugaugcauccuuaaggaa

SEQ ID NO: 4116658 - RNA, 59 nt, Human
uguuggccaggcuggucucaaguuccugacuucaggugauccaccagccucggccucca

SEQ ID NO: 4116659 - RNA, 60 nt, Human
uguuggcuauuccuauaugagaugaugaaacuuauuauuauauagggaaagucccagacg

SEQ ID NO: 4116660 - RNA, 101 nt, Human
uguuggcugggauggucucgaacuccugaccuugugauccacccgccuuggccucccaaagugcugggauuacaggugugagccaccgugcccggccuaca

SEQ ID NO: 4116661 - RNA, 129 nt, Human
uguuggcuucaaguugaagauggggcugcuggcugggcaugguggcucacaccuguaaucccagcacuuugggaggcugaggcggguggaucaccugaggucagaaguucaagaccagcaugaacaaca

SEQ ID NO: 4116662 - RNA, 74 nt, Human
uguugggaacacucugugugugucuaaguaaggguguauuuucucuuggaaucuccauagagugaugcccuuca

SEQ ID NO: 4116663 - RNA, 58 nt, Human
uguugggauggagauuuuauagguucagacaaaucuucuagaucugcuucacccagca

SEQ ID NO: 4116664 - RNA, 57 nt, Human
uguugggcagaggccaggaggaugcuccaugguaucugacaaacccugugcccagca

SEQ ID NO: 4116665 - RNA, 77 nt, Human
uguugggcuccugagcaagcaugccaagucuguuugcaauuuccgcagcacauagcaugcuugucagaggcuuucca

SEQ ID NO: 4116666 - RNA, 67 nt, Human
uguugggguauuauucuaugacuuguucucaucuuaucauaacauuguaugagauuugaccucaaca

SEQ ID NO: 4116667 - RNA, 64 nt, Human
uguugggguuuauuacugcaugcaagguacacacuggccucccacagugguacagcccugaaca

SEQ ID NO: 4116668 - RNA, 58 nt, Human
uguuggguguuguuacuuucuccuuuucaaggaccuguugcugaaagugcacccaaua

SEQ ID NO: 4116669 - RNA, 57 nt, Human
uguugguaggauuugcuucagcuucuaguugcuggcuugcuuucucucugcucaaua

SEQ ID NO: 4116670 - RNA, 101 nt, Human
uguuggucaggcuggucucgaacuccugaccucguaaucugccugccuuggccucccaaagugcuaggauuacaggcgggagccacagcgccuggccaaua

SEQ ID NO: 4116671 - RNA, 102 nt, Human
uguugguccugaaccuuguuuucugaugaccacacuugaucacucugagguuccuagcuguuguaccuggagugcaguugggaggacacccgguucccaaca

SEQ ID NO: 4116672 - RNA, 69 nt, Human
uguuggucuucuuuguugcuauuauuuuggucccuggaauagugcccggcacauagggaaugcucaaua

SEQ ID NO: 4116673 - RNA, 82 nt, Human
uguugguguaaagcauuuguuucuccuggaaagugcacaacggggauuuucuaagaaauggaaaacgauugccacacucaca

SEQ ID NO: 4116674 - RNA, 67 nt, Human
uguugguuuuggcuaugucuacacugaguaaaguggauauuugcaguguuccuguagccugccaaca

SEQ ID NO: 4116675 - RNA, 80 nt, Human
uguuguauaccagaguuacaguuacugugggaaucauaauuugaaauuuugacuccuguguuucuggaaucuuuacaaca

SEQ ID NO: 4116676 - RNA, 69 nt, Human
uguuguauauauguccuauuucccagcugggugguguucuucugucuggaaaaggacauagacacggca

SEQ ID NO: 4116677 - RNA, 86 nt, Human
uguugugugugugugugcaugcaugugugaaagucuggcaguucucuguauucagggacauauauguauguaugcaucggauggca

SEQ ID NO: 4116678 - RNA, 67 nt, Human
uguuguguuggaaaugaggcuggccauauaaaauuuagcccugaauuccaagccuucaacacauuca

SEQ ID NO: 4116679 - RNA, 77 nt, Human
uguuguuuguuucaguugccaagcuaauucucaacauucuuacuuugagagauagcaugguauacugguuaaccgca

SEQ ID NO: 4116680 - RNA, 86 nt, Human
uguuuaagcagcuggagcacaaguuggccaguaaaugcauguuauauagacauuuaauaccacuuggugcuuuaucaggcuuuaca

SEQ ID NO: 4116681 - RNA, 80 nt, Human
uguuuaagccacccagucuauguuaucuuguuauggcaguccagccaacuaauauagggcaugagaaaagggaggagaca

SEQ ID NO: 4116682 - RNA, 71 nt, Human
uguuuacaaaugcacagagccuuagagauaauacauuagugaguuucagguaaauguguaugaugauaaca

SEQ ID NO: 4116683 - RNA, 74 nt, Human
uguuuacagggaaauaaauaugugccagguacugugcuaagugcuuuuuaguacugucuuauuucauuuucaca

SEQ ID NO: 4116684 - RNA, 80 nt, Human
uguuuacauggagguuuucagcagccuuagcaggcaugauguuuggauccuggaaaucaucuauuuuuuauguguaaaua

SEQ ID NO: 4116685 - RNA, 68 nt, Human
uguuuaccauuccaugacaucaggacuggaaauugcauggcaguacuauuuauggagugguuauuuca

SEQ ID NO: 4116686 - RNA, 102 nt, Human
uguuuagauagacacuaauuuuucggucugaugauuuauguaucuugggggaauuuuguuauaaaugacugcaaaaguucauagcgggucuauauaaaauca

SEQ ID NO: 4116687 - RNA, 64 nt, Human
uguuuagaucucauucuucccaggggauuauacagauggguaacagggagagugagaucaaaca

SEQ ID NO: 4116688 - RNA, 76 nt, Human
uguuuaggacucaaccucuggaaaguauggacagguagaaaccuagucccacucccaggguaacaaggccagaaca

SEQ ID NO: 4116689 - RNA, 80 nt, Human
uguuuaguaaauuccuggcaugggcagggcacugggcuucucccaaagacuguaagagugugcaggauuauuugcagaca

SEQ ID NO: 4116690 - RNA, 62 nt, Human
uguuuauagcuuuucuuggcacugguauucuaugaaacauuugcagaggaaagcuauguuua

SEQ ID NO: 4116691 - RNA, 57 nt, Human
uguuuauagggucugucacuugaaaaagccuaugucaaguaucaccaucugugaaca

SEQ ID NO: 4116692 - RNA, 113 nt, Human
uguuuauaguuguuccaucagugcccagccaauuuguuauguugaaggugcucaauauauauuuucugggcaaaugaauggaugaauaaaaauaaagaaauauaacagaaaca

SEQ ID NO: 4116693 - RNA, 57 nt, Human
uguuuaucaggguaaaguguagcaauuuagccuugucccaucuugcccucauaaaua

SEQ ID NO: 4116694 - RNA, 72 nt, Human
uguuuauuaucuggcccuaacugucuguuuuauacacaaauguauccucagcaccuaggacaguagucagca

SEQ ID NO: 4116695 - RNA, 74 nt, Human
uguuuauuccaaaaacaguuuuugaguguauguucuacaaaguucugcacuagauacuguucaggaaauagaca

SEQ ID NO: 4116696 - RNA, 68 nt, Human
uguuucagaucaguaagaggaagaaugggguauggcauuucacaggcuuuuuuggcugauguggcaca

SEQ ID NO: 4116697 - RNA, 57 nt, Human
uguuucaggcuucugggauuuuaugaucuaccugaagucaucugagaacuugaagca

SEQ ID NO: 4116698 - RNA, 71 nt, Human
uguuucagugacuucuuugcucugcguaggucucacugcugcuggguuugacagucacuucaccugaaaca

SEQ ID NO: 4116699 - RNA, 77 nt, Human
uguuuccacacaggcucuacuacucauauuuguaaucagacucaaguacacaaguggacagagcuugccuggauuca

SEQ ID NO: 4116700 - RNA, 80 nt, Human
uguuuccaguuaucuugauuugucagcuggggauaaucacgaauuaucgguaagauggaaaucagggucaugagaauaca

SEQ ID NO: 4116701 - RNA, 65 nt, Human
uguuucccaggcuggaaugcaguggugugaucuuggcucacugcagccuccaucucugggguuca

SEQ ID NO: 4116702 - RNA, 88 nt, Human
uguuuccccuuuccaaacuauaaaguggcuauaugguaguuuuaauaaacuacugugugacuguuauuacuguuugcuguuggaaaua

SEQ ID NO: 4116703 - RNA, 107 nt, Human
uguuucccugggccuagaaccccuacuaggaagcagagcugagcaacaaaaugcccgccacaccagcuugcuaacugguagggguccaguucauaaccuggcgagca

SEQ ID NO: 4116704 - RNA, 60 nt, Human
uguuuccugagccagcacacucuucacacuacacuuugaguagcauggcucuauggaaca

SEQ ID NO: 4116705 - RNA, 60 nt, Human
uguuuccuggagguuauuuuugagacuucuugcuucuggucucagccaccagaagagaua

SEQ ID NO: 4116706 - RNA, 85 nt, Human
uguuuccuugguugugcuucaacuucuaaaauauguuuuuucuaugaacauuuuaaugagggguuggacauaagacagaaaaaua

SEQ ID NO: 4116707 - RNA, 81 nt, Human
uguuucuauucauuccuaacuccacuagccuugggagcuugcguuccuguguuacuugaguuaugauugaacauggcgaca

SEQ ID NO: 4116708 - RNA, 95 nt, Human
uguuucugugucugucucuuacgaauucuuagaggacaaguauguaguauauucaguuuuguaccucaaaauuugaagauacagaaaacaaagca

SEQ ID NO: 4116709 - RNA, 56 nt, Human
uguuucuuacguuuuuagaggcuucgugacggaguuaucagagacauugagaggca

SEQ ID NO: 4116710 - RNA, 78 nt, Human
uguuucuucucuguggcuugggccugccugucaucaauauaauagaaugauggaagugcaagcuauagacaccagaca

SEQ ID NO: 4116711 - RNA, 82 nt, Human
uguuucuucugcaaagagacuuugagucugguugaccaaauguuuugaaagucaagucaugacucaaaggaaguagaaagca

SEQ ID NO: 4116712 - RNA, 78 nt, Human
uguuucuuucaggauaaaauguaauggcaauggcuuugaugucuuugucuugcuuuauccuuccuucuuuaagaagca

SEQ ID NO: 4116713 - RNA, 77 nt, Human
uguuucuuuccuuuuucuucuugguuauaggcacugcacaguguuagcauagcucagaaggagaccccgggauaaca

SEQ ID NO: 4116714 - RNA, 57 nt, Human
uguuucuuuuucuauuucuauugcaaagguaaaagugagaagugggaaaagcaagca

SEQ ID NO: 4116715 - RNA, 66 nt, Human
uguuugacuugacacugagauaaagcugcuuccugguugcuucuauucacuggucacaguucugca

SEQ ID NO: 4116716 - RNA, 85 nt, Human
uguuugacuugugagcuaagauguuguuuuucucuuggaauaccauucuguuucaaagaacaaaugauauaugguuauucagaca

SEQ ID NO: 4116717 - RNA, 56 nt, Human
uguuugcuaggguugguauuuaagccugucugaauaugccacuuucuagccaaaca

SEQ ID NO: 4116718 - RNA, 60 nt, Human
uguuuggggcuuuuugugaacuuccuguuucuaaggaagaaccuaagaaagucucaugua

SEQ ID NO: 4116719 - RNA, 89 nt, Human
uguuugugaagcacacagaggcaggcuuguugaaguaaaauagggcccaaaucuuuguauuuuuaucaaguugcuaagugcuucagaca

SEQ ID NO: 4116720 - RNA, 77 nt, Human
uguuugugcuuccugcuucugucuucuuuauauauacuguguaaacaaugaaaacagagcuggaaaaagcucagaca

SEQ ID NO: 4116721 - RNA, 62 nt, Human
uguuuguugagugucucccgggugccaggcauuucuaggcacugugaauauacuagcaaacg

SEQ ID NO: 4116722 - RNA, 108 nt, Human
uguuuguuuaaaaccuuccacauuucaguauuauuuuaugacaaaugauauauuuggcaauugcuaaauguccuguuuucauuaauacuggugaauggagaacauaua

SEQ ID NO: 4116723 - RNA, 95 nt, Human
uguuuuaauuuguauacauaauugccuaauaaucauccugguucaccucugaacaguuugcuuuaagaggcacugguguuauauaaaaauauaca

SEQ ID NO: 4116724 - RNA, 109 nt, Human
uguuuuauacagauugaugauauguuaugauucauaaacuuuggaagucucaaacauuuuguguugaauauuuuaagaguuuuguuucuaucaucaaauguaaaaaaua

SEQ ID NO: 4116725 - RNA, 92 nt, Human
uguuuuauaucuuucuccaucuuuaaaauggggguaguggccugaagguacaaagaagcaucugguuuaaaagaagaaagcaaugaaaaaca

SEQ ID NO: 4116726 - RNA, 107 nt, Human
uguuuucaaaaaagaaacauggaaagagcaagggcuuugaggcuggcugaaacuggcucaaacccuggccucagcagcuuguuaacucuaugacuuuugggaaaaca

SEQ ID NO: 4116727 - RNA, 76 nt, Human
uguuuucaaagugcagcuugugaucccuagaggguacagcaaaguucuuauaggaguuggcagcaucaaaagaaca

SEQ ID NO: 4116728 - RNA, 117 nt, Human
uguuuucaaaugauagaacgcauuaacaugagagcuaagacauuaagaauuccuucggcguggauguguggugagaccuuguuccuuauguaaaugucuuuguguaauuugaaaaua

SEQ ID NO: 4116729 - RNA, 75 nt, Human
uguuuucaguagcacaauuuugucccuaacagaacuuuccaacaauguuagacagaugugugccacuuaagguca

SEQ ID NO: 4116730 - RNA, 55 nt, Human
uguuuucagucauauagcaggugaggcacccagaucagcuugcgggcugaaaaua

SEQ ID NO: 4116731 - RNA, 56 nt, Human
uuguauuccagccaccacaggcacuccagccuguggcuuucgguugugaaugacag

SEQ ID NO: 4116732 - RNA, 70 nt, Human
uuguauuucacuguaacugcaaauacuuaaccagaauuuugaagguuugcauuguugcaaugaaguauag

SEQ ID NO: 4116733 - RNA, 71 nt, Human
uugucaaucagaaaucauguuacaaguggcucuccuaucauauccauguguaacagagcacugauugacaa

SEQ ID NO: 4116734 - RNA, 77 nt, Human
uugucaaugauucugcaacugugugccaugaauucuuaguccugcaacauggucauaaagacagaaacauuccacaa

SEQ ID NO: 4116735 - RNA, 57 nt, Human
uugucaccccuagaggaauucugcguccuuucgcggcccugccucuguggguggcag

SEQ ID NO: 4116736 - RNA, 63 nt, Human
uugucacuuuugggcuaccugaaaacacugugucuggacauucuguagguuaaaaguagacaa

SEQ ID NO: 4116737 - RNA, 103 nt, Human
uugucagaguuuaucaauuauagaacagccuccucuagaggaauauaaagcacugccaaauccucugagauuuaggcuguugcugguaguaguacucuggcaa

SEQ ID NO: 4116738 - RNA, 71 nt, Human
uugucauuagcugagauggggagggcugcagaaagacuagguuuugaaugcagaagcccuauucuggacag

SEQ ID NO: 4116739 - RNA, 79 nt, Human
uugucauucuacagucagagugccuuucuaacuucccuuaagauguacccuguuggaggcugacuacugaagaagagaa

SEQ ID NO: 4116740 - RNA, 86 nt, Human
uugucauuuuaaguaugcucugacugauacaguuuacagagcuaaucuguacuugugugucaaagucaggugucacuaagguacaa

SEQ ID NO: 4116741 - RNA, 80 nt, Human
uugucauuuuaauuugucuacaaaguuuuguucuaguuagauuuucacccugcaugcuguguggucaaguuaauuugcaa

SEQ ID NO: 4116742 - RNA, 71 nt, Human
uugucccaaagcguucaguaauguuuucuuauuuuaucucuuuaagcaauacuaagugacuuuugggauga

SEQ ID NO: 4116743 - RNA, 66 nt, Human
uuguccucaucauucaaagcagggucacuaccuucaucaaagacacugcucugacagugaggccag

SEQ ID NO: 4116744 - RNA, 78 nt, Human
uuguccugcacugaauaguagacuguacacagagccugcacauaguaggaaaacaguaaauacuuguugagaggacaa

SEQ ID NO: 4116745 - RNA, 74 nt, Human
uuguccuuccuaaaagaauacacuggaugaugaaauaauacaggcauccaagauuacuucuuuugggaagacag

SEQ ID NO: 4116746 - RNA, 55 nt, Human
uugucggcauagaaguugaaggcauugguauauugcuucaaguuaugguuggcaa

SEQ ID NO: 4116747 - RNA, 75 nt, Human
uugucuaagucacauguuguauuccauauuuagcuguaguguugaaauaauaggaaaaacacugugucuuggcag

SEQ ID NO: 4116748 - RNA, 78 nt, Human
uugucuaauucugaacacauuuaaauuuauggaaaucauggggauccacuugaauuuuagugguuuuacuggagauaa

SEQ ID NO: 4116749 - RNA, 81 nt, Human
uugucuauaaguuacagagagauaaguguaaaagucucccauaauacgcaugacuuuuguauuucucuguaguaccaucag

SEQ ID NO: 4116750 - RNA, 70 nt, Human
uugucuauuuguucagguaagggacagcauuauuauuauuagcaccucuuacccuggagcaaauguucaa

SEQ ID NO: 4116751 - RNA, 62 nt, Human
uugugagucuugcaggucgcucacccuucagaccuuuaggcugaggccugccagucucagaa

SEQ ID NO: 4116752 - RNA, 63 nt, Human
uugugauaaaacauuagacauuuaugucaaaagcaguauugucucagaaguguuuuauaacaa

SEQ ID NO: 4116753 - RNA, 56 nt, Human
uugugaucuguguugauggccuauucgaauaugcaggugauucucacuauucacag

SEQ ID NO: 4116754 - RNA, 78 nt, Human
uugugcaaaggaggaggcauuauggggaagacuuagaauuugggacuucacucccacuaaugcuuuucucauuuacaa

SEQ ID NO: 4116755 - RNA, 56 nt, Human
uugugcgagagagcaagagugaccccuccucucacuccccagucucuucuugccaa

SEQ ID NO: 4116756 - RNA, 81 nt, Human
uugugcugaaaucuguugucaggaauccacaagaaguucuucauauuuauuuuguguuucggauagcagauucuguuacga

SEQ ID NO: 4116757 - RNA, 64 nt, Human
uugugcuguggcugaacucugaagaggcaguucuguugugccuguuaauuucagcacaguguga

SEQ ID NO: 4116758 - RNA, 113 nt, Human
uuguggaauuaauucagucauuccugcguggugaaauauggaauaggggcguguauucugacccuguucaauuuguuucaguuaucggcaggggaggugagcagauuucacgg

SEQ ID NO: 4116759 - RNA, 57 nt, Human
uuguggaguaucagaacaguuuuuguuuagaaguuggugaaagcuguuauuccagaa

SEQ ID NO: 4116760 - RNA, 91 nt, Human
uuguggauauugaaguuugaagccuguuguucaucuauagaugcacuggaugggauuggaagucuucagauuucaguaggguuuuccacaa

SEQ ID NO: 4116761 - RNA, 88 nt, Human
uugugggacaauugcuauuuugaauucuuagguguccaacuuuacaaccaagguuuacaaauauuuuaaauggugauuuagucagcag

SEQ ID NO: 4116762 - RNA, 130 nt, Human
uugugguccaguagcauuagcaccacuuggcaucuuguugcaaaugcagaaucacgguucucauugagacuuauugaaucagaaugggcauuuuaauaagauucauagguguuuggcaugcacauugcag

SEQ ID NO: 4116763 - RNA, 98 nt, Human
uuguggugauauaugacauuuaauuaacgaaugcucuggaauuuucaguaaaacacuucauaagcucguaacuaaaugauucaaaggugucaugacaa

SEQ ID NO: 4116764 - RNA, 66 nt, Human
uugugguuuuggccuaucaguggaacacagccacaaaauacuacugguaaaucacuaaaauuacaa

SEQ ID NO: 4116765 - RNA, 99 nt, Human
uuguguacguguguuugugcaugugcacacagugucaugcaaccuuauguguguguguguuuguauguguguguacguauguauagagauuggauacga

SEQ ID NO: 4116766 - RNA, 75 nt, Human
uuguguauaaaacuucauugccuccugaccuccauauaaguucuuguccugucagugaggcagaugaaagcauaa

SEQ ID NO: 4116767 - RNA, 130 nt, Human
uugugucacaacuguaaagauacucuuggugaaguggcuuuucagggacuguacucaucagacaagggauuuucuuucuuaugggguaguccuuuagucacuggaacuguuuauguuacuuaaaccacaa

SEQ ID NO: 4116768 - RNA, 59 nt, Human
uuguguccaaggcuauggugaucugagaagcaaagucacauuggggcccuggcacacag

SEQ ID NO: 4116769 - RNA, 62 nt, Human
uugugucccccuuugagagccagaaacuguuaaccuauggagcuuagagguacagggaccag

SEQ ID NO: 4116770 - RNA, 76 nt, Human
uugugucuaucuucucaguauaugggaugugggguguguuuguguaucugugucugggaggaguguguuggugcgg

SEQ ID NO: 4116771 - RNA, 66 nt, Human
uugugugaauuguuaaggguguugacaguuaaaaagcugucugacugaaccaauuauuuacaacaa

SEQ ID NO: 4116772 - RNA, 67 nt, Human
uugugugcauauguaccugugaucauguauguacaugcaugcauguaugugugcauguguaucucaa

SEQ ID NO: 4116773 - RNA, 82 nt, Human
uugugugcucagagaaagcaauuaaaagggugcugguucuucaugauucagagccucuaaaauuucuaucuagaacaugcaa

SEQ ID NO: 4116774 - RNA, 75 nt, Human
uuguguggaguuuaucagagagcagaggugggcuuuaagaggcucacuagugguuucuggugguugcuauaacga

SEQ ID NO: 4116775 - RNA, 57 nt, Human
uugugugugugugugugcugguuuuuuccuuaaaguagcuuaauaugaaacacauaa

SEQ ID NO: 4116776 - RNA, 72 nt, Human
uuguguguuuguagaaaauccauuucaagucaugucaucauuagaggaauauuuucuacuguuaacacacga

SEQ ID NO: 4116777 - RNA, 56 nt, Human
uuguguucugcacacgguccucaaacaccguggugaaggaacuuuguagaauacaa

SEQ ID NO: 4116778 - RNA, 74 nt, Human
uuguguuggcgaaagcaugucacuugguccagccccuacagaggcagguaugcagacaugucuuucucacacaa

SEQ ID NO: 4116779 - RNA, 74 nt, Human
uuguguuuaaggaguagaauagaugcaccuucauucagaaaguggaaguuuaugaagucuaagccaaaacacaa

SEQ ID NO: 4116780 - RNA, 55 nt, Human
uuguguuucccagagauccgccuccagugacuccauuucucucagggaaacagaa

SEQ ID NO: 4116781 - RNA, 74 nt, Human
uuguguuuggugcuuuaaauagaauuuauugauuuuauaauacugucaagcccuauuucaaggcccagauauga

SEQ ID NO: 4116782 - RNA, 62 nt, Human
uuguguuugucuguggcaauuguggguaaguuuucuuccuuuuauuuguccaggcuuuauaa

SEQ ID NO: 4116783 - RNA, 97 nt, Human
uuguguuuugucugucuccucucacuagaaugcaagcuccacaaggguaggaguuuuugccuuguugaccgguguaucucuagugcccagaacacaa

SEQ ID NO: 4116784 - RNA, 65 nt, Human
uuguuaaaaauagauuuccaggacauccccaugggucuggacucgggauccucuauuuucagcag

SEQ ID NO: 4116785 - RNA, 66 nt, Human
uuguuaaugagcugaauaguauagcaauuggauuucuuuuugaaucuauaauuucaguauuggcaa

SEQ ID NO: 4116786 - RNA, 60 nt, Human
uuguuacaauguacuuccuugcacaguaucuuugugcacuuguaugaguacaucugucag

SEQ ID NO: 4116787 - RNA, 66 nt, Human
uuguuacaugacucaaaggcacccuacuuggaauggaagggugccauugggcagucauugaagcaa

SEQ ID NO: 4116788 - RNA, 119 nt, Human
uuguuacuagaguggaaguugcuucugccuguaguauuuggagaagcuuuaaauuuguaaaucuauuuugcagcuucuccaaauauuacaggcagaagcaacuuccacucuaguaacag

SEQ ID NO: 4116789 - RNA, 67 nt, Human
uuguuacuauuuggauguuagccucaguccauaaagggacuugcuacacaucaucaaacagcggcaa

SEQ ID NO: 4116790 - RNA, 93 nt, Human
uuguuacucuguugaacaguuccagauugcuaaaaguaucaccugcuuccugaguuuagcaauuucuaaaaguguuauaucaugaguauauaa

SEQ ID NO: 4116791 - RNA, 61 nt, Human
uuguuagcugaagugugauguuugcagaaacuucugucagaccugugauuucagcaagcaa

SEQ ID NO: 4116792 - RNA, 61 nt, Human
uuguuaguaucauuuuggcauuaguauuuggugacagauguagcuuuagugauaccugugg

SEQ ID NO: 4116793 - RNA, 68 nt, Human
uuguuaguugggaagaugcugugaggccugaguuaauuuuggacuaacaugucucuucugaaagacaa

SEQ ID NO: 4116794 - RNA, 73 nt, Human
uuguuauagugugcccuucagcuuggaaacaaacguaugugauaaguuucuugauucugaaauauuaugauaa

SEQ ID NO: 4116795 - RNA, 109 nt, Human
uuguucaauuccagguuacguguauaauggauucagaaccgucaacccguauucagaguacauguauaguuguuucugaacuguuaucagguauaccugugagaaacag

SEQ ID NO: 4116796 - RNA, 64 nt, Human
uuguucagagcuggguuuggucuuaagagucauuaaaagacucucugagcuaccaggugagcaa

SEQ ID NO: 4116797 - RNA, 67 nt, Human
uuguucauagcuaucauugugucagcaaaaucucucaccaugaaugacaccaagcaguuaugaacaa

SEQ ID NO: 4116798 - RNA, 74 nt, Human
uuguucauauuugaaacagaaguuaguuucuaagagcuucuuagaauaauaaauauuguucuaaauaugggcag

SEQ ID NO: 4116799 - RNA, 73 nt, Human
uuguuccacaaauauuucuugagcaccugguauuugcccagcacugugcuaggugcuaggaagauaggaauaa

SEQ ID NO: 4116800 - RNA, 90 nt, Human
uuguuccugucgccuuuuaaagugguccauuucagaacaggcuguugauaaacuugcucauuuuauggcuuuuuugaaagauagguuuaa

SEQ ID NO: 4116801 - RNA, 55 nt, Human
uuguucuacucuacaguggagggcuucuuaaaaguuuccacccaggguagaaggg

SEQ ID NO: 4116802 - RNA, 59 nt, Human
uuguucuauggggugaagucuauaaauaaauaaauaagauauuucacauccgagaacaa

SEQ ID NO: 4116803 - RNA, 60 nt, Human
uuguucucugguaaacacaugcguauuuagaaagauguauacagcauguaucaagaacag

SEQ ID NO: 4116804 - RNA, 74 nt, Human
uuguucucuuuucacuuggcgucaagggauugacugaaaauaacuauccuuuuguuacaaagaaagaagagcaa

SEQ ID NO: 4116805 - RNA, 73 nt, Human
uuguucugugccaucugcacucucgucuauguggcagagccaagccuugaugagagagcagaggacaggccaa

SEQ ID NO: 4116806 - RNA, 83 nt, Human
uugagucucagcacagguuagguauuauacuaugcacuuagaauguagagacuaauauaugaaccaagccucaaggagcucaa

SEQ ID NO: 4116807 - RNA, 61 nt, Human
uugagucugcaauacauaacacaccuguaucagucuguauuuguagauguugcagccucaa

SEQ ID NO: 4116808 - RNA, 82 nt, Human
uugagugauaaagcugaagauuuuugcuagccccguagagaaauggggagaaauuuggcaaggcaucuuugacguggcucag

SEQ ID NO: 4116809 - RNA, 64 nt, Human
uugagugguaguuucuagagguguuauuuccaauauguuaaaguuuuagaauacuacuauuuga

SEQ ID NO: 4116810 - RNA, 68 nt, Human
uugaguguaauuaugaaauggaguuagcuauacccaacugcacaaaacacauugcuaauuacauucaa

SEQ ID NO: 4116811 - RNA, 57 nt, Human
uugaguuccaggaugguuguuaguggaaggcuucccaacccccuucugagaacccaa

SEQ ID NO: 4116812 - RNA, 62 nt, Human
uugaguuucuuaaaagaggaguuagaaguugaagauauuucuaaugccuuaaagaaauugag

SEQ ID NO: 4116813 - RNA, 62 nt, Human
uugaguuuugcaaccuccuucuuugauagauugucucaaaggaccagguucccaaaagucaa

SEQ ID NO: 4116814 - RNA, 106 nt, Human
uugaguuuugcaacuguguuuaacaugcauauaauggccagaacaaauguguuacauuguuauuuugucuguaauuauaaggcauaaaauauaggcaaauauucaa

SEQ ID NO: 4116815 - RNA, 63 nt, Human
uugaguuuugcauagagaagugacauaaaacgugaucacuuauaaaaugcaagaucugcuuaa

SEQ ID NO: 4116816 - RNA, 62 nt, Human
uugauaaagaaucuggaugaaaguauugguagcugaugaauuuaucaaagauucuuaauuga

SEQ ID NO: 4116817 - RNA, 74 nt, Human
uugauagaauuaacuuauacccagggcagaaauaauauuugcaugauuccuguggcuggguaaaguacuauuag

SEQ ID NO: 4116818 - RNA, 76 nt, Human
uugauaugcugcugcgcuugucuacuguuugucugauauugacaauuauaaacagggcagugcaaccaguauuuga

SEQ ID NO: 4116819 - RNA, 102 nt, Human
uugaucucccugauaucugaaucauuaaauaguuuucuagugguuaagauuuacaauuauuguaaugggcuacuaggaagaguuucagauucucaagaucaa

SEQ ID NO: 4116820 - RNA, 95 nt, Human
uugaucuuccgcuggcauguacugaagggccuuucuagguucugauuugaaugugugaaaucacaggcuauuuagagugccauguuuuagaucaa

SEQ ID NO: 4116821 - RNA, 68 nt, Human
uugaugaagacacauacaagggaaugaacauggggccagcugugacauuuucugugugccuuaaugag

SEQ ID NO: 4116822 - RNA, 89 nt, Human
uugaugaauaacugugacaauuguuguugcauuuuuaaacauacacaaaaagugaggccagcaacauugagacugcaguuggauaucaa

SEQ ID NO: 4116823 - RNA, 59 nt, Human
uugaugacacauuuuagaagauugcuuagcaauagauucuucuaguuuggaguuauuaa

SEQ ID NO: 4116824 - RNA, 67 nt, Human
uugaugaucaggugucaaugccugguucucugccuaauucccaguaacuugcagacaccugucucaa

SEQ ID NO: 4116825 - RNA, 58 nt, Human
uugaugcuguuauuguccaagauguucucucuuagaauagcugguaaugauagcacaa

SEQ ID NO: 4116826 - RNA, 71 nt, Human
uugaugcuguuguaagaauuaauuaauguuuugaaaguguuuugaacaugaaaagucuuacacgcauacaa

SEQ ID NO: 4116827 - RNA, 58 nt, Human
uugauggcacuggaacucaaauccaggucuuccugguuccagagucuguguucaucag

SEQ ID NO: 4116828 - RNA, 92 nt, Human
uugauguauaaguuuauggcauuguuggugaugauauuugaugguuuuacaaguguguccuuaucuccaaacaaucaaguuuuauauauuaa

SEQ ID NO: 4116829 - RNA, 115 nt, Human
uugauguauauaaugacuuggaaguaaaaauauuguuugccgugggauauuguugucuuuuucuuaugguuaauuccuggcauaauggcuuugcuccuuuauuauaaaacauuaa

SEQ ID NO: 4116830 - RNA, 89 nt, Human
uugauuauaucagcugagcuagggauaucuccugagaaugucuccucccuauucucaggaaaaaucccuagcuugguugaugucaucag

SEQ ID NO: 4116831 - RNA, 74 nt, Human
uugauucagaaguuucacaauggguuuuauggucacaugcuugauuuugucuuucccaugaaacuucuuuucaa

SEQ ID NO: 4116832 - RNA, 61 nt, Human
uugauugcuaagugguauuuggguuuguaaucaaacaucacaauuucauuuaugcagucag

SEQ ID NO: 4116833 - RNA, 88 nt, Human
uugauugguagcgugaagcugcaauaauuguuuugaaauggauucaaauacaauuaaugcaguuuauacccauggaacuaccaaacaa

SEQ ID NO: 4116834 - RNA, 83 nt, Human
uugauuguuuccgcuccccgcguggaugacguccuccgcccuuggauguggagucaggauccuggggauggaugccaacucaa

SEQ ID NO: 4116835 - RNA, 56 nt, Human
uugauuuauugagugcuuaguaugugccagacacuuugccaagcucuuuagaucga

SEQ ID NO: 4116836 - RNA, 63 nt, Human
uugauuucuaaggauguaccuaccauuccacacaauaaauagguacauauacuuggaggucag

SEQ ID NO: 4116837 - RNA, 81 nt, Human
uugauuucugacccuaaaucuaguaccuuuuugauuauacuccauguaaaagaagggaaaucuaggaaagagagaaaucaa

SEQ ID NO: 4116838 - RNA, 57 nt, Human
uugauuuguaggaauggagaccuugcaugcaggucuuuuacaguccuaccaaaacaa

SEQ ID NO: 4116839 - RNA, 74 nt, Human
uuuauuggcuggcugucuucugggagcugugcuuagcucuucauggcuucucaugagaaagccuugccaagaaa

SEQ ID NO: 4116840 - RNA, 63 nt, Human
uuuauuguguacuacaguaugccacacuguuaaauauugggcauguagaagugacaugaugaa

SEQ ID NO: 4116841 - RNA, 64 nt, Human
uuuauuuauugcuuuggaaaacacucauuggccaggaaaaugggcguguccaguaaugauuaag

SEQ ID NO: 4116842 - RNA, 83 nt, Human
uuuauuugauagauauaucugucauacugguauuaguauauuuuacuaagaaaucaaguuggagguagaucuuaacaaauaaa

SEQ ID NO: 4116843 - RNA, 69 nt, Human
uuuauuugcuaccuuugauaaauauuucugagugcuaaguguacuaagaguuagggcuagcaauaugga

SEQ ID NO: 4116844 - RNA, 92 nt, Human
uuuauuuuuguaaacaaaaagcaguuuauagucaguugaacaacuggaaaucaguugauaaguaacuagauauagauuguuuuaaaaauaaa

SEQ ID NO: 4116845 - RNA, 77 nt, Human
uuucaaaggaaauuuuggaaucuugggaagcucagugagguggcaaauuccucagaaucagaaaaccaacuuuggaa

SEQ ID NO: 4116846 - RNA, 59 nt, Human
uuucaaaguggagagccugugguugcucccugaguccagguuuuaucuuccacgagaga

SEQ ID NO: 4116847 - RNA, 55 nt, Human
uuucaaauauccaggagccccuuaguguaagggcaagcucuaaaagauuuugaag

SEQ ID NO: 4116848 - RNA, 57 nt, Human
uuucaaccuaucccaaaaagugauuguccauuucagggcagggcaagggauaugaaa

SEQ ID NO: 4116849 - RNA, 70 nt, Human
uuucaacucuaauuugcaaugugaaauuaaagaauuaagauuugggauuuuacauuguaugguguuggaa

SEQ ID NO: 4116850 - RNA, 70 nt, Human
uuucaacuugcuuuccaaaugacucacuucaguuucagcugagagaggcagaaggaaggcaaaguuggga

SEQ ID NO: 4116851 - RNA, 66 nt, Human
uuucaagcauaacugggaagagagcaugaaaacuccacuuuccacucuugugcuccgugucugaag

SEQ ID NO: 4116852 - RNA, 59 nt, Human
uuucaaguuauaaaagucggcaguuugaaagcauucauccugcaucugugacuugcaaa

SEQ ID NO: 4116853 - RNA, 75 nt, Human
uuucaaucacuuugaaacuaaaauucauuaagcauaaccagauugcuuuuguggguuguuucaaggacauugaga

SEQ ID NO: 4116854 - RNA, 66 nt, Human
uuucacacccacuaggacuguucuaaucaaaaagagagauaauaagguguuagugaggaugugaaa

SEQ ID NO: 4116855 - RNA, 108 nt, Human
uuucacagcugggccacccagaagcucucucuggcucucuugacaguggagcuguugaaaggaauacagaggccuaggagagaguccuuggucuauugaagcuagaaa

SEQ ID NO: 4116856 - RNA, 62 nt, Human
uuucacaugugcuguugucaauaucuggauguugaaacagaugcaugcauggcacagugaaa

SEQ ID NO: 4116857 - RNA, 73 nt, Human
uuucacccaugggaugcugcuuguuugcugauaccacuaagcaaaugaacaguugcauucucugagagggaaa

SEQ ID NO: 4116858 - RNA, 76 nt, Human
uuucaccuggggguagccaaauaaaucuauuuuaagucacuuuaaauaacuuguaugguuauuccacagcaugaaa

SEQ ID NO: 4116859 - RNA, 59 nt, Human
uuucagaaagcugaacauaugacucauuucugugugcgugugugugcgucuuugugaag

SEQ ID NO: 4116860 - RNA, 68 nt, Human
uuucagaaauggcacugaaaucuguuuuccgguuuuacucguugugcaauacagugcuguuuuagaaa

SEQ ID NO: 4116861 - RNA, 57 nt, Human
uuucagaggugucauuauuuuucauauaagcagaugaaagagaagaagucuuugaaa

SEQ ID NO: 4116862 - RNA, 97 nt, Human
uuucagcuaggaccaagaugggccuugacacauggaguguaaaaaaaaccucaauguccauacuuccaaggguguuagguccuaguucuaaaugaga

SEQ ID NO: 4116863 - RNA, 60 nt, Human
uuucagcuaguagcaauguauggauuccauuuggauccugauccauacaaacuguugaaa

SEQ ID NO: 4116864 - RNA, 69 nt, Human
uuucaggaaagaugguaucucuucaauagaguugcuaagcuagugagcagucauccauuucuccuuaaa

SEQ ID NO: 4116865 - RNA, 55 nt, Human
uuucaggagauuguacugucaucacuuaauaguggagaaaaauaguuuucugaga

SEQ ID NO: 4116866 - RNA, 83 nt, Human
uuucaggcagaggaaacaugaguuguaucaggcauagaaaccuggaacaaaauauuuauguuugcucagaccucagucugaag

SEQ ID NO: 4116867 - RNA, 111 nt, Human
uuucaggccucuccuucuucaugugauaggucuagauaccaccuguguaccuggaaacuugcaauuauauuugugguuuuuggcuccuuuauaaggggacaggccuugaga

SEQ ID NO: 4116868 - RNA, 99 nt, Human
uuucagguuagaaggaauaaguacagagaagggcucugauguuuugccagucaaaucauugcuccuuucucugguaaacugaauugcuguggccugagg

SEQ ID NO: 4116869 - RNA, 64 nt, Human
uuucaguagcuugccaaaugucacacuauuacccagcuaguaaguggcucugccaggacugaaa

SEQ ID NO: 4116870 - RNA, 68 nt, Human
uuucaguauccacaaaugcucaaaacauuuucuauacuuugauguuugggaacaaugaggaucugaaa

SEQ ID NO: 4116871 - RNA, 60 nt, Human
uuucagugcccagagcuuugcaggucccaccgcuucccucaagcauccccuguacugaga

SEQ ID NO: 4116872 - RNA, 63 nt, Human
uuucaguggaugugaauuggcgcaaaaggaacacuucuuuuccuucuauacauaucacugaaa

SEQ ID NO: 4116873 - RNA, 75 nt, Human
uuucaguugauugcuuggguuacucuuuauacucugcugcaacacagaaucugagaacugaagcagggacugaaa

SEQ ID NO: 4116874 - RNA, 56 nt, Human
uuucaguuuaaguaacugcuauuacuuaagugauugcacuuuugcucaaauugaag

SEQ ID NO: 4116875 - RNA, 59 nt, Human
uuucauaaucugucaaguggggauaauuaugguaaccaccacugagcauuguuaugaag

SEQ ID NO: 4116876 - RNA, 99 nt, Human
uuucauaauugucuguaugaggagacuacuuaauauuucaugacagauauauuucuuguuguugaaugaguguuuuacucauguaaucaugauauggaa

SEQ ID NO: 4116877 - RNA, 56 nt, Human
uuucauacuguguuuccaaguuucuccuuuggggauacaaugaaguauagaugaaa

SEQ ID NO: 4116878 - RNA, 76 nt, Human
uuucaucagugccaggcuagcccagaccacaggaaguuuaugaaagccuuugugauggcuggcaggcugggugaga

SEQ ID NO: 4116879 - RNA, 77 nt, Human
uuucaucuacuggaauauuuacuuuggauaaaaugcaaguucuuuguagcagucugggggaauuacaauagaugaaa

SEQ ID NO: 4116880 - RNA, 73 nt, Human
uuucaucucuuuuucucugaguacguuucaguguuuaauugaccaggaauguauuucgaggugugauaugaga

SEQ ID NO: 4116881 - RNA, 55 nt, Human
uuucaucugaguagcgucggaugaucauguuauagagaugcucauucagguggaa

SEQ ID NO: 4116882 - RNA, 65 nt, Human
uuucugggaaguagaaucagaugaguauagcuucuaauacauuuaucugaaaaaacucuuggaga

SEQ ID NO: 4116883 - RNA, 59 nt, Human
uuucugggacuggggagauucuguuauucuguucuucagcuccucuaaaagcccaggaa

SEQ ID NO: 4116884 - RNA, 62 nt, Human
uuucugguuguucuguaagccugccauucaucccaaccaggacugcaaccuuagacuagaaa

SEQ ID NO: 4116885 - RNA, 72 nt, Human
uuucugugaauggccaugacaagguacuauguuuuuugacucuuuuguuuaaauguggcauauauacagaag

SEQ ID NO: 4116886 - RNA, 64 nt, Human
uuucuguguuaaguauuugauacacucuuuugguaguguagucacauacuuaauuugcaugaag

SEQ ID NO: 4116887 - RNA, 72 nt, Human
uuucuuaauaaaguaagcaaguaugaugaugaguaaucauuuauccauuagcuaucuguuuacauuaggaaa

SEQ ID NO: 4116888 - RNA, 66 nt, Human
uuucuuacacuuuccgaaagcuuguuuacagacuucagacuaacagggacaaggaaagguaagaga

SEQ ID NO: 4116889 - RNA, 106 nt, Human
uuucuuaccucccuuuuauucugucaaacuuauacaugugacauuccauuuccucagggucuugauguuuacugguuuauagaauaagcagguucacaccaagaag

SEQ ID NO: 4116890 - RNA, 112 nt, Human
uuucuuauucauguuacuuguugguuggaggccagcuaugacucugcuccauggucucgucucuuuggaaggagcagguggcaucugggcacggguauucaugugucagaag

SEQ ID NO: 4116891 - RNA, 73 nt, Human
uuucuuccauaagcagaucuuuaacagggucacuuagguaauugggcugcuuaaacagaugugcuggaagaaa

SEQ ID NO: 4116892 - RNA, 89 nt, Human
uuucuucccaaguguuuacagcuuuuuacuaauagauugaauccuaucccuagcugccaguuuucugugaagagcugaaaaggaggagg

SEQ ID NO: 4116893 - RNA, 71 nt, Human
uuucuuccucagguugcauguggagaaaaucgggaugaauuuccccuauuucacugcaaugcuaggagaaa

SEQ ID NO: 4116894 - RNA, 65 nt, Human
uuucuuccuuaccuuacuagaguagaaaagaggagcgcauacaaaagguggggaaaaggaagaag

SEQ ID NO: 4116895 - RNA, 77 nt, Human
uuucuuccuucugugucuucuuguucugugacuuaaaaaaaugaaagcgagagagagagagagauaggaagaaggaa

SEQ ID NO: 4116896 - RNA, 71 nt, Human
uuucuucuaaguuggcccugcugggcgccaugcaaaagacacacaagcccuagggcaggcauuggaagaga

SEQ ID NO: 4116897 - RNA, 56 nt, Human
uuucuucucacccaggacagagucacagagaccuugaagaauggaggagguagaaa

SEQ ID NO: 4116898 - RNA, 55 nt, Human
uuucuucugccucccaccugauaaauaaucuuguguagugccugggcagaaggaa

SEQ ID NO: 4116899 - RNA, 67 nt, Human
uuucuucuugugcacucucuauguacuaggcuguacuugaggugcuagggauguagcagugaagaaa

SEQ ID NO: 4116900 - RNA, 104 nt, Human
uuauuugggugugcucaauagauuuaguugaaguggaaaagaaauuauucaaauuucagaccauuugcaauuaucaauuuaucugcuguuuuccagccaaguaa

SEQ ID NO: 4116901 - RNA, 60 nt, Human
uuauuuggucuguaauuacauggacuuuauuuggaggucagugaaggaacaacuaaauag

SEQ ID NO: 4116902 - RNA, 57 nt, Human
uuauuugguugcugacuuggaagaguacagaauuuuaaguuuuaagcaaucugauaa

SEQ ID NO: 4116903 - RNA, 107 nt, Human
uuauuuguaaaaugggagugauaccugcuuuaacugccucagaggcucagggucggggggaggcucagagaggcaguggaagucaggaauauuuauuuugcacauaa

SEQ ID NO: 4116904 - RNA, 87 nt, Human
uuauuugucuucccauuguuuauuuagacuuaauccccaggagugaaaugacugaaucagauaauguggucauuuaaagacauuuga

SEQ ID NO: 4116905 - RNA, 101 nt, Human
uuauuuuaaaacagcaaguaaagaauuuaaaaugaucaguaaucugguuuaaaggacucugaugcuaaaauaauuauuuugagauuuguuguguagaauga

SEQ ID NO: 4116906 - RNA, 76 nt, Human
uuauuuuauagaugaagaaacagaccaagaggaucauuuaaauaugaucaucuuaguuuuuucaguaaagaaguaa

SEQ ID NO: 4116907 - RNA, 83 nt, Human
uuauuuuguccaguguuccauggagugauuacccacauuaugcuaauugauauaauugcuccaaggagaacuaaucgaaguag

SEQ ID NO: 4116908 - RNA, 79 nt, Human
uuauuuuugacagcauaauccuacacccaugggagcugagcuuuacagguguuaaagaggauuuguuguaagaaaauga

SEQ ID NO: 4116909 - RNA, 129 nt, Human
uuauuuuuuauacauguguauuucuugcauuuagugaacaaagaauaucuguuuuauuuagguuggugccuuaauuagaaugauguuccucuaacuggaaaguaaaaguacaauuuaaacagaaaauaa

SEQ ID NO: 4116910 - RNA, 89 nt, Human
uuauuuuuucucuuugggccaagaacagcauuuccuagaccuaaaagcagcuccaguaaaugauuauuuugccaacggaugaaggguaa

SEQ ID NO: 4116911 - RNA, 63 nt, Human
uucaaaaacuccuacauaauugcucaauuaugauauuaaggcagcuuucuguaggggugugaa

SEQ ID NO: 4116912 - RNA, 87 nt, Human
uucaaaagaauucugggcucugcaguugauguuuucaauuauucuugcaaaaaacauaugcugcuggcugcccuucgauuuguggaa

SEQ ID NO: 4116913 - RNA, 59 nt, Human
uucaaacaguugcacaacuuaugucacuucucaacauagcagaaagugcaauguuugag

SEQ ID NO: 4116914 - RNA, 89 nt, Human
uucaaagcugaguaacuucagauuacacacucaaguccuguuauuuguuaacagcauuugaaugaguaacuugcucccauugcuuugaa

SEQ ID NO: 4116915 - RNA, 91 nt, Human
uucaaaggcaaaguaucuugucacuacuguuaugcauuucucaaccaauguucaugauugguuuuggcgaaugaagauacuugucacugga

SEQ ID NO: 4116916 - RNA, 93 nt, Human
uucaaaguguaaugaauggagugcacagaauuaagggagaaauaucagauuugggacugaguuuuugccucgaauucugcguauaacuuugag

SEQ ID NO: 4116917 - RNA, 71 nt, Human
uucaaauacauauaauuuuugguuagcucaauaguauuuauauuauugauacccaaguguuauggguugaa

SEQ ID NO: 4116918 - RNA, 77 nt, Human
uucaaauauaaccaugauuaaucuaagaaggcuuaaaggccuucuaauagaagaugauuauuuaugguuuauaugaa

SEQ ID NO: 4116919 - RNA, 118 nt, Human
uucaaauauguuucugcuacaaacauuguccuuuagaugguuccuuugcugccauuaugacuauggcguaaucuguaguaaagcaccauuaagauguuaauacagauguaugugugaa

SEQ ID NO: 4116920 - RNA, 60 nt, Human
uucaaaucagaccgaaggcaaccucagaaacaagaagagccuuuaaaauucugguuugaa

SEQ ID NO: 4116921 - RNA, 76 nt, Human
uucaacuucccacagaauucaaucagugucagagcauggcugaacacagacgcuuauugaauggcuguuggaugaa

SEQ ID NO: 4116922 - RNA, 57 nt, Human
uucaagaaucgagguggcuguuccuuacccaacagggcagagccugagguucuugag

SEQ ID NO: 4116923 - RNA, 123 nt, Human
uucaagcaacagccuguguguuccccaggaguuaugcugaggggcaagguuuuaugcagcucuguguucacagcacuaacagcaccagguaaacaacaggcacucaauaaauguugacaugaa

SEQ ID NO: 4116924 - RNA, 56 nt, Human
uucaagcagggauuggugauggcaacuguucccauuaccaaaguucagguuuugaa

SEQ ID NO: 4116925 - RNA, 69 nt, Human
uucaagcugcuggauuuacugaguuuuaucauauugaacgugagaaaauccagaggcuaguuucuugag

SEQ ID NO: 4116926 - RNA, 72 nt, Human
uucaaggggacccaggacuuugggaccccccugugcucccaccuggagggaguuucauuccugccccuagaa

SEQ ID NO: 4116927 - RNA, 55 nt, Human
uucaaguagaaaguauugaugaucagugacaucaacuggacaguuucugcuugaa

SEQ ID NO: 4116928 - RNA, 90 nt, Human
uucaagucaaauuccauucucugugucugaguuauggucuuuuacuaagauaauguuaauaucauaagcgauacaaaaugguuacuugaa

SEQ ID NO: 4116929 - RNA, 82 nt, Human
uucaaguccuaguagaaucccuugcaaugucccuccucccuggaaggcaagaggagauucugcucccagaacaggccuugga

SEQ ID NO: 4116930 - RNA, 59 nt, Human
uucaagucuggagaucuggaacuucuuccugaagcuccauguuuagccagauaauugag

SEQ ID NO: 4116931 - RNA, 61 nt, Human
uucaaguucuguggagagcuguaaccaugugaccuuccauggcagagccucagagcuagaa

SEQ ID NO: 4116932 - RNA, 67 nt, Human
uucaauaauuuaagaggcugacagcuguaucauagcagcucuaucauagcauuuuuguauugcugaa

SEQ ID NO: 4116933 - RNA, 67 nt, Human
uucaauccgcuccucuaagcgcgguccugagcuuuggucccagacgcgcagaaggaagcggccugaa

SEQ ID NO: 4116934 - RNA, 70 nt, Human
uucaauccuuuaucuuguaguugauuuaucuuuaaucuaaugagaaaacaacaacggagaaaggguuggg

SEQ ID NO: 4116935 - RNA, 104 nt, Human
uucaaucuucucagcauuuugucagucucucaugaaugaacucaaacuaauguaauuuuaaaagacugauauaacugcugcaggagcaaaugcuaucuauugag

SEQ ID NO: 4116936 - RNA, 116 nt, Human
uucaaugaugaauuaauaggcuggcccucaauucccauaucucuuguaacuggucucugcugucaaauuagaaggcugagcuuacaggugaggcagcaagaauuugagugauugga

SEQ ID NO: 4116937 - RNA, 111 nt, Human
uucaauggcagaugacuugauucuuggugguaaagcaagugguugguuauaaguauggggucucauugugccuagguuaacauuucuuuuccacucauaugugccauugag

SEQ ID NO: 4116938 - RNA, 85 nt, Human
uucaaugguacuugaugauagaaugugaggagugauuacacaguguuauggacuucuugcaucuguccauuacaguggaauugaa

SEQ ID NO: 4116939 - RNA, 74 nt, Human
uucaauuuagcauauuugauaaccaauauuccuuguucauuugggagcaaauuuaucaagauguuaugguugaa

SEQ ID NO: 4116940 - RNA, 84 nt, Human
uucaauuuauuagcaaguccugucaccucuacuuucgaaaucagauuauauuuugagucuaacaggacuugcugguaaguugga

SEQ ID NO: 4116941 - RNA, 59 nt, Human
uucaauuucauaauaucuagcucagccagauaugugguguagcaagaguauggauugaa

SEQ ID NO: 4116942 - RNA, 59 nt, Human
uucacaagucuggaauaugcuaccucuagaacccaaaguggccuaccagacauugugag

SEQ ID NO: 4116943 - RNA, 127 nt, Human
uucacaaugaacuuugauucaggauaguguuuuauuugucacauugaauaugauuuauucuaaaccuuuuaauggagaaaucuugcucauugugacaaucauagccuucuuaugucuuuuccaugga

SEQ ID NO: 4116944 - RNA, 73 nt, Human
uucacacugaaugggacuuuaugguguuuugagauaaaacaagaaaggccagauucacuuuacaaugugugag

SEQ ID NO: 4116945 - RNA, 55 nt, Human
uucacaguauagguuuccagcgcagacccugccuuacgugccuccuacuugugaa

SEQ ID NO: 4116946 - RNA, 119 nt, Human
uucacagucuguuuaaagauaagucagguuaucuagauguguuaucagacauuugcaagucguuggguaaaccauuaagauauuuuggaauuucaucuuucucauauaaaacacuugaa

SEQ ID NO: 4116947 - RNA, 69 nt, Human
uucacaugcaaguccucaguucuauuauuuuaauguaaaacucuagagcuuggacugcauuuucgugag

SEQ ID NO: 4116948 - RNA, 66 nt, Human
uucacaugugacccugcaggcagcuaaccaaggcuaaggaaugugcucugggcagggcacauggaa

SEQ ID NO: 4116949 - RNA, 57 nt, Human
uucacauuaagccuccuccuacauggacaaccccuaugaaggggcagcuugugugga

SEQ ID NO: 4116950 - RNA, 71 nt, Human
uucacauucccaauggcuccauuuucaucuccuuaaucagguguuaaaauucauggcuugggaaaaguggg

SEQ ID NO: 4116951 - RNA, 74 nt, Human
uucaccaacauuuuccaaaguaccaugucccugauaccaaaaauaguggaguugguguuuggagucucugggaa

SEQ ID NO: 4116952 - RNA, 76 nt, Human
uucaccaagauaagaacggagcagcuucgugggccaagagggcuggccaggugcuuugguucugcaucugugugga

SEQ ID NO: 4116953 - RNA, 77 nt, Human
uucaccaggacuuuggagagacaggaguguucuccaaaucugcccucacuucauguacuguucaaggcccuggugga

SEQ ID NO: 4116954 - RNA, 79 nt, Human
uuucugcguuaaggcugauaagucagauauaaagguugaccaaauuguuaacacaugcucuacuuacggcuuucagaaa

SEQ ID NO: 4116955 - RNA, 79 nt, Human
uuucuucuuuugcaagggauaccauacuaagaaaugccucauuacauuuuguguuguucccauugcagccagucagaaa

SEQ ID NO: 4116956 - RNA, 100 nt, Human
uuucuugacauuauguguggugaagaaguacaagacaaauuuucuagauaugaaaugucuuugaguauuucugcaaagggcuuguuaccauggugagaaa

SEQ ID NO: 4116957 - RNA, 71 nt, Human
uuucuuggucucacuagccacauuuccaauguucaauggccacauguggcuaguggacacaguauuagaaa

SEQ ID NO: 4116958 - RNA, 77 nt, Human
uuucuuguucgcugaauguaauagucaguagaacaguaaucuggaagcacuacuuuaaugcauguguauauaagaag

SEQ ID NO: 4116959 - RNA, 112 nt, Human
uuucuuguuucccucucccgauucaggaaaugcguaguugaacuucucagguuugcuugaacuucucagguuugcuuugcacaguccuaaaucaaagauguggaccaggaaa

SEQ ID NO: 4116960 - RNA, 85 nt, Human
uuucuuuaccgcucaaggccgccccuucaugcuccugcgggggaguuagcgggaccucuggagucggccuuacgcaaagaagaga

SEQ ID NO: 4116961 - RNA, 60 nt, Human
uuucuuucaaugcuuguaagggaauucuuacaagcuuucccuuacaagcauugaaagaaa

SEQ ID NO: 4116962 - RNA, 86 nt, Human
uuucuuucugaagggugcuucugggcauagcaggauagcugcaagcaauuucuccuauacaaucaggguugaccuucagaaagaag

SEQ ID NO: 4116963 - RNA, 66 nt, Human
uuucuuuuacaguguggcuauucuucuucaauaggcugauggugcagcuacucucugugagaggaa

SEQ ID NO: 4116964 - RNA, 130 nt, Human
uuucuuuuucuguauuucuauuagagugaaggucuuuaugguaugaaaacugaauauucuccucuaacaauguuuguuaucaaugaaucaaaacucuuucaaauccugauguuuccuaagaaaaaagaaa

SEQ ID NO: 4116965 - RNA, 106 nt, Human
uuugaaacauuucaagcauuugaacguuuuaugugauuccaguggcauuuucugugaaaguugucaugccauuuaaaauguuuucaaauaugaaucauguuacaaa

SEQ ID NO: 4116966 - RNA, 70 nt, Human
uuugaaaggugucgagaugugugguaggggggauuauuuuuaaugaaacuaagcuugcauauuuuucagg

SEQ ID NO: 4116967 - RNA, 72 nt, Human
uuugaaaguccuaggagagucccacccuuaaucucuuugaggccucuaugaguuuccauagcacuuuacaaa

SEQ ID NO: 4116968 - RNA, 61 nt, Human
uuugaaagucucaaagcacaggaugcuccagggaaguguuucuggcuuuaggcuuuucaag

SEQ ID NO: 4116969 - RNA, 75 nt, Human
uuugaacuuuguucugcaugcaucuguuucaccuaucauuaguaggaccaaguggagugcaggucaauguuuaga

SEQ ID NO: 4116970 - RNA, 55 nt, Human
uuugaagugggcauuagaaccuuuucccccuuugguguuuaaagcucauuuuaaa

SEQ ID NO: 4116971 - RNA, 77 nt, Human
uuugaauaauuucagugggcucugggcuauaagacugguccccaguugucuaguaccagucccuggaguaauuuagg

SEQ ID NO: 4116972 - RNA, 92 nt, Human
uuugaauauaugugcaguugagagauuuugaagccuggcaugaaaaguuaauuuuaugugcuucauaaucuucucauuauacauauuuuaaa

SEQ ID NO: 4116973 - RNA, 77 nt, Human
uuugaauccaaaauguuugaaugcaugugcuguauauugcaauaauaccacauauguaacugcaggcauuaugcaga

SEQ ID NO: 4116974 - RNA, 64 nt, Human
uuugaaucugaaacucugacauugucugugacuauuucgaaggcaaugugagaguuuauucaaa

SEQ ID NO: 4116975 - RNA, 127 nt, Human
uuugaauuacuauguugcaaaguugguaaucuuagugagaauacaagaaaacauaagguuauucacauucagguuuauuuuguuuuguauccacugugaugauuaaaauugggauuaaauauucaag

SEQ ID NO: 4116976 - RNA, 84 nt, Human
uuugaccuguuuccuuuuuuggcuuuugcuuuauauucauaguagaguguuaguagcucucaagauaagaaagaacagguuaag

SEQ ID NO: 4116977 - RNA, 86 nt, Human
uuugaccuucuuuauagccccaugaggcauuggcauguaaugucaccauuucagaguuggggaaaagcagauaugaaaaggucaag

SEQ ID NO: 4116978 - RNA, 57 nt, Human
uuugacuucugggcauuuugguuucuccccaauuuaggagaaugcccagaaugcaga

SEQ ID NO: 4116979 - RNA, 60 nt, Human
uuugacuuuucugugagcaaacgccaaucacucccagguguccuucauuaucaagucaaa

SEQ ID NO: 4116980 - RNA, 69 nt, Human
uuugagaaguccuguuccugaagaacauaguaaaccaugggcuggaucauggaacugggcaaucuugaa

SEQ ID NO: 4116981 - RNA, 97 nt, Human
uuugagaauaauuccuuucaaaacacgaauuuccaugccuuagcuuaagguuacaucuagguuauguacugaagugaaaaggagucuaucauucaga

SEQ ID NO: 4116982 - RNA, 94 nt, Human
uuugagaccaaauaguucuuauuugucaugauacugcugagaguguguggacucugggagguguuuugagaacuuggaauuuuguggccucaga

SEQ ID NO: 4116983 - RNA, 78 nt, Human
uuugagacuugggcccuuuccucagggagcuuaugccuuacuuagcuccaggauaagacaggugcacaaguaagcaga

SEQ ID NO: 4116984 - RNA, 55 nt, Human
uuugagauagucuagaguaacuguuauaaacacagacuuuggggucuuucucaga

SEQ ID NO: 4116985 - RNA, 64 nt, Human
uuugagcaguauuuuccauuucuguagcagcaagcuagugcuuugaaagauaauacuguccaga

SEQ ID NO: 4116986 - RNA, 97 nt, Human
uuugagccauggcaccaagaggaauggguguguuuaugaaaucaaauuuaguucauaagaauauuccauccuuugauugugcugaacauggguugga

SEQ ID NO: 4116987 - RNA, 90 nt, Human
uuugagcuaucuugaauaauuuauaguagccuuuggcaaguuauccuuaacuacucacaagguucacuauaaauuggaaagaggcccagg

SEQ ID NO: 4116988 - RNA, 75 nt, Human
uuugaguaaggcugaauucaaggguaggcucucaggcaaaacuggccuauuuauggaucaccuuucugauucaaa

SEQ ID NO: 4116989 - RNA, 104 nt, Human
uuugaguuuucuuuuauuuggauacaaucauuugcuuagacacauauuuuuaaacuuuuaauguauugguagcaaugauguuuucaaguagggaaacacuuaaa

SEQ ID NO: 4116990 - RNA, 97 nt, Human
uuugauaaccaaaccauauuuuugcuaaaaggugaaaaguguaugcauauauacauauauguuacuuuuuaguaaaaaauaugguuugguuaucaaa

SEQ ID NO: 4116991 - RNA, 89 nt, Human
uuugauaauuucuucccucauuagagauaaucagugucuagaaacuagauugauagauguuucuaaaauuuuggcuagaauuguacaga

SEQ ID NO: 4116992 - RNA, 81 nt, Human
uuugaucucacuggcaagacuacaggugauguucuguuuuuucaaucaggaggcacauguuugucugucugugauguuaga

SEQ ID NO: 4116993 - RNA, 58 nt, Human
uuugaugaguuuaauaacagccacuauuuauuauucggcugaggaacuccaagucaaa

SEQ ID NO: 4116994 - RNA, 101 nt, Human
uuugaugcauaauuagaagaacaggcccauaaugcaaauauuugguugucauuagcauagagauaguguauuaguugggccagguuaauugcuucaucaaa

SEQ ID NO: 4116995 - RNA, 67 nt, Human
uuugauguucacuacuugaaagaauuacagauguaaaauauuuguauauuuaggugguggaguugga

SEQ ID NO: 4116996 - RNA, 81 nt, Human
uuugauugcgugccugcugcauguaggucagaacuccugcccuccaggaacucacaucacaugacaguaggccgcaucaga

SEQ ID NO: 4116997 - RNA, 75 nt, Human
uuugauugugaaggauggugucaagucugcaaagaaaaauguuucuaaaucaguaaggcauauucucacauuaaa

SEQ ID NO: 4116998 - RNA, 65 nt, Human
uuugcacagagcucgcauuuggcagcaguaacgauuacugcagcugaaccuagagucugugcgga

SEQ ID NO: 4116999 - RNA, 57 nt, Human
uuugcacuuuaauauaaugugaaugcaagcacagaaauauuguagguaaagugcagg

SEQ ID NO: 4117000 - RNA, 69 nt, Human
uuugcagacuuuugacauuaauacagcugaguuuaaggauccacuucagcugcugucagauauuucaaa

SEQ ID NO: 4117001 - RNA, 66 nt, Human
uuugcagcaggaacaguuuaucucuggcugaaaccaaagcagaugaaaaugcugccgugcuguaag

SEQ ID NO: 4117002 - RNA, 59 nt, Human
uuugcagccccuaggccagcaccugcucugguggugccugccccacaagggguugcaga

SEQ ID NO: 4117003 - RNA, 89 nt, Human
uuugcauagcuauaggcaucugcuuuugagaauuuacuuugaugacauaggagucaaugaugaaaagcaggcuugaagagagaugugga

SEQ ID NO: 4117004 - RNA, 63 nt, Human
uuugcauauaagccgugcuucugaacuacuuuccuuugugagcagcagcaaggcuuaaguaaa

SEQ ID NO: 4117005 - RNA, 57 nt, Human
uuugcauauuaauaucugcgcuuugcauaaucugacccgcgcuuuauugauugcaag

SEQ ID NO: 4117006 - RNA, 85 nt, Human
uuugcauccccccaaaauucuuaaguugaauccuaacccccagugugaugguauuuggagaugggaacuuugggaggugaucagg

SEQ ID NO: 4117007 - RNA, 130 nt, Human
uuugcaugaauugcaaugcuuccucuuccuuacaggccucuuacuaccuuaaaaaugcuagcaaggugccaggguaggcagauaggagugcagccuauaaagaugggaauguuugcuguucuuaugcaag

SEQ ID NO: 4117008 - RNA, 57 nt, Human
uuugcauuuauaaguugguggaauauacacauuuuugcuaacuuagaugauaguaaa

SEQ ID NO: 4117009 - RNA, 56 nt, Human
uuugccauuaugaaauguacuuggcuagugaggccuauacacuuguaaugagcaga

SEQ ID NO: 4117010 - RNA, 100 nt, Human
uuugccccuuauccuauacccuucucagucauacaccagccaucugcauucuccucaaggagaaggaaggcugagugcugauggagguagaguaggcaga

SEQ ID NO: 4117011 - RNA, 112 nt, Human
uuugccucucuucucuuuuuuguguaaacaacuucugcacuauggguucugggcacugcuuagaaguauauucuagaugcagcaguauuuacaccguuaggaucuugguaga

SEQ ID NO: 4117012 - RNA, 86 nt, Human
uuugccuucauucucccagaaguaaaacuugucuuauuuuggcaagcuuuaagauuaaguccuagcuuugguaggaaugaaacaaa

SEQ ID NO: 4117013 - RNA, 81 nt, Human
uuugcuaaggggguucuacagccacuugcuguaggccaaagucugagcgauguggguauguagaaguauugccagagcaag

SEQ ID NO: 4117014 - RNA, 78 nt, Human
uuugcuacuucuauuuaagcauuuggggcaaguuacucaauuccucuaugccucuuguuuccuuacauggaaaguaaa

SEQ ID NO: 4117015 - RNA, 60 nt, Human
uuugcucaaucaucagauagaugcuuagaaaacaucauacugucuggauguuuaagcaga

SEQ ID NO: 4117016 - RNA, 99 nt, Human
uuugcucggugaugguagaaaaaacacugggcugggagucagaaugucuagacucaaacaccaggucuuuugcuuacuucuuguaucaccuugaguaag

SEQ ID NO: 4117017 - RNA, 64 nt, Human
uuugcucugcuguugccaggugccagucuguuuucagugaggcuuuggacagcaguggggcaga

SEQ ID NO: 4117018 - RNA, 76 nt, Human
uuugcugagauagcuugucugauuucauguacauggagugacaacuugcaagacgugaaauugagacaacagcaaa

SEQ ID NO: 4117019 - RNA, 124 nt, Human
uuugcugcgugacuuuaaauaacugaugcuaccucucugagcuuaagguguuucaccuuagaaaugagaauugugauauccaguucagaggauauggugaggguuaauaaguuaacaugguaaa

SEQ ID NO: 4117020 - RNA, 122 nt, Human
uuugcugguuauuaaaaauauaugauugccucuaaaauagcagugacagccgcucugcugggcagagccaggugcugcuguuugaaggcuacugaaugauguggaaugaaugcccgggcaaa

SEQ ID NO: 4117021 - RNA, 73 nt, Human
uucagaaacagagugagugagugagugagagauuuacuauaaaaaacuggcuuacuugauuguggagucugag

SEQ ID NO: 4117022 - RNA, 66 nt, Human
uucagaaacaguauggaagccauuaggaagggugcccuugccacuuauuggcccaacucuccugaa

SEQ ID NO: 4117023 - RNA, 79 nt, Human
uucagaaagcugguagugcugcacugcaaaucaguaaggaccaauccaucugggcuugcacugcagcgagaccacugag

SEQ ID NO: 4117024 - RNA, 129 nt, Human
uucagaaucucagcuuggcugugccuucuugcuugucucaugcucugaacccaucuugugaccuuuuaugguucauauuacuuugagugcaggcuagaguuggcucuuagcuagcugucaaauugggag

SEQ ID NO: 4117025 - RNA, 75 nt, Human
uuuguuacuaagccuuuaaauagcucaucugacuucuccucugucaaucaucuauucaggaggcuugguaccaag

SEQ ID NO: 4117026 - RNA, 84 nt, Human
uuuguuauucucccagucucugauggagugagucauugguuuacuacuuaagaaaaucaacuguuuccacagggagaaaacaaa

SEQ ID NO: 4117027 - RNA, 78 nt, Human
uuuguucacccucuuacaagagucacagauuucugcuugugugcuacagauacugaugcugucaaggaggugaacaga

SEQ ID NO: 4117028 - RNA, 57 nt, Human
uuuguucuuuuucccagaauguuuggaaaaagacauuuggcaagaaagagaaacaaa

SEQ ID NO: 4117029 - RNA, 71 nt, Human
uuuguugacuguauaaaaucuggaaguggagcccuggucaguugccaguauuuuauauaaucuguagcaag

SEQ ID NO: 4117030 - RNA, 87 nt, Human
uuuguuggagauaguuuguucuuaugcccuauaucaauaauaauaauaaaaaaccuuugaggcucaagaauagacaguauugacaga

SEQ ID NO: 4117031 - RNA, 56 nt, Human
uuuguuuaucgcuugcucacauaggucuguguccugaagcuuggcagaugagcgaa

SEQ ID NO: 4117032 - RNA, 124 nt, Human
uuuguuuauuaacugauguuucugggcuaguauucuguaaagucuguguaaagucuauaaggguguauguggccacugaagucuuugcuugauuagcuuagugaucaucuaaugauuagacaga

SEQ ID NO: 4117033 - RNA, 66 nt, Human
uuuguuuauuuacuuugggccuugcucaaaacuaguagcaagcugccuggaaugcaaugugacgaa

SEQ ID NO: 4117034 - RNA, 75 nt, Human
uuuguuuauuugugaucuccucccucuagaaugcugagaguguuuugaaggagaagauucauaggaagaaacaaa

SEQ ID NO: 4117035 - RNA, 62 nt, Human
uuuguuucaugacugauguuguugaaucuaugaugaaucaauaaauacaguuaugggucaaa

SEQ ID NO: 4117036 - RNA, 71 nt, Human
uuuguuucuuugaaguuucuagagguggaauaaaacagacacauuucuguggacuacauuaaagaaggaaa

SEQ ID NO: 4117037 - RNA, 127 nt, Human
uuuguuuuaccuagagauuuuuaaaaacucuaagacacuguacaauuuaaaaaguaggcaggcaaaguaggccaaagaaaugugcaguuucuuaaaguuguuaaauuauuuucuuuuacaagacaaa

SEQ ID NO: 4117038 - RNA, 60 nt, Human
uuuucaggagagaccagaaaugaagauuuuuauuucaaaucugaaaguuuuucuugggaa

SEQ ID NO: 4117039 - RNA, 75 nt, Human
uuuucagggaagagagaucuccuaguguuauccauacccagaaauuauugagggauaucuucaauucccugaaaa

SEQ ID NO: 4117040 - RNA, 62 nt, Human
uuuucaguaugcugaaugauuuuucugaucauggauaaucagaaaaacaguaaugcugaaga

SEQ ID NO: 4117041 - RNA, 59 nt, Human
uuuucagucugaugugguuuucacaguucuuauuuaccuuagauggcuuggacugaaaa

SEQ ID NO: 4117042 - RNA, 56 nt, Human
uuuucaguuugcacugcagugccaaccagacaggacgcugcucaguaaccugacag

SEQ ID NO: 4117043 - RNA, 83 nt, Human
uuuucaucagaauuucauaguagaccaccguucuauuguucaauuaccugguagaauuaccucucuauguccuuugguggaaa

SEQ ID NO: 4117044 - RNA, 84 nt, Human
uuuucaucuugucuguuauuucuuugccauaucuuuacgaaauguucaagauuggucaaugaaauagaaagauugucuugggaa

SEQ ID NO: 4117045 - RNA, 95 nt, Human
uuuucaugcugacccaguucaaggccacagagccucagagagguuccuuacccugugaggucaucugugguaacgcuggaugggccggaugaaga

SEQ ID NO: 4117046 - RNA, 67 nt, Human
uuuucauggacuuuuucauguuuucugacuuaaaaaaugagcuauuuaacauugaaagucuagaaga

SEQ ID NO: 4117047 - RNA, 76 nt, Human
uuuucauuaggaggaaggguagcauaauguagcuugagugagcuccagcccugcccauucucucguucuguggaga

SEQ ID NO: 4117048 - RNA, 75 nt, Human
uuuucauucuuauauuuacucauucaacaaguaugccucaugugccaaguggagaggaaaaagugagaaaggaaa

SEQ ID NO: 4117049 - RNA, 59 nt, Human
uuuucauugaauaucuucuuugugccaucugcuacacuuuugggauauaucagugaaga

SEQ ID NO: 4117050 - RNA, 77 nt, Human
uuuuccagccaaagagaaaguauuuggguuuugagcaucuuuuuaacugagaacauuccucuuccuggcuaugaaaa

SEQ ID NO: 4117051 - RNA, 106 nt, Human
uuuuccagugacccaugcuauggccauaguuaauccagguugugaauguccuucagaggugccaauguaugaggauuacaacuggaauggugcuggcacuggagag

SEQ ID NO: 4117052 - RNA, 84 nt, Human
uuuuccauggauugcuggagcuugagaggacagggggugccucauaccuucugcucucuuaggauuccagaauguuaaggaaga

SEQ ID NO: 4117053 - RNA, 71 nt, Human
uuuuccauuauaaucuaguuuaauauguuuaaaaguuuaauauguuuaaacguuuagauuuugggggaaaa

SEQ ID NO: 4117054 - RNA, 69 nt, Human
uuuuccauuuagcacugucuagccaagagacaccacuauuuacaaguucuuagacagcugaaaggaaaa

SEQ ID NO: 4117055 - RNA, 88 nt, Human
uuuucccuaggauuuucuuguauuccucucagaguucuuguuugcuuagaagccuucagagauggaaggcagaaugcuuagcggaaga

SEQ ID NO: 4117056 - RNA, 56 nt, Human
uuuuccugccuuuaaacucuuucuguagauaagaugauggaggaagggcaagagaa

SEQ ID NO: 4117057 - RNA, 129 nt, Human
uuuuccuuuugguccucuuuuccuucaguggcucugcuugccuaucugguggucguuuuggaaguuccaacccagcaccaauccagaguggagcuggugaugccgaaauggaaggaguguuugggaagg

SEQ ID NO: 4117058 - RNA, 56 nt, Human
uuuucuaauggcccaauggcguaggacaaugccaaguuguuuuuggccagggaaag

SEQ ID NO: 4117059 - RNA, 64 nt, Human
uuuucuagaaaguacuagagcuggucacuaaggcugacuacgcuuucuuuauuuuccuagaaga

SEQ ID NO: 4117060 - RNA, 76 nt, Human
uuuucuauuuaaacaauauucauugcuggccuccugagaaucacuggugagacuugagugcuggcuaaauagaaaa

SEQ ID NO: 4117061 - RNA, 97 nt, Human
uuuucuauuuucugaaaugauucuauuuuuuaagaaguagucagcuuuguucuuugcuaauuaagucuucaaagguagugucauucaaaguggagaa

SEQ ID NO: 4117062 - RNA, 87 nt, Human
uuuucucucuuucucuguuucuucuucuguuauauuacaagaaaaaagaauugccuguguagcucaagaggcugggaaguuaggaaa

SEQ ID NO: 4117063 - RNA, 96 nt, Human
uuuucugauguauugaauaugagggguggguuggggagguggacaggguauagaggacugaacccuaaggcacuucaauguuuagaaaucagaaag

SEQ ID NO: 4117064 - RNA, 97 nt, Human
uuuucugcucuguguacuuuuaugacauuuuguaagcauuaaugauaugcuacagcauuuuguagaguacuauaacagagaauuauauauuagagaa

SEQ ID NO: 4117065 - RNA, 65 nt, Human
uuuucuggaauugcugugugaguuccuuucauaggguaggaaaucaugccagcaauaccaaaaaa

SEQ ID NO: 4117066 - RNA, 58 nt, Human
uuuucuggagcuaaaguccacucugccaguaugcagagcagacuggaguaccagggaa

SEQ ID NO: 4117067 - RNA, 56 nt, Human
uuuucugggcagaagcauuuaggcucaauccuugcagaaaaacuuaguccagaaag

SEQ ID NO: 4117068 - RNA, 127 nt, Human
uuuucugugcaugcccccacacacauuuaugauaggagcuugagccuccuuauucuccauccuugcucuuucucucuuccuuuuccucccucaucucacaugugugugccaaggaugugccagaaag

SEQ ID NO: 4117069 - RNA, 71 nt, Human
uuuucuguuccuuugaauguuuuauuuuaauuaccagaugaauguuuuuguacaugaaaggaaacaggaaa

SEQ ID NO: 4117070 - RNA, 78 nt, Human
uuuucuguuuccucauuuaucugcugggacgcuaaggucacaguuagcuucccaacagauaaaugaggaaacagaaaa

SEQ ID NO: 4117071 - RNA, 82 nt, Human
uuuucuuaggcucauccccacaaagcaaagccuacuagauuuaacugcuaguagauuuuugggaaggugaucuuaaugagaa

SEQ ID NO: 4117072 - RNA, 60 nt, Human
uuuucuuaggugcuccaaguagaaggcuuuuuuaaaacugcuaaaaaguagcuaggagaa

SEQ ID NO: 4117073 - RNA, 60 nt, Human
uuuucuucugggucgccucuuaaguggcuccugaaggagugagcagugagccagggaaag

SEQ ID NO: 4117074 - RNA, 91 nt, Human
uuuucuugucucccaacaaugaaauugagauccagagaaauaauuuuuucaagucauucuauaauaucguggugggacuggaauaagaaaa

SEQ ID NO: 4117075 - RNA, 72 nt, Human
uuuucuuuauucagagcuuagaauggacuacugugcuuugcagugauagccccagggcucugagaaagagaa

SEQ ID NO: 4117076 - RNA, 96 nt, Human
uuuugaaagcugguuaguucaugaguuuucauauagcuguugucuucauuucugaugcuggagcaugaagacuucagagcuagcugucuagcagga

SEQ ID NO: 4117077 - RNA, 63 nt, Human
uuuugaagcccagucuacgaaggccacauaauuccuccuagacauuaagcuuggguuuuagga

SEQ ID NO: 4117078 - RNA, 69 nt, Human
uuuugacacuggaauuuuuaacugucagugcuauuguguuuacagcauucaaguucucagaguucaaag

SEQ ID NO: 4117079 - RNA, 70 nt, Human
uuuugacaucguaaugugauuugcauugauuugaggcugccaucaggaugagcucauaacuaugucaaaa

SEQ ID NO: 4117080 - RNA, 56 nt, Human
uuuugaccaaauuauacgggguuuuaccaccucuuguguguagcuauuggucaaaa

SEQ ID NO: 4117081 - RNA, 112 nt, Human
uuuugacugaauuuacaggugaauucaaucaaugugucaguucccacugaacuuucaaguugauugacuacauugauugaauaaguugaccuauuguguugucagcuuggag

SEQ ID NO: 4117082 - RNA, 75 nt, Human
uuuugacuuugacagacacaauugauccaugaaauuauaugucuuugaggguuuguuuguuuguuugagacagga

SEQ ID NO: 4117083 - RNA, 63 nt, Human
uuuugagaaauauugcacagugaggugacugcaguuaauaaagcuucacuguauauuccaaaa

SEQ ID NO: 4117084 - RNA, 57 nt, Human
uuuugagagccaaagacucaauuauguggcagaccuuauuaggaguggcuuucagaa

SEQ ID NO: 4117085 - RNA, 65 nt, Human
uuuugaggauuuuuccaauuguccuaaaagguuauaaucuuaccuuacagggaauuuccacagaa

SEQ ID NO: 4117086 - RNA, 59 nt, Human
uuuugaggcugguaaucgcuuuguuugacaauucaaacuguuagauuucagcucugaaa

SEQ ID NO: 4117087 - RNA, 74 nt, Human
uuuugaucauguuauuuauccauuaaacauccuggugacacuuguguagugggcugaauaauggguucccaaaa

SEQ ID NO: 4117088 - RNA, 102 nt, Human
uuuugauggccucuccaauaucuagaacuccagaauguaggcacuggauaaacuguggcucaugaaaugaaagaguucuaacauugaagagaguaaucgaag

SEQ ID NO: 4117089 - RNA, 66 nt, Human
uuuugauguuugcucauuuaaugucugaaauguacauuaguguaggauguaaggcaggcaucaaaa

SEQ ID NO: 4117090 - RNA, 71 nt, Human
uuuugcaggagaauguuaugguaagguaggugcacuuugcuggagucauacauaccauucucuaagcaaaa

SEQ ID NO: 4117091 - RNA, 129 nt, Human
uuuugcauauggaauagaugggaauuauaggggccaccagagggcagacugugauaagcagaauuuuggcugucaugaucuccacccucugaugcuacuccugugguuauaguauguuacauggcaaag

SEQ ID NO: 4117092 - RNA, 55 nt, Human
uuuugccacacagaguagcauguucuacccugggaaguguuuacugugugcagaa

SEQ ID NO: 4117093 - RNA, 63 nt, Human
uuuugcccacuggauaaugcaaacuggauaauuccaaguuguucaaguuccacguggcuagaa

SEQ ID NO: 4117094 - RNA, 66 nt, Human
uuuugcccagcucccugaagccuggucuugguuaacugggagcgugucguagggagugggguuagg

SEQ ID NO: 4117095 - RNA, 111 nt, Human
uuuugccuaucggagagacgugaguuguuguggccagaggacacauuguagaaaauugucuguaaagacggccaccaacaugcauguugccuuucccaucaagagguagaa

SEQ ID NO: 4117096 - RNA, 97 nt, Human
uuuugcgauggagucucgcucuguugccuaggcuggagugcaguguggcaaucuaagcucacugccugggcaacaagagugaaauuccaucucaaaa

SEQ ID NO: 4117097 - RNA, 102 nt, Human
uuuugcuucggugacugcagaauuugaaguaauauuccaauucucauuauggugaauaguguguggauguagcucagucgauucucucuucacuaagcaaga

SEQ ID NO: 4117098 - RNA, 79 nt, Human
uuuugggauagguagguaguuacacagcaauguaucuggaacauacacaucuggugugacugccagccccuuaccgaga

SEQ ID NO: 4117099 - RNA, 102 nt, Human
uuuuggguauaagugaauaagugccuuuuucuaguaccaugagauguagaauuuuauggaauuugcaaaagguuacuugacuucccucuuguccccccaaaa

SEQ ID NO: 4117100 - RNA, 61 nt, Human
uuuuggucuuggauuuaucagugguuucuaguugaauugagagagcagauccaggcuaaga

SEQ ID NO: 4117101 - RNA, 56 nt, Human
uuuuggugaauuuaagugcugugaauacucuucccacaguucgugaguuccuaaga

SEQ ID NO: 4117102 - RNA, 60 nt, Human
uuuuggugcaccuagcuuuuucuaggaaguucuaacccuacaggagguugugcaguagaa

SEQ ID NO: 4117103 - RNA, 69 nt, Human
uuuuguaacacugucuuauacuucaauguaguacaaucuauuuggggcuagagguacauguuuacaaaa

SEQ ID NO: 4117104 - RNA, 60 nt, Human
uuuuguacuagugagguuuuguuuggauaaauuccaagaaguggaauuucuuggucaaaa

SEQ ID NO: 4117105 - RNA, 78 nt, Human
uuuuguauaaucuguucuacucuauucagagccauuuuauuuuauugugcucacucuuggaguauaauagagacaaag

SEQ ID NO: 4117106 - RNA, 76 nt, Human
uuuuguauaugucauuucaauacaguuuguaaaugggcuuacugauacauuucagacuguguuggaaaauacagaa

SEQ ID NO: 4117107 - RNA, 58 nt, Human
uuuuguauccucccuuucacugaacauucagccuuagugucaggagggaaaugcaagg

SEQ ID NO: 4117108 - RNA, 106 nt, Human
uuuugucagauuauuuuugaaagauccuucucacugcaguguaagcaauauuaacacuggaaauagggagguuuuuuagaaggcuguugaaguaaucuaggcagaa

SEQ ID NO: 4117109 - RNA, 55 nt, Human
uuuugucaguugacuuugggagcugaggucuucccagguccugggacuggcagag

SEQ ID NO: 4117110 - RNA, 62 nt, Human
uuuugucaucauucugcuccucuguacuccuaaauuugagagagacagaaucagagauaaag

SEQ ID NO: 4117111 - RNA, 86 nt, Human
uuuugucauuguacuuuugucuacccugauuccagccauuguggaacuuagauguuugggucuacguagaaagaacaaugagggaa

SEQ ID NO: 4117112 - RNA, 111 nt, Human
uuuugucccucccuuuguuuucuugucaagauugacaagcauccauguguuaccaagugacauaaaguucuugcuugaauaaucaugacuaaaauccaggguauuuuaaag

SEQ ID NO: 4117113 - RNA, 60 nt, Human
uuuuguccucaguaagagggccucuggccaaaauuuggcuagcggcccauugggauaaga

SEQ ID NO: 4117114 - RNA, 66 nt, Human
uuuugugagaugcguaugaauggggguguuuaaauauaaaacacuguucuaacacgucucacagga

SEQ ID NO: 4117115 - RNA, 97 nt, Human
uuuugugcaaaguuagugaccuuuggucucuucuaaagaaugacagaguuaccguauuaacagacuugaaagagacucaguugucaaacccacagaa

SEQ ID NO: 4117116 - RNA, 79 nt, Human
uuuuguggaccuguggaaaugauauggagcaggauauaaaaguggaaucauuuugcucagcuucagaggauccccaaga

SEQ ID NO: 4117117 - RNA, 101 nt, Human
uuuuguguguaugugugugugugcuuacuuugaauuauauaacauauucccauuuaaucauuuauauugacuuuaaagaagcaaacagcauccauauggaa

SEQ ID NO: 4117118 - RNA, 76 nt, Human
uuuuguuaauaguaauggacuccagaccaagaacauuuuuagucacugugucaacaguucauacugaguaacaaaa

SEQ ID NO: 4117119 - RNA, 77 nt, Human
uuuuguugauauacaguauguacugugguuuauaauuuuuaaggcaugugaacugggacauauuggauauuacagaa

SEQ ID NO: 4117120 - RNA, 130 nt, Human
uuuuguuguuuuguuuuugcuuuuaaaaugaaggacucugguauuucacucuugaacaguaauuucucuguagcagugguuuugagauucaggguuuuucuauuuguuagggagaaaaaagagcccugag

SEQ ID NO: 4117121 - RNA, 67 nt, Human
uuuuguuucagaagucaacuagguaaagaacuacagugguucuccugggaugacuuuugaaaugaaa

SEQ ID NO: 4117122 - RNA, 105 nt, Human
uuuuguuucugugugucauuugaaagcauuuuuaugccuuaagauuguggccaacacaaggaauguaacaggaguaaaaaucaagagaaacaacagauaacagaa

SEQ ID NO: 4117123 - RNA, 86 nt, Human
uuuuguuuucaucuuauucuguuuucuuauuuuguuuuguuguuugaucaagacagaagcuaggcuagacaagugagugaacaaga

SEQ ID NO: 4117124 - RNA, 71 nt, Human
uuuuuaagaaaugcacacaacugcuggagggaguccaacuuccccaguguggugguguuguuuuauaaaaa

SEQ ID NO: 4117125 - RNA, 65 nt, Human
uuuuuaagcuccuuugaugucaggcauuauuucuugcucuucuugccugacauugagcugagaaa

SEQ ID NO: 4117126 - RNA, 79 nt, Human
uuuuuaaggcaguuugggaggcaguguugcaaaggguccaguaaucguugcaaaaucauuucucaggaugucuuagaga

SEQ ID NO: 4117127 - RNA, 80 nt, Human
uuuuuaauauacuguauauuucacaucuuggagcaaaauucaaauugccaggaaauagacacuguaugauauguuaaaga

SEQ ID NO: 4117128 - RNA, 73 nt, Human
uuuuuacuagacaauauuugaaaguaguggugcacauuguaaacauugcucugugucaaauaauggguggaag

SEQ ID NO: 4117129 - RNA, 82 nt, Human
uuuuuaguauaauugugucccaaauauugcauggggcauaaguguguuccaaauauaggaugugauauauuuauacugaaaa

SEQ ID NO: 4117130 - RNA, 79 nt, Human
uuuuuagucaacagucugguuuauauaauagauaauuugcucauuaaauguauguauuuugcuaggcugagauuaggaa

SEQ ID NO: 4117131 - RNA, 83 nt, Human
uuuuuaguuccuucaugauccuaccacauugagagcaccucucacauuuaaacaggaggauuaaagaugaaugaagcuaagaa

SEQ ID NO: 4117132 - RNA, 60 nt, Human
uuuuuaucaucuuuacgggaaugccagggugaggucugccauuucuauugaugagaaaag

SEQ ID NO: 4117133 - RNA, 60 nt, Human
uuuuuaucucuaccuguuggccucaaccuaaggguuaaagggccacucuagagaaagaaa

SEQ ID NO: 4117134 - RNA, 118 nt, Human
uuuuuaucugcuacacuaugcugagagcugugaaaaugagguuugauucaaaggcaaccuuaguguuguuuucgguccucauucuauagcuuaauucauagcaaguagcauauaagaa

SEQ ID NO: 4117135 - RNA, 65 nt, Human
uuuuuauuccugguuuauaccuguaucaaugucuugauugaaucagaaaucaucaggggugggag

SEQ ID NO: 4117136 - RNA, 76 nt, Human
uuuuuauuggaaauuacggguuuuuuaauuuaauaguaugcuuuuaaaagggauguuaucuguaaguccaugaaaa

SEQ ID NO: 4117137 - RNA, 86 nt, Human
uuuuucacaugcauuuacauggagcuaucuaacccgccugcugggaaguugggacgcuaacaugagaaucuugcauugcugggaaa

SEQ ID NO: 4117138 - RNA, 78 nt, Human
uuuuucagaagcagcauucagugaaaugugcccauaaauuguacugccuauuucauaggaucugggccuuuugagaag

SEQ ID NO: 4117139 - RNA, 87 nt, Human
uuuuucaggaacuuggguguugugucaaggaaggcguaucugugggaaccccugguguuccuugaauauaucagacgaucugagaag

SEQ ID NO: 4117140 - RNA, 85 nt, Human
uuuuucauucauuaauuuaauauucaaagaacaccugauuuaugccagccaccguuccaaguguugagauuagagggaugaagaa

SEQ ID NO: 4117141 - RNA, 67 nt, Human
uuuuucauugcagccucucuccucuaucuggccauuaaaugauagcuucugagagcacagugauaaa

SEQ ID NO: 4117142 - RNA, 124 nt, Human
uuuuuccauucaggagguuuugggccaucuucagccacccuaccagcccugaaaaggaugugacuccuguuucugggaagugugugguguguuaggugggccuacagcccugguuguggggagg

SEQ ID NO: 4117143 - RNA, 115 nt, Human
uuuuucccaggagagcuacuguugucacuaguauugccuacuguacauuuauauacacauaugugugaaaguuccuaagacuauauacaacauagguucccaccccuuggaaaaa

SEQ ID NO: 4117144 - RNA, 75 nt, Human
uuuuuccucugugccagcaguuauggugauuuguaguuaugcuauaaaagcuuaagguuugguaguagagaaaga

SEQ ID NO: 4117145 - RNA, 60 nt, Human
uuuuucuaauggcuuaggauguugcuuaucuuggcaaauguucuaugugccauugaaaag

SEQ ID NO: 4117146 - RNA, 76 nt, Human
uuuuucuagggccaucuggacucucugaguugcugccaauaggacagcagggaaaguccagaccaguccagguuaa

SEQ ID NO: 4117147 - RNA, 109 nt, Human
uuuuucuaugauccccagucucccauaauuuuccaugguuugcuaacuguaugccucuaaacagguggaaacuagugccaugcgaggggugggagaggaggaagaaaag

SEQ ID NO: 4117148 - RNA, 63 nt, Human
uuuuucuauuuccuuucccuuggagcugccugguuuaagacuuaggaaagaggauuagggaaa

SEQ ID NO: 4117149 - RNA, 64 nt, Human
uuuuucucauggaacaucguuuagaacugugggagaugcuaggcugggguuucuaugggaaaag

SEQ ID NO: 4117150 - RNA, 84 nt, Human
uuuuucugaguuagucaaaaggaaggauaugcuggauaggccuaacauaugcaguaaagacaucguccuuuggccuuggagaaa

SEQ ID NO: 4117151 - RNA, 117 nt, Human
uuuuucugcaauacuuaguuucauuuucuuggguuuucuauugucuuuggaaagugaugugaaggagaauaagauggaaagugcauggaagucaugagauagaguuuaaagggagaa

SEQ ID NO: 4117152 - RNA, 82 nt, Human
uuuuucugguccuuaauuuuaguggagagguccaugcgaagucaauuugcugagaucugccaguagauggaggaaagaaaaa

SEQ ID NO: 4117153 - RNA, 99 nt, Human
uuuuucuugcuucuuuagacuuuccuguauuuugcgaauuuucuauaaugaggcuguaggacuuuuaggaugaggggauaaacaaaggcagcagaagag

SEQ ID NO: 4117154 - RNA, 60 nt, Human
uuuuugaaggcugaugugauuaagaaguacuuagcuuucaucacugaaugccuucaagga

SEQ ID NO: 4117155 - RNA, 83 nt, Human
uuuuugcccuuccuaaaaguauggucaugggcaacuaauuaccuuauuagaaaugcucaggucaacuuaaguugggguuuaga

SEQ ID NO: 4117156 - RNA, 57 nt, Human
uuuuuggcccuuagcucuguaugucccagcuuggacucuuagagauaaggcggagaa

SEQ ID NO: 4117157 - RNA, 65 nt, Human
uuuuuguaacccagaaacugucaacaucaguuuuuuuauguguugacagucugcaguuuuaaaaa

SEQ ID NO: 4117158 - RNA, 65 nt, Human
uuuuugugaaaugggugcaggacacaucaguuuaauucauucugcauccucauuuuucacacgag

SEQ ID NO: 4117159 - RNA, 98 nt, Human
uuuuuguuucugucaucgguauuuuuguucugauuauacugguaguaucuucuuugcacaugguugaaagggugcagaaauaccagaggaaacaugaa

SEQ ID NO: 4117160 - RNA, 75 nt, Human
uuuuuuaucagcaucuuauuuucuauggaaacagucccaccuaacugaaguuccauagcuuuaagagaaagagaa

SEQ ID NO: 4117161 - RNA, 75 nt, Human
uuuuuucauguggaaaagggcuuucagaauggcagaauaaaaaccucugaaaaucuacuccuccauacaaagaaa

SEQ ID NO: 4117162 - RNA, 77 nt, Human
uuuguuuuuguuugagauggguuauugcucuuucgcccaggcuggagugcacuggcaccaucucagcucauugcaaa

SEQ ID NO: 4117163 - RNA, 129 nt, Human
uuuuaaacacugacucucaaaucucugcauuucugugacuguggaguuguuccagugugugaauugacacugguuuguggaacacacuucaaggagaaagaguguagacucaaagaauuagguugcuag

SEQ ID NO: 4117164 - RNA, 72 nt, Human
uuuuaaaguuguagagggugaugcugcuggcggcucccucccaaucagcaccauuugcagccucuuuugaag

SEQ ID NO: 4117165 - RNA, 128 nt, Human
uuuuaaaugcagucuuuguugagaggagcuguucucccagaugcuggauaauaccuaagccuuacaugguuguaggccuauguccagcaauuggugggagcacuguuaauuuuuaacuguagguuuua

SEQ ID NO: 4117166 - RNA, 62 nt, Human
uuuuaaauggcuuuuacuuuucuaagucacugaaacaaggaagggccacaugccauuuaaaa

SEQ ID NO: 4117167 - RNA, 72 nt, Human
uuuuaacuugauuaccucugugaugacauuaguuccaaauaaggacacauucggagguaguugagguuagga

SEQ ID NO: 4117168 - RNA, 88 nt, Human
uuuuaagagcuuuacuucugacuggugcucauugcuuuggaauguuucuauuaaccgcccagugggaagcuaagguggauuuuuaaaa

SEQ ID NO: 4117169 - RNA, 78 nt, Human
uugagaaauguauucuguauguuuugaaaaaugcagacugcaaaaaaauguauagagugacaucauguuaauuuuuaa

SEQ ID NO: 4117170 - RNA, 64 nt, Human
uugagaaccacugaguuagauauuucuguuauugaucuccaacuccucucuggugguucgucag

SEQ ID NO: 4117171 - RNA, 103 nt, Human
uugagaaggagucucacuccguggcccagguuggagugcagugacacgaucucggcucacugcaaccuccaccucccggguucaagcgauuuuccugccucag

SEQ ID NO: 4117172 - RNA, 85 nt, Human
uugagaaggcugcacauuugccacugagcuccucggaaccccugggauuuagagagcagauguaacaaggcguagcauucuacaa

SEQ ID NO: 4117173 - RNA, 67 nt, Human
uugagaaguucuaauuggcucuuuucuuguaacaacacccaaaggaaaacagcaauugacuuuucga

SEQ ID NO: 4117174 - RNA, 61 nt, Human
uugagacagagucuugcucugaaaccuccaccuccggguucaagcaauucuccugccucag

SEQ ID NO: 4117175 - RNA, 103 nt, Human
uugagacagggucuugcacugucacccaggcuagagugcaguggcgugaucucggcucacugcaaccuccgccucccagguucaagcgauucuccugccucag

SEQ ID NO: 4117176 - RNA, 76 nt, Human
uugagaccucugccagacugugagcuccuugagggcagaauccuuggccuuugcauccacagcacagagauuucaa

SEQ ID NO: 4117177 - RNA, 103 nt, Human
uugagacggagucucacucuguugccuaggcuggaguguaguggcgcuauuucggcucacuauaaccucugccucccggguucaagcgauucuccugucucag

SEQ ID NO: 4117178 - RNA, 87 nt, Human
aaaauaagugagcaggacaccuauaucacugguagagaauauuuauuuucccuggacagguuugggugccuguucuuaaauuauuuu

SEQ ID NO: 4117179 - RNA, 69 nt, Human
aaaauaaguggucuagucuccucauuuagauugcaaagucucuggggaaaaggcugauacuuuuauuuu

SEQ ID NO: 4117180 - RNA, 62 nt, Human
aaaauagccucacauaauugcuucuucaaguuuaguggaagcagcuaagcuguggcuguuuu

SEQ ID NO: 4117181 - RNA, 56 nt, Human
aaaauaggaaugugguccugggaauuuaauuauuccuacaauaaaauuccuguuuu

SEQ ID NO: 4117182 - RNA, 106 nt, Human
aaaauaugugugugcauguguguguauguguaugagauauagauauagauauagauauagaucauugauacuugcaucauacuuuacauuuuauaaggcauauuuu

SEQ ID NO: 4117183 - RNA, 64 nt, Human
aaaauccaaguuccacauggaccccuuaaguggggcaaucacagugauaggacauauggauuuu

SEQ ID NO: 4117184 - RNA, 56 nt, Human
aaaauccacaacgcucauuucacugaaaggucguucagguggcggugguggauuuu

SEQ ID NO: 4117185 - RNA, 57 nt, Human
aaaaucuaaguagcgaguaaggcuaauugaccagcauuuacuccuuaaugagguuuu

SEQ ID NO: 4117186 - RNA, 130 nt, Human
aaaaucucugacucccugcuauuuuucugauucaugcauuuggaagcuugaagauuauuaauucuugugacagaaagaaauaguucaggcauaaggcaugaacaaauuaugauaggguguggaguuucau

SEQ ID NO: 4117187 - RNA, 99 nt, Human
aaaaucugaaauaauauggaguuguuuuauaauugauugcaauuugcucacucuguaagucgcuuucaaguagaauacugacauauucuuuuaaauuuu

SEQ ID NO: 4117188 - RNA, 100 nt, Human
aaaaucugaaauccaaaaugccccagugugugcuuccuuugaguguuauguuguuacccaaaaagcuuuugauuuuggagcauuuuagauuuuggauuuu

SEQ ID NO: 4117189 - RNA, 60 nt, Human
aaaaucugcacaggucaguuuuaggucuggauuacuucagcuggcuuuugugaagguuuu

SEQ ID NO: 4117190 - RNA, 58 nt, Human
aaaaugacauuccagugauauuuccauaucucuaaacaucacuuggaaugugcguuuu

SEQ ID NO: 4117191 - RNA, 79 nt, Human
aaaauggugcaaagauggcaguugcaauuugaacuugagcucuaaaaauggucuauuugugguuauauuugcccauuuu

SEQ ID NO: 4117192 - RNA, 60 nt, Human
aaaauguagcuccaugccuuccacugaguauaauuucuuagugaggccagcuggcauuuu

SEQ ID NO: 4117193 - RNA, 124 nt, Human
aaaauguucaaaaguccaggcagauguuaacaaaugauuguugguuggaggaugauugaaucguuuacuauuuucucagccuuucauuuugauggaucuuugcucauucgcuuuuguucauuuu

SEQ ID NO: 4117194 - RNA, 108 nt, Human
guuacaguguuuggauguaauagaauuuguuauucauaggauuugaucuguauuuccuaaaagucuuaggaguagaauucucacauauauugucaagcuuauuguuac

SEQ ID NO: 4117195 - RNA, 115 nt, Human
guuacauauaaauagcuuaaccucuucucuuacaugugaguuauauuugcgauauuggagaacuccaggguagguugaaugugauacacauggggugagccuuaaagauauuaau

SEQ ID NO: 4117196 - RNA, 57 nt, Human
guuacauuuggugauuuggugcacacaacugucuguggucaugcacuuugauguaac

SEQ ID NO: 4117197 - RNA, 76 nt, Human
guuaccagcagagcugggaauaaaauucaagcuccuuggcucccaauucacuguuccuucugcuuugcugugugau

SEQ ID NO: 4117198 - RNA, 82 nt, Human
guuacccagccucucacagccucuuuccacaucaggcaaauggagacgcugcuuucacaggaugggggcugggaguggggac

SEQ ID NO: 4117199 - RNA, 84 nt, Human
guuaccguggccucugguuucccaguuccuccgugguguaaugaagucccagguuuuagaagcugaagccaagccuaggguagc

SEQ ID NO: 4117200 - RNA, 81 nt, Human
guuacggguuuguggaagcugugaacaagcuacgugacuuucuaaacuuuacuuaucucuguuugcagccuuaucuguaac

SEQ ID NO: 4117201 - RNA, 62 nt, Human
guuacucugguguuagucuuugcacagauugcuguggaagagacacuuacauucagagaggc

SEQ ID NO: 4117202 - RNA, 61 nt, Human
guuacugagaucacuggcuccccuucaucuucugauuacagagcccaggcaucucauuaau

SEQ ID NO: 4117203 - RNA, 86 nt, Human
guuacugcauugugguaguguggagccacugaguggcugggggaggcuaccagcucagcgggcuucugguaagacuuugcaguggc

SEQ ID NO: 4117204 - RNA, 97 nt, Human
guuacuuaacuucucuguacuucuacaucugcggaaugggaaaaauuauagcacccauuucacuggguaguuguggggguuaaaugaguuauuauac

SEQ ID NO: 4117205 - RNA, 130 nt, Human
guuagaaagaauuauugaagaaguguccaguuaaagcugaaaugauuaugacaagccuguguuauaacuaugugguaaaugucuagucuuagcucuaauuggucuuauuuuaauguguuuauuguuuaau

SEQ ID NO: 4117206 - RNA, 77 nt, Human
guuagaaaguuauugccacagacacgugaguccuaaaugcaauugugcuuacguucaaugucagucaacuuucugac

SEQ ID NO: 4117207 - RNA, 78 nt, Human
guuagaaguaguaguauaaaauugaugauaucaacaaguugauagcuucucauaauuuaugcugcccacuaauuuggc

SEQ ID NO: 4117208 - RNA, 67 nt, Human
guuagagccccagaaaacaguggugagcauuuggucguccacugugucaucuugggaugucucuagc

SEQ ID NO: 4117209 - RNA, 68 nt, Human
guuagagguucagucgcuauaauaugucaugauugguucguugaguaguguaggcugaaaaaucugac

SEQ ID NO: 4117210 - RNA, 124 nt, Human
guuagauuauuugacucuguuuuugcccaaaucacaaugugagacugagucaccaaauacguaguugaaaacuugugugcuuccuuucucccauuuugguuauaaaaacauagauuugucuuac

SEQ ID NO: 4117211 - RNA, 73 nt, Human
guuagccuaaaaauguuguuuucaugcauaauguagcuguuaaauaguacaguguuuaaaauaauaugcuaau

SEQ ID NO: 4117212 - RNA, 81 nt, Human
guuagcuugaaccacaugaaauugccauuuuguaggucauaaauaguuaaguaucaguaauugcauguguuucaaccuaac

SEQ ID NO: 4117213 - RNA, 72 nt, Human
guuagcuuuucauccugucucacuuuuugcuucuuccuugaagucuugguuuugacagggaaagggagcaac

SEQ ID NO: 4117214 - RNA, 59 nt, Human
guuaggaacacuggagccuaaaagacuccccuagccugagggagcuccauuguuauagc

SEQ ID NO: 4117215 - RNA, 79 nt, Human
guuaggagcccagcugggccugauuugcaggggcugcuaacuguacaaguuuccuacaaaaggccaaguugcucaaggc

SEQ ID NO: 4117216 - RNA, 58 nt, Human
guuaggaggacagaaauuucucaucauguggcugcagauguuauucuguuccuccagc

SEQ ID NO: 4117217 - RNA, 102 nt, Human
guuaggaggccaagaugggaggauuguuugagcccaggaguugaucaaaacccaaauccaaauaccuacuuagcauauuuucucuucugggaaguaacuaac

SEQ ID NO: 4117218 - RNA, 62 nt, Human
guuaggaguggagcaagaugaaaauuccaguuucuuucacucuaaacaguuucacucuuaau

SEQ ID NO: 4117219 - RNA, 62 nt, Human
guuaggcucuucucgcuugcuuguacuaguaaagcaaauagcagcagugagaggugucuuac

SEQ ID NO: 4117220 - RNA, 66 nt, Human
guuaggcugcucaccucccugucugcaucauccaacacgcugccgaugcuggaggagucgcugaac

SEQ ID NO: 4117221 - RNA, 58 nt, Human
guuagggaagcgcuguguucuuggggagagggaggcacaggccgucguuuaccuugac

SEQ ID NO: 4117222 - RNA, 55 nt, Human
guuaguaaguggggaaguccggaauucaaaccaggcuccagaacucuaugcuaac

SEQ ID NO: 4117223 - RNA, 64 nt, Human
guuaguggugaaugguugugaacaucuuuaaucagacuuuuaaagaugugaguauucauauggc

SEQ ID NO: 4117224 - RNA, 94 nt, Human
guuaguguaucccagauuuauuuuacauccuucaucuccugacacgcagagcuagcucaguguuuuccugcaggcuguuugguggaucucuaau

SEQ ID NO: 4117225 - RNA, 77 nt, Human
guuauacaguuuauacuuagaauuuuuacucacucuuggguaguuaugcgaaauauucuaagaugugaucuuauaac

SEQ ID NO: 4117226 - RNA, 80 nt, Human
guuauaguuucauccgaucuggucucaaguuuauagucuuaagugaacugauauauacauggagaaagaccaucuaugac

SEQ ID NO: 4117227 - RNA, 73 nt, Human
guuaucacaagcaauucaaccuaagugcauccagcaaaauggauaccuuagguuaggauucccgcuagaaaau

SEQ ID NO: 4117228 - RNA, 83 nt, Human
guuauccacaguguuauuucugaguaauggauaauuugguuaaaauaauaugaaacuauuauuuaggaaacauuguguucaac

SEQ ID NO: 4117229 - RNA, 55 nt, Human
guuaucugagagucugaguuacaagguaacucagaaaccagcucucucaauuaau

SEQ ID NO: 4117230 - RNA, 75 nt, Human
guuaucugugugcauggcaucauugcagccaccauccuccggucuugucuuuggcuggccauucaaacagguagc

SEQ ID NO: 4117231 - RNA, 60 nt, Human
guuaugaacaccaagaggcgguucacggggagaugccaguagagccagugguguucugac

SEQ ID NO: 4117232 - RNA, 68 nt, Human
guuaugaagucauucacaaauaauuuguuacugauaaugauuaaaucuaugugugaaugaguuuuagc

SEQ ID NO: 4117233 - RNA, 84 nt, Human
guuauggggcaguccuuucucuuuguagcacuuuacugguccucaccugaggacugaugauggugcugacagacugcccucuac

SEQ ID NO: 4117234 - RNA, 71 nt, Human
guuauguauauguguguugacaacuugccaugaaguccuggcaaagauguuuucaacacaauaaauguaac

SEQ ID NO: 4117235 - RNA, 83 nt, Human
guuauuacauguucagguagucucuaucauuacuccauaggacuuuggaaaaauggcaaaaggaguuaguugaaaagaauggc

SEQ ID NO: 4117236 - RNA, 66 nt, Human
guuauuagcuaagauuuauuaaaggcccucuguuuuaggggcuucauaugauuuuaucucaauaau

SEQ ID NO: 4117237 - RNA, 75 nt, Human
guuauuaucuugaggaaucugucggugaaaguaguauuuagacuucaacaagcagaaggccucuugguuaauaac

SEQ ID NO: 4117238 - RNA, 96 nt, Human
guuauucccucggcugagugggggccaacgagggcagcgcggcaaaccucacaccuggcggcuggcugugggcuccacgcucccuuagggaauaac

SEQ ID NO: 4117239 - RNA, 81 nt, Human
guuauucucaaaugcagacuuauucaaguugguuaugauagagcaguuagaacuuagaagaugauucuguguuuggaaugc

SEQ ID NO: 4117240 - RNA, 55 nt, Human
guuauucugccaaacuuccacaagaagaagagaauugugaaagcaguagaaugac

SEQ ID NO: 4117241 - RNA, 94 nt, Human
guuauucuucuacaucuuggugugaaacagguacacaggacaaaguacuuggaacaaguaguugcugguguccuuuauauugaggugucauagc

SEQ ID NO: 4117242 - RNA, 74 nt, Human
guuauugcagauggcacagauuuagagugcaucuuuuauguauaugaaaauguucugugcauuuauagcaaaac

SEQ ID NO: 4117243 - RNA, 64 nt, Human
guuauuggagaaagugcuggggcucuguccaaaugucagcccaggucagcucuucuccaguaac

SEQ ID NO: 4117244 - RNA, 80 nt, Human
guuauuuagcaagaguacaaaauaaaaucugaauuuacauggcucuuuuaagaaauuguuuuguagauuugauaaguagc

SEQ ID NO: 4117245 - RNA, 88 nt, Human
guuauuuccauggguuuuucccacucccacugauuuugguguaguuucugaucaaucaugauggugggagaugacccaguuucauaac

SEQ ID NO: 4117246 - RNA, 115 nt, Human
guuauuugcauauauguuacaggcauuaugaacaauuucuaggaaugacuuaugaacauuauacauauugucuaggaauuguuuaaaauuccugauuuaacauucugccuauaac

SEQ ID NO: 4117247 - RNA, 62 nt, Human
guuauuugcugaguuauacggggagauuuuuacuuuggauuucaaauuacucugcagaugac

SEQ ID NO: 4117248 - RNA, 73 nt, Human
guuauuuuguucuuuuuguauauagaaacauuuaguaaguauuuacuggauuccauugugcaaagagcauagc

SEQ ID NO: 4117249 - RNA, 83 nt, Human
guucaaaagcaaguauagaauccaccuacacaagagacuuuguucagaguuauuugauuuggauuccuacugugcaaugacac

SEQ ID NO: 4117250 - RNA, 72 nt, Human
guucaaauaucaggaugguuauguagugauauagauucacacagauucacaaacacauccagaguauuugac

SEQ ID NO: 4117251 - RNA, 61 nt, Human
guucaaggcugaggugugcugugaucgcaccugugaauagcuacugcacuucaaccugggc

SEQ ID NO: 4117252 - RNA, 64 nt, Human
guucaagguuuuacagaguguaaagugaauuugaacaagauaccucuuugugaaauuuuagaac

SEQ ID NO: 4117253 - RNA, 60 nt, Human
guucaaguuucugagcuuuaauuugaaagaaugacaaaauaaggauuuggaagccugaau

SEQ ID NO: 4117254 - RNA, 77 nt, Human
guucaauaaauuauuggugaauugaauggcuaggguaaucuccuugcucuuacauucuuuuacuagcauauauuaac

SEQ ID NO: 4117255 - RNA, 74 nt, Human
guucaauuaaguuacaaauuuaucugagacuucagcucagcuucagacccaugauaugugucuuggucaugaac

SEQ ID NO: 4117256 - RNA, 61 nt, Human
guucacagaaggccagaugguaggaagucuacacuuauuccuccuuuugucuuuugugaac

SEQ ID NO: 4117257 - RNA, 86 nt, Human
guucacagccaugcugcuugcauccauguaugucagauuaccuaucuuuuugcuacauaccacgaugcaguaucauacuuguuaau

SEQ ID NO: 4117258 - RNA, 115 nt, Human
guucaccaucccgcuggauguuuucuuuuagugauuuuguccugacaaacagcaagugcaguucugccuccguguucuccagagauaaucuaaaagaagaaaggggagagugggc

SEQ ID NO: 4117259 - RNA, 127 nt, Human
guucaccugcagggcuguauccaccuaguggggaaaucauuugcucauuuguacaaaggcucuggagccauaugggcuaacgaaggccuugccaaugagagaacucccuaccccuugccucggugac

SEQ ID NO: 4117260 - RNA, 57 nt, Human
guucacuggcugcagcaaauggaccacucuguuguaaagugcugauggugagggagc

SEQ ID NO: 4117261 - RNA, 66 nt, Human
guucacuguagugagcagaauauauuuccccaucccaaugagauauuaaugaacaugacagugagc

SEQ ID NO: 4117262 - RNA, 56 nt, Human
guucagaagucaggguaaaugacaucauggguauuuuuguugcccugauuuuuaac

SEQ ID NO: 4117263 - RNA, 78 nt, Human
guucagaagucuuauuugucauguaugugaaugaugcccuaucaguaucugagaaacaacaggaaaucagaccugaac

SEQ ID NO: 4117264 - RNA, 74 nt, Human
guucagaugucaacacuaaagaauaaucuuugaggcuccuagacuuaaaguguuuucugauguguucucugaau

SEQ ID NO: 4117265 - RNA, 61 nt, Human
guucagcaaguacucaguccacagcaguagcuccaaauauuggcugaguggaugcaugaau

SEQ ID NO: 4117266 - RNA, 102 nt, Human
guucagcuguauuguguauuauugauuucugcuuacucacuguaguuuuauugcacagugggcuuagggaauuaaugaguuuuauguuaaaugcuuaaggac

SEQ ID NO: 4117267 - RNA, 68 nt, Human
guucaggaaagcuugcuagguuuccacgccggaaagcccaaggagaaggagccagcaggccucugagc

SEQ ID NO: 4117268 - RNA, 72 nt, Human
guucaggaugccccugccuggcccagaaaccacacugccaugaaugggucaggacauuuuaccauccugugc

SEQ ID NO: 4117269 - RNA, 69 nt, Human
guucaggccagaugauguuccuaauccugcaaggucugggguacuuucaucugauaagagcccaugagc

SEQ ID NO: 4117270 - RNA, 62 nt, Human
guucagguguggaccgaggucagaucuguuuugacaaggacucuggcccuguccaccugggu

SEQ ID NO: 4117271 - RNA, 59 nt, Human
guucaguacuuaguggagaauuauuaucaauugaucauuuuccacuuuagugcaauaac

SEQ ID NO: 4117272 - RNA, 65 nt, Human
guucaguaggauccacagccucuuggaagacagcaacccaggaagcauguuggauccacuugggc

SEQ ID NO: 4117273 - RNA, 86 nt, Human
guucaguccucuugugaucucuacucuugucuccagccaaugucucugugacccuuggcucugaccagguagaggagauacugagc

SEQ ID NO: 4117274 - RNA, 57 nt, Human
guucagugaaggggagcuguuuugaugacuaccucucccuuugaucacuaacagaac

SEQ ID NO: 4117275 - RNA, 65 nt, Human
guucaguggcugcagggaccgagggcuccuuccuuccaaagcccuuccuccucgccugucagaau

SEQ ID NO: 4117276 - RNA, 57 nt, Human
guucaguucugggucuggacacacagagguuaggcaggcucuggcucaggacugaac

SEQ ID NO: 4117277 - RNA, 87 nt, Human
guucaguugcccuggaacuccuaggcaagcagaaaacucuggaaacagaaaccaugaaaccuacggaguucccagaggaaacuggac

SEQ ID NO: 4117278 - RNA, 68 nt, Human
guucaguuuuacccaagcuuauuuuagguaaucaaaaccuagagcaauuagcuuagguaaaacuuaau

SEQ ID NO: 4117279 - RNA, 79 nt, Human
guucaguuuuugacacgugauuauagaagcaguuugucaaucuccacaauaaagucuaauccguuuaauaauacugaau

SEQ ID NO: 4117280 - RNA, 66 nt, Human
guucauaaagauuucuuuuucucuacuuaauaugcuaaggaguaggggaaagagagauuuuuuaac

SEQ ID NO: 4117281 - RNA, 69 nt, Human
guucauagauaaagccuaggagucugcuguuuauguaggaaccucaaauaaguuuuauuuauccugaac

SEQ ID NO: 4117282 - RNA, 56 nt, Human
guucaucacucagagaccucccucagggcugggggacauggacugugaauggggac

SEQ ID NO: 4117283 - RNA, 78 nt, Human
guucaucaggcaagaagucaugcugcacaggucugcuaaaaaccagcacccuggcuuugaccuugcuguuuuaugagc

SEQ ID NO: 4117284 - RNA, 58 nt, Human
guucaugacucuuucauaaaugcauauaaacuugagcuucagugaagagucauugaau

SEQ ID NO: 4117285 - RNA, 60 nt, Human
guucaugagcccugaggaucuguucgguaaugguccaauagaacaucagggcuccuggau

SEQ ID NO: 4117286 - RNA, 80 nt, Human
guucaugggagcgagguggggcaccaaacacucgugucucucucugaggcuggaucuaugccacacucacuucuguggac

SEQ ID NO: 4117287 - RNA, 62 nt, Human
guucauguggaaauuuaaaacauuauuugaauuuuauguguuuuaccuucuuccaccuggau

SEQ ID NO: 4117288 - RNA, 123 nt, Human
guucauguggugcuuuuaugugucuaugcguugggguuauguguguggaccacguaugugugucagaguuuguauguggacacacauguaugucagaggagaugcaugguggcuugugugugc

SEQ ID NO: 4117289 - RNA, 79 nt, Human
guucauuaauaaacacuuuauaugucauggaaacuuuugcucucugcaggaacauacuguguagacuuugauaaugaac

SEQ ID NO: 4117290 - RNA, 70 nt, Human
guucauuacucccugacaggccaugggcuucgugacauaugaauuucauuauugccagggauuagaaagc

SEQ ID NO: 4117291 - RNA, 55 nt, Human
guucauucauuuauucguucaacaaaaauuguugaaugaccaugaugcaagggac

SEQ ID NO: 4117292 - RNA, 72 nt, Human
guucauuguugugucucagcagguagcauauaguagauacucucuaaauguuugugggauaaacaaaugaau

SEQ ID NO: 4117293 - RNA, 59 nt, Human
guucauuuuuacuuugaucuacuguuauuaugagaaaguggauugaggugacagugugc

SEQ ID NO: 4117294 - RNA, 59 nt, Human
guucauuuuuagaaugcuaguaaauuauagauauugaaaaucuggcuuuagaaaugagc

SEQ ID NO: 4117295 - RNA, 111 nt, Human
guuccacuaaagaacuggugacucugggacuagaauuuguaagaucaguguagacuaggaugggauuuacaauucuggugccagcuacuaaucuucuuguucuuuugagac

SEQ ID NO: 4117296 - RNA, 69 nt, Human
guuccagauacuuaguaagcuuuuuaaacaaaugguuuuguacuuacagagcuuauaaguuaaugggau

SEQ ID NO: 4117297 - RNA, 65 nt, Human
guuccagcauagcucccagggcugggccuggauacuucuagcuuggcugugagcuuugcuguggc

SEQ ID NO: 4117298 - RNA, 55 nt, Human
guuccaguaugauuccacccauggcaaauuccauggcaccaucaaggcugagaac

SEQ ID NO: 4117299 - RNA, 69 nt, Human
guuccauuaugcuuaggaaaauaugaaaaacgagcuaaguguuucagcaauuuuuuaagcuaauugaau

SEQ ID NO: 4117300 - RNA, 65 nt, Human
guuccauuugcuaagcccugggccuaggcugcaccuacccagagcugggcuuggcaaacugugac

SEQ ID NO: 4117301 - RNA, 76 nt, Human
guucccaaauuaccuuguuuguguuuugugggauaacauucaucacacagaauaauucacauggcucuuuggguac

SEQ ID NO: 4117302 - RNA, 66 nt, Human
guucccacaucuguucuuaguucugaguugccaggaaucugcagugggaggauaggaugugagggc

SEQ ID NO: 4117303 - RNA, 56 nt, Human
guucccaccccugagcuccgaugcucaucacaucgggaguuuuucuggaugggggc

SEQ ID NO: 4117304 - RNA, 82 nt, Human
guucccacuuuauagauauaaaacugaagcuuagggaaaucaaacaagcagcccaaguuuacagauguaguagggguggaac

SEQ ID NO: 4117305 - RNA, 68 nt, Human
guucccagaugugggccgcggccuuuccucuuucuggaggaaugacaggccucccgcagaggaggagc

SEQ ID NO: 4117306 - RNA, 129 nt, Human
guucccaucugguagucaggccuuucacgaguagcccaggaaggaagcagggguuucacaaccauuacugagaauucacuugucuuccauuuuacucuccuccuguaagggugaugugcuggauccaac

SEQ ID NO: 4117307 - RNA, 62 nt, Human
guuccccaggacugugauagcucuucggcuauaccuucagcagcuauuucagauuugagagc

SEQ ID NO: 4117308 - RNA, 62 nt, Human
guucccccuuaaaguuuauccaguguugaaaaaauacacaauccuugaacuuuagguggagc

SEQ ID NO: 4117309 - RNA, 90 nt, Human
guuccccuuccuguguccauguguucucauuguucaauucccaccuaugagugagaacuaaucaugcauggaguuuauagcacuuugaau

SEQ ID NO: 4117310 - RNA, 90 nt, Human
guucccucucucagucccugggaagaccggcagugggguaggacgccaaucuccccagcugcucuuccaggcuccccugccagaggaggc

SEQ ID NO: 4117311 - RNA, 77 nt, Human
guucccugaaagcuuguaagaaaaauauuuuaaaaucuauuuucaaugaaaaauauuguuuuuggcucucagggaau

SEQ ID NO: 4117312 - RNA, 91 nt, Human
guucccuggcacacaugaccugagcuuucuaccagguccugucuccaaggggagaaggaaccuguguugagauaugggccagcuaggugac

SEQ ID NO: 4117313 - RNA, 70 nt, Human
guucccugggucuccggcagccucgggccucucggaagccgcuugccagaagaccggggagucagggagc

SEQ ID NO: 4117314 - RNA, 65 nt, Human
guucccuucucaugggguccagcauguccuaucauuguggagcugggcucugaguggaagggggc

SEQ ID NO: 4117315 - RNA, 117 nt, Human
guucccuugcuugauaccccacuccaauuuuaucucaggagguuccucugucccaggauguuggguagaagaagauuccugaguuuaguuugaugguuagcaccaacaaccaggaac

SEQ ID NO: 4117316 - RNA, 80 nt, Human
guuccgacuauccaccaggcuccauguucaguguuggaaaugcaagacugaaaaagacaucuugguaagguaguaggagc

SEQ ID NO: 4117317 - RNA, 62 nt, Human
guuccgugcagaggacaagcaaucacagcuccaucuguuaagcuucuguaucuagcaggaac

SEQ ID NO: 4117318 - RNA, 80 nt, Human
guuccuagaguugccccucuuguacuagacaguuuugcuaaaccacagacugcggauagauaggcggggguguggggaac

SEQ ID NO: 4117319 - RNA, 55 nt, Human
guuccuaucugcuauccaaggcauaucaaggugucuagaaagccaaauuaggaau

SEQ ID NO: 4117320 - RNA, 78 nt, Human
guuccucacuauagguuuugccuacucuuagauucaaacaagaaaucugaauguaagacuuuaagaaccuaaaggagc

SEQ ID NO: 4117321 - RNA, 79 nt, Human
guuccucaguugaaauaguuacuguauucucauuaucuacaacaguagcaacaauggaaguaacuucaggcucaggaac

SEQ ID NO: 4117322 - RNA, 88 nt, Human
guuccucaguuugcagcugcugagcugcucccgcugcagcgacaggcucugcgugcugcggcgcaggcacuccaggcucugcaggaac

SEQ ID NO: 4117323 - RNA, 68 nt, Human
guuccucgaagaagccuccuaugagugccuggaugaggucaggcuucuugggcuucauucugagcagc

SEQ ID NO: 4117324 - RNA, 62 nt, Human
guuccugaugcauuacaaaagugauuauugaugauaaugauuauugaugagagcaccaggac

SEQ ID NO: 4117325 - RNA, 57 nt, Human
guuccuggggggauagauuucaccugauagcccaggcacaucccuauacuuaggagc

SEQ ID NO: 4117326 - RNA, 68 nt, Human
uauggucaaagauaugaagcccucaaguccagauaaacaugaaggccauggcuaaugucuuugaaaua

SEQ ID NO: 4117327 - RNA, 63 nt, Human
uauguaacauacguauguaugugcauguguacauuugcacauguauauuucuguaugugcaua

SEQ ID NO: 4117328 - RNA, 55 nt, Human
uauguaaggagccacagugggggcaacuucugucuuuucaaugguucuuuaugug

SEQ ID NO: 4117329 - RNA, 60 nt, Human
uauguaagugagaucauggaguauuuguuuuuccgugccugacuuauuucacuuagcaua

SEQ ID NO: 4117330 - RNA, 55 nt, Human
uauguacaccaaggauugaaaagguucacaucuuuccaaucaaaagugcugcaug

SEQ ID NO: 4117331 - RNA, 68 nt, Human
uauguacauuuugagguuaaaacaaccaugcaguuauggugguuuuguuuauucugaaccuguaugua

SEQ ID NO: 4117332 - RNA, 63 nt, Human
uauguaccauguuuugugcuuaauuucaaagcuaauguaacuacuaggcacagagcauacaua

SEQ ID NO: 4117333 - RNA, 56 nt, Human
uauguacuguuucugugguggucuuagaugauacagccaagaacaagacagacaug

SEQ ID NO: 4117334 - RNA, 79 nt, Human
uauguacuucuguguuuuuuucuccuuuaaauaugauauaguguaugaaugggaaaaggaaacgaaguuaagaaacaug

SEQ ID NO: 4117335 - RNA, 101 nt, Human
uauguaugcaagcuuacaggugccacaugugugcugaggacuguggguaacucauguagcagccacauauguauacugcaaugugacauguuugaugcaua

SEQ ID NO: 4117336 - RNA, 56 nt, Human
uaugucagagugcuugggagggcggaaugucucccuccccaccagacucuaacaua

SEQ ID NO: 4117337 - RNA, 57 nt, Human
uauguccugcuacucucucaugcugcauuuuugcucuugggaaauguccaggacaua

SEQ ID NO: 4117338 - RNA, 81 nt, Human
uaugugacagcuggccgggaaggacuggugccugcauauggagagugcacuugugacaguuccuggcauagaauaagcaua

SEQ ID NO: 4117339 - RNA, 56 nt, Human
uaugugcuaagugucugguauaugccccauguaucuaccagagcucucaguaugug

SEQ ID NO: 4117340 - RNA, 62 nt, Human
uaugugcuguagcuuacuguuauuccauuuuguacaguuaaucaaauggcauauggcgcaua

SEQ ID NO: 4117341 - RNA, 89 nt, Human
uauguggaacugcagauacuguuggcagcagaccagaauuuauaguuaauucuguuuggccuugcacgucaucuagucaguuguauaug

SEQ ID NO: 4117342 - RNA, 67 nt, Human
uauguggccuuauuauguacaaaaugaauaagccaucauuuccaguacuaucauaaggagcuacgug

SEQ ID NO: 4117343 - RNA, 61 nt, Human
uauguggcucauuguuugcuuacggagacugaugucauaggguaagcucuauggguacaua

SEQ ID NO: 4117344 - RNA, 75 nt, Human
uaugugguguacaugugucuguauaucuuuggagaggcuuacaugauuauggagaaauauguacaggcuuacaua

SEQ ID NO: 4117345 - RNA, 82 nt, Human
uauguguaagaauuauauuuugcaauuguguugguauaaaaacuaauauguuaaugugauauaaaguauuuucuuugacgua

SEQ ID NO: 4117346 - RNA, 71 nt, Human
uauguguauauguguguguguguauuauauagauaauguugaugaaauaaauacccacacauacacacaug

SEQ ID NO: 4117347 - RNA, 60 nt, Human
uaugugugcauuagcauucuagggagucauuuaauugacccuagaggagaguuuaccaua

SEQ ID NO: 4117348 - RNA, 58 nt, Human
uaugugugccccuuuuacucuuugcuuuacguaaucuagaauuuuagggguauaucua

SEQ ID NO: 4117349 - RNA, 88 nt, Human
uaugugugugugcugagcaggagaauaugggcuacugucuuuuaaaacagagucauaguuuaacuuuuguuauacacacacacacaua

SEQ ID NO: 4117350 - RNA, 55 nt, Human
uauguguguguguguguguuugugcauauauacagauauacacccauaucacaua

SEQ ID NO: 4117351 - RNA, 80 nt, Human
uauguguuuaacaugcaaugucugaaaauccagggaauauuuugucuuggauuuccagcuucauugucuaaaaacacaua

SEQ ID NO: 4117352 - RNA, 61 nt, Human
uauguuaagugggauaaucaaauauuuuuauuucugugucugguuuauuucacucagcaua

SEQ ID NO: 4117353 - RNA, 61 nt, Human
uauguuaccaucuuuuaucuacaucuuuaauaaggugggacacauuaaaguuggugacaua

SEQ ID NO: 4117354 - RNA, 56 nt, Human
uauguuagagucugguggggagggagacauuccgcccucccaagcacucugacaua

SEQ ID NO: 4117355 - RNA, 76 nt, Human
uauguucacaagaugucuguggcuucagguggggauuaaacaaaaauaacugccuuagucacaggccuggaacaug

SEQ ID NO: 4117356 - RNA, 68 nt, Human
uauguucuaaccuugucuuucccuucagccauucuaccaauauggggcaacuuaggaguuagagcaug

SEQ ID NO: 4117357 - RNA, 69 nt, Human
uauguugccuuuugacuguuuaugaauggauagcugcuccagaacauaaaucucuuaagacucaacaug

SEQ ID NO: 4117358 - RNA, 87 nt, Human
uauguuggaagugucuaucaguuugagugcugugucaaagaacucacacuggcuuuucaacagcucucaaaugaucacucuuuuaua

SEQ ID NO: 4117359 - RNA, 129 nt, Human
uauguuuuguaagauuuuauuucauucaacauucaaccaacauuuaugaaucaccucuaugggacaggugcugugugaaauuuuggugguguauagaugaauaaaaauggugccuugucuucaauaaua

SEQ ID NO: 4117360 - RNA, 69 nt, Human
uauuaacauuuuccaaagcaucugagugugcaugugugugcaugcacauguggcuuuauguauauaaua

SEQ ID NO: 4117361 - RNA, 97 nt, Human
uauuaaccacaguuagaauuuaagauagcacgucuagauauauuugggcuuauaaaguauauuguaggugcuauuugaacuucauauauguuuaaua

SEQ ID NO: 4117362 - RNA, 84 nt, Human
uauuaaggucacacguggagauucugggcaauuacagauagugccuucuccucccacagaaaucuccaugucagacauguagua

SEQ ID NO: 4117363 - RNA, 87 nt, Human
uauuaaguuggugcaaaaguuauugcgguuuuugccaguuccaaaaccaauggccaaaacugcaguuaccuuugcaccaaccuaaua

SEQ ID NO: 4117364 - RNA, 88 nt, Human
uauuaauuucugaauacucaguuuauauuuuuagauuguuuugugaauugggaucucugaguauaaagugguuuucagcacauuggug

SEQ ID NO: 4117365 - RNA, 63 nt, Human
uauuacccaggguaggaauuccuguuaaucuuaccuaaguaguuauuucuuuauuggguaaua

SEQ ID NO: 4117366 - RNA, 96 nt, Human
uauuaccggguaccaccaguacagugaaaagaauauuagaauaggcauaaaaauggauucuaauucuucauucaucacuaugugauuuuaguaaua

SEQ ID NO: 4117367 - RNA, 102 nt, Human
uauuacuuuuugguuuaguuuucaaggaacucugucugugggaggaauucuaaguaucauuuacagauggcaguuucuugagcugguuuaaucacgucaaug

SEQ ID NO: 4117368 - RNA, 80 nt, Human
uauuagagacuuaucagcauguggaaaaagggugcuuuucagccguucagaaaacucuucacacaugcugcccucugaua

SEQ ID NO: 4117369 - RNA, 83 nt, Human
uauuagaggggacaguuuuuaauccuuucauggggauaaugaaaauaucuuugacauggauugaaaaccaguguuuguugaug

SEQ ID NO: 4117370 - RNA, 68 nt, Human
uauuagaugggagguucauguacuaggcagacacuccaaaaugucuacuacaaaccuccacacuggug

SEQ ID NO: 4117371 - RNA, 71 nt, Human
uauuagcauagugucugguaacauaguaaagauucaguuauuuuauuauuguuaugaggcuuaugauuaug

SEQ ID NO: 4117372 - RNA, 84 nt, Human
uauuaggugggugcaaaaguaauugugguucuugccauugcucuuaauggcaaaacccacaauuacucuugugccaaccuaaua

SEQ ID NO: 4117373 - RNA, 82 nt, Human
uauuagguuggugcaaaagaaaucaguuuuugccauuacuuucuauggcaaaaacuguaauuacuuuugcaccaaccuaaua

SEQ ID NO: 4117374 - RNA, 84 nt, Human
uauuagguuggugcaaaagucacugcuguuuuugccauugaaaguaauggcuuaaaucacagugacuuuugcaccaacccgaua

SEQ ID NO: 4117375 - RNA, 64 nt, Human
uauuagguuggugcaaaauuaauugugguuuuugccauuaaaaguaauuugcaccaaccuaaua

SEQ ID NO: 4117376 - RNA, 85 nt, Human
uauuagguuggugcaacaguaauuugcgguuuuugccguugaaaguaauggcaaaaacugcaauuacuguugcaccaaccuaaua

SEQ ID NO: 4117377 - RNA, 83 nt, Human
uauuagguuggugccaaaguaauugcuguuuugccauuaaaaauaauugcaaaaacugcaauuacuuuggcaccaaccuaaua

SEQ ID NO: 4117378 - RNA, 84 nt, Human
uauuagguuguugcaaaaguaauugcgguuuuugcuauugaagcuaguggcaaaaaccgcaauuucuuuugcaccaaccuaaua

SEQ ID NO: 4117379 - RNA, 78 nt, Human
uauuagucucuagccuuuuggcaucugugauuguguaaucacuuguccugagaugucacaagguuuauaggauuaaua

SEQ ID NO: 4117380 - RNA, 55 nt, Human
uauuauauguuguugaguguaguugucaaagcaacuagcacgauuccaaguaaua

SEQ ID NO: 4117381 - RNA, 56 nt, Human
uauuaucucuaaauuuaggagaggauaaauguucccuccugggcuaagauauagug

SEQ ID NO: 4117382 - RNA, 82 nt, Human
uauuaugagcagugucccaaucuacuuuucccuccaaauggaaggaauauucucugauugggacuagaugauugcuauagua

SEQ ID NO: 4117383 - RNA, 63 nt, Human
uauuauggaauuuauaaaguguaauuucuaauaggauauugcuagccuaugaguucaguagua

SEQ ID NO: 4117384 - RNA, 63 nt, Human
uauuauggggggaacaucacucagcucacuacaacuucugagacaaaguucccaccucugaug

SEQ ID NO: 4117385 - RNA, 79 nt, Human
uauuauguuaauaguggcagagcaugaguguuaaagaucuauagacucaaauaucagcucugucacuuacuaaccaaug

SEQ ID NO: 4117386 - RNA, 99 nt, Human
uauuauuuuaagaggagagcaacgaggugauacuagaagaauguuuuucugaccauaagugucacuuuuugcauuacgucauucuuucaugaaguagua

SEQ ID NO: 4117387 - RNA, 73 nt, Human
uauucacccacccaccugccgggcucaugcagacccacccaggugcagagucccagcaggugguggcugcaua

SEQ ID NO: 4117388 - RNA, 95 nt, Human
uauucacuguaguccaagagauguaacgaagaacaagacuaauaagauucuuacuuuuucaaaauuacauccucauugggagacacagaugaaug

SEQ ID NO: 4117389 - RNA, 83 nt, Human
uauucagauucuauaucauauuaauaagaauugaaccuugaaaguaacaucuguuauucuauuaaugugauugugugugaaug

SEQ ID NO: 4117390 - RNA, 88 nt, Human
uauucaguuuggaccaaauuaaaaguuggcugcaauuuauucccuugcacuguagcuaaaaucaccuuugguccuuuguaacugagug

SEQ ID NO: 4117391 - RNA, 81 nt, Human
uauucauacuaaauuugucaaugacacuugcuuuagugcacuuaaguucaaggugacguugaaaauuuggagaaguggaua

SEQ ID NO: 4117392 - RNA, 59 nt, Human
uauucaucuuugucuuaggcugaauucucuaaaaccagacccugaggaaaagaugauug

SEQ ID NO: 4117393 - RNA, 67 nt, Human
uauucauguguuggaaaggaacugggauaauuaaaugcuuuccuacauuccuuuccuucauuggaug

SEQ ID NO: 4117394 - RNA, 57 nt, Human
uauuccaccagagaugugaauuguggaaucgaggcaauuuauguuugggguggaaug

SEQ ID NO: 4117395 - RNA, 130 nt, Human
uauucccucuccuagccacacaugccauccucugucggaagugacagaugauauuuuggucuugggauuuccucuuuggagucugucugucacuucugcagucugugaugaaugcauucuuaagagcuua

SEQ ID NO: 4117396 - RNA, 78 nt, Human
uagagugcguauuggcuuauuuccuuagaugauguucucaggaguggaaugaauaacaucugaaaaggcuucacucua

SEQ ID NO: 4117397 - RNA, 74 nt, Human
uagaguuacugucacuccaacugagucgucaaaacccauuuuuaagucuuaugacuuuuaggagcagugcucug

SEQ ID NO: 4117398 - RNA, 74 nt, Human
uagaguuugaggugccuauggaugucaacuuggagagauuauauagauaguuggauuuauaagccuuaagccua

SEQ ID NO: 4117399 - RNA, 87 nt, Human
uagaguuuucaaugcacuuucuuauccaugaucucacugaugcuuaagacaacucagugaaacaggcaggggaaguauauaucucug

SEQ ID NO: 4117400 - RNA, 72 nt, Human
uagauaaacuaagcuuuucaaaaacauguuucugacugugugacaucuuguggagaggcuuuggaagaucug

SEQ ID NO: 4117401 - RNA, 80 nt, Human
uagauaauuuuuuccuacauuuguacaauaagauuauucucauuuauagucuucauguugcuguagggagagaucauuua

SEQ ID NO: 4117402 - RNA, 83 nt, Human
uagauacccagacugguugauugcugaaaguauuuuaugacuaccaaguugggaaauuguaguaaaaccuaucuguggauuug

SEQ ID NO: 4117403 - RNA, 90 nt, Human
uagauagaaugugacauuuuuggucaacuccaaagaaguggcaggauuuucuuuggaauuugcuggaaauauugugguuguuuucuacug

SEQ ID NO: 4117404 - RNA, 68 nt, Human
uagauagaggccaggacacuuaaguaagaaggucuaccuuuccuguuuuaaagucaugguugcaucua

SEQ ID NO: 4117405 - RNA, 56 nt, Human
uagauaggaaauaaggauuugguggggaaugucugccaguauuauuucucuaugua

SEQ ID NO: 4117406 - RNA, 85 nt, Human
uagauauagacaugugguauaaucaggggacuagaucgugcauagaaaugcauguacaaacccuugauugucuauaggucuucua

SEQ ID NO: 4117407 - RNA, 66 nt, Human
uagauauuuaaauaaagagcaguguaguuguucuucagguaggugucugcucuuauuuaacaucug

SEQ ID NO: 4117408 - RNA, 61 nt, Human
uagaucaggaguuggcaggcuauagccccaaggccaaauucugccugccagccugaaucug

SEQ ID NO: 4117409 - RNA, 123 nt, Human
uagaucaggcuagagaugguuaccaugaggcaugcaauuuuugguucucuaucuugguugaagucacuauguagauauuaaaaauggcagugcuuagaguguggcuuugaaucuuaugauuua

SEQ ID NO: 4117410 - RNA, 67 nt, Human
uagaugaggaagccgaagcuuguagagaccaagugggugcuacaggucuucugccuucacucaccug

SEQ ID NO: 4117411 - RNA, 69 nt, Human
uagaugcugauggaugagcugaagugaaaguagcugcuuuaggaucagccuacacuccaacagcaugug

SEQ ID NO: 4117412 - RNA, 120 nt, Human
uagauuccauuuuacuaauuauuucuuaugucaaauuugugcccacauucaaaaggugaugaaggccaaaaccucuaucgcauuuuuuuaugucaacaguaacagauaaaaugugaucua

SEQ ID NO: 4117413 - RNA, 80 nt, Human
uagauucucauaaggagcucacaaccuagaucccucacaugugcaggucacgauaggguucgcacuucugugagaaucua

SEQ ID NO: 4117414 - RNA, 66 nt, Human
uagauucugaggccuugcucaagauuauucugacauaauaacucuucaguagguccucagaaucug

SEQ ID NO: 4117415 - RNA, 59 nt, Human
uagauucuggagagacagcagugaauuagacauaaaaauguguguucuuccagaauuua

SEQ ID NO: 4117416 - RNA, 58 nt, Human
uagauuuccucuuccucauuccuauagacaacauaugugaagaggaaaugggaauuua

SEQ ID NO: 4117417 - RNA, 127 nt, Human
uagauuugaauuggugaaugaauaaauugggucuuggagaaaggaaagggcuugaaugaguucuuucagaauaggccuuuucuuuucucaaaaguaccagcaauagcuucccauuuuuucagaacug

SEQ ID NO: 4117418 - RNA, 87 nt, Human
uagauuugaggggcuguugccgaaccaauguaaagcuuucagagggaaguaugcaggucucugcaaggccuaucaagcagcauucua

SEQ ID NO: 4117419 - RNA, 74 nt, Human
uagauuuuuuggaagcaaauuccagaaccacagaguugacuggucgauaugucucuugaguuuguuuuaaucua

SEQ ID NO: 4117420 - RNA, 83 nt, Human
uagcaaaagcuugcugacacccauucaaugugacugguuuugcaaggauuggaaaacaugcacauuggauucagcugcugcua

SEQ ID NO: 4117421 - RNA, 82 nt, Human
uagcaaagcucucccacuguaugaaggaaagacuagcaaagugaaauaaguuagccuuguaagcagagggucagcuuuucua

SEQ ID NO: 4117422 - RNA, 83 nt, Human
uagcaacuagugcuggcguuuucuuaauguguuuucucuuguaauucugacagcucuaugaaugcuccaguaacuuucagcua

SEQ ID NO: 4117423 - RNA, 58 nt, Human
uagcaacugcucuauucuaggacuggagagcucucccgggcccuggucagaguugcua

SEQ ID NO: 4117424 - RNA, 82 nt, Human
uagcaagcucaaacuaauauggggcuaaacaugaucaauauuuguugaaugaaugguccauauagaagguuaugggaggcug

SEQ ID NO: 4117425 - RNA, 56 nt, Human
uagcaaggcuuccaaugaacagcagaugcaggagcuggaguaggaagugauuguug

SEQ ID NO: 4117426 - RNA, 76 nt, Human
uagcaagucacagcaguuuaggguugacauagcagaguucaaaugucugacuuuucucacuguuguguacuuguug

SEQ ID NO: 4117427 - RNA, 70 nt, Human
uagcaaguggcaccacauuucuaggcauauaaagaaauaauaacaccuagaauuuguaaacaauuugcua

SEQ ID NO: 4117428 - RNA, 60 nt, Human
uagcaauguguugacuuggucaucuauuguaguaaaauuugaccaagugucagguuguua

SEQ ID NO: 4117429 - RNA, 63 nt, Human
uagcacacaguacuauaugcuacagaugaaguacaaugcugucaaauagggguacuuguguua

SEQ ID NO: 4117430 - RNA, 56 nt, Human
uagcacacuaaagauauuaacagucgguaccucuagacugguguaucauugugcug

SEQ ID NO: 4117431 - RNA, 57 nt, Human
uagcacagauuugucaacauagaccuguuacauugucuaucccuaaaucugcugcug

SEQ ID NO: 4117432 - RNA, 69 nt, Human
uagcacagcaauguacccaucugugaguuuuaguagcuuugaaugagugcauugcagacacuguggcua

SEQ ID NO: 4117433 - RNA, 96 nt, Human
uagcacauuuugcuuaaucuagauuuugcgucaacaaauaacuuucaguaacugaggcaaucuugaagcggauuagagcaaauuccuccugugcua

SEQ ID NO: 4117434 - RNA, 71 nt, Human
uagcagaacugcaguuaacaagucuucauggucccagagagaaauugauauuugcugacugcauugugcug

SEQ ID NO: 4117435 - RNA, 68 nt, Human
uagcagagagauucuaaaccaggucugacuuuccaauuucaacaucuguguuugaaucucaaauguua

SEQ ID NO: 4117436 - RNA, 58 nt, Human
uagcagaguaauacuuuggagccagauaucuggauuucauuucuguguuaguuugcua

SEQ ID NO: 4117437 - RNA, 61 nt, Human
uagcagagugugaaggcagggcuuaagucacuagaccagagcucauaucacggcucugcug

SEQ ID NO: 4117438 - RNA, 66 nt, Human
uagcagcaauucaggugugaugcugucauuuuuuaucauggcccugaacucccagaauuguuguug

SEQ ID NO: 4117439 - RNA, 62 nt, Human
uagcaggaggcaguuccucgcuucagucuacauguagcaucuaaggagacuacuucuugcug

SEQ ID NO: 4117440 - RNA, 55 nt, Human
uagcaggcuugugaauggagccuguaaauaucaggcuuuuagacccaagccucug

SEQ ID NO: 4117441 - RNA, 57 nt, Human
uagcagggaagccuccagaaccuuagacaugaaggcacacacuugaggcccuugaua

SEQ ID NO: 4117442 - RNA, 69 nt, Human
uagcaggguuuugaagaggguugcuggggguggcugacucugccaaaauguuuccuuuuucucuugcug

SEQ ID NO: 4117443 - RNA, 82 nt, Human
uagcaguagcuaguuuguaggcuuuugugagaauuacauaauauccauauaauguucuuagcaaaguacuugcuacaugcua

SEQ ID NO: 4117444 - RNA, 101 nt, Human
uagcaguagcugugagaagaugggguccagcaugcccuguaggaaguucccaagccucagggcaggacaguguaggcccuaguucuggcugugugcugcug

SEQ ID NO: 4117445 - RNA, 61 nt, Human
uagcauaaggcuuaaagaauauauauuuucacauggaaaaaaaugugcuugggccaugcua

SEQ ID NO: 4117446 - RNA, 83 nt, Human
uagcauagcucauucugggugcucuguacuaauaaucaaaccacacuaaauugaauuugaagagcaucaugaugcuaagucug

SEQ ID NO: 4117447 - RNA, 65 nt, Human
uagcaugcagugaugcacugcaucaucuuuuguuugugguugcaacaacgugucgcuguacgcug

SEQ ID NO: 4117448 - RNA, 65 nt, Human
uagcaugucuauagccugauuuguuggccucuucugcaaggucaacacuggcuacaguuaugcug

SEQ ID NO: 4117449 - RNA, 76 nt, Human
uagcauuuguggguuguugcugaguacuguugaauauaacauguagcagaaacgacuaaaugguuacaaaugauua

SEQ ID NO: 4117450 - RNA, 57 nt, Human
uagccaaaguagcuguuauagcuauaugcuaugguaaaacacugcagcuuuugguug

SEQ ID NO: 4117451 - RNA, 56 nt, Human
uagccacagagcauuagauuucagaguacacuugaguucuuucuguucugucacua

SEQ ID NO: 4117452 - RNA, 109 nt, Human
uagccacgggaugggggcaugggaagggaggggucucuagcgaggagacugucucuugucuauccugagagccucuucuccccuucuacccaccaugaauccugggcua

SEQ ID NO: 4117453 - RNA, 78 nt, Human
uagccacuuguguccuggagcccccaguucaaaucuuuccauuggacuggaggcuugugggaggcugggagguggcug

SEQ ID NO: 4117454 - RNA, 64 nt, Human
uagccagaagacuaccuucagggucaaacaauaacuuuccccugggucuucagucugcugguua

SEQ ID NO: 4117455 - RNA, 73 nt, Human
uagccaucuuaacaggucucugagggucaauauccuuugacuaucccucuagcuuuguuggucaugauggcua

SEQ ID NO: 4117456 - RNA, 60 nt, Human
uagcccagccacugauuugcaaccagugggcaccugcugcaaguucagaagguugggcug

SEQ ID NO: 4117457 - RNA, 71 nt, Human
uagcccuguagauuuaggagaguuuucagccccuauaggccucacuuuucuucauuuauaaaaugaggcua

SEQ ID NO: 4117458 - RNA, 87 nt, Human
uagcccugucuaauuaagccuggaauguguguaaaaucacuagcauagaguuuugcaaaguacauuaucaggcucugguuugagcua

SEQ ID NO: 4117459 - RNA, 100 nt, Human
uagcccuuccugaauugauccucagagcugaggccagggacagguaagacuacaaggugcuuguguggucccagcuuuggggagcaagcagaagggacug

SEQ ID NO: 4117460 - RNA, 112 nt, Human
uagccggcauguuggcacgugccuauagccccagcuucucagaaagcugaggugggaggaucacuugagccugggagguugaggcugcagugagcugugaucaugccgccug

SEQ ID NO: 4117461 - RNA, 57 nt, Human
uagccucucuccuccacaaccuagagagucucagauuguacugagugggagaggcug

SEQ ID NO: 4117462 - RNA, 60 nt, Human
uagccugggcaugggacgggagggcucauuaaccauccucccuuccuccaucccggccug

SEQ ID NO: 4117463 - RNA, 61 nt, Human
uagccuuucuccaaggccacccaaggagcccagugaaagcuccagcccuggagccaggcua

SEQ ID NO: 4117464 - RNA, 84 nt, Human
uagccuuucuucccaugaucacccgugcacagaugaggaggcugagcuggucugagcauggccgguccauggugggcuaggcug

SEQ ID NO: 4117465 - RNA, 130 nt, Human
uagcgaaaggugacgaggcuguuuucggagagccaggggucccagcggcccgcuuuccugcuagaggagggggcggcgcguagccggagacuucagcgcggcggcuccaaagaucucccuucacuuuuca

SEQ ID NO: 4117466 - RNA, 85 nt, Human
uagcuaugugacauuggaagauuacuuaguuuucucuuuuguaagaugaaaauaguaauaucuaccuuagaguguuauagaguua

SEQ ID NO: 4117467 - RNA, 60 nt, Human
uagcuauguuaaguauaccuguuaagugccaggguacuguacuaauugcuuuacauguua

SEQ ID NO: 4117468 - RNA, 71 nt, Human
uagcuauuuggaaaauuccaauaaaauauuuugacugguaagauaucgcaguggccuuuuugaaauagcua

SEQ ID NO: 4117469 - RNA, 87 nt, Human
uagcucaacugugcacaaguuucuucauuguucauuauucuccauggauagaguagacauuguggaacaugaucucauuacaugcug

SEQ ID NO: 4117470 - RNA, 85 nt, Human
uagcuccaggugaguuugucucuuagcuccuuaagagaggcuuagaucucuuuagggaagcauggaggagaugguauuugagcug

SEQ ID NO: 4117471 - RNA, 56 nt, Human
uagcuccuccccauccagguuccccuaguguugggcagcaaaggaggucaggacua

SEQ ID NO: 4117472 - RNA, 77 nt, Human
uagcucuggauuucaguucaccugggaacccgcuggaagccgaguggacuccaggaggaacgaagugccuugggcua

SEQ ID NO: 4117473 - RNA, 74 nt, Human
uagcugaauauaggcacaacagaaauuucccauuaagcacgggguuuuuguuuguuuguuuguccuuucaguua

SEQ ID NO: 4117474 - RNA, 112 nt, Human
uagcugagcaugguggugcaugccuguagucccagcuacuugggagguugaggcaugagaaucgcuugaacccaggaagcggagauugcagagagcugagaucaugccacua

SEQ ID NO: 4117475 - RNA, 76 nt, Human
uagcugcacugguuucuuuccacucuccacccucauuuccuuggaagguuuuagauauagaagaaacagauagcua

SEQ ID NO: 4117476 - RNA, 69 nt, Human
uagcugccuaugugauaagagagccagggaacaguuaaacgguuaaauauauuuguccuguggcagcug

SEQ ID NO: 4117477 - RNA, 58 nt, Human
uagcuggcuuauauaaaagggcuguggauaaaggcccgggaaguaugggagccaguua

SEQ ID NO: 4117478 - RNA, 93 nt, Human
uagcugggaaaggaugaaacaucuauuuucugugagguaucaaccacaagggaagauacaccuuuuuagaagauuuuauuuugaugccagcua

SEQ ID NO: 4117479 - RNA, 74 nt, Human
uagcugggacagacaacuauguugagaugcacaacgucaaagagaguacugagcauguugugauguuaccacug

SEQ ID NO: 4117480 - RNA, 91 nt, Human
uagcugggguggaguguggguucccaagggggcagggggcacugagagugggaggccucaggccuagggagccacaccaggccacaugcug

SEQ ID NO: 4117481 - RNA, 65 nt, Human
uagcugguucuccaggagcuaggaucagcucagccuggcaccuaguuagcaggaggaaucaguua

SEQ ID NO: 4117482 - RNA, 87 nt, Human
uagcugguuuuacaggugugagccaccaugcccaauuaauuuuuguauuuuuaguagagaugggguuucaccauguuggccagacua

SEQ ID NO: 4117483 - RNA, 60 nt, Human
uagcugucagcugcaggcaggccaccccaucccauagaccuucucacaguaugacagcua

SEQ ID NO: 4117484 - RNA, 67 nt, Human
uagcugugccaucugauauaagagccaccagucaccuguggcucuugaaauguggcuggcgcaacug

SEQ ID NO: 4117485 - RNA, 126 nt, Human
uagcuguggauuacauguguuucaaauguauagcuaggaauugaaaaguggucugagcuucaaaaagucuuacuauauuuuaauacuuccauaugaauuugacuuaauuauguaaggaaauaguua

SEQ ID NO: 4117486 - RNA, 126 nt, Human
uagcuguggauuacauguguuucaaauguauagcuaggaauugaaaaguggucugagcuucaaaaagucuugcuauauuuuaauacuuccauaugaauuugacuuaauuauguaaggaaauaguua

SEQ ID NO: 4117487 - RNA, 64 nt, Human
uagcuucuaauacuuaccaauugcauuuuaauaucacuuguuucugguagucuaggggaggcug

SEQ ID NO: 4117488 - RNA, 73 nt, Human
uagcuugcugagagcgugucaacaagaagagugacaaauaaucuugcuuuuguucacugucucugagcaccug

SEQ ID NO: 4117489 - RNA, 78 nt, Human
uagcuuuaaugauaccuauuagauauguaaucuugagcaaguuuuuuaacuugucagugucugagguuuuauaaguua

SEQ ID NO: 4117490 - RNA, 69 nt, Human
uagcuuuaauugugacaugagggccacagugccuccccacucuggccuauuucugucagauccaaguua

SEQ ID NO: 4117491 - RNA, 130 nt, Human
uagcuuuaguucucucuccugguagcugggccaacagggugcgggagaugugcaccagcucagcuucugagguguuauuuguacacuuggaugguccagugcaucaacauugaaggagacaggauuccug

SEQ ID NO: 4117492 - RNA, 55 nt, Human
uagcuuugaccaacgacugguccucacuaaugggagaccaggaguaucagagcug

SEQ ID NO: 4117493 - RNA, 77 nt, Human
uagcuuuguuuuuguugucuuuuucuguagggaucccauuaauuaugucuaugagaagaaaacaagauuaaaagcug

SEQ ID NO: 4117494 - RNA, 97 nt, Human
uagcuuuuuuacauccccucuucauccuccugcagagaaguacgaaguacuuuuuuggugcuccuaggaaggugguagaaauggaguagacagguug

SEQ ID NO: 4117495 - RNA, 59 nt, Human
uaggaaaauaucucuuauugggaacacaaguaaaaaauguguaaagggauaucguccua

SEQ ID NO: 4117496 - RNA, 57 nt, Human
uaggaaaugaaugcaggcucccaugggguaucccccagccugauucuggguuuccua

SEQ ID NO: 4117497 - RNA, 61 nt, Human
uaggaacacacauguguagcugucuuucguaucuaccugaagucacacaaugguguuuuug

SEQ ID NO: 4117498 - RNA, 64 nt, Human
uaggaaggccauuuuuagguagaauauacaaagaaaguaauugagccuaaagaggaccuaacua

SEQ ID NO: 4117499 - RNA, 63 nt, Human
uaggaaggccugucacuacuugauguuugaauuuagccuacgauguagucacaggcauuucua

SEQ ID NO: 4117500 - RNA, 55 nt, Human
uaggaaugcuuucaaaaaugugcagugguaaaacugccagauugaagguuucuua

SEQ ID NO: 4117501 - RNA, 63 nt, Human
uaggacagagcugguuacaaugcugugugguuuugagcagcuuacuuaaccucucugaaccug

SEQ ID NO: 4117502 - RNA, 55 nt, Human
uaggacagcaugagaguagcaaaaggaguccuugcugaaacucuuaguaguugua

SEQ ID NO: 4117503 - RNA, 73 nt, Human
uaggacaggugaggggcugugggcacacaaacauuucacuuacuuaaugguggccauggccacaucugugcug

SEQ ID NO: 4117504 - RNA, 124 nt, Human
uaggaccuccaugguuccagagucuaaggucuuccauguuuucucugacaccuaugcugauccaucccauuguaggaugugccaggaaagaaaggauuuuuagcaccuggcaaccuggguccua

SEQ ID NO: 4117505 - RNA, 68 nt, Human
uaggacuuugagaauuguuauuaggugaguuugacaauagcacaggguaauaaugucucagacaccua

SEQ ID NO: 4117506 - RNA, 91 nt, Human
uaggagaagacuauggacuuguugaugagauaaacaugcucaaaauuugacaugggcauccaguucugaucaacaauaauacuuucucuua

SEQ ID NO: 4117507 - RNA, 79 nt, Human
uaggagaauaucacaaggugcauggaguaauuucucaaauuuugaggccuuaguaacccugcacuggauuaaucuccua

SEQ ID NO: 4117508 - RNA, 93 nt, Human
uaggagacgacaguuccauguguguuacugcccuugaauaccuuccaguggaacaaaauguggagguggaaggcagugauauuguugauccug

SEQ ID NO: 4117509 - RNA, 72 nt, Human
uaggagcaccugggacacagcuuguucucgauuuccccucugaacacugacaccugcccucagguccuccua

SEQ ID NO: 4117510 - RNA, 73 nt, Human
uaggagcaucaggagagugucuggaggaagcuaacauccccauguucuuuaucagcaucuccuauuguuuuug

SEQ ID NO: 4117511 - RNA, 63 nt, Human
uaggaggauguaaaauagacaaaauggaacagccacuuuggaaaacaguuuggcauccacuua

SEQ ID NO: 4117512 - RNA, 65 nt, Human
uaggaggauuuugacuuauucagggaggaagggaaggcuucucugaagaaucgaugauucuguug

SEQ ID NO: 4117513 - RNA, 116 nt, Human
uaggaggcauggagagcauauaggauccuaagaugggcugugauccuguuccauuuguaucugugccuaacacaguccugcucacuuauuuccuuauuuucuaaccaacccuccua

SEQ ID NO: 4117514 - RNA, 69 nt, Human
uaggagggcccugaaaauggcagagaccucaauucuccccucccucccugccccuuuaugggcucccua

SEQ ID NO: 4117515 - RNA, 87 nt, Human
uaggaguaguucuugaucuuuuuaucaaguuauccauuguuaggaauugcaugggucacuauuugcagagacgugaaauacucgcua

SEQ ID NO: 4117516 - RNA, 87 nt, Human
uaggaguuuccucuauagggaaugggacccacugguggugagcgcuccacccagcuggugggucuuucucugaaaccagagcucuua

SEQ ID NO: 4117517 - RNA, 60 nt, Human
uaggaugacaacaguugugagaacauuccaauauaugcaguucuaacagcuuucauucua

SEQ ID NO: 4117518 - RNA, 67 nt, Human
uaggauggcuguggcaccuuugcuucuccagugccuggagucaccaucuguggcagccugaguccua

SEQ ID NO: 4117519 - RNA, 78 nt, Human
uaggauggugcaaaaguaaucaugguuuuagccauggaaaguaagggcaaaaacugcaguuacuuuugcaccaaccua

SEQ ID NO: 4117520 - RNA, 124 nt, Human
uaggauguuuaaguucauguuggguuucuggaggaagucucucuacaagaaaaaauauuuggaguguuuucuguaggggauaucuuugaagauuaaccuucauucaucacuucaauuuguucug

SEQ ID NO: 4117521 - RNA, 80 nt, Human
uaggauucuguggauuguuagagcucugggcaguuuugcugccuguaaucuuggcucaggcucuggccauccaaggcuug

SEQ ID NO: 4117522 - RNA, 116 nt, Human
uaggcaacucgcaaaaacuugguuuccaaugguuuaaagaguaugacuuugacuuuaagcuugguucaaagucaugaugaaccaccguaaacuguuucuccuucugcgagugcuug

SEQ ID NO: 4117523 - RNA, 59 nt, Human
uaggcaaggcauuuggcucuuggugguuacauuaagucagcuuuaccugucaugaccug

SEQ ID NO: 4117524 - RNA, 69 nt, Human
uaggcaaguugcccaaucucucugagccuuguucuuccaucauuaguaaaaaagagaggguuuugccua

SEQ ID NO: 4117525 - RNA, 64 nt, Human
uaggcacugccacacccaauguuuuugugugacagcaaagaucacacuguggggcagugacuua

SEQ ID NO: 4117526 - RNA, 88 nt, Human
uaggcagaagggccaccuccuucaucagaaggaaggacgauuaugcagaugcagguauauuugcugagaaggagggagauccugccua

SEQ ID NO: 4117527 - RNA, 66 nt, Human
uaggcagcucuccaguugcuuucuuuuucccuacgugcaggggacucuucagcugugagagccuua

SEQ ID NO: 4117528 - RNA, 55 nt, Human
uaggcaggugugcacugcccacuggcgcagggcuguggguaccugcaccugucug

SEQ ID NO: 4117529 - RNA, 74 nt, Human
uaggcauaccauguaguugugagugacagaaagcuuugauaggcuucaguauucaccgcaugcucuuuugccua

SEQ ID NO: 4117530 - RNA, 77 nt, Human
uaggcaugugauuucagguuuuucauacugagaacauugagauuucaguuggaagacacccugaaaucuuaugagua

SEQ ID NO: 4117531 - RNA, 66 nt, Human
uaggcauuaguaacccacacaacaguagauuagucaguaaugauaggugcuaccgugggaugcuua

SEQ ID NO: 4117532 - RNA, 81 nt, Human
uaggccaaagaaguuuccugggaggacuugugggcuucauguccacauaugaagccaucuccuccccuucauaauggcuua

SEQ ID NO: 4117533 - RNA, 85 nt, Human
uaggccaaagcuugggauauauaugacccaucugcauggugcuguacaugugcacauauacucauauuccccauugcugggccua

SEQ ID NO: 4117534 - RNA, 84 nt, Human
uaucagggacaaaauguacuuccuuaucaaacagagaccuaaccaaggacacucauaaggcaagcugucaguuuguccuuuaua

SEQ ID NO: 4117535 - RNA, 95 nt, Human
uaucaguuuggaugaauuuuucuaagcuuuuguauaaaucucaagaaggaaggcaggacauuggaaaaguuuccuauagaccaucccaacuggua

SEQ ID NO: 4117536 - RNA, 88 nt, Human
uaucaucugaguauuugaaacgauuccuaccacauccuaauucuagcaaggagaaaggggaaaaaguguuaggaguauacuugugaug

SEQ ID NO: 4117537 - RNA, 122 nt, Human
uaucaucugcauuagcuguguugucuaaaauuucuacaguacacaugcauuauuuucacaaucagaaagaaauaauauggacucuagaugauuuuuguggggcagugggagagguagaggua

SEQ ID NO: 4117538 - RNA, 59 nt, Human
uaucauguagaugaugguaaaagcaucaagcauaugcuguugcuuuaucagacaugaua

SEQ ID NO: 4117539 - RNA, 67 nt, Human
uaucauucauacaaguuuguuucauuucauggugguauugagaugaaaguagaaugucugaaugaug

SEQ ID NO: 4117540 - RNA, 57 nt, Human
uaucauuguaugggugagacaggauuguucauuaauucaccauuacauacaaagaug

SEQ ID NO: 4117541 - RNA, 56 nt, Human
uauccaaagagauucauguucuugguccauauauuuggaaugaucucuuugaggug

SEQ ID NO: 4117542 - RNA, 60 nt, Human
uauccagugaggaugauaauuaagguggcuuuaccuaaggcaguuauuuucaucuugaua

SEQ ID NO: 4117543 - RNA, 61 nt, Human
uauccauuauguuggcuagucuacaucccugcaggugaaggaugcuuuucagugauggaug

SEQ ID NO: 4117544 - RNA, 58 nt, Human
uaucccgucauaaugaugcuauuaggaauuucuucaugguggcucaccugauuggaua

SEQ ID NO: 4117545 - RNA, 75 nt, Human
uauccuacacaagaaagaaggagguacaagccaaagaucuuucucuuuauaaaucucucuuuauucuuggggaua

SEQ ID NO: 4117546 - RNA, 76 nt, Human
uauccuagugggguuucagucaccagcaaagaaaauccuaauuaguacauuuguauaugagaaauuccacaggaug

SEQ ID NO: 4117547 - RNA, 73 nt, Human
uauccuauaugaauaugaaguagagaaugcucuauagagcugcagauucucuacuucauauucauauaggaua

SEQ ID NO: 4117548 - RNA, 69 nt, Human
uauccucagaguuuaagaugucagaccugggauccagccccaacucugucaauuaugggcugugggaug

SEQ ID NO: 4117549 - RNA, 85 nt, Human
uauccucuguccuaagacagcagguaauuaguuaacauaaggccuuaaagauguaaguaaauuucuguugucuggauacuugaua

SEQ ID NO: 4117550 - RNA, 104 nt, Human
uauccucuucgaggcuuuucuagucuaagaaaucuuuacuuuucauuaggagaguugagguuagcacuuacuuggcuagaguggcagggucuggagugagggua

SEQ ID NO: 4117551 - RNA, 62 nt, Human
uauccuucuuaaagucgcauuuggccuuucacuaggaagggugcaacuaagaagaggugaua

SEQ ID NO: 4117552 - RNA, 66 nt, Human
uauccuucuucuucaauggcacagugcuacucuauguggggcacuguacugugaauaaggaggaua

SEQ ID NO: 4117553 - RNA, 75 nt, Human
uaucgauuuuauguuguuuugagaagcuaaagauguaaggaaauuuagcauaucugcaagauaaugaagaugaua

SEQ ID NO: 4117554 - RNA, 83 nt, Human
uaucgcauaauuaaacaggcaagauuuacuccuuugggcaucuaccagaacauauuuaaauguugucuuugaauugugcugua

SEQ ID NO: 4117555 - RNA, 65 nt, Human
uaucuaacacaaucguaaaugaauagucucugacucagagcagucauuuacagacugugugggug

SEQ ID NO: 4117556 - RNA, 55 nt, Human
uaucuacaggugucagguaagauguuaaauacaugaaccuggaagucaguagaua

SEQ ID NO: 4117557 - RNA, 93 nt, Human
uaucuaccaggguauacuuuguaagaucuucugauuccuauaagauauuuugcugauaauagaaaucuuaucaagaaaugcccuuuggagaua

SEQ ID NO: 4117558 - RNA, 77 nt, Human
uaucuaggaagauauagauggugguauaaauaaggacaaaucauuguuauauaucuguauuuauaucaagauagaua

SEQ ID NO: 4117559 - RNA, 66 nt, Human
uaucuauggcuucaccucagcaugaaggcaaaugaguuuccuuuagcuugagugaguuuggagaua

SEQ ID NO: 4117560 - RNA, 57 nt, Human
uaucucaucauguuuagauccucagucuugauucugagcauuuaugcuaaugggaua

SEQ ID NO: 4117561 - RNA, 74 nt, Human
uaucucaugcuguuugugccucaaauccucuucugagucaaacaugaagacaaacuggguagaaauuguagaua

SEQ ID NO: 4117562 - RNA, 60 nt, Human
uaucucugugggauguaggccucugcgcccggagguggcucccugugucccacguagaug

SEQ ID NO: 4117563 - RNA, 58 nt, Human
uaucugcuuuccuacuuaucuuggugaauaaaauaaagccaggaaagaaaggcaggug

SEQ ID NO: 4117564 - RNA, 68 nt, Human
uaucugucuugccuugcauauuuucuugaaaagaaacaaauagacaaaaauguaggucagggcauaua

SEQ ID NO: 4117565 - RNA, 102 nt, Human
uaucuuaauuuggcuucaccaugcuugauuuguaauguguucugagacccaagagaagcucugacauugcaauuagguaccuaugaacguuauauuaggaua

SEQ ID NO: 4117566 - RNA, 63 nt, Human
uaucuuauuuggggaggucucuguagaauuuucuacugaugacaccuuugccagaucaagaug

SEQ ID NO: 4117567 - RNA, 116 nt, Human
uaucuucaaaaccuaaaauauagggccuugaucauaacaggcgcucaauaaauguauguagaaugaaugagugccuuuuguaugcaggccauguauaguauuagguucuggggaua

SEQ ID NO: 4117568 - RNA, 70 nt, Human
uaucuucagcaguucacacuuaacaagugcucugugcauaguaggugcuuagugaaugcuauugaagaua

SEQ ID NO: 4117569 - RNA, 94 nt, Human
uaucuugaucucaguguguaguaaauuguagguuuuugauaaguuagauaauccugagucaauucuucucuaucuacugugauuaaaugagaua

SEQ ID NO: 4117570 - RNA, 70 nt, Human
uaucuuggcuauucuaauaggugugggcugaaguuagagaccagauagggaugagagugcuaccgagaug

SEQ ID NO: 4117571 - RNA, 58 nt, Human
uaucuugucucucggucuggacuaaauguuaucuuucagagacaugagacacaggaug

SEQ ID NO: 4117572 - RNA, 73 nt, Human
uaucuuugaaugugaccuuauuuagaaauagucuucacaaauuuaauaagguuaagaugaggucauuaagaua

SEQ ID NO: 4117573 - RNA, 60 nt, Human
uaucuuuggacggucccaacugacaauguuaaauuuguaagacacccgacuccagagaug

SEQ ID NO: 4117574 - RNA, 61 nt, Human
uaucuuuuagaguacugagugaagcaauggccugcauuccuucagcaguccucuagagaua

SEQ ID NO: 4117575 - RNA, 78 nt, Human
uaucuuuucccuauaguuccaggcauguuauugaauugaguaacaguuugccugaaauguauuaaccugggauggaua

SEQ ID NO: 4117576 - RNA, 66 nt, Human
uaugaaagcaguuuuucaaaauuacaugaucuacugguuccuaaauuugaaggacuuuaguucaua

SEQ ID NO: 4117577 - RNA, 71 nt, Human
uaugaaagggcuuuggauaaaaaucccauuugaauaugucgcuguuauugauaucuaaugcucuguccaug

SEQ ID NO: 4117578 - RNA, 84 nt, Human
uaugaaauaugcagagaaaguguagacaggcucccagcugguuuugcuauucuacauucucucuucuuuagcauacuuuucaug

SEQ ID NO: 4117579 - RNA, 81 nt, Human
uaugaagacucugaccauucccuugauuuuuugaaucacuguaaaaccauucacaaagaagaaaauggcagaguuuuugua

SEQ ID NO: 4117580 - RNA, 95 nt, Human
uaugaaggguuauuguugaauuauuuugaauaaaaaaguaguuucacuugaagcuagauaacuuuuauauuuaacguguuauauaaacccucgua

SEQ ID NO: 4117581 - RNA, 70 nt, Human
uaugaagucauugcugugggcauuugcugccugaccagagcacaaguccuccgacagcacguucuuggug

SEQ ID NO: 4117582 - RNA, 81 nt, Human
uaugaauacuuuuuggagaaugucucuguugcuggucucaggcccagggcaguuuuacuucucucuuaggauugguucgua

SEQ ID NO: 4117583 - RNA, 62 nt, Human
uaugaauaugcuuauacauaauguacaggucaucuuguaugcuuguguauaauauaauuaug

SEQ ID NO: 4117584 - RNA, 77 nt, Human
uaugaccaccuuauaugauggguacuauuaacauccccauuuugcaaauggagcaccugugugguagggaggucaug

SEQ ID NO: 4117585 - RNA, 88 nt, Human
uaugacuucuaagauacagggaaugggacauaaaucccagagcccaccaagguagggaguccacaugccuguaucccaaagaauuaua

SEQ ID NO: 4117586 - RNA, 70 nt, Human
uaugaguuaguacaagaaagaugaacugaggucggcucacauccguuugcauuucuugaacuauaucaua

SEQ ID NO: 4117587 - RNA, 84 nt, Human
uaugauaaagaugcccacauugcagguaaugauaauuccaaguguucgcaauucaucaccugccuacuggacauuuucagcaua

SEQ ID NO: 4117588 - RNA, 79 nt, Human
uaugauauuuuuuucuacuuuucuguaggugcauugcgaaaagaaaaugcugccuuucugaaugguggagaaguacaua

SEQ ID NO: 4117589 - RNA, 60 nt, Human
uaugauggacuaaaagggaaaccagaagccuauuucuuaagcccaacuggauccaucaua

SEQ ID NO: 4117590 - RNA, 71 nt, Human
uaugaugucgcagcugaaaaucucaaugaacaaaaaagccauuaaagaaacccagcaugugacugauuaua

SEQ ID NO: 4117591 - RNA, 64 nt, Human
uaugauuguucucugggccuugcaagugcucagagcuaacuuugccuccuagagcacguucaua

SEQ ID NO: 4117592 - RNA, 60 nt, Human
uaugauuucuaaguuuuaccacaaauauuucucaguauaguggaaacuuagagcauugug

SEQ ID NO: 4117593 - RNA, 76 nt, Human
uaugcaaauugucuuuaaucaggucauguuagacaaacuuaaaaagaugugacucuacuuaagauuaagcugcgua

SEQ ID NO: 4117594 - RNA, 129 nt, Human
uaugcaagauuuucuaaauccccugguguaugguucuaggcuuugucuuuuguucuccauauccuuacuugucauauaaaugcaaagcuuggcgcuuacuuacccaggcuaccugaaauugcugauaua

SEQ ID NO: 4117595 - RNA, 59 nt, Human
uaugcacuggagauccuggggagacugaagaggccauucccacagucucacaaugcaua

SEQ ID NO: 4117596 - RNA, 74 nt, Human
uaugcauauauuuucccaucuuaaaguuuauugauaaaaaaugucuucucaaggauucggggaaguacugcgua

SEQ ID NO: 4117597 - RNA, 62 nt, Human
uaugcauuaugccugugccugagggacccguaaugagggaaauuguguaggucuaaugcaua

SEQ ID NO: 4117598 - RNA, 72 nt, Human
uaugccagagcugugggagcacaugacagauaacacacugucccuguuuguccccaucccucagcaggcaug

SEQ ID NO: 4117599 - RNA, 129 nt, Human
uaugccuggcuaauuuuuguauuuuuaguagagaugggguuucaccacguuggccaggcuaaucuugaacuccugaccacaggcgauccacccgccucagccucccaaagugcggggauuacaggcaug

SEQ ID NO: 4117600 - RNA, 64 nt, Human
uaugcuggacaggcuggggacugcaaacuauaauguggauuaaggugaaggcuugucaaggaug

SEQ ID NO: 4117601 - RNA, 67 nt, Human
uaugcuucacuguuugguucacagcaguuauuuccuguuaacagccagauuuggugauuuaagcaua

SEQ ID NO: 4117602 - RNA, 84 nt, Human
uaugcuugacauucaacuuugaugauuaugucagugacuuucagguuucuaucuaaugauucaucaaguuguauuucaacugug

SEQ ID NO: 4117603 - RNA, 91 nt, Human
guuccugucggaagggcgggccugcucauccuggcgagaauuugcuuuucugcuuuauaggggauugcaggccaggcccacugacaggagc

SEQ ID NO: 4117604 - RNA, 66 nt, Human
guuccuguucuuguugacugggggaaggaaugagaccccuugucccucagagggcaagcgcagagc

SEQ ID NO: 4117605 - RNA, 55 nt, Human
guuccuguugauuucccaggaggcccuuucuucuucugcugaagucacugggagc

SEQ ID NO: 4117606 - RNA, 68 nt, Human
guuccuuagaguugauaugguaacuuuuaaugagaauuggauucuuuuaccauauagacugaaggaau

SEQ ID NO: 4117607 - RNA, 61 nt, Human
guuccuuagcugucccuggaaauagauuuaaucucaucuacuuucacaugagcaaagggau

SEQ ID NO: 4117608 - RNA, 83 nt, Human
guuccuucugagggcccuaccucccugcugggccagccuuaugcccagcauccucagggagcggggcugucaccauagggagc

SEQ ID NO: 4117609 - RNA, 65 nt, Human
guuccuuguaauuuguuaaggaagcccuaggaaacuaacacaucuaacaacaagaugcgaggaac

SEQ ID NO: 4117610 - RNA, 78 nt, Human
guuccuuucaucagauuuacugcagagcagauucaucaacaugaaguucaauucccaguagacuaaugaaaagagggc

SEQ ID NO: 4117611 - RNA, 59 nt, Human
guuccuuuccuauuuggauaagggagcaaguugguuauccaguaaaauggcagagggac

SEQ ID NO: 4117612 - RNA, 129 nt, Human
guuccuuuuuuuuugcugaaacauaguggauucuucuacucugcaguggaaagacucagacuucacagaugaggaccuguguuuuccuugaaugaggaaccaacuaguuuagccagcaacugaagguau

SEQ ID NO: 4117613 - RNA, 88 nt, Human
guucgcgucucugacugcugucccaucccugcucccagagaagugccuggcauguagcagggcugcagugugucuuuguggauggaac

SEQ ID NO: 4117614 - RNA, 88 nt, Human
guucgggcccaucuccccucccuggaccagugcugcagagggcugcauccuguccaucuggcuccugggagggguggaaccacugaac

SEQ ID NO: 4117615 - RNA, 89 nt, Human
guucgugguccuagcucuguucuccucuaccuucagaucauauucauauuaugauuuugucagugagaacagaguugcgauccaugggu

SEQ ID NO: 4117616 - RNA, 97 nt, Human
guucguggugcuugcaagccggaaugcaacagcugggaauauguauauuauuacugcaauguuaaccccugcugugcgguaugggaauaccaaaagc

SEQ ID NO: 4117617 - RNA, 129 nt, Human
guucuaaaguugcaucauuuuuggguuauggcauuaccuuccuccuguuuugguuuguaucuuuggggauaagggucaggguggaauggaaugcuggccaauccuuaaugagaagcccaacucuagagc

SEQ ID NO: 4117618 - RNA, 117 nt, Human
guucuaacccaaauagacauaaagaauaacacuuauagauaauaauaggauguacaauagaauugugaacaucuguuuacuccugauauauuuuugagggcuguaaggaaagagaac

SEQ ID NO: 4117619 - RNA, 81 nt, Human
guucuaagaucagcaguuauauugaaauaaaaaugauuacucuuuuauuauagcaaguguaacugauugguugccaaagac

SEQ ID NO: 4117620 - RNA, 63 nt, Human
guucuaaguguugacaaagucuagcugugaucauacuucugaugauugggagacauuugggau

SEQ ID NO: 4117621 - RNA, 71 nt, Human
guucuacucuugauagcauuuaccuuuuuggggagucucccaggcuccaaaggauaaaagcagaguagaau

SEQ ID NO: 4117622 - RNA, 102 nt, Human
guucuacuguugaaggaaggcaaagguauccucugauuaaaauugagcuauugggcucuguaaugaugaacucagagggaaccagcccauucaguguaagac

SEQ ID NO: 4117623 - RNA, 97 nt, Human
guucuacuuuucuacauaagcucugggaguaguuccaccuggauuccaaugggccucuuucccugggggaaacuuagaaaaggaaaguuaaugggac

SEQ ID NO: 4117624 - RNA, 76 nt, Human
guucuauggucuuuaguugaaacaugugguagugacugcgauacugcuauaagaggacagaugaagauuacagagc

SEQ ID NO: 4117625 - RNA, 69 nt, Human
guucuauuguaauaagcgggugaagaguggggcuuauuuguuuuagcagcugguguuaccauagcagac

SEQ ID NO: 4117626 - RNA, 67 nt, Human
guucucacucuucauguauagaaaguuaacaauuuuucucagagcacggggagugaaugguuagaac

SEQ ID NO: 4117627 - RNA, 69 nt, Human
guucucauugcacaggaagcuggucauuuagacugcagucuucauuugugugccugaugcaauaagaac

SEQ ID NO: 4117628 - RNA, 88 nt, Human
guucuccaaugcugcacugcaaaguaauauggucccagugauguauccuaauaacugaacagccuaauucuuuugcagauuggagggc

SEQ ID NO: 4117629 - RNA, 62 nt, Human
guucuccauuuaacuuccuuaugcagcuaccagcucaucgcauuaaggaaaagaugcaggau

SEQ ID NO: 4117630 - RNA, 66 nt, Human
guucuccucccuuggcccagccucucuguaaggaagucagacucugugcucagagggagggagagc

SEQ ID NO: 4117631 - RNA, 84 nt, Human
guucuccucugccucgcuuacuuccuaccacucucuccucacccagaagaguguaugaacuuaagagagagcucuucucagaac

SEQ ID NO: 4117632 - RNA, 128 nt, Human
guucuccucuuuguguggguaccugugagcaugguggcugaagugggcaggagggaggccguucugugucucuuccuccuuauuucaugugaugcugcuccagaggccuggcuugaaaagagcaggac

SEQ ID NO: 4117633 - RNA, 84 nt, Human
guucucguggaggccuggaucuuggguaaggccuggguucuuguagaggucuggguuuugggcaagguccagauuccugggaac

SEQ ID NO: 4117634 - RNA, 58 nt, Human
guucucuaaaagaaacuuucaagacuuauauauaucuugaaaguguuuuaaagaggau

SEQ ID NO: 4117635 - RNA, 67 nt, Human
guucucuaucuaacacucucugccaugacucuccaacuuuggcaggcaccaggaucaguuagagaac

SEQ ID NO: 4117636 - RNA, 58 nt, Human
guucucucugcuuccaagauggugcccuuccugccccaucuucacauagcagaaggac

SEQ ID NO: 4117637 - RNA, 57 nt, Human
guucucugccacuuaccagcuacagagcccugacugccugcggagugugcagaguac

SEQ ID NO: 4117638 - RNA, 71 nt, Human
guucucuuucaaguuaccuuuaaacagcuuccuauuuuugaagcuugauuuuaaggcuuguuagauugaac

SEQ ID NO: 4117639 - RNA, 80 nt, Human
guucugccacuggacaucucuucccaacuccacauucugugacaucaaguuguguagccugaaguuggccaugguaggac

SEQ ID NO: 4117640 - RNA, 76 nt, Human
guucugccaggcaggugcagauuccucuugacuuuuguuaugaaaaccaucgucaccuugccuggcuuaccagagc

SEQ ID NO: 4117641 - RNA, 107 nt, Human
guucugcccaggcuuaacuuccuguaaauggaacuauguaguauauaggcacaaaaggguaaauacugccaaauuccauuuauaggaaguucgaacacuggcagaac

SEQ ID NO: 4117642 - RNA, 80 nt, Human
guucugcucccugccugcuguagcggcuucacuuuugugaugugaugagcuagcaaauagcauguaggaagguacugaac

SEQ ID NO: 4117643 - RNA, 63 nt, Human
guucuggaaagcaagaaagagugcuauuaauucauugcacuaauuuugaggacuuuccagagc

SEQ ID NO: 4117644 - RNA, 77 nt, Human
guucuggagcauuucuuccccaugggguaagucagaauuuucuaggcaaaccacaggggaggaaugaugcccgggac

SEQ ID NO: 4117645 - RNA, 56 nt, Human
guucuggcaccuuugcccccuggucaaugaguaccaggguggcucugggucagaac

SEQ ID NO: 4117646 - RNA, 107 nt, Human
guucuguaacaaauacccacuauguucucggcacuauggaugccuacuaugugcuugguaccauguuaguuacugggaauguuguaaugaauauauuugaagugaac

SEQ ID NO: 4117647 - RNA, 126 nt, Human
guucuguaaugauuaggguuuuaucuggacugucuggguggaugggcuaagcuggaggggcauuuuggaauacuccuccaguggcccaguccuucaacagcccuggcccauauuucuuugcagagc

SEQ ID NO: 4117648 - RNA, 59 nt, Human
guucuguacuccaagcucuuccacaaccacauguguaggcugcuuacugguaucagagc

SEQ ID NO: 4117649 - RNA, 67 nt, Human
guucuguagucauagagcaauucauacugagucaaaaugcucagcuucuguuccacaugaucagaac

SEQ ID NO: 4117650 - RNA, 63 nt, Human
guucuguaucuugauuguggugcuaguuacaugacuguacacauucgucaagacucacagaac

SEQ ID NO: 4117651 - RNA, 59 nt, Human
guucugucauuuucuuccaauauaagguuucacuaugauuggcaugagaauggcuuagc

SEQ ID NO: 4117652 - RNA, 64 nt, Human
guucugugugaauagugaggucuauugguuguaaguucgguguacacuuccuucacacgguuac

SEQ ID NO: 4117653 - RNA, 86 nt, Human
guucuguguguuucaaucucacauccucaguagugcaagcccuguucuauuuaugguguuugugagugagguuaacacuuguaugc

SEQ ID NO: 4117654 - RNA, 103 nt, Human
guucuguguguuuguuuugggucucuugauauauuacauagaguuccgauuauuaaacuccauuuauccaaggagauguuuccaaagcuaaaacucaaugaac

SEQ ID NO: 4117655 - RNA, 57 nt, Human
guucuuaauaucucucuuccuuucuugguggcaaagaggcugcaggguauugagaau

SEQ ID NO: 4117656 - RNA, 83 nt, Human
guucuuaauggcuuauauauuuucacuugccuuggccacauucucuggcauugguacaugauguauguaaugucuguaagaau

SEQ ID NO: 4117657 - RNA, 62 nt, Human
guucuuaggguauuauguguguggguauaaucauaccuuuucaucugaaacuuuuagagaac

SEQ ID NO: 4117658 - RNA, 56 nt, Human
guucuucagauuccauuucagugccuuuccaacacugaggaguaguucuggaggac

SEQ ID NO: 4117659 - RNA, 65 nt, Human
guucuucagcccauaucuuccaguggccccacugcccuucccacuggccugccugggcugagagc

SEQ ID NO: 4117660 - RNA, 57 nt, Human
guucuucaucuuaaccaucuguugcaggcugacagauggguugauauaugacagaau

SEQ ID NO: 4117661 - RNA, 78 nt, Human
guucuucucugacaugccuaagacuuuucucuguuauugacaaauaucaaggugguaggcuauaucaguaagaggaac

SEQ ID NO: 4117662 - RNA, 77 nt, Human
guucuugagcccccaaauuuuaaucauugucucuuugguugcuacuauggcaacuuacaauguuagagucucaauac

SEQ ID NO: 4117663 - RNA, 62 nt, Human
guucuugaguaucugcacagugcccagcagagugccuggcauacaguaggugcucaaugaau

SEQ ID NO: 4117664 - RNA, 68 nt, Human
guucuugguggcuucugaggauggcgaagggcucaccuucugucaucccgaaccaucacugaugggac

SEQ ID NO: 4117665 - RNA, 71 nt, Human
guugaaacauucuacaguuaaccauuagcaugcuaguuguccuaauggaaauuuuugaagaguuuuucaau

SEQ ID NO: 4117666 - RNA, 67 nt, Human
guugaaagcauagaauuagaguuaggcugcuuggguuugaaaccuaguuauaugacuaacuuuuagc

SEQ ID NO: 4117667 - RNA, 87 nt, Human
guugaacaugauucugaaagcaauggcacaugaugguaccuuuagauuucugaauaugauuugucauuguuuaaaaaguguuucaac

SEQ ID NO: 4117668 - RNA, 93 nt, Human
guugaacugacagucuugccaaguuucuuacaugacaguacugauuaagaaagaauggaauucagaaacuugggauaagauacccaguuggac

SEQ ID NO: 4117669 - RNA, 77 nt, Human
guugaaggaacugggcucauaaugucauagaaggcaauuauuuucacauuuuguucaaggcuaguucccaaaucaau

SEQ ID NO: 4117670 - RNA, 60 nt, Human
guugaaggcucuaggauccauccuuauuucacaaugagaaccaagaccaagggccucaau

SEQ ID NO: 4117671 - RNA, 129 nt, Human
uaugcuuuauuuuaucuuaauuuuuacguagcuuguugagggucaaauuggaagguggauauccuagucacagaauauguggcuguaccaguuuucuauuuuagccuggauagucuaauugagauuaua

SEQ ID NO: 4117672 - RNA, 101 nt, Human
uaugcuuuccuuugggagcaugaauuuucccaaagcccaccggcauccucuccuaauuccuugcuggucaaaaugaauuuuugcucccaaaggaaagcgua

SEQ ID NO: 4117673 - RNA, 97 nt, Human
uauggaaauguguagaaguaaaauguuuccuuuauuacuuaaaaacauuuagacuauaaggugauagauuacaauauuguacucugauuaguccaug

SEQ ID NO: 4117674 - RNA, 55 nt, Human
uauggaugacuccagaugacuguagccccaacuaacaucugccuguuaucacaua

SEQ ID NO: 4117675 - RNA, 58 nt, Human
uauggcaguuuauauucuagugcuguuccacggagcagggccaacaguaaacaccaug

SEQ ID NO: 4117676 - RNA, 59 nt, Human
uauggcuuuuaacugucguaugcaaggaauucccuuaucugacaguaggcagagccaug

SEQ ID NO: 4117677 - RNA, 62 nt, Human
uauggguaggccugccgccugucucgcucuaucugcuaccugggaguggcuuccugcucaua

SEQ ID NO: 4117678 - RNA, 56 nt, Human
uauggugauggcacagaccagcaauucuggacacuucuggagucaucuuuaccaua

SEQ ID NO: 4117679 - RNA, 106 nt, Human
uauggugguuaagaacuuaggcuuuguaguuaggcuauaggaauuucaauuuugacuucacaagucauuagcugcauaaccuuagguaaguuacuuaacuacuaua

SEQ ID NO: 4117680 - RNA, 81 nt, Human
uaugguuguaacuuggauacuuguguuagguuacuuggccuuuaauauaaaguaauuucucauggauucaguuauaccaua

SEQ ID NO: 4117681 - RNA, 63 nt, Human
uaugguuuguuauaguugugagugcuucuaauguacucacaucaacauuauagcaugacugua

SEQ ID NO: 4117682 - RNA, 61 nt, Human
uauguaauggagauucaauccucauggaaauuugguaggagauauggucuccgagugcaua

SEQ ID NO: 4117683 - RNA, 59 nt, Human
uauguacauguuaaagggcaaaagcacauccaacguuuggcugccuugagauguauaua

SEQ ID NO: 4117684 - RNA, 77 nt, Human
uauguagcaauagcaucauacugggccccacaggagcagccugacaguaugauuuggcuauuauuccuggcugcaug

SEQ ID NO: 4117685 - RNA, 129 nt, Human
uauguagugacuguaaagcuaaccaucagauuucaaguguagauuauggagugucuuauuauguggaaauaggcuucugugagcucauacaaguaugugugaugguuagguucacuaugaaauaccuua

SEQ ID NO: 4117686 - RNA, 72 nt, Human
uauguaguuagaagauucaaacagauuucucuagaaaaagcaguaggguuauggaaacuucuagcuuacgua

SEQ ID NO: 4117687 - RNA, 57 nt, Human
uaugucugucacugagggcuuuaugaagacauccagccucagccgguggcagaagug

SEQ ID NO: 4117688 - RNA, 74 nt, Human
uaugugaauguuaaaaucagacauuguucccuuuucuuuacaacaacaagucuuugguuuuggcuauauacaug

SEQ ID NO: 4117689 - RNA, 74 nt, Human
uaugugacaaaaguaaacugcaugacuucugaugcuaugucauaagaaccccguaguucuacuucagucucaug

SEQ ID NO: 4117690 - RNA, 57 nt, Human
uaugugauuaguccuuacaugcagccaaucauuuugcucguaagugauuaucucaua

SEQ ID NO: 4117691 - RNA, 57 nt, Human
uaugugcacauuagagagauggccccucacuucacaggccauaaaaucugguauaua

SEQ ID NO: 4117692 - RNA, 112 nt, Human
uauguggcuccgugggcuaggagaagaaucugaaggcaccucuggucagucacugcccaucugaaagacccagagaacugugccuugagggccuuagaucaucagucacaug

SEQ ID NO: 4117693 - RNA, 61 nt, Human
uaugugguguaggucucagaggaguguacgaugagcuccuagaagcaccacucaucacgug

SEQ ID NO: 4117694 - RNA, 66 nt, Human
uauguguaagcuguuuaucuuuuuccucuuauuauacuuuggccaagguggaaaaagcuuaccaug

SEQ ID NO: 4117695 - RNA, 78 nt, Human
uauguguaagugagauuuggaaaauuugauaugccagcaaggacaaagaaguguugaauuugcaaguuuaugcacaua

SEQ ID NO: 4117696 - RNA, 65 nt, Human
uauguguagcucauauuaguguuacugaggacaugcccacugacagaaaaauguagcuccaugua

SEQ ID NO: 4117697 - RNA, 83 nt, Human
uaugugucauuuuucugugcauaagcaagaauaugcauagccaugcauacacccacaccuguguacacgagagguuauauaua

SEQ ID NO: 4117698 - RNA, 62 nt, Human
uauguguuguauaugugcagagguguuauuugucuucuucuguuccauauuuccagcacaug

SEQ ID NO: 4117699 - RNA, 85 nt, Human
uauguugaugaucauguugacuucagugccaugaauaauaaaauauuucucucuuagccugaaguuucaugccucuaucagcaua

SEQ ID NO: 4117700 - RNA, 98 nt, Human
uauguuggauguggaagugggauagagauaacauuguggcuuuuggaaaguucaaacucuauuucuguuggcuuaauuucauuaucauuucuuucaug

SEQ ID NO: 4117701 - RNA, 58 nt, Human
uauguugugaucauuaucuugaugacaaacauuucgucccaagauuuguucacacaug

SEQ ID NO: 4117702 - RNA, 105 nt, Human
uauguuguugccagauauuuuaggaaggccuugaaugccagucugagugucaacaguuuugguauuucaagcagggccacuauuccauaugcucaaagcaacaua

SEQ ID NO: 4117703 - RNA, 80 nt, Human
uauguuuguuuuauacuggcuaguguuuuuuaauggaaaaauaguguuuugauugacauuagacuaauguagcauuuaug

SEQ ID NO: 4117704 - RNA, 84 nt, Human
uauguuuucaugcuuugcauucaucuucuuuuaaaucauuaagagguagggaagaaggcaugaaauuacuaucauaaauacaug

SEQ ID NO: 4117705 - RNA, 57 nt, Human
uauguuuuccucuggcacuuauggagcuuauaaaccagugacagaggaaggugcaua

SEQ ID NO: 4117706 - RNA, 98 nt, Human
uauuaaaaggcauauaaaguacuugaugcuacagaguaucuagaaauaugcguugugcuuauucauuugugacaauagguauuuuggcauuuuuaaua

SEQ ID NO: 4117707 - RNA, 83 nt, Human
uauuaaacauuuuauucucaucucccuacuuagauucuaagcuucuauuuugaauggucagauguggaguacugaguuuagua

SEQ ID NO: 4117708 - RNA, 62 nt, Human
uauuaaaccauccagagacucuuccaggccauagaucugaaacugucauggguaguuuagua

SEQ ID NO: 4117709 - RNA, 104 nt, Human
uauuaaauuauuuaguuugcaugccuguuugaaauuggaccucucagcagcacuuugaaauaguuuuaauuagguuaacauuuuguacauuaaauaaguagaua

SEQ ID NO: 4117710 - RNA, 55 nt, Human
uauuaacacguauaaaguguuuagcagagugcuugacacaugugcguguucagua

SEQ ID NO: 4117711 - RNA, 114 nt, Human
ucaaugcacacaggacuuggugaccuauaauccuugacagagggcagaugugauguaauauccauauucacuuugucuuuuuccucaaggauauuaccaaaucauuguguauga

SEQ ID NO: 4117712 - RNA, 57 nt, Human
ucaaugcauaaugguuugugacaaauuuuagcauuuugcucuuaccauuauguguga

SEQ ID NO: 4117713 - RNA, 62 nt, Human
ucaaugcauaggagguggcagaguguuuccagaccaagaccugucaccugauuaugauuuga

SEQ ID NO: 4117714 - RNA, 62 nt, Human
ucaaugucaauaucuugguuguacuauauuguacuauaguuuuucaagauguugccacuugg

SEQ ID NO: 4117715 - RNA, 68 nt, Human
ucaaugucauugacuuuccagaagcaaccuauaccucggguuugcucuugauacaucaagaacuuuga

SEQ ID NO: 4117716 - RNA, 57 nt, Human
ucaaugugcuuuagguuuguuuacaaccuguugugaaucuaucuaaagguauuauga

SEQ ID NO: 4117717 - RNA, 128 nt, Human
ucaauucacucugguggauugaacacaaguauucagcacaucuuuguacagcugcucgugauaagguagcuuaguccuaguguacuaaauaucuguugaauuuuaauccuuaugaacagagaaauugg

SEQ ID NO: 4117718 - RNA, 74 nt, Human
ucaauuggcccaauagagaaauagugaaauucagcagacacuguuauuuucugacucuauugagguaucauuga

SEQ ID NO: 4117719 - RNA, 57 nt, Human
ucaauugugaacaagccccuuauucaaaauuugagcaggaguugagugcacaguugg

SEQ ID NO: 4117720 - RNA, 77 nt, Human
ucaauuguucucucuucauccauuucaguguaucacuauuuguggcagaugaauaaacuaugaggaggaauaguuga

SEQ ID NO: 4117721 - RNA, 74 nt, Human
ucaauuugaucccauuuccuguuuugucaagggggaaagccgccuugcaggauuuuagagaugacaugaaauga

SEQ ID NO: 4117722 - RNA, 67 nt, Human
ucaauuuggugaugaaaauuugauuugugguuuccucucacagggcucuucaucacacaguaauuga

SEQ ID NO: 4117723 - RNA, 72 nt, Human
ucaauuuguuuaucauuauuauuagcaaccuuugcacuuauuuuggucuagcaaugaugaugagcuauuaga

SEQ ID NO: 4117724 - RNA, 107 nt, Human
ucaauuuuuguuuggaguuccguuagauauuccuguauccuuucauaaaugacuaauaggaaagauacaagacuaauaggaaacacaacuuuaugcaacuucauuga

SEQ ID NO: 4117725 - RNA, 70 nt, Human
ucacaaaaacaggcacuuuacaaugugugacauagacuaugauagacaauaaaagugaccagguuuguga

SEQ ID NO: 4117726 - RNA, 79 nt, Human
ucacaaaaugauuuauuacuuacauuagcaaacaagguuucucuaagcccugacacuugguggaaguauugcuuugugg

SEQ ID NO: 4117727 - RNA, 57 nt, Human
ucacaaaggagaaugucagcauaauagcugcuguuugauugaugaauccuguuguga

SEQ ID NO: 4117728 - RNA, 56 nt, Human
ucacaaagugaagugugucauggguaaaaaguccagacaucauaaugacuuuguga

SEQ ID NO: 4117729 - RNA, 64 nt, Human
ucacaaaucgaagccuuauaauugacuucaaaauuuuuguuaagccauaugaggcaguuuguga

SEQ ID NO: 4117730 - RNA, 126 nt, Human
ucacaaguacuuagccgauucuuaguugagauacguuaaagaugcagcuuuagagaagauuuccaggccucuggcccuauucuagacugcuucuuucucacugaguguucaaugcauugacuguga

SEQ ID NO: 4117731 - RNA, 70 nt, Human
ucacaaugaacaagaaagacuuugagcuguccuuccacacggcucuggaguucccuugaucugacgguga

SEQ ID NO: 4117732 - RNA, 86 nt, Human
ucacaaugccagugcuugugucugagcagaaacuuguuuccagucucuguugcugcuuaauagugcacugguuuccuuuaauguga

SEQ ID NO: 4117733 - RNA, 67 nt, Human
ucacaauggcagcagcuuuagcuguggcuguuacaauuuaaagccagaagugauugcuccguugaga

SEQ ID NO: 4117734 - RNA, 57 nt, Human
ucacaaugucugguaggccacuuuggguucuagagguagcauauuccagacuuguga

SEQ ID NO: 4117735 - RNA, 114 nt, Human
ucacacagggaaccugcuagaaaugcaguuuccuggucccugcugcacugcagacaucuuuaaugaccuaggagggaccuaggaauauugcguuuucagcaggcccccugguga

SEQ ID NO: 4117736 - RNA, 74 nt, Human
ucacacauuuuuggguugaugucugauauuuugcaucacaaaugucaauuggcuacaaauaauguaauuuguga

SEQ ID NO: 4117737 - RNA, 82 nt, Human
ucacaccccucucccccgacacccaacauaacaccuauaguccaugcuguucaaggcuguggugcugaaggagggggugugg

SEQ ID NO: 4117738 - RNA, 67 nt, Human
ucacagaaggcaucacagaagacaugauuaacaagaucuugaguuagaaagguggguuuucuuguga

SEQ ID NO: 4117739 - RNA, 56 nt, Human
ucacagaagggaaagaugccaaaaguccgcaucuuuguggcaucauugaucuguga

SEQ ID NO: 4117740 - RNA, 72 nt, Human
ucacagaccagaggcauguucaaagcaauuucagagaugaaaauggcauggaguuuuugggagguccuguga

SEQ ID NO: 4117741 - RNA, 64 nt, Human
ucacagcauuuuuagaaagauuaaaugguuuaauuguuaugccuuccuuuuagggauguuguga

SEQ ID NO: 4117742 - RNA, 76 nt, Human
ucacagggcagucaguuuuaccaaucucagugaaguggcacaucacugauaggugaacuaaaauugauucuuguga

SEQ ID NO: 4117743 - RNA, 55 nt, Human
ucacaguaucacacaaggauuaaccuuacccuggauuuccauuguucuacuguga

SEQ ID NO: 4117744 - RNA, 119 nt, Human
ucacaguggucucuuuuuaggaaaugcauauuagcaugccaagcuuuuagaauuccaagaaacacauuuuaggagauauaaaucuagaauguuuuuugaaagggcgaaauucauuguga

SEQ ID NO: 4117745 - RNA, 86 nt, Human
ucacagugugacaugauggcgucauguaacaaggcuaagaaucgguugcaugacaauugccgucaaguuucguggaggugcuguga

SEQ ID NO: 4117746 - RNA, 60 nt, Human
ucacaguguggcaacucacagaagaagaaaauucauguagggugcucuggcacauucuga

SEQ ID NO: 4117747 - RNA, 80 nt, Human
ucacaucacugaaaggagggcucacaaaaguggucugcaggcagugcuuacuccaagcccgcuuuuuacacugaaaauga

SEQ ID NO: 4117748 - RNA, 74 nt, Human
ucacaucuuucuuugcacacucaggguaauaaucuaaaugcugaguauucucugaagucaauggaaaucuguga

SEQ ID NO: 4117749 - RNA, 57 nt, Human
ucacaugaggcauccccgggcagccccucaccuggcuccaggggccagcucguguga

SEQ ID NO: 4117750 - RNA, 76 nt, Human
ucacaugcuugauaaaaugaugaaaucacugaccagcaggauccgucaguggagucagcauuuuaucacaauguga

SEQ ID NO: 4117751 - RNA, 81 nt, Human
ucacauggacagugcccuaugaacagcucucuguugaccaacaaaaagaugcuucguuuauagauggcauuuucaaggugg

SEQ ID NO: 4117752 - RNA, 76 nt, Human
ucacauggacuucacagagggccacuugaauguuuucacaaugugaaaagauaaacaacagccuucuccaggguga

SEQ ID NO: 4117753 - RNA, 61 nt, Human
ucacauggcuaaagcaagucuagauucaauggauagagaaauaagcuuugccuugauguga

SEQ ID NO: 4117754 - RNA, 121 nt, Human
ucacauggucaagccugacaucacuggagcaaaggggcacagcaagaagggaaaugaaauauuugguccaccagucauagacucuaucaugcuguguuuucagucuugggagaugaugaga

SEQ ID NO: 4117755 - RNA, 65 nt, Human
ucacauucacaggaggaaccuggccuggacgucauaaccaccagacucaggcuccuguagguuga

SEQ ID NO: 4117756 - RNA, 77 nt, Human
ucacauucuggcuggagugcaggugagugaucagcaaugagcugugaccacacacgugcacuccagccuggguguga

SEQ ID NO: 4117757 - RNA, 73 nt, Human
ucacauuuaggaaguggauaaaauagcuuuauuuucaucagagugaaacuucagcaucauuuuuaagauguga

SEQ ID NO: 4117758 - RNA, 85 nt, Human
ucaccaacuuauauuacaacucugaacuacagagguuuugcagugucaagaaccugagugauauugaguguaaugaagucuguga

SEQ ID NO: 4117759 - RNA, 58 nt, Human
ucaccacucccuuuucuacuucuacccaaaauuggguaaguugauaagagagucuaga

SEQ ID NO: 4117760 - RNA, 90 nt, Human
ucaccaggccuagagggacgccugcucuccauacacuuucuaggcuggcuggagggaggggagggacaggggccucuuauggcucuguga

SEQ ID NO: 4117761 - RNA, 56 nt, Human
ucaccauccucaccuagaaaugaccaacucuguggucacccuaggaggucugguga

SEQ ID NO: 4117762 - RNA, 100 nt, Human
ucaccaugagagcaaugaauggggaggcaugguggagucugagcaggggugagccaugcucagccccuuggguucuacuugcugcccgaccagcugguga

SEQ ID NO: 4117763 - RNA, 125 nt, Human
ucaccaugcuggccaggcugguugcaagcuccugaccucgugaucugcccaccuuggccucccaaagugcugugauuacaggcaugagccacuguguccggccuggugcagaauguuaauagugg

SEQ ID NO: 4117764 - RNA, 86 nt, Human
uauaaauuuauuguauuaaaaguuuaaauauuggugugugggcauccuacaugauauaugggaaaugcuuggaucaguaauuuaua

SEQ ID NO: 4117765 - RNA, 123 nt, Human
uauaacgaggugaccaguugucccacuuugccugggacugcagauccccagagcaugaaacuuaccauuuugaaaucaggaaaguuccaggcaguugaagauggguuggucaccuucgcugua

SEQ ID NO: 4117766 - RNA, 128 nt, Human
uauaacucuaguuuuggccauuguaugggauuuuauguuauuauuuacuacaugaucaaaugaaaaugugaaagugucauagaaacccaugucuggaacugagcacgcaccccuucuuaagaguuaua

SEQ ID NO: 4117767 - RNA, 76 nt, Human
uauaagcuuuugguaacaagucauuuuaaauuauguguguaaagcacauaguggaaugcuuguuccuuaguaggua

SEQ ID NO: 4117768 - RNA, 77 nt, Human
uauaaggaaccacaaguuucagcacccagagaagaugucaaauuuuucuggccuuucaugaaauuugauucauugug

SEQ ID NO: 4117769 - RNA, 122 nt, Human
uauaaguaacuauauugaucucaguagugcuuugguauagaacuauuuuguggaaauaagcuguccugacuugguaagcuguccaaagcauuacuaagaggugcauugcucuguaacuuaua

SEQ ID NO: 4117770 - RNA, 64 nt, Human
uauaagugacagauuauccaaauuaaugguggcuuaaacacaguaggauuucuugucucuuaua

SEQ ID NO: 4117771 - RNA, 78 nt, Human
uauaauauguucguaagguguuuguauguucuauaguguuagauguaaaaacuccuuucgaaaagaaagcauguuuua

SEQ ID NO: 4117772 - RNA, 68 nt, Human
uauaaucugucauuuuguaucuacauggguagcucccuauaucuacagauaacugaaugcagacugua

SEQ ID NO: 4117773 - RNA, 82 nt, Human
uauaauuuucuuuuauuauuuucuacuuggcuccuaguuuugcuugccaaguuuggauuaugaaaaaguggccaauguugua

SEQ ID NO: 4117774 - RNA, 60 nt, Human
uauacagaaccgccugaagucugcaucaugacuugaugguuacccagggguuuaugugug

SEQ ID NO: 4117775 - RNA, 55 nt, Human
uauacagucuuuugcuauauucacuaggugaugguaguuuaugaaauacugugua

SEQ ID NO: 4117776 - RNA, 71 nt, Human
uauacauguaauugauuuuguguuagccagucaugucauguuugacuaacacugaaaaugaugcaugugua

SEQ ID NO: 4117777 - RNA, 60 nt, Human
uauaccaguauuagacugagaaauggagucucuccugagaaccaucuaaguacugguaua

SEQ ID NO: 4117778 - RNA, 130 nt, Human
uauacuccuugaaggauauccuaagucuuauucauaucuggaucuccagcacuuaucacaacgccuagcacagagugaguaccugguaaaugcugagggagauuaaugagaccaccaaauuccuuugaua

SEQ ID NO: 4117779 - RNA, 68 nt, Human
uauacugucccucugcacuccaccccgcauacaccauuauuugucuugaagugaccuggggcagugua

SEQ ID NO: 4117780 - RNA, 88 nt, Human
uauacuugugugucauuuggacuuugguauuaccauaagggaauauauacuuaugauaacaugaaacuccaaaugguacagaaguaua

SEQ ID NO: 4117781 - RNA, 61 nt, Human
uauacuuuccugcaacuuugauuuugaccuuggaaugaauaugggcagcaggacuagugug

SEQ ID NO: 4117782 - RNA, 63 nt, Human
uauagaaacaaacugacauugcuucuaggauaucuaggagggcagauuugguuuguuuuaaua

SEQ ID NO: 4117783 - RNA, 70 nt, Human
uauagauguaggcugaagaugaaguggagcuaaaaaccauuaguuauauauuaaaguuagccauacugua

SEQ ID NO: 4117784 - RNA, 81 nt, Human
uauagcagcauuauucauuagagucaaaaaguggaaacaaauguccaucagcugaugaauggaugaauaaaaugugguaua

SEQ ID NO: 4117785 - RNA, 71 nt, Human
uauagcuaaaauaacucagcacauuccuguuuacaaggaauuauuugaguaacuggggaauuugagcuaug

SEQ ID NO: 4117786 - RNA, 65 nt, Human
uauaggaacagcuagcacagaacugcucaggaaggaugcaaugucuucagugcauguuaccuaua

SEQ ID NO: 4117787 - RNA, 87 nt, Human
uauaggauuuggcugcuugauuagguugacacugauacauuuaguuguggcaagugaaccaagucaagccauuagccaaauccugug

SEQ ID NO: 4117788 - RNA, 67 nt, Human
uauaggcuccuugauuauaaaaaaugcacccaucugguguggcauguugauaauggagaaggcuaug

SEQ ID NO: 4117789 - RNA, 76 nt, Human
uauaggcuuuuguugcagaacacguuucgggaaccaccauuuccgauuucagagguuuugguaggaaaagcuaaua

SEQ ID NO: 4117790 - RNA, 76 nt, Human
uauagggauagaucauggaguaaaauggaagucacuggaaugcuuucaguagaggagcuacaugaucugacuuaug

SEQ ID NO: 4117791 - RNA, 95 nt, Human
uauagggucaucuuuaaaacauauuaacugcacuacacuauuaaaugucuguagaugaaauguguguuauuaugaaugaagaauaugggucuaug

SEQ ID NO: 4117792 - RNA, 124 nt, Human
uauaguaguagguucagaaacucaggcuaaggaaagcauccagaaaacauugucugccucugcaacaguuuguggauagcuuguaauuguaguucugaucuugucaaucugucuuauaacucua

SEQ ID NO: 4117793 - RNA, 55 nt, Human
uauagucuucaguggucuaucuccgguagugaaggggagagcagggaagacagua

SEQ ID NO: 4117794 - RNA, 66 nt, Human
uauaguuacuguuuucuagcaggugagcucuuucacaagaugguaaagcuagagaagguuacuaug

SEQ ID NO: 4117795 - RNA, 61 nt, Human
uauauaaaagguacaggguauuagauuauguauggaugcaugauaauguauuuuuuauaug

SEQ ID NO: 4117796 - RNA, 87 nt, Human
uauauaagaggaauaacaugucagaaucaacuugaguuuaucccaggaauacaacacugguucgacaugugaaaaucacucaguaua

SEQ ID NO: 4117797 - RNA, 83 nt, Human
uauauacacguauuagaggguuauuaggacagaagcggagcuggaacaagcuccuuuaccugaagaccuucaaagaauauaua

SEQ ID NO: 4117798 - RNA, 59 nt, Human
uauauaggcaguccagccccucauuuacuuauauuaggggcugacgaaggccaugugug

SEQ ID NO: 4117799 - RNA, 56 nt, Human
uauauauuacaaaagaggaaggauuucacaugaauguccuacucuuuuaauaugug

SEQ ID NO: 4117800 - RNA, 64 nt, Human
uauauauugcuagugguacuguaaauugauuccauuuuacagaagaguaacuuggcaauauaug

SEQ ID NO: 4117801 - RNA, 105 nt, Human
uauaucaaacuguuugagagcaauugaauagaugcauuauacuaugagagaaaaaagauuaguaaagcaugauuuaaucaagugcaaucuuauagaguagauaug

SEQ ID NO: 4117802 - RNA, 65 nt, Human
uauaucaccaaaaacaguucuggguggaauuaaacaccacauuucauguaacuuggugccauaug

SEQ ID NO: 4117803 - RNA, 76 nt, Human
uauaucuaggcugaauguaaaaucccuuauguuguaucaauggggguaaaaacuauuuuuauuugccuaugauaua

SEQ ID NO: 4117804 - RNA, 62 nt, Human
uauaugaauuuggcuggaaaggucgaugcuuggucaacagaccuugccacaggauucaugua

SEQ ID NO: 4117805 - RNA, 76 nt, Human
uauaugaccaauguggcauuuuuugauaucuuagucaguaauuugaaggucuagaaaugccauacgugccuaugua

SEQ ID NO: 4117806 - RNA, 87 nt, Human
uauaugaggauguccauugcagcauucauuuggagaauaaaauauugaaaaaccacugaaaguccagcaugguacauccuuacuaug

SEQ ID NO: 4117807 - RNA, 74 nt, Human
uauauggcacagcuauuuuauuuauucauguauuuaucaauuaauuugggaauggaaauagcaugugucauuua

SEQ ID NO: 4117808 - RNA, 130 nt, Human
uauauguaugugcuucuaggaagagcggguaaaugagaugacacacccugcccacuagcaaucugcuacuuuggcaccuagguuugggagggugaacagaaucauuuguuugucucagcaacugcauaua

SEQ ID NO: 4117809 - RNA, 71 nt, Human
uauaugugggauuauuugugcugucaucugcuaauuucacagaugucuucucaacuguagaccuucauaua

SEQ ID NO: 4117810 - RNA, 71 nt, Human
uauauguguguguauacauacauacacacguauguuauauaugugugcauguguguguacacauacaugua

SEQ ID NO: 4117811 - RNA, 58 nt, Human
uauauuaaccauaggguucuaguagcuguuccaguaguuuuuccugugguuugauaug

SEQ ID NO: 4117812 - RNA, 72 nt, Human
uauauuaagauccauugccauaucuuaacaaauggcuuagcauaagcugggcauuugauagggcauaauaua

SEQ ID NO: 4117813 - RNA, 127 nt, Human
uauauuagaaucacuggggagcuuuaaaaaaauccauaucuggacucuaccccagagauuuugguuuaauugguccaggauggggucuaugcacuguuuuaaaagcuccccagguggaucuaaugug

SEQ ID NO: 4117814 - RNA, 69 nt, Human
uauauucugugccauucuuuguagcaugaugaacucucauucugcccugccccaguggcacuggaugug

SEQ ID NO: 4117815 - RNA, 63 nt, Human
uauauuugugagacugacugaaguugauacauauaauguacuucauucauuuucacgaaugua

SEQ ID NO: 4117816 - RNA, 79 nt, Human
uauauuuuggaggcuugcuagagauacuggacauuuuacacacauuaucuuauuuaacacagcaaaacuuuaaagugua

SEQ ID NO: 4117817 - RNA, 72 nt, Human
uaucaaaacuuuuuaugaacguuguagacuaaaaauaguuauuuacucuuauaauguugaaggguugggaua

SEQ ID NO: 4117818 - RNA, 68 nt, Human
uaucaaagugauuuguaaacagggaaaugcaaauauuauacagaagagcccugugaauugguuugaua

SEQ ID NO: 4117819 - RNA, 73 nt, Human
uaucaaauuaguaaguuacucuugggcuauuuuaacauuuaaaaagcaaugcaguggcuuaaggaaaaugaua

SEQ ID NO: 4117820 - RNA, 126 nt, Human
uaucaacaacagcaaauaucauucauuauuguuuggaggacagaacuauuuuuauauucuuuaauuaaaaauggcuuugacauuuucaaauucagagggaaguugauaauuuagugcuguaugaua

SEQ ID NO: 4117821 - RNA, 72 nt, Human
uaucacagacagaggugacccugagcuggauggauagauaauccagccuuccuuuucacucucucuguaaua

SEQ ID NO: 4117822 - RNA, 127 nt, Human
uaucagaaccuccauggcuacucagccaggacugagaaugggagcaaacccaggccagaaagcuauggacuccuacuguucuuaucucaguuuuagcaguuuagcaguuauaaaggugucucugaua

SEQ ID NO: 4117823 - RNA, 58 nt, Human
uaucagcaccgcggacagcauccaggcagggaccggggagcuguccugggugcuagug

SEQ ID NO: 4117824 - RNA, 81 nt, Human
uaucaggucaucuguauguccucagcuuguuugccaccggcccacacccauagucagcuggagaucaugcugauacugaua

SEQ ID NO: 4117825 - RNA, 104 nt, Human
uaucauugaggcacauuggagccuccagguuuuacaaggucuauauagucuaaauagggaaauuguagaacugguuauuguuuuauauuaugucugaaaugaug

SEQ ID NO: 4117826 - RNA, 63 nt, Human
uaucauuguuacugcuggagcaggucggaggguaucuguaugccagaggcagucacaguggug

SEQ ID NO: 4117827 - RNA, 63 nt, Human
uaucauuucacacuuguuaggauggcuuuuauaaaaagacaagagauaacaaguguguggaua

SEQ ID NO: 4117828 - RNA, 80 nt, Human
uauccaaagauuucugcuuuuggaggcagauagccuacuuucguguccuccaaacaaagccaguauaagaacuuaggaua

SEQ ID NO: 4117829 - RNA, 61 nt, Human
uaucccagcaucuaugugcuguugauaguaacaguccacugccacauagaugcugaagaua

SEQ ID NO: 4117830 - RNA, 89 nt, Human
uauccccacaguuuaugaagcugaccuugucuugcugaugguauacucuggcucaggcagggcauggaugguggaauccuuuggggaug

SEQ ID NO: 4117831 - RNA, 91 nt, Human
guuuacccugaggacucuugcugggccagaagacauuuaggaugcucugacuuagcucuuaaggagucugguugggaagaguuauuuaagc

SEQ ID NO: 4117832 - RNA, 88 nt, Human
guuuacccuggagaagagaagacuuaagggugauuuaaugcuguuauugaagcauaagaggguucuuuucuagagccuccugguaagc

SEQ ID NO: 4117833 - RNA, 115 nt, Human
guuuacugcuaaaauuccuaaaacagagcugaguaucccacugaagucccaaaauaugacugccugauguggacuuaaagggaaacuugaguugugagaaaucuuauuuaugaac

SEQ ID NO: 4117834 - RNA, 127 nt, Human
guuuacugcuguuucugggcugagagcaagacagaagccagaggcaguggguacucuugucggcaagggcugcccugcaucugugccuuccaguaagcuugagacgaguuuggagacggcuguagau

SEQ ID NO: 4117835 - RNA, 88 nt, Human
guuuacugucaguuuagucauccugaagcaugaaugucaaaaggcuacuccuguuugcucacaauuuuuaguuugaccuucagugaac

SEQ ID NO: 4117836 - RNA, 103 nt, Human
guuuacuuccauuuugugcagagguuauaaaaugagcgauaaaugauuuugaauccuugucauugguaauuauuuuugacaugcacaguagauuugggaaaac

SEQ ID NO: 4117837 - RNA, 80 nt, Human
guuuacuuuguaaaaccagcaacuccuguagcuuaugcauaguuagugcccuauaugaauuugcugaggaccaagugaau

SEQ ID NO: 4117838 - RNA, 111 nt, Human
guuuagacuaucauuucuugcauaucaacccaagcauacugugagaguuuuaaacaagaaucuuaauaaagcuauuauaguuauguuuuaaagaaguggauuuguuuaaau

SEQ ID NO: 4117839 - RNA, 120 nt, Human
guuuagcaaaaaccugaauguuuuauagagaagucuucauuuugaagaggcagaaaccaacuggauuuagcuuaaauggagaaagaggagauuuauuuuuaggacauagggaugucuaac

SEQ ID NO: 4117840 - RNA, 108 nt, Human
guuuagcugaagcugagacagauuuagguagaagacuuauauugcucuccucugagaucccauugaaaguccuaucuaagggagauauucugcucuuacagcuuugac

SEQ ID NO: 4117841 - RNA, 63 nt, Human
guuuaggcuuuaaguggccuacagcuccuuccuggagcaugcuaccacucaagcucuuuaaac

SEQ ID NO: 4117842 - RNA, 81 nt, Human
guuuaggucaggccuggcuggguugaagcggggacccuugagggacuuugcugugucagcuucagcuucccggucuuuaac

SEQ ID NO: 4117843 - RNA, 69 nt, Human
guuuaggugugugaaguuguggucauuuuagcaggguaaucagaggccaaaucuugcacacucuuguac

SEQ ID NO: 4117844 - RNA, 70 nt, Human
guuuaguaaguguucuagggauuguaaccaucugaugaagagccaguuacaacuguggagaaauauuaac

SEQ ID NO: 4117845 - RNA, 88 nt, Human
guuuaguauaugaugaauaugguauuucacacuugaucuuagccaaaagccugagaaguaaugaauacgguauuugaaaugacagggc

SEQ ID NO: 4117846 - RNA, 74 nt, Human
guuuaguggaaugggaaguguaaugggcuggaagggaacccaccucuacaacauuaugcuuucuguccuuaggc

SEQ ID NO: 4117847 - RNA, 64 nt, Human
guuuaguucugggcuccaaacucaaggaguggcauuaagcgacuggugcgaggccagagcagac

SEQ ID NO: 4117848 - RNA, 55 nt, Human
guuuauagauggcagagcuaggagugaaacccaggcagucugugauaguguagau

SEQ ID NO: 4117849 - RNA, 64 nt, Human
guuuauaguuugaaagugaugugaaggaaacagaaucaaucacagacacauuaaacaugugaac

SEQ ID NO: 4117850 - RNA, 65 nt, Human
guuuauauacaaucaucauuauauucccagugacugggcaauuuguagauggugauugaaugaau

SEQ ID NO: 4117851 - RNA, 73 nt, Human
guuuauauaugcuauugccuguaucuucagaagucuccaacuucugaggauagaggcaauaggacauauaaac

SEQ ID NO: 4117852 - RNA, 111 nt, Human
guuuaucacuaaaauucuauggcuuugggauugauuuauugucaaguaugaugacuguuauacuucaacauaucagucagaaucacagaaaaauagauaauaaagaugaac

SEQ ID NO: 4117853 - RNA, 64 nt, Human
ucacucagcacugaggaucugcgugauauuuaacaaauuaccagcaucacagcauguuggauga

SEQ ID NO: 4117854 - RNA, 74 nt, Human
ucacuccuuugauuaaaaguggcacaguuauuugugacccuuacugugcauuuaguuuuaauaaaggagccuga

SEQ ID NO: 4117855 - RNA, 88 nt, Human
ucacucucugggcagauguaauuacucaagucaauggccuacugacaaauaagcauugaaauugucaaaauuaaauucccagagggga

SEQ ID NO: 4117856 - RNA, 56 nt, Human
ucacucugacuuggccuccaacacacuuccccucauguuggaaggagccagagugg

SEQ ID NO: 4117857 - RNA, 84 nt, Human
ucacucuuuucagaacaaccaugguuagauccagaaauccaggacugugggccauuggguucuguaucaauuuucaaaagguga

SEQ ID NO: 4117858 - RNA, 71 nt, Human
ucacugaaaguuugagugauuugacacaguucuugagugugucagauuuaggcucaaacgcagucaguuga

SEQ ID NO: 4117859 - RNA, 74 nt, Human
ucacugaauguguccacaggugugagagaagggcuggaugcugugccucucucacaguugcagggcaguagugg

SEQ ID NO: 4117860 - RNA, 117 nt, Human
ucacugacucugacaacaucccuuuuucuauagauagaaauauauaaguacaggggcaugccacuuaauacaucauucaucuaaggaagagguauguauuugucagcugguaagugg

SEQ ID NO: 4117861 - RNA, 67 nt, Human
ucacugagguacuggccuccauucaacaauauuugauauucaagaauguauguuaguaucuuagaga

SEQ ID NO: 4117862 - RNA, 58 nt, Human
ucacugcagccucgacuucccuggcuuccgucagccucgacuucccuggcuugcguga

SEQ ID NO: 4117863 - RNA, 66 nt, Human
ucacugccaaucugaagagcuucuuuuugaagacggaaguagcauggggagucuuagauaugcuga

SEQ ID NO: 4117864 - RNA, 59 nt, Human
ucacugggcccugaggugggacaucaaauaauuagaaauuccuuuuuauggcuuagugg

SEQ ID NO: 4117865 - RNA, 98 nt, Human
ucacuguccaguuacuuuuuccaacaugccagacauuaguuuguaggaucccuacgcuagagugcaggcauaguugucaaaguguaggaaucaguuga

SEQ ID NO: 4117866 - RNA, 58 nt, Human
ucacuguguaagaagaugggcuuagugacuuacucaaguacauauauuuagauaguga

SEQ ID NO: 4117867 - RNA, 80 nt, Human
ucacuuauaaaaaugagggcgguagcuagauaaguuaguaucacauauuguuuuguuaccgaauuccuuuuuucaaguga

SEQ ID NO: 4117868 - RNA, 66 nt, Human
ucacuuccccaucauguagagcagcucaggucuucucuagcucuuccaccucaugauggguaguga

SEQ ID NO: 4117869 - RNA, 126 nt, Human
ucacuucuuuucuucucucucccuucucucaguguucucaaauuuauacagaguucagaguuaauucacccuggauucaacaguagauaugaaauacugagaaggaggauaaugugaaaagauugg

SEQ ID NO: 4117870 - RNA, 71 nt, Human
ucacuucuuuugugauuauucaguuacuucaggccaucuggauguauacgugcaggucacaggggauauga

SEQ ID NO: 4117871 - RNA, 76 nt, Human
ucacuugaacucagaagguggagguugcagugagccgagaucgugccauugcacucccgccugggugacagaguga

SEQ ID NO: 4117872 - RNA, 70 nt, Human
ucacuugagauguuugcaccugguaagaauguuucaaaccuugaauucuacuuuguguaauuaucuguga

SEQ ID NO: 4117873 - RNA, 64 nt, Human
ucacuugggcucucucugauauuagcuuaccaucagugagcauagauacauugagccacauuga

SEQ ID NO: 4117874 - RNA, 66 nt, Human
ucacuuuaagagaucaccaaucacacuugcacauucaaguaucugugaaggugcuccugaaaauga

SEQ ID NO: 4117875 - RNA, 67 nt, Human
ucacuuuaagcgggaggcagagguugcagugagccaauaucaugccacugcacuccagcuuggguga

SEQ ID NO: 4117876 - RNA, 57 nt, Human
ucacuuuaguuucuuuauacuuuucucaugggaaguacacuaugguaacuggaguga

SEQ ID NO: 4117877 - RNA, 124 nt, Human
ucacuuugcacacuucugagugguuuugaugucucagggucucaggugucucagguucccaucccagcacugcccaggcacccaucuugugcucauagauccaaacuugcaagaaguuugcuga

SEQ ID NO: 4117878 - RNA, 57 nt, Human
ucacuuuuugauaucauucugccacuauugggacaggaccaacugauauagagguga

SEQ ID NO: 4117879 - RNA, 130 nt, Human
ucagaaaaaaagccaguggcuggaucacauaaauaaauuuggaaagagaugaagcucaacagguaggugaggaccacgcuauuucaggcuauauuucuuguuuauugugccucauugguuuuguuuuaaa

SEQ ID NO: 4117880 - RNA, 68 nt, Human
ucagaaaggaguuagaggucucauuuuagagaagguuaauauacuaaagacauuuaauugcuuucugg

SEQ ID NO: 4117881 - RNA, 80 nt, Human
ucagaaauccuggaguaggccuuagccaucuguguuuuaacaauuccuccagaugauacugaugccugcuugaguuuuga

SEQ ID NO: 4117882 - RNA, 72 nt, Human
ucagaaaugguuugcuagucugaucuaugauccuacuguuagaaaaggcauuuugucaaccauaauuuuuga

SEQ ID NO: 4117883 - RNA, 57 nt, Human
ucagaacagugccuggcacuaaguaaccauucaacauaugcuaguuauuguuucuga

SEQ ID NO: 4117884 - RNA, 57 nt, Human
ucagaacauuacauuuugagcugcugauguagaagugcucaaaaacuaguguuuuga

SEQ ID NO: 4117885 - RNA, 64 nt, Human
ucagaacuuggacuccagacuccuguuuuuugguuugugucaggcaucuggagggaagcuuuga

SEQ ID NO: 4117886 - RNA, 57 nt, Human
ucagaagacuacuaggacacauaauccucuucaaauguuuccuaagugguuugcuga

SEQ ID NO: 4117887 - RNA, 86 nt, Human
ucagaagaucuuguucccauuccuuguucuuuaaauguuucaaaaaucacagaacugaaggaagcagaagcgagguuucaugcuga

SEQ ID NO: 4117888 - RNA, 63 nt, Human
ucagaagggaaacacaagugaccuuaaugaaaugaagccguggucaugcuuucuccuuccuga

SEQ ID NO: 4117889 - RNA, 62 nt, Human
ucagaaggucacacuuggaucauagaaaagccagagagguguuauuaugaccuguguucugg

SEQ ID NO: 4117890 - RNA, 106 nt, Human
ucagaaguaagauuacuaggauauaagaagagugagaugagcuuaagacuguggauagauuucgcugcaucucaaucaguaucugaauucaagaauguacuuuuga

SEQ ID NO: 4117891 - RNA, 69 nt, Human
ucagaaguagggaaauguuuuacuuagagauuuaaaauacuuaauuucauuacauuucuaugcuucugg

SEQ ID NO: 4117892 - RNA, 60 nt, Human
ucagaagugcuggcuggacauggagcacugcuacggugaccagcgcagccaccacuagga

SEQ ID NO: 4117893 - RNA, 66 nt, Human
ucagaaguuagacuucaacuaauucagcaaggccccaucauguauuagaaaaagucugaguucuga

SEQ ID NO: 4117894 - RNA, 102 nt, Human
uaucccuuuaaaucccgcgagggguguggcuggggagccccgacucccggguuccggcccgcggagcuccagcccgccccgccgcgcaaggguuaaccgaua

SEQ ID NO: 4117895 - RNA, 62 nt, Human
uauccuuguacuucgggcauugccauaagaaccuugcagcauaggccacuagugccaggaug

SEQ ID NO: 4117896 - RNA, 62 nt, Human
uaucuacaguuaauaugucaucuguagucuauuauuuacaguuaauauguuaccuguaggua

SEQ ID NO: 4117897 - RNA, 129 nt, Human
uaucuagagagucacaagauggaauggcuucuagagcccuuccccucuuuauuggacagauggagaaacugaggcccagagaggggaagggcuugcccaaggccauacagaaauuuuauggcagagaug

SEQ ID NO: 4117898 - RNA, 60 nt, Human
uaucuagauauuuggauaaaugcaguuauaaauucuugcuuuaucauuuccgucuggaua

SEQ ID NO: 4117899 - RNA, 56 nt, Human
uaucuagcaguguuauaauuggauacaugagagugauucauaugauccugcuuaua

SEQ ID NO: 4117900 - RNA, 69 nt, Human
uaucuaguauggcuucugcuuucuugacuguacccagacuuauacaccagugaaagcauagcuuagaug

SEQ ID NO: 4117901 - RNA, 85 nt, Human
uaucuccaugauggcuuguuuagcauaggucacugggagccucccagaccuggaaaacaggcuugcccaugguuuaugccaggua

SEQ ID NO: 4117902 - RNA, 73 nt, Human
uaucugaaccucaguguccucaucuguaaaaugaggagaacaccuccuacaucugaggaugacuguaaagaug

SEQ ID NO: 4117903 - RNA, 58 nt, Human
uaucugaagggcuaaggguuuuagaauuuguauuccauagaauucuuacccuuugaug

SEQ ID NO: 4117904 - RNA, 79 nt, Human
uaucugcucaaagagaugaugagauaaggauaacuucaaaguaauggaagaacuaacuagucucaucucugaggagaua

SEQ ID NO: 4117905 - RNA, 75 nt, Human
uaucuggaacaaaugacacauugaugugaguacauagcagaaaguguuguucaaugccuaguauguucacagaug

SEQ ID NO: 4117906 - RNA, 58 nt, Human
uaucugggaaaggagaccugaggugagcguggagugaucaccuuuccuuucucagaug

SEQ ID NO: 4117907 - RNA, 109 nt, Human
uaucuguaaaaugggaaggguauauuagaugugaauuaggcugauguaagaaagcaaaagauguuacacagaaccugguguacaguggguaugacuauuguugaagaug

SEQ ID NO: 4117908 - RNA, 66 nt, Human
uaucuuaaaggagguuuuguuuccauaauucacuucaguuguggaagcaaaauauccuuuaaugua

SEQ ID NO: 4117909 - RNA, 72 nt, Human
uaucuucauuagaaaaguaaaaaugcuggagaacccuggguuugauaggcauggagcuucguggugaaggua

SEQ ID NO: 4117910 - RNA, 67 nt, Human
uaucuuccagaaauaucaccuggacucuagacaaguguguggguaggaaguguuucugggacagaug

SEQ ID NO: 4117911 - RNA, 86 nt, Human
uaucuuucugcaagaucugcuccagugugguauucuauuuaauaauguaaaaugcuauuucauggaggagagaguacggaaaggua

SEQ ID NO: 4117912 - RNA, 61 nt, Human
uaucuuugccuuggguuuuguucucuccacagacugagauccagugcccguggaaaagaug

SEQ ID NO: 4117913 - RNA, 102 nt, Human
uaucuuuuccuccuaagaacacuaugauuauaauaaaaccgucauauaucuguggacacuccuaauauuugcaggcuuuugucaugguggggggaaaagaug

SEQ ID NO: 4117914 - RNA, 63 nt, Human
uaugaaaacaauguuuuauuuccuauugagagaauaggccaggcaugaagcauuguuuuugua

SEQ ID NO: 4117915 - RNA, 67 nt, Human
uaugaaacacuggaagggacaucaagugacaaucucauugagucccugucuccauugugaccacaua

SEQ ID NO: 4117916 - RNA, 88 nt, Human
uaugaaagguaagauuggguacgauuauuuuaugguauuuuagaauucaaguuuuguuuaauccuuguacccaugcuguauuuucaua

SEQ ID NO: 4117917 - RNA, 76 nt, Human
uaugaacauaaauuauuuacagugugcucgaagagcucagaagggcuuuguaagguaaauaauuuauaaacucaua

SEQ ID NO: 4117918 - RNA, 80 nt, Human
uaugaacuacuauucuuuuccaaacugucaacuucuguuugaaaucauugugggggauaguuuggaaauaugguggcaua

SEQ ID NO: 4117919 - RNA, 78 nt, Human
uaugaagucccugaaacacagcuuuacuuguuaaaacacuacccccaaagaggugcacugucuaauuaggucuucaug

SEQ ID NO: 4117920 - RNA, 65 nt, Human
uaugaauucuguucauugaugacuucacuuaagaaagguuugugcuuaguggacaguauuacaua

SEQ ID NO: 4117921 - RNA, 95 nt, Human
uaugaauuuguauuuaaaucaauguuagucaugaauuuucaauacauuggaaauuucuaguguugcuaauauuaugguuuaagaaaauugucaua

SEQ ID NO: 4117922 - RNA, 78 nt, Human
uaugagaucauauucuguucuugaucuguauauuaugaaauauuuaucucacaauucaagaagagagaugaaaguaug

SEQ ID NO: 4117923 - RNA, 130 nt, Human
uaugaguucuauuuuaccuguucugguucaagggcuauaugaguuucccacuucuggaaaagauaacauuuucuagaaguguaaaacucauauagcccuugauucaugcuuuucuguggaauccaauuug

SEQ ID NO: 4117924 - RNA, 77 nt, Human
uaugauauuccuggguagccuguccaagauggcaacucucaaagccuacaucuuugaaugcauugaggcaugucaua

SEQ ID NO: 4117925 - RNA, 73 nt, Human
uaugaugagaaaaagagcugaaagauuacugauguaauuuauaacagguuaguauuuuuaguucaucauuaua

SEQ ID NO: 4117926 - RNA, 67 nt, Human
uaugauuaggcauauggcacaugauagaaaaucaguaguuuuuuaucuagauuguuaugcuuucaua

SEQ ID NO: 4117927 - RNA, 98 nt, Human
guuuggaguuuagaccccaagaaguuagcuguggccucauguuugguguuugagucacgaauguggggaagccauggcugaugugucagcucacaaac

SEQ ID NO: 4117928 - RNA, 68 nt, Human
guuuggcccagggucagcggcgcucccugcaggccgguggggauggccugagagaauucugggccagc

SEQ ID NO: 4117929 - RNA, 65 nt, Human
guuuggcugguuucaagaaggcaucucugaggaaaugacauuugaauugagaccgguuaacaaac

SEQ ID NO: 4117930 - RNA, 117 nt, Human
guuuggguuuuuuuaaauggacagucuacauuuucauuuguucugcugaggccaguaauggcuaugcuaaacagugagaagguggacaggaauuuaaaacugaucacaaauccaaac

SEQ ID NO: 4117931 - RNA, 78 nt, Human
guuuggucuccauggagcccacagggaggcugcuguuaccuggcggccuucucccugggcaucacaggagagucgaac

SEQ ID NO: 4117932 - RNA, 55 nt, Human
guuuggugagcagcuuggguaucacagcacugucccaagacucuuuuuaccaagc

SEQ ID NO: 4117933 - RNA, 69 nt, Human
guuuggugucccauuuaucuagaugucagaugcaucauggcuuuaacucucuagaaaauggcuacaaac

SEQ ID NO: 4117934 - RNA, 56 nt, Human
guuugguuuaugaguggggacagcuaauagauuuaguauuuacucauaggccugac

SEQ ID NO: 4117935 - RNA, 83 nt, Human
guuuguaaaggggagcgugaauuaguugguacacaguugaucgucugugcaguagggucaugcucacacgucccuccacacac

SEQ ID NO: 4117936 - RNA, 59 nt, Human
guuuguaaccagaacagagagucagauguaacaagcugacucugggcugcguugcaaac

SEQ ID NO: 4117937 - RNA, 85 nt, Human
guuuguaaucuagggaaagaagcagauacauaaaccacuaggugaaauacuaguguauuugucuggcuucuccagaaaaacacac

SEQ ID NO: 4117938 - RNA, 78 nt, Human
guuuguacuuggauuuaguaaaauugagggaauuuuggggcucuucccaauuucuuccucauuugccuguuugcagac

SEQ ID NO: 4117939 - RNA, 130 nt, Human
guuuguagcucucuggaccgggaaaaugccugucauuaagguggcccauucauaguaugaccuaugucugcuucaaaaugagcugggccauccagugaucuuggcauucugagcuuagaaauacaaagac

SEQ ID NO: 4117940 - RNA, 90 nt, Human
guuuguaggccuuucuggauuaaguaaaauagaggaagguguaguccuuccaccucuugcauugguuaguuucgggaaagaacuacagau

SEQ ID NO: 4117941 - RNA, 72 nt, Human
guuuguauugacugugaaucuaaguuacuaagaaaaauuagugauauuagcaaaugguuauacuaugcaaau

SEQ ID NO: 4117942 - RNA, 72 nt, Human
guuugucaauuaugaguaaaaccacuauuuacagauaaauaucuguaaagguuucaauucauuuggguaaau

SEQ ID NO: 4117943 - RNA, 64 nt, Human
guuugucauccuuggcuugcccucuucagcacuuccguguaaggucaaccacaagcugacaaac

SEQ ID NO: 4117944 - RNA, 61 nt, Human
guuuguccacucccguaucccagcaccaagaagagugccugggacaugguaggggcacaac

SEQ ID NO: 4117945 - RNA, 72 nt, Human
guuugucuguugauuguggauuuuuauauauacauuauauaauuauguauaaguacacagucggaauugaac

SEQ ID NO: 4117946 - RNA, 57 nt, Human
guuugugugaguguacauaugugugugugugcgugugugugugacucauacuagaac

SEQ ID NO: 4117947 - RNA, 59 nt, Human
guuuguuaaucucuugguuuuauuucaaaaaugaaacuauauuuagagagggaacaaau

SEQ ID NO: 4117948 - RNA, 59 nt, Human
guuuguucauggcugaugcuugcucgcagccucgcccuaagcaugcagccagagccaac

SEQ ID NO: 4117949 - RNA, 128 nt, Human
guuuguucuaaaagugauaagaucuauaauaguuuugaaucaacuuugccuucagugcuuuccaaggagagagauuacugaaaaaguaugauucacuguaaugauccauugucaugaguggaauuaac

SEQ ID NO: 4117950 - RNA, 74 nt, Human
guuuguuuccaaagucuuuucuuaaucuuugugugcucaguacaaguucaauuacagagaagaggaacacaaac

SEQ ID NO: 4117951 - RNA, 129 nt, Human
guuuguuucucuggugcugcccugacuugcucuguuuacaguuuuuaguacccucaguguguguaccucucuaacuucagggcuuucuuuguaaaagaagggucagaacuugucacagagucacaaaac

SEQ ID NO: 4117952 - RNA, 75 nt, Human
guuuuaaaaauaguugcuuuguguacacaagaaucaacaccaguugauucuuaacuccaaggcauaaaaugaagc

SEQ ID NO: 4117953 - RNA, 130 nt, Human
guuuuaaaacauuaguuugaaaauucuggauauuacuuaucuauccccucuccaggccucaaaccaggauuaugaagauuaguaucauuuccaggguuuuccucuuuaauuauauugaauguaacaaagc

SEQ ID NO: 4117954 - RNA, 81 nt, Human
guuuuaaaaugaugagccagcauauauauaguugaauacauguaaaaaugagaguucagcauaggcugcucuucaaugaac

SEQ ID NO: 4117955 - RNA, 77 nt, Human
guuuuaaaauuuuguuuuaguggaggcuguguucaguucuagugcaguuuaugcagcuggaauagaauuuauagaac

SEQ ID NO: 4117956 - RNA, 74 nt, Human
uauguacaaguuuuugugugaacauguuauuguuucacuauguauguaucauuucacacauaaacuuggguaua

SEQ ID NO: 4117957 - RNA, 58 nt, Human
uauguauacauuuaacuagauagaaauggaaccaucgucuauaagugauguaggcaua

SEQ ID NO: 4117958 - RNA, 56 nt, Human
uauguauauagcagaaguacauaugcuacauaguaugagguacuaguauauacgua

SEQ ID NO: 4117959 - RNA, 59 nt, Human
uauguauaucuggauauauguguagaauauauucaccugcacauauguggauauacaug

SEQ ID NO: 4117960 - RNA, 70 nt, Human
uauguauugcuucauaauuguugccaaagcuucuccuaggaguuuggugcaaggcaaugaagaauaaaua

SEQ ID NO: 4117961 - RNA, 123 nt, Human
uaugucaaaauguggaaauaucacuaauuuccuuggguuuccacuggcagcguagcucccaaaauuuaagacaaauucuaccugcagcgggaauccauuaguauccaauccacguuuuauaua

SEQ ID NO: 4117962 - RNA, 58 nt, Human
uaugucucauggaagggcauuaucugcucugggauguccugcagaaacaugagaaaug

SEQ ID NO: 4117963 - RNA, 81 nt, Human
uaugucuggauucuaauucuguauuuggucauuggauauagcaucugugacauaaaaacagcaaucagaaguacaggcaua

SEQ ID NO: 4117964 - RNA, 77 nt, Human
uaugugaauucucagaaggcaagggcuggggguaauacugcuuuuaaugaaaaucugcuuuuaugaguuuucagaug

SEQ ID NO: 4117965 - RNA, 67 nt, Human
uaugugauguuggcaauuaacauauacaguuuuuaccagcugucaccacauuugucaauaucauaug

SEQ ID NO: 4117966 - RNA, 62 nt, Human
uaugugcauuauuaccaguggacacauccaucaucaugaagccauggguauuaaugcauaug

SEQ ID NO: 4117967 - RNA, 81 nt, Human
uaugugccucaaguauuuccucugucaaauguaguaguuaggccuaagcuguauucugggcagggaaggagaaggcauaua

SEQ ID NO: 4117968 - RNA, 65 nt, Human
uauguggaaauuuaucaagauauacaguugagugcacucauguaugugugauaaacuuccaugua

SEQ ID NO: 4117969 - RNA, 102 nt, Human
uauguggauaacagaugcacauucucaucagcaaccagucacaucacuucuuccaaugucugucuguuggugcugggucauggugcauuucuuaucaguaua

SEQ ID NO: 4117970 - RNA, 80 nt, Human
uaugugugugcauguauguaaaugugagcguguacauauguacauccauacauacagauaugcauucagaaauauacaua

SEQ ID NO: 4117971 - RNA, 68 nt, Human
uauguuauuugaaccaaauuuguuuggaagaaaugauucugugggcaaaaugguuuaaaaguggcaua

SEQ ID NO: 4117972 - RNA, 72 nt, Human
uauguuauuugggaaaguuguacaguucagaugugaacauuucaauguauuuaagcuuuaccuaaaaaugua

SEQ ID NO: 4117973 - RNA, 60 nt, Human
uauguugagugaaagaagcuagaugcaaaagagcacauaguguaagcuuucauuuauaug

SEQ ID NO: 4117974 - RNA, 79 nt, Human
uauguuuguguuuauauguguauccaucugucuauuuagaauuuuuuaaauaugcaggggugcacuuggaucacacaug

SEQ ID NO: 4117975 - RNA, 59 nt, Human
uauguuuuagcccagugaccacacaugggggcagauaggugugguccaguucagauaua

SEQ ID NO: 4117976 - RNA, 82 nt, Human
uauuaaaacacagacugcugggccccaucccucgagcaucugauucagugugggguugggguuagucuuuugcauuuuaaua

SEQ ID NO: 4117977 - RNA, 129 nt, Human
uauuaaagguaguugagaaggugcugacgucaccagcucucaggaggaugacugccuuggaaaaacagcuuuuaaaggcaguaauuccugaguuuaguagaugcaguuuugccucuuggcugggaauga

SEQ ID NO: 4117978 - RNA, 56 nt, Human
uauuaaguaucuugaugacaaacagcgauauguuauuugucagauuuugcuugaug

SEQ ID NO: 4117979 - RNA, 122 nt, Human
uauuaauagcauuguugaacaacuaaauaaaagucuuacauaauaguuuggauaguccuuuaugcuaacugcuauuaugugaguuuugcuuuucuggcucuuuugauaucauguuacgagug

SEQ ID NO: 4117980 - RNA, 59 nt, Human
uauuacagcucuuacuccgaaauuuuaaaaaugagguuucacaauuuagagcagugaug

SEQ ID NO: 4117981 - RNA, 87 nt, Human
uauuaccguucugacagauauguuggguucuuguuuguagucucuacaacaauaggaccuuuauguucuacaaagaaauugguaaua

SEQ ID NO: 4117982 - RNA, 77 nt, Human
uauuacucaggccagaguccaacuccagaaauucugacuccguuggucuggagugggacuuugcaucuuuaguuuua

SEQ ID NO: 4117983 - RNA, 123 nt, Human
uauuaggaacaagcaguguugggcaguggguggaucucagggauggaugcaaacuugccucugcaguggugagcccauguucucuuccaauccacuaagcucagccaacagauguucuuagua

SEQ ID NO: 4117984 - RNA, 84 nt, Human
uauuaggcuguugcaaaaauaauugccguuuuugccauugaaagugauggcaagaaccacaauuacuuuugcaccaaccuggua

SEQ ID NO: 4117985 - RNA, 57 nt, Human
uauuagguaaguauuugugguguuuuuuuccauacaaaacaagucacuuacuuagua

SEQ ID NO: 4117986 - RNA, 59 nt, Human
uauuagguaugaacuggcaaccauguguugguacaggcucaaguucauauggacugaua

SEQ ID NO: 4117987 - RNA, 62 nt, Human
uauuagguuagugcaaaaguuuuaauggcaacaaccacaguuacuuuugcaccaauuuaaua

SEQ ID NO: 4117988 - RNA, 65 nt, Human
uauuagguucaugaaauuuucaggaauuaaaguuaguccugaggaaaguucaugaaugucuaaug

SEQ ID NO: 4117989 - RNA, 75 nt, Human
uauuagguugguacaagaguauuugcgguuuucaccacaauuaaaaaccacaauuacuuuugcaccaauguaaua

SEQ ID NO: 4117990 - RNA, 94 nt, Human
uauuagguuggugcaaaaguaauugagguuuuugcuauuacuuuuaauuuuugcuauuacuuuuaaccugaauuacuuuugcaccaacuuaaua

SEQ ID NO: 4117991 - RNA, 86 nt, Human
uauuagguuggugcaaaaguaauugcgguuuucccauuaaaaguaaagaaagguaaaauugcaauuacuuuugcaucaaccuaaua

SEQ ID NO: 4117992 - RNA, 71 nt, Human
uauuagguuggugcaaaaguauugcgguuuugccauuuaaaaacugcaauuacuuuugcaccaagcuagua

SEQ ID NO: 4117993 - RNA, 84 nt, Human
uauuagguuggugcaaaagucauugcagcuuuugccauugaaaauaauggcaaaagcugcaaugacuuuugcaccaaccuaaua

SEQ ID NO: 4117994 - RNA, 129 nt, Human
uauuaguuauucuucagauauuuuaauuauauagcuuucauaauggcucuaaaaugacauacaaguuuaggaucaaugagaaagucuaugguaguucuguuuccuaaaauuaaugauugauaacucaug

SEQ ID NO: 4117995 - RNA, 78 nt, Human
uauuauauuuuggaauuaugcuuaaaguuucacugcugaaauuacuuugaaggaaauggcgucuuccaaaauaaagua

SEQ ID NO: 4117996 - RNA, 81 nt, Human
uauuaugccaugagucauuucucuaguccauucugagacacugauaaaaaagauuugugauagaaauacuuugguauaaug

SEQ ID NO: 4117997 - RNA, 100 nt, Human
uauuauguugcauugguugauugucacucccuauaugguaacuucccccaaaaaaaugaagaugcaggugugguuggugucaggacagccuguuaugaug

SEQ ID NO: 4117998 - RNA, 69 nt, Human
ucacucaaauuaggaugacuugaggacgguuuaauaaagagacuauuuacaaagacaugcuaggggugg

SEQ ID NO: 4117999 - RNA, 87 nt, Human
ucacucaacaaaagcugugcuaggcuaggggauggaguagcaaacaaaauugaaauucuaaagcuuguggagcuuauguucuagugg

SEQ ID NO: 4118000 - RNA, 59 nt, Human
ucacucaauaucccaguggggcccaaauacuuauauagccuuauuugagaggggaguga

SEQ ID NO: 4118001 - RNA, 83 nt, Human
ucacucagaugguagguggcaggacugaaauuaauacuccuuucugcuguguucaaaucacucugccuccauauuacuaguga

SEQ ID NO: 4118002 - RNA, 69 nt, Human
ucacucagguuucuucuuaggaauauguuucuaccuuaagaaauucuauaaagaagaggcuuguuuuga

SEQ ID NO: 4118003 - RNA, 114 nt, Human
ucacuccauuagauugugaguucccauggacuuugucuaucuaguuccaggcaugguccucaugcucuggaauaguccuaggcacauauugggugcucaauguuuguggaguga

SEQ ID NO: 4118004 - RNA, 108 nt, Human
ucacucgaacccaggaggcggagguugcaguaagccgagauugcgcuauugaacuccagccugggcgacagagcaagacuccgucuccaaaaaacggaagagaagaga

SEQ ID NO: 4118005 - RNA, 58 nt, Human
ucacucguuaaaaaaaugcagaugcuaaaugucacgcguuuacauuuugaaacaguga

SEQ ID NO: 4118006 - RNA, 77 nt, Human
ucacucucaagcaaaguaugugcugggagcuuaaagagaaaaaauaagcuuaagccaaauacuuugguuuccaguga

SEQ ID NO: 4118007 - RNA, 76 nt, Human
ucacucuguggcccagguuggagugcagugguguaaucucagcccacugcaacuucugccuccuggguucaaguga

SEQ ID NO: 4118008 - RNA, 76 nt, Human
ucacucuguugccuaggcuggagugcagugacccgaucuuggcucacugcaaccucugccucacggguucaagugg

SEQ ID NO: 4118009 - RNA, 77 nt, Human
ucacucuuguugcccaggcugaagugcaauggcacgaucucggcucacugcaaccuccgucucccggguucaaguga

SEQ ID NO: 4118010 - RNA, 129 nt, Human
ucacugauaagaagcuaucuuuaagaucucagguuggucugcuucagaaacauguggcucugacagauagauagacagucaugcccugccaagcaggcuaaaucuuagagugcagguauccacaaguga

SEQ ID NO: 4118011 - RNA, 56 nt, Human
ucacugcagaaaacagcaggugcucauccacucauuugcagugauucuugcaguga

SEQ ID NO: 4118012 - RNA, 55 nt, Human
ucacugcagagaccucuagucauaauauucgaugcacuagagcagcucucagaga

SEQ ID NO: 4118013 - RNA, 59 nt, Human
ucacugcaucuccccaucuguuucccuccauguaucugaaccagaggaaagagcaguga

SEQ ID NO: 4118014 - RNA, 86 nt, Human
ucacuggaaauuuuaugagguaugcugaacucuguuucugaaaaguacaaacauuagacaccauaugcuccugaaaugcuccagga

SEQ ID NO: 4118015 - RNA, 63 nt, Human
ucacuguaauagguuugaagauaggggaagaaaagauccuugcucucaagaacuuacagauga

SEQ ID NO: 4118016 - RNA, 79 nt, Human
ucacuguagagucuguuuccacaaaccacucccggcccuggcuuagguuggguucuccaggaaacagacucugagauga

SEQ ID NO: 4118017 - RNA, 59 nt, Human
ucacugucccuguccucuuaucuguagaaagaggugagugugacagagggggcagguga

SEQ ID NO: 4118018 - RNA, 75 nt, Human
ucagaauagaggugucacuuugggaaguaaguaacccagagaucuagcuucucaugaaaucucuagcuauguuga

SEQ ID NO: 4118019 - RNA, 61 nt, Human
ucagaauuuagcauuuuaacaagaucuccugcagaucuguuguuuguuugcuaaagcuuga

SEQ ID NO: 4118020 - RNA, 58 nt, Human
ucagacaggcuggacagcuugcuuacagaagcagagccaggauccggaucugacuuga

SEQ ID NO: 4118021 - RNA, 61 nt, Human
ucagacaugggauaugaagcucugagaacuucugacucauuuguuuggauccccuguuaga

SEQ ID NO: 4118022 - RNA, 58 nt, Human
ucagacccaggugccaagcuguacgggcaugcugccagcagccaggacuuugggcugg

SEQ ID NO: 4118023 - RNA, 127 nt, Human
ucagacgugaggcuuccuuccuggguucuuucuggcugcgcuaguccagaagaccagcaaacccgagauggucugagguggacgauggagccugaauggagagccuggggcgugagccagggucugg

SEQ ID NO: 4118024 - RNA, 65 nt, Human
ucagacuguccacauggagaaccugguuuggauggcucugccagucgugccucuccuggguuuga

SEQ ID NO: 4118025 - RNA, 56 nt, Human
ucagacuuucuccuugcuuaguucuuacaucuaggcaacauaacacgaaagucuga

SEQ ID NO: 4118026 - RNA, 67 nt, Human
ucagagaaaggcugaaaugccagaauggccauuguagugcauucuagcugaguaucagccccucugg

SEQ ID NO: 4118027 - RNA, 59 nt, Human
ucagagaaugaaaaugaaacuugcucacuguagcuucauugaaccacuuuauucuuuga

SEQ ID NO: 4118028 - RNA, 105 nt, Human
ucagagacagagacuaggauucauugcaguugaguuguguuaaaguaaaacuuauagaacaaacuuuuagaauuccugcugccaauguccaaagacugucccuga

SEQ ID NO: 4118029 - RNA, 60 nt, Human
ucagagaguuagugucuuagcuuguucugauagaucuagagcugccacccuagcuucuga

SEQ ID NO: 4118030 - RNA, 61 nt, Human
ucagagcuaaggggagagcaaaagggccgggguccacuguguaauccuucccuuguucuga

SEQ ID NO: 4118031 - RNA, 82 nt, Human
ucagaggaagugcuggagcaggacgugggaaugggaaaccagaagguuucgagccaggguacccgccuaguguuuccucugg

SEQ ID NO: 4118032 - RNA, 73 nt, Human
ucagaggaucaucuaguuugacucaggcagagcuuugaauagccaugggacauuuaucagaugaccauuuuga

SEQ ID NO: 4118033 - RNA, 68 nt, Human
ucagaggaucuuugugaaucucaacuuggacauggugucuaguuugcccuguuauaggguaccucugg

SEQ ID NO: 4118034 - RNA, 57 nt, Human
ucagaggcuucuggccagucuguuuggggacaauugccugagauaugaggccuuugg

SEQ ID NO: 4118035 - RNA, 107 nt, Human
ucagaggucacauagucuagcaggagagauaaugugaagauaaugcaagaguuugaggaaaaucuucugcuauuuuucuuuauguaacccuagucuaccacuucuga

SEQ ID NO: 4118036 - RNA, 60 nt, Human
ucagagguggccccugcccucacccucucagagcugguuacuggcaggggacgccuguga

SEQ ID NO: 4118037 - RNA, 62 nt, Human
ucagagguuacccaugggacagauggcauuuaaacuaggccuugaagcaaggguggcucuga

SEQ ID NO: 4118038 - RNA, 56 nt, Human
ucagagguuccggccauaaccacagaggaauuggagguugguaaaugacgcucuga

SEQ ID NO: 4118039 - RNA, 79 nt, Human
ucagaguaauuugagaaagauggaaucuuacaggcuguacugucuguucaugaaauaucuuuuugaaguugaacucuga

SEQ ID NO: 4118040 - RNA, 73 nt, Human
ucagaguaggcggggcagggggaaucagagcaguggcuccaaagucacccuucccagcuguccgccacucugg

SEQ ID NO: 4118041 - RNA, 71 nt, Human
ucagaguuuucuauuuuuauuccuguguguaaucaaugggaacacacugugacggaaauaaagaauuauga

SEQ ID NO: 4118042 - RNA, 57 nt, Human
ucagauaccauugaauuuguuguauggucuuuggcagcacucaguaugggcgucuga

SEQ ID NO: 4118043 - RNA, 57 nt, Human
ucagauccacacagcgucucaggccccaacuccggguuucugggagagugaaucuga

SEQ ID NO: 4118044 - RNA, 59 nt, Human
ucagaucuuagugacauccaggauggauaauuuucaucuuuguuuugaugcagaucuga

SEQ ID NO: 4118045 - RNA, 69 nt, Human
ucagaugagaggagcugugaguguggccuggaaaagaugucuccggcaaaccccagccccucuaucuga

SEQ ID NO: 4118046 - RNA, 85 nt, Human
ucagauguagauuagauaggaaucgagugggacugacucaaaggcacuauuuauuagcucacaugcccuaccuaaucuuagcuga

SEQ ID NO: 4118047 - RNA, 68 nt, Human
ucagaugucaacaggccuuuaaacaugcucuuuaccacugagcaauaaauacccugguugaguccuga

SEQ ID NO: 4118048 - RNA, 58 nt, Human
ucagauguuucuuuaacgcaugguugcaaaacgugcuguuaguaaggaacaugacuga

SEQ ID NO: 4118049 - RNA, 85 nt, Human
ucagauuaucccgauuacaguagcuuuauuuggaguaacuuucccucuuacuugccaaaggcuguguagcuaauaggauuauuga

SEQ ID NO: 4118050 - RNA, 93 nt, Human
ucagauuccucugcuuccugaugugagaaaugucaguggcuaaaagcaacauacagacaguuuuucagauauuuagugaaaagagucaucugg

SEQ ID NO: 4118051 - RNA, 66 nt, Human
ucagauuuccuccugugguugcuuuguuccuuuccaauauggcagccaguguuggaggaaagaugg

SEQ ID NO: 4118052 - RNA, 63 nt, Human
ucagauuugcugcccugguucugugauuucaucaaccuggauggguagggacagugguucuga

SEQ ID NO: 4118053 - RNA, 69 nt, Human
ucagauuuggacaucacugggcauuugugagacuaaaccucugacaguggaugugauguccagguaaga

SEQ ID NO: 4118054 - RNA, 64 nt, Human
ucagauuuguccuacuaggcacuacaggguaaucacuccuuaucugcuuggagggaccuuuugg

SEQ ID NO: 4118055 - RNA, 72 nt, Human
ucagcaagcacaugaaaaugugaagcuggaugcacugagaggcaucaacaguuucauucauuugcaugcuga

SEQ ID NO: 4118056 - RNA, 87 nt, Human
ucagcaaguuccuaagcuguggcccuggaucccuucacuccauacucuucagggaggugucaaagguggucaagcuugggaggcuga

SEQ ID NO: 4118057 - RNA, 61 nt, Human
ucagcaauaaugucuacaaaucuucuagguacauagcagauugugcaacaauguugcuaga

SEQ ID NO: 4118058 - RNA, 60 nt, Human
ucagcacaggucuugcaaaacauuucacuuauaguucaguaucuugggcucugugcuuga

SEQ ID NO: 4118059 - RNA, 61 nt, Human
ucagcacagugaccagacccacuagcauguggacauagggcagugggguggcugugaauga

SEQ ID NO: 4118060 - RNA, 80 nt, Human
ucagcaccugauaugaugagguauaaaggauaaugguggcuguaacauuaugacccuuacugcaucauacaaagcacuga

SEQ ID NO: 4118061 - RNA, 70 nt, Human
ucagcacucuuaguuugucucagcaacuggauagcucugugcagguacuugacaacuugggcucugcuga

SEQ ID NO: 4118062 - RNA, 56 nt, Human
ucagcacugauguuucagaagaaauuaaguuaaaguuuuuugccuaucaguggugg

SEQ ID NO: 4118063 - RNA, 65 nt, Human
ucagcagacccugaagacuugcuuuuaaacaaagaaaauccugggcacuucugcagggcugcugg

SEQ ID NO: 4118064 - RNA, 56 nt, Human
ucagcaggcccauccuccaggccaauggcccacacuaugggggcuggguaagcuga

SEQ ID NO: 4118065 - RNA, 62 nt, Human
ucagcaggucuggguuaaguccugauaauuugcauuacuaacaaguucccagauggugcuga

SEQ ID NO: 4118066 - RNA, 71 nt, Human
ucagcagucacauguugucccaaguguuaggaauuugggacaaaugccaugugaccuaccagugaugcuga

SEQ ID NO: 4118067 - RNA, 123 nt, Human
ucagcauccguauccuguuugauugcaaacuugcuaaagguagguauuguuugucuuggacuucgcugccaguccuuagaacagugccugggacacaguguguucucaaauauuuguugcugg

SEQ ID NO: 4118068 - RNA, 74 nt, Human
ucagcaugacauuacaguagcaugacuuuuagauuucugccuaaaagacauauaacuguaggaaucauuacuga

SEQ ID NO: 4118069 - RNA, 57 nt, Human
ucagcauuccugaagacaagcauaaaaagaaguaugcaguuaucaagaggaugcuga

SEQ ID NO: 4118070 - RNA, 55 nt, Human
ucagccaggccaccuucagcuuuauccaccagucuuugaauuuggccugagcugg

SEQ ID NO: 4118071 - RNA, 123 nt, Human
ucagccaggguuuuuaaggaucuuaauagaguggaacuaagguagaaacuauuaagagcaauuaauagugauauaucuauaguccuguuucuaaacaaguuuuuuuaaaaaccucaacucuga

SEQ ID NO: 4118072 - RNA, 72 nt, Human
ucagccaugugcuaggguuuacuccaggagcauauuaacucccaggauuuuaggcucucaguagcuggguga

SEQ ID NO: 4118073 - RNA, 64 nt, Human
ucagccccuuaucucuggcugccuaugaaagaaagcuuccaaagcagcuuggaugagaggcuga

SEQ ID NO: 4118074 - RNA, 56 nt, Human
ucaugugaaagauugagaaaguaaauccuuugugcaauucuuagucucaugcauga

SEQ ID NO: 4118075 - RNA, 62 nt, Human
ucauguguccucuggcagguuuagaaguauguacuuugaaaccucaaccaaagguuaccuga

SEQ ID NO: 4118076 - RNA, 67 nt, Human
ucauuaaagcagccucauuugugguaagaaaccaucauucccgaaauagguugcuuucaagaaauga

SEQ ID NO: 4118077 - RNA, 106 nt, Human
ucauuaacuuaaaagacgaacacagguggcagaguauggugauuauaugcugucccucauaagcucacauucaaaucugccuucuaucuuuugucuguguuaauga

SEQ ID NO: 4118078 - RNA, 69 nt, Human
ucauuaaucucugggaaguguuucauuggcaacaugauugugacaacaucuuguccuuagauuaaauga

SEQ ID NO: 4118079 - RNA, 67 nt, Human
ucauuagaaaugcagauucucaugccccaccccagaccugcuucaucagaaucugcauuuucagagg

SEQ ID NO: 4118080 - RNA, 89 nt, Human
ucauuagcccuauuuuacagauguggaaagugagccuuagagaaguaaguaauugccauaagucacacaucugagaaauaaugaaguga

SEQ ID NO: 4118081 - RNA, 81 nt, Human
ucauuaguagccaaugauauauauuuguaucauguauacauauuuguguaaugauacauauguaucguuaguagccgauga

SEQ ID NO: 4118082 - RNA, 61 nt, Human
ucauucaagauuucaauagauuuuuagaaaaauggaaaucauaugcaggaguugugaauga

SEQ ID NO: 4118083 - RNA, 63 nt, Human
ucauucacuuuuuaugucuaaguauaguccuaagacuuacuuugguuaaugaaaugugaguga

SEQ ID NO: 4118084 - RNA, 66 nt, Human
ucauucagauugguuaccacuuuaaaucuuuucugauagagagauagaaggguaaaccaugcguga

SEQ ID NO: 4118085 - RNA, 56 nt, Human
ucauuccuccagcgggaguccagucaggguccugaaguuugcugguucaggaaaga

SEQ ID NO: 4118086 - RNA, 85 nt, Human
ucauuccugaccuacaguggcccucagcaguugccaagauuuguccccaaagcucagggcugguggucagguggguuagggauga

SEQ ID NO: 4118087 - RNA, 71 nt, Human
ucauucugagcuaauaugcuuaugagcaugacuuauuaaggagcaccaguauaggcauguugauggaauga

SEQ ID NO: 4118088 - RNA, 88 nt, Human
ucauucuucauggcaguccugaaauugugauuucuuggcguccccuucagcaaguuggcucauuuuauagacagcgauugcaggauga

SEQ ID NO: 4118089 - RNA, 67 nt, Human
ucauucuuugacuguuguaguaaugaguuagcuuugcuccaacugccagaaucauucaaggaaguga

SEQ ID NO: 4118090 - RNA, 57 nt, Human
ucauugaaagugccuccucggacuggccaaaagcaguuagguaaugcucuucgguga

SEQ ID NO: 4118091 - RNA, 55 nt, Human
ucauugagcgguucuuaacccaucucugcacuggugggaccucugcccucaaugg

SEQ ID NO: 4118092 - RNA, 66 nt, Human
ucauugccauggcauuugcagacuguccuggugcuggugggagugucuuuaugcuaugagcaguga

SEQ ID NO: 4118093 - RNA, 85 nt, Human
ucauuggcucaacaaauauuuacugagugccuguuauccuccaaggucuuuaagaggcauuagagacauagcagugagccaaaga

SEQ ID NO: 4118094 - RNA, 101 nt, Human
ucauuguaaaauuauuucagcuuuucuguauguuugaaauuuucauuaaaaaaugaugaaaaaagacgagcauauaaagggagagaaguaaacuacuuuga

SEQ ID NO: 4118095 - RNA, 56 nt, Human
ucauuguaggugaugcugugaacccuccccaagggagguaccaaaagccugcauga

SEQ ID NO: 4118096 - RNA, 96 nt, Human
ucauuuaacugagaaaguugugcaugcagauuugcugagauaaucugggugaauuagcucagcaaaucugcauucacaacuuccugacauaaauga

SEQ ID NO: 4118097 - RNA, 73 nt, Human
ucauuuaacuucuuugagcuccaguuuucucauguacaaaaugggaaaaauccuaucucacagaguuguguga

SEQ ID NO: 4118098 - RNA, 92 nt, Human
ucauuuaauugucacauccaucuuaugagauaggugcuauuauuauucucacuaaagagggcugaucauuggauugaugugagccuagauga

SEQ ID NO: 4118099 - RNA, 60 nt, Human
ucauuuagauauuaaggugucacuguccaauaaggcaguaugaaccuggguucuggauga

SEQ ID NO: 4118100 - RNA, 78 nt, Human
ucauuuagucagugcuucccauuagaacugugauguucugaggauauuaauagguuauuuggggagcauuggggguga

SEQ ID NO: 4118101 - RNA, 69 nt, Human
ucauuuaucgcugccuuuuaaaagcuaaagagggaacuuuacagcauaugaagggugagauauaaguga

SEQ ID NO: 4118102 - RNA, 57 nt, Human
ucauuucacuucucuagggagagauuuuuauauccaucuuuugaagagaugagauga

SEQ ID NO: 4118103 - RNA, 84 nt, Human
ucauuucauaaaucacauucgucugcuccuuccagcaauuucccuuuucccuggaagggggauguuauuguguuuuaucugugg

SEQ ID NO: 4118104 - RNA, 73 nt, Human
ucauuucauagauucucagagagggauuccugauaauauuucugcucacaugaugugagaauguaagaaaugg

SEQ ID NO: 4118105 - RNA, 57 nt, Human
ucauuuccucaaauucaagguuuuagauaguuucucuccauggcuaugaggaaauga

SEQ ID NO: 4118106 - RNA, 64 nt, Human
ucauuuccugucuuuugugaaggauuccguaauauuagaaucacucagcacagauggggccuga

SEQ ID NO: 4118107 - RNA, 61 nt, Human
ucauuucuccuaagugaaauauacuguuuguuuuccugugugugcauggagggggcaguga

SEQ ID NO: 4118108 - RNA, 56 nt, Human
ucauuucugagccuuccaugauuuuugagccugauuugcugguaucucaggaauga

SEQ ID NO: 4118109 - RNA, 76 nt, Human
ucauuugaacccaggaggcacagguugcagugagcccagaucaugccacugcacuccagccugggugacagaguga

SEQ ID NO: 4118110 - RNA, 88 nt, Human
ucauuugaagcuagucaagcuuagauaacgauaaugauaauuaaaucucaugcuucaguaucuaaguaugauaaugcuucaggcauga

SEQ ID NO: 4118111 - RNA, 86 nt, Human
ucauuuggauuuaauggaugaggggcagcucucuggauuuuuuccuauguccuguuccucuaucacguuagauaaguaucaaguga

SEQ ID NO: 4118112 - RNA, 71 nt, Human
ucauuugguauuaauuuucagaaccugucguucuaaaaccuuaauacaguuugaagauuaugccagaguga

SEQ ID NO: 4118113 - RNA, 94 nt, Human
ucauuugugcagggacaacugugcaccugaucuugguaaucuccuuacccugacuaauuucagugucacaggaugcuaugcauaccacccauga

SEQ ID NO: 4118114 - RNA, 68 nt, Human
guuuuuuaugaucuuuauaaccuaucuucuuccuaaguagaggagagguauaugaaggcaaugaaaac

SEQ ID NO: 4118115 - RNA, 77 nt, Human
guuuuuucauaugcagauuaacaaauauggcugucuggauuuaguuauauuuuuaaggcucugacaucuggaaaaau

SEQ ID NO: 4118116 - RNA, 129 nt, Human
guuuuuucuuuguuuuacccauuuggauaacugagccagaggcauuacugaaaaggugaguuuccucccauuguucuagaaugccaacuuugucauaauucaagugucuacagguaauuaucaguuuuc

SEQ ID NO: 4118117 - RNA, 94 nt, Human
guuuuuugccccgugagacagauaguuuuaucauuacuuccaagggaaaacugagguauaagguauguaaacuauuuguccauggucagaaaac

SEQ ID NO: 4118118 - RNA, 62 nt, Human
guuuuuugcucuuuaauacauuuucaaguagguauuuguaaauaugucugagggcaaagaau

SEQ ID NO: 4118119 - RNA, 91 nt, Human
guuuuuuuuaagguguauaguuagccauuuuauucagcaggucuuaguugagugccugccaugagcuaaugacacacugauuaauagggau

SEQ ID NO: 4118120 - RNA, 82 nt, Human
uaaaaaacgcaauuucugggauuucauuccagaucuacucaaugagacucugcaggugggccccuagaaucugcauuuuuua

SEQ ID NO: 4118121 - RNA, 56 nt, Human
uaaaaaucgugggaaacuagaacauguauauacauuucaagugacuaugguuuuug

SEQ ID NO: 4118122 - RNA, 107 nt, Human
uaaaaaugucuauguaguauagaaacccagaaagauaguguaacuacuuuuauaucauacauuauuuuuaaaaguucacacagaucuuacuuuguaauacauuuuug

SEQ ID NO: 4118123 - RNA, 57 nt, Human
uaaaacuuaacuauccagauuauuauuucuuugguguuucuggauggcuaagauuua

SEQ ID NO: 4118124 - RNA, 57 nt, Human
uaaaaggaggaagaggagaaggagauaaggaagaacuucucuguaaaucuucuuuua

SEQ ID NO: 4118125 - RNA, 72 nt, Human
uaaaaggaguuguucugugcaccagaaugauauuucuuaaagaaacucucauuuuagugcacugaccuuuua

SEQ ID NO: 4118126 - RNA, 129 nt, Human
uaaaaggcauuucaacauggugaagccaguagcugagaggccaauugaacuuuuaaaacagugaacagcaugcaucugggccuuaucuuccaaguucuuguuuuauuacguugcuauaccuucaaagug

SEQ ID NO: 4118127 - RNA, 80 nt, Human
uaaaagggugauucuagguuacuguaauuaagcuccucaaagccuucauuuauaaagauccuuccagaguuaccauuuua

SEQ ID NO: 4118128 - RNA, 120 nt, Human
uaaaaguuuaucuuucucauggcauuuuuuacaaucguaguugaaaugaaucucuuccuagcauggguucagacuaaagcuaugcaguuaaguagaauaaauaucauuagaacacuuuug

SEQ ID NO: 4118129 - RNA, 57 nt, Human
uaaaauagccagugccccucugaguuuuaaaccuucagaggggcacuggcuauuuua

SEQ ID NO: 4118130 - RNA, 115 nt, Human
uaaaauauagaacuacauuugaagaaggaaaaaauggcuuaauaggcaauaaguacaauacuuuuuuucugaagcaguuuuacuaccuaaauccugaguguuggauuauauuuua

SEQ ID NO: 4118131 - RNA, 80 nt, Human
uaaaaugaggggacagagauucuaaacuugauucugcugcaaaucagcuaugucauuuggggcucugacaucucauuuua

SEQ ID NO: 4118132 - RNA, 102 nt, Human
uaaaauuuuauauacuggauauuaauauaaugcuauauaauaaaacauuuuucccaguuguuugcccuuuagcuuuguguaugaugucuguguauuuuuuua

SEQ ID NO: 4118133 - RNA, 92 nt, Human
uaaacacucauguacaaguuuuugugugaacauguuuucauuucucuucccuagaaguggaauuacugggucauauggaaauucuauguuua

SEQ ID NO: 4118134 - RNA, 70 nt, Human
uaaacagccuucaguccccagcaagcuguuuagggaagaggccuggcagcagcaagguuggagcuguuua

SEQ ID NO: 4118135 - RNA, 80 nt, Human
uaaacauggcuguuucaguuaucuuuggcugcuuaacaaaccaccccaaaaugcagugccugaaagcaacagccauuuua

SEQ ID NO: 4118136 - RNA, 79 nt, Human
uaaaccaagcauuucuagccagucacauucaacugaaauugauacaguguagugaugauuuagagugcuucuuaguuua

SEQ ID NO: 4118137 - RNA, 67 nt, Human
uaaaccagguaaagaagcucucugguuccucaugcugccucuuccugcuggcuuuauucugcguuug

SEQ ID NO: 4118138 - RNA, 61 nt, Human
uaaaccuguaguugauguaauugggagaaacaauagcucuugaaaacacagcuaagguuua

SEQ ID NO: 4118139 - RNA, 98 nt, Human
uaaaccuucuuuuauuggucuuuuccccuuuguuuaugugagauuacaucaucuaaucugagguaggaagagcugccaucugaagaacugcagguuug

SEQ ID NO: 4118140 - RNA, 87 nt, Human
uaaacuagaguuucagaugcagugcuuaaaucauuugcauguuuucugcaugauaauugaauuuauguaugcacuuccuuucguuua

SEQ ID NO: 4118141 - RNA, 88 nt, Human
uaaacucagugguuuucaagucaucuguuaugggaguuuuugguaaaaggugcccuguucccacugcagugaugguagcccuguuuua

SEQ ID NO: 4118142 - RNA, 66 nt, Human
uaaacugaacacagggccaaacuugagcuuagcagccaggcagccagguuuccacuguguuguuug

SEQ ID NO: 4118143 - RNA, 85 nt, Human
uaaacuucaaaguuuggauucucacuuuaaagcaagggacaaaccccuuuguaacuggacaagauauucaucacucugagguuug

SEQ ID NO: 4118144 - RNA, 88 nt, Human
uaaagaaggcaaguuggucgcaauuagucacauguuuuuauaauuaccauguagaaauuaguaagaucaacuauggcacacuacuuua

SEQ ID NO: 4118145 - RNA, 89 nt, Human
uaaagaagguuaugauggcccuuuccuggugagaugccaacuggggagaaauggggggcaaaaucagaaaguucaucauguuuguuuua

SEQ ID NO: 4118146 - RNA, 75 nt, Human
uaaagaaucuucuguguugcucuuuguccacuacauguguggggcuuacagggaaggagcauagaaaaaguuuua

SEQ ID NO: 4118147 - RNA, 73 nt, Human
ucagucucauuaacacuuuauguugguuuuuaugacuuucugcaucuggacagcuuuguguuaaugggaagga

SEQ ID NO: 4118148 - RNA, 84 nt, Human
ucagucucuuucauuuguccagaucaaugcccacaugcccaauuuaggucaaggcaucaggcagaggaaaggacuggagacuga

SEQ ID NO: 4118149 - RNA, 58 nt, Human
ucagugaggucagugggcuugccagaggucauagguaaagagcagcugcacccauuga

SEQ ID NO: 4118150 - RNA, 101 nt, Human
ucagugaguuuucuauuuguguccaggaggugaggggaccaaaugccucagaggcuggcauuugagacccauaaccucuccgguggcagaugggacacuga

SEQ ID NO: 4118151 - RNA, 64 nt, Human
ucagugauaggugguuguuggcaaaauuaagucugaaauacugccaaaguuuaccuaacacugg

SEQ ID NO: 4118152 - RNA, 130 nt, Human
ucagugauuuuuuugguuuugauuuuuguauuuaccuggcaacaaggguuauuauuugcacguuuauagcuagugugcuaaauggcacuuugacagccugccaggaaggucagucagaauuucccacuga

SEQ ID NO: 4118153 - RNA, 66 nt, Human
ucagugcuuccuggaggaagcccuaugcuuugaugcuucuuccaggaagcaacccaugauuucuga

SEQ ID NO: 4118154 - RNA, 63 nt, Human
ucaguggcaguucguggccaugcaggcaauucugcuggccugguuguugcugccguuuccuga

SEQ ID NO: 4118155 - RNA, 71 nt, Human
ucagugggcagauuaauuucucaauacgugcuaaucuacaauugagaugcuuaaaucuucaccugcacuga

SEQ ID NO: 4118156 - RNA, 99 nt, Human
ucaguggggggcuuuuguugcagguggugaugacagaagacaggugcaggcagugaccaugaucaccacuugacagcccugagagugaccuccaacuga

SEQ ID NO: 4118157 - RNA, 77 nt, Human
ucaguggucucgcugcagugcaagcccagauggauugguccuuacugauuugcagugcagcacuaccagcuuucuga

SEQ ID NO: 4118158 - RNA, 59 nt, Human
ucagugguuggaugauggucgcccacaguaguacgggugaucuuuacucagccuacuga

SEQ ID NO: 4118159 - RNA, 86 nt, Human
ucaguguucagaacacuagucuagaccagaccagaccaaugugguauucguugugggcuggcaaguagacugugugagaauaaaga

SEQ ID NO: 4118160 - RNA, 129 nt, Human
ucaguuaugaggacuuuuucucugcccuucaucaacaugcagccugugaacagugucugggaaaguaguggucauugguugcguaauuugauuuuaggcuuauggagaaaaggacccaagugacucuga

SEQ ID NO: 4118161 - RNA, 66 nt, Human
ucaguuccagagguagcaaugacuuggagaauaaauuuggcagugguuccuguucuucugggcuga

SEQ ID NO: 4118162 - RNA, 70 nt, Human
ucaguucucaucauuccuucaaagcccgggaccuucuguuguaucgggcucgaaugcugagaguaacugg

SEQ ID NO: 4118163 - RNA, 60 nt, Human
ucaguucugaaguucugccucccuugaugugucauacucggagacacucuuaagaacuga

SEQ ID NO: 4118164 - RNA, 85 nt, Human
ucaguugaaagaugcuucaguguuuaauuuaggauucacuuaaaaauaauuuaucuuaauaugggcagucugaauauaaagcuga

SEQ ID NO: 4118165 - RNA, 70 nt, Human
ucaguuuaagaugacuaacaauucaguaaguaugagaauacagguagaauuaaaguugaaauugaacuga

SEQ ID NO: 4118166 - RNA, 55 nt, Human
ucaguuuaauacccagaugccuucccuguguccagugucugcucuggguauuuga

SEQ ID NO: 4118167 - RNA, 100 nt, Human
ucaguuucauaucuaucccugauaguuacaauggcggaggucugcguuauaagcccaucccugacccaaaacugucagaaauagauugugaauauauuga

SEQ ID NO: 4118168 - RNA, 64 nt, Human
ucaguuucauuaccugacccaugaggauaauaagugucuccuucaaggguuguagugaagauga

SEQ ID NO: 4118169 - RNA, 62 nt, Human
ucaguuuccugguuuugacauugcacuauccuacgaaaaauguuacuuuuauaggaaacuga

SEQ ID NO: 4118170 - RNA, 67 nt, Human
ucaguuucuaccuacuaugugugagucacaugaauagacccacauucauugccaggguggaagcuga

SEQ ID NO: 4118171 - RNA, 64 nt, Human
ucaguuucugccaggauguguuaaaauuacuucuaaaauuuucacauucuuuucagagacaugg

SEQ ID NO: 4118172 - RNA, 60 nt, Human
ucaguuugggaauuguagcugucuugcuguagaucaggccuguuauaauucccagcuugg

SEQ ID NO: 4118173 - RNA, 65 nt, Human
ucaguuuuuguuguuuuuuaaauggcugaauagcauacccuuuacaggaacagcaaauuuucuga

SEQ ID NO: 4118174 - RNA, 80 nt, Human
ucauaaacaucacuguggcuuucuuuuugcucucuguuucacagcaguuauugucaaggaagauagcuauuaugacauga

SEQ ID NO: 4118175 - RNA, 60 nt, Human
ucauaaagcuugccugcaguguagcucuggacaacagaaaacuccugguaacuuuuguga

SEQ ID NO: 4118176 - RNA, 56 nt, Human
ucauuuugucuucugauccagguacauccacuggauuaguuucaaggcagcaauga

SEQ ID NO: 4118177 - RNA, 77 nt, Human
ucauuuugugcuagacacuauggcuaaaaccaaauaaagacaagguucuucccuucaugguguuuacauacugguga

SEQ ID NO: 4118178 - RNA, 66 nt, Human
uccaaacccagcaaagggagccauccugccugacugaagccagaguggggcccacugcugggugga

SEQ ID NO: 4118179 - RNA, 59 nt, Human
uccaaagagcuuaggagagaaauggcauaaaccuuaaauucucuacucagcuuuuagga

SEQ ID NO: 4118180 - RNA, 67 nt, Human
uccaaaguauuaaaucuuagcaacugaugaaguaaaaagcuauuuuugcuaagguuuaacuauugga

SEQ ID NO: 4118181 - RNA, 56 nt, Human
uccaaagucucagauuucuccagacuuccuggaugagaaacucuggugacugugga

SEQ ID NO: 4118182 - RNA, 76 nt, Human
uccaaaguucacaguuuuagaaaauagauagucuucauuaucuguguuuaguuuuuaauuaauuguuuguuuugga

SEQ ID NO: 4118183 - RNA, 66 nt, Human
uccaaauauagaugaguuguaaugucuggcauuuuugacagucagccuuuacaauuaaaucuugga

SEQ ID NO: 4118184 - RNA, 77 nt, Human
uccaaaucauugauuaauuguugcuagcugagaauacaaccugaacaaagacaguaacaaauauucauuggauugga

SEQ ID NO: 4118185 - RNA, 90 nt, Human
uccaacagaucuugaccuaugguaugugugacugaacagucccuuuugcuucuuauuuguacauucuauaucuguuacaucuguuuugga

SEQ ID NO: 4118186 - RNA, 64 nt, Human
uccaacagcugcaacucugucuccuuaacacaagcggaugacaaaaugaaugcagcuaguuuga

SEQ ID NO: 4118187 - RNA, 61 nt, Human
uccaacugggccuugccauggcagccuccaacaggacuagcuucuggcgggcccacgugga

SEQ ID NO: 4118188 - RNA, 82 nt, Human
uccaacuucugucacugagcucaggauucccaggcaagcccacggagugccccacagggucagagccguaacaggacuugga

SEQ ID NO: 4118189 - RNA, 71 nt, Human
uccaagagacaguuacccccaaaagaauucagcagacuuaguaucuauuuggggaugacuuuaucaauggg

SEQ ID NO: 4118190 - RNA, 59 nt, Human
uccaagaucaagguguuggcaggguugguuucuucugagacugcucuccuugacuugga

SEQ ID NO: 4118191 - RNA, 96 nt, Human
uccaagaucucaccagucaguaguaagcggaggaggcccaaggacacaggguguguucugggguuggugcuuacaccagcguggcaggagcuuggg

SEQ ID NO: 4118192 - RNA, 71 nt, Human
uccaagcccaugaaauggccucaaugaacaaauguuuagaaaacagaaagucauuggugggaucacuugga

SEQ ID NO: 4118193 - RNA, 66 nt, Human
uccaagcuaucuuccugcagccuucaucagugauaccacaucugggugaaggaggaagcugaugga

SEQ ID NO: 4118194 - RNA, 85 nt, Human
uccaagcuucuggaaugauaaauggaagcagcaucacugugcuacuaguuucauuuuucagaucuaguuguaaaaagcuauugga

SEQ ID NO: 4118195 - RNA, 90 nt, Human
uccaagggcaaggcaacauaugauuuuguauauaaaguucacauuuugcauuuaaaugguguguuuacuuuuuuagccuugucaacugga

SEQ ID NO: 4118196 - RNA, 55 nt, Human
uccaagggcucuaagucacaagauggucuugaaucauuugaacugggcuuuugga

SEQ ID NO: 4118197 - RNA, 86 nt, Human
uccaagucuuugcuauugugaauagugcugcaauaaacauacgugugcaugugucuuuauaguagcaugauuuauagucgcuuggg

SEQ ID NO: 4118198 - RNA, 119 nt, Human
uccaagugauguuaagaggauuacaguaaugaggccaugcuugguaugcugugagcuccuaaaagucuugagucauauaaagacagaggccuuauaauuacaucuuuauauucacugga

SEQ ID NO: 4118199 - RNA, 57 nt, Human
uccaaguuucccaggauccuugccuuuuucauagaaaggacaggaggggaauuagga

SEQ ID NO: 4118200 - RNA, 105 nt, Human
uccaauaucauacuuuaugggcaagaagcuggaagcauuccccuugaaaaccagcacaagacaaggacgcccucucucagcacuccuauucaacacaguauugga

SEQ ID NO: 4118201 - RNA, 83 nt, Human
uccaauugacccagauuuuuggccugguccuugucaaggcaucucauaggguuuggaagggccgggccgugggauuuacugga

SEQ ID NO: 4118202 - RNA, 76 nt, Human
uccacaaagccccccagaguucucaggucagcugagucuccaaaagccuggagaccagcagagaagggggccagga

SEQ ID NO: 4118203 - RNA, 79 nt, Human
uccacaauaaaguguaggcuucaaagagggaugacauguauuuuccaucccuuaguuguggacccugcacuggccugga

SEQ ID NO: 4118204 - RNA, 130 nt, Human
uccacaauaauaacaugaaauauauaagggaaaucuuaugcauguacucuggcuggcuagguugccaguaaucuguuuccauuagagucauaccauaagcuuuccuuuuuguuuccucuuuuauuuugga

SEQ ID NO: 4118205 - RNA, 55 nt, Human
uccacacaccccuuaccuccaggguccguaucuccugcugggugaggucguugga

SEQ ID NO: 4118206 - RNA, 102 nt, Human
uccacacagguguccagggcuugucuggagucuggugguuauggugucacugcccggaagcacgacccccaagccuccagccgcagccccagcaggugugga

SEQ ID NO: 4118207 - RNA, 93 nt, Human
uccacaccuggcaaagcccuggcucagcucaccagagagaagagaccucacagccuggguggggcugagguaggggcagugcccagaggagga

SEQ ID NO: 4118208 - RNA, 55 nt, Human
uccacacuccucuggcccaaggugcugucaugaacuugggcuuguagauggugga

SEQ ID NO: 4118209 - RNA, 83 nt, Human
uccacacuuagaagcagaaaucuccucucacgcuaggaacuccugauguguacagcaggauuucucaaccuucacacugugga

SEQ ID NO: 4118210 - RNA, 73 nt, Human
uccacagccugauuuauggagcagugccgucuccuggaugauauggagacacugugaaugaaagagcugugga

SEQ ID NO: 4118211 - RNA, 93 nt, Human
uccacaggagcagcuaaagucaaucacaugcacacugaauggaaaaagaauauuaaguugugacacgugauaaggcagagggcuuaugcugga

SEQ ID NO: 4118212 - RNA, 65 nt, Human
uccacaucucucgccaaccaauuuacugcauccuugugaagaagguuagaggagagaugugugga

SEQ ID NO: 4118213 - RNA, 65 nt, Human
uccaccacacgaguucuuuucuugauaucugcaaagaaaccaagaggcuggcauugaugguagga

SEQ ID NO: 4118214 - RNA, 80 nt, Human
uccaccacuuuaaacauuuugggagaaaguuguuacuuuggcuugauggcagcucauuuggaaauggaguacuguuugga

SEQ ID NO: 4118215 - RNA, 80 nt, Human
uccacccgaggcagguccagucaccagagagagaagcagccaccuccuuucucacggcagcuggcaaagcaccgggugga

SEQ ID NO: 4118216 - RNA, 55 nt, Human
uccacugacaggugaauggauaaacaaaaugugguauauauauaccuacagugga

SEQ ID NO: 4118217 - RNA, 71 nt, Human
uccacugagcaauguuugaaacuuugaucacuaaaucuauauccuuguguuuauggucuuucuucagugga

SEQ ID NO: 4118218 - RNA, 106 nt, Human
uccacugagggugaaguguccacuggacuucucuucaaagacaggcuuucucugugucuuccagagagucuauaaaacauuuaaacaccaggaagaaucgguagga

SEQ ID NO: 4118219 - RNA, 61 nt, Human
uccacuggaguccagacccaagaggccaucugcagaaagagaagcccuggcucuaggugga

SEQ ID NO: 4118220 - RNA, 75 nt, Human
uccacugggagacgcagcuggggaucccucccaggacuuuuucacuugagggcccccaguucugaucccaaagga

SEQ ID NO: 4118221 - RNA, 65 nt, Human
uaagaucucuguuucuguggaguauuguuggaggaggcagauaacacaaagaaaugggcauuuua

SEQ ID NO: 4118222 - RNA, 64 nt, Human
uaagaucuucaucuucuuacagccaucaaucuuaggaugguuucaagaauugaagaggauuuua

SEQ ID NO: 4118223 - RNA, 77 nt, Human
uaagauggagacugucucuaguugcuggcauucaucaaagguguuaguugcaagcaauggacggugacuuugacuua

SEQ ID NO: 4118224 - RNA, 84 nt, Human
uaagauuauuuagaauuuaguguaaagcuacuggaauguaaauugcuuuccuuuggcuuagcacuagguauagaucugaacuua

SEQ ID NO: 4118225 - RNA, 58 nt, Human
uaagcaagggucucuguaucagauauuuaccaacagugagauuagagacccuuguuua

SEQ ID NO: 4118226 - RNA, 98 nt, Human
uaagcaaugaaggcaaagcuccaagugugguguuuggcacauagcugguacacaaugaaugccauccaucaguauuugugguuuguuuuaaauguuua

SEQ ID NO: 4118227 - RNA, 72 nt, Human
uaagcauuagguggacaaaugaaugacugaacgagugccaagucucuuuuguuacuuugccacccuuacuua

SEQ ID NO: 4118228 - RNA, 78 nt, Human
uaagccacacagucugugguacuuuguuauggcagcccaagcugaguaagacaaauacuauuucaagaaagugacuua

SEQ ID NO: 4118229 - RNA, 56 nt, Human
uaagccacuaggacuaaacaaagcuguaaauuggcuuugaauagaaauagugcuua

SEQ ID NO: 4118230 - RNA, 76 nt, Human
uaagcuaguaaaauauuucagaggaucuggcuuaugaaaacuuuaagcauuuccaagaguauaguuuauuggcuua

SEQ ID NO: 4118231 - RNA, 82 nt, Human
uaagcuauuaaguagacuuggccaaagacaaauuugaaaucaguuuacauuuaccuaguuaagucaauauuugguggacuua

SEQ ID NO: 4118232 - RNA, 100 nt, Human
uaagcuauuugaagucuuucacuuccucagaugcucucuggcauguauuucagauggcugaacaugcaacaaaguaccugcaagugaguuucguaguuua

SEQ ID NO: 4118233 - RNA, 73 nt, Human
uaagcuuuccaugauuggucaucauagaaaauagaaucuugauuugcuaugguuccagauggugguuugcuua

SEQ ID NO: 4118234 - RNA, 62 nt, Human
uaaggaagauuuuuuccaaauauuagagguuucugaaaguggagggaaugaaucuucucuua

SEQ ID NO: 4118235 - RNA, 68 nt, Human
uaaggagaccuuuaaagcaagcugcaguggugucauaucauuguacaguuauuuuaaaauaauccaua

SEQ ID NO: 4118236 - RNA, 55 nt, Human
uaaggagagaauuuagagguuuuagacuggcaucugcuucuaaauucuguuuuua

SEQ ID NO: 4118237 - RNA, 65 nt, Human
uaaggagcguccucaaauuacacucacaguuucaaaguucaagaauuguggcugagcacuccuua

SEQ ID NO: 4118238 - RNA, 57 nt, Human
uaaggcaaagaaccauaguaaugucccugacacuagacuagaugguuuugugucuug

SEQ ID NO: 4118239 - RNA, 118 nt, Human
uaaggcaguucuuuaaaccaaccaaacccuucagcaggaguuugaugcuuuuaucauucaaaagugaucuaauauaugugccuugauuggguuugguuuagccuugagaauaaccuua

SEQ ID NO: 4118240 - RNA, 66 nt, Human
ucagaggcaggaagaugggcaguagcuauguuuuccugaauuacuguucauuuguccuguaucugg

SEQ ID NO: 4118241 - RNA, 55 nt, Human
ucagagguucuucucaguggccacugacaagucugcaggcugugaagagcucuga

SEQ ID NO: 4118242 - RNA, 64 nt, Human
ucagaguacgcaugcucugauuuucucuuuggagucuucccaaaucagaguacgcaugcgcuga

SEQ ID NO: 4118243 - RNA, 75 nt, Human
ucagaguauguacgggccccaggacacccggauguucauucuagcccuguccuuggccugugcuuuauucucuga

SEQ ID NO: 4118244 - RNA, 55 nt, Human
ucagagugaggcgucaacaugagcugaugcacaggaccagauggccuuaaucuga

SEQ ID NO: 4118245 - RNA, 65 nt, Human
ucagaguggguccacagaggugacagugggaguccugcuauuuuccuugguggacccagucuuga

SEQ ID NO: 4118246 - RNA, 102 nt, Human
ucagaguguccugagaaccacccggagagcggggauuaacguggaagcagcggagcuucugagggaaccuuguucuuguggcugcccacaggacagcuuuga

SEQ ID NO: 4118247 - RNA, 87 nt, Human
ucagauaaaccacaugguuuuaagcaaaaguaucucucaugcaauauaugggaaagcuuuguacuugaaaacuugugguuuaucuga

SEQ ID NO: 4118248 - RNA, 118 nt, Human
ucagauauuaccaagauccccaucauucucagacacauuuuacauuaacuguacugacaaacuugaacagaaugcguagugcauguuggagaauguugugcauguuggagacauauga

SEQ ID NO: 4118249 - RNA, 77 nt, Human
ucagauauuuggaaguaguucuguguuuguauuccuuuuucaggugcaaagucgcaaaauucuucucuccauucuga

SEQ ID NO: 4118250 - RNA, 61 nt, Human
ucagaucaggccacucuucagcucagcaucgguguguggccuuaaagagaggcugagcugg

SEQ ID NO: 4118251 - RNA, 120 nt, Human
ucagauccaggaguucugucaaagucugaaauauugguaauacuuuggauccaaagaucaagaguucauaaauuauuaauauuguucaaugaaacuuuacaaaacucgaggaugaccuga

SEQ ID NO: 4118252 - RNA, 64 nt, Human
ucagaugcuaaauuauuugcacauuagaggcaaaacgugccuucuauguagaugauuuauuuga

SEQ ID NO: 4118253 - RNA, 117 nt, Human
ucagauggcccugcgccucugucagcaaacccgcccuggccuucagggcucagguucuuagaugcagcuucagcccugggacccagggaugcugaaguagagaguucugucaacuga

SEQ ID NO: 4118254 - RNA, 71 nt, Human
ucagauggugacugagggggaaggacuucagacugggugugagggaggcccuuugagcagaugacauuuga

SEQ ID NO: 4118255 - RNA, 59 nt, Human
ucagaugguuaccuuugaaaggagagagcuuuccaagcucuccugggcugaccguccga

SEQ ID NO: 4118256 - RNA, 67 nt, Human
ucagaugucuccaagggcugggcaaguuacaugaaucaguaagagauggccaaacuggagcauuuga

SEQ ID NO: 4118257 - RNA, 58 nt, Human
ucagauuaagugcucaacaguguuagcuguugcugauauuauuagucucuugguaaga

SEQ ID NO: 4118258 - RNA, 83 nt, Human
ucagauucccaggagugucgggucacuaggucuccaggccaucuggaggaagcuuggcaucucacugacucuugggaauagga

SEQ ID NO: 4118259 - RNA, 89 nt, Human
ucagauuccuuuguucauucacccaggaaacaucucagagcagaggucugggcucggaugugguccaggaguuggagagucaaagcuga

SEQ ID NO: 4118260 - RNA, 99 nt, Human
ucagcaacauccacccuggccuuguguuuaagcaagaaauccacugcagauaaaugauuucuccccacugcaaaaugcagggcugugcgguucaucuga

SEQ ID NO: 4118261 - RNA, 79 nt, Human
ucagcaacauuaaaccaauaauuguuaccauuuggagagguuuggaggcagaugcaucuugguuuaaacugauagcuga

SEQ ID NO: 4118262 - RNA, 56 nt, Human
ucagcacacuaagauguaugcccagaacuuccuugggcuucucuuuagugagcuga

SEQ ID NO: 4118263 - RNA, 128 nt, Human
ucagcaccaccugggagagucuuuggaaacaccugagcaacacuccacauugcuaggagucccuggguguuguucuggguuaucugguuuuguuguuguuuuguuuuguguuuaagcucuuccauuga

SEQ ID NO: 4118264 - RNA, 98 nt, Human
ucagcaccuccugcugucagcuacuuagaaugugaggccacacugugcuuggaacccacccugggaagcuaggcagcaggggucaguccaauugcuga

SEQ ID NO: 4118265 - RNA, 61 nt, Human
ucagcaccuuccuuaacuccaggacaaaguggggguugggggaagaauggggagguguuga

SEQ ID NO: 4118266 - RNA, 81 nt, Human
ucagcacgaaguccucgcggcacucgggccggauguccuugcgcagcuuggccagcagccgcgacgcccacuucugcuuga

SEQ ID NO: 4118267 - RNA, 66 nt, Human
ucagcacucacuuuuggguuuccaguagauuuuguugagucuacauuggaagcuaggguguguuga

SEQ ID NO: 4118268 - RNA, 56 nt, Human
ucagcacuuacuaguggccuuucggcaguucccgagaagaucaccagcaaggcuga

SEQ ID NO: 4118269 - RNA, 110 nt, Human
ucagcagauuugaauggucaaagcacaucucaccugccucaugcuuuuagaaauccugacgaugaaauaaaacagcagggcagagaaguuuaaaucuucaaacuugcuga

SEQ ID NO: 4118270 - RNA, 58 nt, Human
ucagcagccgcagcugacucagcagugucauuugccauccaucacugaggcugcuuga

SEQ ID NO: 4118271 - RNA, 89 nt, Human
ucagcaucaguccagauuuaccuaacuccaaguucuaggcuaucgaucuuacaucuuaaagcucaggagugagggaguuucugauguga

SEQ ID NO: 4118272 - RNA, 56 nt, Human
ucagcauggagacaaagugggcaugguaugccugcacgcacuugcucuccagcgga

SEQ ID NO: 4118273 - RNA, 65 nt, Human
ucagccaaggaggaggauaguaagaaguacagauaaugaucucuggccuuccuuuuccaagcuga

SEQ ID NO: 4118274 - RNA, 56 nt, Human
ucagccaggcacaauggcagcugaacacugauuugguaucaacguguuugugcuga

SEQ ID NO: 4118275 - RNA, 92 nt, Human
ucagcccacaugaaaagaagacaguguucuucuucaaagcucugauggacgacuuuagagacuguuucaggaacacucugucuuuuugcuga

SEQ ID NO: 4118276 - RNA, 80 nt, Human
ucagcuacagggauaacccccaagaaggucuuuaauagcauauauaugcuugagaguuuggagguguuccuggaagguga

SEQ ID NO: 4118277 - RNA, 79 nt, Human
ucagcuacuuaaaaagaugucauacacauuaagagggacagaacuugcuuuagaugcuguauguuauuucuguaaauga

SEQ ID NO: 4118278 - RNA, 58 nt, Human
ucagcuccacagcuccucugccuuuguccgagggcaaaaggaacggaugugaagcuga

SEQ ID NO: 4118279 - RNA, 68 nt, Human
ucagcuccacuugaguggggccuggaagauauacagaacucugacagccauauuaaggauggggcuga

SEQ ID NO: 4118280 - RNA, 61 nt, Human
ucagcucucugggcucgaaccuaguuggccguaacaugguugaaugcaccaagagaguugg

SEQ ID NO: 4118281 - RNA, 59 nt, Human
ucagcucuguguacaguuagcauuaggcuguuccaauaugacugauugacauggacuga

SEQ ID NO: 4118282 - RNA, 56 nt, Human
ucagcucuguuuugaguggaacugaacacucagugauggcuaaaaacagcaguuga

SEQ ID NO: 4118283 - RNA, 62 nt, Human
ucagcucuuccccccagccaggaaggacucuagccacaaaacuugcuggguggaagagauga

SEQ ID NO: 4118284 - RNA, 63 nt, Human
ucagcugcaagaagaggucccugacaauauuagggucagaugcuuccuuagcuugcagacaga

SEQ ID NO: 4118285 - RNA, 59 nt, Human
ucagcugcucaaauuuaugucaaggaaagccaaauucuauuaauauuuuguguagcuga

SEQ ID NO: 4118286 - RNA, 56 nt, Human
ucagcugcugugguauguacauaggcuugccugugaugcauaguugcugcaguuga

SEQ ID NO: 4118287 - RNA, 82 nt, Human
ucagcugcuucccgcugcucuacccaugcaucugucuugcuggacguugcaggagagccggcccgaugcauccucgugcuga

SEQ ID NO: 4118288 - RNA, 72 nt, Human
ucagcuggaguuguggguuuacuaaauguguuacuagacaaaaaucauuagugaaucuuaacuccugccuga

SEQ ID NO: 4118289 - RNA, 117 nt, Human
ucagcuucuuugguacaacuuuuucagggcugacaagccuauuguagggcagugucacuguaggucaguaguuauuaguugccacugaaaacaguuucuuuaacuacuuaagacuga

SEQ ID NO: 4118290 - RNA, 111 nt, Human
ucagcuugaucgggcgggccccagaagccagguguuuaggccagcgguugaggccaaaaccgcugccuucaucccacgccuaggcucgcugaucuuucccuuuccagcugg

SEQ ID NO: 4118291 - RNA, 55 nt, Human
ucagcuugcguucugggauuuacucuugucuucuugggaaauguuugcgagcuga

SEQ ID NO: 4118292 - RNA, 77 nt, Human
ucagcuuugcucguuacacuaacuacuguugacuucaauuaucuuacucaauuuuaagugauaaagaguagagaugg

SEQ ID NO: 4118293 - RNA, 58 nt, Human
ucaggaaagaagaugcucaguggacugcuacccaccccacaucccuauucauuucuga

SEQ ID NO: 4118294 - RNA, 60 nt, Human
ucaggaacagcagggaggaaagugcuucacuucaucaucucacucucugacuuuuguuga

SEQ ID NO: 4118295 - RNA, 76 nt, Human
ucaggaagucaccaguggaauuaaaaauaagugcauuuuugugugacauauuuucaguuuuacuugcgcuuuguga

SEQ ID NO: 4118296 - RNA, 58 nt, Human
ucauggaccaacauucacuggcauacuugugaccuaugccuugaaauguggucacaga

SEQ ID NO: 4118297 - RNA, 56 nt, Human
ucauggaucuggugaacauuuacaggaaucuguaaaugaaacagcuaaauccuuga

SEQ ID NO: 4118298 - RNA, 58 nt, Human
ucauggcauuguuaaggguuuuaaaugagauaauacaaguucuuagcauaaugccuga

SEQ ID NO: 4118299 - RNA, 77 nt, Human
ucauggcgcuccacaccagggccuagccagggcgacagaguugugauucaugccaucuggggccugccgugcuguga

SEQ ID NO: 4118300 - RNA, 96 nt, Human
ucaugggaaguuugguuuccagaggacagacggaaagugccaccugauuugcagugguauuacaacugacuucuagggggagccaccugcuuguga

SEQ ID NO: 4118301 - RNA, 123 nt, Human
ucaugggucaaauguugucaaguuuuucauucauuauacaguagagaagaggcuaggaucauguccacccugggucacuauaguagcuugggugaaaaguaacuuggccauugaaucccgagg

SEQ ID NO: 4118302 - RNA, 106 nt, Human
ucauggguuggagcaguguuuagcagugaagugaagugaagagaugaaaggagaaaauucaugaaacuuuuauucacuuauacauguuaaaguuccuaggccauga

SEQ ID NO: 4118303 - RNA, 59 nt, Human
uaaggcuuuauuuuuacaaugccuucucugggguuuuuuguucaaucuguaaggccuug

SEQ ID NO: 4118304 - RNA, 64 nt, Human
uaagggagcauuuacaucgacggagagaaggcauaauucgucaguggagacucaugcuuccuua

SEQ ID NO: 4118305 - RNA, 67 nt, Human
uaagggaguaucuuuuacaccaggaaauuaauaguacaguaaauuucacugauaaagacuccacuug

SEQ ID NO: 4118306 - RNA, 71 nt, Human
uaagggauguggaggaaggcauuccaggcacagaaaauugcccuuccugucugaauuccacaucguucuug

SEQ ID NO: 4118307 - RNA, 55 nt, Human
uaagggcuuuccagcuauucuuguucacaagggaauguagaggggaagaccuuua

SEQ ID NO: 4118308 - RNA, 80 nt, Human
uaagggucugagagguuaagaauccuuccaaaugcuuaucuuauugcaccacuuuggaacuuaacccugauagguccuua

SEQ ID NO: 4118309 - RNA, 71 nt, Human
uaagguagggauagcuuugagggcuccuuaggagggagugaaaccccugagggucaaggagcccuaguuug

SEQ ID NO: 4118310 - RNA, 120 nt, Human
uaaggugccccgggcggggacccugccccugagguccucucggaaccccuuugaagaaguuucagggcuggaggaagaagaggccggggagcuggggucccuccccaauggaacaucuug

SEQ ID NO: 4118311 - RNA, 64 nt, Human
uaagguuauaaagucuaccguauuaaagaggggaagauuuccuucuguggaauuucagaucuug

SEQ ID NO: 4118312 - RNA, 57 nt, Human
uaagguuucuucagauacuagucucugaucccacaggagauucuagaagaugccuug

SEQ ID NO: 4118313 - RNA, 55 nt, Human
uaaguaaaacauucaagaagucagcauccucugcuuuaguugagugcuuuauuua

SEQ ID NO: 4118314 - RNA, 83 nt, Human
uaaguaguucuaagauucacauugguucuugauagcugugcuacacaaguagagucucaaagucagugucauggauuuauuua

SEQ ID NO: 4118315 - RNA, 63 nt, Human
uaagugaaauggugcaucaaauggcacuaguagccauuuggaacuucuuuccauuuugacuua

SEQ ID NO: 4118316 - RNA, 60 nt, Human
uaagugauuuguaaagcucuguacuuuuugaguucuagugcaaaguuuuauucucauuug

SEQ ID NO: 4118317 - RNA, 71 nt, Human
uaaguggcagaagucacuggguagcuuuggguacauuauugcccauuucuugccuucugcuucuccauuug

SEQ ID NO: 4118318 - RNA, 61 nt, Human
uaagugucuguaauagucacuaugugaaauguaagcugcucucacaauuaugagacacuua

SEQ ID NO: 4118319 - RNA, 103 nt, Human
uaaguguuuauugaaugaaugguucuacuucaaagauuugugggacugaguucucacaguaucagguggaguggagaauuaaguuauuaaauuaacccacuua

SEQ ID NO: 4118320 - RNA, 86 nt, Human
uaaguucuacgguacauaugcacaacaugcagguuuguuacauauguauacaugugccauguuggugugcugcaccuauuaacuug

SEQ ID NO: 4118321 - RNA, 113 nt, Human
uaaguugcucucaugaaagguaaacagauccuuucccaaggagcucuugguagucugccuccuggagaaacucagagaucuguuuaucuaugugcuuuuuagagagcaaguua

SEQ ID NO: 4118322 - RNA, 67 nt, Human
uaaguugguauacaauacacaaugcucuggaagacucugauggaacacagugauugauagcgacuua

SEQ ID NO: 4118323 - RNA, 56 nt, Human
uaaguuucuacuugucgggucuucagagcacugccugguagguacugugaggcuua

SEQ ID NO: 4118324 - RNA, 62 nt, Human
uaaguuugugucucuguuacuugcaaaacguaacacccagcaaaauacagagacuagauuug

SEQ ID NO: 4118325 - RNA, 117 nt, Human
uaaguuuugauuuuaaagaaauuccuugcacuacagccuuuucuuaaaaugcaagauucucacuuugaagguuuuguguuggaagaaaugcuacugguuuuuaaaaagcaaagcuua

SEQ ID NO: 4118326 - RNA, 130 nt, Human
uaauaauaugcaguaaaaaucaaaauauggcacaugaucuuauguagaagaucucagcaccaaaaugaaaaugaguuguggucaauuuuaucuaaaucagagcuauucuauuuauaugagcaauauuuaa

SEQ ID NO: 4118327 - RNA, 74 nt, Human
uaauaaucuauccaugucaugcugaagcucaacccuccgggggagaguuauuucaguaacauaauaguaguuua

SEQ ID NO: 4118328 - RNA, 110 nt, Human
uaauacauccuggcauauuugcaucaauggaaugcucuacaguuauuuuuaaacaaugauagagacuauagagcacuuacuugggaugaaaagaugccugcaauauauug

SEQ ID NO: 4118329 - RNA, 57 nt, Human
uaauaccuacuggucauugcaauguguaaauugugcugaccaucaugugggauguua

SEQ ID NO: 4118330 - RNA, 79 nt, Human
uaauaccugguguguuuagcuucugggcuguagugagcaucacacagagcuucccagccugagcauugccuaaauauua

SEQ ID NO: 4118331 - RNA, 90 nt, Human
uaauacuaugauugucagaagcuaaauuugauauuugcugacuauaaaaaugucaucaaguggaguuuauuuuuaugauuaucuuuauug

SEQ ID NO: 4118332 - RNA, 79 nt, Human
uaauaggaauauagcaauagaaacauauaaagucccugaacucauggggcuuauauucuacuguuagagacagauauua

SEQ ID NO: 4118333 - RNA, 91 nt, Human
uaauauaguauuuacuucucaggguuauagugaggauuuaaaugaguuaauauacgucuaaagcccuuagaauaguacaugacacauagug

SEQ ID NO: 4118334 - RNA, 80 nt, Human
uaauauauuccuacaucagcacuaugauuaaaguaucuaaaaugguaacuauagucagucuggugguuuuggucuuauua

SEQ ID NO: 4118335 - RNA, 71 nt, Human
uaauauauuguuagagcaggagcagucauguucauauaacaugauucucugcuacucuaaaugauagauua

SEQ ID NO: 4118336 - RNA, 64 nt, Human
uaauaucgaauuucauccugugguaaaauaaaauuaggcuaccacaggguaaaguuagauauua

SEQ ID NO: 4118337 - RNA, 62 nt, Human
uaauauggaucuuuccaauguuugccugauuuacacaggauaacauuucaggauccaaauug

SEQ ID NO: 4118338 - RNA, 87 nt, Human
uaauauuccauuguauggguauaccacauuuuguuuaucugaucaucaguugauggccauuuggguguguccauauuuugacuauua

SEQ ID NO: 4118339 - RNA, 67 nt, Human
uaauauugugucaacaacagccuuggaugucccucagauuauuccuggacauuguuuacacauguug

SEQ ID NO: 4118340 - RNA, 77 nt, Human
uaauauuguuggaaagacuaaauguguucuaaaguaugagguacuuuauaaaguauaguggucaugaaauaauauua

SEQ ID NO: 4118341 - RNA, 95 nt, Human
uaauauuugcucucugugcucacaagggcaguugaaauauugaacauccuuccaccaucuguucucuuguccuuggauuacagacgguaaaguua

SEQ ID NO: 4118342 - RNA, 85 nt, Human
uaaucacagugcauuacauguaauaaaauagugguaucauuuaacuuuuguucauuguuuaugcauguguaugcauaugugauua

SEQ ID NO: 4118343 - RNA, 66 nt, Human
uaaucauaguggguacaggggcagagaacauuaauuucucuacuucuauguaacuacuucauuuua

SEQ ID NO: 4118344 - RNA, 72 nt, Human
uaauccccaggauuuggaagggagaugggauuuugagcucucuuuaucuuuagaccuuugcaaaggggguua

SEQ ID NO: 4118345 - RNA, 84 nt, Human
uaauccuuuauauugcagaauguuuaauuguuuuuaaaugggaagugaggaaauauuuuguuuuaguuguauuauaaaguauua

SEQ ID NO: 4118346 - RNA, 92 nt, Human
uaaucugugaacuacaugcaucagaggacucugggaaccugcauuuucacaagcauuucacaggauucugauguagugaagcucacacuuug

SEQ ID NO: 4118347 - RNA, 73 nt, Human
uaaucuuccuaggcuccagaacugugaaaaaugaauuucuauuguuuauaaauuaggcgccucagguauuuug

SEQ ID NO: 4118348 - RNA, 99 nt, Human
uaaucuuucugaagcucaauuuccuuuucuuaaaaaugaguauaacauuuacuucauaggguuguaaggauuaggugaauuaaguauucaaagagauua

SEQ ID NO: 4118349 - RNA, 63 nt, Human
uaaugcaacagcugcuagugaucaugugauugauacauuuuuaaaggcagauguugaguauua

SEQ ID NO: 4118350 - RNA, 56 nt, Human
uaaugcaggugcccuuggguuucagagagaaaugcccccacuggggcuccacauua

SEQ ID NO: 4118351 - RNA, 63 nt, Human
uaaugccuacuacaaagacuugucagugaagauuaacugagaauaguuuuauaggugggauua

SEQ ID NO: 4118352 - RNA, 65 nt, Human
uaaugcugaucuguaauaagauuuuauguauuuuacuucugaaaauuccuugcagauagguauug

SEQ ID NO: 4118353 - RNA, 109 nt, Human
uaaugcuuuugucacuguuugcugcugaauuccagggaaguauauguuucuucucaucccaauucagaagcaaucacagugaguuauuucauuuauugcaaaaauauua

SEQ ID NO: 4118354 - RNA, 79 nt, Human
uaaugguguauuauagagaaauuccucaaaucaaguauugcucuugaagagagaagucucucugguucuaugacuauua

SEQ ID NO: 4118355 - RNA, 96 nt, Human
uaaugucuggcuuaauagaacacugcaggaaucuuguauauauuucugauuaaauaagcuguguauugcacauccuguagccucugcagaauauua

SEQ ID NO: 4118356 - RNA, 112 nt, Human
uaauguuccucagccaagaaggcugugaugagccucauggagaaaauauacauguuagaugagcuucauucaggcuugaguuacggugcuguuggccuugaguucaacauua

SEQ ID NO: 4118357 - RNA, 59 nt, Human
uaauguugaggguauggagggccaccccaguggaucuuuccaggugaccgucagaauua

SEQ ID NO: 4118358 - RNA, 93 nt, Human
uaauuaaaguucauuugagauaauuaaaucaaaaccucuagucuggguuggagggugauaaaguuaucuggcgaaauauaugaacuucuguua

SEQ ID NO: 4118359 - RNA, 103 nt, Human
uaauuagccgaaagaucuugaaggaggaaucaagaaaauggauccaaucaccuugaauaauaugcuucguucuccaagaucacaaauuuauuuugguuauuug

SEQ ID NO: 4118360 - RNA, 109 nt, Human
uaauucaccuaucuacaucuguguauuucuuggacuuuguuuuucauggccauuauuauagacuaaugcuguccaauaggaacauaaugugagucacaaaggugaauua

SEQ ID NO: 4118361 - RNA, 64 nt, Human
uaauucaguuacucuagacacuucauguaaguggaaucaugcagucuuuucugugacuggcuua

SEQ ID NO: 4118362 - RNA, 57 nt, Human
uaauugcugguuauuaucaugucauuauuaacuaguaauaauaguagccggcauuua

SEQ ID NO: 4118363 - RNA, 124 nt, Human
uaauugguaggcugaggcaggaggaucacuugaaccuggaagguggagguugcagugagcugagaucaugccacugcacuccagccugggcaacagagugagauuccaucucaaaaaauaauua

SEQ ID NO: 4118364 - RNA, 73 nt, Human
uaauuguggcuucuuucuuuccauguguacacucaaaggagaacaucuguuugagaaaaagaagccaucauua

SEQ ID NO: 4118365 - RNA, 55 nt, Human
uaauuguucagcagguaacaucuuuucucaagguguuacuaaagaugaacauuua

SEQ ID NO: 4118366 - RNA, 109 nt, Human
uaauuuguucccaauaguagugugugugugugugugugugugugugugugugugugugugugugcaugcacgggcacauaugcuagcguauauaccugucuacaaguua

SEQ ID NO: 4118367 - RNA, 76 nt, Human
ucauucacguuuuuuguugguuucagauggguugaaacaguuuaacaaaucuggaauuaagagaaagugaagauga

SEQ ID NO: 4118368 - RNA, 64 nt, Human
ucauucagaauugcuuggucucugucuccugaagacuguggcuaggauuauuccugaugaauga

SEQ ID NO: 4118369 - RNA, 63 nt, Human
ucauucagagagaauguuccaggugagaagagccaagcaccaaacauggggcccuuugaauga

SEQ ID NO: 4118370 - RNA, 66 nt, Human
ucauucauaacggcaaaugucaccugucggaguuagacggugcacagccugugcugcugugugggg

SEQ ID NO: 4118371 - RNA, 73 nt, Human
ucauucauccauucacugaacaaggcuaaacaagcaguguuuggcacuguucuaggugcaagaagcugacuga

SEQ ID NO: 4118372 - RNA, 73 nt, Human
ucauucaugcugcuacacacaacagggagucauggaaggaagaaggucuggaguguaaagagcauagaaguga

SEQ ID NO: 4118373 - RNA, 61 nt, Human
ucauucauugcuuacccuguguaaggcuagcaagcuguuguuagaacaggguaaaugaaga

SEQ ID NO: 4118374 - RNA, 58 nt, Human
ucauuccugcccgucuuucaagccagguucucccuacucuuguugauucuaggaauga

SEQ ID NO: 4118375 - RNA, 56 nt, Human
ucauucucacacucgucaaugucugcaaaaggaagggcaugagaggugucagaaga

SEQ ID NO: 4118376 - RNA, 64 nt, Human
ucauucuccuuauuuuuauuauguacucuucaagcaaaugugguacauugaagaaugggaauga

SEQ ID NO: 4118377 - RNA, 71 nt, Human
ucauugaauauggggccauacaggauauuuaacuuucuuuuguccauuuguaacaggcuuuaauucacuga

SEQ ID NO: 4118378 - RNA, 61 nt, Human
ucauugaaugagaugcaauagacaaguuauuuauuguagucuguccugucuuguucaguga

SEQ ID NO: 4118379 - RNA, 55 nt, Human
ucauugcagugauguuguauguagcaccuggcaugcaguaugcucagaguaauga

SEQ ID NO: 4118380 - RNA, 56 nt, Human
ucauugccaaccagcaucuuucccuaaucggaauuuauggcucuguuuggcaguga

SEQ ID NO: 4118381 - RNA, 129 nt, Human
ucauugccuccugcuauuaaugagucaucuguugcuucagucagugcugcccagggcuuuauuugccaucucuguguuugagcuuugaaaugagguuaucgauuuaugaucaguguaacuccuggcuga

SEQ ID NO: 4118382 - RNA, 129 nt, Human
ucauugcuguggauuuuugucuuggacuugacauucaugaauguuccaugugaguaaagcacucaaguuuaccugugaccaccuggagcaguaugauuugguguccaguuagcugauccagcuuaaggg

SEQ ID NO: 4118383 - RNA, 75 nt, Human
ucauugggauauacaauggcugaaucauccagugggaaaaauuucuucccuggcuuaaagccaguuguccaguga

SEQ ID NO: 4118384 - RNA, 62 nt, Human
ucauugguuccuugaacccugcacuguggcaaaguggcccacaggcuggaggaggaccaaga

SEQ ID NO: 4118385 - RNA, 86 nt, Human
ucauuguaugcauuauuuguccauucuacuguugauagauauuagguuguuuccaauuuuuaaguggaugacuaaugcugcuauga

SEQ ID NO: 4118386 - RNA, 124 nt, Human
ucauugugucucuucagccuccucuggucugugacaguuucucagaauuuccuuguuuuugaugaccuugauaauuuugaggaagcuguuuucaacagcaagagggaucaaggaagcaaaauga

SEQ ID NO: 4118387 - RNA, 60 nt, Human
ucauuguuuaccaauauugaaugucaguuaguuuggauuuauuagguuggugaaaaauga

SEQ ID NO: 4118388 - RNA, 80 nt, Human
ucauuuaaacacagaugcuuggaccaggcaaugauguagucagcacugaugacuggaaucccaggcucugugggggaugg

SEQ ID NO: 4118389 - RNA, 87 nt, Human
ucauuuaauuuucacgacaauccuacaaagcagggcuauggcuguggcauccauagccuaaaugugaggaacugaggauuugaauga

SEQ ID NO: 4118390 - RNA, 84 nt, Human
ucauuuacauuacucaucggccacugcagacaucagauuuugugacuacugauuugaaagaaaccagugagugaguguacauga

SEQ ID NO: 4118391 - RNA, 65 nt, Human
ucauuuauaaggaugcaauuaaagcauugccaaguuaaaaaugucauguugcucuuugucaauga

SEQ ID NO: 4118392 - RNA, 61 nt, Human
ucauuuccaugucgguauuuuauaaauauucggucuguacuccuccaggcaugaggaauga

SEQ ID NO: 4118393 - RNA, 110 nt, Human
ucauuucuaaauucccugccuaugacucacagauguuucaaggggccuucagaaugccuguggacuuuaguaggugagagccaugggcagaggaaagauguaguagauga

SEQ ID NO: 4118394 - RNA, 69 nt, Human
ucccaaagugcuaggauuacaggugugagccacugcaccuggucugauucuccacuuucuauauaggga

SEQ ID NO: 4118395 - RNA, 73 nt, Human
ucccaaagugcugggauuacaagcgugagccaccacgccuggcccaaugcuuguauuuuuaguagagagggga

SEQ ID NO: 4118396 - RNA, 71 nt, Human
ucccaaauuccucugaucauaagaaucaccugggcugcucaucuuguaauucugagucagaaaguuugggg

SEQ ID NO: 4118397 - RNA, 63 nt, Human
ucccaaccccuucuccuggcuguuccagccucuagcuugagauuccaggggauggggagggga

SEQ ID NO: 4118398 - RNA, 60 nt, Human
ucccaagacuauguucugugugacagccuccaucuguguggcauaaggccaauuuuggga

SEQ ID NO: 4118399 - RNA, 64 nt, Human
ucccaagccauaauggcucaaccuagugguuuggaagaauccaagccagucauuaugagcggga

SEQ ID NO: 4118400 - RNA, 78 nt, Human
ucccaaggucuggcaugaguaacgugagugaggagagagcucugaauucacaauugcauuaugacauagggauuggga

SEQ ID NO: 4118401 - RNA, 62 nt, Human
ucccaagguucagcugaggagggccacauuugagaacaggugugccacuucacugagcagga

SEQ ID NO: 4118402 - RNA, 74 nt, Human
ucccaaugagaugaacaggguaccucaguuggaaauacagaaaucacccaccugcuguguuggucucgauggga

SEQ ID NO: 4118403 - RNA, 71 nt, Human
ucccacacagccaggcccagcacgcagggagaggcgcccucccuggaccagcucuccuugucuguguggga

SEQ ID NO: 4118404 - RNA, 115 nt, Human
ucccacacuaacugguguucuggggugcacagcacaugaauugaugccaagugcucucagauguacuaggaggaggugcuuggcuccauuuuuggugcccucagaggcuguggga

SEQ ID NO: 4118405 - RNA, 58 nt, Human
ucccacaggcccagggcggaaacuguucccacagcagcaaggcccuccggccugggga

SEQ ID NO: 4118406 - RNA, 56 nt, Human
ucccaccacugccuucucugggacccaaccuccagacaucaggaugguggcuggga

SEQ ID NO: 4118407 - RNA, 130 nt, Human
ucccaccaugccuccuguccaacacugaagauaacaauucaacaugagauuuggguggugauaugguuuggcuguguccccacccaaaucucaucuugaauucccacguguugugggaacaaccugguga

SEQ ID NO: 4118408 - RNA, 55 nt, Human
ucccacuucagagaagaauuagacuguucccaaugucuucacaucugugagggga

SEQ ID NO: 4118409 - RNA, 98 nt, Human
ucccagacuccucccagaaccugagaugugagcacuuggcccugagccuguuccagagaacuucaggacuaggggcuucaagguuaaaggggcugggg

SEQ ID NO: 4118410 - RNA, 94 nt, Human
ucccagagccuuguacuuugugaguacaucuuaauuugacuaauugaauuuaucacucuuuuggucaguugguguuuugcaaacacauuuggga

SEQ ID NO: 4118411 - RNA, 63 nt, Human
ucccagaggaaauggcagcugauuugaguuugaaaagacagcuggcagucauccuagugagga

SEQ ID NO: 4118412 - RNA, 77 nt, Human
ucccagagggauugcuauauuuagggaaagucuuucuuaacuagugaaagacuggaaggugaggcuguuuacuggga

SEQ ID NO: 4118413 - RNA, 105 nt, Human
ucccagaugaacuucucaucuucucagacuagagaaauggggagagaauuggggugcggucacuugacccuucucuagccugugggaguugcaaaguuccuggga

SEQ ID NO: 4118414 - RNA, 65 nt, Human
ucccagauggagugauugauugauauuuaccacacggagugauagagcaguagaucaccauggga

SEQ ID NO: 4118415 - RNA, 73 nt, Human
ucccagccucagaggucuacugggccaaggucaagguucugaucaggaaagaguggaacucugaaaauuggga

SEQ ID NO: 4118416 - RNA, 56 nt, Human
ucccagccuccugacaguuuugcaaucuaggcaaugucuuucucaaggaccuggga

SEQ ID NO: 4118417 - RNA, 69 nt, Human
ucccagcuucuccugucagagggugucagccaacaucuuggagaauggcagagaagcaagcucuuggga

SEQ ID NO: 4118418 - RNA, 90 nt, Human
ucccaggaccuagucuaguucucucagccuccccguugguggcuguuuucaacuuggagggagcuggguggaaucuuuacuugucuggga

SEQ ID NO: 4118419 - RNA, 55 nt, Human
ucccaggagcaccuuuugagcccaacucacauggcuaucucagggaguucaggga

SEQ ID NO: 4118420 - RNA, 80 nt, Human
ucccaggccucuguuccccauguuuuccuuccuagacaugaaaauaugaauggaaaaacaaggagaacagggcuaaagga

SEQ ID NO: 4118421 - RNA, 91 nt, Human
ucccagggcuccaugcagcggcguuugguuuaaaguggagagaggauacgcuuagguuaaaggcagcugcaaggagaccuguguccuggga

SEQ ID NO: 4118422 - RNA, 77 nt, Human
ucccaggggcgcgagagagggcgacguagagcagcaccgcccagcggcagagcggcgagccccuccgcggcucgggg

SEQ ID NO: 4118423 - RNA, 118 nt, Human
ucccagggggagaguguaucuguugguuggcuggauucucaucagagccagagcucugcccucccucuggcuguguaugagaguuuuuguuuccuuuguaaacucccuuuccugagga

SEQ ID NO: 4118424 - RNA, 77 nt, Human
ucccagucagaaaaaucuauuauuuuuauucgagggaaaucauauuuuccaugcuuaacagugacagauauguggga

SEQ ID NO: 4118425 - RNA, 76 nt, Human
ucccagucguugggccgucuucacuggugcuuccugaacaaucucuacgcugcacuugaggacgacucagcuggga

SEQ ID NO: 4118426 - RNA, 61 nt, Human
ucccagugcaggcucgcuugugaggccuggggaaaggcacggaggaagggccguacuugga

SEQ ID NO: 4118427 - RNA, 103 nt, Human
ucccaguggcagcaacagugccuguggcugcagugguguacagagaaggggucccacucuguguacaagccugaguacagaggccacucugccaguuguggga

SEQ ID NO: 4118428 - RNA, 85 nt, Human
ucccaucagauguucagcauagcagcuucaggacuaucaucuaagggaaggcggaagaagcugguuauguuggugucugauuuga

SEQ ID NO: 4118429 - RNA, 88 nt, Human
ucccauccugcccuuacuccagcccagcuccucucagaacuuaggaguggagcaguggcuggguugggggaagagcaagcccuuggga

SEQ ID NO: 4118430 - RNA, 79 nt, Human
ucccaucuguuuaggugaguugauuccauuuuucacuuuggaaaugugaguggcaucaacuuuaucuguagcagaggga

SEQ ID NO: 4118431 - RNA, 72 nt, Human
ucccaugagugugccauccucaggcccuggggucuccuaggcaagaccagggccucugugggcucucucgga

SEQ ID NO: 4118432 - RNA, 129 nt, Human
ucccaugcugaugcccauguaaacuuaaagugguuuaauaucuauuggcuuuuguguauaguuaguauugcaaaagaauauagauauugucauaauuauguggugucauaacauuggcaaagugguagg

SEQ ID NO: 4118433 - RNA, 87 nt, Human
ucccaugcugugacccucuagagggaagcacuuucuguugucugaaagaaaccaaagcgcuucccuuuggagcguuacgguuugaga

SEQ ID NO: 4118434 - RNA, 109 nt, Human
ucccaugugauggacaaacacucagaacccagcagcaguguucuagaaucuuugugagggacaaacauucagaaucuuguagcaguguucuagaauccuauuuauggga

SEQ ID NO: 4118435 - RNA, 98 nt, Human
ucccaugugccuuuaaggaaucauucuugaucucagccauaaaauuggaaagcugcauaacugacaagaugaucccugaaggcagcugaaacaugggg

SEQ ID NO: 4118436 - RNA, 78 nt, Human
ucccauuagccaaagcaagucacaugaucaaguccaaauguaaaaggcuggggggcaugugacugcuuuuguguggga

SEQ ID NO: 4118437 - RNA, 96 nt, Human
ucccauucgcgcuaccaccgcggccgcagccccaggagucgccgcggagccagcgucgcccuccagcuguugcgcgucggaagccggaagcaggga

SEQ ID NO: 4118438 - RNA, 73 nt, Human
ucccauuucaauggaaagcuuuuaccgaaucugaaaugcaaugagauuccaucugguaaaauucauugaggga

SEQ ID NO: 4118439 - RNA, 58 nt, Human
uagaggaacugccuuucuucuguuuagaagagacagagaagggagagcauuuccucug

SEQ ID NO: 4118440 - RNA, 71 nt, Human
uagaggaauguucagcuuucuuacuuaaggaugaaacccaacauuuuuaaucuggccugaauauuuuucua

SEQ ID NO: 4118441 - RNA, 64 nt, Human
uagaggagcuguguuauccauucccaggcacagcaugggaauguggcaaggcauagaguuucua

SEQ ID NO: 4118442 - RNA, 93 nt, Human
uagaggcaaaaucuuugauggagagauagauauucugagacucuauggucuuauaugcauauauccuguuucucaucauacuuuugccuacua

SEQ ID NO: 4118443 - RNA, 63 nt, Human
uagaggcagugggaaauaagugagaaaggugucauuucgcucuucuucugccuauugugucua

SEQ ID NO: 4118444 - RNA, 111 nt, Human
uagaggcuuuucuuaauguauucaccugguguguucaguuauuucugaagauauagaaauguuugaugaaaugaaugaagauacagaauguagauucaguaucaagcucua

SEQ ID NO: 4118445 - RNA, 69 nt, Human
uagagggaauaucagagcaacaucagggccuaggucauauagagcccugugguucugguaaggauuuug

SEQ ID NO: 4118446 - RNA, 55 nt, Human
uagagggggcaguaaccucaaaguguuaccaaccuuugggauaacuguucuccua

SEQ ID NO: 4118447 - RNA, 74 nt, Human
uagagguuauuucuguaugcauaaaaggaaaaaaaaguuuguuuuauguccuuuguaugugauauggaucuuua

SEQ ID NO: 4118448 - RNA, 55 nt, Human
uagagguuggccuuagaaagauucaaaauagaaaaauuuuaagcuauuaccucug

SEQ ID NO: 4118449 - RNA, 85 nt, Human
uagaguaacuggagcagagagguggcugcauaugaaaagcuuuuccuuguccuugcagacaucucucuucaaaccagucacucug

SEQ ID NO: 4118450 - RNA, 62 nt, Human
uagagucaauggccauugggucaugcuagcuaagaaagcacauguucuugaagccaacucug

SEQ ID NO: 4118451 - RNA, 65 nt, Human
uagaguccuccaucccuaucuguguucgucaacagcaggugaccuucacaaaugaugaggaccug

SEQ ID NO: 4118452 - RNA, 56 nt, Human
uagaguccuucauucugugcagaugcacuuggcaucuagagugggaccggagucua

SEQ ID NO: 4118453 - RNA, 57 nt, Human
uagagucucaaugaauagccugcugaaauuccaauggcuuuaucaaaugagacccug

SEQ ID NO: 4118454 - RNA, 64 nt, Human
uagagugagcaaaguucuauguucucaacaaugauugccaacaugucuuacuuugcuuucuuug

SEQ ID NO: 4118455 - RNA, 62 nt, Human
uagagugcugucaaagacuuguguuacucauuccuaagcauaugucaugcaccagcacuuua

SEQ ID NO: 4118456 - RNA, 94 nt, Human
uagaguuauuaccccuggaggucauaaguguauagauguguauucacaugaguuuccaucacuagguuaugcugccuugaggguaagaagucug

SEQ ID NO: 4118457 - RNA, 64 nt, Human
ucccaaagugcugggauuacaggccugagucaacaugccuggccuccuacaguacuuuuuaaga

SEQ ID NO: 4118458 - RNA, 57 nt, Human
ucccaacaggagucagaccuaggaggagaaagguccuaggcucacucaccuugugga

SEQ ID NO: 4118459 - RNA, 57 nt, Human
ucccaacuugaaccugggagucaaaaagauagcucagucaccaggugggaggugggg

SEQ ID NO: 4118460 - RNA, 59 nt, Human
ucccaagauuauugagggagggaguuccuaugcauuucucuuugagcaagauccugggg

SEQ ID NO: 4118461 - RNA, 82 nt, Human
ucccaagccagggagccagagauggaggaggagguggaagaguccgggcugccucuguagcuuuggacccuaggcagaggga

SEQ ID NO: 4118462 - RNA, 87 nt, Human
ucccaagccuaacauagaaccuggcacauaguaagccaacacuugucaagggcuuacuaugugccaggcucuguguuaggcuuggga

SEQ ID NO: 4118463 - RNA, 63 nt, Human
ucccaagcuuggggugggcaauguaggcaagucgaucgagcuuguggcugacacccuuuggga

SEQ ID NO: 4118464 - RNA, 63 nt, Human
ucccaagcuuggggugggcaguguaggcaaguugaucgagcuugcagcugacacccuuuggga

SEQ ID NO: 4118465 - RNA, 74 nt, Human
ucccaaugagaugaaccagguaccucaguuggaaaugcagaaaucacccacuuccuguguuggucuugcuggga

SEQ ID NO: 4118466 - RNA, 70 nt, Human
ucccacacaugucucuccaugcucuucucuguuuuacagaguggauggagaugaccauggugaccuugga

SEQ ID NO: 4118467 - RNA, 55 nt, Human
ucccacaggaggaguuggaaaugaaucucaaauuucaccaaggccccugcugggg

SEQ ID NO: 4118468 - RNA, 111 nt, Human
ucccaccaaagcuuggcauggcaguggcaaaugccugugagagugguggccuaggcagggugccugggucuuguuccccacacugcccaccaccagucauggcgaguggga

SEQ ID NO: 4118469 - RNA, 61 nt, Human
ucccacccuaguugguuguagaaggagaacgugccagaaccuccaccaggaaggguaggga

SEQ ID NO: 4118470 - RNA, 84 nt, Human
ucccaccgggcagacguuaugugagcagccucaccugaggguagagaauauucuuuaauggggcccuuauucugcucucuggga

SEQ ID NO: 4118471 - RNA, 67 nt, Human
ucccacuagaucuuggggggaucaccaugguggacuugcucacacaugagagcccccaagagcagga

SEQ ID NO: 4118472 - RNA, 64 nt, Human
ucccacuauuauccuauguggguucacagaugaaaacucaaggcccaaaagguaaugaguggga

SEQ ID NO: 4118473 - RNA, 81 nt, Human
ucccacucacuaggucaucccuguccucccucaguuggggcaaaucucgcuggccuggaggggagccagagaaggugugga

SEQ ID NO: 4118474 - RNA, 68 nt, Human
ucccacucucuucacucuaccuuuugacuccacaguggaaaccagaaguaguccaguggaaaguagga

SEQ ID NO: 4118475 - RNA, 71 nt, Human
ucccacugaacuuuuucuccaauucacauacuagccggacuuggauuuucuggaaagauuucaguugagga

SEQ ID NO: 4118476 - RNA, 68 nt, Human
ucccacuggcuucugaguuaacaguagauuuuggggaaacaagaguauaggcaggaugccaguuggga

SEQ ID NO: 4118477 - RNA, 56 nt, Human
ucccacugucaggcccaagaagcucagagugguggcugaaggagccugggguggga

SEQ ID NO: 4118478 - RNA, 83 nt, Human
ucccagacuacccaacccugucggacccacugcugcuguuuauauaaagagcccagggaguugauuagcauuugggucuggga

SEQ ID NO: 4118479 - RNA, 64 nt, Human
ucccagagggaagaggaagcgcugagaugaguccucacucacggaugcuuuuuucccacugggg

SEQ ID NO: 4118480 - RNA, 58 nt, Human
ucccagccauuccuuuagguguuuccuuaguugaagagccugaugaauguggcuggga

SEQ ID NO: 4118481 - RNA, 106 nt, Human
ucccagccccguccacugucauuccuccuuguucaucaagagcuuugccucugguagcagaaagcagguggccacgaggaggagcugugggacuugggugcaggga

SEQ ID NO: 4118482 - RNA, 76 nt, Human
ucccagccuuagcccucccuacagccuauuucuguccacacauaggaaggcaggaggcaggccugaaauccugggg

SEQ ID NO: 4118483 - RNA, 62 nt, Human
ucccagccuuccagucugguuuucaucguuucagaauaaacgucaaggcuuagaaggugggg

SEQ ID NO: 4118484 - RNA, 61 nt, Human
ucccagccuuccuuguggugaaucaccugagaaugcaggaugugacucagggaguuugggg

SEQ ID NO: 4118485 - RNA, 59 nt, Human
ucccaggcaggugacagggggacagauucacacuccaauccucaccuuuuugccugggg

SEQ ID NO: 4118486 - RNA, 113 nt, Human
ucccagggaaugcuuacuggacucugcugaaggugccacuucccucagacuauggugggagcggguaugaggaugaggguggcaugcacagaguugaguuaacagguguggga

SEQ ID NO: 4118487 - RNA, 59 nt, Human
ucccagggacaccaagcuguuucugauugcaacuguaacagccuguguaccagcuggga

SEQ ID NO: 4118488 - RNA, 64 nt, Human
ucccagggacugggcuaggcuuugcauggaagauaaauuacaauagagcuccuggucucaggga

SEQ ID NO: 4118489 - RNA, 88 nt, Human
ucccagggcaggcauccauccccucagagaucaucuuuaaccugccaggaauggccuggguuccaugaucuccagggcugcccugaga

SEQ ID NO: 4118490 - RNA, 61 nt, Human
ucccaggguccucuucuggaauccaacuagaguuccuaagggaggaggauccccagaggga

SEQ ID NO: 4118491 - RNA, 69 nt, Human
ucccaggugggggcagggcgguccugcgucacggcugacacugcaggcuugcccggccuccuucucgga

SEQ ID NO: 4118492 - RNA, 62 nt, Human
ucccaguagccuucucaagacaaaguugccuuuguguaacuacaacugggaggcuuugguga

SEQ ID NO: 4118493 - RNA, 59 nt, Human
ucccagucuagagccggauuggcgaguuagacgcuuguagauccaagguuggauugggg

SEQ ID NO: 4118494 - RNA, 67 nt, Human
ucccagugaugaaccuaggacuguaggcucuaacuuggaagucagcuacaaguucauucacuaggga

SEQ ID NO: 4118495 - RNA, 58 nt, Human
ucccauaccuagggcuuuucccaccacucaagcucaggggaaguccauggguuuggga

SEQ ID NO: 4118496 - RNA, 78 nt, Human
ucccauaugucauccaugauugcccagaggugucucauaaagagaauuucucucugaauccugaaguacuauauggga

SEQ ID NO: 4118497 - RNA, 66 nt, Human
ucccaucucagcuuucugcuuccacugcagacuucccugucuaucacuagcagagagugaauggga

SEQ ID NO: 4118498 - RNA, 64 nt, Human
ucccaucucuggcccuguuuucuaucuguggaaagcagaugcaugaguugggcuaggucaggga

SEQ ID NO: 4118499 - RNA, 58 nt, Human
ucccaugccugcuguuuauguccucccuccccauuugaucuaaacaguuggcaugggg

SEQ ID NO: 4118500 - RNA, 129 nt, Human
ucccauggcagaagggacuuuguagauguggaugagucgccgaccuuugguggagaugguucuggauuaucugggggcgcacagucaccacaaagguucugagaaggagauggcaggaaggucagagga

SEQ ID NO: 4118501 - RNA, 104 nt, Human
ucccauuagcaaaagcaaacuguguaugcagagagcauuucuggaaggacagcagagaaacuuuuaacaagcaugcuucagcgguguguuggggcuggaugggg

SEQ ID NO: 4118502 - RNA, 81 nt, Human
ucccauucacuuucacucccuucucucuuuccaagcucauauaugauuggguuggcuugggacuggagaauaggguuggga

SEQ ID NO: 4118503 - RNA, 73 nt, Human
ucccauuccagugcucugucaacaugucaaagggcuauuaagcaagugacuaguugccggggcuggggaggga

SEQ ID NO: 4118504 - RNA, 59 nt, Human
uccccaaagauucccucuggcuucuugccuguaaaugaagccuggguauccuuugagga

SEQ ID NO: 4118505 - RNA, 130 nt, Human
uccccaacucuguugggguguagaugcaggccgcccuuccuccauuccuuccugccagagacucaaugugaauagugucugggccuuggaguggggagaaucugcuggcccuucacaccuucgcuguggg

SEQ ID NO: 4118506 - RNA, 82 nt, Human
uccccacaugggaaaacaaugaaauauuuuuauggaccacacaauggaauuauauuaugcucguuuacugauuaugugggga

SEQ ID NO: 4118507 - RNA, 65 nt, Human
uccccacucagaagaaacaagagaguuugcuguugccuuuccugaaaucucuucugcagcaggga

SEQ ID NO: 4118508 - RNA, 80 nt, Human
uccccacuggagagcugcagaggugcaaugaaccagcaaggggaguucugcuggguuugccuuucaccaugccaggggga

SEQ ID NO: 4118509 - RNA, 63 nt, Human
uccccacuucccaggccccugcccuggggauuccaaagcagcggauugggauagugccuggga

SEQ ID NO: 4118510 - RNA, 71 nt, Human
uccccagaagcauuuggcaugaaacucuuguucuucaaagaauaucuuucaggccuaguguuuaaugggga

SEQ ID NO: 4118511 - RNA, 64 nt, Human
uccccagccucgcagcccuccagaagccagcccucagcugggagcagcuuugcgagggagggga

SEQ ID NO: 4118512 - RNA, 71 nt, Human
uccccagcgcccaagcccaggcugccgguccggucugggugccaccgagguccuggacuuggcccugggga

SEQ ID NO: 4118513 - RNA, 71 nt, Human
uccccagggccaaguccaggaccucgguggcacccagaccggaccggcagccugggcuugggcgcugggga

SEQ ID NO: 4118514 - RNA, 55 nt, Human
uccccagggggugggugaugacagauggacucaugacucucccaaguuugaggga

SEQ ID NO: 4118515 - RNA, 123 nt, Human
uccccagugccuucguccaacuccaggcacugaccccuccagggccccucucacuggagcagggcagcuccccuagagcaaaggggccucuuggccagucaggcccucguuacccacugggga

SEQ ID NO: 4118516 - RNA, 57 nt, Human
uagcgcauccuaaugucuucaggucuuacuuacuacagugaaguuaguggugugcua

SEQ ID NO: 4118517 - RNA, 75 nt, Human
uagcgcggcacuuaccucucucuaauggugggauaaagacccugccaguuuggggccgggauaagguuguuguua

SEQ ID NO: 4118518 - RNA, 78 nt, Human
uagcgggccuuaggcccaguucuuucuagacacguagacuucaucaagcugagaaaaaucaggcccuauagcucgcua

SEQ ID NO: 4118519 - RNA, 105 nt, Human
uagcuaacauuuguaggauacuuuauagauuauggcaaugaauaccccagcucucuuucauuugccuugugauuuguaaguacucugacuacaugcacugugcua

SEQ ID NO: 4118520 - RNA, 73 nt, Human
uagcuagcaaggcguggcacucaaauguggacuugagucugaagaauuugaaagccaccgcuccugugugcua

SEQ ID NO: 4118521 - RNA, 73 nt, Human
uagcuauccagggagucucugcuuuauacaagguucugugcaauguacaaagccagaacucccaacucagcug

SEQ ID NO: 4118522 - RNA, 58 nt, Human
ucauuugccugucucuauuucagcaaaaguuaaggcugaaaauuaagcagaugaauga

SEQ ID NO: 4118523 - RNA, 102 nt, Human
ucauuugggguccaucuuauuuccuggggcacagcugggucucuuuucccaguugccaaacugaaggagucucagcugggccugaggaagggcaguagauga

SEQ ID NO: 4118524 - RNA, 60 nt, Human
ucauuugguccucccaacaagccugugagguacacauaguaaaauggagggaccagguga

SEQ ID NO: 4118525 - RNA, 59 nt, Human
ucauuugugcauuguuuuugccagccaaggcaguggcuugaagagacagcagcaaaaga

SEQ ID NO: 4118526 - RNA, 82 nt, Human
ucauuuuaucuucuguguagaaagaauauguuucauaaagucccuuuagagguaaugaaguuuuuacacaaagcugagauga

SEQ ID NO: 4118527 - RNA, 119 nt, Human
ucauuuucagcuucacaaagaggaugcagccccaccucccagcgggagucaguucugcucugagacgugaggcucagaaucagaugaagacuccugcugcugcaucuugaagauaauga

SEQ ID NO: 4118528 - RNA, 78 nt, Human
ucauuuucauggagucaucuuaaucuaggcaacuccauaaguugccuagauauguugguacucugugagcacagaugg

SEQ ID NO: 4118529 - RNA, 81 nt, Human
ucauuuucgccuuuagccugaaauaguuuaugaggcuauuacggucucugaguucauaccaggcuacccagaaaaaauuga

SEQ ID NO: 4118530 - RNA, 64 nt, Human
ucauuuucuguucucuguguuagaacuagacaauguuauguucuaauaggagaaaagacaguga

SEQ ID NO: 4118531 - RNA, 67 nt, Human
ucauuuugguccaucucuugagcccacaugaauacugucauggauggaggaggaaggaccaggcugg

SEQ ID NO: 4118532 - RNA, 59 nt, Human
ucauuuugugccuuaugaccgcugggccaccccuagaauccugguugaguacagaguga

SEQ ID NO: 4118533 - RNA, 93 nt, Human
ucauuuuguuagucuccugggcuugguuguugagaacccaagaauauauaucuguucccaugccuccaagcuucagugaauuaaugaaaauga

SEQ ID NO: 4118534 - RNA, 72 nt, Human
ucauuuuuagaggggaaaguggcugguuuggacuuauuaacaauauuugcaauguguccucuuuauggauga

SEQ ID NO: 4118535 - RNA, 61 nt, Human
ucauuuuucacacagggucaccagaauaccaucaauuuuuugguaucacugucaaaaguga

SEQ ID NO: 4118536 - RNA, 60 nt, Human
uccaaacaucuaucagcauuuuuuacuggaucacuggaagaugccuuuggcauuuuugga

SEQ ID NO: 4118537 - RNA, 64 nt, Human
uccaaaccaggacaauuuugaaaguaaaagaaguugcuuuuaauaauuuaacuggaaccaggga

SEQ ID NO: 4118538 - RNA, 75 nt, Human
uccaaaccaguaggcugggaaggaaggccuggaaguugcguuucuaacaaaccuccagcauuacuggcccaugga

SEQ ID NO: 4118539 - RNA, 68 nt, Human
uccaaacuaguaucuuccgugccaugcaauaagggcuacauugcaaggcugcagagggugcuacugga

SEQ ID NO: 4118540 - RNA, 81 nt, Human
uccaaacucuuuguuguggccuacaauggcuugucucugugcccgucaccaaguuuguaugccaacagcaaagugugagga

SEQ ID NO: 4118541 - RNA, 91 nt, Human
uccaaagguaugaaggaaagaaggguggcugacuguuuuguggauuauaguagggguuuuuagauuacucagccaccauucaucaccagga

SEQ ID NO: 4118542 - RNA, 77 nt, Human
uccaaauagaauucauguuacuguuagcacaaauaaugugccuaaauaccuuuguaacuggguucccuaaguuuggg

SEQ ID NO: 4118543 - RNA, 101 nt, Human
uccaaaucuaugaagucaaagaaacucaguucuuuccacaaugcaauaaaaaguuguacaagaggagaaaauggaguuuuaaacucauguaaaccuuugga

SEQ ID NO: 4118544 - RNA, 61 nt, Human
uccaaauuccucaguuagugccugaggccuggaggcugaaggcaguaacugggggcaagga

SEQ ID NO: 4118545 - RNA, 124 nt, Human
uccaacacugaaagauuacaauuugacaugagauuuggguggggacacagauaguaacugauauggucuggcucuguguccccacccaaaccucaucuggaauuguaauccccacauguuagga

SEQ ID NO: 4118546 - RNA, 72 nt, Human
uccaacccugaagaauauuuccugcacuugggauuggugcaaaauuccaguagaauuuuauucaacagugga

SEQ ID NO: 4118547 - RNA, 107 nt, Human
uccaaccuugagcugcgcggguuccaagagccaggcccguacuugcuguugaugucauuggcuuggggaguugggguuuggugcccagcgcggucguugggggaggg

SEQ ID NO: 4118548 - RNA, 55 nt, Human
uccaagaaucagucucuuuugggggaaaauaauccaacagaggcagauacuugga

SEQ ID NO: 4118549 - RNA, 83 nt, Human
uccaagaaucaucuccagccacagaaugaucccugggguuucacucuuggagagccuuggugaucugggcuggaagagaugga

SEQ ID NO: 4118550 - RNA, 67 nt, Human
uccaagacuuugaacaguguaucaguaaucucggaagaaauucaguauuuauauacaguucauugga

SEQ ID NO: 4118551 - RNA, 55 nt, Human
uccaagaggagacacugggaugagccccgacggguggccauguguuccuuuuggg

SEQ ID NO: 4118552 - RNA, 97 nt, Human
uccaagaucuguuuagauauuagagguagauggucagccaaugauggaaacgaauauucugcuaccuucucuuuuaagucucacaucucacuaugga

SEQ ID NO: 4118553 - RNA, 62 nt, Human
uccaagaugguuggugugguggugcacugugaagcaguuccaugaacagcuaacauuuuggg

SEQ ID NO: 4118554 - RNA, 63 nt, Human
uccaagcuugaacugaaauugucacacucucuaguguuggcgcaacucauucaugguguuggg

SEQ ID NO: 4118555 - RNA, 72 nt, Human
uccaaggccccaucccaucccuuuuuucgaguuuggacacugugggguggagaugguggcccuuuaguugga

SEQ ID NO: 4118556 - RNA, 55 nt, Human
uccaaggguucaugugcauucauccauuaacgggucuugcacggucacccguggg

SEQ ID NO: 4118557 - RNA, 57 nt, Human
uccaaguauaaauuagauacugugggucaucuuggcaaaucugagguuguauuugga

SEQ ID NO: 4118558 - RNA, 55 nt, Human
uccaagucuuccuucccaaaccuuugucauuuagggauugagaagcugaguuggg

SEQ ID NO: 4118559 - RNA, 129 nt, Human
uccaagugccaagaugauuaguucaguccacaaaauuucuugggagcucagagaauaaaaagaucacugugguuugggaagccuagagaaagguuugguggaagagcagguacucagcuaggccuugga

SEQ ID NO: 4118560 - RNA, 79 nt, Human
uccaagugugacauuuaucaaaaccuugacuuuuaauguaaacuuuauuauaugaguugggguuugaguugacacugga

SEQ ID NO: 4118561 - RNA, 63 nt, Human
uccaaguuguccuaaccuuugguggaguaaagaaacuaucuacaaaacuuaggugacuuagga

SEQ ID NO: 4118562 - RNA, 63 nt, Human
uccaaguuucuucugcacaacaguauaaauauaacuaaggugggguggagaaggagauuugga

SEQ ID NO: 4118563 - RNA, 107 nt, Human
uccaaguuugaaggagccagggacaugaaccccugcuucaccucuuaagauggauguuaggucaggagcaaggagcagugggauaaagguuucccuggaagcuugga

SEQ ID NO: 4118564 - RNA, 110 nt, Human
uccaauuauacauaugcuuaaauugcauuagcuaauggugaagauucagacuuuucuaaguuuugauuugucuauuauuuaauuugaauuauugauaugaugacauugga

SEQ ID NO: 4118565 - RNA, 116 nt, Human
uccaauuuuuucuuaaagaaguuacacuuaaguuuggggagaauuucauuucauauuagccgcuguaggaguugaaaaaaauggcuacuggaacuuagugggaagaaaaggaagga

SEQ ID NO: 4118566 - RNA, 59 nt, Human
uccacacccagccuggcacacauccugugugugucucugucucccagguugugguggga

SEQ ID NO: 4118567 - RNA, 82 nt, Human
uccacacucagacagucaucagagcuugucuauucacccaaggggugugauccugcaguucugaggcugcuguauaaaugga

SEQ ID NO: 4118568 - RNA, 68 nt, Human
uccacagagguguggagaaauaugugauuugggcugaguaucucauuaauucuuacaacacccuggga

SEQ ID NO: 4118569 - RNA, 97 nt, Human
uccacagcuugaaguuaccuccaaucuuuacaagaaauucuuuuagagcuuccuuugccugacuuuagagaugggaggucauagcuucucaccugga

SEQ ID NO: 4118570 - RNA, 98 nt, Human
uccacagguuuuuggauaauccuuuaucaaguugcugaaacuuuaucaaaauccuuucaagaacagcaggcaagaagugagguccaauaagccuugga

SEQ ID NO: 4118571 - RNA, 73 nt, Human
uccacauauucugguguguuuuugccaucaacugaaaaagcagaauuggucaaaagcuacuaugaaugcugga

SEQ ID NO: 4118572 - RNA, 64 nt, Human
uccacaucacaggucccucagauaugaccagagaccuccucaagucugagacuuguagugugga

SEQ ID NO: 4118573 - RNA, 68 nt, Human
uccacauccauugcuugacuuuuuaaagagacucucugucuugauuuaaguuccugggguggguggga

SEQ ID NO: 4118574 - RNA, 70 nt, Human
uccacaucucagggaccuucuuugugcucguuuuaaacuuaucacacagacagcucucugaagacaugga

SEQ ID NO: 4118575 - RNA, 66 nt, Human
uccacaugaacaugcuggaaaagccagcuuuccaaggaacauggcuuuugauggcuguucauggga

SEQ ID NO: 4118576 - RNA, 60 nt, Human
uccacccuccucccagcucuuggacaggggcauuccuggcacccuuggguuggaggugga

SEQ ID NO: 4118577 - RNA, 93 nt, Human
uccaccucugaagcccauguucuucccauuaccccacgauccuggccaagaaucagggcagaugugcaugaugggaagggcggcguggaugga

SEQ ID NO: 4118578 - RNA, 78 nt, Human
uccaccucuuccaccuuguagucuugggaaugcuaaaagcaauaaggccaggcaucugcagccgcguggggacgugga

SEQ ID NO: 4118579 - RNA, 92 nt, Human
uccaccuggguagcagcacuggccuggcagggagggcauggccagucucacuccuuuagacccugccaggccucugggcagaacucagugga

SEQ ID NO: 4118580 - RNA, 69 nt, Human
uccaccuuuuuuguuaauggcccuaagccugaaauaucagcugcuguucagaagcagaaaauagguggg

SEQ ID NO: 4118581 - RNA, 77 nt, Human
uccacgagcgagcaucuguuaacaaagaagacagcccugcuguugaugguguugaugagaagagcuccuuuugugga

SEQ ID NO: 4118582 - RNA, 77 nt, Human
uccacguggccucuccuugaggcuuggacuucucacaauauggcagcuggauuucaagagggagugcaccaagugga

SEQ ID NO: 4118583 - RNA, 68 nt, Human
uccacguggggcaggcggguguccagaucggcaaugccugcugggaacuguacugccuugaacaugga

SEQ ID NO: 4118584 - RNA, 59 nt, Human
uccacuacguggucugaaugugucugaagaaaaacagagcacagauaacauggagugga

SEQ ID NO: 4118585 - RNA, 100 nt, Human
uccacugaacaagcccauauauuuuuccucuuuguucuccuuuagcuauuuccaugccuaacucaaaggagacacaaggagaaagugagcucagccugga

SEQ ID NO: 4118586 - RNA, 85 nt, Human
uccacugagaggcgacccagggccacagcccgcaguagaucuguugcuacagccaaaggggcuuggcccugggccaaacaggaga

SEQ ID NO: 4118587 - RNA, 58 nt, Human
uccacuguccccugcuuccuugcccuucagaaaggucuuggaaacaggggccagagga

SEQ ID NO: 4118588 - RNA, 90 nt, Human
uccacuguugaaagcuguacaauguuaccuauuuauuugcagacauccuuuggaaacaaauagguagauuugcaacaaauaaagagugga

SEQ ID NO: 4118589 - RNA, 63 nt, Human
uccccuaagcagaugcugucugcacaaacuuauuuuggaagacagugcaucugcugacaugga

SEQ ID NO: 4118590 - RNA, 56 nt, Human
uccccuccaacuccaacuaugguucugaggaccagaaugggagcuguggagggaga

SEQ ID NO: 4118591 - RNA, 58 nt, Human
uccccucuggagcuucuguaagaagaguccauuguuuccacagaagcauagaaaagga

SEQ ID NO: 4118592 - RNA, 76 nt, Human
uccccugguguuggagucuagccaaccuuggagugugcauaggccuccagcuagggcuggcuuacuuagcagggga

SEQ ID NO: 4118593 - RNA, 81 nt, Human
uccccugucugccucggugucccuugcucagggcucuugauggggccugggagcacaucgggguccuugcaagacccggga

SEQ ID NO: 4118594 - RNA, 58 nt, Human
uccccuguuccuccuccaacccaggcugggaccccugauggcaggaggcagcagugga

SEQ ID NO: 4118595 - RNA, 62 nt, Human
uccccuuggguguuuaauagauauaucagaucuaauaugucuaauaaugcaucucaaaugga

SEQ ID NO: 4118596 - RNA, 56 nt, Human
uccccuugugugugauuccauuccauugguauggaauauuugacacauagggugga

SEQ ID NO: 4118597 - RNA, 80 nt, Human
ucccgagccaaaauugagaaaauucgagcaaguuuauuuaacaauaaugacuugauugguuugucaaguuuggaugguga

SEQ ID NO: 4118598 - RNA, 72 nt, Human
ucccgaguagcuagaacuacaggcaugugccaccacgcuuggcuaauuuuuguauuucuaguagagacgggg

SEQ ID NO: 4118599 - RNA, 123 nt, Human
ucccggcacacggugcuguguuucuccacucuugggcucugcagugacuugaggggucaagucuaugaucccacgggaggcugggcuaaugaggggaccagagaccucagugcugugcaggga

SEQ ID NO: 4118600 - RNA, 65 nt, Human
ucccgguccaucacagggcuguugggcacagacacacuugcccacucagcccuguggagcaggga

SEQ ID NO: 4118601 - RNA, 88 nt, Human
ucccgugguucuuuguggcauuuguauucaagaguuccauauaugugaaagcuucugagaauaguaaaugcccauaccaacguaagga

SEQ ID NO: 4118602 - RNA, 55 nt, Human
ucccgugucuuuuuccagcccugagcgaaggcugugggguuggcuggcacaggga

SEQ ID NO: 4118603 - RNA, 65 nt, Human
ucccuaagaggccacucucuccagcugaggugauaaagaccugggaaaaggaguggccaugggga

SEQ ID NO: 4118604 - RNA, 92 nt, Human
ucccuaccuggcggcaucaaagagagaggacuguuaugaccuccugcggguccugacagggaaagguccucuuuugggggcaacugugggga
